United States Patent Application Publication US 2004/0034888 A1 - sequence listing, part 17

SEQ ID NO: 40285 - protein, 240 aa, Glycine max
  Clone ID: 701150581_FLI.pep
GSSVLLLTQQEKKITFPKTPFSLRMAKTRPGRKDVDSYTIRGTNKIVRAGDCVLMRPSDTSKPPYVARVEMIEQDNRNNVKVRVGWYYRPEESIGGRRQFHGAKELFLSDHYDVQSAHTIEGKCVVHSFKNYTKLENVGAEDYYCRFEYKAASGAFTPDRVAVYCKCEMPYNPDDLMVQCEGCKDWYHPACMGMTIEEAKKLDHFVCSECSSDDDMKKPQATFSASPGADGKVEPKRRKR

SEQ ID NO: 40286 - protein, 87 aa, Glycine max
  Clone ID: 701151908_FLI.pep
GKLQPQHLHKNQCTQHTQIPSLMHRSFTSKVNKITQTSYYKVLAGCYQCSRGITLLLRPMWPFFITDLSTILHKMTKGQAFQPTSLP

SEQ ID NO: 40287 - protein, 181 aa, Glycine max
  Clone ID: 701152088_FLI.pep
EAMASFGGTTQKCMACAKTVYLVDKLTADSRVYHKACFRCHHCRNTLKLSNYCSFEGVLYCRPHYDQLYKRTGSLDKSFEGIPKIQKPEKPVTGNENTKVLANVFLGTRDKCVCCNKTVYPTERVTVNGTPYHKGCFKCTYGGCTVSSSNFITHEGKPYCKHHHIQLFKEKGNYSQLENEC

SEQ ID NO: 40288 - protein, 422 aa, Glycine max
  Clone ID: 701153389_FLI.pep
IMENNNNNHNLIVPNPQDSLWMMNLRTGETMDSGSYPERPGEPDCSYYMRTGLCRFGATCRFNHPPNRKLAIATARMIGEFPERIGQPECQYYLKTGTCKFGATCKFHHPKDQAGIAGRVALNILGYPLRPNEPECTYYLRTGQCKFGNTCKFHHPQPSNMMLSLRGSPVYPTVHSPTTPGQQSYAGGTYIPSPRWQGPSSYAPLILPQGVVSVPGWSAYSGQMGSISTSDSPQQAMRNGQTYGTSRQGELAGSQGAYSQFRSGTVPVGFYTLQRENIFPERPGQPECQFYMKTGDCKFGAVCRFHHPQERLVPAPNCVLSPIGLPLRPGEPLCVFYSRYGICKFGPSCKFDHPMEIFSHNISASPSADAPSRHLLGSSSGTAALNLSSEGLVESSSAKPRRLSLSETRQIPSGDDDIDDDG

SEQ ID NO: 40289 - protein, 146 aa, Glycine max; identical to SEQ ID NO: 38602
  Clone ID: 701155595_FLI.pep

SEQ ID NO: 40290 - protein, 276 aa, Glycine max
  Clone ID: 701156672_FLI.pep
EGALVKRMGRRPCCPKEINKGAWSREEDETLSKYVSIHGEGKWQKVAQNAGLKRCGKSCRQRWLNYLKPGIKRGHISVDEEDMIIRLHRLLGNRWALIAKRLPGRTDNEIKNYWNTNLSKKLQKHPTSSVSSLQHKRHEKEKTIQMHVSPEAPRPRRVNAVEYSKNLENGGCGNRPSTTPSPSNKVEGSSEEASFSDFLIHDIDQNQFLIADDSNSKVPQMEEDHHHNNKVELITNNSPSSSSPSDHCHHLLPEKFDPFETLLDVELASFLGFEND

SEQ ID NO: 40291 - protein, 161 aa, Glycine max
  Clone ID: 701156939_FLI.pep
FFLFLQAMLHFIYKDTLTEEVDTVSSTTTSDFPVSEILTAKLLAAADKYDLGRLRLMCESRLCKDICVNSVANILTLADHCHATELKAVCLKFAAQNLAAVMRSDGFEHMKEKGPWLQSEILKTIAGCEGDGCSAVEKSQSVWGQLSDGGDMNGRRVRQRI

SEQ ID NO: 40292 - protein, 149 aa, Glycine max
  Clone ID: 701157007_FLI.pep
RLKARVEVLQRSQRNLLGEDLAQMNTNELEQLENQLEAALRNIRSTKTQFMLDQLSDLHHRETLLIETNNVLRSKLEETDHSQVQVSLALEAGGPSIQYTNFPPQSEGFFEPVGVNPTLQIGYNQTGPDDTNVGASSLSMHGFASGWML

SEQ ID NO: 40293 - protein, 169 aa, Glycine max
  Clone ID: 701157093_FLI.pep
KKESEKQKHQPQPPIIFIFPTTNSSTLTTNPSCQLNILGHNGYTLGVNGTQVSVLKEPNKVCLSSFLQCKHGVALETQISLEVLSNFTNQPLEGELPDQKLGTLLVFPNLTKSNGTRTITVGLLHTTSSWCRLTRSLGCKLLPRSLSSCGLTSGLLRTSHLCLLPKRST

SEQ ID NO: 40294 - protein, 243 aa, Glycine max
  Clone ID: 701157256_FLI.pep
LPQPIHSSLYLQMASGFGESTGRSPPSPSYFNNNNNNDAANFECNICFELAQDPIITLCGHLFCWPCLYKWLHFHSQSRECPVCKALVEEEKLVPLYGRGKSSTDPRSKSIPGDNIPHRPAGQRPETAPPPETNHFHQHGFGFMGGLGGFAPPPMATTRFGNFALSAAFGGFIPSLFNFQLHGFHDAAMYGGGAGFPHGFANTFHGVHAHGFPLRTHQGQQDYYLKKLLLFVVLCVVLAFIWQ

SEQ ID NO: 40295 - protein, 125 aa, Zea mays
  Clone ID: 701160529_FLI.pep
GQVLLFLLYPWIDIDAAAARRYYLLPWHVAGEHEVAVLVLVGDGELASAVGRGGEAAEERVQRVPQLTVAAVGPQVHLPEVWRPVHAHLHVQASSSLLLAPPGPPRLRRRVERVLPVHSHRRPPH

SEQ ID NO: 40296 - protein, 190 aa, Zea mays
  Clone ID: 701160751_FLI.pep
AELLLPLDLFGSGERSMGRGKIKIKRIENSTNRQVTFSKRRTGLVKKAREIGVLCDTEVGVVIFSSGGKLYDYCSPRTSLSRILEKYQTNSGKILWGEKHKNLSAEIDRVKKENDNMQIQLRHLKGEDLNSLQHRELIAIEEGLQNGQTNMREKQMDYWRMHKTNGKMLEDEHKILTFRMHQQAVDLSGR

SEQ ID NO: 40297 - protein, 81 aa, Zea mays
  Clone ID: 701160861_FLI.pep
VCPVINFAAFVCFLVRDQFTSIFSKIIIFIYRILHIARKISQNKKGSIALRGILFGYLTLMNAPQPATSDLPNKIWSMVNN

SEQ ID NO: 40298 - protein, 100 aa, Zea mays
  Clone ID: 701163214_FLI.pep
GRHSPVVSSPHELVVVVVVRGVRVEEREVRRREEWRRRRRSRGRRRLPPVDLAQQLLLPLPEELVPELPPLRDDLPEPLHYCPLQHCRHRRSPSVRAPRG

SEQ ID NO: 40299 - protein, 148 aa, Zea mays
  Clone ID: 701163595_FLI.pep
AMLIAEGMWQQMAMDSGATMQPGSYPERPGEPDCTYYLRTGLCRFGMSCRFNHPPDRNLAIASARMKGEYPERAGQPECQYYLKTGTCKFGPTCKFHHPREKAGIAGRVQLNTSGYPLRPNEKECAYYLKTGHCKYANTCKFHHPELF

SEQ ID NO: 40300 - protein, 77 aa, Zea mays
  Clone ID: 701164649_FLI.pep
YKITLEILHVIDGRYSSTTLLNRHGQGFCTCIVIMTSIWTISQDRSAVLAPQSSCSFLFGPIPPDTNRLRSRASHAW

SEQ ID NO: 40301 - protein, 163 aa, Zea mays
  Clone ID: 701164749_FLI.pep
VNTTTVYDLRKRCPPPWHARRPVAGQLHKRRKSNATHARTHTDRSIQPKINNEERSTARDLDIHVYRFYFFFHVFPPLPPLLLGVLYLTLMGSGLPSHSLRHSSMGSTSLPWLMPTNTLLHSSPGDLSLSPVRNTQPSSSRTKRYSGNDRLSAIRFATGAVPS

SEQ ID NO: 40302 - protein, 140 aa, Zea mays
  Clone ID: 701165182_FLI.pep
DCHYSRQKYTKNVIIISNETRVSLGHLCNDSNRACLSLQRLRYPRPSYASPSSAQHQQYLYRYMYIPSLKMLISLGLTSTIHSHHSFAARLCLDQFAEILCPPPPICPSCSPDMLFTVVDQSSVFSLLAGFCWAPELVRS

SEQ ID NO: 40303 - protein, 130 aa, Zea mays
  Clone ID: 701165471_FLI.pep
AEDLGMAQRPVAPAKKTRRGPRSRSSQYRGVTFYRRTGRWESHIWDCGKQVYLGGFDTAHAAARAYDRAAIKFRGLDADINFSLSDYEDDLKQMRNWTKEEFVHILRRQSTGFARGSSKYRGVTLHKCGR

SEQ ID NO: 40304 - protein, 268 aa, Zea mays
  Clone ID: 701166461_FLI.pep
TALLSAVAAGSLPCLEVLIEAGANPNVKAGGATPLHIAADSGNIEVIKCLLKAGADPNTCDDDELKPVQVAAWRNNREAVELLLPLTSPIPGVSNWNVDGIIEHMLPKEYEEKSQLKEAASLKSGLTQTIEVSSEAKKRSLEAKSRGDDAFRRKDYLVAVDAYTQATELDPTDATVLSNRSLCWLRAGQAERALEDAKACRALRPDWAKACYREGAAHRLLQRFEEAANAFYEGVQLEPENTELVNAFREAIEAGRKFHGVNTPNSTQ

SEQ ID NO: 40305 - protein, 180 aa, Zea mays
  Clone ID: 701167349_FLI.pep
CSKDSIPSARMVLIKSYSETEGFKFYTNFNSRKGKELEENPNAAMLFFWDELKRQIRIEGKVIKLSEEESSVYFKSRPIKSQIAAVCSNQSKPIESRDNLEEQFNQVEASFQDDPDNGLKKPPNWGGFTLIPNNFEFWKGQSTRLHDRIVFSKQTDLNSLPKGVMFKQAYKDWIMYRLQP

SEQ ID NO: 40306 - protein, 206 aa, Zea mays
  Clone ID: 701168881_FLI.pep
DLWSDDEDNEKMSRSWSSTSDESLFNCDVLWSNRKRPGHLYFEFFEVGSPYGRVPLIDKVYELSQGFPGLTSLKSAELSPVSWMSVAWYPIYHIPYQRSVKDLSACFLTYHTISSSFQDHGLETMTTDCCHPVANGKQNGHMDKKSNTVSLPPFGLAAHKIQGSLWTNPMTGDRRKMDFLFSAADSWLKQLGVQHHDFNFFITHPM

SEQ ID NO: 40307 - protein, 226 aa, Zea mays
  Clone ID: 701174937_FLI.pep
YNNTSITFLFVFSFHFKKLQNKQLKMSAGKCAACGKTAYPLESVTALEQTFHKICFKCDVCKGTLNLKNYKGVNGKVYCFTHTPVDRSSTGSDSVTTKTAMQAPKKQAEGLGTAQKGTGEKPNVGLDTVTVQTAIKAPKAVAEGLGTAQKGTGEKPTVGTESVHLKSALSAPKVRAENIGTVHKGDSITAPQQASFDVEHPAPASEEAHHHEEAEPVSYDEQPADE

SEQ ID NO: 40308 - protein, 366 aa, Zea mays
  Clone ID: 701175394_FLI.pep
KMQGGIVMAGGGKPSWSASAIVATVASGYHILRIDGYSHTMGTPTGEYIASLPFTVGGHRWHIRYYPNGRSSETKEYVSLSLYLHDWVAETVKARFKFRFVGDVAEQPLILGGLHSFDNIDNNWGRPEFIKRKDLEESKHLLDDSFSIRCDVVVPTNEVRVVATAAAAMVSVPPSDLHQHLGILLLTEKGADVVFDVAGETFAAHRCVLAARSPVFSADLFGAMEEGGHTGGVVRIEDMEPLVFKALLYFLYTDLLETETMKQGEDGDDEDVLCQHLLVAADKYNLERLKLLCEKKLCECIHVGTIATILALAEQHRCHALKKVCFHFLSSPANLRAVAATDGFEHLSRSCPSVMEELVVMLSNLV

SEQ ID NO: 40309 - protein, 225 aa, Zea mays
  Clone ID: 701175695_FLI.pep
KRAFSISSSPLAHPNQIHLTVSVVAWVTPFKRTRRGLCSTWLAGLNPNKDNLIPCWIHQGSLPPPRPLVPLVLIGPGTGCAPFRAFVEERAAQAAAEPTAPVLFFFGCRNQENDFLYKDFWLTHAQDEGVLSSKRGGGFFVAFSRDQPQKVYVQHKIKEQSSRLWNLLLSDAVIYIAGSSTKMPADVTAALEEVICKEGGVKQADASKWLRDLERAGRLNIETWS

SEQ ID NO: 40310 - protein, 192 aa, Zea mays
  Clone ID: 701176323_FLI.pep
RRANWQSLRMRTNNLIRGDNARLECGLKKEMREMLPVVIFKESFLIRETQCSVCLAEYEPDERLQKIPPCGHTFHINCIDHWLSTNTTCPLCRVSLLPAPKATSTGLDLEAQTAVEEESPNAHHRQEEGLVDANTPQEGEAAGGDGSSSVQVEELHGDAAEPLAVTVVAVAAPQADAEGSPSTACQTVKGKK

SEQ ID NO: 40311 - protein, 177 aa, Zea mays
  Clone ID: 701179745_FLI.pep
ICQPLHALLRKGALFLWAEDHSTAFQTLKQALMLAPVLALPDFSTQFTIETDASSIGVGVVLMQKGHPLAFLSKALGPKSCGLSAYEKEFMAILVAVQQWCKYLQNGEFMILTDHQSLSQLNEQRLHTPWQHKVFTKLLGLQYKIVYQQGHTNRVAAALSRRLEPKFNVVSEVIPHG

SEQ ID NO: 40312 - protein, 101 aa, Zea mays
  Clone ID: 701180088_FLI.pep
PNTNTMEQGVTPKLFKTTGSFRAIRPWSYQTTSFRAGKLGADELGGRDHVGQGGLDLRVLACLETTVRVHPEDVGVEHGEHLLDAVCDLLCGGNPRRVDVV

SEQ ID NO: 40313 - protein, 150 aa, Zea mays
  Clone ID: 701182651_FLI.pep
AVNKSSAGTKKSRKPYVVSRPRERWTADEHGRFLHALLLFGRDWKRVQAFVATKTGTQIRSHAQKHFLRADKKLGLAVPPPDVETVQLPLSPDDLRFAQVYRFVGDVFGCGAMWPVEAQLQRLLGADPVVVDTILRVLANLQDNFPPCSL

SEQ ID NO: 40314 - protein, 139 aa, Zea mays
  Clone ID: 701182767_FLI.pep
QTVYAQRLLLAPVAVQEQRPVHRGEVEEHDQQDEQVIDESKEAQHAIISIRALNTSGRVRWGSISSLNSLRMKKGRSCNLTEPMGAVRLARDPEAVVADGADVVLRRQGRLPCRRRRGGGIHLSSSLPVSTLCVRAVAG

SEQ ID NO: 40315 - protein, 153 aa, Zea mays
  Clone ID: 701184147_FLI.pep
LVELLVEQGAAVNMQNFVGETALFIASSLGLNLICLFLLENGGDTRISTLEGSSPLHAASACGHLSVIKSLVSHGAFVNSTDEEGDTPLHYAVREGKKEAVGLLVQLGAQLIKNEDLESPLDLAEEFDETWMVDLLSNHFPSLRSDSEHGFCF

SEQ ID NO: 40316 - protein, 243 aa, Zea mays
  Clone ID: 701186070_FLI.pep
HRIRRRSIDRRGKIERLVPHPPADLAGVLVLVRVVVGGVSGEERGGGGGGFVGVVAAPLVAAGAVVVRLDASSGAMIHGAHRPAVVVVVLAAGKYDSTLLSTAAANLPYSSASASTTALPPLPVLSLSSDFTSCSTSNVAAGSAGSSTSSAKEASTSTAGAAVSAVAPPSVASSFSCSFSVNDTTCERRRLLSWRRASWSARRASKEALRRSKSRSSCLVFHRARRFWNQTATWRGCRPQLAR

SEQ ID NO: 40317 - protein, 161 aa, Glycine max
  Clone ID: 701203522_FLI.pep
KMASSSGTSSGSSLLQNSGSEEDLQAVMDQRKRKRMISNRESARRSRMRKQKHLDDLVSQVAQLRKENQQILTSVNITTQQYLSVEAENSVLRAQVGELSHRLESLNEIVDVLNATTVAGFGAAATSSTFVEPINNNSFFNPLNMGYLNHPIMASADILQY

SEQ ID NO: 40318 - protein, 351 aa, Glycine max
  Clone ID: 701203632_FLI.pep
LKKMGSASESVCVTGASGFIGSWLVMRLIERGYTVRATVRDPVNMKKVKHLVELPGAKSKLSLWKADLAEEGSFDEAIKGCTGVFHVATPMDFESKDPENEVIKPTINGVLDIMKACLKAKTVRRLIFTSSAGTLNVIERQKPVFDDTCWSDVEFCRRVKMTGWMYFVSKTLAEKEAWKFAKEQGLDFITIIPPLVVGPFLMPTMPPSLITALSPITGNEDHYSIIKQGQFVHLDDLCLAHIFLFEEPEVEGRYICSACDATIHDIAKLINQKYPEYKVPTKFKNIPDQLELVRFSSKKITDLGFKFKYSLEDMYTGAIDTCRDKGLLPKPAEKGLFTKPAETPVNAIMHK

SEQ ID NO: 40319 - protein, 337 aa, Glycine max
  Clone ID: 701205278_FLI.pep
AASMASSLGRRRTHAPKASSTLNDDVSCEECGGGHSPSKLILCDKCDRGYHLFCLRPILPSVPKGSWFCPSCSNHKPKSFPLVQTKIIDFFRIQRSPEALSNQDTRRKRKRGGGLVVSKKKRKLLAFVPSEDPNRRLEQMASLATALTTTKTEFSNQLTYMLGMAPRSANRPALGRGGMQVLSKEDTETLNLCKRMMERGEWPPLMVVFDPLEGFTVEADRSIKDLTIITEYVGDVDFLKNRENDDGDSIMTLLSASDPSRTLVICPDKRSNIARFINGINNHTPEGKKKQNLKCVRFDVGGECRVLLIANRDITKGERLYYDYNGDEHEYPTEHFV

SEQ ID NO: 40320 - protein, 369 aa, Glycine max
  Clone ID: 701205280_FLI.pep
LIILSIMGTPQSNNLPPGFRFHPTDEELILHYLRKKVASIPLPVAIIAEVDIYKFDPWELPAKAAFGEKEWYFFSPRDRKYPNGARPNRAAASGYWKATGTDKNIVASLAGGVREHFGVKKALVFYKGKPPKGVKTNWIMHEYRLVDTNRPIRIKDTSMRLDDWVLCRIYKKFKHAVSPTTEAASTLQVINEQLDQAVVEEEEQIKDTLLPILKNNNTFVPPPQATILMSQKSLSFSNLLDATDYSMLSTILSENHSNNYPTPSETSLFNNCENLDQEITPQNYYINDTNSINNNSYLFQKNPSNMENIARPKRHLPNMDHEDNMLLYPLKKYHSSSCNFPNTNLQNQNPQWNFMFKQPLMSPQYLQFQ

SEQ ID NO: 40321 - protein, 89 aa, Glycine max
  Clone ID: 701205427_FLI.pep
LSPSEGFIEEFRSRTPTLRFGSMCGSKQPQHECCCVCLTKFEPESEINCLSCGHIFHKVCMEKWLDYWNITCPLCRTSLMPEDDASCFW

SEQ ID NO: 40322 - protein, 199 aa, Glycine max
  Clone ID: 701205474_FLI.pep
VLDTKPIAVSGGPLQSPNLKEQISRLVDNHILEAIVNMKEQKGSDKVAIASFIEEKYRSPPNLSKLLSTKLKHMVASGKIVKEKHKYRIAPSSTVSEKRRCSSLVLLEEKPKDPSEVHKNDDVNILSKSQIDAEISKVKGLTAQEAAAAAAKAVAEAEAAIAQAEAAAREAEAAEAEAEAAQVFAKAAMKALKCKMLHI

SEQ ID NO: 40323 - protein, 121 aa, Glycine max
  Clone ID: 701205476_FLI.pep
ERQLDSSLKQVRSTKTQFMLDQLADLQNKEHMLVEANRSLTMKLEEINSRNQYRQTWEAGEQSMSYGTQNAHSQGFFQPLECNPTLQIGSDYRYNPEASEQQLAATTQAQQVNGFIPGWML

SEQ ID NO: 40324 - protein, 155 aa, Glycine max
  Clone ID: 701205621_FLI.pep
CSQYKLPYGFRIEGARWKTKHLEKEYEVLKKQFEAVKADNDVLKVENQKLQAELQAVKSRDWCEAGMMSHKKETEGSWSNGSDNSLEINLDHSRTLGLNSPISSQNGKNLLLPNSLNPTSITQLLQDDGLCNMFHNIDAQQNFWPWPDQQHQRFH

SEQ ID NO: 40325 - protein, 199 aa, Glycine max
  Clone ID: 701206519_FLI.pep
SARPKSAEKMSKANAKNKSPSTELHPPYFEMIADAISSLKDRTGSSQPAIAKFIEDKHSKVLPPNFRKLLSVQLKKLVKSEKLYKVKNSYKLSSATDKETQKNTETEPKQKVEKKKKKKKKVGEKIKRLSQVKTPETLKKKAPTKKDAAATKKKSASAVEGSGGGKVKCLSQVKTPEALKKKKPNLTPKPSRPNRNARK

SEQ ID NO: 40326 - protein, 200 aa, Glycine max
  Clone ID: 701207149_FLI.pep
SEWRSLKVQWDEPSSILRPDRVSPWELEPLVSTPPTNPQPSQRNKRSRPPILPSTMPDSSLQGVWKSPVESAPFSYCDHQHGRDVYPSTNFNSTATGFLGFGGNCYASNKSIYWSSRMENSTESFSPVALKEFGEKRQGTANGCRLFRIQLHDNSNSNEESLPMVTLSGRMGDDGPFHLWMLSLTSILNHQMLIDLISLR

SEQ ID NO: 40327 - protein, 85 aa, Glycine max
  Clone ID: 701207208_FLI.pep
LCGSAARYTLSMEHITAIRRTRQCSTSSPTTVTIFHFIYHICISNTYIICMKILIHIFGCNFTRKNEDKSQEHNKDEQSLGTHFP

SEQ ID NO: 40328 - protein, 89 aa, Glycine max
  Clone ID: 701207222_FLI.pep
VLNCFSDLRKMGSKALLVLVVFLAFVLVLSGEVAPEDMDENFHANDVGVADTNMVDEMKYSYSSWRTGAALPCPPNCCYVFHGKCIPCC

SEQ ID NO: 40329 - protein, 282 aa, Glycine max
  Clone ID: 701207375_FLI.pep
AKRKRKNQYRGIRQRPWGKWAAEIRDPRKGVRVWLGTFSTAEEAARAYDAEARRIRGKKAKVNFPDEPSGAASSKRLKANPEAQPMKKNLNSVKPKINQMFNFGDNLEGYYSPIDQVEQKPLVNQYVNRAPFAGNGVQVSPVTPSADVTAYFSSEHSSSSFDYSDLGWGEQVPKTPEISSMLSAAPLDGESQFVQGAADQNQKKNNLLDMASVQDDSAKTLSEELADIESQLKFFETPSFLDEAWADAALASLLSEDASQDAAGNPMNLWSFDDLPSMAGVF

SEQ ID NO: 40330 - protein, 254 aa, Glycine max
  Clone ID: 701207433_FLI.pep
GFQGTHSIAVSLESTKRHRFIDLLPPRPGLQELVPIQAANILELQLIPHSPLSMASTLKSGGIHTGAINDDLYKELWHACAGPLVTLPREGERVYYFPQGHMEQLEASMYEGLEQQMPSFNLPSKILCKVVNVHLRAEPETDEVYAQITLLPEADQSEVTSPDDPLPESPRVKIHSFCKTLTASDTSTHGGFSVLRRHADDCLPPLDMSQQPPWQELVATDLHGNEWHFRHFFEGNPSATYLPLGGVSLSVPKN

SEQ ID NO: 40331 - protein, 273 aa, Glycine max
  Clone ID: 700566749_FLI.pep
FVRFFVTPSDSVAIIAANAVEAIPYFSAGLKGVARSMPTSAALDVVAKHLNLKFFEVPTGWKFFGNLMDAGLCSVCGEESFGTGSDHIREKDGIWAVLAWLSILAYKNKDKLEDKLVTVEDIVRQHWATYGRHYYTRYDYENVDAGAAKELMAYLVKLQSSLSEVNQIVKGIRSDVSNVVHGDEFEYNDPVDGSISSHQGIRYLFEDGSRLIFRLSGTGSEGATIRLYIEQYEKDPSKIGRLSNEALAPLVEVALKLSKMEEFTGRSAPTVIT

SEQ ID NO: 40332 - protein, 574 aa, Glycine max
  Clone ID: 701207946_FLI.pep
RYCAETIFPRLDYTAEPPVQTVVAKDVHGETWRFRHIYRGTPRRHLLTTGWSSFVNQKKLVAGDSVVFLRAENGDLCVGIRRAKKGISEGSGSGSSSVWSSASGSGNGNCGIGPYGPFSFFLKEENKMLRNGCGGNLSGRVKVRAEDVVEAVTLAASNKPFVVVYYPRASTPEFCVKASAVRAAMRIQWCSGMRFKMAFETEDASRISWFMGTIASVQVVDPIRWPNSPWRLLQVTWDEPDLLQNVKRVSPWLVELVSNIPLINFTPFSPPRKKLRPQHPDFPLDVQFPIPMFSGNQLGPNSPLCGFSDNAPAGIQGARHAQFGKSLSDLHLNNKLQLGMLPTNIHQLGVYNEISNGNMMTNHDKSKESLSCFLTMGKSTKSLEKSDDVKKHQFLLFGQPILTEQQISSCSGDVLSHRKRSVSDDKDKAKCLMDDSQSTLSQQFSPGKASSAEFSWQLGLDTGHCKVFLESEDVGRTLDLSLFGSYEDLYRRLAIMFGIERSEILNHVLYHDAAGAAKKTGEEPFSDFMKTAKRLTILTDSSSKNIKRAFITGTRNGEHGLDASNKTGPLSIFA

SEQ ID NO: 40333 - protein, 184 aa, Glycine max
  Clone ID: 701209443_FLI.pep
MDHQPPPCPAAASATDNPRGGTRHPMYRGVRKRRWGKWVSEIREPRKKNRIWLGSFPVPEMAARAYDVAAYCLKGRKAQLNFPDDVDSLPLPSSRTARDIQTAAAQAARMMKASGNDEKSGIASDDGDSGCDDFWGEIELPELMDGECCWGCPAGASSWTSSGDLAEWPEEELSPQQPSFMACL

SEQ ID NO: 40334 - protein, 275 aa, Glycine max
  Clone ID: 701209890_FLI.pep
KGGPENATCTYKGVRQRTWGKWVAEIREPNRGARLWLGTFDTAREAALAYDAAARKLYGPDAKLNLPELSVPYAAGVMNPSHMQQQQQQQQQPQVPQMMMQQQQPLVHPTFDLVNVTPHSDFNNNSINILNNNPVVSSMASSFLADAAAPVYTSCDSIVSLPLSATNYTTNNTVPMEMDGYYYSSIAVESKEDDMFRPFWGPTMDDTMPVSDESIWTEAAMSLDYPIVGGGGGFVTTENLFGEATAWTPCKLLLSACKLSSDERDRQYSNKVLCL

SEQ ID NO: 40335 - protein, 340 aa, Glycine max
  Clone ID: 701209913_FLI.pep
RMGSKSETVCVTGASGYIGSWLVMRLIERGYTVRATVLDPADMREVKHLLDLPGAESKLSLWKAELTEEGSFDEAIKGCTGVFHLATPVDFKSKDPENEMIKPTIQGVLNIMKACLKAKTVRRLVFTSSAGTTNITEHQKPIIDETCWTDVEFCRRLNMTGWMYFVSKTLAEKEAWKFAKEHGMDFIAILPALVIGPFLLPTIPSSVISALSPINGIEAHYSIIKQAQFVHIEDICLAHTFLFEQPKAEGRYICSACDVTIHDIVKLINEKYPEYKVPTKFQNIPDQLEPVRFSSKKITDLGFQFKYSLEDMYTGAIDTCIEKGLLPKPAEIPANGIEHK

SEQ ID NO: 40336 - protein, 427 aa, Glycine max
  Clone ID: 701209925_FLI.pep
PSFLPFTTTPSLYFKISPFQIPNFYNFTIRIYNLSFSSSIQSNPIPSQSKQENHVFIGEASSHRFLQGGRRARHDDRGRLQRRPPSSAAAAADDSRREQRRGPRGRDQGPEEARRDLGPGRDALSHWPSREMDALFNTSKSNKHLWEQISAKMREKGFDRSPTMCTDKWRNLLKEFKKAKHQDRGSGSAKMSYYKEIDEILRERSKNVQYKSPTPPPKVDSFMQFADKGIDDTSISFGPVEATGRPTLNLERSLDHDGHPLAITTADAVAASGVPPWNWRETPGNGGESQSCCGRVISVKWGDYTRRIGIDGTPEAIKEAIRAAFRLRTKRTFWLEDEDQIIRSIDREMPLGNYTLHIDEGMAIKLPLYDEPDHIPVHTEDKIFYTEDDFRDFLTRRGWICLREFDSYRNIDNMDDLRPGAIYRGVS

SEQ ID NO: 40337 - protein, 158 aa, Glycine max
  Clone ID: 701210145_FLI.pep
MLLSSVHSLIVILLLATAFLVIILIIHLRYRLLRFFFIPTSRTFRLFLVISSHVLLVLHFPFLRLCHIRCFFSIRHRLPFCSSSFAHSRHCFVVGMFLVEHLPEFLHENEESTWRPLWLVRIFRCLPLSGGFPSLGGGALLIHSKFGIGSLRFGLGLS

SEQ ID NO: 40338 - protein, 184 aa, Glycine max
  Clone ID: 701210318_FLI.pep
ILLYLTTPSLCVRIIMGLQNQLNDVSSGSIPLLVLAQIATCVNYLRSMLFALLQTLGLSRFHSDQIVDERFLAAVGSGLAGLIMLSDQLTLSSQFFHHHHGTAAGHDHDHDHHPCVVCQATFEDGDQVRMLSCRHVFHRRCFDGWLHHYKFNCPLCRSPLFSDERVALTERRLGQQLISWFSLH

SEQ ID NO: 40339 - protein, 311 aa, Glycine max
  Clone ID: 701210864_FLI.pep
GPYTLKYRGSMWGYKRFFKRAQLEASTFLKDDCLKINCTVGVVVSSIDCSKLNTIQVPESDIGAHFGMLLENEEGSDVTFSVGGERFHAHKLVLAARSTAFETEFFNGMEEDDHDVVVTDMEPKVFKALLHFIYRDTLIDDEELFMSRSSFLPSVSESFAAKLLAAAEKYGLPRLKLMCESVLCKDISIDSVAYILALADRYRATELKSVCLQFSAENLVAVMQSDGFEYLKENCPLLQSELLKTVAGCEEEFSGEGKCRSVWAQFSDGGDTNDRSVRQQTWENGVERSQSLWVHLSDGVNNNDRSPGQET

SEQ ID NO: 40340 - protein, 91 aa, Glycine max
  Clone ID: 701210894_FLI.pep
RFLFSFRRRSGCVPRISDAVVGFLRPRLLPTDGDDDHGVRSRLRVPRSRLRPSLSQSRRNRCPHRFPKPITGKDLHPIEGENIRRERYLEK

SEQ ID NO: 40341 - protein, 180 aa, Glycine max
  Clone ID: 701211947_FLI.pep
SAATSFWLPVSPKRVFEFLRDENSRSEWDILSNGGVVQEMAHIANGRDTGNCVSLLRVNSANSSQSNMLILQESCADSTGSFVIYAPVDIVAMNVVLNGGDPDYVALLPSGFAILPDGTTAHGGGIGDTGHGGSLLTVAFQILVDSVPTAKLSLGSVATVNNLIACTVERIKAALSGEVA

SEQ ID NO: 40342 - protein, 402 aa, Glycine max
  Clone ID: 701212072_FLI.pep
LGDVAGQSTKARRHSMHSCHDRYDSLKHNAGHSRSLLFFNREYNDIVRKLWHPLNFQQEKKLNFIYRKFKLLRVLELDGVRVVSLPSLIGDLIQLRYLGLRKTNLEEELPPSIGNLQNLQTLDLRYCCFLMKIPNVIWKMVNLRHLLLYTPFDSPDSSHLRMDTLTNLQTLPHIEAGNWIVDGGLANMINLRQLGICELSGQMVNSVLSTVQGLHNLHSLSLSLQSEEDEFPIFMQLSQCTHLQKLSLNGKIKKLPDPHEFPPNLLKLTLHNSHLQKESIAKLERLPNLKVLILGKGAYNWPELNFNGEGFPQLHILRLVLLKELEEWTVEENAMPRLENMVIDRCEKLKKIPEGLKAITSLKKLKIIGMPVEFEHKLRTKDLFDFTNTPVIESTTDILAID

SEQ ID NO: 40343 - protein, 59 aa, Glycine max
  Clone ID: 701212095_FLI.pep
DIYFYNNLLIITVLVLIICIIYGIKGTGSVALPFNNFPSLLAAFVYQTGIFYCLSSYIN

SEQ ID NO: 40344 - protein, 116 aa, Glycine max
  Clone ID: 701212210_FLI.pep
QNYAQKRYMTRENHESWVLLPFLLTEKASPCLIIQNLSISSALRPGMRPAIKFHLSPTSLYILRMRSSSCSLMCMTFHSLLLTSSEVVVAVVDMDLSLPSELPDMIQTRREGCRDC

SEQ ID NO: 40345 - protein, 69 aa, Glycine max
  Clone ID: 701212212_FLI.pep
LEEFQINPLQLNPSAEEMGHGRYPGQPQGHALFQPLDCEPTLQIGYHPDPVSVVSEGPSMNNYMAGWLP

SEQ ID NO: 40346 - protein, 180 aa, Glycine max
  Clone ID: 701212261_FLI.pep
IQTKPSINNCSDHYIYKLIFKKRNPQKTLDLQHNRLTNPNSRAGKLGNRLGPFRNGVFGQFTREHETHGGLDLPRGDGGLLVVASQTRRFLGELLEDVVDEAVHDAHGLAGNTNVGVNLLEDLEDVDLVGLHALLRALLLLLAPSFLRDLLLRLRLLLRRCLLRRWLLLRRLLLCLCRSH

SEQ ID NO: 40347 - protein, 340 aa, Glycine max
  Clone ID: 701212272_FLI.pep
RMGSKSETVCVTGASGYIGSWLVMRLIERGYTVRATVLDPADMREVKHLLDLPGAESKLSLWKAELTEEGSFDEAIKGCTGVFHLATPVDFKSKDPENEMIKPTIQGVLNIMKACLKAKTVRRLVFTSSAGTTNITEHQKPIIDETCWTDVEFCRRLNMTGWMYFVSKTLAEKEAWKFAKEHGMDFIAILPALVIGPFLLPTIPSSVISALSPINGIEAHYSIIKQAQFVHIEDICLAHIFLFEQPKAEGRYICSACDVTIHDIVKLINEKYPEYKVPTKFQNIPDQLEPVRFSSKKITDLGFQFKYSLEDMYTGAIDTCIEKGLLPKPAEIPANGIEHK

SEQ ID NO: 40348 - protein, 525 aa, Glycine max
  Clone ID: 701212376_FLI.pep
ESSELQSEENKVSNEKNKKRKLKTPAQLKALENFYNEHKYPTEEMKLVLAEELGLTEKQISGWFCHRRLKDKRLMKDEAVANGRQDRSSGVIQDRGSGLGQDSCGSSKHADHRYLDPKEVESHGLYNHELSVADMTHGCRNRYTENVSGVDDTSSESSSFLQERLFSQGLDPYDMEPSRHLTPNGALPPLNPKGAVNMGHKPSGYLKVKGEIEHAAITAVKKQLGRHYLEDGPLLGIEFDLLPPGAFECQTADPANEPYSATNPLLLNSPEISAAKRQPSISSRYDSYYTKFSSQDPHMEGADFGSLHETDFQDKQDKKARQNIKQRQPLYGYTNHFPGRNSFPDLYEDSTGEASAYNSTKSHRMSTKHGVEGMRSDSASNHSDHYEEKLAVKQKGLMLHGYDNINLKNMQRSEHVKSKPPSSIRNPRVPMIPEERGLSARMAKEEMFKGDRKAKNTYCNVDGAGMLSNEIMVAKRAKVDMLQQYNVKKSPVAEMEQRKIQRSAADLPSSFSEDETADTNSSLDY

SEQ ID NO: 40349 - protein, 194 aa, Glycine max
  Clone ID: 701212864_FLI.pep
GLNISAHLCLALCHSIIIHSHLSLFSLHPNPNSRPCSPLVSVMKGGKSKTESKRADPKLAVNKKGAATKARKPAGKGKAAKDPNKPKRPPSAFFVFMEEFRKVFNKEHPENKAVSAVGKAAGAKWKTMSDAEKAPYVAKSEKRKVEYEKNMRAYNKKQAEGPTGGDEEESEKSVSEVNDEDDDEEGSGEEEDDD

SEQ ID NO: 40350 - protein, 397 aa, Glycine max
  Clone ID: 701213140_FLI.pep
SRLKSEQKKMMGTLKVSNSSLYIFSKFLVICMVMMISLVDSSYSLCDFEAIFNFGDSNSDTGGFHTSFPAQPAPYGMTYFKKPVGRASDGRLIVDFLAQGLGLPYLSPYLQSIGSDYTHGANFASSASTVIPPTTSFSVSGLSPFSLSVQLRQMEQFKAKVDEFHQTGTRISSGTKIPSPDIFGKALYTFYIGQNDFTSKIAATGSIDGVRGSLPHIVSQINAAIKELYAQGGRAFMVFNLGPVGCYPGYLVELPHATPDYDEFGCIVSHNNAVNDYNKLLRDTLTQTGESLVDASLIYADTHSALLELFHHPTFYGLKYNTRTCCGYGGGVYNFNPKILCGHMLASACDEPQNYVSWDGIHFTEAANKIVAHAILNGSLFYPPFPLHKHCDLQPIG

SEQ ID NO: 40351 - protein, 313 aa, Glycine max
  Clone ID: 701213230_FLI.pep
NMGTAIDMYNSSNIVADFLDPYSEELMKALKPFMKSDYFSASSSSSLESQPCSFSSNSLPTSYPSSNQIKLNQLTPDQIVQIQAQIHIQQQQQHVAQTQTHLGPKRVPMKHAGTAAKPTKLYRGVRQRHWGKWVAEIRLPKNRTRLWLGTFDTAEEAALAYDNAAFKLRGEFARLNFPHLRHHGAFVFGEFGDYKPLPSSVDSKLQAICESLAKQEEKPCCSVEDVKPVIHAAELAEVESDVAKSNAEYVYPEFEDFKVEHENPMFSGESSSPESSVTFLDFSDFSDSNNQWDEMENFGLEKFPSVEIDWEAI

SEQ ID NO: 40352 - protein, 150 aa, Glycine max
  Clone ID: 701213472_FLI.pep
SASAFWKQRPKYFEMARTKQTARKSTGGKAPRKQLATKAARKSAPTTGGVKKPHRYRPGTVALREIRKYQKSTELLIRKLPFQRLVREIAQDFKTDLRFQSHAVLALQEAAEAYLVGLFEDTNLCAIHAKRVTIMPKDIQLARRIRGERA

SEQ ID NO: 40353 - protein, 242 aa, Glycine max
  Clone ID: 701213889_FLI.pep
NKFVLVLFTVSWVLLFGLLDGKPPIGSGRVIWDTGGQQLFASYAYYITARHPDLGSGGLKLIKTGNSTCPNTILQYFPKYTHGLPMYLLISVISNFIVYEGTPLAIFMAKKPNCVESLVPDPMKGSPDPPSPLNPPNSSRLLVFVDNSIHKTCVGTAGPEAHPGLLTYSGTFHIEILENVRFGYSSYKLVFCFDGSDYQNCSYIGTYDNGEGGRRLILTETNPFLFSFVHALKFDGTIKSVG

SEQ ID NO: 40354 - protein, 276 aa, Glycine max
  Clone ID: 701213890_FLI.pep
LCPRDYFNLMQGLQWPALIQALALRPGGPPLLRLTGIGLPSSDNRDTLREIGLRLAELARSVNVRFAFRGVAAWRLEDVKPWMLQVNPNEAVAVNSIMQLHRLLASDSDPAGSGIETVLGWIRSLNPKIISVVEQEANHNEDMFLERFTEALHYYSTVFDSLEACPVEPDKALAEMYLQREICNVVCCEGPARVERHEPLDKWRKRLGKAGFKPLHLGSNAYKQASMLLTLFSAEGYCVEENQGCLTLGWHSRPLIAASAWHAAPVQDRETLRFEQ

SEQ ID NO: 40355 - protein, 354 aa, Glycine max
  Clone ID: 701214015_FLI.pep
QTLQQSTLYPIYKMSSFSQNPYVLVLFLVLTVWISRVMSRGLITSERHEKWMAQYGKVYKDAAEKEKRFQVFKNNVQFIESFNAAGDKPFNLSINQFADLHDEEFKALLNNVQKKASRVETATETSFRYENVTKIPSTMDWRKRGAVTPIKDQGYTCGSCWAFATVATVESLHQITTGELVSLSEQELVDCVRGDSEGCRGGYVENAFEFIANKGGITSEAYYPYKGKDRSCKVKKETHGVARIIGYESVPSNSEKALLKAVANQPVSVYIDAGAIAFKFYSSGIFEARNCGTHLDHAVAVVGYGKLRDGTKYWLVKNSWSTAWGEKGYMRIKRDIRAKKGLCGIASNASYPIA

SEQ ID NO: 40356 - protein, 512 aa, Glycine max
  Clone ID: 701214153_FLI.pep
FFSMALLFFYFLVLISFAFTTIIVQKIRKKPKKTDDTTCKIPHGPRKLPIIGNIYNLLCSQPHRKLRDLAIKYGPVMHLQLGQVSTIVISSPECAREVMKTHDINFATRPKVLAIEIMSYNSTSIAFAGYGNYWRQLRKICTLELLSLKRVNSFQPIREDELFNLVKWIDSKKGSPINLTEAVLTSIYTIASRAAFGKNCKDQEKFISVVKKTSKLAAGFGIEDLFPSVTWLQHVTGLRAKLERLHQQADQIMENIINEHKEANSKAKDDQSEAEEDLVDVLIQYEDGSKKDFSLTRNKIKAIILDIFAAGGETTATTIDWAMAEMVKNPTVMKKAQSEVREVCNMKARVDENCINELQYLKLIVKETLRLHPPAPLLLPRECGQTCEIHGYHIPAKTKVIVNAWAIGRDPNYWTESERFYPERFIDSTIDYKGSNFEFIPFGAGRRICAGSTFALRAAELALAMLLYHFDWKLPSGMRSGELDMSEDFGVTTIRKDNLFLVPFPYHPLPVS

SEQ ID NO: 40357 - protein, 117 aa, Glycine max
  Clone ID: 701214276_FLI.pep
CNLTPIVMAMEIKVCVIPIVGIGGLGKTTLAKLVFNDNRMDELFPLKMWVCISDEFDIRQIIIKIINSASASAPIIALSHQENINSFNIEQLQSRLRHNLSGKKYLLVNGFKELQTL

SEQ ID NO: 40358 - protein, 100 aa, Glycine max
  Clone ID: 701214323_FLI.pep
ASKLTIFLLFLRTLNNNNMVTPKLVSQGINNDSWWGFHGRIWIRIWTSGDRRTTQRASSMRLEPSINAREMKSMVAFWQQSQVFILLELDQTNRTIVTFH

SEQ ID NO: 40359 - protein, 313 aa, Glycine max
  Clone ID: 701214851_FLI.pep
CSVKSFRVRVAMGRAPCCDKANVKRGPWSPEEDATLKNYVETHGTGGNWIALPKKAGLRRCGKSCRLRWLNYLRPDIKHGGFTEEEDNIICTLYAEMGSRWSAIASKLPGRTDNDVKNYWNTKLKKKIMAGKVTLKTLTDNDTLPSISTPSLTNNQNVKTSQNSPFPSSQNQNSPPLDANNTFSISEKSIISFDQTHHGLYSPQVMDVVSQIGANSRIPNYNNNNNPVVSLSQEGSSSISDSSSIAMNNKNVSQPEQHANDDYESMEMLMDFGFGFPYDFANGPNCHYERVGELAPSSYPEWVDFSYADIKPH

SEQ ID NO: 40360 - protein, 142 aa, Arabidopsis thaliana
  Clone ID: JC-ATXP108C175O12T7093_FLI.pep
QVHPRIYKSSNYKLNRVSSTLTTYTGVDYNQTKQWQMQFSNLNLIIQNLTSSFYISPVGIIFNSLTRSYDLKSLPKHRAKSKANFPSFVRLVLSAPLVNNIFVMSRFRLCTAICNGVHPSLSATLTSTLYLNSSFTVCKAPT

SEQ ID NO: 40361 - protein, 155 aa, Arabidopsis thaliana
  Clone ID: JC-ATXP119C195P24T7076_FLI.pep
SITVAMESTGKVKKAFGGRKPPGAPKTKSVSKSMKAGLQFPVGRITRFLKKGRYAQRLGGGAPVYMAAVLEYLAAEVLELAGNAARDNKKSRIIPRHLLLAIRNDEELGKLLSGVTIAHGGVLPNINSVLLPKKSATKPAEEKATKSPVKSPKKA

SEQ ID NO: 40362 - protein, 256 aa, Arabidopsis thaliana
  Clone ID: JC-ATXP25C125G4T7_FLI.pep
SINLIKICRDMAAAAVSSNPRTVEEIFKDYSARRAALLRALTKDVDDFYSQCDPEKENLCLYGHPNESWEVNLPAEEVPPELPEPALGINFARDGMQRKDWLSLVAVHSDCWLLSVSFYFGARLNRNERKRLFSLINDLPTLFDVVTGRKAMKDNKPSSDSGSKSRNGTKRSIDGQTKSSTPKLMEESYEEEEEEDEHGDTLCGSCGGHYTNEEFWICCDVCERWYHGKCVKITPAKAESIKQYKCPPCCAKKGRQ

SEQ ID NO: 40363 - protein, 116 aa, Arabidopsis thaliana
  Clone ID: JC-ATXP46C173N12T7054_FLI.pep
LTTESVKSPSLPLESVDNIHGGHSLPPSVLGVSDSITNHVLEKDLEDATSLLVDETTDTLDSTSTSQSSNRRLGDSLDVVSQNLPVTLGSSLTQTFSSLSTTRHFFSEDLVYLERN

SEQ ID NO: 40364 - protein, 185 aa, Arabidopsis thaliana
  Clone ID: JC-ATXP89C245B2T7_FLI.pep
RFPDATPEELSSNDATCIICREEMTSAKKLVCGHLFHVHCLRSWLERQNTCPTCRALVVPAENATSTASGNRGPHQESLQQGTGTSSSDGQGSSVSAAASENMSRHEARFQAAASAASIYGRSIVYPSSANTLVWSQGNSLLPQTEVEAQRRFLESQIEVLTNQLRLLEKPTTVDTKGKSVADTA

SEQ ID NO: 40365 - protein, 476 aa, Glycine max
  Clone ID: JC-GMST02400042B10_FLI.pep
ANRESTNSGAAGDGGDGSSGGGENSAGKQVVELSTAQRQELQMKKSKLVTMLDEVEQRYRQYHHQMQIVVSSFEQAAGYGAAKSYTALALKTISKQFRCLKDAISAQIKATSKTLGEDDCLGVKVEGSRLRFVDHHLRQQRALQQLGMIQPNAWRPQRGLPERAVSILRAWLFEHFLHPYPKDSDKVMLAKQTGLARSQVSNWFINARVRLWKPMVEEMYLEEIKEHEQGNGSENTKSKESSKELASTANVALDHLQSKHESFNNQNTSPTEISTSSSMSPMGGSLQSHSGFHLAGSSDMQIRSPNKPRSSEMQNSPSSILSVDMEMKHSGDHGNNRDANTKFGIERHHQQKDGYPLMTSNPNHGGGFGAFTMEDIGSRFNVTTEQLASRFHGNGVSLTLGLPHNENLSMSGTQQHGFLSQNIHLGRRLEMGTNGNEFCTINTAPPSSHSGTTYESIDIQNRKRFVAHQLLPDFVA

SEQ ID NO: 40366 - protein, 283 aa, Glycine max
  Clone ID: JC-GMST02400043D01_FLI.pep
KSVSKVMAERGYHVSPQQCEDKFNDLNKRYKKLNDMLGRGTSCQVVENPVLLDVIDFLSEKEKDDVRKILSSKHLFYEEMCSYHNGNRLHLPHDPALQRSLQLALRNRDDHDDDMRRSHHDEDDQDVEIDDHDDFEENCASHGDSRGIYGPLGGSMKKLKQCQGQEDANTFGNSLNCQDYNKSSYPHGQMIPSDVNQGLPEGMKAAWLQKQWVESRTLQLEEQKLQIQVEMLELEKQRFKWQRFSKKKDRELEKLSLENERMKLENERISLELKRKEMGTGFK

SEQ ID NO: 40367 - protein, 214 aa, Glycine max
  Clone ID: JC-GMST02400054H07_FLI.pep
YSHTTLLFQSFNMGDFIFSFKTQPQDHAHHQRAKHNNNNNKRLTEDQVAILEKCFASNMKLEPEQKFHLANQLGVPPRQVAIWYQNKRARWKTQSLEVDHGVLQARLENVVAEKKQLEKDVERLKAELKKAQEMLLISNNVKSGDHSNNNNNNASCEFSTSFEEGGSSGVVLDDATHHHHHECWQSGSEVMQVEELFTYFMGANYGSGLHEKRA

SEQ ID NO: 40368 - protein, 48 aa, Glycine max
  Clone ID: JC-GMST02400055G07_FLI.pep
KTINVYHNHPQTRLPKTRVKFKLRHISTRKQPMLRQLVLQHWKVWISV

SEQ ID NO: 40369 - protein, 125 aa, Glycine max
  Clone ID: JC-GMST02400056A10_FLI.pep
KKEKEEDDIAKPRNMGHHSCCNQQKVKRGLWSPEEDEKLIRYITTHGYGCWSEVPEKAGLQRCGKSCRLRWINYLRPDIRRGRFTPEEEKLIISLHGVVGNRWAHIASHLPGRTDNEIKNYWNSW

SEQ ID NO: 40370 - protein, 355 aa, Glycine max
  Clone ID: JC-GMST02400072C12_FLI.pep
NYTIPTLPLSSTTTVDFTTVTWSFSEDPTMAAGTVFCAAATAASNLTTTTFLHNQTPPSTSSQPPLDSLFLSASSPFLGSRSIVSFGDVQGGKGCNDSFFRPYDENGDEDMDEYFHQPEKKRRLSVEQVKFLEKSFDEENKLEPERKIWLAKELGLQPRQVAIWFQNRRARWKTKQMEKDYDSLQASYNDLKANYDNLLREKDKLKAEVARLTEKVLGREKNESHLEQAETNGLQEPLHKSLVDSASEGEGSKVTFEACKQEDISSAKSDIFDSSESPQYTDGVHSALLETGDSSYVFEPDRSDVSQDEEDNLSKTLLPHYIFPKLEDVDYSDPPHGSCNFGIPEEDQAIWSWPY

SEQ ID NO: 40371 - protein, 331 aa, Glycine max
  Clone ID: JC-GMST02400073F10_FLI.pep
FSYSLFSLLLLSPSFSFSGDMESKWGGAPASIMAANFDDFKWIASMFDPGNDDVKPFSDAAFQNQDAVTAFSTCGGVTDDTLVRSQNLTPIQSTISATIDSQSSFCVGSPVSANKPNVRDNQVKGVATTTSGSSREPSDEDDEAGPCEQSTNAIDMKRLRRKVSNRESARRSRRRKQAHLADLEWQVERLRLENANLFKQLTDASQQFRDADTNNRVLKSDVEALRAKVKLAEDMVTRGTLTPINNQILQNQSSLNTPPQLNTNNLHRMTHVSPTITVRGNDDASYGGGITVSGQNSPLGGLGNLDNIPCSDFNSGINSNNAVSSMTSMWP

SEQ ID NO: 40372 - protein, 105 aa, Homo sapiens
  Clone ID: LIB10-10-F3_FLI.pep
TFCEEYDACQRKPCQNNASCIDANEKQDGSNFTCVCLPGYTGELCQSKIDYCILDPCRNGATCISSLSGSTCQCPEGYFGSACEEKVDPCAWCPCQNNGTCYVDG

SEQ ID NO: 40373 - protein, 384 aa, Zea mays
  Clone ID: LIB143-001-B9_FLI.pep
VVRGEMDAFLHRLKRLDAYPKVNEDFYKRTLSGGIVTLVAAVVMLLLFISETRSYFYSSTETKLVVDTSRGERLRVNFDITFPSIPCTLLSVDTTDISGEQHHDIRHDIEKRRLNSHGNVIEARKEGIGGAKVERPLQKHGGRLDKGEQYCGTCYGAEESDEQCCNSCEEVREAYKKKGWALTNPDLIDQCAREDFIDRVKTQQDEGCNVLGFLDVSKVAGNFHFAPGKGFYESNIDVPELSLLEGGFNISHKINKLSFGTEFPGVVNPLDGAQWTQPASDGTYQYFIKVVPTIYTDIRGRGIHSNQFSVTEHFRDGNVRPKSQPGVFFFYDFSPIKVIFTEENRSLLHYLTNLCAIVGGVFTVLVSLTRSYTMDRRRSRRKWS

SEQ ID NO: 40374 - protein, 118 aa, Zea mays
  Clone ID: LIB143-001-D3_FLI.pep
SATSRRWRTSGCSSASRPGRSTSTSSSAWASCSRARQRPRAPTCTPRPTSRTRSARPAGASLTAASSPRSSTSPSSSTPCPSAPRRSRVGRPPCACVFVCLTRLFIELQTVAAARAAA

SEQ ID NO: 40375 - protein, 264 aa, Zea mays
  Clone ID: LIB143-001-E8_FLI.pep
PTRDPQMKIIPVPCLDDNYAYLIVDESTKKAAAVDPVEPEKVLKAAGEVGAYVDCVLTTHHHWDHAGGNEKMRLQVPGIKVFGGSLDNVKGCTDQVENGMKLSLGKDIEILCLHTPCHTKGHISYYVTSKEGEDPAVFTGDTLFIAGCGKFFEGSAEQMYQSLIVTLGSLPKSTRVYCGHEYTVKNLKFMLTLEPENEKTKQKLEWAEKQREANQPTVPSTIGDEFEINTFMRVDLPEIQAKFSVNSPVEAMREVRKTKDNWRG

SEQ ID NO: 40376 - protein, 269 aa, Zea mays
  Clone ID: 700575684_FLI.pep
EKNRLKTSINLSLTPILNQYNLTCFEWQHYKFLHDLCGQFCIIICPFEIHQCILSDQWSICFHNAGVMVPLTWSIRMKIALGAAKGLAFLHEAEKPVIYRDFKTSNILLDEEYNAKLSDFGLAKDGPVGDKSHVSTRIMGTYGYAAPEYIMTGHLTAMSDVYSYGVVLLELLTGRKSLDKSRPVREQMLADWALPLLAQKKKVLGIVDPRLAEDYPVKAVQKTAMLAYHCLSRNPKARPLMRDIVATLEPLQQLEETPGDSVAVTLEGT

SEQ ID NO: 40377 - protein, 134 aa, Zea mays
  Clone ID: LIB143-003-F5_FLI.pep
KNKVFSIDLVSDEPSVIACDMAHTPLEPSSIDVAIFCLSLMGINYPSYLEEANRVLKPSGWLVIAEVRSRLDPSNGGADPEKFSKAIIQLGFSLVSKDVKNRMFILFYFRKKEKSKVAKSIDWPQLKPCLYKRR

SEQ ID NO: 40378 - protein, 268 aa, Zea mays
  Clone ID: LIB143-003-G1_FLI.pep
GLKWRFKKLENWHHLKNTLKCKMPKIKSLSNACRVSFSPEGPISEEALERVRALLDMIRPLDVGLDNEAQIARNWSSSTRPSNGRRGRNGANQFAAPIKYLHIHECESFSMGIFCMPPSSVIPLHNHPGMTVLSKLLYGRLHAESYDWVDIPDHPIDQLQTRPAKLVKDCEMTAPETTILYPNAGGNIHTFRAITPCALFDVLSPPYSAEDGRHCSYFRKSQMNQPPVVLPAEIDSSQVVWLEELEDHQPPEGFVVARGLYKGPVIRR

SEQ ID NO: 40379 - protein, 142 aa, Zea mays
  Clone ID: LIB143-004-E9_FLI.pep
GARPPQRARHHRRRLGQRRAAPVPRGPRQRRAPHAGEGEGRGGGRAARGEGGRGHPGRRGRQGELRGELFPGAGQGVPVRDGGGVRQRGGAGRRGRGRQGGGGQGLGQAAAGRGDGPGLRRRRCSNAREPLITGCRVSLSGF

SEQ ID NO: 40380 - protein, 326 aa, Zea mays
  Clone ID: LIB143-004-F12_FLI.pep
NLAKMRSLRAAQTLVSRSLFSARHLSGAASPATAAAAGARWCAAPAPPPRSPLPSSRVMPAGVAGAVSFSLTFATVAAAEAKAKERPQPDLLPQNVVLYQYQACPFCNKVRAFLDYHDIPYKVVEVNPLSKKELKWSDYKKVPILTVDGEQLVDSSDIINILQSRINPNEELTSDEEAKWRRWVDEHLVHVLSPNIYRTTSEALESFDYIAKHGNFSFTERFAVKYAGAAAMYMVSKKLKKKYNITDERASLYDAANTWIDALNGRDFLGGSKPNLADLAVFGVLRPIRYLRAGKDMVENTEIGDWYRRMEDAVGEPSRIQDAEGN

SEQ ID NO: 40381 - protein, 130 aa, Zea mays
  Clone ID: 700576978_FLI.pep
AAAAADSSFSIPSQSAAVAPSNMAPKKDKAPPPSSKPAKSGGGKQKKKKWSKGKLKEKVNNAVLFDQATYDKLLSEVPKYKQITPSILSERLRINGSLARRAIKDLMARGLIRLVSVHSSQQIYTRATNT

SEQ ID NO: 40382 - protein, 315 aa, Zea mays
  Clone ID: LIB143-012-B6_FLI.pep
LAPARMESAGGEARPVLPPPPPPVQELAGAANDVPARYVARAGNEPKVTVTAPVPVIDLARLCQPGGGADEASKLRLALESWGLFLVTNHGIEATLMDAMMDASREFFRQPLQEKQKHSNMIDGKHFQLQGYGNDRVASEDQVLDWCDRLYLLVEPQEDRSLDLWPACLRDVLHDFTTECTRVKDCLLREMAKALDELGDDDDYFIDQFGDRADTHARFSYYPPCARPDLVFGLRPHSDGTFLSLLMLDDSVGGLQGFPGRSLVRRAHQTSHPARQSRRPNRDNKQWDLQEPSAPGCNKRGEREAISGSVLFYRS

SEQ ID NO: 40383 - protein, 626 aa, Zea mays
  Clone ID: LIB143-013-A2_FLI.pep
ASLQIDPGSPTPIFPSRSKPEQIERLKLHPAKQNRIGAARHAAMGILLRSLLVASLVLSSLVLHVAAAKTIDPYKVLGVDKNASQRDIQKAFHKLSLKYHPDKNKGKGAQEKFEEINNAYEILSDEEKRKNYDLYGDEKGNPGFGGGNFGNHGGSTYFTGGGPKSSQFTSGNGWQTMGGQGNTKTFSFSFGGKPGASGGNPFGGGFDLGDVFSNLFGGGPMGDSHIGGSSGSARAKTGTSGQHSGTTKIEDITTQVFNKEVADQGTTWLLLFYTPQSKSQFVLESVMQDVVHSLDGVLRAGKINCDNEKSLCKRSGVSIGKSARLFIYSYATAEKGSLHEYSGEHDAKSLKTFCQEHLPRFSKRVDISQFSFPLNVLPNLPQVLLLSSKKDTPAMWRAISGMFRNRIIFYDAEVHDVSHPLLKSLGVKNLPAVIGRTVNGEELLLKDGISVKDLRSGVKELKTLLDSFEKKNKKLLSNLANKKPSGQWEEIKKIPLLTASNFEEICGEKTSVCIIGVFRSNKAKGQLEAVLSEISKKTLIRGQNYNSRNAVSYALLDKDKQSAFLSSFDKSGYRSSDNLLIAYKPRRGKFAVYDGEVTLEEAERFVGSVLNGDVQLSPTKQKPVLR

SEQ ID NO: 40384 - protein, 401 aa, Zea mays
  Clone ID: LIB143-013-C7_FLI.pep
TVTQHSTGSSRERERERCRGSGTTTTTSRLPRRRAPTRCSRSSAAPTRTTAWPSATAPSCWPRSTPRTTTSTGTRTCASAPGSRTRKACRRSRSSTRPRGSQSSTPSASPTRSSSRLSARTRRTRRCCGRRARTWARASAASAWSTTPASTSTPSTATRTTAACTTAPPSCSGSGARARTRAGRSCRGVPRPTPPRPTREARTPCASSARPAARTTASRCATARRAWRPPTRGTSTSTGSRTCATAPGCGTRRATRPSRSSTRSPARRSSTPRGRATPSSSCPTTRTTRTSPCSGPRAATSATASAASAWSTTSTSTSTPSTATRPTAASMTVPRSCSGSGARATTSAGRSSLGERTKETTSWYPNNNSAGCGDPKIKEAGCDASRTSRVVFASDSQPLWG

SEQ ID NO: 40385 - protein, 230 aa, Zea mays
  Clone ID: 700577847_FLI.pep
GDVGRDLRQQLEDHQRHRRHLGQHDRHGGPERGVVGVRASRRMERSGHAGGGQRGHDQQRVRRALQPLGDLQGASHHRLRRQAYVAGDVRHPGQQGGDRRQPRSARRAGEEGADGGQQRDLGRAALRVPDGGAAPEPARQGRGHHHRALGRHRPPRRHARRGQGPVAARDVGRHVHGQDELRRRAALVQDARPQAQDPDPVNYATAAAWARVRAALTTSPRVHSFVLQAN

SEQ ID NO: 40386 - protein, 88 aa, Zea mays
  Clone ID: LIB143-013-E2_FLI.pep
WRTACSPSPCPRRRPRSRRSGLSRSLVDRSVHCMHYECPSCTTGSITFRNSLVGHLPSKYKLSICPSFVYGSVVLLVSSTSGQCFVSM

SEQ ID NO: 40387 - protein, 546 aa, Zea mays
  Clone ID: LIB143-013-E4_FLI.pep
VQVSLATESHREMGGPGRPWRRHVFLVVSLQLLLVAPWQDETAARALNFTRQDFPRAFVFGAGTSAYQYEGATDEDGRSPSIWDNFTHAGRMPDKSTGDLGADGYHKYKGDVQLMSDTGLEAYRFSISWSRLIPRGRGAINPKGLEYYNNLINELVKRGIEIHVTLSHLDYPQILEDEYHGWLSPRMVDDFEAYADVCFREFGDRVRHWTTMDEPNVNSIAAYDNGAFPPGRCSPPFGFGTNCTAGGNSSVEPYVVTHNCILAHAAVAALYTRSYRAEQQGVVGINIYTFWNYPFSPAPADVQATQRSLDFMIGWMVNPLVYGDYPQVMKRIVGSRLPRFTKRQSEMVRGTADFIGINHYTSVYVSDRPNDAAADTTGPRDYNADLSATFRFSRDDPATGQFVPINMPSDPQGLQCMLEYLSQTYNNIPVYVQENGYGALFNDSIHDHERAEYLSAYMGSALAALRNGANVKGYFVWSFLDVFELLAGYYSRYGLYHVDFQDPELPRTPKLSALWYGKFLKSEIDDIIENVVVSATDDARSHAAEQ

SEQ ID NO: 40388 - protein, 268 aa, Zea mays
  Clone ID: LIB143-014-B11_FLI.pep
QARPKQRSDGQGPPQRRGVRRRPSSSTSRLRPGRGRGRAAHGADGVAQVAALQLRRLHRLRRPRRPGLPRGLLRRLVPPPAPRRRRAHGRHGEAAAHRAPQDAARLNGALGHLRRRRRRRRRHDGRGHAAAVRPPPPHRRVLQDAGARPPPPRRRGNRRTVVRGGGLLRSARLRGARRPRGRRRRGGAEEGGRRRRRVPPRRGRATPRRAAVHGARHRPRRHVPRRLVGAVAAAHELAGVVLSLAIEATRWSGAHIPGTLPVTRVPLQ

SEQ ID NO: 40389 - protein, 123 aa, Zea mays
  Clone ID: LIB143-015-A11_FLI.pep
EKKPAVSFSMFSPNGKFILVAMLDNSLKLCNFATGKFLKVYSGHVNRQYCIQSAFSVTNGKYIVSGSEDNCVYIWDLQGRNILQKLEGHTDTVISVSCHPTENKIASGGLHNDRTVRLWVQDS

SEQ ID NO: 40390 - protein, 337 aa, Zea mays
  Clone ID: LIB143-015-B2_FLI.pep
LSARPLPSRSEKSAASPRASEAHTTMQGGSSGIVYGGLKYQARCIADVRADASSTTFLAGTLSLKEENEVHLIRLSPAESELVCDGVFYHPNEIWDLKSCPFDHRVFSTVYTSGEGFGASVWKIPELNGQSNSPQLEQLFELSGHTGKIRRVIWWPLGKHDKLISIDDRNIFLWNVDMSNKSAKVISQGSADMLPNLSGGAWDPHNHNSIASISDSSLHLWDLRSMEKSSAIEHAHIRDVDYNPKKQHIIATTEDDFGICLWDLRMLKLPLKDLPGHSHCPSGSPNRQEEPLLNSYTDYEDSIYGIAWSSHDPSLFASLSYDGRVVLESVKPYLQRK

SEQ ID NO: 40391 - protein, 655 aa, Zea mays
  Clone ID: LIB143-015-D8_FLI.pep
VSVCSVLSSPSPAPAPPCSVCFRPLCVAIAKLVCSVAMGSLATADGPLPPLKYPQARRDEDIVDDYHGVLVPDPYRWMEQVDSKEVKEFVDAQAAVTSAVLSSCDHRGRLRGQLTALFDHPRFRAPFKRRGSYFYFHNPGLRPHSALYVQHGLGGEPDVLLDPSTFSEDGTVSLGVVGVSDDGEHLAYGASASGSDWVTIRVMRVRDKEHLPDTLSWVKFSRIAWTRDGQGFFYSRFPAPRDALDSGMKTDVNLNHEVYYHFLGTEQSQDVLCWRDPDHPKYIYIPQVTEDGKYVILSVSETSEPVNKLYYCDLSALGGVKSAHGNGMLPFVKLVDRFEAYYGLIANDGTQFTFLTNKDAPRYKLARVDVDDDEPAGSPWTDVVPEDEDGKAVLESACAVHGHKLLVSYLSDVRCDVGSAVPEMDVYREISVPGFDRNEFEAKQVFYPSKDGTKIPMFIVSKKEISLDGSHPALLFGYGGFGVSVTPQFSVARVVLMRNLGFVACVANLRGGGEYGEGWHRAGSLAKKQNCFDDFVAAAEFLVSAGYTSPARLCVEGGSNGGLLVAACVNQRPDLFGCALAHVGVMDMLRFHKFTIGRAWTCDFGCSEKEDEFQWLIKYSPLHNVRRPWEKENKRAAAADASCRGLAASTLPPCC

SEQ ID NO: 40392 - protein, 407 aa, Zea mays
  Clone ID: LIB143-015-E2_FLI.pep
RRRSIHLKASRDMESSPLLQLPAARVEALSLSGLSAIPPEYVRPADERAGLGDAFDLARTHANDHTAPRIPVVDISPFLDSSSQQQQRDECVEAVRAAAADWGVMHIAGHGIPAELMDRLRAAGTAFFALPVQDKEAYANDPAAGRLQGYGSRLATNTCGQREWEDYLFHLVHPDGLADHALWPAYPPDYIAATRDFGRRTRDLASTLLAILSMGLLGTDRGDALEKALTTTTTRTAADDDLLLQLKINYYPRCPQPELAVGVEAHTDVSALSFILHNGVPGLQVLHGARWVTARHEPGTIIVHVGDALEILSNGRYTSVLHRGLVNREAVRISWVVFCEPPPDSVLLHPLPELVTEGHPARFTPRTFKQHLDRKLFKKKQQHKAKAEEEDGGNGDHHRHEPPPQTN

SEQ ID NO: 40393 - protein, 126 aa, Zea mays
  Clone ID: LIB143-017-H1_FLI.pep
QVYMLKAEGIAFRFLPDPLQIKNALEMKSGLTAFDGVPVFQSDLLVVKKQKKRYCPVYFQKEDIERELTRASKGSRGSALSKKIMVGSLEDVLKKMEINERDSGWDDLIFIPPGKSLNQHINEVSA

SEQ ID NO: 40394 - protein, 212 aa, Zea mays
  Clone ID: LIB143-017-H3_FLI.pep
RTTNAARPAAYVRSSRDLQRGPAKVEGQHGRPELGLLLWRADRHRRNRHHRRLRRRHRRRSPLGRAEPLGLHVLVLPPGSHVHVVILHALLGRGAHDLDDAAQPVGPADEHLGQRGHQRAVAGAGARHLELGAEAELHHHAHGLAAPRLHRHLHVAVLACTRVSADRKRTRQQTNEPTCSASNIWVQIFLGCWAGNMHPWVRDLEGWCGRLR

SEQ ID NO: 40395 - protein, 386 aa, Zea mays
  Clone ID: LIB143-018-A7_FLI.pep
GLLCFLSSPSSPLCSPLSLGVFFSRAPPAASFATAAPALSMKPPPLSSLQEEGEEGPTVEDSSVFSAAVVPPRPATHSHSLHKYAPLDWSAYFDEERRVAIPDTDNVFNAYTTGSEGPVVFCLHGGGYSGLSFALAASQMKDKARVVAMDLRGHGKSTTNDDLDLSIETLTNDVIAVIRTMYGDLPPAIILVGHSMGGSVAIHVAARKEIRNLHGLVVVDVVEGTAMASLVHMQKILANRAQHFPSIEKAIEWSVKGGPLRNIESARVSIPSTLKYDESRECYTYRTPLEQTEKYWKGWYEGLSDKFLSCPVQKILLLAGTDRLDRALTIGQMQGKFQMVVIRHTGHAIQEDVPEEFASHILKFISRNKIGPNGVEIPGLIKKWQQ

SEQ ID NO: 40396 - protein, 376 aa, Zea mays
  Clone ID: LIB143-018-B5_FLI.pep
YAYSLFVPSGHINNQYNTCFWMLVKSGKSEQEAQLALKGTFAKDKNELLAKQFQINYDDELAMFRKGSSVYREKVETIVKIDDYGEPIKRPRLKVTVAHVDIIGTEFWENHPHILREGKFMHGFVKKFGINHIFSPCNWIIVRIIACQFDQFSRIHSFDKPNDETALRLMNESATLMMEQYPDIVFGYGFSNEYSFVFHEKSELYQRRESLILSSCSSYFTSLYMTKWKEFFPYTELMQTPHFEADALCYPKLKIICEYLSWRQAECHAGNQYNTCFWMLVKSGKSEKEAHEILKGTLSKDKNELLFQQFQMNYNNEPAMFRKGSCVYRRKVEELAGAEDGGNVTSRERWHVKVDHVDLGPGFWRKHPGLMTDRTQ

SEQ ID NO: 40397 - protein, 426 aa, Zea mays
  Clone ID: LIB143-018-E12_FLI.pep
DMIIGDDTVYYYHDMIVEMIKWGYQEGKTLFGFGYDFRQSNRLSETLDRFSKKLESVYTASGGKKINLITHSMGGLLVKCFISLHSDIFEKYVKSWIAIAAPFQGAPGYITTSLLNGMSFVEGWESRFFISKWCMQQLLLECPSIYELLANPNFQWRDIPLLQIWRENLDNSGKKSALLESYEPEEAIKMIKEALSSNEIIADGMHIPVPLNLDILNWAKETYDLLCSTKLPESVKFYNIYGIDYDTPHTVCYGSEQQPVSSLSSLLYAQGKYVYVDGDGSVPAESAKADGFNAVARVGVAPDHRGIVCSRRAFRIVQHWLHAGEPDPFYDPLSDYVILPTRYEIEKHREKHGDVTSVAEDWEIISPNDGKTMRPGELPPMVSTLTTSREGKEGALEEAHATVVVHPEKKGRQHVQVRAVGVSHGG

SEQ ID NO: 40398 - protein, 246 aa, Zea mays
  Clone ID: LIB143-018-F2_FLI.pep
AGEGGDPEVQELPPPEPTRFAFATAAKAAVDGVMTTTPKDVKGDRPVKRGRKNQYRGIRQRPWGKWAAEIRDPNKGVRVWLGTYNTAEEAARAYDAEARKIRGKKAKVNFPDDDAPGTGHRPANAAPRLVAPPPPPKACADEIFNNLKNDDDDNNNNNDDLFAMFAFGDNKKKVPAAKPAAAEGGSGSGSFLVPAPAVAVVPGNKRRSSATNTMLSVSDDQRSNSYGSGSSDLVGSWSWDDDAAAA

SEQ ID NO: 40399 - protein, 430 aa, Zea mays
  Clone ID: LIB143-018-H8_FLI.pep
FIRERTWREICLAGLNLCTCCSLPLWLYITWFISLYSLLICVIIKSCFGSARLLGVVICVTPVESSGFQASRRHQLLEVDGRGEAHLRRRGEDGQGALLGRGLRAVHPVPEQVLAAVGAVGGVGRARGLRVEPPPAAARAGHIPEPGRSRVRREVGHHAVGAADGVARPRERARGREVGERRPERVVEAPRQRVGAVDAPGRAVGGGGPHRRHAAEGRHVHDPEPPRPEAVERPHVPRVAGQHVRVQGRRLGRRPVPPQEREHVVAAVADEEEGPGQQLVHGRRAAVRHHLGLGGREVLDLLRQRDRVPRGVEDAGPSGRVVDAAEASQDLTARSWRQGQVSRRAPLETQQFRDEVGDVVAVAEAPGGPRVREIDAVGELRRGVPRQVLVVAHVHGGVAEHVQRGHQVRLLRPAGRGRRRRDNADEEHQQ

SEQ ID NO: 40400 - protein, 214 aa, Zea mays
  Clone ID: LIB143-019-C12_FLI.pep
QLLKERGENIPAEESFDVARRIKEMYCYTSSDIVKEFNKHDKEPSKYIKHWTGTKPKTGAKYTCDIGYERFLGPEIFFNPEIYNNDFTTPLQVVIDKCIQSSPIDTRRALYKNIVLSGGSTMFKDFHRRLQRDLKKIVDARVRASNSRLISGDAKAQPIEVNVVSHPIQRYAVWFGGSVLASTAEFYEACHTKAEYEEYGASICRTNPVFKGMY

SEQ ID NO: 40401 - protein, 234 aa, Zea mays
  Clone ID: LIB143-020-H4_FLI.pep
GFGFVTMAAVKDADRCIKYLDRSVLQGRVITVEKAKRRRGRTPTPGKYLGTKSSRGRRYSTSYSPDRRGRYSSRYSPDRRDCHGRDRSYSPYDRRRSYSPYSRDGSYSPYYGRRSYSPYYSRRYRSRSPYCYRRRRSPSVSPYYRRHRYRSVSKSSSSSPRARGRSYSCSLSPQRSYSRSHSPESERSTSYSPKKGSKREPSRSRYSGKSRHSRESHSHSRSSYSRSVSRERSA

SEQ ID NO: 40402 - protein, 108 aa, Zea mays
  Clone ID: 700577790_FLI.pep
LLVNPATWPPTYHGRQSSTIVKLRYLIHACVPTWGTTASWSPLCISAPCILLWLALNGNPLHSGYHNCKAMHGCIVSMLQLSPCGYRGSPELYHHSPKRRIECIKLPA

SEQ ID NO: 40403 - protein, 365 aa, Zea mays
  Clone ID: LIB143-022-B2_FLI.pep
ESPQNQRKAFPRSSRGHQRWVPATRWRSPSAPPGTSRTSTGATATSSPTPWCGSTPAASARPASTSTTARARRGTRSCSSRSPPNLPTEGWSGLYSGLKPSLIGTAASQGIYYYFYQILKNKVEDIAVARSKKGLGDGTVGMLSWLGIAAVAGSINVLLTNPIWVLVTRMQTHTQAKRKILESKRELLLKEMSRANSLEVAILKDRLVKLESEKPRPYGTLQAVCNPSIQFMIYETLAKRLQSKRSGKQLPKRHLTAMEVFLLGALAKLGATLVTYPLLVVKSRLQAKQEIGSNVMSRYTGTIDAIIKMVRYEGLHGFYKGMGTKIVQSVFAASVLFMVKEELVKLAVLLVGSSRTILITTSKKQ

SEQ ID NO: 40404 - protein, 478 aa, Zea mays
  Clone ID: LIB143-022-C7_FLI.pep
DRLVADGYAEASDLEFRDRLAAHFGRLPHSYQLDINVDKASDVLVHQNVLAEAKDPDRRPAFYVRFLRIEDMDSAYDSDASEEGDDDGDDLSVRQDTPYTHIHEIVFSTIDKPKLLSQLSALLSDIGLNIREAHVFSTHDGYSLDVFVVDGWPVQDADGLHKALEASILRNEGSWSGSSHSSAAERTLPFQVKGGEWEIDKRLLKMGGMVASGSCGDLYHGTYLGEDVAVKVIRAEHLNKNVWNEFTQEVYILREVQHKNVVRFIGACTKPPQFCIITEYMSGGSLYDFVHKQHNVLNLRTLLKFAVDVCRGMCYLHERGIIHRDLKTANLLMDKDHVVKVADFGVARFQDQGGVMTAETGTYRWMAPEVINHQPYDNKADVFSFAIVIWELITSKIPYESMTPLQAAVGVRQGLRPGLPKKTHPKVLDLMQRCWEADPSARPAFPDILAELEDLLAQVQGTPGKTAHAPSNNSNTKD

SEQ ID NO: 40405 - protein, 373 aa, Zea mays
  Clone ID: LIB143-022-D3_FLI.pep
LGWTQPRPVCLLLLSPLPLPAPPGSTSPLGSRHWKDSMSVSASSPAAAAGDEKQEAAPVRRCKGVNDLDKVVLREVRGSSAEVYLYGGHVTSWKDEHGDELLFVSNKAIFKPPKAIRGGIPICFPQFSNFGNLEPHGFARNRTWSVDDDPPPFPVPTSNSAYIDLILKPTEDDLKIWPHSFEYRLRVALSPGGDLMLTSRIRNTNADGKPFSFTFAYHTYFKISDISEVRVEGLETLDYLDNLQDRARSTEQGDAIVFESELDRIYLGTPSKIAIIDHEKKRTFVVRKGGLPDAVVWNPWDKKAKAMSDFGDDEYKRMVCVEAAAIEKTVTLKPGEEWTGKLELSAVPSSYYSGQLDPDRVIQDSTVPEDSIS

SEQ ID NO: 40406 - protein, 442 aa, Zea mays
  Clone ID: LIB143-022-D7_FLI.pep
GIIGRPWILNFHLQKVWSIGRCNRFMHGSEGMVHLEDICSYVPYNKKGYLVKIWSILLDSCVDASPLLVINNGMMSIFIGSHSYLFLCIDGYSGSVRWSVKLEGRIECSAAITGDFSEVVVGCYKGKIYFLDMSTGKLSWTFQTDGEVKMQPVVDKMRNLIWCGSYDHYLYALNYKDRCCTYKVFCGGSIYGSPAIDMAQNVIYVASTSGLVTAVSFKEPSFRVLWQYEAGAPIFGSLAIDHQSGTVICCLVNGLVMTLNSQGSVVWKATVGGPIFAGACLSPTLPHQVLIPSRDGNLYSFDTVSGALLWVYKAGDPITASTFVDELLTSVSFGPSERFACICTSSGKVHVIRIRVDIRTRVDAKYNQEQGGDGVKSEELVQGLDAKYNQEQAGEGAKSEELVQGLASIDLPGDIFSSPLMVGGRIFVGCRDDRLHCLTVTT

SEQ ID NO: 40407 - protein, 73 aa, Zea mays
  Clone ID: LIB143-024-B5_FLI.pep
LFDVFQPFKSTFKTFTWKLLMMSTLRGHDIRTHMNDKHRTTINSKKQKDQTYLVNVKPNVRLAVYITLSADRI

SEQ ID NO: 40408 - protein, 784 aa, Zea mays
  Clone ID: LIB143-027-H3_FLI.pep
SSPIIAAAPSPPLPSSGKMASHIVGYPRMGPKRELKFALESFWDGKSTAEDLEKVATDLRASIWKQMADAGIKYIPSNTFSYYDQVLDTTAMLGAVPERYSWTGGEIGFDTYFSMARGNATVPAMEMTKWFDTNYHFIVPELGPNTKFSYASHKAVNEYKEAKALGVDTVPVLVGPVSYLLLSKPAKGVEKGFPLLSLLSSILPVYKEVIAELKAAGASWIQFDEPTLVLDLDSDKLAAFSAAYAELESVLSGLNVLVETYFADVPAESYKTLTSLSSVTAYGFDLVRGTQTLGLVTSAGFPAGKYLFAGVVDGRNIWADDLATSLSTLQSLEAVVGKDKLVVSTSCSLMHTAVDLVNETKLDSEIKSWLAFAAQKVVEVDALAKALAGQKDEAYFAANAAAQASRKSSPRVTNEEVQKAAAALKGSDHRRATNVSARLDAQQKKLNLPILPTTTIGSFPQTVELRRVRREYKAKKISEEEYVTAIKEEINKVVKLQEELDIDVLVHGEPERNDMVEYFGEQLSGFAFTANGWVQSYGSRCVKPPIIYGDVSRPNPMTVFWSKTAQSMTSRPMKGMLTGPVTILNWSFVRNDQPRFETCYQIALAIKKEVEDLEAGGIQVIQIDEAALREGLPLRKAEHAFYLDWAVHSFRITNCEIQDTTQIHTHMCYSNFNDIIHSIIDMDADVITIENSRSDEKLLSVFREGVKYGAGIGPGVYDIHSPRIPSAEEIADRIDKMLAVLDTNILWVNPDCGLKTRKYTEVKPALTNMVSAAKLIRTQLASAK

SEQ ID NO: 40409 - protein, 171 aa, Zea mays
  Clone ID: LIB143-032-A2_FLI.pep
EKMVWLTDFQCWTLGSTPLKVTRETVNVLQDCYPERLGLAILYNPPRIFESFWKIVKPFLDHETRKKVKFVYSNDKESQKIMAEVFDMEELDSAFGGKNPATFEYNSYAEQMQDDDKKMGSSHGSANSLLGSAGKEANGADSDASSEASFYSGTDSPTHENGEHSIAKKNG

SEQ ID NO: 40410 - protein, 174 aa, Zea mays
  Clone ID: LIB143-033-D2_FLI.pep
WWLVPEDDPIAKRDLVPSIDSNSKPSTVTDDNQQLNLKESQALENPITELAKRLGIALSEEVSASFVDEANDKELVELSSRLAGQSLPASDQVASIQVLRDHWKSSPASSLQLQELGPLLRDYQRLILRHYTGNSLPDFREMEALRFFHLKSASQLRMDDIPVLLSEYGRLLST

SEQ ID NO: 40411 - protein, 424 aa, Zea mays
  Clone ID: LIB143-035-B4_FLI.pep
HSGGVARRMARARGGAAWWVLAAAWVLWAAAAAAEAEARSPSARRVHRHLKRLNKPAVKSIESPDGDIIDCVHISHQPAFDHPLLKNHTIQFRPAYHPEGLYDDTKSSIGSNNAGERPMLQMWHRNGRCPEGTVPIRRTKKDDLLRASSVRRYGRKRHTAPNPLSVDPNMLSEGGHQHAIAYVQGDKYYGAKATINVWEPKIQQANEFSLSQLWILGGSFGEDLNSIEAGWQVSPDLYGDNNTRLFTYWTSDAYQATGCYNMLCSGFIQINSEVAMGASIFPISNYAGSQYDISILIWKDPKEGNWWMQFGKEYVLGYWPSFLFSYLADSASMIEWGGEVVNSEPDGTHTSTQMGSGHFPEEGFSKASYFKNVQVVDSSNQLSAPKGVGTFTEQSNCYDVQNGNNGDWGTYFYYGGPGKNSNCP

SEQ ID NO: 40412 - protein, 246 aa, Zea mays
  Clone ID: LIB143-035-E1_FLI.pep
MARSSANQDDMLLLLFLAVQPARPQRVSPLLLEQPEAVLPLPLLYHGDEPHDEVERKQDPARPQQVYREEAEGELVGRPDRDHGDQVPQQQDDRERDGHRAAPGRAPAGGARALGVLRVAGSDQRHVHQLLLLLLFRLVLRPGHPHAVSDGHRDISRLGFLGRNGVAWLKVLEANLADGASLLVAPPLHASPVSVLEGAGAGAGRLHGGAPLVLLVVANPALPQRGGARFLLLHLLLLFFFLALSL

SEQ ID NO: 40413 - protein, 107 aa, Zea mays
  Clone ID: LIB143-037-C9_FLI.pep
SGARRGLPHRLDPQDDGPGKGVHAGRPQGKAHDEIHSGGADDAVVNQRVLGHERDPGEPRCREPHVREMTPVPVVYIIVRPTCLPLGNCTLGPICTRPVDGQRGGPL

SEQ ID NO: 40414 - protein, 160 aa, Zea mays
  Clone ID: LIB143-037-E8_FLI.pep
THKQGEQSTYGVGLSFQPADQVRSVTFFGLQIHPPPLASVSRTKLVVRRSAPRGQPGELRSGAERRPTTGSLAAVALLEPARPSSSPPPLFSASLCLLLLLLTSWPRTRPPWRPRTRPLCSAATAAASAGCWPPALRTPRRGASAHSGSPRCRTGCRPCT

SEQ ID NO: 40415 - protein, 177 aa, Zea mays
  Clone ID: 700578004_FLI.pep
RGTTTATSPSSRPAPSARTPRTPRSPPTRPRRTSPSRSCRPRIPSGSASPSTSPSSTTRSSARRTAPARWPSRPSTKLFQSWIVLGKSRTRIAPSSCSFFVTTSPCGLLTCRRMVAMKCGMQTSLTRSSSSRHAMPCHACTRTIFVCPFLQSSTFRFVVILLLWNPVTVTVSVSYWQ

SEQ ID NO: 40416 - protein, 109 aa, Zea mays
  Clone ID: LIB143-037-F10_FLI.pep
VFTDILCFLHQIFSEVVQFAPLGLIDMFNSGGALDNISSVADSSATTVHIRCRGPGRFGAYSDTRPELCRVDEHEVEFTLAEDGLLTFYLPPSSSQDNLRHVEIVYKAS

SEQ ID NO: 40417 - protein, 219 aa, Zea mays
  Clone ID: LIB143-037-G12_FLI.pep
RTARSLGLGFRGFALGFGRTMGRSRGVQNSGDDDTVHRSKRRRVASGGDATDSVSAGIGGAGEGGGKKALYHCNYCNKDISGKIRIKCSKCPDFDLCVECFSVGAEVTPHRSNHPYKVMDNLSFPLICPDWNADEEILLLEGIEMYGLGNWLEVAEHVGTKSKLQCIDHYTTAYMNSPCYPLPDMSHVNGKNRKELLAMAKVQGESKKRDFTVAWRADS

SEQ ID NO: 40418 - protein, 109 aa, Zea mays
  Clone ID: LIB143-038-C11_FLI.pep
SVGLHHRHLAMSTATDAVPVAVAPAKRPPINKYAFACALLASMNSVLLGYDISVMSGAQLFMKEDLKITDTQIEILDGVINIYSLFGSLAAGLTSDWLGRRYTMVLAAA

SEQ ID NO: 40419 - protein, 359 aa, Zea mays
  Clone ID: LIB143-038-E1_FLI.pep
SRRSRVRRVLCYSFHVVVVGEHGNISGGGLLVSASAEACDGAVGGEEVGGEVVRRASHDGHVGCDVEAVDVVRAVGLAQHAVHVVGEVVELEAEVEVREGVAVVLPDAVVVDPRVLGGDGHYAGDDAEGAPELDDDGVDARGAGDGQRRRRGRGPARADEARQQGRDVDVLVVEGQRQVVGGGVPPGRPLGGDVEVVVREADAQRLDPGEVAAHGRVALADEVRVDVEGGVGDDAEVPVLLAVEVEVVAVGAREAWVAAGHAGIEVAQAECLAAWALDEALVRAACVAGGAAGGLVALDVGALESRAAIVGAHLQVRDVRHRLLRRCGLQQRRRRRHDDDAHQAEAHTASVTVSHCRLL

SEQ ID NO: 40420 - protein, 473 aa, Zea mays
  Clone ID: LIB143-039-B6_FLI.pep
LMISGSCDQADAGRGDFQELDQIAATKPFAKLAVKATTIADIPRLVFQALAAAVSGRPGGCYLDIPSDVLHQTLPESEAAALIAAAAADSAASDPSPSMHKSLDEGIAKAADLLRCAERPLVVIGKGAAYARAEEAIRKLVDTTGIPFLPTPMGKGVVPDSHPLSATAARSLAIGQCDVALVIGARLNWLLHFGEPPKWSKDVKFILVDVSEEEIELRKPHVGIVGDAKRVTELINREIKDNPFCLARSHPWVEAITKKANDNVLKMEAQLAKDVVPFNFMTPLRIIRDAILAEGSPAPVVVSEGANTMDVGRAVLVQNEPRTRLDAGTWGTMGVGLGYCIAAAAAEPERLVVAVEGDSGFGFSAMEVETLVRYQLPVVVIVFNNNGVYGGDRRSPDEITGPYKDDPAPTSFVPAAGYHKMMEAFGGKGYLVETPDELKSALSESFRARKPAVINVIIDPYAGAESGRMQHKN

SEQ ID NO: 40421 - protein, 306 aa, Zea mays
  Clone ID: LIB143-041-D12_FLI.pep
HYYYYYTRFHTVRREFWPISIRKQRGNIKLKCGKMRTARGRIALKSVASSSVLVGDVSEAAHQVAGPGEHHEVVRHDLPDLVHGAVLHHPALEPLRDGVVLRAHDVDLARRAVPFLGVGLLEHQVLHEHGTRPKQRCHEGHVLGRAELGELLSDDPGPEQHRGGELAFAVLGFQLCVHPLQPLPLHELLQHVRRPRRAVGHEGAEEHHGGDLVRERLGGQRDAQAAEAVAHEHHAIPVRQRRQELQQRPRVVPERGHLPQRRGHLEPGPAAQARAVDEHDVLAAATLGRRRRSVHLCFFFFFRKNT

SEQ ID NO: 40422 - protein, 168 aa, Zea mays
  Clone ID: LIB143-041-G2_FLI.pep
HGQKQPRTARVQGDGEMRIYQSSSRVALWKHSTVHTRMKKDVNSMNMAPVSIKPACLRIAGIARLPMADAPVKNFAALIHPPPSLLVKKCVDPPPKNRHGIGTRTYMRAANMGHQLLYKAHASICSRILVENMNASAASTSTVIAIFAFPLQRERWEGEGEGGLKTFF

SEQ ID NO: 40423 - protein, 191 aa, Zea mays
  Clone ID: LIB143-041-G9_FLI.pep
HHKRARDPGRKKREKTSLSSRRPRSPTSRLLPACLPACKKEFVMASKRILKELKDLQKDPPTSCSAGPAGEDMFHWQATIMGPPDSPYAGGVFLVNIHFPPDYPFKPPKVSFKTKVFHPNINSNGSICLDILKEQWSPALTISKVLLSICSLLTDPNPDDPLVPEIAHMYKTDRPKYESTARSWTQKYAMG

SEQ ID NO: 40424 - protein, 255 aa, Zea mays
  Clone ID: LIB143-044-C6_FLI.pep
SCGGKRRISPCLCMPGRLLSVRIPSLAKLGAPSRCAKSMASDTGKKLIQIDVSSDTVCPWCFVGKKNLEKAMEQSRDKFDFEVRWHPFFLNPDAPKEGVRKSDFYKAKFGPVQYERVISRMAEIFRGLGLEYDMSGLTGDTMDSHRLIALAGHQGYDKQNALVGELFLNYFCEGKYIGDKQVLLDAARKVGIEGAEELFQDPTKGVDEVQEELKKYSSGISGVPHFVINDKYQLSGGQPPNVFMRAFEMAAKDGA

SEQ ID NO: 40425 - protein, 327 aa, Zea mays
  Clone ID: LIB143-046-B4_FLI.pep
TKYQCTNNSLRAQHRQIYYEKDNTTICLFTLTPDAKDHMIPYRQQNVSLQDRVYLSISKPQFGELEVGLFVVIKESLLIRSIFLDKRAENRVAQQGFVTWELKKALLITTQKFLEVRVVKDQRVCSPGPLETRPLFVAPSQGVATREGNNVLIAQAHLLAKNLPQVVRTLSGVRKAALRWGLRLVLPTGVEGNLRPTGDLHGHNSRELVEIGVREDWELLLDGLEQPHRDVQPRVSAVSQFRLMLHRAEWTAGPRRHVERPRGVPREAEHERGAALLGDEGSELAPGLLHSLAVLGAHGRVVLRHGCEQRELWIVGCDATRLREGHK

SEQ ID NO: 40426 - protein, 117 aa, Zea mays
  Clone ID: LIB143-046-F9_FLI.pep
IRHETDRIDGGGIAVVKPRGRSDEPQDQETQARSERPWIMAGAVDRILFTGRRYYIYTPRRRPPPLDSRAPSPGRASSVAAAAGAAAAGAALAGVAVAAAALGGRLEAAGAGLGGRR

SEQ ID NO: 40427 - protein, 306 aa, Zea mays; identical to SEQ ID NO: 39172
  Clone ID: LIB143-047-A7_FLI.pep

SEQ ID NO: 40428 - protein, 279 aa, Zea mays
  Clone ID: LIB143-047-B8_FLI.pep
SHNLPSPGSAIPPCPLSVPSTFSLLSCFPQQSPNNSTSGSGRGSFRGKLGRPVPCGKKKRKGTCLDVVVVAVSDGGEDVRVGRRLGGGHAQARETPAVEPRVGAAVPAPEAAAPGRAGAGGGAPAGRQRARGGPRRRHRVPVHPRRAGEHRAPGPRRRARRPPPLRQRGAPPRRGVQRRRHGHPGGDAGGRPAAASLAAALPGCRHAHRRPAHAPLLMIASTNHTTIHLRLSAGAGWQQDKKNWLPLNNIHIYYLPGCLENYRASTICCCVKSTSWFLQ

SEQ ID NO: 40429 - protein, 122 aa, Zea mays
  Clone ID: LIB143-047-H6_FLI.pep
ITSPRNLQRRFKSSVGRTMSPWRQPLVIRFCADSWLLLLAIRPLGNGEMNLLAGRGLRLEGLLEAVPDQRSADVGVADVGHPRRPPEGHRCSGRRHLVASFPLRFTCAAAGASMENGEDATE

SEQ ID NO: 40430 - protein, 324 aa, Zea mays; identical to SEQ ID NO: 38165
  Clone ID: LIB143-049-B4_FLI.pep

SEQ ID NO: 40431 - protein, 151 aa, Zea mays
  Clone ID: LIB143-049-G3_FLI.pep
AKKESEKQSPCLASSTRSRRSSTWGATTRIRRRSTTRRPRSTTRRRRGSTTRRTAGSTRKASWRRSRTRSPASTATSPATTRRRRTRRRRIRRSTARATTTTAATVAAAATATEIWCRSTGATHVCLLDGGFIPADADVVFHWCHACIVLL

SEQ ID NO: 40432 - protein, 471 aa, Zea mays
  Clone ID: LIB143-050-E12_FLI.pep
GRVCRPAAEFLASYPDICTYGVDDHDADQIHVIVASLYQKDAEETVDGIENTTATQLDVADIGSLSDLVSQVEVVISLLPASFHAAIAGVCIELKKHMVTASYVDESMSNLSQAAKDAGVTILCEMGLDPGIDHLMSMKMIDEAHARKGKIKAFTSYCGGLPSPAAANNPLAYKFSWNPAGALRSGKNPAVYKFLGETIHVDGHNLYESAKRLRLRELPAFALEHLPNRNSLIYGDLYGISKEASTIYRATLRYEGFSEIMVTLSKTGFFDAANHPLLQDTSRPTYKGFLDELLNNISTINTDLDIEASGGYDDDLIARLLKLGCCKNKEIAVKTVKTIKFLGLHEETQIPKGCSSPFDVICQRMEQRMAYGHNEQDMVLLHHEVEVEYPDGQPAEKHQATLLEFGKVENGRSTTAMALTVGIPAAIGALLLLKNKVQTKGVIRPLQPEIYVPALEILESSGIKLVEKVET

SEQ ID NO: 40433 - protein, 189 aa, Zea mays
  Clone ID: LIB143-051-A9_FLI.pep
ALNKFIADRYSWNHSVSEYHVYEFFKIWNCSRERANFLVHEFFTTHYFQDGIHPIPGARDALQTLSSFCSLSVVTSRQDVIKNHTLEWIEKYYPGLFEQIHFGNHFALEGQSRPKSEICRSFGAQVLIDDNPRYALECANDGMRVLLFDYESSYPWCKTGADELHPLVTKVHNWEEVEEKLLSWVVPDS

SEQ ID NO: 40434 - protein, 202 aa, Zea mays
  Clone ID: LIB143-051-F3_FLI.pep
HVDAHQHTGPQASAAAAAAAAAAAAAEGRRRAHWHRRRRRHGGGGSGAGEHRHRGAGAASGRHHAGGVRGAGARPAAVRDGQHGLEGDADGARVHGRPPRAAPRRGEGGGGGGEAAPDQRAAAARRRGEGRPLAPRRAQLRPLRAHRAPPAQRQHRRRAGRAPGRRAHRHRAQGQRPQGLRQAHHHHQLINYIYIYIYIYIY

SEQ ID NO: 40435 - protein, 207 aa, Zea mays
  Clone ID: LIB143-052-B7_FLI.pep
QKSAKTQTKRLSAFQTPHDQFISWAHTGRARLISLYTCLPALQPLSRTDSRIHRCMLKPRQRYLSTLSSDLPQTQPASASHAFQAVAILRLVVVFVVVAAAAVVAATDGHTCPGELERALPRPGLRAAALLLSSPDAIHQHDRLAHRSRRRAGGGSSVVQPVLLEMAFHFIVCKPVHLHHLPDLFRSSHLRATEFVQSGNEPPVKLR

SEQ ID NO: 40436 - protein, 279 aa, Zea mays
  Clone ID: LIB143-052-E9_FLI.pep
SGWTDGRGHTSRGAVAGDVAGLAAVVAGAVAATPAAAAEPPSATAATAGAVPGHVAGLAAVVAAASTAAAATAVAAAAAGAVPGHVARLATLEAATAAAASSSVAASAVAASAVGARAVPCHVAGLAALVARAGTAPAAGSPAAAPATTVAATAAARSATAAGAVAAAASSSASAAPDEGSVGAGHVDGLSAAVVTLRDGKLHLLALRERAEALRLDRRLVHEEIFAAVLGGDEPEALGVVEPLHRPPLSRRRRHRNPRTLALRMLGLDFFFLSPARLS

SEQ ID NO: 40437 - protein, 103 aa, Zea mays
  Clone ID: LIB143-053-H12_FLI.pep
RNKQRNHDWKKFSKHLWKEKPARSIYLAEHEKQAIKHLYLLTMKPVIYVANVTESYLAEPDINPHVKEVSKPTSDLQSGMVTIPARVYCIHRSTRTFEEISDK

SEQ ID NO: 40438 - protein, 231 aa, Zea mays
  Clone ID: LIB143-054-C8_FLI.pep
TRAQGVHSTRAQGEEENKRMVKARPKPTPVKAAPEVIFDPMASGARKPRRPGAPSASKEWHSFMGSSLSDMYRKPVLEKSADTSDEEPDIDIMKLLKDVEIIGAPTFKGRKQIENRRVVELGGKSVKKHRTPLSVAKPALKNQKKREQKKMEEEKLLGIFRKRDKDTKPHKTRPEDRVLRATEGRFRNGILNVKHLLAPPKPSGKDMSEPKMRKDKHKGKGKQKGGRRKRR

SEQ ID NO: 40439 - protein, 377 aa, Zea mays
  Clone ID: LIB143-055-C11_FLI.pep
CCRNRWTRWWPTTSAAEEGRLKKGPWTSAEDAILVDYVKKNGEGNWNAVQKNTGLFRCGKSCRLRWANHLRPNLKKGAFTPEEERLIIQLHAKMGNKWARMAGHLPGRTDNEIKNYWNTRIKRCQRASLPIYPASVCNQSTNEDQQLSGNFNGGENISNDLLSGNSLYLPDFTSDNFIANPEALSYAPQLSAVSISNLLGQSFASKSCSFMDQVDQAGMLKQSGCVLPALSDAIDSVLSSADHFSNDSEKLRQALGFDYLNEANASSKSIAPFGVALTGSHAFLNGNFSASRPTNGPLKMELPSLQDTESDPNSWLKYTVAPAMQPTELVDPYLQSPSATPSVKSECASPRNSGLLEELLHEAQALRSGKNQQYEIS

SEQ ID NO: 40440 - protein, 227 aa, Zea mays
  Clone ID: LIB143-055-F2_FLI.pep
FSRVAVGTHTPAMATAPVTSSMATNSTCVRLPSMPLRRAPAIVSFASRPWSTAMTSCTGLSRHSDVVAAAGHQKLMGSLNNNEGLMFGVVVARFNEVVTNLLLQGALETFERYSVKAENITVVSVPGSFEVPITAQKLGKSGKFDAILCIGAVIRGDTTHYDAVANSAASGVLNAGLSAGVPCVFGVLTCEDMDQALNRAGGKAGNKGAEAALTAIEMASLFRHHLG

SEQ ID NO: 40441 - protein, 199 aa, Zea mays
  Clone ID: LIB143-056-D10_FLI.pep
DSRFGCERSRVRFSQHPPPQSPDKSLARHKFVDDCEAALNEQINVEYNASYAYHSLFAYFDRDNVALKGFAKFFKESSDEEREHAEKLMEYQNKRGGRVRLQSIVTPLTEFDHPEKGDALYAMELALALEKLVNEKLHNLHGVATRCNDPQLTDFIESEFLEEQVEAINKISKYVAQLRRVGKGHGVWHFDQMLLEEEA

SEQ ID NO: 40442 - protein, 405 aa, Zea mays
  Clone ID: LIB143-057-A1_FLI.pep
PSVPSSPPWRRRRYRSSWIWTRPLPPVPPAVSDKKKEGEGGDTVTGHIISTTIGGKNGEPKRTISYMAERVVGTGSFGIVFQAKCLETGETFAIKKVLQDRRYKNRELQLMRAMEHPNVICLKHCFFSTTSRDELFLNLVMEFVPETLYRVLKHYSNANQRMPLIYVKLYMYQLFRGLAYIHNVPGVCHRDVKPQNVLVDPLTHQVKLCDFGSAKVLVPGEPNISYICSRYYRAPELIFGATEYTTSIDIWSAGCVLAELLLGQPLFPGESAVDQLVEIIKVLGTPTREEIRCMNPNYTEFRFPQIKAHPWHKIFHKRMPPEAIDLASRLLQYSPSLRCSALDACAHPFFDELRAPNARLPNGRPFPPLFNFKHELANASPDLINRLVPEHIRRQNGVNFGHIGS

SEQ ID NO: 40443 - protein, 202 aa, Zea mays
  Clone ID: 700578607_FLI.pep
GSAQAARRAAPTVLLPRLASRRAMASTKAPGEKHHSIDTQLHQLVPGKVSEDDKLIEYDALLIDRFLNILQDLHGPSLREFVQECYEVSADYEGKGDTTKLGELSAKLMGLAPVDAILVASSILHMLNLANLSEEVQITHRCRNSKLKKGGFADEGSATTESDIEETLKRLVSEVGKSLEEVFEALKNQIDPHLCLCLFYIF

SEQ ID NO: 40444 - protein, 536 aa, Zea mays
  Clone ID: LIB143-058-A11_FLI.pep
EIGTMMGGRALLLLLVSALLVQIRASDPLLYEPFDEDFEGRWIVSKKDEYQGVWKHAKSDGHEDYGLLVSDKARKYAIIKELDEPVTLNDGTVVLQFEVRLQNGLECGGAYIKYIRPQDAGWDAKEFDNETPYTIMFGPDKCGSTNKVHFILKHKNPKTGKYVEHHLKFPPSVPYDKLSHVYTAILKPDNEVRILIDGEEKKKANFLSADDFEPALIPSKTIPDPDDKKPEDWDERAKIPDPDAVKPDDWDEDAPMEIVDEEATKPEGWLDDEPEEIDDPEAAKPEDWDDEEDGEWEAPKIDNPRCEEAPGCGEWKRPMKQNPAYKGKWHAPMIDNPNYKGIWKPQEIPNPEYFELDRPDFDPIAAIGIEIWTMQDGILFDNILITDDEKVATSILEKTWKPKYDVEKEKEKAEEAAAGADGLSDFQKKIFDVLYKIADIPFLAPYKTKIIDVIEKGEKQPNITIGILVSVVIVFVTVLCKLLFGGKKPVAPVKPAAEAKKPKAAETDGAGSSGDKDEKEDEKEETGPRRRTRRET

SEQ ID NO: 40445 - protein, 451 aa, Zea mays
  Clone ID: LIB143-058-D1_FLI.pep
PNTNSNTNNGGAAKESKPEERREEGLAGWPWPSSAGSSWSLARSIIPPSPPACPPAHMTESEGETEAARAAVLTPPLSLGGGGLAGELRPANLGQRVLSLFRNVRPGSDLSHFQLPATFNLPKSQLQLYGEAVYCGGEDMLARCARGADSLQRMCAVVAWSISTTRPPIFGFAPYNPVLGETHHVSTPAGLNVLLEQVSHRPPVTALHATHARGEVELVWCQSPAPRFHGASVEAAVRGARELRLPRHAETYAVGCPGLVIRLLPSPGCEWAGDVRVSCAESGLEATLSYRRSRRSFLGLGGGDARCVRGRVFRSAAPDDTLCEVDGFWDRQVSLRDVATGEVSVLYDARQTIADLATPVVQDRKGVSASESAVVWAEVSAAILNKDWEAARQAKRRVEETARRLAKERNERGEVWTPSHFSLWQNKHGDWECWPLEDSVPPAPIVVPSPS

SEQ ID NO: 40446 - protein, 494 aa, Zea mays
  Clone ID: LIB143-059-A2_FLI.pep
STSLVLGKDNQNDFTAFEYSIWADLGEDFIFVPHDSSIGRNKVLFYPARQQYSVSMNGCQDTVPLITARTGLYLEGSVLPATSDVDIKILAAGKSNYAHLNKGDVATEAKTDSEGSFFAGPLYDDIVYKVEASKDGYHLKQTGPYTFSCQKLGQILVRIYGENSELLPSVLLSLSGEKGYRNNSISSSGGTFTFDNLFPGSFYLRPLLKEYKFNPSAVAIDLNSGESREAEFRATRVAYSAMGSVTLLTGQPKEGVFVEARSESTGFYEEATTDSFGRFRLRGLVPGSTYSIRVAAKDNLQFAAVERASPEYLSVNVGHEDMTGIDFVVFERPEVTILSGHVEGDGIDTLHPHLSVEIRSATDSSRVEAVLPLPLSYYFEVRDLPKGKHLVQLRSGLPSHTHRFESELVEVDLEKDPQIHVGPLKYKTEERHQKQELTPAPVFPLIVGVSVVALVISMPRLNDLYQSAVGMTSLGSGMAPTKKEPRKNILRKRV

SEQ ID NO: 40447 - protein, 512 aa, Zea mays
  Clone ID: LIB143-059-H6_FLI.pep
RKALTSPGARSRQQERMAADAAAAATLRTALSQATGQEQRASLLCTPKHRVAASRRSLRFTTRASSNAGASVSIPKQWYNLIADLPVKPPPPLHPQTHQPLNPSDLSPLFPDELIRQEVTDERFVDIPEEVIDVYKLWRPTPLIRARRLEKLLGTPAKIYYKYEGTSPAGSHKPNTAVPQAWYNAAAGVKNVVTETGAGQWGSALSFASSLFGLNCEVWQVRASFDQKPYRRLMMETWGAKVHPSPSTATEAGKRILEADPSSPGSLGIAISEAVEVAATSADTKYCLGSVLNHVLLHQTVIGEECLEQLAALGETPDVVIGCTGGGSNFGGLAFPFLREKLRGRMSPAFRAVEPAACPTLTKGVYAYDFGDTAGLTPLMKMHTLGHGFVPDPIHAGGLRYHGMAPLISHVYELGFMDAVAIQQTECFQSALQFARTEGIIPAPEPTHAIAAAIREALECKRTGEEKVILMAMCGHGHFDLAAYEKYLRGDMVDLSHPAEKLEASLAAVPKV

SEQ ID NO: 40448 - protein, 355 aa, Zea mays
  Clone ID: LIB143-060-D9_FLI.pep
ARRFPRISSDARGRDGGRAMAGDAGSGVDWESLAEATSGAIGSLVSTTVLYPLDICKTKFQAELQTHQGAQKKYRNLSDVFWEAICKRQFLSLYQGLNTKNIQSFVSSFFYFYGYSYFKRLYLEKSGAKSIGTTANLLVAAAAGACNAIVTQPLDTATSRMQTSAFGKSKGLRETLAEGTWMEAFDGLGISIILTCNPSIQYTAFDQLKKRIIQRQRRKNAATAEDNSIVSLSAFSAFLLGAVSKSIATVLTYPLIRCKVMIQAADPDKDDDDDSERPSKSRTPKTMLGALHAIWSKEGIPGFFKGLNAQILKAVLSSALLLMIKEKISKFTWVSLLALRRYLFVSQKRIKSVTV

SEQ ID NO: 40449 - protein, 160 aa, Zea mays
  Clone ID: LIB143-061-D9_FLI.pep
YTDDEQEQAPNRAAGDIYLFIYFFSLTKLERSKLDLASHAVRQKKTPATRLWRRRLRAAALAEVCENVVTAVGDDGAMAHAGTNSCTDLDAVHALRMAPVDRHVIALALRRLLLVASTAVVAAGPGRRAFAESCEDGENSQSADEYQLRPHLCFSCPGNN

SEQ ID NO: 40450 - protein, 306 aa, Zea mays
  Clone ID: LIB143-062-H10_FLI.pep
TACLPACVSPPGSRNPPPTSSDSFPLSSSPVLQPPALCCRPVRLPASSLLGSRGRAMKLRTKRPEWKSLVPLQLSRLSRKSAMRFFLFPKVQSAGQSPDDTPVYLNVYDLTPMNGYIYWAGLGIFHSGIEVHGVEYAFGAHDFPTSGVFEVEPRQCPGFRFRKSIFLGTTCLDPIQVRQFMELQSVNYNGDTYHLITKNCNHFCKDMCYKLTGNKIPKWVNRLARIGAICNCLLPESLKISPVGHDPNSQSEDSEKRRLRNPFSCFSSISSHRQLPSSSPFPPSPVKGGLPRCSSRKSSTASPKNR

SEQ ID NO: 40451 - protein, 471 aa, Zea mays
  Clone ID: LIB143-063-D2_FLI.pep
TKQPNQIPLAASSLRDISSPVVASISKPLRRSRLIIDPKASNQTSSRVSASSVAMGFTKRSPQHPASPAGGEVGAQTAGKVTPVPAAPESAPVAVVPRPPDVAPFLTKVYDMVSDPATDAVISWSAGGGSFVIWDSHAFERDLLPRHFKHNHFTSFIRQLNTYGFHKVDPDRWEWANEGFVKGQKHLLKTIKRKKKSSQDVPSDLQSVPVKTAPGTENIEIGKYGGLEKEVETLKRDKALLMQQLVDLRQYQQSSSAEVQNLIQRLRVMEQNQQQMMALLAIVVQNPDFLNQLVQQQRRSNWWNDDGNRKRRFQALEHGPVDDQETSGGGAQIIQYRPPVPETSNQPIPANEAFYSTPAQPASSPALEMPMDVEMTSNNVDTFDSTGNDFTDTSALCEWDDMDIFGDELEHILQQPEQDFQVDPPLTVEDYGYDHPRLEQDCQMEAQQNCKNPQYVACVLKQRESHASDVH

SEQ ID NO: 40452 - protein, 442 aa, Zea mays
  Clone ID: LIB143-063-E8_FLI.pep
GLSSPPIPNSPLSSSVQHQLSSAPRSGQPRRNPNPSAPWRDTPSPHPGPSCSAWTTWRCPRGTSPSPPTSPSPTSSAPSRSPRPPATTSPPTGARCRPPPRWRRSRRRPPSSSASARSGAAAATAAPRAPSPATATSPCTSPRSPTRRTPTRRASRASPAARSPGSPSPRPPSPTASGTSTTRSRSLRRCSTSACPGRCPTSGACATWSPSTCTPGRAPTPPGTRSGSSAPSPASSSTASTSSSRSVGAATCSASRRSRRSRRPRAWSATRSSARPTRCPSTGLRRRWPSSGRGWRRRGGRRRRGRTRRFSVGISMLLLSWRRWWRRPELRMGRRARLLQQSASRLRTMRQPMPIRKCMRPYSHRPGSRISRRHTRAARFRWEEIDLMPRAIALHGGGDPIVLICLARVTNFNVGSFIWWCYLCLIGDPERILAVRAALNST

SEQ ID NO: 40453 - protein, 150 aa, Zea mays
  Clone ID: LIB143-063-G2_FLI.pep
GSDLLMQLERGQLLMVAPYLVKRKKQHFHHLEKYNVDLILGCNGFIWAGEHVVVGEKPKTTGGQQGFSTEAENFTPLETRKHICRLANSVRVLSALGFTLTVELIIETMEASASSNVEINDMLGAEFYVQTAEREAKRRADLLRKKNDAR

SEQ ID NO: 40454 - protein, 223 aa, Zea mays
  Clone ID: LIB143-064-D11_FLI.pep
TKQFGIFNSTLMTAIITEINEKIGAAGVVSQECKTVVSQYGQQILDLLLAETQPAKICSQVGLCTFDGTHGVSAGIRSVVDDEAGKSNGGLKSDPMCNACEMAVVWMQNQLAQNKTQELILNYINQLCERLPSPMGESAVDCGSLASMPDIAFTIGGKKFKLKPEQYILKVGEGQAAQCISGFTAMDIPPPRGPLWILGDVFMGVYHTVFDYGKLRVGFAESA

SEQ ID NO: 40455 - protein, 579 aa, Zea mays
  Clone ID: LIB143-064-E5_FLI.pep
PLQILGYGWAGLLRRYLVDPAEMWWPSNLAQVSLFRALHEKEEEGGKSRGPSRMRFFLIVFFASFAYYALPGYLLPILTFFSWACWAWPHSITAQQVGSGYHGLGVGAFTLDWAGISAYHGSPLVAPWASIANTAVGFVMFIYVIVPLCYWQFNTFDARRFPIFSNQLFTASGQKYDTTKVLTKDFDLNVAAYDSYGKLYLSPLFAISIGSGFLRFTATIVHVLLFHGSDMWKQSKSAMNAVKLDVHAKLMQRYRQVPQWWFLMLLLGSVVVSLLMSFVWKEEMQLPWWGMLFAFALAFVVTLPIGVIQATTNQQPGYDIIAQFMIGYALPGKPIANLLFKIYGRISTVHALSFLADLKLGHYMKIPPRCMYTAQLVGTVVAGVVNLAVAWWMLDNIENICDVEALHPDSPWTCPKYRVTFDASVIWGLIGPGRLFGRHGLYRNLVWLFLVGAVLPVPVWLLSRAFPEKKWIALINVPVISYGFAGMPPATPTNIATWLVTGTIFNYFVFRYRKGWWQKYNYVLSAALDAGTAFMGVLIFFALQNAHHELKWWGTEVDHCPLASCPTAPGIAVKGCPVF

SEQ ID NO: 40456 - protein, 74 aa, Zea mays
  Clone ID: LIB143-064-H12_FLI.pep
LAIIEHACVLDNHKDQQTWPLHCPSISPDLAVVAPGLVAVEPVVDGGGVGLRPVEEVGPMPLVARLLPGWKTLR

SEQ ID NO: 40457 - protein, 128 aa, Zea mays
  Clone ID: LIB143-065-E4_FLI.pep
IYSLAEHNTLSRGAHRTAQCTDDDHETLNSTRTHQTYQSRATTVPHTRVASLKPKTRRRDANATRPFTSRPCLLQPEIWMLLTSGFLTSALGTVTVSTPFSSAALTSSVLAFSGRRKRRTNWPLLRST

SEQ ID NO: 40458 - protein, 252 aa, Zea mays
  Clone ID: LIB143-066-C5_FLI.pep
PFSPLRSRRTPRAAAMEYSGGGATLSEMYQSARRLLLSARDGVGRVERLASAPTSSSYSSAPLVGGASGDPAVAEEVRREVAQIQGLCAQMDRLWRSIPAKGQRDLWKRKVEQLSEEVDSLKETLDRHSLRQKKRILEAKERAELFERANGESSHVLRIFDDEAQAKQSARNSSRMLEEAYETGVGILHKYADQRDRLKSAQRKALDVLNTVGLSNSVLKLIERRHRVDRWIAYAGMVITVVVMIAFWRLTH

SEQ ID NO: 40459 - protein, 403 aa, Zea mays
  Clone ID: LIB143-068-B3_FLI.pep
FPLIHLTVPGLPSLLPRRQLTSNPQPIASEMLGVARRRLGSGCVLAQLAQALRPAAAPARTYSAAAKEITVREALNTALDEEMSADPSVFLMGEEVGEYQGAYKISKGLLDKYGPDRVLDTPITEAGFTGIGVGAAYHGLRPIVEFMTFNFSMQAIDHIINSAAKSNYMSAGQISVPIVFRGPNGAAAGVGAQHSQCYAAWYAHVPGLKVLAPYSAEDARGLLKAAIRDPDPVVFLENELLYGESFPVSAEVLDSSFCLPIGKAKIERQGKDVTITAFSKMVGYALQAADILAKEGISAEVINLRSIRPLDRATINASVRKTNRLVTVEEGFPQHGIGAEICMSVVEDSFEYLDAPVERIAGADVPMPYAANLERMAVPQVDDIVRAAKRACYRAAVPMAATA

SEQ ID NO: 40460 - protein, 185 aa, Arabidopsis thaliana
  Clone ID: LIB146-005-F10_FLI.pep
QHKKVCHVAAEALNSDVWAWRKYGQKPIKGSPYPRGYYRCSTSKGCLARKQVERNRSDPKMFIVTYTAEHNHPAPTHRNSLAGSTRQKPSDQQTSKSPTTTIATYSSSPVTSADEFVLPVEDHLAVGDLDGEEDLLSLSDTVVSDDFFDGLEEFAAGDSFSGNSAPASFDLSWVVNSAATTTGGI

SEQ ID NO: 40461 - protein, 162 aa, Zea mays
  Clone ID: 700579124_FLI.pep
LLVGVHVEPDRVQAISRAAKEASDVAVVHHLDTERGALVPAVRSVSAFVGDEFERLDQIVNVVGWARGPGDLRQALVEPAQINLVLRASMAETPWPLLVRFAIGSDVDEGDGADAAAVVRRDLHLDQPVRSSPQIPTIAGVSTPLSDLRRLPHVCRRVVEET

SEQ ID NO: 40462 - protein, 283 aa, Arabidopsis thaliana
  Clone ID: LIB146-006-A10_FLI.pep
FTVLNYLCDCRRDSYITHRAFCDALIQESARNPTVSFTAMAAGGGGGARHGFYGGASSALSHNHFGNNPNSGFTPLAAAGYNLNRSSSDKFEDFVPQATNPNPGPTNFLMQCSPNQGLLAQNNQSLMNHHGLISLGDNNNNNHNFFNLAYFQDTKNSDQTGVPSLFTNGADNNGPSALLRGLTSSSSSSVVVNDFGDCDHGNLQGLMNSLAATTDQQGRSPSLFDLHFANNLSMGGSDRLTLDFLGVNGGIVSTVNGRGGRSGGPPLDAEMKFSHPNHPYGKA

SEQ ID NO: 40463 - protein, 39 aa, Arabidopsis thaliana
  Clone ID: LIB146-008-D6_FLI.pep
NIKTICSCHLSYLQAEATIKLFSSQQKWSSPISSGAWVD

SEQ ID NO: 40464 - protein, 92 aa, Zea mays
  Clone ID: LIB148-001-C1_FLI.pep
WSVGNILLDLTGGVLNFCQMGVQSIDQHTLVNFYGNIGKTLLSLETVFFDVLFIIQHYVLYPVKKDENGKAIISERVAPLIRPSDKPEEDNV

SEQ ID NO: 40465 - protein, 228 aa, Zea mays
  Clone ID: LIB148-002-F11_FLI.pep
PENYNYLMEFVGSGDEGKRRRRRAGKKEIYARLARPVPFGDGKKEFWLDKNKGMICMALSSKALVITGIDDRRYWQHMPTSESRFQSVAYLQQIWWFEVVGEVDFCFPVGTYSLYFRVHLGKFYRRFGRRQCTSEHVHGWDKKPVRFQLSTSDGQQALSQCYLEEPGSWVLYHAGDFVASKPDQLMKLKFSMAQIDCTHTKGGLCIDSVLIYPKGKGFHQERVVRSQK

SEQ ID NO: 40466 - protein, 261 aa, Zea mays
  Clone ID: LIB148-003-A1_FLI.pep
EAEPRRGMGRDERFPVWEAALGAGVAAAFAAGLVGVYLSMPDSDYSFLKLPRNLQELQILTGHLENYTSDYTLQVLVGYCAVYIFMQTFMIPGTIFMSLLAGALFGQLRGVALVVFAATAGASSCYFLSKMIGKPLVFTLWPDKLSFFQRQVAKRREKLLNYMLFLRVTPTLPNTFINLASPIVDVPYHIFLLGTLIGLIPASYVTVRAGIALGELTSLSDLYDTQSIALLFLIGVVSVTPALLGKDEAQEKPSEMAVGAS

SEQ ID NO: 40467 - protein, 123 aa, Glycine max
  Clone ID: 700566884_FLI.pep
ERSWGQHCLLVKGLSHRVKSVTKFLLLCAKGRSLIHFWNALESGMVLHFQFVSFVFFCFLQVVSFCIRVCVDISIWFVYKGCGKSIHIQQLPVFLDMPIKELVIHIVIEFHLFAVALSANINT

SEQ ID NO: 40468 - protein, 325 aa, Zea mays
  Clone ID: LIB148-003-B12_FLI.pep
IVHPAALLAVVFSGTSKGGTNVRAACLPADMGSSLKYRSGLCLIVAVVLIWVISAEVTQGIFTKYRHPFAVTYLGASLMVIYLPLSFLKDFIYNSLRRHSRNTSASKIASKSSFGGSAPLKNGEFQKMLEMESQKTIVVNCPDVSIPVVEETKPLICGITEMDDGLFKDKQLSTKEIATYGLYLCPLWFVTEYLSNAALARTSVASTTVLSSTSGLFTLFIGVLLGQDSINAAKIIAVFISMAGVVMTTVGQTWASDESEAGKSGFTQRTLLGDMFGLMSAIAYGLFTVLLKKFCGEEEKRLMSKNCLVILGFLPLLLYGGLSGH

SEQ ID NO: 40469 - protein, 177 aa, Zea mays
  Clone ID: LIB148-003-C10_FLI.pep
KSRPRCGRPHPFLSSSPAQPDCSSTKRKKGRKGPEASAMSNSASGMAVCDECKLKFQELKAKRSFRFIVFKINENVQQVVVDRLGGPGESYDAFTACFPANECRYAVFDFDFVTDENCQKSKIFFISWAPDTSRVRSKMLYASSKDRFKRELDGIQVELQATDPSEMSMDIVKSRAL

SEQ ID NO: 40470 - protein, 194 aa, Zea mays
  Clone ID: LIB148-003-F7_FLI.pep
GDLLLHRPGVPADGHARRQVRRLLLRRHAAADHHGEAAHGAVAPRRTRPGARRAAGHAGPRRARLAPGGGAVPRRDGAPVLRAAPQGPAGPRRRRAPGAQPAARARRGQHAVLRRHHQGWRRRRRHAQLVAVPQQHLTVTRRDDDRFPVPKISVQLKSGRFAHAAEKVERLTGMKWTFISSIGDGVVVMSCAGA

SEQ ID NO: 40471 - protein, 95 aa, Zea mays
  Clone ID: LIB148-004-C9_FLI.pep
DGTSAELCIVLVKAALGSVEVVPVLKGVLHVRQRLHNVRMLLQRGDLRRRELGGEPASGGLVAVDQRPLGFLLAAERGGEDAHVVRLGVDALGRS

SEQ ID NO: 40472 - protein, 180 aa, Zea mays
  Clone ID: LIB148-006-F6_FLI.pep
STEDQSAKEASPSSQSELRRELGRGRLRRGLGRRRLVKVLEVAPHVEPFDVREVLVGRRRDVRRPGHLREHVPRDAGEERVGPDLVGAAGVPEPPPRVPLQQARDEIRELRRPPPGVPRELELLLQHVPERLLAVLALERRPPERHLVGEHADGPPVDGEAVALAAHHLWRHVLLRADEG

SEQ ID NO: 40473 - protein, 284 aa, Zea mays
  Clone ID: LIB148-009-B5_FLI.pep
EREGGEERRKKMERAAPVRSSHTSTAGLLAWPQPDGAASQAPRRPNQPTEEFRKVVFGGQVTEEADGLNKTKMRTTASAPKSKETTGIGMFKAESAAAAVTTASRDRQASQITFSQDGTIPPRKPTSVAGVARQRELSHTVESSGDGKMKRQVSNAKSKELSGHNIFADHEDPSPNRSSSSAAALAHVKNANVSSFSFGKADMDSTVKTAKKKGSSNKSTDLMNGKAISERDSAPAGKQPLNRAKPKGLSGSSIFADGKASTTGDHAGRRTRQPPGGDSSILLG

SEQ ID NO: 40474 - protein, 139 aa, Zea mays
  Clone ID: LIB148-011-A6_FLI.pep
SDAEGGLVGGVGLKIFRDDIIGDAVAARLDGKADAEGVLEWGLCVKRPGAGRALLELKGEVIATVLLDLHFGDGGNVGGEDQVARLGAFADLEGERGGARTNHKKRSQCRCGEHDGEPRGHCWWRAREVLFVCSCFFDG

SEQ ID NO: 40475 - protein, 164 aa, Zea mays
  Clone ID: LIB148-012-A11_FLI.pep
LMLALVSLFGCIQSQALLYEVVTEPLNHHVALSRGHGLVVDADHQRLSGLLHSYASRSLLPADDSAGLALDDHVLGGAKEEADRGQKPRLVEVLNDVGHLLWLELWECGALGPNGAVVADYGGRAQVVALDLAHEVLIDVRLPRHPVQWLLLLNYDLQCNARGG

SEQ ID NO: 40476 - protein, 155 aa, Zea mays
  Clone ID: LIB148-012-C3_FLI.pep
WAAGRATGPSPTTATDSDVWTCRPTTSSSSRGRAGRGGPLAADHVLVVADRRGRVGLPAALQALLLVDLPQPLDLLPQCLLMSGEGRSREEQGRPAMAVTIFEDLVLRERRDPLPQVAVPQRQQRALVVEERHARGQRRHLRLERRDAALQLRDV

SEQ ID NO: 40477 - protein, 305 aa, Zea mays
  Clone ID: LIB148-012-C5_FLI.pep
DFCKQLELARTFQFPTLRQPPASFLATMEEYIREAPRPSIKSEESEEPKLLTYEQEAPEEPENAVEEEKEEPSQKPEPQPVPDPEPHPQQTTGDLLNLEAEVNPSALELEQSNALALAIVAPGDYKPPASQSMFDVNSSGWELALVNAPSTHTSQAVETNLAGGFDKLLLDSLYEDEARRQQIAGATYTGSLGAANPFCTNASDPFTMSSRFAPPANVQLALMAQNQQQYYQAQQYYQAQLYFQPQQQQYFQQHQQTLAMPMPNMYHHQYQYSVPTSGASNPFGDPFSDLAPMGAPAKQSNSVFL

SEQ ID NO: 40478 - protein, 483 aa, Zea mays
  Clone ID: LIB148-012-E4_FLI.pep
ARHRKRRREELSKEKECTTYMPDQTNFNEVEAEECDAYEENQEEPVAMMEGSPPDVGQDGDDEQGIDPSWAAVVTPVLRVKTIYISSAILAAKSPFFFKLFSNGMKESDQRHATLRITDSEEIALMELLSFMYSGKLTTTEPTLLLDILMAADKFEVVSCMRYCSQLLTSLQMTTESALLYLDLPCSVSMAAAVQPLTDAAKDFLAVKYKDLIKFQDEVMNIPRAGIEAILSSNDLQVASEDTIYDFLLRWARAQYPKSEERREVLSSRLLPLVRFSHMTCRKLRKVLACTDIDHEQATKCVTEALLFKADAPHRQRALAADAITCRKFAERAYKYRPLKVVEFDRPYPQCIAYLDLKRDECSRLFPAGRIYSQAFHLAGQGFFLSAHCNMEQQSAFYCFGLFLGMQEKGSTSVTVDYEFAARTRPSGEFVSKYKGNYTFTGGKAVGYRNLFAIPWQKFLADDSLFFVDGMLHLRAELTIKQP

SEQ ID NO: 40479 - protein, 127 aa, Zea mays
  Clone ID: LIB148-013-B5_FLI.pep
RSSTWRRWRRSCRWTWRTSAAAPSSAPSAPAAREAASPTRATSSGTRATSCRTSSSGSGTSTPASSTCSSDGSPPHLKTELEETNCSMYVLSLHIPMGRTYGFARVTMILCDACMLKSQDVTVFCVF

SEQ ID NO: 40480 - protein, 419 aa, Zea mays
  Clone ID: LIB148-013-D8_FLI.pep
RSRNHVMSGKKRNSGTHTHGHGDRSLRGDELHASDGERGERADGEGVDVGAGLGVGGVAALVHEAVVLVGPADDGAGELVGVGLVGRHPVPEAEAAVDVRAGGQHGGGCAAVVRLRGRVGAEAHDVGAVPRVGAQQVVHLLPRELVQPGRGQRLVPAQHRLPRPQQQVRVHHQQERRAGHVLRVGAVAEVDHAARGDEHLVERRVRQHRAHEVVRLRLEVLRAARRGHVELGQQHLRAGELEVPAELGHARRDGLVGDEVRVHLPPRRQVQPGRGPQQLVVVARVGAVEGALAVVAAQVALGEREQQLRLVQQLARVLLVVAEHHGRGGERGRRLGGDLRPGRLRVDLVQRARRLHVLRPHPALVVQVGIADLHPQLVLPGGAFQQVVGAPLDGLVHVLQLLGRLQLGLERQRRPRQRR

SEQ ID NO: 40481 - protein, 153 aa, Zea mays
  Clone ID: LIB148-013-H8_FLI.pep
RSVGPALDDVEAHLAGVGGLDLALDAVQLPPEPVLGAGVQHLAPGACSIRGPGEEEDLALLAVLDGGEVEVVDGVAALVGGEAVGEVAVALVRLAEAVHLDLHVLVVDPEHDEPEAPPRLQIPELHLALVAHRQAGRRVRHGCTCVPSALAQA

SEQ ID NO: 40482 - protein, 365 aa, Zea mays
  Clone ID: LIB148-016-C7_FLI.pep
INRVEYMHSKGFIHRDIKPDNFLMGLGRKANQVYIIDYGLAKKYKDLHTHKHIPYRENKNLTGTARYASVNTHLGIEQSRRDDLESAGYLLLYFLRGSLPWQGLKAGTKKQKYDKISEKKMLTSAEVLCKSYPSEFVSYFNYCRSLRFEDRPDYSFLKKLFRDVFIREGYQFDYVFDWTVLKHPQIGSNNKLVQQPSARMAGVGPSVERTDKASVGQEARDRFTGAVEAFARRNPGSGRHGDHSRHQSLADSFGTSNEAVADSEKTHILSWGGSSSKMPAASSSRPTSSGDCSDQNHRWVSGSSGGSGRPSTVQRHHHSAGAENSRSSTRSPVARNAAERGGSGSRDSTTFRSLERLSITTSRRK

SEQ ID NO: 40483 - protein, 155 aa, Zea mays
  Clone ID: LIB148-016-F7_FLI.pep
KAGSGSIRFPSWGMAAEGKRKGVPALGWWLMLVGSLRLASVWFGFFDIWALRVAVFSQTEMTDVHGRTFGVWTLLTCTLCFLCALNLENRPLYLATFLSFIYALGHFLTEYLIYHTMPAANLSTVGFFAGTSIIWMLLQWNSHGNPRGSYAGKQS

SEQ ID NO: 40484 - protein, 345 aa, Zea mays
  Clone ID: LIB148-016-H9_FLI.pep
GQQERGMARLMSLVDEGFAVRRQTQEALYCMQMMTRIQTQLYTRRLKTEKDKKVLKSQTKAVNKHSLDKAKIGEGWDHSLQSKEQMETVQKMKQEAATRRQRALSYAFSQQWRNRNTSSARAAHGPAPMYMEPGNPNWGWCWAERWMAATRPWENQTMPPPDTGRAASKSASTRLPRVAVSVQIPTATTTPKGKPFRPPNWSSSSSLSSPSTPPPRRTATLASPRSGPLHATSGLQHSKSLQPDHRRPRSSQELSANSPRRAAVPASPRCASGSSSPLHPSSGAGAQHATTTATIRLERRPRSSQDRGMSSPRLLGAKDAPLRRTASLRSELPIRLSLGSAVAAA

SEQ ID NO: 40485 - protein, 288 aa, Zea mays
  Clone ID: LIB148-017-C8_FLI.pep
GLSLPYTRRRPADLIGAGAMAGQNQRLNVVPTVTMLGVMKARLVGATRGHALLKKKSDALTVQFRAILKKIVAAKESMGETMRASSFSLAEAKYVAGDGVRHVILQSVRAASVRVRSHQENVAGVKLPKFTHFVDPAAASGGPSNASPSLTGLARGGQQVAACRSAHVKAIEVLVELASLQTSFLTLDEAIKTTNRRVNALENVVKPRIENTISYIKGELDELEREDFFRLKKIQGYKKREIERQMAAARLFAEEQLAEDLALKRGISVGAAANLLVAGGEKDDDIIF

SEQ ID NO: 40486 - protein, 225 aa, Zea mays
  Clone ID: LIB148-017-F2_FLI.pep
VFTANDSPPDQKIPFHHEMAQVPTFPSKLFFFCEVEPKSGGETPVVPSHYVYKRMKEKFPGFVEKLEKDMIVYTRVLGEGDNPSSSIGRGWQSTFLTKDKVVAEERAAKLGIKLEWTDDSVKTVMGPIPAVKWDESRGRKIWFNSIVAAYIGWKDARNNPMKAVTFGDGSPLPADVIDACGQVLEEESVAVPWQHGDILLIDNWAVLHSRRSFEPPRRILASICK

SEQ ID NO: 40487 - protein, 149 aa, Zea mays
  Clone ID: LIB148-018-A8_FLI.pep
FYQRFSCWLLRAPSLSLPDVDRVLQHGLASSLPPSHGDAGQQGARASAAQVWGVGREESGHVRGLHRHIPEGPRRQEDHHRPWGWERARRHSAGLQERRRRRRVQARLRRRQPVHAAQTEEVGLLWLLNRSSLCCCADSKGERIVQQLK

SEQ ID NO: 40488 - protein, 231 aa, Zea mays
  Clone ID: LIB148-018-C8_FLI.pep
EDCHFPNSIEKAIRSAFVKADNAIADSHSLDRNSGTTALTVLIFGRTLLVANAGDCRAVLGKRGRAVELSRDHKPSCIVERLRIENLGGTVFDGYLNGQLAVARAIGDWHMKGSKGSVCPLTPEPEFREVRLTEEDEFLIIGCDGLWDVMSSQFAVSMVRKELMEHNDPQRCSRELVHEALRRDCCDNLTVVVVCFSADPPPQIEIPRFRVRRSISMEGLHRLRGALDSNI

SEQ ID NO: 40489 - protein, 230 aa, Zea mays
  Clone ID: LIB148-018-D9_FLI.pep
KQQVFIQSDDSSVLAAFKKFARFRRVLNIEAKISGASKPSVDDIKKYADTVRVNRNSVAQINGYFLTHFTDTVSNLQDANITVFVGVLKNEFMNLGFDYFADPTVEIATYTLAVLADGLVTDNPATAASYFRSPCSDMKLNLSYTILPAQPGALVNLASPGALAPAGAPAPLLQPADVVDPPLPPVKAVIAADAPAPGAADNTSSAFSSSAGNGLLWAGIAALLSLTFLH

SEQ ID NO: 40490 - protein, 140 aa, Zea mays
  Clone ID: LIB148-018-G3_FLI.pep
WINCSNKQHRMQLRCADIYIFLPCIGVYRRRLLIRVRGHLVHGLHVVAALGEPEPAHAVLRVAPPLVVVVQHPGRPLLLGHPHLRVGGDVAHQLHHADPHRHPCRREQRVHLRPNPARRHVFFPRFCKRTDRDLWTCLAW

SEQ ID NO: 40491 - protein, 509 aa, Zea mays
  Clone ID: LIB148-020-E3_FLI.pep
REESSEREGTGRRMLAAATAAYGYFNPALLPTPHSPPASSRLPDLARSAPVASQFGSSHTSAKMREILHIQGGQCGNQIGAKFWEVVCDEHGIDPTGRYTGNSDLQLERVNVYYNEASCGRFVPRAVLMDLEPGTMDSVRTGPYGQIFRPDNFVFGQSGAGNNWAKGHYTEGAELIDSVLDVVRKEAENCDCLQGFQVCHSLGGGTGSGMGTLLISKIREEYPDRMMLTFSVFPSPKVSDTVVEPYNATLSVHQLVENADECMVLDNEALYDICFRTLKLTTPSFGDLNHLISATMSGVTCCLRFPGQLNSDLRKLAVNLIPFPRLHFFMVGFAPLTSRGSQQYRALTVPELTQQMWDAKNMMCAADPRHGRYLTASAMFRGKMSTKEVDEQMINVQNKNSSYFVEWIPNNVKSSVCDIPPRGLSMASTFIGNSTSIQEMFRRVSEQFTAMFRRKAFLHWYTGEGMDEMEFTEAESNMNDLVSEYQQYQDATADEEEYEDEEEVQADDM

SEQ ID NO: 40492 - protein, 284 aa, Zea mays
  Clone ID: LIB148-022-C2_FLI.pep
ARRAVGERGHARGPRHGRHADPPHRRPAAAERRRQGLLRLGLRAAAGADPGPVLAAEGAGPAVPGAGVVDHRAHVPLHQRRAARRHGAGGRRQHERGVQLQRRGLPHRGARGAVLPAVPQRGGRRQPPGAGRGVVARGGDAVRLPAHVPVLCARRARGRGRREDHHVRAAVHHARLLHEPAAADPACHRVRRGGPELQGDRGRAEKAGAGAARVLPVVRGGEGRAEHGCVGEGPVRSISSHPPCGSLRDRVHKWRASLTLSLSLCVCLFAFFGFVFLLGMDGCK

SEQ ID NO: 40493 - protein, 124 aa, Zea mays
  Clone ID: LIB148-022-E2_FLI.pep
VEKNSERHLCTRPTLWRVAPAVPAHALRGAQVLRLPSNPSSDHWHWGKQKHGQVLGVLQRLPICPARWKTAGEHLLWGTPRVMGALPKFRDGVIAHRRSCSTVAPPISVGSGLHRPIDREITRI

SEQ ID NO: 40494 - protein, 194 aa, Zea mays
  Clone ID: LIB148-022-F3_FLI.pep
PRRRSAAAMARRPDDLALAAITFAIVALCARYASAVGTTPQSTFSYKEGDPTGPTKWATLQKDWDVCDSGTEQSPIDVAKVEVSEDLDPLQQTYEPGDAVMHNRLHDFMLNWTGGNGGLTIEGKKYKLKQVHWHVPSEHTVNGTRFDAEMHMVHEDSTDAKSKAVVAVLFSAKAGKSSKLLRDVPQALLREARW

SEQ ID NO: 40495 - protein, 151 aa, Zea mays
  Clone ID: LIB148-023-B8_FLI.pep
LKWWEKNAGPNMIDIHSTVEFLDALRDAGDNLVIVEFYGTWCASCRALFPRLCRTALENPDILFLKVNFDENKPMCKRLNVKVLPFFHFYRGADGLLEAFSCSLAKFQKLKDAIAMHNTARCSIGPPVGVGDVDLLDNASPQEKPAEASPR

SEQ ID NO: 40496 - protein, 265 aa, Zea mays
  Clone ID: LIB148-023-E1_FLI.pep
APLGQSKSPKIPAFPSHGGRRPHASSSSSRRDAAGSGGRGPDRDRGGRVGAAGHRAVRGPRARPVGGRHRDVRGHDAGPLRGAARGGAPVRGVRGHGAAPPGGHTAGGPVAARAAAAGRGAPPGRRPRRRGQRVRGRLRHAPRRRHGGLPLRHRRAQGVRAHLEEGGVRRRRGLEGEPRVPGPPLRRRRCDGGRVLREQGQGPGGLTLMDGGARIPLSLHRGRDSRPIGAGGFMKFYVLLTRSPLILFSIYFFFLRETAACTCTP

SEQ ID NO: 40497 - protein, 159 aa, Zea mays
  Clone ID: LIB148-023-E5_FLI.pep
PRGRGRDPHAHRRHGRRRQRHRGVRRALLLPGAAAPGALPPRRGRRPRAARRGLPRLRPRRQRLHLRRRARALHGAHGPPHLLRRAHRHDERGRHRRRRRHQLPGVHSHHGQVRRRLPRPRCSVTSSLSLPTHRRRSPPLFVRSFPFLLHLAIASARSK

SEQ ID NO: 40498 - protein, 381 aa, Zea mays
  Clone ID: LIB148-024-C9_FLI.pep
FITTPVVMTIYKPARRGAPYKNRTVQRANPHDEFRMMACFHSTRNIPTIINLMESSRGTRKRGITVYAMHLVELSERSSAICMVHKARRNGMPFWNRRRNGDGGGDQLVVAFETYQQLSRVSIRAMTAISDLETIHEDVVTSAHQKRAALIVLPFHKLHQIDGHMESLGDQYQHINQRVLHHAPCSVGILVDRGLGGVAQVAASDVSYTIVVIFFGGRDDREALAYGMRMVEHPGIGLHVLRFLLQSGGAASDDDASFLEEFRTKVANGNDSVRYEDRTVGGKEEVVEAIKATGRCNLFLVGQGTPCMPLVDWSTDSPELGPVGTYLALPEFSTVASVLVMKQYDPMAKHDDFVEEVADIAVDVDTPGPSNRGTNTSFHAG

SEQ ID NO: 40499 - protein, 259 aa, Zea mays
  Clone ID: LIB148-025-F11_FLI.pep
LSVHQLVENADECMVLDNEALYDICFRTLKLATPTFGDLNHLISATMSGVTCCLRFPGQLNSDLRKLAVNLIPFPRLHFFMVGFAPLTSRGSQQYRALTVPELTQQMWDAKNMMCAADPRHGRYLTASAMFRGKMSTKEVDEQMLNVQNKNSSYFVEWIPNNVKSSVCDIPPTGLAMASTFVGNSTSIQEMFRRVSEQFTAMFRRKAFLHWYTGEGMDEMEFTEAESNMNDLVAEYQQYQDATAEEEEEYEEEGDEVAA

SEQ ID NO: 40500 - protein, 180 aa, Zea mays
  Clone ID: LIB148-025-G3_FLI.pep
AAMFLGDSDGEGLSLVLYFRVSECYDKEVSEHFKESMMRFFEDETEKVKGFTSESTVSYRDRLKIMAGLVNPDDLQLGSTERKLVQAYNEKPVLSRPQHSFYEGEDYLEVDLDIHRFSYIARKGLDSFRARLKNGILDLGLTIQAQKQSELPEQVLCCVRLNKIDFTDQEVPTIVTVDDT

SEQ ID NO: 40501 - protein, 98 aa, Zea mays
  Clone ID: LIB148-028-F2_FLI.pep
SSRYCPALGTRWGRRLTPSSTLSANQCLGRGWPRWATLVVHRCTANLGGSSWGSIWVSWLANFSPEHLGDGPCASNFSPSTCSPPRDYSVPWAGLLGA

SEQ ID NO: 40502 - protein, 222 aa, Zea mays
  Clone ID: LIB148-030-A12_FLI.pep
RPHLALGAPGAGPAAQLRARLPRRHAAARRAPRHVPRLRRGRGGRRPDAGVRGPRGPRGGGARVLPRQLQQLLHGRLLVAPGAQRHLPRAPPMLLQHGRHGHGRRQVARRRVHAPGGGVDGRAEAAADLPPRLAAAVPARLRRPHPGGGPPVEPARARRRQRRGPLPGSPSGPYQPPSLERQGQAVAPPRRPPAVLCGLPMGALRPLPLLVAGDRRVVTGEP

SEQ ID NO: 40503 - protein, 409 aa, Zea mays
  Clone ID: LIB148-030-D5_FLI.pep
ESLNDPNTTMGDLVPLVRDVSDGLCVNGNVLKAQNVSGKIIICEAGGDVSTAKAKMLKGIGVVGMIVVTPELFGPVIIPRPHAIPTVQVSNAAGQKIKAYIHKARGPTATFVFKGAAFNTPRSPMVAPFSSRGPNRRSRGILKPDIIGPGVNIIAGVPSIEDVDLLRNAEVPRFDIKSGTSMAAPHLSGIAALIKHAHPTWSPAVIKSALMTTAEPNDNLRKPIQDVNGRPANLVAIGAGHVNPKKAMDPGLVYNMTAMGYVPYLCGLNYTDDKVSTIIYPEPPVSCAKLSRLEQDDLNYPSITVILNQPPFTAKANRSVTNVGAASSTYTVEVNVPASVTVEVNPPKLTFKALEEVLNYSVTIKSANGQALTGPVEGELKWLSGKYVVRSPILVTNESGPSPAETRKP

SEQ ID NO: 40504 - protein, 349 aa, Zea mays
  Clone ID: LIB148-032-B6_FLI.pep
CCFDLCSLWRIWSRTEWPEKMMGGFLSRVLLLAFGYAYPAYECYKTVELNKPQIEQLIFWCQYWILVALLTVLERFGDFTISWLPFYSEAKVLFFVYLWYPKTKGTTYVYGTFFKPYISQHENEIDRNLLELRARATDMVVLYFHKAASVGQNTFFDVLKYVAAQSPSRKSRLHPHQEPQQQQPQVQVELQQPQPQKQAAPVMRRGASIAARQAAMAQQSLETIPVPSSPKIKRQTSGRPGSVASTKPAAAASTPKPGGSPKKGEVKPAVDPVQTPATSADSPKSEPSAPPLSETEEVDNMAIDEVSGDAAEGAEELDPALEETLMEETIRVTRAKLRRRTATEDSAGN

SEQ ID NO: 40505 - protein, 73 aa, Zea mays
  Clone ID: LIB148-032-E9_FLI.pep
GAISVQLSASEFMPCTMNRDSQEIRPFQVQREGLYGTGGVFLRVIENTIYLKTNNIVRGRKISLRIGEERILG

SEQ ID NO: 40506 - protein, 114 aa, Zea mays
  Clone ID: LIB148-033-B9_FLI.pep
PHDLHWRCRRNPVAGHRGQMWAHTRITQGRWIPTTTTGSHQRTARHMAAVPVHQRRRGAGPWRWSFSVLPPFFRSARWRCGRLPRSLCLPRMDTTASGPGDGPLRSLHSNGCCK

SEQ ID NO: 40507 - protein, 264 aa, Zea mays
  Clone ID: LIB148-033-C11_FLI.pep
TIASIMSGRSWTIMAPLLASMLLVGLAVGSEEEEDGGGKKKPHVNHGKFKAEPWTDGHATYYGGRDGLTDTTDGGACGYKGELGKDYGTLTAAVGPSLYTNGTGCGACYELKGPKGTVVVTATNEAPPPVSGQKGEHFDLTIPAFLKIAEEKAGIVPITYRKVACERKGGIRYTITGNQHYSEVKVTNVGGAGDVVALWVKGNKRVKWTPMKRSWGQLWTTEVDLTGESLTFRVMTADHRKATSWHVTPRDWQFGKTYQATKNF

SEQ ID NO: 40508 - protein, 623 aa, Zea mays
  Clone ID: LIB148-033-D8_FLI.pep
RFSPTMGPLLRAAALSVALLALAAVGEAHSATEFLNIFKPRNEHDYFHNANQEEDVMPRASDQQNLITAPVTKSGLMKVPPRSAPTAVAQDTVVLPVDSAAGFPGAWSIISENAGVSAMHLVIMRSDKAIMFDTVTTGPSLLRLPKGNCRLDLRSKQVGAKDCAAHAVEFDYATGGVRALKVLTDVWCSSGALDAEGNLVQTGGYFEGEKVVRYLSPCGNCDWREFPGSLAEGRWYGTQQLLPDGRSIVLGGRRAFSYEFVPAEGQSNAQAIPLQILRDTTDDVENNLYPFVHLLPDGTLFIFANDRSILFDPRNGQVVREFPVLPGGGRNYPASGMSALLPLDLRRGDVLSPEVIVCGGSPKNAFTLGESNTFPPALKDCARINPLKPDARWALDQMPVARTMGDLLILPTGDLLILNGAAKGCSGWGFGRQPVLSPLLYSPRQARGSRFRALAPTTIPRMYHATSAVLPDATVLVAGSNTNSAYNFSGVDFQTEVRVERFTPPYLAPERAANRPAIDVATVPGDGMAYGAKFTFQFSTPVQAVAEPDLKVTMYAPPFTTHGYSMNQRLLVLSVTAFAANGQRYTITVDAPGKPELAPPGYYLLYVIAKGVPSKAAWVKVHK

SEQ ID NO: 40509 - protein, 94 aa, Zea mays
  Clone ID: LIB148-033-G9_FLI.pep
QKFVCLMIENQVGKLPHLTTIFFLKKNQIWLLQNLRMSCCFPRTRERTAAPLLLLQNPENQVVRQLELGLVVRTGTGTDGDYGKHDGMVKPRHM

SEQ ID NO: 40510 - protein, 114 aa, Zea mays
  Clone ID: LIB148-034-B7_FLI.pep
HAQPEGPFFQPSLQLQYTTAPPYPCPHTSLRTNRETGSFFFFCPSTSVHLIHFLPHVFRNDPVDKLGGEPFEFGCCEVEQRWHWPSVRQASLGVPQLIEERMGTGVDSSAAQVR

SEQ ID NO: 40511 - protein, 123 aa, Zea mays
  Clone ID: LIB148-034-F1_FLI.pep
SPNQLLVRILSLHITLFIATSAGRFAAAHSPPGRWGLPVVAGRSTFPVPVRASDPQRFPESLRARVSPSQGSKVDSAPSSPELVHAPLSLRARSFAGDHHAVLEPVFSGNGASRPASGTTPSR

SEQ ID NO: 40512 - protein, 389 aa, Zea mays
  Clone ID: LIB148-035-B4_FLI.pep
AAAGVMRTIMEVVLHCHKHGVMHRDLKPENFLYANTSETSPLKVIDFGLSVCFKPGDRFSEIVGSPYYMAPEVLKRNYGKEIDIWSAGVILYILLCGVPPFWAETDEGIAQAIIRSNIDFQREPWPKVSENAKDLVRKMLDPSPYSRLTAQQVLEHPWIQNASAAPNIPLGEAVRSRLKQFTVMNKFKKKALLVVAEYLPAEELEAIRELFHMLDTNKDGHLTIEELRKGLRLIGHNVHDTDVDMLMEAADMDGNGTLDCKEFVTVSIHLKKIRSEDHLPKVFSYFDKNGSGYIEIEELKEALSPRGDQKAIDDIILDVDKDKDGKISYEEFELMMKAGMDWRNTSRQYSRAVYNTLSRKMFKDVSLKLDANNGPLAAAAVVVKEQAVD

SEQ ID NO: 40513 - protein, 159 aa, Zea mays
  Clone ID: LIB148-035-D6_FLI.pep
RSVGPAPDDVEAHLAGVGGLDLALDAVQLPPEPVLGAGVQHLAPGACSVRGPGEEEDLALLAVLDGGEVEVVDRVAALVGGEAVGEVAVALVRSAEAVHLDLHVRVVDPEHDEPEAPPRLQLPELHLALVVHRKAGRRVRHGCFCLCLPSELVRASNAR

SEQ ID NO: 40514 - protein, 226 aa, Zea mays
  Clone ID: LIB148-036-D12_FLI.pep
LIPSFLVLVVVIVVVIIPLLETGCPPFFAYWYFHVPKRSVDIDVSLDGVTSALPPDHIPHSRAEILRPEADRQVHGGHFPSLDIRSLPELSGRDAHAAEPHLVVHGVEPQVEGVPVVQAQVKRRGGLLEGELLELDPVDADVGPVRHRDLAVLLQRERDPPDHGNVHVEDHPDLVGDDAPGLDLPVRAPDVVVDQQEGDGDGLRAVRVDGPGVGDRAGDELPSLAL

SEQ ID NO: 40515 - protein, 427 aa, Zea mays
  Clone ID: LIB148-036-D5_FLI.pep
ETVLDRIDPAVARPRGRRRRRREAPEGPAMTSSVRQWWRRAAAALKDRRSLLLARLRPRRAGSSSWHHRELEAAVIRATSHEDRWMDYRSAARVFAWARSSPTFIRPVMWALARRARRTRCWVVALKSLMIAHGILLRSGRAPRAGRVPFELADFRDRSSSAAARSLAFSAFVRAYFRFLDYRSLFAAQEDTDGDDDAERCSDPQTACLDRIAKKQFMLELLLQIRPYGDGMEVPLVLEAMDCVLIEIFQVYGEICTGIARFLISGVQGGPAMLTTRKEVMAAGVKVLWRAAEQSAQLSSYFDLCRELGVANARKLPTSLVRLKDDDVRDLERILMSESDIQNESGEEAEAEAEAEAEAAADVKDAGSTSTNTAVVMATTEWVTFDEERPSAGVVAYHGGGHVSNHWNPFVAAPLDGREGGNLIELF

SEQ ID NO: 40516 - protein, 236 aa, Zea mays
  Clone ID: LIB148-038-F8_FLI.pep
FDIKSGTSMAAPHLSGIAALIKHAHPTWSPAVIKSALMTTAEPNDNLRKPIQDVNGRPANLVAIGAGHVNPKKAMDPGLVYNMTAMGYVPYLCGLNYTDDKVSTIIYPEPPVSCAKLSRLEQDDLNYPSITVILNQPPFTAKANRSVTNVGAASSTYTVEVNVPASVTVEVNPPKLTFKALEEVLNYSVTIKSANGQALTGPVEGELKWLSGKYVVRSPILVTNESGPSPAETRKP

SEQ ID NO: 40517 - protein, 75 aa, Zea mays
  Clone ID: LIB148-038-H7_FLI.pep
LLQRQPGAHEGRRKGLLIHYIFVHTIQSMMNLLIYTHMYHSAPTYDFDQLACLAWLNAVLRLPISTKLLLGFCFI

SEQ ID NO: 40518 - protein, 117 aa, Zea mays
  Clone ID: LIB148-039-A5_FLI.pep
PPLVWNATLARFSQQYAETLKGNCQQIHSSSPYGENLMEGTPGLTWKITVDGWSEEKKNYHYNSDTCDPGKMCGHYKAVVWKTTTSVGCGRIKCNSGDTIIMCSYWPPGNYDGVKPY

SEQ ID NO: 40519 - protein, 95 aa, Zea mays
  Clone ID: LIB148-043-D3_FLI.pep
TTLTDPDPINCWFKLLQSDIHKEVENAIASFPSPAGCSRRDAEPLQLQLNLPALHVPEPEDHVLRELAVPPAHVALVGEAVRGARPHRQDDGAVP

SEQ ID NO: 40520 - protein, 299 aa, Zea mays
  Clone ID: LIB148-043-H8_FLI.pep
SSPPHPYLPPSSRRPWRRRRTMRGLHRCPHQLLLVSPPPRSAPACRQSATASSRGLRSSLAVFSAPGARVAAAAREQKWGHVEGDEDGGEEGLGEALHRTRELVECAMFAAVAGLAYFLSNSLAIENYFSCFFPLPIVISSLRWGLEASRKTVVATVLLLFTLSGPVKASTYLLMHGVVGLIMGTVWRLETNWIVSIILCSIVRALGACGYVLVSSFLIRENILALITVNIHASLTYILTAAGVNTIPSMGTIYLLFGTLLLLNCGFFVFLLHVMYTVFLAKLGIKPSLRSPRWLDRVM

SEQ ID NO: 40521 - protein, 160 aa, Zea mays
  Clone ID: LIB148-044-C5_FLI.pep
DFGAAWSTTLKFKVNESYSCRYMLGSNKADIHSNKLFNCTAEEPSTGELFKRILILFSEMYVSEDFSSGRMLVYVAAGVVLGMLSSMFITALFRGMYGLLLAAARWAVRKHCIRVFASRLKRACLLVAYVSAVGWITLQYSKFIGLKELLSDSEVMERFF

SEQ ID NO: 40522 - protein, 212 aa, Zea mays
  Clone ID: LIB148-045-B6_FLI.pep
LSYLYDELCMLTVPHGHLKSSNILLDGHYEPLLTDYALVPVMNQSHAAQLMVAFKSPERKQFGRSSKKSDVWCLGLLILEMLTGKPPTYDLPKAAGAVPSAESLSSPQKPGPAAGNGTDLVTVVGSTPEGEWLDTVVDPDLRGEEEEDKEEMVKLIRVGMACCESNVDSRWELKTAIDKIEELKAKERPAPDEEQAFYSTVNNEDFNDVAIN

SEQ ID NO: 40523 - protein, 178 aa, Zea mays
  Clone ID: LIB148-047-A9_FLI.pep
PRCLPSLVVELALQTHALLRELGNPAGARIVLETERRAALEAAPSAAAARDGGGGASRANNKRGVRAPPPPLLDEPSWTMFCNGKKTGYAVRRQATDDDLAVMETLRAVSMGAGVLPGRAAPSSAPDAAAAAAADDEVPYMRGCFDHFVGSRDSESLYMIAPQGGGTGPELAVFFVRL

SEQ ID NO: 40524 - protein, 157 aa, Zea mays
  Clone ID: LIB148-047-C3_FLI.pep
PPTANPVRRRGPGQGGARVGRRPRGGGGTRQARRMEGSEAVPGLLRHHRAQESGGHPTWRHGGGHVQPGRVGGGVQRGRRRGCPRHWHRRHGVPAKICLASVVARRRGAHIRQCKSKGFLSCLRITTEVLVCVDYVPNRCMCVFFSTRTCTRAQVFH

SEQ ID NO: 40525 - protein, 351 aa, Zea mays
  Clone ID: LIB148-047-C8_FLI.pep
IAVVSSSASLSVRSAPPLKNPSGHCRTELPFLKCPRPGRLDAQLRARMASGVLHRSASLCLRPAAGSSADSGRGHGAVMIGDSRTRVAALRLGGSSRRELLSVTMASRDHTGLTRQLLDFQHDTIDEVGAGHDPFMDLKARFMDFKQRNYVEKFSNYQTLAEQQTPKFMVVACADSRVCPTAVLGFQPGEAFTVRNVANLVPPYEHGGTETSAALEFAVNTLQVENVLVIGHSRCGGIQALMSMKDDSTSGSFIKNWVSIGKSARLSTKAAAGNMSFDIQCKHCEKESINSSLLNLLTYPWIEKRVNEGTLNLHGGYYNFVDCTFEKWTLLYREGLEGGSKYAIKNRSTWC

SEQ ID NO: 40526 - protein, 219 aa, Zea mays
  Clone ID: LIB148-048-F3_FLI.pep
GESACVQPQAGVGTMSSFTGTQDKCAECDKTVHFIDLLTADGVTYHKTCFKCSHCKGILSMCSYSSMDGVLYCKTHFEQLFKETGSFSKNFTPGGKSSDKGELTRAPSKLSSAFSGTQDKCAACQKTVYPLEKLTLEGESYHKSCFKCSHGGCILTTSSYAALNGVLYCKIHFAQLFMEKGSYSHMMKKSPSQDTLPDMAADEQPPEPAPPQDGEGEDN

SEQ ID NO: 40527 - protein, 195 aa, Zea mays
  Clone ID: LIB148-049-D12_FLI.pep
AGAPDPGDADEAVPGPRDALLRREGRRRPRGRPGPRHPRRGVGPQERRRDPRLRHDPHGPRHPGVQGRGRRADQAPGRGPQSGLPPVRALLQLDGTATGSAGDPKAGGAVHRVRAAGATGEELRDRRETGREVHRLAGGRVARRVGHRQHHAARAPLGIRPQEHGGQVHAVDLHPVIVKLTSMVLFRAFEGKCFF

SEQ ID NO: 40528 - protein, 127 aa, Glycine max
  Clone ID: 700658206_FLI.pep
TVSHYNNHYDDSGFFWFRFLCGLLVFLLGMGINVWADRVLLRLKSEGKGYVVPRGGLFELVACPNYFGEIVEWLGWAVMTWSWAGLGFFVYTFANLGPRARANRRWYLEKFGEDYPKERKAVIPYLY

SEQ ID NO: 40529 - protein, 131 aa, Zea mays
  Clone ID: LIB148-052-E7_FLI.pep
ASRILQLALVLGLLLSILLGVGLRIGSRLFTSDQGVLHHIYIGIPFVCLTQPINALAFVFDGINYGASDFGYAAYSMVLVAVVSIICILTLESYGGFIGIWIALVIYMSLRMFAGFWRIGTAQGPWAYLRG

SEQ ID NO: 40530 - protein, 178 aa, Zea mays
  Clone ID: LIB148-057-H8_FLI.pep
AAATAVLQRAEPKVGDLEVAARVKEEVLRLEVAVVHAAAVAELDGRHQLLEVAARHGLREPRALGEAREELPAAGVFHDEVDLGPRGHHLVEADDVRVAHAPHHVDLGLHLLRHAGAVHSILVQHLDGHSLAGGHLMGLVHLSEVAAAEELAQPVPAHDQLGVLVLLHGHGKQRMFSL

SEQ ID NO: 40531 - protein, 190 aa, Zea mays
  Clone ID: LIB148-058-A9_FLI.pep
SVESGKFWFPAQVYNREHGHVGFMMSCYDAALSYDFHTDTFRARYPPHGRRTVVLEDGVQWDRVRAPPVDTLAHDLHTSDCLHELRPGDHIEIQWRRNKEFPYGWWYGVVGHLESCDGSEHFCRCHLSDTVVLEFNQYTPGSRWRQALVKRKEHREEGNEGDGFYGGIRKLRGNDDISKWRQLWPTDVLE

SEQ ID NO: 40532 - protein, 261 aa, Zea mays
  Clone ID: LIB148-058-F3_FLI.pep
QHKNDCESRSGRSLEASGSLLGKAAFHSPSRVCSGLTRSIHDLLAEPSILPLLDISLFGPLSPLSLLGHSACILQQHLHLQSLLVSFLHQIYLSLRLTAFCQHLLKPCSFHGDIPVWREPNILLHDQTRELVCEPGLKVLLQLRWVYGNEAHHLSRARTAGVRGHAGAGHAGSTAADAHGAQRHGAVAAQRGRRGAARVAEPGARVERPRLGSPVHGGVAVQAQPGVTAVAEDDGIMHSAGPAAVERQGHPPPRRREPDRT

SEQ ID NO: 40533 - protein, 275 aa, Zea mays
  Clone ID: LIB148-059-F10_FLI.pep
DDTALDASSPGTDTQRRLLSRLASDWLALLLFKSAYLLALLLLSLLSVAASVFSVASVYSAKRDALTFPRVLSVVPRVWRRLAATFLAAFALLFAYHAVAVLVFVGLLVAADNGSGLAGLLAFLVAVAYLLGLVYLGVVWHLASVVSVLEDHKGFAAMRKSKDLIRGKLVTAGAIFFTLNVVFAAVELGFRAWVVRGSGAASSRLLLGLIMLAALCCVVMLALVTQTVVYLVCKSYHHESLDKANISDHLEVYLGDYVPLKASDVQMEQFQPGNL

SEQ ID NO: 40534 - protein, 213 aa, Zea mays
  Clone ID: LIB148-060-F1_FLI.pep
AMGTVVDAAPAVVAEVTENMLGGKKVTVVFVLGGPGSGKGTQCANIVEHFGFTHLSAGDLLRAEIKSGSENGTMIENMIKEGKIVPSEVTIKLLQEAMIKSENDKFLIDGFPRNEENRAAFENVTKISPAFVLFFDCSEEDMEKRLLGRNQGRVDDNIETIKKRFKTFVDSTLPVIEHYNSKDKVKKIDAAKPIPEVFEDVKAIFAPYSLKAE

SEQ ID NO: 40535 - protein, 246 aa, Zea mays
  Clone ID: LIB148-060-F5_FLI.pep
CCTMRIVFVSNRLTAAGVNIHYHRRPLLQSTRMLHVRRALLELPDPVPAGRPAVGASRAHPPPQREAEVSGVLEPPALRLDDVALGERGGVAQRVVAVGVDHVALPEPAHGLLLLHRHDGHVRRPECLGGCGAPLRRRLLDGPVNAAAEEGQVGEGGDEGPVAVVDAVPAPGGGPGGGVPHGGVHGHGLGGEVPAHGGRLPHLAHRHVVHVEGHGGGRPQDGVAVELRGGVEGEHVPLLPAPAHAS

SEQ ID NO: 40536 - protein, 209 aa, Zea mays
  Clone ID: LIB148-060-H6_FLI.pep
VEGQRRSIAERLMRDGGGAMDVDMQARGGGASHGGELDDDGKEKRTGTVWTASAHIITAVIGSGVLSLAWAMAQLGWVAGPVILLLFAAITYYTSCLLTDCYRFGDPVTGKRNYTYTEAVESYLGGRYVWFCGFCQYANMFGTGIGYTITASASAAAILKSNCFHWHGHDADCTQNTGSYIVGFGVVQVIFSQLSNFHELWWLSVLAAA

SEQ ID NO: 40537 - protein, 350 aa, Zea mays
  Clone ID: LIB148-062-A1_FLI.pep
DSPLCSVCVLVNIHRFEFSPGAVHMHLSMCRRARDELSQIAMPRTVCSVCRVLTYDRRSTSPPLHVGELLEELPGGGGGRVGHGTARGYDSAAAARRRGAVLVVPVAALPRALGRVGVLQLQRVLEVPQHVAHGDAVAAELGEALLGGLGELGERLRVDGAGELGVHDLLDEALALPLHAPLRQADLLPGQLRVDGGPRAQRLQQHHAEGVHVGLVRQLLAPEVLRVQVPEAALHGGAHVQLVHPGPVLGQPEVRHLGHEVVVQQDVGGLHVAVDDPLRRARVQVVQPPGSADADLQPLLPRQRRLPLAAVDVVPEHAVVHVLVHQDHLLVLVAVADQGHQVPVPQLRQH

SEQ ID NO: 40538 - protein, 293 aa, Zea mays
  Clone ID: LIB148-063-E8_FLI.pep
TSLASSFALSGEEGQEEAAPNLSGDRSAGDKMPRGGKPAASSKPNPFDSDSDSESSNKPANKSGASSYQAPADAKKRYKDGFRDSGGLENQSVQELEHYAAYKAEETTDALAGCLRIAEDIRQDASDTLITLHKQGEQISRTHEKAVEIDQDLAKSETLLGSLGGFFSKTWKPKKTRQIKGPAQVSRDDSFKKKASRMEQRDKLGLSPRGKRDPRHYAEATDAMDKVQIEKKKQDDALDDLSGVLGQLKGMAVDMGSELDRQNEALDHLQGDVEELNSRVKGANQRARKLVAK

SEQ ID NO: 40539 - protein, 171 aa, Zea mays
  Clone ID: LIB148-063-F8_FLI.pep
QTRSAVSALWALRGPHGLKCHAPATTRVNTGPARPGPAQEPPSLDSSNKFPFPLLPIPTHPRRRANPSERESPEPRDQPAMALRALYNEIRSMKVRDVPAYLKPRLTWDNVKKSADQAVDRYIEKYIDTSSPDPLYHVCIGGMIFSYFVNLPWERAHLAHLEEMERTGGKH

SEQ ID NO: 40540 - protein, 185 aa, Zea mays
  Clone ID: LIB148-064-A1_FLI.pep
LEIKKDVVLLDDDDDIEPARSADVQISNKWEESNIHYPSSTDPEAVELTYSDMKCLEPEEYLKSPVINFYLQYLKKARPRRDLHMFNTYFYSKLEEALSMPGHHDSEFSKLRRWWRGVDIFKKAYIILPINESMHWSLIIVCMPTKEADSGPIILHLDSLGLHSSQKLFDIVAREDMEASFKKYQ

SEQ ID NO: 40541 - protein, 99 aa, Zea mays
  Clone ID: LIB148-066-C9_FLI.pep
HRPPHYRGRHQVRLRRCHPCQLEGQHRLHRQIINFSADNTLSRPMLAILELVGSQAMHYTCMHWTVISICYHYPITTVMLAPTMMVSSSFSIFFISIYS

SEQ ID NO: 40542 - protein, 194 aa, Zea mays
  Clone ID: LIB148-066-D8_FLI.pep
RIQLETQTQDCLDEMRGPSCQLPHTQKSERTRYDDEVSQAPQTVIPCIMHLNSLKSTRPSLSRSTLQIISRTLAMLLASGRPSFLSTSCSSAAEMKPSPSTSKTLNASRISCSSSSAPAPAPAPSAAAVASSWPPSAPKKASPSARWSLSKSSTYGFSCPALLQLAALAALPLVLLSSLLCVCVCGVKIASFVS

SEQ ID NO: 40543 - protein, 499 aa, Zea mays
  Clone ID: LIB189-001-C5_FLI.pep
SKLSRPDLKQVWAIADTRRQGYLGFSEFVTAMQLVSLAQAGNEITQDSLKRDDLSSLNPPVMEGLDALLAKSKHLVKRVDPEMDGYPQEQSPLTNKWFSSKSSKKIPLTAVTSVIDGLKKLYIEKLKPLEVTYKFNDFVSPLLTSSDFDAKPMVMLLGQYSTGKTTFIKHLLRTSYPGAHIGPEPTTDRFVVVMSGPDERTIPGNTIAVQADMPFSGLTTFGTAFLSKFECSQMRHPLLEHITFVDTPGVLSGEKQRTQRSYDFTGVTSWFAAKCDLILLLFDPHKLDISDEFKRVIGSLRGHDDKIRVVLNKADQVDTQQLMRVYGALMWSLGKVLNTPEVSRVYIGSFNDKPVNESAVGPLGKELFEREQDDLLSDLKDIPKKACDRRINEFVKRARAAKIHAYIIGHLKKEMPTMMGKAKAQQRLIDNLPDEFAKVQREYHLPSGDFPYVEHFKEVLSGYSFDKFEKVKPKMIQAVDDMLGYDIPELLKNFRNPYE

SEQ ID NO: 40544 - protein, 685 aa, Glycine max
  Clone ID: 700672216_FLI.pep
GNLSNLDTLDLSSNNMLPPSKLHGDWTRLNKLKVFFMFQSNLVGEIPQTIGNMVALERLDLSQNNLSGPIPSGLFMLENLSIMFLSRNNLSGEIPDVVEALNLTIIDLTRNVISGKIPDGFGKLQKLTGLALSMNNLQGEIPASIGLLPSLVDFKVFFNNLSGILPPDFGRYSKLETFLVANNSFRGNLPENLCYNGHLLNISAYINYLSGELPQSLGNCSSLMELKIYSNEFSGSIPSGLWTLSLSNFMVSYNKFTGELPERLSPSISRLEISHNRFFGRIPTDVSSWTNVVVFIASENNLNGSVPKGLTSLPKLTTLLLDHNQLTGPLPSDIISWQSLVTLNLSQNKLSGHIPDSIGLLPVLGVLDLSENQFSGEVPSKLPRITNLNLSSNYLTGRVPSQFENLAYNTSFLDNSGLCADTPALNLRLCNSSPQRQSKDSSLSLALIISLVAVACFLALLTSLLIIRFYRKRKQGLDRSWKLISFQRLSFTESNIVSSLTENSIIGSGGYGTVYRVAVDGLGYVAVKKIWEHKKLDKNLESSFHTEVKILSNIRHKNIVKLMCCISNEDSMLLVYEYVENHSLDRWLHRKNKSSTVSGSVHHIVLDWPKRLHIAIGAAQGLSYMHHDCSPPIVHRDVKTSNILLDSQFNAKVADFGLARMLMKPGELATMSSVIGSFGYMAPGE

SEQ ID NO: 40545 - protein, 140 aa, Zea mays
  Clone ID: LIB189-001-E2_FLI.pep
GGPRPGPALPRTSLTSPASRATRAASSSTRSASPAPSRTASTSPTSTSSSGSSWPRSSTPASPCLPCSPSTSRPGRARRRSARSAYDLHAAGERVSSRLRGVGELLGTYGCSGSDALPRRLEAKEERSSNLLSVLVVSSG

SEQ ID NO: 40546 - protein, 174 aa, Zea mays
  Clone ID: LIB189-001-G4_FLI.pep
GRAGRGDGEVPQAAGDDAAGHAAHADAGHQGHDDAGHPLVALARRGVHGGVRGAVVAGGAHGEGGVREVRRQDEGDRGVHRRVQQQPGPQEPLRRRDRAVRAAQALLQAGSHREGHPQQHLHLIHPQHALVQLIKSGVVLLLHAEAACRIKRTICTIVLYMCVNATRGTFETLS

SEQ ID NO: 40547 - protein, 103 aa, Zea mays
  Clone ID: LIB189-001-G7_FLI.pep
RRRHGEAHPHGNQRRAARDVQGGRERRRRRHPGDGDRGAVDAELQQGRREAELHGELHGGRDAVGHQRVRAARLVQRPPRGRQPDRGDVDLMASGGRTVAIAR

SEQ ID NO: 40548 - protein, 214 aa, Zea mays
  Clone ID: LIB189-001-H3_FLI.pep
TERGWKTSWNTPPKHRGRTLPYYSYVPIRSNTDRRGHFAVQFLFLHNIQFRGINRGELTLLREQAARLDNLPLRDVADLEPVVIGQLPVEYLEVLLQPLPVVALDDARHSLLMYPSQRHLCHGLPPRPGYLREHLRVEHGVAPPVPVLPSQRRVGGDVDAPVGAVRPQRPLLPRRVQLHLVHRGRDRGHGQDLVQVPGGEVADADRPGEAQPLA

SEQ ID NO: 40549 - protein, 306 aa, Zea mays
  Clone ID: LIB189-002-F7_FLI.pep
AEHHHHTPPPQADVPMAMASTATAAASLRLAFPLLSSPASSSSSSNTLRFPLRRRSAARPIAVTAFKKLSEASPVPIPQEPTEPLLVDEDALPPKAGVYGVYDPAGELQFVGISRNVRASIEGHRRKVPANLCASVKVAVSDEETPDRSALNNAWKSWMQEHIAATGKAPPGNVAGNNTWVGGPQRPPDLRLTPGRHVQLTVPLEQLIHRLVKENRVVAFIKGSRSAPQCGFSQRVVGILEGHGVDFVTVDVLDEEHNHGLRETLKAYSSWPTFPQVFVGGELVGGCDIVSSMAEKGELAALLIQK

SEQ ID NO: 40550 - protein, 222 aa, Zea mays
  Clone ID: LIB189-003-C1_FLI.pep
QVSWPLDLIINTEALKKYNQVMGFLLKVKRAKFVLDETRKWMWKARGRTTHNFKQHLIVAQKLLHFVDAFHQYVMDRVYHSAWTELCDGMTAATTLDEVMEVHEAYLSSIQRQCFVASDKLWALIASRVKTILGLALDFHNVEQTLSTGGTASAVRTRCEMEIDRIEKQFDECVIFLLRILSFKLNVGHFPHLADLVTRINYNHYFMSDSGSFSAIPGSRPR

SEQ ID NO: 40551 - protein, 88 aa, Zea mays
  Clone ID: LIB189-003-E7_FLI.pep
RLQLALEEQTEMANHSQQQCDRLRNERILCRICFERDICIVMLPCRHHVLCEPCSNKCQSCPICRLTVEGRLFVYDAVMSSNPSCYAV

SEQ ID NO: 40552 - protein, 224 aa, Zea mays
  Clone ID: LIB189-004-B4_FLI.pep
RGLLRAQGGGGGVQPARAQQQQRRDHPAHGVGLLQPAHGPAGAAGGLAPAADQVQRRRRRERLLGDHHGVPPRRLPRRRRRQHRPRRPHRRLARQVRRLPGRQHQDAHGGGVEHRGGGLQHLGPLHGLLPAAQRPQGGQGEPGRRRRQGRRAPAAAEDTGGHRARRALAGGCRQHGRLGLARREVMTTRHVPYVRTYVLAVLSEEHVFVRDTCVTIRSYMSQDL

SEQ ID NO: 40553 - protein, 378 aa, Zea mays
  Clone ID: LIB189-004-D1_FLI.pep
RASMVMVHNKQSKHRPIVDGCRSNLKFCIVFNFVSKRCLSACACSDSDWFVVHYFTSVGDPDAVVSEDLTDELPLAGADVAADDLAVPDEDESGHLHDLHGPEELHAAVVLVAVHAREDGVVDHGPRQLQHGGVHLDAGPAVLEAHVQHDELALVAAVLVDERLHVLPRVQLHHRRVAVAVVEDVAREPLGADGLLLVHLLGALVEVEVGHLRDALPAEQLLGGLRLVVAQDQQEVHVAAGAAELHHGRVDLAAVLAVARRELHHHQPVLGGLERVVELLGAVHPDHALVLARRRLLGARHRRPRRGQHRRAPPAADLRLRGQEPDDLGEGRHGAAQAIGCRGPAGEGGQEGGGGGHLAGVLSLMLSAEDQRTREGRR

SEQ ID NO: 40554 - protein, 159 aa, Zea mays
  Clone ID: LIB189-004-H12_FLI.pep
GSVLSVFFIRKGVSVGASGALFGLLGAMLSELITNWSIYTNRFAAMLNLIIIAAINLALGILPHVDNFAHIGGFATGFLLGFVLLIQPQFGWLEQPFGAKTKSKYKAYQIILLLAALVLLAAGFAVGLVMVFRGENGNDHCSWCHYLTCVPTSSWKCDN

SEQ ID NO: 40555 - protein, 175 aa, Glycine max
  Clone ID: 700672612_FLI.pep
FVLFASVACCFSHPSLLGIHPLDEKYYNSEVIKCRDGSKSFSRDRLNDNFCDCPDGTDEPGTSACPNGKFYCRNLGSKPQFIVSSHVNDHFCDCCDGSDEYDGIICCPNTCVMGGNAESTFSNCKSEASQNGVKSEESVHTGLKLVIILQVVLVIFLVFLWSFRCRTRSRRRHYR

SEQ ID NO: 40556 - protein, 114 aa, Zea mays
  Clone ID: LIB189-005-D4_FLI.pep
ESSSDPPSGFFGALRRRRSDVTMSGHTQPEGPRQLDSKHAVNSCRKNVPGTSFVSDLRDHIHEFINASADEHRTCFTKTLKRMFNMSKTVTDRSSEAEEAGPESVLPLQTTVSR

SEQ ID NO: 40557 - protein, 151 aa, Zea mays
  Clone ID: LIB189-005-F10_FLI.pep
FNLKGKWHLDVAFGCLLFPLVNLLSHINISLVPASPGPAVGVSSVEQSIVARDPVAMALYAVVVTVCAPIWEEIVFRGFLLPSLTRYMPLPWSILASAAAFALAHFNAQRVMPLVFLGVVMGGVFARSRNLLASMVLHSLWNGFVFLDLMK

SEQ ID NO: 40558 - protein, 231 aa, Zea mays
  Clone ID: LIB189-005-H8_FLI.pep
NMIGRWPFSQAVGVAKVSDKKVQQLGLPPSTAAAAARRRHGLLGGHGRRAGPPPPPLARRRARPGAEPQPEVARRLRRDGRRRPHVRPRRRPPLRRGERRAPHGPPRRRRQSKRVVAAPVELGQRPDGAAPKHRLHRRLAQLPAARAEQPHGAAHRVDRPPGRLVHQRLEHRWALRLGDGGEEGHEAGAAEELGDEDGGVALRLGAVDPLQARPQHARVAAPLAKHAAPVA

SEQ ID NO: 40559 - protein, 89 aa, Zea mays
  Clone ID: LIB189-006-D7_FLI.pep
LITPWYAQSCPKRLHLLHWREYINKNKVVVRLTLYQYMAQNFKRNCTVSIHLLFFIISLFLQEARVKQLFTMVHRNIDQGTQGFTLRIP

SEQ ID NO: 40560 - protein, 197 aa, Zea mays
  Clone ID: LIB189-006-D9_FLI.pep
AAAHHVWDQADLRRRAAVAQRRRRVGAVGRLLGGDGDAATKVEVHSGAAVGSIVRHDAVGVREPGEVLGEERVDHVVREQEVQLTGVDDDLGRVAAVLPFRGKAEQQRRLLRGGISGGADGLHGDALVAARQRVGVVDVGVARGAERGGVGAARHGGRRALAHLADPHPLVPRPRVPRVAPPAQVRAARARPAVRRH

SEQ ID NO: 40561 - protein, 153 aa, Zea mays
  Clone ID: LIB189-007-A12_FLI.pep
LFTMDQILLGRSDVAGWGAFIKNPVNKNDYLGEYTGELISHKEADKRGKIYDRANSSFLFDLNDQYVLDAYRKGDKLKFANHSSNPNCYAKVMLVAGDHRVGIYAKEHIEASEELFYDYRYGPDQAPAWARRPEGSKKDEASVSHRRAHKVAR

SEQ ID NO: 40562 - protein, 157 aa, Zea mays
  Clone ID: LIB189-007-A3_FLI.pep
FIYKLLFLQDNPTRHPTFEVSSRVIDTHSKALTRAHRDAPIDHSQSQVKVNAHDSCPRPAAYSSSSPMMNLPLPGLMAAMKKKRTLKMTSGSISLMGTPVSMLSCASAPFPVMISPMMEKATPSCAIRPTNSSFDLVNPNSGPPSLRPRPRPAAPSA

SEQ ID NO: 40563 - protein, 590 aa, Zea mays
  Clone ID: LIB189-007-E1_FLI.pep
QVFEPFSILGLESGASESDIKKSYRRLSIQYHPDKNPDPEAHKYFVEYISKAYQALTDPISRENYEKYGHPDGRQGLQMGIALPKFLLNIDGASGGIMLLGIVGFCILLPLMIAVIYLSRSSKYTGNYVMHQTLSTYYYFMKPSLAPSKVMDVFIKAAEYMEMPVRRSDDEPLQKLFVAVRSELNLDLKNIKTEQAKFWKQHPSLVKMELLIQAHLTRESFALTPALLKDYRHMLELAPRLLEELVKIAVLPRNPHGFGWLRPAIGVIELSQNIVQAVPLSARKTSGGNSEGIAHFLQLPHFTEATVKKIARKKIRAFQELCDMSVEGRAALLTQVAGLSEEQVRDVELVLEMIPCIEVDIKCETEGEEGIQEGDVVTMYAWVSLRRRNGLTAALPHCPNFPFHKEENFWLLLADAASNDVWLSQKVSFMDEATAITAASKAIQDTQEALGASAKEIGNAVKEAVDRVKKGSRLVMGKFQAPAEGTHNLTSFCLCDAWIGCDIKTSFKLKVLKRSRAGTRGHVPEEGSAAAVEDGIEDEEEEDEEEYDDYESEYSDDEEDEKNKGKGQGKVVNGSAHQGAESDIDSGSDE

SEQ ID NO: 40564 - protein, 338 aa, Zea mays
  Clone ID: LIB189-008-B12_FLI.pep
GGASCFGFGLTQLQPAAVRLRLPPARAADTSSSQSPARLTAVLEQVDQLLSQGNDMAALSLVRSTQGGDGGLRAFGAARQVPQRLYKLDELKLNGIDTSAFLSPVDLTLGSIERNLQIAAVLGGLSVSAALELSQLQILFLILGLLSLWSVDFVYFGGGVRNLVLDTIGHYLSQKYHNRVIQHEAGHFLIAYLLGVLPKGYTITSLDTLMNQGSLNVQAGAAFVDYEFLEEINTGKLSATMVNKFSCIALAGVAAEYLLYGRAGGGLADINKLDGLLKGLGFTQKKADSQVRWAVLNTVLILRRHEKARSQLAEAMSTGKSVGSCIQVIEECISTDDI

SEQ ID NO: 40565 - protein, 459 aa, Glycine max
  Clone ID: 700674467_FLI.pep
FIINGGWSLFNCFSLFLSLLTAPTNPTSPSPPQSLSSNTMLFSRISRNLRGSFNSCRWFLSIGDHNHRFLSLHNFHSRGGDSTQQVMRSLIISKGLPALHSSRYLIHHQSSSIVEDEHDPFSLVADELSLLGNKLRAMVVAEVPKLASAAEYFFKIGVEGKRFRPTVLLLMSTALNLSIHEAPPPVEVGGTLTTDVRSRQQRIAEITEMIHVASLLHDDVLDDADSRRGIGSLNFVMGNKLAVLAGDFLLSRACVALASLKNTEVVSLLAKVVEHLVTGETMQMTTTSDQRCSMEYYMQKTYYKTASLISNSCKAIAILAGQTAEVAMLAFEYGKNLGLAFQLIDDVLDFTGTSASLGKGSLSDIRHGIVTAPILFAMEEFPQLRTIVDEGFENPANVDLALEYLGKSRGIQRTRELAVEHANLAAAAIDSLPESDDEDVRKSRKALIDLTHRVITRTK

SEQ ID NO: 40566 - protein, 446 aa, Zea mays
  Clone ID: LIB189-008-E8_FLI.pep
NCEHINSPPLSNMGANCCIAAKERTQPCITPLEVSAYRNVRHSPSWSFRWDNRTHIEDIMEIPTLFSNHSSGSIRPDTKSGSIAPTEGFSNGNSLGTSPSNVSHGTKWHKSDKKMEASKVTKADPRADHPTASNSSLEAKLSRKSLDMSSVASDLKTSGSVPSTPPLVSRADPSSSRGHSQPTDSDSMKKARRSPGYQLYRQVSDSKIPSLRSLNEISSPEGRPSSSMLSVCSNDLSAAGSYAESSDGWSMRTFSEMVATSQRERWSLDSELLGSISSKVTRTSASNSTTLPPDQEVCKLCLKLLKERSTWNAQELAVVAVLLCGHVYHADCLDSITTEADKYDPPCPVCTHGEKCTVKLFGKLESKVKNKIPKNVAADINPDGNSNKHQKKGRREPRLGTSSSMKVPFSRPFLRRHFSIGSRPPRSVSETDSTRKKGFWARHWRE

SEQ ID NO: 40567 - protein, 162 aa, Zea mays
  Clone ID: LIB189-010-B1_FLI.pep
PTLDQLRVLHRCIARVTEEIQETRFNTAISAMMEFLNAAYKWETQPKSVIESFVLLLSPFAPHLAEELWFRLGHPQSLAYEQFPEAKSEYLEESKLVLPVQINGKTRGTILVDKACSEDDAFRTAASDEKLSKYLDGKGIRKKIYVPGRILNVILDQQKSRT

SEQ ID NO: 40568 - protein, 670 aa, Zea mays
  Clone ID: LIB189-010-G9_FLI.pep
QLNKHLTVYQAVQRQVVHAEDDEDRFGGSDLPDDGNHFWDDIRGDVFTITYQKADNTAEKGSVGGSASVPKSSKSDSCRTLSEKQCTSLLDSILQGELPCDLEKSNQTYNILSLLHVLEGLNQLSPRLRLQSACDDFAEGKVATLNGLYDVGAKVPSKEFINSKMTPKLARQIQDVLALCSGSLPSWCYQLTKACPFLFPFETRRQYFYSTAFGLSRALHRLQQQPGNDNNTAFEREVRIGRLQRQKVRVSRNRILDSAAKVMEMFSNQKAVLEVEYFGEVGTGLGPTLEFYTLLSRELQRVDLGLWRSHSSDNSGMQIDANADDLIRSKNHESESLTESRNIVQSPLGLFPQPWPPTAAASEGSKFFKVVEYFRLVGRVMAKALQDGRLLDLPLSTAFYKLLLGQELDLYDILSFDTEFGKTLQELQILVARKQFLDSCSSESQKIDLCFRGAPVEDLYLDFTLPGYPEYVLKEGGENAEVNICNLEEYISLVVDATVKTGIMRQVEAFKAGFNQVFDISSLQIFSPQELDYLICGRCELWEPETLPEHIKFDHGYTSKSPAIINFLEIMAEFTPEQQHAFCQFVTGAPRLPPGGLAALNPKLTIVRKHSSVANNNSNATGATESADDDLPSVMTCANYLKLPPYSTKAIMLKKLLYAINEGQGSFDLS

SEQ ID NO: 40569 - protein, 374 aa, Zea mays
  Clone ID: LIB189-010-H6_FLI.pep
LLGESDMSVPGQCSSQPQFITSVGRSNRSNGPGTPLIESIDVDQIVIPEKNSWKNLFSYIGPGFLVSIAYIDPGNFETDLQAGAQYKYELLWIILVASCAALIIQSLAARLGVVTGKHLAEHCRAEYPKVTNFVLWILAELAVVACDIPEVIGTAFALNMLFRIPVWCGVLITGLSTLMLLLLQQYGVRKLEFLIAFLVFLIATCFLVELGYSKPNAPEVVRGLFVPELKGNGATGLAISLLGAMVMPHNLFLHSALVLSRKVPRSVHGIKEACRFYTIESAFALTVAFLINISIISVSGSVCGSGNLNPEDQANCSDLDLNKASFLLKNVLGNWSSKLFAVALLASGQSSTITGTYAGQYVMQVFGTYTLFQF

SEQ ID NO: 40570 - protein, 75 aa, Zea mays
  Clone ID: LIB189-011-C10_FLI.pep
NAHDGFNFTKSVLSEMDLTLLLFHVMQSLELWDIREKNTMTFNNAHDGLVAALASSSATGKVASVSHDRTLKLWK

SEQ ID NO: 40571 - protein, 639 aa, Zea mays
  Clone ID: LIB189-012-E4_FLI.pep
HAATHPRSADRDPPDPRSPSPHALASSRTTHKTTATATATGPPLRLRHIPPRPRTKPNQTSPDQRNTLRSPETGHMAAAAVTSNGGAVAANGPAPGRLASVYSEVQTNRLLHALPLPSVLRSNFSVVDGPASSAAGNPDEIAKLFPNLFGQPSASLVPSAEPAATRPLKVGVVLSGGQAPGGHNVICGIFDYLQERAKGSTLYGFKGGPAGIMKCKYVELTSDFVYPYRNQGGFDMICSGRDKIETPEQFKQAEDTANKLDLDGLVVIGGDDSNTNACLLGEYFRSRNMKTRVIGCPKTIDGDLKCKEVPTSFGFDTACKIYSEMIGNVMTDARSTGKYYHFVRLMGRAASHITLECALQTHPNAALIGEEVAAKKQTLKNVTNYITDIICKRADLGYNYGVILIPEGLIDFIPEVQKLIAELNEILAHDVVDEAGAWKSKLQPESRELFEFLPNTIQEQLMLERDPHGNVQVAKIETEKMLISMVETELEKRKAEGRYSAHFRGQAHFFGYEGRCGLPTNFDSNYCYALGYGAGALLQSGKTGLISSVGNLAAPVEEWTVGGTALTSLMDVERRHGKFKPVIKKAMVELDAAPFKKYASMRDEWAIKNRYISPGPIQFSGPGSNDSNHTLMLELGAAL

SEQ ID NO: 40572 - protein, 362 aa, Glycine max
  Clone ID: 700674932_FLI.pep
DPFPMYGTENDRDDSERTAFRRAEKKYKLYYDNNASSKNKRKKLPKPVDLTEVLDFRSILECYLQNDVLPPGVIVLHDNFTSPVFSLQNRPGFYFIPGALSIERQCSLIRESLTDFPQPPNRTNHNAMYGPIQDVFVAAKEGKVLVEDNSPITSSETDTDIDHKDGKEWKFTTEKDALSRKCRSASASVLLRKLRWSTLGLQFDWSKRNYDVSLPHNKIPEALCELAKQLAKPALPTGVEFRPEAAIVNYFGLGDTLGGHLDDMEADWSKPIVSLSLGCKAIFLLGGKSREDTPLAMFLQSGDVVLMAGDARECFHGVPRIFTDKENAEIGHLETQLTREDDLCFLQYIQTSRININIRQVF

SEQ ID NO: 40573 - protein, 301 aa, Zea mays
  Clone ID: LIB189-012-G8_FLI.pep
KEREKQSGVHPFLSAMTNGYLFREYIGAQSTGVQFSDVPINAFVSFHFILSFAIDYTPVGQQPKPVPTNGVFSPFWDTGNLSPAAVAAIKASHPNVAVMAGLGGDSVQDIVKAFFTPTSVDTWVANAVTSLTGIINRYGLDGVDVDYEHFADGADVNTFVECIGRLLTQLKQTMPNIATSIAPFEDPVVQKYYQALWSKYSGVIDYVNFQFYAYGDNTDVPTYVMFYNNQLANYPGGKVLASFKTGNVTGLLSPDQGISGAKELQRQNKLPGLFIWSADSSKKSSYGFKYETEAQQIIANH

SEQ ID NO: 40574 - protein, 157 aa, Zea mays
  Clone ID: LIB189-013-C4_FLI.pep
KSDFLSDPALHALSAASNLIHLGFRGNILSSFGLLQFVPPVTLCVLDLSGCWILTGDAISTFRKRHPTIELRHELLHEVEENFVGGSQFRKPRRRRSPHVKAEVGNSFAGSSRLHDIRFVDERIKYSKEEFVELQGLAKPNSLMLGVWLPPELRRPK

SEQ ID NO: 40575 - protein, 347 aa, Zea mays
  Clone ID: LIB189-013-E5_FLI.pep
GRAGAGRRGGRGARAGDGPLLQLGARVRAHPRRHRGDGGQHHGRPRPPLRRRVRRLHRQEPRVPGAPRHGQLAPLVPRLRRRRGVRPCAGPGDRGQQLLHHGGQRRHAQARQGGRQHPVRLPDPAGRDGHVQRAGGRGGQQRRRRAQGGDGHERAAHQRVRAGDGGVRGGGRDGGLRGGHVHGRAHEQDGRPHRGLAAHRLRHLRVRRLRRVVHGRGRGHHPLHARARRGRRHGVQGPAPAGGRRLLRQGAPRPGIRRPHRRLRHRRGGVRIQLHRHVPGLRHRGRVHGGRHLGVTSAAQRGRGGAELEARHLKRQIKISVRAAACGHPAIAMCLISGSQVLSMIHH

SEQ ID NO: 40576 - protein, 357 aa, Zea mays
  Clone ID: LIB189-014-G8_FLI.pep
MASLTDLVNLDLSDCTDRIIAEYIWIGGSGIDLRSKARTVKGPITDPSQLPKWNYDGSSTGQAPGEDSEVILYPQAIFKDPFRKGNHILVMCDCYTPQGEPIPTNKRYSAAKVFSHPDVAAEVPWYGIEQEYTLLQKDVSWPLGWPVGGYPGPQGPYYCAAGADKAFGRDVVDAHYKACLYAGINISGINGEVMPGQWEFQVGPSVGISAGDEIWVARYILERITEMAGIVLSLDPKPIKGDWNGAGAHTNYSTKSMREAGGYEVIKAAIDKLGKRHKEHIAAYGEGNERRLTGRHETADINTFKWGVANRGASIRVGRDTEREGKGYFEDRRPASNMDPYVVTGMIAETTILWNGN

SEQ ID NO: 40577 - protein, 373 aa, Zea mays
  Clone ID: LIB189-015-E3_FLI.pep
ACVRFEDAHTDAMEVTPNHTLTVTGWAAMNESAGKVEPFVFKRRENGPDDVTIKVQYCGMCHTDLHFINNDWGITTYPLVPGHEITGVVTKAGRNVTGFRVGDRVGVGCIAASCLDCDRCRRSEENYCDRVALTYNGVFWDGSVTYGGYSRALVADKRFVVRVPDALPLDAAAPLLCAGVTVYSPMKHHGMLGHPGASLGVVGLGGLGHVAVKLAKAFGLRVTVVSTSPAKEAEARARLGADRFVVSTDDAQMRDAARSLDYVIDTVSAKHSLGPILDLLKVSGKLVLVAAPDQPVELPSFPLIFGKRTVSGSMTGGIRETQEMLDLCARHNITCDIELVSTDGINAALARLARNDVRYRFVIDIAGDSTSKL

SEQ ID NO: 40578 - protein, 305 aa, Zea mays
  Clone ID: LIB189-015-F1_FLI.pep
EGEAEGAARRGTDRAMAVAPPTAAALEQLSSSKMFDGFNLRFRHQSATLGCAMTFSIYLPPSPASNLPVLYWLSGLTCTDENFIIKSGAQRAAAAHGIALVAPDTSPRGLNIEGESDSYDFGVGAGFYLNATNEKWKNWRMYDYIVKELPKVLSDNFEQLNTSQASIFGHSMGGHGALTIYLKNTDKYKSVSAFAPIANPINCPWGQKAFSNYLGSTKSDWEEYDATCLIKKNSKVPTTILIDQGEADKFLAEQQLLPHKFEEACKAAGAALTLRMQPGYDHSYYFIATFVDDHIAHHAQFLKSA

SEQ ID NO: 40579 - protein, 148 aa, Zea mays
  Clone ID: LIB189-017-D1_FLI.pep
GGDDEPNGGHPGPVPHNRPPQLLLLFLSQRIREAAIRGGEGVRGDDGDGEAGHQGGAQPARVPPLRARRPPVAQVGVREEQVPVDLLRQGDVLPAAGEGEGVPRRPRGGVRGDRRGRPCRLPQGHELHLGRRRGRRQALQLRVAAAAD

SEQ ID NO: 40580 - protein, 245 aa, Zea mays
  Clone ID: LIB189-018-C6_FLI.pep
PCPAHHHQHLAPSSAVVVTRSNAPPSMAPKNALPAASGMTLEPRYRGVRKRPWGRYAAEIRDPARKARVWLGTFDTAEAAARAYDAAALHFRGPKAKTNFPVAFATATDTRALPLPLRLPLPPPPPKKLSVSPSGSTVESSSRDSPAAPAPAPSLDLSLGMPAMVAAQPFLFLDPRLAVTVAVAAPVPRRPTAAAAGAGASKQAAYSCCREDEQSDTGSSSSVVDASPAVGVGFDLNMPPPGEVA

SEQ ID NO: 40581 - protein, 69 aa, Zea mays
  Clone ID: LIB189-018-H12_FLI.pep
NQLSHDSRHKPYKYFERQHHPWAMAETLDNPDTAAASTTDGLITTAKTEHQVEGALLLDIVVCKGATIL

SEQ ID NO: 40582 - protein, 153 aa, Glycine max
  Clone ID: 700659735_FLI.pep
AVFTGMLGGEELSQAYASGDVFVMPSESETLGFVVLEAMSSGIPVVAARAGGIPDIIPADQDGKTSYLYDPRDLEDCLSKLRPLLHNKELRETMGKAAREEMEKYDWKAATRKIRNEQYNAAIWFWRKKRAQLLRPFQRLAKRFFPSPQVNYR

SEQ ID NO: 40583 - protein, 195 aa, Zea mays
  Clone ID: LIB189-019-F1_FLI.pep
SLHNIANMQIILELTRCRGRNSRGGLHKCAPCTAMPNNKIVAANMEEKGAGGKAAVPHDELPRFTIFLIPNRREPPLDLVELVCLHHRISLGNGVPGSSPVVELAVVLVGVAVECAVQVPTPAVESRKSNPLPAGAAPVRPYLPPFGDRRHPLAGSGNISGLLHVHCLQLNLGNSYYRVAASNNRLHDGVAAVHD

SEQ ID NO: 40584 - protein, 144 aa, Zea mays
  Clone ID: LIB189-021-E11_FLI.pep
PAAVPVPEAPAPITVVVPPLPPVEVGREPATSSTAASSDGAASSRVHRCSICHKEFPTGQALGGHKRKHYDGGVGSAAASTDVPAAPAETSAEVGSSAARAFDLNLPAVPEFVFRCGKPGKMWEEDEEVQSPLAFKKPRLLMTA

SEQ ID NO: 40585 - protein, 457 aa, Glycine max
  Clone ID: 700664169_FLI.pep
NVGILAIDIYFPPTCIQQELLEAHDGASKGKYTIGLGQDCMAFCTEVEDVISMSLTVVSSLLEKYAIDPKQIGRLEVGSETVIDKSKSIKTFIMQIFEKYGNTDIEGVDSTNACYGGTAALFNCVNWVESSSWDGRYGLVVCTDSAVYAEGPARPTGGAAAVAMLIGPDAPISFESKLRGSHMAHAYDFYKPNLASEYPVVDGKLSQTCYLMALDSCYNHLSHKYEKQEGKQFSISDAEYFVFHSPYNKLVQKSFARLVFNDFLKNASFVDEAAKEKLEPFATLSGDESYQSRDLEKASQQVAKPQYDAKVQPTTLIPKQVGNMYTASLYAAFISLIHNKHSTLDGKRVILFSYGSGLTSTMFSLLLREGQHPFSLSNIDKMMDVAGKLKSRHEFPPEKFVETMKLMEHRYGGKEFVTSKDTSLLSPGTFYLTEVDSMYRRFYAKKTSENGLVTNGH

SEQ ID NO: 40586 - protein, 191 aa, Zea mays
  Clone ID: LIB189-022-E2_FLI.pep
AGRKKEESRKNEEHVNLIKEYRAKIEAELSNICDGILKLLDSHLVPSFTAAESKVFYLKMKGDYHRYLAEFKTGPERKESAESTMMAYKAAQDIALAELAPTHPIRLGLALNFSVFYYEILNSPDKACNLAKQAFDEAISQLDTLGEESYKDSTLIMQLLRDNLTLWTSDLTEDGADEGKEAPKGEAGDGQ

SEQ ID NO: 40587 - protein, 425 aa, Zea mays
  Clone ID: LIB189-022-E4_FLI.pep
SKTKMQTQNEGLYSERFFLCSAMATHTSYSARPPVRCAVGEGQSTGSRGRGRRDVLDRAGLRQGRAKRLLGHRLHLVVVVGRERGQALQVQRLVVVDVPPLLHQGVDVLPVHVRLLAREPPRLGPRRAVVHDLHLLQLHVLGVPPEHGQHEVVHVGDRPVLIPEEHVQEVLLCEGGGRSHAEGVEERLGGGHAGLVHEHAGVEVERRRRAQLGGRRWPRHLVRALLAVADPVLRGVAPRLLAEAVHHRVEVPLLELEQAVDVLEHLDVRVQVHHPLVLHELPDAELGVVDDVVRHGELRLVLRRVHGLDLADDAALRDEDAAVGLGHVGQHGHHQGVGRADLAEALGQPHHALPVVAVARQERHVRPRGRLRRRRRRRRRGGLGGHLGCHQLGSHLALSGSRGYERVLVGTRRPVCWLAVGLSVV

SEQ ID NO: 40588 - protein, 242 aa, Zea mays
  Clone ID: LIB189-022-H10_FLI.pep
VRRIRAYIQMRARVMHAYIYIIVQIQIRIIPAKSKSLAHACRAYSGRSRAEGDLVVAVAATGMGLHVGGVVVRVGASRVRAHQPHAGAAGEGHGEVVAVDDRDVVEVLAAADGELGQRQRRLPRQRAGQRAAAVARLAAPAVAVEGAAGAAPHAAGAGAGRHVDGPRPARVQLRAPAHRGGRGPHGEPAVVGDGEGGGVGAHASQGGGQEQQEDRGRGGGGHCWCSALFLVESKQYSSYRAR

SEQ ID NO: 40589 - protein, 294 aa, Zea mays
  Clone ID: LIB189-023-A11_FLI.pep
RLPSSPMRVVSSKPSRKNYNAKSKFDPELTTKQVQRLLLLFKPVSAPQSVSNNHLGERRHYEKRRKPRHFEERRPIEAARRPRFDEERRPAVRHVPFEDPYRAPRYAPVPVDSQHGHSLASDHHRYYQPALTPEPRQLPLVLEPRYVPPALDHHHVPELRHAPPAYYRTLAPSGDSYYRSVENLVPERYADRTMADLTTRDPIIRDHTALPGEALARADRLDDLYRSDRVEELYRSDRLVNRAVDRPHPAYFTAAYETNPAYAETSIRPVSARVNGPSAAVSSLYSFSGGPVYR

SEQ ID NO: 40590 - protein, 306 aa, Zea mays
  Clone ID: LIB189-023-A2_FLI.pep
RYKKWMAQYRRKYKDDAEKAHRFQVFKANAEFIDRSNAGGKKKYVLGTNQFADLTSKEFAAMYTGLRKPAAVPSGAKQIPAAGSKYQNFTRLDDDVQVDWRQQGAVTPVKNQGQCGCCWAFSAVGAMEGLIMITTGNLVSLSEQQILDCDESDGNQGCNGGYMDNAFQYVINNGGVTTEDAYPYSAVQGTCQNVQPAATISGFQDLPSGDENALANAVANQPVSVGVDGGSSPFQFYQGGIYDGDGCGTDMNHAVTAIGYGADDQGTQYWILKNSWGTGWGENGFMQLQMGVGACGISTMASYPTP

SEQ ID NO: 40591 - protein, 199 aa, Zea mays
  Clone ID: LIB189-023-B1_FLI.pep
YTDATAADESALFSSPELYSSPRISNSCSRRWVMNRTGLSWPSSLSSNSTLNGRLAVMRFPFQTPMYCLTTPSMPRRSRPGALATWWTRTGTVTRTRFPTLGAAAASSAATSWDEDTSLPTATRRSMWRRAQHRRGLGRRWQRAGVETGGRKRGLGWRGPGEVELEGEATAVAVAAMIAIGDGKVGGRVGNCVEQAVRT

SEQ ID NO: 40592 - protein, 227 aa, Zea mays
  Clone ID: LIB189-023-G5_FLI.pep
ASRGETEPLEVMVSVLRVVVEHPLPRRQHPPAVLRPHHALVLRLVPHGRHHVVLPEEVGGLVHQRGVPPAGLEPRAGAAEAVQQVQVRLQVVVAREVQGLLEERRHLVVQLQQHAQVRVHAAEAQPVRRPQDELRERRLVEEHAGHLGHAVVHVHDAQRPHAQLPLEPPPEGDVPDARAGEGEHAHRRHPVARRHVRARLRDVEGAQHRQRAAQAVARDRHAHLLAP

SEQ ID NO: 40593 - protein, 334 aa, Glycine max
  Clone ID: 700668119_FLI.pep
CYSFHFLNLSFRKNTVGQYESHAGFTLPGLYRVVHGIDVFDPKFNIVSPGADMSIYFPYSEKQNRLTALHGSIEQLLFAPEQTDEYIGLLKDKSKPIIFSMARLDRVKNITGLVESFGKNSKLRELVNLVIVAGYIDVKKSSDREEIAEIEKMHELMKKYNLVGDFRWIAAQTNRARNGELYRYIADTQGAFVQPAFYEAFGLTVVEAMNCGLPTFATCHGGPAEIIEHGISGFHIDPYHPDQASQLLVEFFQKSKEDPSHWKKISDGGLQRIYERYTWKIYSERLMTLAGVYSFWKYVSKLERRETRRYLEMFYILKFRDLANSVPLAKDDAS

SEQ ID NO: 40594 - protein, 98 aa, Zea mays
  Clone ID: 700572286_FLI.pep
ANAPHAAKPREKSTQCPGRPGLSRDMKGVGVTHLPLVLGLDEHVLIQHGGVVPAEVLRHAARLQAAPALLVVPERVEAVRERVDHPIRLRAVERPPQP

SEQ ID NO: 40595 - protein, 438 aa, Zea mays
  Clone ID: LIB189-024-D7_FLI.pep
LAIAKSCFLLEEGASLHGVLVGFTKSSLVEVLVSKLHTLDVLLLRHQHVSVLQELLDRYLGLLERGRALLGVDELPGDVLDAGLAHPPSDLVVVDPGTQRAEEVDGLAREGVDQLDDVLLVDAVGAEDALADADAVLAGGRPVELLHAAVADDRRVERGEVVAGDDDGHAGVVLLVVHPRELHVGGVVGDVHQGGVDHLVVHRVLGGAAHATRAGVEVVDEEAGHLALLDEVGGLTVALPDELGGLSGVAALQLAGAHHDGGDAHLGEDQLALERFSLAFASPDTQDEGNLDVWQGHEVLGEVDDELVHEALGYVEAIHHVVEVVRLLALADVVVGAEHGDVGAVPHRRLEEVVDEALAPGDVLLVVRDVVGQALPPVLVGLLRLVHLLGSHRLEPAVAAGALAMVGHGRGHLRLVELLPEEAAPGRGGGRSSDGGGE

SEQ ID NO: 40596 - protein, 172 aa, Zea mays
  Clone ID: LIB189-024-E11_FLI.pep
IMTLLGRIRSKKKHTVAFLPLTHGDAWAIPKSLCYLRPLSTATRGRPRRCAVRAQAAGADASNDKSVEVMRKFSEQYARRSNTFFCADKTVTAVVIKGLADHRDTLGAPLCPCRHYDDKAAEVAQGFWNCPCVPMRERKECHCMLFLTPDNDFAGKDQVISFEEIKEATSKF

SEQ ID NO: 40597 - protein, 235 aa, Zea mays
  Clone ID: LIB189-025-D7_FLI.pep
RLEFSRPAVMATEQAAENYTVEDLVALNPYNPDILNDLEKFVNEQVSSQTYNLDANLSLLRLYQFEPERMSIQIVAHILIKALMAMPAPDFSLCLFLIPEHVQMEEQFKVLIVLSHYLETARFSQFWDEAAKNRHISEAVPGFEQAIQSYAIHVLSLTYQKVPRPILVEAINIEGLALDKFLEYHAANSGWVIEKGGQSQVIVLPRNEFNHPELKKNTADILPFEHVTRIFPVLG

SEQ ID NO: 40598 - protein, 184 aa, Zea mays
  Clone ID: LIB189-025-G11_FLI.pep
KFYDDDTDKGQYHCIDCGICRVGGKENFFHCVKCGSCYSVILRDNHQCVENSMRQNCPICYEYLFDSLQGTRVLNCGHTMHLTCFEEMVAHNKYTCPICSKTALDLTHHWEMLDQEIEATIMPLVYRYKIWVLCNDCNKVSEVNFHVIGHKCSHCRSYNTRTTSRPADLSGSSSPSTDSSDNNI

SEQ ID NO: 40599 - protein, 221 aa, Zea mays
  Clone ID: LIB189-026-A12_FLI.pep
QGFVSSYDTAHQYSDSEEDAHKWVSHRNHRGNICGVDFIWLLNPDKCRKPLKTSWNEAVFGIIKYFLQVVAFLSEENAFALLKADSLYDHITYSSFYQALCQLGMVHPDRLKSEEIEELWSEADRDGDGVINYKEFQCIWSPNCCSQEEEDTEIDITDESLDTFEANNEAFGFTVKEAVLFPPEVEKGMWPENYSLSDHAPLTVVFSPIRMPCSPRNRGEL

SEQ ID NO: 40600 - protein, 98 aa, Glycine max
  Clone ID: 700669702_FLI.pep
LLDHNYIFVYIPCVSEMTNCYLTISFLFYCTAKFDLYYVQVHFSWFHQRIRTIMATTLYVAYIRGSLIQKRIFNLHGLIYVGCMSFDAIVQISFDVII

SEQ ID NO: 40601 - protein, 407 aa, Zea mays
  Clone ID: LIB189-026-H12_FLI.pep
AASLPQVGRASEKKAMAAESFLFTSESVNEGHPDKLCDQVSDAVLDACLAQDPDSKVACETCTKTNMVMVFGEITTKASVDYEKIVRDTCREIGFTSDDVGLDADRCKVLVNIEQQSPDIAQGVHGHFTKRPEEIGAGDQGHMFGYATDETPELMPLSHVLATKLGARLTEVRKDGTCAWLRPDGKTQVTVEYVNEGGAMVPVRVHTVLISTQHDETVTNDEIAADLKEHVIKPVIPERYLDEKTIFHLNPSGRFVIGGPHGDAGLTGRKIIIDTYGGWGAHGGGAFSGKDPTKVDRSGAYVARQAAKSIVASGLARRCLVQVSYAIGVPEPLSVFVDSYGTGTIPDKEILKIVKENFDFRPGMITINLDLKKGGNRFIKTAAYGHFGRDDADFTWEVVKPLKKASA

SEQ ID NO: 40602 - protein, 267 aa, Zea mays
  Clone ID: UC-ZMFLMO17230B11_FLI.pep
SNVYDTICEILAQYVIASDPNFVGIESSYLTQYLKKINVFNIIKNCLISNPNQEIVSLLIDFSNVDNTNLYLKAELPLTIVENIVSSVILVPRLKEIVQNNCEYNFVLISQYNCLSNFRLSLESHFSLPDISHSEFSKIWQEKQSQEFPLYGQFLDLITFQLANQISINVPSESERTNICYEGERKFHTFIGQYTIPSGETKSSFRIDKPQVILPIKINGKLIIKNEIEQVYIINNQFFEQTPSLSVEIHFSLMLGKPLLLEIFEVY

SEQ ID NO: 40603 - protein, 176 aa, Zea mays
  Clone ID: LIB189-027-C8_FLI.pep
DQKNAGCRYCRRVLGRAARQGQAGGEEQGGGPCPRHKEERPCSCRRRDRGRADRLQLKRLGVPDGGLRPAWWRRVQRAHVPGGQARLGGGGGEQGVWSGWTGTTCPTTSQRRCSRARRAMTLAASSARRRTRTASPRSWRTPEDPDPSISVHHAMYVCVADGLHLRVRARRAGEAS

SEQ ID NO: 40604 - protein, 163 aa, Zea mays
  Clone ID: LIB189-027-E8_FLI.pep
DSLNITEHNDIQDKIAINQINAFQLIGMSSCLDLSGFFEKEDVSERKIRFASNYSPAYLFEKIESIVRKMGFQVHKSNGKLKVIQDCKGLANSRGQESLLISAEVFEINESLYVVELKKSSGDCSLYRKLCETLSEDLGTCKSQQFLKQDSIRQDIGRYNSSF

SEQ ID NO: 40605 - protein, 114 aa, Zea mays
  Clone ID: LIB189-028-B11_FLI.pep
IKPKDQNDASIVTKTNFKHLYWTLTQQLAHHTINGCNMRPGDIFATGTLSGPERDSLGCLLELTWNGQKEIPVGNLTRKFLEDGDEVILTGCCKGEGYNIGFGTCTGKVLPALP

SEQ ID NO: 40606 - protein, 170 aa, Zea mays
  Clone ID: LIB189-028-H7_FLI.pep
LLVGVHVEPDRVQAISRAAKEASDVAVVHHLDTERGALVPAVRSVSAFVGDEFERLDQIVNVVGWARGPGDLRQALVEPAQINLVLRASMAETPWPLLVRFAIGSDVDEGDGADAAAVVRRDLHLDQPVRSSPQIPTIAGVSTPLSDLRRLPHVCRRVVEETMYVCRSMS

SEQ ID NO: 40607 - protein, 104 aa, Zea mays
  Clone ID: LIB189-029-A3_FLI.pep
GLGCEDALVHLLNYVWPNIFETSPHVINAVMEAIEGMRVALGAAVILNYCLQGLFHPARKVREVYWKIYNSLYIGAQDALVASYPALEDDGDNIFSRPELAMFV

SEQ ID NO: 40608 - protein, 133 aa, Zea mays
  Clone ID: LIB189-029-C6_FLI.pep
STWLRIPSLQSQNTCYGTEKMGVKTTTRKLQTLTIYVVRKKKGSRERSDLQQFMASCTNVRRRENAEKLGDSIYPLTVTVKGAPLFQLSKARWSKSAAVLYVLGNERFCQARERWLVESLYSLVFFGLPPQLV

SEQ ID NO: 40609 - protein, 358 aa, Glycine max
  Clone ID: 700875731_FLI.pep
PFQLTKNLSLVWNDYGWDKASNIIFVDQPTGTGFSYTSDESDIRHDEEGVSNDLYDFLQAFFKEHPQLTKNDFYITGESYAGHYIPALASRVHQGNKAKEGIHINLKGFAIGNGLTNPEIQYQAYTDYALDRGLIKKADYDSINKLIPPCKQPIEACGTEGGETCVSSLYVCNKIFNRIMTIADDVNYYDIRKKCVGDLCYDFSVMEDFLNKKTVRDALGVGDLDFVSCSSTVYSAMMQDWMRNLEVGIPTLLEEGIKVLVYAGEEDLICNWLGNSRWVNAMEWSGQKQFGASGTVPFLVDGAEAGTLKSHGPLSFLKVYEAGHMVPMDQPKAALEMLRSWMQGKLTMTKSGDNVSPK

SEQ ID NO: 40610 - protein, 216 aa, Zea mays
  Clone ID: LIB189-029-D1_FLI.pep
EGGRAGGSGGDVWQLTTGLESAWNKLRGVDVLTKENIAEPMRDIRRALLEADVSLPVVRRFIESVSEKAVGTDVIRGVRPDQQLVKVVSDELVQLMGGEVSDLVFAKSGPTIILLAGLQGVGKTTVCAKLAFYLKKLGKSCMLVAADVYRPAAIDQLTILGKKVGVPVYSEGTEAKPSQIAKNGLKEAKVNKADVIIVDTAGRLQVIHMLLRYLFH

SEQ ID NO: 40611 - protein, 101 aa, Zea mays
  Clone ID: LIB189-030-A5_FLI.pep
AAQNNSGEDDELLSELKDKWDAMENKSSLALYGAGAILAVWISLVVVRSLDSVPLLPGILELVGLSYSGWFVYRYLLFQENRKELAGVIDDIKRRIVGDDE

SEQ ID NO: 40612 - protein, 289 aa, Zea mays
  Clone ID: LIB189-030-C11_FLI.pep
DETTRILSICALASAQLAWDLVGHALPPQGLHDVLAVQVHGVLDGFAGSGGGQEVVDGHLLVLVLLVVFEEAADLLEAVRGELADVVVVAVLGVVGADGDDLVVLLSLIYHRHEADGPGAEEGAGKDGFLHEHEDVHGVVVLAERPGHEAVVVRVDDGRVEDPVHLDEPRLLVQLVLHLAPLGDLHDDVEDGRSFRTDLEVVPGVRGDGPPRQRRQDALVQPRRPALRLHLHHVGGVLPVGASVLLVLAHLPLPLRKKTQIGRLRLRRLAGAGRRRSYLTSPGLDRQTS

SEQ ID NO: 40613 - protein, 299 aa, Zea mays
  Clone ID: LIB189-030-E4_FLI.pep
RGPGGGGERQQVAAGDADGRGGGEDGGADAADLGDHDHVLDGVRADDHLLGVAGHHHGPPRRGLVPDPRGLPHRLLRRLHPAHRARLRPPRGARRAPRQRQPARPHPAAADRRRPRALRRRHGGRRAHGGPPPPRRARVLRVRLRRRRAHVGVLAHPAVLPRGGGRGVHVHRPARLLPARVPQGDEDHEHGAVPQHPVAGILRQLRARRRRAQGHGRPPPLDRQRPQQGPPRQLLLAARRRLPRQPTSLPRRRPLVQVQGGPPRRRRQRQRRRDGRRAHAPLIHPCSIDRRGTRRTTLN

SEQ ID NO: 40614 - protein, 416 aa, Glycine max
  Clone ID: 700849459_FLI.pep
LSSMDPTSIPPPPATTVPFTVEPSNHVTPADNTNTNHPPYDEMIYTAIGALKEKDGSSKRAIGKYMEQVYKDLPPTHSALLTHHLNRLKSAGLLILVKKSYKLPGSDPLPVLQAQKPRGRPPKLKSQPNTELTWPALALNDNPALQSAKRGPGRPKKIAGPVGVSPGPMVPGRRGRPPGTGRSKLPKRPGRPPKPKSVLAISSGLKRRPGRPPKAESNVNVIPFAAPVAPGLPTVQPIVPTASVPNGSPRPRGRPKKIVAGAGAPALSSVGGAPRGRGRPRGVLPLVRPGRPQKLAVGRPKNPARRPVGRPKGSTAAAITAHKAANDDLRRKLEHFQSKVKESLGTLKPYFNHESPVTAIAAIQELEVLSTLDLKAPLRDETHQQPQPQPQVYEQQYPQPQPLLQQFFQPHTSAPS

SEQ ID NO: 40615 - protein, 315 aa, Zea mays
  Clone ID: LIB189-030-G4_FLI.pep
QMFCIHLQAYELVQGNLVQWNSFMDKSIPDPPTAVLLHGILGSRKNWGSFAKRLAQEFPMWQFLLVDLRCHGDSTSIKKSGPHTVASTALDVLKLIMQLRLTPRVLVGHSFGGKVALSMVEQAAKPLARPVRVWVLDATPGKVRAGGDGEDHPAELIEFLRRMPEQVSSKQEVVDALVKGQFSMDVARWVATNLRRTSPLGQRPSSSFSWTFDLNGISEMYKSYEDTNLWRIVENVPRGVHINFLKAERSLHRWALEDLQRIYTAEELAADEGGGVEMHVLEDAGHWVHADNPDGLFRILSSTFRIETTIRGMQD

SEQ ID NO: 40616 - protein, 205 aa, Zea mays
  Clone ID: LIB189-031-C4_FLI.pep
MKSCEQRGRDLLNQNVITAAGLAEWLRGAKEGGHHETVSLGLPSYSLLCTVLQSIRAGSGGLVLGSFEVNQHNRPQDRLLDWFFHPVLVLKEQIQALRMTEEEVRFLEKLTVFAGNVAGAGAGGWENGAGMMVVPQDPVRLAQIQAISRRLVGIVRSLSKFPTYRRRYRHVVKLLIAYSVERESSGRSSASGRSASYFEITQLDV

SEQ ID NO: 40617 - protein, 197 aa, Zea mays
  Clone ID: LIB189-031-F6_FLI.pep
LNKHDTHTHSSRGKGHFHSHGLPHAEHLLEHVVHELAVRVVEEAVHLVPHVIDLPEHEQVGEAPFLQPLQPVQPRHVEPLQHVARAYVLQQALLAAVLDVADPVLVRRRQQRQPVLPELPLLDRPVHETQQRRARLHAHVADVHRRRLLLPQVVHEHALEHGGARRQHRLVRLQHPVRRVDGHVRVDGVRQHVRQAA

SEQ ID NO: 40618 - protein, 82 aa, Zea mays
  Clone ID: LIB189-034-F11_FLI.pep
RRPHRQTKIPSSMQTTRDVTRRRQDGSGGAGDGCGDERRLHLQGELEDLVEANGRRAVRQGPLEGVHEAGNPEDLVEANGRR

SEQ ID NO: 40619 - protein, 257 aa, Chlorella vulgaris
  Clone ID: LIB191-008-A1_FLI.pep
CMNMLHDHLYPERSPSLASTAGSTGAPNATAAPRLCGVLGCCCLLCGALGAHANQAGIHALRAQGVVCLLGLHLGGDGNLLQSGRSACDGQHRAAELRDRLELLRAGIAGLGLAGAAREHHQVGLVGLQAVHILLKPLKGPVLAAVVHCNANGGGKLGGNASLLELLQREAAARALLHVILDGLAVHDGPQRARGGAGEHLLGLLGAGIPPPELASGLVEPGPDFVLPLLPEVLVGHHVVVPDHCSWPSIPADGLPW

SEQ ID NO: 40620 - protein, 98 aa, Chlorella vulgaris
  Clone ID: LIB191-011-E8_FLI.pep
VRVTHRCNEKSDNWQLKGRVHRATGGDWSTADRAVTFQLLTLADTRIMKLAAACIVLALLWLTVILRYYVQEPHDAAITNDPCTSLLGHNPRSLCCCI

SEQ ID NO: 40621 - protein, 481 aa, Chlorella vulgaris
  Clone ID: LIB191-027-B2_FLI.pep
IAPPSMLWTAGMLSRALLGRHWTAGAACALASSRQINTSAWRGHVQPVPADIDGDSNAAPGEAGVNGALGHRRWLADLGAIRTDWTREEVADVFATPLLELVYHAATVHRMYNDPSMVQRCTLLSIKTGGCPENCGYCSQSSHWSKDTGLKAEKLMDLEEVYQAALRAKQAGSTRFCMGAAWRGPSQVGKGQWTRVLDMVKRIRALDMEVCTTLGLLTPDQAQELREAGLTAYNHNLDTSPEYYEKVTTTRKYEDRLNTLENVRQAGISVCAGGIIGLGEGKMDRVGLLHQLATLPAHPESVPINALVAVKGTPMQGNQAPEALDVVRCIATARVIMPRTVVRLSAGRMNFGLGDQALCFMAGANSIFDGDKLLTTPNNDRNEDLAMFEALGLRSRPAFLPYGAGNESSATDFAAAAAGEAGGCRGDGSCGGGHGHGHGHHHHGVETDSHEQGRGEAASAHVGGGCGGRGACGGHQHAAHA

SEQ ID NO: 40622 - protein, 101 aa, Chlorella vulgaris
  Clone ID: LIB191-032-C1_FLI.pep
TASRMLSSAVTWSPPWCQAWITLLARCALDQTVLRRFCPLASCQPLSRRAWRRRRSFWQRISQLALSLPRRRQHEHMPETVVCLEIWDTNTPSPHSCLGWW

SEQ ID NO: 40623 - protein, 134 aa, Chlorella vulgaris
  Clone ID: LIB191-033-D4_FLI.pep
DTDQFLTDAKTATLVMEVILKQGGLAPGGINFDAKLRRESISLEDLFYGHISGMDAMARGLRNAARMIEEGELDKMRRERYSSYFDDRIGRDIVDERADFRQLEAHAMSQYDPGLNITSGQAELYDLWLAHYLR

SEQ ID NO: 40624 - protein, 164 aa, Chlorella vulgaris
  Clone ID: LIB191-037-D10_FLI.pep
ALRQVFRLAVPNTLRGGHQQLIQGQNQSRTPANVVRAMSSEEVAAQKAAETGAKDSGAPTIFDKIINKEIPATVIYEDEEALAFRDVNPQGPVHFLVIPKHRNGLTMLSKAGEEHKALLGHLLWVAQHVAKQEKLAEGFRVVINDGRNGCQSVYHLHLHVIGGR

SEQ ID NO: 40625 - protein, 392 aa, Chlorella vulgaris
  Clone ID: LIB191-038-B9_FLI.pep
TPCGCLGQTTAKMQTAFAGKVALFKGTVAAPKAQRRSLVVRAGQYDEELVQNAKKIASPGKGILAMDESNATCGKRLESIGLENTVENRQAYRELLVTTPGLGQYISGAILFEETLFQKTRGGKQMVDCLNEQGILPGIKVDKGLFPLPNSNGESWCAGLDGLAQRCGDYYKQGARFAKWRSVVSIPAGPSTIAVRDCAYGLARYAAIAQSQGLVPIVEPEILLDGEHDIDRTLEVAEAVWAETFKYLADNKVVFEGILLKPSMVTPGAEHSKKATPEEVASYTLKMLRRRVPPAVPGIMFLSGGQSELESTLNLNAMNQSPNPWHVSFSYARALQNSVLKTWKGEEGNVKAAQDALLRRAKANSDAQLGKYSGEGENAEAGKGMYEKGYTY

SEQ ID NO: 40626 - protein, 201 aa, Chlorella vulgaris
  Clone ID: LIB191-038-H7_FLI.pep
LPPLLPWPALGSSPRPSVSKRMQAAAGPLPDPCMSTPRSFSCSSRLLARQEAIGVVAGPPPLVLAHLLHRQLGLPPQLPLGGLSRGPHRLGVARPPVRDVGVHLEPAGRLKGVHHLQHGGACAGAQVVRDATQLRCGLQLAQRGNMALRQVHDMDVVAHTGAIARVVVAAVHIEHLLVPQSHGLHPGHQVVQHHLVLTDAA

SEQ ID NO: 40627 - protein, 234 aa, Chlorella vulgaris
  Clone ID: LIB191-041-A11_FLI.pep
GKRRTEEYADCFLDPEKLPLDVVKNADVLVTGTLGLATGPTAGAIRKAVEAAKEGRKCTVMVDVNWRPVFWSDLDQAKKVVEEYVHQADVVKLTDEEAEWLFGIGRDEALNQPEKVLENLPHAKGVLVSAGEKGSAYSFRSPGGKMDLSGVVPVLSVDVVDTTGAGDAYTAGFLFYMLLSGSLDSLLADPTRLRRAVEFATACGAATCTKPGAIGAQPTVAEVEQLLAAKDKNK

SEQ ID NO: 40628 - protein, 219 aa, Chlorella vulgaris
  Clone ID: LIB191-041-E1_FLI.pep
RPQVPTTHKLNCLAYLFARERPLSHAVQPLHSGPLQRIPHKTSQHPLPVGPAPEGLESGRPLPITAAEQASHCSLTGLLNVLHSGFSSAAALSSTVAFFSTSPASSSAALSVADSSAVVTSFNNGSFLAAAPSYDSLNCCARSALAKRMQNISMRCSSSAKSTQLHTMALSLPPCSCTLLPGITMWFALIFSVFSCRNRNRVRLFSLCCNSFAWPTPRS

SEQ ID NO: 40629 - protein, 174 aa, Arabidopsis thaliana
  Clone ID: LIB22-005-B7_FLI.pep
TNLVVVVVMAPTVKTAAVKTNEGNGVRYRGVRKRPWGRYAAEIRDPFKKSRVWLGTFDTPEEAARAYDKRAIEFRGAKAKTNFPCYNINAHCLSLTQSLSQSSTVESSFPNLNLGSDSVSSRFPFPKIQVKAGMMVFDERSESDSSSVVMDVVRYEGRRVVLDLDLNFPPPPEN

SEQ ID NO: 40630 - protein, 332 aa, Glycine max
  Clone ID: 700849474_FLI.pep
EFFIANHNQTYISCMILSIIMHVLFFMSLCRSRVVPVPPLSFSIVSKIVLLGVIGSSSQVLGYAGISYSSPALASSIGNLVPAFTFILAVICRMEKLAAKSRSSQAKVIGSIISIAGAFVLTFYKGPSIINALTHLPLLLQQPINFLKSEDESWAIAGILLIADYFLASVWYIVQVDILKVFPDELTTVFFYNVTATILSTTVGFFAVPNASAWKIGLDISLISIVCSGIFGKLMSNVVYAWALYLKGPVYVTSFKPLQIVIAVAMGVMFLDDSLYIGSVVGATIVSIGLYAVLWGKAKEEIEEDVGSQESPTIENVPLLQSHRTETSEKNV

SEQ ID NO: 40631 - protein, 705 aa, Glycine max
  Clone ID: 700849742_FLI.pep
LIGRAYVPVSEVLDGEEIDRWVEILDEEKNPIHEGSKIHVKLQYFDVTKDRNWARGIRSPKFPGVPYTFFSQRQGCKVSLYQDAHVPDNFVPKIPLAGGKNYEAHRCWEDIFDAITDAKHFIYITGWSVYTEISLVRDSRRPKPGGDQTLGELLKKKASEGVKVLMLVWDDRTSVGLLKKDGLMATHDEETAQFFDGTEVHCVLCPRNPDDGGSIVQDLQISTMFTHHQKIVVVDGAMPGGGSDRRRIVSFVGGIDLCDGRYDTAFHSLFRTLDTAHHDDFHQPNFPGAVITKGGPREPWHDIHSRLEGPIAWDVLFNFEQRWRKQGGKDVLVPLRELEDVIISPSPVTFLEDHETWNVQLFRSIDGGAAFGFPETPEDAARAGLISGKDNIIDRSIQDAYINAIRRAKNFIYIENQYFLGSSFAWSADDIKPADIGALHLIPKELSLKIVSKIEAGERFAVYVVVPMWPEGVPESASVQAILDWQKRTMEMMYRDIIQALRAKGIEEDPRNYLTFFCLGNREVKKPGEYEPSEQPDPDSDYQRAQEARRFMIYVHTKMMIVDDEYIIVGSANINQRSMDGARDSEIAMGAYQPYHLATRQPARGQIHGFRMSLWYEHLGMLHDSFLQPESEECINKVNQVADKYWDLYSSESLEHDLPGHLLRYPIGIASEGDVTELPGFEFFPDTKARILGGKADYLPPILTT

SEQ ID NO: 40632 - protein, 473 aa, Arabidopsis thaliana
  Clone ID: LIB22-009-D7_FLI.pep
LRQLKQIAQEVTQTNSSVNGWGRRPAALRALSQRLSRGFNEAVNGFTDEGWSVIGDSMDDVTITVNSSPDKLMGLNLTFANGFAPVSNVVLCAKASMLLQNVPPAILLRFLREHRSEWADNNIDAYLAAAVKVGPCSARVGGFGGQVILPLAHTIEHEEFMEVIKLEGLGHSPEDAIVPRDIFLLQLCSGMDENAVGTCAELIFAPIDASFADDAPLLPSGFRIIPLDSAKEVSSPNRTLDLASALEIGSAGTKASTDQSGNSTCARSVMTIAFEFGIESHMQEHVASMARQYVRGIISSVQRVALALSPSHISSQVGLRTPLGTPEAQTLARWICQSYRGYMGVELLKSNSDGNESILKNLWHHTDAIICCSMKALPVFTFANQAGLDMLETTLVALQDISLEKIFDDNGRKTLCSEFPQIMQQGFACLQGGICLSSMGRPVSYERAVAWKVLNEEENAHCICFVFINWSFV

SEQ ID NO: 40633 - protein, 348 aa, Arabidopsis thaliana
  Clone ID: LIB22-011-G1_FLI.pep
PCKPLRGFAQLQEEEKMLVDGKLVCVTGAGGYIASWIVKLLLERGYTVRGTVRNPTDPKNNHLRELQGAKERLTLHSADLLDYEALCATIDGCDGVFHTASPMTDDPETMLEPAVNGAKFVIDAAAKAKVKRVVFTSSIGAVYMNPNRDTQAIVDENCWSDLDFCKNTKNWYCYGKMLAEQSAWETAKAKGVDLVVLNPVLVLGPPLQSAINASLVHILKYLTGSAKTYANLTQVYVDVRDVALGHVLVYEAPSASGRYILAETALHRGEVVEILAKFFPEYPLPTKCSDEKNPRAKPYKFTTQKIKDLGLEFKPIKQSLYESVKSLQEKGHLPLPQDSNQNEVIIES

SEQ ID NO: 40634 - protein, 314 aa, Glycine max
  Clone ID: LIB3052-008-G7_FLI.pep
LDQMPRRFYLAGNQEQEFLKYQQQQQGGSQSQKGKQQEEENEGSNILSGFAPEFLKEAFGVNMQIVRNLQGENEEEDSGAIVTVKGGLRVTAPAMRKPQQEEDDDDEEEQPQCVETDKGCQRQSKRSRNGIDETICTMRLRQNIGQNSSPDIYNPQAGSITTATSLDFPALWLLKLSAQYGSLRKNAMFVPHYTLNANSIIYALNGRALVQVVNCNGERVFDGELQEGGVLIVPQNFAVAAKSQSDNFEYVSFKTNDRPSIGNLAGANSLLNALPEEVIQHTFNLKSQQARQVKNNNPFSFLVPPQESQRRAVA

SEQ ID NO: 40635 - protein, 105 aa, Arabidopsis thaliana
  Clone ID: LIB22-013-F2_FLI.pep
YQYFSSDQGSNSFDCSEFGWSDQAPITPDISSAVINNNNSALFFEEANPAKKLKSMDFETPYNNTEWDASLDFLNEDAVTTQDNGANPMDLWSIDEIHSMIGGVF

SEQ ID NO: 40636 - protein, 385 aa, Arabidopsis thaliana
  Clone ID: LIB22-014-C8_FLI.pep
GVGGDGGGTGRWPRQETLTLLEIRSRLDHKFKEANQKGPLWDEVSRIMSEEHGYQRSGKKCREKFENLYKYYRKTKEGKAGRQDGKHYRFFRQLEALYGDSNNLVSCPNHNTQFMSSALHGFHTQNPMNVTTTTSNIHNVDSVHGFHQSLSLSNNYNSSELELMTSSSEGNDSSSRRKKRSWKAKIKEFIDTNMKRLIERQDVWLEKLTKVIEDKEEQRMMKEEEWRKIEAARIDKEHLFWAKERARMEARDVAVIEALQYLTGKPLIKPLCSSPEERTNGNNEIRNNSETQNENGSDQTMTNNVCVKGSSSCWGEQEILKLMEIRTSMDSTFQEILGGCSDEFLWEEIAAKLIQLGFDQRSALLCKEKWEWISNGMRKEKKQIN

SEQ ID NO: 40637 - protein, 149 aa, Arabidopsis thaliana
  Clone ID: LIB22-016-F3_FLI.pep
GEPLPGTELKEVWKLADVPKDDKYQYTHFAHKINSFDTAPKKLLPSDSRLRPDRYALEMGDMSKSGYEKSSMEERQRAEKRTREEKGQAFTPKWFDVTEEVTATPWGDLEVYQFNGKYSEHRAAADNSEDNTDPKSIQFNPWQFQDLST

SEQ ID NO: 40638 - protein, 180 aa, Arabidopsis thaliana
  Clone ID: LIB22-026-H2_FLI.pep
LKLRPKMLQEPSAAFSLRRNSFRRRSPRSNVDDRGWNPLHIKARKGDLKSVKQLLDQGMDVNALAWGPKSKGVSALHLAAEGGHIEVMDLLLERGANIDAKTWGSCGWTPLHAAAKERKREAVKFLVENGAFLADDITDTRFNPPVHYCHGLEWAYEEMKKLNSESSSSSGGDTSSSSDN

SEQ ID NO: 40639 - protein, 185 aa, Arabidopsis thaliana
  Clone ID: LIB22-031-D4_FLI.pep
DAESSSSSGSSVGPSASDTLAAKLLGAADKYKLPRLSLMCESVLCKDISVDSVANILALADRYNASALKSVCLKFAAENLIAVMRSDGFDYLREHCPSLQSELLKTVAGCEEELSGGGGKTRSVWGQFSDGGAETNGRQAQTWGDINGGAERSQSVWVEVVNANGSGRNNNDNNNSDDPMAELED

SEQ ID NO: 40640 - protein, 249 aa, Arabidopsis thaliana
  Clone ID: LIB22-037-A12_FLI.pep
SLDRYGPFYFISGNEDNCKKGQKLNVVVISARIPSTAQSPHAAAPGSSTPGSMTPPGGAHSPKSSSPVSPTTSPPGSTTPPGGAHSPKSSSAVSPATSPPGSMAPKSGSPVSPTTSPPAPPKSTSPVSPSSAPMTSPPAPMAPKSSSTIPPSSAPMTSPPGSMAPKSSSPVSNSPTVSPSLAPGGSTSSSPSDSPSGSAMGPSGDGPSAAGDISTPAGAPGQKKSSANGMTVMSITTVLSLVLTIFLSA

SEQ ID NO: 40641 - protein, 436 aa, Glycine max
  Clone ID: 700865583_FLI.pep
GGPDNDFGIKYNVNNGGPAPESVTDKIFQRTKEISAYKVLDAGELDLSKIGSSTYGPMEVEIVDSVKDYVTLLKDIFDFPLIKSFLQSNPSYRVLFDGLNGVTGPYAKAIFLDTLGLAPSSVQQCVPLPDFGGSHPDPNLTYAHSLVEVVERENIAFGAASDGDGDRNMIYGKGAFVTPSDSVAIIADWADVIPYFKKTGIRGLARSMPTSNAIDYVAKAKGFEIFEVPTGWKFFGNLMDAGRLSICGEESFGTGSDHIREKDGIWAVIAWLNIIAAANQKTPGTGINELLQDHYTKYGRSFFSRYDYEEVSSEGSKQFTDNLDALFASSSFVGSKHGEFIVKKTTNFSYTDPIDGSVSKNQGHIVLFEDGSRVVFRLSGTGSQGATVRVYIERYSKDPSQFKKDTAEGLQPLIDAALEFTKLKEYLGRDKPTVIT

SEQ ID NO: 40642 - protein, 260 aa, Arabidopsis thaliana
  Clone ID: LIB22-059-E1_FLI.pep
LYYLSVFIKPFFHLPHHLPKKKNTKEEERLIMMGSVELNLRETELCLGLPGGDTVAPVTGNKRGFSETVDLKLNLNNEPANKEGSTTHDVVTFDSKEKSACPKDPAKPPAKAQVVGWPPVRSYRKNVMVSCQKSSGGPEAAAFVKVSMDGAPYLRKIDLRMYKSYDELSNALSNMFSSFTMGKHGGEEGMIDFMNERKLMDLVNSWDYVPSYEDKDGDWMLVGDVPWPMFVDTCKRLRLMKGSDAIGLAPRAMEKCKSRA

SEQ ID NO: 40643 - protein, 395 aa, Glycine max
  Clone ID: LIB3028-001-B9_FLI.pep
QTFSFTLSDCVKMGAGGRTDVPPANRKSEVDPLKRVPFEKPPFSLSQIKKVIPPHCFQRSVFRSFSYVVYDLTIAFCLYYVATHYFHLLPSPLSFLAWPIYWAVQGCILTGVWVIAHECGHHAFSDYQLLDDIVGLVLHSGLLVPYFSWKYSHRRHHSNTGSLERDEVFVPKQKSCIKWYSKYLNNPPGRVLTLAVTLTLGWPLYLALNVSGRPYDRFACHYDPYGPIYSDRERLQIYISDAGVLAVCYGLFRLAMAKGLAWVVCVYGVPLLVVNGFLVLITFLQHTHPALPHYTSSEWDWLRGALATVDRDYGILNKVFHNITDTHVAHHLFSTMPHYHAMEATKAIKPILGEYYRFDETPFVKAMWREARECIYVEPDQSTESKGVFWYNNKL

SEQ ID NO: 40644 - protein, 439 aa, Arabidopsis thaliana
  Clone ID: LIB22-059-H4_FLI.pep
CKQLGRNGSILLVLDDVWAEEESLLQKFLIQLPDYKILVTSRFEFTSFGPTFHLKPLIDDEVECRDEIEENEKLPEVNPPLSMCGGCNSAVKHEESVNILGVLWHPGCFCCRSCDKPIAIHELENHVSNSRGKFHKSCYERYCYVCKEKKMKTYNIHPFWEERYCPVHEADGTPKCCSCERLEPRGTKYGKLSDGRWLCLECGKSAMDSDECQPLYFDMRDFFESLNMKIEKEFPLILVRKELLNKKEEKIDNHYEVLIRAYCMSEQKIMTYVSEEPRTGQNKQLIDMDTEPQGVVHECKVTAILILYGLPRLLTGYILAHEMMHAWLRLNGHMNLNNILEEGICQVLGHLWLESQTYATADTTADAASASSSSSRTPPAASASKKGEWSDFDKKLVEFCKNQIETDESPVYGLGFRTVNEMVTNSSLQETLKEILRRR

SEQ ID NO: 40645 - protein, 423 aa, Glycine max
  Clone ID: LIB3028-015-H8_FLI.pep
LYQLPHYTEIPPKPVCVVVCEEMATKRSVGTLKEGDLKGKRVFVRVDLNVPLDDNLNITDDTRVRAAVPTIKYLTGHGAKVILSSHLGRPKGVTPKYSLKPLVPRLSQLLGIEVTMANDSIGEEVEKLVAQLPEGGVLLLENVRFYKEEEKNDPEFAKKLASLADLYVNDAFGTAHRAHASTEGVAKYLKPSVAGFLMQKELDYLVGAVSNPKRPFAAIVGGSKVSSKIGVIESLLEKVNVLLLGGGMIFTFYKAQGYSVGSSLVEEDKLSLATTLLEKAKAKGVSLLLPTDVVIADKFAADANSKTVPASSIPDGWMGLDIGPDSIKTFGEALDKTQTVIWNGPMGVFEFDKFATGTEAIAKKLAELSGKGVTTIIGGGDSVAAVEKVGLADKMSHISTGGGASLELLEGKQLPGVLALDDA

SEQ ID NO: 40646 - protein, 187 aa, Zea mays
  Clone ID: UC-ZMFLMO17256F06_FLI.pep
ERQQTQTYLQKSEKSVLVVATSAVDVGVDFKIHVLICESSDSATVIQRLGRLGRHGGFQQYQAYVLIPSQTQWVIASLKEELEEDSSIDRLELSTVIETAFNAPQEFKQYQKIWGELQAQGMLYQMVYGGSRSESKDNLAVTQDLRDRMIESLEKIYQKQINGFGRWWGLSNDAVGKATQEELLRFR

SEQ ID NO: 40647 - protein, 367 aa, Arabidopsis thaliana
  Clone ID: LIB22-063-C11_FLI.pep
IYGLKFQTFHWICEKKMSGSETGLMAATRESMQFTMALHQQQQHSQAQPQQSQNRPLSFGGDDGTALYKQPMRSVSPPQQYQPNSAGENSVLNMNLPGGESGGMTGTGSEPVKKRRGRPRKYGPDSGEMSLGLNPGAPSFTVSQPSSGGDGGEKKRGRPPGSSSKRLKLQALGSTGIGFTPHVLTVLAGEDVSSKIMALTHNGPRAVCVLSANGAISNVTLRQSATSGGTVTYEGRFEILSLSGSFHLLENNGQRSRTGGLSVSLSSPDGNVLGGSVAGLLIAASPVQIVVGSFLPDGEKEPKQHVGQMGLSSPVLPRVAPTQVLMTPSSPQSRGTMSESSCGGGHGSPIHQSTGGPYNNTINMPWK

SEQ ID NO: 40648 - protein, 225 aa, Glycine max
  Clone ID: 700837458_FLI.pep
LLLELLLVSITLPAPNNVFEGRPHLLLTELNILQRISGRLSKLRHRHLRRHLENLHRHRQLPLPPLLRPLHPHHKLLLPRHPKVQLLRHRLHLRQHRRSRKLAYEHRRRPLPRLKQTPKIKAVRQGRYYLERVVKRPGRFPHCNLLLLVVLHIVEINVVFNVRLLNRKRDWPHEPNLKPRIPHYIRNGIPLARISNEEIRNKILGLRRNPFWEFIFSSESLSVNS

SEQ ID NO: 40649 - protein, 204 aa, Arabidopsis thaliana
  Clone ID: LIB22-064-D9_FLI.pep
PTESKFLSSIEQKEAVKGNDVNVKRIKEYMEKVELELSNICIDIMSVLDEHLIPSASEGESTVFFNKMKGDYYRYLAEFKSGNERKEAADQSLKAYEIATTAAEAKLPPTHPIRLGLALNFSVFYYEIMNAPERACHLAKQAFDEAISELDTLNEESYKDSTLIMQLLRDNLTLWTSDISEEGGDDAHKTNGSAKPGAGGDDAE

SEQ ID NO: 40650 - protein, 496 aa, Arabidopsis thaliana
  Clone ID: LIB22-066-G9_FLI.pep
SRSTQLFRCTKTEPRNAIFHQCFINSPPSSIFTGSKIEAEDGSPLVIELVDATTNTLVSTGPFSSSRVELVPLNADFTEESWTVEGFNRNILTQREGKRPLLTGDLTVMLKNGVGVITGDIAFSDNSSWTRSRKFRLGAKLTGDGAVEARSEAFGCRDQRGESYKKHHPPCPSDEVWRLEKIAKDGVSATRLAERKILTVKDFRRLYTVNRNELHNIIGAGVSKKTWNTIVSHAMDCVLDETECYIYNANTPGVTLLFNSVYELIRVSFNGNDIQNLDQPILDQLKAEAYQNLNRITAVNDRTFVGHPQRSLQCPQDPGFVVTCSGSQHIDFQGSLDPSSSSMALCHKASSSTVHPDVLMSFDNSSTARFHIDKKFLPTFGNSFKVSELDQVHGKSQTVVTKGCIENNEEDENAFSYHHHDDMTSSWSPGTHQAVETMFLTVSETEEAGMFDVHFANVNLGSPRARWCKVKAAFKVRAAFKEVRRHTTARNPREGL

SEQ ID NO: 40651 - protein, 674 aa, Glycine max
  Clone ID: 700870927_FLI.pep
VTPSEPQIREIALWLSEYHMDSTGFSTDSLFDAGFPSALSLGDVVCGMASVRVTAKDMVFWFRSHTAAEIRWGGAKHEAGEKDDSRRMHPRSSFKAFLEVVKARSLPWKEYEMDAIHSLQIILRNAFKEDTESLDLNAKAINTRLSDLKIEGINDLKIERMQELEAVTSEIVRLIDTATVPILAVDVDGLVNGWNIKIAELTGLPIGEATGKHLLTLVEDSSTDRVKKMLNLALLGEEEKNVQFEIKTHGSKMDSGPISLVVNACASRDLRDNVVGVCFVAHDITAQKNVMDKFIRIEGDYKAIVQNRNPLIPPIFGTDEFGWCCEWNPAMMKLTGWKREEVMDKMLLGEIFGTQMAACRLKNQEAFVNLGVVLNKAMTGSETEKVPFGFFARNGKYVECLLSVSKKLDVEGLVTGVFCFLQLASPELQQALHIQRLSEQTASKRLNALSYMKRQIRNPLCGIVFSRKMLEGTDLGTEQKQLLRTSAQCQQQLSKILDDSDLDTIIDGYLDLEMAEFTLHEVLVTSLSQVMTKSNGKSIRIVNDVAGHIMMETLYGDSLRLQQVLADFLLISINFTPNGGQVVVAGSLTKEQLGKSVHLVKLELSITHGGSGVPEVLLNQMFGNNGLESEEGISLLISRKLLKLMNGDVRYLREAGKSAFILSAELAAAHNLKA

SEQ ID NO: 40652 - protein, 324 aa, Arabidopsis thaliana
  Clone ID: LIB22-068-C6_FLI.pep
TLASKYSSLCLSLSHLFEHQGLITVIEAHIMDHHQYHHHDQYQHQMMTSTNNNSYNTIVTTQPPPTTTTMDSTTATTMIMDDEKKLMTTMSTRPQEPRNCPRCNSSNTKFCYYNNYSLAQPRYLCKSCRRYWTEGGSLRNVPVGGGSRKNKKLPFPNSSTSSSTKNLPDLNPPFVFTSSASSSNPSKTHQNNNDLSLSFSSPMQDKRAQGHYGHFSEQVVTGGQNCLFQAPMGMIQFRQEYDHEHPKKNLGFSLDRNEEEIGNHDNFVVNEEGSKMMYPYGDHEDRQQHHHVRHDDGNKKREGGSSNELWSGIILGGDSGGPTW

SEQ ID NO: 40653 - protein, 239 aa, Arabidopsis thaliana
  Clone ID: LIB22-068-D12_FLI.pep
EARCYSSSEPLDLQFPFELKKQISCSLYLTNKTDNNVAFKVKTTNPKKYCVRPNTGVVLPRSTCEVLVTMQAQKEAPSDMQCKDKFLLQGVIASPGVTAKEVTPEMFSKEAGHRVEETKLRVTYVAPPRPPSPVHEGSEEGSSPRASVSDNGHGSEFSFERFIVDNKAGHQENTFEARALITKLTEEKQSAIQLNNRLQRELDQLRRESKKSQSGGIPFMYVLLVGLIGLILGYIMKRT

SEQ ID NO: 40654 - protein, 426 aa, Arabidopsis thaliana
  Clone ID: LIB22-069-D11_FLI.pep
YRSDHFFSMTKKAVLIGINYPGTKAELRGCVNDVRRMYKCLVERYGFSEENITVLIDTDESSTQPTGKNIRRALADLVESADSGDVLVVHYSGHGTRLPAETGEDDDTGFDECIVPCDMNLITDDDFRDLVDKVPPGCRMTIISDSCHSGGLIDEAKEQIGESTKKEAEDEDESEESSSRFGFRKFLRSKVEGAIESRGFHIGGNKKDEDEAEEIETKEIELEDGETIHAKDKSLPLQTLIDILKQQTGNDNIEVGKIRPSLFDAFGDDSSPKVKKFMKVILGKLQAGNGEEGGLMGMLGKLASGFLEGKLNDEDYVKPAMQTHVGSKEEVYAGGSRGSVPLPDSGILISGCQTDQTSADATPAGKPTEAYGAMSNSIQTILEETDGEISNREMVTRARKALKKQGFTQQPGLYCHDGYANAPFIC

SEQ ID NO: 40655 - protein, 148 aa, Arabidopsis thaliana
  Clone ID: LIB22-071-A2_FLI.pep
GHNAQTNFLTPPPSPTTEVLPETPVIDLETVSGCDSARESQISLCSPTSVLRFSHNDETEYRTEPTEEQNPFFLPDLFRSGDYFWDSEITPDPLFLDEFHQSLLPNINNNNTVCDKDTNLSDSFPLGVIGDFSSWDVDEFFQDHLLDK

SEQ ID NO: 40656 - protein, 375 aa, Arabidopsis thaliana
  Clone ID: LIB22-075-G6_FLI.pep
LKRIYIEMMSSSSPTQLASLRDMGIYEPFQQIVGWGNVFKSDINDHSPNTVTSSIIQVDPRIDDHNNNIKINYDSSHNQIEAEQPSSNDNQDDDGRIHDKMKRRLAQNREAARKSRLRKKAYVQQLEESRLKLSQLEQELEKVKQQGHLGPSGSINTGIASFEMEYSHWLQEQSRRVSELRTALQSHISDIELKMLVESCLNHYANLFQMKSDAAKADVFYLISGMWRTSTERFFQWIGGFRPSELLNVVMPYLQPLTDQQILEVRNLQQSSQQAEDALSQGIDKLQQSLAESIVIDAVIESTHYPTHMAAAIENLQALEGFVNQADHLRQQTLQQMAKILTTRQSARGLLALGEYLHRLRALSSLWAARPQEPT

SEQ ID NO: 40657 - protein, 303 aa, Arabidopsis thaliana
  Clone ID: LIB22-079-G7_FLI.pep
TISILNKIPIMTSTNPVVAEVIPAETSTDATETTIATTEAGEAPEKKVRKAYTITKSRESWTEGEHDKFLEALQLFDRDWKKIEDFVGSKTVIQIRSHAQKYFLKVQKNGTLAHVPPPRPKRKAAHPYPQKASKNAQMSLHVSMSFPTQINNLPGYTPWDDDTSALLNIAVSGVIPPEDELDTLCGAEVDVGSNDMISETSPSASGIGSSSRTLSDSKGLRLAKQAPSMHGLPDFAEVYNFIGSVFDPDSKGRMKKLKEMDPINFETVLLLMRNLTVNLSNPDFEPTSEYVDAAEEGHEHLSS

SEQ ID NO: 40658 - protein, 149 aa, Arabidopsis thaliana
  Clone ID: LIB22-085-C12_FLI.pep
IHNGFVVLLRLFCGLDGIYCMFLGRLNNLCTLNRQYGLSGKNSNEAMFVIEAYRTLRDRGPYPADQVLRGLEGSFAFVVYDTQTSSVFSALSSDGGESLYWGISGDGSVVMSDDIQIIKQGCAKSFAPFPNGKPKLKFFISPIKKETYF

SEQ ID NO: 40659 - protein, 247 aa, Glycine max
  Clone ID: 700846835_FLI.pep
SAEEGFLKNGQSPLLTVMSAGHVLHVFINGQLAGTVWGGLGNPKLTFSDNVKLRAGNNKLSLLSVAVGLPNVGVHFETWNAGVLGPVTLKGLNEGTRDLSRQKWSYKVGLKGESLSLHTESGSSSVEWIQGSLVAKKQPLTWYKTTFSAPAGNDPLALDLGSMGKGEVWVNGRSIGRHWPGYIAHGSCNACNYAGYYTDTKCRTNCGQPSQRWYHVPRSWLSSGGNSLVVFEEWGGDPNGIALVKRT

SEQ ID NO: 40660 - protein, 453 aa, Arabidopsis thaliana
  Clone ID: LIB22-089-B9_FLI.pep
LHIYIRTYVHSSKVLAASMRKELCRNFQRGSCRYGENCRFLHPQQAKPNNPFGFGTQNQQQQQQQQQQNSSNPFGFGVQSGGSSRPNQFQNTWSRTASTPTGGGAAASTQQTGKQTQPADHKCTDPAACKRVMQDDFKNERPMWKLTCYGHWKYFPCDVTGDISYEELRAVAYEEAKRGIPLQSIVERERNLQNSKIAEFENFLRNPYKGSVTANQSPFAATTPSIFPQSSQINSPSPAFSGFNQQTAFSNTNAGGLSSSGPPNAFASFNQQTTFPNTNAGGVSSSGPPNPFASFTQQSNNQQTAFSNTNAGGLSSSGPPNAFASFNKQPNAFSVNTPQPVPSGPSGFQTNPSTTFKPASFGPGPGFATTPQNNNIFGQSTPTPATNTSQNNQTAFNFNVPVASFTAPAINTTNTSSGTELQIGGDPVDSSIWLKEKWNPGEIPEQAPPDAFV

SEQ ID NO: 40661 - protein, 260 aa, Glycine max
  Clone ID: 700852966_FLI.pep
IPTKNWPFEGSVSGNNHSRSHQGFTRRQENFEERQCYCHWASSGLGLATAKALAETGKWHVIMTCRDFLKAERAAKSAGIAKEIVSLDSVRQFVDNFRQSGRPLDVLVCNAAVYLPTAREPTYTADGFELSVGTNHLGHFLLSRLLLEDLNKSDYPSKWLIIVGSITGNTNTLAGNVPPKANLGDLRGLAGGLNGLNTSAMIDGGSFDGTKAYKDSKVCNMFTMQEFHRRYHEETGITFASLYPGCIATTGLFREHMCCE

SEQ ID NO: 40662 - protein, 291 aa, Arabidopsis thaliana
  Clone ID: LIB23-003-C10_FLI.pep
QIIIMLHASRGNKWSVIARHLPRRTDNEIKNYWNTHLKKRLMEQGIDPVTHKPLASSSNPTVDENLNSPNASSSDKQYSRSSSMPFLSRPPPSSCNMVSKVSELSSNDGTPIQGSSLSCKKRFKKSSSTSRLLNKVAAKATSIKDILSASMEGSLSATTISHASFFNGFTEQIRNEEDSSNTSLTNTLAEFDPFSPSSLYPEHEINATSDLNMDQDYDFSQFFEKFGGDNHNEENSMNDLLMSDVSQEVSSTSVDDQDNMVGNFEGWSNYLLDHTNFMYDTDSDSLEKHFI

SEQ ID NO: 40663 - protein, 374 aa, Arabidopsis thaliana
  Clone ID: LIB23-010-E9_FLI.pep
LIPFLLLLLSSKPLVFVAMSLVSDLINLNLSDSTDKIIAEYIWVGGSGMDMRSKARTLPGPVTDPSQLPKWNYDGSSTGQAPGEDSEVILYPQAIFKDPFRRGNNILVMCDAYTPAGEPIPTNKRHAAAKVFSNPDVAAEVPWYGIEQEYTLLQKDVKWPVGWPIGGYPGPQGPYYCGIGADKSFGRDVVDSHYKACLYAGINISGINGEVMPGQWEFQVGPAVGISAADEIWVARYILERITEIAGVVVSFDPKPIPGDWNGAGAHCNYSTKSMREEGGYEIIKKAIDKLGLRHKEHIAAYGEGNERRLTGHHETADINTFLWGVANRGASIRVGRDTEKEGKGYFEDRRPASNMDPYIVTSMIAETTILWNP

SEQ ID NO: 40664 - protein, 293 aa, Arabidopsis thaliana
  Clone ID: LIB23-014-D1_FLI.pep
QNTHLSSSFDLLLFLYCLFGFSPPVLMEASPNDRLHFGKMGFGCKHYKRRCQIRAPCCNEVFDCRHCHNESTSTLRNIYDRHDLVRQDVKQVICSVCDTEQPAAQVCSNCGVNMGEYFCSICIFYDDDTEKQQFHCDDCGICRVGGRENFFHCKKCGSCYAVGLRNNHRCVENSMRHHCPICYEYLFDSLKDTNVMKCGHTMHVECYNEMIKRDKFCCPICSRSVIDMSKTWQRLDEEIEATAMPSDYRDKKVWILCNDCNDTTEVHFHIIGQKCGHCRSYNTRAIAPPVLPQ

SEQ ID NO: 40665 - protein, 415 aa, Arabidopsis thaliana
  Clone ID: LIB23-022-B11_FLI.pep
ELVNVIMASNEMEKSSKEKEPKTPPPSSTAPPSSQEPSSAVSAGMATPDWSGFQAYSPMPPPHGYVASSPQPHPYMWGVQHMMPPYGTPPHPYVAMYPPGGMYAHPSMPPGSYPYSPYAMPSPNGMTEVSGNTTGGTDGDAKQSEVKEKLPIKRSRGSLGSLNMITGKNNEPGKNSGASANGAYSKSGESASDGSSEGSDGNSQNDSGSGLDGKDAEAASENGGSANGPQNGSAGTPILPVSQTVPIMPMTAAGVPGPPTNLNIGMDYWGAPTSAGIPGMHGKVSTPVPGVVAPGSRDGGHSQPWLQDDRELKRQRRKQSNRESARRSRLRKQAECDELAQRAEVLNEENTNLRAEINKLKSQCEELTTENTSLKDQLSLFPPLEGISMDNDHQEPDTNQTGAAERKVDSYKDST

SEQ ID NO: 40666 - protein, 245 aa, Arabidopsis thaliana
  Clone ID: LIB23-024-E9_FLI.pep
RRLFRAQRKHPPHHRLLQQNLPPEIADFFILSLSFRSDSMPSRRRTLLKVIILGDSGVGKTSLMNQYVNKKFSNQYKATIGADFLTKEVQFEDRLFTLQIWDTAGQERFQSLGVAFYRGADCCVLVYDVNSMKSFENLNNWREEFLIQASPSDPENFPFVLIGNKVDVDDGNSRVVSEKKAKAWCASKGNIPYFETSAKVGTNVEEAFQCIAKDALKSGEEEELYLPDTIDVGTSNQQRSTGCEC

SEQ ID NO: 40667 - protein, 374 aa, Arabidopsis thaliana
  Clone ID: LIB23-031-G5_FLI.pep
SSLMSLHVKGPVCQTCGDIGFEEALVFCDSCMFESIHRYCLGITPIPFTEYITWICEDCDNSESDSDCNEVDQTVKKKKKSRNQPLVVLAEDNVLQEPLEGSKREESSCSRKPHELTCLDGNGESVLEAADSSSVPDHSSCTSKRKEVDQTANLGHILERSEKKKKKKKKKKSINHSPPVLAVEDHELQGTTNVVEPVEVSSSSPTKETMESKRQESSDSRKPHELTCLVGDSETANSSSVPEHNSCAVKKRKLSSGNKQIQLADGSSSCRVAESNMPLTLTSRNYRAQPIKIPIWRGLMSVKGGNSCTMDGIVAHVSSLACPKVHETASSLKGRLSAEILPRLEVWPKTFLKNGGPKDESVALFFFPSSERCT

SEQ ID NO: 40668 - protein, 249 aa, Arabidopsis thaliana
  Clone ID: LIB23-036-H8_FLI.pep
SLPHCPITLQSLYVHNNITMVKQERKIQTSSTKKEMPLSSSPSSSSSSSSSSSSSSCKNKNKKSKIKKYKGVRMRSWGSWVSEIRAPNQKTRIWLGSYSTAEAAARAYDVALLCLKGPQANLNFPTSSSSHHLLDNLLDENTLLSPKSIQRVAAQAANSFNHFAPTSSAVSSPSDHDHHHDDGMQSLMGSFVDNHVSLMDSTSSWYDDHNGMFLFDNGAPFNYSPQLNSTTMLDEYFYEDADIPLWSFN

SEQ ID NO: 40669 - protein, 367 aa, Arabidopsis thaliana
  Clone ID: LIB23-054-E6_FLI.pep
FPKHTDYFLSDAAMSLLSDLVNLNLTDATGKIIAEYIWIGGSGMDIRSKARTLPGPVTDPSKLPKWNYDGSSTGQAAGEDSEVILYPQAIFKDPFRKGNNILVMCDAYTPAGDPIPTNKRHNAAKIFSHPDVAKEEPWYGIEQEYTLMQKDVNWPIGWPVGGYPGPQGPYYCGVGADKAIGRDIVDAHYKACLYAGIGISGINGEVMPGQWEFQVGPVEGISSGDQVWVARYLLERITEISGVIVSFDPKPVPGDWNGAGAHCNYSTKTMRNDGGLEVIKKAIGKLQLKHKEHIAAYGEGNERRLTGKHETADINTFSWGVANRGASVRVGRDTEKEGKGYFEDRRPASNMDPYVVTSMIAETTILG

SEQ ID NO: 40670 - protein, 358 aa, Arabidopsis thaliana
  Clone ID: LIB23-055-G8_FLI.pep
INSVGLRKPRRREKKKSMEGGGRGPNQTILSEIEHMPEAPRQRISHHRRARSETFFSGESIDDLLLFDPSDIDFSSLDFLNAPPPPQQSQQQPQASPMSVDSEETSSNGVVPPNSLPPKPEARFGRHVRSFSVDSDFFDDLGVTEEKFIATSSGEKKKGNHHHSRSNSMDGEMSSASFNIESILASVSGKDSGKKNMGMGGDRLAELALLDPKRAKRILANRQSAARSKERKIRYTGELERKVQTLQNEATTLSAQVTMLQRGTSELNTENKHLKMRLQALEQQAELRDALNEALRDELNRLKVVAGEIPQGNGNSYNRAQFSSQQSAMNQFGNKTNQQMSTNGQPSLPSYMDFTKRG

SEQ ID NO: 40671 - protein, 276 aa, Arabidopsis thaliana
  Clone ID: LIB23-068-C8_FLI.pep
SYEDDHPHQSPSLAPLLPSCSLPQDLHGFASFLGKRSPMEGCCDLETGNNMNGEEDYSDDGSQMGEKKRRLNMEQVKTLEKNFELGNKLEPERKMQLARALGLQPRQIAIWFQNRRARWKTKQLEKDYDTLKRQFDTLKAENDLLQTHNQKLQAEIMGLKNREQTESINLNKETEGSCSNRSDNSSDNLRLDISTAPPSNDSTLTGGHPPPPQTVGRHFFPPSPATATTTTTTMQFFQNSSSGQSMVKEENSISNMFCAMDDHSGFWPWLDQQQYN

SEQ ID NO: 40672 - protein, 177 aa, Arabidopsis thaliana
  Clone ID: LIB24-001-B1_FLI.pep
GKASNDVYLLEKIWKILAEIEDLHMLMDPEDFLKLKKQLQIKSTGKNDAFCFRSKGLVEMMKMSKDLRQKVPAVLAVEVDPTGGPRLQEAAMKLYARKTECDKIHLLQGMQAVEAAAKSFFFGYRQLVAAMMGSAEMNATASQESCDSLSQIFMEPTYFPSLDAAKTFLGEFWSHLG

SEQ ID NO: 40673 - protein, 140 aa, Zea mays
  Clone ID: LIB3076-004-A9_FLI.pep
QRRHFTHDWSFTSAAQPASGSSARRNRRTARASEDEGDPRGSPAPRPGCCRLLVQASRRGSRRRRGAGRRVRRQVPQPVLAEEGRAVHGPVHDVLRQVPGLRAVGAVRQQGRVPLLQGHEVPQEPAPQVPLGPTALREGG

SEQ ID NO: 40674 - protein, 476 aa, Arabidopsis thaliana
  Clone ID: LIB24-001-F8_FLI.pep
PSEHLSETSMNVEKELEMPAVEILPDNDKNSDVLAVGVSGDSDNVVSVLPASQTSSDRDEGMITVDAEPTEDMKLDVPDSKLVTDTTVDSTNNKDAHVEANTERQDNSSALVLNDANNESAPVKRVPGPYVASSNIKSEARGSGDLNNGVHKIVRTPPVFDGTMRAKRSFLLDDASDGNESGTEEDQSAFMKELDSFFRERNMDFKPPKFYGEGLNCLKLWRAVTRLGGYDKVTGSKLWRQVGESFRPPKTCTTVSWTFRGFYEKALLEYERHKVSEGELQIPLPLELEPMNIDNQASGSGRARRDAASRAMQGWHSQRLNGNGEVSDPAIKDKNLVLHQKREKQIGTTPGLLKRKRAAEHGAKNAIHVSKSMLDVTVVDVGPPADWVKINVQRTQDCFEVYALVPGLVREEVRVQSDPAGRLVISGEPENPMNPWGATPFKKVVSLPTRIDPHHTSAVVTLNGQLFVRVPLEQLE

SEQ ID NO: 40675 - protein, 502 aa, Glycine max
  Clone ID: 700674513_FLI.pep
QTQTQSMAKPHSGTPAVAPKPAWVLPYRTENLREVYTLSRKLGQGQFGTTFLCTHKGTGRTYACKSIPKRKLLCKEDYDDVWREIQIMHHLSEQPNVVRIHGTYEDAASVHLVMELCEGGELFDRIVRKGHYSERQAAKLIKTIVEVVEACHSLGVMHRDLKPENFLFDTVEEDAKLKTTDFGLSVFYKPGETFCDVVGSPYYVAPEVLRKHYGPEADVWSAGVILYILLSGVPPFWAETEQGIFRQILLGRLDFQSEPWPSISDSAKDLIRKMLDRNPKTRVTAHQVLCHPWIVDDNIAPDKPLDSAVLSRLKQFSAMNKLKKMALRVIAERLSEEEIGGLKELFRMIDADNSGTITFDELKEGLKRVGSELMESEIKDLMDAADIDNSGTIDYGEFIAATVHLNKLEREENLVSAFSYFDKDGSGYITIDEIQQACKEFGLDDVHIDEIVKEIDQDDDGQIDYGEFAAMMRKGNGGIGRRTMRSTLNFRDTLGIKGHGSD

SEQ ID NO: 40676 - protein, 105 aa, Zea mays
  Clone ID: 700570619_FLI.pep
RHRPKRDCIGLSCSCLPSFKQLAICNYYHCFVQYAKCVFDEEQIHEAKEKKGKRKFAKVRAYYFCRHNGYWSQKLTCHVVTGSSSSVQLGLIFASPRTNGKLFHL

SEQ ID NO: 40677 - protein, 304 aa, Arabidopsis thaliana
  Clone ID: LIB24-006-A2_FLI.pep
WGEEQMGRTPCCDKIGLKKGPWTPEEDEVLVAHIKKNGHGSWRTLPKLAGLLRCGKSCRLRWTNYLRPDIKRGPFTADEEKLVIQLHAILGNRWAAIAAQLPGRTDNEIKNLWNTHLKKRLLSMGLDPRTHEPLPSYGLAKQAPSSPTTRHMAQWESARVEAEARLSRESMLFSPSFYSGVVKTECDHFLRIWNSEIGEAFRNLAPLDESTITSQSPCSRATSTSSALLKSSTNSWGGKEVTVAIHGSDYSPYSNDLEDDSTDSALQLLLDFPISDDDMSFLEENIDSYSQAPPIGLVSMVSKF

SEQ ID NO: 40678 - protein, 563 aa, Arabidopsis thaliana
  Clone ID: LIB24-006-A9_FLI.pep
SEDDEDTWSGGDPTVLRGTDLSATDSYPLKKQKLGSEVAGRKKTLFRSQSAQSRSFRVPQSEKEDESLEGVNINRLKKSVASFQEDKYPPGKKFCSDASPRGTSMRKFSPPFVPNAWRRLSMPVELKKARLDFSEEKDDEETGKWESEMTHERELRDDDYVSGDDGENNEVLLRSNPSSSGYDDYNDDDEESSEEEGDNNKRAHVLDQTDYTGAEFYQSESDSPTSIEILPSERAMYYSEAGNMIYGQTSCKEDERFDSEVGQGSLFVEVDTIPIPGPPGSFLPSPRDMGFDENLGNSSVITSQVQSSMDQLDRNSSESPVSAVSNFAAGRLNFPAELSSFRENFSPDIAMSYSTTPMSFCVPSHHGTITEAEPITIDKTISPSRFRNNDQESCCCQRKERISEGITLNHQGSHLLQRRAASSSNTMNLTNSPTRLDPNHPFEQSPYKTQQALDLQMSKFSSRKSLNAVVPPSPSNPVLRLMGKDLMVMNQGEADEEASRSSLTPNPQFVDPPCGGTGLYFNTGLYLRNSFDSTHQPQVQAQQQSQAAAFRNNFDHVRYFSPS

SEQ ID NO: 40679 - protein, 133 aa, Zea mays
  Clone ID: 700571573_FLI.pep
FYFYEKMKSHVPEEHRKGIIAKLGCGSVAGLLGQTITYPLDVVRRQMQVQALSSSSLVGRGTFESLVMIAKQQGWRQLFSGLSINYLKVVPSVAIGFTVYDSMKVWLKVPSREETAVAVLTEERSNTAPIPSS

SEQ ID NO: 40680 - protein, 557 aa, Arabidopsis thaliana
  Clone ID: LIB24-006-C1_FLI.pep
MADSSPDSCFKGGKFSAPGFRFHPTDEELVMYYLKRKICRKRLRVNVIGVVDVYKMDPEELPGQSMLKTGDRQWFYFTPRSRKYPNAARSNRGTENGYWKATGKDRVIEYNSRSVGLKKTLVFYRGRAPSGERTDWVMHEYTMDEDELGRCKNPQEYYALYKLFKKSGAGPKNGEQYGAPFQEEEWVDDDNEDVNAIAVAVPEQPVVRYEDARRVDERRLFNPVILQLEDIDELLNGIPNAPGVPQRCIPQVNSEEELQSTLVNNSAREFLPNGQQYNRPSSFDSLETAEVTSAPLVFEKEDFIEMDDLLLIPEFGASSTEKAAQFSNHGEFDDFNEFDQLFHDVSMSLDMEPIDQGTSANLSSLSDSANYTSDQKQQLLYQQFQDQTPENQLNNIMDPSTTLNQITSDIWFEDDQAILFDQQQSFSGAFASPSSGVMPDSTNPTMSVNAQGHEIQNGGGTTSQFSSALWALMDSIPSTPASACEGPLNRTFVRMSSFSRMRFNGKANGTPVSTTIAKKGIRNRGFLLLSIVGALCAIFWVLVATVRVSGRSLLLKD

SEQ ID NO: 40681 - protein, 498 aa, Arabidopsis thaliana
  Clone ID: LIB24-010-E5_FLI.pep
NQSLPSSHLKEVIQFTSKMVKICCIGAGYVGGPTMAVIALKCPSVEVAVVDISVPRINAWNSDQLPIYEPGLDDVVKQCRGKNLFFSTDVEKHVREADIVFVSVNTPTKTRGLGAGKAADLTYWESAARMIADVSVSDKIVVEKSTVPVKTAEAIEKILTHNSKGIKFQILSNPEFLAEGTAIEDLFMPDRVLIGGRETTEGFAAVKALKDIYAQWVPEERILTTNLWSAELSKLAANAFLAQRISSVNAMSALCEATGANVSEVSYAVGKDSRIGPKFLNSSVGFGGSCFQKDILNLVYICECNGLPEVAEYWKQVIKINDYQKTRFVNRIVSSMFNTVSNKKIAVLGFAFKKDTGDTRETPAIDVCKGLLGDKARLSIYDPQVTEEQIQRDLTMNKFDWDHPLHLQPMSPTTVKQVSVAWDAYTATKDAHGICILTEWDEFKKLDFQRIFENMQKPAFVFDGRNVVDADKLREIGFIVYSIGKPLDQWLKDMPALA

SEQ ID NO: 40682 - protein, 583 aa, Arabidopsis thaliana
  Clone ID: LIB24-011-F8_FLI.pep
PGPWNSTTYYSGVREHVFTGSVSSLASFMSNQETSFVTLGQRVLAKPLKIRMHYGHPDVFDRVFHITRGGISKASRVINISEDIFAGFNTTLRQGNVTHHEYIQVGKGRDVGLNQIALFEGKVAGGNGEQVLSRDVYRLGQLLDFFRMMSFFFTTVGFYLCTMLTVLTVYIFLYGRAYLALSGVGATIRERAILLDDTALSAALNAQFLFQIGVFTAVPMVLGFILEQGFLQAIVSFITMQFQLCTVFFTFSLGTRTHYFGRTILHGGARYQATGRGFVVKHIKFSENYRLYSRSHFVKAMEVILLLVVYLAYGNDEAGAVSYILLTVSSWFLAVSWLFAPYLFNPAGFEWQKVVEDFKEWTNWLFYRGGIGVKGAESWEAWWEEELSHIRTLSGRIMETILSLRFFIFQYGIVYKLKLQGSDTSFAVYGWSWVAFAMIIVLFKVFTFSQKISVNFQLLLRFIQGLSLLMALAGIIVAVVLTPLSVTDIFACVLAFIPTGWGILSIACAWKPVLKRMGMWKSIRSLARLYDALMGMLIFLPVALCSWFPFVSTFQTRMMFNQAFSRGLEISLILAGDNPNSGL

SEQ ID NO: 40683 - protein, 150 aa, Glycine max
  Clone ID: 700893909_FLI.pep
LQKGDRTLADYMKDRNFPSNLESVMFGRVLQGVDSSKRNALIIKQIMRQIITSLRKIHDTGIVHRDVKPANLVVTKRGQIKLIDFGAATDLRIGKNYVPNRTLLDPDYCPPELYVLPEETPSPPPEPIAAFLSPILWQLGLYSCKWQYQA

SEQ ID NO: 40684 - protein, 250 aa, Arabidopsis thaliana
  Clone ID: LIB24-014-G10_FLI.pep
QDVWFPLLFRPNLYFLGILSFSFLLIKTLEFAPIRREKGIEMVNGESSTSTSYSDSNNDTNDQGGDFECNICFELAQDPIVTLCGHLFCWPCLYRWLHHHSHSQECPVCKAVVQDDKLVPLYGRGKNQTDPRSKRYPGLRIPNRPTGQRPETAAPPPQPEAASNFFNYGIGLMGGIMPMMATTRFGNFSMGFGGLLPSLFNFQFHGFLMLRFMVQHRVILTVVIITVSVEFLLVDKSVLWLVEETKVMHF

SEQ ID NO: 40685 - protein, 114 aa, Arabidopsis thaliana
  Clone ID: LIB24-015-H9_FLI.pep
VIPLAKYRKAICGSQLSVGMRFGMMFETEDSGKRRYMGTIVGISDLDPLRWPGSKWRNLQVEWDEPGCNDPWEEFVGCVRCIRILSPTEVQQMSEEGMKLLNSAGINDLKTSVS

SEQ ID NO: 40686 - protein, 225 aa, Arabidopsis thaliana
  Clone ID: LIB24-033-G5_FLI.pep
EGLGLSRNSDERYLELGQLENENNSFAKHLESANTMISFIWWVIGFYWVSSGGQELAQGSPQLYWLCIVFLGFDVFFVVFCVALACVIGIAVCCCLPCIIAVLYAVAEQEGASKEDIDQLTKFKFRKVGDTMKHTVDEEQGQGDSGGVMTECGTDSPVEHALPHEDAECCICLSAYEDETELRELPCGHHFHCGCVDKWLYINATCPLCKYNILKSSNYEEGEEV

SEQ ID NO: 40687 - protein, 670 aa, Arabidopsis thaliana
  Clone ID: LIB24-043-F3_FLI.pep
VPELETEIVFHQEHDDGKNCIVFFDGEQGSESAGAIPDAHEESQTADLNGEQTQLEPENGSTSEDNERSREIEEVLDGDVSKDLDAVDPLAGEVIEEEVDFEDVEYHDVENMMDKQETHDLYCPNCDSCITKKVILKRRKRKIRRHELGDSKRPHLTEPLFHSEDNLPSLDGGENSANESFVFKCLSCFTIFIPKGVSSKPIPPRQGVEGLKIQPNPQVEATGDSNWFSSIFGLNKKESAIQQGGASSSVLEANPPPRESIVPVVNPSRGNLSPMRKDTTGSAVVQPDAATSIQVAKSNDTSEIVNNGAIVGDGQKFLAPMVEEQTQQKIDNDDSSTADGNHTSDKGRLSPIQPSHGMSILNTVTNGPDGLKVETTIHEEGAPLLFEGKDTPDTSTADFGLTKVTGVMDTGDRGVITGPANPEIDISAGNLLEEGSLREPLMRRVVVQGRKLEILKSIVYGGLLEAITSLGVISSAAGSGASMLNILVLGLANLLGGLILIIHNLQELREEEPIRTTTEDNQTNGREEEEGRYKRLLGRRENFTLHATVAILSFIITGILPPVVYYFSFSEKHNKDYKVASVFGASLFCIVLLAIAKAHVRYPRGSYLKSILYYGSIAVSVSGISYVVGNFLEQLLEKHGWSDGSETPVGQMMLSSLMGRKAGFGYSSSY

SEQ ID NO: 40688 - protein, 107 aa, Arabidopsis thaliana
  Clone ID: LIB24-044-A9_FLI.pep
ILLTMVSIVTFFRASLMESNCNSHKIKKKKKLCSACNCFIHMNSEFKESQPLFLGTIIFSQMQIQPSRWLEQDQRLCSGTHSVRLAGHYQLLHQLQLEDKPPTHAVC

SEQ ID NO: 40689 - protein, 269 aa, Arabidopsis thaliana
  Clone ID: LIB24-052-B5_FLI.pep
TSVYGSPGSTPLHLAARSGSIDCVRKLLAWGADRLQRDASGRIPYVVAMKHKHGACGALLNPSSAEPLVWPSPLKFISELNDEAKLLLEQALMEANREREKTILKGTAYSLPSPSFSDTDDNMSEVSDTELCCICFEQVCTIEVKDCGHQMCAQCTLALCCHNKPNPTTSTVTPPVCPFCRSTIACLVVAQNNNNNNEKSKSLDDVVVVDREAGDVSSSKFRKHRRSINLGEESSSFMGLSTIGSFGRITGRGSGRIAAENELMDKPIL

SEQ ID NO: 40690 - protein, 323 aa, Glycine max
  Clone ID: 700875376_FLI.pep
VFQAKCLETGETVAIKKVLQDKRYKNRELQTMRLLDHPNVVTLKHCFFSTTEKDELYLNLVLEYVPETVHRVIRHYNKMNQRMPLIYVKLYFYQICRALAYIHNCIGVSHRDIKPQNLLVNPHTHQLKICDFGSAKVLVKGEPNISYICSRYYRAPELIFGATEYTTAIDIWSAGCVLGELLLGQPLFPGESGVDQLVEIIKVLGTPTREEIKCMNPNYTEFKFPQIKAHPWHKIFHKRLPPEAVDLVSRLLQYSPNLRCTALEALAHPFFDELRDPNTRLPNGRYLPPLFNFRANELKGVPPEMLVKLIPSHARKQCALFAS

SEQ ID NO: 40691 - protein, 476 aa, Arabidopsis thaliana
  Clone ID: LIB24-061-A11_FLI.pep
VREGIIDVDGGEEDYEVLKRSNTPHMFCKTLTASDTSTHGGFSVPRRAAEDCFPPLDYSQPRPSQELLARDLHGLEWRFRHIYRGQPRRHLLTTGWSAFVNKKKLVSGDAVLFLRGDDGKLRLGVRRASQIEGTAALSAQYNQNMNHNNFSEVAHAISTHSDHSISYNPKASWSNFIIPAPKFLKVVDYPFCIGMRFKARVESEDASERRSPGIISGISDLDPIRWPGSKWRCLLVRWDDIVANGHQQRVSPWEIEPSGSISNSGSFVTTGPKRSRIGFSSGKPDIPVSEGIRATDFEESLRFQRVLQGQEIFPGFINTCSDGGAGARRGRFKGTEFGDSYGFHKVLQGQETVPAYSITDHRQQHGLSQRNIWCGPFQNFSTRILPPSVSSSPSSVLLTNSNSPNGRLEDHHGGSGRCRLFGFPLTDETTAVASATAVPCVEGNSMKGASAVQSNHHHSQGRDIYAMRDMLLDIAL

SEQ ID NO: 40692 - protein, 185 aa, Arabidopsis thaliana
  Clone ID: LIB24-066-D5_FLI.pep
AGFADTVIMKPLRASMIGACLQQVLELRKTRQQHPEGSSPATLKSLLTGKKILVVDDNIVNRRVAAGALKKFGAEVVCAESGQVALGLLQIPHTFDACFMDIQMPQMDGFEATRQIRMMEKETKEKTNLEWHLPILAMTADVIHATYEECLKSGMDGYVSKPFEEENLYKSVAKSFKPNPISPSS

SEQ ID NO: 40693 - protein, 117 aa, Arabidopsis thaliana
  Clone ID: LIB24-070-F6_FLI.pep
LTAESVESPSLPLESVDNIHGGHSLPPSVLGVSDSITNYVLEKDLEDATCLLVDETTNTLDSTSTSQSSNGRLGDSLDVVSQNLPVTLGSSFTQAFSSLSTTRHFLERIRFLFFATR

SEQ ID NO: 40694 - protein, 387 aa, Glycine max
  Clone ID: 700875555_FLI.pep
ASYCGSLSPLCRIPLPLWVLDEIQKDIELAYCDRFGRRNIEYISLGCDILPVLHGRSPIQAYADFMRNFRDTFGSLLGVIITGVQIGMGPGGELRYPSFSSQEPNLAWPHELGEFQCYDKYMLASLNASARNIGKREWGNGGPFGSGSLMQNPEHTDFFKNDGGSWDTPYGKFFLEWYSDMLLLHGERICREAETIFRGSEVHISAKLAAIHWHYVTQSHPSELTAGYYNTSNRDGYLPIARMFSKYGFSMCCSCFEMQDAVMQKINPDGSPEGFLRQLLLAARLCDISLEGQNFSTNLDDGAFTQVLKMSKFYSDGIEKRSFSFNFVRMDKRLFESRNWDRFTRFVRQMSNGNIFRARLNSVRDVRLKTTPVVAAVGLLYHLYQHS

SEQ ID NO: 40695 - protein, 266 aa, Arabidopsis thaliana
  Clone ID: LIB24-071-C10_FLI.pep
QSFLCTLNPRIQIGIKAEWRGHHGRLVLFMGNKNTSPLTSVQALILPPAHLRLDLSPVPDTIPPRAQVQSPLEVMNIRPSRDVAVLDFSYKFGANVVSAKLRIPATLNKFLQPLQLTSEEFFPQWRAISGPPLKLQEVVRGVRPLALPEMANLFNSFHVTICPGLDPNPNNLVASTTFYSESTGAILCLARIETDPADRTQLRMTVGTGDPTLTFELKEFIKEQLITVPMGSRALVPAAGPAPPVAQPPSPAALADDPGAMLAGLL

SEQ ID NO: 40696 - protein, 186 aa, Arabidopsis thaliana
  Clone ID: LIB24-074-A2_FLI.pep
SVYGITPLSPSAPAYQSGPSSTGVSNKEQTFPQRPEQPECQYFMRTGDCKFGTSCRFHHPMEAASPEGAVPCTHFAQHGICKFGPACKFDHSLGSSSLSYSPSPSSLTDMPVAPYPSSLGTLAPSSSSDQCTELISSSSIEPITTTTGGSETVAAGVSSMTSDVSHPEPAETNKGDSASNEAKTSS

SEQ ID NO: 40697 - protein, 304 aa, Arabidopsis thaliana
  Clone ID: LIB24-074-G7_FLI.pep
GDQNWKMYSAIRSLPLDGGHVGGDYHGPLDGTNLPGDACLVLTTDPKPRLRWTTELHERFVDAVTQLGGPDKATPKTIMRTMGVKGLTLYHLKSHLQKFRLGRQAGKESTENSKDASCVGESQDTGSSSTSSMRMAQQEQNEGYQVTEALRAQMEVQRRLHDQLEYGQVQRRLQLRIEAQGKYLQSILEKACKAFDEQAATFAGLEAAREELSELAIKVSNSSQGTSVPYFDATKMMMMPSLSELAVAIDNKNNITTNCSVESSLTSITHGSSISAASMKKRQRGDNLGVGYESGWIMPSSTIG

SEQ ID NO: 40698 - protein, 580 aa, Arabidopsis thaliana
  Clone ID: LIB24-075-A12_FLI.pep
EVNRVSFFTSCACFSNKFSRLNSLELEISSKAFMDTGFSFFSVTRHSLELLKAASTSSMVMSSSSWSNDGGLYPFLNHSSRTRGEKPLSSKDVVENDGGDFPAATTVNIPNISAATITPLTASPPYNAGIVRLAVGWTIIGPFRFQGPDKFFRTRAEKYKSTVFRTNIPPTFPFFGNVNPNIVAVLDVKSFSHLFDMDLVDKRDVLIGDFRPSLGFYGGVRVGVYLDTTEPKHAKIKGFAMETLKRSSKVWLQELRSNLNIFWGTIESEISKNGAASYIFPLQRCIFSFLCASLAGVDASVSPDIAENGWKTINTWLALQVIPTAKLGVVPQPLEEILLHTWPYPSLLIAGNYKKLYNFIDENAGDCLRLGQEEFGLTRDEAIQNLLFVLGFNAYGGFSVFLPSLIGRITGDNSGLQERIRTEVRRVCGSGSDLNFKTVNEMELVKSVVYETLRFSPPVPLQFARARKDFQISSHDAVFEVKKGELLCGYQPLVMRDANVFDEPEEFKPDRYVGETGSELLNYLYWSNGPQTGTPSASNKQCAAKDIVTLTASLLVADLFLRYDTITGDSGSIKAVVKAK

SEQ ID NO: 40699 - protein, 108 aa, Glycine max
  Clone ID: 700888971_FLI.pep
APVVQVQPPEYDVNNTAIFVGNLDLNVSEEELKQNFLQFGEIVSVKVQSGKGCGFVQFGTRASAEEAIQKMQEKMIGQQVVRISWGRTLTARQVIWHPYMVIDSPEQL

SEQ ID NO: 40700 - protein, 304 aa, Arabidopsis thaliana
  Clone ID: LIB24-075-G4_FLI.pep
EISKLFTRRPALQRANVAQLEFKLSLLKPLGITSSDLVKILNCRPRFFSCRLVLDERINYFMEILGSKEVLRRVIIRNPSLMLYDLDDKIKPAIEYYKGLGFSQQDLVAMLISRPTLIPRTNFNNEKFEYIEKTGVTRESKMFKYVAVIIGVSRMETIEEKVRNLEKFGFSEEEIWHLYGKCPILLSLSVEKVQRNMTFVIASMKLPAHSVVKHPCLLLLNLESRLKPRADLVKRVLEMRLKPLIKEVSIFRAVRMSEKRFLKVYVMCHPQDIATELMEFYEKSKNMKRLAEKSKKYIRKGFPF

SEQ ID NO: 40701 - protein, 336 aa, Zea mays
  Clone ID: LIB3067-033-C2_FLI.pep
YSKPSKETPTFFECLAAGTALRYARRSCPAAKVRPIRSRQLKWSGVTWPANERNETSKGKERPFSQVEEAGGAPHGVAHAPEVASLECASGAFHDRRRRRSAPRGHLVRRHHGLAVVVLVIRGLQLQLRFAAAPVRGRHRLGPGRHGDGGRLVARARGVLLLRARGGRDGRGGRVVVVGVGEERGQPHAAGGEVAGRGGNRPPEAGGRGRGRGRRGGRGGRGRGGRAAGGPDDVALVELQLLDAVGLGAGVVGLLEQAEEAERRGGSGHAATRRGHGRRQCRARLSSLVAPACGAGAGAGGRHWPCAARRGFRPLLWERYYWRAADASGGDGGRGQ

SEQ ID NO: 40702 - protein, 290 aa, Arabidopsis thaliana
  Clone ID: LIB24-078-H8_FLI.pep
NVDVIGKPDFAYQRGSSPMASTLHGASILLRLSGTWDWFVSISVDDYPLVTQDELLHIMSHLPKDLNFVNHTSYIGWKESRKLKPVIVDPGLYLVEKTDMFFASQKRELPKAFKLFSGPSFSILSRNFMEHCVLGTDNFPRTLLMYLSNTPDSLSNYFPTILCNTDTFKKTIMNNNLLYLASNDTSKERYHQLDHKEFTEMVDSGAAFARGFRYDDTVLDRIDHELLGRKPGEVVPGGWCLGDSSKNRSSCSVWGDSGILRPGSGSDRLERRIVELLSNDWFRLHQCVPE

SEQ ID NO: 40703 - protein, 252 aa, Arabidopsis thaliana
  Clone ID: LIB24-083-D4_FLI.pep
FETQFVKFGGLRMKGLVSTGWKGPVKFRMPTAENLVPIRLDIQFEGQRYKDAFTWNPSDPDNEVVIFAKRTVKDLKLPYAFVTQIAQSIQSQLSDFRAYEGQDMYTGEKIIPIKLDLRVNHTLIKDQFLWDLNNFESDPEEFARTLCKDLGVEDPEVGPAVAFAIREQLYEIAIQSVASARESRLSKKGRRGSDHGSASKASGLSMDLMKLFSFKSSVVRKRKDLDVYEPVVDLLTSEEVDALEAREERHAR

SEQ ID NO: 40704 - protein, 563 aa, Arabidopsis thaliana
  Clone ID: LIB24-085-D12_FLI.pep
VEGSRFKGSDISQMTRLLDILEDYLMYRGYQYCRIDGNTGGDERDASIEAYNKPGSEKFVFLLSTRAGGLGINLATADVVILYDSDWNPQVDLQAQDRAHRIGQKKEVQVFRFCTENAIEAKVIERAYKKLALDALVIQQGRLAEQKTVNKDELLQMVRYGAEMVFSSKDSTITDEDIDRIIAKGEEATAELDAKMKKFTEDAIQFKMDDSADFYDFDDDNKDESKVDFKKIVSENWNDPPKRERKRNYSEVEYFKQTLRQGAPAKPKEPRIPRMPQLHDFQFFNIQRLTELYEKEVRYLMQAHQKTQMKDTIEVDEPEEVGDPLTAEEVEEKELLLEEGFSTWSRRDFNAFIRACEKYGRNDIKSIASEMEGKTEEEVERYAQVFQVRYKELNDYDRIIKNIERGEARISRKDEIMKAIGKKLDRYRNPWLELKIQYGQNKGKLYNEECDRFMICMVHKLGYGNWDELKAAFRTSPLFRFDWFVKSRTTQELARRCDTLIRLIEKENQEFDERERQARKEKKLSKSATPSKRPSGRQANESPSSLLKKRKQLSMDDYGKRRK

SEQ ID NO: 40705 - protein, 320 aa, Arabidopsis thaliana
  Clone ID: LIB24-089-D7_FLI.pep
NYKREKMEKVFSDEEISGNHHWSVNGMTSLNRSASEWAFNRFIQESSAAADDGESTTACGVSVSSPPNVPVDSEEYRAFLKSKLNLACAAVAMKRGTFIKPQDTSGRSDNGGANESEQASLASSKATPMMSSAITSGSELSGDEEEADGETNMNPTNVKRVKRMLSNRESARRSRRRKQAHLSELETQVSQLRVENSKLMKGLTDVTQTFNDASVENRVLKANIETLRAKVKMAEETVKRLTGFNPMFHNMPQIVSTVSLPSETSNSPDTTSSQVTTPEIISSGNKGKALIGCKMNRTASMRRVESLEHLQKRIRSVGDQ

SEQ ID NO: 40706 - protein, 398 aa, Zea mays
  Clone ID: LIB3068-022-C1_FLI.pep
KEGFLYMTESTGCFNAEALEFQTKITKRSGLGDRTYLPPGIQARPPRLSMEEARAEAEAVMFGCLDSLFSATGIDPRRDVRVLIVNCSLFNPTPSLASMVVHRYKMREDVKSFNLGGMGCSAGLIAVDLARDMLQANPGCYAVVVSTENITLNWYFGNDRSMLLSNCIFRMGGAAALLSNRRADAGRAKYRLLHTVRTHKGAADECYGCVYQREDGTGRVGVSLARELMAVAGDALKTNITTLGPLVLPISEQLKFLKSLVLRRALRSRGVRPYIPDFRRAFEHFCVHAGGRAVLEEVQRSLGLRDADMEPSRCTLHRFGNTSSSSLWYELAYAEAKGRVRRGHRVWQIGFGSGFKCNSAVWRALRDVPPVHADGAGGGSNCNPWVDSIQSYPPKEYI

SEQ ID NO: 40707 - protein, 243 aa, Arabidopsis thaliana
  Clone ID: LIB24-091-F5_FLI.pep
LSNTKLANQRDSNEETGNGQYHYNAEEITRIINEPEYYPPGYNLSTTAISNMVSMLTNVVSGETEPSASATWTMGHKREREEFSLPPQPLITGSAVTKECESSMSLERPKKYRGVRQRPWGKWAAEIRDPHKATRVWLGTFETAEAAARAYDAAALRFRGSKAKLNFPENVGTQTIQRNSHFLQNSMQPSLTYIDQCPTLLSYSRCMEQQQPLVGMLQPTEEENHFFEKPWTEYDQYNYSSFG

SEQ ID NO: 40708 - protein, 321 aa, Glycine max
  Clone ID: 700792664_FLI.pep
LTMLDEVYRRYRQYYQQMQAVVTSFEYVSGLSNAAPYASLAIKAMSKHFRCLKNAITDQIQFANKAHFHISNRKDESPRFGNSDRGPYGQRPGFLEHQPVWRPQRGLPERAVTVLRAWLFEHFLHPYPTDTDKLMLAKQTGLSRSQVSNWFINARVRLWKPMVEEIHMLETRQAPKNLQKEEHCTNKPSDHLPSDNSIVSENPSTSTDKFQEAPYKRAINELPNIPVRTQEQLNLPCTSNQPGGVGVSMGGSASNSVSLTLGLYQNHGIGLAEPFPLNAAQRFGVALETNNEGYVMSDYESQNRHFGRDVIGGQLLHDFVG

SEQ ID NO: 40709 - protein, 333 aa, Zea mays
  Clone ID: UC-ZMFLMO17224A07_FLI.pep
AGNPATPATRNITVDTVAPAVTIDSISDDTGAQANDFITNDDTLVFNGTAEADSTVVVSLDGIEIGTVTANGAGEWTLDYTGTLLADGDYELSVTATNPTGNSATATQTIVVDTTAPTVTINAIAVDDIINAVEAGSPVAVSGTTTGVEDGQVVTVTIDGNTYTATVTGNAWTFNIPVADIANFEATEEVVATVSDLAGNPATPATRNITVDTTAPTVTINAIAVDDIINAVEAGSPVAVSGTTTGVEDGQVVTVTIDGNTYTATVTGNAWTFNIPVADIANFEATEEVVATVSDPGRKPLDWPPWFALPRPTLPLFLPPLRFGDGVYCDFAA

SEQ ID NO: 40710 - protein, 241 aa, Zea mays
  Clone ID: UC-ZMFLMO17225H06_FLI.pep
GLKKLNLRSPSADRYARFLVEKGYAVAICDQVEDAAEAQAEKRMVERQVTKLLTPGTLTDDSMLPAKRNNFLAAIAMVEDKWGLAHADISTGEFFTCQSSNLDDLAVELLRLQPSEVLIPTSAPDIRNILRPGEPSEHIPKQLPTSFCYSLRSQAPFSLVEAKQRLLTTFRVKSLEGMGCEGLPLAIRAAGGLLEYIEDTQKAHVVPIQPLKTYGLTDFLVLDPRLFSLGFTHCDDCGRWC

SEQ ID NO: 40711 - protein, 145 aa, Zea mays
  Clone ID: UC-ZMFLMO17227E06_FLI.pep
ASPQLPPPLPCAHYLTAPPNSKLNLSAPPSPYPDSPWILQKRKSRVLWRSESIGPPGWLRSCSYTNHSRYGPYVPAYFSLEPELDPLGFLCPRWKGYSSFPYLAGVSAVPQWGNYAPTNPLLSLPCLRLRPEPHYPWFVSNPLQM

SEQ ID NO: 40712 - protein, 230 aa, Zea mays
  Clone ID: UC-ZMFLMO17228C09_FLI.pep
TGSSSWPSSGSNYPLWRKSSMALFKSKVLTLALFAALSLTAKPTVSWPLPSTSTLLTQIPSAEIEEPELREPEEDDTPELMEDPQGQSNPFLAPELDELVDNKISEDVWQQMLGELPCSVTTEDCINQLQNVAVQNSRLLADLQEKIDEAQNAVDEARRKNLDSIAIGNFSPFIQTFLYSTLGPVSNGVEPPVNNPFRLILGNTLSAFLGQGLGALFNWSDYAANDSQQQ

SEQ ID NO: 40713 - protein, 256 aa, Arabidopsis thaliana
  Clone ID: LIB24-111-H3_FLI.pep
QISLFLSLMAATLGRDQYVYMAKLAEQAERYEEMVQFMEQLVTGATPAEELTVEERNLLSVAYKNVIGSLRAAWRIVSSIEQKEESRKNDEHVSLVKDYRSKVESELSSVCSGILKLLDSHLIPSAGASESKVFYLKMKGDYHRYMAEFKSGDERKTAAEDTMLAYKAAQDIAAADMAPTHPIRLGLALNFSVFYYEILNSSDKACNMAKQAFEEAIAELDTLGEESYKDSTLIMQLLRDNLTLWTSDMQEQMDEA

SEQ ID NO: 40714 - protein, 523 aa, Arabidopsis thaliana
  Clone ID: LIB24-113-C11_FLI.pep
ILVIDWLIRALSFLFLSLETREMALYLSSSRLITFLSFILLLSNGFSSSSSRPSIHHRHHLDNHNYKDALSKSILFFEGQRSGKLPPNQRMTWRSNSGLSDGSALNVDLVGGYYDAGDNMKFGFPMAFTTTMLSWSLIEFGGLMKSELPNAKDAIRWATDFLLKATSHPDTIYVQVGDPNMDHACWERPEDMDTPRSVFKVDKNNPGSDIAGEIAAALAAASIVFRKCDPSYSNHLLQRAITVFTFADKYRGPYSAGLAPEVCPFYCSYSGYQDELLWGAAWLQKATNNPTYLNYIKANGQILGADEFDNMFSWDNKHVGARILLSKEFLIQKVKSLEEYKEHADSFICSVLPGASSSQYTPGGLLFKMGESNMQYVTSTSFLLLTYAKYLTSARTVAYCGGSVVTPARLRSIAKKQVDYLLGGNPLKMSYMVGYGLKYPRRIHHRGSSLPSVAVHPTRIQCHDGFSLFTSQSPNPNDLVGAVVGGPDQNDQFPDERSDYGRSEPATYINAPLVGALAYLARS

SEQ ID NO: 40715 - protein, 208 aa, Arabidopsis thaliana
  Clone ID: LIB24-113-E9_FLI.pep
EIPIKMSGDNGGGERRKGSVKWFDTQKGFGFITPDDGGDDLFVHQSSIRSEGFRSLAAEEAVEFEVEIDNNNRPKAIDVSGPDGAPVQGNSGGGSSGGRGGFGGGRGGGRGSGGGYGGGGGGYGGRGGGGRGGSDCYKCGEPGHMARDCSEGGGGYGGGGGGYGGGGGYGGGGGGYGGGGRGGGGGGGSCYSCGESGHFARDCTSGGR

SEQ ID NO: 40716 - protein, 153 aa, Arabidopsis thaliana
  Clone ID: LIB24-114-H8_FLI.pep
GEPLPGTELKEVWHLADVPKNDNFQYTHFAHKINSFDTAPAKLLASDSRIRPDRYSLEQGDLSKAGSEKHSLEERQRAEKRTRETKGQKFTPRWFDLTDEITPTPWGDIEVYQYNGKYNEHRDTAESSSSASNETDLKSIEFNPWQYGNISTE

SEQ ID NO: 40717 - protein, 530 aa, Arabidopsis thaliana
  Clone ID: LIB24-116-B6_FLI.pep
TESSSIMKEIKKTMTKQMTARRDDTPLHTAVREGKTDLLLEMIGEHDGVELKELLAEQNQSGETALYVAAEYGYTDMVKILMKHSDSVLAGTKAKNGFDAFHIAAKNGNLQVLDVLIEANPELSFTFDSSKTTALHTAASQGHGEIVCFLLDKGVDLAAIARSNGKTALHSAARNGHTVIVKKLIEKKAGMVTRVDKKGQTALHMAVKGQNTEIVDVLMEADGSLINSADNKGNTPLHIAVRKNRAEIVQTVLKYCEVSRVAVNKSGETALDIAEKTGLHEIVPLLQKIGMQNARSIKPAEKVEPSGSSRKLKETVSEIGHEVHTQLEQTGRTRREIQGIAKRVNKMHTEGLNNAINSTTLVAILIATVAFAAIFNVPGQYTDDPKDVPPGYSLGEARAAPRPEFLIFVVFDSFALFISLAVVVVQTSVVVIERRAKKQMMAIINKLMWMACIMISVAFVSLSFVVVGEKEKPLAVGVTAIGALIMVSTLGTMCYWVIANRIEGSKSSPASMMSDPELADSKHNRKLYAV

SEQ ID NO: 40718 - protein, 361 aa, Arabidopsis thaliana
  Clone ID: LIB24-118-C6_FLI.pep
YFLSDAAMSLLSDLVNLNLTDATGKIIAEYIWIGGSGMDIRSKARTLPGPVTDPSKLPKWNYDGSSTGQAAGEDSEVILYPQAIFKDPFRKGNNILVMCDAYTPAGDPIPTNKRHNAAKIFSHPDVAKEEPWYGIEQEYTLMQKDVNWPIGWPVGGYPGPQGPYYCGVGADKAIGRDIVDAHYKACLYAGIGISGINGEVMPGQWEFQVGPVEGISSGDQVWVARYLLERITEISGVIVSFDPKPVPGDWNGAGAHCNYSTKTMRNDGGLEVIKKAIGKLQLKHKEHIAAYGEGNERRLTGKHETADINTFSWGVANRGASVRVGRDTEKEGKGYFEDRRPASNMDPYVVTSMIAETTILG

SEQ ID NO: 40719 - protein, 330 aa, Arabidopsis thaliana
  Clone ID: LIB24-126-E2_FLI.pep
RKEVAAFLDSPIVEDEEGEEREEEEEGGIVSNANFTFEFDPYMMSKAESVNKALEEAIPVGEPLKIHEAMRYAILAAGKRVRPILCLASCELVGGQENAAMPAACAVEMIHTMSLIKDDLPCMDNDDLRRGKPTTHKVYGEGVAILSGGALLSLAFEHMTTAEISSERMVWAVRELARSIGTRGLVAGQAMDISSEGLDLNEVGLEHLEFIHVHKTAVLLETAAVLGAIIGGGSDEEIESVRKFARCIGLLFQVVDDILDETKSSEELGKTAGKDQLAGKLTYPKLIGLEKSKEFVKRLTKDARQHLQGFSSEKVAPLVALTTFIANRNK

SEQ ID NO: 40720 - protein, 350 aa, Zea mays
  Clone ID: 700801321_FLI.pep
QQQYGYGYGYGHHHHQHDHHKIHRFEQGDVVAMPAGAQHWLYNDGDAPLVAVYVFDENNNINQLEPSMRKFLLAGGFSKGQPHFAENIFKGIDARFLSEALGVSMHVAEKLQSRRDQRGEIVRVEPEHGFHQLNPSPSSSSFSFPSSQVQYQTCQRDVDRHNVCAMEVRHSVERLDQADVYSPGAGRITRLTSHKFPVLNLVQMSAVRVDLYQDAIMSPFWNFNAHSAMYGIRGSARVQVASDNGTTVFDDVLRAGQLLIVPQGYLVATKAQGEGFQYIAFETNPDTMVSHVAGKNSVLSDLPAAVIASSYAISMEEAAELKNGRKHELAVLTPAGSGSYQQGQAGSAQQ

SEQ ID NO: 40721 - protein, 573 aa, Glycine max
  Clone ID: 700836189_FLI.pep
GRSDETVSMIESYLRANKMFVDYSEPQVERVYSSYLELNLEDVEPCVSGPKRPHDRVPLREMKVDWHACLNNKVGFKGFAVPKESQNKVAEFTFQGTPAHLRHGDVVIAAITSCTNTSNPSVMLGAALVAKKACELGLQVKPWIKTSLAPGSGVVTKYLQRSGLQKYLNELGFNIVGYGCTTCIGNSGDINEAVASAITENDIVAAAVLSGNRNFEGRVHPLTRANYLASPPLVVAYALAGTVDIDFDTEPIGIGKDGTKIFFKDIWPSSEEIANVVQSSVLPAMFRDTYNAITQGNPMWNNLSVPTGTLYAWDPTSTYIHEPPYFRDMSMSPPGSHGVKDAYCLLNFGDSITTDHISPAGSIHKDSPAARYLIERGVDRRDFNSYGSRRGNDEVMARGTFANIRIVNKFLNGEVGPKTIHIPSGEKLSVFDAAEKYKSEGHDMIILAGAEYGSGSSRDWAAKGPMLLGVKAVIAKSFERIHRSNLVGMGIIPLCFKPGDDADSLGLTGQERYTIDLPSNVNEIRPGQDVTVVTDAGKSFVSTLRFDTEVELAYFNHGGILQYVIRNMVNAKH

SEQ ID NO: 40722 - protein, 386 aa, Arabidopsis thaliana
  Clone ID: LIB24-134-B9_FLI.pep
YKKFSNLKFQISEIAMASVTLGSWIVVHHHNHHHPSSILTKSRSRSCPITLTKPISFRSKRTVSSSSSIVSSSVVTKEDNLRQSEPSSFDFMSYIITKAELVNKALDSAVPLREPLKIHEAMRYSLLAGGKRVRPVLCIAACELVGGEESTAMPAACAVEMIHTMSLIHDDLPCMDNDDLRRGKPTNHKVFGEDVAVLAGDALLSFAFEHLASATSSDVVSPVRVVRAVGELAKAIGTEGLVAGQVVDISSEGLDLNDVGLEHLEFIHLHKTAALLEASAVLGAIVGGGSDDEIERLRKFARCIGLLFQVVDDILDVTKSSKELGKTAGKDLIADKLTYPKIMGLEKSREFAEKLNREARDQLLGFDSDKVAPLLALANYIAYRQN

SEQ ID NO: 40723 - protein, 532 aa, Glycine max
  Clone ID: 700841319_FLI.pep
SESSPFPSSEIYKTLPVREEILRALLNSDLIGFHTFDYARHFLSCCSRMLGLTYESKRGYIGIEYYGRTVSIKILPVGIHLGQLQSVLRMPQTEEKVCELIRQFSDKGRTLLLGVDDMDIFKGISLKLLAMEQLLIQHPEYREKVVLVQIANPARGRGKDVKEVQAETKATVKRINETFGKPGYDPVILIEEPLKFYERVAYYVVAECCLVTAVRDGMNLIPYEYIISRQGNETLDKVLGLASSPKKKSMLVVSEFIGCSPSLSGAIRVNPWNIDAVADAMDSALEMADLEKELRHEKHYRYVSTHDVGYWARSFLQDLERTCSDHVRRRWWGIGFGLSFRVVALDPNFKKLSMEHIISAYKRTATRAILLDYDGTLMPQSSTIDKSPSSKSIEILSSLCRDKNNMVFLVSARSRKMLSEWFCPCENLGVAAEHGYFLRMKRDEEWETHVAATDTSWKQIAEPVMKLYTETTDGSTIEDKETALVWCYEDADPDFGSCQAKELLDHLESVLANEPVTVKSGQSNVEVKPQGC

SEQ ID NO: 40724 - protein, 142 aa, Arabidopsis thaliana
  Clone ID: LIB25-001-A9_FLI.pep
SNWPAHDLHQGIGMDWDSINDLRVDMGRIQQRMDNLQRMLEACMEMQLELQRSIRQEVSAAMHRSTDQPGPSKDTASYESKWEYVRKGICCVCCESNIDSLLYRCGHMNTCEKCAKKLVEAGGKCPMCQAPVIEVVRAYSIL

SEQ ID NO: 40725 - protein, 368 aa, Arabidopsis thaliana
  Clone ID: LIB25-003-F12_FLI.pep
PKQSSIMASRREVRCRCGRRMWVQPDARTVQCSTCHTVTQLYSLVDIARGANRIIHGFQQLLRQHQPQHHEQQQQQMMAQPPPRLLEPLPSPFGKKRAVLCGVNYKGKSYSLKGCISDAKSMRSLLVQQMGFPIDSILMLTEDEASPQRIPTKRNIRKAMRWLVEGNRARDSLVFHFSGHGSQQNDYNGDEIDGQDEALCPLDHETEGKIIDDEINRILVRPLVHGAKLHAVIDACNSGTVLDLPFICRMERNGSYEWEDHRSVRAYKGTDGGAAFCFSACDDDESSGYTPVFTGKNTGAMTYSFIKAVKTAGPAPTYGHLLNLMCSAIREAQSRLAFNGDYTSSDASAEPLLTSSEEFDVYATKFVL

SEQ ID NO: 40726 - protein, 337 aa, Arabidopsis thaliana
  Clone ID: LIB25-007-H7_FLI.pep
FSDPIPAKEDETNGTCSSSSPEMTSFQVMRSSNSRNSDLSRRISSASTSSSSIRPQQQFRRDLTSVGYGGRNDGLYSSNSMTVEGILHDTFASDPPAPTESSLLDASINLMDASPAPMEITTTTASDVVDHGGGTETTRGGKSVDEIWREMVSGEGKGMKEETSEEIMTLEDFLAKAAVEDETAVTASAEDLDVKIPVTNYGFDHSAPPHNPFQMIDKVEGSIVAFGNGLDVYGGGARGKRARVMVEPLDKAAAQRQRRMIKNRESAARSRERKQAYQVELEALAAKLEEENELLSKEIEDKRKERYQKLMEFVIPVVEKPKQQPPRFLRRIRSLEW

SEQ ID NO: 40727 - protein, 451 aa, Arabidopsis thaliana
  Clone ID: LIB25-009-A9_FLI.pep
AELVKSMGHQNAAVSENQNHDDGAASSPGFKLVGFSKFVRKNPKSDKFKVKRFHHIEFWCGDATNVARRFSWGLGMRFSAKSDLSTGNMVHASYLLTSGDLRFLFTAPYSPSLSAGEIKPTTTASIPSFDHGSCRSFFSSHGLGVRAVAIEVEDAESAFSISVANGAIPSSPPIVLNEAVTIAEVKLYGDVVLRYVSYKAEDTEKSEFLPGFERVEDASSFPLDYGIRRLDHAVGNVPELGPALTYVAGFTGFHQFAEFTADDVGTAESGLNSAVLASNDEMVLLPINEPVHGTKRKSQIQTYLEHNEGAGLQHLALMSEDIFRTLREMRKRSSIGGFDFMPSPPPTYYQNLKKRVGDVLSDDQIKECEELGILVDRDDQGTLLQIFTKPLGDRPTIFIEIIQRVGCMMKDEEGKAYQSGGCGGFGKGNFSELFKSIEEYEKTLEAKQLVG

SEQ ID NO: 40728 - protein, 515 aa, Arabidopsis thaliana
  Clone ID: LIB25-011-H1_FLI.pep
IISFWCFLRFWGNSMDTLLKTPNKLDFFIPQFHGFERLCSNNPYHSRVRLGVKKRAIKIVSSVVSGSAALLDLVPETKKENLDFELPLYDTSKSQVVDLAIVGGGPAGLAVAQQVSEAGLSVCSIDPSPKLIWPNNYGVWVDEFEAMDLLDCLDTTWSGAVVYVDEGVKKDLSRPYGRVNRKQLKSKMLQKCITNGVKFHQSKVTNVVHEEANSTVVCSDGVKIQASVVLDATGFSRCLVQYDKPYNPGYQVAYGIVAEVDGHPFDVDKMVFMDWRDKHLDSYPELKERNSKIPTFLYAMPFSSNRIFLEETSLVARPGLRMEDIQERMAARLKHLGINVKRIEEDERCVIPMGGPLPVLPQRVVGIGGTAGMVHPSTGYMVARTLAAAPIVANAIVRYLGSPSSNSLRGDQLSAEVWRDLWPIERRRQREFFCFGMDILLKLDLDATRRFFDAFFDLQPHYWHGFLSSRLFLPELLVFGLSLFSHASNTSRLEIMTKGTVPLAKMINNLVQDRD

SEQ ID NO: 40729 - protein, 282 aa, Arabidopsis thaliana
  Clone ID: LIB25-012-H7_FLI.pep
KPNVPGSGNVSEDTQSSGGNGQKGRETSSNTKKRKRNGQKNSEAAQSHRSQQSEEEPDNNGDEKRNDEQSPNSPGKKSNSGKQQGKQSSDPPKDGYIHVRARRGQATNSHSLAERVRREKISERMKFLQDLVPGCNKVTGKAVMLDEIINYVQSLQRQVEFLSMKLATVNPQMDFNLEGLLAKDALQLRAGSSSTTPFPPNMSMAYPPLPHGFMQQTLSSIGRTITSPLSPMNGGFKRQETNGWEGDLQNVIHINYGAGDVTPDPQAAATASLPAANMKVEP

SEQ ID NO: 40730 - protein, 343 aa, Arabidopsis thaliana
  Clone ID: LIB25-013-A4_FLI.pep
THHAVLSSYEYVSQGLRQYNLDNMMDGFYIAPAFMDKLVVHITKNFLTLPNIKVPLILGIWGGKGQGKSFQCELVMAKMGINPIMMSAGELESGNAGEPAKLIRQRYREAADLIKKGKMCCLFINDLDAGAGRMGGTTQYTVNNQMVNATLMNIADNPTNVQLPGMYNKEENARVPIICTGNDFSTLYAPLIRDGRMEKFYWAPTREDRIGVCKGIFRTDKIKDEDIVTLVDQFPGQSIDFFGALRARVYDDEVRKFVESLGVEKIGKRLVNSREGPPVFEQPEMTYEKLMEYGNMLVMEQENVKRVQLAETYLSQAALGDANADAIGRGTFYGKTEEKEPSK

SEQ ID NO: 40731 - protein, 528 aa, Glycine max
  Clone ID: 700892694_FLI.pep
ISKSSTKVTCGRVDPNSERCTYDSNALDKNLCPHLTDFGLAEYKNDLKRVSTENWKSSGKPTGGFHKKNMVGTLIYMAPEILRKELHTEKSDVYSFGISINELLTGVVPYTDLRTEAQAHTVLEMNYTEQQLTAAVVSDGLRPVLAAEDLGIPSRLLSMIKKCWDADPNNRPAFDDIVEELDLVMEHGKLKKAEDIHIRPYNLHVVQPAGKTDHFKAYQESFSWFTRGELLARSASSANDSGLITRCESSDKPSAYHPTMSWGSYATCGRRETMEDTHFILPHICDEKDAYAFGIFDGHRGAAAAAFSSRAVPAVLQTSDFMGSPANALAEAFIKTDAAFRKELDSYRKSNRCIQKDWHPGCTAIAILIVRNKLFVANIGDCRVILCRAGNPIALSKDHVASCLQERERVIRQGGQVHWQVDTWRVGLPALQVTRSIGDDDLKPAVTAEPEITESTLCPEDEFLVMASDGLWDAISSMEVINIIKDTVKEPGMCSKRLATEAVERGSKDNITVIVVFLRPVSTAERIY

SEQ ID NO: 40732 - protein, 158 aa, Arabidopsis thaliana
  Clone ID: LIB25-027-D7_FLI.pep
RIEALFKPEKPQCFELDLEEKIQNYLPHKELLETVQRLAVRHIFLPSSSDKKNVFFLLSTCEYSKLEEPNVDNVSVDSLISLEEQLETALSVSRARKAELMMEYIESLKEKEKLLREENQVLASQMGKNTLLATDDERGMFPGSSSGNKIPETLPLLN

SEQ ID NO: 40733 - protein, 961 aa, Zea mays
  Clone ID: 700349202_FLI.pep
TPHLDIWWWQGNANLPCCCFECSGGCRMDRRSWLWKRKSLDKSPGESDSSGSASSHSEPSFDDQEPKPVSSNSSPNHSHSPDVSSRIIYNENQEAERAESLNEKLVLATSSNDSSPQHDQSMKPDIYQSPLLFPNIRNDDVPDSVKNLNEKVSPKFKVDDVQDSVKSLNEKLSAALLTINDKDDLVKQHTRVAEEAVAGWEQAEAEVASLKQLLETASKKNTSLEDQVSHLDDALKECVRQLRQAREEQENKIHETVAKKSKELESEKFELQHHIAELSKQLQATKLEATTVRVQRDLQEKLQIVEKENKDLKVELLALSKDLKILARERDLSNQAAETASKLHLESVKKITRVEAECLKLRHLTRRTSLTNDSRLITNSACMESQTDSQSDSGEHMLVDEMKNSDSWATALIAELDQFKNANNDTRNLVNNSVEIDLMDDFLEMEKLAALPEVDCVSSSFGAETDSDQGVSRDKSSKVKTEPLQCQVTDLHAKIEKIEGEKRELEMALADARVQLGTSCDALMVANNRLIDLQMQLDLANESKHAAFGEAERLNGERKDLALQLESRSSQVDELQLMVASLEKNVDRKVLELQLELVSVEAADLRKTVASLEEKIDAEITLSMQHKTNADLAEASKESLEAQLQSANTEIGKLNGIVQTLENEVRKETDSREELLKQIEAMKIESERSLSVVSTKESLEVQLQVANSEVAKLRGMVNALECDAANEKAYSSDLQMQLEAVEGIRKVLESELESSHQEVMRLKEKVSSLEARIKDQTSLLVEYTAKSEDAVSRKKAMEGQLEAANLEVTKLRNKVSLIQGKVEQEKLLSEEYEAKCRKLEAQVLRDSREAKLWRLTNSNGDLKVKQEKELVSAAGKLAECQKTIANLGRQLKSLTDLDGVVADPEKLESRDTHLDFRDGGDVADGLYELGLPKRNGSCLSPLRSDPSPRGLPSLSSYLSKT

SEQ ID NO: 40734 - protein, 144 aa, Arabidopsis thaliana
  Clone ID: LIB25-027-G8_FLI.pep
IEICVIANGATKKEIGRAKDYIVKTLGLEPGQSVDLGTIHAGDFMRRFCSNLAMSNHAVKAAQEAVQKSEEFDIRRSPISIAAVVIYIITQLSDDKKTLKDISHATGVAEGTIRNSYKDLYPHLSKIAPSWYAKEEDLKNLSSP

SEQ ID NO: 40735 - protein, 275 aa, Zea mays
  Clone ID: 700452607_FLI.pep
HRKIKRLALEHNGNDLELHLVPSAPHNGLLNIRSVLRISSPLEERQQNGCLLDISFFSKPDHTEMNCLPVQNQTGFAQTNQEFKLQEPRVYNSHIGSKRSKLWLQNQHHLPQSFHIMSPLLIRGYASSTPRPSVRPLGNDSTPSRRAAAEHGGGRQRRGVELVEAERGADEAEQDPGADHDEDGGVGELVEPEEQALLADVEVHGLLAQAHLLPPLPPDLLLRRRRRRRGGGGLLLRHHHHLRRRGVQPDPAGLVPRLEAVLDAGGLGSGWRRGT

SEQ ID NO: 40736 - protein, 149 aa, Arabidopsis thaliana
  Clone ID: LIB25-036-B4_FLI.pep
KSLKMAKADKKPAEKKPAEKTPAAEPAAAAEKKPKAGKKLPKEPAGAGDKKKKRSKKNVETYKIYIFKVLKQVHPDIGISSKAMGIMNSFINDIFEKLAGESSKLARYNKKPTITSREIQTAVRLVLPGELAKHAVSEGTKAVTKFTSS

SEQ ID NO: 40737 - protein, 569 aa, Glycine max
  Clone ID: 700555656_FLI.pep
TRDKHLLKCHEVERTYEVKVLNHNAALQLLTWNAFKREKIDPSYEDVLNRVVTYASGLPLALEIIGSNMFGKSVAGWESAVEHYKRIPNDEILEILKVSFDALGEEQKNVFLDIAFCLKGCKLTEVEHMLCSLYDNCMKHHIDVLVDKSLIKVKHGIVEMHDLIQVVGREIERQRSPEEPGKRKRLWLPKDIIHVLKDNTGTSKIEIICLDFSISYKEETVEFNENAFMKMENLKILIIRNGKFSKGPNYFPEGLRVLEWHRYPSNFLPSNFDPINLVICKLPDSSIKSFEFHGSSKKLGHLTVLKFDRCKFLTQIPDVSDLPNLRELSFEDCESLVAVDDSIGFLKKLKKLSAYGCRKLTSFPPLNLTSLETLQLSSCSSLEYFPEILGEMENIRELRLTGLYIKELPFSFQNLTGLRLLALSGCGIVQLPCSLAMMPELSSFYTDYCNRWQWIELEEGEEKLGSIISSKAQLFCATNCNLCDDFFLAGFKRFAHVGYLNLSGNNFTILPEFFKELQFLRTLDVSDCEHLQEIRGLPPILEYFDARNCVSFTSSSTSMLLNQVLSYFI

SEQ ID NO: 40738 - protein, 159 aa, Arabidopsis thaliana
  Clone ID: LIB25-039-D12_FLI.pep
MESSSSGTTSSTIQTSSGSEESLMEQRKRKRMLSNRESARRSRMKKQKLLDDLTAQVNHLKKENTEIVTSVSITTQHYLTVEAENSVLRAQLDELNHRLQSLNDIIEFLDSSNNNNNNNMGMCSNPLVGLECDDFFVNQMNMSYIMNQPLMASSDALMY

SEQ ID NO: 40739 - protein, 480 aa, Glycine max
  Clone ID: 700556474_FLI.pep
AGIRNCGQDGINEIKFLIKEAHKRGIEVIMDVVFNHTAEGNENGPIISFRGVDNSMYYMLAPKGEFYNYSGCGNTFNCNHPVVRQFIVDCLRYWVTEMHVDGFRFDLASIMTRSSSLWDGANVFGAPIEGDLLTTGTPLSSPPLIDLISNDPILCGVKLIAEAWDAGGLYQVGTFPHWGIWSEWNGKYRDTVRLFIKGTDGFAGAFAECLCGSPNLYQGGGRKPWHSINFVCAHDGFTLADLVTYNNKNNLSNGEDNNDGENHNNSWNCGQEGEFVSTSVKKLRKRQMRNFFLSLMVSQGVPMIYMGDEYGHTKGGNNNTYCHDNYHNYFQWDKKEESSSDFFRFCRLMTKFRQECESLGLADFPTSERLQWHGHFPGKPDWSETSRFVACTMVDSVKGEIYIAFNMSHLPFTVTLPERPGYKWEPLVDTSKPTPYDFLTPDLPGRDIAIQQYAQFLDANMYPMLSYSSIILLRIPDENL

SEQ ID NO: 40740 - protein, 153 aa, Arabidopsis thaliana
  Clone ID: LIB25-043-H11_FLI.pep
NFFRVKKMAPKADKKPAEKKPVEEKSKAEKAPAEKKPKGRQETPVGKPVPAAIRKKKMKKKSVETYKIYIFKVLKQVHPDIGISSKAMGIMNSFINDIFEKLASESSKLARYNKKPTITSREIQTAVRLVLPGELAKHAVSEGTKAVTKFTSS

SEQ ID NO: 40741 - protein, 311 aa, Glycine max
  Clone ID: 700557301_FLI.pep
PPELLLGATYYGTAVDLWSTGCILAELYAGKPIMPGRTEVEQLHKIFKLCGSPSEDYWRKSKLPHATIFKPQQPYRRCVSETFKEFPAPAIELIEILLSIDPADRGTSASALNSEFFSTKPLPCDPSSLPKYPPSKEFDAKVRDEEARRQGAAGSKGQRHDIERRGARESRAIPAPDANAELVLSIQKRQGQANSQSRSEKFNPHPEEVASGFPIDPPRPSQAAGLIADPPVHQHKRSSHSGPLTHRAAWANKAGKNQEDAPKISMGGDLSTVSGLVAARRSMLSDDRREWSGSSQAEAPKLISRFPGSFK

SEQ ID NO: 40742 - protein, 68 aa, Glycine max
  Clone ID: 700557663_FLI.pep
PFFLVSQQHNIIFFPGTTFKLRNPTSSPADHAQDEYSLQLIYSSTYPQSNSSMLVHQCTQNFQEHFLL

SEQ ID NO: 40743 - protein, 274 aa, Arabidopsis thaliana
  Clone ID: LIB25-045-F7_FLI.pep
SKMESNSFFFDPSASHGNSMFFLGNLNPVVQGGGARSMMNMEETSKRRPFFSSPEDLYDDDFYDDQLPEKKRRLTTEQVHLLEKSFETENKLEPERKTQLAKKLGLQPRQVAVWFQNRRARWKTKQLERDYDLLKSTYDQLLSNYDSIVMDNDKLRSEVTSLTEKLQGKQETANEPPGQVPEPNQLDPVYINAAAIKTEDRLSSGSVGSAVLDDDAPQLLDSCDSYFPSIVPIQDNSNASDHDNDRSCFADVFVPTTSPSHDHHGESLAFWGWP

SEQ ID NO: 40744 - protein, 474 aa, Arabidopsis thaliana
  Clone ID: LIB25-060-A9_FLI.pep
TTILNENVKKCQYAVRGELYLRASELQKEGKKIIFTNVGNPHALGQKPLTFPRQVVALCQAPFLLDDPNVGMLFPADAIARAKHYLSLTSGGLGAYSDSRGLPGVRKEVAEFIQRRDGYPSDPELIFLTDGASKGVMQILNCVIRGNGDGILVPVPQYPLYSATISLLGGTLVPYYLDESENWGLDVANLRQSVAQARSQGITVRAMVIINPGNPTGQCLSEANIREILKFCYNEKLVLLGDEVYQQNIYQDERPFISSKKVLMEMGSPFSKEVQLVSFHTVSKGYWGECGQRGGYFEMTNLPPRVVEEIYKVASIALSPNVSAQIFMGLMVNPPKPGDISYDQFARESKGILESLRRRARLMTDGFNSCKNVVCNFTEGAMYSFPQIRLPTGALQAAKQAGKVPDVFYCLKLLEATGISTVPGSGFGQKEGVFHLRTTILPAEDEMPEIMDSFKKFNDEFMTQYDNNFGYSKM

SEQ ID NO: 40745 - protein, 394 aa, Glycine max
  Clone ID: 700559825_FLI.pep
SEVLIVVFRLSSNQLRSPVRFGAMEQYGRSSEGSRSDPSPEWAEPEAQTGLEEPVWQLGMGGGAGEESYPQRPDEVDCTYYLRTGFCGFGSRCRFNHPRDRAVVAGAERTAGEHPERVGQPVCQYFMRTRTCKFGSSCKYHHPRQAGAGGAAATPVSLNYYGYPLRQGEKECSYYVKTGQCKFGATCKFHHPVPAGIQIPPSPFAPVSPLPVPVPSPLYSTMQPPPGPSSQQIGVLVARPPMLPGSLVQSPYGPVVLSPAMVPISGWGPYQASASGAVLPSGTPSNVGSAQLYGITQLPSPAAAYPGPYPPSGSPVGPPSSSQKEQAFPERSNQPEYQYYLKTGEVKFGPSYRYNPPPDMSVPDMSTPKANVILSPAGLPLRPGLKLKSVDESN

SEQ ID NO: 40746 - protein, 368 aa, Arabidopsis thaliana
  Clone ID: LIB25-073-C7_FLI.pep
SFPKHTDYFLSDAAMSLLSDLVNLNLTDATGKIIAEYIWIGGSGMDIRSKARTLPGPVTDPSKLPKWNYDGSSTGQAAGEDSEVILYPQAIFKDPFRKGNNILVMCDAYTPAGDPIPTNKRHNAAKIFSHPDVAKEEPWYGIEQEYTLMQKDVNWPIGWPVGGYPGPQGPYYCGVGADKAIGRDIVDAHYKACLYAGIGISGINGEVMPGQWEFQVGPVEGISSGDQVWVARYLLERITEISGVIVSFDPKPVPGDWNGAGAHCNYSTKTMRNDGGLEVIKKAIGKLQLKHKEHIAAYGEGNERRLTGKHETADINTFSWGVANRGASVRVGRDTEKEGKGYFEDRRPASNMDPYVVTSMIAETTILG

SEQ ID NO: 40747 - protein, 493 aa, Arabidopsis thaliana
  Clone ID: LIB25-077-D9_FLI.pep
SFFINLSLFSSLLKDRTFRFQSLQSSFVFIETMAKNVGILAMDIYFPPTCVQQEALEAHDGASKGKYTIGLGQDCLAFCTELEDVISMSFNAVTSLFEKYKIDPNQIGRLEVGSETVIDKSKSIKTFLMQLFEKCGNTDVEGVDSTNACYGGTAALLNCVNWVESNSWDGRYGLVICTDSAVYAEGPARPTGGAAAIAMLIGPDAPIVFESKLRASHMAHVYDFYKPNLASEYPVVDGKLSQTCYLMALDSCYKHLCNKFEKIEGKEFSINDADYIVFHSPYNKLVQKSFARLLYNDFLRNASSIDEAAKEKFTPYSSLTLDESYQSRDLEKVSQQIAKPFYDAKVQPTTLIPKEVGNMYTASLYAAFASLIHKKHNDLAGKRVVMFSYGSGSTATMFSLRLNDNKPPFSISNIASVMDVGGKLKARHEYAPEKFVETMKLMEHRYGAKDFVTTKEGIIDLLAPGTYYLKEVDSLYRRFYGKKGEDGSVANGH

SEQ ID NO: 40748 - protein, 206 aa, Arabidopsis thaliana
  Clone ID: LIB25-078-G1_FLI.pep
RKMQDPAAYYQTMMAKQQQQQQPQFAEQEQLKCPRCDSPNTKFCYYNNYNLSQPRHFCKSCRRYWTKGGALRNVPVGGGSRKNATKRSTSSSSSASSPSNSSQNKKTKNPDPDPDPRNSQKPDLDPTRMLYGFPIGDQDVKGMEIGGSFSSLLANNMQLGLGGGGIMLDGSGWDHPGMGLGLRRTEPGNNNNNPWTDLAMNRAEKN

SEQ ID NO: 40749 - protein, 333 aa, Arabidopsis thaliana
  Clone ID: LIB25-092-E6_FLI.pep
KLRGTPLDTASKSDSCNDTRDSKANTNPIRKSNRISKRRVLDEELDSLDDDDEEIQFLRRMKMAKVVAVEEDVDDDEDRTRKHKKLSKVMKQNVEFPRGVGTSEKSAKKDKMGKAFDDADYVKDDDEEEEEAVSDVELENKSARTRRGAEEGQSEVKTEMTVTTRRRSGHSGNLIEFPRGLPPAPPRKRKENGLEVDQQLKKAEAAQRRKLQVEKAARESEAEAIRKILGQDSSRKKKEDKIKKRQEDKAKEKAADSIARRSDTVKWVMGPSGTIVTFPEELGLPSIFNSTPHSYPPPRERCAGPECTNPYKYRDSESNLPLCSLRCYKAIKG

SEQ ID NO: 40750 - protein, 367 aa, Arabidopsis thaliana
  Clone ID: LIB25-098-H3_FLI.pep
KQSSIMASRREVRCRCGRRMWVQPDARTVQCSTCHTVTQLYSLVDIARGANRIIHGFQQLLRQHQPQHHEQQQQQMMAQPPPRLLEPLPSPFGKKRAVLCGVNYKGKSYSLKGCISDAKSMRSLLVQQMGFPIDSILMLTEDEASPQRIPTKRNIRKAMRWLVEGNRARDSLVFHFSGHGSQQNDYNGDEIDGQDEALCPLDHETEGKIIDDEINRILVRPLVHGAKLHAVIDACNSGTVLDLPFICRMERNGSYEWEDHRSVRAYKGTDGGAAFCFSACDDDESSGYTPVFTGKNTGAMTYSFIKAVKTAGPAPTYGHLLNLMCSAIREAQSRLAFNGDYTSSDASAEPLLTSSEEFDVYATKFVL

SEQ ID NO: 40751 - protein, 617 aa, Glycine max
  Clone ID: 700562474_FLI.pep
ILRSDFSGGLGFGNLGIFLGFGFEIHFSSILNCLLRRLVLVLVNHMEAGRKSVSLRREFCKYGSTIGFDHHSTRSFDVEVGGSRNHHLSRSGVERFHVEKEEGEIYVEHELASVVPPPEKKRKFSPIIWDLAVKEERVSSKSRISQIAALSPPRPSLPSSPGAYVVDCGNVMEEFLPDSRSYKQDVEEENDVQGWTIKKSRWDCDDVPSPRGADEKQKHGKVSSSPEIGGGSSESTITRSSGSNGRDHYSGASSDDTDSEKDFLLDSMVDVEEQSDDDYSLSDSDETGGLMHGQRNINMLQSCRSVCEFEMIKKINEGTYGVVYKARDKKTGELVALKKVKTNIERDGYPMSSLREINILLSFNHPSIVNVKEVVVDDFDGTFMVMEHMEYDLKGLMEVKKQPFSMSEIKSLMRQLLEGVKYLHDNWVIHRDLKSSNILLNHDGELKICDFGLSRQYGSPLKPYTPLVVTLWYRAPELLLGAKEYSTSIDMWSVGCIMAELIVKEPLFRGKSELEQLDKIFRTLGTPDEKIWPGLSKLPGAKANFVKQPINTLRKKFPAASFTGLPVLSELGFDLLKRLLTYDPEKRITAEDALLHDWFHEAPLPKSDFKPIFPSWQ

SEQ ID NO: 40752 - protein, 149 aa, Arabidopsis thaliana
  Clone ID: LIB25-102-G8_FLI.pep
KSLKMARADKKPAEKKPAEKTPAAEPAAAAEKKPKAGKKLPKEPAGAGDKKKKRSKKNVETYKIYIFKVLKQVHPDIGISSKAMGIMNSFINDIFEKLAGESSKLARYNKKPTITSREIQTAVRLVLPGELAKHAVSEGTKAVTKFTSS

SEQ ID NO: 40753 - protein, 368 aa, Glycine max
  Clone ID: 700562777_FLI.pep
SSAAFKVGVLGSGISGAVRASTLARNGVSVTLFESARGPGGRMSQRRERTEDGTELHFDHGAPFFSVSKSEVLHLVQEWESRGLVAEWKEKFASFDFHTLKFNNIEQEGSSKRYVGVPGMNSICKALCNESGVESKFGVGIGRIEWLHDEKLWSLIGVDGQNLGQFKGLVASDKNIVSPRVAEVTGRTPPLDIKLVPELSEKLLDLPVKPCFIVMLAFAEPLSTVPVKAFSFENSEVLSQAYCDSSKPNRSTTSERWVLHSTAEYAEDIIAQTGLKKPSDITLNKVAEQLLQEFQSTGLITSQPFFKKAHRWGSAFPAASIAQEEKCLWDRNKRLAICGDFCVSPNVEGAIDSAFAAALRLKDSVSSL

SEQ ID NO: 40754 - protein, 149 aa, Arabidopsis thaliana; identical to SEQ ID NO: 40736
  Clone ID: LIB25-104-C11_FLI.pep

SEQ ID NO: 40755 - protein, 531 aa, Glycine max
  Clone ID: 700565738_FLI.pep
KNISHNMAFKGYFLLGLVTLVLVKSSKVTCEEESVNTVSPIIDISLNRKSFPEGFIFGAGSSSYQFEGAAKEGGRGPSVWDTFTHNYPGKIMDRSNGDMAIDSYHNYKKDVGMMKDMNLDSYRFSISWSRILPKGKLSGGINQEGINYYNNLINELLANGIQPLVTLFHWDLPQALEVEYGGFLSPRIVKDFRDYAELCFREFGDRVKYWVTLNEPWSYSQNGYANGRMAPGRCSAWMNLNCTGGDSSTEPYLVTHHQLLAHAAAVRVYKTKYQASQNGVIGITLVANWFLPLRDTKSDQKATERAIDFMYGWFMDPLTSGDYPNSMRSLVRTRLPKFTAEQSKLLIGSFDFIGLNYYSTTYASDAPDLSEARPSYLTDSLVTPAYERDGKPIGIKIASDWLYVYPRGIRDLLLYTKEKYNNPLIYITENGINEYNEPTLSLEESLIDTFRIDYHYRHLFYLQSAIRNGANVKGYYVWSLFDNFEWSSGYTSRFGMIFVDYKNGLKRYQKLSAQWFKNFLKKERRLYSSSK

SEQ ID NO: 40756 - protein, 191 aa, Arabidopsis thaliana
  Clone ID: LIB25-108-A7_FLI.pep
ISAQRFAMNGRSMRLPPGFRFDPDDEDLVFEYLAKKVLHRPMDFDLPELRSCNVDPWDLLGEKNKEVYYFVKKEERERKGRETLSGYWEECEEEEVMEAGGRDCIHLEGRRKTFAFFIGKKPRGTITPWIMYEFRLLSSRATRWSSSPLPRGEVGKWRAVKVVVKEENDEEMVEDEHESDESDGEEVIQSR

SEQ ID NO: 40757 - protein, 390 aa, Arabidopsis thaliana
  Clone ID: LIB25-117-D5_FLI.pep
ERFTNPDLLNRHKQTPLMLAAMYGRISCVKKLAEVGANILMFDSVNRRTCLHYAAYYGHANCVQAILSAAQSSPVAVHWGYARFVNIRDDKGATPLHLAARQRRPECVNVLLDSGSLVCASTSVYGSPGSTPLHLAARSGSIDCVRKLLAWGADRLQRDASGRIPYVVAMKHKHGACGALLNPSSAEPLVWPSPLKFISELNDEAKLLLEQALMEANREREKTILKGTAYSLPSPSFSDTDDNMSEVSDTELCCICFEQVCTIEVKDCGHQMCAQCTLALCCHNKPNPTTSTVTPPVCPFCRSTIACLVVAQNNNNNNEKSKSLDDVVVVDREAGDVSSSKFRKHRRSINLGEESSSFMGLSTIGSFGRITGRGSGRIAAENELMDKPIL

SEQ ID NO: 40758 - protein, 209 aa, Zea mays
  Clone ID: 700576833_FLI.pep
VSFEAGFFLLGGHAIYLGPDDIQMGKREETRDVARVLSGYNDIIMARVFAHQDILDLAKYAAVPVINGLTDYNHPCQIMADALTMLEHVGRIENTKVVYVGDGNNIVHSWLLLAAVLPFHFVCACPKGFEPDAKTVEVARSAGISKIEITNDPREAVKGADVVYTDVWASMGQKEEADYRKQKFQGFTVCLFSHFLEFLCLAGHQLHIL

SEQ ID NO: 40759 - protein, 486 aa, Glycine max
  Clone ID: LIB3-02-B3_FLI.pep
ILQMVLPGFPDIRKINGNSVIELVSMPTKITGVHYVQGVVIFHDVFDNEYNVGGAQIRVEGVYIWPYRQLRMVANSGKEVGLNQDGDYILSNPYHLLGVFSSQVFQESSQHKMWRRKHSPLHGMEKHCNVEIAAHVSRLSSSKHEGEHDSFQLEGLMESPSVDDDGDCFSPLQLNATSINIEVYYNKALNYTLMVTFISFLQVLLLIRQMEHSNTQSGAAKVSILMIGQQAIVDAYLCLTHLTAGILVESLFNAFATAAFFKFVVFSIFEMRYLLAIWKASRPLSNGEGWETMRRELSVLYSRFYGILLGGILLMYEFHNHLRPILLLVYSFWIPQIITNVIRDSRKPLHPHYILGITVTRLAIPLYIFGCPNNFLHIEPDQSWCVCLAIFVGLQAAILLLQHYFGSLWFIPRQFLPEKYCYYRRFAQDTNHATDCVICMTAIDLSPRSNDCMVTPCDHFFHSGCLQRWMDIKMECPTCRGPLPPA

SEQ ID NO: 40760 - protein, 156 aa, Glycine max
  Clone ID: LIB3028-007-A9_FLI.pep
LRSKHQIVMAPKAEKKPAEKKPVEEKKSTVGDKAPAEKKPKAGKKLPKEGGAGGEGKKKKRNKKSVETYKIYIFKVLKQVHPDIGISSKAMGIMNSFINDIFEKLAQESSRLARYNKKPTITSREIQTAVRLVLPGELAKHAVSEGTKAVTNFTSS

SEQ ID NO: 40761 - protein, 170 aa, Glycine max
  Clone ID: 700682663_FLI.pep
QKALHANVTGIPYSWAGCNDVIVENWGDSPLSMLPIYQELIEGGIRIWVFSGDTDSVVPVTASRYSIRALNLSTIINWYAWYDNDEVGGWSQVYEGLTLVTVRGAGHEVPLHKPRQGFILFKTFLEDKNMPLPIDRSLSGPTDKSLNKNIRLARPIRKITMPSSTQGFTY

SEQ ID NO: 40762 - protein, 114 aa, Glycine max
  Clone ID: LIB3028-007-F6_FLI.pep
DLRKRRKKKTCVSWEAMSTTESQRYKGTVKWFNEEKGFGFITPEDGGSDLFVHYSAIQTDGGFRTLSEGQSVEFLVTQDDSGRAAAVNVTTTTVKSSDSGNGENSGGDAANVEK

SEQ ID NO: 40763 - protein, 480 aa, Glycine max
  Clone ID: 700727643_FLI.pep
GDFSGSLMVQIVVLQCIIWYTLMLFLFEFRGARMLISEQFPDTAGSIVSIHVDSDVMSLDGRQPLETEAEIKEDGKLHVTVRKSNASRSDIFSRRSQGLSSTTPRPSNLTNAEIYSLQSSRNPTPRGSSFNHTDFYSMMAAGGRNSNFGASDVYGLSASRGPTPRPSNYDEDGGKPKFHYHAGGTGHYPAPNPGMFSPSNGSKSVAAANANANAKRPNGQAQLKPEDGNRDLHMFVWSSSASPVSDVFGAHEYGGHDQKEVKLNVSPGKVENHRDTQEDYLEKDEFCFGNRGMDREMNQLEGEKVGDGKPKTMPPASVMTRLILIMVWRKLIRNPNTYSSLIGLTWSLVSFKWNVEMPAIIAKSISILSDAGLGMAMFSLGLFMALQPRVIACGNSTAAFAMAVRFLTGPAVMAAASVAVGLKGVLLHVAIVQAALPQGIVPFVFAKEYNVHPDILSTAVIFGMLIALPITLVYYILLGL

SEQ ID NO: 40764 - protein, 147 aa, Glycine max
  Clone ID: LIB3028-009-E3_FLI.pep
WHQSREEASGEEARGGEEVDGGRQGSGGEEAKAGKKLPKEGGAGGEGKKKKRNKKSVETYKIYIFKVLKQVHPDIGISSKAMGIMNSFINDIFEKLAQESSRLARYNKKPTITSREIQTAVRLVLPGELAKHAVSEGTKAVTKFTSS

SEQ ID NO: 40765 - protein, 295 aa, Glycine max
  Clone ID: LIB3028-010-A12_FLI.pep
PCPNLSAPSFSIFGFTKPLCLIKGSLIFPIFLVVKKLLAKRRPSFWCCRRKRRINMKIQCDVCERAPATVICCADEAALCAKCDVEVHAANKLASKHQRLLLQCLSSKLPTCDICQDKPAFIFCVEDRALFCQDCDEPIHSAGSLSANHQRFLATGIRVASSSNCTKDNEKSHSEPPNRSAQQVSAKIPPQQVPSFTSSWAVDDLLELTGFESPEKKESLQFGELEWLTDVGIFGEQFAQEALAAAEVPQLPETHNSSSVASYKTSKSYMSHKKPRIEVLNDDDDDEYFTVPDLG

SEQ ID NO: 40766 - protein, 492 aa, Glycine max
  Clone ID: 700732423_FLI.pep
QHYTSKHTPLAQSPMASSDSKLPLKPIPGSYGLPFFGPMSDRHDYFYNQGRDKFFAERIKKYNSTVIRTNMPPGPFISSNPRVIALLDGVSFPILFDNSKVDKRDVLDGTFMPSTSFTGGYRACAFQDTTEPSHALLKRFYLNFLASKHETFLPLFRNNLSDHFSDLEDKLAGKSGKASFNSSVGSATFNFLFRLLSDKDPSETIIGSDGPSLVQTWLAAQLAPLATLGLPRIFNYVEDFLIRSIPFPAWTVKSSYKKLYEGLSTAGTAILDEAERVGIKRDEACHNLVFMLSFNAQGGLVNQFPILIKWLGLAGEGLHKQLAEEIRTVVKDEGGVSLRALDQMTLTKSVVYEVLRIEPAVPFQYAKAREDLVVESHDAAYEIKKGEMIFGYQPFATKDPKIFENAEDFVAHRFLGHDGEKLLRHVLWSNGPQTEEPTPDDKQCPAKNLVVLMCRLYLVEFFLRYDTFTFDFKPVVLGPDVTIKSLAKASSF

SEQ ID NO: 40767 - protein, 212 aa, Glycine max
  Clone ID: LIB3028-011-G8_FLI.pep
CRLSKMNLDLKAIAMSFIGTQQKCKACEKTVYPVDQLSADGTAYHKACFRCSHCKGTLKLSNYSSMEGVLYCKPHYEQLFKESGSFSKNFQSPAKLADKTTPELTRSPSKAASMFSGTQEKCATCGKTAYPLEKVTVEGQAYHKSCFKCSHGGCPITPSNYAALEGILYCKHHFSQLFKEKGSYNHLNKSASVKRAAAATAAATTAASVPES

SEQ ID NO: 40768 - protein, 475 aa, Glycine max
  Clone ID: 700897511_FLI.pep
RRVPTQHNPSMTSMATFFAQTSFPSHSLSKTFDTHFAPAPKVNVFVNFRARRHVGVRVSNALIEPDGGKLVELVVTDFERDLKKGEALSLPRIKLSRIDLEWVHVLSEGWATPLKGFMREAEFLQTLHFNSLRLDDGSVVNMSVPIVLAIDDAQKHRIGDNKKVALFDSKGDPVAILNNIEIYKHPKEERIARTWGTIAPGLPYVEQTITNAGNWLIGGDLEVIEPIQYNDGLDHFRLSPTQLRAEFTRRNADAVFAFQLRNPVHNGHALLMTDTRKRLLEMGYKNPVLLLHPLGGYTKADDVPLDWRMKQHEKVLEDGVLDPETTVVSIFPSPMHYAGPTEVQWHAKARINAGANFYIVGRDPAGMSHPVEKRDLYDADHGKKVLSMAPGLERLNILPFRVAAYDKTQGKMAFFDPSRPQDFLFISGTKMRTLARNKESPPDGFMCPGGWKVLVDYYDSLVLSSNGKVQEAVPA

SEQ ID NO: 40769 - protein, 142 aa, Glycine max
  Clone ID: LIB3028-015-D2_FLI.pep
KKPTNGSRKAEKKPAEKKPAEKAPAEKKPKAEKKISKEGGSEKKKKRTKKSVETYKIYIFKVLKQVHPDIGISSKAMGIMNSFINDIFEKLAQESSRLARYNKKPTITSREIQTAVRLVLPGELAKHAVSEGTKAVTKFTSS

SEQ ID NO: 40770 - protein, 269 aa, Glycine max
  Clone ID: 700900558_FLI.pep
FVGYCDDDNKMALIYEYMANGSLKDFLLLSDGNSHCLSWERRIQIAIDAAEGLDYLHHGCKPPIIHRDVKSANILLSQDFEAKIADFGLSREFRKDNQDQQFQVIHKDATYEKSAVMGTTGYLDPEYYKLGRLNEKSDIYSFGIVLLELLTGRPAILKGNRVMHILEWIRPELERGDLSKIIDPRLQGKFDASSGWKALGIAMSCSTSTSIQRPTMSIVIAELKQCLKLESPSDTKTFVAPPRQVYDEVYSSSEAFSYDSESITSPFPR

SEQ ID NO: 40771 - protein, 221 aa, Glycine max
  Clone ID: 700902387_FLI.pep
TNTHTLSFFLPAATIWSLSLPPNTTTISPSLPPSTRRLRRRRPVPSGRSWWWPPSPPGCNSGGPYSSLYLPLTSNCWGFPTLGPPSSGSAAQSPACSSSPSWDTTATAAPPASAAAVCLAMTVLVTKMAQHSRQYTLLPNAHQEPLPPPAAVKAGALALFSLLGIPLAITYSIPFALASIFSSTSGAGQGLSLGVLNLAIVIPHDGGVCDKWTMGCSIWRW

SEQ ID NO: 40772 - protein, 215 aa, Glycine max
  Clone ID: LIB3028-022-D10_FLI.pep
EVHQIIDQKYSMGSFETELNLKATELRLGLPGCDETHDKSSSSSGSVVRSNKRSSPEPSVEESRCNSNGSSDSTTTSDHDEDSVQPAKVQVVGWPPIRSFRKNSLQQQKKVEQQGDGSGTYLKVSMAGAPYLRKIDLKVYNSYPELLMALQNLFKCTFGEYSEREGYNGSEYAPTYEDKDGDWMLVGDVPWNMFVSSCKRLKIIKGSEAKGLGCL

SEQ ID NO: 40773 - protein, 628 aa, Glycine max
  Clone ID: 700903715_FLI.pep
TSISPSSGPFLSRNTHKISGTAMAAVRLLLLLLFPFSSLSLSENEALLNLKKSFSNPVALSSWVPNQNPCSSRWLGVICFNNIINSLHLVDLSLSGAIDVNALTQIPTLRSISFVNNSFSGPIPPFNQLGALKSLYLAHNQFSGQIPSDFFSQLASLKKIWISNNKFSGPIPSSLTNLRFLTELHLENNEFSGPVPELKQDIKSLDMSNNKLQGEIPAAMSRFEAKSFANNEGLCGKPLNNECEAGGSSEVGSGWGMKVVIVLIVAVALAFIFALTRSKRRHDDDFSVMSRDHVDEVVQVHVPSSNHSRGASEGGSKKESSSSKKGSSRGGMGDLVMVNDEKGVFGLPDLMKAAAEVLGNGGLGSAYKAAMNNGLSVVVKRMREMNKVSRDIFDAEMRRFGRLRNLNIITPLAYHYRKEEKLFVTEYMPKGSLLYVLHGDRGSSHADLNWPIRLNIVKGIARGLDFIYSEFSNEDLPHGNLKSSNVLLTENYEPLLSDFAFHPLINPNYAIQTMFAYKTPDYVSYQHVSQKTDVYCLGIIVLEIITGKFPSQYHSNGKGGTDVVHWVFTAISERREAELIDPELMSNHSNSLNQMLQLLQVGAACTESNPDQRLNMKEAIRRIEEVQV

SEQ ID NO: 40774 - protein, 156 aa, Glycine max
  Clone ID: LIB3028-024-C10_FLI.pep
PRTRPLRHVRATMLAIGKATSVDICRFFSKPGPYVSCDTMEFLLARYDGELDVDAVDSEGRTTIHVVVREGHTRVIRFCVTMGGNPNRVDSKGWTPLYYAAWKGHVKAAECLLECSNVKCVRDREGRRTFSVVAESEHEHSVIDKVQKETKSRAGF

SEQ ID NO: 40775 - protein, 65 aa, Glycine max
  Clone ID: LIB3028-028-B8_FLI.pep
IIASGSFRNTVTRTLMRLSYFHLGHLDCSISINFIALHVVFACLLEFYSKESLLNAFAYSYAPSS

SEQ ID NO: 40776 - protein, 492 aa, Glycine max
  Clone ID: 700904381_FLI.pep
DPNHLFFTHFRDGAIASRIEGQHRGALPSVIVIGAGISGLAAARSLYDASFKVTVLESRDRLGGRIHTDFSFGCPVDMGASWLHGVCNENPLAPLIRGLGLSLYRTSGDNSVLYDHDLESYMLFNIDGKQVPQQMVIEVGDTFKKILEETGKVRDEHTEDISVSQAISIVLDKHPDLRQQGLAHEVLQWFICRMEAWFAADADMISLKTWDQEHVLSGGHGLMVQGYDPVIKVLAKDIDIRLNHRVKKISSGYNKVMVTVEDGRNFVADAAIITVPIGILKANLIEFEPKLPDWKVSAISDLGVGNENKIALRFDKVFWPNVELLGTVAPTSYTCGYFLNLHKATGHPVLVYMVAGRFAYDIEKLSDEAAANFVMQQLKKMFPNASKPVQYLVSRWGTDPNSLGCYSYDLVGKPTDVYDKLRAPLGNLFFGGEAVSLDNQGSVHGAYSAGVMAAENCESYMLEKLGHAEKLSLASVRHEMLETLIPLQISRM

SEQ ID NO: 40777 - protein, 237 aa, Glycine max
  Clone ID: LIB3028-028-G1_FLI.pep
QKQKMKIQCDVCDKVEASVFCPADEAALCHSCDRTIHRANKLATKHARFSLHYPTSKDFPLCDICQERRAYLFCQEDRALLCRECDVPIHRANEHTQKHNRFLLTGVKLSGTCLDPASSSTNYTNNNRVTGSEGRNDARSRMNRPRSSVSNEENASNSSCKVEDNVASDTGSISTSSISEYLIETIPGYCFEDLLDASFAPNGFCKKQNFDHPWAFQDQKRTSGDTMAVPFLKLVIH

SEQ ID NO: 40778 - protein, 397 aa, Glycine max
  Clone ID: LIB3028-029-E11_FLI.pep
AFTCLKLIFCELASFFIMAKSSTEKNGLKKGPWTPEEDQKLIDYIQKHGHGKWRTLPKNAGLKRCGKSCRLRWANYLRPDIKRGRFSFEEEEAIIQLHSVLGNKWSTIAANLPGRTDNEIKNYWNTHIKKKLLKMGIDPVTHTPRLDVIQLASILNTSLYNSAPQFNYPSLSGIGRSVINPSHMLGLLTTLLSCQNRNYNPDVLNNNQLSGGSTLLQNQHQCSRMQLDSTQAFQPNQPQVSLQENHIAKSNSNPLNMEPQVMKTTLENQITPIATPFSQQNTLPNLWHYNTEGHISDLPTMAQSSSAMQCFSSPKFNSIYNNLLENQNLCNNNEGMPNFNLSSLLSSTPSSSSPISTLNSSSSTTFVNGTTEDERDTYGSSMLMYNISNGLNDSGLL

SEQ ID NO: 40779 - protein, 576 aa, Glycine max
  Clone ID: 700904514_FLI.pep
ARPDPKKNITTLVKAFGECRPLQELANLTLIMGNRDGIDEMSSTNASVLLSVLKLIDKYDLYGQVAYPKHHKQYDVPDIYRLAAKTKGVFINPAFIEPFGLTLIEAAAHGLPIVATKNGGPVDIHRVLDNGLLVDPHDQQSIADALLKLVSNKQLWAKCRQNGLKNIHLFSWPEHCKTYLSKIATCKPRHPQWQRSEDGGESSESDSPGDSLRDLQDLSLNLKFSLDGEKSEGSGNDNSLNSDGNAADRGAKLENAVLSWSKGISKDTRRGGATEKSDQNPNAGKFPPLRRRKHLFVIAVDCDTTSSLLETIKAIFESAGKDRAESIVGFILSTSLTISEIQSFLISGGLSPIDFDAYICNSGSDLYYPSLNPGDRPFVVDLYYHSHIEYRWGGEGLRKTLVRWADSITDKKGDNDEQIVSPAEQLSTDYCYAFKVRKPGMAPPVKELRKLLRIQALRCHPIYCQNGTRLNVIPVLASRSQALRYLYVRWGFELSKMVVFVGECGDTDYEGLLGGLHKSVILKGVGSSAISQLHNNRSYPLSDVTPLDSPNIVEATEGSSGADIQALIEKVGYLNG

SEQ ID NO: 40780 - protein, 88 aa, Glycine max
  Clone ID: LIB3028-034-B10_FLI.pep
RVSVTVSCFSTCPSDQLHFYFQICYCKNFGLLPSFLLQTFLHQPLVSLLPTNSISFSSSLAVLLVVSCLLNPPTQRYEHFCSVPSSWL

SEQ ID NO: 40781 - protein, 771 aa, Glycine max
  Clone ID: 700907443_FLI.pep
KEDEVLYEATFDLPEAFGNVGAVLVQNEDHNEVFLKSIVLDGFPNGPLHFTCDSWIQPKSDSPVKRVFFSDKSYLPSQTPSGLRKLREEELKQKRGNGEGERKSTDRIYDYDVYNDLGDPDSNIDLKRPVLGGTRQYPYPRRCRTGRKHSEADPSSEKKASNFYVPRDEIFSEIKQTQFTTTTISSAVSLVLESLDAILTDQSLGFVSFEDIDTLYKEGFHVPALQANGNALQRVIPKLLSVVNDKQNLLRFDTPDAFKRDRFFWLSDEQFARETLAGVNPYSIQLVKEWPLRSKLDPQIYGPPESAITKEVIEPQIIGYCTVEEAIKEKKLFMLDYHDLFLPYVRKVREIKGTTLYGSRTLFFLTEQSTLKPLAIELTRPDMEGKPQWKQVFTPATHSSSHATKLWLWRLAKAHVLAHDSGYHELVSHWLRTHCAVEPFIIATNRQLSTMHPIYRLLHPHMRYTMEINSLAREVLISANGVIESSFSPRKYSMEISSVAYDQLWQFDLQALPNDLIFRGMAVADPNAPHGLKLTIEDYPFANDGLLIWDAIKEWVSEYVNHYYPSSSTIEFDQELQAWWTEIRTVGHGDKSEEPWWPNLKTPKDLIEIITTIAWVSSAHHAAVNFAQYTYGGYFPNRPTIVRNNIPTEDPSKEELEKLINNPEKTFLESLPSQIQATLVMVVLNLLSNHSPDEEYIGQYVEQSWVENQTIKAAFERFSTKLKEIEGIIDSRNANCDLKNRNGAGVVPYELMKPFSGPGVTGKGVPYSISI

SEQ ID NO: 40782 - protein, 180 aa, Glycine max
  Clone ID: LIB3028-037-G7_FLI.pep
KEMLDSGIQPDKRVCQQHSNKRHLFIYSRILKEREEAAHVLCFILRLFFCVFLRIRFFWLWWLFISFSCRFSRFRSDILLVVSRLEYMMIVPFLHEKLLEMVPTVEDTIQGSIRGMCEVATCMSTPKAILVIAFPFQCHLFQRIDCFEQTEHLSRVPLNMDDSLLGALFVSFCLSEDFAV

SEQ ID NO: 40783 - protein, 164 aa, Glycine max
  Clone ID: LIB3028-044-F5_FLI.pep
NGTAGGGSISANDKKAVYRHIVKSEVNLNAIISGKAGFSSNTPSSINPNISCESKTPQVEDIQDGSSVLHLACIISDSAMVELLLQYGADINAIDSRGRTPLHYSTMRGKNATARVLITRGANPLAVDKEGNTPFKPATEPDTAGKETLALNQQIACPQNLIEK

SEQ ID NO: 40784 - protein, 164 aa, Glycine max
  Clone ID: 700909063_FLI.pep
PWMLHLGWSICMEKNIVHFDLKCENLLVNMRDPQRPICKIGDLGLSKVKQHTLVSGGVRGTLPWMAPELLSGKSNMVSEKIDVYSFGIVMWELLTGNEPYADMHCASIIGGIVNNSLRPQIPTWCDPEWKSLMESCWASDPVERPSFSEISKKLRSMAASMNLK

SEQ ID NO: 40785 - protein, 192 aa, Zea mays
  Clone ID: LIB3067-033-E4_FLI.pep
AFIKLAMFEKEQAACSSQKRRAADISNFASAVIRVSRSQTKLNTEIVKHLGIIHEYMETMASVHNAFTDRSNALLRVQNLSADLYFLHTRAGKLESVSARGMDQERSRYQKIEELKETVRATEDAKTRALKELELIKENNMNEIKRFNKERRQDLVEMLKGFVLDQATYSDHFATIWTKVAEETKGYANSSS

SEQ ID NO: 40786 - protein, 208 aa, Glycine max
  Clone ID: LIB3028-045-E8_FLI.pep
VESQSSSVQDHIHAPSLSLSLSLSLTLCLSISLFNSKTLPPSNSNSPSIMGSEGSTVVVPRNFRLLEELERGEKGIGDGTVSYGMDDADDIYMQSWTGTIIGPPGTVHEGRIYQLKLFCGKDYPDNPPTVRFQTRINMTCVNQETGVVEPHLFPMLANWQRECTMEDILMQLKKEMISPQNRKLAQPPEGNEDGRIDQKGLALRCCVM

SEQ ID NO: 40787 - protein, 253 aa, Glycine max
  Clone ID: LIB3028-050-G11_FLI.pep
FNSLLSEVCAFLFNSSLFLRHPRREPKIKNKKINTINKGEKTNMSFTGTLDKCTACDKTVYVVDLLTLEGIPYHKNCFKCSHCKGCLTMCTYSSMDGILYCKTHFEQLFKESGNFSKNFAKSSEKQNELNRTPSKLSSMFSGTQDKCSVCTKTVYPLEKMTLEGECFHKTCFRCAHAGCPLTHSNYAALDGVLYCRVHFAQLFMEKGNYNHVLQAAAHRRTGSSTPPLLEEPSQEPAPPASHEDQTEEETPLE

SEQ ID NO: 40788 - protein, 123 aa, Zea mays
  Clone ID: 700553279_FLI.pep
NVLGTMSEADLEFIDNPKARRYIKSLPYTPGVPLVSMYPHAHPLAIDLLQKMLIFDPTKRISVTEALEHPYMSPLYDPSANPPAQVPIDLDIDENISSEMIREMMWQEMLHYHPEVATAISMS

SEQ ID NO: 40789 - protein, 56 aa, Glycine max
  Clone ID: LIB3028-053-G10_FLI.pep
GLTNGSGSTSEESLQRQKLRDGEASDEEEEYEAKDIEVEEVIDLTEEVLHLEYGQE

SEQ ID NO: 40790 - protein, 753 aa, Glycine max
  Clone ID: 700554222_FLI.pep
IDKRLSGKRTFIVLDDVNEFGQLKNLCGNRKWFGQGSVIIITTRDRRLLDQLKVDYVYDVDKMDENESLELFSWHAFNEAKPKEDFNELARNVVAYCGGLPLALEVLGSYLNERRKKDWESVLSKLERIPNDQVQEKLRISFDGLSDHMEKDIFLDICCFFIGKDRAYITEILKGCGLHADIGITVLIDRSLLKVEKNNKLGMHQLLRDMGREIICESSRKEPGKRSRLWFHEDVLDVLTNNTGTVAIEGLALKLHFAGRDCFNAYAFEEMKRLRLLQLDHVQLTGDYGYLSKQLRWISWQGFPSKYIPNNFYLEGVIAMDLKHSNLRLFWKEPQVLKWLKILNLSHSKYLTETPNFSKLPNLEKLILKDCPRLCKVHKSIGDLCNLHLINLKDCKTLGNLPRGVYKLKSVKTLILSGCSKIDKLEEDIVQMESLTTLIAENTALKQVPFSIVNSKSIGYISLCGYEGFARNVFPSIIRSWMSPTLNPLSYISPFCSTSSYLVSLDMQSYNSGDLGPMLRSLSNLRSILVRCDTDSQISKQVRTILDNVYGVSCTELEITSQSSEHYLRSYLIGIGSYQDVFNTLSDSISEGLTTSESSDVFLPSDNDPYWFAHMGEGHSVFFTVPEDCRMKGMTLCVVYLSTPESKAIEYLISVLMVNYTRCTIQIFKRDTVISFNDVDWHDIISHSGPGDKVEIYVIFGHGLVVKKTAVYLMCDESIDKGMDPSPEPKIEPKKNAFVKFIKKIVSSKNEEQ

SEQ ID NO: 40791 - protein, 264 aa, Glycine max
  Clone ID: LIB3029-003-E11_FLI.pep
VTSLIITKQSSTGFKMLKSGMGIEERKQVKKPAQASSRKGCMRGKGGPENASCTYKGVRQRTWGKWVAEIREPNRGARLWLGTFETSHEAALAYDAAARKLYGSDAKLNLPELSIKSQSQCPPPPSSVSNNTQIPQMENLQQQIQNNYMDMATCSNNFNNNTNNPSEVSMASQQVGVGVPIYTSDSIVSLPLDTNPKPVENDGDFRPSWGTMNEGLPVFDDSIWAEAAMSLDFPQIAAETAIYSSGNNLADVGVWDSLQTPWCM

SEQ ID NO: 40792 - protein, 475 aa, Glycine max
  Clone ID: 700553960_FLI.pep
PSHACVQRRQPQAQHVIDGFLTHQPPNHTVAPIPSLIPPMASTTTTFSLSLRTNQQTPFPKPSFFSNNNHLHFNSNNWAWTSVSTARKSRICVTSSQVLDSLAAKSEPALPTTVEVDLGNRSYPIYIGSGLLNQPDYLQRHVHGKRVLVVTNKTVAPLYLDKVVDALTRGNPNVSVESVILPDGEQYKDMDTLMKVFDKAIELRLDRRCTFVALGGGVIGDMCGCAAALFLRGVNFIQIPTTVMAQVDSSVGGKTGINHRLGKNLIGAFYQPQCVLIDTDTLNTLPDRELASGLAEVIKYGLIRDAEFFEWQEKNMHLLLARDPSAMAYAIKRSCENKAEVVSLDEKESGLRATLNLGHTFGHAIETGVGYGQWLHGEAVAAGTVMAVDMSYRLGWIDDSLVKRVGDILKQAKLPSAPPETVTVDMFKSVMAVDKKVADGLLRLILLKGPLGNCVFTGDYDRKALDDTLRAFCKS

SEQ ID NO: 40793 - protein, 410 aa, Glycine max
  Clone ID: LIB3029-010-B7_FLI.pep
RAFAAEPTTEPQKPSPKKTVDTFGQRTSIYRGVTRHRWTGRYEAHLWDNSCRREGQSRKGRQVYLGGYDKEDKAARAYDLAALKYWGPTTTTNFPISNYEKELEEMKNMTRQEFVASLRRKSSGFSRGASIYRGVTRHHQHGRWQARIGRVAGNKDLYLGTFSTQEEAAEAYDIAAIKFRGLNAVTNFDMSRYDVKSIANSTLPIGGLSGKNKNSTDSASESKSHEASRSDERDPSAASSVTFASQQQPSSSTLSFAIPIKQDPSDYWSILGYHNSPLDNTGIRNTTSVTATSFPSSNNGTTSSLTPFHMEFSNAPTSTGSDNDAAFFSGGGIFVQQQSGHGNGHGSGSSGSSSSSLSCSIPFATPIFSLNSNTSYENSAGYGNWIGPTLHTFQSHAKPSLFQTPIFGME

SEQ ID NO: 40794 - protein, 279 aa, Glycine max
  Clone ID: 700893503_FLI.pep
RFLWEEMKKRHSTQNFVQHIELISKLRHRHLVSAIGHCFECSLDDSSVSKVFLVFEYVPNGTLRNWISDEHARKSFSWTQRIGAAIGVAKGIQFLHTGIVPGVYSNDLKIEDVLLDQNLVAKISSYHLPLLSNMGKVRRGNSSSGLKNSSNSKSVKQEDKSDIYNFGVILLELILGRQIKTVNDADAFRDLLQASLGGDEEGRRGVVDPAFRKACLDQSLKTMMEICVRCLVKEPADRPSIEDVLWNLQFASQVQDAWRGDSQSSEGSPGSESRGLPFH

SEQ ID NO: 40795 - protein, 268 aa, Glycine max
  Clone ID: LIB3029-011-G3_FLI.pep
KLSPSSSFSSFQSQILSFDNPNPTSSSNTTTQFYGFDCTLNPTQNEMVSVSVPNMRKPRFPTQTAKGSPKNQNFETKTSHGKRSPAHAQDHIMAERKRREKLSQSFIALAALVPGLKKMDKASVLGDAIKYVKELKERLTVLEEQSKKSRAESVVVLNKPDLSGDDDSSSCDESIGADSVSDSLFEVESRVSGKEMLLRIHCQKQKGLLVKLLAEIQSHHLFVANSSVLPFGDSILDITIVAQMGESYNLTTKELVKNLRVAALKILS

SEQ ID NO: 40796 - protein, 380 aa, Glycine max
  Clone ID: LIB3030-002-G3_FLI.pep
VLQWLKFLNLSHSKYLKETPDFSKLPNLEKLILTDCSSLLKVHQSIGDLQNLLFINLKDCKSLSNLPRSIYKLKSLRTLILSGCSKIDTLDEDIMQMESLTTLIAENTAVKQVPFPIVSSKGIGYISIYGYEGFSHHVYLSIMRSWMLPKMNPLSCIRSFSGTSSSPIPMDMQNKNLSDLAPPISNFRSVVVQCETEIQLFNQIRTILDDVYGANFSELEITSYTSQSSNHSVKSYLIGIGDFEQVFISLSNSISEGLATCESSDVFLPGDYYPYWLAHTGEGQSVYFTVPEDCRIKGVTLCVVYLSTLENMATEVLIGVLMVNYTKCAIQFHKRETLFSFNDVDWQGIISFFGPGRQGGDFCYFWEWIGDQEDSCVFNL

SEQ ID NO: 40797 - protein, 210 aa, Glycine max
  Clone ID: LIB3030-003-F5_FLI.pep
LLLRILHLTLNFLSPYAPANSSFTSLPITAPSQVVGWPPLGAYRMNSYNSHAKSPATEVFNSTLDKRASNSAGVRKSADGGSDSSNIISKEKGNLRTSLFVKVKMDGIPIGRKVDLGAHDSYETLAQTLEDMFDESTTVLTHKVGSNGEDHGTEVGTDGHSKLLDGSSDFVLTYEDKEGDWVLVGDVPWCYFAAPRLEEKNRRSNTSSYR

SEQ ID NO: 40798 - protein, 414 aa, Glycine max
  Clone ID: 700891441_FLI.pep
SLPEVMASAGVAPASGVRDVNANSVAVERLPDEMNGMKIRDEREMEATVVDGNGTETGHIIVTTIGGKNGQPKQTISYMAERVVGNGSFGVVFQAKCLETGETVAIKKVLQDKRYKNRELQTMRLLDHPNVVTLKHCFFSTTEKDELYLNLVLEYVPETVHRVIRHYNKMNQRMPLIYVKLYFYQICRALAYIHNCIGVSHRDIKPQNLLVNPHTHQLKICDFGSAKVLVKGEPNISYICSRYYRAPELIFGATEYTTAIDIWSAGCVLGELMLGQPLFPGESGVDQLVEIIKVLGTPTREEIKCMNPNYTESKFPQIKAHPWHKIFHKRLPPEAVDLVSRLLQYSPNLRCTALEALVHPFFDELRDPNTRLPNGRYLPPLFNFRANELKGVPPGMLVKLIPSHARKQCALFAS

SEQ ID NO: 40799 - protein, 209 aa, Glycine max
  Clone ID: LIB3030-006-D8_FLI.pep
EMGRGKIEIKRIENSSNRQVTYSKRKNGILKKAKEITVLCDAQVSLIIFAASGKMHDYISPSTTLIDILERYHKTSGKRLWDAKHENLNGEIERLKKENDSMQIELRHLKGDDINSLNYKELMALEDALETGLVSVREKQMDVYRMLRRNDKILEEENRELNFLWQQRLAEEGAREVDNGFDQSVRDYNSHMPFAFRVQPMQPNLQERI

SEQ ID NO: 40800 - protein, 230 aa, Glycine max
  Clone ID: LIB3030-008-E2_FLI.pep
NNMAFSGTQQKCKACDKTVHLVEGLSVDGAAYHKNCFRCSHCNGLLAISNYSSTEGVLYCKVHFEQLFKETGAYPKKSQSSGKPPLELNRAPSKLSAFFSGTQEKCSKCKKTVYPLEKLTVEGEFYHKSCFRCAHGGCFLTPSTYAALDGYLYCKPHFSQLFKEKGSYSYLSKQTSLKKSEMQQEQEAVEKTTTTTTTDDDRSEPEPETTTTTTTMEAEQADDDHSEQEH

SEQ ID NO: 40801 - protein, 430 aa, Schizochytrium aggregatum
  Clone ID: LIB3033-001-A12_FLI.pep
LNEKEMQTLVDKDWASVFGSKNGMPEINYKLCARKMLMIDRVTSIDHKGGVYGLGQLVGEKILERDHWYFPCHFVKDQVMAGSLVSDGCSQMLKMYMIWLGLHLTTGPFDFRPVNGHPNKVRCRGQISPHKGKLVYVMEIKEMGFDEDNDPYAIADVNIIDVDFEKGQDFSLDRISDYGKGDLNKKIVVDFKGIALKMQKRSTNKNPSKVQPVFANGAATVGPEASKASSGASASASAAPAKPAFSADVLAPKPVALPEHILKGDALAPKEMSWHPMARIPGNPTPSFAPSAYKPRNIAFTPFPGNPNDNDHTPGKMPLTWFNMAEFMAGKVSMCLGPEFAKFDDSNTSRSPAWDLALVTRAVSVSDLKHVNYRNIDLDPSKGTMVGEFDCPADAWFYKGAATMPTCRTRSSWRSPSRPRVCSPRCSRRP

SEQ ID NO: 40802 - protein, 349 aa, Schizochytrium aggregatum
  Clone ID: LIB3033-002-B4_FLI.pep
YYLRVGLTQLTYMRAYLQLLGRDVCVIDAGHKSGSAIGKACVAQNFETAQEARSTKDLLVNLNDARVLVCDGRIKVSSLDEIVEGTNGRTAPDLVVHDAIGSSSVGPAARQAQVPAKAQRHLELGVALGALDLLRVVKTVNVKVFGLVPDLFERAAEDALLDARKLCGGHGLERVVLAKELVELVGARGKHGSLLEDLKLDAFLEHVGSRGHAYVRVSGLRELLAHIVARARLLGDLVHGAGDNKGGTHVEGGQRRLGAPNATAGAHTDAKVGRVAALAVKAVAKVDDEGQNDVDGAVVGVATRVSFDRDVVSDGNTAGELGLLLVDLAGSNELLKKVLGRRTHEHLGE

SEQ ID NO: 40803 - protein, 539 aa, Schizochytrium aggregatum
  Clone ID: LIB3033-013-B8_FLI.pep
APSAPVQKKAAPAAETKAVASADALRSALLDLDSMLALSSASASGNLVETAPSDASVIVPPCNIADLGSRAFMKTYGVSAPLYTGAMAKGIASADLVIAAGRQGILASFGAGGLPMQVVRESIEKIQAALPNGPYAVNLIHSPFDSNLEKGNVDLFLEKGVTFVEASAFMTLTPQVVRYRAAGLTRNADGSVNIRNRIIGKVSRTELAEMFMRPAPEHLLQKLIASGEINQEQAELARRVPVADDIAVEADSGGHTDNRPIHVILPLIINLRDRLHRECGYPANLRVRVGAGGGIGCPQAALATFNMGASFIVTGTVNQVAKQSGTCDNVRKQLAKATYSDVCMAPAADMFEEGVKLQVLKKGTMFPSRANKLYELFCKYDSFESMPPAELARVEKRIFSRALEEVWDETKNFYINRLHNPEKIQRAERDPKLKMSLCFRWYLSLASRWANTGASDRVMDYQVWCGPAIGSFNDFIKELTLIRPSQTSTRASFRLTSRSFVERASCAVSKFCATHAFPMALPLLWPASMTHTSRPRSCK

SEQ ID NO: 40804 - protein, 423 aa, Schizochytrium aggregatum
  Clone ID: LIB3033-018-G4_FLI.pep
LFFTKGSKVRGGKRTQHAKSGKMSAVGKEIFIVAAKRTAFGTFGGSLKHLSAVQLGVEAAKGAIAQLPSAEIIDTVHVGNVQQTTTDVAYLARHVALKAGVPIEVPALTVNRLCGSGFQSIVNGVQDILVGDAEVVLTGGAESMSQAPYLVHGVRFGSPLGVNPPMIDSLWEGLQDKHVGCPMAITAENLAEKYDISKEDADAFALRSQQKWAAAQEAGLFKDEIVPIKIKDRKKGEIDFEVDEHPRPQTTVESLQKLKPLFKKGGSVSAGNASGISDGAGAVIVASAEAVKKHNLKPMARIVSYAVAGVPPEIMGIGPVPAIQEALRRANLSINDMDFLEINEAFASQFLACQKDLGFDLEKEGMQSKGGAIAQGHPTGASGSRIMGTLAYDLARNPGKKYAIGSACIGGGQGIAIILENCA

SEQ ID NO: 40805 - protein, 439 aa, Schizochytrium aggregatum
  Clone ID: LIB3033-021-G6_FLI.pep
GEKYYVIRSFSPPPPAIRCRVRTRFTFLERVGGLVDKGSILGLEVNARVVAQGVETAQVAGTTEDLQVDLDDTGVLVGDSGVEVGALDEVVEGANGRATPDLVVHDAVRGAHVGPAAGKTKVPAEAERHLELGVVLGALDLLRVLETVNVKVLGLLPDLLECALEDTLLDALELGRRHGVEGVVLAKELVELVGARGEHGSLLEDLELDALLEHVGGRGHADIRVGGLRELLAHVVAGAGLLGDLVDSAGDDEGGAHGERGGGGLRAADATAGANADAEVRGVAALAVQAVAEVDDEREDDVDGAVVGVAARVSLDSDIVGDGNAARELGLLLGDLARGDELLEEVLRGRADEHLGELGARDLADDAVADVDRTVGVAREAGGAVAHDLRGEGHECRGLHHSDALLEEEIDVALLEVAVKRRVDEVDGVGALRQGGLDL

SEQ ID NO: 40806 - protein, 354 aa, Schizochytrium aggregatum
  Clone ID: LIB3033-022-H5_FLI.pep
AAASHSRAEGSLGELGAHEREAEDFGGLEALRLLRDEAAESAKALLGLLDGLLGALRGKILGEHVADGSGTSALSELETLKGQDNGAGAEDADQGEGELAAVIDNENGAVLGALQDELVRAADVNHLGVHQGKIITVSAVDRVNLDRRRGASRGRSSGGRRRGRATSDLSLHGIDDLANSASAAESVDVLGLDVEHGLNLGENLDTLDGVNAELGLELHVGLDHVGLVASLGGEDLHDDGLGLLKKLVRDSRGGGSRSRGSGGRRRGRATSDLGLHGIDNLANSAGAAEGIDVLGLDVEHGLNLGEDLDTLDGVNAELSLELHVGLNHVSLVASLGGEDLHDDGLGLLEKLARD

SEQ ID NO: 40807 - protein, 648 aa, Schizochytrium aggregatum
  Clone ID: LIB3033-025-F11_FLI.pep
QKDNLSRFTSLDLEGKAVRGDDRSLDINEEIALLVVELKGVLVLGVTARLVGAEGNVEGLVLRDRAVLDDALDRVGERSLAERAAHPDEHGLKGQVVHEGVMGVSVRGKLAASGVGAGDSAALGHKLALGAREHVIDAAEGRAVEEGLAVVDGALERRIGIERGRLHGGVGRGRALVGEHDDGAVGRDQLAAGKGLERGLDVDAARGRRRRGEGHLAVDVAVDSDTLEELGVVNGPERVAGEEAEAGLRERANGQRHGQHAAALDDVVLEEGVGLGGNLAVQGDGVRADLLGRGAPVADKDLSRRGAEHDARHGISAALAGDDLHAHLLELLLELRRHHATVPGTEADRLDRDVLGELEAHLVKGLVGHGVVRLADVAVEAGERAEEDHVLEVGAVDGGEEVLETGDLGAKDGVELVGELLLDETVAEHARGMNDARDAGTELGLGIAHGLGHVGGRVHVARRVDGLAAERFNRSNRAAHLASAKNRAHKLSDSAGRGLGALASAKGALELLGSSLLHSLLVSDASAPCRFARRDLAAAKQNVLAARDLARDLPDAKRRDAASAARNEQHVVLGDLALRVAGLELGGTDRAALLVCANADLANANVSARHLAHNRHGGILGVHALSNVHAAGKDVRLGPLEADGLAEA

SEQ ID NO: 40808 - protein, 299 aa, Schizochytrium aggregatum
  Clone ID: LIB3033-037-H2_FLI.pep
ALQDDVCNRLLLRGPQDELDLTENAQPAIMALSIAVTRVLDHELGLGAASPHCKMALGHSLGEFAAMVATGALELADAARIVRARGRAMQTASNMFFRERADGDDDFAMYAIMPIGYEKAAEACALALQELGEDSHVCQVANANSPKQVVLSGSRLAVSRAVEIAKEKFRARRATPLRVSAPFHCRVMADARPALEEALSAAKSWRHPDVPIISNVTAEPVLSADALQELALEQLTSTVRWDACVHTALQGAANASFIEAGGKVLSPLVSAVGGKNVRVFPVSDTIDLPTPQDFPQVSP

SEQ ID NO: 40809 - protein, 810 aa, Schizochytrium aggregatum
  Clone ID: LIB3033-046-E6_FLI.pep
SHSRAEGSLGELGAHEREAEDFGGLEALRLLRDEAAESAKALLGLLDGLLGALRGKILGEHVADGSGTSALSELETLKGQDNGAGAEDADQGEGELAAVIDNENGAVLGALQDELVRAADVNHLGVHQGKIITVSAVDRVNLDRRRGASRGRSSGGRRRGRATSDLSLHGIDDLANSASAAESVDVLGLDVEHGLNLGENLDTLDGVNAELGLELHVGLDHVGLVASLGGEDLHDDGLGLLKKLVRDSRGGGSRSRGSGGRRRGRATSDLGLHGIDNLANSAGAAEGIDVLGLDVEHGLNLGEDLDTLDGVNAELSLELHVGLNHVSLVASLGGEDLHDDGLGLLEKLARDSRGSGSGRRSGSSRSRSSGGRRRGGAAGDLSLHGIDDLANSASAAESIDVLGLDVEHGLNLGENLDTLDGVNAELGLELHVGLDHVGLVASLGGEDLHDDSLGLLKKLVRDSRGGGSRSRGSGGRRRGRATSDLGLHGIDNLANSAGAAEGIDVLGLDVEHGLNLGEDLDTLDGVNAELSLELHVGLDHVSLVASLGGEDLHDDSLGFLEKLVRDSRGGGSGRRSGSSRSRSSGGRRRGGAASDLSLHGIDDLTNSASAAESVDVLGLDVEHGLNLGENLDTLDGVNAELGLELHVGLNHVSLVASLGGEDLHDDSLGLLEKLARDSRRRGGSSRTWGSGGRRRGRATSDLSLHGVDDLTHSASAAESVDVLGLDVEHGLNLGEDLDTLDGVNAELSLELHVGLDHVSLVASLGGEDLHDDGLGLLEKLVRDSRRGETRGRARERRRRRGAARRDAAAA

SEQ ID NO: 40810 - protein, 334 aa, Schizochytrium aggregatum
  Clone ID: LIB3033-050-B10_FLI.pep
YYLRVGLTQLTYMRAYLQLLGRDVCVIDAGHKSGSAIGKACVAQNFETAQEARSTKDLLVNLNDARVLVCDGRIKVSSLDEIVEGTNGRTAPDLVVHDAIGSSSVGPAARQAQVPAKAQRHLELGVALGALDLLRVVKTVNVKVFGLVPDLFERAAEDALLDARKLCGGHGLERVVLAKELVELVGARGKHGSLLEDLKLDAFLEHVGSRGHAYVRVSGLRELLAHIVARARLLGDLVHGAGDNKGGTHVEGGQRRLGAPNATAGAHTDAKVGRVAALAVKAVAKVDDEGQNDVDGAVVGVPPESASTAMSSATGTRRASSACSWLISPEAMSF

SEQ ID NO: 40811 - protein, 486 aa, Schizochytrium aggregatum
  Clone ID: LIB3033-062-D9_FLI.pep
QRVGEKYYVIRSFSPPPPAIRCRVRTRFTFLERVGGLVDKGSILGLEVNARVVAQGVETAQVAGTTEDLQVDLDDTGVLVGDSGVEVGALDEVVEGANGRATPDLVVHDAVRGAHVGPAAGKTKVPAEAERHLELGVVLGALDLLRVLETVNVKVLGLLPDLLECALEDTLLDALELGRRHGVEGVVLAKELVELVGARGEHGSLLEDLELDALLEHVGGRGHADIRVGGLRELLAHVVAGAGLLGDLVDSAGDDEGGAHGERGGGGLRAADATAGANADAEVRGVAALAVQAVAEVDDEREDDVDGAVVGVAARVSLDSDIVGDGNAARELGLLLGDLARGDELLEEVLRGRADEHLGELGARDLADDAVADVDRTVGVAREAGGAVAHDLRGEGHECRGLHHSDALLEEEIDVALLEVAVKRRVDEVDGVGALRQGGLDLLEGGAHVVHGEAAGAKGAEDLALAGGDDEVRRGNALGHGARVQR

SEQ ID NO: 40812 - protein, 445 aa, Glycine max
  Clone ID: 700850490_FLI.pep
QLANLANLLTFNLSHNNLQGELPAGGFFNTISPSSVSGNPSLCGAAVNKSCPAVLPKPIVLNPNTSTDTGPGSLPPNLGHKRIILSISALIAIGAAAVIVIGVISITVLNLRVRSSTPRDAAALTFSAGDEFSRSPTTDANSGKLVMFSGEPDFSSGAHALLNKDCELGRGGFGAVYQTVLRDGHSVAIKKLTVSSLVKSQEDFEREVKKLGKIRHQNLVELEGYYWTTSLQLLIYEYVSGGSLYKHLHEGSGGNFLSWNERFNVILGTAKALAHLHHSNIIHYNIKSTNVLLDSYGEPKVGDFGLARLLPMLDRYVLSSKIQSALGYMAPEFACKTVKITEKCDVYGFGVLVLEIVTGKRPVEYMEDDVVVLCDMVRGALEEGRVEECIDERLQGKFPAEEAIPVMKLGLICTSQVPSNRPDMGEVVNILELIRCPSEGQEELA

SEQ ID NO: 40813 - protein, 279 aa, Brassica napus
  Clone ID: LIB3034-014-F6_FLI.pep
ARFELELLLKNIEKYRVTQLWVVPPVFLALAKQSVVKKYDLSSLKYIGSGAAPLGKDLMEECGKNIPNVVLMQGYGMTETCGIVSVEDPRLGKRNSGSAGMLAPGIEAQIVSVESGKPQPPNQQGEIWVRGPNMMKGYFNNPQATKETIDRKGWVHTGDLGYFNEDGNLFVVDRLKELIKYKGFQVAPAELEGLLVSHPEILDAVVIPLPDEEAGEVPIAFVVRSPNSSITEEDIQKFIAKQVAPYKRLRRVSFISTVPKSAAGKILRRELVQQVRSKM

SEQ ID NO: 40814 - protein, 397 aa, Brassica napus
  Clone ID: LIB3034-015-G7_FLI.pep
NMVMSRPSSSLDEIRKAQRADGPAGILAIGTANPANHVIQAEYPDYYFRITNSEHMTDLKEKFKRMCDKSMIRKRHMHLTEEFLKENPNMCAYMAPSLDVRQDIVVVEVPKLGKEAAVKAIKEWGQPKSKITHVVFCTTSGVDMPGADYQLTKLLGLRPSVKRLMMYQQGCFAGGTVLRLAKDLAENNRGARVLVVCSEITAVTFRGPSDTHLDSLVGQALFSDGAAALIVGSDPDASVGEKPIFEMVSAAQTILPDSDGAIDGHLREVGLTFHLLKDVPGLISKNIEKSLEEAFKPLGISDWNSLFWIAHPGGPAILDEVEKKLGLKAEKMRATRQVLSEYGNMSSACVLFILDEMRRKSAKDGVATTGEGLEWGVLFGFGPGLTVETVVLHSVPV

SEQ ID NO: 40815 - protein, 327 aa, Brassica napus
  Clone ID: LIB3034-030-C2_FLI.pep
QKSSMSTEREVVCVTGASGCIGSWLVHLLLLRGYSVHATVKNLQDEKETKHLEALEGAATRLHLFEMDLLKYDTVSAAVNGCSGVFHLASPCIVDEVQDPQKQLLDPAVKGTLNVLTAAKEAGVKRVVVTSSISAITPSPNWPADKIKNEDCWADEDFCKQNGLWYPLSKTLAEKAAWEFAEEKGLDVVVVNPGTVMGPVIPPSINASMLMLQRLLEGCTETYENFFMGSVHFKDVALAHILVYENPSAKGRHLCVEAISHYGDFVAKVAELYPNYSVPKLPRETQPGLLRAKNAAKKLMELGLEFSSMEVIIKDGVESLKSKGFIS

SEQ ID NO: 40816 - protein, 183 aa, Brassica napus
  Clone ID: LIB3034-030-D9_FLI.pep
SLVGQALFSDGAAALIVGSDPDVSAGEKPIFEMVSAAQTILPDSDGAIDGHLREVGLTFHLLKDVPGLISKNIEKSLDEAFKPLGISDWNSLFWIAHPGGPAILDDVEKKLGLKAEKMRATRHVLSEYGNMSSACVLFILDEMRRKSVEDGVATTGEGLEWGVLFGFGPGLTVETVVLHSVPV

SEQ ID NO: 40817 - protein, 147 aa, Glycine max
  Clone ID: LIB3039-003-F7_FLI.pep
DRELETDMDWHHGTKPLVPRPETLSFFYNYNYNSPYPGVEVKQAALMETGEGSVPALMDSRNKEKKKRLTNNQIELLERSFQEEIKLDPERKMKLSRELGLQPRQIAVWSKIDEQGGRPSSLSTCTMCLNTNMMSSPTKSKSFKKRL

SEQ ID NO: 40818 - protein, 191 aa, Glycine max
  Clone ID: LIB3039-005-C6_FLI.pep
MQLSVHSLIVILFLATAFLIIIFIIHLRYRLLRFFFIPTSRTFRLFLVIGSHVLLVLHFPFLRLCHIRCFFSIRHGLPFCSSSFAHSRHCFVFRMFFVEYLPELLHENEESTWRPLWLVRVFRCLPLAGGFPSLGGGSLLIHSKFGIGSLRFGLGLSSFHDGYERGTGSGVRVWVEREERKMRMNDNTIPF

SEQ ID NO: 40819 - protein, 170 aa, Glycine max
  Clone ID: LIB3039-007-G9_FLI.pep
SVRLREPTEGRNKKRKLTNNLYFHQNKIPLYFSQMARTKQTARKSTGGKAPRKQLATKAARKSAPATGGVKKPHRFRPGTVALREIRKYQKSTELLIRKLPFQRLVREIAQDFKTDLRFQSSAVSALQEAAEAYLVGLFENTNLCAIHAKRVTIMPKDIQFARRIRGERA

SEQ ID NO: 40820 - protein, 82 aa, Glycine max
  Clone ID: LIB3039-011-A9_FLI.pep
TATPYGTWGNALVMSENSPISGYSADEMRDCIHPKSVGSHLQEVCSQDNIHQRPSYKSHRFHPGHPKSMKQQHAILIIQQIW

SEQ ID NO: 40821 - protein, 289 aa, Glycine max
  Clone ID: LIB3039-015-B9_FLI.pep
NSREEQEIVRKRRRRQKGKVQEFVVSYKLVYREENMKLFVFFVAAAVLVAWPCHGAGYQRFPLRMKTGYGERSSEVKCASFRLAVEAHNIRAFKTIPEECVEPTKDYINGEQFRSDSKTVNQQAFFYASEREVHHNDIFIFGIDNTVLSNIPYYEKHGYGVEEFNETLYDEWVNKGDAPALPETLKNYNKLLSLGFKIVFLSGRYLDKMAVTEANLKKAGFHTWEQLILKDPHLITPNALSYKSAMRENLLRQGYRIVGIIGDQWSDLLGDHRGESRTFKLPNPMYYIE

SEQ ID NO: 40822 - protein, 189 aa, Glycine max
  Clone ID: LIB3039-016-A3_FLI.pep
MQLPVHSLIVILFLATAFLIIIFIIHLRYRLPRFFFIPTSRTFRLFLVIGSHVLLVLHFPFLRLCHIRCFFSIRHGLPFCSSSFAHSRHCFVFRMFFVEYLPELLHENEESTWRPLWLVRVFRCLPLAGGFPSLGGGSLLIHSKFGIGSLRFGLGLSSFHDGYERGTGSGVRVWVEREERKMRMNDNTI

SEQ ID NO: 40823 - protein, 126 aa, Glycine max
  Clone ID: LIB3039-017-D3_FLI.pep
TTVQYTKTMADKDAFCYPYHVHDCTSPQENLPNKGPFHSEMLPKNSRKGAGYTSEKPLDAKTLRRLAQNREAARKSRLRKKAYVQQLESSRLKLTHLEQDLQRARSQDEFMGCGGAGGSISSGEFN

SEQ ID NO: 40824 - protein, 161 aa, Glycine max
  Clone ID: LIB3039-023-D9_FLI.pep
IAKSFLQFNHHCTTQFPSSFSIKRAMARTKQTARKSTGGKAPRKQLATKAARKSAPATGGVKKPHRFRPGTVALREIRKYQKSTELLIRKLPFQRLVREIAQDFKTDLRFQSSAVSALQEAAEAYLVGLFEDTNLCAIHAKRVTIMPKDIQLARRIRGERA

SEQ ID NO: 40825 - protein, 191 aa, Glycine max
  Clone ID: LIB3039-026-H1_FLI.pep
ENCASFGTSSKSGTSMATEEVNKLQSLPPYPEMIVKALEALNEADGSSKSAISKYIETTYGELPDETVLGSHLNKMKESGELAFKQNNYMKADPNAPPKRGRGRPPKPKVPLPPGTVVSPPRPRGRPPKDPNAPPKSPKAKATPATGRPRGRPKKVARSPAVPSPTAVSTGRPRGRPPKVKPQLTEVSVES

SEQ ID NO: 40826 - protein, 180 aa, Glycine max
  Clone ID: LIB3039-046-H12_FLI.pep
AQTKPSINNCSDHYIYKLIFKKRNPQKTLDLQHNRLTNPNSRAGKLGNRLGPFRNGVFGQFTREHETHGGLDLPRGDGGLLVVASQTRRFLGELLEDVVDEAVHDAHGLAGNTNVGVNLLEDLEDVDLVGLHALLRALLLLLAPSFLRDLLLRLRLLLRRCLLRRWLLLRRLLLCLCRSH

SEQ ID NO: 40827 - protein, 311 aa, Glycine max
  Clone ID: 700561334_FLI.pep
VILGRTVEVKKAIPRSEQHQHQNPLQSRGGGYYYNNNNNNNDDNNNNSNDYCSDHNVRTKKIFVGGLPGISEEEFKNYFERFGRITDVVVMQDSVTHRPRGFGFITFESEESVQNVMVKSFHDLNGRQVEVKRAVPKEGNHGYDGFSKLRNKSERGVPKSFPPFSHRDMLPLPGFTPLPWYSGDGVYAYGSNAYGCWYPVGGYGGNGYAVPSDAPSNLWYGPMMTGPQACQVPYASAVPNVVYVGGRIGIVGSGAGSWGYTGIMGSATNFKFDQAFNANEFVPGNVTSPHGVKQDVIDSSSLKGSNGGISS

SEQ ID NO: 40828 - protein, 145 aa, Glycine max
  Clone ID: LIB3039-047-H1_FLI.pep
GREEASGEEAGGGEEVDGGRQGSGGEEAEGRKEASEGCRSRRRRGEDKKRNKKSVETYKIYIFKVLKQVHPDIGISSKAMGIMNSFINDIFEKLAQESSRLARYNKKPTITSREIQTAVRLVLPGELAKHAVSEGTKAVTKFTSS

SEQ ID NO: 40829 - protein, 429 aa, Glycine max
  Clone ID: LIB3039-051-A2_FLI.pep
KQQIEKEVGTWNRNWILASSLCFKIHQQPPTLSIKPAFYFSQPKIPSTNLMMMSSLSVSRHNHLFSGPLPARPKPKPSFSSSRIRMSLQENGPSIAVVGVTGAVGQEFLSVLSDRDFPYSSIKMLASKRSAGRRITFEDRDYVVEELTAESFDGVDIALFSAGGSISKYFGPIAVDRGTVVVDNSSAFRMDENVPLVIPEVNPEAMQNIKAGTGKGALIANPNCSTIICLMAATPLHRRAKVLRMVVSTYQAASGAGAAAMEELQLQTREVLEGKPPTCKIFNRQYAFNLFSHNASVLSNGYNEEEMKMVKETRKIWNNKDVKVTATCIRVPVMRAHAESVNLQFETPLDEDTARDILKNAPGVVVIDDRESNHFPTPLEVSNKDDVAVGRIRQDLSQDGNQGLDIFVCGDQIRKGAALNAIQIAEMLL

SEQ ID NO: 40830 - protein, 160 aa, Glycine max
  Clone ID: LIB3040-009-E8_FLI.pep
QQNNFQTQLPFHNLISSLFPSQRAMARTKQTARKSTGGKAPRKQLATKAARKSAPATGGVKKPHRFRPGTVALREIRKYQKSTELLIRKLPFQRLVREIAQDFKTDLRFQSSAVSALQEAAEAYLVGLFEDTNLCAIHAKRVTIMPKDIQLARRIRGERA

SEQ ID NO: 40831 - protein, 191 aa, Glycine max
  Clone ID: LIB3040-017-G12_FLI.pep
MQLSVHSLIVILFLATAFLIIIFIIHLRYRLLRFFFIPTSRTFRLFLVIGSHVLLVLHFPFLRLCHIRCFFSIRHGLPFCSSSFAHSRHCFVFRMFFVEYLPELLHENEESTWRPLWLVRVFRCLPLAGGFPSLGGGSLLIHSKFGIGSLRFGLGLSSFHDGYERGTGSGVRVWVEREERKMRMNDNTMTS

SEQ ID NO: 40832 - protein, 312 aa, Glycine max
  Clone ID: 700737936_FLI.pep
ENQMHRGKFSLTPKNEVKDLTGSSLTSYKHSSLLDPIDVSSSSDDENDLPNDDVSNQLVLYDPVANGNNAIELAPDPLQCEHPLLPRSKPSHSVPRVLPSVGAFTVQCASCFKWRLIPTKEKYEEIREHILEQPFVCQKAREWRPHVSCDDPEDISQDGSRVWAIDKPNIAQPPAGWERLLRIRAEGSSKFADIYYIAPSGKRLRSMVEIQKFLMEHPEYTRDGVTLSQFSFQIPRPLQENYVRKRPARLTSSYEVSEPVEHEQVSPLAWVDPEGHGRRLGLPAPPFMESHDIDPISISRPSKRQATHKGAL

SEQ ID NO: 40833 - protein, 173 aa, Glycine max
  Clone ID: LIB3040-029-E4_FLI.pep
WSAPDFSVLSHTHSVLRISDSRVRVPNFSTDQKMSSTGGSTKGGRGKPKASKSVSRSQKAGLQFPVGRIARFLKAGKYAERVGAGAPVYLSAVLEYLAAEVLELAGNAARDNKKNRIVPRHIQLAVRNDEELSKLLGSVTIANGGVLPNIHQTLLPKKAGKGKGEIGSASQEF

SEQ ID NO: 40834 - protein, 188 aa, Glycine max
  Clone ID: LIB3040-030-E5_FLI.pep
KTISLYKMKLLFLLRRFGGLRSRGLLRRRSGTLLRQQNRVNVRQHSTASNSHTLKQFPQLIIIPHRQQHVPRVNPILLVVTCSVPGQLQHFCGEIFENGGEINGSAGAKAARVTAFLQVPGDAADGELEASFDGFGNGLLPVTSSSSSAFGWGFHCRSEKRAKRFVSEEMRETSFAFSISFNVFVAVS

SEQ ID NO: 40835 - protein, 162 aa, Glycine max
  Clone ID: LIB3040-032-B3_FLI.pep
EPSSFFSISTLQTLEFAFSSLFPQSMAKGEKKPAEKKPAEKAPAEKTKAEKKIPKEPASGEKKEKKRNKKSVETYKIYIFKVLKQVHPDIGISSKAMGIMNSFINDIFEKLAQESSRLARYNKKPTITSREIQTAVRLVLPGELAKHAVSEGTKAVTKFTSS

SEQ ID NO: 40836 - protein, 156 aa, Glycine max
  Clone ID: LIB3040-032-F8_FLI.pep
LRSKHQIVMAPKAEKKPAEKKPVEEKKSTVGDKAPAEKKPKAGKKLPKEGGAGGEGKKKKRNKKSVETYKIYIFKVLKQVHPDIGISSKAMGIMNSFINDIFEKLAQESSRLARYNKKPTITSREIQTAVRLVLPGELAKHAVSEGTKAVTKFTSS

SEQ ID NO: 40837 - protein, 137 aa, Glycine max
  Clone ID: LIB3040-033-F4_FLI.pep
LFSPHKKNLPMAPAKAEKKPAEKKPAEKKISKEGGSEKKKKRTKKSVETYKIYIFKVLKQVHPDIGISSKAMGIMNSFINDIFEKLAQESSRLARYNKKPTITSREIQTAVRLVLPGELAKHAVSEGTKAVTKFTSS

SEQ ID NO: 40838 - protein, 256 aa, Glycine max
  Clone ID: LIB3040-040-A9_FLI.pep
DQPCRQYNPCGCQTACGKQCPCLQNGTCCEKYCGRPKSCKNRFRGCHCAKSQCRSRQCPCFAADRECDPDVCRNCWVSCGDGTLGIPSQRGDNYECRNMKLLLKQQQRVLLGRSDVSGWGAFLKNSVGKHEYLGEYTGELISHREADKRGKIYDRENSSFLFNLNDQFVLDAYRKGDKLKFANHSPDPNCYAKVIMVAGDHRVGIFAKERICAGEELFYDYRYEPDRAPAWARKPEASGSKKEDGAPSSGRAKKLA

SEQ ID NO: 40839 - protein, 94 aa, Glycine max
  Clone ID: LIB3040-040-F9_FLI.pep
IMQLYRWEHWLTSTHYFHLCSTGNIKFLQEVLLKKIRQAQYHPLFVSKQAEICCKGTSPFLTVFNCQLHLSTVKLKLRVQHQALPGIPHSKTQS

SEQ ID NO: 40840 - protein, 124 aa, Glycine max
  Clone ID: LIB3040-043-E12_FLI.pep
EKQTPKETVRIRIRRSEQRCRVVEREARVWVREEPRGTGRCSAITSRESQNPPFAVWLAEAASRESVASSMKKPAASLRSSSRTLFATLLPTPSMLGGRLLPLWMLFMLSRGRAGLSMVSVVKF

SEQ ID NO: 40841 - protein, 270 aa, Glycine max
  Clone ID: LIB3040-044-H3_FLI.pep
VIMDKSEQTQQQHQHGMGVATGASQMAYSSHYPTAPMVASGTPAVAVPSPTQAPAAFSSSAHQLAYQQAQHFHHQQQQHQQQQLQMFWSNQMQEIEQTIDFKNHSLPLARIKKIMKADEDVRMISAEAPVIFAKACEMFILELTLRSWIHTEENKRRTLQKNDIAAAISRNDVFDFLVDIIPRDELKEEGLGITKATIPLVNSPADMPYYYVPPQHPVVGPPGMIMGKPVGAEQATLYSTQQPRPPMAFMPWPHTQPQQQQPPQHQQTDS

SEQ ID NO: 40842 - protein, 195 aa, Glycine max
  Clone ID: LIB3040-047-C9_FLI.pep
VMESGGNSLPSGSDGVKRKVSYFYDPEVGNYYYGQGHPMKPHRIRMTHALLAHYGLLQHMQVLKPTAAKDRDLCKFHADDYVAFLRGITPETQQDQLRQLKRFNVGEDCPVFDGLYSFCQTYAGGSVGGALKLNHGACDVAINWAGGLHHAKKCEASGFCYVNDIVLAILELLKIHEVSLINSPHYLIDAWLFSF

SEQ ID NO: 40843 - protein, 163 aa, Glycine max; identical to SEQ ID NO: 39900
  Clone ID: LIB3040-049-C1_FLI.pep

SEQ ID NO: 40844 - protein, 279 aa, Glycine max
  Clone ID: LIB3040-049-E3_FLI.pep
VMANAAEVSALKRIKLHLLGELSPLATPQNKFDQTNPSPSESSNSESSSISLNHYFTDLLEPEIEFPLFEFDSKPQVIDLETPKTLISAEKKPQFNRKPSLLIAVPKKTEWIQFGNPEVAAPENQPEKKHYRGVRQRPWGKFAAEIRDPNKRGSRVWLGTFDTAIEAAKAYDRAAFRLRGSKAILNFPLEVNTAAETVSVAAVDVERKRRREEEEVVVEDVKAVVKKEKITEHDVSCFRGMPLTPSMWTGFWDSDVKDIFNIPPLSPLSPFGFSPLVAV

SEQ ID NO: 40845 - protein, 201 aa, Glycine max
  Clone ID: LIB3040-054-G11_FLI.pep
KMASSQSKKRVDAVDSRAASVLLRAKDGSAFARCDDCKKNVPVALIDMHSCSLEAKIKMNLDAQVVEQAAEAKKPERKKPKSKEPMAKKAKVEKVKKVKDPNMPKRPPTAFFAFLDDFRKSFKEANPDSKDVKRVGKEAGEKWRSMTDEKKKPYLDKVAELKAEYEKAMESYEAGQDEEDQAGSDKEAAAKEVEEELTDEE

SEQ ID NO: 40846 - protein, 159 aa, Glycine max
  Clone ID: LIB3040-055-G5_FLI.pep
LDLSALAPNTPSELNILGHDSDTLGVNSAKIGVFEETNQVGLGGFLEGGDGGALKSKVGLEVLRDLTDQSLERELPDQKFRALLVLPDLAERYGSRTESVRLLHAAGSRSRLTSRLGGQLLTWRLAAGGLASRLLRTSHLRKLNWVGKRTELFVFSLFS

SEQ ID NO: 40847 - protein, 142 aa, Glycine max; identical to SEQ ID NO: 40769
  Clone ID: LIB3040-058-C11_FLI.pep

SEQ ID NO: 40848 - protein, 340 aa, Glycine max
  Clone ID: LIB3040-061-A11_FLI.pep
LTPKFANCHFNPQFLLQRPLTSRSQFSFPVSNPNSLIPMASEEPTVAVEPAPEPATAEPPPEEKEEPKPEAKARKTKEPKPKKVSRPRNPPTHPSYEEMIKDAITSLKEKTGSSQHAIAKFIEEKHKQLPPNFRKLLLYHLKKLVAAGKLVKVKGSFKLPPTRPSASSSSSPAKKKKPAPAKPQPKPKPKPKPKPAAKAKDTKATKSKAPAKPKAAAKPKAKVPAKPKPAPKPKAAAAAASKPKPAAAKPKGTKPAAKPKPKPAAKTKAAAAKPAAKPKAKPAKASRTSTRTSPGKKAAPAAKPAAKKVAPAKKAPVKSVKPKSVKSPAKKATAKRGGRK

SEQ ID NO: 40849 - protein, 243 aa, Glycine max
  Clone ID: LIB3040-061-G7_FLI.pep
RRQKGAYFISLIITHTYLIAMETGGFHGYRKLPNTTSGLKLSVSDMNMNMRQQQVASSDQNCSNHSAAGEENECTVREQDRFMPIANVIRIMRKILPPHAKISDDAKETIQECVSEYISFITGEANERCQREQRKTITAEDVLWAMSKLGFDDYIEPLTMYLHRYRELEGDRTSMRGEPLGKRTVEYATLATAFVPPPFHHHNGYFGAAMPMGTYVRETPPNAASSHHHHGISNAHEPNARSI

SEQ ID NO: 40850 - protein, 433 aa, Gossypium hirsutum
  Clone ID: LIB3048-018-G4_FLI.pep
NLPSFDQSKNNQNSMGKKAVLIGINYPGTKAELKGCINDVKRMYKCLTERYGFSEEDITVLIDTDNSYDQPTGKNIRRALNDLVRSAEPGDFLFVHYSGHGTRLPAETGDDDDTGYDECIVPCDMNLITDDDFRELVDKVPKGSRISIVSDSCHSGGLIDEAKEQIGDSSKPQDSESESGSGGFRSFLHHTVQDAFESRGIHVPSRLRHRDHHHDKEEVDDRGVNEDYDDSGYVKSRSLPLSTLIEMLKQKTGKDDIDVGKLRPTLFDMFGEDASPKVKKFMNIIMTKLQGSGDDGEGGGFMGKVGNLALQFLKQKLDDDEGYGKPALETEVSSKQEAYAGAGKHSLPDSGILISGCQTDQTSADASPSGNASKAYGALSNAIQTIIADSDGSITNKELVLKARQMLKKQGFTQQPGLYCCDHHVRAPFVCEY

SEQ ID NO: 40851 - protein, 385 aa, Glycine max
  Clone ID: LIB3049-001-F2_FLI.pep
SLSSQPKIPMASLSVLRHNHLFSGPLPARPKPTSSSSSRIRMSLRENGPSIAVVGVTGAVGQEFLSVLSDRDFPYRSIHMLASKRSAGRRITFEDRDYVVQELTPESFDGVDIALFSAGGSISKHFGPIAVNRGTVVVDNSSAFRMDEKVPLVIPEVNPEAMQNIKAGTGKGALIANPNCSTIICLMAATPLHRRAKVLRMVVSTYQAASGAGAAAMEELELQTREVLEGKPPTCKIFNRQYAFNLFSHNASVLSNGYNEEEMKMVKETRKIWNDKDVKVTATCIRVPIMRAHAESVNLQFERPLDEDTARDILKNAPGVVVIDDRESNHFPTPLEVSNKDDVAVGRIRQDLSQDGNQGLDIFVCGDQIRKGAALNAIQIAEMLL

SEQ ID NO: 40852 - protein, 266 aa, Glycine max
  Clone ID: LIB3049-003-A4_FLI.pep
VMDRHKCKLCSRSFSNGRALGGHMKAHLATLPLPPKPHSYSSSSDSEQEQEQESLNYALRENPKKSFRVADPEDRESETESRNPTRQRSKRNRKSTMPKLTPPPHPEPEPLSSVSDTSPEEDVAMCLMMLSRDTWQQHKHANAATPKRRFSSGSEIKKNVRGNHLCHKCHKSFRSSRAFGSHRNVCCPREEGQNNYNNNRSTKVFECPFCYKVFGSGQALGGHKRSHLIPSSSSTVNDSVKLKHSFIDLNLPAPAEDDDLSVVSDA

SEQ ID NO: 40853 - protein, 686 aa, Glycine max
  Clone ID: 700895059_FLI.pep
RSHAQKFFTKLEKEAFVKGVPIGQALDIDIPPPRPKRKPSNPYPRKTNVGAPTLHSEAKHGKSLISIASSHGKQALDLEKEPLPEHNVDLRPTTVKENKDGSCLNVFTIIQEAPCSSVSSANKNSTSISVPLRNSCALREFIPSVKEVITRDETNESFVTDELENQKLEIDDGKHTQKTNDTCEVSKLENSGASELVQTEKTDGRNCALTIDGVPGNQNYPRHVPVHVVDGNLGTSTQNLSPDMVFQDSIFQPKGGVNRQPNLVTNSATSHISECQNNAARSSIHQSFPPSPPFAQDDYHSFLHMSSTFSSLIVSTLLQNPAAHAAASFAATFWPYANAETSADSPVCTPDFPSRQIGSPPSVTAIAAATVAAATAWWAAHGLLPLCGPLHTAFACPPASATTVPSMIIDESPQKTERGEIKPQNPPLQDQIPDPEHSEAQHSAPKSPAVSSSKSEDRGDANLDTSPKATNHEMNQAISENPDSNKMKGRKPVDRSSCGSNTTSSSEETELLEKDEKEKEEPKTPDANVLDTELSNRRSRSISNLTDSWKEVSEEGRLAFQALFSREVLPQSFSPTHHLINKDNQIDSIKDNELNTDYKDEDLESKKCSSICDGVQKNLLFVKDNNEEEGLLTIGLGPGKLKTRRTGFKPYKRCSVEANENRIGTACIQGEEKGPKRLRLNGEAST

SEQ ID NO: 40854 - protein, 175 aa, Glycine max
  Clone ID: LIB3049-003-C7_FLI.pep
IPTLIFVHTHRFPSFEFRYFDQIHNTSSSMTLGSSGSSVVVPRNFRLLEELEKGEKGIGDGTVSYGMDDGDDIYMRSWTGTIIGPYNTVHEGRIYQLKLFCDKDYPEKPPSVRFHSRINMTCVNHETGVVESKKFGLLANWQQRFTMEDILTQLKKEMAASHNRKLVQPPEGTHY

SEQ ID NO: 40855 - protein, 395 aa, Glycine max
  Clone ID: LIB3049-004-G9_FLI.pep
DLDAIVKPFSLLSRVLALSLSLVFVLPFCLSQSHTFSMTNDNIAVTDLTSALNEDNRADLVNALKSKIQSLAGAHSDVLETLSPNVRKRVESLREIQGKHDELEADFLKEREALEAKYQKLYQPLYTKRYEIVNGVTEVEGAANESTDESEENKEKGVPSFWLNAMKNNDVLAEEISERDEGALKFLKDIKWSRIENPKGFKLDFFFDTNPYFSNTVLTKTYHMIDEDEPILEKAIGTEIEWYPGKCLTQKVLKKKPKKGSKNAKPITKTESCESFFNFFKPPEVPEDDADIDEDLAEELQNQMEQDYDIGSTLRDKIIPHAVSWFTGEAAQGDEFEDLEDDEDEEEDEDEDEDEEDDEDEDDEEEDDTKTKKKKSGKAQAGDGDGERPPECKQQ

SEQ ID NO: 40856 - protein, 47 aa, Glycine max
  Clone ID: LIB3049-006-A5_FLI.pep
ERRKKVEGDSVCFNRRIYRTKKPCQQLDEKKIRKSFSNPKRSTKKQG

SEQ ID NO: 40857 - protein, 405 aa, Glycine max
  Clone ID: 700560728_FLI.pep
KVIASRVPNSKVSGGSFKIVAVEEKKEIEETQQTDKDRWKGLAYDISDDQQDITRGKGLVDSLFQAPQDAGTHYAVMSSYEYLSTGLRQYLDNKMDGFYIAPAFMDKLVVHISKNFMTLPNIKVPLILGIWGGKGQGKSFQCELVFAKMGINPIMMSAGELESGNAGEPAKLIRQRYREAADMIKKGKMCALFINDLDAGAGRLGGTTQYTVNNQMVNATLMNIADNPTNVQLPGMYNKEENPRVPIIVTGNDFSTLYAPLIRDGRMEKFYWAPTREDRIGVCTGIFRTDGIPEQDIVKLVDTFPGQSIDFFGALRARVYDDEVRKWISGVGVDSVGKKLVNSKDGPPTFEQPKMTLEKLLLYGNMLVQEQENVKRVQLADKYLNEAALGNANEDAIQRGTFFQS

SEQ ID NO: 40858 - protein, 207 aa, Glycine max
  Clone ID: LIB3049-006-E5_FLI.pep
TKEQLQTNKLVRSMEDIGPNSCTRPVTEKKARPQEQLNCPRCSSTNTKFCYYNNYSLTQPRYFCKTCRRYWTEGGSLRNVPVGGGSRKNKRVTSSKVPDLNPPISLSSVSAISSQNPKMQGVHDLNLAFPAAMDKYHHGTSPYVEMPKLEIGGDHSTSHHSHHHSHSPSSAVELLRSGMDSRGLNPYAPNSLMSGSDHSLYTPGYPM

SEQ ID NO: 40859 - protein, 150 aa, Glycine max
  Clone ID: LIB3049-007-B3_FLI.pep
QGSLTSHINLQNKRNLTIKIKKKKKNKLASKSVEGSSLSLESINHIHCRNGLSPSVLSVGNGVTNHVLQKDLEHATCLLVDETTDTLHTTPASQTPNRRLGDSLNVIAQHLTVSFRSSLSQTLAPLSTSRHFARKVQLTNNHSRKGNENE

SEQ ID NO: 40860 - protein, 318 aa, Glycine max
  Clone ID: LIB3049-007-D4_FLI.pep
TFSSLSTLLFFSAMEFHCLPIFLYLNLMLMTANAALTPRHYWETMLPRTPLPKAITELLSLESRSIFEYAGNDDQSESRSILGYAGYNQDEDDVSKHNIQIFNRLFFLEEDLRAGKIFNMKFVNNTKATVPLLPRQISKQIPFSEDKKKQVLAMLGVEANSSNAKIIAETIGLCQEPATEGERKHCATSLESMVDFVVSALGKNVGAFSTEKERETESGKFVVVKNGVRKLGDDKVIACHPMSYPYVVFGCHLVPRSSGYLVRLKGEDGVRVKAVVACHRDTSKWDHNHGAFKVLNLKPGNGTVCHVFTEGNLLWLPN

SEQ ID NO: 40861 - protein, 303 aa, Glycine max
  Clone ID: LIB3049-012-A7_FLI.pep
MTLETLQSNEFSNFIIYDTISATPFSSHGSPEASFLESFVNYQEQHDHPTFDNCAMRTRKREASEPESIGRRQNSVAVQGRKKRRRKPRVCKNTEEAETQRITHITVERNRRKQMNEHLAVLRSLMPESYVQRGDQASIVGGAIEFVKELEHLLQSLEARKLQLLHQEVAQTNENTAISKLMQPPFAHCFSYPQYTWSQTPNKYTSKTKAAIADIEVTLIETHANLRILTRRSSHGQLTKLVAGFQTLCLTVLHLNVTTIDPLVFYSFSAKVEEGFQLGSVDGIATAVHHLLARIEEEASLCC

SEQ ID NO: 40862 - protein, 162 aa, Glycine max
  Clone ID: LIB3049-012-B2_FLI.pep
DITLSLLQSQLIAFFFFQRESVFVFQMARTKQTARKSTGGKAPRKQLATKAARKSAPATGGVKKPHRFRPGTVALREIRKYQKSTELLIRKLPFQRLVREIAQDFKTDLRFQSSAVSALQEAAEAYLVGLFEDTNLCAIHAKRVTIMPKDIQLARRIRGERA

SEQ ID NO: 40863 - protein, 205 aa, Glycine max
  Clone ID: LIB3049-013-F4_FLI.pep
VEAKMRIMIKGGVWKNTEDEILKAAVMKYGKNQWARISSLLVRKSAKQCKARWYEWLDPSIKKTEWTREEDEKLLHLAKLMPTQWRTIAPIVGRTPSQCLERYEKLLDVACVKDENYEPGDDPRKLRPGEIDPNPESKPARPDPVDMDEDEKEMLSEARARLANTKGKKAKRKAREKQLEEARRLASLQKKRELKAAGIDIRQRK

SEQ ID NO: 40864 - protein, 393 aa, Glycine max
  Clone ID: 700868013_FLI.pep
AHNGHVLVLLIALVTSFIIITEGVTTPNPEIASLNRNSFPTGFIFGTASSAYQYEGAANEGGRGPSIWDTFTHKYPDKIKDRDSGDVAIDSYHRYKEDVGIMKDMNLDAYRFSISWSRILPKGKLSGGINQEGIDYYNNLINELLANGLKPFVTLFHWDLPQSLEDEYGGFLSPRIVKDFQDYADLCFKEFGDRVKHWITLNEPWSYSQHGYATGEMAPGRCSAWMNPNCNGGDSATEPYLVSHHQLLAHAASVHVYKTKYQTFQNGLIGITLNVNWYVPFSDNKLDHKATERAIDFQYGWFMDPLTTGDYPKSMRFLVRARLPKFTKEQSKLLIDSFDFIGINYYSASYASDAPQLSNAKISYLTDSLSNSSCCFKLVVRLSKRISRRFVIH

SEQ ID NO: 40865 - protein, 305 aa, Glycine max
  Clone ID: LIB3049-013-H3_FLI.pep
TKKVLSLMERYKCKLCSRTFSNGRALGGHMKAHLATLPLPPQNQQPPLSPSAAASFSSNSSSEQEQATHDEKSLIYGLRENPKKCFRLADPEFDTGSVVQDRESETESKNPTRRRSKRTRRPVNLEQKKPKLSFMESPEPVSSVSDTSPEEDVAMCLMMLSRDRWSKNNNINVVNVNDEDVVEEEEEEEEEEEEGGRSVLEIKLRRVRGKHQCQSCGKTFRSSRALGSHRSICEGSGNDSKIFQCPFCSKVFGSGQALGGHKRSHLMPSSSTTANNDSVRLKESFIDLNLPAPPEDDDLSVVSDA

SEQ ID NO: 40866 - protein, 157 aa, Glycine max
  Clone ID: LIB3049-016-F3_FLI.pep
GILFIQDSASAFWKQRPKYFEMARTKQTARKSTGGKAPRKQLATKAARKSAPTTGGVKKPHRYRPGTVALREIRKYQKSTELLIRKLPFQRLVREIAQDFKTDLRFQSHAVLALQEAAEAYLVGLFEDTNLCAIHAKRVTIMPKDIQLARRIRGERA

SEQ ID NO: 40867 - protein, 113 aa, Glycine max
  Clone ID: LIB3049-019-H7_FLI.pep
EAVAVDISIFYTKHNKLENNTKTLRNKKCIAKRKGDNYAIIIIISLSTFSTDAACELNVLGHDGHSLGVDRTKVGVFKQTHQVSLRSFLKRKNRVTLEPQISLHKRQKLNYNN

SEQ ID NO: 40868 - protein, 203 aa, Glycine max
  Clone ID: LIB3049-029-D2_FLI.pep
EAVAVDISIFYTKHNKLENNTKTLRNKKCIAKRKGDNYAIIIIISLSTFSTDAACELNVLGHDGHSLGVDRTKVGVFKQTHQVSLRSFLKRKNRVTLEPQISLEVLRDFTNKTLKGELADQKLCALLVFSDLTKSNSSRTIAMRLLDSTGGRCRFSCSLGGELLPRSLPTGGFASGLLGTSHERRLREKIDSARCERVMLCDV

SEQ ID NO: 40869 - protein, 418 aa, Glycine max
  Clone ID: LIB3049-029-F5_FLI.pep
NENESEAAKRGRAMEGGYGNRGSSFSQSRRGRGRGRGQRFPSNQSKVSSFAERGTPSSSSANRASASVISNTLEDDAQPSSNFVGTCPYMCPERERIQREKLRDLAIFERLHGNPGKSSPALAVKKFCRTISTKYVQASDMRPITVLEDTLNYLLSLLESKEHLSEVVHDFVFDRTRSIRQDITMQNIVNKKAIYMYEGMVKFHVVSHYKLWCSMSDPNTASLHHLNMEQLTKTLASLFNLYEANQNSNHVHENEAEFHSLYVLLHLGSYSQPMGEPLSLWFQRVSTPVLKSKEMCFARRILRSFRLGNYKDFFCTAAAQASYLQFCIMMPYINEVRVLALSCINFGGYKLHPYPLLDLSKLLFIKESDLESFCNHCGLETGTDESGNKLLPTKQTTFSHPKGGFQRYSFLGLQEYER

SEQ ID NO: 40870 - protein, 483 aa, Glycine max
  Clone ID: 700847855_FLI.pep
RCKYKILIIRILYKGKVENKMGEDGYSWIRRTKFSHTVCHRLDPARLGSIPISVQSEQKSRPAASKAQRHPITNKQRSLSPLPETYLSEAFREARHEQKRFSTPNPRREKRIMGKLLNKDSRETKESSSKSPSHSPNRQVKSKNRKDSAWTKLLDNGGGKITAVETAEEWNVDMSQLFFGLKFAHGAHSRLYHGVYKEEAVAVKIIMVPEDDENGALASRLEKQFIREVTLLSRLHHQNVIKFSAACRKPPVYCIITEYLAEGSLRAYLHKLEHQTVSLQKLIAFALDIARGMEYIHSQGVIHRDLKPENVLINEDNHLKIADFGIACEEASCDLLADDPGTYRWMAPEMIKRKSYGKKVDVYSFGLMIWEMLTGTIPYEDMNPIQAAFAVVNKNSRPVIPSNCPPAMRALIEQCWSLQPDKRPEFWQVVKILEQFESSLASDGTLSLVPNPCWDHKKGLLHWIQKLGPLHQNSGPVPKPKFT

SEQ ID NO: 40871 - protein, 147 aa, Glycine max
  Clone ID: LIB3049-029-G6_FLI.pep
LNKKNIKHQAAATAALRALLVGDLMDLGCLGFAGVDTFFVFFGPTFFAGFLTASVFFGATAVAILFRFGRDSFVALAVLSFTFFAASANLYEALILTSFPLAAWFFSCRPSIFLKFAGSTALASPPCTSLSHMDSILLSRSEQSKRP

SEQ ID NO: 40872 - protein, 159 aa, Glycine max; identical to SEQ ID NO: 39229
  Clone ID: LIB3049-030-E8_FLI.pep

SEQ ID NO: 40873 - protein, 174 aa, Glycine max
  Clone ID: LIB3049-032-B4_FLI.pep
KISLFFLLLNRSAISYMNNNMLGMKRRRDDNEGSLDLAKCLMLFSCPIESNKTQQKSFGSVEFECKTCNRKFSSFQALGGHRASHKRQKLEGEELKEQAKSLSLWNKPKMHECSICGLEFSLGQALGGHMRKHRASLNEGFPIIPSIDQVIAKIPVLKRSNSTRVMCLDLELHL

SEQ ID NO: 40874 - protein, 182 aa, Glycine max
  Clone ID: LIB3049-032-G12_FLI.pep
FHFLDYSFQLMGFYAEDPLSGLTIGQAIYEVALMIAVLRWVLCLIFRVINDRRTTQSDETPTPEPCSQMTRDKDSILLLTTFGEIKERLPETEETCAVCLSQLSVEDEVRELMNCYHVFHRECIDRWLEHEHENHSATCPICRAPLLSSSCHHSSATCLPPPQPSWAVERLLYLFGDDLLPC

SEQ ID NO: 40875 - protein, 307 aa, Glycine max
  Clone ID: 700849062_FLI.pep
WVYYEYGNIEEILKFESNIPIPDIKEDQVLIKVVAAALNPADYMRALGFFKDTDAPLPIVPGFDAAGVVVRVGSKVSKFKVGDEVYGDIIEYAWNNPKTIGTLAEYTATEEKVLAHKPSNLSFIEAASLPAAIITAYQGFDKIEFSAGKSILVLGGAGGVGSLVIQLAKHVFGASKVAATASTPKQDLLRSLGADLAIDYTKENFEELVEKFDVVYDTVGESNKALKAVKEGGKVVTIVPPATPPAITFSAVSDGAVLEKLQPYLESGKVKPVLDPKGPFPFSQTVEAFAYLKTNRAIGKVVLHPIP

SEQ ID NO: 40876 - protein, 329 aa, Glycine max
  Clone ID: LIB3049-034-F10_FLI.pep
GFGQEYPSRHWNKTNPILGLFLHSYCLPASYAADTASNRCQVLTNASESLTPTQLSLLTFLKEMVNVMEWQKQRWQPNGNAEMMYVKVMTDEQLETLRKQIAVYATICEQLIEMHKNISSHQDLAGIRLGNMYCDPLLGSGGHKIASRQRWTPSAMQLQILERIFDQGTGTPTKEKIKEITNELSQHGQISETNVYNWFQNRRARSKRKQQNVAPSANAESEVETEVDSKDKKTKPDEFQSPPSVSAVPADDNLGFQNHGSLQYLNPESNKPDSVFPSDASLRSTRNFNHVPVFDGLLSNSTSDYLTGKMEAPENYDLYQPAGDFNMAG

SEQ ID NO: 40877 - protein, 169 aa, Glycine max
  Clone ID: LIB3049-040-F6_FLI.pep
QFEFPIQNPNTFKEPSSESVMAPKAEKKPAEKKPVEEKKSTVGDKAPAEKKPKAGKKLPKEGGAGGEGGKKKKRNKKSVETYKIYIFKVLKQVHPDIGISSKAMGIMNSFINDIFEKLAQESSRLARYNKKPTITSREIQTAVRLVLPGELAKHAVSEGTKAVTKFTSS

SEQ ID NO: 40878 - protein, 191 aa, Glycine max
  Clone ID: LIB3049-042-D6_FLI.pep
MQLSVHSPIVILFLATAFLIIIFIIHLRYRLLRFFFIPTSRTFRLFLVIGSHVLLVLHFPFLRLCHIRCFFSIRHGLPFCSSSFAHSRHCFVFRMFFVEYLPELLHENEESTWRPLWLVRVFRCLPLAGGFPSLGGGSLLIHSKFGIGSLRFGLGLSSFHDGYERGTGSGVRVWVEREERKMRMNDNTMTS

SEQ ID NO: 40879 - protein, 247 aa, Glycine max
  Clone ID: LIB3049-043-A1_FLI.pep
EREEREMGRGRVELKRIENKINRQVTFAKRRNGLLKKAYELSVLCDAEVALIIFSNRGKLYEFCSSSSMLKTLERYQKCNYGAPEANVSTREALELSSQQEYLKLKARYEALQRSQRNLMGEDLGPLSSKELESLERQLDSSLKQIRSTRTQFMLDQLSDLQRKEHLLSEANRSLRQRLEGYQINPLQLNPGVEEMGYGRHPAQTHGEALFQQMECEPTLQIGYQPDPVSVVTAGPSMSNYMAGWLP

SEQ ID NO: 40880 - protein, 114 aa, Glycine max
  Clone ID: LIB3049-044-E12_FLI.pep
TNEMYNGCSDDSAYGSDENSTDTDSYPAPKAHSNRNNLSVQKGKKKKKLKSKKSKAHECPICNKIFRSGQALGGHKRSHFVGGSEENTLVIRPSAPPAAVPCLIDLNLPAPVDE

SEQ ID NO: 40881 - protein, 389 aa, Zea mays
  Clone ID: 700471383_FLI.pep
NEKEVALADRERAQVNTLYSDHFQDVPSDLHSTDANISSQDVTLDNSGQACAHATDGMTRELTHFVHSNANIFESNEVPASEITGVEYNQGASGFPQSTEDENAVGYNQDVSGFPRPTEDENAVDYNQDASGFSRPTEDVQDASGFPRPTEDENMVDYNQDASGFPRPTEDVNAVGYNQDASGFARPTEDVNAVGCNQDASGFPRSMKDENAVEYNQDGSGFPRPAENENDVSAMGDNSGFHENNMGSLTDLDMVNDYELKESNDFGSAINGVDTDFLNYDDDDGGDFDDANDDEPNPNEFQSLDNSGWSSRTRGVARYLKALFDDESGLERKSVAIDHLVRGKTRKEASRMFFETLVLTTKDYISVDQPNPFDLVRIKPGSKLLMSEF

SEQ ID NO: 40882 - protein, 147 aa, Glycine max
  Clone ID: LIB3049-047-G5_FLI.pep
HPNLSTLFLSPLASDPACKLDILGHNGNPLSMNRAEVSVLEQPNEVSLSSLLKRGNSAALETQIGLEILRDFSHEPLKWKLPDEKLGALLVLSDFPQRHGSRPEAVGFFTPPVAGADFRAALVASCLRGALPPVDLRAVCFVRAISK

SEQ ID NO: 40883 - protein, 159 aa, Glycine max
  Clone ID: LIB3049-050-F5_FLI.pep
NLCILFIQDSASAFWKQRPKYFEMARTKQTARKSTGGKAPRKQLATKAARKSAPTTGGVKKPHRYRPGTVALREIRKYQKSTELLIRKLPFQRLVREIAQDFKTDPRFQSHAVLALQEAAEAYLVGLFEDTNLCAIHAKRVTIMPKDIQLARRIRGERA

SEQ ID NO: 40884 - protein, 439 aa, Glycine max
  Clone ID: 700870679_FLI.pep
ITTSEHFHCFYLTGSIDITSITMAEVAPPKKENPNLLLGRFELGKLLGHGTFAKVHHARNIKTGEGVAIKIINKEKILKGGLVSHIKREISILRRVRHPNIVQLFEVMATKTKIYFVMEYVRGGELFNKVAKGRLKEEVARNYFQQLVSAVEFCHARGVFHRDLKPENLLLDEDGNLKVSDFGLSAVSDQIRQDGLFHTFCGTPAYVAPEVLSRKGYDGAKVDIWSCGVVLFVLMAGYLPFNDRNVMAMYKKIYKGEFRCPRWFSSELTRLLSRLLDTNPQTRISIPEVMENRWFKKGFKQIKFYVEDDRVCSFDEKLLLHHDDDLATSDSEVEIRRKNSNGSLPRPASLNAFDIISFSQGFDLSGLFEEKGDEARFVSSAPVSKIISKLEEVAQLVSFSVRKKDCRVSLEGCREGVKGPLTIAAEVFELTPSLVVVEV

SEQ ID NO: 40885 - protein, 237 aa, Glycine max
  Clone ID: LIB3049-050-H12_FLI.pep
IRKRKVSNDFNMMDLKIYTCEHPQCPYSQVRLGFPDRISRDNHQLICAYRGTSDFGGPSFPVNEIKPVVHPPSFVQPKSTAQPGSMVPPVIDLTGLEVSDNGQKMITDLMTNYDTNVRGNKKTSSCNHLAAENFDLPQHAMQQQQDNFIRGQGITAEGNIFDEANMPNNHHMFAREEGQFDRFKALNAPFETNHNNNNFHSMFGSLCDLASFDFKEDMQGVGMDTLQKQPDISIWYQ

SEQ ID NO: 40886 - protein, 188 aa, Glycine max
  Clone ID: LIB3049-054-D7_FLI.pep
VHSHAIIIIQTKPSINNCSDHYIYKLIFKKRNPQKTLDLQHNRLTNPNSRAGKLGNRLGPFRNGVFGQFTREHETHGGLDLPRGDGGLLVVASQTRRFLGELLEDVVDEAVHDAHGLAGNTNVGVNLLEDLEDVDLVGLHALLRALLLLLAPSFLRDLLLRLRLLLRRCLLRRWLLLRRLLLCLCRSH

SEQ ID NO: 40887 - protein, 158 aa, Glycine max
  Clone ID: LIB3049-055-F3_FLI.pep
FQQSAKHSPLRFALPEASRKLQMARTKQTARKSTGGKAPRKQLATKAARKSAPATGGVKKPHRFRPGTVALREIRKYQKSTELLIRKLPFQRLVREIAQDFKTDLRFQSSAVSALQEAAEAYLVGLFEDTNLCAIHAKRVTIMPKDIQLARRIRGERA

SEQ ID NO: 40888 - protein, 224 aa, Glycine max
  Clone ID: LIB3049-056-E1_FLI.pep
IHTSLSLSEFLSISCFNFNNGYSFFVLSFNQAIIMSTASQPKAKKTASSKKPLSHPPFAVMIAEAVASLKERTGSSQYAITKYIEGKHKELPATYKKLVLVHLKKSVAAGKLVKVKNSFKLAPTKPAPVKAAAPKKPTKAATKPASKPKAATPKKKAVAKPKAKAAATTAKPKSKPAKVAAKKVAAKPAKKKTPVKAVKKPKSVVKKPKSVKSPAKKTKAKAKK

SEQ ID NO: 40889 - protein, 302 aa, Glycine max
  Clone ID: LIB3049-056-G12_FLI.pep
FPLISMATEEPTVAVEPAPEPASADPPPEEKEETKPEAKAKKTKEPKPKKVSRPRNPPTHPSYEEMVKDAITSLKEKTGSSQYAIAKFIEEKHKQLPPNFKKLLLYHLRKLVAAGKLVKVKGSFKLPPTRPAASSSSSSSPAKKKKPAAAKSKPKPKPKPAAKAKDTKATKSKAPAKPKPAAKPKAKAPAKAKPAAKPKASAAAKPKPAAAKPKAAKPAAKSKPAAKTKAVPAKPAAKPKAKPVKASRTSTRTSPGKKAAPAAKPAAKKVAVAAKKTPVKSVKPKSVKSPAKKATAKRGGRK

SEQ ID NO: 40890 - protein, 162 aa, Glycine max
  Clone ID: LIB3050-008-F7_FLI.pep
RTRGTENVKKEEGRRKYRGVRQRPWGKWAAEIRDPFKAARVWLGTFETVEAAARAYDEAALRFRGSKAKLNFPENVTLRQPQFTVSTSTDPFQLSGTNLYDHRMFLTSNTMASHHLQSSLPLPPATSSSLTSPPQNITSLSSLYSAQLPPWSASGHSSSSSP

SEQ ID NO: 40891 - protein, 112 aa, Glycine max
  Clone ID: LIB3050-009-H5_FLI.pep
GKWAAEIRDPFKAARVWLGTFDTAEAAARAYDEAALRFRGNKAKLNFPENVTLRQPQFTVSNPPSSLVSITTSIDPVVHSTRPLLLPSQASTATNVYEYFQLSGFPTNTNLL

SEQ ID NO: 40892 - protein, 78 aa, Glycine max
  Clone ID: LIB3050-011-A10_FLI.pep
LDDGYKWRKYGQKVVKNTQHPRSYYRCTQDNCRVKKRVERLAEDPRMVITTYEGRHVHSPSNELEDSQTPFELSNFLW

SEQ ID NO: 40893 - protein, 250 aa, Glycine max
  Clone ID: LIB3050-011-A8_FLI.pep
YISFPTREIMEKDIIHLSPTWDGDNGNSTEKRLRLFGFELNPSKDGYAKESGEGDESVNSSNSVSSGGDKTVQEKPSAKDSDERKFECQYCYKEFANSQALGGHQNAHKKERMKKKRLQLQSINRYLQHPFQSKHGFAHPSDTPWFYDPSTYNNSEFTLSEEPQISFNSNVLDANFSCDQKSSWYSLASHPSNSQQDTCMFTFSNASNNSPFIFKPCHFPASNQSHKSKALDLQLGLNLQSNTRSSLRRM

SEQ ID NO: 40894 - protein, 63 aa, Glycine max
  Clone ID: LIB3050-011-F6_FLI.pep
KINENYYQVQKISRISKIKLLQRGQFPLLTQISLEHVLQNVCPHGINAAPLCRTMHTQQLYST

SEQ ID NO: 40895 - protein, 118 aa, Glycine max
  Clone ID: LIB3050-012-B4_FLI.pep
NLEHQLESALKHIRSRKNQLMYESISELHKKDKALQEQNNTLAKKIKEKEKALAQQAQLERLGDEVDLTSSALVPQPLVTSNIRTSSQIRGEGDNEGTPTPTQANAILPPWMLRPTNE

SEQ ID NO: 40896 - protein, 66 aa, Glycine max
  Clone ID: LIB3050-015-F6_FLI.pep
SFLLIMSDLHCNHPHVDSNPKPTPPEMFSCIECRCSPSYVTINIVGSSGARSTCFLAGHPLTLLHL

SEQ ID NO: 40897 - protein, 658 aa, Zea mays
  Clone ID: 700214295_FLI.pep
CSGGGGSVESPALPIRSGPAGFLTLVFFFASSLIRCNLAVAVRSNRTLPRSPRTLESRCRCRGSTMAFWWPLLVLAAAYALCRLLLFLIPPTVPSIDVDASDVLAKEDSFIYIPRRGKSTQTDKVQCYEPATMKYLGYFPVVTPDEVKEHVAQSRKAQRIWAKSSFKQRRQFLRIVLKYILEHQDLICEVSSRDTGKTMVDASLGEIMTTCEKITWLLDEGEKWLKPEYRSTGRSMLHKRAKVEFYPLGVIGAIVSWNYPFHNVFNPVLAAVFSGNAAVIKVSEHATWSGCFYFRIIQAALSAVGAPENLVHIITGFAETGQALVSSVDKIIFVGSPGVGKMIMKRASETLIPVTLELGGKDSFIVCEDVDLPSVVQVATRAALQSSGQNCAGAERFYVHDDIYSAFVSQIVKTVKSISVGPPLSGRYDMGAICMIEHSEKLQNLVNDALDRGAEIAVRGSFGNLGEDAVDQFFPPTVLVNVDHTMKIMQEETFGPIIPIMKFSSDEEAIKLANDSKYGLGCAVFSGNQKRAIRIASQLHCGVAAINDFASSYMCQSLPFGGVKDSGFGRFAGVEGLRACCLVKSVVEDRLWPYIRTVIPKPIQYPVSEHGFEFQQLLVETLYGYSVWDRLRSLVNLIKMVTEQNSAPASNATTKKRR

SEQ ID NO: 40898 - protein, 220 aa, Glycine max
  Clone ID: LIB3050-019-A6_FLI.pep
GFECTLDRVIEELKNYNDFCIHRLLLHYGVNDRKGILPDKHVMLSAKCRALAELLPSLKEGGHRALIFSQWTSMLDILEWTLDVIGLTYKRLDGSTQVAERQTIVDTFNNDTSIFACLLSTRAGGQGLNLTGADTVVIHDMDFNPQIDRQAEDRCHRIGQTKPVTIYRLVTKGTVDENVYEIAKRKLVLDAAVLESMEEINEGDMPEKTMGEILSAILLS

SEQ ID NO: 40899 - protein, 234 aa, Glycine max
  Clone ID: LIB3050-019-B5_FLI.pep
VSEIRLPNSRERIWLGSYDSPEKAARAFDAALYCLRGRHANFNFPNTPCNMDTATNAPPNQSLTPPEIQEVAAKFANQVSPLLQKPQEQPQPQRSSDGGGGGANSSSFGSKLLCKSDSIAESSTTSTTTNCTPTTTASSCSATMYECDGTEQVDRGDMMDWTFLNVFDFSNEVVLPAVGSDYNDLYNSELHKMHSDSGELLYSTPFEGYEQLIEADHHDDDPFSHQSFLWNWNF

SEQ ID NO: 40900 - protein, 269 aa, Glycine max
  Clone ID: LIB3050-022-G11_FLI.pep
EGDSKLTTSISTSTSTSTSLIPFHTLLQISQVLTLQMALEALQSPTTATPSFSPFEETSLSYLETPWTKGKRSKRSRTEQQLQHPSCTEEEYLALCLIMLARGGAGSVSTAKPAVSDNNSAPLSAAKLSYKCSVCNKAFSSYQALGGHEASHRKLAGENHPTSSAVTTSSASNGGGRTHECSICHKTFSTGQALGGHKRCHYEGGNSAVTASEGVGSTHTGSHRDFDLNLPAFPDFSARFFVDDEVTSPHPSKKSRFNLTIPKIEIPQY

SEQ ID NO: 40901 - protein, 139 aa, Glycine max
  Clone ID: LIB3050-023-F5_FLI.pep
MFFDRWSKIAQQLPGRTDNEIKNYWRTRVIKQAKQLKCDVNSKQFRDTLRYVWMPRLLERLQPTSQALEPNQSGLVLHASSSLLPSNSDHSIERGSDLWPGFNNQMLLEQGSGGDLLESLWDDDNMCFLQQLSYDLQMK

SEQ ID NO: 40902 - protein, 284 aa, Zea mays
  Clone ID: 700216113_FLI.pep
PARISGSSNGDGVVERAEELQRRGRAQPAGSVVPVRPPGAVLRQRHHLWPRHHVRGVDARPATPCPPRRLLSRGLRLRSAGPRDRAGELRAVQGVRGVPLPLGHACRPRDPGAGSSGPGQLGEGAGVGGRPRRAGHVPGRPGAVGHAADHPGDRVRGHRLRRAPAHHGEGPREEEVPRRRLRPARLLQGPRQVRGVQAQGDQERPPRHAGLRRLLRPAVGVPRHRPAGEPRLPPRRPVAQQHRRHHHPQINLPLSSAQLLVAVSCVRLGPACTTSDDGDFPPGN

SEQ ID NO: 40903 - protein, 138 aa, Glycine max
  Clone ID: LIB3051-002-E5_FLI.pep
SQDQVISWNGDPHRPSGQRPQTAPPPPPPEANPFGSYGFGLMGGFIPMATARFGNFTLSTAFGGFIPSLLNIHFHGFQDATVYGTTSGYPFGFNGFHGGNTRGFTQATGQVQRQEDNVLKNLLMLIGFLVLLTVIFVW

SEQ ID NO: 40904 - protein, 256 aa, Zea mays
  Clone ID: 700218366_FLI.pep
LCGSRPFWARTESGIFRAVLKAEPSFDEAPWPTLTAEAKDFVKRLLNKDYRKRMTAAQALSHPWIRNSQQVKVPLDMIIYKLMRAYISSSSLRKSALRALAKTLTTDQLFYVREQFELLGPNKNGYISLQNLKSALAKNSTDAMKDSRVVDFVNTVCALQYRKLDFEEFAASAISVYQMEALETWEQHARRAYELFDKEGNRPIVIEELASELGLGPSVPLHVVLQDWVRHADGKLSFLGFIKLLHGVSSRSIPKA

SEQ ID NO: 40905 - protein, 194 aa, Glycine max
  Clone ID: LIB3051-007-H12_FLI.pep
NIVQAPLIPSHTDIAKIVQKVLQPKLPVHPTWTPPSRDYMNKAFTCQMCELSVNEVDTVLLCDACEKGFHLKCLQPSVLRGIHNRVDWHCMRCLSLSGGKPLPPKYGRVMRSSNTPPKLPSNTGGVQPCSEKKVENIDPKVIPQTLATNGSSVPTVSGGHHNVELPSESKIPDTKDMQGTGISSTIEAIDKKPD

SEQ ID NO: 40906 - protein, 454 aa, Zea mays
  Clone ID: 700257005_FLI.pep
RLYLVRGMVQQRILEFARKEALPSLTRSGCAYLMEACQFEHQLFAHFFPASAADVSSMAPLMDPLCTYLYDTLRPRLIYEGNIDSLCELVDILKVEVLGEQLSRRGESVAGLRPILQRILADVHERLAFCARTHIREEIANFRPSVEDLDYPGKLERPVDMSSSATVGDNSDIYITWYRPLEKTVSCLSKLYRCLEPSVFTGLAQEAVEVCSTSLQNASRVISKKATPMDGQLFLIKHLLILREQIAPFDIEFSVTHKELDFSHLLDHLRRILRGQVSLFDWSRSTSLARTFSPRVLENQIDARKELEKSLKATCEEFIMSITKLVVDPMLSFVTKVTAVKVALSSGSQDQKLDSVLAKPLKTQAFASPDKVAELVQKVAAAIQQDLPKVMTKMRLYLQNPSTRMILFKPIKTNIVEAHIQLHSLLKSEYSSEEMQSIGMLPIPDLQSQLDSLL

SEQ ID NO: 40907 - protein, 279 aa, Glycine max
  Clone ID: LIB3051-008-F7_FLI.pep
RIIISSLSSSSMAEHLASIFGTEKDRVNCPFYFKIGACRHGDRCSRLHNRPSISPTLLLSNMYQRPDMITPGVDPQGQTLDPRKIQQHFEDFYEDIFTELAKFGEIESLNVCDNLADHMIGNVYVQFREEDQAAKALHALRGRFYNARPIIADFSPVTDFREATCRQFEENSCNRGGYCNFMHVKLIGRDLRRRLFGRNHRGGSGTYHRVSRSRSRSRSASPRYRRERRESDSRGGRRSRERDGSGGRRRQHGSPPAREGSEERRARIEQWNREREENK

SEQ ID NO: 40908 - protein, 182 aa, Glycine max
  Clone ID: LIB3051-009-E7_FLI.pep
NAPSVSFILSRAHRYRLQCYYTEQGFLDDIFNISQYWRSLKYNQPNCWLENWLRREIQALIQEEDVDIILHHILAVVKAALWTRREQKSHMNAPEKKQEEFKMSVSEAARPFLAARTDRFVYEIQLFLASGMNIEAYDAAYIQRLGWSSPGVNTEVSHSELVDRSTVIPYMHLFDGDFDENE

SEQ ID NO: 40909 - protein, 276 aa, Zea mays
  Clone ID: 700257810_FLI.pep
DLANLPPANPSPAPEIYSAQTAMAETLDMTLDDIIKNNKKSNPSSRGARRSRGVSAPGGGTGGVGPTRRPFKRAGNRQAPYQPPKAPDAAWQHDMYPAVAAGGGGGGGRVSALETGAKLYISNLDFGVSNEDIKELFSELGDLKRFSINYDRSGRSKGTAEVVFARRSDAVAAVKKYDNVQLDGKPMKIEIVGTNTPAAAAAHPVPNGGHARNAARSAPKDAAPAGMSQHRTHQRGGRRAAGSGGGRRGKERSKPKSTEELDADLEKYHADAMQTN

SEQ ID NO: 40910 - protein, 210 aa, Glycine max
  Clone ID: LIB3051-011-G5_FLI.pep
SSFSSQYLMANALEVSALNRIKLHLLGELSPLTQFQEPNTTSLCSQSSTSDSFTTVDQIFSEFLDFPTTTTSSTEQNQFSAFEFEPKPEIIEPQLEFSFPTTRCKSSRRPSLQISLPKKTEWIQFGEPEVTETVSQSNPNAEEKKHYRGVRQRPWGKFAAGDPGPEQARLQGVAWDVRHGYRSRQSLRPSRVQASRLQSHPQLPPRSRRR

SEQ ID NO: 40911 - protein, 507 aa, Zea mays
  Clone ID: 700258617_FLI.pep
QAVVLFYKASRVGAGVTLIEHRRDRRLRTRLPPRLKPFPLLPIPSVGRRSIPYDDTMRECISIHIGQAGIQVGNACWELYCLEHGIQADGQMPGDKTIGGGDDAFNTFFSETGAGKHVPRAVFVDLEPTVIDEVRTGTYRQLFHPEQLISGKEDAANNFARGHYTIGKEIVDLCLDRIRKLADNCTGLQGFLVFNAVGGGTGSGLGSLLLERLSVDYGKKSKLGFTVYPSPQVSTSVVEPYNSVLSTHSLLEHTDVAILLDNEAIYDICRRSLDIERPTYTNLNRLVSQVISSLTASLRFDGALNVDVNEFQTNLVPYPRIHFMLSSYAPVISAEKAYHEQLSVAEITNSAFEPSSMMAKCDPRHGKYMACCLMYRGDVVPKDVNAAVATIKTKRTIQFVDWCPTGFKCGINYQPPSVVPGGDLAKVQRAVCMISNSTSVVEVFSRIDHKFDLMYAKRAFVHWYVGEGMEEGEFSEAREDLAALEKDYEEVGAEFDEGEDGDEGDEY

SEQ ID NO: 40912 - protein, 118 aa, Glycine max
  Clone ID: LIB3051-014-A8_FLI.pep
SLPSTNSNAIQEPVARDIHGTSAKLEEPKESECKVQTDLELDSAKGSEIELAKSGKPIDLVEEEDACPICLEEYDAENPKLATNCDHHFHLACILEWMERSETCPVCDQDLVFDPPIE

SEQ ID NO: 40913 - protein, 159 aa, Glycine max
  Clone ID: LIB3051-015-H7_FLI.pep
EAVAVDISIFYTKHNKLENNTKTLRNKKCIAKRKGDNYAIIIIISLSTFSTDAACELNVLGHDGHSLGVDRTKVGVFKQTHQVSLRSFLKRKNRVTLEPQISLESYRSHWQRYQQKMSVICCNINGLNETTTGPQPIFKTLVLNLEHTLKSCAISRTRR

SEQ ID NO: 40914 - protein, 177 aa, Glycine max
  Clone ID: LIB3051-016-G10_FLI.pep
VMGSKPVVDFENVSGSRMTDRPFFQALEKEENCDEDYEGCFHQPGKKRRLTSEQVQFLERNFEVENKLEPERKVQLAKELGLQPRQVAIWFQNRRARFKTKQLEKDYGVLKASYDRLKSDYESLVQENDKLKAEVKEIKKKKERDTHNTYLHSILLLCFMLLVLLALIKCNLYYLSH

SEQ ID NO: 40915 - protein, 254 aa, Glycine max
  Clone ID: LIB3051-019-C12_FLI.pep
IEICNSCQPMGPLGKFGLPKNHQTPTPTEQHLCDKIISSLKRFLFLLRSVTLFLLLFLLLFLLEHYFAEKLGQNGLVAGHFGVPREIVDINDKITVPVSSVSYDIEIEEVELEGAPEAPSDVDDEGVGGHFGVVVEMHQTVIAVAVVHGGEVGDLRERHQVLGNAAERLLLVGHVGEGLALHAAHVLAHHVHLEDHATVVHELLQHDRRLELVQCVAREHERHLVRLGAAVGNERLRYHGKLEALPGLRVQEGG

SEQ ID NO: 40916 - protein, 162 aa, Glycine max
  Clone ID: LIB3051-025-H10_FLI.pep
KIKGIFRERERERVVMEGEEGGIATKKRGKEGETETTRYKGIRMRKWGKWVAEIREPNKRSRIWLGSYSTPVAAARAYDTAVFHLRGPSARLNFPELVAAEGPAADMSAASIRKKATEVGARVDALHRQHPHALPAGEFADRVDLNKMPEPENSDCDYWDRD

SEQ ID NO: 40917 - protein, 385 aa, Glycine max
  Clone ID: LIB3051-035-E3_FLI.pep
FWLNVNSDGFCLKYYNQNDIPRVLQVLYASEQHRPIYNGICMAMLEYWNISEKFLPICVSRLTPMVEEEHKAVSSVKEEYSLMFGNGICGDNLVPSLDASLVTTRSPAPGSSGNARTTVNLKLNEETAMDSTVSTVNHHHSDPKCQNSVNRSAAVSPVKCSLVSRQFNNYGHANDVGLPMNLSLQTKGDQSGFGKCKGSLTNDFVYMGCSYKPQSYINYYMHGDVAASAAANLAVLSSEDSRSEGHVSGNLGKATSGNTYLLAKAFSQTASRFFWPSSEKKLVEVPRERCGWCISCKASVSSKKGCMLNHAAISATKSAMKILSGLAPVRSGEGIIPSIATYVMYMEESLRGLIVGPFLSECYRKHWRKQVERAKSFSDIKPLLL

SEQ ID NO: 40918 - protein, 151 aa, Glycine max
  Clone ID: LIB3051-037-C4_FLI.pep
MGNQKQKWTQDEEDALIAGVEKHGPGKWKNILKDPQFAPFLTSRSNIDLKDKWRNLSVSNGAQGSKEKSRVPKLKALPAPPAPTATPQNAAPALQNAASDVTPPDASQNDQDAKNPPRYNAMIFEALSALKDSNGSDMNAIIKFMEQKIFR

SEQ ID NO: 40919 - protein, 98 aa, Glycine max
  Clone ID: LIB3051-040-A1_FLI.pep
KLFHPLDTASIHQWQVEEKPRDLAQPKRASPEATKLVSNSQLVVLLDTSRLASMLTVSVLALPCISPLFLNILLLRQFFLIAFDFCFRVLSLDLGFIN

SEQ ID NO: 40920 - protein, 343 aa, Glycine max
  Clone ID: LIB3051-040-F12_FLI.pep
KKKEKEIKFFVFSMNQKFIGKPPATVDLDRMPERGSHHRRSHSDTSFRFAANFDDLLLFDPSDFDISGLPSPLPLPSPVSAGLVPMSVDSDESGKQPRPAGASAGGHLRSLSVDSDFFDGLGFGGDERGAGKGGGGERRVGHHRHSNSMDGSSTTSFEADSAMIMDGVKKAMAPDKLAELALMDPKRAKRILANRQSAARSKERKIRYTSELERKVQTLQTEATNLSAQLTMLQRDTTDLTTENKELKLRLEALEQEAQLREDLNEALKEELQRLRAQSTRLGAIGGNPSFGGIFNQLASQLAMQQLSNSAPHQQTQHQPQVGMPPPPSGQNHPNFMDFNQQK

SEQ ID NO: 40921 - protein, 371 aa, Zea mays
  Clone ID: 700259427_FLI.pep
KSYTLLLQPGLGAHVPLLYCRCWRRHGQELPPQGPAAARAADGSPRRHGRGGQLRRRRRRLRLRLPRRRPGEPLGTGSRERADRAVRPRHAERDAVVREGRDGAARDPDLVGGRSLHQAGPAATARRRARAGRGVLVRRRVPQSQQATNLGPASDDRLCSHIFSLYVFSFVSATARTAPYTSLMVIWTARSHSQGYCVSKVLLEKEACRFAGEHGISLVTVCPVITVGAAPAPKVRTSIIDSLSMLSGDERGLAVLKGIEKTSGAVQLVHVDDLCRAELFLAEAAAADGRYICCGLNTTVLELARFLAHKYPQYGVKTNLDGDEQQLLEKPRVRVSSEKLVREGFEYRHNTLDEIYDNVVEYGKALGILPY

SEQ ID NO: 40922 - protein, 204 aa, Glycine max
  Clone ID: LIB3051-040-G5_FLI.pep
EPPFLSHGAATVTLLYFLLPRFSIFARNRMWNFASNCIAGTVGLKNDSKPTHSASECSDDETSVIGREEGLECPICWESFNIVENVPYVLWCGHTLCKNCILGLQWAVVKFPTLPVQLPLFISCPWCNLMSFRLVYRGNLKFPRKNYFLLWMVESMNGDRGKSHSPFCSDNQQHSIKDNLTTGSQVSHGNLRRGQVCHPETLSS

SEQ ID NO: 40923 - protein, 132 aa, Glycine max
  Clone ID: LIB3051-041-D12_FLI.pep
EAVAVDISIFYTKHNKLENNTKTLRNKKCIAKRKGDNYAIIIIISLSTFSTDAACELNVLGHDGHSLGVDRTKVGVFKQTHQVSLRSFLKRKNRVTLEPQISLESYRSHWQRYQQKMSVICLKSCAISRTRR

SEQ ID NO: 40924 - protein, 343 aa, Zea mays
  Clone ID: 700260423_FLI.pep
DCDGSAPRLLRSLEELGVLEFKCRNQSPDRKKGQSRTWCSSKSRTALRESQLATIRIVTMRDFASCLSQSAVQVAHSSSSSGQNFVQSAYVARLRDKRCVVTVTWSKVAMGQAFAIAIHDYSNRCLCKAEVKPWLFSKRKGSKVMELDSGNVEIIWDLSAAKFAAGPEPLEGFHVALLYGLEVVLVLGNLSKEEDHRVLSDASHCDAVMIARKEHIYAKKMYSAKARFLDIGQIHHISIECDMAGVRDPCLEIRIDKKKVLHLKRLAWKFRGNQTIYVDGLPVEVLWDVHDWLFGSTNGCAVFLFQSGQSMEKISFRTCSQNEKEAQAHRLGFTLILKAWKTE

SEQ ID NO: 40925 - protein, 173 aa, Glycine max
  Clone ID: LIB3051-041-D6_FLI.pep
LFLRNSFSHAKSNMGFPVGYTELMLPKVFLQVLSVLGLIRKLITVLLCYMGFHDFFESDIAWPERAPEFQSVWAVLIREILPVVKFSEMEMEMAEAPESCAVCLYEFEGEDEIRRLTNCRHIFHRGCLDRWMGYDQRTCPLCRTPFIPHHMQAAFNDRLWAASGIPDFYYNHE

SEQ ID NO: 40926 - protein, 220 aa, Glycine max
  Clone ID: LIB3051-045-D2_FLI.pep
HMDSPSSFFNSPSSGFCSESSSPEAFSWEGYLPFNENDPEEMLLYGMIAGATTEEHSGERASSEESAAARKEKSYRGVRRRPWGKFAAEIRDSTRHGMRVWLGTFDSAEAAALAYDQAAFSMRGSAAILNFPAEIVRESLKEMNYAHDDSNNEEGCSPVVALKRKHSLRRKINVRKKKNNNNNSKLQSSTVDNAVVFEDLGPDYLEQLLMSSDHHIPTTF

SEQ ID NO: 40927 - protein, 440 aa, Glycine max
  Clone ID: LIB3051-047-D12_FLI.pep
LVGTYLTRCFSFGACLMGNSEDEKSVKTGSPSSSPATTDQTNQPNIHVYPDWAAMQYYGPRVNIPPYFNSAVASGHAPHPYMWGPPQPMMPPYGPPYAAFYSHGGVYTHPAVAIGPHLHGQGVSSSPAVGTHSSIESPTKLSGNTDQGLMKKSKGFDGLAMSIGNCNAESAEHGAENRQSQSVDTEGYSDGSDGNTAGANQTKRKRCREGTLTTDGEGKTELQNGPASKETSSSKKIVSATPASVAGTLVGPVVSSVMATTLELRNPSTVDSKANSTSAPQPCAIVPNETCLQNERELKRERRKQSNRESARRSRLRKQAETEELARKVDMLTAENVSLKSEIIQLTEGSEQMRMENSALREKLRNTQLGQREEIILSSIESKRAAPVSTENLLSRVNNSSSNDRTTENENDFCENKPNSGAKLHQLLDTNPRADAVAAG

SEQ ID NO: 40928 - protein, 264 aa, Zea mays
  Clone ID: 700260850_FLI.pep
SLGRRAPQLLPLPLDSLLTGALLEFPPAKLPAELLRWVSLPGVLACTTLLLEQRPTCLPRLFPSASTSLRVPGLSPSVLRSCSAAPSPPSLLNQLGSMAARSSPLLAQPSSFPMRNLLQPWRPAGISRLVRVLLGVPLLVAPELPSPCAASSLVATRPSSSPRRSVLSISPCSDLEQHTPCVSRRSWFPEHASSFTSVVPGVARRAVARPLPNLWSRSRLAATATPIAALGLRLCRTREFSSLGLNSRRIVDLAKCVRRLVLCP

SEQ ID NO: 40929 - protein, 253 aa, Glycine max
  Clone ID: LIB3051-047-H7_FLI.pep
QWASLIQALASNKTGPPGPHLRITALSRTGSGRRSIATVQETGRRLAAFAASLGQPFSFHHCRLEPDETFKPSSLKLVRGEALVFNCMLNLPHLSYRAPESVASFLSGAKALKPRLVTLVEEEVASIVGGFVARFMDSLHHYSAVFDSLEAGFPMQGRARALVERVFLGPRIVGSLARMGEEEERGSWGEWLGAAGFRGVPMSFANHCQAKLLIGLFNDGYRVEELGSNKLVLDWKSRRLLSASLWTSSSHSD

SEQ ID NO: 40930 - protein, 180 aa, Glycine max
  Clone ID: LIB3051-063-B11_FLI.pep
MQLSVHSLIVILFLATAFLIIIFIIHLRYRLLRFFFIPTSRTFRLFLVIGSHVLLVLHFPFLRLCHIRCFFSIRHGLPFCSSSFAHSRHCFVFRMFFVEYLPELLHENEESTWRPLWLVRVFRCLPLAGGFPSLGGGSLLIHSKFGIGSLRFGLGLSSFHDGYERGTGSGVRVWVEREER

SEQ ID NO: 40931 - protein, 197 aa, Zea mays
  Clone ID: 700261171_FLI.pep
RQWRLDTRRRRRHERKHNTGREMARRPHVRIASHVRVTVDDLHLLDVAAVAAGHLVHGAAALDGAADGGAAALQRRAVRGDGDRDALARLRVGGQVEGAAVDADVELHLGGVGRAQAPRPPAHGELGVAARVQRVGAREQRRAVGQRLQRQRHVVAAQVLHRHLLVLHAVVVRQVRARQRQHGRRRQEEQGRRRGLR

SEQ ID NO: 40932 - protein, 210 aa, Glycine max
  Clone ID: LIB3051-065-G8_FLI.pep
SHTRHITILFFAKEGEGCTLTPMKENVLPPVTVNFQQGLGQKFKQPAGTGIDFSTFEESELLKVGDMDVYPVAIKADASSSDHDESKSNETPSSGSSNSQITQAVFEKEKGEFQVKVVKQILWVNGMRYELQEIYGIGNSVESDVDGNDPGKECVICLSEPRDTTVLPCRHMCMCSGCAKVLRFQTNRCPICRQPVERLLEIKVGPEPEE

SEQ ID NO: 40933 - protein, 479 aa, Zea mays
  Clone ID: 700263141_FLI.pep
NSSASAVATPEKKPAAHGKWAVYSWRSKKALQLPEYPNAEELDAVLKTIETFPPVVFAGEARRLEERMAEAAMGRAFVLQGGDCAESFKEFHANNIRDTFRVLLQMGVVLMFGGQMPVVKVGRMAGQFAKPRSEPFEEKDGVKLPSYRGDNVNGDDFTEKSRVPDPQRMIRAYAQSVATLNLLRAFATGGYAAMQRVTQWNLDFMDHNEQGDRYRELAHRVDDALGFMTASGLTVDHPIMTTTDFWTSHECLLLPYEQALTREDSTSGLFYDCSAHMLWVGERTRQLDGAHVEFLRGVANPLGIKVSDKMNPSELVKLIDILNPSNKPGRITIITRMGAENMRVKLPHLIRAVRNAGLIVTWITDPMHGNTIKAPCGLKTRPFDSILAEVRAFFDVHDQEGSHPGGVHLEMTGQNVTECIGGSRTVTFDDLSDRYHTHCDPRLNASQSLELAFIIAERLRKRRMRSGLNSSLPLPPLAF

SEQ ID NO: 40934 - protein, 218 aa, Glycine max
  Clone ID: LIB3051-068-G8_FLI.pep
VQRCADDRTILVTTYEGTHNHPLPPAAMAMASTTTAAASMLLSGSMSSADGIMNPNLLARAILPCSTSMATLSASAPFPTVTLDLTHNPNPLQFQRPGAPFQVPFLQAQPQNFGSGAAPIAQAQALYNQSKFSGLQLSQDVGSSQLAPQAPRPPLQPSQQPSLADTVSAAASAITADPNFTAVLAAAISSIIGSAHNSNNNNSNNNTSRTTISSFSGN

SEQ ID NO: 40935 - protein, 336 aa, Glycine max
  Clone ID: LIB3051-069-A2_FLI.pep
HTTRAKNLCSPLAFDREERSEKMSDAFCSDCKRQTEVVFDHSAGDTVCSECGLVLESHSIDETSEWRTFANESGDNDPNRVGGPSNPLLTDGGLSTVIAKPNGGGGGGEFLSSSLGRWQNRGSNPDRALIIAFKTIATMSDRLGLVATIKDRANEIYKRVEDQKSSRGRNQDALLAACLYIACRQEDKPRTVKEICSVANGATKKEIGRAKEYIVKQLGLENGNAVEMGTIHAGDFMRRFCSNLCMNNQAVKAAQEAVHKSEEFDIRRSPISIAAAVIYIITQLSDDKKPLKDISLATGVAEGTIRNSYKDLYPHVSKIIPNWYAKEEDLKNLCSP

SEQ ID NO: 40936 - protein, 367 aa, Zea mays
  Clone ID: 700263391_FLI.pep
LTMASAARSTGSLPVANVQALAEACNDDGGDVQVPERYLSKDPSSAEEVVVVAGDDSACRAIPVIDLRRLLDPESSEEETAKLASACLDWGFFQLINHGIPDEVTGNLMKDVAAFFRQPLDAKKECAQQADSLEGYGQAFVVSEDQKLDWADMLFLIVQPREARDTRFWPTRPASFGDSVDSYSLEASRLAYRLLELMARGVGADPASLRRVFEGQTQGMRVNYYPPCRRAADRVLGLSPHTDASGLTLLLQASNGVQGLQVRKDGRWFAVDAIDGALVVNVGDFLEILSNGKFTSVEHRAVVHPTRERMSAALFLYPCQNMRVGPLPEFVNGGEERYGSTDYEEFMKHYFATKLDGRKHLDRLKLE

SEQ ID NO: 40937 - protein, 59 aa, Glycine max
  Clone ID: LIB3051-082-G12_FLI.pep
FSMNLLTNRIGLLQLCPICLTNSKDMAFGCGHQTCCECGQDLQSCPICRSPINTRIKLY

SEQ ID NO: 40938 - protein, 499 aa, Zea mays
  Clone ID: 700263740_FLI.pep
GEGALYLFIIIAHFTYTVSQLVQAYLGKTYTCHAWNNITNTRTQLALSSESHGRRTRMQLPLFIPTSPYEGAVALGGWVPGDWRVPRPVTRTYAVSVHYPFIISSAPRHARRRSSHHLKDGAGHRFPATAAAAVAHALLLLVVVAVVLLALLLAPVAVAGVVVSVVACAALLLSPAPLHAPQPFHPVAVLLASFLAPVAVLVVVGGGVLLLLTLAALHAPLPRLPIAVVLASLLAPAAVVVVGGGVLLLLLTLAALHAPLPRLPIAVAPAFHLAPPVAVVLVDVGVTAAAALLSPALASLDALLPAFPVVVALALLLARAAVAAVLLLLAAPAAAAALLLPLPALAVHQAALPLPPVPAVVALAPLPALARALAAATVLLLHVDGQSAAAAPPHALLGLPRLALVAAQALAPALAPPGAGDVGVHAAVAVLARVSLLVPLAALALAFPLPRGVLSVLPLARLLAPPQVLLAVPFDHSVLRPGRGCYDQQHAGEQEERPP

SEQ ID NO: 40939 - protein, 343 aa, Glycine max; identical to SEQ ID NO: 39097
  Clone ID: LIB3051-084-A12_FLI.pep

SEQ ID NO: 40940 - protein, 407 aa, Zea mays
  Clone ID: 700264753_FLI.pep
RAAAQEVGRASEKKAMAAESFLFTSESVNEGHPDKLCDQVSDAVLDACLAQDPDSKVACETCTKTNMVMVFGEITTKASVDYEKIVRDTCREIGFTSDDVGLDADRCKVLVNIEQQSPDIAQGVHGHFTKRPEEIGAGDQGHMFGYATDETPELMPLSHVLATKLGARLTEVRKDGTCAWLRPDGKTQVTVEYVNEGGAMVPVRVHTVLISTQHDETVTNDEIAADLKEHVIKPVIPERYLDEKTIFHLNPSGRFVIGGPHGDAGLTGRKIIIDTYGGWGAHGGGAFSGKDPTKVDRSGAYVARQAAKSIVASGLARRCLVQVSYAIGVPEPLSVFVDSYGTGTIPDKEILKIVKENFDFRPGMVTINLDLKKGGNRFIKTAAYGHFGRDDADFTWEVVKPLKKASA

SEQ ID NO: 40941 - protein, 124 aa, Glycine max
  Clone ID: LIB3051-084-E4_FLI.pep
LCYLLFTFLYFLLCRKMQISGATDLASKGQGASDSSSVKVKSEFDDAFQPDVKIRCLCGSRLETENLVKCDDARCHVWQHISCVIIPEKPTEGIPLVPDKFYCELCRLTRADPFWVSVAPLCIL

SEQ ID NO: 40942 - protein, 490 aa, Zea mays
  Clone ID: 700265564_FLI.pep
KDCPNLVQSCPLVSLARLHPSPPPPPSPSQATMLDINLFRTDKGGNPDLIRESQRSRFASVELVDEVIALDKAWRERQFELDKIRQELNATSKKIGKLKASKQEEEAKKLMESTDEIKKRLAAKEVEVQEAKSTLDAKVTTIGNIVHESVPVSDDEANNKIVRTFGEKRVEDNLKNHVDLCRMLDIVALEKGADVAGGRGFYLKDEGVLLNLALINFGLAFLRKRGFKPMQTPFFMRKETMAKCAQLAQFDEELYKVTGDGEDKYLIATSEQPLCAYHLGDRIYPAELPIKYAGYSTCFRKEAGSHGRDTAGIFRVHQFEKIEQFCITSPNGNDSWEIHEEMLKNSEDFYKEIGLPYQVVSIVSGALNDAAAKKYDLEAWFPASKTFRELVSCSNCTDFQSRRLGIGYGQKKNDEQSKQFVHMLNSTLTATERTLCCILENFQKEDGVEVPKALQPYMGGIEFLPFKQPLDAKQAADSKSNKSKSKGNAA

SEQ ID NO: 40943 - protein, 374 aa, Zea mays
  Clone ID: 700265711_FLI.pep
YESTTSSAARRASRPTIRSLLRASLQTRNYITTVPCNFPDLLPPCFLRLHPLTSARSPRSRVPSAGKMSSPHGGLDDQIERLMQCKPLAEPEVRALCEKAKEILMEESNVQPVKSPVTICGDIHGQFHDLAELFRIGGKCPDTNYLFMGDYVDRGYYSVETVTLLVSLKVRYPQRITILRGNHESRQITQVYGFYDECLRKYGNANVWKTFTDLFDYFPLTALVESEIFCLHGGLSPSIETLDNIRNFDRVQEVPHEGPMCDLLWSDPDDRCGWGISPRGAGYTFGQDISEQFNHTNSLRLIARAHQLVMEGFNWAHEQKVVTIFSAPNYCYRCGNMASILEVDDCREHTFIQFEPAPRRGEPDVTRRTPDYFL

SEQ ID NO: 40944 - protein, 292 aa, Glycine max
  Clone ID: LIB3051-088-C3_FLI.pep
QTNQWVPRGSGFPMMSRFMHAPSPVLSSSHPHLGVGHKREREDDTGAGASGGVAIAAASSQTQTQEIESAGGDRRRRYRGVRQRPWGKWAAEIRDPHKAARVWLGTFDTAEAAARAYDEAALRFRGNRAKLNFPENVVPVPPPPPVPDLPASAVAGSDSISGSGSVVAGFSPTLMQGAPFQGSSAFLRDYWGYSQLLRSTGDFHGLDQWFFDSQMAAFQSSSSSLLPSPPPPSFSPSSASYPLFSSSQQMGIFRPPGEQGHGGEDGGSGSEFSELPPSTWSDTSGYPPPPPG

SEQ ID NO: 40945 - protein, 248 aa, Zea mays
  Clone ID: 700332274_FLI.pep
HHPRLKQGSDHHHHQKKMCPTKKGMTGEPSSPCSSASASTLPEHHQTVWTSPPKRPAGRTKFRETRHPVFRGVRRRGSAGRWVCEVRVPGRRGCRLWLGTFDTAEAAARAHDAAMLALAGAGACCLNFADSAWLLAVPASCASLAEVRHAVADAVDDFLRHQLVPEDDALAATPSSPSSEDGNTSDGGESSSDSSPPTGASPFEFDVFNDMSWDLHYASLAQGLLVEPPSAVTAFMDEGFADVPLWSY

SEQ ID NO: 40946 - protein, 60 aa, Glycine max
  Clone ID: LIB3051-101-B10_FLI.pep
MGATLFHNSKARFQPHVISLSLQTNDTTSYSATSISSSFAKLMTTFSKVIRISMDNNSPS

SEQ ID NO: 40947 - protein, 113 aa, Glycine max
  Clone ID: LIB3051-103-B11_FLI.pep
RVQKYLVLSLLYLRNFVILMSIQNIPLIFFFKLLIMFSVVVSLAKQWAFEEPYVETITSENVLTWPHVVGKSLLIKSLVKHYTKHNLPDVRGLITIISGKQRQVQFAVCGMSK

SEQ ID NO: 40948 - protein, 326 aa, Zea mays
  Clone ID: 700332786_FLI.pep
RVPNARGCKTSRVWGRDKLMQAFPRKCGEAASNPQPGRVLQAAFWYGFIVHFRIYPIIYAIPFVIVLGKGYAGPVGRPTLTMWRSKQQLQDDKVSQIEEPTSFLATVWGFLSNFISRNGILFGLLSGSMFFAWTGVFFYLYGWDFLNEALLYHLTRTDPRHNFSIYFYHIYLHHQQGFSSIQRLASFLPQLIVQLALILRFSRDLPFCMFLQTVAFVAFNKVMTAQYFVWFFCLLPLILPWSSMKLKWKGLACAVVWMGSQLHWLMWAYLLEFEGRNVFVQLWVAGLMFLAANTFVMLMVMKHHKYTLLFSTPLKSGNKVATKKEE

SEQ ID NO: 40949 - protein, 228 aa, Glycine max
  Clone ID: LIB3051-112-G10_FLI.pep
GGRFGLVQMDSLEDSGCWDFLDYSFIDQAPPDFLWSNNNNSVSTEIDIPGDAVACQENTKKRGRTDSCFKAGSKACREKLRRERLNERFCDLSSVLEPGRPVRTDKPAILDDAIRVLSQLKTEAQELKKTNEKLLEEIKCLKAEKNELREEKLVLKADKERIEKQLKALPVAPAGFMAPPVAAAAAAYQAGVNKMAVYPNYGYIPMWQYLPQSVRDTSHDHELRPPAA

SEQ ID NO: 40950 - protein, 437 aa, Zea mays
  Clone ID: 700333232_FLI.pep
FDLCSRSEVPGDREAASIVGMALVLHSGAGNKNAFKALIAAEYSGIKVELTKDFEMGVSNKTPEFLKMNPLGKVPVLETPDGPVFESNAIARYVARLKDDNPLFGSSRIEQAHVEQWMDFAATEVDPGVAWYLYPRLGYLPYVSTTEETAISSLKRSLGALNTHLASNTYLVGHAVTLADIVMTCNLYHGIARILTKTFTSDFPHVERYFWTMVNQPNFKKVIGEVKQAESAPPIPKKAAPSKEPKAKDVKKEAPKEAPKPKVVEAPAEEEAPKPKPKNPLDLLPPSKMVLDDWKRLYSNTKTNFREVAIKGFWDMYDPEGYSLWFCDYKYNDENTVSFVTLNKVGGFLQRMDLCRKYAFGKMLVIGSEPPFKLKGLWLFRGQDVPKFVMDEVYDMELYEWTKVDISDEAQKERVNAMIEDQEPFEGEALLDAKCFK

SEQ ID NO: 40951 - protein, 455 aa, Zea mays
  Clone ID: 700333366_FLI.pep
EERRKMRECISVHIGQAGIQVGNACWELYCLEHGIQPDGQVPGDKTAGHHDDAFSTFFSQTGAGKHVPRAIFVDLEPTVIDEVRTGTYRQLFHPEQLISGKEDAANNFARGHYTIGKEIVDLCLDRIRKLADNCTGLQGFLVFNAVGGGTGSGLGSLLLERLSVEYGKKSKLGFTVYPSPQVSTSVVEPYNSVLSTHSLLEHTDVSILLDNEAIYDICRRSLDIERPNYSNLNRLVSQVISSLTASLRFDGALNVDVNEFQTNLVPYPRIHFMLSSYAPVISSAKAFHEQLSVAEITSSAFEPASMMVKCDPRHGKYMACCLMYRGDVVPKDVNAAVATIKTKRTIQFVDWCPTGFKCGINYQAPTVVPGADLAKVQRAVCMISNSTSVVEVFSRINSKFDLMYAKRAFVHWYVGEGMEEGEFSEAREDLAALEKDYEEVAAEGGSDDGDEEEEY

SEQ ID NO: 40952 - protein, 313 aa, Glycine max
  Clone ID: LIB3051-115-C4_FLI.pep
KELASWSLRTLACTSTTPTFLHLPLYYFFFNHKSKSTKMVRAPCCEKMGLKKGPWAPEEDQILTSYIDKHGHGNWRALPKQAGLLRCGKSCRLRWINYLRPDIKRGNFTIEEEETIIKLHDMLGNRWSAIAAKLPGRTDNEIKNVWHTNLKKRLLKSDQSKSKPSSKRAIKPKIERSDSNSSIITQSEPDNFNFREMDTITSSACTTSSSDFSSVTVGDSKNIKSEDTESTETMPVIDESFWSEAAIDDETPTMSSSQSLTISNEMRLQYPFANYEETFQQGHHAYDSNFDDGMDFWYDIFTRTNDSIELLEF

SEQ ID NO: 40953 - protein, 426 aa, Zea mays
  Clone ID: 700333669_FLI.pep
PVASHPTTTHLVVRRFDPVLPTQVMATKRSVGTLGEADLKGKKVFVRADLNVPLDDAQKITDDTRIRASVPTIKFLLEKGAKVILASHLGRPKGVTPKYSLKPLVPRLSELLGVEVVMANDCIGEEVEKLAAALPEGGVLLLENVRFYKEEEKNEPEFAKKLASVADLYVNDAFGTAHRAHASTEGVTKYLKPAVAGFLMQKELDYLVGAVANPKKPFAAIVGGSKVSSKIGVIESLLAKVDILILGGGMIYTFYKAQGYSVGKSLVEEDKLELATSLIEKAKAKGVSLLLPTDIVVADKFAADAESKIVPATAIPDDWMGLDVGPDATKTFNEALDTTKTVIWNGPMGVFEFEKFAAGTEAIAKKLAELTTTKGVTTIIGGGDSVAAVEKAGLADKMSHISTGGGASLELLEGKTLPGVLALDDA

SEQ ID NO: 40954 - protein, 152 aa, Glycine max
  Clone ID: LIB3052-001-H2_FLI.pep
ISILHLFIRRSKIIIIRIIIRVVMKMMMKRPLPRRWIWERRDPMSLHQKLQFLPRKPKMLLLKRLMVRKVDIQQLLTLQRKAERLPTAKPKPRLPTVKPKPRLLSLVDSLAKPAASLSPMKVVCNNITRQSMVVSDIFAVGYDSFMYYFWLM

SEQ ID NO: 40955 - protein, 104 aa, Glycine max
  Clone ID: LIB3053-002-F2_FLI.pep
VDTKEFESMQALSSKKDNHDIFIKLGSDKDKRKEAFEKEEKSKKSVSITEFLKPAEGEAYYNPGRGRGRGRGSRGGGGYHGSATNNAPAPSIEDPGHFPTLSAK

SEQ ID NO: 40956 - protein, 362 aa, Zea mays
  Clone ID: 700333804_FLI.pep
LQLRSQPQPTGTAIHQLDLPVRPPARFSRRGRPRATLNPQGTTPPDNLEKKHRQRRRASTSSQSQPGKIDSDEQPMMMHGNGHGHGRVHPASSSSDFSGEMNQSAVSDPSSSPLYSFHFEKPVPPPPPAGTYVVQVPKDKVFRVPPPENARLFDHYTRRARRRRRGSCSCACLLVGAAVALAAALAGVLACLVLGPKPPAYAVQALAVSGLVNASSSPAALSPGFDATVRADNRNGRLGVRYEGGRGRVSVSYGGALLADGAWPALYQAPRNVTVVVARARGSGVRLSRSVRGQLAAAERLRSVPFDMDVDVPVRLQLGVVRTWAVPLRARCTVAVDRLAADARVVSNSCDVKVRLLSWWRN

SEQ ID NO: 40957 - protein, 253 aa, Glycine max
  Clone ID: LIB3055-002-H9_FLI.pep
ESPIMRTLCDACESAAAIVFCAADEAALCRACDEKVHMCNKLASRHVRVGLASPSDVPRCDICENAPAFFYCETDGSSLCLQCDMIVHVGGKRTHGRYLLFRQRVEFPGDKSSHAENPASQPLEPGEAKRGQNPLPKLKMGEKQQNHKMPMVPTPGPDADGHAKMESKMIDLNMKPNRIHEQASNNQPINGATRQCSSDRILNQKSTNGKSFVLFSCMLVTRMTYSINILYILANEAPESFEEFVRLRRNLIW

SEQ ID NO: 40958 - protein, 490 aa, Zea mays
  Clone ID: 700334563_FLI.pep
CSASTSGSSSASVSVPHSCSSSSSSPCSASSPPAAADAAVLPPSSTSPPSCPMPSPSTPPSPPRTSKRCPPAAPRPPPPRPRRRSPRCCRRRRRDSIQIETGKEHRITFPEQPPPPHHQRSGGPSSRGASGESRGGGGEPGVPEVSHLGWGHWYTLKELEDATCMFADEKVIGEGGYGIVYHGVLEGGVQVAVKNLLNNRGQAEREFKVEVEAIGRVRHKNLVRLLGYCAEGNQRMLVYEYVNNGNLEQWLHGDVGPVSPLTWDIRMKIILGTAKGLMYLHEGLEPKVVHRDVKSSNILLDKHWNAKLSDFGLAKLLGSERSYVTTRVMGTFGYVAPEYAGTGMLNETSDVYSFGILIMEIISGRVPVDYNRPPGEINLVEWLKTMVSNRNSEGVLDPKMTEKPTSRALKKALLVALRCVDPEARKRPKIGHVIHMLEVDDFPYRDERRGGKAPAQARSVETPPASEPGDSSGNNTPKDAPNGEPFKWRN

SEQ ID NO: 40959 - protein, 256 aa, Glycine max
  Clone ID: LIB3055-004-D2_FLI.pep
LDMVKPAMASVDSSSFSSCKNDSFSSNYSIDTCKMYKGVRKRKWGKWVSEIRLPNSRERIWLGSYDTQVKAARAFDVALYCLRGKSASFNFPDTPRHLEINMVLPCDIQQQPLSHPEIQEIASKFANNDHVPLEEESAFQEQEQDPSMESQSDESKSANTITEMSNFPNIYDGGTHTNVQVDQLQGDWDSMDWTFFNMLDDLNGSDFGLYLGPDKLHPGEFLCPTQAPMLFHEDEIEGDDDHDAFSNHSLLWSWNF

SEQ ID NO: 40960 - protein, 189 aa, Zea mays
  Clone ID: 700335459_FLI.pep
TRRVRAPCSLSLVGTAARPPPPYARRPGLRQYLRRRRTSTHRKMASRAGGDGKEAINEQVIANTYANMRTEMNQLYTKITELEMEVSEHSLVMGAIEPLDPSRRCYRMIGGVLVERTIREVMPAVKRNKEGLEEVIARMHEALERKKKEITEFELKYKIRIRKADSDAEDEGGKKEGTAQGVLVGPAGQ

SEQ ID NO: 40961 - protein, 455 aa, Glycine max
  Clone ID: LIB3055-006-A5_FLI.pep
KLYRLEGSAGVQKDLLSQSLNETNLKIWNLSYGTELAWRRLHNAKALIVLDNVEEDKQLNMFTANRKNLLRERLGRGSIVIIISRDQQILKARGADLIYQVKPLDDTDALRLFCKNAFKNNYIMSDFKTLTSHVLSHCEGHPLAIEVLGSSLFGKDVSYWGSALVSLRESKSIMDVLRISFDQLEDTHKEIFLDIACFLYDHDVIYVKEILDFRGFNPEYGLQVLVDKSLITMRRIVEMHDVLRNLGKYIVREKSPWNPWKWSRLWDFKDLNIVSLDNKATENVEAIVHEEDYDIEKDSDLEEDSNLEDYDLEDSDLEEDSDLEDYDLEEDSDLEDYDLEEDSDLEDSHFLPTVRVDALSTMSNLKLLKFRYAGYEINYSGTLTKLSNELGYLTWVKYPFECLPPSFEPDKLVELILPKSNIKQLWEDRKIISIIIIIIFLYCFHLNKQIKRQTF

SEQ ID NO: 40962 - protein, 644 aa, Glycine max
  Clone ID: LIB3056-008-C11_FLI.pep
VDSSSAVGLGFGKNKVREMVVGRDDLWVVGISGIGGSGKTTLARELCKDDQVRCYFRDRILFLTVSQSPNVEQLRTNIWEYIMGNERLDANYMVPQWMPQFECRSEARTLIVLDDVWTLSVVDQLVCRIPGCKFLVVSRPKFQTVLSYEVELLSEEDALSLFCHHAFGQKSIPLAANENLVKQVVTECGRLPLALKVIGASLRDQTEMFWLSVKNRLSQGQSIGESHEINLIDRMAISINYLPEKIKECYLDLCCFPEDKKIPLDVLINIWVEIHDIPETEAYAIVVELSNKNLLTLMKEARAGGMYSSCFEISVTQHDVLRDLALNFRNRESIDERRLLVMPKRENGMPKEWLRYRHKPFEAQIVSIHTGEMKEVDWCNLEFPKAEVLIINFTSTEYFLPPFINRMPNLRALIIINYSATYACLHNVSVFKNLSNLRSLWLEKVSTPELSSIVLENLGKLFIVLCKVNDSLVEKEVDLAQVFPNLFELTLDHCDDLTQLPSSICGMKSLQNLSLTNCHNLTELPVELGKLRSLEILRLYACPYLKTLPNSICDMMRLKYIDISQCVNLTCFPEKIGRLVSLEKIDMRECSMIRNVPKSAVSLQSLRLVICDEEVSGIWKEVAKPDNVHIQVSEQYFDLDWLKE

SEQ ID NO: 40963 - protein, 198 aa, Zea mays
  Clone ID: 700335565_FLI.pep
LIWPSPSTSASRIISSTSSSVSFSPRFVMTWRSSAAEMKPFWSLSNTRKASLSSSSESVSFILRAIRFRNSGKSMVPLPSASTSLIMSWSSASVGFCPSERMTVPSSLVVMQPSPSLSKRLKASLNSAIWSSVSWSAMGVVVGRDQIDRSWKRQGLDRGRGKTARALVRWNFPSPNLYALPLERPSHLGRALVYRFSS

SEQ ID NO: 40964 - protein, 385 aa, Zea mays
  Clone ID: 700377511_FLI.pep
AKKVLMLCGDYMEDYEVMVPFQALQAYGVSVDAVCPSKKAGDICRTAVHQLTGHQTYSETKGHNFTLNASFDEITASEYDGLVIPGGRAPEYLAMDEKVLDLVRMFSGAKKPIASVCHGQLILAAARVVENRTCTAFPAVKPVLVAAGAKWEEPDTMAKCTVDGNLITAATYNSHPEFISLFVKALGGSVAGSDKRILFLCGDYMEDYEVMVPFQALQALGCHVDAVCPDKGAGETCPTAIHDFEGDQTYSEKPGHDFTLTASFGSVDASSYDALVVPGGRAPEYLALNDKVISLVKAFAESGKPIASICHGQQILSAAGVLKGKKCTAYPAVKLNVLLGGGTWLEPDPIHRCFTDGNLVTGAAWPGHPELVSQLMALLGVKVSF

SEQ ID NO: 40965 - protein, 124 aa, Glycine max
  Clone ID: LIB3056-014-C12_FLI.pep
ELCDVIAWARIRNSLQLRYQKMAELVLRSCCFGLGSGGGTDGNALSISFSLLSLSFSSSNRETLISSSCVYACLLARDRAADSLFLIILFCLLSTVFSTTTPEAPLFRPGVCVSDNVQLILRTS

SEQ ID NO: 40966 - protein, 172 aa, Zea mays
  Clone ID: LIB3059-001-B11_FLI.pep
VDLGNKPEWFLNISPEGKVPLFNGGDGKCIADSDVITQVIEEKFPTPSLVTPPEYASVGSKIFPAFVKFLKSKDASDGSEKALLDELQALDDHLKAHGPYINGENVSATDLSLGPKLFHLQIALEHFKGWKIPENLTNVHAYTKALFSRESFVKTKPSEEHVIAGWAPKVNA

SEQ ID NO: 40967 - protein, 165 aa, Zea mays
  Clone ID: LIB3059-002-G5_FLI.pep
VPLCPMVRGSLCMCSSASLLLFWLHLYDLTKEGSLDGPHLHTVYPHGSTDTLPFATMGSGSLAAMSVFESKYKEGLTREEGIQIVCEAICAGIFNDLGSGSNVDVCVITKGKTEYLRNHQLPNPRTYASSKGYSFTKGQTEVLSSKVTLLKQKVEVAEGGDAMEE

SEQ ID NO: 40968 - protein, 155 aa, Zea mays
  Clone ID: LIB3059-009-A8_FLI.pep
PITVVTLQCPQSKHRRNPSGSLTNYQSMTQATRSREKKQTNSFTETQPVGCGGPEKGHRRSWLFCHVLLFLFVLVLLVGGGVLVLLVLGDQIVHVALGLSELHLIHPLAGVPVQEGLAPEHGGELLAHPAEHLLDGGGVPHEGPRHLQAPGRDVA

SEQ ID NO: 40969 - protein, 202 aa, Zea mays
  Clone ID: LIB3059-009-C6_FLI.pep
RNPFTGKRQWLGTFDTAGAASAAYLSASRSFADEKRRRRGQPVPSSSPVPSASATPTASSSSSTSTAPFAHPSPSSVLGPATKEAPLNPQSPELVATPTLVLPSDESAELPDDPEFYQDLLRGLQLPDISPMDFRAGLDALDVSDAPFGLDDEQDLLLGDFGDEELEIDLDLDDINDVFPEMPGCDLGRGMDDFLQTVDFCV

SEQ ID NO: 40970 - protein, 150 aa, Zea mays
  Clone ID: LIB3059-009-E7_FLI.pep
KRTEKLGRLAVRNRFWWPEVEKSPNKQGHSMEISSSVDCGQEKEQPTNKRPRSESTTESSTKASREKIRRDKLNERFLELGAILEPGKTPKMDKTAILSDAIRVVGELRSEAKKLKDSNENLQEKIKELKVYTISCGQVINGAVQMGGGT

SEQ ID NO: 40971 - protein, 778 aa, Zea mays
  Clone ID: LIB3059-009-G11_FLI.pep
GPPPYGGDDPHLKVEVEGSSLSTISVRSHRPAAAMAFLARALRQSNWRLSSRCPAVAASCRWISPTAAAGSPEAGAAVASADPELPPPREPVGGARVELPPNPEDALEVFVDGHAVRIPKGFTVLQACEVAGVDIPRFCYHSRLSIAGNCRMCLVEVEKSPKPVASCAMPALPGMKIKTNTPVAKKAREGVMEFLLMNHPLDCPICDQGGECDLQDQSMAFGADRGRFTEMKRSVVDKNLGPLVKTVMTRCIQCTRCVRFATEVAGVQDLGMLGRGSGEEIGTYVEKLMTSELSGNVIDICPVGALTSKPFAFKARNWELKGTETIDVTDAVGSNIRIDSRGPEVMRVVPRLNEDINEEWISDKTRFCYDGLKRQRLNDPMIRGPDGRFKAVTWCDALAVVAEVLHQVKPEEITGVAGKLSDAESMMALKDFVNRMGSDKVLCEGNGPNPPADLRSNYLMNTSIAGLEKADVFLLVGTQPRVEAAMVNARIRKTVKATQAKVGYIGPPADFNYDHEHLGTGPQTLVEIAEGSHPFCSVLQSAKNPVIIAGAGLFEREDQVALFSTIETVAKKFNVMRPDWNGLNVLLLHAAQAAALDLGLVANPAESIKSAKFLYLMGADDISLEKLPDDAFVVYQGHHGDKGVYRANVILPSSAFSEKEGTYENTEGCTQWTIPAVPTVGDARDDWKIIRALSEVAGAQLPYDSLSAVRDRISTVAPNLVHVDERETPTISAEVKPPVKQQVSSTPFKAVVENFYMTDAITRASKIMAQCSATLLKK

SEQ ID NO: 40972 - protein, 172 aa, Zea mays
  Clone ID: LIB3059-011-B7_FLI.pep
LFSSSRPEETPTGRWAVAAAGRICAAMATSNTARMEDGGGDLRSTIKKWNIIYPVYLNSKKTVAEGRRIAAAKACPDPTCIEIADCCSHLKIPHAIELDKAYPRDFFQVGRVRVQLKKDDGSPVNPAIKTKKQLMIQVAELVPKHHGRTKKQEPAPNPGGSSKNTKGGKKKK

SEQ ID NO: 40973 - protein, 151 aa, Zea mays
  Clone ID: LIB3059-011-D11_FLI.pep
ACSTGLCFLASIPPLSASCSSGSSCFLMIKRVSSAPSLSRWTIQYKQLGHTIYRRSHVLAFASADAPQGKRSSGENVVMVDPLEAKRLAAKQMQEIRAKEKLKRRRQAEAINGALAVIGLTAGLLVEAQTGKDILGQLAGYLTAISSLFGQ

SEQ ID NO: 40974 - protein, 362 aa, Zea mays
  Clone ID: LIB3059-018-C2_FLI.pep
IFDHVIEAINDVLKGNEADGRLPYWLSNTSALLCLLQRNLRSNGLFTTPSRRSGGALGKIAQTLRSPSKFIGRSDTLPHVDARYPAILFKQQLTACVEKIFGQLRDNLKKEISPLLNVCIQAPKSTRGQSGKASKSSGVGAHPASNSNWDNIVNFLDLLMDTLRENYVPSFFIRKLITQLFSFINIQLFNSLLLRRECCTFSNGEYVKAGLSLLEKWITDVTDEFAGTSWHELNYIRQAVGFLVIHQKRKKTLEEIKQDLCPSLSVRQIYRICSMYWDDKYGTQGISTEVVAAMREMVNKDTQNLVSNSFLLDDDLSIPFSTEDLSMAIPSIDYADVDLPESLQHYTSVQFLLRQQDPQPAQ

SEQ ID NO: 40975 - protein, 136 aa, Zea mays
  Clone ID: LIB3059-022-A11_FLI.pep
VALANLSPYSQQQQFLPFNQLSTLNPAAYLQQQQLLPFSQLATAYSQQQQFLPFNQLAALNPSAYFQQQILLPFGQLATTSPASFLTQQQVLPFYQQFVANPATLLQLQQLLPFVQLALTNPAAFYQQHIIGGALF

SEQ ID NO: 40976 - protein, 318 aa, Zea mays
  Clone ID: LIB3059-023-B6_FLI.pep
KSTLCSACLVLFPCHMATKMVLCRFVALAAVACLLRPGAPVRAPPQALRVVRRRGRDVVRRSHRRWERRWCMRVPERRRPAAVLVHDRRRQSIHLPERQGLRRLLSGEMHRARVVLRQPGDRGPHRRVPRRRVPGRARALRPERHGVRSHGEGRPGGPAPRRRTPQDPVHSGAVQLARAGHRVQGGRRLEPELLRGAHRVRVRGRRAGVRGAHAARRRRRGGVGADAAVVGRGVAVQLRRHPAGALLRPPHLRLRQDGRRQQRHPRGVDARRHVPLGRQLRQLTRTDGRTEITARPPARPPAGRRDGRERRGAIAFSL

SEQ ID NO: 40977 - protein, 272 aa, Zea mays
  Clone ID: LIB3059-024-F3_FLI.pep
MRTMKEDFIMLCLQQFCKHCHHPILSGKSWVCTSCKNFHLCDKCHAEEQNTAQKDRHPATTKQKHAFERMEVQPLPETDDGDPTMESKYFDSRIDFLKHCQDNQFQFDTIRRAKHSTMMILYYLHNSTCSACHRAVDQCLVWRCLECLGCTFCGQCYKQNGQGLHIHELRQIDTRETSQKHTLQDYIDGLVHASRCYDPRNCTHPLCLTLKKLFAHGARCHVRACNSGGCKKCLFMWKLLFRHSKDCNDGDCAVPRCRDVKAFIAEKMKLKI

SEQ ID NO: 40978 - protein, 205 aa, Zea mays
  Clone ID: LIB3059-025-D7_FLI.pep
LARFRPIAPKPTPAATGEGRDVPVERDLLRKLLEPRVISPRAVRPVWSAIHVGCIHRTDDAACTDAGVSKTAVQVEAELEVDALPAVVSDSGNRVRLVNDAYKEMVGQPECPWLDAVAATSRRISGEVALVVADRSSLPDSYGAFTCTAKIEWEDDGKVTSIAAPCDVSRLQCESRDYLFAWRFRTAAADADASVGHSSEEISES

SEQ ID NO: 40979 - protein, 114 aa, Zea mays
  Clone ID: LIB3059-027-A10_FLI.pep
SFSSILYRLSSYCDYRCRELSSTESESDPSCLLCAGVVLLECRFVGTITSSSIHPSSSITEYLSSPSSPLNTGCRYELARYAFRSKLGSRARSRVSFFIACSGFLTNAGSKRFL

SEQ ID NO: 40980 - protein, 179 aa, Zea mays
  Clone ID: LIB3059-028-A11_FLI.pep
LLLLEINGLVSEVKQILPGMVRRHRHSDSTGSTTSSRSNPMREDMLNRSNTHRARSQFLENHLAKLFEQKMEIFTKVEYTQESVISTVLKLCLKSLQEFVRLQTFNRSGFQQIQLDMEFLKTSLKEFVDDEAAISFLLKEVNNAAHERCLDPIPLEPPILDKLINAKLAKIKERNPNMR

SEQ ID NO: 40981 - protein, 47 aa, Zea mays
  Clone ID: LIB3059-029-F3_FLI.pep
GNSAVGCYAGWDLLVNQSFSILYPEFVIPKFPGFLTILLLHVDIALF

SEQ ID NO: 40982 - protein, 209 aa, Zea mays
  Clone ID: LIB3059-030-B1_FLI.pep
KGQKSVTIQRAVAAWRIVLSGRFRLLDRWCNFVEKYQRHNISEDTWQQLLAFSRCVNEDLEGYDPRGAWPVLIDDFVEQMHRIYHSTDCSSAMESQCNISSTLKGLDPQPGSKRKCPHLKSNEEDVELSDSFTRSVHLTPIKRVKESHDARYGAGESAKTTHFSNSSSGGYHEDMNLHNSRGCLQNSPCNVEDALSKGFEGCISMKCPF

SEQ ID NO: 40983 - protein, 100 aa, Zea mays
  Clone ID: LIB3059-032-A10_FLI.pep
YPTWVTNFAARLALDLLKTMREIEECRISGTILVIGEYHRRIILHGLTNKKLEVLQLAKEKLGCTLDTLFELIRFLSLLCWSQRKRMSSKRISLLCCTLD

SEQ ID NO: 40984 - protein, 135 aa, Zea mays
  Clone ID: LIB3059-040-A5_FLI.pep
VEQTRDDTDATHNTSSSYSREALTDHGDGGRKNFSLRVGGDDTGRPGSAAYAIAVMLHYTTRHHVQLPPVQAWRRRKTPHLLMQRCEHRSPFHLEGCAADFLLVCRNGSHFVLGILVALQSSKGIRVEATLRERR

SEQ ID NO: 40985 - protein, 163 aa, Zea mays
  Clone ID: LIB3059-042-B9_FLI.pep
SRTIREAEHLEAELGKEPPVLAGLEPLLKARFGRLAGGDLLVVGRECVGPTGGDILEIDVEGVAGGHEVSEVDELDEALDARLLRSLLGGVLADHLLWVLGEACDEAVAIGAVAGALLEHAHDNCLPAGEAALEEDNGLAGLEELHHLRMLLPLLRRRRRRRE

SEQ ID NO: 40986 - protein, 281 aa, Zea mays
  Clone ID: LIB3059-042-F11_FLI.pep
LELKIIQRKVEKLRSSLECFHNIEGGIGSDSVVRYAEEQLMMRNQHRIIHWQAGLCKLNDIVKRGNKCDIILNYHNLLFQRIILNISDTSSIFVNNSLNGNQIGKTFPNLDASLAFNFVFEAEENQRVSDLQSLQKKTMETSLLLGNLIDVLEEIKLSKLELVNLTSAAFVLESQTRKLGLHLSFMSFKSGKKIAFIIDMTDLNRSVYPSEPSELIKVFEAHTTLAQPSIDETMASIRNLQSGRTAILRLCRMVSRLIHGYNDDLITGVQAVGSKHHPDCR

SEQ ID NO: 40987 - protein, 251 aa, Zea mays
  Clone ID: LIB3059-043-A6_FLI.pep
KVESSSNNRATMATKIFSLLMLLALSACVANATIFPQCSQAPIASLLPPYLPSMIASVCENPALQPYRLQQAIAASNIPLSPLLFQQSPALSLVQSLVQTIRAQQLQQLVLPVINQVALANLSPYSQQQQFLPFNQLSTLNPAAYLQQQLLPFSQLATAYSQQQQLLPFNQLAALNPAAYLQQQILLPFSQLAAANRASFLTQQQLLPFYQQFAANPATLLQLQQLLPFVQLALTDPAASYQQHIIGGALF

SEQ ID NO: 40988 - protein, 158 aa, Zea mays
  Clone ID: LIB3059-049-B9_FLI.pep
MSQIVQALPPVGASNNKAPWSSNYFTLSNIEITQLHRRYAFVHKGVSRLAAAATTLRRATSTSRLARDYISNFDPIRLIRYIENAILDFLVDCSSSLNKCLLDILRGLCRGLHEDKTMFLCELLAFLIAHCTPVRQITLIPNKHYRHVSIRVLPCILQ

SEQ ID NO: 40989 - protein, 396 aa, Zea mays
  Clone ID: LIB3059-052-A8_FLI.pep
ISRTPWSSIKDKLIFPFVDLDIKYFDLGLPHRDATDDKVTVEAAEATLKYNVAIKCATITPDEARVNEFGLKAMWKSPNGTIRNILNGTVFREPIICKNIPRLVPGWTKPICIGRHAFGDQYRATDAVIKGPGKLKLVFEGKEEQVELEVFNFTGAGGVALSMYNTDESIHAFADASMATAYEKKWPLYLSTKNTILKKYDGRFKDIFQEVYEAGWKTKFEAAGIWYEHRLIDDMVAYALKSEGGYVWACKNYDGDVQSDFLAQGFGSLGLMTSVLVCPDGKTIEAEAAHGTVTRHYRVHQKGGETSTNSIASIFAWTRGLAHRAKLDDNARLLDFTQKLEAACVGAVESGKMTKDLALLVHGSSNITRSHYLNTEEFIDAVADELRSRLAANSNL

SEQ ID NO: 40990 - protein, 321 aa, Zea mays
  Clone ID: LIB3059-054-E11_FLI.pep
MPTWIQKLTQKFLNSPVTVDLVGEDDQKLAEGISLLSVSSENREKPAVLGKLIKEHAKGGKCIVFTQTKRDADRLSHNMSRSFQCEALHGDISQSERERTLAGFRDGRFNILIATDVASRGLDIPNVDLVIHFELPNSSEIFVHRSGRTGRAGKKGTAIVMYNYDQSRAVRVIERDVGCKFMELPKINVEGSDLLGGGFDSFGGGGGGYGGSNYGRSRGGFGGRGGGGGFGRSGGGGFGNSGFGRSSGGFGDSGFGRSGGGGFGDSGFGRSGGGGGFSDSGFGRSGGSGGGFSDSGSGRFGGGFGSSRSGSFGRFGDKDSR

SEQ ID NO: 40991 - protein, 143 aa, Zea mays
  Clone ID: LIB3059-056-F9_FLI.pep
LTTHTSTKPRGGAMARGVVSAKGGTAAGKKKGSVAFTIDCTKPVEDKIMEIASLEKFLQERIKVAGGKAGNLGESVIISREKTKVTVTCDGPFSKRYLKYLTKKYLKKHKVRDWLRVIAANKDHSVYELRYFNIAENEGEEED

SEQ ID NO: 40992 - protein, 85 aa, Zea mays
  Clone ID: LIB3059-058-B7_FLI.pep
LPFNQLAALNPAAYLQQQILLPFSQLAAANRASFLTQQQLLPFYQQFAANPATLLQLQQLLPFVQLALTDPAASYQQHIIGGALF

SEQ ID NO: 40993 - protein, 374 aa, Zea mays
  Clone ID: LIB3059-058-C2_FLI.pep
KVLRFLMSSSRSSTDVCVVCLIACMFIYVGCFTSQVRALLRLDDRQVALLLQAQHGLVQALPQRSELQPQVPEPLVGELERLRHWLAVLLALGRDGVLRKEVSEHVDEVGAVQHGADAEVPAPGSGALVGEHVRARDVADVDVGGDGVGDGALGAHEVARDVVGAEVERLLQHGARGHAGQHHGQLQAPRVRLRRRRHLRHHLGAAVQVVGSLAEVVVAPAGLVEDGVGAPAGVHVHGAIGGGEDDTARALVRRGVDDVPGALHRHRDKLRVVGHRGGDVEDAVAAGEGGAQGGAVEDVGAAQGEALLGSLQSQQVRVLAVRRVPRGSPDAVTPLEQLIHHPRADEAAGAGHAHQLLLILAAVGRHRDVAAQAS

SEQ ID NO: 40994 - protein, 298 aa, Zea mays
  Clone ID: 700377574_FLI.pep
GNEIGAQTHTHTQTMVMEETIDDSEMSLSNMVLGFLEDFERDERRPENDDDNNEEEGSSGGDTAESKAFWQTQHLQLREALAKGSPAESRIRADTEEAVKSMRAAACSCSCTGRPAARDCRPCMLRHVADRLRDAGYDSALCKSKWTRSPDIPSGEHSYVEVAVQTRSGKSVRVVVELSFRAEFEVARASAGYRALVTALPEVFVGRADRLRGVVKVMCAAAKQCMKDNNMHMGPWRKHKYMQAKWLGTPERGAAAVAAAETPVVAVPSVTVGSPEKQTKFRASMLTFDFGRTALEVA

SEQ ID NO: 40995 - protein, 94 aa, Zea mays
  Clone ID: LIB3059-058-D9_FLI.pep
HLPMDPGASSPAALMWNYDEVMAIVHQYNCVKACFAGHDHKGGHSVDSHGVHHRTLEAALECPPGTSAFGHVEVYPNRLLLVGFDRMADTEVRF

SEQ ID NO: 40996 - protein, 185 aa, Zea mays
  Clone ID: LIB3060-002-C5_FLI.pep
STARKPSLGARSPVSACPTSTTEAMQEAKHLTTSKLPPQSQSSSPSPSAPAANPPPYHHDYGTFHRPFQPTLPVVGPAYHDYHASPIGFGSQGFVASPGAVQQQVFVEGIPVREPPLPFCGVGVGWFLFLLGFFLAAIPWYAGAFLLFFVALDHREKPGLIACTVAGIFALVPFILNGIRLNPFW

SEQ ID NO: 40997 - protein, 295 aa, Zea mays
  Clone ID: LIB3060-002-G8_FLI.pep
TVLTALGARRSSDVSIEQRLVRLVHHEQRLVHEAGQGPAEQRADPVDPVVGPDPGGHGGTEGPRRVHGRAGEVAAGEAVGADYEPRQQRADGPDLAPRVQDHGVGDEEQREGEDHLHHQALHRADASAQGVHRGHHAAAEVAEEDAGEGGRQQLGGDVQQRPELGDVAANQDPHRHRGVEVAAGDVEAGRHQDASGQRVRDSHRRQRRHRHSLPGLPAGPGGHGGGDAGEDEEEGEDELGQHGAHAADVRRRRLVVVERIDQLVDELRHGWTNYCEEPCCSWRGGESGWGKSSGC

SEQ ID NO: 40998 - protein, 238 aa, Zea mays
  Clone ID: LIB3060-002-H10_FLI.pep
ELKHPGSGIIVGMSVPASAQVPHTIRSAGSCCFRSSHQLSAQNLGRHRRWRGTGKKKILSTRGVLESRNGAHPGGLTKRRKVVEHIILLRAKPNISDAEEKDMLDYLYTSQYQMRGILAVSLGRIEDPNSDNFTHAVFMRFQQKQDIAEFQSNAYYSKVVDEHVKPVSYGSVSVDFESEVEDDIIPLFRRGEVWPWPKSIDTVLSFFFFFSFFGNRKKKKKCGRILTTASSLCCWCLS

SEQ ID NO: 40999 - protein, 245 aa, Zea mays
  Clone ID: LIB3060-006-G6_FLI.pep
CQDSALSIPSTSAKVPSGGEAMAAPVTVYGPMLSPAVARVAACLLEKDVPFQIEPVDMSKGEHKSPSFLKLQPFGQVPAFKDHLTTVFESRAICRYICDQYADSGNQALFGKKEDGAVGRAAIEQWIESEGQSFNPPSLAIIFQLAFAPMMGRTTDLAVVEQNEAKLAKVLDVYDQRLGESQYFAGDDFSLADLVHLPNADFLVNRTSKAGLITERKNLARWWDDVSSRPAWKKVTEMQSTPRPS

SEQ ID NO: 41000 - protein, 773 aa, Zea mays
  Clone ID: 700377845_FLI.pep
NQPAPPFQRLHPLLPMATPFPLEADEGEARELLYEAYNELHALASELGGAAAAPAVVVVGHQTDGKSALVEALMGFQFNHVGGGTKTRRPVALHLRFNPRCDEPQCRLLSATGDAEEHDEAGVAARPMPLADIQAYIEAENLRLENDPCQFSEKEIIIKVEYKHSPNLTIIDTPGLILPAPGRKNRVLQSQASAVESLVRAKIQHKETIILCLEDCSDWSNATTRRVVMQVDPDLARTVLVSTKLDTKIPQFARPSDVEVFLHPPNCVLDVSLLGDSPFFTSVPSGRVGSCHEAVFRSNGEFKKAILSRELEDIASIEDKLGRSLTTMEKDRIGVGNLRLYLEELLQKRYIKSVPLIIPLLEKQHRNTTSKLREISHELSDLDETKLKEKAQLFHDTFLTKLSLLLKGMVVAPPDKFGETLVNERINGGTFTGSENFQLPNKMMPNGGMRLYGGAQYHRAMAEFRLVVGSTRCPPITRDEIVNACGVEDIHDGTNYSRTACVIAVAKARDTFEPFLDQLGFRLLYILKRLIPISVYLLEKDGEHFSSHEVLIRRVQEAFKRFVESTEQSCRQRCMEDLESTTRYVTWSLHNKNRAGLRHFLDSFVAPEQLSVNTLNERFSGLNDNKQDKAKGDSKSNHSPDTNSSTAMPETRLVDLLDSTLWNRRLVPSSERLVYALVHQIFHGIKEHFLVTTELKFNCFLLMPIVDKLPALLRQDLESAFEEELDSIFDVTQLRQSLGQKKRELEIELKRIKRLKEKFGEINKKLNSLQVRQ

SEQ ID NO: 41001 - protein, 93 aa, Zea mays
  Clone ID: 700378757_FLI.pep
APCICPILVLHQPLALPRASRMTMVFPCKWLHVNNHTFHCLLISRPPTSLCNLHNPPSTNIGPLHFSYVVVLICVQPFTQNIHLLIFASDIYR

SEQ ID NO: 41002 - protein, 271 aa, Zea mays
  Clone ID: LIB3060-007-F4_FLI.pep
NLLADQRKRILNFNQRIVIALDVAIALTYLHLCSGDALICYNLRTSNILLTESYRAKVCCSELSKSGNIVLLKGTGGYIDPEYLETSELTAKSDVYSFGIILLEIISSHGPQDWDVLMNHRQSSVVQWALEKFYDDLMNEILDYRMEDRVDGDVVRDLLSLALSCVVSRGADRPSIVVVGERLWKIWQDHRRNVGEQHEYQGSWAEFIEQEGILRHHKCVLKRSWEPSTTQQDWSVYVRQIELVQEAYDTPWGEEIFSGSVSLDDITVYSR

SEQ ID NO: 41003 - protein, 172 aa, Zea mays
  Clone ID: LIB3060-011-C12_FLI.pep
SSQNEVLLREKLPTRELYLNLRSSDTWVAEYRKWMDRAGHGMPYYFGHSTLSPPPVPAVVEQAPAGAVAGISASFPAKGGVGMVHAPNPTNRYFRHVVHCKGCRATVKKYTSLKTVFAALAAAALSAAILAATRQWKAVLVAASAVLAAASYACDAVLSLITTNFIRTHRRL

SEQ ID NO: 41004 - protein, 253 aa, Zea mays
  Clone ID: LIB3060-011-D12_FLI.pep
SHVRKKLASLQCTSNSAGHNSGGSNTSHRCRHDYFQGKETNSCRKRRTNHGVASSERVEHVLGAAVGERAALLEVDHLDHAVLREQRVAAGPDAEPHGLVGEVELDAHGARQLAVAVRQEQHLVPDPQTLLPRAHHEGVVDGDAGHGVDALGAELPGLGHEPREVLLGAGGRERAGHGEEHHLLPRGEVADRHRLQLAVGGGRVEVGERRVREPVPDRDGLGRRRGGRRRRRRHGPDWRAKEPPEGCPGGQAA

SEQ ID NO: 41005 - protein, 152 aa, Zea mays
  Clone ID: LIB3060-013-C1_FLI.pep
SSSLSPPSSPMATLQLNHIARETSDVARLAAFYEAVLGFERIPSPTYSGFQVAWLRLPSSPDVALHLIERDPAAAPVAVGPGAEGAPPSQLPRRHHLAFSVADYDGFVTGLKARGTDVFEKSQPDGRTRQVFFFDPDGNGLEVTSAGAGNEK

SEQ ID NO: 41006 - protein, 222 aa, Zea mays
  Clone ID: LIB3060-013-F5_FLI.pep
NLRIKVALGAAKGLAFLHSDKARVIYRDFKTSNVLLDSNYNAKLSDFGLAKDGPTGDQSHVSTRVMGTYGYAAPEYLATGHLTPKSDVYSFGVVLLEMLSGRRAMDKNRPATEHNLVDWARPYLSSKRRVSRILDDRLAGHYPLPAVQRAAALALQCLSEDSRKRPTMDQVVASLQQLTAAQDHDDAHRSSRRYPKDHRQAAALNNRNLNAHRRLSALPLPE

SEQ ID NO: 41007 - protein, 88 aa, Zea mays
  Clone ID: LIB3060-014-E3_FLI.pep
EPYRLSLFKHGRLFSAPAREVRHNRTRNTHTPNSITQLYQYISDGQDTGQNFLKRRGTKQIPHGLTSAYGFTCFGTDKRMWCSTYGNL

SEQ ID NO: 41008 - protein, 343 aa, Zea mays
  Clone ID: LIB3060-017-C3_FLI.pep
SPPPLQGFAPPNSRNPTHPMRDRSVEREFPSRERGDRPPPGVLGPPRRGPAYKTKLCALWQRGGCSRDTCSFAHGHAELRRFPGSRTSFPPRAGRRDYRAGDFRDRFDRRRSPHRRHSPDGDSRGHRSLRDRRPNSQERESSYSRSPSRKSEMRHEKKPDDGETNSSRSLSVSDNNDDRKKETLLSGDDKEDHEIQLKQIRQDMELLRDDKSLLEIILDEKNAEVRKISSRLNDLDLQLRKEKEECHRMTSKIKKFLKAHARFLKAQEELKRSQARFERLGDLLASDILKRGANEEVSSINVDEDPNVPYERSPNAAIAKKRSIPYSTSEEAKAREEKKRAGL

SEQ ID NO: 41009 - protein, 304 aa, Zea mays
  Clone ID: LIB3060-026-F2_FLI.pep
VKRSRLASVLHAGGDALHGEDERVFQAGRVLARRVQLDQSGGLVLVGELLGQRRLGRHLEVGVPYPLQRVGLEHVQGGDVGVAQHQPLLQEWIAFKNILVPSDLEEKLLCLHVFVPELLPKGLEFFRHKQLVIQAGNAGVSLGENHLQQVQGDPEEWPLVVHLFEDLEVPDVLVDGELEGGADSQPHGKVEPGLSPREDPGDGAQGRDAAAGPPLGWPAADVHPPVLGLRCSRSEVLDEARLLDDDRAVLLRGHDRHLVHELAPLGLGRDRRVHAVLQRGGREALQSLEAQVLLPEAELDDLAL

SEQ ID NO: 41010 - protein, 277 aa, Zea mays
  Clone ID: LIB3060-027-C1_FLI.pep
ARRKAHQCSSPAGPFSVPVRGSMKILVAVKRVVDYAVKVRVRPDGRGVETANVKMSMNPFCEIAVEEALRLREAGVAAEVVAATVGPAQSADTLRTALAMGADRAVHVLHDPDPARPLLPLAVAKILRAVALQEKPGLVILGKQAIDDDCNQTGQMLAGLLKWPQGTFASKVTLDTEKQKATVEREVDGGIETICLDLPAVITTDLRLNQPRYATLPNIMKAKSKVIKKVAAEDLGVDIRSDMEVIEVNEPPKRKAGVILSCVDELLDKLKNEARVL

SEQ ID NO: 41011 - protein, 135 aa, Zea mays
  Clone ID: LIB3060-027-F4_FLI.pep
IKYNSSHMVPQCFLCPTANFAADGWETKALVSLVAVASREAIIDPIDLQHINRYLEADDTDTVHEFLHLDWIIGPRSHQWPPDLVQWNFHYHWALLLRICCQGWHCCTVGGGSGERQIPAPRSARAPSPSWSEGG

SEQ ID NO: 41012 - protein, 277 aa, Zea mays
  Clone ID: LIB3060-028-C4_FLI.pep
FTSSKQASKQGSEEGELCMLDPSTGSLLLSSSCCFCWRRRLFGSRLILLFLLLFFLLLLYHRRLRRCLCRRRCRLRRCSWLGLLLLLLHGDFPGGGLRRRLRLGLLLGDKRCDLVQDEGDRRKQGRGAGLGHRLAHHLGSREVNLSQLIEELGDCSRVLLADLDWLLILEQSLDLRRRCFVGLHDLGLQLCLLVLNLLVNLLLVEGLQEACSCSLLAILVKDLVEARQNLGLPHAGHLDLFFRIYTCSNLCSRPTDTAEKVQRRRKIDDEWKTTSRA

SEQ ID NO: 41013 - protein, 406 aa, Zea mays
  Clone ID: LIB3060-029-F4_FLI.pep
FIIKSSLCINFVCVSKSYHVIYLQMLSVLESAIKRDYLSSNFETTTELLNSSTQDFATQNSAGGSGSATALPWVPDTTAAVALRLLDLDASISYTLHPKLGSNKEQESGDFMKLPPRYPSMNKGKQEIEQFRPIGFDQQDGTLLPNSNGRRGRGRGGRGGSRGGRSRGRGGRVPRGIGSSSRIQFRDDNSMLYGRAPRKNARGGRGRGRGRGRGLRTVRPRQPSELSARSIPKANLLGSFSMLSKTNHTGTTHSPESSGAEEWAFERREYVKDDENNLVSQSDESEENVEPMNEEYGEHISGYPRDNSDSRPVQMMGDGSDDNDEDAEGDEGEEDGEDYEAEDPGDEDDDVEMDGDDDVEVDEDDDIEMDEDDDIEDGDDDDGGDGAANGDEDGGGTSSYSSEYSE

SEQ ID NO: 41014 - protein, 565 aa, Zea mays
  Clone ID: LIB3060-029-H4_FLI.pep
AAAARPVPPYGKRTGFVPRRPEDFGDGGAFPEIHVAQYPLGMGRRDDKGGSKILALTVDAHGSVAFDAVVKQGENAGKIVYSKHSDLVPKIATADSQATSDDDEEQKQIEETTERTKAALEKVVNVRLSAAQPKNVPTHDSESKFIKYKPSQQSAAFNSGAKERIIRMSEMAVDPLEPPKFKHKRVPRASGSPPVPVMHSPPRPVTVKDQQDWKIPPCISNWKNPKGYTIPLDKRLAADGRGLQEVQINDNFAKLSEALYVAEQKAREAVQMRSKVQRELMLKEKERKEQELRALAQRARMERTGAPPAPSGVPAGGGRGAIQDVDEVMDMEQPREPRESREQRRESREEREGRIERDRIREERRRERERERRLEAKDAAMGKKSKITRDRDRDISEKIALGMASTGGAKGGEVMYDQRLFNQDKGMDSGFATDDQYNIYSKGLFTAQSTMSTLYRPKKDGDSDVYGDADEQLEKVMKTERFKPDKGFTGASERTGKRDRPVEFDKQEENDPFGLDQFLTEVKKGKKAVEKIGGGGTMKASGGSSMRDDYDGGSGRSRINFERGR

SEQ ID NO: 41015 - protein, 434 aa, Zea mays
  Clone ID: LIB3060-034-G4_FLI.pep
ASRGETEPLEVMVSVLRVVVEHPLPRRQHPPAVLRPHHALVLRLVPHGRHHVVLPEEVGGLVHQRGVPPAGLEPRAGAAEAVQQVQVRLQVVVAREVQGLLEERRHLVVQLQQHAQVRVHAAEAQPVRRPQDELRERRLVEEHAGHLGHAVVHVHDAQRPHAQLPLEPPPEGDVPDARAGEGEHAHRRHPVARRHVRARLRDVEGAQHRQRAAQAVARDRHAHLLAPPVVQIHQLAHLGQHLLPRRVPAEAAAGALVRVQRREPSLHLHVGVRAGDARLAQGDLVGRQIGHPLEAGDGAAPRHGDVPAAEPRRLLVGGHGHVPDERAGLAPHLGVGGRLDAEVGELEVVAGGVEVAGDLVADAAEADVVEEGLRRVLAAAAVGGEAVVVEAVVGGLGELAVADELLEEHAVDGVQQTLPVVAAVDLPPPRGELP

SEQ ID NO: 41016 - protein, 176 aa, Zea mays; identical to SEQ ID NO: 37650
  Clone ID: 700343996_FLI.pep

SEQ ID NO: 41017 - protein, 364 aa, Zea mays
  Clone ID: LIB3060-035-B1_FLI.pep
QQQMYHQQQLHTHNQHLSSSRPGLPPEKQFLLHGAGGGGGGDAGLVLSTDAKPRLKWTPELHERFVEAVHQLGGPDKATPKTIMRLMGIPGLTLYHLKSHLQKYRLSKNLQAQAHTASAKNALVGCRTGADNALCQGSASPPPPPPPPHLNLDPPQINRSMHISEALQMQIEVQRRLHEQLEVQRHLQLRIEAQGKYLQSVLEKAQEALAKQSGGADETTTTQQQMLPDLISRATATRRGHVQQEHLHLQHHLGGDGSVDSCLTACEGSRCQRERDQDLLSIGLSSAPPPTPSRGYNDRGGGGSASCEEFLQFLDEPGRRGAGGGGGSSDEQQELDLSISGGRSNPRPRGSQSQRIDLNGSSWN

SEQ ID NO: 41018 - protein, 321 aa, Zea mays
  Clone ID: LIB3060-035-D4_FLI.pep
TPPESMEIRAPPTSLRLAPPPAAASFRRTPLRTSFLRGSVSLKVVQVRQSNVNRFKCNSIRSNLFDRLTRVVRSYANAVLSSFEDPEKILDQAVLEMNDDLTKMRQATAQVLASQKRLENKYKAAEQASADWYRRAQLALQKGDEDLAREALKRRKSYADNASSLRSQLDQQKGVVENLISNTRLLESKIAEAKQKKDTLKARAQSAKTATKVSEMLGNVNTSSALSAFEKMEEKVMAMESQAEALGQLATDDLEGKFALLETSSVDDDLSQLKKELSGSSLKGELPPGRTAVSNSGAGRPFPDLEIESELNELRRKAKEY

SEQ ID NO: 41019 - protein, 426 aa, Zea mays
  Clone ID: LIB3060-035-D8_FLI.pep
GLVPQSDLFGLFDGVPVSPSSFAMPSSASARGGRGLLLPAAAEAVVVLILGAVAPAAGCYPRVFSFGDSLADTGNYPFVYGNDSGSGGAALRPPYGETFFHRATGRASNGRLVVDFIADTLGLPFVRPYLSGRSAEDFASGANFAVGGATALSPDFFRARGFDTMGNKVDLDMEMKWFRGLLDLLCPGNLAGCSDMMNQSLFLVGEIGGNDYNGPLLSGVPMEKIRAITPSVVAKISSTISELIRLGAKTLVVPGNLPIGCIPDYLMIFKSNKEEDYEPQTGCLRWMNEFSQYHNKVLVEQLKKLRKLHPGATIIYADYYGAAMEIFLSPEQYGIEYPLVACCGGEGPYGVSPSTGCGFGEYKLCDNPEKYGSWDGFHPSESAYRAIAMGLLLGSYTRPSITSTTTSCPQLMELGSSAEYKPLYDL

SEQ ID NO: 41020 - protein, 118 aa, Zea mays
  Clone ID: LIB3060-035-F9_FLI.pep
CSGRISCFKFKLCKVRSVQFGQKGIPYLNTYDGRTIRYPDPLKANDTIKIDLETNKIMDFFKFDVSNVVMVTDGRNTGRVGVIKNWEKHKGSFEVIDVLLGAFCMLCLVFSYLLYKKT

SEQ ID NO: 41021 - protein, 180 aa, Zea mays; identical to SEQ ID NO: 37897
  Clone ID: 700345212_FLI.pep

SEQ ID NO: 41022 - protein, 256 aa, Zea mays
  Clone ID: LIB3060-041-H11_FLI.pep
QILAKIVVGCDGVNSPIARWMGFSEPRYVGHMAFRGLAEYADGQPFEPKVNYIYGRGVRAGFVPVSATKVYWFICFNRQDPGPKITDPTALKTEALELVRGWPSDLLAVMRSTPEGAVVRTPLVDRWLWPGLAPAASRGGRVVLAGDAWHPMTPNLGQGACCALEDAVVLARRLADAGADGAQAAAAMRAYEAERWARVFPLTARAGLVGALVQWENAAVCAARDGVVIPRLVRLGPFLEHTNFECDLLEPAPESS

SEQ ID NO: 41023 - protein, 372 aa, Zea mays
  Clone ID: LIB3060-043-D10_FLI.pep
RRGGGGGGMADAARGLGSSSLPVANVQALAESCNDNGADAPVPGRYLIKDPSAEEVVAAGDSACAIPVIDFRKLLDPGSSEEECARLGAACHHWGFFQLINHGVPAEVTGNLMKDVAGFFRQPLEAKKECAQQAGSIEGYGQAFVVSEDQKLDWADMLFLIVRPREARDMRFWPTRPESFRDSVDAYSLEASKLAYRLLEFMARGVGADPASLQSMFQGQVQGMRVNYYPPCQQAADQVLGLSPHSDPNGLTLLLQMSHDVHGLQVSKDGRWFPVQALPGAFVVNVGDALEIVSNGAFRSVEHRAVIHPTKERISAALFHFPDQDRMLGPLPELVKEGDTVRYATTTYQEFMKRFFAAKLDGKKLIERFKLQ

SEQ ID NO: 41024 - protein, 409 aa, Zea mays
  Clone ID: LIB3060-044-F10_FLI.pep
YTNTSVAHISRHSPSAATWDTRIGSAQSAVAALVLVPLDVQALGGGGVPGAGAGVLAQRGLGVGLAADDEGGLRGGDVLLLADPLLEGALLQRAAEGEGQRPGLEHLQLVHRVQVLRRLLLALPARQEHHPGHRRRHGAPQRRHRVLRYHLRGDLGAIGTGGDHVGLEERGLEQDFVVAERLVEGGEDALRGGGAGPDVVAAVGEYLGLHDGHQPVLLADERVPREALDVLPDGELGGLPLPRGADLEHGAPLGKARAGLVVLGAACAQGVEALRGGLAVGARDLHGALVDLDPRDHSARDEHVHERLPVGGLLVQRLLEEDDPGEVVEHAGRREEQLAERLPVRLHVLEVDAGQALADGARRLVGGQDALARRCEALGGLDQLICVLPHKGRHGDPFRREQRSKIQTR

SEQ ID NO: 41025 - protein, 246 aa, Zea mays
  Clone ID: LIB3060-047-C2_FLI.pep
NRGRNRYTDVLPFDQSRVQLESSTGNDYINASHIEIAGRNLTKFISTQGPLANTIEDFWQMVYENHCPVIVMLTKFDGLKCDEYLPLSKGQAVFGKFTIKITKFRKDGQLLLRGVEIRQDESDEVRSLLHIEYPEWPDHGVPNSSADVRRILKRLYHIPRERPIVAHCSAGIGRTGAYTTIHNTIERILLGEQGAADLVETVKKFRSQRPGMVQTEEQYKCCHHAIRDELEDLVSSSKIEPLSRNG

SEQ ID NO: 41026 - protein, 327 aa, Zea mays
  Clone ID: LIB3060-047-G10_FLI.pep
RCSVVVALARSRSVDHGVEGQLLGPGAHPAQPAPPHGVPRLAVARGPPPPAAHGRRHQRRHAPPMGHRHDEGQRQERGDGGAVGAERHHGVDADGHDGDPLLHGRGGGAEQHLHHQEAAQRHRVRRARRVHDGAQVRGAHAALPPRLPLPLPRHLLPQPGQLPHQHLGLPLLLLRRLRRRRPRPPAAAHQGLHRRRPGARLHPQPRRQQALLRRGAPPALDLRPAPRLPVLHGHGPHTLQPRRRQPHGPQRMRRRQRQICGDERRERVRACRLKLPDLCPQQTICMRSVHVIRLRLLPRATACDVSSTKETACCSSSSFSHSCGVIG

SEQ ID NO: 41027 - protein, 307 aa, Zea mays
  Clone ID: LIB3060-047-G11_FLI.pep
DADSLPNNIKDLLHEHTVADDVAGSKCLVVRGWALHVAILAHPASDGFMALCGWGSTLEVVAAGLPMAAWPFFAEQFINEQLIMDVLGIGLSVAVMKPIENVLIASNMGGAVVMIYAPVFWSCLTSFTLGIHGQIVGVLCLPFLVIQLNISIAVQQRFLWDPGGDQCCLLNLFIHGLGDLQMQQASLSFVTKTGWLVIILSLLLLQWDKPNLRGLNKSKCIQRGFRRCYVHACPSRWSDWLPSAEFWYNSSFHSATGRSPFEDLYGYAPRHFCITSCDGPSAGLNAFLQDKLVMTKLLQQHLLRAKQ

SEQ ID NO: 41028 - protein, 276 aa, Zea mays
  Clone ID: LIB3060-047-G7_FLI.pep
GNKGPDVPIFSVQQPSFLHDFAVTERYAIFPEIQIVMQPMGMVTGGAPVGSDSGKVPRLGVLPKYATDESEMRWFEVPGFNMMHSLNAWEEADGEELVLVAPNVLSVEHALERMELVHSCVEKVRMNLRTGAVSRTPLSAGNLDFGVIHPGYLGRRNRYGYLGIGDPMPKISGVAKLDLDRAGTGDCTVARRDFGPGCFAGEPFFVPDDVEGDGNEDDGYLVCYVHNERTGENQFVVMDARSPQLDIVAEVQLPARVPYGFHGMFVTQAELQAQQQ

SEQ ID NO: 41029 - protein, 237 aa, Zea mays
  Clone ID: LIB3060-047-H5_FLI.pep
PFQIRDVLPPSNHARPAKLAMALPSSSTPTASAPASLGERWPPLESTPAVFNQFVWSLGVPEDDVEFHDVYGLDADALDMVPQPVLAVVLCFPDPPQDASYPSEQLLISGEKETQDQVYFIKQIESLGNACGTIALLHAVGNASSKVNLVENSCLDLFFKSTATMDPYERAVCLEKDDTMARAHLLAANDGATELSDLIEEHYICFVYVNGTLYELDGMKDGPIKHGPCSSISLLQV

SEQ ID NO: 41030 - protein, 750 aa, Zea mays
  Clone ID: LIB3060-053-A5_FLI.pep
LLLLLLFGSCSSAAAVVLRTGEVEMEERLFATEKHGGRALYRLHAVTVFLGICLVLCYRATHVPAAGSGGRAAWLGMLAAELWFGFYWVITQSVRWCPIRRRTFHDRLAARFGERLPCVDIFVCTADPRSEPPSLVVATVLSVMAYNYPPAKLNVYLSDDGGSILTFYALWEASAFAKHWLPFCRRYGVEPRSPAAYFAQSEKPRHDPPHALQEWTFVKNLYDEMTERIDSAARTGNVPEETRAKHKGFSEWDTGITSKDHHPIVQILIDGKDKAVADNEGNVLPTLVYVAREKRPQYHHNFKAGAMNALIRVSSVVSNSPIILNVDCDMYSNNSDTIRDALCFFLDEETGHRIAFVQYPQNYNNLTKNNIYGNSLNVINQVELSGLDAWGGPLYIGTGCFHRRETLCGRRFTEDYKEDWDRGTKEQQQQHRVDGETEAKAKSLATCAYEHDDEDTRWGDEVGLKYGCSVEDVITGLAIHCRGWESVYSNPARAAFVGVAPTTLAQTILQHKRWSEGNFGIFVSRYCPFVFGRRGKTRLPHQMGYSIYGLWAPNSLPTLYYAVVPSLCLLKGTPLFPELTSPWIAPFVYVAVAKNVYSAWEALWCGDTLRGWWNGQRMWLVRRTTSYLYGFVDTVRDSLGLSKMGFVVSSKVSDEDEAKRYEQEMMEFGTASPEYVIVAAVALLNLVCLAGMAAALDVFFVQVALCGVLVLLNVPVYEAMFVRKDRGRMPFPITLASVGFVTLALIVPFF

SEQ ID NO: 41031 - protein, 354 aa, Zea mays
  Clone ID: LIB3061-001-D5_FLI.pep
GAFSPGEGKRIQTMEKKKVAIPLVCHGHSRPVVDLFYSPVTPDGYFLISASKDTNPMLRNGETGDWIGTFQGHKGAVWSCCLDRNALRAASASADFSAKVWDALTGDELHSFEHKHIVRACAFSEDTHLLLTGGMEKTLRVYDINRPDAAPRELDKSPGSVRTAAWLHSDQTILSSCTDMGGVRLWDVRTGKIVQTLETKASITSAEVSQDGRFITTADGSSVKFWDANHFGLVKSYDMPCNVESASLEPKSGSKFVAGGEDLWVHVFDFFTGEEIACNKGHHGPVHCVRFAPGGESYASGSEDGTIRIWQLSPVNADDDEAANANGKANAAVNEVTTKLEGGFHIPKEGQAGG

SEQ ID NO: 41032 - protein, 352 aa, Zea mays
  Clone ID: LIB3061-001-G8_FLI.pep
NRQAKPSQKRQPRAAVWSLLWVVPFFAGGRKGQWSGTAQGEAGVPKSHFRRPLSPCRDRGRKERRCFTMKALILVGGFGTRLRPLTLSFPKPLVDFANKPMILHQIEALKEVGVTEVVLAINYRPEVMINFLKDFEDKLGITITCSQETEPLGTAGPLALARDKLADGSGQPFFVLNSDVISEYPFAELIKFHKCHGGEATIMVTKVDEPSKYGVVVMEEATGRVERFVEKPKIFVGNKINAGIYLLNPSVLDRIELRPTSIEKEVFPQIAADQQLYAMVLPGFWMDVGQPRDYITGLRLYLDSIRKKSAAKLATGAHVVGNVLVHESAKIGEGCLIGPDVAIGPGCVWRTA

SEQ ID NO: 41033 - protein, 88 aa, Zea mays
  Clone ID: LIB3061-006-G3_FLI.pep
VGTGVPFARKFKEDEPLLDMIDDKVLRRWRHRPVPGAWCTGKRRWFSDPCSQWSNVNIVRPGPQAEKFRTYINQIMEESKSSNNSCKQ

SEQ ID NO: 41034 - protein, 231 aa, Zea mays
  Clone ID: 700345701_FLI.pep
GVMAVSFANLSSEAGLKKLDEYLLTRSYITGYQASKDDLAVYTSFSSAPSSKYINVARWFNHIDALVRLSGITAEGQGVKVESSAVPSAPTPDVAEAQAPVAEEDDDDDVDLFGEETEDEKKAAEERAAAAKASGKKKESGKSSVLLDVKPWDDETDMAKLEEAVRSVQMEGLLWGASKLVPVGYGIKKLQIMMTIVDDLVSVDTLIEDYLCAEPVNEYVQSCDIVAFNKI

SEQ ID NO: 41035 - protein, 446 aa, Zea mays
  Clone ID: 700346046_FLI.pep
ASYQERSIAQEQEEVRRQLCRMASEKVETIVAGNYMEMEHEPGGGGDHDQQPSGGAASSTSSSSRGGGKKKALSSLFWHGGSVYDAWFSCASNQVAQVLLTLPYSFSQLGMASGVVFQLFYGLMGSWTAYLISILYVEYRTRKEREKVDFRNHVIQWFEVLDGLLGKHWRNVGLFFNCTFLLFGSVIQLIACASNIYYINDKYDKRTWTYIFGACCATTVFIPSFHNYRIWSFLGLLMTTYTAWYLTIAAIAHGQVEGVTHSGPSKMVLYFTGATNILYTFGGHAVTVEIMHAMWKPHKFKLIYLVATLYVLTLTLPSASAVYWAFGDMLLDHSNAFALLPRSGFRDAAVIFMLIHQFITFGFACTPLYFVWEKLIGVHETGSVALRAAARLPIVAPIWFLAVVFPFFGPINSTVGSLLVSFTVYIIPALAHMATFLPPAARENAV

SEQ ID NO: 41036 - protein, 143 aa, Zea mays
  Clone ID: LIB3061-006-H10_FLI.pep
HLTIQTIATQQQQQFLPALSQLDVVNPVAYLQQQVLASNPLALANVAAYQQQQQLQQFLPALSQLAMVNPAAYLQQLLPFNQLTVSNSAAYLQQRQQLLNPLAVPNPLVTAFLQQQQLLPYSQFSLMNPALSWQQPIVGGAIF

SEQ ID NO: 41037 - protein, 242 aa, Zea mays
  Clone ID: LIB3061-007-E12_FLI.pep
DGEVEILGFKMPTEERVRKRKESNRESARRSRYRKAAHLKELEDQVAQLKAENSCLLRRIAALNQKYNDANVDNRVLRADMETLRAKVKMGEDSLKRVIEMSSSVPSSMPISAPTPSSDAPVPPPPIRDSIVGYFSATAADDDASVGNGFLRLQAHQEPASMVVGGTLSATEMNRVAAATHCAGAMELIQTAMGSMPPTSASDLHRRRRIMSCWVQMGPYTWTCIRHCGFRNRWEHFICRRR

SEQ ID NO: 41038 - protein, 143 aa, Zea mays
  Clone ID: 700346058_FLI.pep
AVRTSPSSLPRAGRSLLQSHVVAAVSLLRQLHLLLAELLLQLRQRKKRRWKRRKKAMMIWASASSTRLHSHHSIVLGSETRGKPESCLDFKLVLCWKVLERLLLVFIFGNSAVDCYAGWDLLVNQSFSVLYILNWLSQSFLAF

SEQ ID NO: 41039 - protein, 130 aa, Zea mays
  Clone ID: LIB3061-014-A11_FLI.pep
KHGTCAADVFDEHGYFQAALRLRDQLGVLGALTSAGVKPDGGYYTLSQIKGAIRQGTGFEPYVECNRDEAGNSQLYQLYFCVDAAGDSFVDCPVLPSGRPLHSMQEDNGMFIPHSSFFFANKRRAIGVPY

SEQ ID NO: 41040 - protein, 292 aa, Zea mays
  Clone ID: LIB3061-017-C2_FLI.pep
NPSFVSGGGMAGGPGWEREKAAIAAHPLYERLLEAHVACLRVATPVDQLPRIDAQIAARPPPMEAAAAAAAAGGAHSGGEELDLFMTHYVLLLCSFKEQLQQHVRVHAMEAVMACWELEQTLQSLTGASPGEGTGATMSDDEDNQVDSESNMFDGNEGSDGMGFGPLMLTEGERSLVERVRQELKHELKQGYRDKLVDIREEILRKRRAGKLPGDTASTLKAWWQAHSKWPYPTEEDKARLVQETGLQLKQINNWFINQRKRNWHNNSASSSSDKSKRKRNTAGDGNAEPAW

SEQ ID NO: 41041 - protein, 170 aa, Zea mays
  Clone ID: LIB3061-018-D2_FLI.pep
PEPALGINFARDGMRRRDWLSLVAVHSDAWLVSVAFFFAAKLNGNDRKRLFNMINDHPSVYEIMADRKGRENNPGVDNSSKSRHSTKRSNDGKIKNSRVAVGECRYENDEDHSETLCGSCSGLYNSSEFWIGCDICERWFHGKCVRITPAKAEQIKHYKCPDCSYKKSRQ

SEQ ID NO: 41042 - protein, 142 aa, Zea mays
  Clone ID: LIB3061-020-F2_FLI.pep
GAFVQPAFYEAFGLTVIESMTCGLPTIATCHGGPAEIIVDGVSGLHIDPYHSDKAADILVNFFDKCKADPSYWDKISQGGLQRIYEKYTWKLYSERLMTLTGVYGFWKYVSNLERRETRRYIEMFYALKYRSLASQVPLSFD

SEQ ID NO: 41043 - protein, 54 aa, Zea mays
  Clone ID: 700346349_FLI.pep
IQFAFLHEKQTESKREVKKRTTILHRVLIAETVCLLLSFNSKLQGLEVELGSVN

SEQ ID NO: 41044 - protein, 164 aa, Zea mays
  Clone ID: LIB3061-025-A7_FLI.pep
PVVASHRFQDTNMRSATLLTICTLSALLLVARGSEKPSAAPPPVVAVGVAAASDLIRSGGHRYLDVRTEEEFRSGHVEDSLNVPYLFFTSQGREKNPKFIAQVAAGFDKEDNIVVGCKSGVRSELACADLMAAGFRNVKNIEGGYTAWVESGLAVKKSQAQDEL

SEQ ID NO: 41045 - protein, 362 aa, Zea mays
  Clone ID: LIB3061-028-E2_FLI.pep
NQYVTPEKASAPSATLESDPLPLVWGKQRDHPLSVEEWTSFLDREGRIMDSKALRKKVFYGGVDHALRKEVWKFLLGYHEYDSTYAEREYLAVMKRAEYEVIKSQWKSISATQAKRFTKFRERKGLIDKDVVRTDRSIPYYEGDDNQNVVVLRDILLTYSFYNFDLGYCQGMSDFLAPILYVMEDESESFWCFASLMERLGANFNRDQNGMHAQLLALSKLVELLDPSLHNYFRQNDCLNYFFCFRWVLIQFKREFSFDQIMLLWEVLWSHYLSEHFHLYLCVAILKKYRQRIIGEQMDFDTLLKFINELSGQINLDRAIQDAEALCTIAGENGASCIPPGTPPSMPVETDGGMYVQEDEVL

SEQ ID NO: 41046 - protein, 208 aa, Zea mays
  Clone ID: LIB3061-030-E1_FLI.pep
RRAGWRCSRDPRVDSSGGGAIPSPGRCPRLAVAHRNRSPAANRGLPPPRPLLPRLLAAGIRTRVTGDRGCEGRPFVKCAGDRSVEEQPEHAGGEVAKLFSDAGLVCIASLISPYRRDRESCRALLSDGSFIEVFLNMSLELCEARDPKGLYKLARAGKIKGFTGIDDPYEAPLNCEIEIKEIDGVCPSPSDMAGQVVTYLEEKGFLHE

SEQ ID NO: 41047 - protein, 160 aa, Zea mays
  Clone ID: LIB3061-036-G5_FLI.pep
LASSLALLATPVLLTATASRSSCSVSQTLLLCCCTCKSATAHTEMSTTVSRASLDQKLALAKRCSREATLAGAKAAAVATIASAIPTLASVRMLPWAKANINPTGQALIVSTVAGMAYFIAADKKILSLARRHSFEQAPEHLKNTSFQGTGRPHPAFFRP

SEQ ID NO: 41048 - protein, 91 aa, Zea mays
  Clone ID: LIB3061-037-B6_FLI.pep
QLLQQIVPALTQLAVANPAAYLQQLLPFNQLTVSNSAAYLQQRQQLLNPLAVANPLVAAFLQQQQLLPYNQFSLMNPALSWQQPIVGGAIF

SEQ ID NO: 41049 - protein, 654 aa, Zea mays
  Clone ID: 700346627_FLI.pep
QPAGPGGHRALLCRCPSWEKNRRREEKPRRLPWLALGKQAATHTRLQPRSVSSSGRKPAGDRRGADSGSTGMDAGDTMERGVRAVLRPKLLALPSGLTRSISMGTPRLPTPCTPRSPFLITPHRLASFTPDRQRSIGARSHGDMEKTQGPETQDGDLQVPLLDDKNCAGSKAPLVVLGFECLESTAFNGISTNLVMYLETVLHGSNVASASNVTLWFGTSYLTPVFGAIIADAFWGNYNTILVSLAIYLLGMILVTLSAFLPTDTVLGGSSVFGAHTVAFVGLYLVAIGSGGVRSSLLTFGAEQFDDDNAADRENKLSFFSWFYLCVDFGPIVSGLFIVWIQENISWGLGFGISTACIALALGAFVLATPMYKRSTPTAGKASVISDSETGLEAISEEAGSSQKLRAATKAEEFKTLLGLLPIWATSIIVSSAYTQMNTTFIQQGSAMNVSVLSVQVPPASMGSFEVVCVLIWVLLYGHVIVPALRGCGFSFGGDGEPSQLQRMGAGRLLMALAMAVAALVEMKRLGSAARGEEITIAWQIPQYFFLAGAEVLCYIAQLEFFYEEAPETMKSTCTSLALLTIALGSYLSSFIYAIVAAFTATADSPGWISDNLNQGHLDYFFWTMAAISALNFVVYSVFARNYKPKSQDYALMT

SEQ ID NO: 41050 - protein, 217 aa, Zea mays
  Clone ID: LIB3061-039-A5_FLI.pep
MGSEGPSPVTVHVTGFKRFHGVAENPTERIVRGLQPFMETRGLPKGLVLGSCTVLEAAGQGALGPLYELLESTVSGRERQERVILLHFGANSGSHRFALENQAVNEATFRCPDELGWKPQRTPIISSDGSILHARQTTLPVEEISKSLQQMGYDVVPSDDAGRFVCNYVYYHSLKFAEKHGIGSLFVHFPLFLAIDEEVQMQFVASLLEVLASLNFQ

SEQ ID NO: 41051 - protein, 224 aa, Zea mays
  Clone ID: LIB3061-039-D8_FLI.pep
HTEPSTQEPEAQSIGWGQGVDHAGESAAQGNGHGWQWLKDPRLDYLGYRGIFPADTIPPLVESDKEADERHYQLWRIENGVAEGSTEIPKGEAIPLEYNLAGLNAISFEKGCYIGQELIARTHHRGVIRKRLMPMKFVDGNGQELEQAVAPGSEVVDEASGKKVGAVSTALGSRGMGLLRLEEALKPGSALRAGGNRDVRVQAIRPDWWPAEWTQVLQEQRAAA

SEQ ID NO: 41052 - protein, 203 aa, Zea mays
  Clone ID: LIB3061-048-G9_FLI.pep
AQVAPELVVYSELLSTKRLYMHGVTTVKPGWLLKYASSLCTFSAPLEDPKPYYDPLNDQVYCYVSPVFSRHNWQLPLHSLPIKDGASRLQVFACALLKGDVLPCLRDAKDFLALSPSAVLGPARQRRVGDLLSRMKIGPKLVDSRAALRGVWNLDPGFLYPELKLWYQDRFHDQFDLVWEQMHQQVLLEGRKLFPKRSKKVKG

SEQ ID NO: 41053 - protein, 196 aa, Zea mays
  Clone ID: LIB3061-050-B5_FLI.pep
QTLVAMGEITEQMRQKSKEFPETKPLDYHRYLVVSLGTGLPEQDIKFDACRVAKWGIFGWLGRRENTVPLLQMFMHASSDMTDSYVADLFKAIGCSDQLLLRVQDRNIPIAAVAADLSTEKNLRGLVKIAENLLHKPLGEDDYKTDDRVETTPRDGRAILTYAGMLARFAKLLSDERKLRLQNMGHCMPVIANREA

SEQ ID NO: 41054 - protein, 581 aa, Zea mays
  Clone ID: LIB3061-052-F9_FLI.pep
NSRCGARGAHHGAAGSVTNPHPHLRPPTGTPLACSTTLMRSRPALAAHLRRLLLLSPSAHLIIIRRAMASAAAAQAQPGGAPLATAEYEEVLGRLSSLITQKVRANTANRGNQWDLMEHYVKILELEESIARMKVIHVAGTKGKGSTCTFTESILRSCGFHTGLFTSPHLMDVRERFQLDGVNISEEKFLKYFWWCWNKLKEKTDDDIPMPAYFRFLALLVFKIFSAEQVDVAVLEVGLGGKFDATNVVKAPVVCGISSLGYDHMEILGNTLGEIAGEKAGIFKKGVPAYTAPQPEEAMTALKQRASELGISLQVVDPLEPHHLKYQHLGLHGEHQYINAGLAVALASTWLEKQGHKDTLPLNRTDPLPDHFIRGLSSASLQGRAQIVPDSQVNSEEKDKDCSLVFYLDGAHSPESMEVCGKWFSHVTKDDTRLPSSVEQSHTSRSQKILLFNCMSVRDPMRLLPCLLDASTQNGVHFDLALFVPNQSQHTKLGSNTSAPAEPEQIDLSWQLSLQTVWEKLLQDKGINTTKSSDTSKVFESLPVAIEWLRRNARENQSTSFQVLVTGSLHLVGDVLRIIKK

SEQ ID NO: 41055 - protein, 134 aa, Zea mays
  Clone ID: 700550128_FLI.pep
TPPPPPLFLEMGGKCPHRKVKKRRLSHKTARRGKFLLKADDAVYDELVKLADQGKDAEAKELPVDEDLPGLGQFYCLHCDRYFASESVKDDHYRSKRHKKRVKVMSGPAPHTQLDAELAAGMGKPDNGLKLMSM

SEQ ID NO: 41056 - protein, 229 aa, Zea mays
  Clone ID: LIB3061-052-H7_FLI.pep
HVQQQQQQPQHHHQQQQQQHQQQHQCEGQQQHHQQSQGHVQQHEQSHEQHQGQSHEQQHQQQFQGHDKQQQPQQPQQYQQGQEKSQQQQCHCQEQQQTTRCSYNYYSSSSNLKNCHEFLRQQCSPLVMPFLQSRLIQPSSCQVLQQQCCHDLRQIEPQYIHQAIYNMVQSIIQEEQQQQPCELCGSQQATQSAVAILTAAQYLPSMCGLYHSYYQNNPCSSNDISGVCN

SEQ ID NO: 41057 - protein, 230 aa, Zea mays
  Clone ID: 700551024_FLI.pep
SRSFRSEPGLGFRVLPSSSSAMSGREVREYTNLSDPKDRKFGKGKDKIDDEDITFQRMVAKMQEVAGDRGGYLHGRGALDSDDLLYLKEQMEAEEDAERLLRHTEKRAFAAFKKAAILADSTPAVPVALRVEPKPKSDIRQQDLLKNIVGIKPKRPKVSSPSQPTDSNKPKHTEEDPVSELSSSRNPLGPSHGAVNPDHTAPRLDEPTEVKQQNRAGSLLGLAYESSDEE

SEQ ID NO: 41058 - protein, 209 aa, Zea mays
  Clone ID: LIB3061-056-H5_FLI.pep
VSLAISSSTPDWRTRHHEGADRCPCSPGARCERRLQYKRRLWLPDTTVSSTASVLYAASVLSAAAAAAAAMAIPHSTTAAKPVPAVRILRRRQRRQPVPGPVRRVPEAPVQPGGDALRLATVPGAAAAVLPPDQAGGAAAPVPGDIRCGPAVLPAAAAAGRARGADGGPGSAAADGDVRSAAAAARSLPLQRSCRRCLLLRKLCTVVIM

SEQ ID NO: 41059 - protein, 219 aa, Zea mays
  Clone ID: 700551141_FLI.pep
SIAAMSKLHSELLKDCISQIVQDAKKNRKFTETVELQISLKNYDPQKDKRFSGSVKLPHIPRPKMKVCMLGDAQHVEEAEKMGLDYMDVEALKKMNKNKKLVKKLAKKYHAFLASETIIKQIPRLLGPGLNKAGKFPTLVTHQESLESKVNETKATVKFQLKKVLCMGVAVGNLSMEEKQIQQNIQMSINFLVSLLKKNWQNVRCLYIKSTMGKPFRIF

SEQ ID NO: 41060 - protein, 146 aa, Zea mays
  Clone ID: LIB3062-002-D9_FLI.pep
GQNNHSPNSKMSKWDATIPTYTTVTKGRFLLLSSHSAPHVPGSYIRTKSLTSTNNRNPDPALSNYYCIANTPINHHNLQDYIDLLVHPPEYNLDQAAAKSNCTTKTVPPKICDASLRTTQQHRKAEGTQNTDGPSLFTWPSKPQRT

SEQ ID NO: 41061 - protein, 193 aa, Zea mays
  Clone ID: LIB3062-011-E12_FLI.pep
CIYLTGDRTIDMYSRMEPRAIRFCNSVDQKKKKKLQVVMLDDLRRLPLLAGVDDDGHQHGRHPRAQKVVLAELVVHASRAAEVHVLEPHPHQPEPEPAILIDGGELGRRGAVDALLPLLRRRGVHPAHLLLERGVEVLLDGPDALAQLLGAAEPAGVLPLHGLGRGQEAEGCGRRRVGAVGAATEALHGRAAS

SEQ ID NO: 41062 - protein, 423 aa, Zea mays
  Clone ID: LIB3062-011-E8_FLI.pep
QNEIAEALYKLVSDKHLWSQCRQNGLKNIHKFSWPEHCQNYLARVVTLKPRHPRWQKNDVAAEISEADSPEDSLRDIHDISLNLKLSLDSEKSGSKEGNSNALRRHFEDAAQKLSGVNDIKKDVPGENGKWSSLRRRKHIIVIAVDSVQDADFVQVIKNIFEASRNERSSGAVGFVLSTARAISELHTLLISGGIEASDFDAFICNSGSDLCYPSSSSEDMLNPAELPFMIDLDYHSQIEYRWGGEGLRKTLIRWAAEKNKESGQKIFIEDEECSSTYCISFKVSNTAAAPPVKEIRRTMRIQALRCHVLYSHDGSKLNVIPVLASRSQALRYLYIRWGVELSNITVIVGECGDTDYEGLLGGVHKTIILKGSFNTAPNQVHANRSYSSQDVVSFDKQGIASIEGYGPDNLKSALRQFGILKD

SEQ ID NO: 41063 - protein, 96 aa, Zea mays
  Clone ID: 700551521_FLI.pep
RSLGSSTRRCHVSNQTSSTVKPGGRDCFNLFAFSASKTQSVYKYLEQRTLNLTTSLLLLIFTERASFLLAVRRKSLISWICFGIFSRDLGIAELFF

SEQ ID NO: 41064 - protein, 213 aa, Zea mays
  Clone ID: LIB3062-012-C8_FLI.pep
RLLRLRMASRSCSRCAALAPHAALPLSSLLAPSPSAARPRSAPLSCAARPCRGHAAASALHGAAGRRPPSVAAMSSSTPPPGSVQKSEEEWEAILTPEQFNILRLKGTEYPGTGEYDKFFEEGIYKCAGCGTPLYKSSTKFNSGCGWPAFYEGLPGAIRQTSDPDGRRTEITCTACGGHLGHIFKGEGFKTPTNERHCVNSISLKFNPSPEEA

SEQ ID NO: 41065 - protein, 187 aa, Zea mays
  Clone ID: LIB3062-013-F8_FLI.pep
ARLIRFRDPCLLSAAMMLRAAGRRLLGVGGGDPAPAVAAAVAASRSRGYHERVVDHYNNPRNVGSLDKDDTDVGTGIVGAPACGDVMKLQIRVDEGSGRIVDARFKTFGCGSAIASSSVASEWVKGKQVEEVVAIKNTEIAKHLSLPPVKLHCSMLAEDAIKAAVKDYEAKKGKKMAKAEEQDTPCP

SEQ ID NO: 41066 - protein, 122 aa, Zea mays
  Clone ID: 700551565_FLI.pep
LSFCSIQMLRSLSAQNGVDQWLHLSKVDDCIHHPATNYSCSHQGQMEQVCGGPAVAAEEREEGCGDAGEDEDERRRPEPHGRLRRPRRAPPAAAATRSLSLDRSVREGETRQKLLLADSHVT

SEQ ID NO: 41067 - protein, 470 aa, Zea mays
  Clone ID: LIB3062-013-G4_FLI.pep
LYKKKMQNNLKSYQPITYCIFEPYVCFAINPRCYVPNLLQFHSSEKNGERLLSLALVASSSLIPPRKRGAFPRPRRQSSIEGEPGAGGGATAAAAAAVEEVVGDAVARGDGRRGAHGVLGDHVVVEELERDVGVDGVSGALADVVEDAAGAEHDGEVLQLHLGALLEAAPAGLEALEGVPGHGAHAVHPLVEHVLRPRHVVVRVGHQQPVHERVPGAAHQALPLQQARGASLQVERGAVEHVGVGHGARPADADVREGTARVHHALHRDGVGRLLVALRVAAVVVGGDVGLGRDDGDVRGVHGSHDARDPRRGLEPGGLGRGGVGRLGPLHGLGHEHGLDGGADLEDELVAGGDAEAEALGHEAERLPGGEAPDADGHALADGDGGAQHGVLLGDGGAQLLAHGLEGGPGHAEGAAELVLGARGAAHPVPPLVVALLDPEAAAAAPASATAAGCGCGCGCGRVLVVAVIA

SEQ ID NO: 41068 - protein, 48 aa, Zea mays
  Clone ID: LIB3062-019-B12_FLI.pep
SYLPPTYLTTRCAVQQQHHKVSDCKNVAVGKESNCASSVLAYFKVNIC

SEQ ID NO: 41069 - protein, 472 aa, Zea mays
  Clone ID: 700348341_FLI.pep
RSLSLPLPPLPRRPAMAGLLHLQSTLLPSASALRRRAGAPVPCSSRRRCRVEAKIREIFMPALSSTMTEGKIVSWTAAEGDRLSKGDPVVVVESDKADMDVETFHDGFLAAVLVPAGESAPVGSAIALLAESEEEIPVAQSQAASFSSSSPSPPPPQETAQEASPPPPPPPPSAPVAVSAPALPSPATQGGGRVVASPYAKKLAKDLGVDLFSVTGSGPGGRIVAKDVEAALAAPKKAAPVTAARPDVPLGSTVPFTSMQGAVSKNMVESLAVPTFRVGYTITTDALDQLYKKIKSKGVTMTTLLAKATAMALVQHPVVNCSCRDGKSFTYNKSINIAVAVAIDGGLITPVLQDADKLDIYSLSRKWKELVDKARAKQLQPHEYNSGTFTLSNLGMFGVDRFDAILPPGTGAIMAVGASEPTVVGTKDGRIGIKSQMQVNVTADHRVIYGADLAAFLQTLAKIIEDPKDLTF

SEQ ID NO: 41070 - protein, 196 aa, Zea mays
  Clone ID: LIB3062-019-F1_FLI.pep
LLHPRLQLQTEPPRQSPSAEPPRNLFSSSKVTALYSIEMAMGLINANPIIHEKKERRIRQAPETTDENAAESIDQLEIFDHIRDIKDPEHPYSLEQLNVVTEDSIELNDESNHVRVIFTPTVEHCSMATIIGLCIRVKLVRSLPPYYKVDIRVAPGSHATEAAVNKQLNDKERVAAALENPNLLDMVEECLSPTFD

SEQ ID NO: 41071 - protein, 313 aa, Zea mays
  Clone ID: LIB3062-019-G8_FLI.pep
FGVICQPLTQLLKKGVHFIWTSEHDTAFSTLKQALTSAPVLSLPDFASPFTVETDASAVGIGAVLMQHGHPVAFLSKALGPKTRGLSTYEKEYMAIIVAVQQWRSYLQHGEFTILTDHKSLTQLNEQRLHTPWQHKVFTKLLGLNYRIQYRSGSDNRAADALSRHSFAECQAVSVIVPQWLVAVQDSYHQDKQALSLISKLAVDPAAVPNFTLHDGLLRYKERIWVGEDTHLQHRIVEALHSSPLGGHSGIPVTYSRVKKLFAWTKLKPFVQKFVQECQVCLQAKPDRAAYPGLLQPLPVCNTSNPSIKIIHY

SEQ ID NO: 41072 - protein, 156 aa, Zea mays
  Clone ID: LIB3062-020-C12_FLI.pep
LAKAISMATPARIELDKLSVEQLKGLKEQTDLEVNLLQDSLTKIRTAATRLENASAALQDLSLRPQGKKMLVPLTASLYVPGSLDDAEKVLVDVGTGYFIEKTMAQGKEYCERKINLLKSNFDELVEVATKKKAIADDMGLLLQAKLRQASPGPSS

SEQ ID NO: 41073 - protein, 302 aa, Zea mays
  Clone ID: LIB3062-021-C11_FLI.pep
VCGNDKLAEFCIPHPKDMVSEFIRSYEIGADRTASIETLMNHLQETALNHVKTAGLLGDGFGATPEMSKRNLIWVVSKIQLLVEKYPLWEDTVQVDTWVAAAGKNGMRRDWHVLDCKSGCTILRATSVWVMMNKNTRRLSKMPDEVRAEIGPYFNARAAITDEQSEKLAKPGSTAGGDAMKQFMRKGLTPRWWGDLDVNQHVNNVKYIGWILESAPIAILEKHELASMTLDYRKECGRDSVLQSLTTVAGECVDGDTDSTIQCDHLLQLETGADIVKAHTEWRPKRAHGEGTPMGGFPAESA

SEQ ID NO: 41074 - protein, 121 aa, Zea mays
  Clone ID: LIB3062-023-E4_FLI.pep
NHDPVAQVLESITIRIVRPKSHHRREGIHQGNDASESSRPAKLLDKVWTLFRKRSTLDEPRGINSCRSPPLSSSSPTYVSCSRAASGASSSSAQQYLLASRRRCGRTWGIFFISSTVFARF

SEQ ID NO: 41075 - protein, 280 aa, Zea mays
  Clone ID: LIB3062-026-A1_FLI.pep
PRGAGPCPGPGPGARRVRAELGRARVLRCHRAVRRPAQAAVRRGVHAPRHGLRRVPRHRGHRGRPRAPGVLHPARRRQPHPVRGRARGSHPPPPGSHRAEVAGGREAGAVRAGPGGPAVGGDADVPRERAAGGAGGGVDEGRPGVQRVLRDGRRRQGAGPGRHRRRQGEGWRGPPRGERGAPPAAAAAVPGRLRARQRRRRWPRAGIPRQPREEEPVQPRPHQIVLVKAGRVLGSRPASWRGRTDTRHCSVYVLYCTYRAPTSVVRSSDRHRRRGVEQDG

SEQ ID NO: 41076 - protein, 111 aa, Zea mays
  Clone ID: LIB3062-026-B1_FLI.pep
SLSNLDQDLPNYAQHTVPIFSLPQEWLWCESWCGNATKARAKTIDLCNNPMTKEPKLQGARRIVPEWTGLDSEARQFTARILGDDVEPADATPPPSEAPKPEDDQDVKDEL

SEQ ID NO: 41077 - protein, 246 aa, Zea mays
  Clone ID: 700349132_FLI.pep
PSGNSPYPGIRMGSKASFCVTLLLLLAAAWGPADDAAELPDHRAITLKEQVSSTEIPVRLKSGSPLCSACEDFTGKAVSYISEKQTQDKVMGFLHDACSQSFSFEQKCDELMDSYATLLFAKITEIKPEAFCKRYGLCRGTALFSGVTSDSTCVFCHHLLDEVMSKLKDPDAEFEIIQILIKECNKIEGHVQQCKRLVLQYIPLILVNGEKFLEKNDVCALVQACPATHKRTFSSALKEALLLSDA

SEQ ID NO: 41078 - protein, 224 aa, Zea mays
  Clone ID: LIB3062-026-F6_FLI.pep
QKAFAEWILYTSSGISSALYHSCDVGTWCILSFRVLQFLDFWLSFMAVVGTFIYMATIDEVSKRAMHTAVFILTALLAATGATRSANIGIVIAIGSVGLLMGWLLEFSTARRFICWPSRINLNMPQSWPNLRTLFQITLEMVNKRFRWIFLLLGFMTLSFAAISWKLESNNNYWIWHSIWHITIYTSSFFFLCSMRVSTRNSSPESNYELTRQDSLPRSEPRET

SEQ ID NO: 41079 - protein, 227 aa, Zea mays
  Clone ID: 700349145_FLI.pep
PRRRLPWEGEEEEEAEAAEMAPVSALAKYKLVFLGDQSVGKTSIITRFMYDKFDNTYQATIGIDFLSKTMYLEDRTVRLQLWDTAGQERFRSLIPSYIRDSSVAVIVFDVASRQSFLNTSKWIEEVRTERGSDVIIVLVGNKTDLVDKRQVSIEEGEGKAKDLGVMFIETSAKAGFNIKALFRKIAAALPGMETLSSAKQEDMVDVNLRSGNANSSQSQAQAGGCSC

SEQ ID NO: 41080 - protein, 107 aa, Zea mays
  Clone ID: LIB3062-031-C2_FLI.pep
LQRRRTDSLPVGAWEVYSAGTIRRTLFGMIVLLHLALAFGSSAPGMILLLQMQSFLRTQSTKQVWTASADSRMHLPAQAQFLEQMHSLLGTRGSITVSVQMLLGLGC

SEQ ID NO: 41081 - protein, 448 aa, Zea mays
  Clone ID: 700349409_FLI.pep
AMGKEKSHINIVVIGHVDSGKSTTTGHLIYKLGGIDKRVIERFEKEAAEMNKRSFKYAWVLDKLKAERERGITIDIALWKFETTKYYCTVIDAPGHRDFIKNMITGTSQADCAVLIIDSTTGGFEAGISKDGQTREHALLAFTLGVKQMICCCNKMDATTPKYSKARYDEIVKEVSSYLKKVGYNPDKIAFVPISGFEGDNMIERSTNLDWYKGPTLLEALDQITEPKRPSDKPLRLPLQDVYKIGGIGTVPVGRVETGVIKPGMVVTFGPTGLTTEVKSVEMHHEALQEALPGDNVGFNVKNVAVKDLKRGYVASNSKDDPAKEAASFTSQVIIMNHPGQIGNGYAPVLDCHTSHIAVKFAELITKIDRRSGKELEKEPKFLKNGDAGMVKMIPTKPMVVETFSQYPPLGRFAVRDMRQTVAVGVIKSVEKKDPTGAKVTKAAIKKK

SEQ ID NO: 41082 - protein, 260 aa, Zea mays
  Clone ID: LIB3062-032-C6_FLI.pep
IGLDLDLESLEWCLENNLSKIGADGYSRMLLFHGNVLQPMESRLVKQKFTNLVHGLDLNSNNGTGSNSCKQMGLADSKCLANLTMSEADFPARDIICAFNYSCCCLHSRKDLVLYFRHVCSVLSERGGIFVMDVYGGISSERKLRLQRKFPSFTYFWEQDEFDIISRQTRISLHFQGGKKQMLRYAFTYHWRLWSIPEIKDCLEEAGFKWVHVWMREMPNTQSGGNAKEYNANRDVKYEESQHFNQGDAWNAYVVGVANV

SEQ ID NO: 41083 - protein, 408 aa, Zea mays
  Clone ID: 700349988_FLI.pep
IPTRARHETMRPLCSNPPLHSKSHGGSHRSLARLRFPCSLGMELITNVTEYEKLAKERLPKMVYDYYASGAEDQWTLKENREAFSRILFRPRVLIDVSRIDMATNILGFSISMPIMIAPSAMQKMAHPDGELATARAAASAGTIMTLSSWSTSSVEEVNSVGPGIRFFQLYVYKDRNIVRQLVKRAEMAGFKAIALTVDTPILGRREADIKNRFALPPHLVLKNFQALDLGTMDKTNDSGLASYVAGQVDRTLSWKDVKWLQTITSLPILVKGIVTAEDTRLAIEYGAAGIIVSNHGARQLDYVPATISCLEEVVREAKGRLPVFLDGGVRRGTDVFKALALGASGVFIGRPVLFSLAVDGEAGVRKVLQMLRDELELTMALSGCTSLREITRAHVITDSDRIGRSRL

SEQ ID NO: 41084 - protein, 768 aa, Zea mays
  Clone ID: LIB3062-032-G2_FLI.pep
TITGISDMDPLRWKNSQWRNIQVAWDEAAPSERRTRVSLWEVEPVIAPFFIYPSPLFTAKRPRQPGVTDDDSSEMDNLFKRTMPWFGEEVGKRDLSTQNGLVPGLSLVQWMNMQHNPSLANTVMQPELLNSLAGKPVQTLAAADLSRQISFQPQFLQQNNIQFNTSLLPPQNQQTEQLANVIATPNQLGSVIVPQKAVQNCSSEQKQNLVTQPLQVSQPMVSVAQPQLVHTQLQQPQVVLQAQPQQPQVIVQAQLQQQQPLVQNHTTIQGGLQQIQLLQQQQVQQSVQEQQQIKIQPFQVPNDANMVTQLSDQMKIQLLKALQPQQPLVMEQQKMIFDLQQQAVNSQSTAQQCSQVATQVVGLHSSSTNQYPTQQKTQPLKTFQDFPGNAVSIVKPEIVTSVGARSLHVPGGVQSMKMDEVPSSSTSPSTNNNPVILRSTPSSSKNQCLPTAAKAPQSSVVLGSTLEQGMKPCDSTQHPMVIPKLAEERPATGQDYMNNNQLDYLDTSSSATSVCLSQADGSLQQSFPPSSFNQHQPLREAVPDSEFEVTDAGNNFLFGANIDGHMEPLNEDDLLGTAFEADKYMEQMPGNGISNYISSKDSQQELSSSMISHPFGVADIAFNSIDSSINDIQFLNRNSRAPGPAQQRMRTYTKVHKRGAVGRSIDINRYSGYDELKHDVARMFGIEGQLSDQNRVGWKLVYEDHEKDVLLVGDDPWEDFVNCVRCIRILSPQEERQMRLASDYGDSFVGNQACSSSDGGRPWRVTGD

SEQ ID NO: 41085 - protein, 214 aa, Zea mays
  Clone ID: LIB3062-034-A8_FLI.pep
APPFIYIDQVKNSLTGRIEVSAQNVWIGKGGAYTGEISAEQLVDIGCQWVILGHSERRHIIGENDEFIGKKAAYALSQNVKVIACIGELLEEREAGKTFDVCFRQMKAFADSISNWADVVIAYEPVWAIGTGKVATPEQAQEVHAAVRNWLKTNISPDVASSTRIIYGGSVNAANCAELAKKEDIDGFLVGGASLKGPDFATIINSVTAKKVAA

SEQ ID NO: 41086 - protein, 244 aa, Zea mays
  Clone ID: LIB3062-035-B2_FLI.pep
AAAGFSFLRLRGLRALLRALRSTSDADADAGLFRDSQSIRDLQVIPVLFEHSLRKATGDAVLTVAQVLGMEPAAARLRNPATDSEVVLALRVLEGCCLLCPACAAAAHRYNAVKVVLNILMTRGILEQRACLDTLLALLVNCSGNLTDFKEQDGLNKIAVIVKDANRDDHVRLKCSEFLLLYSGNAKEKCGADSESNMREDLAKVFGEKCASFISSMNLFSSTLESQMRQSELSFLAEHVLDYM

SEQ ID NO: 41087 - protein, 130 aa, Zea mays
  Clone ID: LIB3062-035-C6_FLI.pep
IDKITRPKPGWAHTSVPSAAAAAAVAATTTLAPTAVAATASVAAATTLAPTAVAATAAITAVTAPATIAAAAATAAVATAATATATGLGLVNGDVTAVELLAVHVLDSVEHGVLGGEGNEAEAARPPRLP

SEQ ID NO: 41088 - protein, 210 aa, Zea mays
  Clone ID: 700350790_FLI.pep
WVLTPPPLSLSSPFFRRKEKRKTHTLFPSSLAVSHPAATMSGLYNQGFSPARTLSPQIRSNPDADSQYLAELLAEHQKLGPFMQVLPICSRLLNQEIMRVSSMVHDHGFSDLDRRRFRSPSPMSSPIVRPNLHGNGFGPWNGMHQERLGFPPPGTSMDWQGAPPSPGSYIVKKIMRLEVPVDSYPNVLPSKTCAIYPSVLNDILVLFFFL

SEQ ID NO: 41089 - protein, 124 aa, Zea mays
  Clone ID: LIB3062-036-G2_FLI.pep
AAAADLAAEAIEGAALALKGVDDVHGGDGLTARVLGVGDGVADDVLQEDLEHAAGLLVDEPRDALHAAPPRQPPDRRLRDPLDVVAQHLPVTLRAALAQALAALAAPRHLSRGDERIGEFLLAG

SEQ ID NO: 41090 - protein, 217 aa, Zea mays
  Clone ID: LIB3062-043-H2_FLI.pep
VELTEGGTFWLSESPSVPGSISWGAKAPCIATWATFQLKRLEPPGFSFQIVNTNLDEVSPRARRRSALLTWQHIASLPPNLPVIYCGGFNTQKESMTGRFLLGRSREHGVVGDMRDAWPNARVRKNVSLIHTYHGFKGEKQGALEFLKLIFRALCLCWDRQTQDLHIDWILFRGRPLVPALCEVINDNIDGVYPSSHFPIFAEFLLPRSVRLAETPS

SEQ ID NO: 41091 - protein, 437 aa, Zea mays
  Clone ID: LIB3062-045-F12_FLI.pep
AVVLAHLVRPRELRLPSLWTAPASSHLPPPVHSYKAWHFAVRTRMLFAPSRLPLPRLPTRRLRLAPGSPMASMLAILRPSAPAPLAGRRARAAAPATARVALSTRSRYSSARVSLGSEVAVGADALFADYKPTTAFLFPGQGAQTVGMGAEAQSVPAATKLFNQANEILGYDLLDLCTNGPKEKLDSTMISQPAIYVTSLAAVEVLRARDGGQDVINSVDVTCGLSLGEYTALAFAGAFSFEDGLKLVKLRGEAMQDASDAANSAMVSVIGLDSEKVQELCDAANDEVDENDRVQIANFLCPGNYAVSGGVKGIEVVEAKAKSFKARMTVRLAVAGAFHTSFMQPAVSRLESALAATEIRTPRIPVISNVDAQPHSDPNTIKQILAQQVTSPVQWETTVKNLMGKGLEKSYELGPGKVIAGILKRINKGTSIENIGA

SEQ ID NO: 41092 - protein, 249 aa, Zea mays
  Clone ID: LIB3062-059-E4_FLI.pep
EMMSNFQATTCKPHSRIIVKKPIASLGSTCQYPLYSHALGFHTLQEKVYPRLVLISASHKRLTSVCALSGKGSSGTADDPLMESLKKAVADAKKPRSIQDLLKEQVAKLREQASGGGRGNGNRRGGSGGSGGPDDESFKETLDEVVQVILATVAFILVYIHIIRGEELYRLARDYTRYLVTGKRTARLKRAMQRWRNFSESFMQKAGSEDDQYERPAVSKPAWWQQPQKFVHFVEDLCRGNWRPHAQES

SEQ ID NO: 41093 - protein, 180 aa, Zea mays
  Clone ID: 700351676_FLI.pep
SSLSTCTSLARPSLAAAMGRGKFKGKPTGRRNFSTPEEIAAGTSGRPRTFKKKEEEEEEEEEREESEEEESEDESDDKPKHKGTEGIIQIENPNLVKVKNIKAKEVDLGKTTELSRREREELEKQKAHERYMKLQEQGKTEQARKDLERLALIRQQRADAAKKRDEEKAAKEQRKSEARK

SEQ ID NO: 41094 - protein, 349 aa, Glycine max
  unsure (1)..(349): unsure at all Xaa locations
  Clone ID: LIB3065-022-H5_FLI.pep
PAIITMSSPNSVPQSHAPLLLPRPDAAARLPILALLLGRRGHSAVVRETAARELEERRADWTYSKPVVALDMTWNMAFVLVSAVMLACTVKENPNTPIRWWICGYALQCLVHVALVWLEYRRRNDAPRDEESAASLQYDDVNDSDEDDVGTSGSSSSSGFTKRCASLNTMISLLWWMVGFYWVVSGGDILLQDAPRLYWLSVVFLAFDVFFAIFCVVLACLIGIALCCCLPCIIAILYAVAGQEGASESDLSILPKYRFQLLSNEETPGEGGGSMIPMETSXGYSVNERTLSPEDAECCICISSYEDGAELHVLPCNHHFHSTCIVKWLKMNATCPLCKYNILKGNEQV

SEQ ID NO: 41095 - protein, 216 aa, Zea mays
  Clone ID: LIB3066-003-A11_FLI.pep
FLPGSTSRVLITSADSRIRVVDGLNLVHKYKGFRNTNSQISACLAANGRYVISASEDSHVYIWRNDGSLEKGRSKANVTVTNSYEHFHCQDVTVAVAPPSNGSAVVSRSNSTKHDERDSVLEHPMLHAVPEKLQDSSDLQLQSGNILSTSSNHSGDRATWPEELMTPTKQSPQSSASLLSGADQAPSWSAWGTVIVTAGRGGQIRAFQNFGFPARV

SEQ ID NO: 41096 - protein, 161 aa, Zea mays
  Clone ID: LIB3066-003-B11_FLI.pep
QIAADQQLYAMVLPGFWMDVGQPRDYITGLRLYLDSLRKKSAARLAAGAHVVGNVLVHESAKIGEGCLIGPDVAIGPGCVVEDGVRLSRCTVMRGVRIKKHACISNSIIGWHSTVGQWARIENMTILGEDVHVCDEVYSNGGVVLPHKEIKSSILKPEIVM

SEQ ID NO: 41097 - protein, 134 aa, Zea mays
  Clone ID: LIB3066-003-B6_FLI.pep
SLPRQRFNHPKYFSNDVMANSLPIHQSDPVSTMNDSFSNYLASAPPAEQKNLLGNRLYPLVERHQPELASKITGMLLELDNSEVVTLLCSSEMLSVKVDECVQLLQATKPKAEDHEALHPGFMLEPRPPTVNAS

SEQ ID NO: 41098 - protein, 178 aa, Zea mays
  Clone ID: LIB3066-006-B8_FLI.pep
MSVSSSSSPPPILAAAIGGGGGGTHTHIIGSIAEKNIVHGVVRSIRLQLPPAEQAGAVLDEPAVDARHVEHVPAVRQAPHLLPDLEILEADGAAGEVADGVAPVLLGDPRLGELVDGRPRHAVGGLHLEQVRRLPERRRVHRVHLAADHPLHRRVDLLAHQPARQEAVDHVQHVEDAP

SEQ ID NO: 41099 - protein, 277 aa, Zea mays
  Clone ID: LIB3066-006-D8_FLI.pep
NHLGRSAHGPRLKKGSRWEKQNTRRRPQLPHSTFRVSDSGDSTTSNPCSERTPTIAMSRRGDWVYENNGGTCVAIAGADYCVVAADTRLSVGYSILTRDHSKICDLADKCVLASSGFQGDIKALQKNLAARELLYQHQHNKRMSCPAMAQLLSNTLYYKRFFPYYAFNVLGGLDSEGKGCVFTYDAVGSYERTGYSAQGTGSTLIMPVLDNQLKSPSPLLLPVRDAVTPLSESEAIDLVKDVFASATERDIYTGDKLEIVVINKAGTMREYIDLRKD

SEQ ID NO: 41100 - protein, 219 aa, Zea mays
  Clone ID: LIB3066-006-E11_FLI.pep
DRMRPEDVGLSPDLSFFRARDATRGGGTPTITHTTIYKCPNFSMVILFLPRNAVIPLHNHPGMTVFSKLLLGSMHVKSYDWLNTADPDPSSATSTTSTSSSSSDGPCLRLAELVVDDVFTAPCDTSVLYPTAGGNMHRFTAMAPCAILDVLGPPYSIEEDRDCTYYAELPYANHSLVAAGDDVERGQGQGHLAWLEEIDMPRELKMCSVHYGGPPISDE

SEQ ID NO: 41101 - protein, 261 aa, Zea mays
  Clone ID: LIB3066-006-E3_FLI.pep
MKGVFATRVSGSADLYQVNNRKPYHSVNFVIAHDGFTLCDLVSYNSKHNDANGEGGRDGCNDNYSWNCGIEGETNDLNVLSLRSRQMKNFHVALMISQGTPMMLMGDEYGHTRYGNNNSYGHDTHINNFQWGQLEERKDGHFRFFSEMIKFRHNHPILRRDRFLNKNDVTWHENRWENQDSKFLAFTIHDHSSGGDIYLAFNAHEYFVDAVIPPPPHHKSWSRVVDTNLESPKDIVPEGVPFTGSGYRIAPYSSILLKAKP

SEQ ID NO: 41102 - protein, 97 aa, Zea mays
  Clone ID: LIB3066-010-B6_FLI.pep
TRNLDIKLNKRGRVEMEGGQYCRRGTLVIEAEIFEVAPSVRVVEMRKIGGDSPEFREFYRQELKPSLGDIVWSWQGSDSPPVPLLPPAPRQATNQRS

SEQ ID NO: 41103 - protein, 145 aa, Zea mays
  Clone ID: LIB3066-014-A12_FLI.pep
LCHYKHMDVRCSFKPQGLTPRRKPAAEVSICSRGGDGRLHGLEPGLLGLELVAHVQVHVVLEHEARVGGLGAVLLGGADKRGGREDDGVGARVVEGRDGHAVAVGAREHAVHDALVPPVGDDLQLVADVGDDGVAHGRHVHPLPA

SEQ ID NO: 41104 - protein, 337 aa, Zea mays
  Clone ID: LIB3066-017-A5_FLI.pep
AWMYLAVPVVFYASERSIRKIREQSYRVSIIKAAIYPGNVLSLYMTKPPGFKYKSGMYMFVKCPDVSPFEWHPFSITSAPGDDYLSVHIRTLGDWTSELRNLFGKACEAEVTSKKATLARLETTVVAHGLAEDTRFPKVFIDGPYGAPAQNYRKYDILLLIGLGIGATPFISILKDLLNNIKSNEEMHDAELGCSLKTNGPGRAYFYWVTREQGSFEWFKGVMNDVAESDRDDVIEMHNYLTSVYEEGDARSALIAMVQSLQHAKNGVDIVSGSKIRTHFARPNWRKVFSDLANAHKNSRIGVFYCGSPTLTKTLRDLSIEFSSTTTTRFHFHKENF

SEQ ID NO: 41105 - protein, 430 aa, Zea mays
  Clone ID: LIB3066-017-A6_FLI.pep
HMHSLRDQNGVPGSINLPPHSALLSCRSFNSTPLSDGAAGARRPQPAQHPPGLPGRDRAERPDAGGRAPDQPRPRARPVHERLVVRVLLQPHPQGRHPRRRALQPLHAPVVAVVARRAGDGEAPEPFLLAVCLLPPCLGKQRLDATGGGAAVSPADGQRRRACVLEEEHLHDHPERQQLVPGGVHRRRLGELPAVENPAQLLPRTLVYLRVHSEVSVDGSVQMVVLRAGAVRHGLGNGDQLVQGQVGILGDLHQESIDQPPDPDHRAVRRRGGRGPTRSLVLRALGGPRPPVSARVRRACLRDPRRRRLPQRQLFKDGRHGVHVVQRLARARRRYQEVAHAGVFQLQRHPPRELCLGRGRGAQDAGCLEKLEKEAAGDGVPLGGEQAHHLFDKKPAVPLGCADVGLLQHQVPALGNGRQPPARVGLERVA

SEQ ID NO: 41106 - protein, 334 aa, Zea mays
  Clone ID: LIB3066-019-A5_FLI.pep
LHRARRGRGRTCRFGMSCRFNHPPDRNLAIASARMKGEYPERAGQPECQYYLKTGTCKFGPTCKFHHPREKAGIAGRVQLNTSGYPLRPNEKECAYYLKTGHCKYANTCKFHHPELFNVVPSSRGSPIYTSVHSSASAGPQSYTGTMPSWAFPRASFIPSPRWQSPSNYAPMIVPQGLVQMQSWNSYTGQLQSPGAQQTYGSSQQGEASTGNQGMLSPYRPSSFPVPQYALQRENVFPERPDEPECQYYMKTGDCKFGAVCKFHHPRGEELCKFYSRYGICKFGANCKFDHPTVVAPMVYAYGFSASASPASASTNVPMARRLLGSPPGSGYTS

SEQ ID NO: 41107 - protein, 36 aa, Zea mays
  Clone ID: LIB3066-020-A11_FLI.pep
RRLMCYHHYMCNFTVLPGDCYVELYVVSNSRVGSES

SEQ ID NO: 41108 - protein, 156 aa, Zea mays
  Clone ID: 700352242_FLI.pep
QANHRSSGARAGGAMADDDYNEIDMGYEDEPPEPEIEEGAEEELENNEDAPDDVIGGEGEDKEQEKTKRERKTTKYMTKYERARILGTRALQISMNAPVMVELEGETDPLEIAMKELRARKIPFTIRRYLPDGSYEDWGVDELIVEDSWKRQVGGD

SEQ ID NO: 41109 - protein, 197 aa, Zea mays
  Clone ID: LIB3066-024-A4_FLI.pep
CSECLTHTLVDQPPVVLKPSEHQSEQEALEIAITKLLLKSYYNIVRKNVEDLIPKAVMHFLVCDSYPIVLSVNHTKRALHNYLITKLYRDDLLEDLLKEPDEITIKRKQIRENLKVLQQAYKTLDEIPLDAEAVERGGYSLDSDAIGLPRAHGLSSSLHGFNDGSSPYSTPKQSRSRRSNHSGEQLPFNPNMSGNGF

SEQ ID NO: 41110 - protein, 208 aa, Zea mays
  Clone ID: LIB3066-024-E5_FLI.pep
HYYGNKKKKNTRKIKSGDGDSREPLSGREGKERRSGGEMGAAESVPETSIHEFTVKDCNGKEVSLETYKGKVLLVVNVASKCGFTETNYTQLTELYQKYRDKDFEILAFPCNQFLRQEPGTDQQIQDFACTRFKAEYPVFQKVRVNGPDAAPVYKFLKASKPGLFGSSRIKWNFTKFLVDKDGKVIERYGTSTAPMAIEKDIQKALEE

SEQ ID NO: 41111 - protein, 334 aa, Zea mays
  Clone ID: 700353024_FLI.pep
GEVDLHLREKAAGVVMMESQPLQAPTATAPAPGSAEPAGAPPAVTPGKEFTRTCKGLVVVLIGGYVLLQLLPSSLNYLAIIPSKTIPYVWTVFTAGYIEQVLPGAIGSSLGLLFCGKDIEPAWGRKEFLKFIILINSICGILAFCFAIGLYYVTGKESFLVTPLSGFHGCLAGFLVALKQLLPNLELPMCFFWKIKAKWMPFFVVCFSSIMAFIVPDSINFLPTLVSGMYVSWLYLRYFQRNPLTGLKGDPSDDFSFPSLFPAAMRPVTDPVANLFDRLLCARSRTLEVALPISDPTKASRRRERGERVLEERLAADNAGDTEASPRGHGTAED

SEQ ID NO: 41112 - protein, 89 aa, Zea mays
  Clone ID: LIB3066-025-A9_FLI.pep
LLVHTRVIHYLPSRLKTPSYFLLGQNLSEKLNLALSLVIAKDSSRALSFGHLPRFNWSSAPAPVPEPAQIPSHQPASCRNRRRGLPTRS

SEQ ID NO: 41113 - protein, 234 aa, Zea mays
  Clone ID: LIB3066-025-D10_FLI.pep
PCPSAQPPPPPPGRNVTRSPPSMAPRNAVPAASAVANGMVMEPRFRGVRKRPWGRFAAEIRDPARKARVWLGTFDTAEAAARAYDAAALHFRGPKAKTNFPVAFAALPPPPPKKPAAVTVSPSSSSTVESSSSSSRDSPATPPRAASPSQQAPSLDLSLGGTPAMVAAQPFLFLDPRLAVTVAVPAPAGANKHAAASCREEEQSDTGSSSSVVDASPAVGVGFDLNMPPPAEVA

SEQ ID NO: 41114 - protein, 228 aa, Zea mays
  Clone ID: LIB3066-026-C4_FLI.pep
KFFHMNMYRCKDMLIKDVTVTAPGDSPNTDGIHMGDSSGITITNTVIGVGDDCISIGPGTSKVNITGVTCGPGHGISIGSLGRYKDEKDVTDINVKDCTLKKTMFGVRIKAYEDAASVLTVSKIHYENIKMEDSANPIFIDMKYCPNKLCTANGASKVTVKDVTFKNITGTSSTPEAVSLLCTAKVPCTGVTMDDVNVEYSGTNNKTMAICTNAKGSTKGCLKELACF

SEQ ID NO: 41115 - protein, 407 aa, Zea mays
  Clone ID: LIB3066-026-E5_FLI.pep
GDPKGVLISNKSIVTIVSAVDEFLSNSNEQLNMDDVYISYLPLAHIFDRVIEEVFIRHGASIGFWRGDVKLLVEDIGELKPTVFCAVPRVLDRIYGGLQDKITAGGFLKKTLFNVAYKYKQGNMLKGNKHEEAAAMFDRLVFTKVKRGLGGRVRLILSGAAPLSRHVEEYLRVVTCSHVLQGYGLTETCAGSFVSLPNNMSMLGTVGPPVPYVEVRLESVPEMGYDALSSETPRGEICIRGDTLFSGYYKREDLTKEVLVDGWFHTGDIGEWQSDGSMKIIDRKKNIFKLSQGEYVAVENLENIFGQTPAVDSIWVYGNSFESSLVAVVNPNTQALERWAESNGVTGEFATICEDPKAREFILGELTKMGKEKKFKGFELIRAVHLDPAPFDMERDLITPTYKKKRP

SEQ ID NO: 41116 - protein, 207 aa, Zea mays
  Clone ID: LIB3066-026-G1_FLI.pep
SSSPRSMTKSPSVTCRKPLQSDNTSHSQEEDSYSVTSSTVTSARAGKTKKTTVAVAPTFVCDNRAEKRGEFYTKLEEKRKALEEEKLQAEARKQEEEEEALRQLRKNLVVRAKPVPSFYQEPPPKVELKKVPPTRAKSPKLTRRKSCSDTPHTPEGGNGGGAVCCRLHRHSVGNSKDIGGKAQCSPKTGPAAKSRAPPNPGKTRGLP

SEQ ID NO: 41117 - protein, 110 aa, Zea mays
  Clone ID: LIB3066-029-E12_FLI.pep
QQCVSQQEIGSPESIERTIRLWCPELPIELHATDRGLGFGTSPNQNPGLSCIGREKRRVIVGPGGGEEDYAIVTGADDGEEVEHAPELLLVHGRHRRDVSSGCLLLACDG

SEQ ID NO: 41118 - protein, 232 aa, Zea mays
  Clone ID: LIB3066-031-B10_FLI.pep
AASHPYTLGGRRAVEGHPELAMAAVRSNRAHAHQHCRSEASCPTTSVAVAAARAGDAPRHRSQAPVQVSKGHHQMRRSAAFPPRRPGPGRRPPQRCDSDLNIRQHRTCSEVAGGTAAGCAAVCCCFPCVMVEVVVLATVRAPAALCRKAARVSKGGRRRSASVGQATEIYELPVDNAGVVVKVDASAVEAVALPVKPALQLEETGELEKEVWARFYGTGFWRSVSQLDDDDR

SEQ ID NO: 41119 - protein, 326 aa, Zea mays
  Clone ID: LIB3066-031-E6_FLI.pep
VVDSLANSSELVIRRLRSLAVEHAKNLAFHKVDIRDKDGLEKVFASTRFDAVIHFAGLKAVGESVQKPLLYYDHNVVGTINLLEVMAAHGCKKLVFSSSAAVYGSPKNSPCTEDFPLTPHNPYGRTKLMAEEICRDIYHSDPEWNIILLRYFNPVGAHPSGYLGEDPCGTPNNLMPFVQQIAVGRRPSLTIFGNNYATKDGTGVRDYIHVVDLAEGHLFALKKLFESSSNIGCEAYNLGTGKGTSVLEIVNAFEKASGKKIPLIMGQRRPGDAEILFSSPAKAERELHWKAKYGITEMCGDLWNWASKSPYGYAASESPKLNGSSR

SEQ ID NO: 41120 - protein, 220 aa, Zea mays
  Clone ID: LIB3066-032-B12_FLI.pep
GGESACVQPQAGVGTMSSFTGTQDKCAECDKTVHFIDLLTADGVTYHKTCFKCSHCKGILSMCSYSSMDGVLYCKTHFEQLFKETGSFSKNFTPGGKSSDKGELTRAPSKLSSAFSGTQDKCAACQKTVYPLEKLTLEGESYHKSCFKCSHGGCILTTSSYAALNGVLYCKIHFAQLFMEKGSYSHMMKKSPSQDTLPDMAADEQPPEPAPPQDGEGEDN

SEQ ID NO: 41121 - protein, 217 aa, Zea mays
  Clone ID: LIB3066-037-D11_FLI.pep
TYTIQKTRKAATIFNSWASGQGSNGCRHAQDGGRSWRLGGVLEIVLLEEGAALLERVLAEEGDGVGVADALLLDAVVGGERDAGAVAELLDLRAPRVGAPGQHHLADLLLVVLVDLQLVPPAVVRRRLRLERLLGRAEVPAHHLHRRAGHAPGHVRLEPGAAGVAVHAPRHHEPARLLRGRHAGQGRRRRHGQNYGHGGDQRRRRPVAALRRHSFYA

SEQ ID NO: 41122 - protein, 151 aa, Zea mays
  Clone ID: LIB3066-037-E8_FLI.pep
IIVIQEFVLGEFDDDATAAYHENITSELVDDDHHVKDISQRYHVHLYTNGTVCDLTDIPRETEVRFVCSEPTVLISSVKEISSCRYVVTIQSPMLCKNPLFQEEKRTLSIHCNELPARAESSAEDDSLPKEAQISIIPDQDELHDFPAYAT

SEQ ID NO: 41123 - protein, 111 aa, Zea mays
  Clone ID: LIB3066-042-D12_FLI.pep
PHYADGWSIKTHHHFIRYAHALTPDIDQSPRWRAAEAGSRLRVSCPPAPSCHGTAPSGGEVRRRRRRERGQPPRAARRRAGRRRRCSPCCLPLTGRTRQCRRTVSTPVPAP

SEQ ID NO: 41124 - protein, 328 aa, Zea mays
  Clone ID: 700355511_FLI.pep
HLSVQELAASLGALPPEFVRSEQDQPGATTYRGAAVPDAPVIDISEPGFGARMAAAAREWGLFQVVNHGVPSAAVAELQRVGRAFFALPTEEKERYAMDPASGKIEGYGTKLQRDLEGKKTWNDFFFHVVAPPEKVDHAVWPRSLAGYREANEEYCRHMQRLTRELFEHLSLGLGLHGGAMAEAFGGDGLVFLQKINFYPPCPQPELTLGVAPHTDMSTLTVLVPNEVQGLQVFKDGQWYEAKYVPDALIVHIGDQIEIFSNGAYKAVLHRTTVNKEKTRMSWPMFVEPPGELVVGPHPKLVTEESPAKYKAKKYKDYQHCKINKLPM

SEQ ID NO: 41125 - protein, 288 aa, Zea mays
  Clone ID: LIB3066-042-H8_FLI.pep
SAESCTTRRPFAWRGRKDLDGTGYHRSLEQWRDALLVPEVVAGVHLGLGPGEPLEVAIVVLLAPDPAAVVGGDVADHLVDAKVEVPVVGVRLPRVLAEVRLHERVHVPAPLRRRRPVALAEPVADVLDVEQHALPVRKRRRILRDGADPGAVGVHDHDPGPGLGEPGVDLLPHVPRDGVLHVVRLVLAEGLDVGRPVEEVHHGGRLAHGDEGHGLDPRHLVAVLLFDAQLREAAGHQREEVLARAQVQGLEHGILLHGHDPDHEVIGEGRRHLLPFVDEVDGAVLDPP

SEQ ID NO: 41126 - protein, 196 aa, Zea mays
  Clone ID: LIB3066-043-F10_FLI.pep
LKLSARYQILVALIPVEMKEDYLEEGKVICNQHFMIQLSHVSEIHFFRKSNGSDPENDESRSSKMAIRNANISPRGRGRGRGRGRGRPPTKRKEVGYVQFEDESSMFAEQGEPLPGEETVQEINGNETMPQSTQPPVEAPPTALAQATTSSKAEEANSDHQSDWPMPDAIGSIGVVPSGFGHLTVQVEDEDYDNED

SEQ ID NO: 41127 - protein, 37 aa, Zea mays
  Clone ID: LIB3066-043-G10_FLI.pep
RVFAIIWLLLASPSIEIKTYEKILEVARIRCVHFFLF

SEQ ID NO: 41128 - protein, 373 aa, Zea mays
  Clone ID: LIB3066-043-G12_FLI.pep
SSEPSAGGDLFAQQFSLLTTDKKLELSEQKSYTSVANGMSGVLELSEASIESSGAKAAACGTLSVLSSMSNKVYNDQGTPAAFRVPAGAVIPFGSMEDALKKSGSIKSYTNLLERIETAQIENGELDSLSSKLQATVSLLSPSEEIIESLKKTFDQNVRLIVRSTANVEDLAGMSAAGLYESIPNVSLSDPRSFGAAVGQVWASLYTRRAILSRRAAGVPQRDAKMAVLVQEMLQPDLSFVLHTISPVDHDPKLVEAEVAPGLGETLASGTRGTPWRLSCHKLDGKVTTLAFANFSEELMVLNSGPTDGEMSRRTVDYSKKPLSVDATFREQFGQRLAAIGQYLEQKFGSAQDVEGCLVGPDIFIVQSRPQPQ

SEQ ID NO: 41129 - protein, 113 aa, Zea mays
  Clone ID: LIB3066-043-G1_FLI.pep
CHPFMMLARKPNILRNDRPFKTSIVFSLEEGHGQLFRALGVFAQRKINLTKIESRPHKERPLRVSDDCSSLLKNFDYLFYVDLEASMADPKIQNALGNLKEFATFLRFIHICR

SEQ ID NO: 41130 - protein, 223 aa, Zea mays
  Clone ID: LIB3066-043-H1_FLI.pep
QGAEGRVQEKRGYGARRANRVRDGAGEAAEEQGAAADAQHGDGAVGGEAGAPGAARRLAAGCRHWDGSRCRHAGGLLLLLRRLIRRGGDGGLLEGVRPMQPPPRARPRHLHLQGRGGVLQPGVPGEADRVRRAHGEDLLLTDLHQGGPVRVRRQRLRPVRQRRGDRGRRLAGVALEVQCRRAATPDGSIGPVVSAMPERLCIVQLWLWVPAVMNASVILLSGD

SEQ ID NO: 41131 - protein, 224 aa, Zea mays
  Clone ID: LIB3066-044-A8_FLI.pep
RRGNMGTKMKKGILKPFRYISTIMDGKEAEMQIGFPTDVKHVAHIGWDGPGSTNNNNNNSNNNSGGAPSWMKDYHSAPLDSSSFRSESGGTAAANPWASQEIVMDGASVGETSFRDTKSEAGVDVGGGDSPPSPATRRSRRHRSRGSGNSSMDATGGEGEEKTKEKSKKGTRKNRKKQDKSAGDDASGTCQDLPAVPKKSNRRKNKGSSEGSGSAAAKDTTAAA

SEQ ID NO: 41132 - protein, 413 aa, Zea mays
  Clone ID: LIB3066-044-A9_FLI.pep
CRASRRQRRRSGSLAWTWFSPTKPTPQLSTCTAPTMLRRLIFSTWVDSRRLRPKPWWPSTPSPARLVDSDDGRKEISCNGEGALFVVARADGDLTIDEVKKFKPSPELRRLFIPLIEPSSIIMAIQVTFLKCGGVVLGTAIHHAATDVSSAFHFFQTWSAFCKHGDSAAVELPCHDRTLLRARSPPTVHPDALSTLQPRLVLTEPEGPLAIEIFTISRDHVASLKQLCGGTSTFCAVSALIWQCACVARRIPPDSQVRVMFPADVRRRMRPPLPTHYFGNAVIRLYAAGPAGDIGTAALASVAARIKGAVERMDDELVRSAIDYYEMAETNKRRTGTGILPRTDLNITSWLGRPQHDADFGWGKPQSMSRAESVRGGSMHLMNDDGGTGNVRVLVCLEAENIKELGRLLYAKL

SEQ ID NO: 41133 - protein, 227 aa, Zea mays
  Clone ID: LIB3066-044-E10_FLI.pep
EDWRAPITLFLQGYYHPTDVSEAKRLRHRSRDFALIEGQLYKKGVSQPMLKCVTETEGMQILREVHSGTCGSHAGPRALAAKVIRQGFYWPAMICAANRVTRSCEACQKFSPRSGNPSQYTKLIAHTWPLQRWGLDIVGPLPTAQGNLKFAFVAVEYFTKWIEARAVSTITSKTAQKFFWQNIVCRFGVPPHHAYQHHQEVQIVPPPPPPPHQQPPNKQQRYLSLPG

SEQ ID NO: 41134 - protein, 279 aa, Zea mays
  Clone ID: LIB3066-044-G3_FLI.pep
FFFYSILSPQTTAFLYEYVAKGSILDILCSQEDFPLDLRMRIAIKTAEALQYLHSSETGVTGHGSVSASTILLDNNLVPKLTEFSRSCTLFKKSETTSVVGAGVMITGSLLEKALNDDPSRYGSVLMNLESDVYRFGGVLMALVSRDGDGDHDGLLARFTRAYETEETGRALFDRDVITAEEDVALLDELGRLALKCSVLDADRIAVRPTMKEVADELRTMRRSWKERSRSTEAAAAYVDVATAGAGAAVVPAEARLPNLMRHMFGYRRISVGDPIRVC

SEQ ID NO: 41135 - protein, 372 aa, Zea mays
  Clone ID: LIB3066-044-H10_FLI.pep
EAEQPKDTKTSVSFLGSADDGNTFLHSSVYMPSAPPVLDEEALNYNIYRAVLEAEPPEWLPDSYASACMQCAALFTALTRGRHHCRFCGGIFCRACSKGRSLLPAKFRERNPQRVCDACYDRLDPLQNLLINSVSNASQTAKHDVMDWTCARGWLNFPIGLTMEHEIYKAANTLTSYSQVARINPEKSIPHAVLSGASGLAILTVVKAGAILTYKLGTGLVVARRSDGSWSAPSAILSAGFGWGAQVGGELMDFIIVLRGPEAVQTFCSRMHFSLGAGVSAAAGPVGRVAEADLRAGDKGSGVCYTYSCSKGAFIGVSLEGNLVATRMDANLRFYGDPYLTTSDILTGNVEQPNAAKFLYTALDNLYSGLDW

SEQ ID NO: 41136 - protein, 254 aa, Zea mays
  Clone ID: LIB3066-045-G6_FLI.pep
AVYAPATMNMLQTPPFHSNSHEKESGAVFSNSFNMAPSVTPTSPFQLMSPSSTNYTSTQIFEETNNLEDTSRVFGGGDNESNNSEEPDPKPAVEMEDLNQGNDHTSNKTANCQDYRMVLRKDLTNSDVGNIGRIVLPKKDAEPNLPILEDKDGLILEMDDFELPVVWNFKYRYWPNNKSRMYILESTGEFVKRHGLQAKDILIIYRNKKSGRYVARAVKAEDIAPPECECVEAGNPREECGFSVSPSINKKIIT

SEQ ID NO: 41137 - protein, 301 aa, Zea mays
  Clone ID: LIB3066-046-C3_FLI.pep
RINGRRWVWSGTGRRDHDEMETDISSCGGGGAQQRGIGPVEVQAATAALRRSEVFHVLKELVGFVLYMHHQIPSVLPSLENEFASLKEEMTEMALQPAELKPSDRRKYNTRKTEVRRRIKKHEKLMNGISTLLCSLQHALDEVSSIEGVVLILGGSLVRPLFVYDITISHGIFGPGSAKEHALTKLAQSVSRKAIRALVSRGAGSLSYTGPSKLFLLVRCSSTLKLPLDFLPKLDFRYSKKVVPLQMHIKCSKSGCSGHNQHHMPLVDSPCSTSESSLSDVIWFQCKHTIRGLPGKASLEG

SEQ ID NO: 41138 - protein, 143 aa, Zea mays
  Clone ID: LIB3066-046-F2_FLI.pep
TLPTLSRCLVELEGLHHLPGEVGVVTAEVAVGGGLDEPVAALLQVEVDADHPGPEVEVLLHDLEDLLVGDRAGAVRVDEHGQGLRHADGVRHLHEAAAGEAAGHDALGGLPGHVGAAAVHLGGVLAGEGATAVGSPAAVRVDD

SEQ ID NO: 41139 - protein, 264 aa, Zea mays
  Clone ID: LIB3066-048-E2_FLI.pep
DSEAPSISEQQTSASSYLAGPVGGDHQDAEVVAPMPGGLEVRGPAHQAFGGLPLVPRAVHNHLHLRVVRRAPAVLPRRRRVLRLGVVHVAPGDAAAADGARGVRQQPGVDALGVEGVATGGQDAEQLGGVEGAQAHRALGGAAHVDVTVAEPDRRKRAHRGAAEPRAAAVARGGREAEAQAAGPLAGAALLAVLGVDEEEEERQQHGREHAHDDGRVHGRQRRRWQRRWSHLRRRRRRLHGLARKRRQRRRRGRHPVSIMAGAA

SEQ ID NO: 41140 - protein, 382 aa, Zea mays
  Clone ID: 700356672_FLI.pep
RRERRGEAVMPLAESPPWRRKATDFFSTSSVKLKQAGQSAGDNIVDVAGKVGSVVKSRWAVFQEARQQQQQQQRPPHETVQERIITAAASTGLLFRKGISETKEKVAVGKVKVEEAAKKTADKSKSILNNIERWQKGVASTDVFGVPIEATVQREQSDRAVPLVLVRCADYLVISGLNNEYLFKSEGDKKVLQQLVSLYNEDSGASLLEGVNPIDVGALVKCYLASIPEPLTTFSLYDELRAARVSIPDLRNILKKLPNVNYMTLEFVTALLLRVSRKSSLNKMDSRSLAVEFAPLIMWRQGDTGTDLRNHLKFTLKPPPKIVDTTSNAATWDLLDEDDEDASSQIPLDDASPPDYSSIEVIQCLIEHHNAIFTDANETVWR

SEQ ID NO: 41141 - protein, 630 aa, Zea mays
  Clone ID: LIB3066-048-F2_FLI.pep
KTTGGSKPRPKPTTTELLRGSGRPLGALGLHGERGGGARAVDVAAVDVGGHGQRADALAEAGLLHQLLGARRVAAADGVVAADAHGVAVAREHHLLDELLGRARQRGPGLEVGGGHRDLAVLALPRLDVRRVPLRDESADVVALHRQDHDRIRPPELLLEQHQHVVLLPQEGPWNMVQLLRWPAEGVLVGDPVAADALAVDEHQALAHCAHIQHDRVLSRRHVEVPLVPGERPVVHGWLPCDAAHALIGVDLLLLADEADDVAPAVIRQVQRARVEALDLHPVDAGQTVLQVSATVHHSHRRRQDGDVVHALFQVHGLLERERLVHLGPVPTSYEFGVHKRHAGVPVAVDLEHRLDVAADRHVVRLQLEAGGVPDVVGLVLGEVVEIAGLAQPDLGLLVLGHLLLVEHLPHVVLRRLVREVERPLVVLRVHVLGAEDDGLAVGEDADGVARHEVGLAPERQRHVVLGVVVGEERHAHLLLRDLEHPRLELLAQLLRRCLPPEQGLLAQLQRQVQVPQMAPLRLLVQTEFIERCLVVVFWHHKGSRCPSKVCSTMVHVVVCHSTAHGEEARHGKCNVLSRTLGWWVTEYSVLCCPVLSPQEGHALVHWTWPCISTVPPIAGRNHITRSFGL

SEQ ID NO: 41142 - protein, 182 aa, Zea mays
  Clone ID: LIB3066-052-D2_FLI.pep
CRSPVAVAREDVSSSHFPASTSSWSSARAASSSTASSRGGTTPSAPPPMSLAPSSRSSISAIGTTSSTVTSSRRTSFSPIRRRTRRRAAPLSICRPASSSPLDPSAIPSPLCQLPLASSSALHPPRSVARASSSLCPVPSPSCRPASPRLRLRLPSASRAISALASTYAPASSHKSSSRVCL

SEQ ID NO: 41143 - protein, 314 aa, Zea mays
  Clone ID: LIB3066-052-G6_FLI.pep
AASGTPTWCSSSARARSTAASCTSTWPAAAWTTACSALRRRRRARHPVAAPVPHLRRDRDGAAVPAPDQARAAGAPGPQAGEHPAGPQLREQDQRRRAGAARAAVRRRHRDAVPDDVHRGDLLLHRPGVPADGHARRQVRRLLLRRHAAADHHGEAAHGAVAPRRPRPGARRAAGHAGPRRARLAPGGGAVPRRNGAPVLRAAPQGPAGPRRRRAPGAQPAARARRGQHAVLRRHHQGGRRRRRRHAQLVAVPQQHLTVTRRDDDRFPVPKISVQLKSGRFAHAAEKVERLTGMKWTFISSIGDGVVVMSCAGA

SEQ ID NO: 41144 - protein, 118 aa, Zea mays
  Clone ID: LIB3067-001-A11_FLI.pep
KDGIRPLWEDPANQNGGKWIIRFKKAVSGRFWEDLVLVVVGDQLEYSDDVCGVVLSVRFNEDILSVWNRNASDHQAVMALRDSIKRHLKLPHSYLMEYKPHDASRRDNSSYRNTWLRG

SEQ ID NO: 41145 - protein, 664 aa, Zea mays
  Clone ID: LIB3067-002-C10_FLI.pep
LRYSTRESAPTHITPHLPLQKKKPDRNPESPAPAPSVPPPLGVWPPGVVGRDRDDIVERCIHGADRDGAPVRGHVPGVRVGAVVAHLHGGPVLRHQPLRGHLRRAAAVLPLHLHQRPVRHEPPVPGRGHAAEAGRPRGAGRVLAPALQAGGAAAGLVHHALLRVDAAQHAGDGHPAADRHVRSLRRVPDGAGGGAPVHHLVHAAAVPLRVPRRADAHRGPVPGHRGGHRVAARGPGRGVAGGRARRDGGRGGGGRPAPRDGAPVVGVAAVAADGDAAAVQPDGRGDILMSSSRQHSPRGSNFNHADFFAMVDGAPPPPAPGARASSFGAAELYSMHSSRGPTPRQSNFDERSASARSSRPAAVPSHDAKELHMFVWSSGASPVSDVSGLPAFNGGGAGGVNVGAKEIRMVVPAEMPQNGSAGKENENNGAAAAATGEAEGFGFRSGGKTTAEDAEAGEAAGPEQLTKLGSRCSTAELRAKDDGGGGAGSAAQQMPPASVMTRLILIMVWRKLIRNPNTYSSLIGLAWSLVAFRWHISMPAVVAKSIAILSDAGLGMAMFSLGLFMALQPKLIACGWRATGVSMAVRFLAGPAVMAAASLAIGLRGTLLRIAIVQAALPQGIVPFVFAKEYNVHPAILSTMVIFGMLIALPITLIYYILLGLKPV

SEQ ID NO: 41146 - protein, 147 aa, Zea mays
  Clone ID: LIB3067-002-D4_FLI.pep
TERHQSPDGGVGAVPKRVKRILANRQSAQRSRVRKLQYISELERSVTSLQMEVSALSPRVAFLDHHRSLLTVGNSHLKQRIAALAQDKIFKDAHQEALEKEIQRLRQVYQQQQVKVATTGGADIATAASPSMQARQELLACEGAAIR

SEQ ID NO: 41147 - protein, 166 aa, Zea mays
  Clone ID: LIB3067-002-F10_FLI.pep
ALFRCSDAAGDQQRDSSYYERENALTVIGSNPLRRHLALGYDDSHSHDDGASSAGSDRVDGIELAAAAPAPAVVKKQVRFAVAPPRSPGVDETVLEELHELCEAREAGTAFILGHSHVKTKPGSSILKRLAVGVGYNFLRRNCRGPDVVLRVPPASLLEVGMVYVL

SEQ ID NO: 41148 - protein, 232 aa, Zea mays
  Clone ID: LIB3067-002-G5_FLI.pep
TGLSCDICVNNLLAVVNTKLLRDYGQIDKRLQQLAFIVKHWAKTRRVNETYQGTLSSYAYVIMCIHLLQLRRILPCLQEMEATYYVKVEEINCAYFDQVDKLNNYGAHNRDTVSRLLWSFFHYWAYEHDYTRDVISIRTGRIISKERKDWTRRVGNDRHLICIEDPFEISHDLGRVVDKFTIKILREEFERAANILQFDPNPSVTLFEPYVPPPSPSLLQEETANAAEIELS

SEQ ID NO: 41149 - protein, 150 aa, Zea mays
  Clone ID: 700356966_FLI.pep
AGSLRVVGGAMVSFEMNDLKKIGLGLTGFGVLFTLLGIIMLFDKGFLAMGNILFVSGVLLTIGLKPTVQFFTKPKNHKGSIFFGFGFFLVLIGWPVSGMLVESYGFITLFSGFWPTAAVYLQKSPSFGWIFHHPLVTSLITRFRGRRVPV

SEQ ID NO: 41150 - protein, 126 aa, Zea mays
  Clone ID: LIB3067-004-H5_FLI.pep
PAAAAACALSCYSSQLDRTDGRDPGAQASRLLPADVVVTAATEPPRGGRAQELQALLPHLLHLLRGEDLYAGHRAHEFPVGLGCQRNVRKNAEKKKKQRRMQCLLPRVVAHEKDVLLTVDEYKLPA

SEQ ID NO: 41151 - protein, 276 aa, Zea mays
  Clone ID: 700464507_FLI.pep
RSFIWWMKVLLGCFLLILVGYVFVKWGVPFVFEKVLLPIMQWEASAFGRPVLAIVLVASLALFPVILVPSGPSMWLAGMIFGYGWGFLIIMAGSTIGMVVPYWIGSLFRERLHVWLTKWPQQIALIKLAGEGNWFQQFRVVALFRISPFPYTIFNYAVTVTEIKFNPYLCGSVAGMVPEAFIYIYSGRLIRTLADMKYGNYKMTPVEIAYNAISFVIAIALTVAFTVYAKRALGDIKSPDDGIGKDEEDHGPNGSGVRMNRRQERADARYIELDDM

SEQ ID NO: 41152 - protein, 159 aa, Zea mays
  Clone ID: LIB3067-005-A7_FLI.pep
NAETHSMYMYISPGTRQATMQRQEGTMAVAGGGILFRRRYIVVVRWVGGRPGGCLVIAGGSVAAAAGAAAAGAAVAGVAVAAAALGGRLEPAGARLGGGGGEDRGLHAADAGGLHVREHLAAAASAAAVAAGGARAVAAAARHALMSRRKERRTVGAWL

SEQ ID NO: 41153 - protein, 620 aa, Zea mays
  Clone ID: 700464955_FLI.pep
RRADRSEAGGRDRALRDSAVHHEVNAALGAAAMASLVPGVLLKLLQHMNSDVKVAGEHRSSLLQVVSIVPALAGSDLFTNQGFYLKVSDSSHATYVSLPDEQHDLILSDVIQLGQFVHVDRLEAATPVPILRGVRPVPGRHACVGSPEDLVVTSSSTFLLGSGKAAQASSTNGSSKDAGALSLEKEQGRLEKINAPPKSNGTESKKPQLTKSNSNLSKQALNGLLSDKKDVVSSKAKSTSARSTPSSPTSAHSLPASFDKFSSDMKQRVRTKGAEKSPPSRLSLLEKAASVLKATTAGRKSSLGNSISNTLLSFESGPKALRRSWEGKADAKDKGNSDSKPAKAEKKSENRSSSTPRRKSLAEEKPSNKDDSKILTPPRKSSASAPADDSDKVVNNKLSSPIRRTSGVLNNPNVTNLVKVAASNRKLTDASASWTTLPPSLVKLGKELLKYRDAAQMAAVEAMQEASAAESIVRCLSSYAEVSSSAEEQNPQQAVEQFLALHGAISRATIVTESLTKATTTVSTATSPDQSAAGDASTADEETMAVAAERRRRAASWVGAGLATDLSAFSLYNLKPAPASVISPLAVVLVDESAKPAAAKAVPPAKSRLSPAKGRLKAGS

SEQ ID NO: 41154 - protein, 115 aa, Zea mays
  Clone ID: LIB3067-006-A4_FLI.pep
PSSLRTAPSYTEPLPVIRSIMVYIYGQLSSDSVDISMNTHLKTVKLTLKGKNPVTLDHLSVRGNNIRYYILPDSLNLETLLVEETPRVKPKKPTSGKPLGRGRGRGRGRGRGRGR

SEQ ID NO: 41155 - protein, 219 aa, Zea mays
  Clone ID: 700465319_FLI.pep
GPGRGDAAGPVLVPQEEADGGAVVDAGRRVPGPPALRRGLGDGLGRVLLPRRGADDGHDLLVAEHVPHAVRGQDDEQVPRRDAAVRHLRLRHHAVALEAVVAQRARHGEARAVLVGKPHAQHRRLVLEREHAAVAALDTLSLLGHVGLLVGGELHGLEVARVRHGRQHGPGVAEVGDDEVLPLLDGAHGGGAAEVAVHVGLELELLVHGLERVGAGLPP

SEQ ID NO: 41156 - protein, 344 aa, Zea mays
  Clone ID: LIB3067-006-F1_FLI.pep
FLDPKTTAKIHVLGNKYQSKLLEIIDASELPEFLGGTCTCPEYGGCLKAEKGPWKDPNILKIVQSGEVHCARQIVTISNGEEKFITYAKPKHHSMRGSDTSTAESGSEADDAISPKALRSYIQHPKLTPVREEVKIVRATSFSTRLPEYDVPVVDKAVDATWRREQPRKIPFMPQDADSSVKTMSRPSDSSWDKIVATLMACLMAIVMLVRSVKDLVTRRLPYKGGSEEIHSTLYPDPIQKEEFRPPSPIPGFAEADLFAVVLQRLGELEEKVQMLQEKPSEMPCEKEELLNAAVRRVDALEAELIVTKKALHEALIRQEELLAYIDRKEIAKAQRKKKAMLCY

SEQ ID NO: 41157 - protein, 158 aa, Zea mays
  Clone ID: LIB3067-007-D4_FLI.pep
LTFGKSKIHGYGVFAKVAHKAGDMMVEYIGEIVRPPISDTRERRIYNSLVGAGTYMFRIDDERVIDATRVGSIARLINHSCEPNCYSRAITILGDEHIIIFAKRDIDPWEELTYDYRFFSSDQRLPCFCGFPKCRGVVNDVEAEEQSAKIRVKRSELF

SEQ ID NO: 41158 - protein, 309 aa, Zea mays
  Clone ID: LIB3067-007-H4_FLI.pep
RRRSTSSCGRRWTRTTATPWGRVNAPRCWRSASTRRRRPSGPSSAASTARRCTSTSSGAARSAQTPKPATPSAPAASARSASSRACPLAPAPSASTYSTTPLGSSASPSPEASTAFGTTAPSPPSPSSKTPRSAPSCSSPTSLTSPTATPRTTPASSPTPSSGSTSRSSSPSPRPTPPRPPQPPIPSFCRGRRSSGGCHRQGKKATASFVRFCYFNSLGKGFSELNLIMDGFGLDKEGPGQPKLGVIARARPVIISLSSPRFLLFIFTSSRIWLIPALCDWNHSLGIAASHMSLHCMFDVAILRHVIHA

SEQ ID NO: 41159 - protein, 212 aa, Zea mays
  Clone ID: LIB3067-008-D1_FLI.pep
SVFQRFQEHEQPDHGGLHLGRAVRRVRERGLARLPVADHPGAACRGHRHRHEAQGVVHHPLLRELLLQGRVRRGPLDAVAVPAGRRRRQPHWRQPGVGGQAAAGRVMQRRVLQRRRQAGGRRSEQLQRRRCRAQQLRAAGWRQGRRRQRVGPGGGHGELGRGDQGVPELWDAVQDQRPGQFFLVILGTPETAIRLAVPVGDFSSPNYIILCM

SEQ ID NO: 41160 - protein, 103 aa, Zea mays
  Clone ID: LIB3067-009-A3_FLI.pep
LAGVDVDVEREREDGEGGEEDEGVDEDGLAVGVEAAEVDVAVGARQLAEQARREQHEQHHAHHHGAPVRHVSPSRRSDPRSHQTRSRSRVAGERECGEETRRG

SEQ ID NO: 41161 - protein, 256 aa, Zea mays
  Clone ID: LIB3067-009-D6_FLI.pep
KNQFRGIRRRPWGKWAAEIRDPRKGVRVWLGTFNSPEEAARAYDAEARRIRGKKAKVNFPDEVPTAVSQKRRAAGLASLKAPKMDVEEEKPIIKPAVNNMTNSNAYHYPAVVGHHNIIPEPFMQTQDMPFAPLVNYAALVNLSSDQGSNSFGCSDFSLENDSRTPDITSVPAPVATLAAVGESAFVQNTAGHAVAPPATGNAGVDLAELEPYMNFLMDGGSDDSISTLLSCDGSQDVVSNMDLWSFEDMPMSAGFY

SEQ ID NO: 41162 - protein, 420 aa, Zea mays
  Clone ID: LIB3067-014-D4_FLI.pep
PTTVRTVLSLALARSWPGHQLDFKNAFLHGALTETVYCCQPVGFVDSSRPDMVCRLNRSLYGLKQAPRAWHSRLATFLVTLGFVEAKSDMSLFVHHHGTETAYLLLYVDDIVLTASSQSLLRRLVDALQREFPVKDLGVLHHFLGVTVEARPSGLLLHQRQYTLDLLERAKMIACKPCSTPVDTQAKLSEAQGDPVEDPTGYRSLAGALQYLTYTRPDISYAVQQICLHMHDPREPHLAALKRLLRYLRGTVDYELLLHRSTSSELVVYTDADWAGCPDTRRSTSGYAVFLGGNLVSWSSKRQPVVSRSSAEAEYRVVANGVAEAAWLRQLLAELHSPLSRSTLVYCDNVSAVYLSTNPVQHQRTKHVEINLHFVRDYVAAGAVRVLHVPTTSQFADIFTKGLPSSTFAEFRSSLNISSG

SEQ ID NO: 41163 - protein, 97 aa, Zea mays
  Clone ID: LIB3067-017-B7_FLI.pep
CYLGDKSRCTFSAITKVVRIPRLGCYFLVILLSDVMTIHFFFLVRNTGSWMEIGNSISHFGIVSAQVVFVLLLFALTNIYTRDILVSSRQLTARKVM

SEQ ID NO: 41164 - protein, 259 aa, Zea mays
  Clone ID: LIB3067-017-H1_FLI.pep
EEGLLKNLPKDLRREIKRHLCLSLLMKVPMFENMDEQLLDAMCDRLKPMLYTEGSCIIREGDPVNEMLFIMRGTLESTTTNGGQTGFFNSNVLKGGDFCGEELLTWALDPTSASNLPGSTRTVKTLSEVEAFALRADDLKFVATQFRRLHSKQLQHTFRFYSQQWRTWAACFIQAAWHRYCRKKLEEALYEKEKRLQAAIVSDGTTSLSLGAALYASRFAGNMMRILRRNATRKARLQERVPARLLQKPAEPNFFAEDS

SEQ ID NO: 41165 - protein, 196 aa, Zea mays
  Clone ID: LIB3067-018-F7_FLI.pep
EYSSHSSMEGILERYQRYSFEERAVLNPSIEDQANWGDEYVRLKSKLDALQKSQRQLLGEQLSSLTIKELQQLEQQLDSSLKHIRSRKNQLMFDSISALQKKEKALTDQNGVLQKFMEAEKEKNKALMNAQLREQQNGASTSSPSLSPPIVPDSMPTLNIGPCQPRGGAESESEPSPAPAQANRGNLPPWMLRTVK

SEQ ID NO: 41166 - protein, 529 aa, Zea mays
  Clone ID: LIB3067-018-G6_FLI.pep
PSAAPRTPNQQLPRPSAGEMALYLLFESASGYGLFHAYGIDEIGQSVEAVRSSVLDLDRFGKAVKLTAFNPFSSAVDALNQCNAISEGIMTDELRSFLELNLPKPKEGKKAKYSLGVVEPKVGSHISEVTGIPCQSNEFVQELLRGVRLHFDRFINELKDSDLEKAQLGLGHSYSRAKVKFNVNRVDNMVIQAIFLLDTLDKDINSFSMRVREWFSWHFPELVKIVNDNYLYAKLAKFIVNKSDLTEKDIPALADIVGDEDKAKEIVEAAKASMGQDLSPVDLINVQQFAQRVMNLSEYRKNLYEYLVTKMNDIAPNLTSLIGEVVGARLISHAGSLSNLAKCAASTLQILGAEKALFRALKTRGNTPKYGLIFHSSFIGRASTKNKGRMARYLANKCSIASRIDCYSEASTSVFGQKLREQVEERLEFYDKGVAPRKNLDVMKAAIDSMVNGTSMDDDDIEKTDASPKKSKKKKTKTKADGDAMDVDKPSNVAGGEAEPGTEKKKKKKKHKLEEEAQEENGAADTTPK

SEQ ID NO: 41167 - protein, 223 aa, Zea mays
  Clone ID: LIB3067-019-B2_FLI.pep
SLQFLQCACQPVQALIKAITFERTRALDVPDAVLQIVEAKTLTHLHWCHCPFHILLIGKYQYYTVKHQRIFDYCLKFSFGFSNSLPIQRINYVDQAISIVEVVPPQGPQLFLATNIPHSKHHILVLNFLDVETNRGNSRQNLPDMQLVQYGGFTGGIQTKHHNPHLAGAEEGIEQLAERLPHRRTEINPSRREHQTSDRILELRILQVAGVDESSGVFGSRNG

SEQ ID NO: 41168 - protein, 626 aa, Zea mays
  Clone ID: LIB3067-019-D5_FLI.pep
VESLPVEPLEPSDLKPENSRYDAQISVFGAKLQKKLEQSKIFMVGSGALGCEFLKNLALMGISCSQNGKLTVTDDDVIEKSNLSRQFLFRDWNIGQPKSTVAATAAMAINPKLHVEALQNRASPETENVFNDAFWESLDVVVNALDNVTARMYIDSRCVYFQKPLLESGTLGAKCNTQMVIPHLTENYGASRDPPEKQAPMCTVHSFPHNIDHCLTWARSEFEGLLEKTPTEVNAFLSNPGGYATAARTAGDAQARDQLERVIECLETDKCETFQDCITWARLKFEDYFSNRVKQLTFTFPEDAMTSSGAPFWSAPKRFPRPLEFSSSDSSHLNFLLAASVLRAETFGIPIPDWAKNPKKLAEAVDKVIVPDFQPKQGVKIETDEKATSLSSASVDDAAVIEELIAKLEAIFKTLPPRFHMNPIQFEKDDDTNFHMDLIAGFANMRARNYSIPEVDKLKAKFIAGRIIPAIATSTAMATGLVCLELYKVLAGGHKVEDYRNTFANLAIPLFSMAEPVPPKTIKHQDMSWTVWDRWTITGNITLRGLLGWLKEKGLNAYSISCGTSLLYNSMFPRHKDRLDKKVVDVAREVAKVEVPSYRRHLDVVVACEDDDDNDVDVPLVSIYFR

SEQ ID NO: 41169 - protein, 151 aa, Zea mays
  Clone ID: LIB3067-019-D7_FLI.pep
NLQSPPNFPEPNHSHRLHSNQHTFPFGGSKEGRRRWVAAWRCTKTGGSKSGTPAARTSSSISAGPAAASPSSASSASLSPSSSTRASSANSICRTRMQAGHTGSSCKRRPGPQETSIPRPGLRGGEFPFSLCRYCFSLNLMEQFGMLNYCA

SEQ ID NO: 41170 - protein, 254 aa, Zea mays
  Clone ID: LIB3067-019-G8_FLI.pep
HSTYKPLISNGVHQALRAAGARHARALLVPARSRVGEGGTGVPLVRVRLATLDRRRPPASRQHTVSPAAPCQHTVGPPAPCQHTVSAPAAGDPPSHSDRWGKPEPDEEGTPEGVPTASVSPDAHAHAHAVLGQVPHRRAEARRLRGRSRERGARRRRQRPVLPAREGHRRALRGGVPLHRHQGQGARHLRLRAHRARGARQLRLRRPARLQMHLNDSIPFHFHFHFHTAHVHSKTSPFALPMQSLKRLVDGFGW

SEQ ID NO: 41171 - protein, 107 aa, Zea mays
  Clone ID: 700467374_FLI.pep
LKLTKARHKHTAWAKRTYACITACMEWMDQKHWVSSLIYSSSRPAGGRSPSSYLPHHVVLSRDEDVDGVDDARDVAQDGEQQADPELNLQGRHTVDREQAVTLLTHI

SEQ ID NO: 41172 - protein, 164 aa, Zea mays
  Clone ID: LIB3067-023-C4_FLI.pep
ASRAMSFSGNGWAVCILTANGTVSNVTLRQGESSGGTVTYEGRFEILSLAGSYLLSESTGMSSRTGGLSVSLASPDGHVLGGAVAGPLTAASPVQVVIGSFLADTKMELDPGSAPEKHVFSRFQTTSSPSRGTESSGGHASPPNTTGSFSTSTQPGFPSFPTWK

SEQ ID NO: 41173 - protein, 554 aa, Zea mays
  Clone ID: LIB3067-023-F10_FLI.pep
WVPPPLSSNRSPEREKESTFAAGRSRRVEVERTLTDSQRDEFEDMLRALTLERSQIKDAMGFALDNADAAGEIVEVLTESLTLKETSIPTKVARLMLVSDILHNSSAPVKNASAFRTKFEASLPDVMESFNDLYRSITGRITAEALKERVMKVLQVWADWFLFSDAFLNGLRATFLRSGNSGVVPFHSLCGDAPEIEKKGSSEDGNDGFKLNEDGALATGKAAATKELLGLPLAELERRCRHNGLSLCGGKEMMVARLLNLEEAEKERIYEKDVDMKYVQGEQHVVGREDSGVNAHSTSRFGEGSNGDELDVSRNSMRAGKGRSGGSASAELESFPSKKPKYDPVLPASKWSREDDISDDEDRKGGRGLGLSYSSGSDIADGLGKVDTTEASTDHTSHHHDTIVDEEHRQKLRQIEISVMQYRESLEEQGLRDLDEIERKVASHRRRLQSEYGLSTPADGANSRRSSERTSSSSERKERHGDAHDHPRKRRRSQSRSLSPPRKSQERDREHYRGRDRSHGNDVGRDRVRGKSASQGRDDHHDRSRDREDRRKGR

SEQ ID NO: 41174 - protein, 243 aa, Zea mays
  Clone ID: LIB3067-025-B4_FLI.pep
NRRSAAERSDLAEFSQPHRRRRRACGSEMETSGWRRRAAARASWSPATVYLWLALAAAALTLAQAKKDLTEVTHKVYFDVEIDGKPAGRIVMGLFGKTVPKTAENFRALCTGEKGIGKSGKALHYKGSTFHRIIPSFMLQGGDFTLGDGRGGESIYGMKFADENFKIKHTGPGLLSMANAGRDTNGSQFFITTVTTSWLDGKHVVFGKVLSGMDVVYKVEAEGRQSGQPKSKVVIADSGELPM

SEQ ID NO: 41175 - protein, 61 aa, Zea mays
  Clone ID: LIB3067-025-D9_FLI.pep
FRRQEPRWISLSALVYRNCHTNSNNTIRKIISTVPPSIYISLQEPKNSDNTLLRKHVLYPW

SEQ ID NO: 41176 - protein, 328 aa, Zea mays
  Clone ID: 700468172_FLI.pep
EGMEEANRTAVESCHRVLALLSNPHGQLVPSPSPILGLQLFPRYHQFEGSSSKDPVRIPTQFPKRLLLEKPTAGMEGSTSQSPPIVQMVQPVSVAPPAGTPTPALPPAHLHFIQQQQSYQRFQLMQQMKIQSEMMKRSNLGDQGGSLSGGGGGGRKGVNLKFDSSNCTASSSRSFLSSLSMEGSLASLDGSRTSRPFQLLSGSQTASTPELGLVQRRRCAGREDGTGRCATGSRCHCSKKRKLRIRRSIKVPAISNKVADIPADEFSWRKYGQKPIKGSPHPRGYYKCSSVRGCPARKHVERCVDDPSMLIVTYEGDHNHNRVLAQPA

SEQ ID NO: 41177 - protein, 69 aa, Zea mays
  Clone ID: LIB3067-025-F3_FLI.pep
SGGSCCFCSFETIRKARSFFHLCFSMQTPKHMALQIFLVKLLLKIELLPCLAVAYHTLRSSFKWLLPRT

SEQ ID NO: 41178 - protein, 591 aa, Zea mays
  Clone ID: 700468775_FLI.pep
PNIIMAMIDEPLYPIAVLIDELKNEDIQLRLNSIKKLSTIARALGEERTRKELIPFLSENNDDEDEVLLAMAEELGVFIPYVGGVEHAHVLLPPLETLCTVEETCVRDKAVESLCQIGAQMKENDIVDWFAHVVKRLAVGEWFTARVSSCGLFHIAYPSAPEQLKAELRTIYGQLCQDDMPMVRRAAASNLGKFAATVEQSHLKTEIMSMFDDLTQDDQDSVRLLAVEGCAALGKLLEPQDCAAHILPVIVNFSQDKSWRVRYMVANQLYELCEAVGTEPTRGDLVSAYVRLLCDNEAEVRIAAAGKVTKFCKILNPQIAIEHILPCIKELSSDSSQHVRSALASVIMGMAPVLGKDATLEQLLPIFLSLLKDEFPDVRLNIISKLDQVNQVIGIDLLSQSLLPAIVELSEDRHWRVRLAIIEYIPLLASQLGVGFFDDKLGALCMQWLEDKVFSIRDAGANNLKRLTEEFGPEWAMQHIIPQVLEKINNPHYLYRMTTLQAISLLAPVMGPDITCQQLLPVVIASSKDRVPNMKFNVAKVLQSLVPILDQSVVEKTVKPCLVELSEDPDVDVRYYAHQALRACDQMVISS

SEQ ID NO: 41179 - protein, 350 aa, Zea mays
  Clone ID: LIB3067-026-C11_FLI.pep
LLQALSKEEEAVRARLRRRARASRQSAHNVLALAAALEIVAVGYAIMTTRSPDISWQMRAVRVLPMFLVPALAALIYSTITNLTKMLDNRDQQTLEKLRTERQAKIDELKERTNYYTTQQLIQRYDLDPAAKAAAATVLASKLGADSGLRVFLGDETSRDAAIGRSNDNNLGPTTGLRQRKGHVTNGAGRAQSLEPFDGSNVYDGSDEGPSPPNQTVEHFRGPSGNDGGWLARVAALLVGEDPTQCYALICGNCHMHNGLARKEDFAFVTYYCPHCNALNGSRQHDDHELVPDSGKESPDSQSGGIIGQAGASLATSGAASPVASSLPTLEELSAEEDSGEKASSDQPAN

SEQ ID NO: 41180 - protein, 258 aa, Zea mays
  Clone ID: 700469055_FLI.pep
EETSSLPPVTSLYKYYFDSLLPRVPLPILRQVTSHLEKLKLPTKQSGMTGDSNRLESNDTARRPPSVKASLSVSFGQRAPHRASTRDSSPVRRTLPSKQDKEGDRAKSPPMKHRSRSSERDHDLERERSDRERGSGRYYKDREPDRHAREHRDRDHRRSDYSNRDGETRGRERRDRDSDRSRHASVRRSRSRSPVRGRSDGDKHRSSPFGRAPELSNLAKLKDLYGDATNVKNDAGDDRAHRDSGTEEVIRLGGARWR

SEQ ID NO: 41181 - protein, 288 aa, Zea mays
  Clone ID: 700469208_FLI.pep
SFQHVVLLAVSIKHLLLPSRQFLLIFQDFLYEGHVLRFLPLCKVFQFLHRFIVLISLFYPAEIFSKARARRAITKHLSLGMDSFYRPWHSPNYEREIIHQFYSSLSLHVIIQFHQCSRSNIFIWDRVIDDELHMDNICTLCKSSFDGRFLYLRRKVVNIYCPLNFLLETSIVLGSLFFGSLHRRATSSRSRRGREGGEEAGWGRSRSPLTGSSRGVVLLAVLLAAEAPAAEKRQDAGVVLLAVLLLVLDGCSLLPGGARRKSRGSDQVGVGDDRSDRMGRGQGMRMSG

SEQ ID NO: 41182 - protein, 201 aa, Zea mays
  Clone ID: LIB3067-027-G9_FLI.pep
CLLVRSIPQTIKYPQIARLGRDVRMEVEEELPASADLTGGSKQATTTTPFYLALDHTASARSSPPPAEAPPLPRAAAANSERGSEIIKAKIMSHPLYPAVLRAFIDCRKVGAPPEIVGRLSALADDVEMNSDDRQEQRRAVDPELDQFMTMDLHVVCECARTGDLLSHVGEVQTGAHKANPGSRRILQEHGGPDRRILVIR

SEQ ID NO: 41183 - protein, 197 aa, Zea mays
  Clone ID: LIB3067-028-A3_FLI.pep
SSLGDAEGIEKLASLAKEHGKNNVAFLCLFMLGKVEDCIQLLVDSSRIPEAALMARSYLPSKVPEIVAIWRNDLSKINPKAAESLADPSEYPNLFEDWQVALTVEKSVASQRDHYPPADQYLNHAEKSDMILVEAFKRMQVIEHEEPEDAAEENGEPDQQASEEKEMHNTDHADEHEETVSVNGKEGEEQQVLTEHE

SEQ ID NO: 41184 - protein, 144 aa, Zea mays
  Clone ID: LIB3067-028-B10_FLI.pep
FHLLFSPRKPFPQAQIRLLAAAMAARLPLLVLAVVAASLLAADARPCHTFFVAFRADPNPSRGDDAVPHHLAAAQDAVLHADPGAGGPGGGGVPLHRPQGQRPGHQPQPAHQPQPPRQLLRQARPLGLPVLLTITRPSIDRSGG

SEQ ID NO: 41185 - protein, 121 aa, Zea mays
  Clone ID: LIB3067-028-C2_FLI.pep
QLPPNVRGHGSRRLHRSGQVQAAVDRDDGALLLPDDAGGHRGGRRDLIGVRRGQPHGAGRGGRAQLGGGGDPGVHGAGGPARRGLHEPQGAEPGQAAARHQRLHARRCRPHVHAGQVGLVY

SEQ ID NO: 41186 - protein, 220 aa, Zea mays
  Clone ID: LIB3067-028-C8_FLI.pep
YMKLHCDITPLAHDSEDYKLIEQYLLNTHAPTHKDWSLELEEVFSLDRDGELNKYSRYKNNLHNKMLLWHGSRLTNFVGILSQGLRIAPPEAPVTGYMFGKGLYFADLVSKSAQYCYVDRNNPVGLMLLSEVALGDMYELKKATSMDKPPRGKHSTKGLGKTVPLESEFVKWRDDVVVPCGKPVPSSIRSSELMYNEYIVYNTSQVKMQFLLKVRFHHKR

SEQ ID NO: 41187 - protein, 77 aa, Zea mays
  Clone ID: LIB3067-028-E10_FLI.pep
FLRFFCFFRCSSPRCHKGKAYLLFCSAPSHGQMRLFKPCESEHQQEESTAMQDLSRAAATALCSGISVSSPADAAAA

SEQ ID NO: 41188 - protein, 207 aa, Zea mays
  Clone ID: LIB3067-029-D12_FLI.pep
LGELTIDWSIDQYMAESAALSDAHRHLAHGAGSLLPNPPHAFRRPPLAGAADPVDDGVFRSTGGCGSPWTCWTEGPVLASPAGTTALLLRRRGPYLHAPYQIFARLDIGVDHYEIPLLKLVGTNKFPCVLQQIHSALVVGPKPVPHVPHARRSDVLHGDGDAIPRLQLRQVNLRFLFGEHDAAEAPDVALLQHLLQQEPQVLVRLGA

SEQ ID NO: 41189 - protein, 545 aa, Zea mays
  Clone ID: 700471165_FLI.pep
IQTQSSMASMAIIRRRKYFLDHVNTPTISSSAFFTFQHGRLGLEVEPRTEQRFLEHSSGDSKCEKEQHNMNLIKKDLLGLGNGFWQRPSYVISLSHGGFGRNEFRLPLSLGARSLLQSVRTASTATARQPKMDTDDEQSEDHKQNKRKKEASPEECDQAVEGLSTAKAKAKAKQVQESLKVGQSIIQKFWARVLGVGPALRAVASMSRADWAAKLKHWKDEFVCTLQHYWLGTKLLWADVRISSRLLVKLAGGKSLSRRERQQLTRTTADIFRLVPFAVFIIVPFMEFLLPVFLKLFPNMLPSTFQDKMKEEEALKRKLKARMEYAKFLQDTAKEMAKEVQTSRSGETKQTAEDLDEFLNKVRRGGRVSNDEILNFAKLFNDELTLDNMNRPRLVNMCKYMGIRPFGTDHYMRFMLRKKLQDIKNDDKLIQAEGVESLSEEELRQACRERGHLGLLSTEEMCQQLRDWLDLSLNHAVPSSLLILSRAFTVSGRMKPEEAVVATLSSLPDEVVDTIGTVLPSEDSVSERRRKLEFLEMQEELIKEE

SEQ ID NO: 41190 - protein, 111 aa, Zea mays
  Clone ID: LIB3067-031-H5_FLI.pep
PAGTVNKIYTLQICYLYTVVKNTANRCCCFSRSRRYCTRRRSGDSPGSGEDLLDFGLSHRDGEGKPSAAQMAKHPWWQSNASLRLRCCPFHHPPACCHREDADICCWGSFP

SEQ ID NO: 41191 - protein, 78 aa, Zea mays
  Clone ID: LIB3067-031-H9_FLI.pep
KFLRGNAGGSECMSAIAGSYGYIAPEYAYTLKVDEKRTGARRRSSSSSRKGHTTRRRSRIFLVSRSAVARVGRTDGTW

SEQ ID NO: 41192 - protein, 159 aa, Zea mays
  Clone ID: LIB3067-032-A11_FLI.pep
RVHSRCIMWLRVVIPCPVIRERCILRAAHRGFRAPLGRCAASRPLLGPGVARRLRRGVGHGRDGALVLRNLGLRVPEVEVPRVAVDEPPPRLGQRWIRRRVARSIGRRRGRRRRHPPPCSCTRLARRNARGDVGSCARSRGGGGGDWVFFFSSPNAAGS

SEQ ID NO: 41193 - protein, 88 aa, Zea mays
  Clone ID: LIB3067-032-F8_FLI.pep
TGGVDGAGAEADQQLVHQPAEAALEAVGGDAVRGDGWVPPGPAQRRRVLRRRTPRGSNAGDVLRPAGSWGSSWPLAQLIQPTHATMKY

SEQ ID NO: 41194 - protein, 343 aa, Zea mays
  Clone ID: LIB3067-033-C11_FLI.pep
TVKSLLWQLLNGLNYLHSNWIIHRDLKPSNILVMGEGDEHGIIKIADFGLARIYQAPLKPLCDNGVVVTIWYRAPELLLGGKHYTSAVDMWAVGCIFAELLTLKPLFQGVEAKNPPNPFQLDQLDKIFKVLGHPTVEKWPTLANLPWWQNDHQHIQGHKYENPGFHNIVHLPPKSPAFDLLSKMLEYDPRKRITAAQALEHEYFRMDPLPGRNALLPSQPGEKIVQYPIRPVDTTTDFEGTTSLQPTQPPSGNAPPGGQSVARPMPRQMPQQPMVGGIPRVAGGVTMAAFNAASQAGMAGLNPGNMPMQRGAGGQSHPHQLRRKADQGMGMQNPGYPQQKRRF

SEQ ID NO: 41195 - protein, 84 aa, Zea mays
  Clone ID: LIB3067-033-C12_FLI.pep
TWSKCSSPSHVTSSRGLQRLIQSQRTRQSKLTSQTRVPRHQLPSDLHAAVHKQTHDSHNHWLFDTIYFLLGFYRKNLRKPLMIY

SEQ ID NO: 41196 - protein, 241 aa, Zea mays
  Clone ID: LIB3067-033-D11_FLI.pep
ALVEIACARTPAQLFAVKQAYHDRFKRSLEEDVAAHVTGDFRKLLVPLVSAYRYDGPEVNTSLAHSEAKILHEKIHKKAYSDEEIIRILTTRSKAQLLATFNSYKDQFTHAINKDLKADPKDEFLSTLRAIIRCFTCPDRYFEKVIRLALGGMGTDEDDLTRVVTTRAEVDLKLIKEAYQKRNSVPLERAVAKDTTRDYEDIMLALLGRSEEACLNSISSAPTCLMGPKNCIDVVSTWPWF

SEQ ID NO: 41197 - protein, 227 aa, Zea mays
  Clone ID: LIB3067-033-E11_FLI.pep
RETRVVLLSVFARRSIKEGEGEMAENPQLFGNGMPVPFYGEMFVLVRDGVEFHVDKIPSAPGGHVKTKGTIYLSNIRMVFVASKPVGNFFAFDMPLLFVHGEKFNQPIFHCNNISGFVEPVVPDNQNRALYSTHTFKILFKEGGCGTFVPLFLNLTASVRRYNEFEAQSAANMAPRVDPLQAAQTPVDDMMRHAYVDPNDPTKIYLQQPAPESQLRRRNYHGPADAN

SEQ ID NO: 41198 - protein, 124 aa, Zea mays
  Clone ID: 700473003_FLI.pep
LATLTNQVFMSDLDIQIPTAFDPFAEANAGDSGAAAGSKDYVHVRIQQRNGRKSLTTVQGLKKEFSYSKILKDLKKEFCCNGTVVQDPELGQVIQLQGDQRKNVSNFLVQAGIVKKEHIKIHGF

SEQ ID NO: 41199 - protein, 87 aa, Zea mays
  Clone ID: LIB3067-034-D8_FLI.pep
ICWKEWRCSPELRLRNKIFVSVCTNLGTDQAWLLFQILEALGFAPDASTLEIFIFHSCRETKLKSAHVYLSECFSRHIKPGVYSYNA

SEQ ID NO: 41200 - protein, 293 aa, Zea mays
  Clone ID: LIB3067-034-H1_FLI.pep
IVQVRRGYLPKDFVVPKSPERILFCGWRRDIEDMIMVLDAFLAPGSELWMFNDVPEVDRERKLIDGGLDFSRLDNITLVHREGNAVIRRHLESLPLESFDSILILADESVEDSAIQADSRSLATLLLIRDIQAKRLPCKESLISHVPRGTFSEGSWIGEMQQASDKSVIISEILDPRTKNLLSVSKISDYVLSNELVSMALAMVAEDRQINNVLEELFAEQGNEMQIRPSDLYLREEEELNFFEVILRARQRKEIVIGYRLEAAERAIINPIDKVSRRRWSPKDVFVVISEKE

SEQ ID NO: 41201 - protein, 158 aa, Zea mays
  Clone ID: LIB3067-035-C11_FLI.pep
GVLLVAPMCKISEDVTPPAPVLKALSILSCLLPEAKLFPQKDIGDLAFRDPRKRKVAEYNAISYSDQMRLRTAVELLKATKDIESQLEKISSPLLILHGAADMVTDPQVSKFLYEKASTKDKTLKLYEGSYHSILEGEPDDRISTAINDIISWLDSHC

SEQ ID NO: 41202 - protein, 219 aa, Zea mays
  Clone ID: LIB3067-036-A9_FLI.pep
EFLELSQRGNNLSVDLTVGDIYGEEGYPKIGLPASTTAASFGKVNSSKLSEYKVEDLAAALLNSFTYNIGQIAYFVANLSGLKRIFFRGAYVCGHEKTMDKISRSLKYWSKGEVQTTFLCHEGFLGTLGAFWSYENMGIDSLAAHEVIREVLLGAPYTGQFPSLPVTQQQENGEHGTLEGEVESLRHDNALLKAEVERLQRENALLRAKLVRSGETSTL

SEQ ID NO: 41203 - protein, 211 aa, Zea mays
  Clone ID: LIB3067-036-D10_FLI.pep
MPATCIVQVIKWSQLDCHLIFRWLQSMNVSTLLKAASRCCNTDFMLSSVLFRAIFRETIFHFDSNSQASLLLANPSTRHARFQGLPAEEAFAPPFNSPLCCRSRRGKSVVTPTYVRRIRDEAIRYTHHGGGALVLFAAPGGGSPDAEAEEEAAGSPHFGGRARGILVARKAAVRLISHLAGGAESFVAFTSIHSMPMHGRNLRIEWEEIGD

SEQ ID NO: 41204 - protein, 193 aa, Zea mays
  Clone ID: 700475738_FLI.pep
SAPLSRQAAAQATMVAALLRRALHLRRVLPSPAVTAAASQRLIPAFSTTPTPTPTTSQQNAATTTIDLSSDESRRRLLNRLVYRSKQRGFLELDLVLGTWVEQHVHAMDEANIRALLQVLDLENPDLWKWLTSQEQPPEDLNSNPVFAAIKSKVTDNLTKHASPETRSTPGQPWVRGWDDIKKGKDGPKYGNQ

SEQ ID NO: 41205 - protein, 202 aa, Zea mays
  Clone ID: LIB3067-038-E1_FLI.pep
GLGMTLRSFSAFATAATQLGAFGTLLNSTLRLRLLGLGHLSLLRLLLILGLLDALLDLTKSSFSSSITDFRLLSSLLLDHFQGSTHNGPRVWLLGSAAPLLDSFSMDVLLVLLPVHCCPGKLCRLQAVVEVALAFRVGKKENLRISTNKPDAFPRIDLLATEAAEFRLQHHLLGFKKSSLKTFERSGRRSRGDGGGRRGKRR

SEQ ID NO: 41206 - protein, 171 aa, Zea mays
  Clone ID: LIB3067-038-E9_FLI.pep
DEINTALVRPLPHGVKLHALIDACHSGTALDLPYLCRMNRSGQYVWEDHRPRSGVWKGTSGGEAISFSGCDDDQTSADTSALSKITSTGAMTFCFIQAIERGQGTTYGSILNSMRSTIRNTGDSAGVGGGAVTSLITMLLTGGSLSAGGLRQEPQLTACEPFDVYAKPFSL

SEQ ID NO: 41207 - protein, 364 aa, Zea mays
  Clone ID: 700475782_FLI.pep
QLLLPPRPAPPDVERPEIWLPVFHPVGEEGHQPPDRARHPQGRQDGRQGHQPCCAEQERGSQRRRHTFREQAPEPEGEGGARQHPDGGRDPQRDPQQREGGVPHRRHVQARQGHRAVPLQEEDQGPDADAFDGEVPEDPAGGAARVPAVHRAGHQVPGGAGLQDMDRGQVAVAAGAAVGAAGHALPPVRSAAHHRLPPGLHLRQARRHEAPQGRRGTRLLRVHDGARGGARVPRRRRGALPGRVGAPRGGRPRGGPDRRRVGGGAQARAHAGVSERAPGAGDRDGRRARPRPEITRRLFVVAWLLRRVGGCATEYYYYYQLLATIVQDCCKRNATELIGWFAYTNTLMYVRILQYCTRHGLPLL

SEQ ID NO: 41208 - protein, 92 aa, Zea mays
  Clone ID: LIB3067-039-C11_FLI.pep
TNEPGALMNLVEESTADDADDDDTKDCKGLFKNLKFYLSREVPRESLLFIIPAFGGTVSWEGEGAPFKEIDEDITHQVDSICNNLLHQSLTI

SEQ ID NO: 41209 - protein, 97 aa, Zea mays
  Clone ID: 700477430_FLI.pep
RVALATAKVHYADSYERCVRTHAIGLLGELGLVDADALPGGALAAGLVRGAQTALLPHLAVPLLPQLLPASLASAAAPCKRRGNHSVRASNISEHIR

SEQ ID NO: 41210 - protein, 136 aa, Zea mays
  Clone ID: LIB3067-039-G4_FLI.pep
PNSIFSYQPSGSEGREELVEVEWEGVELLAARVCLEGPEPVPEMVPPVLPHGAISPLQRIVQEIRHSPADERLRGEYHVDHIVEPSCTRVYRAKACYGSVLVEILWHRQTHKQREPQDEFCSEAVQVAELQETNTR

SEQ ID NO: 41211 - protein, 99 aa, Zea mays
  Clone ID: LIB3067-039-G7_FLI.pep
LGDDGLDHSRTHHSILHAPHPVVPALDLDISITLLYRIHIYHLQVTSDLVSRVGNPNACIALSIDRLASVTCKSKPDRIQTCVLLVFDRYLGRVFCWCA

SEQ ID NO: 41212 - protein, 177 aa, Zea mays
  Clone ID: LIB3067-039-G9_FLI.pep
GERLDDSYHPMAAFATGSTTARATLASPTSCQPAARRAPARWMPLRCSPPALGLRGGARSRRSATLRVEAKKQTFSSFDELLEKSEKPLLVDFYATWCGPCQYMVPILQEVSEKLGDKIQVVKIDTEKYTSIASRYRIEALPTFIIFKDGKPCYRFEGALPVDQMIEQIENALAVTK

SEQ ID NO: 41213 - protein, 412 aa, Zea mays
  Clone ID: LIB3067-042-E1_FLI.pep
ARTKGAFINVAYFEQFGVTLIEAAMHGLPVIATKNGAPVEIHQVLENGLLVDPHDQHAIADALYKMLSEKQFWSRCRENGLKNIHQFSWPEHCKNYLSRILTLGPKHPAFACKEDHKVPVKCRKHIFVIAVDSVNKEDLIQIIRNSVEATRSGTMSDLTGFVLSTSLTIAELQSVIVRTGMLPTDFDAFICNSGSDIYYPSQSSDVPSNSRVTFASDHNYRSHIEYRWGGEGLRKYLVKWASSVVERRGRTEKQVIFEDSEHSSTYCLAFKVINPSHLPPLKELQKLMRIQSLRCHALYNHGATRLSVIPIHASRSQALRYLSICWGIELPDAVVIVGETGDSDYEELFGGLHKTVILKGGFNTPANRIHTVRRYPLQDVVALDSSNIIAIEGFSTGDIRSAMQQKLGIPTR

SEQ ID NO: 41214 - protein, 379 aa, Zea mays
  Clone ID: 700439213_FLI.pep
PLKRTMEQDHSEKRSGIEAVIVAPSRELGMQIVREVEKILGPNDKRLVQQLVGGANRSRQEEALKKNKPIIVVGTPGRISEISAAGKLHTHGCRFLVLDEVDQLLSFNYREDMHRILEHVGRRPGGTSRDILGPLARRSERQTILVSATIPFSVIRAARSWGHDPVLIRAKSVVPLDSITVPRPALSQSDANPSSSSQSVNQAAVGSLPPSLEHYYCTAKAQHKVDTLRRCIHALEAQTVIAFMNNTKPLKDVVFKLEARGIKATELHGDLGKLARSTVLKKFKDGEFRVLVTNELSARGLDVPECDLVVNLDLPTDSTHYAHRAGRTGRLGRKGIVVTICEESEGFVVRKMRKQLDVAIKPCEFTEGELVVHKEEDVE

SEQ ID NO: 41215 - protein, 109 aa, Zea mays
  Clone ID: LIB3067-043-A5_FLI.pep
ASLHRSPFEGVFSGHASVMDQMFFHYIQPPPQGPKTKQNKTGAAMCMYSTPTTTILKPRAMVGFHHSLQCQQVRLISSTIHQNNHTHVRCHRLKSQCRSVLSSSPSQHP

SEQ ID NO: 41216 - protein, 227 aa, Zea mays
  Clone ID: LIB3067-043-B2_FLI.pep
RDTKIKFLSSVKQLTEEDKSAWSELVVSLKSEYPKYTPLLSKILQCVLQKGTDGDKISHEKEVIAAADEVVGSIDKEELAKYLSLNSDPEDEEAQKFKKKIEETRDQLADALYQKCLALAEIESLKSDESIEVSAKDIFEENYKELIKWVDVKSAKYGTSTVLREKRCGRPGTALKILNDLIQNESEPKKKLYDLKIQLIEEMGWNHVSTYEKQWMQVRFPPSLPPF

SEQ ID NO: 41217 - protein, 148 aa, Zea mays
  Clone ID: LIB3067-043-C2_FLI.pep
NIKSSNVLLGSDFEACLTDNCLSFLLESSEVKDDAAYRAPENMKSNRMLTPKSDIYAFGVLLLELLSGKPPLEHSVLVASNLQTYVQSAREDEGVDSDRITMIVDIATSCVRSSPESRPATWQVLKMIQEVKEADATGDNDSDLTSNS

SEQ ID NO: 41218 - protein, 269 aa, Zea mays
  Clone ID: LIB3067-043-D1_FLI.pep
EHLAVALDERRVNPNALIAAASFETLPNRSAYMPMNPPPPPPPGSASSTPAGASYFPLPFHLQQHQPQPQMPPPMAASSYQQYQQQLHQAHQLFQRDAQTITPEALQSVKAALATSDVLDPAAAANARPSDPSTSKKPIPRRAAGQSWEDPTLTDWPENDYRLFCGDLGNEVNDDVLSKAFSRFPSFNMARVVRDKRTGKTKGYGFVSFSNPTDLAAAIKEMNGKYVGNRPIKLRKSNWKERTDVEALQRQKNHVQRKPKIPKKSVLHK

SEQ ID NO: 41219 - protein, 128 aa, Zea mays
  Clone ID: LIB3067-043-H5_FLI.pep
TLSPARVTTARTNHQAKAREGKNKQETDGGCSEGVVDGGDERRGRGGAQGPGGPLPLELRAALRPPRRQGQRSQLRAGQEKAGAARRGQGRRGGGDEDRHVPQLLGPQLARASASFGFLQPYRARLQI

SEQ ID NO: 41220 - protein, 129 aa, Zea mays
  Clone ID: LIB3067-043-H9_FLI.pep
FKTKFGHNQESEAASSNEEWCILALKRLKEASPLALKVSLRSIREGRYQTLDECLVREYRMSMNGISKQFSHEFCEGVRARLVDKDFTPKWDPPALEYVTNDMVDAYFAPLGDSEPELKLPIESREAFV

SEQ ID NO: 41221 - protein, 144 aa, Zea mays
  Clone ID: LIB3067-044-C5_FLI.pep
FDSGSTYTYFTAQPYQAVVSALKGGLSKSLKQVSDPTLPLCWKGQKAFKSVFDVKNEFKSMFLSFASAKNAAMEIPPENYLIVTKNGNVCLGILDGTAAKLSFNVIGDITMQDQMVIYDNEKSQLGWARGACTRSAKSILSSFP

SEQ ID NO: 41222 - protein, 507 aa, Zea mays
  Clone ID: LIB3067-045-B5_FLI.pep
SPTPPPNSQVPPPLPRSPEELAARQSRAATAKILRGLLFPARHCAARVLHSRSAQPIIHRSIHHHHPAAAMCGGAILSGFIPPSGVAAAAAAAAKKKQQQRCRVTADLLWPGPGSKGAPQDKEEDFEADFREFERGLGEDDVDSAGEGGDPEVQELPPPEPTRFAFATAAKAAVDGVMTTTPKDVQGDRAVKKRGRKNQYRGIRQRPWGKWAAEIRDPNKGVRVWLGTYNTAEEAARAYDAEARKIRGKKAKVNFPDDDATGTRHRPTNAANAARLVAPPPPPKACADEMFNNLKNDDGDNNNNDDLFAMFAFGDNKKEAVPAAKPAAAEGGSGSGSGSFLVPAPAMAAAVPGNKRRSSATNIMVSVSDDQSSNSYGSGSSDLVGSWSWDDAAAAAAMTSDYTSSVFAPASYSYMQGGAPKRMRSSYGGAPPSLAHDAAMPGFGLDKVSYHHYQALPPYYVGSSNASVGNLGLLQQADDAPAPQDGASAGDIWSLDELLMLAAAGAY

SEQ ID NO: 41223 - protein, 179 aa, Zea mays; identical to SEQ ID NO: 38879
  Clone ID: 700439546_FLI.pep

SEQ ID NO: 41224 - protein, 161 aa, Zea mays
  Clone ID: LIB3067-045-C12_FLI.pep
IDCYSEASTSVFGQKLREQVEERLEFYDKGVAPRKNLDVMKAAIDSMVNGTSMDDDDIEKTDASPKKSKKKKTKTKADGDAMDVDKPSNVAGGEAEPGTEKKKKKKKHKLEEEAQEENGAADTTPKKKKKKSREASEEAEPKTATDGKKKKKKKAKAEDDE

SEQ ID NO: 41225 - protein, 145 aa, Zea mays
  Clone ID: LIB3067-045-D4_FLI.pep
PLSREGKIISGNVNVKNQISREDLKEAFKKFGAVRYVDFSIGDNSGYLRFEDSKAAEKARMSAVLADGGLIIKDHIVTLEPVTGEAEKDYWDTIRSIQGKYKDSRSYKGRASNNQRGGKRFNAKRDRNPDSEKNSNKARKVEAIA

SEQ ID NO: 41226 - protein, 170 aa, Zea mays
  Clone ID: LIB3067-045-G9_FLI.pep
ARALPLLLFLALLAGLAFLLYPSAPAARVADLRVDSFRAQPPVLGLGLALRLRVSNPGFVLPLRYRAVSAAVSYRGHLLGAAKAWPGSGELAARDEVYADAEVWVDAGKVLDDVIELIGDVAAGSVPLEIVSEVVGSIKVFRFHIPVKGLISCSVSISPVTQGIISQDCY

SEQ ID NO: 41227 - protein, 100 aa, Zea mays
  Clone ID: LIB3067-045-H2_FLI.pep
KVTSPVVLPSTSVVCSGEDDVEAECAGPSSKFKPGIMQSCLWTNYFSCIARQLRGSSESAQANKQKTSQSTRSCSEIDWKTVSGKLNCYINTCLVYNYKA

SEQ ID NO: 41228 - protein, 70 aa, Zea mays
  Clone ID: LIB3067-046-D1_FLI.pep
HPLITCPVPKGWDQGLLGMCVGEKRKLKIPSKLGYGPQGSPPTIPGGATLIFDTELVAVNGEPTNQSDEL

SEQ ID NO: 41229 - protein, 168 aa, Zea mays
  Clone ID: 700440886_FLI.pep
LHRLPATPPSVGRASGSRGGRRPHLRCSSGGGGGEPGQPPQEAVLEAISKIARSKGRVALTTNVVMGGTVMDDASDEWLALDQKVNSYPTDRGFTAIGIGGDDFVQSMVVAVESVLQESIPKGRVSQKLSSGGKYVSVKIGPIRVVSSEQVQAVYRAMRRDNRMKYFL

SEQ ID NO: 41230 - protein, 187 aa, Zea mays
  Clone ID: LIB3067-047-C10_FLI.pep
KLDNPVALSVSLELFLCAAAAAAFRSSSSYARAKPTNPLPPVLRPTHPGAMTLGSSGAGSSVVVPRNFRLLEELERGEKGIGDGTVSYGMDDADDIYMRSWTGTIIGPHNLFCDKDYPEKPPSVRFHSRINMTCVNHETGMVDPRKFGLLANWQRDYTMENILTQLKKEMAASQNRKLVQPPEGTFF

SEQ ID NO: 41231 - protein, 392 aa, Zea mays
  Clone ID: LIB3067-047-C11_FLI.pep
KKEKNHKEIPLTTTNPRRSSSAMMRDGVPPSVAGSGGAAGGDGPRRCSQCGHHGHNARTCTARPVKLFGVRIGDKPIRKSASMGNIAHLAAEGSGGREEGYGSDGERPHKKRGEAWTEEEHKKFLLGLNKLGKGDWRGISRKYVVSRTPTQVASHAQKYFNRQTNVHRRKRRSSLFDMVIDDPSDQLPLSRSSSQEMEQQHLDDPQPVAALPAPVVSPATVVPPVPVEVSASVPSPVQVPVPVSAPVMTSQPMEQDSDTTSSIAGEAGTVMPGAMPPYLYPMMIPPPYYHTAFVPMPCYGYVPFYCEPQGAAQAPHEVVKPVAVHSTPPLNAKDLYNMSELSLKGDSNANGGVPASPLPPKPIGRPERQSAFHGKGPTPTGGSSGGLIPAVK

SEQ ID NO: 41232 - protein, 93 aa, Zea mays
  Clone ID: LIB3067-047-C2_FLI.pep
HMVDQLTELQKKEQMFCEANKCLRRRLEESNQVIWQHAWEQSERHSEVQPQQLNGNNFFHPLDGAGEPTLQIGYPSEALTSSCMTTFLPPWLP

SEQ ID NO: 41233 - protein, 168 aa, Zea mays
  Clone ID: LIB3067-048-E1_FLI.pep
NLKMVKQILIPFDFLNRRSHQVDREGGLLGALGASPLGLPVVVAGAGVLVAVGARRHAQARRAALAAEEEARLLVRRRRAPPRAPAAALVWLETAGGDTTVHWGWECAGLGWPRSSGGVVRVRRGGAGRCRSWTRRRHETSGLNMNVRKRNPPHMSKKQLRITVELLM

SEQ ID NO: 41234 - protein, 161 aa, Zea mays
  Clone ID: LIB3067-048-G6_FLI.pep
GDAQTVLIVKDTEGSIYGGYASQPWERHSDFYGDMKTFLFKCYPQASIFRPTGANKNLQWCAVNFSSENIPNGIGFGGQPHHFGLFLSANFDQGHSFTCSTFTSPPLSKTNRFRPEVIECWGIQMRGAQDEKLELVKGTVLERFKEDRNMLKMVGLANASD

SEQ ID NO: 41235 - protein, 181 aa, Zea mays
  Clone ID: LIB3067-050-A3_FLI.pep
HESGTRTVDQNVWGEIRNFKKCLLKMFAQQDKDVLFMETVISLARQRRHCMIECIPVPCEVSSNAPMYFKKAIDEAEEEWTQHEMKKVIPTSASRNLRQVIPENFAYFHVEFGLDRGFVHVIDDESKFSAGFGLNVIRGMLQLPEEDMHRRRRHESMDNQRQAVASFMKDWEPFDWTKQLD

SEQ ID NO: 41236 - protein, 127 aa, Zea mays
  Clone ID: LIB3067-050-B7_FLI.pep
NIMFVVRRHHHYTSLATTRPVLLAEDNHLELVVPSKDTSTSYSAEDVCASTLEEGLGTLLCDNLLESVQGAVVLDGLTRCHHHATANSVNGVGGKASTNGYTPPEQEAGQEVILQGTNKKHWLQGII

SEQ ID NO: 41237 - protein, 191 aa, Zea mays
  Clone ID: LIB3067-050-G9_FLI.pep
KERFSKKYRHPLLDSKLTLKRLNAEARCMTKARRLGVPTPVLYAVDPVLHTLTFEHVDGLSVKDILLRFGSDGVNEERLNDIATQIGNAIGKQHDGGLVHGDLTTSNMIIKNSNNQLVLIDFGLSFTSTIPEDKAVDLYVLERALISMHSSCGDVMEKILAAYRKASKQWCSTQNKLAQVRQRGRKRTMVG

SEQ ID NO: 41238 - protein, 278 aa, Zea mays
  Clone ID: LIB3067-052-A10_FLI.pep
LLSFGLSVLILLSVYETRFRTMRSVSAWSSDGGDYPLPMLRNLVMVAGHSIYTSSRCGETESENSWFLEPYQKHAGQAATFLAHIKEGVGIAARDEGALLLFSGGETRRDAGPRSEAQSYWAIAESKGWFGNDEGVRSRALTEEHARDSFENLLFSVCRFRELTGRYPQNITVVSYDFKEERFAQLHRTALGFPEGRFFFSGTPATPSAREAALKGEAAVHSQFLEDPYGCLGSLHVKRLKRDPFHRTIPYPAGCPELKGLFSYCGPVPYSGHLPWTE

SEQ ID NO: 41239 - protein, 542 aa, Zea mays
  Clone ID: 700441654_FLI.pep
DLRSPRRSKMQIFVKTLTGKTITLEVESSDTIDNVKAKIQDKEGIPPDQQRLIFAGKQLEDGRTLADYNIQKESTLHLVLRLRGGMQIFVKTLTGKTITLEVESSDTIDNVKAKIQDKEGIPPDQQRLIFAGKQLEDGRTLADYNIQKESTLHLVLRLRGGMQIFVKTLTGKTITLEVESSDTIDNVKAKIQDKEGIPPDQQRLIFAGKQLEDGRTLADYNIQKESTLHLVLRLRGGMQIFVKTLTGKTITLEVESSDTIDNVKAKIQDKEGIPPDQQRLIFAGKQLEDGRTLADYNIQKESTLHLVLRLRGGMQIFVKTLTGKTITLEVESSDTIDNVKAKIQDKEGIPPDQQRLIFAGKQLEDGRTLADYNIQKESTLHLVLRLRGGMQIFVKTLTGKTITLEVESSDTIDNVKAKIQDKEGIPPDQQRLIFAGKQLEDGRTLADYNIQKESTLHLVLRLRGGMQIFVKTLTGKTITLEVESSDTIDNVKAKIQDKEGIPPDQQRLIFAGKQLEDGRTLADYNIQKESTLHLVLRLRGGQ

SEQ ID NO: 41240 - protein, 341 aa, Zea mays
  Clone ID: 700442752_FLI.pep
QAPERPAPAPPEKYGVNAAGDKPRRPGCLARRFFSPSPRNFLGSTPYYTTGVFPFGCHSVLSQPAAGAMLYIVGLGLGDERDITVRGLDAVRSCSKVYMEAYTSLLSLGLDPAALANLEKLYGKEITVADREMVEERVDQVLSEAADTDVAFLVVGDPFGATTHTDLVVRAKKMGVEVKVIHNASVMNAIGVCGLQLYRYGETISIPFFTDEWRPDSFYEKIQNNRQLGLHTLCLLDIRVKEPTWESLARGKKVYEPPRFMTVNTAISQLFEVEEARGGYAYRRETLCIGVARLGSDDQKIVAGPMEKLLDVDFGPPLHCLIIVGETHPLEEEMLEFYMIK

SEQ ID NO: 41241 - protein, 74 aa, Zea mays
  Clone ID: LIB3067-052-D2_FLI.pep
TLPTDSWDTKEPSNSSFQRNKPRGVGGTDTGPAVLDRLVGDGELSKVVADHLRLDLNLVEGLAVVDPNNASNHL

SEQ ID NO: 41242 - protein, 63 aa, Zea mays
  Clone ID: LIB3067-053-A11_FLI.pep
ACQLASLAHFLSSLGAYHMYLGCLDFMLFFFIFCSSFSNAIEQNCIVSNICHLDANVITKHLA

SEQ ID NO: 41243 - protein, 394 aa, Zea mays
  Clone ID: 700445177_FLI.pep
QRSQRRRSFRCASLGSCCRPPAIWRGPFGRQVEVGRGDRFLAAGGMDSHAAVSSSVGSGDGAAQPRRNSRKPKYSKFTQQELPACKPILTPKWVISVFVLVGVIFVPIGIVSLRASHQVVEIVDRYDDACVPANVTEKLAYIQNDSIPKTCTRNLTITKDMKQPIFVYYQLDNFYQNHRRYVKSRNDAQLRDKSKASETTNCDPEAKTVDGKPIVPCGLIAWSLFNDTYTLIHNNKTLRVDKKDISWKSDRDHKFGSDVFPTNFQKGPLQGGKILNPKIPLSEQEDLIVWMRTAALPTFRKLYGRIYVDLKENDTITVQLENNYNTYSFSGKKKLVLSTATWIGGKNDFLGLAYLTVGGICFVLAFAFTLLYLIKPRKMGDNNYLSWNRPTLGR

SEQ ID NO: 41244 - protein, 95 aa, Zea mays
  Clone ID: LIB3067-053-C7_FLI.pep
HTNSTDVRLRKGLGTMQHSTTLMSSSYKQIHKNDAIRMDIIYHAQRLPPIRLASCMSFCMIVTRLAWMAHRFAISNSSIKWNSAASCSARRASAV

SEQ ID NO: 41245 - protein, 320 aa, Zea mays
  Clone ID: 700446403_FLI.pep
TSITLVPRSSLYYIYNSGGGVLQQQQRQQQAGSLVFGDRGSLQEAVADLRGDVAHRSGAMRDEHRGRLGRRADLLHGVEVLGDEHHVHDVLGGGARHVDGEPQHAVPEPVHDGLPLARNAQPGQVLGFCLPLRALDLHDLLRLRLLVCSRPEPRSCVDLVHCALHMLVWLDVHDESLHDLKAISRHGLLKLFLHRPCDLVLLLESIVQMELGNACSDHVKDVGLDLGPCVAQFVESVTCFVSQSAVLNRCHHIHKNIVLCFCLTAHIQLLQPECEMPSYTLAGEPRHAVASWLKHAVKLAKLLPDGHSRLVNLNTAAQVA

SEQ ID NO: 41246 - protein, 127 aa, Zea mays
  Clone ID: LIB3067-054-C7_FLI.pep
EADLGDRLDFSSKSLDLPTTEISKSTRASKSADLSPVRSNQSKGPLQNLNPNLPEAAPPLQHRAGRPSSTAGRPSSVARRWPPLLYSRPPLLCSTPPAAPPLQPAAPRNYRIDRLCLLLYWHFETHL

SEQ ID NO: 41247 - protein, 216 aa, Zea mays
  Clone ID: 700450245_FLI.pep
AAASAQYTKGTGDLAGVIRYCPRSVGRSYTSAVCLVLSLLQVLEEQATLGGKEGGKHEGLHGHELDEDVEGRAGGVLQGVTNGVTDHSGLVAVGSLGTEGPRVLAGTSLDVLLGIVPCTAGVGSRDGDLHSRNQGTSKNAGESLDAKEGSNDEGSQHDQSARRNHLLDGSISGDLHTGCVVGLGCSLHQPRNGVELPADLLHHLQGSASNTLHGHG

SEQ ID NO: 41248 - protein, 198 aa, Zea mays
  Clone ID: LIB3067-056-A9_FLI.pep
LSSSCAAALRILAAPEVYLVAAGDALVRPAESLLLALAADVGPSPGLLRHDAELVAVAPVAQRPRVLLGRLVLRLLQQPDLRVREREGHVEVEVHQVPAVPRHRPAVGPHHHQRRDLPHVEVPRQRARRRAVVGERQPRHVAAGAQVPVLLPVHGDVHDLEVLRLAPEAAVDGRQLRRELDTRRAMVSREVEPHRLPH

SEQ ID NO: 41249 - protein, 346 aa, Zea mays
  Clone ID: LIB3067-056-C8_FLI.pep
TLLDQTKFKKNQPSNGFVTFSLTMGPEYHISQITDAVVIARYLGATLVLPDIRGNELGNKRKFQDMYNVDKFVRSLDGVVEVIEDIPDEVSAKKPAVIRVPNRVTESFITGTIQPIFQKNKYLRLAVIFSSVSLRPKETNNKDMDTTACLAMFGGLELKHEYSEVARKMLDRLQELSKKSDGKVLAIDLRTDLLEQKSCKTTRGARRKGCYSPDEVLAFLRSVGFSANTTIYLTETSWHKGLDVLKEEFPNTWYKGDIMPAENKAEFLKSSNADLARALDLEICSQSDVFVPAVAGLFYGHVTGKRIASGRTQILVPSQSSTSTHASDFISTYISNKNHLAYACYC

SEQ ID NO: 41250 - protein, 178 aa, Zea mays
  Clone ID: 700450309_FLI.pep
IDKITRPKPGWAHTSVPPAAAAAAVAATTTLAPTAVAATASVAAATTLAPTAVAATAAITAVTAPATIAAAAATAAVATAATATATGLGLVNGDVTAVELLAVHVLDSVEHGVLGGEGNEAEAARPPRLPVGDDLGVEDLAVGGEGILQRLVAGGPGKPADEATVLHISRRHRPSTKP

SEQ ID NO: 41251 - protein, 200 aa, Zea mays
  Clone ID: LIB3067-058-C7_FLI.pep
EGKPLPLIQKAFIGLTAGAIGACFGSPADLALIRMQADSTLPAAQRRNYKNAFHALYRISADEGVLALWKGAGPTVVRAMALNMGMLASYDQSVELFRDKFGAGEISTVVGASAVSGFFASACSLPFDYVKTQIQKMQPDANGKYPYTGSLDCAVKTFKSGGPFKFYTGFPVYCVRIAPHVMMTWIFLNQIQKFEKKIGI

SEQ ID NO: 41252 - protein, 73 aa, Zea mays
  Clone ID: LIB3067-058-D8_FLI.pep
SSSSSSTRLKTLSISLVKVAFGAIYAQVKKEASRWFSRSSRTSTSSRIRLATSPSQLLVVGLFTLATFLFCVL

SEQ ID NO: 41253 - protein, 304 aa, Zea mays
  Clone ID: 700453049_FLI.pep
SNTKPFKLMETSAATPTRPPHQAATSPSPSPSSSLRLWRPAAQRNMRNQWSHLSAAKEQWLAAVADGRAHASALVNVHLSCRNMPTMDLGVLKDMPGIRDKANSKLALREEQYSGMLLSAYKEMVRQLSYLVEASHSMRRFSKAAPNCPITQFSDRQDNLNDSGDGGGAPVFKWFSVLEFESLAQELVQMFVSEQKLKRLLLLEFLSIALKEGVELQTSLNWGDELYDGESNKLQSIGLQSGDAYSPPENWCAERLGSQRPGNLPLHEVLQVYLTTWHANMNINRSRIDEIFELVEEEMKIKLS

SEQ ID NO: 41254 - protein, 137 aa, Zea mays
  Clone ID: 700453333_FLI.pep
YNQHSKTVMAQRQGRGSGAVALAAAAAVLLCVLLHAHVAESAVFTVGDRGGWSFSTGTWTNGKRFKAGDVLVFKYDSTAHNVVVVNAAGYKGCSAPRGAKVYTSGNDRVTLARGTNYFICSIPGHCQSGMKIAVTAA

SEQ ID NO: 41255 - protein, 191 aa, Zea mays
  Clone ID: LIB3067-058-H9_FLI.pep
GKMWPDASDTDASSHYKLPFSRTVYIEKTDFRLKDSKDYYGLAPGKSVMLRYAFPIKCTDVIYGDTPDDIVEIRAEYDPLKTSKLKGVLHWVAEPAPGVEPLKVEVRLFEKLFMSENPAELEDWLGDLNPHSKEVIKDAYAVPSLATAVLGDKFQFERLGYFAVDTDSTPEKLVFNRTVTLRDSFGKAGPK

SEQ ID NO: 41256 - protein, 95 aa, Zea mays
  Clone ID: LIB3067-060-A11_FLI.pep
TEIKDGSTKHIHQTPCKKSESRLLPDWHFLLHQAPQQLSLEEPQQAGVSFQQTWILLAIFHHALVLLQHIFSEHPSVCPHFHAEVQICSTMPKNH

SEQ ID NO: 41257 - protein, 199 aa, Zea mays
  Clone ID: LIB3067-060-C4_FLI.pep
NDDEGSLCCGRSGRGGGRGLPCRAAGRGRRGRVRCDAAGHGGAEAGAVRVGGGGPRLRAVRLLLQRGARHREAEPQVPLRRHAVQHRQERRDQGRGRHHHPQTLQPRRPPRWLQVRRLHPAMSGGEFSRPDLLHGMPEYHRSASSCVVCPCLSVSLYVLPIINKDMRVPDMCNSSSMVRVITRHAYSYSCVQFWVYRDM

SEQ ID NO: 41258 - protein, 122 aa, Zea mays
  Clone ID: LIB3067-060-D11_FLI.pep
YLPPCAFTLLSICCWFPCAVKPVKGDALLFFSLHPDATTDSDSLHGSCPVIEGQKWSATKWIHVRSFDLPVKQPGSSDGCEDDNILCPQWAAVGECAKNPNYMVGTKEAPGFCRKSCKVCAE

SEQ ID NO: 41259 - protein, 220 aa, Zea mays
  Clone ID: LIB3068-002-F12_FLI.pep
FIKHYDEHALRTPSNPFLLCVRCSIELLDHPKDYTTPPEELVLLPASATLGDLKVQASKAFQETYLMFQSFQTEQLPDFPNFSDTTPVKHVLGSGQLLRVRGRCTGDYRRIVQFRMERGLENWTVDCSCGAKDDDGERMLACDICGVWQHTRCSGISDFEEVPENFICRKCASPRKGDGRGGGGSNGGGTMEVTASGRCKDEIGASVGGAGKYGRMATVG

SEQ ID NO: 41260 - protein, 240 aa, Zea mays
  Clone ID: LIB3068-003-H12_FLI.pep
LTPRQASLVHCWPRSSISCVSAGGVAAMAASKPILYSAWISSCSFRVRIALNLKGVDYEYRAVTRNDLDYEKINPIKYVPALVDGDFVVSDSLAIILYLEDKYPQHPLLPQDLKKKAINLQIANIVCSSIQPLQCYAVIGLLDGTLGSNQSLQIVRNYTDKGFKAIEKLLEGCDSKYATGDEVQLADVFLAPQMYAGVTRFGIDMSKYPLLERFYKAYMEIPAFQVAVPEKQPDAPASPY

SEQ ID NO: 41261 - protein, 451 aa, Zea mays
  Clone ID: LIB3068-010-H4_FLI.pep
LVLQLTVCSHLFLFPNRARALALPPPPGTAAVVEATQEEEEDQEWEAALQKWKTKTYALSVPLRVVALRGSFPPSWIKDFVEAQGKRLKFSPELRANLDGIFSEMSQCMDKGQVQPKSAMAADVVSLGDSWLGYAIRKGLLEPIKNAEEQDWFHSLSDRWKVHLCRNQNGEADPNGTIWGVPYRWGTMVIAYKKDKFKRHNLKPIQDWEDLWRPELAGRISMVDSPREVIGAVLKHLGSSYNTVDMEMDVNGGRAAVLNSFTQLQKQVQLFDSMNYLKSFSVGDVWVAVGWSSDVIPAAKRMSNVAVVVPKSGSSLWADLWAIPCATRFQTDQIGSRARGPSPLVHQWFDFCLQSARSLPFRQDVIPGASPLHLESPVPEVPQDKNKRKPKLDTNLVSGVPPPEILERCEFLEPLSGKALEDYQWLMSRVQRPRLGLFGNMLQKMSAVLDF

SEQ ID NO: 41262 - protein, 284 aa, Zea mays
  Clone ID: LIB3068-011-G12_FLI.pep
HGQLAPGRRRDDHHHHMLHEQQAPPPAVAAPPPSINPDDDGARDVEVTTFRDIHPLTPDAPPPASASWDTASHRSLSSSDDQQYMTMSREFTAMVAAGATMQTGGYDGAADQLTSIGEDELEETNPLAIVPDSHPIATPARSRPSGLEVVPAGPAPQPQPQPPAHLEASQVKKEEVETKVTAWQTAEVAKINNRFKREDVVINGWETEQVEKASAWLKKIERKLDEQRAKALEKTQNDIAKARRKAEEKRASAEAKRGLKLAKVLELANFMKAVGRVPTKRSFF

SEQ ID NO: 41263 - protein, 181 aa, Zea mays
  Clone ID: LIB3068-017-G3_FLI.pep
RAGFAKQSPRAQDEDACAGGIGICAGGCGGAAPAPATGGRLRGRRVQGRRPGRLGRAAAVQARRLQALGQIHPLRARRLHLVPVPAEPGLGAAASAGGLRVLRPVAPRGQARRRQLLIQPHRARPRLLRQRRAGPLPQGPEALGRRALAQRHLPPALRHRPRRARAHPRRRPARRVRVRGR

SEQ ID NO: 41264 - protein, 897 aa, Zea mays
  Clone ID: LIB3068-019-G10_FLI.pep
DVRRQSNDFQGVMNHLYDVMYEFSFSLPPDYALVIRALGSLEGTAKALDPEFKVIESAYPFVIGRLLADPSPDMRKILRELLICDDGSIRWNRLERLIAAISEQSSESSSASGADSSENANGSPEWRSFDMHSVIAATENPNPPGRVGSLSLSSPKPYAALLSLPVSPSRAGGGADEIPAMAGPTSRLLILARRADRRRCLPFLVPRALQAAPPTFSPALPLPPCLPASTPVMSYSSAFTSVHGERPSSEYAKIRKESLETQFGRILGSSSRRHFADRGFGPFLALYRAATISFHVVKLTIWHLLLNDMHKRAEKFRETLIRLGPFYIKLGQALSTRPDILPSAYCQELAKLQDQIPPFPTRIALRTIESQLGSRISDLFADISPEPIAAASLGQVYKAHLRSGELVAVKVQRPGMAPLLTLDALLFHMIGGQMKRFAKARKDLLVAVNEIVRHMFDEIDYILEGKNAERFATLYSHGSSGVNSEASTSIKVPKVYWNYTCKTILTLEWIDGIKLTDAERISKANLNRKRMIDEGLYCSLRQLLEEGFFHADPHPGNLVATEGGSLAYFDFGMMGDIPRHYRVGLIQMLVHYVNRDSLGLANDFHSLGFVPEGTDLLAVADALRFSFGDVRRQSNDFQGVMNHLYDVMYEFSFSLPPDYALVIRALGSLEGTAKALDPEFKVIESAYPFVIGRLLADPSPDMRKILRELLICDDGSIRWNRLERLIAAISEQSSESSSASGADSSENANGSPEWRSFDMHSVIAATEDLFDFILSRKGWRVRVFLVQDIVNASDVFLQEATFPYVYAKVGKLGDLNPERSKMIRRLVNTVQSFRQAINLAPDAWSAMLIRTLLKPESQKFVLDVFLALANHSSYKIPETFWLFMSRFLNYLDKQDIL

SEQ ID NO: 41265 - protein, 141 aa, Zea mays
  Clone ID: LIB3068-025-C2_FLI.pep
DLRRRYSSHWLLSSSSLQLCHSAKGRRRKEEGRQSPPWTPPERARGRAATSAVSATCLTRRSANAWTSRRSGATQSASGASGTPPTVASTSRPCTPTAAPTSSSTSASAAAVLPGPPQLLAPSRRVHMHAIVAVCAASEKN

SEQ ID NO: 41266 - protein, 196 aa, Zea mays
  Clone ID: 700454936_FLI.pep
TVTKTTITELLLSYSSVIDNKVKHNRRPKCWVNKHRSTTTQQYSPTLSMKLTRSSTSVLDLLLGPQLVAVTTLLLAAVDSPRVQSCIAFAADHLVLVVLASERLQRGLNDSTAEPKHEVERRLLLDVIVRKGAAILQLLPGKDQPLLVRRDPFLVLDLGLDIVDGVAALDLEGDGLPCQRLHEDLHLVGPGRSPGC

SEQ ID NO: 41267 - protein, 205 aa, Zea mays
  Clone ID: LIB3068-025-D8_FLI.pep
CSISTSSSVTVKQCRAPRTSFSVPLQQIICPRKQNQAKPHLNSPPLGRAEAQPAMGWLATYSMARGSESILSASMSGISSLNSSSMAMTTSTVSRLSSPRSFSKCASGVTLEGSILGWLLMTSRIRSMTSSRVRCASWEDMGRASHRPSACGWDAPVPAAARASEGEGERRMRRRIAGRSAAAAISRCGFGFYWPVHRGGNELTR

SEQ ID NO: 41268 - protein, 204 aa, Zea mays
  Clone ID: 700455686_FLI.pep
TVTKTTITELLLSYSSVIDNKVKHNRRPKCWVNKHRSTTTQQYSPTLSMKLTRSSTSVLDLLLGPQLVAVTTLLLAAVDSPRVQSCIAFAADHLVLVVLASERLQRGLNDSTAEPKHEVERRLLLDVIVRKGAAILQLLPGKDQPLLVRRDPFLVLDLGLDIVDGVAALDLEGDGLPCQRLHEDLHLVGPGRSPGCCDCWCGGF

SEQ ID NO: 41269 - protein, 140 aa, Zea mays
  Clone ID: LIB3068-026-B2_FLI.pep
ENRRASVIWDQEAGRYVSVPAQTRMGSGVDLPARNPRFLTNPSGEPSSHVRSVVPGNASSSAMPSGQPSERLTYSGQSIFFGGPMLSTPGVGANRNEADARARPEGSRDPNALCEKARTGSGSSPIFAPGAFQRNPPFDK

SEQ ID NO: 41270 - protein, 122 aa, Zea mays
  Clone ID: LIB3068-026-C9_FLI.pep
GRAATIGHRALLLLHGEVAPRVHRRQPCGQPKLLDLEEVFLGVAPYLDRRLGADMLLDLLPVASEHEQRVDEAGVLLGAPPLAGLGDGVGLPRLLPGHLAAPAVRGRVIPLHGPAQLSSADA

SEQ ID NO: 41271 - protein, 103 aa, Zea mays
  Clone ID: LIB3068-026-G1_FLI.pep
SFLEKSMDVYLGRGARREQGEDDCHRVSERGREVHDLRPVRRRQRGVYCHDVLIFFYPLPPEKRGKQIRVYLYLHMVLVYHACTFKNIFPRNGIEQLRACLHI

SEQ ID NO: 41272 - protein, 422 aa, Zea mays
  Clone ID: LIB3068-027-E6_FLI.pep
RAQQHLASRLLQLPQPNPLSLAHYLISLSPVHHTGQYGWPVGAKAPLLPFHPISTGRVNGRDCMHAGSASGRCCRVVAAAGHFLDSTNLLLIDIVDSLCYYTLTNLRLHGNGHVGLDRQLLRRRHGSMDAAVGHAGRICPCSRSCLGGAGAGDRLHVHVDDHDHLRLVHLLHRRRRSFDVDVDGVHLGTAARPGLGHHHHLLGVLRQLRLLHRHLHRDRRGLLVPVRHVQRHLRDAEDEAQHVGERHEHVPLQRAVREPDHGAQHQEEGERDGHELHALGPDHLPHDAERRGEYAERDADADPSEHAHAEAGAGDHHGGERGESKDADVEPQQHLGRERPGGLGRVHQVRGQVRRLDHAPDAVDGHQQLGAGLEQRVEDPQHAAEQRHHVRGRLEPLRRLLAVHAVERRQRRKEHHQRDYVT

SEQ ID NO: 41273 - protein, 201 aa, Zea mays
  Clone ID: 700456843_FLI.pep
GHRHDTSSAGGGRAGGGRTLRSPPTQPPPLPDKATRSEMPLYDCMLLLKTTVTREVLAELVTRVARRACQRNGVVTDVKSFGKVSLAYGIRKLDGRHFQGHLMQMTMMVPPSFPQELHYLNKEDRLLRWLVVKHRDTVYGLEFLNADGGRDELRSFSHGHTKGDYDIEIDSDDEDSDDSDDEEYAIEEEEEEEAANDEEKK

SEQ ID NO: 41274 - protein, 70 aa, Zea mays
  Clone ID: LIB3068-032-H5_FLI.pep
NAVLFDQATYDKLLSEVPKYKQITPSILSERLRVNGSLARRAIKDLMAKGLIRMVFVHSSQQIYTRATNT

SEQ ID NO: 41275 - protein, 211 aa, Zea mays
  Clone ID: 700570762_FLI.pep
LVIEAVVENEAVKKKLFVELDKVTKPSAILASNTSSISITRLASATKRPSQVIGMHFFNPPPVMKLIEIIRGADTSDEVFAAVRSFSERLGKSVICSQDYPGFIVNRILMPMINEAFWALYTGVATKEDIDAGMKLGTNHPMGPLQLADFIGLDVCLSVLRVLHSGLGDSKYSPCPLLVQYVDAGRLGKKRGVGVYSYGHRPSSVRPKSSL

SEQ ID NO: 41276 - protein, 309 aa, Zea mays
  Clone ID: LIB3068-033-A2_FLI.pep
AFGNGLSTTCVVNIGAQVTQVVCVEDGVALPHTALALPYGGDDISRCLLWVQRRHGTWPNFQTDPMSNPIDMLMLNKIKESYSQIKTGSIDAAVLVHSYDNERSGGHQKTRLSAINVPPMGLLYPRVLVPEEYPPPPRSWFQDYDDMLEDTWQTSDGLYPSGNGGFGMWDSYPMFPTRLKKFDNIGLVEAIISSVLSTGRVDLQKKLFGSIQLVGGAASTAGLAQVLEQRVRTKISANQSIEKVEVLQSRTYPLFVPWKGGVILGVLDIGKDAWIHREDWIKNGVHIGSGRKYKDSYFLQAQVMCYYNV

SEQ ID NO: 41277 - protein, 225 aa, Zea mays
  Clone ID: LIB3068-033-B10_FLI.pep
FLYPIYSLICVAAAAVIDSLPDFFHDKYSSDQSIFEKIAKGLRPLILGFILCASHSRTFSMLNGYGAPLQIYQHLEHHDDTGPGSILCVGSEWHRYPSSFFIPSYISEVRWIDDGFRGLLPFPFNETLGGTTAAPSYFNNKNKAAEGQYLKDIGACNLLVELDLRRPYPSRGSDLSTWEALAALPFLDRELSPALYRSFFIPYRWQQNNVFGLYKLLRRLHPDHA

SEQ ID NO: 41278 - protein, 69 aa, Zea mays
  Clone ID: LIB3068-034-B2_FLI.pep
LAWGQLRRQLGLRQPDALQRLINKLATSPCMHALLLENTIRPDRYDDGYVLLYYTQIQQSRIKQINVYS

SEQ ID NO: 41279 - protein, 83 aa, Zea mays
  Clone ID: LIB3068-035-D6_FLI.pep
VTGTPAATRTPRRSSAHGPTAPGTPPPTAPRSCARSPRRPRRRPRRRSRWMSSHSTSASSGSPGAGRLIGSSPCSRIRESRMQ

SEQ ID NO: 41280 - protein, 324 aa, Zea mays
  Clone ID: 700570906_FLI.pep
TSAVYQGRSSELGRMPDIQLGCHTIRSHGTKVATLHMYDWIILLCLAVLDGLLNIIEPFHRFVGRDMMTDLSYPLKGNTIPFWAVPLIAIVLPLVIFAVIYFKKKNVYDLHHGILGILYSVLITAVITDAIKDGVGRPRPDFFWRCFPDGKPNFNNITTDVICHGEKSVIKEGHKSFPSGHSSWSFAGLGFLAWYLAGKLKAFDRKGHIAKLCLVFLPLLVASLVAVSRVDDYWHHWQDVFAGGIIGLTVASFCYLQFFPYPFDNDALWPHAYFQQLAETHSNGNANSINIRPTEFEDEPDDHGDIVLRDTSPILESMESGRRP

SEQ ID NO: 41281 - protein, 115 aa, Zea mays
  Clone ID: LIB3068-035-G6_FLI.pep
WPRCSASSRSWSSCTRRRPTRCAASGPRTPPSPAGSAALWRRRSTPRWTPRRGTMRRGGRRGWRRTSTWAGSTTCTGCSPCSAQSTCSFSSSLPSGTSTGSGSTCRPQLLLISSS

SEQ ID NO: 41282 - protein, 272 aa, Zea mays
  Clone ID: 700571084_FLI.pep
RQRGVQGQRQRAQGEPPAGHAVRVPGADRGGPAGPGERQHGALAGHHGQHLPALRRRVRARRRALPPAAPGLLVRGAVPVPHQLLPLLRVQGRPGQRAARVRPVPARRRRGHRRRHGAQVRQHAVRAGRLGVRRHPEAGPHRRRRQGLRDRVAVQGRPRRGRRHAGVRQDVHRQPAAEDRDGAGHADEAVGARRRLRLRALQREPQARPGLRTELRLALPRRHARVRCRPAGIPSTHGLFTRHQRGGPFLRLHQLRSHCIDHSQLILLRALP

SEQ ID NO: 41283 - protein, 192 aa, Zea mays
  Clone ID: LIB3068-038-D3_FLI.pep
PTYLTTFSTPVGSDAVTLNLSGMGKGEVWVNGESIGRYWVSFKAPSGNPSQSLYHIPREFLNPQDNTLALFEEMGGNPQLITVNTMSVSRVCGNVNELSAPSLEYKDKEPAVDLWCTEGKQISTIEFASYGSPTGDCKKFGFGRCHAGASESVVKQACLGKSGCSVPVTPIKFGGDPCPGIQKSLLVVANCR

SEQ ID NO: 41284 - protein, 124 aa, Zea mays; identical to SEQ ID NO: 41198
  Clone ID: 700571838_FLI.pep

SEQ ID NO: 41285 - protein, 432 aa, Zea mays
  Clone ID: LIB3068-038-G2_FLI.pep
HEKKKITMSSWVTKSLPFLVAPAVASPTAALQLTSMDRALVSLPVSAMFVYENPIDRPAETIRRALSRALVPYYPMAGRLAVTGDQLKLACTGEGVAFVGASASCTLQDARLCDRRPVVSVEDLSISYAGQYSEDPPLLLVQVTEFSCGGFVVGVTWNHVLTDGAGMAQFLKAVGEFARGSPSPSVLPMRVDDTLSELPPPITTMTKALVSSKPRDMPSSYITVPLSFVDRIKGEFRRRSYGSGSGQVSTCTAFDVFTAAIWKCRARATIGSAASPDAPTALAFTVNVRKPAKAKDGYYGNVFAFGLAASTLREVADGDILDLVTLVRDAKARVPFTFADGAAHIADEMGGRLKGLDGYDTLYVTSWWNLGLDDVDFGSGGAERVIGCMERKVVPGCFLCGKKDKAEGVAAMALCVKQEHAEAFHAELRSLK

SEQ ID NO: 41286 - protein, 200 aa, Zea mays
  Clone ID: 700572887_FLI.pep
RADLRVPGGVRVLRQGRRRVHHGGGAGDGDGVAAGAAAQRGGAARDDPRRRRRRQRRHRLRRVPGPHGTQDRGGRRRRRRRPRRGAARGVQGVRQGPERVHLRHRAPPRHDQPRREAHGRGGGADDPRGRPRRRRPGQLRRVRQDDDALRRRRRRRRSHGPPPMNPSPPFISLALPITSLADGVADHSIRLCFPFLFHPL

SEQ ID NO: 41287 - protein, 391 aa, Zea mays
  Clone ID: LIB3068-043-C2_FLI.pep
VLNMLACWIEDPNSEAFKLHIPRVYDYLWLAEDGMKMQGYNGSQLWDTAFTVQAIVATNLIEEFGPTLKLAHNYIKNSQVLDDCPGDLNDWYRHTSKGAWPFSTADHGWPISDCTAEGLKASLLLSRISPKIVGEPMEANRFYDAVSCLMSYMNDNGGFATYELTRSYPWLELINPAETFGDIVIDYPYVECTSAAIQALTSFKKLYPGHRRKEVDNCISKASNFIESIQKSDGSWYGSWAVCFTYGTWFGVKGLIAAGRTFENSPAIRKACDFLLSKELPSGGWGESYLSSQDQVYTNLKGNRPHAVNTSWAMLALIDAGQAERDPTPLHRAAKVLINLQSHDGEFPQQEIIGVFNKNCMISYSQYRNIFPIWALGEYRCRVLGAGKSWR

SEQ ID NO: 41288 - protein, 247 aa, Zea mays
  Clone ID: 700573623_FLI.pep
AYPTVNEDYLKAVDKAKRKLRGLIAEKNCAPLMLRLAWHSAGTFDVATKTGGPFGTMKNPAEQAHGANAGLEIAIRLLEPIKEQFPILSYADFYQLAGVVAVEVTGGPDVPFHPGRQDKPEAPPEGRLPDATQGSDHLRQVFSTQMGLSDQDIVALSGGHTLGRCHKDRSGFEGAWTSNPLIFDNSYFKELLSGEKEGLLQLPSDKALLSDPSFRPLVDKYAADEDAFFADYAEAHLKLSELGFAEA

SEQ ID NO: 41289 - protein, 470 aa, Zea mays
  Clone ID: LIB3068-043-E3_FLI.pep
NIFAFWRVSTRSYCTVSIPFNEMARQSALSLVRDRAKTGALKRLTLSSSKTAGRNSSGRITSFHRGGGAKRLQRKVDVKRDACSTGIVERIEYDPNRSSSLALVRWVQGVHFRRPKSPQELSAMSQIQQSATADVSGRFSLAALSSRVHKDKEASALYSALGNGDISASLKSGASSSLPRIAVAGAKPTFFAQAKADEEGKHTFSFTEIQKWATDDVLWAQRMKRQAALSWQNELKKKHLLKTQANSFSSLAAKTSGTSKGPKGKADCIPVSYILASHQCMPGSTVMNYNSSKPSKSSASSPYSLENQFDIIDLNSKVGNCIPLANARIGTWVHNIECRPGQGGKMVRAAGTYAKVVQEPGAKCVLRLPSGAEKAVDSRCHATIGIVSNPSHGTRKLRKAGHSRWLGRRPVVRGVAMNPVDHPHGGGEGRTKGGRPSVSPWGKPTKAGYRSPSVASRKAFAGTKLIQFRK

SEQ ID NO: 41290 - protein, 130 aa, Zea mays
  Clone ID: LIB3068-044-D8_FLI.pep
QGQPVCAFDSLLLQLGFRGFLGAERTAAAAAAMAAAEEEIAVKEPLDLIRLSLDERIYVKLRSDRELRGKLHAYDQHLNMILGDVEEVVTTVEIDDETYEEIVRTTKRTIPFLFVRGDGVILVSPPLRTA

SEQ ID NO: 41291 - protein, 209 aa, Zea mays
  Clone ID: LIB3068-047-E9_FLI.pep
GTVTRTSRSNPTLGTKLKETTHHPAGRHRTVTTMAAQEGGMRLVSHPIAAHDGRLPRQYTAEGQGAKKDMSPPLEWYGVPEGARSLALLVQDIDADPVVPWTHWVVANIPPATRGLPEGFSGAAGAGAGAGRDQLGGLQEGVNDWKQPGWRGPVPPSHGHRIQFKLYALDDEVHLGNKVTRDKLMEAIDGHVLEEAELIAVFQGVVANN

SEQ ID NO: 41292 - protein, 254 aa, Zea mays
  Clone ID: 700574379_FLI.pep
QNIFVLPSLLSLPAWSQYNLIYAGAALHCTALHCTRDCSLALDCAPSLSTQRKTQQEPELPPKSQPLYVQSIVGFRSVPSRPGRSAPQRDGGLVHQRPGGLRDAVRLPLRGLPARPGAVHAAHEGGEAPPVVRVEEVGAHAQVREGHHPVLGGALGGRGDHLVVRRAVVPRQRVLAREAHPGGARRGAHLPDQRLRHAPRLLRLLVVPHLHAGEVEHGAVARQEARDGEVPVVAPRVVVARGELGGVGPAAVVP

SEQ ID NO: 41293 - protein, 361 aa, Zea mays
  Clone ID: LIB3068-047-F1_FLI.pep
EEGEAMDLNECERRGPAGPDPLSRQGSIYSLTFDEFQNTLGGMGGGLGKDFGSMNMDELLRSIWTAEESQAMASASASASASVSALGAAVDGGAALQRQGSLALPRTLSVKTVDEVWRDFVREAPPGTAGGEEPQPNRQPTLGEMTLEEFLVRAGVVRDNPAAAAAAVPAQPVAPRPIQAVSNGASIFFGNFGGANDAGAGAMVFAPVGIGDQAMGNGLMPGVAGMAGGAVTVSPVDTSVAQLDSMGKSDEDLSSPMAPVPYPFEGVIRGRRSGAGVEKVVERRQRRMIKNRESAARSRARKQAYTMELEAEVQKLKEQNAELQKKQEQIMEMQQNQVPELVSNPYAQKKRCLRRTLTGPW

SEQ ID NO: 41294 - protein, 405 aa, Zea mays
  Clone ID: LIB3068-049-C2_FLI.pep
FLKTAEVLSLPTCRPTSSYNQLVAGVYIYNMMEAEKNGNILMQKYEVGKLLGQGTFAKVYHARNIETSQSVAIKVIDKDKIFKVGLMEQIKREISVMKLVRHPNIVQLYEVMATKSKIYFVLEYVKGGELFNKIAKGKLREDASRKYFQQLVSAVDFCHSRGVYHRDLKPENLLVDENGNLKISDFGLSALAESRRQDGLLHTTCGTPAYVAPEVISRKGYDGAKVDTWSCGVILFVLMAGYLPFQDSNLMEMYRKIGKADFKCPPWFPSDVRKLVSRILDPNPRTRMPITKIVECFWFKKGIDNKLIRKNIEMKGKVSALTDVNVVFSSTGIGSNNNKLVDVEQDVAKITNLNAFDIISLSEGFNLSGLFEESEKRKEARFTSSQSASTIISKLEDAATCSKMT

SEQ ID NO: 41295 - protein, 51 aa, Zea mays
  Clone ID: LIB3068-052-B11_FLI.pep
LRTTLRKSPSMSTSRVATLWLSTRSRVQFLRLGNGSGSARQVCAGMPVYPF

SEQ ID NO: 41296 - protein, 163 aa, Zea mays
  Clone ID: LIB3068-058-E2_FLI.pep
YTAVQVVTVKYTCSSTLASKSEIEAAAGKPDCVEESGESELLLVHVEQQQVVLQLEPTDDGRRRLPRRLDEAEASRVGVHLHHGVAAEHREVLPALQHHVDLRHGVAEQTLRELGGVVAPVERRHRGDPGHPGEVGPGRRRVERLDERSVHVGPERRVRDRGA

SEQ ID NO: 41297 - protein, 198 aa, Zea mays
  Clone ID: LIB3068-058-E6_FLI.pep
SCCGRRDERTPERFRHRWAQMPPPPPPPQQQQQQSGMTLCRLPTATLGLPLSLPCLLPRSRPRLCFAARHARAVAARASSSSPSPDSSFGSRMEESVKKTVADNPVVIYSKSWCSYCMEVKALFKRIGVQPHVIELDHLGAQGPQIQKVLERLTGQSTVPNVFIGGKHVGGCTDTVKLYRKGELASMLSGLDININNS

SEQ ID NO: 41298 - protein, 347 aa, Zea mays
  Clone ID: LIB3068-059-F6_FLI.pep
VQLSLSMASPAAVLVSNGGISPHAPPSAAAFLVSTPGAYTTAPGTLLWWTRHLRRLAESATLLARSRPNLLGLPLPRSRALDLDLLSIHSLVNPSVRVAIREMRTRLPMTKDEDLALTALVRGADPISGGGGAGLDVFVHVGTYSPPIFGESGARLAAAGRGRDAAAAKYASWARIRKSLEKMRPPGVTELLLTNDGDHILEGAVTNFFVVCQQEECESNGKFSNQTMATKFEVQTAPLSDGVLPGIMRQIVIEVCHDIGIPVREVSPSWSMNEFWKEAFVTSSLRFIQHVESVQVPLFWEDIQSKTWSDVPWAVKKFQGVGCITTQIQRELLKRARSDEYGVNGLL

SEQ ID NO: 41299 - protein, 106 aa, Zea mays
  Clone ID: LIB3068-059-G7_FLI.pep
WYIEHDLFEQLIKETSSDTEQTSQIDHSISATSCNTVQYITSLVTPHYATTLSSRGGTLISRNRTTQRARRQQRTIMIRTRAFRRRAARYRALRGGCRSRRRAKPP

SEQ ID NO: 41300 - protein, 141 aa, Zea mays
  Clone ID: 700574409_FLI.pep
GVRDRHHLRARLHRLRHRRRPQEGLPRHHRAHRHRLHRRRQHPRRGALQRRLHEPRPLLRPRRRRGRLRRQLGLLGRPAHRRRPRWPRLRRRLHRRLLPAGRRPGLRLSSVLRSSGLSSSNAAARFDRRRHLLCSSFHHVM

SEQ ID NO: 41301 - protein, 180 aa, Zea mays; identical to SEQ ID NO: 37897
  Clone ID: 700575162_FLI.pep

SEQ ID NO: 41302 - protein, 242 aa, Zea mays; identical to SEQ ID NO: 39143
  Clone ID: LIB3068-059-H10_FLI.pep

SEQ ID NO: 41303 - protein, 338 aa, Zea mays
  Clone ID: 700575242_FLI.pep
SRHTDTDMPFFFLLNLKTYRYDRDTQTRTLAAVQHVTIARAAAPGYGRWARTTHTHTYQSFLSSSLLALIGCARTVHAAGCSPVEASREVREHVLSSDRDRDCDVLAVDRAVRGAVAAAVGHRRLTAGVVGGGGVVGGDEAAGGVVGGLPLLHPLDGRGRAAGDARAPRHRLPRRVLREEPLEYHPVVVGLLVDGRVVGEHLGGVVHHLIRHLLFSEGFETIDPVVANAVTELFFLPVENMLGQVRVLVVVERLPHDPLLDAAQVLVVHFPFGVHAHGDVDELLVEERHADLQAPRRRGLVGAQAVVLVQGFHLAAGLPVELLLVGGEVEVEVAAQEL

SEQ ID NO: 41304 - protein, 224 aa, Zea mays
  Clone ID: LIB3068-059-H7_FLI.pep
EVPSSAQASASTRTKTGLSPSLSRPFSSGNSMTQAHSTTFAPTRSISLTAAHSVPPVAIRSSTTRARSLACTAPTCISILSVPYSKEYSSEITSPGNFFGFLKGTNFAPMAKAIGGPKMNPLASTPATTVIPWSLYRSTKRSMVSRNALGSSSNVVMSWNMIPGLGKSGMTRMEEAIPAKRASADAIATTACPCLPPVTRTLSGAATLTRGRKGGVGRRGRGRD

SEQ ID NO: 41305 - protein, 335 aa, Zea mays
  Clone ID: LIB3068-060-A4_FLI.pep
VAEPPAKKARKTKKVASVSLLGLICVAMLCGCLIPAVNRMYDSVDAGEGAAYGPSHRGRVLAVEGPHDNVSDGVDPKPPQRASETLPALLYLPKNGKHVKINGNLVIKSIVASEKASLQMSGNDGKRPQNQEEETRLAIPGYVTPLKAGEVMESTEGMMNNELLALAPADGSMYREEDGLLPQWFSEAMSGPLLSSGMCTEVFQFDVSPSSAHPNGIIPVYSNAMSNSSQNFTQDLPPARVRTVKNRRISYSEAIPLRGSTSNDTEHLKSFGSTKPVSSVVVSVLADPREAGDGDGEGRISSKSLSRILVVVLIDSVKYVTYSCVLPFKSHSPHL

SEQ ID NO: 41306 - protein, 65 aa, Zea mays
  Clone ID: LIB3069-001-G2_FLI.pep
KGTQIRADITVADILVFGCFMVYWKTNVDRFLVGAETVTVWSCPLSYVLIPQTVGCEANLFFFAF

SEQ ID NO: 41307 - protein, 185 aa, Zea mays
  Clone ID: 700579636_FLI.pep
TEQGNPPLRGTQRSRKPETKMSSVFSGDETAPFFGFLGAAAALVFSCMGAAYGTAKSGVGVASMGVMRPELVMKSIVPVVMAGVLGIYGLIIAVIISTGINPKAKPYYLFDGYAHLSSGLACGLAGLAAGMAIGIVGDAGVRANAQQPKLFVGMILILIFAEALALYGLIVGIILSSRAGQSRAD

SEQ ID NO: 41308 - protein, 59 aa, Zea mays
  Clone ID: LIB3069-002-B12_FLI.pep
MKESVCRMAVTNKVICFVSAVFVLFRTVNCVLPYLGLYRPRKYIVRHVSYLGACALPGS

SEQ ID NO: 41309 - protein, 211 aa, Zea mays
  Clone ID: LIB3069-003-G12_FLI.pep
FSCRSSCGRAAHHQKSGRAAQRRENQPSGAAALPEGGRRMEKALTKLGSFTISRKAKQELSAIGDDISRFSSTVEEKAKWVFEKLKGHKKSLPDLLREHNLPPGLFPRNIICYEYDESTSKLVVHLSKPCEVSFKDSSTVRYAPRVKATLSRGKLSGVEGMKTKVVVWVKVASVSIESYKSDKICFIAGVKKLRPKDAYEVPREAISVEEF

SEQ ID NO: 41310 - protein, 130 aa, Zea mays
  Clone ID: 700579836_FLI.pep
YMTIVFVLIMLEGAITMDVFLNSNWEEDFPADPSGKFEDFKHFVRSNFEICEWVGLSVVAAQVLSIILGMVLRTLGPDRETDYDSDDEVTVPARLPLLINQSQHGSYYAEPNTSGRSDSWKLRILDKVNN

SEQ ID NO: 41311 - protein, 166 aa, Zea mays
  Clone ID: LIB3069-003-H4_FLI.pep
QLPEEQDLLHRLVTGGVEDQGQDPVRDIEARPAAAAGRGPLRGAGHRPLRDGLRRHQRPRAMRPPLRSAPIYVLTCAWACSPTTHCSVVSSHLRSCVCVCDRPDANWRWCAPVAIDAANLTRLRVCLLCYFRFSGEMVQAWCVDVDGWSRSSGEWQRTNETSTSAT

SEQ ID NO: 41312 - protein, 366 aa, Zea mays
  Clone ID: 700582095_FLI.pep
SVASTAMATKLVVLGIPWDVDTEGLREYMAKFGPLDDCVVMKERSSGRSRGFGYVTFASADDAKNVLDCEHVLGSRTLEVKVATPKEEMKSQGSKKATRIFVARIPQSVDESMFRRHFEAFGEILDLYMPKEHGSKGHRGIGFITFQSAESVDNIMQESHELDGTTVVVDRATPKDEDVRYPPSRPSQGGYGAYNAYISAATRYATLGAPTLYDHPGSAYGRGYYGPSQAVGKKIFVGRLPQEANTDDLRQYFGRFGRIVDAYIPKDPKRSGHRGFGFVTFADDGVAERVARRSHEILGHEVAIDTAAPLENDSAAGGYIDPMDLYGAYGSMRSFGRFCGGLDYNYGYGPSSGSSRSRSDWRYRPY

SEQ ID NO: 41313 - protein, 217 aa, Zea mays
  Clone ID: LIB3069-004-D10_FLI.pep
LKSQTKRFSSSGSLPPPPPPPLVVVTDSSEVMDGVPGRRRRRSPGAGHDPGLSHSPRSHDGSGGTGGGRRAPHGPPRRRRQSKRVVAAPVELGQRADGAAPKHRLHRRLAQLPAARAEQPHGAAHRVDRPPGRLVHQRLEHRWALRLGDGGEEGHEAGAAEELGDEDGGVALRLGAVDPLQARPQHARVAAPLAKHAAPVAAHPRHPAPPTLHREAH

SEQ ID NO: 41314 - protein, 77 aa, Zea mays
  Clone ID: 700582759_FLI.pep
ELQLPSDTIQQHSAPHAALYCKPNSVHHYTGRIERIWAIRWTHYCCLPVEHVFTNRTCTARGGRVLLQILELLLNPL

SEQ ID NO: 41315 - protein, 246 aa, Zea mays
  Clone ID: LIB3069-004-F1_FLI.pep
NCVARKMESAGIDAALMGKPNREPRVVVQTVSEVDILDDGYRWRKYGQKVVKGNPNPRSYYKCTNTGCPVRKHVERASHDPKSVITTYEGKHNHEVPVSRNASHEMSTAPMKPAVHPINSNMPGLGGMMRACDARAFTNQYSQAAESDTISLDLGVGISPTHSDATNQMQPSVPESMQYQMQHMAPVYGSMGLPGMPVTAVPGNAASSIYGSREENGNEGFTFKAAPLDRSTNLCYSSAGNLVMGP

SEQ ID NO: 41316 - protein, 442 aa, Zea mays
  Clone ID: LIB3069-004-F8_FLI.pep
VTGQWFYRPEEADKKEGGFWVARDTRELFYSFHTDDVPAESVMHKCVVHFIPQQKQIPSRKQHPGFIVQKVYDAVEKKLWNLTDKDYEDNKQQEIDLLVKKTIDRIGQLPDLEPEETPLENNYLSNKRGLRKKPVNPIDVTREPPVGKSEQFAKAETPGSDKIRNYDTLVKYKVLTGHSHRDRWLDKLIESIPLASKENAGTSADANSTAKSSISGSPAKDVGSAENEKSYGLDVVVEIMTALERSAYEALGTDFGKYNQKLRQLQFNIKNISKLRRRLMDKELDPPVLLTMSPDELKAGLTSAEKTSEPEESRKLQMTDTRCQRCSEKKVGISDIIHAGHGDRYQLECTSCGYTWFSSRDAITTLTEDAPSTAGNVGTAPLATAKFEVVEKKLTSPRDQSGKPASDALQKSTAAYMPTMERQKSFAKTKLLDEPSPAPKQG

SEQ ID NO: 41317 - protein, 196 aa, Zea mays
  Clone ID: 700461278_FLI.pep
PIASGTTDGGCSTCTPGGARLRAGRGVLGAGAQVSAVLARVVLDVAGGVGDPAARVVHPVGAHGVAAREVAVHPGGHGERGGGEGAGGERGGDDGGDHDGDGHPDGAGEQRDGAQEDERHHGARQRHPRQQQQHGARDEQRQEPHHLRRVGRAGLHPPQQRRRVLHAAARPMLMPVSHARCAVAAFEGSPVGGGDR

SEQ ID NO: 41318 - protein, 307 aa, Zea mays
  Clone ID: LIB3069-005-C2_FLI.pep
TASDMLKAYHLFLAASPFKRLSHFLSNQTILSLTKNASKVHIIDFGIYFGFQWPCLIRRLSKREGGPPVLRITGIDVPQPGFRPTERIEETGQRLAEYAEKFKVPFEYQGIASKWESIRVEDLKVGKDEVVIVNCLYRFRNLIDETVAVDSPRNRVLNTIRQVNPAIFIHGIVNGSYSVPFFITRFREALFHFSALFDMLETTVPRDDAQRALIEREMFGREALNVIACEGSDRVERPETYKQWQVRNLRAGFVQSPLNQEIVMKAMDKVKDIYHKDFVIDEDNGWLLQGWKGRILYAISTWKPKNN

SEQ ID NO: 41319 - protein, 117 aa, Zea mays
  Clone ID: 700612325_FLI.pep
QLHVMLAICYSGRWDMVQACRELAREAQANRLSPDDIDESIIAGKLATSAAGEFSCPDLVIRTSGEMRLSNFLLWQSAYSELFFTAKMWPDFGEAEYLEALRSFQGRDRRFGQSKLL

SEQ ID NO: 41320 - protein, 146 aa, Zea mays
  Clone ID: LIB3069-005-F10_FLI.pep
ALLILISARAASAPAGRRIPPASSMLWVRNIRRFVDTGAGLGSEAIMELETKRILLEIFKERQRKSAEAGSIPSFYKKPEEGSISSRVQRLAKYRFLKKQSELLLNADDLDAMWVCLRENCVIDDATGAEKMNYEDFCHIATVCTE

SEQ ID NO: 41321 - protein, 223 aa, Zea mays
  Clone ID: 700612584_FLI.pep
RNQGWSRRATTRRRSRRGRRSPNPHCARVYARGSMVGGGARRAALGRWCLVILAVASALGVSGPAFYWRYKKGFSSSSPSSTAAAVASSPSCPPCSCDCPAPLSLKSIAPGLANFSITDCGKNNPELAKEMEKQFVDLLNEELKLQQVVAEEHSHHMNATLVEAKRQATQYQREAEKCNAATETCEEAREQSEVAISKEKKLTAMWEQRARQLGWHDSRATSM

SEQ ID NO: 41322 - protein, 226 aa, Zea mays
  Clone ID: LIB3069-006-A7_FLI.pep
QSLFNYVKRTGGGCLKLGLEAPALFDDVNILSLAVALPTTCSEESGCWLLSLWMGRAQIFISPSRHIVRIDSLVNSRPDRGSTCTRCATRGESFGTSRIRGEGCRTPAGGHALSHCADGLPLLNVGEPPDGWRRGTAISSNARSQRSSWVSCPIDPKRYMTFSSVSSEFGGDQYGSKETALTHELCPSPHATIFLSSMLHTCTRSSSPPDNKYLPSALQEQHNSAP

SEQ ID NO: 41323 - protein, 281 aa, Zea mays
  Clone ID: LIB3069-006-E1_FLI.pep
KPSPSQKLLTSRRPAVSPFLGGRPLLFTDSQVIEMSSAEAKAAAKAVPESVLRKRKREEQWAADKKEKALADRKEALDSRKIIFARAKQYAQEYDAQEKELVQLKREARLKGGFYVSPEAKLLFVVRIRGINAMHPKTRKILQLLRLRQIFNGVFLKVNKATINMLRRVEPYVAYGYPNLKSVRELIYKRGYGKLNKQRIPLSNNNVIEEGLGKHNIICIEDLVHEIMTVGPHFKEANNFLWPFKLKAPLGGLKKKRNHYVEGGDAGNRENYINELIKRMN

SEQ ID NO: 41324 - protein, 94 aa, Zea mays
  Clone ID: LIB3069-006-F4_FLI.pep
QTLCDQVTETLDLIDHRHEPNSTSSQETPRDNLFLHQYEDIQGVVILTECAWNEAIVMWVNNRGIKNTVHLDQTRCLVQLVLNLAASRNLNHLT

SEQ ID NO: 41325 - protein, 298 aa, Zea mays
  Clone ID: LIB3069-008-C6_FLI.pep
LIPCFGFGDASTHDQDVFAFYPDERPCNGFQEALARYREIVPHLRLSGPTSFAPIIDMATTIVEQSGGQYHVLVIIADGQVTRSVDTEFGQLSTQEQMTVDAIVQASQFPLSIILVGVGDGPWDMMKEFDDNIPARSFDNFQFVNFTAIMSKKISQSKKETEFALSALMEIPLQYKATLELGILGRRIGESPERIPLPPPFASYSTVSRAEPSRANSYRSVPSHPREEPAVNSTITASVTSPSAAESRVLEPQMCPVCLSKPRDMAFGCGHQTCSECGPQVTDCPICRRPIDTRVKLY

SEQ ID NO: 41326 - protein, 628 aa, Zea mays
  Clone ID: LIB3069-010-B5_FLI.pep
LLSAAENQLAEVAKDAKSTKDPNYCKVLSSTLSSIMGWTEKRLLAYHETFNTCNIESMQGIVSIGVSAARILVEDISQEYRRRRKEETDVARSRVETYIRSSLRTAFAQRMEEADSKRSSRNPTPVLSILAKDIGDLATKEKNIYSPILKTWHPLASGVAVATLHSCYGNELKQFVAALTELTPDTVQVLKSADKLEKDLVNIAVEDSVDSDDGGKSLIREMPPYEAENAIANLVKVWIKDRVDRLKGWVDRNLKQETWNPGANRDNFAPSSVEMLRVIGETLDAFFQLPIPMHPALLPDLTAGLDRSLQLYVAKAKSGCGTRNSFMPQLPPLTRCEVGSKLLFKKKEKPQNLQVRVSQNGAANGNDPLGLPQLCVRLNTLQYIRGELENIEKKIKTSLRNVESAQADVTDGLDIKFELCQAACLEGIQQICETTAYKVMFYDLGHVLWDTLYVGDTASNRVEVLLRELDPVLETISGMVHNKVRNRAITALMKATFDGFLLVLLAGGPLRAFTRQDSQIIEDDFRALRDLYLADGDGLPEELVDKASSQVKNVLPLFRADSESLIERFRRMMVESNRSASKNRLPLPPTTGHWSPNEPNTVLRVLCYRSDETATKFLKKTYNLPKKI

SEQ ID NO: 41327 - protein, 156 aa, Zea mays
  Clone ID: 700612833_FLI.pep
QANHRSSGACAGGVMADDDYNEIDMGYEDEPPEPEIEEGAEEEPENNEDAPDDVIGGEGDDKEQEKTKRERKTTKYMTKYERARILGTRALQISMNAPVMVELEGETDPLEIAMKELRARKIPFTIRRYLPDGSYEDWGVDELIVEDSWKRQVGGD

SEQ ID NO: 41328 - protein, 165 aa, Zea mays
  Clone ID: LIB3069-016-E10_FLI.pep
QMRGFETMYNGHTGRKLTAMIFLGPTYYQRLKHMVDDKIHSRGRGPVQILTRQPAEGRSRDGGLRFGEMERDCMIAHGAAFFLKERLFDQSDAYRVHVCEKCGLIAIANLKKNSFECRGCKNKTDIVQVHIPYACKLLFQELMAMAIAPRMLTHDMKTGKDQKKR

SEQ ID NO: 41329 - protein, 179 aa, Zea mays
  Clone ID: LIB3069-017-B3_FLI.pep
FPRSKARCTIHKTMAPLGKLRVRVDDSTTTNGKLLLVAPRRRRTRRRCGNHGGCSVELGPAEGLAEAPAARGSVAGDHGAAVAGGDAEGEGLPVQERVALPVLAPVARQGLPPRGTVALHGHRVHVAGAAHVGHQHQVEVGVAVDGEPDAALLVARDPAVGDGDNASPVERDALEHGLR

SEQ ID NO: 41330 - protein, 114 aa, Zea mays
  Clone ID: LIB3069-017-H3_FLI.pep
LQFYAPIGCRLWQERADAGLSGRGEEAEGVQEAELVATTVKMSPSWTARVDPAAHEVEAADGESGLRGMRPTRWSTEKADPRHDASRSNGQQAGGFFSSPRSFAVWNHRGYSRI

SEQ ID NO: 41331 - protein, 273 aa, Zea mays
  Clone ID: LIB3069-018-D6_FLI.pep
CRCDQRRRMSRRRQEGPIMYCSRTIFEDATPELVRDFFWDGDFRLKWDPMLAYCKSLDEFPQNGATIVHWIKKFPFFCSDREYIFGGRIWESGKTYYCVTKGVPYPSLPKKEKPRRVELYFSSWRIRAVQSPKHVGQQSACEVTLVHYEDMGIPKDVARVAVRHGMWGAVKKLQSGFRAYQQMRHTETTLSHSVIMARMTTKISITASNDPLDHDLSVADKISDENDSSNAVQHGFDWKWLVVGGAVAAVCVLNTGLVGKAVLLGAARRQAKK

SEQ ID NO: 41332 - protein, 282 aa, Zea mays
  Clone ID: LIB3069-020-C3_FLI.pep
VQESLIHAMETGRYKDLHGGRVTDLNDSIVVLSTRMIQGCQDASLGVEEGNAFSEEKAVAARGHQLKIIVEPGTTNIGGGNVVVSSRHSLGSSEASSKRKLHISDGQEKTEESASTSKRLHRTSSIPFDLNLPGDDEEAHDDGDDDKSSGSHENYLEGSVGNLLRWVDGSINFKPFDFGKLCEDILQEFSNTTSKILGTRGCRLEIDAGAMEQVVAAAWASDSHENEKRPVRTWVEQVFGRSLEQVKMRCENLSSCTLRLVSCEVKEDGFGALLPSRIILDW

SEQ ID NO: 41333 - protein, 297 aa, Zea mays; identical to SEQ ID NO: 39275
  Clone ID: 700613916_FLI.pep

SEQ ID NO: 41334 - protein, 127 aa, Zea mays
  Clone ID: LIB3069-020-E3_FLI.pep
LNIPTVKFVSFMKLQGDTANKIGTYNLAISAKHHSVQVYVAAPVTSIDLSLPSGDEIVIEERSPKELLNSEGGLGKQVAASGISVWNPAFDVTPANLITAIITEKGVITKTDADGSFDIKGFLLPAK

SEQ ID NO: 41335 - protein, 144 aa, Zea mays
  Clone ID: LIB3069-021-E1_FLI.pep
KGIEAESKGAVERVTSSSSRVSQSAAMATRAAARFLQRRFLSSGGKVLSEEEKAAENVYIKKVEQEKLEKLARKGPSSGEQPSSTTGSAASDVKADAGPTESASASVSTDKNRNYAVLAGAVAALGGLGWYLLSKPKKSEEVVD

SEQ ID NO: 41336 - protein, 240 aa, Zea mays
  Clone ID: LIB3069-023-H4_FLI.pep
VERFDHHCPWVGQCIGLRNYRFFYMFVFSTTLLCLYVFGFCWVFIIKIRNAEQITIWKAMTKTPASIALIIYTFIAVWFVGGLSVFHLYLMSTNQTTYENFRYRYDQRDNPYNKGVMENIKEIFFTTIPPSKNNFCGRVEQEHGLRPRPTNGFMSPNMGRAVGDIEMGRKPVAWDEPRMAAEIGDLGAGLSNLLEDKDGRFRTTSPDLSRDALAVGGGLEEHGSSAMNPGRSSWGVEAGR

SEQ ID NO: 41337 - protein, 157 aa, Zea mays
  Clone ID: 700614786_FLI.pep
RRSVAAKLERGLGKGVPTTNYVVPLDKATGMTRPLVEILRDLNKRVPDKIIDPDTNTVNWYHANRMLSFYAPGWCGEVRDVIYSENGTVTVVYRVILKGTDGEAYRDATGTAQLHEGRREDAVAAAEEAAFCKACARFGFGLYLYHQDDSHYDDHFH

SEQ ID NO: 41338 - protein, 174 aa, Zea mays
  Clone ID: LIB3069-023-H5_FLI.pep
AEEVWKEITGGGGSGEAVAPVAAQVVAPDGGAGTGGPEVTLEDFLARESAVKEDEVKISVPPAPVMGLPGGAEGVSVPGGGGGRERKRQLVSTVDRARSAIQREKRMIKNRESAARSRERKQAYIAELEYMVTRLAEEKAELLRQQEEQFQTRLEELVDRATPAILREKNITRS

SEQ ID NO: 41339 - protein, 150 aa, Zea mays
  Clone ID: LIB3069-025-A10_FLI.pep
LEIDNVGGWRYMFGFSAPLAAIMAIGMWTLPSSPRWLLLRAVQGKASLEDNKKKAIQALRTLRGRTASEKVLADDVDDTIVSIKAAYAGQEAEGNVWDVFEGASLKAFTIGGGLVLFQQITGQPSVLYYAASILQVLRYLKLTMLEGAHY

SEQ ID NO: 41340 - protein, 132 aa, Zea mays
  Clone ID: 700615353_FLI.pep
PSDSRLINSYNCDLEDLPMMLLQQVASQVIHWLHDEAMILGMNVTRDFLCLYFDLGQGETLGLLAHVDPDDTYGCISWYLTVDHPMEEGKMSAGSPESEKRRFLGYLSLEVLYSTLMDLIKLCSTSDQIRAS

SEQ ID NO: 41341 - protein, 818 aa, Zea mays
  Clone ID: LIB3069-025-E5_FLI.pep
INLLKTGDQEAYMRMVEESKNERLKMLLDKTNELLEGIGKAVQRQKDAEHVSKPEGGSEVPKGSESEDCSQISGIKSESAEESTSDDDGDLPGPADESKFNAGRRLDVTVHSIEEKVTEQPSALEGGELRPYQLEGLQWMLSLFNNNLNGILADEMGLGKTIQTIALIAYLLEKKEVAGPHLIIAPKAVLPNWSNEFKTWAPSIGTILYDGRPEERRLLRDKNFDGEQFNVLLTHYDLILKDKKFLKKVHWHYLIVDEGHRLKNHECALARTLVSGYMIRRRLLLTGTPIQNSLQELWSLLNFILPNIFNSSQNFEEWFNAPFACDVSLNDEEQLLIIHRLHQVLRPFLLRRKKDEVEKYLPVKTQVILKCDMSAWQKAYYEQVTSREKVALGYGIRKKALQNLSMQLRKCCNHPYLFVEHYNMYQREEIVRASGKFELLDRLLPKLQRAGHRVLLFSQMTKLLDILEVYLQMYNFKYMRLDGSTKTEERGRLLADFNKKNSEYFMFLLSTRAGGLGLNLQTADTVIIFDSDWNPQMDQQAEDRAHRIGQKNEVRVFVLVSVGSIEEEILDRAKQKMGIDAKVIQAGLFNTTSTAQDRRALLQEILRRGTSSLGTDIPSEREINRLAARNDEEFRLFEKMDEERRLRENYKSRLMDGNEVPNWVFANDNETLRKKTVADEFRNIIVGSKRRRKEVVYSDSFGDQWMKSDEGFEEIAKMTPRVKRTAYSPDIQVEYNERRKRPKSVENSADGASNPTRTPDKGRAGVSSYSKDETEDDGEDEVITSGLQKGNSFTWKTLGRKRSSHLSSSSDSKGRPPF

SEQ ID NO: 41342 - protein, 297 aa, Zea mays
  Clone ID: LIB3069-025-G6_FLI.pep
CIETYLRCFVHACPSKWYQWLAVAEFWYNTNFHSALNCSPFEVLYGQPPRHFGLQPGSAVTVSDLSTWLHDREVVSKLVQQHLLRAQDRMKRQADKRRSERIFSVGDQVYLKLQPYVQSSVTTRANQKLAFRFFGPYKILQRIGPVAYKLQLPASSQIHPIFHVSQLKSAVNRPQHIVPLLPETNDSLQVPIQVLQRRLIRRGGSMVTQVKVAWSGMDTAMATWEDVDALKARFPYAPAWGQAAFQDRGNVSSAVPEDTRTMAKKDLTAKTEGGDVSARPRRIKRGSVRVTGPEWAN

SEQ ID NO: 41343 - protein, 283 aa, Zea mays
  Clone ID: LIB3069-027-E12_FLI.pep
LPSQLFEYIKRTFRYCLTLTRIEPPQIFNKSHQQGPCITYLFDQVIIVIGEGLRSGSCKLSFMLLLQGHINLHFWWLQSNSFNKVKVLIPCQLPSEVKEGLLKVVIALGRNLIVLQVLLPVECNLLGLDLPVLDINLVTTKNNGDVLTDPAQVPVPCRNILVCQPRSDIKHNDGTLTMNVVAIPKATELFLPSSVPAIKANFATVSAKIQRVNFNTNGGLIFLLKLASKMPFHKCGFTSSTVANDDELEAGVIHALLIRQRHFYGAKRSTVRGSGEQRDRGSV

SEQ ID NO: 41344 - protein, 111 aa, Zea mays
  Clone ID: LIB3069-029-E10_FLI.pep
QSGYTTMFMQVQMPYMVFTGLEDYKARGTQASPYYTVTHYTEFAETKDTVLIRGDVVFTSKLTDSEAKTLLETAHSFYLNDVRYRLVERFNKETHDFEFGDVLKVLDMPTM

SEQ ID NO: 41345 - protein, 194 aa, Zea mays
  Clone ID: LIB3069-029-E9_FLI.pep
HFALYQSLKKALYKPAAFNKGILLPLCRERNCTLREAVIIGSIIQKVSIPFLHASVALVKLAEMEYCGTTSYFIKLFLDKKYALPYRALDAVLAHFMRFVDDERIMPVIWHQSLLAFVERYKNELEKKDKEKLARLLDHQKHYLVTPEIRRELRGSCNRGEKDTNLHTLSPISVITKPIEEDKWDVPQVPMEQD

SEQ ID NO: 41346 - protein, 85 aa, Zea mays
  Clone ID: LIB3069-031-F1_FLI.pep
RRRSSTGSRRWSKASPNATSSHTGENSVFIRRSSGLLHETSSMIRVYSGRGAVFTNTSLSVLCCVFCFPIQILDQSNPALCCLRA

SEQ ID NO: 41347 - protein, 155 aa, Zea mays
  Clone ID: LIB3069-032-B4_FLI.pep
EGYFSGSSSAEQLIPCSNQQTIRQSSCRPACLLCLSLLMQRACSPKAVCCESHHSLALPVSSHLLRLPHGLMLTLRRLLSPVLLAVPTKVCLRQPEIQTFQTHHHLFDATMALPSSACVIYSSAYADPFVITGAPLCLIYTSSRTALPFCFLVTY

SEQ ID NO: 41348 - protein, 230 aa, Zea mays
  Clone ID: 700618126_FLI.pep
KFPSPVLCVRLISSEARPRFPNPPSNSMAANAGNKIRNAKLVLLGDVGAGKSSLVLRFVKGQFVEFQESTIGAAFFSQTLAVNDETVKFEIWDTAGQERYHSLAPMYYRGAAAAIVVYDITNPASFTRAKKWVQELQAQGNQNTIVALAGNKADMLDARQVPAEEAKAYAQENGLFFMETSAKTAINVNDIFYEIAKKLLQGQQAPSPQAGMVLNQRPNERTVSSSSCCS

SEQ ID NO: 41349 - protein, 86 aa, Zea mays
  Clone ID: LIB3069-032-B5_FLI.pep
PAAAAAACALSCCSSQLDRTDGRDPGAQASRLLPADVVVTAATEPPRGGRAQELQALLPHLLHLLRGEDLYAGHRAHEFLPRVVAH

SEQ ID NO: 41350 - protein, 57 aa, Zea mays
  Clone ID: LIB3069-033-C11_FLI.pep
ERPRSGCSSGWRSAAKISRRISASPAGTTARAEVLMPLVQGHCNPPPRCRRKFRRSN

SEQ ID NO: 41351 - protein, 124 aa, Zea mays
  Clone ID: LIB3069-034-D11_FLI.pep
GARRPRRGPRGGVPQRLRRLRRAAVLLHGAVREPPAVQAHGLLAPLQVGVPQGLLLRLRRPDVHPHLLRRRLLRRHLLPAPPLNFYFFKVFGRVLLVILCLRLRFDVLACVRFTCLRHASSESP

SEQ ID NO: 41352 - protein, 257 aa, Zea mays
  Clone ID: LIB3069-034-G10_FLI.pep
PTKSARTRASRQSVAQLPLLSLAPGAGARAPPTARYRRRVMAGPGDKVDYVFKVVLIGDSAVGKSQILARFARNEFSLDSKATIGVEFQTRTLVIDHRSVKAQIWDTAGQERYRAVTSAYYRGALGALLVYDITRRQSFDHIPRWLDELRAHADKNIVIMLVGNKSDLEEQRAVSTEDAKEFAEKENLFFLETSALQATNVESAFQTVLTEIFKIHSKKNMVSEPKSNGAAQAMPGTKVLVPGPAQEIPKSKCCSSM

SEQ ID NO: 41353 - protein, 178 aa, Zea mays
  Clone ID: LIB3069-034-H10_FLI.pep
EREREREGNPIAMASDSGDFGGENKSLETARRLLEETFTSEAEAEALPSLPSGFYDAFVLRGIRVVQALQPGTLLCHFNVPSRLLNSGGFLHGGATASLVDLVASAAFATAGLRTRGSPLEMNISYLDAAFADEEIDIEAKVLRAGKAVGVAVVELKKKSGKIIAQARYSKYLGVSKL

SEQ ID NO: 41354 - protein, 172 aa, Zea mays
  Clone ID: LIB3069-034-H8_FLI.pep
SICQKFPYLVKKKLKEGEEVRRVAQLEWKIIESDIQKPFTTSGLEFVPLPVIHGEDYICLGFLFGRKSKVAYISDVSRFPPSTEYAISKSGGGQLDLLILDCLYRTGSHNVHLCWDQTLDAVRRICPKRALLIGMTHEMDHHKDNQTLEEWSRREGIDVQLARDGLRVYIDL

SEQ ID NO: 41355 - protein, 197 aa, Zea mays
  Clone ID: 700619152_FLI.pep
FCSTGGGAESKMGSGSFLKVLAKNFDVLAGPLISLAYPLYASVRAIETKNPVDDQQWLTYWVLYSFVTLFELTFAPIIEWLPFWSYAKLFFNCWLVLPWFNGAAYVYDHFVRPMFVNRRIVNIWYVPRNEKLGKSDDVLSAAERYIEQNGPEAFEKLISKSTKSSKSRSTKRSILEEAEAERESWGENPFYDKNYRH

SEQ ID NO: 41356 - protein, 423 aa, Zea mays
  Clone ID: LIB3069-035-E4_FLI.pep
AAATTSTATPPPPSRSPLPAPSTSSRIEAMSSDDEVREEKELDLSSNDVVTKYKAAAEILNNALKIVVSQCKPKVKIVDLCEKGDSFIREQTGNVYKNAKRKIERGIAFPTCVSVNDTVCHFSPLATDDAVLEENDMVKIDMGCHIDGFIAVVAHTHVITNGPVTGRAGDVLAAANTAAEVAMRLVRPGKKNKDVTEAIQKVAAAYDCKIVEGVLSHQLKQFVIDGNKVVLSVSNADTKVDDAEFEENEVYAIDIVTSTGEGKPKLLDEKQTTIYKRAVDKNYHLKMKASRFIFSEISQKFPIMPFTARALEEKRARLGLVECMNHELLQPYPVLHEKPGDLVAHIKFTVLLMPNGSDKITSHPLQELKPTKSIEDNAEIKAWLALGTKSKKKGGGKKKKGKKGDAAEADPMEEATNGATSQE

SEQ ID NO: 41357 - protein, 163 aa, Zea mays
  Clone ID: LIB3069-035-F4_FLI.pep
VSPSTMHSRCGFHTVVLQPAVRRLRCDDDIFLLTTTWLPCEPARTTLFCCRCGCGFFSGGTDEAGMRKYISPRSSSESGDTMRILRTATPWEHGLLRTWFGLAARISPAATGRPYSSMRPLRWTILIRSSAPQGRTQARQHLRLLPIGICFDLSFSLYSSILS

SEQ ID NO: 41358 - protein, 182 aa, Zea mays
  Clone ID: LIB3069-036-B11_FLI.pep
LATGDVLFDPHSGDNFDRDEDHLALMMELLGMMPRKIALGGRYSRDFFNRYGDLRHIRRLRFWPLNKVLMEKYEFTEINANGMADFLVPILDFVPEKRPTAAQLLQHPWLDVGPLRQQPKTRPESARSPGDGVSEKQKKEKEEREAMAVELGNIAIDGASSSRMANDPQSSTNKTTATSSKK

SEQ ID NO: 41359 - protein, 239 aa, Zea mays
  Clone ID: LIB3069-036-D1_FLI.pep
FSHFLPHLGRRLPQRAGAASSLPVPTPTPIPSASNAMNPEYDYLFKLLLIGDSGVGKSCLLLRFADDSYLESYISTIGVDFKIRTVEQDGKTIKLQIWDTAGQERFRTITSSYYRGAHGIIVVYDVTDQESFNNVKQWLNEIDRYASENVNKLLVGNKCDLAENRVVSYEAGKALADDIGIPFLETSAKDATNVEKAFMTMAGEIKNRMASQPAASGASRPATVQMRGQPVSQQSSCCS

SEQ ID NO: 41360 - protein, 320 aa, Zea mays
  Clone ID: LIB3069-037-B1_FLI.pep
NQTVCFIRHVLREPAQRRAGKDGGCDLQPCGVLDGCDDGLCLEVVAEGVDALLPPDAAHLVAAERDGGVEHVVAVHPHGARPQRPRQGVGRVQAPREHPRRQPVGRRVRAPDHLLHAAELENGLHRPEYLLPSDLHFVLGVGKHRRLYVEAPVAYPVAAGDEGGTAVDAGLNVPQDLVELLAVDLRPLFDPVPEGVADDALQGARLGLLHELVVHALVHERPRPGAAALALVEEDRLVRELDGLVDVGVVHDDERGLATELQRHRLKVAPRRQLEHDLPRARRSRERKLVDTHVAGERCAGRRAEAGHHVQNTLGEPSLQ

SEQ ID NO: 41361 - protein, 84 aa, Zea mays
  Clone ID: LIB3069-037-E6_FLI.pep
ATGNVTDTFSFSICKLLASHGFANLCCICISGGQRPRCQGECVSYTHHSCMCHGYLKKRGEEDSSCQVDFLLGKRGRQGGLLNL

SEQ ID NO: 41362 - protein, 273 aa, Zea mays
  Clone ID: LIB3069-037-G6_FLI.pep
TDPRIPRARAVRSPSEATAPPAPAPAPAAKSKGKADASSSSSSSSTPPRLRRALAVVMAASLLVLAVAFLVGSGSGGIDGGAAAPVEVEGTEVAYGSVIKLMHEKTKHRLHSHDVPYGSGSGQQSVTGFPEGDDSNSYWIIRPTPDSSSKQGDAIETGGIIRLQHMRTRRWLHSHLHASPLSGNLEVSCFGGDELSDSGDHWRLEIEGSGKVWKRDQKVRLRHVDTGGYLHSHNKKYNRLGGGQQEVCGVREKRAENIWLTAEGVYLPVNGSK

SEQ ID NO: 41363 - protein, 258 aa, Zea mays
  Clone ID: LIB3069-037-H2_FLI.pep
LDIDLAITDPCPIAPVDPVQEENESDDDFNARVRNHAPIKMKYDLYKVKWDQSNRKCLMVIKSSIMDTIRGAFPACTTATEYLSKVESHFTISSKAYACTIIERLLTDKYTGGGVREHILKMASMASKLKPMEMALPDEFLVYLIFASLPKEFEAFEINYNSQPDNWGIEKLIAMCVQEEERIKASRGDSINYVGMYKAHGKAPQNDHHLKNKEVDMNACYWCEKSGHHQKDCPSFLKHLINKEIPYEEDPSKRRKMH

SEQ ID NO: 41364 - protein, 83 aa, Zea mays
  Clone ID: 700619743_FLI.pep
DKMVANGDVPARGSAAAAASLRRRRTTSGAAAGGGGTSSMLQFYTDEAAGRKMSPNTVLIMSIGFVAVVAVLHVFGKLYRTSN

SEQ ID NO: 41365 - protein, 308 aa, Zea mays
  Clone ID: LIB3069-038-F5_FLI.pep
SNRLGNVEFVVCRDANGKLHAFHNVCRHHASLLACGSGHKTCFQCPYHGWTYGLDGTLLKATRISGIKNFNKNDFGLIPIKVATWGPFVLIRFDDESTEDNVYDTVGNEWLGSASDLLGTNGIDTSLPHICRREYIINCNWKVFCDNYLDGGYHVPYAHGDLASGLQLQSYETLTYERVSVQRCESAPAEPDDFDRLGTKALYAFVYPNFMINRYGPWMDTNLAVPLDSTRCKVVFDYFLDKSLLDDQCFIKKSLEDSEQVQIEDIALCEGVQRGLESPAYSVGRYAPSVEMAMHHFHRLMHANLSEY

SEQ ID NO: 41366 - protein, 566 aa, Zea mays
  Clone ID: 700620156_FLI.pep
LKVPSSMLVSEMNDSAVEAAPIEEDHAQDMSEGEDGEFAEEISEDEDGEFAASDLNDEDGDEMDNTQRQPSHMHVHASESIEEPVHRQSQLSNAEEGMETGIAHVDAYMVEPLAENNVFSETRYEMEAPQNGAETPVVDLYRDAEEQPLAENNDCSEAENEMNKSEFETGVGNLDRDEQEQLLAENNNGSEVRYDMEAPQSEVETGVGSLNRDGEEQLLTVTDGYSELRHETGTPQTEVETVIDDISRDEQELPAWYKIFDLNVIETPLGCEVSEISCGHPADGLCDSVPDLVGLVNQQANNDTSEIQGQDGHAGANQVLEDESDLNSYDLNNEADEDAQDDTLENQVQDENVEDNHLLEDGHDLTRYVVNNEAGEHAHDNHLMKNAEILLNHSMVARISENCHMNNEKMLLKQNVDEQQMENEQMLIDQVTSVQVLDIHHVHDEQLLVGHAADDHHQMEPNPMAFSLGVHDLDNYYLSSKQILLYNDVGGIHHLKDVQIILDEAADGQARVHNMGHGRTIPGIDLEDDYAQVSAIRNTGECLESASDTSHEYTDNVLQEHMCSQD

SEQ ID NO: 41367 - protein, 206 aa, Zea mays
  Clone ID: 700622325_FLI.pep
GLSVENKGGMLDGEAVKNKGGNHDQENSTSFFFFLVTAVAPPAGPGTVCLHLGLGLLLRLPPSLLLLVPAESRSQRAVLGVRVQRRTKERQRADVTKEKGSYRREARQRVEVAGGGEDGSSSSAATAPGSHGLTGFVPDPCSLGSNPGPSLAMSLPPSTPRPTPDPPREARARPQAAAVDGRACITVAYNNNADRRPTASRARRTR

SEQ ID NO: 41368 - protein, 320 aa, Zea mays
  Clone ID: LIB3069-039-B8_FLI.pep
RKTGRLFYFYLASQASQGGHTPIPPPSPAPSSPPAGHATMLPPAARLAARRLLGLASASASEAAGRRVASSPIASAGYSAAASRGSVSSTRPFSTALNYHLDSPENKPDMKWEFSQANMKKVNEILSHYPSNYKQSGIIPLLDLAQQQHGGWVPVAAMDAIAKIVEVAPIRVYEVATFYTMFNRTKVGKYHLLVCGTTPCMIRGSREIEETLLEHLGVKRNEVTSDGLFSVGEMECMGCCVNAPMIAVADYSKGSEGYTYNYYEDLTPKRVVEIVEMLRRGETPPRGTQHPERKNCGPAGGNTTLHGEPKPPPCRDLDAC

SEQ ID NO: 41369 - protein, 174 aa, Zea mays
  Clone ID: LIB3069-039-F10_FLI.pep
CFDMECISSDKDVEGKQKVNHVTVFERPGLHEFLRKTSEFADLILFTAGLEGYARPLVDRIDLHNRFRLRLYRPSTVTTEYREHVKDLTRVSKDFGRIVIVDNNPFSFILQPLNGIPCVPFSAGQHSDDQLMTVIFPLLKHLSLQKDVRPVLRERFHMPEWFQNHGIPQVSQAV

SEQ ID NO: 41370 - protein, 157 aa, Zea mays
  Clone ID: LIB3069-040-F3_FLI.pep
NSYIIEGRVCYLTLCDRSYPKKLAFQYLEDLKNEFEKVNGSQIETAARPYAFIKFDAFIQKTKKLYLDTRTQRNLAKLNDELYEVHQIMTRNVQEVLGVGEKLDQVSEMSSRLTSDTRIYAEKAKDLNRQALIRKYAPVAIVIGIVVMLFWVKNKIW

SEQ ID NO: 41371 - protein, 233 aa, Zea mays
  Clone ID: 700622751_FLI.pep
IARVHTGSSLCPAPGYGHLSISIPQFGELEVGLFVVIKECLLICSIFLHKRAEDRVAQQGFVTWELKKTLLVATQKFLEVRVVKDQRVRSPGPLKTRPLFVAPSQGVATREGNNVLITQTHLLAKDLPQVVRTLGGIRKTALRWRLRLVLPAGVEGDLRPTGDLDGHNSGKLVEIGIGEGGELLLDGLEQPHRDVQPRVGAVSQFRRALHSTEGTAGPRRHVERPRGVPREAE

SEQ ID NO: 41372 - protein, 196 aa, Zea mays
  Clone ID: 700623959_FLI.pep
ARSCAPPRSPRSCGNMGLTFTKLFSRLFSKKEMRILMVGLDAAGKTTILYKLKLGEIVTTIPTIGFNVETVEYKNISFTVWDVGGQDKIRPLWRHYFQNTQGLIFVVDSNDRDRVVEAKDELHRMLNEDELRDAVLLVFANKQDLPNAMNAAEITDKLGLHSLRQRHWYIQSTCATTGEGLYEGLDWLSNNIANKA

SEQ ID NO: 41373 - protein, 98 aa, Zea mays
  Clone ID: LIB3069-042-A5_FLI.pep
APGRELLRGRGARRRGGHLPRRRHRLRRRLRGWERGQRPGHHPRQLPAAELPGGVRPGEGEAGVPPAVMHVVAVVRSHDVGMAGIGVEASNYSRVQST

SEQ ID NO: 41374 - protein, 151 aa, Zea mays
  Clone ID: 700624095_FLI.pep
LGVDDAEGVAVLDDDVVHVDGAEVGEVLGQRDEVDGGALVVLQQAGAAAVSAAGVVALPAERRQLALQRGVGRDHLPGRRVQQRLALARRRRRVPRRRVLHQPHHAVPEHPHPRHAWTFFIDGGCLLLPPWLFLSLARPPARLHALALWGS

SEQ ID NO: 41375 - protein, 517 aa, Zea mays
  Clone ID: LIB3069-042-D4_FLI.pep
DRSRQAAARQKPLPHVPHRAHHADDHVRQPDVRRRRHHATGSRLRPGHPLRPPPRRGAPHRPPRPRGLHDALHTAPRDARQGGRLRHVVPGRRGRGGLLLHHPVRRRARARAAGVRLHAVRRVDGRAHAAVTGAGRGGVRGLRGDGRNGRSTRDAAGAGSSHAVSADEEGPELRVAGVPWQPLHGGRRRHRQHGSRAGAVHPRGHRRRPLRVKTPRSGRLPDRPGPASQAAVRARRRRAGSSTAARVREVARRAAPSVRRAALLWEHGRQLPVAPGPRDRRRPRAQRAPLPVGAPWPATAGRFQVPDGRQRPRAAPGRVPGEDEGPRPRVAHVGAAEGHPRQPRRRRLRHPLRLELHPREPVARRADGALAAVRGAAPERVRARVRHGRRRCHAGGQEARQLRRGGGAGARGPVPDGRVGGGGEEGAGEGDGGEGPEPERRGQRRVVGRVGAETGARDFAQARRQGVCHRKRGEHGQRRRSRISGRNNMIPRTRRNRRRPRINRRPPCDPSGTAHVV

SEQ ID NO: 41376 - protein, 245 aa, Zea mays
  Clone ID: LIB3069-042-F6_FLI.pep
QRVRRQLRHAGVGAQEGRARPPAGHDRRGRLADGRRQARHGGPRGALLRGAPPAARGQERHAAPARRAHRGLPVRARGRGRQERGAGQLRAPLGNLHLRRAAQVPAGPARRRAAGDARPGPGRGVPAPAVVRPEPHQHGRGRTAPGQRRVRVLPRRLHGARLRVQLRRAGRARERVVRLQRLLPGTGTGGVGVRLPGARRRRRRGRVSGRLQLQRAARWVRGSGGHRGHHDGGRTGGSVSCVDLS

SEQ ID NO: 41377 - protein, 296 aa, Zea mays
  Clone ID: 700799059_FLI.pep
NMAPLSPRLVVPVDVKKLPREQKVPLHNRWHPDIPPVADVTEGELFRVEMVDWSGGRVRDDNSADDLKFMDFTIAHYLSGPLRIVDSEGVPASPGDLLAVEICNLGPLPGDEWGYTAILERENGGGFLTDHFPSARKAIWYFEGIYACSPQIPGVRFPGLTHPGVVGTAPSLELLNIWNEREKSLSETSPETIKLCEVLHQRPLAHLPTPENCLLGKVQEGTAEWHIIANEAARTIAGRENGGNCDIKNLSRGSRIYLPVFVEGANLSTGDMHFSQGDGEISLCGAIEMSGFLELK

SEQ ID NO: 41378 - protein, 291 aa, Zea mays
  Clone ID: LIB3069-043-B3_FLI.pep
WGSSAFGGVVSAYFSGSLVDTYGVRFVFGVTALLPLMTSAVAVLVNEERLPLGKSSVSLSVPSSELIESSKKRIMQIWDSVKQPSILLPTLFIFLWQATPQSDSAMFFFITNKLGFTPEFLGRVTLVTSVASLLGIGVYNLFLKEVPLRKIFLVTTVLGSALGMTQVLLVTGLNRKLGISDEWFSIGDSLIITVLGQASFMPVLVLAAKLCPVGAEATLFATLMSISNAGGVAGGLVGAGLTQLLGVSRDNFENLALLIAICNLSSLLPLPLLGLLPDESRNADGAQTKND

SEQ ID NO: 41379 - protein, 196 aa, Zea mays
  Clone ID: LIB3069-043-D11_FLI.pep
SFREPRGFGFVEFVDAYDASEAQYHMNRQMFAGREITVVLAADTRKRPEDMRRRTGPRGYSGHEGRRPNRHGAGRSRSRSYSRSRSPRPRGRGRSQSYSPAPKRRDDYSASPPRAKEEHPRSSKQPKENNRDRRRSYTPDDINDRRGADNGRDERKRSPAGEEDEEPRRGHHRSPRPASMSPPGSRSRSASPVISD

SEQ ID NO: 41380 - protein, 654 aa, Zea mays
  Clone ID: LIB3069-043-D5_FLI.pep
GAENTGMIHPLVLSLPSPAIISRPRRHRHHTTTPSLPSHSRSLHHYRLLRVTPLVASCGDRRRIVRGASATMGLFTVTKKATTPFEGQKPGTSGLRKKVTVFQQPHYLQNFVQSTFNALPADQVKGATIVVSGDGRYFSKDAVQIITKMAAANGVRRVWVGQNSLMSTPAVSAVIRERIGADGSKATGAFILTASHNPGGPTEDFGIKYNMGNGGPAPESVTDKIFSNTTTISEYLISEDLPDVDISVVGVTSFSGPEGPFDVDVFDSSVNYIKLMKTIFDFEAIKKLLTSPKFTFCYDALHGVAGAYAKHIFVEELGADESSLLNCVPKEDFGGGHPDPNLTYAKELVERMGLGKSSSNVEPPEFGAAADGDADRNMILGKRFFVTPSDSVAIIAANAVQSIPYFASGLKGVARSMPTSAALDVVAKNLNLKFFEVPTGWKFFGNLMDAGMCSICGEESFGTGSDHIREKDGIWAVLAWLSIIAFKNKDNLGGDKLVTVEDIVRQHWATYGRHYYTRYDYENVDAGAAKELMANLVSMQSSLSDVNKLIKEIRSDVSEVVAADEFEYKDPVDGSVSKHQGIRYLFGDGSRLVFRLSGTGSVGATIRVYIEQYEKDSSKTGRDSQEALAPLVDVALKLSKMQEYTGRSAPTVIT

SEQ ID NO: 41381 - protein, 272 aa, Zea mays
  Clone ID: LIB3069-045-D8_FLI.pep
TCKRKKTQPCYSGPRPKAVHFEECREVSVQGVTLQNAQQFQLTFTRCSCVKASFLRVVAPADSPNTDGIHLNDTSHVRITDNLISTGDDCVSMVGNCSDVRVKDISCGPGHGISIGSLGKNRTTDMVEDVKVDTCLLTNTTNGVRIKSWQGGTGFARDLRFENIVMKNVSNPIIIDQYYCDQPTPCANQTQAVEVRRVEFAGIRGTSATPQAISIACSDAVPCRDLELANVNLTLEGGGAGRATALCYRASGKSAGTVVPPSCLARSSLRVT

SEQ ID NO: 41382 - protein, 328 aa, Zea mays
  Clone ID: 700800973_FLI.pep
LAQHRLPSPQTTTYAAARSTAQESAAAAHPPPLAQKAAAALTTGALNADIPLRLPFPTQNPGLQGSGTMPQGDHIELHQKRHGKRLDHEERKRKREAREVHRRSKDARNLIGAKGKRFAKKRYAEKAQMKKTLKMHDESNKRQKVDDDVQEGALPPYLLDRDQTQRAKVLSNTIKQKRKEKAGKWDVPLPKVRPVAEEEMFKVLRTGKRKTKQWKRMVTKATFVGAGFTRKPPKYERFIRPTGLRFTKAHVTHPELKCTFNLDIISVKKNPNGPMYTSLGVMTRGTIIEVNVSELGLVTPAGKVVWGKYAQVTNNPENDGCINAVLLV

SEQ ID NO: 41383 - protein, 579 aa, Zea mays
  Clone ID: LIB3069-048-G8_FLI.pep
PPAGIDILVDGLVLSPARKLQAAPCPKIENVLYGTNLLHNNGFTRGLSGWSPMGSCRLSIQTEAPHMLPSILKDRASQKHISGHYILATNRTDVWMGPSQVITDKLRLHVTYRVSAWVRVGSGGHGRHHVNVCLAVDKNQWVNGGQVDADGDQWYEIKGAFKLEKQPSKVTAYVQGPPAGVDLRVMDFQIYAVDRKARFEYLKEKTDKVRKRDVVLKFQGSNAVNLLGSSLRIQQTENSFPFGSCIARHNIENEDLAEFFVKNFNWAVFENELKWYHTEAEQGRLNYKDSDELLQFCEKHKIQVRGHCLFWEVEDAVQPWVQSLQGHHLMAAIQNRLQSLLSRYKGRFRHHDVNNEMLHGSFYEDRLGRDIRAYMFREAHKLDPSAVLFVNDYNVEDGCDTKSTPEKLVEQVVDLQDRGAPVGGIGVQGHISHPVGEIICDSLDKLAILGLPIWITELDVTAENEHIRADDLEVFLREAFAHPAVGGIILWGFWEMFMFREHAHLVDADGTINEAGRRYLALKQEWLTRMNGSVDHQGEFKFRGYHGSYTVEVNTPSGKVARSFVVDKDSPVQVIALNV

SEQ ID NO: 41384 - protein, 237 aa, Zea mays
  Clone ID: 700802734_FLI.pep
RLRAPPRRATSAPLFAPAGVEAEAKASMHHDPNPFDEGSAEDNPFSDIKRREEALKNAGVPMEEKNWPPFFPIIHHDIANEIPANVQKLQYLAFASWLGIVLCLSWNFVAVIVCWIKEGDSKLFFLATIYALLGIPLSYLIWYRPLYRAMRTNSAFSFGWFFLCYLIHIGFCIIAAIAPPIVFHGKSLTGILAAIDTFSEHVIIGIFYFVGFALFCLETLLSIGVLQKVYMYFRGNK

SEQ ID NO: 41385 - protein, 70 aa, Zea mays
  Clone ID: LIB3069-050-C5_FLI.pep
VVSYFEWVQNIQGFMWAEEKVNDELEKYMSSAFQHMKAMCKSLDCDLRMGAFTLGVNRVARATLLRGWEA

SEQ ID NO: 41386 - protein, 418 aa, Zea mays
  Clone ID: LIB3069-050-E7_FLI.pep
GRESSRTEAASGEMKLNVKTLKGTNFEIEASPDASVADVKRIIETTQGQSTYRADQQMLIYQGKILKDETTLESNGVAENSFLVIMLSKAKASSSGASTTTAAKAPATLAQPAAPVPPAASVARTPTQAPVATAETAPPSAQPQAAPAATVAATDDADVYSQAASNLVSGNSLEQTIQQILDMGGGTWERDTVVRALRAAYNNPERAIDYLYSGIPENVEAQPVARAPAAGQQTNQQAASPAQPAVALPVQPSPASAGPNANPLNLFPQGVPSGGSNPGVIPGAGSGALDALRQLPQFQALLQLVQANPQILQPMLQELGKQNPQILRLIQENQAEFLRLVNESPEGGPGGNILGQLAAAVPQTLTVTPEEREAIQRLEGMGFNRELVLEVFFACNKDEELTANYLLDHGHEFDEQQQ

SEQ ID NO: 41387 - protein, 279 aa, Zea mays
  Clone ID: 700804015_FLI.pep
VRETEEACDPLHSLHPVHHSLVQEVTHQTGKGKHHQRRRERTPSLSSRTARSYPVSPFSGLGESEMASSASRFIKCVTVGDGAVGKTCMLICYTSNKFPTDYIPTVFDNFSANVVVDGTTVNLGLWDTAGQEDYNRLRPLSYRGADVFVLAFSLVSRASYENIMKKWIPELQHYARGVPVVLVGTKFDLREDKHYLMDHPGLVPVTTAQGEELRRQIGAMYYIECSSKTQQNVKAVFDAAIKVVIQPPTKLREKKKKKSRKGCSMVNILSGRKMLCFKS

SEQ ID NO: 41388 - protein, 450 aa, Zea mays
  Clone ID: LIB3069-051-D3_FLI.pep
QSLPQDNVFIISNPKSKYPVLQLDLRLISDLVVVIVSATCGGIAFACLGQPVITGYLLAGSIIGPGGFSFVNEMVQVETVAQFGVIFLLFALGLEFSTAKLRVVRAVAVLGGMLQIMLFMFLCGILATLCGGKTKEGVFVGVLLSMSSTAVVLKFLMERNSINALHGQVTVGTLILQDCAVGLLFALLPILSGTSGLLHGVASMTKSLVVLITFLTILSILSRTGVPWFLKLMISLSSQTNELYQLAAVAFCLLFAWCSDKLGLSLELGSFAAGVMISTTDLAQHTLEQIEPIRNLFAALFLASIGMLINVHFLWNHVDILLAAVILVITVKTFIVAIVVKGFGYSNKTSLLVGMSLAQIGEFAFVLLSRASSIHLIEGKLYLLLLGTTALSLVTTPLLFKMIPAVVHLGVLLRWFSVDTNQVELGLKNDVLRIDSGKRINLIVQGSHDS

SEQ ID NO: 41389 - protein, 168 aa, Zea mays
  Clone ID: LIB3069-051-H6_FLI.pep
NGRKPKREVGEKRKELEHPVERRRRQRLWEMSILWEKSAGWRWLVRRTRDSKPFFFTFAALCGVVPGVIGYGVMQLTGSRNEQLEAHLRSTARPETTMMGQVNRERLAEFLGELQRKEDTNDRYVAALRGETLTRKRYERIQPVPAANAQASQETAGASAEEERPKAK

SEQ ID NO: 41390 - protein, 361 aa, Zea mays
  Clone ID: LIB3069-054-C12_FLI.pep
APMARYLLAPTSTSSALLPKDGVKNSPTSRPLRLRALGSRTSKARHIMAVASEQAAPPARYPKVAAPTTGPIPAAELLGVIEAAAKAGADVIMEAVNKPRNIHYKGVADLVTDTDKLSESVILEVVTKNFKDHLILGEEGGLVGDSLSEYLWCIDPLDGTTNFAHGYPSFSVSISVLFRGKPAASTVVEFCGGPMCWSTRTISASAGGGAYCNGQKIHVSQTDKVEQSLLVTGFGYEHDDAWTTNMNLFKEFTDISRGVRRLGSAAADMSHIGLGITEAYWEYRLKPWDMAAGVLIVEEAGGVVTRMDGGEFTVFDRSVLVSNGLVHGQLLDRIGPPTEDLKKKGIDFSLWFKPDKYPTDF

SEQ ID NO: 41391 - protein, 132 aa, Zea mays
  Clone ID: LIB3069-054-D8_FLI.pep
LSWPRLLRPTTTRASRCRVQKDVGKGDKSGDKGTAEKFAIYQKHRSSLADTVQFRRPAAPTSSVNADIVGTSTLQSASLPKQESSTATSKSYTFREGDRVRYVGPAQLSSLSQRLLSFCWLRCWKRDIMWCG

SEQ ID NO: 41392 - protein, 89 aa, Zea mays
  Clone ID: LIB3069-054-E6_FLI.pep
PSHSTATPNLPLCADGSVSATHSVDTRRKGGCSRSIQSEMRSAERRSSCCLRTTPELPGANVLNGDSISDFPYLACRNRCDVRLFGITR

SEQ ID NO: 41393 - protein, 288 aa, Zea mays
  Clone ID: LIB3069-055-A9_FLI.pep
RGVIPPESPPPQVPQTQAPISPSPPQSSKRKPHLAAAAMSRRYDSRTTIFSPEGRLYQVEYAMEAIGNAGSALGILAADGVVLVGEKKVTSKLLQTSRSAEKMYKIDSHLACAVAGIMSDANILINTARLHAQRYALSYQEPIPVEQLVQSLCDTKQGYTQFGGLRPFGVSFLFAGWDKHHGFQLYMSDPSGNYGGWKAAAVGANSQAAQSMLKQDYKDGLTREEAVALALKVLSKTMDSTSLTAEKLELAEVFLQPGSGEVQYQVCSPEALGKLLAKSGLTQPTPEA

SEQ ID NO: 41394 - protein, 164 aa, Zea mays
  Clone ID: LIB3070-003-A9_FLI.pep
NCCFCFGVPPFFLLNIKIRRPPAYSRKKQHSLLEEHVQPSSWNGPIDYQGRAFQQTNMYATPPNNSFDTGRNSFMPLAAESSYGPFPGSYSERVQRPGGYGFQQQTSSDRLNVVGPRSSYQGGSSNHHAGSNAMDDPAAVAAELQRRWVPPQPPGVIMPEAAAA

SEQ ID NO: 41395 - protein, 136 aa, Zea mays
  Clone ID: LIB3070-003-H12_FLI.pep
AWPFRVHLYSNKNLTLDAARVHEHSDLAPHGLRREVGLELGADDARVAVRAGDLAPDAPVAGLAALGLSLVDVRHALASVPRDVLLGVHPLDLNERRGLVLVRLGPLVSEDGAPDVEPDALSRASLHHGGRLLPST

SEQ ID NO: 41396 - protein, 132 aa, Zea mays
  Clone ID: LIB3070-004-A12_FLI.pep
PVKEIRRTMRIQALRCHVLYSHDGSKLNVIPVLASRSQALRYLYIRWGVELSNITVIVGECGDTDYEGLLGGVHKTIILKGSFNTAPNQVHANRSYSSQDVVSFDKQGIASIEGYGPDNLKSALRQFGILKD

SEQ ID NO: 41397 - protein, 219 aa, Zea mays
  Clone ID: LIB3070-004-E10_FLI.pep
RGTSQLQASRLVGSWRPSNGGSGARGSGRRRKREASMDQRQVVSENYANPITCFFHVLFKAGALAFYILFSLFVKSFVIIFVITVLLAALDFWVVKNVSGRILVGLRWWNEIDDDGNSVWKFECLDGESLARMNKKDSWLFWWTLYLTAAAWIVLGIFSLIRLEADYLLVVGVCLSLSIANIVGFTKCNKDAKKNIQTFAQNALASRVTSSLQSAFGVI

SEQ ID NO: 41398 - protein, 374 aa, Zea mays
  Clone ID: 700804659_FLI.pep
STVCAVHGFILLSARSQLTHALREETPGDAAVCALGKEAAVLGGVTGAVHDAEDLLRRAVVGERQVVAGDDVPHGQPLGPQLGRHHQALVLHAPPPQRVPEVRDACRDLRHPAGIARHTRHPALVQQRTDHRVLRRLHRQQPRQQLSGLRGEEPGVGADVAGEADVGDDVGGDEEVEAVLVGVEGRVQRRVQRLLDDLAEVGRADVQQRPREAPHRLLDRPEVPDFLVTELGGHVADERGEGRGLAADGGRPAAGEVGVDGVEAVPQSGPAEELRLQVLQVQRELQQVHVRLRQQRPGRGAEEPAVGRPRPLAVHVLRLRKGPAQANHCRRGHHDDGRQRRRTHLRPAGGCDGNRAVTSIVALFGNAHTSLPLR

SEQ ID NO: 41399 - protein, 127 aa, Zea mays
  Clone ID: LIB3070-005-F5_FLI.pep
VGPYPESPRLARFPNLPDMSPKKVSATHNVYVSPLRSSKMDTLLSPSPKSYYACVGESTYAFQSPSKDLKAINNRLNSGKKVSGRLNFDIVSDLVVASSLNGVQNAKPAATEVVPTKTPVKCEPSES

SEQ ID NO: 41400 - protein, 112 aa, Zea mays
  Clone ID: LIB3070-007-G10_FLI.pep
FPTQNDKTLAICCLQLIGAGKTHRIVNHLSNNGIKVSGRKRLTTYYSSALWRNKISLHLRFGKQNMLVHTGIILSKLKLLGDATRILALHVEESSAGCRNQPDEDRGTLCLP

SEQ ID NO: 41401 - protein, 119 aa, Zea mays
  Clone ID: LIB3070-008-D10_FLI.pep
ERFSSERTERDSASALPGTYEAATFLGDLAAAAFLGDFFSLPSLAAATAVFLGSSTGLMLGRTPPCAMVTPASSFPSSSSLRIASSTCRGMIRFFLLSRAAFPANSRSSAARYSRTAAR

SEQ ID NO: 41402 - protein, 50 aa, Zea mays
  Clone ID: LIB3070-008-F9_FLI.pep
SLAIHLNCSTGILSWWTQLSWIWQCQPSWRCGTASRIHGAQQRRLRTQYS

SEQ ID NO: 41403 - protein, 270 aa, Zea mays
  Clone ID: LIB3070-008-H8_FLI.pep
RIRALRLLTSGHHQPLTSAVASSAKAEMASVAAAEVAAAALRSVLSRAQQAAARAGRAPGSVRVVAVSKTKPVPVIRGVYDAGHRCFGENYVQELIDKAPQLPEDVEWHFIGNLQSNKARALLAGVPNLDMVESVDDEKIANRLDRVVADLGRKPLKVLVQVNTSGEESKFGVDPSGCMELAKYVKLNCPNLVFSGLMTIGMLDYSSTPENFKALANCREEVCKELGIPEEQCELSMGMSADFEQAIEMGSTNVRVGSTIFGAREYPKKN

SEQ ID NO: 41404 - protein, 167 aa, Zea mays
  Clone ID: 700805472_FLI.pep
GCLRMELQICSAELECQVPRNFRLLEELERGEKGIGDGTVSYGMDDADDIFMRSWTGTIIGPPNTVHEGRIYQLKLFCDTDYPDKPPTVRFQTRINMTCVNQETGLVEPSLFPMLGKWEREHTMEDILTSLKREMSTPQNRRLYQPHEGNEDQRVEQKGVSLRCVIM

SEQ ID NO: 41405 - protein, 67 aa, Zea mays
  Clone ID: LIB3070-009-E5_FLI.pep
GFTTSSIHDTNKIITVLVPCGKWSPSFSSTSSPPFLAIRILPPQALNDVCSIQVHRVLYGFISGARW

SEQ ID NO: 41406 - protein, 151 aa, Zea mays
  Clone ID: 700422128_FLI.pep
ELIKKEELRREIEASVRASRRAMCPDGYSSRRISLRSRVAAAAASTAVVMATATAFLAGNCGSGSKLGSGDVENDGPAYTSAAGLALLPPGCLRPAAGDDVPAGGDLLLVAVAPGWWLSLPAALRRAAAAARILCGGAGKRTLRARSTSVA

SEQ ID NO: 41407 - protein, 74 aa, Zea mays
  Clone ID: LIB3070-011-B9_FLI.pep
ESGFPLYLMESGFGASLFSCDFGIPAPFPFMEGMRCCWSAHWNGTDIDRTFRFISKELRLTDLWISLDALTKVN

SEQ ID NO: 41408 - protein, 249 aa, Zea mays
  Clone ID: LIB3070-013-D7_FLI.pep
YSPRGSLVRFQRKKLLILDLNGLLADINQDYHNAHLAHAKVRTKLVFRRPYCDDFLRFCFQNFELGIWSSRKRENVESVVDILMRGLKQCLLFCWDMSYCTVTGCKTIDNKDKPLVLKELKRVWNKDEPDLPWGQGEFSPSNTLLVDDSPYKALCNPPNTAIFPEPYNYMNQRDDYSLGPGGDLRVYLQRIAAADNVQNFVRDNPFGQKSITESDPNWNFYVKIVDKMEKQIVDQVETKIVDEVERSLG

SEQ ID NO: 41409 - protein, 41 aa, Zea mays
  Clone ID: LIB3070-013-G9_FLI.pep
TVLWRGDMNWEFLFPCFMSIKAPFQSHGINFSFLLNFSYMN

SEQ ID NO: 41410 - protein, 175 aa, Zea mays
  Clone ID: LIB3070-014-C3_FLI.pep
EECDATWEPQNCWAYDDGNRLSLALVSSSSGSMIRSKRQFVYGTVSTMIQLVPGDSAGTVTTYYTSSLGDNHDEIDFEFLGNVSGQPYTIHTNVYAAGVGNKEMQFKPWFDPTADYHNYTISWTPCMIAWYVDGVPIRVFRNYAASHGVAFPTSQPMYAYSSIWAAEDWATQGGR

SEQ ID NO: 41411 - protein, 156 aa, Zea mays
  Clone ID: LIB3070-015-A3_FLI.pep
EFGSRLGTVKWFNGTKGFGFITPDDGSEDLFVHQSSIKSDGYRSLNDGDAVEYTVGSGNDGRAKALDVTAPGGGPLAGGERPDGGNGGGRGGYGGGDRGYGGGGDRGYGGGGDRGYGGGDRGYGGGGDRGYGGDRGYGGGGGYGGGYGGGGGGGGR

SEQ ID NO: 41412 - protein, 153 aa, Zea mays
  Clone ID: 700424195_FLI.pep
LEESLPNGVLAGYPVVDFRAVLVDGSYHDVDSSVLAFQIAARGAFREGMRKAGPRLLEPIMKVEVITPEEHLGDVIGDLNSRRGQVNSFGDKPGGLKVVDSFVPLAEMFQYVSTLRGMTKGRASYTMQLAKFDVVPQHIQNQISVAKTEEAAA

SEQ ID NO: 41413 - protein, 166 aa, Zea mays
  Clone ID: LIB3070-015-F5_FLI.pep
YNEIEDPSSLDGWMHICMKTKGIACLMKETKYLLWEGSGEVQVGRAPSAAAAPFPGLAGHRPRYLLALVHERGVHGEAHQAVVGGIASSSPCPGVVVARGHHHRGLHELKAEPQLVGLDVREPRHGAPEEELGGEAAEHVERGDAVQRPGAGVGVVVEEHGHHVGG

SEQ ID NO: 41414 - protein, 140 aa, Glycine max
  Clone ID: LIB3072-018-B1_FLI.pep
QRTAMELLEQYMQFKQEAEKDGKKNKKEKDPLKPKHPMSAYFLFTNDRRAALAAENKNFLEVPKITSEEWKSMTEEQKRPYEEMAKKNKEQYALEMEAYKQKKDEEAAHFMKEEEEQMKLQKQEALQLLKKKEKTENIIK

SEQ ID NO: 41415 - protein, 148 aa, Glycine max
  Clone ID: LIB3072-044-H10_FLI.pep
EDLNNFAEDLKQEGKIAPDEPAILPPLPIVPKPEKRKPIYVTPQSKRIDYRDRDWDRERDRDFELMPPPGSHKKEYATPMDVDQPIDPNEPTYCVCHQVSFGDMIACDNENCQGGEWFHYSCVGLTQETRFKGKWYCPTCILLPQCQR

SEQ ID NO: 41416 - protein, 184 aa, Glycine max
  Clone ID: LIB3072-051-G4_FLI.pep
ELVDEFEDSEAITPPELVVLPLNATVAELKNQAANAFQDVYLRFRRLQVDGLHGYSGVDDSTQVKLLLGSRDVVCVRGRCIGKNGLSKFRMERGLERWTVDCSCGAKDDDGERMLACDICGVWRHTRCSDIHDTDPVPARFVCLKCQNCESKLKCSGHCKDETVTNVSGSSCFRNGLPVPSDVI

SEQ ID NO: 41417 - protein, 307 aa, Glycine max
  Clone ID: LIB3072-056-H1_FLI.pep
NSQRTEETRMPGELQLPPGFRFHPTDDELVNHYLCRKCAAQTIAVPIIKEIDLYKFDPWQLPEMALYGEKEWYFFSPRDRKYPNGSRPNRAAGSGYWKATGADKPIGKPKALGIKKALVFYAGKAPKGVKTNWIMHEYRLANVDRSASKKNTTTNNLRLDDWVLCRIYNKKGKIEKYNGVAVVDQKVAKLSEEEVQFQHETKPQIKMYGHDDFRNDQLYMDTSDSGPRLHTDSSCSEHVVSPDGTCEKEVQSEPKWNDLELGPDPALGFDFNFMDLTSDDAFAPQVQYQINHLSPWQEMFTYLPKTF

SEQ ID NO: 41418 - protein, 140 aa, Glycine max
  Clone ID: LIB3072-059-E6_FLI.pep
TEINAQYYQQESAKLRQQIQMLQNSNRHLMGDALSTLTVKELKQLENRLERGITRIRSKKHEMLLAEIEYFQKREIELENENLCLRTKITDVERIQQVNMVSGPELNVIQALASRNFFNPNMLDGGTVYPQTDKKILHLG

SEQ ID NO: 41419 - protein, 147 aa, Glycine max
  Clone ID: LIB3073-009-B12_FLI.pep
VRTLSQLFPITLWKDIHSKGKMTEEQSKKVAETESFPSNPAPEPVVVPKEDVAEEKSVIPQPSPSPADESKALVIVEKTSEVAEEKPIEGSVNRDAVLARVATEKRLPLIKAWEESEKSKADNKSHKKLSAISAWENSKKAAAEAEL

SEQ ID NO: 41420 - protein, 128 aa, Zea mays
  Clone ID: 700427749_FLI.pep
DAVHKKYLEEVSSCNVFVVKDNVISTPAIKGTILPGITRKSIIDVALSKGFQVEERLVSVDELLDADEVFCTGTAVVVSPVGSITYQGKRVEYGHQGVGVVSQQLYTSLTSLQMGQTEDWMGWTVQLN

SEQ ID NO: 41421 - protein, 212 aa, Glycine max
  Clone ID: LIB3073-016-G1_FLI.pep
FVNTNTIAMGFNILRTTSISTPISSSKSKPIFSTLLRSSPSTIFPPKSVTPTTLFVSATPFFTLHPKLGFRGGIVAMAAPGSLRKSEEEWRAILSPEQFRILRQKGTEFPGTGEYDKFYEEGVYNCAGCGTPLYRSITKFNSGCGWPAFYEGIPGAINRNPDPDGMRTEITCAACGGHLGHVFKGEGFPTPTNERHCVNSISLKFAPANSYS

SEQ ID NO: 41422 - protein, 180 aa, Glycine max; identical to SEQ ID NO: 40346
  Clone ID: LIB3073-018-G7_FLI.pep

SEQ ID NO: 41423 - protein, 132 aa, Zea mays
  Clone ID: 700430183_FLI.pep
EGRQSELACIGQREPNQNQKQARRDCYLMERVMKIASERAVVVFTLSSCCMCHTVTRLMADLGVNALVHELDSDPRGKDMERALLKMLGGRGPAVPAVFIGGKLVGGTNRVMSLHLAGELVPMLKSAGALWL

SEQ ID NO: 41424 - protein, 122 aa, Glycine max
  Clone ID: LIB3073-019-D1_FLI.pep
QGGWFYFCLLATMAVANKLLSVLIIALIAISMLQTVVMASHGHGGHHYNDKKKYGPGSLKSFQCPSQCSRRCGKTQYHKPCMFFCQKCCRKCLYVPPGYYGNKAVCPCYNNWKTKEGGPKCP

SEQ ID NO: 41425 - protein, 146 aa, Glycine max
  Clone ID: LIB3074-040-B2_FLI.pep
RTMSSTEVAATTKKGGRGKPKTTKSVSRSSKAGLQFPVGRVARYLKAGRYAQRVGSGSPVYLSAVLEYLAAEVLELAGNAARDNKKTRIVPRHIQLAVRNDEELSKLMGSVTIANGGVLPNIHQNLLPKKAAGKGKLEIGSASQEF

SEQ ID NO: 41426 - protein, 112 aa, Zea mays
  Clone ID: 700431246_FLI.pep
QTLYQDKAPGRQLRLFDVRLRQSEVHAFGWKQESSESQSALINQSWSPDGWYMSSGSADPVIHIFDIRHHGQNPCQSVQAHQKRVFKAVWHRTLPYLTSISSDLNIGIHKYS

SEQ ID NO: 41427 - protein, 160 aa, Zea mays
  Clone ID: LIB3075-003-H3_FLI.pep
KFEFEFERRKLARDDVRELIYRETLEYHPQMLQEFLGGGVKANFVYPSGVDRFKRQFVHLEEIAAKGEKTSPQLRQHTSLPRERVNDSGDDLEKPSADYCIRLHVCDQLSSSRNFLKSESISASQCVVIKPKREKDEEPISEYASSPVDGVPPRIAQLKT

SEQ ID NO: 41428 - protein, 295 aa, Zea mays
  Clone ID: 700432587_FLI.pep
SKQSSILCCLYIKSCCHDAETCYFREQSLCLISFLLGLQKSSLWVMLVSESTAIPSSLSCSLELDPLLRDLVEKKLSLKRNVTAMATELRDARNRLASQELLLAQEIEARKVAELKTRNLEDEVSKLQKCLGDKDEQLRASLCSADQFRNELDGFRSQLPVMTTLLHCSYLLGKLNDRNNSMSEGEFPVNNLAEQLNHLEKCLESRDPTLRQFKDCYSLRTESDITDAFARVAFDNDDGVAKPGEDIRALSAHWVNRSKELESQLDQHRRTAQELKRRVMRLELCILEPYGNSIG

SEQ ID NO: 41429 - protein, 304 aa, Zea mays
  Clone ID: 701158505_FLI.pep
EGAGGQAQAQLHRDEKQHKPAVLKKVKEKVKKIKNTLAGHGHGHDGEHGGGERMGDADAGSDSSEEAEEDAAEREAALEKGGYMEDVEDKPLVTEPEPEPNPELHGAPMYESARAPAVQDLVAEYDQPAWTPAVQEVEGDGSAPRVRLGDIGGPVVEDPAAPRSTTPTAREGEDIGTTPVVRQFETMSLSDDPTHVGAGKKGAKAEEWKDKAADTVRGADGGGGASYTDTLKNAAAGTTEYGKKLASTVYEKVAGVTTAVGVGKRGDERTEATPASNTRTEERGAAPEATDATRGAGYTDKIKS

SEQ ID NO: 41430 - protein, 130 aa, Zea mays
  Clone ID: 701159568_FLI.pep
GFFVCFGNSVRFLLHRMSLFCIAHSLNYFCFIFLFIFFAAVAVSVVEEIEEVPRGGPRRRSLLLHRLVVVGDVGVLRGGLTLLEDSPEQPGGHADGELGRWLGFGIVLGRSGERIFRWRLPMSFWPFPTQ

SEQ ID NO: 41431 - protein, 384 aa, Zea mays
  Clone ID: LIB3075-004-E3_FLI.pep
MALRAVELRRFLLRRIGGGEAALPPLAWRGRPASTSAPADDELAGKSAYEVLGVGETSSSAEIKASFHRLAKETHPDVAAAAGSRRFLQILAAYEILSDSQRRAHYDSYLRSQRRVVGKHPRPSQFVYPSGSGSGIVVPRESNVVEWLKWYRLTIDDIVTKKRVATGSGYFERLESELYTAIHAAYYGPDVDSMDVLPDCFEAEERSAYETSELLHLVSGRDLFGIVTVTDSVKELSDVCREKLVPSGCRSSEFTHVVSRNANKNSISMNPVDMNKQEMRYENDVPSSDSFKDIELQICGKLVATATRSPNCDCIDKSDLEEDHIHVYLVPNANISDLTHGKLLLGTITGLATTGEEGSCCVYDGHNIKTHIIMKHRTLMVLAF

SEQ ID NO: 41432 - protein, 149 aa, Zea mays
  Clone ID: 701160564_FLI.pep
TNTESRIPAKYDSISSQAKRSTPSTQASSSSWESKGLDKQRIRNSTMGGSGSDRRGQRIRRLQQRGPRRRRGQWPARRRIGLSLLRCPTYPPSCCLLLLLDSTSNSPVFTLLFCAVASRLVHCTCWSPPAMTARQVATTELRGDGGQKW

SEQ ID NO: 41433 - protein, 339 aa, Zea mays
  Clone ID: LIB3075-006-D6_FLI.pep
ILTANMTNYLASKVSGGWGWRTPVTFGAIPAAVIALGALAIPDTPASLVERGDTATARKTLSQIRGVGDVREEFDDLAAASEDAKAVQCPWRELFFGGKYKPQLTFALLIPFFQQLTGINVIMFYAPVLFKTVGFKQNATLVSSVITGLVNVFSTFVAIATADKIGRRALFLQGGTQMIISQILVGTFIGLQFGMSGTGDISEQYAMCIVLFVCVYVAGFAWSWGPMGWLVPSEIYPLAVRSAAMSVTVAVNMFFTAFIGQIFLTLLCHLRFGLFYFFGAWVLLMTLFIAMLLPETKSVPVEEMAHVWKKHWFWRKFVIDTGNDARNAEMRKRIALEMS

SEQ ID NO: 41434 - protein, 280 aa, Zea mays
  Clone ID: 701160937_FLI.pep
SPFQGLKRKPQSRRHRPKSSKRKSHLAAAAMSRRYDSRTTIFSPEGRLYQVEYAMEAIGNAGSALGILAADGVVLVGEKKVTSKLLQTSRSAEKMYKIDSHLACAVAGIMSDANILINTARLHAQRYALSYQEPIPVEQLVQSLCDTKQGYTQFGGLRPFGVSFLFAGWDKHHGFQLYMSDPSGNYGGWKAAAVGANSQAAQSMLKQDYKDALTREEAVGLALKVLSKTMDSTSLTAEKLELAEVFLQPDTGEVQYQVCSPEALGKLLAKSGLTQPTPEA

SEQ ID NO: 41435 - protein, 272 aa, Zea mays
  Clone ID: LIB3075-006-G3_FLI.pep
RNSRRSLELVCSQDERRRCREAGAADGPVHPAGGRRESQRDQCCRRGGVQHREAAAGGVGKTEGAAGVRAQGEAGGRPQEDRVLDGAERGAHQAAAGAGRRGDRDEGERRRRAAPRHQGRQRLQEGPQGPHRAEPASSEGAGAGAAVPRGGPEPGGGGAGGGQEGVRREGQGQPPQDHHRRQGLPAAAEDQPRRARAVLLRRRGARVPGRQDRLRQHAGRQAQRLLQAKAPRDQEETLQPASIVLMFFFCYSDRLFSEINQKRSDPTKIHRS

SEQ ID NO: 41436 - protein, 69 aa, Zea mays
  Clone ID: LIB3075-008-H3_FLI.pep
AAARAQMYSNALRKLPYMRHPWEHLLGMGLGAVFVNQLVKFDEKLKEDLDKMLERARLANEQRYIDDDE

SEQ ID NO: 41437 - protein, 265 aa, Zea mays
  Clone ID: LIB3075-009-G7_FLI.pep
IEQRSTRRDKRMPVSRIAVGAPGELSHPDTAKAAVAEFISMLIFVFAGSGSGMAFSKLTDGGAATPAGLIAASLAHALALFVAVSVGANISGGHVNPAVTFGAFVGGNISLLKALVYWVAQLLGSVVACLLLKIATGGAAIGAFSLSAGVGAMNAVVLEMVMTFGLVYTVYATAVDPKKGDLGVIAPIAIGFIVGANILAGGAFDGASMNPAVSFGPAVVTGVWENHWVYWVGPLAGAAIAALVYDIIFIGQRPHQQLPTTAADY

SEQ ID NO: 41438 - protein, 130 aa, Zea mays
  Clone ID: LIB3075-009-H10_FLI.pep
ANRVNMDKYMTNASADAVFFSERYAAAAPPCTAHRFADRSTGGYHACASDTRRPVTIHQMREGNKHDSILIVGLDGVVLRLDKLASSARNSGALLPFRSATVTGAASRAGDAVAGPLVRAGRSVFFLLNS

SEQ ID NO: 41439 - protein, 81 aa, Zea mays
  Clone ID: LIB3075-010-G7_FLI.pep
KENLSKMASKKMVLAVAALLLVTLALQVAPPAIAMDCKAGCAEIKNSPLGISIEECLKRCEGIATEQGPRDPYKDNKLDIP

SEQ ID NO: 41440 - protein, 122 aa, Zea mays
  Clone ID: LIB3075-011-E10_FLI.pep
QRNQLIRPISNYNDKKTNPRRRACLALAVVVDPGRVVVVGEAPLPEPMAAPDPVHHLVDGHALGLRQQREDEDGHDHDPGGEEEEDEGAHGAHHGQERLRDEEGEEHVGADGEREAGRARLQ

SEQ ID NO: 41441 - protein, 365 aa, Zea mays
  Clone ID: LIB3075-011-H3_FLI.pep
HRHAQEQVELQGLRDHGLAGRGPHHEPAAPALLPLHQGDDPRRHRHGDDPLRLPGVRRRPGQAGEAGADQAGAHRRRRQPDPPGQVRHGPLRGPAPGPAPHQGARRAGAPGAGAGGRPQVARAAQEQQEGAGEADAAAAQDGQEDPRRRQPRPRPGQPVRRLDHQVAGGEGQQPHRRRHHDPGGHQEGGGQEDVGGLRGAPGQGRPGQERRGLRVRGGSGGRTPVRRDGRRQQEPDHPVAGARGDQGRVRARQVRRARRVRPPPRAAAVRGLHGRARRGLAARHGGAGHHRRAVRGLWVHGEAAAHVVQVRGPAAHELRRQAVRPAVPVRLRAHHQGCRESRLAIRVRLCFCFFGVDEIVSGNGK

SEQ ID NO: 41442 - protein, 458 aa, Zea mays
  Clone ID: LIB3075-014-B1_FLI.pep
TSESISVPFSSSTGQAVRPFSASVFLGFDADPSLNITARIRGPNDQYINHIMKETGVTVVLRGKDSENLGSCHSEASQQPLHLYLTSMHLKNLEAAKVLAENLLDTVAAEFGASRISSSKVYGAVPPPQQLLAGVDTSGTKSDVHYIVGPNVLSGATHSFASTGVIAPVVAPAVTVQSGAPTYSGVPLPSNMAYPIPPANGGAFYSGYGDIYPQATPLQQLAFTLKHASSSATQAVPVTSTPTSMATKGNSILDAEMDKRSRRKFQELPVSKGPATESQNSQQGSKFVKTGLDSSGNIGSSSIAPPKKVHPGSNGMLPAEEADMPSHLSISTKMLPPPLKSMLPLPPRSMPPPPPKSMPPPPPKFPSDEFLSRNENKFFPLKEPTAPPRSFDAISVLPSERRPREPKEEKTKGTPVSDTLLKLIDYGDDDDDDDIDVTDNIPKGNPTPGSEQKPFWAV

SEQ ID NO: 41443 - protein, 178 aa, Zea mays
  Clone ID: LIB3075-014-E2_FLI.pep
INVARWFNHIDALLRLSGVTAEGLGVKVEPSAVPSASILDVADGQAPAADEDDDDDVDLFGEETEEEKKAAEERAAAAKASGKKKESGKSSVLLDVKPWDDETDMAKLEEAVRSVQMEGLLWGASKLVPVGYGIKKLQIMMTIVDDLVSVDTLIEDHLCAEPVSEYVQSCDIVAFNKI

SEQ ID NO: 41444 - protein, 180 aa, Zea mays
  Clone ID: LIB3075-017-H5_FLI.pep
ILDALRETGQRGIISRGWGALGSFSEVPVDVFILEDCPHDWLFPRCAAVVHHGGAGTTAAGLIAGCPTTVVPFFGDQFFWGERVHARGVGPAPISIAELTVEALSDAIIFMLDPEVKSRTMELAIAIGNEDGVAAAVDAFHRHLPSELPLSPPAHVEEERTDFFQWFSRGLEKCCFPFSF

SEQ ID NO: 41445 - protein, 307 aa, Zea mays
  Clone ID: LIB3075-018-B9_FLI.pep
AYKSQESGKMHACGHDAHTTMLLGAAKLLQARKGDLKGAVKLVFQPSEEGYGGAYYVLQEGALDGVSAIFGLHVDPALPVGVVASRPGPFTATAGRFSATIRGKGGHAAVPHESVDPVVVAATAILSLQQIVAREVDPLHGAVVSITFVKGGEAFNVIPESVTFGGTMRSMTDEGLSYLMKRVKEIVEGHSSVHHCTASLDFMEEEMRPYPAVANDERMYAHARAVGESLLGENHVKVAPQVMGAEDFGFYARRMAGAFFTIGVGNESTMVTVQQPHSPYFVIDEDALPVGAAFHAAVAIDFLKKHS

SEQ ID NO: 41446 - protein, 280 aa, Zea mays
  Clone ID: LIB3075-018-C2_FLI.pep
RHFRGVINLEDCNLEDNLDDEDAPRSSKDSKKANMVDTGKDSSLMFKITHKIAYKNVLKAHSAVILKAESMSDKTEWIAKIKGIVDPKGLSAKKPSASEGGAPVRQSHPDGSLEPVLKKPVNHEEELRWISQEVRAYVEAVLNNLAGNVPKAVVLCQVEKAKEDMLSQLYTSISTQSLAKIEELIQEDHNVKRKREKFQLQSSLLSKVTRLLSIHDSRSGSAGLSTDSAGSESSPRNGGHSGDDWRSAFGAGSASWSTGAAIAGRRVPSRGPPPPPPNVG

SEQ ID NO: 41447 - protein, 129 aa, Zea mays
  Clone ID: 701161256_FLI.pep
EHNRLGSYTPEPYSKWLLLHLYWWLREEARAGSRSAAANHYSPSALLWRSDSEKDLGDLKLPRPPFGPFLRRIPAPPSLRGGSARASRTFFPRCGGGSWLHSTSSESESSSSPSSPSATAWSGPRSGGR

SEQ ID NO: 41448 - protein, 164 aa, Zea mays
  Clone ID: 701161565_FLI.pep
MITPATVLPAPAVSAATPSPTGPGASASLAEGALALERLVLVGASATGAGAGALDFFFLFLEDEEGFFFFLDGAGAGTSAGLVAGVVGGAAAGAGDFLVGVAGGVVAAAGAAAGAVVDFCAAAECAATRQSSTRQRAPARAIAAAAEAAVCGVCSVAVRCSGCF

SEQ ID NO: 41449 - protein, 700 aa, Zea mays
  Clone ID: LIB3075-018-G2_FLI.pep
QKMELWEENLSTAVSLEVLGITEKFSVAAGARSITTDYAKLDCVTSILMGLLSRNQSLAFWKAFLPVVYNIFNVHGATLMARENDRFLKQIAFHLLRLAVFRNDSIRKRAVVGLQILVRNSFNYFKNTTRLRVMLTITLSELMSDVQVTQMKFDGSLEESGEARRLRKSLEEMADVRSKDLLKDCGLPVTALEAAPEGSSDNRWSWVEVKHLSKCLVQALDAGLEHALLGSVVTVDRYAAAEGFYKLAMAYAPVPDLHIMWLLHLCDAHQEMQSWAEAAQCAVAVAGVIMQALVGRNDAVWSKEHVASLRKICPIVNTDVSAEASAAEVEGYGASKLTVDSAVKYLQLANKLFTQAELYHFCASIQELIIPVYKSRRAYGQLAKCHTSLTNIYESILEQEASPIPFIDATYYRVGFYGERFGKLNKKEYVFREPRDVRLGDIMEKLSHIYEAKIDGSHTLHIIPDSRQVNADELQPGFCYLQITAVDPVMEDEDLGSRRERIFSLSTGTVRARVFDRFLFDTPFTKNGKTQGGLEDQWKRRTVLQTEGSFPALVNRLPVIKSESLEFSPVENAIGMIETRTAALRNELEEPRSSEGDQLPRLQSLQRILQGSVAVQVNSGVLSVCTAFLSGEPATRLRSQELQQLIAALLEFMAVCKRAIRVHFRLIGEEDQEFHTQLVNGFQSLTAELSHYIPAILSEL

SEQ ID NO: 41450 - protein, 241 aa, Zea mays
  Clone ID: LIB3075-018-H7_FLI.pep
KDNTVPMASLDAVRGDLALLILYLNKAEARDKICRAIQYGSKFISNGEPGPAQNVDKSTSLARKVFRLCKFVNDLHALISPPAKGTPLPLILLGKSKNAMLSTFLFLDQIVWAGRTGIYKNKERAEFLGRIAFYCFLGSNTCTAIIELAELQRLSTSMKKLEKELKHQELYKNEQYRMKLHKSNERLLALVKSSLDIVVAVGLLQLAPKKVTPRVTGAFGFASSLIACYQLLPSPPAKQSK

SEQ ID NO: 41451 - protein, 221 aa, Zea mays
  Clone ID: LIB3075-019-A5_FLI.pep
ISPPFPLLVSAPLLASDPQFLLRISHSAQRRCEGRGTRRKMGLAFGKLFSRLFAKKEMRILMVGLDAAGKTTILYKLKLGEIVTTIPTIGFNVETVEYKNISFTVWDVGGQDKIRPLWRHYFQNTQGLIFVVDSNDRDRVVEARDELHRMLNEDELRDAVLLVFANKQDLPNAMNAAEITDKLGLHSLRQRHWYIQSTCATTGEGLYEGLDWLSSNIASKA

SEQ ID NO: 41452 - protein, 73 aa, Zea mays
  Clone ID: LIB3075-019-B8_FLI.pep
RKKIWILGRHVYVRSFRSESDGSTLPRWLKIMKSRLAGSETILFSSECGSTERNLVGTARPAHMHKTNPKSNS

SEQ ID NO: 41453 - protein, 311 aa, Zea mays
  Clone ID: LIB3075-019-E9_FLI.pep
ERQFLIEINMDSEKNDAEVQAEGVLNSRLQQIVHTLDKVRYVMRCIFGDPKNAPPPLVRLSGKSLVSAIWKGDSSIVAELIQSMEPHVEEEVLSDLKAKIRAHDPSESEDIEGGTRNSLLWLRDELRTLSCTYKCRHDAAADLIHLYAYTKCFFRVRDYKTVKSPPVHISPLDLGPKYADKLGPGFQEYCKTYPENYCLAQLIYWYSQNSEPESRLTRARKGCMSLPDVSSFYVKSAKPSQERAYGNRTVRFMLSRMEKQAQRPWPKDRIWVFKSDPRFFGSPMMDTVLNNSPLDKEMVHWLKTRPNVFLG

SEQ ID NO: 41454 - protein, 216 aa, Zea mays
  Clone ID: 701164304_FLI.pep
IDPRSTAMVRMKQVKISVKKDVDSYTIRGTNKVVHVGDCVLMRASDSDKQPYVARVEKMEADGRGSVRVQVRWYYRPEESKGGRRQFHGAKELFLSDHFDLQSAHTIEGKCVVHSFKNYTKLDNVGPEDYFSRFEYKAATGSFTPDRVAVYCKCEMPYNPDDLMVQCEACKDWFHPSCMAMTIEQAKKLDHFVCSDCLKENGSKRLSNVYATSSNS

SEQ ID NO: 41455 - protein, 129 aa, Zea mays
  Clone ID: LIB3075-020-D8_FLI.pep
PTTLPTTVVGYVGPAARPRSRRENRVLGRHLLTGTWALLSWSSSCCSRGRSPCCRRCQAARTGTWRSTCCRRRGTASCGASWSTAAGTPRRTERASGFPCHPCSCSPRACGGRRRRRRPCPALHLRRRR

SEQ ID NO: 41456 - protein, 103 aa, Zea mays
  Clone ID: 701165961_FLI.pep
RSIPVSSVGDRKVAAIGIHGSRMIVYHGLALNITTDLAPFRMIDPCGIKDRGVGSIKEILQRVSDAEEIDDASLMDIVYDSMIKEFAELFQLSLDFSPGCSFQ

SEQ ID NO: 41457 - protein, 269 aa, Zea mays
  Clone ID: 701166557_FLI.pep
GQRLIGWAWSTLHAHLPPATASESLAGRQANPTASARNLGARTRDHVLRGQQRRRRRREWSGGDGRRRAVRGNGEGPRVERSQVAALRPALARRLRLRRLVQLRVQPGGSGAPDPALLVLATGDAERHTVPAPVRAYGQLDGVPHQRSLRGVPGQEGEGEGGLQEPCHPVVRGAGRAAREALEERRPGLQLHVPALRLGHPAHRLRKQHLLHQRQAGQADVDVHLRSLLRHDGVHPVVPQLPDLVVPGPRHDHLHGVVPRRRVPHPWPG

SEQ ID NO: 41458 - protein, 278 aa, Zea mays
  Clone ID: LIB3075-020-F6_FLI.pep
KDDKKGHEDQQEIPEPAEEALEDELEIPEPAEENYGGYHSEVEDDRRKYEDEEFYHESEDEYVDDYDEHVESYKSDDDQKDLTEPGHASWLDKVQQTVQNVFQKFNFFKTPVDLSEASHVRKEYDDASSKLSKIQSKISSLAEKLKHDFGNDKEFYSFYDQCFETKEGKYTYKVCAYKKASQAEGHSSTNLGRWDKFEDSYRVMHFSSGDKCWNGPDRSLKVRLRCGLSNELNDVDEPSRCEYVAVLSTPAVCVEDKLKELQNKLDAMSLKQPGHDEL

SEQ ID NO: 41459 - protein, 340 aa, Zea mays
  Clone ID: LIB3075-022-A3_FLI.pep
GSWHQHQHRHQRLFPCRISATPGTATAGGRPASLVPACAAGRGDGWPRAPVARRAPSSAACGGGRGASSRRRSATRGAACASGSAPSTPRRRPRASTTPPPSSSAGPTPPPTSPRPPPLTAAPGPGPGRTRRRHRQRATSPARSRRRRPCSARSPPCPPSPRTTPTRRPPSAAAWPSSRRRSWASSCRSRTRPSTPPAASGTSSPTRGSSTPSRRRRRRRGMPPPPSPSPPRLTTRPAGPRRRCRRTTTSRTCATSSRSTGFPRFSEQVDGERRNRERRRWFVYRDVILDVESALCLCLCLCRAYAHRVLVRLSPRRFCYYLRVDEKCGNMLPNDEHVEF

SEQ ID NO: 41460 - protein, 289 aa, Zea mays
  Clone ID: 701173144_FLI.pep
QPAIIPPPHAKSARSSSSPEDQARAPEMSYAYLFKYIIIGDTGPCRHVGPLPSSVLRLDPRASQPESAAARWRSNLVRLPVCDDGDGLGFAFAAGVGKSCLLLQFTDKRFQPVHDLTIGVEFGARMITIDNKPIKLQIWDTAGQESFRSITRSYYRGAAGALLVYDITRRETFNHLASWLEDARQHANANMTIMLVGNKCDLSHRRAVSYEEGEQFAKEHGLIFMEASAKTAQNVEEAFVKTAGAIYKKIQDGVFDVSNESYGIKVGYAIPGQSGGAGSSSSQGGGCCS

SEQ ID NO: 41461 - protein, 307 aa, Zea mays
  Clone ID: LIB3075-025-A10_FLI.pep
QMNLFEACLNPDSLDGQVTNDLKKAGSLRFYKPKFKYIFCDMDGTLLNSKSQVSARNAEALREARSRGVNIVIATGKARPAVIDALSMVDLSGRTGIVSESSPGVFLQGLLVYGLEGRRIYKRNLDQEVCREALSYSIENKIPLVAFSQDHCYSMFDHPLVDSLHYIYHEPKAKIVPSIGQLLETAEIQKVLFLETPERISSALRPYWAKAIEGRAHVVQAQPDMLELVPPATSKGNGVKVLLNHLSISPDEVMAIGDGENDIEMLQLASFGVALANGSDKTKAAANVIGATNDEDGVAQAIYEYAF

SEQ ID NO: 41462 - protein, 221 aa, Zea mays
  Clone ID: LIB3075-026-G6_FLI.pep
LCGVGRLTNSQITRIRRDARLVSPFLSCWPPACSHCPAPRGQMAPAPALTATSVLKRSHLPGVHSLAGRRQPGRDRVSVLSPAIPPPRVSWQQGSGVVAKRLLWASASGSFEKDNIGEDVVLPSQIAVENKVDLLKILKSANSIIPHIVLGSTILALVYPPSFTWFTTRYYAPALGFLMFAVGVNSSANDFIEAIKRPDAIAAGYIGQLSLSPCLDSFLAL

SEQ ID NO: 41463 - protein, 323 aa, Zea mays
  Clone ID: 701173691_FLI.pep
CESLDSFVTAIEDAKAVFEMGKNLGFDMHILDLGGGYPGTSDAKIPFEPIAEIIQETLDRCFPPVDGLEIIAEPGRYFAASAFTLVTQVIAKREIQYDDNAAAEAIEFAENNNVVRCYPHVLRSASPDVPQTESLHCQDLDMSREIMYYLNDGVYGSFNCTIFDHWTVYPCPWLEANRSVQSYIRTVLWGPTCDSMDMIRRDIYMPELIIGDWVVFDEMGAYTIAAASPFNGFKLPKLKYQISGRVMAVLKATKDWPALKKLLVSPESSAEHQQMGCSSSSLSYSGSFGNSENHLHPTPPDTEPGDRIEPCMKNGKISYIQVH

SEQ ID NO: 41464 - protein, 185 aa, Zea mays
  Clone ID: LIB3075-027-D8_FLI.pep
RRPHRLLDLFSKLARRADAEDPIEKALLGLPTDGLRVLLEYVREWNTKPKFCHVAQFVLFRLLRSFSPTDILEIKGISELLEGLIPYSQRHFSRVDRLVRSTFLLDYTLMRMSVVDPDVDAGTIKDEMNGSSAENGELAEPRPASPVPQKSSKKRKSGKSGKKGKEKKVKVASSGLLSKDVSVEP

SEQ ID NO: 41465 - protein, 266 aa, Zea mays
  Clone ID: 701181593_FLI.pep
EASSARSGRCTVLYCSRLVLHSSFSSQVPPPPPYRRERKRKAWKEKRMAGRRAEEEYDYLFKVVLIGDSGVGKSNLLSRFTRNEFCLESKSTIGVEFATRTLHVEGKIIKAQIWDTAGQERYRAITSAYYRGALGAVLVYDVSKPTTFENISRWLKELRDHADSNTRIMLVGNKTDLRHLRAVATDDARSFAEAEGLSYIETSALEATNVEEAFQLILGDIYRAVSKKPVASDEVGAGQGGVKEGKTIDVATGADAAAHKKQCCSA

SEQ ID NO: 41466 - protein, 239 aa, Zea mays
  Clone ID: LIB3075-027-E4_FLI.pep
ISWTGQWTCRGTVKQEALVLLLLLSCLPPRHGRGVAVEELVDDGLHVLSAELDVLLRLSPGAEVLREAAEEGAVGRHDDGGDGDAQLRLQLLVADDPCALRPVDLVHGGVELLEPLLEHRLLHVALHRQHAVVAEQPQHAAPRVPLVVLVVLPQVGRLLPRPRLAQHRVGLRRPADLLQHVPPVVHQEDVAQRRVLVQPRLGLQVAVQQLHHLHQLRRERVAAVVAAAAAVVVLTEHLL

SEQ ID NO: 41467 - protein, 457 aa, Zea mays
  Clone ID: 701185186_FLI.pep
TAAEGEQAAAPIAVMELSMSGSSLRTFGRCVTFLARVASELVLQAHPAKLEMHTLNSSRSAYASISLARDFFDQYHLDAAASAPSSTPLQCSVLLKSLLAVLRTPHAALDRLAVSLPEPDAPKLQITLHCLNGVRKTYWIVCSAEPEVQSLSLDRGRFPSRLAIRPRELARLLSNFQSSLQELTIIATDPASGLPDASGDVGGKAVELRSYNDPTKDDCDTRLHTQLWIDPAEEFVEFVHAGDPVDVTFGVKELKAFLTFCEGCEVDILLFFEKTGEPVLLVPRFGLDDGAASDFEATLVLATMTVSQLSDSDDAQQPATSAQNAGEPGAAAPTLVPENVSNHTKIWSELSGSTPKSIEANRENHAQKKRNASTNMLNDMSMLPNVTNAPSKPPVADNANNIMQPLQMDHMEERPEGISGIPRSQHHPSNWVGADDNDDDNEDDEELLVQTTPYYMD

SEQ ID NO: 41468 - protein, 254 aa, Zea mays
  Clone ID: 701185950_FLI.pep
AGGRRVSRAGGGRLGDGPALGRLPGGGRRGRRGLDAEQVVGQQHLVDGVDGEGLLRAQGLADAGGDEARGHVGLAAAVGGDVERVGPVGARRLRTHGVAGGLEGVERVELRQDVVLHQRHLLLLRQLVQRAGLEAGEGAVGGREHRVPAAERVVQLAVQLRVLLRRLHQPHERRVLPALLQDRRNVRRALVGRRRRRGAWRLAEHRRHRRQRQERRREQAPCPCRRHYWCRVVTANAKVVAAAVLTAQFPLNLS

SEQ ID NO: 41469 - protein, 183 aa, Zea mays
  Clone ID: LIB3075-027-G3_FLI.pep
RGQATTAKTAWLPPLKAGLLHRHHLHRHGDRHAYEPDGDAGDPLREAERGRVGEATEALHDHELEHDGAAEDHDEHVVVQDASEHVHPLHLPRVHLVENLAEHEAVEDDRVQDQVGVGGALVDPEEPFPPRLQVPDDEELVEGLPHDVPPHGVADEVAFPSDGSPLHELVVGGLRGQRQPKRP

SEQ ID NO: 41470 - protein, 223 aa, Zea mays
  Clone ID: LIB143-012-D8_FLI.pep
CYISTMVKLTMIARVTDGLPLSEGLDDSRDLKDADFYKQQAKLLFKNLSRGQHEASRMSIETGPYLFHYIIEGRVCYLTLCDRSYPKKLAFQYLEDLKNEFEKVNGSQIETAARPYAFIKFDAFIQKTKKLYLDTRTQRNLAKLNDELYEVHQIMTRNVQEVLGVGEKLDQVSEMSSRLTSDTRIYAEKAKDLNRQALIRKYAPVAIVIGIVVMLFWVKNKIW

SEQ ID NO: 41471 - protein, 285 aa, Zea mays
  Clone ID: LIB3075-027-H1_FLI.pep
EQSTGPFLAYRAPQVVKPYLHLVPPPSPARLPIDAQAALRLLPVGRERGAPALPPAINSPHPITAPPSSIGSSVVGCYRQAGRMFSLSQIEHDLPMPPHLLSRPLPDAIKAELERLFLDKVITKLGLCVSVYDIRSIEGGSIHPGEGCSTYKVSFRLLMFKPFNGEILVGRITGYDDKGLQVSLEFFSDICIPGHLMQFGTVRGPDGRWMLKTELGDELYLDLDDEIRFLVSSTKYPPIPIDQNEDDPPFAPMQIVGSIKGDGLGLLVWWAADEEEGEEAAEEEQ

SEQ ID NO: 41472 - protein, 230 aa, Zea mays
  Clone ID: LIB143-019-A10_FLI.pep
ETASMGAVLGRHDTHKRSSHGSKLEVKMVDAMQQRASHGTSLKSFDSIIMKFPKIDESFRKCKTIFEQFDEDSNGEIDKEELKHCFQKLEISFTEEEICDLFEACDINEDMGMKFNEFIVFLCLVYLLNEAAVLEAKIKMGLGNLEATFETLVDAFVFLDKNKDGYVSKDEMIQAINETTTGERSSGPIAMKRFEEMDWDKNGMVTFKEFLFAFTRWVGIDENEDEDDDE

SEQ ID NO: 41473 - protein, 180 aa, Zea mays; identical to SEQ ID NO: 37897
  Clone ID: LIB143-019-B4_FLI.pep

SEQ ID NO: 41474 - protein, 285 aa, Zea mays
  Clone ID: LIB3075-028-B5_FLI.pep
RVDNLVITGKGNLDGQGPAVWSKNSCTKKYDCKILPNSLVMDFVNNGEVSGVTLLNSKFFHMNMYRCKDMLIKDVTVTAPGDSPNTDGIHMGDSSGITITNTVIGVGDDCISIGPGTSKVNITGVTCGPGHGISIGSLGRYKDEKDVTDINVKDCTLKKTMFGVRIKAYEDAASVLTVSKIHYENIKMEDSANPIFIDMKYCPNKLCTANGASKVTVKDVTFKNITGTSSTPEVVSLLCTAKVPCTGVTMDDVNVEYSGTNNKTMAICTNAKGSTKGCLKELACF

SEQ ID NO: 41475 - protein, 358 aa, Zea mays
  Clone ID: LIB143-019-D3_FLI.pep
DNVKAKIQDKEGIPPDQQRLIFAGKQLEDGRTLADYNIQKESTLHLVLRLRGGMQIFVKTLTGKTITLEVESSDTIDNVKAKIQDKEGIPPDQQRLIFAGKQLEDGRTLADYNIQKESTLHLVLRLRGGMQIFVKTLTGKTITLEVESSDTIDNVKAKIQDKEGIPPDQQRLIFAGKQLEDGRTLADYNIQKESTLHLVLRLRGGMQIFVKTLTGKTITLEVESSDTIDNVKAKIQDKEGIPPDQQRLIFAGKQLEDGRTLADYNIQKESTLHLVLRLRGGMQIFVKTLTGKTITLEVESSDTIDNVKAKIQDKEGIPPDQQRLIFAGKQLEDGRTLADYNIQKESTLHLVLRLRGGQ

SEQ ID NO: 41476 - protein, 126 aa, Zea mays
  Clone ID: LIB3075-028-E5_FLI.pep
PFSRRRQPLPRRRRRHPPRLSGMPVRVVDTATPSSQPSPGQEANTGHPSPPSCSLLSAGRSFAGTQNVSSLQKDEAWKVNVRIHGCDLEQGYLCGTMEALNVPLADTPVVTFWEGEIGVQYLSRSR

SEQ ID NO: 41477 - protein, 160 aa, Zea mays
  Clone ID: LIB3075-043-D3_FLI.pep
LRGDRLHSIMGRVKLQIKRIENNTNRQVTFSKRRNGLIKKAYELSVLCDIDIALIMFSPSNRLSHFSGRRRIEDVITRYINLPEHDRGGVVRNREYLMKMLGKLKCEGNIAEQLTPNKEPINSNVEELQQEIKTYQHQMEVLKEQLRSDNIDVDERFRDV

SEQ ID NO: 41478 - protein, 183 aa, Zea mays
  Clone ID: LIB143-037-H1_FLI.pep
FPTHNPNITRSSSSPTTVVLPATEIRKRRNRSRDRGCSGPLAPDAARELDVFGHDGDALGVDGAEVGVLEEAHEVGLGGLLQRGHGGGLEPEVRLEVLRDLPHQPLERQLPDQQLRALLVLADLPQRHGARAEAVRLLHAPRGRRRLARRLGRQLLPRRLAARRLARRLLRAGHRCRRGLAWE

SEQ ID NO: 41479 - protein, 586 aa, Zea mays
  Clone ID: LIB3075-043-H10_FLI.pep
LALIRLQSMATVSLALSLRFAPSSRPLSLHRRRPDAVTCRATTTTFHRLDAVAVREEESKFRRAAAEGCNLVPITRSIFSDHLTPVLAYRCLVKEDDREAPSFLFESVEQGSEGTNMGRYSVVAAQPAMEVLAKANKVTVMDHELKSRREHLVPDPMKIPRTIMEQWNPPQVTDGLPDAFCGGWVGFFSYDTVRYVETKKLPFSKAPHDDRNIPDMHLGLYTNVIVFDHVEKKMHVIHWVRTDCYQSLDEAYEDGTNRLESLLSKLHCFNVPTLSSGSIKLNVGGFGSATLKSNMSKEEYKNIVVQAKEHILAGDIFQAVLSQRLERRTFADPFEIYRALRIVNPSPYMAYLQARGCILVASSPEILTRVQKRTVVNRPLAGTIRRGKTKAEDKVLEQLLLSDEKQRAEHIMLVDLGRNDVGKVSKPGSVKVEKLMNIERYSHVMHISSTVTGELRDDLTCWDALRAALPVGTVSGAPKVRAMELIDELEADMRGPYSGGFGGISFNGDMDIALALRTIVFPTASRFDTMYSYANGKSRQEWIAHLQAGAGIVADSKPDDEHQECLNKAAGAARAIDLAESTFLQE

SEQ ID NO: 41480 - protein, 307 aa, Zea mays
  Clone ID: LIB3075-044-D2_FLI.pep
PRTLLCHGVPPTIALFWDPHIFGTVLLPRYFKHNNFSSFVRQLNTYGFRKVDPDRWEFANEEFLRGQRHLLKNIRRRKPPHSSPNQQSLGSYLEVGHFGYEEEIDQLKRDKQLLMAEVVKLRQEHQNTRSDLQAMEEKLQDTEQKQQQMMAFMARVMQNPDFMRQLISQREMRKELEDAISKKRRRRIDQGHEAGSMGTGSSLEQGPQGVFEPQEPVESVANGVPSDLESSSVEAKGLEVRQGVSSGGSEHLNGRPSGELNDDFWEDLLHEGGLGADAGNAVGQDDMNMDMDPDVSLPQLKQHGPRH

SEQ ID NO: 41481 - protein, 297 aa, Zea mays
  Clone ID: LIB143-039-B10_FLI.pep
TELVCLVGKPSVRFSPIMEDERNTQQHQGGEQAQDQENEVKDRGLLDSLLGRNKHDDQEKKNQQAEEELATGMEKVTVAEPDHKEEGHEAAEKKDSLLAKLHRTSSSSSSSSDDEEEEVIDENGEIVKRKKKKGLKEKVKEKLAAHKAHDEGDHHQTPAPPVVVDTHAHHQEGEHFPAPAPPPHVETHHPVVVHKIEDDDTKIQTPPQAPEEEKKGLLDKIKEKLPGGHKKPEDAAAAAAAPAVHAPPPAPHAEVDVSSPDGKKGLLGKIMDKIPGYHKSSGEEDRKDAAGEHKTSS

SEQ ID NO: 41482 - protein, 138 aa, Zea mays
  Clone ID: LIB3075-044-E1_FLI.pep
HPLGFVAKPAMLPDGSVNLMLWNCVVPGKEGTDWEGGYFPVTLHFTENYPSNPPTCKFPRRFFHVNVYDSGDVCLSILGDAWAPSITVRQILIGIQELLENPNPASPAQDFAYDVFAENMPEYKRRVREQAKRYPSLV

SEQ ID NO: 41483 - protein, 192 aa, Zea mays
  Clone ID: LIB143-039-C2_FLI.pep
TGVSCPGGDAAADRAPDRLISSGSQRRSRVTSLLVVSNDRRTKGCREWKQEAQRSVHGEPQGGAGGGGVDDGAGVRGVGREERRRAGLLHGLLQDPRDAQAEQARALPGQPRRRRRRRRRPTPEEAAAAAGGGKQGPAAQQALRRRRGRRPPSSAARRLPYGEEEVPELFPVLYQSVKKTPKTCSSSAALRR

SEQ ID NO: 41484 - protein, 164 aa, Zea mays
  Clone ID: LIB3075-047-B6_FLI.pep
PEKYENEERLEDHKAQCSFRPVACANDGCRAKVSVRCVKDHDAACVYKLLQCEQGCDKRLLRRDMDRHCVTVCPMRPMKCPFGCDSSFPDRDLERHCAEFLQPHLLMVLKAIHKKGRSEQDLKDLAQKLEKFDGDGKLAKALDARPLTNIVKDLEAKMKGGQSS

SEQ ID NO: 41485 - protein, 241 aa, Zea mays
  Clone ID: LIB143-043-A12_FLI.pep
STLHLVLRLRGGMQIFVKTLTGKTITLEVESSDTIDNVKAKIQDKEGIPPDQQRLIFAGKQLEDGRTLADYNIQKESTLHLVLRLRGGMQIFVKTLTGKTITLEVESSDTIDNVKAKIQDKEGIPPDQQRLIFAGKQLEDGRTLADYNIQKESTLHLVLRLRGGMQIFVKTLTGKTITLEVESSDTIDNVKAKIQDKEGIPPDQQRLIFAGKQLEDGRTLADYNIQKESTLHLVLRLRGGQ

SEQ ID NO: 41486 - protein, 213 aa, Zea mays
  Clone ID: LIB3075-047-B8_FLI.pep
RSLPLLPQNHLSPDLGLPRFTTCSPLRLRPWLILIRTRNMVYHSSFADDDGITKACSCPLLPLKTHIKGPAPASDPDKADIVDEAITFFRANVFFKNFHVKSSADKLLIYLTFYINIALKRLDGCRTLAVGTKAIINLGLEKVPVPGEPGFPFPGLFTLPQSQEEAELLRNYLKQIREETSGRLLNCAYRANGFPNKWWLAFAKRKFMNIVIL

SEQ ID NO: 41487 - protein, 349 aa, Zea mays
  Clone ID: LIB3075-050-A5_FLI.pep
MEADIHSGDAVKKELHQVHMEAKRLITERQMLTLETEDVNKELQKLSASGDSKSLPELLAELDGLRKEHLNLRSQFEFEKNTNIKQVEQMRTMEMNLMTMTKQAEKLRGDVANAERRAQAAVAKATGHAAGAQVTASQPGTAQATAVPAAATDPYAGAYASYPPAYQQGAQAGAYQQGAQAGTYQQGAGTQAGGYQQGAQAGAYQQGAGAQAGAYQQGAQAGAYQQGAQAGAYQQGAQAGTYQQGNQAGAYPYAYDAATAYTYAGYSGYPVAGYAQSAVPNYSYAAPPQPISSGAATDAASLYGAVGSAGYPTAQVQPSSGPANAAPPPPPPPAAPYPSTYDQTRGAQR

SEQ ID NO: 41488 - protein, 334 aa, Zea mays
  Clone ID: LIB143-060-A3_FLI.pep
HSRGSFETATNPSFQDRQHLEAAASAPLRPTLERDRPDDHLVVDGSQRSADEGADPEDPVVSPRMVLVVNYGGAKAPRGVDAGAGDRDGGQVDEEHGKPDWKRGEDRHMGVPGVPLGVGGGEDGVDEDEGADDLGAEAVALGVAGRDDVGAAAVAHVQPLLEPLDDARAADGAQALHDDVKHRPGEGQLPRQEQPEGHRRVDVPAGDAGGAVDEGEDHAAEGPGDALDADGGALGGGLGDAHDGEDGDVEEEEGGDELGDAGAVEGPGLELPGLEERRRRGLLVVLVVRALRRRADGLALRELVGAQADVLLLPLHACAVTFLQQTSLARARRS

SEQ ID NO: 41489 - protein, 281 aa, Zea mays
  Clone ID: LIB3075-052-H3_FLI.pep
RAAFRVTQLSTTMGSLANNIMVVGAVLAALVVGGSCGPPKVPPGPNITTNYNGKWLTARATWYGQPNGAGAPDNGGACGIKNVNLPPYSGMTACGNVPIFKDGKGCGSCYEVRCKEKPECSGNPVTVFITDMNYEPIAPYHFDLSGKAFGSLAKPGLNDKLRHCGIMDVEFRRVRCKYPAGQKIVFHIEKGCNPNYLAVLVKFVADDGDIVLMEIQDKLSAEWKPMKLSWGAIWRMDTAKALKGPFSIRLTSESGKKVIAKDIIPANWRPDAVYTSNVQFY

SEQ ID NO: 41490 - protein, 80 aa, Zea mays
  Clone ID: LIB143-066-A1_FLI.pep
HLLPCMRRMWPTMALGRIKLVAAGVHKEEETPGSWLWPRQEDWRLALPGFLARAFSSPLGQPTCGQHCRNLNRRARLRVT

SEQ ID NO: 41491 - protein, 120 aa, Zea mays
  Clone ID: LIB3075-055-F3_FLI.pep
MASSSSSLLLASMAVAALFVVGSCGGALTFTIGKDSSSTKLSLVTNVAISEVSVKEKGALDWSDDLKESPAKTFTLDSKEPIKGPISVRFAVKGGGYRVVDDVIPADFKPGSVYQTGEQI

SEQ ID NO: 41492 - protein, 474 aa, Zea mays
  Clone ID: LIB143-069-G11_FLI.pep
GTQSLRHRHSRQQSAPQQKPNSFSARATGGLVAESQSSRFLPAIRLSFHPIRFGSRDSGDRGRRREKKGKAIAARVLPAFSVGSSSPFIPAIPLRSRYRAVVVMPLAEPPQWRRKATDFFSTSSVKLKQAGQSAGDNIADVAGKVGSAVKSRWVVFQEARQQQQQRPPHETVQERIITAAATTGLLFRKGISETKEKVAVGKVKVEEVAKKTADKSKNILNNIERWQKGVASTDVFGVPIEATVQREQSGKAVPLVLVRCADYLVISGLNNEYLFKSEGDKKVLQQLVSLYNEDSGASLPEGVNPIDVGALVKCYLASIPEPLTTFSLYDELRAARVSIPDLRDILKKLPNVNYMTIEFVTALLLRVSHKSSLNKMDSRSLAVEFAPLIMWRQGDAGTDLRNHLKLTLKPPPKIVDTTSNTATWDLFDEDGEDASSQIPLDDASPPDYNSIEVIQCLIEHHNAIFTDANETVWR

SEQ ID NO: 41493 - protein, 532 aa, Zea mays
  Clone ID: LIB3076-002-H8_FLI.pep
VGKSGAMVGGCASGDGAAEGTLARWRRAAAKRIGLSCASFFSYAASPSPPPSKTISHSALNAPDGEQQKMEEPTSTRVADKNLCAICLELLSTSISSDVDSGEAAAIYTAQCSHSFHFLCIASNIRHGNVSCPICRAQWSELPRDLKVPPLLHNQSDPILRILDDNIASSRVNRRSSIRAARYNDDDPVEPFTLAEHVDPCLRFVLIPAPVSAHHHVLGHYPCGRMLPLQQQCQYSGSSMLSPPQIASPSGQRRAYLSVSLAPQPAMDLVLVASPNGPHLRLLKQAMALVVFSMRAIDRLAIVTNATTATRAFPLRRMTSHAKRMALQVIEHLCCVGGTDPVGALHKGLKILEDRAHRNPSNCILHLSDHPVRNCVGGVDMNHSSIPVHQFHVGLGFGVRSGFIMHEFEELLARLLGGVIGDTQLRIGEHGGMVRLGELRGGEERRIPLDLAADWDIILVGYSYLEGGREEQLRTGEIAVGFEEKGDNGYCGMREMGLSIGGERRSCCAERRDYHDPFMARRWAKHFNVYRA

SEQ ID NO: 41494 - protein, 309 aa, Zea mays
  Clone ID: LIB143-070-D6_FLI.pep
PSRFFSAASMDLWERARAFAGEAAKRSQELSAEAAKRSSALVSETAKKSKEIFSETASKSREIAAEATKQADLLAGQIKHLASDLPVPSIPPIPAIPPIPAAASSVPDAAELECYGITDDLREFVKGMTINTFRDFPLQDEPEVSDVPTVSNVRQDLNEWQARHGTLVLSAVKEISKFRYELCPRYMKERKFWRVYFLLVNSYIAPFEKKYFEELKVKAEEEKKDSQKEASQASTTAEPKDTKVPSKTSSTNPEHDLDVFLLGDLGSDDEASVGGDDGLDDDFDKIDATSGLESDDDDKKAATGKAEGV

SEQ ID NO: 41495 - protein, 398 aa, Zea mays
  Clone ID: LIB3076-047-B9_FLI.pep
EMLNRQVVKSDSAIIKIPELDFEIPPEAQRGTLSTVEGIIMRAVDELQALQDERKKVDPQKAEAIDQFLLKLRSLGSGEAAFTFILDDPAGNSFIENPHAPLLDPLLSVRFYERTREQQAALGFLAEPPKEQPGEAVLPASAVESNSDGLQSVPHGSVGAVAGRRAIAQGNPDEVAAALCRYSAPEEVDTLPSTCGACGTECVTRFFATKIPYFREVIVMATTCDMCGYRNSELKPGGEIPAKGKKITLRVQNAQDLTRDVIKSDSASVKVPELELELSCGTLGGMVTTVEGLIVKICEALERIHGFQLGDSTLEWKKKKWDDFKERLSKLLSLQEAWTLIIDDGLAASFVAPATDSLEDDSQLTIEEYQRSWEQNEELGLNDMDTSSADAAYNTTST

SEQ ID NO: 41496 - protein, 591 aa, Zea mays
  Clone ID: LIB3076-047-G3_FLI.pep
FFPLSFAQKINCTGETACLCFVSSVFVSLGFSSGPFFFTCGVGGAETIMGKQGPCRHCGVTSTPLWRNGPPDKPVLCNACGSRWRTKGSLANYTPMHRNDNIDDDEPRVSKLKPPTSKLKSQKKKTNHIIMENGPFSSQNFRKMGDDDPSYRSSSGSAVSYSGSCAPYGAADASEMTGSAQSHAWESLVPSRKRSCVTRPKPSPVEKLAKELNSIMHEEKLYYLSESSEEDLLYHSETPIGSFEIGSGSVLLRHPNSKSLEEESKTSSIPADNKSYITSESYSDSASFVVHSGNKAAINLNLPTARSKKSPLHMEDNARRDKLHYENQHVLESVDSPLVSVDLEDVINYTNFMKYLTKEDRRQLLKFLPPVDSLTPPESLRSMFSCIQFSDAIDSYQMLLREGILDPSLCGDEEWKKVKTLALTNLTKCSWLECYKQKKGAKETGGVGGISGPEGFTKSTMKPLKRPRDTHFQSDAELDGTMRSPLRVLKSGALALQFESSSLPKSSYATEDSTCTGGAPNLFMLPLEKLPLLVPSQYAVSDQDLLLEIPLNARHPEAELLCQPSQLMSSITSSSTSMGGVAEGEGYLKQP

SEQ ID NO: 41497 - protein, 307 aa, Zea mays
  Clone ID: LIB143-070-E3_FLI.pep
TRNPTKRNFTSSEQYRTAGKIKEEAMAGGGQAAISFMTRMAKVAAGLGVAASAASTSFYTVDGGERAVIFDRVRGVLPRTMSEGTHLLVPILQKPFIFDIRTRPHSFSSTSGTKDLQMVSLTLRVLSRPDVEHLPDIFTSLGLEYDEKVLPSIGNEVLKAVVAQFNADQLLTERPHVSALVRESLTKRAREFNIVLDDVAITHLAYGQEFAQAVEKKQVAQQEAERSRFLVARAEQERRAAIVRAEGESEAARLISEATTTAGNGLIELRRIEAAKEIASVLSRTPNVSYIPAGDNGQMLLGLNAAR

SEQ ID NO: 41498 - protein, 112 aa, Zea mays
  Clone ID: LIB3076-055-B11_FLI.pep
FGRVGPPLRCKFFLWLARNNRCWTMDRLAKRGLSHPDSCPLCDQAGETLQHILIGYIFSRQIWALILQSLHLEAITPNGGRVGQSWVSSHGGRALSRWFPRTFEKGGTLFLF

SEQ ID NO: 41499 - protein, 101 aa, Zea mays
  Clone ID: LIB148-006-B12_FLI.pep
TKHDASQRCRPARRRSVEVVGEEGGDERPGGGHGGGGGAACARASRTTGRAGGRLGGRLGGDRGQHGGGRGGGDEGGAEDLLHLHGWRVDHFVAPGYSGPR

SEQ ID NO: 41500 - protein, 163 aa, Zea mays
  Clone ID: LIB3078-001-F4_FLI.pep
TCFRAWALHAPAGSKDRLLVGNLVLPSKRALAPLSVGRVATRRPRHVCQSKNAVDEVVVADEKNWDGLVMACETPVLVEFWAPWCGPCRMIAPVIDELAKDYAGKITCCKVNTDDSPNVASTYGIRSIPTVLIFKGGEKKESVIGAVPKSTLTTLIDKYIGSS

SEQ ID NO: 41501 - protein, 570 aa, Zea mays
  Clone ID: LIB148-028-D7_FLI.pep
TNRIPVRVPTHTPRAASGRRGQLISHDEPASRPAFRRRMAPASSSSAGVACLVLLLLLLLAGASAAHGSFQARRALSDDHGSGIVARWRRLLADAATPANNSLVLAAARTHRSDPFANLTAYSGGWNISDEHYWASVTYTAVPLFLMAVLWFVGFGIVMLVISCCCCCFCRGKNDAYSPGCYLSSLVLLIIFTMATIAGCLILHGGSDLFHGSTIRTVEYVFGQGNLTVDHLRNFADSLAAAKDITINQIFLPADVQQKIDVVEEKLNSSAGVFSTRLQENSRKIKGVLNHMEHELFAVAAVMAGLSILGFLFSVLGLRFLVSLLVIAAWILLTNTIISSGLFLLLHNVVADTCVAMGDWVAHPQAHTALDDILPCVDVATANESLYRSQEVTSQLVALVNNVVVNISNRNFPPGLRPLYFNQSGPLMPVLCNPFNPDMSPRRCAPGEVDFGSAAREWKRFECQTTGPPGSELCATPGRVTPAAYGQMTAATSVSKGLYEFSPFLVQLQDCSFVRETFTSITNYNCPGLEQYSRDVYVGLVVISAGVMLSVVFWMVHTRHRRRRAMRKQL

SEQ ID NO: 41502 - protein, 204 aa, Zea mays
  Clone ID: LIB3078-002-H8_FLI.pep
CSQAQSFAEEATTMAIAGQCSSCYYTSPTLQLQLQRRHSHLPLQPQAARRARRPRLQVATAAGSGPIRAATDAEFFQPSDTRPIMLFDGVCNLCNGGVRFVREHDPNRSIRYVPLQSESGRKLLQRSGRSPDDISSVVLVEKDRSFIKSEAVLRIMEYLNLPFPQLAVFLKFVPLFLRDFAYDNVANNRYAMFGRSEAEACEIL

SEQ ID NO: 41503 - protein, 172 aa, Zea mays
  Clone ID: 700622477_FLI.pep
SAGAEMLVYQDLLSGDELLSDSFTYKELENGVLWEVEGKWVTQGPVDVDIGANPSAEGGEDESVDDTAVKVVDIVDTFRLQEQPPFDKKSFVSYIKKYIKNLTAVLEPEKADEFKKGVEGATKFLLSKLKDLQFFVGESMKDEASVVFAYYKDGATNPTFLYFSHGLKEIKC

SEQ ID NO: 41504 - protein, 307 aa, Zea mays
  Clone ID: LIB3078-003-C3_FLI.pep
SRVVNVGSTPGITRSMQEVQLDKKVKLLDCPGVVMLKSSNSGVSVALRNCKKVEKIEDPVAPVKEILSICPHEKLLSLYKVPNFGSVDDFLQKVATVRGKLKKGGVVDVEAAARIVLHDWNEGKIPYFTLPPKRDAGEDSDAVIISEDGKEFNIDDIYKAESSYIGGLKSIEEFHHIEIPPNAPPAIDEEMLEDGGKKPSEAIQESRDREEQMPDVKDSGGSKAASASTQNDKLYTAEGVLDPRKSKAEKKRRKASRPSALNDMDADYDFKVDYRMEDGGSEGAHADDEDGGDGSEDNEPMTGVDDA

SEQ ID NO: 41505 - protein, 91 aa, Zea mays
  Clone ID: LIB3078-003-D12_FLI.pep
LEYSGAVSGADWGLLEKGSSVVPCLTNSVLICAIIALGTNVMASTGSILSICFVSTTHHALSLCWYADFSLCFRRRCSCIAHCWNPRSPQN

SEQ ID NO: 41506 - protein, 205 aa, Zea mays
  Clone ID: LIB3078-003-H5_FLI.pep
DIIKLKDYFDRRNEAKSQLPLTKATVTKVEVVGMGDRVCVDLCSIMRPGEGLLVGSYARGMFLVHSECLETNYIASRPFRVNAGPVHAYVTVPGGKTSYLSELGSGKEVIVINQSGLWRTAIVGRVKIESRPLILVEAKDHSGDETYSIFLQNAETVALITPNTGSSGRTAIPVTSLKVGDEVLVRKQGAARHTGIEIQEFIVER

SEQ ID NO: 41507 - protein, 121 aa, Zea mays
  Clone ID: 700622920_FLI.pep
DQRRRRHACAAAPTMDEDEFRRMLDLFPVVRSRDYCCSDLGTSSRGTRQRSRVQEATKGDNKDSSGGRDMFMQKLKMAAENKIGATKAEFFCKTFEEVHEKLVHRELNLDAAKKFLSAYES

SEQ ID NO: 41508 - protein, 110 aa, Zea mays
  Clone ID: LIB3078-007-F2_FLI.pep
QPSTHHHPPPPRHRAAESVLCFAHRPTDRSRHGGLGAGADRAGALHPALPGPALPDPRQGPDHRVRQLPDQRPLHPHPRRHLLRPPRHLPPRRRRPHLPRLASRPSSPPG

SEQ ID NO: 41509 - protein, 227 aa, Zea mays
  Clone ID: LIB3078-007-H9_FLI.pep
AAPTAPPCTPPCASGCTSSPRPRSSALGSPRSPAGSCPAPSPSSSPAPPCTAGCRWSDAQEQPREPGVLVVLVLLEEHLPQEGAERSDAGTRCEHDDCCVGVFGHEHLLAHWPCDLHLSAWLQVTEEVRADSFDDLPLIVGVDQPLHAQRHRLGVAEISEGAAGDGVEPELVRLAVLVLAIRDDADGLALSVGDLAFCAEDHVPRLPGRLVAGDPGVEQAPPDVRLL

SEQ ID NO: 41510 - protein, 187 aa, Zea mays
  Clone ID: LIB3078-008-A8_FLI.pep
ENNGGSSDSYGDRRGGGGPAAGGTSTTTSCNGFDGGEHNEAADAQATGQAAAAAAASTELIRDPKRVKRILANRQSAQRSRVRKLQYISELERSVTTLQNEVSALSPRVAFLDQQRTILTVGNSHLKQRIAALAQDKIFKDAHQEALKKEIERLRQVYEQQNLKMSAGAAASDHGPPPVRAEKELMS

SEQ ID NO: 41511 - protein, 212 aa, Zea mays
  Clone ID: LIB3078-009-B6_FLI.pep
AAERGWRSMAQGTRPSGEPVEAHVLGGDGEQRHDDSPDDEVPEERRARLRRHEREHEAGVGQQEREPDEARPRGHPRDEPHREQHRGAEPHPARRHEQPVPPPVLVTHDRVSGDVPREAVVPLEIVLPVPARDVGAQLVRQRCDQCRHHQQRVRFIRAEVGCVNAGAVAIVRRPFLRYNYKGGLTIAGAVHPSCSHLFLLALTLDRVSTVRR

SEQ ID NO: 41512 - protein, 154 aa, Zea mays
  Clone ID: 700623231_FLI.pep
RGKKLYEQQIEQLGNFQLRIHDQMIMLEAAKATTETVDALRTGAAAMKAMQKATNIDDVDKTMDEINEQTENMKQIQDALSTPLGASDFDEDELEAELEELEGAELESQLLEPVAALPVHPVHVPGNKQPARPAPQKATAEDDELAALQAEMAL

SEQ ID NO: 41513 - protein, 427 aa, Zea mays
  Clone ID: LIB3078-009-B9_FLI.pep
FKNGALHYIDTIQQALPDIAWGKRSRVILDVGCGVASFGGYMFDRDALTMSFAPKDEHEAQVQFALERGIPAISAVMGTKRLPYPSRVFDVIHCARCRVPWHIEGGMLLLELNRLLRPGGYFVWSATPVYQKLPEDVEIWNAMSTLTKSMCWKMVNKTKDKLNQVGMVIYQKPMDNICYEKRSENSPPLCKESDDADAAWNVPLEACMHKLPGGSKVRGSKWPELWPQRLEKTPFWIDGSKVGVYGKPANEDFEADNAHWKRVVSKSYVNGMGIDWSKVRNVMDMRAVYGGFAAALRDQKVWVMNIVPIDSPDTLPIIYERGLFGMYHDWCESFSTYPRTYDLLHADHLFSKLRKRCKLAAVFAEVDRVLRPQGKLIVRDTADTINELESMAKSVQWEVRMTYTKGSEGLLCVEKSMWRPKELDAST

SEQ ID NO: 41514 - protein, 146 aa, Zea mays
  Clone ID: LIB3078-009-D9_FLI.pep
NLLILHFLPLPLPVSPALALALAYAAAYLAVDRRAGAVAGLLFLAAWAASRALAARLGFALSWKLVLVTQLFCWTWQFLGHGLFEKKGPSVSDLPEVFLMEPFLIFLQILNKLFGYEPYPGFCKNVDRKIEADLRASESSSRGRTT

SEQ ID NO: 41515 - protein, 113 aa, Zea mays
  Clone ID: 700623308_FLI.pep
LTRWHGCTGLRPSCRWGSSAACSASWATPSISSTRPRTAGRSTSGTICGTSPWSAATRSSWNNPPATRVLINLKLFWMLTNLLQKHRSTALLFPVQLEPRLVCFALKYQQFGE

SEQ ID NO: 41516 - protein, 80 aa, Zea mays
  Clone ID: LIB3078-009-H7_FLI.pep
ATVAAAATVVVAAATAVATVAAATATPTGTGGTERWGPRGQVILFATVMFTLVQRVYLRSCRVCCCPSVFLIARSLCVSC

SEQ ID NO: 41517 - protein, 66 aa, Zea mays
  Clone ID: 700623572_FLI.pep
FKMYLQYYINEKGDKVYTTKKESPLGVPTQSAHPARFSPDDKYSRQRYLLKKRFGLLPTQNPGPKY

SEQ ID NO: 41518 - protein, 355 aa, Zea mays
  Clone ID: LIB3078-011-F3_FLI.pep
FKMEWQLLMEQSIRFVSWSDISIPHPPAYKLLMGLLRGLDCLQRIDLILDVPNRWNSTHDMIMEAIEYKVVLKRYAEEQLEPSPNDEEWTNSEAIGEFLEAFEKATKAFSTHRSPTSHLFLHNVLCIHRTLRNTNWQINCVLKDSARAMDAKFDKYWEKGKYNMTLVLATILDPSKKMDFLDFFYEKMSQYFVDIQINVVLVKQCLTKLFEKYATLVQIDNKSSPFIDIRTSNLGSTVLGKRRLDEEFSQWSQIRGRRFPKSELDTYLEEELVRIDERFEILNWWRTNANKYPVLSAMARDILAIPLSTVPSEFAFSAGGRILDDNRSTMTPRNHLNALYAVRIGYMNTQIFKLS

SEQ ID NO: 41519 - protein, 243 aa, Zea mays
  Clone ID: 700623636_FLI.pep
PIRRAAARADKEQAEEELCQATMGISRDSMHKRRATGGKQKAWRKKRKYELGRQPANTKLSSNKTVRRVRVRGGNVKWRALRLDTGNYSWGSEAVTRKTRILDVVYNASNNELVRTQTLVKSAIVQVDAAPFKQWYLTHYGVDIGRKKKTPAAKKDNAEGQEVEAAAEETKKSNHVTRKLEKRKEGRTLDPHIEEQFGSGRLLACISSRPGQCGRADGYILEGKELEFYMKKLQRKKGKSAVA

SEQ ID NO: 41520 - protein, 170 aa, Zea mays
  Clone ID: LIB3078-012-H6_FLI.pep
KMQYIGELELKVQTLQTEATTLSAQLALLQRDTTGLTTENSELKIRLQTMEQQVHLQDALNDTLKTEVQRLKVATGQVGNGGGGMMLNFGAMPRLVGGNQQMFHSSQAMQSVLATHQLQQLQLHSQPQQQQLHSLQLQQVARDLKMKGHLGGQGQWGDGKSGSGSRSSGS

SEQ ID NO: 41521 - protein, 192 aa, Zea mays
  Clone ID: LIB3078-013-H9_FLI.pep
GVWKNTEDEILKAAVMKYGKNQWARISSLLVRKSAKQCKARWYEWLDPSIKKTEWTREEDEKLLHLAKLMPTQWRTIAPIVGRTPSQCLERYEKLLDAACAKDENYEANDDPRKLRPGEIDPNPESKPARPDPVDMDEDEKEMLSEARARLANTRGKKAKRKAREKQLEEARRLASLQKRRELKAAGIDTRH

SEQ ID NO: 41522 - protein, 209 aa, Zea mays
  Clone ID: 700624275_FLI.pep
YNSQTFQNIQNIQDIRHHHRANFKTEQKKQQHSVQLVFHQYQKSRTFRTAHCGHLIGTKSEAAESSRGPETRGSLGLGVGSGELLLLEALERLLVRPRLDCKVGLRVEADAEDDDGEEGGHVAGQLPILPLARFPRRRRRPVEEVPLGALLVTWGRPPPGPLAAAAANARCPAQPCPQHTINRRRHRPHRCASRSERGEEFVDLGACRG

SEQ ID NO: 41523 - protein, 190 aa, Zea mays
  Clone ID: LIB3078-014-E10_FLI.pep
TGHGEVLYSYFCTTMALQMQLLLAQLGNAVDELDGCGYRAGGDGVLDDLASVAVAGAGDQGAGQGAPDHRVLPVTAATDPFHAVHHAHINSSNSAPICALLAHLPQGMLNLVLRNIPPVEALEGLLGSHLAGADGADLEEAVDGAVEEGVSHVDDDVDLGRPEGPREAAAGHPRPTFLAVAGQLCLCDSA

SEQ ID NO: 41524 - protein, 218 aa, Zea mays
  Clone ID: LIB3078-014-E8_FLI.pep
KGKGKGGGASPEKGSSGAPSGEDDSRSSDSGSDESSETRDDDTDHKGSSAPKKRKSGNTSAEGEPSQAAVVRYATVESPYPAKGRSASKLPVSAPGRAALPSATPNLNIGMDIWNTSPALAVPAVQGEANPGLALARRDSVTQLDERELKRERRKQSNRESARRSRLRKQVVLESVHPHFLQNGMVKNIQTHAHTRTCSLVPVNLVKICLQDNSRQVG

SEQ ID NO: 41525 - protein, 251 aa, Zea mays
  Clone ID: 700624547_FLI.pep
NQLSHDSRHKPYKYFERQHHPWAMAETLDNPDTAAASTTDGLITTAKTEHQVEGALLLDIVVCKGATILQLLAGEDQTLLVWGNPLLVLDLSLHVVDGVRALNLQGYGLASQGLHKDLHTAPQAEHQMEGALLLDVVVSQGATILQLLAGEDQPLLVRGDTLLVLDLGLHIINGVGALNLQGDGLAGQCLHEDLHSSPEAQHQVEGALLLNVVIRKGASILQLLAGKDKTLLVRRDALLVLDLGLDIVNGI

SEQ ID NO: 41526 - protein, 258 aa, Zea mays
  Clone ID: LIB3078-016-A1_FLI.pep
RLPLETLFDEFVVAHILGWWGKAVMIRNQLLLWVLSIGFELMELTFRHMLPNFNECWWDSIILDILICNWFGIWAGMHTVRHFDGKTYEWVGLSRQRSIMGKVKRSLSQFTPAQWDKDQWHPFMGPLRFIQVLFLCVVFMTVELNTFFLKFCLWIPPRNPLVVYRLILWWLIAIPTIREYNSYLQDRKPVKKVGAFCWLSLAICIVELLICMKFGHGLFHDPMPTWLIIFWSSVGTALVIFLLSWSWRSHQRFRRKQL

SEQ ID NO: 41527 - protein, 167 aa, Zea mays
  Clone ID: LIB3078-016-H10_FLI.pep
GCSRSVHPGGFVRSKAASELEDAGQAVGRRGGRASPGDGPREAPQGHHRPPARHQQRRGRRQLQAGAVDAVDPDDAGDAVVVVVVDDAARRRQRVAQRLPPGEQPGHQGHGRQPLRPAAAQLPHRLRLALQRRDQEQPPLDRARWMDSEEAMFAGPCGYLKRTHALL

SEQ ID NO: 41528 - protein, 320 aa, Zea mays
  Clone ID: LIB3078-017-A2_FLI.pep
PRVRSSPTVRMDDTEAAKNTATTGPTFASPLFSFSNLGGASFGSGFGFKSSAPLPPAIEVQLCEESPVPAARLEPVVVDDSLTIYKGRVSTSDVFGVKDSDLVPGKYEGGLKLWEGSLDLVKALNSDIKEDKFHLEGKRVLELGCGHGLPGIFAGLKGADLIHFQDFNAEVLRCLTIPNVKVNLFKDSPEGTCTCPIVGFFAGDWSEMDKLLLCGDAEQDKTASGDTEGKMCNGYDIILMAETVYAVSCLPNLYRLIKKCLRYPGGVVYMAGKKHYFGVGGGTRQFLRLVEKDGAMHPERLNDVADGSSNVREVWKFSFK

SEQ ID NO: 41529 - protein, 117 aa, Zea mays
  Clone ID: LIB3078-017-H5_FLI.pep
GQQVQVFLIFIRSFLSDLGSPLSRTPGFAVCLTITRIKKGSQVLLVDAMLQELEKEIDDVDAQIGNRWQLLDKDHDGKVTPEEVAAATAYLKDTIGKEGVQELISNLSKDTEGKNPC

SEQ ID NO: 41530 - protein, 257 aa, Zea mays
  Clone ID: 700624582_FLI.pep
DAYPCNANVACWHSNQNMSVLCTHLDIYNNNNNNNTRELLGVGRVAGARLPDAPFGGGGGLLRSVRGPFAVQEDDLGPRQALFQVLGAEVVLAAELVEADHVVLDLGVLNYGEGREDDYPELLCQKGGLLGVDLHEPCLHVLFCQSRQVLVHDLAGPVVAVEVADEPLASLGDGEELLLGDLGVLPVPQRTPLGAALGGAAHLLDPALAERLDVVRIEAIERGDLLIELVLHRLRGRQHLLLQNLADDFVHGSSGDG

SEQ ID NO: 41531 - protein, 183 aa, Zea mays
  Clone ID: LIB3078-017-H7_FLI.pep
GNSSATAAAYVQGSNEPLGVEVTETDSAPAVTETGNAPTVTGTDNNAPKPTCSVPSEQFGGDDGTHSSGNNGAEESSDTKQPPPSKKQRVYTDDDLVVIMSRSLGELASAIKRLSEQPDLPVPKGLYEELKSIPGFEEAHLEHYYAYLCENPPLARAFYALPQLSSKVTWVARYVKNHSSELM

SEQ ID NO: 41532 - protein, 462 aa, Zea mays
  Clone ID: 700612428_FLI.pep
LASGVLRSLPLNTSRPRPKMPSLAAFLVLLLPPLLLSAAGAAEAEELIGFKATLRHVDADAGYTEEQLLSRALRRSSARVATLQSLAALAPGDAITAARILVLASDGEYLMEMGIGTPTRYYSAILDTGSDLIWTQCAPCLLCVDQPTPYFDPARSATYRSLGCASPACNALYYPLCYQKVCVYQYFYGDSASTAGVLANETFTFGTNETRVSLPGISFGCGNLNAGSLANGSGMVGFGRGSLSLVSQLGSPRFSYCLTSFLSPVPSRLYFGVYATLNSTNASSEPVQSTPFVVNPALPTMYFLNMTGISVGGYLLPIDPAVFAINDTDGTGGTIIDSGTTITYLAEPAYDAVRAAFASQITLPLLNVTDASVLDTCFQWPPPPRHSVTLPQLVLHFDGADWELPLQNYMLVDPSTGGGLCLAMASSSDGSIIGSYQHQNFNVLYDLENSLMSFVPAPCHLM

SEQ ID NO: 41533 - protein, 252 aa, Zea mays
  Clone ID: LIB3078-018-E3_FLI.pep
RQVFLPCLRSHSRPHLGCSQLVLDGLGGGCLLGCRWRLGGGGGGGACGLLALLDEVDDVVRRPAAVVGCHLPARGHEVQGRVALDVKLTGNVIGSRVHLSNHDFLVALESGGCLVQDGRQLLAVSAPGGIEFNKDIFARFEDEVVDVVSDNHLNRLIVDLRNRLRLPERRQFAIKVLLQPSDDLVSLNVNLQELLGVTILDEDKGCLVLFQAKVLEGTLAGFDVTNKELDFLVLEFLRGSRVGRLERIKRSG

SEQ ID NO: 41534 - protein, 344 aa, Glycine max
  Clone ID: 700845874_FLI.pep
VKKVQSLVSGAVGVPSLKKKKKKGIIVIIIMYPRLIHPHDGIVTQDELQGGAASNLSHAHKGDPCLVLTADPKPRLRWTQDLHERFVDAVTQLGGASKATPKAIMRTMNVKGLTLFHLKSHLQKYRLGKQSGKDVGEGCKDGSYLLESPGADNTSPKLPTPDTNEGYEIKEALRAQMEVQSKLHLQVEAEKHLQIRQDAERRYMAMLERACKMLADQFISATVIDTDSQKFQGIGSKAPRGTLVDPLGFYSLPSTEVAGVNVPEEEILPSLPPQRADCSTESCLTSHESSGGLALEGSPGEGKRRMLGMDSMAAPLIWSEAKMRTQAINVAQGNHPQGITRYGM

SEQ ID NO: 41535 - protein, 107 aa, Zea mays
  Clone ID: LIB3078-018-F10_FLI.pep
TGQWVRHKKNTLNSCVESSEVLNGTSNQRKSLGRLTRQQLRVTTPHCISKRLAISTLMSRNLWAQLVRQVDSPELNLLPGALVMHLSQHALVSLPTISFIIAFCCSF

SEQ ID NO: 41536 - protein, 58 aa, Zea mays
  Clone ID: LIB3078-018-H10_FLI.pep
NQQETKTTTIAQTWFILVYNANSSSRLAYAMQRETKDTHASRSINQSTYVHPLRSERQ

SEQ ID NO: 41537 - protein, 334 aa, Glycine max
  Clone ID: 700901689_FLI.pep
KHNLDKDIKVSSPIALSALANSYPSSAGSFRPELVEPVFKPMLDFLRETGSYLMVNVYPFFAYESNADVISLDYALFRDNPGVVDPGNGLRYYNLFDAQIDAVFSALSALKYDDVKIVVTETGWPSKGDSNEVGASVDNAAAYNGNLVRKILTAGGTPLRPKADLIVFLFALFNENQKPGPTSERNFWLFYPDERRVYNVPLTTEELKDYHDRPAPVSGGGQQKGTPAPAPVVSGGVSKSTTGNTWCVANPDADKVKLQAALDFACGEGGADCRPIQRGSTCYDPNTLVAHASFAFNSYYQKQSRKGGSCYFGGTSYVVTQEPKYGSCEFPTGY

SEQ ID NO: 41538 - protein, 169 aa, Zea mays
  Clone ID: LIB3078-018-H4_FLI.pep
HVSTRVAGTIGYLAPEYAVRGQVTKKSDIYSFGVLLLEIVAGRCNYNSRLPQGDQFLLEKTWAYYVQGKLEKVIDAEAGEDLNVEEACRFLKVGLLCAQDAMKLRPNMASVVLMLIGEKGISVDRITKPAVIGDPYLDRRPSNADSTTMKSFATTEALTSSEANTEWSL

SEQ ID NO: 41539 - protein, 152 aa, Zea mays
  Clone ID: LIB148-014-A4_FLI.pep
PTIKPPRPPHLLGAAMGACATKPKTLEGKAPAEATISTPKVAPETTTIHIEVAAKHAVVEKVEEDKEEALTVAAKQEPAATIEPQQIASEVTTSEVAVVVVEPENKEEEEVVEKTVIEKEKPSAVHAEENIATNKVAAEPTTELKKDTEEEI

SEQ ID NO: 41540 - protein, 82 aa, Zea mays
  Clone ID: LIB3078-019-F1_FLI.pep
ESSGMKQGHSSQEFLHLVHFLHAPNVQRHSLVDLCRCDVKNSLVAVRALATGLLDDEAHGGALVEKPQLAVLALLVPGVPVD

SEQ ID NO: 41541 - protein, 198 aa, Zea mays
  Clone ID: LIB148-007-B2_FLI.pep
INDLHRLILSSGLRPLLHRRHAHAVPATAAATAAPRRLPEVIGGELLRERADVEHEAGRVLHGDAVDAPVEEEHPDGDAAEVPDAAARDVAVDPAAVREAVAAVHLELAVPVVHEHLERAVRRAVRVPGHALRQDAPREPEPLQHLVRARLSRDRDRDRDAGARRAGAAGCGGEERRAERRRGEEDEEEKEREEDGAA

SEQ ID NO: 41542 - protein, 137 aa, Zea mays
  Clone ID: LIB3078-019-F4_FLI.pep
TVRLVASTLPSGFSCAANVSKDLISDLNYPSIAVTGLLGNKSAAAGRSRTVTRTVTNVGAQEAASYTVAVSAPPGLDVKVTPSKLEFTRGVKKLAFQVSFSRSGNDDDAAAAKGALSGSITWSDGKHMVRSPFVVTS

SEQ ID NO: 41543 - protein, 166 aa, Zea mays
  Clone ID: LIB3078-022-D12_FLI.pep
PRTPAEKNQNSPSNPIANPATDRGCRLFPPALAPTPMGSADRSKLQIDGIVVTEKGARSCVECRATTTPMWRSGPTGPRSLCNACGIRYRKKRRQELGLEHNKQQQQQQNNGEAKTGVKDSSSNSSSSGSSNFHVVQKRRLLMEVEEAALLLMTLSSSPASTLLHG

SEQ ID NO: 41544 - protein, 171 aa, Zea mays
  Clone ID: LIB3078-023-C11_FLI.pep
RVRVAPGLLQAAIGAFSTVFPDYQERIARHEAAHFLVAYLIGLPILGYSLDIGKEHVNLIDEQLQKLIYSGQLDGKELDRLAVVSMAGLAAEGLEYDKVVGQSADLFTLQRFINRTKPQLSKDQQQNLTRWAVLFAASLLKNNKAAHEALMSAMSQKASVLGCIEAIENAS

SEQ ID NO: 41545 - protein, 697 aa, Zea mays
  Clone ID: LIB148-042-C12_FLI.pep
QPPAASTPPPSLVKLSPPQAPVASPPPPVKTTSPPAPIASPSPPPPAPVVSPPPPVKSPPPPAPVASPPPPEKSPPPPAPVASPPPPVKSPPPPTLVASPPPPVKSPPPPAPVASPPPPVKSPPPPTPVASPPPPAPVASSPPPMKSPPPPTPVSSPPPPEKSPPPPPPAKSTPPPEEYPTPPTSVKSSPPPEKSLPPPTLIPSPPPQEKPTPPSTPSKPPSSPEKPSPPKEPVSSPPQTPKSSPPPAPVSSPPPTPVSSPPALAPVSSPPSVKSSPPPAPLSSPPPAPQVKSSPPPVQVSSPPPAPKSSPPLAPVSSPPQVEKTSPPPAPLSSPPLAPKSSPPHVVVSSPPPVVKSSPPPAPVSSPPLTPKPASPPAHVSSPPEVVKPSTPPAPTTVISPPSEPKSSPPPTPVSLPPPIVKSSPPPAMVSSPPMTPKSSPPPVVVSSPPPTVKSSPPPAPVSSPPATPKSSPPPAPVNLPPPEVKSSPPPTPVSSPPPAPKSSPPPAPMSSPPPPEVKSPPPPAPVSSPPPPVKSPPPPAPVSSPPPPVKSPPPPAPVSSPPPPVKSPPPPAPISSPPPPVKSPPPPAPVSSPPPPVKSPPPPAPVSSPPPPIKSPPPPAPVSSPPPAPVKPPSLPPPAPVSSPPPVVTPAPPKKEEQSLPPPAESQPPPSFNDIILPPIMANKYASPPPPQFQGY

SEQ ID NO: 41546 - protein, 128 aa, Zea mays
  Clone ID: LIB3078-023-C7_FLI.pep
DYQNSKMNKGKIFKLAKGFRGRAKNCIRIARERVEKALQYSYRDRRNKKRDMRSLWIERINAGTRLHGVNYGNFMHGLMKENIQLNRKVLSELSMHEPYSFKALVDVSRNAFPGNRPVPAKEGLASIL

SEQ ID NO: 41547 - protein, 290 aa, Zea mays
  Clone ID: LIB143-020-D6_FLI.pep
LSPNNMVMEQNIRLLRMEPTCGLLLERSWLAHDGGMLQDVETELASLLGGVDLVLPGRRQQLEVLDEATDGDAEDGQGEDDPGAAPAADAEGQVPEVVAVGLDVLLLLEESLGPELLGPPPAVGVVGEVPGVDEDLALGGDVVAAELGVVEVHVRHQQRDGHPQPQRLLDHRLQVGEVVRVRLRDLVARPEHRVQLLPQLLLDLRVVHQLSDRPLDRPQRGLDRCNVNVLDDEEHVVLVDLTLLLCLQYVINGALEAVAVRGLGARQLLPLLEEEILEELEAGLLDPDGG

SEQ ID NO: 41548 - protein, 162 aa, Zea mays
  Clone ID: LIB3078-023-E1_FLI.pep
RACGCDAHQPSHGQGSSSSPRRRQPHCHHSAAAIVEERRRWRRFVLQSRHRQQARQGNSEARRRRAEACRQAEVHHQGRGARTVLADRGGEGGREPHDDTPALHHHLRHVHPLRHPRHRLRQWLDQGPCAMTVTRKPVWIIDADSSACISSSVCPASLYLHI

SEQ ID NO: 41549 - protein, 144 aa, Zea mays
  Clone ID: LIB3078-024-B12_FLI.pep
NHLHKTISYRDQEPKSRNITEQKKQNPSCEPQLFPLTAAPAPANHVVVALERLLPLQPHLHVELVDERLHAAVQLVLPQRRLPPHQRSGSRPAPSGATVVESLGLPHRPRRCHGRWIDLPAAATAGRAAPGTGVPGVGLLEASS

SEQ ID NO: 41550 - protein, 233 aa, Zea mays
  Clone ID: LIB3078-024-E8_FLI.pep
ITQVIATSVILGLLWWHSDPSTLKGLEDQAGLLFFIAVFWGFFPVFTAIFTFPQERAMLNKERAVDMYKLSAYFLARTTSDLPLDLFLPIIFMVIVYFMAGLKATATHFFLSMLTVFLSIIAAQGLGLAIGATLLDIKKATTLASVTVMTFMLAGGFFVKSVPPFISWLRYLSFNYHTYRLLLKVQYDPVPDILTTTRHMDSGGTEVAALVAMVIGYRVLAYLSLRRAKALGS

SEQ ID NO: 41551 - protein, 80 aa, Zea mays
  Clone ID: LIB3078-025-E11_FLI.pep
SSGWTGTTCPTTSQRRCSRARRAMTLAASSARRRTRTASPRSWRTPEDPDPSISVHHAMYVCVADGLHLRVRARRAGEAS

SEQ ID NO: 41552 - protein, 269 aa, Zea mays
  Clone ID: LIB148-009-D6_FLI.pep
MGSLANNIMVVGAVLAALVAGGSCGPPKVPPGPNITTNYNGKWLTARATWYGQPNGAGAPDNGGACGIKNVNLPPYSGMTACGNVPIFKDGKGCGSCYEVRCKEKPECSGNPVTVYITDMNYEPIAPYHFDLSGKAFGSLAKPGLNDKIRHCGIMDVEFRRVRCKYPAGQKIVFHIEKGCNPNYLAVLVKYVADDGDIVLMEIQDKLSAEWKPMKLSWGAIWRMDTAKALKGPFSIRLTSESGKKVIAKDVIPANWRPDAVYTSNVQFY

SEQ ID NO: 41553 - protein, 383 aa, Zea mays
  Clone ID: LIB3078-025-F11_FLI.pep
RIENGRGTENSLEVLEGMQFERGYLSPYFVTDRGNMTVEFTDCQILLVDKKITDASEIIRILDSAVKENYPLLIIAEDVEEQAMADLIKNKLKGTIKVAAVKAFSFGEQKTQCLDDIAIMTGGTLVRDDMGHILEKAGKEVLGSASKVVITKDSTLIVTDGSNRRAVEERVAMIKGQIENSKESYNKKILGERIARLCGAIAVIQVGAQTIIEMKDKKLRIEDALNTTRAAIEEGVVVGGGCSLLRLSEKIDAIKESSLDNIEQEVGADIFKQALSYPTSLIAKNAGVNGDFVIKKVLLNDDANYGYNAAKNCYEDLMAAGILDATKVVRCCIEHAAVVAKSFLTSDVVIVEAKEGKPIRIRPPMPPRHLIPPMPASISGIRV

SEQ ID NO: 41554 - protein, 383 aa, Zea mays
  Clone ID: LIB143-030-C3_FLI.pep
YVGAMKLKTDSCGIGSGQESFFFSFSDFSVTIGHTMIIFSATLSGYYRDRYFYWLHFCHVVRLMAMEGPVLCRPAMQAKSPAAALVNNSLTRFGQLGTISKYRNVSRFISPISQPSTKNIGPCCSFSSSSDGNGYMAGNFSDSDEDYVNSTVLEAVEVRSGSEGYVIKMRDGKNLRCVHNNSQGRNIPESAPQPAIVLRIEDGSETLLPIIVLEMPSVLLMAAIRNVHIARPTIYQVVKEMIDKMGYEVKLVRVNKRIQEAYCAELCLTKIDDSTDSITFDLRPSDAINIAVRCKVPVQVHRSLAYSDGIRPVEPARMAVAAGLSDGLLFTELDRPDGQASVEAQEFGLVKNMLIAAVEERYKDAASWKDKLMRLRSKRKNWA

SEQ ID NO: 41555 - protein, 298 aa, Zea mays
  Clone ID: LIB3078-026-A11_FLI.pep
TSSSCRTPRKARIYHFYIPVFLWCEDEVMVHRARYNDGDDIPPLVIGVSAPQGSGKTTLVFALDYLFRVAGRNSATLSIDDFYLTAKEQNELRDRNPANALLEFRGNAGSHDLQLSVETLESLIKLTKEGMKMKVPRYDKSAFGGRGDRADPSVWPEVEGPLEVVLFEGWMLGFKPLPNEVVKEVDPQLEVVNKNLEAYSDAWDRFIQSWIVIKIREPGSVYQWRLQAEVAMRADGKPGMSDEEVMDFVSRYLPAYHAYLPTLYKEGPNGSNPDHLLVIDIDENRNPICGGSWDISCL

SEQ ID NO: 41556 - protein, 406 aa, Zea mays
  Clone ID: LIB148-025-C5_FLI.pep
ETETETEPVVARMAGGMQAADAAGRLSALLSLLALRRLLAVLQPLALLLLLPFRWRARPAGAVAAAVASDAATASAPGASGRKGKASSSSSVVLRVPAGSPMVAARRQASARREIAVRRAREAGREYELVPTARGETLFTQCWWPHPPSTVKPRALVVVMHGLNEHSGRYDHLARRLNGIGIKVYGMDWTGHGGSDGLHGYVQSLDHAVSDLKIYLKKVLAENPGLPCFCFGHSTGGGIILKAALDPEVETLLSGIVLTSPAVRVQPTHPIIAVMAPIFALIAPRYQFTASHRNGPPVSRDPEALRAKYTDPLVFTGAIRVRTGYEILRLTSYLQQHLHRIAVPLLVLHGADDLVTDPRGSRALYERASSADKSLKLYDGLLHDLLIEPEKDRVMDDIVAWLSPRV

SEQ ID NO: 41557 - protein, 143 aa, Zea mays
  Clone ID: LIB3078-026-C11_FLI.pep
GDLDRRRSLSGYVFTIGDCAVSWKARLQDTVALSTTEAEYMAIAEVTKEALWLKGIYSELCGIKSCITIYCDSQSAIHLTKDQMITEKSKHIDIRYHFIRDIIEKGLVKVCKISTDNNPADMMTKHVSVAKFELCSNLVGIIN

SEQ ID NO: 41558 - protein, 159 aa, Zea mays
  Clone ID: LIB148-035-G3_FLI.pep
MAMATRPRPPRPRTKFPRGPSAFSNGKPALPCLVVPCVPLTSRLGRAGHAHGIAMAARGHCTRTRRRPARRFPQAQGIHEERTSARRGRAVETPAEVDFLVRWTRHGVDDDTVLTWPAPLTRCGCAEERDRALASSEKSLAFRSTRQVLFFYTHNPTLD

SEQ ID NO: 41559 - protein, 280 aa, Zea mays
  Clone ID: LIB3078-027-A6_FLI.pep
LDNINVVPLTTESEVGHNEHSNEAPTKTFAEETAKLPNTFKTPEANNESTHRNMEVLVDKPEEKVVVNASNLGNFVGKPVFQAERIYNQTPVGVVMGLAWNAMGGSTLYIETAKVEESKGKGTLFVTGQLGDVMKESAQIAHTVCRAVLLEKEPNNPFFAKSKLHLHVPAGATPKDGPSAGCTMVTSMLSLAIGKSVKKDLAMTGEVTLTGRILPIGGVKEKTIAARRSGVKTIIFPSANRRDFDELASNVKEGLEVHFVDKYSEIYDLVFTSDTKTQES

SEQ ID NO: 41560 - protein, 88 aa, Zea mays
  Clone ID: LIB3078-027-H11_FLI.pep
IVELYVQYRQKAVSISKPGRYVLKQSTGQSNQSGRPTGAKSVPSASPLLIKHTLTNEFHTSPQPRFKHTITDQVPISVATIEARHNFG

SEQ ID NO: 41561 - protein, 184 aa, Zea mays
  Clone ID: LIB148-043-B6_FLI.pep
QESRWHRRHTRHVERRFRLPKIPGNFPVQRRQPQHEREHGGRGREVHVHRQCQLAGDVEQRGAKVVHDDGGDGACQAGNGRLGVGRLQLDETGDHVLRAGEGGELHVREAVEADVEPRARGGLPLYDVREPGHRQWREEHGERHGQVAAAAHQHPLAGLEHGRQVAGDAERDEHHRWCRHWSRL

SEQ ID NO: 41562 - protein, 93 aa, Zea mays
  Clone ID: LIB3078-029-B4_FLI.pep
IIRAGRLTDGPYTSYDLNTLLKATAGERRAVVIGKGDKLVGEVSRLVVAEACIQALDIESTEGQIYEINSVKGEGPGTDPEKWEELFRSARSD

SEQ ID NO: 41563 - protein, 298 aa, Zea mays
  Clone ID: LIB148-056-F1_FLI.pep
DINGLMTDMVKFLHDHGAPFVVNIYPFLSLYQSDNFPFEFAFFDGGKNIQDKGGVTYSNVFDANYDTLVHALKKAGVPDLKVIVGEAGWPTDGNKYANFKLARRFYDGLLRKLAKNEGTPVRKGKMEVYLFGLFDEDMKSIAPGNFERHWGIFTYDGKPKFPIDLTGQGHEKLLSPVTDVKYLPNQWCVFDDGAEDKSKLPSNVQYACASGDCTALGYGCSCNGLDEKSNISYAFNMYFQMQDQDVRACDFEGLAKITDKNASTRGCLFPVQIISASGRVAPALLLAALLALLVIVFV

SEQ ID NO: 41564 - protein, 103 aa, Zea mays
  Clone ID: LIB3078-029-H6_FLI.pep
LVCGLFSHTTWFNTSSQRHKHLEGYSSRSMRRQIQCQLGPYLWPGNYITYSEFSHDSIPRSATGQVSLEILQLCKNFILWAVDQITHSPYLQCSTSTSALTII

SEQ ID NO: 41565 - protein, 116 aa, Zea mays
  Clone ID: LIB189-009-A1_FLI.pep
RESSQSYVSLQSASSFPFEQSFTPSQRFVLLMQGPPGQKKSSGFGHVSEQFSSSVPLVHCLVPSHFQTIGIHWLEDGHFNSSKLHSQFSHIFSSLPSVQSFIPLQTRCLLRQAPLS

SEQ ID NO: 41566 - protein, 225 aa, Zea mays
  Clone ID: LIB148-062-A6_FLI.pep
RAPPDATIPLLRPFPPISRSLSSSVASASPSPAMGCGGSKEAVATGNTSAGSKVLRRKSSSVSTGASHTSTTSPSSSGVVVKDVVKDAAAAGEVMTPADAEKPISVDPKADAIVVMDAKKEEGNNKVAVEEDLLPESTMADEALAVDEGPKVDEPLKIKDGEEKTVESQHIEEEHPMNEDGDSATEPLEARPAVDEHKAKEATTVVPAPSAEEEKTTTDEQAAAN

SEQ ID NO: 41567 - protein, 492 aa, Zea mays
  Clone ID: LIB3078-030-E10_FLI.pep
PMFVSYQTSKSEVIYLSEESTDPSKYLDGTRVYVQGSMWDGFANGKGDFTDGPYEIQYPESFFKDSFYKYGFNPEVGSVGVPVAATIRATMPPVGWSIPILKKRIDGYIEEVPNPIWDYHKYIPYSKPGKVHDQIELYGAPKDLDDFCEKAQLVNYVQYRALLEGWTSFMWTKFTGVLIWKTQNPWTGLRGQFYDHLQDQTAGFYGCRCAAQPIHVQLNLVTYFVEVVNTTADELKDMAVEISVWDLDGACPYYKVTEKIVIPPKKVKQIIEMKYPKMKDAKPVYFLLLKLFRLSDNGTISRNFYWLHLPGQDYKSLEQYQQKKIPLKIDSDVSVSGTRHKVRMTVENISKKSVVDSTRSVSAMDLGDASGSHSTRKETTRKGNGSDGLWRKIRSGLGVARPSDNRRTLEVSGTDSGVAFFLHFSVHTSESSTDGEEYNDTRILPVHYSDNYFSLTPGENMAVDISFEAPQGSSPRVVLRGWNHHLDHAVMI

SEQ ID NO: 41568 - protein, 480 aa, Zea mays
  Clone ID: LIB148-064-H5_FLI.pep
PSLATAMADVGEPPPSLCPLCGHPAAFSVSPSTSAAASVSPARPLLKRRTPPEAPPAVVRVEIGDEAAALREALARQQAALADVQAELDAERGAAAGAASEAMTMILRLQREKAEAMMEARQFRRYAEEKMAHDAAELAALEEALSKREAGMRALQGQTPRHACAVPSGGSTPRRPSVATPRHPPSSLSPAASSGGGYYPPLRCSIDHPPTASEADALETPRDQLNHLAHRVHLLERGATPMAATNTTPIIRVAPGSAFPHHARVYSDDSLDLYDGGDCFPDDDCGTSDRVYTVDAIHGAPLAVPEGSYAGSTPMGSDCYGGAPWAEDEEVRRLSVRMQALEADRESMRQAIMSMGAEKAQVMLLKEIAQKLCKDTTPPVPAAAVAQHSFYKGGNTQPAMTITVRPPRHPALLMQRKLVKKKPSLLAAVVKWVTSIMWWRRKSSRVKFPIGQCGNNVGLLLLLDKAPRAGHGHQRPPKRI

SEQ ID NO: 41569 - protein, 170 aa, Zea mays
  Clone ID: LIB3078-031-D12_FLI.pep
LLEMKLVPTFILHTPDECVCSWGRWMHIHDRWSGKLLVNPFVGAASGLVHVDEDADGLADARPLLELLQRVAHVRHGSPALERVGDIVQPQQVLLLAQRERSLLPVLPHHIHGQQIPPHELFLYQRHIVRSTVLLPDEVCKIQPIELGIFVTPDQAFQILSGQAAAAIVF

SEQ ID NO: 41570 - protein, 167 aa, Zea mays
  Clone ID: LIB3078-032-G3_FLI.pep
LIHDLGKVLLHPSFGELPQWAVVGDTFPVGCAYDECNVHFKYFKENPDYHNPKLNTKLGVYSEGCGLNKVLMSWGHDDYMYLVAKENKCTLPSAGLFIIRYHSFYPLHKHGAYTHLMDDEDKENLKWLHVFNKYDLYSKSNSRIDVEEVKPYYMSLIDKYFPAKLRW

SEQ ID NO: 41571 - protein, 110 aa, Zea mays
  Clone ID: LIB3078-033-D5_FLI.pep
NCIADEHYLPTLFNMVDPGGIANWSVTHVDWSEGKWHPRSYRAADVTYQLLKNITSVNENVHITSDDKKVVTQTPCMWNGTKRPCYLFARKFYPESLNNLLKLFSSYTSA

SEQ ID NO: 41572 - protein, 283 aa, Zea mays
  Clone ID: LIB148-002-E2_FLI.pep
RNGDGGGDQLVVAFETYQQLSRVSIRAMTAISDLETIHEDVVTSAHQKRAALIVLPFHKLHQIDGHMESLGDQYQHINQRVLHHAPCSVGILVDRGLGGVAQVAASDVSYTIVVIFFGGRDDREALAYGMRMVEHPGIGLHVLRFLLQSGGAASDDDASFLEEFRTKVANGNDSVRYEDRTVGGKEEVVEAIKATGRCNLFLVGQGTPCMPLVDWSTDSPELGPVGTYLALPEFSTVASVLVMKQYDPMAKHDDFVEEVADIAVDVDTPGPSNRGTNTSFHAG

SEQ ID NO: 41573 - protein, 238 aa, Zea mays
  Clone ID: LIB3078-034-B6_FLI.pep
KADAEAKAKKLKSRKHRRRGDSSSDSDSDYDSDVDRKHRRRKDRRRNKKHEHSDSDDARRRKHRSRKGSDSSDESNREYESGSEEERTKKKRSHRRKHHRHSSMSDSEDNSDEDERRSAKDHSQPRRRHHQSSDDGSDKVRLRHGKRLRSSDENARPDSNSHKHLRSQSLEESSDDRDDDGPEKIRNGKRYHKNHHRHHHHHRHHRHHHERHNNSAEPNDRRQVLKDDQRALEGSSAD

SEQ ID NO: 41574 - protein, 139 aa, Zea mays
  Clone ID: LIB3078-035-H11_FLI.pep
PSSLRSACIPSHRRNKITSSCDAEGGGGLLDSLPGALEPPLVAGLRLADVELAVGDGGRDELVLAALVAVRRPGEHGHGVVLLAVDHGGGALQDVGGGHGAGLEPALGVGLAAVGLPAEQVVDLGEELLGRAVVGDGLL

SEQ ID NO: 41575 - protein, 280 aa, Zea mays
  Clone ID: LIB143-038-H3_FLI.pep
LALAETEAAASVENSDVVVARPVRAPPPVRIYDRFRHNPPRPVLLCRFPLLVLCLLSELPLPVVPVVDLTFFKLITRHYNKEVARYIPAKQTRGSEKTSDYASVCELEVTMSSGSSFGSSQWTQRSRSAEDDLDLDLQAEMEKRRKRRKESNRESARRSRLRKQQHHDDLTSQVDQLKGQNKQLNLALSTTSQNLVAVQAQNSVLQTQRMELASRLGALTEILWCISSSTGTAAPPTNPAMVNGGVTTTWSWSDASGDILGASAWNHQQQQPIDAYRCYY

SEQ ID NO: 41576 - protein, 178 aa, Zea mays
  Clone ID: LIB3078-036-D12_FLI.pep
DQIHVGMVHYTNTNYSAVALLVQINQTLIGYMTSTHARTRLSVEYILDDRSEEVGVVSVAGGGEDVVGDDVAERAPGEDVDEVEAHGVVGLEQGRELLGALVAGVEVRLAVLRGHLLRHVLPLEVEEDEAAQEERHARAQADHQRRAQLRARRHGPPRRRRRRAERHARPAGRRRQAE

SEQ ID NO: 41577 - protein, 513 aa, Zea mays
  Clone ID: LIB148-038-H6_FLI.pep
RCARRGRRAKPPVVRDLAMAPALLLLRLLALIATAREACAARAFAAASNATAHGATVVAGKLNVHLVPHSHDDVGWLKTVDQYYVGSNNSIQGACVMNTLDSVVDALARDPARKFVVVEQAFFQRWWAEKIPNIQAVVRKLVDSGQLEFINGGWCMHDEAAVHYIDMIDQTTLGHRMIKKQFNKTPRAGWQIDPFGHSAVQAYLLGAELGFDSLHFARIDYQDKEKRKAGKGLEVIWRGSRTFGSSSQIFTNVFPVDYSPPDGFGFEVLDENILPVQDDMLMFDYNVEERVNDFVAAAIEQANFTRTNHIMWTMGDDFSYQYAESWFRNMDKLIYHVNKDGRVHALYSTPSIYTDAKHFSNVSWPVKYDDYFPYADSKNSYWTGYYTSRPTFKRYVRVLSGYYLAARQIEFLVGRSFLGMFTTSLEDPMAIAQHHDAVSGTAKQHTTDDYSKRLALGASKVEKGVNVALTCLLSSNGTCAPSVQKFSQIYLTTLFLLLTIQVPTSQYKLLPFN

SEQ ID NO: 41578 - protein, 59 aa, Zea mays
  Clone ID: LIB3078-036-G5_FLI.pep
RLGLGGVGLGLVEDHTLVLDLEPLHGVFLSDPVLDPNTGLAPAATGDTVPSTLKDDVEV

SEQ ID NO: 41579 - protein, 259 aa, Zea mays
  Clone ID: LIB3078-037-G4_FLI.pep
ARRGEENNLTMSSIGTGYDLSVTTFSPDGRVFQVEYATKAVDNSGTVVGIKCKDGIVLGVEKLVTSKMMLEGSNRRIHSVHRHSGLVVAGLAADGRQIVSRTKSEAASYEKVYGEPIPVKELADRVAVMFIFARCTGGSGPFGCGVILGGYDRDGPQLYMIEPSGVSYKYFGAALGKGRQAAKTEIEKLKLSELTCREGIVEVAKIIYGVHDEAKDKAFELELSWICDESNHQHQKVPNELLEHAKAAAQAALEEMDAD

SEQ ID NO: 41580 - protein, 239 aa, Zea mays
  Clone ID: LIB148-048-E12_FLI.pep
PSFKGNRAQQTTTTPHSHTHNVHRESSLRRSTQVTSSSDSPRQATQGRRKHDDDYEHRRREGRLWHAVVAKPRDTPLETTPILHQRDFQNLNPPPRFARRSAGTRTTANAGGATAAHMPTPHTTIEEPDPPLLTVAQLTPAHSSRQGREGGEGWQRRERRATMHARAPNCHRRNRHRPPAPAAEGRSGLHATNPTPGGARPPASSRPTTPCVRRRNGAAPPPPVDAANPSPGCTCRTRC

SEQ ID NO: 41581 - protein, 172 aa, Zea mays
  Clone ID: LIB3078-038-A5_FLI.pep
LAYVRDREAPGQQVVLHLDQQPEHHVARQLQRRHREVPQRCQVRCQVEERVRPPHRRSCVDDPLEDDVERGPEEEVGDPEPREPQAIQGGLAQQEDCVHRMHPDQQEVEAVVLLGEEREDDEPEHAVREHHRACICLVDDLEQVAPEPSDLSGTVSFIQGRLSSSRPQATGD

SEQ ID NO: 41582 - protein, 268 aa, Zea mays
  Clone ID: LIB189-007-D11_FLI.pep
GQGRYRREHDSNRRTSDVRKWDGDSSEFEASDEEWDSGDDRGNALGFDNDRGSTDEHPRRFGSMRNEKSRSTRAQDFVPRGGVGEGKGFNRSYGNPDADVHNRGQGRHRRDNKRTSDARRWDDNSEIEASGEECGSGDDRDSVLGLNNDIDTGDGHPRQFKSMRNERSRSSGRQISIPGGFRGSNRIPGNSADASDGTMFRGSNGDESDTEDDDLWMLDYKGEEANSRAPKVNFPNFHSSSEDSDDNRKNGGKIGKTKKNTDESWDSD

SEQ ID NO: 41583 - protein, 146 aa, Zea mays
  Clone ID: LIB3078-039-D7_FLI.pep
TYSNKLSNNGVCCASNPRPKISTLLADRSSDSGTFHLTLGIHNHSSIIFEVHVDPVLAAPRLALADDDGGHHLLPEVGLPLLDGGHDHVANAGGREAIEAALDALDGDDVEVLGAGVVRAVHRRGHWQTQRHAELVPRRTSPASLR

SEQ ID NO: 41584 - protein, 102 aa, Zea mays
  Clone ID: LIB3078-039-E2_FLI.pep
LAQLIYKDPEVKEHFHLLKWVTVSDDFSVLNLANKICNASERVLEDAVKKLQEHLKGKRYCWSLLAITNSTFLHASYDVCKLLSTKSSIRRVISCVPNGLVC

SEQ ID NO: 41585 - protein, 360 aa, Zea mays
  Clone ID: LIB3078-040-F8_FLI.pep
NVKSSPFVIRSSDREVKCHSLIIATGATAKRLRLPREDEFWSRGISACAICDGASPLFKGQVLAVVGGGDVATEEAVYLTKYARHVHLLVRKDQLRASKAMQDRVLNNPNITVHFNTEAMDVVSNDKGQMSGVHLKRRDTGEESVLTVKGLFYGIGHTPNSQLLQGQIELDSAGYILVKEGSAKTSVDGVFAAGDVQDHEWRQAITAAGSGCIAALSVERYLVANDLLVEFHQPVQEETKKDITDKDVQMGFDISHRKHKGQYALRKLYHESPRLICVLYTSPTCGPCRTLKPILSKVIDEYGEFVHLVEIDIEEDPEIAEAAGIMGTPCVQFFKNKEMLRTVSGVKRKKEYREFIEANK

SEQ ID NO: 41586 - protein, 241 aa, Zea mays
  Clone ID: LIB3078-045-C1_FLI.pep
SGLDLERWTAAAAASSSRPLRHPALACRLFSLSPPGQRSAMAGPAVLNERILSSMSQKHVAAHPWHDLEIGPGAPEFFNCVVEIPRGSKVKYELDKASGLIKVDRVLYSSVVYPHNYGFIPRTLCEDNDPLDVLILMQEQVVPGCFLRARAIGLMPMIDQGEKDDKIIAVCADDPEFRHYTDITDLPPHRLQEIRRFFEDYKKNENKEVAVNEFLPAKDAINAIKYSMDLYGSYVIESLRK

SEQ ID NO: 41587 - protein, 185 aa, Zea mays
  Clone ID: LIB3078-045-G2_FLI.pep
PSRRIRSDPLDSPAAPPTSKLPEFQIGLGTIVVQSSNLLSPQEAQLDGNVVTDLPSDPILHNMRTRRVQAASMGISESRQKQVYLISLINKGRVVAKGKLVTTDSQREILGAKLGPKYCGVLVEGLENIELGNIIDEEVPRPSNQIRTLIDAIGYVIPWPITHVKQARSSSCTRNKLVPAARGQS

SEQ ID NO: 41588 - protein, 80 aa, Zea mays
  Clone ID: LIB3078-046-C7_FLI.pep
DTVGFRLQSQGSYLGPTSFNAQICSSPIADWTVTTRSFPLSNPSLIWATRVSSVGSLRSSLVLPSEVRRLTNPSSEISIS

SEQ ID NO: 41589 - protein, 92 aa, Zea mays
  Clone ID: LIB3078-046-C9_FLI.pep
IALIVPLSYLSYTRQRLAAAVAYQLRCPSLHSKYCRLQLLTVANALHSIPFHSILLQSDESLFLFLYKYSLASITFHQVPFQEGPPPPPLEL

SEQ ID NO: 41590 - protein, 207 aa, Zea mays
  Clone ID: LIB3078-046-D2_FLI.pep
QTCRSPMAGSTSLVPLPVPAPPSRHRFHTSTSASPRHLRPSPATRLRAARRRHPDAVVVVPDARPWVGDLSGAAASYRDGSEEDEDDADEDEDEDEDRSLDLLARFLHSVFRKASRRARRAARSVLPPSVPAELVKFSVNGVLVLTFLWILKGLLEVVCTFGSMVFASILLVRGIWSGVTYIRENRYSYIHRIDNDENRWSRVQTAG

SEQ ID NO: 41591 - protein, 119 aa, Zea mays
  Clone ID: LIB189-013-A3_FLI.pep
GRRARRRTAPRPTSSAPCRPPRMTATCSGPMRASCGTPKTTTRKQAPQRSMWSRRATRRRWCPRADRCPRGVWTVSGGHLLHLLCFVRTGVHMRTDEGGGGSTRVNQLSPPSTEPAKNN

SEQ ID NO: 41592 - protein, 160 aa, Zea mays
  Clone ID: LIB3078-046-E10_FLI.pep
WGGWSRSGGWTSSTRTPRPWSGPRPGPALPRTSLTSPASRATRAASSSTRSASPAPSRTASTSPTSTSSSGSSWPRSSTPASPCLPCSPSTSRPGRARRRSARSAYDLHAAGERVSSRLRGVGELLGTYGCSGSDALPRRLEAKEERSSNLLSVLVVSSG

SEQ ID NO: 41593 - protein, 163 aa, Zea mays
  Clone ID: LIB3059-013-C9_FLI.pep
QEMTKREYVEDQDAEDPDDFIISLTTQIARRDEEMAPYITESERNYIFGGISSVAANASIKALAQMKSINLLGVQQICRNSIALEQALAAIPSIDSEAVQQRLDRVRTFYELLNLPFESLLGFIAEHEYLFSAKEYLSVLKVNVPGREIPADAERRISQILGH

SEQ ID NO: 41594 - protein, 285 aa, Zea mays
  Clone ID: LIB3078-046-E5_FLI.pep
TVKPFVNGGASGMLATCVIQPIDMVKVRIQLGEGSAGQVTRNMLANEGVRSFYKGLSAGLLRQATYTTARLGSFRVLTNKAVEKNEGKPLPLFQKAFIGLTAGAIGACVGSPADLALIRMQADSTLPVAQRRNYKNAFHALYRISGDEGVLALWKGAGPTVVRAMALNMGMLASYDQSVELFRDKFGAGEISTVVGASAVSGFFASACSLPFDYVKTQIQKMQPDANGKYPYTGSLDCAVKTFKSGGPFKFYTGFPVYCVRIAPHVMMTWIFLNQIQKFEKKIGI

SEQ ID NO: 41595 - protein, 282 aa, Zea mays
  Clone ID: LIB3059-015-C8_FLI.pep
FGQLVFSLGSRLGGCGMGAKAEECEVPPLAANAEEAASTNQCTLIFKGCSNSMEKVYAISSPSKKRKSQYELSDPKLLPLKCKFRKRLYCQDDESATTESLGYDGIFMNKTSGTDMVSIPEELDSCENTISLFCGCIEVDSKNGIQEQSLRKMFEIRTSASSSSSNNFSSEAFSSSHSSGTRDTDSWAMDDIERHHPYVMLKPHNDDLERIFNVLEQYDDLMEDELMAGDVFGSAAQVMDEKLYSNSVDDFQILPTGQTGYHGEKKLTIDQEFEQYFANLML

SEQ ID NO: 41596 - protein, 129 aa, Zea mays
  Clone ID: LIB3078-046-G8_FLI.pep
RRSIPEAGAGAAQPLHHHPERVPGLHAEADKGPQLQGDAPAAAVQGVRRREQARRTGQAEPGERVPARPGRHAHPHHEGHRRRHAEHWLGGFSSLTCRVHRNNQLPDGGVLSVLDGNAELAASVFPMHM

SEQ ID NO: 41597 - protein, 471 aa, Zea mays
  Clone ID: LIB3060-003-B1_FLI.pep
IRLARPTNATLIRSLRSSNPPPMATVDCPLPSPADLDDNGFPALPSSPAACSSGFAEDFYRSGTDWSSLRAPPPLGPPRRAPGVKERGGGSAVQSSLFQAWGIEKPRRDGRGAGDSSLVQRSLFQAWGIERPQREGLGAGDSSPSSSLSGSLLARKRRRGSTEEERVAAKKPLACPFYKKIPGTPFTVDAFRYGQVEGCSAYFLSHFHHDHYGGLTKKWCHGPIYCSALTARLVKMCLSVNSDYICPLELDTEYVIEGVTVTLLEANHCPGAALIHFRLSDGKTCLHTGDFRASKTMQSHPLLQRGRVNLVYLDTTYCNPKYKFPPQEDVIDFVVRTTRRYLKKQPKTLIVVGAYSIGKENVYLAISQALEAHIYTDASRRRILYSFGWPDLSKRLCSCNQSSSLHVLPLGSINHENLKKYLETLNGRFLAVLAFRPTGWTFSEATGKHLDLIKPSSNANVTIYGRICWLY

SEQ ID NO: 41598 - protein, 149 aa, Zea mays
  Clone ID: LIB3078-047-G12_FLI.pep
RPSHFYISYNIVQVHHASHHEHFIIIIIIVDSLPSSPPPTKRKSSISAIKPNNACMCGSTPRTAKFIRAPHLGVKAWKMVAWPGSARWAKRLSMGPVPVYSAWNQAPMTASMARRPFLISLVRSSLIFSGEPEPQPSGSNHRPPGYPTS

SEQ ID NO: 41599 - protein, 190 aa, Zea mays
  Clone ID: LIB3060-024-C1_FLI.pep
HSLQPSIHELPFSISSHGGVDRAHQGVRLRRAGAGGLCLPQPLDGLPGRQGPQKVQGVLPHHVRHRVGEQGRQALQLRAEGAPELSRVDARFLRHTAAGRSAAPDHRRRSGRHLHRREVLLLQGIRHRRSGQPSQDWGAQLLGVAWADHLHSIFRHQPAHQGDALNFGFICELQAGLTAQVTHGLSIKTL

SEQ ID NO: 41600 - protein, 471 aa, Zea mays
  Clone ID: LIB3078-048-C4_FLI.pep
DPVLRNVAHLGSWQVISPVEVSGYVVVVDELLAVQNKSYDKPTILVAKSVKGEEEIPDGVVGVITPDMPDVLSHVSVRARNSKVLFATCFDHTTLSELEGYDQKLFSFKPTSADITYREITESELQQSSSPNAEVGHAVPSISLAKKKFLGKYAISAEEFSEEMVGAKSRNIAYLKGKVPSWVGVPTSVAIPFGTFEKVLSDGLNKEVAQSIEKLKIRLAQEDFSALGEIRKVVLNLTAPMQLVNELKERMLGSGMPWPGDEGDKRWEQAWMAIKKVWASKWNERAYFSTRKVKLDHEYLSMAVLVQEVVNADYAFVIHTTNPSSGDSSEIYAEVVKGLGETLVGAYPGRAMSFVCKKDDLDSPKLLGYPSKPIGLFIRQSIIFRSDSNGEDLEGYAGAGLYDSVPMDEEDEVVLDYTTDPLIVDRGFRSSILSSIARAGHAIEELYGSPQDVEGVVKDGKIYVVQTRPQM

SEQ ID NO: 41601 - protein, 143 aa, Zea mays
  Clone ID: LIB189-018-E6_FLI.pep
LKQKSSLKDLTVIGYIPYFGKAMNFLLLSLMYAYYCFEYKWNFFAVSLHERLDFFESNWAFFAGFGAPCVLPIFFFSPLISYGFLAILYPLFVLTAAGTQAEQVIDALKPAHEGKLQRIPVFFVAKRLTTKVLQLFPVAQKEQ

SEQ ID NO: 41602 - protein, 258 aa, Zea mays
  Clone ID: LIB3078-048-C6_FLI.pep
MGPHAPRRGSSRGRCCRRDRRLPHTRILFLLQLAMILWCYLMAVFTDPGAVPENWRHDAEDSGNPSFSSSDEQESAPRYCSRCQNGKPPRCHHCSVCNRCVLKMDHHCIWVVNCVGARNYKYFLLFLVYTFIETVLDTLVLLPNFIEFFQDEHRRSSSPGDIAILFLAFVLNLAFALSLLCFIGMHASLVTRNTTSIEVYERKKSVSWKYDLGWKRNLEQVFGTKKLLWFVPLYSTEDLHNIPALRGMEFPTRSDAIV

SEQ ID NO: 41603 - protein, 116 aa, Zea mays
  Clone ID: LIB189-027-D7_FLI.pep
FQVNIAEEAVRRLTGITLMLPTAFEKPTSSAPLSSCPSDAASASASAAIEDSVKHFLQAPLENSGIIPNAAVFQTKPASLHRVASLENLQKRIVGDAMYSETASTTFSDPEALADR

SEQ ID NO: 41604 - protein, 179 aa, Zea mays
  Clone ID: LIB3078-050-H5_FLI.pep
NLVKLIRVLGDAQVGGDDITEELKSVLNSAAPEVRRPYCNCLIDVCRNHGFPPQRAREVFHLAQTYGLYSKLQSRKDEEWSLDLRSLSVGAAKTAFDDWMQTVSERWAQQKDLPESFSVYTGSSTHKFAQGLASAFAAHLDQMAVPFHASESQAGSFISSRDDLVSWLQMSRSSAVVAG

SEQ ID NO: 41605 - protein, 173 aa, Zea mays
  Clone ID: LIB3059-020-A6_FLI.pep
QQQQFLPSLSHLAVVNPVTYLQQQLLASNPLALANVAAYQQQQQLQQFMPVLSQLAMVNPAVYLQLLSSSPLAVGNAPTYLQQQLLQQIVPALTQLAVANPAAYLQQLLPFNQLAVSNSAAYLQQRQQLLNPLAVANPLVATFLQQQQQLLPYNQFSLMNPALQQPIVGGAIF

SEQ ID NO: 41606 - protein, 147 aa, Zea mays
  Clone ID: LIB3078-051-B6_FLI.pep
QRSISFAELLETLGACLTGGGEVMAMDPDAVAKAFVEHYYRTFDTNRAALVGLYQETSMLTFEGQKFQGPSAIAGKLGSLPFQACEHQIVTVDCQPSGPQGGMLVFVSGSIRTGPEEHPIKFSQAFHLLPAAGSFFVQNDMFRLNYG

SEQ ID NO: 41607 - protein, 439 aa, Zea mays
  Clone ID: LIB3060-007-F12_FLI.pep
SALPGIPKGSARQLFQRLQGPFEEGTLKRHFEKIILLPQKLHQTRRKDEIHELRQKNPLHTSHGFALSQACPGNLSGVILTPLDLCDGPSNSDALSIGYTGSNTSGLGLPNNNCSVGATLPTSNMNLRLPGSPGMVLGSNSPLPLNAPSRDVQRYGVPRPTSIQGDEQSRIHYNQMVNGRNLQQPGVPVPGVLPSGVDQGARMMPPAHGVGIMAGLNRGTPITRPGFPRLGSLGNMSPTNGQGLKNTVNVHPGAILGPGSTMLRPRDPMQMLRPGQNSEEHRQMMMPEFQLQVSQGNNHAVHFSGPPYSNTGASSPVQSLPAQQSQPHQMPQQSHMYGNTHLLHTQGTNQSNPQQQQAYAMRLAKERHMQQMMPQQQRPLSVASAVSAVQNGSPMQQQSQGSATCVIPATQTQHKQQYPAQNAQGSSMLPHQPSATTTH

SEQ ID NO: 41608 - protein, 341 aa, Zea mays
  Clone ID: LIB3078-051-F7_FLI.pep
EMYARDNTGDYVLRLGADQSSENLTLLETGEPIYSPTLQEGPIMTAELIKETEELVLRTGSLGAGCSQLLSDMQAFKAANPGCVLEDFVRWHSPPDWSEDCAANSTTVGEGSSRRGRLSDRMQTKEGNLWKELWEAAKPIPAVEQTPIYDEDLAVESIFDALEVIEPSKLFEQLLGVILSVCFVAAESVLAADSNLSKLFYDCKDYIIGVYHNDMSKDELDEMYKVYETMEAIVTHPEEALQIMEQPDEKSVDNKNRFTLKLNFMAKDRPPLWKRTTKDDKISQKVEKNTSEEKNTKIFSNLFDKKVSIFSKKNVRSSEVPPASTSSSSPGPFDESEWTIL

SEQ ID NO: 41609 - protein, 212 aa, Zea mays
  Clone ID: LIB3078-052-C2_FLI.pep
APERMLLGVCAVLMVVGVTNAAEGQVASVVVGLARCADSTRKNMKAEAGFKGLQVAIKCKNSNGEYETKAVSEIQSSGAFSVPLAADLHGADCHAQLHSAANNAPCPGQEPSRIAPMSGGTFVAVPGKMHYPSAECASAFLCSPIKKHLLDHFHKAPLPVPEYHPVPDHSKPPVPEYHPVPEHSKPAPEYHPPTPVYGQPKPTPIYHPPAEH

SEQ ID NO: 41610 - protein, 83 aa, Zea mays
  Clone ID: LIB3078-052-C9_FLI.pep
SESLVTWATPRLSEDKVKQCVDPRLKGEYPPKGVAKLAAVAALCAQYEAEFRPNMSIVVKALSPLLQQRPAPTTEEPAPQPGS

SEQ ID NO: 41611 - protein, 284 aa, Zea mays
  Clone ID: LIB3060-032-H1_FLI.pep
NSCVHSIVKWHHEKVLRRWSHRWKKSGQRTPSFQRHQVSKCIGLAKRCKEVEPTRRPSICDILAALGKMEDMNCSDQQVDEEVTYLEDMLGIEPLDLHFLVEPTKQISCSVHLTNATNDCFAFIVQTTNPKQYCIQPDRGVVPPRSECSVAIVLSQEPTHNKRCSMEDELSVQSTRVDEGVTAADVSEALFTGKEDRTVDHVSLMVGFDMSPSPPEEQTEDFTFAPLASLYDEEPQLSAAKVSVWTSNQVRVCAFSLWIPSPDWIMHDSLSECAFTVGAFWSLL

SEQ ID NO: 41612 - protein, 159 aa, Zea mays
  Clone ID: LIB3078-054-A1_FLI.pep
WDRGRRRWQQPRRHGRPLPADDRGGPGQLAAPGQLRQVPQGGGRGRGKGAGVLRARHPRQPRRRRGAVALRGPRLGDQPRRWPRRGLLQPRRPGRARRLLRPGLLRRVPVGRRGRRGRELRALATAFAVPGGSSASFHHSGLLDDRELDLDLTTACERS

SEQ ID NO: 41613 - protein, 295 aa, Zea mays
  Clone ID: LIB3078-054-B6_FLI.pep
QTKEHILLAKQVGVPKIVVFLNKKDMVDDEELLELVELEVRELLSNYEYDGDEVPIVAGSALKALEALMGNPTLKRGDDEWVDCIFKLVDSVDSYIPVPQRQTDLPFLLAVEDVFSITGRGTVATGRIERGTVKIGDTVDIVGIRDTRNCTVTGVEMFQKTMDDAMAGDNVGLLLRGMQKDDIERGMVLAKPGSITPHTKFEAVVYVLKKEEGGRHSPFFPGYRPQFYMRTTDVTGNVTVIMNDKDEEAKMCMPGDRIKMVVQLIQPVACEQGMRFAIREGGKTVGAGVINKIIE

SEQ ID NO: 41614 - protein, 206 aa, Zea mays
  Clone ID: LIB3061-037-A2_FLI.pep
VTAAGFQHPTIQSYMLHEAIVASILRSLALTLQQPYALLQQPSLVHLYLQRIATQQLQQQLLPTINQVVAANLAAYLQQQQFLPFNQLAGVNPAVYLQAQQLLPFNQLVGSPDAFLLQQQLLPFHLQAVENIASFLRQQQLLPFYPQVVGNINAFLQQQQLLPFYPHNVANIVAFLQQQQLLPFSQHALTNPTTLLQSPTIGGAIF

SEQ ID NO: 41615 - protein, 452 aa, Zea mays
  Clone ID: LIB3078-054-E3_FLI.pep
FILFAEREDMESTGKILMERYEVGRLLGKGTFGKVHYAKNLESNESVAIKMMDKDKVLKAGLSEQIRREITTMRLVAHKNIVELHEVMATRNNIYFVMEYVKGGELFDKIGKSGKLTEAAAHKYFQQLIGAVDYCHSRGVYHRDLKPENLLLDENENLKVSDFGLSALSESKGQDGLLHTTCGTPAYVAPEVISKTGYDGAKSDIWSCGVVLFVLVAGYLPFRAPNMMEMYRKIQNGDFRCPSWFSHKLKKLLYKILDPSPDTRISVQKIKESTWFRKGPVETRTVKEKILSENDTTNAAPAVAMRRKKNVHEDVKPPTVTSLNAFEIISFSTGLDLSGLFIRKECKKETRFTSDKGAVSIISKLEDVAKALNLRVRKKDNGVVKIQGRKVGRKGVLEFDTEIFEITASYHLIEMKQTGGDSLEYKKLLEEDIRPALKDIVWAWHGDDQQQK

SEQ ID NO: 41616 - protein, 125 aa, Zea mays
  Clone ID: LIB3061-038-F5_FLI.pep
TRSEGGGGGAEVGDLEQAGGRGDEDVRPVAGLLPPGVEAQLALPHGFRHHRIHHHEDDGQLHRGGSQELQVRPGTQEEALTNQVKELSETHVWPASSVMLLNEKFRPFFLVSLIEMLALYVPFVM

SEQ ID NO: 41617 - protein, 98 aa, Zea mays
  Clone ID: LIB3078-054-H6_FLI.pep
SKGKAKKKHFLFLLPGFSFLPSDNFIHISDTLSLVWLRWPPLLYGSSKLTDRALVIAAHGDPCVLLHLDRQAFRNGHPNRVGESQVHHEIVALHRRTI

SEQ ID NO: 41618 - protein, 205 aa, Zea mays
  Clone ID: LIB3061-041-D12_FLI.pep
LDLTGLSRAKPCVAYPVAIASVGDLGSSEPACKARKSFEDPCHSPDDYQCQIPGLGGRLHAVSTIHNLQPLLLRVRIRVRVRARAEQAVEAASPAEGKRPPPPLQVPGDPDGGGVLGGDVVDDELQVGADGPHELAEEADHTLPPNEGAREHQVLVHAALRDERLHRRQVPPVHPVVELPHHVRRRGPAGRRRRLSGPVSCRRGY

SEQ ID NO: 41619 - protein, 367 aa, Zea mays
  Clone ID: LIB3078-055-D7_FLI.pep
DDFLAMLEESKELTSSTRWSKAILMFEDDERFKAVERPREREDLFENYLVELHKKEKAKAAEEHKRYVAEYRAFLESCDFIKASTQWRKVQERLEDDERYSRLEKFDRLDIFQEYIRHLEKEEEEQKRVQKDQVRRQERKNRDGFRKMLEEHVADGTLNARTRWRDYCAQIKDSQSYLAVASNTSGSTPKELFDDVIEELGKQYQEDKIQIKEVVKSGKIPMTTSWTLEEFQTATLEDDALKGISTINIKLVYDDQLERLKEKEQKDAKKRQRLGENFSDLLYSIKEISASSTWDDSKQLFEDSQEFRALDSETYARELFEECVVHLKERLKEKERLREEEKAKREKEREEKEKKKEKEKERKEKER

SEQ ID NO: 41620 - protein, 226 aa, Glycine max
  Clone ID: LIB3092-014-C10_FLI.pep
FLRRDAEGQRRRSLGGGGGGGERIRFKGASVPGRAEETVGEIRGGDQRPVEESQGLVGNLRFCRGCCTCLRHRRSESPRFQGQNQFPSLTFLLSTPTTDPFFYAGFHDHQNNSNNNNDNLNNPQRPTSSGMSSTVESFSGPRPPTTTTTTTTPFLTTTRRYPRTPPLVPEDCHSDCDSSSSVVDDSDDNIVSSSFRPPLPFDLNALPFDDDAAVVDDDLRCTALCL

SEQ ID NO: 41621 - protein, 191 aa, Zea mays
  Clone ID: LIB189-031-B2_FLI.pep
FFPPSCARMSCAGLVQTWAAVIMGVFAGSVPWFTMMILHKKVALLTRVDDTLGVFHTHAVAGLLGGVLTGLLATPELLEIESPVPGLRGAFYGGGIRQVGKQLAGAAFVVAWNVVVTSLILLAIGLLVPLRMPEDQLMIGDDAAHGEEAYALWGDGEKFDATRHDAVRVAGVMDREGSAEQRLSGGVTIQL

SEQ ID NO: 41622 - protein, 376 aa, Glycine max
  Clone ID: LIB3093-015-G4_FLI.pep
ALSSLLQETDLTAEQRLMVETILKSSNLLATLINDVLDLSRLEDGSLQLEAATFNLHSLFREVLNLIKPVASVKKLSLTSHVASDLPMYAIGDEKRLMQTILNVVGNAVKFSKEGCISITAFVAKPESFRDARIPDFLPVPSDNHFYLRVQVKDSGSGINPQDIPKLFTKFAQNQSLTRNPAGSGLGLAICRRFVNLMEGHIWVESEGIGKGCTVTFIVKLGIPDRSNEFKLPFVPKVPGNHGSTNFAGLKVLVMDDNGVSRTVTKGLLMHLGCDVTTASSSEECLRVVSLEHEVVFMDVCTGLDGYELAVRIHEKFTKHQDRPLIVALTGNTKKVTKENCMRVGMDGLILKPVSVDKMRGVLSELLERRVLFESV

SEQ ID NO: 41623 - protein, 175 aa, Zea mays
  Clone ID: LIB3115-013-E1_FLI.pep
AAAHEDVRGLDDLAVAVLGEAAHEADVRHLHLAAAVGASGPVHADRPRHGHALLHLPRHLQRPRLGLDDGLPAELVARARHQPPEQHRRPRREPLLLQQRLRQQRVEPLVADVGEHDVLLHREPELAGAVLVGEPRQLEHVRGLQPAHRHVEAHVRQAFLLLRVHAEVVPPLPAL

SEQ ID NO: 41624 - protein, 118 aa, Zea mays
  Clone ID: LIB3116-006-A1_FLI.pep
RRRVGRPRLIRPLPEVLLVGGVRGQRVDDGHERGGLRQAGQRRQEEAVRVGHQVRVLRVALGGHQPPHQRRPVRDVAAQRVLPEVERRVLRRGEPQQRRQQRRQVRGRRQARPPRRVA

SEQ ID NO: 41625 - protein, 182 aa, Glycine max
  Clone ID: LIB3138-126-A8_FLI.pep
LMVFDICAQVLRQLAPNLAYRSLVMLGIASIQALPVASFSKDDAERLLFFCTRQEKENCPKDHVFSGIPSWLKPPPPSRKRSEPCSSSKSINASGRGVEAIGSHRQKFIVASMRPIPHSNRHKILPFSGLSEGTRYDGDHGKSNLPLALIKHNVSGPTSVTNRKSVSNSFQAHQIISLNPLP

SEQ ID NO: 41626 - protein, 290 aa, Glycine max
  Clone ID: LIB3167-077-G10_FLI.pep
LFQESLGTRWTPQENKLFENALAVFDKDTPDRWLKVAALIPGKTVGDVIKQYRELEEDVSVIESGFIPLPGYTAADSFTLEWVNNQGFDGLRQFYGVTGKRGASTRPSEQERKKGVPWTKEEHRQFLMGLKKYGKGDWRNISRNFVTTRTPTQVASHAQKYFIRQLSGGKDKKRSSIHDITMVNLPEAKSPSSESNNRPYSPDHSVKDVNPPSQNQRLSTTMVIKQEHDWKLPCETVPMLFNSTNGNMFMTPLCGISSYGSKPLQEQYFLSGCQFGPYDTIMQMPSMQNQ

SEQ ID NO: 41627 - protein, 285 aa, Zea mays
  Clone ID: LIB3060-012-D1_FLI.pep
SKSALPIGRPHIPLSASPPAVSPTTRSGRLLAACSRRPPLHHPVLSPLAIRSLDPSFPSKKRSAHGHGHASLRRHAPPAGRRLGAGGEAAAAELAARAAVVVLPRAGPAPRVHRGGGGGAQGVRGPAAGPQHAVPDLRRQHGRAAPQGAGGGVLRHHVDVPQGAGVRDAHRRRRHHAGGPQPLEAGAQGAVPGARHQVALQVQDHLPVLPRLPQRRGAVPPPQGRRLPGEGQPRQGGRRPELPQHRQERQPHRRQVHRQGHLRLITLHVRRTPQPGSKLKNFFFY

SEQ ID NO: 41628 - protein, 155 aa, Arabidopsis thaliana
  Clone ID: LIB3168-066-E8_FLI.pep
HYMFVESLSMAEKFVEDENVEVELELELCLSLGGPFKKTEKSKTFGQSNAVGFEKDNGVNLDGRTTNVTRIKETRKKREAKQQQRSGEEGECKRIRTEYNGVSNGDDMDLSSSNMCNGYGSGRLKESSKDVTIGSPICTSSDVSDPSSSSRQEGI

SEQ ID NO: 41629 - protein, 149 aa, Arabidopsis thaliana
  Clone ID: LIB3168-086-G10_FLI.pep
RMEESVASEGLEFKWGKKKGVGGKKKDVQFYESFTYDGDEYRLYDCVLVGNASEPDSTEPFIGMIIKIWEHANKHIPKKVKLLWFFKPSEIAPYLEGVPNVLANEVFLASGEGLGLANTNQLVTNYSSAYYVEFSFSIVLIEHVMAFSY

SEQ ID NO: 41630 - protein, 88 aa, Glycine max
  Clone ID: LIB3170-005-H6_FLI.pep
QGLMANVPDSFQSQSVHIHEYKFWHCNILFFFPPCPSVIFGRHFFCIPQCWLESARVHADQVNQCLYFTGHLSDWWKPSVVICREMNR

SEQ ID NO: 41631 - protein, 392 aa, Glycine max
  Clone ID: LIB3170-021-C10_FLI.pep
KHQTLKREKGSKNLRRKELAEMEIHYSNSYFERRPILKSKAAAVKWVKEWVPQDLVTTGGKCMILKWVTEDTLKTLKEKVKEPSVPEPEPEPTTEVLFLCSYDGCGKTFIDAGALRKHSHIHGERQYVCHYDGCGKKFLDSSKLKRHFLIHTGERDFVCPHEGCGKAFSLDFNLRSHMKTHSQENYHICPYPDCGKRYAHEYKLKNHIASHHEKNASVDVTKYTTPPSEKQTKTSKPSGGAYGSASSDRPYACPYDGCEKAYIHEYKLRLHLKREHPGLMADENAEHAQANVDNEMDEASDHDAYVAKRSNGKIQKQSKPKPNLKLPPSKIAKRKLSTPSLTVNKNSWPVKDEPFDEEDSEETEEDRDNVEDGWRYAGGNNEDDDEETEYED

SEQ ID NO: 41632 - protein, 166 aa, Arabidopsis thaliana columbia
  Clone ID: LIB3175-019-H10_FLI.pep
LCFFFFTQKSKTKVKTMAPRAEKKPAEKKPAAEKPVEEKSKAEKAPAEKKPKAGKKLPKEAGAGGDKKKKMKKKSVETYKIYIFKVLKQVHPDIGISSKAMGIMNSFINDIFEKLASESSKLARYNKKPTITSREIQTAVRLVLPGELAKHAVSEGTKAVTKFTSS

SEQ ID NO: 41633 - protein, 378 aa, Arabidopsis thaliana columbia
  Clone ID: LIB3175-022-A2_FLI.pep
VLSKNENFRWFPPIWPAGEDMAGAKDSGCDDDLRIAGGCDPGKRGNPEDSSSPVEVSCSICLESVLDDGTRSKAKLQCGHQFHLDCIGSAFNMKGAMQCPNCRNVEKGQWLYANGSTRPFPEFSMEDWIPEEDLYGLSYPEMQYRVHWCPFGELSQAAASFEELEPATTTYHTEFHGHHAAAVNHSYLAYVGPGPAATPRTSDNNSTDDHPWNSHSNDHFHQLPVAPQYHHHSPSFSLPAAHVVDGEVDSSAARGLPYAHPFLFSHRSNQRSSPAINSYQGSSTQMREQHHAYNHQRQQHHANGPTLASPLISMTRRGLPPPPPPPPMPDQNVGFFIYPGGHHEPETDQIHAWERDWFPHFPVPSNHRTIPSLWHRHF

SEQ ID NO: 41634 - protein, 154 aa, Arabidopsis thaliana columbia
  Clone ID: LIB3175-034-A12_FLI.pep
EEAGSYNMNVDDTNNNNNYICTDNDYIEEDEDNSNTKKSQTQAWGTWEELLLACAVKRHGFGDWDSVATEVRSRSSLSHLLASANDCRHKYRDLKRRFHEQEKTDVTATVEEEEEEEERVGNNIPWLEQLRNLRVAELRREVERYDCSILYGIN

SEQ ID NO: 41635 - protein, 290 aa, Arabidopsis thaliana columbia
  Clone ID: LIB3176-007-F5_FLI.pep
DDFDVGDVFADVKPFVFTSTPKPAVSAAAEGSVFGKKVTGLDGDAEKSANRKRKNQYRGIRQRPWGKWAAEIRDPREGARIWLGTFKTAEEAARAYDAAARRIRGSKAKVNFPEENMKANSQKRSVKANLQKPVAKPNPNPSPALVQNSNISFENMCFMEEKHQVSNNNNNQFGMTNSVDAGCNGYQYFSSDQGSNSFDCSEFGWSDQAPITPDISSAVINNNNSALFFEEANPAKKLKSMDFETPYNNTEWDASLDFLNEDAVTTQDNGANPMDLWSIDEIHSMIGGVF

SEQ ID NO: 41636 - protein, 128 aa, Arabidopsis thaliana columbia
  Clone ID: LIB3176-029-C6_FLI.pep
QKLALAKKLNLTARQVEVWFQNRRARTKLKQTEVDCEYLKRCVEKLTEENRRLQKEAMELRTLKLSPQFYGQMTPPTTLIMCPSCERVGGPSSSNHHHNHRPVSINPWVACAGQVAHGLNFEALRPRS

SEQ ID NO: 41637 - protein, 231 aa, Zea mays
  Clone ID: LIB3060-035-E8_FLI.pep
TTHTHEEPAMKMSASVAAASPTLRFSSATHPLHRPLRRRLPSVRCSLAAAAAGPGVRAPPELVDSILSKVKGTDRGVLLPKDGHQEVAEVALQLGKYCIDDPVKSPLIFGEWEVVYCSVPTSPGGLYRTPLGRLVFKTDEMVQAVEAPDVVRNKVSFSVFGLEGAVSLKGKLNVLDSKWIQVVFEAPELKVGSLGFQYGGESEVKLEITYVDEKIRLGRGSRGSLFVFLRR

SEQ ID NO: 41638 - protein, 189 aa, Arabidopsis thaliana columbia
  Clone ID: LIB3176-037-G5_FLI.pep
SVSEVKPKNLGVRPGEALAVNFAFVLHHMPDESVSTENHRDRLLRMVKSLSPKVVTLVEQESNTNTAAFFPRFMETMNYYAAMFESIDVTLPRDHKQRINVEQHCLARDVVNIIACEGADRVERHELLGKWRSRFGMAGFTPYPLSPLVNSTIKSLLRNYSDKYRLEERDGALYLGWMHRDLVASCAWK

SEQ ID NO: 41639 - protein, 522 aa, Zea mays
  Clone ID: LIB3060-036-D1_FLI.pep
SYAATSKEDDDFLKSCPSHRCHKHGPEIRFPFRLPSHPPSCGTPGMQLSCSGHDTILDHPVLGSCRVTAIYYRHRVMNVIPPEDSSSHCQLQKLVKRNQSTDVYTPVAHPVSVVVGCSREATNQDDIAGPSSCRSLINNANQLWYLVDPSTDMSTLPMGCEVVAKGIPVPYTYDKNGPNYNTFSGRSLFNEKANRTINFGETSFNWNLNNITGSCQRCEQEGKHCGFSSNRRQAFCLHHGSHVILIAATTSVATFVVLVVTALYLSLKKRYNEAIHLKVEMFLKTYGTSKPTRYTFSEVKKIARRFKEKVGQGGFGTVYKGQLPNGVPVAVKMLENSTGEGEDFINEVATIGQIHHANIVRLLGFCSEGTRRALIYEFMPNESLGRYIFLPQELLVPEKMLDIATGIARGMEYLHQGCNQRILHFDIKPHNILLDYSFNPKISDFGLAKLCARDQSIVTLTAARGTMGVHRTRDIFSKFRWGIIQVRCLQFRHAGVRDGEWKEEFRPRYREPKWGVSTRVGL

SEQ ID NO: 41640 - protein, 158 aa, Arabidopsis thaliana columbia
  Clone ID: LIB3176-049-C7_FLI.pep
KSPFLRSHHLHRRFCNDHLCYSRRSIYEEEEEMSNTPAAAASSSSKSKAAGTSQPQEKRKTLFQKELQHMMYGFGDEQNPLPESVALVEDIVVEYVTDLTHKAQEIGSKRGRLLVDDFLYLIRKDLPKLNRCRELLAMQEELKQARKAFDVDEKELVD

SEQ ID NO: 41641 - protein, 211 aa, Arabidopsis thaliana columbia
  Clone ID: LIB3176-084-H5_FLI.pep
EMGDSDVGDRLPPPSSSDELSSFLRQILSRTPTAQPSSPPKSTNVSSAETFFPSVSGGAVSSVGYGVSETGQDKYAFEHKRSGAKQRNSLKRNIDAQFHNLSEKKRRSKINEKMKALQKLIPNSNKTDKASMLDEAIEYLKQLQLQVQTLAVMNGLGLNPMRLPQVPPPTHTRINETLEQDLNLETLLAAPHSLEPAKTSQGMCFSTATLL

SEQ ID NO: 41642 - protein, 249 aa, Arabidopsis thaliana columbia
  Clone ID: LIB3176-101-H5_FLI.pep
NPDFPDLKFSPPPIPSSQILQILPSIFEFGREMDQQGQSSAMNYGSNPYQTNAMTTTPTGSDHPAYHQIHQQQQQQLTQQLQSFWETQFKEIEKTTDFKNHSLPLARIKKIMKADEDVRMISAEAPVVFARACEMFILELTLRSWNHTEENKRRTLQKNDIAAAVTRTDIFDFLVDIVPREDLRDEVLGGVGAEAATAAGYPYGYLPPGTAPIGNPGMVMGNPGAYPPNPYMGQPMWQQPGPEQQDPDN

SEQ ID NO: 41643 - protein, 103 aa, Arabidopsis thaliana columbia
  Clone ID: LIB3177-080-G7_FLI.pep
FWLQKAGVLSPDRWNRVLLVASKVSLFDLLFKSIRRKAVKDFYTASPAKTLSIYRIVEDVLMLLSCWICNLISQYSDRFLGQISGNSKPLLINYYVNVIKVTS

SEQ ID NO: 41644 - protein, 126 aa, Arabidopsis thaliana columbia
  Clone ID: LIB3177-085-F7_FLI.pep
LRRTQANHKPTRQETERKEKKNTIVSKSPTPKSFLSHYLIPTIYLENHPHSHNPTTSQSQLSTFSSDPASELNVFGHYGHTLGMDGAEVSVLKETHKVCFSSLLECKHSMALETQVSLEILGNLTN

SEQ ID NO: 41645 - protein, 408 aa, Zea mays
  Clone ID: LIB3180-009-B4_FLI.pep
SPAAQLLSSLGGATTAIKRDTGVTEESTMGGEKETFDTSDLNASLPAAAAALSAEDRAGLVNALKDKLQSLAGQHADVLETLSPNVRKRVEFLREIQSQHDEIEAKFFEERAALEAKYQKLYEPLYTKRYGIVNGEVEVDGVCDEPASENTVEGKEPDAKGVPDFWLTAMKTNEVLSEEIQERDEAALKYLKDIKWSRIEDPKGFKLDFFFDTNPFFKNSVLTKTYHMVDEDDPILEKAIGTEIEWYPGKNLTQKILKKKPKKGSKNTKPITKTEDCESFFNFFNPPQVPEDDDDIDEDTADELQSQMEHDYDIGTTIRDKIIPHAVSWFTGEAVQGEDFGELGDDDEDDDDEDDDEDDEDEEEDDDEEEDDEEESKPARKSGSGRRHKAPQKVSQGNAEQPAECKQQ

SEQ ID NO: 41646 - protein, 372 aa, Zea mays
  Clone ID: LIB3180-055-C7_FLI.pep
LVRSSVVRNSELVMAGAVLVDDGVDLGVGRGLDGVGCLHGDAAVSLLGGHVARHADVPLLAPLGAPRVLDQPVLGAVRGDPVADRRDAVVQLRPAPAGEHPLGVELEVRAAGLDGDGHGLVRHRLLERRLVVGRHVLVAVDGDDRGRRLLAGRLARPVRVRVLRRHPAVLGDVLERVVHEAPVAAGVGLGVAVHQLLLRQRRQVLGLDRVDALHGGDRRERPAATALALVLDVGDSALLPPVDGGRDVARVGVHERRRRRRGALPVAAEHAVVRDPGARVVASELVGGHVAEAVEAELVGLVPAVELVDEAHVGLEDVEAARLVAQVPRQRVAAAPALVQRPQRLLRRQVLRAEVDRGRRRRRRGQQQRGGR

SEQ ID NO: 41647 - protein, 322 aa, Arabidopsis thaliana nossen
  Clone ID: LIB3234-048-B10_FLI.pep
AESGGLARTNNKNLSSSNLVFVFISIGSVRCRRFSPPFSEVMDVSARKSQKAGREKLRREKLNEHFVELGNVLDPDRPKNDKATILTDTLQLLKELTSEVNKLKSEYTALTDESRELTQEKNDLREEKTSLKSDIENLNLQYQQRLRSMSPWGAAMDHTVMMAPPPSFPYPMPMAMPPGSIPMHHPPMPSYTYFGNQNPSMMPAPYMPYMPPNTVVEQQSVHIPQNTRSREPRAKVSRESRSDKAEDSNDVATQLELKTPGSTSDKDTSQRPEKSKRCKRNSNNNNSVEESSHSSKCSSSPSVRDNTSSSSVAGGLKPDDAK

SEQ ID NO: 41648 - protein, 146 aa, Arabidopsis thaliana nossen
  Clone ID: LIB3234-085-G6_FLI.pep
KGYIRQRSIIYILLSEINLSQKDIQNTALRLPPVTYRRTEAERKLTLCVGEGGAASTGESAIDLFANLYNAAAPSSCCLVFKEPRRPSSNSNPVKRQLNINFLDKEHLNWTVNALNITHASHLAHENIKKLSHAVVIYEYGSLILG

SEQ ID NO: 41649 - protein, 111 aa, Glycine max
  Clone ID: LIB3242-512-F10_FLI.pep
CIPKSTIQRETSFPRLNFFFKLKSTISSAAKKKNLYFFKFSSITLLLKVKKLTLIITPSSSSSHYRSLRFPPLIISIISGELIATNGTSVPYPQPRHNALPMVTMRTRQHL

SEQ ID NO: 41650 - protein, 340 aa, Glycine max
  Clone ID: LIB3242-759-D11_FLI.pep
CSSLLEKLMRHKHGWVFNSPVDVETLGLHDYFTIITHPMDLGTVKTRLNKNWYKSPKEFAEDVRLTFRNAMTYNPQGQDVHIMAELLSKIFEDRWAIIESDYNREMRYGFDYRAAPPAPSPLSRRVSAFTPPPLDMRRILDRSDSMTQTPRLMSITPSSRTPAPKKPKAKDPHKRDMTFEEKQKLSTNLQSLPSEKLDAIVQIIKKRNSALNQHDDEIEVDIDSVDAETLWELDRFVTNYKKSLSKNKRKAELARARAEALQQNAIQKSQAPAMAEIPKETQTDERSLPQPLPVQGRNQADNGSRSSSSSSSSSDSGSSSSDSDSDSSSASGSDAGSQGT

SEQ ID NO: 41651 - protein, 479 aa, Zea mays
  Clone ID: LIB3245-493-A7_FLI.pep
AAAHEDVRGLDDLAVAVLGEAAHEADVRHLHLAAAVGASGPVHADRPRHGHALLHLPRHLQRPRLGLDDGLPAELVARARHQAPEQHGRPRREPLLLQQRLRQQRVEPLVADVGEHDVLLHREPELAGAVLVGEARQLEHVRGLQPAHGHVQAHVRQAFLLLRVHAEVVPPLPALVDEVLRRGALQHPVRHPLLHLRPEHLHPELVDEPHHARLLPVAPGAEVPVRLEDGLAHGDDVVPGDPGVERQRLGPPLGADEPAHQKVEAELAVLDGRHVREVVDVRVLVQVVRADDADVPFPRQVGDGGVPLGVVGDVGGEQVGVWARVDDLVGVDAGERVADGVAHVVHAALQAGEADGAEAVQDGRDVRERHPADLPVLPGGHVRAPVRAVRLDDARQVPRLLARRHAVGQLQPHHEPPVLVLAAVEEAEPLEADVDVVLGELGGVDLLHGDPGQVLDAALHEQRHGLLLQLHLLLRVQPR

SEQ ID NO: 41652 - protein, 129 aa, Zea mays
  Clone ID: LIB3060-049-A3_FLI.pep
QHLCLVHAPLCRAVSLHASSSRAESSPMLTRSCSNLSCRVVITFCHELDSRCHRALCVLAFAVESLNPSSPAQPYPASSLQIQSRYRPARHQESQESGEDEASSAIFPKRSTIAWIGKSLPISRIRVGY

SEQ ID NO: 41653 - protein, 195 aa, Zea mays
  Clone ID: LIB3245-563-D5_FLI.pep
GRGAEGDRSHRERPCLSRRVTVQEQISSSFMDSPPPPHLDAPLFGADLIPSGRLRRMRGWRHSPGGLEEEIRMFQTRVLLGGMNMYDRYQDWRLDVDNMTYEELLELGDKIGYVNTGLRDDEITRNLRKFKHPSFSSLRFATEMERKCSICQEEFETNEEMGRLDCGHSYHVYCIKQWLSQKNICPVCKTAVSKN

SEQ ID NO: 41654 - protein, 406 aa, Zea mays
  Clone ID: LIB3061-016-H2_FLI.pep
WNAYVMQVESEDEAEAACAVVLTPPLSLEGGLAAELRPANLAQRVLSLFLNVRPGSDLSHFQLPATFNLPKSQLQLYGEGVYCAGEDLLGRCARGRDSLERLACVVAWSISTTRPPIFGFAPYNPVLGETHHVSTTSGCGGGLNVLLEQVSHRPPVTALHATDARGEVRLVWCQSPAPRFHGASVEAAVRGARELRLLRHAETYVIGCPGLLIRLFPSPACEWSGDVRVVCAESGLEAQLSYCRTRRSFLGFGGGDARCVRGRIFRSAEPGDTLCEIDGFWDRQVTRRDLATGEVSVLYDAQRAIGDLATPVVQDRKGVSASESAVVWGEVSNAILKKDWETAQQAKRRVEDTARRFAKERNDRGEVWTPKHFSLSQNKSGDWECWPLEDSVPPAPIVVPSSSSSS

SEQ ID NO: 41655 - protein, 149 aa, Arabidopsis thaliana
  Clone ID: LIB35-003-G11_FLI.pep
GQNMNQHYPSSPVRQPPSQHGFESSAAAAVAVMKARSTAFAKRSLSFKPATQTAPQSNLSDWGSPNGKLEWGMIGEELNKMRRSVSFGIHGNNNNNAARDYRDEPDVSWVNSLVKDSTVVSERSFGMNERVRIMSWAEQMYREEEQTVV

SEQ ID NO: 41656 - protein, 77 aa, Homo sapiens
  Clone ID: LIB43-126-B5_FLI.pep
STHAFASTVPVSAAGSANETPEIPDNVGDWLRGVYRFATDRNDFRRNLILNLGLFAAGVWLARNLSDIDLMAPQPGV

SEQ ID NO: 41657 - protein, 105 aa, Zea mays
  Clone ID: LIB83-009-D2_FLI.pep
RPLKDLIEFPRFFSYSLEDRIEPRHRTLVANRINMKLRYMLTGSDEEFAQRVREAVERRARFEAGKAAGLETFSCSSETSSDAEATEAAACQNSTDVVGVLQKQA

SEQ ID NO: 41658 - protein, 177 aa, Zea mays
  Clone ID: LIB84-014-D11_FLI.pep
RPRRPLAQQLPRLLATAAAAVAAAPLPALAEQMEKAALFDFNLTLPAIATEFLLLMVALDKLYFTPLGKFMDERDAKIRGELGDVKGASEEVKQLEDQAAAIMKAARAEIAAALNKMKKETTAELEAKLDEGRSRVEAELVEALANLEAQKEEAVKALDAQIASLSDEIVKKVLPSA

SEQ ID NO: 41659 - protein, 139 aa, Zea mays
  Clone ID: LIB84-026-A9_FLI.pep
THQVRLRSLLQRKHRMALETKISLEILGNLPDKPLERKLPYEQVSALLILADFTKSNSSRAVTMRLLYSPSCGCRLTGSLGGKLLPRSLPSSGLASSLLSTSHGSLNYGLPENSSASQIPNQQRAVCDPRGLFPPNLRL

SEQ ID NO: 41660 - protein, 608 aa, Glycine max
  Clone ID: jC-gmfl02220061f06_FLI.pep
AREKIEQGTHKSGRNVGLKAYVVCQVLEIVVKKEIKQAEIKSTQVKIRRFFRPEDLSNEKAYCSDIREVYYSDETYIISVESIEGKCQVRKKNDIPECSALGGIFQNVFFCELLYDPATGSLKKLPAHIKVKYSSGQTSDAAARKRKGKCIEGDGVSESTKEGKTLNDKRLATLDIFAGCGGLSEGLQQSGVSSTKWAIEYEEPAGDAFKANHPEALVFINNCNVILRAVMEKCGDTDDCISTSEAAELAAKLDEKEISSLPMPGQVDFINGGPPCQGFSGMNRFNQSSWSKVQCEMILAFLSFADYFRPRYFLLENVRNFVSFNKGQTFRLTLASLLEMGYQVRFGILEAGAFGVSQSRKRAFIWAASPEDVLPEWPEPVHVFSAPELKITLSENVQYAAVRSTANGAPLRAITVRDTIGDLPAVGNGASKGNMEYQNDPVSWFQKKIRGDMVVLTDHISKEMNELNLIRCQKIPKRPGADWRDLPEEKIKLSSGQVVDLIPWCLPNTAKRHNQWKGLFGRLDWQGNFPTSVTDPQPMGKVGMCFHPDQDRILTVRECARSQGFPDSYEFAGNIIHKHRQIGNAVPPPLASALGRKLKEAVDSKSST

SEQ ID NO: 41661 - protein, 216 aa, Glycine max
  Clone ID: jC-gmfl02220102f12_FLI.pep
GSSGSLQPNNQTHHFQQHPQPQGQSFGASAPANGGGSGQPKQRVRARRGQATDPHSIAERLRRERIAERMKALQELVPNANKTDKASMLDEIIDYVKFLQLQVKVLSMSRLGGAAAVAPLVAEGGGDCIQAKRSNSNDSLAMTEQQVAKLMEEDMGSAMQYLQGKGLCLMPISLASAISKATCHPFINGDGPSSPRMSALTLANAVVKDAASVSKS

SEQ ID NO: 41662 - protein, 490 aa, Glycine max
  Clone ID: jC-gmfl02220146h05_FLI.pep
LESVSNSSSSAVVIGDGSEEEYEEEEEDEEGVGVGGGRSMKKRSSKIFGFSVTQNEEESMDSDHPPVTRQFFPVEDADVAVATGGGGTGVSSTFPRAHWVGVKFCQSETLGTGKSSVEVSQPMKKSRRGPRSRSSQYRGVTFYRRTGRWESHIWDCGKQVYLGGFDTAHAAARAYDRAAIKFRGVEADINFNIEDYEDDLKQMSNLTKEEFVHVLRRQSTGFPRGSSKYRGVTLHKCGRWEARMGQFLGKKYVYLGLFDTEIEAARAYDKAAIKCNGKEAVTNFDPSIYDNELNSESTGNAPDHNLDLSLGNSTSNPGNDQALGNQAPNAVTHDQHMPSESNWRNGGIKPKLVNILPKPCYRSNNKDTHGRDVHGESETLRMLSQTHLHSPAFNEMQQRYGPYRSPGGESQMLQNFAHIHPPNFHFPRSSIGGRIGSDLSLSVADQQQWQTGPSRYLATAAASSSFQQEIRPSSQGWLQKNGLHSLMRPS

SEQ ID NO: 41663 - protein, 143 aa, Glycine max
  Clone ID: jC-gmfl02220148g09_FLI.pep
LLAMARGKIQIKRIENNTNRQVTYSKRRNGLFKKANELTVLCDAKVSIIMFSSTGKLHQYISPSTSTKQFFDQYQMTLGVDLWNSHYENMQENLKKLKEVNRNLRKEIRQRMGDCLNELGMEDLKLLEEEMDKAAKVVRERKV

SEQ ID NO: 41664 - protein, 247 aa, Glycine max
  Clone ID: jC-gmle01810054h06_FLI.pep
GSRVSITPNHASSIKLNQLTPSQMFQIQARIQVPRGQFLSPKPIPMKHVRASPSSKPTKLYRGVRQRHWGKWVAEIRLPKNRTRLWLGTFDTAEEAALAYDNAAFKLRGENARLNFPHLRHHGARAYGEFGNYKPLPSAVDAKLQAICQSLGTNSQKLKTQNPIVLDTHKAETETSEFQDFNKVENYQTSSSSAFSDEYSSSSSSSSPESDITLLDFSDSCETMDNLGLDLEKYPSVEIDWAALSDS

SEQ ID NO: 41665 - protein, 296 aa, Glycine max
  Clone ID: jC-gmst02400026g10_FLI.pep
GSRCMEIFRPQNLDSPVENTLKGKIRITTRCLWLDKGKLLDALHKAAHAALASCPVSCPLAHMEKIVSEMLRKMVRKYSGKRPEVIAIAIENPAAVLANEINTKLSGKLNVDGMSALRKVVDGHEKENQRTEMQIRDRIDVGGLLPTKDNAISSGAEDGLSDAEDPNDYFKPFVESSPVEKSIKTNNGYVPRKEKSSPLKDDCSEDTEECNSVNTSDSEPKSSKSAKRNKWKHEEVKKLIDMRGELNDRFQVVKGRMALWEEISQNLLANGISRSPGQCKSLWTSLLQKYEQEVKN

SEQ ID NO: 41666 - protein, 513 aa, Glycine max
  Clone ID: uC-gmflminsoy063a07_FLI.pep
EMGNSFGCSASGERLVSAARDGDLVEAQMLLNCNPCLAKYSTFGGLNSPLHFAAAKGHNEIVALLLENGADVNSRNYCGQTALMQACRYGHWEVVQTLLLFRCNVMRADYLSGRTALHFAAVHGHVRCIRLVVADFVPSALYQAIHAGTDVDRGGGSNAKGKHEQSALSKFINKTADGGITALHMAALNGYFDCVQLLLDLNANVNAVTYHYGTSMDLIGAGSTPLHYGACGGNLKCCQILVARGASRLALNCNGWLPLDIARMWGRHWLEQLLAPSSDASIPTFSHSNYLSLPLMSVLNIAREYGLQSSPTSSDEIDFCAVCLERPCSVAAEGCGHELCVRCALYLCSTNNVSSEMLGPPGSIPCPLCRHGVVSFVKLPGSQAKENKLHVSLGLCTPCILHPRDLDQPSLSHTPEIGRNRVASVPSEIRCPVTCSPFPSMAIPLCTCNDGPCPSFEPGEVETQDGSPHHSQASTVDQDKIEGPRLDKTTCSSMFWGRRSCSREHQCNSEINA

SEQ ID NO: 41667 - protein, 325 aa, Glycine max
  Clone ID: uC-gmrominsoy104a03_FLI.pep
FGIRFATNPAFNSLPFSFSLKSLKMVSKNPNPPEGFYLDPSGGMPLPGMPPFASVSAATAANSPEDAAKKIRKPYTITKSRENWTEPEHDKFLEAIQLFDRDWKKIEAFVGSKSVIQIRSHAQKYFLKVQKSGTSEHLPPPRPKRKAAHPYPQKASKNAPVLSQVSGRFQSSSALLEPGYILKNDAPPMLKTPIMNTVASSWSNNTLQTANLSPVTKVNNPCSSGESTPKVWPVGESNGQGNKIHPLRVLPDFTQVYGFIGSVFDPNATEHLQKLKKMDRIDVETVLLLMRNLSINLTSPDFEDHRKLLSSYEVEPERDDNYQRG

SEQ ID NO: 41668 - protein, 372 aa, Glycine max
  Clone ID: uC-gmrominsoy210c03_FLI.pep
VTRNCKDKMSVMYSPVLNYSDVEHQLRKNQDMDSSIGHPQQHCHQPNSGLLRYCSAPSSLLASLIDNTIHGCVNEESFTSENHHHQQQQQQQHYLPSTSSEMETMLSKLLPSNNGWSNSEALQEFGGKPVKQEIGESIPQEPPQQNGYSYGGSQLIYQSQQIQGLPNGGSSSASGSAFDGSFGVVHSMASEDSIQSKMGIRNCSNLFRQKSSPAAFFSIENDLAALREVGSFKADDVSNGLVTASTGGLHSSHTFSSRPSSCLKRLPQIAENGNESLEENCDQSRNLVNDNGSSKCYIPSFTNELWESSAFNAPKTENEDEIMFSTSNILESQEADFSFQNLGLTHHLSLPSSSTKMSSIEKFLQIQGSVPL

SEQ ID NO: 41669 - protein, 182 aa, Glycine max
  Clone ID: uC-gmrominsoy223d02_FLI.pep
RRGCHKIINKATTRKKRSKKQPKLDVDASKSNQDAKLEQQQEPVNNNFPFHASNSEDMMPLSPPQCSSHMSSSSLTTSDNNGSINNNHDMSLNVNDDIDTPENNLALDEDFWSEVLSSDNSGETTSGFPTIDYDHQFLPMSPLMTEEGVLIDASSSSVCDDGMDFWCNVYARAEEFTQLLEL

SEQ ID NO: 41670 - protein, 264 aa, Glycine max
  Clone ID: uC-gmrominsoy229c02_FLI.pep
CRLRWLNYLRPDVRRGNITLEEQLLILELHSRWGNRWSKIAQYLPGRTDNEIKNYWRTRVQKHAKQLKCDVNSKQFKDTMRYIWMPRLVERIQATAAASATTTVTATTATNNAYTYGSNLNNNKFEVHDHKGKMGLTDPSVMNNDLVGSHVTQSYTPENSSTGASSSDSFGTQVSAISDLTEYYTVTVSGNNNNTNSADYYQPSQISYSDSCITSPSGLFPQGLDFQSMDPNTPWNMQSGDSSDSFWNVESMLFLEQQLMNDNM

SEQ ID NO: 41671 - protein, 399 aa, Zea mays
  Clone ID: LIB3245-467-A4_FLI.pep
RKEALSILRDMRGAGCGPNVVTYNTLVAAFFRAGEVDGAERLVGMMLEGGLKPNLVTFNSMVNGMCKAGKMEDARKVFDEMMREGLAPDGVSYNTLVGGYCKAGCSHEALSVFAEMTQKGIMPDVVTFTSLIHVMCKAGNLERAVTLVRQMRERGLQMNEVTFTALIDGFCKKGFLDDALLAVRGMRQCRIKPSVVCYNALINGYCMVGRMDEARELLHEMEAKGLKPDVVTYSTIISAYCKNCDTHSAFELNQQMLEKGVLPDAITYSSLIRVLCEEKRLSDAHVLFKNMIKLGLQPDEFTYTSLIDGHCKEGNVERALSLHDKMVKAGVLPDVVTYSVLINGLSKSARAMEAQQLLFKLYHEEPIPANTKYDALMHCCRKAELKSVLALLKGFCMKG

SEQ ID NO: 41672 - protein, 414 aa, Zea mays
  Clone ID: LIB189-024-H3_FLI.pep
PQLTKSNSNLSKQALNGLLSDKKDVVSSKAKSTSARSTPSSPTSAHSLPASFDKFSSDMKQRVRTKGAEKSPPSRLSLLEKAASVLKATTAGRKSSLGNSISNTLLSFESGPKALRRSWEGKADAKDKGNSDSKPAKAEKKSENRSSSTPRRKSLAEEKPSNKDDSKILTPPRKSSASAPADDSDKVVNNKLSSPIRRTSGVLNNPNVTNLVKVAASSRKLTDASASWTTLPPSLAKLGKELLKYRDAAQMAAVEAMQEASAAESIVRCLSSYAEVSSSAEEQNPQQAVEQFLALHGAISRATIVTESLTKATTTVSTATSPDQSAAGDASTADEETMAVAAERRRRAASWVGAGLATDLSAFSLYNLKPAPASVISPLAVVLVDESAKPAAAKAVPPAKSRLSPAKGRLKAGS

SEQ ID NO: 41673 - protein, 180 aa, Zea mays
  Clone ID: LIB3062-047-D10_FLI.pep
RGRVKLVGRRRAGAEGVPAGRTTAAHDEVGERPRAGLDDAVLLAQELPGARPLHLPLVVVHQDVRLHALPGPRPRQHPRREYRRHPARRRSRVPARAVDEDDVPGDVVELVGEVVDGEAAVGEEEVLDGPALGAPRGAGGVKQVRELADGGGVGDVVGLQPRVATLQVGHVVLVLVEEHG

SEQ ID NO: 41674 - protein, 74 aa, Zea mays
  Clone ID: LIB3060-005-A12_FLI.pep
NRMIVAYTYPSNAIYICLILCRVVSRKLACYLYPTHLRARNPAFVPLLPLTAAAPRYSSLIDFCHGFILVQLPL

SEQ ID NO: 41675 - protein, 405 aa, Zea mays
  Clone ID: LIB143-006-F6_FLI.pep
AGAQRLDDVLHVHLDAVDAAGGEVRVELAVEVPHPARVHQAQPQDGQRVHDDVRLVARHARGLHGVRQRRLVALHRRPRRRRHAAPVPGHGVPHVHLLHAVRVLGLGHQSLQPARRLLAVAVAVGLGLELGVLLDPGQPAGELRALLDGDVGVGLVLGGDLLPAVVDDEEPRRRAALGQALKAVFDAVGGDVGVEGVPGAPAEPVEERRQLLLVAVVERLQVLLHRLDGGGDGVEGVVAGVEVHHVRGLVRLHRLVPALDADLQLVAVVPLQRCPKLPLQQRKHHHVRGGVVAVAVTGRDLDEHELGLQRDVAAGDAHPLRHPPQLEPEQAQEPAVPERAEGEDVVALGLAGVGADEGPVDEPRPGRVRRRHVVRHAGEHRTAAHRQPPVAHRDPWRHRHLPPSR

SEQ ID NO: 41676 - protein, 359 aa, Zea mays
  Clone ID: LIB3060-005-E4_FLI.pep
LSPPRIVGHPPKSKPSPRRIAAAGSASLDPDPGDMPRNDDRYGNTRLYVGRLSPRTRSRDLEYLFSKYGRIREVELKRDYAFIEFSDPRDADDAQYNLDGRDVDGSRIIVEFAKGVPRGSGGSRDYNGRGPPPGTGRCFNCGVDGHWARDCQAGDWKNKCYRCGERGHIERNCQNSPRNLRRERSYSRSPSPRRGRGRSRSYSRSRSYSRSRSPSGSPRGGRRDRDERRSRSLSYSRSASPRRSVSPVKEKERSRTPDGSRSPSPRDKVSPPPKDNGAHNGSDREDSPGGREMSKRSRSSSDGYRSPVGNGRSPSRSPSPKVNNGDDPSPKGNNGDDPSPKGNNGDDEHRGSPRGSQSP

SEQ ID NO: 41677 - protein, 199 aa, Zea mays
  Clone ID: LIB3062-021-E10_FLI.pep
PVSRRSSGGGGEKAANWWPAVRRELRHPAAGRHASGPADGSSSMSSAAPLLGGEAGGGEPAPRTPPPPSSWVGRVVDAAEARAQLGFAVPMVLTSMAYYGIPLVSVMFSGQLGDVHLAGATLGNSWATVTGYAFVTGLSGALETLCGQAYGAGLHRMLGLYLQSSLIMSAAASALVSALWWFTEPVLLLLRQEPEASRA

SEQ ID NO: 41678 - protein, 69 aa, Glycine max
  Clone ID: LIB3170-052-H2_FLI.pep
PFSSQSMYLSPTYPLLSSLFDFYSTKQGHSLRIQLRLTSPSTFQYNHCRRIHAQFSSPSQGRHLDHSCP

SEQ ID NO: 41679 - protein, 99 aa, Glycine max
  Clone ID: 701148210_FLI.pep
LIFLHRKWRHPNLRSLYKTIHPVRFTSSSIRASALDTGFILSKSFSLYSVQVCVFVLILLFVFLFTSCFVLVCVLCFVICVLVLVTFLCLLLVYFTLCV

SEQ ID NO: 41680 - protein, 185 aa, Zea mays
  Clone ID: LIB3180-001-G11_FLI.pep
EPHLAALKRLLRYLRGTVDYGLLLHRSTSSELVVYTDADWAGCPDTRRSTSGYAVFLGGNLVSWSSKRQPVVSRSSAEAEYRAVANGVAEAAWLRQLLAELHSPLSRSTVVYNDNVSAVYLSTNPVQHQRTKHVEIDHFVRDYVAAGAVRVLHVPTTSQFADIFTKGLPSSTFAEFRSSLNISSG

SEQ ID NO: 41681 - protein, 223 aa, Zea mays
  Clone ID: LIB3060-043-D5_FLI.pep
PPPTDPAPSSMAGAGAKAAGALALALVLALAGANSEGDALSALRRSLRDPGGVLQSWDPTLVNPCTWFHVTCDRDNRVTRLDLGNLNLSGHLVPELGKLEHLQYLELYKNNIQGTIPSELGNLKNLISFDLYKNNISGTIPPALGKLKSLVFLRLNGNHLTGPIPRELAGISSLKVVDVSSNDLCGTIPTSGPFEHIPLSNFEKNPRLEGPELQGLAIYDTNC

SEQ ID NO: 41682 - protein, 452 aa, Zea mays
  Clone ID: 700472831_FLI.pep
LEAWPRELQPAAAAPYYFGELEEALIHGTRTSVDHGMIGSDVDTERKTAGYLAARPPTLEIFPSWPMSHLQQPYSGNSHSVGSTTESSSGQNSMPQTELVSPGSMRADSGQRQELLMVTVDDYNYEQGLGAAATTAPIFQQHAAGQDKGKHGSTRKDGRLLDAKTERRLAQNREAARKSRLRKKAYVQQLETSRIRLQQIEQELHGARSQGLFPGGGGAAGDLSSGAVIFDMEYARWLEDDTKHMTELQAVLQPQIIDANLGAIVEDCMRHYDELFHLRAMLARSDVFHLMTGLWATTAERCFLWMGGFRPSEILKMLIPQLDPLAEPQLIGMYNLQRSSEQTEEALVQGLQQLHQSLADAVGASPLSDGANVANYTALMALALDRLDTLESFYRQADSLRQQTLHQMRRILTTRQTARCFVSISEYHRRLRALSSVWASSRPPTPPSEGVV

SEQ ID NO: 41683 - protein, 190 aa, Arabidopsis thaliana
  Clone ID: LIB3168-079-G7_FLI.pep
WLQVKVNLHEFFTGYTDGRYDRMGWPLVLKLKDWPPAKVFKDNLPRHAEEFLCSLPLKHYTHPVNGPLNLAVKLPQNCLKPDMGPKTYVASGFAQELGRGDSVTKLHCDMSDAVSTHMICLFSFSYPFLSSKSVHSYCFSLHIYNDFRTYENIKIRYHFLIGHLDFLLHLGFVSSSFPDQFLKLFCFSFG

SEQ ID NO: 41684 - protein, 186 aa, Arabidopsis thaliana nossen
  Clone ID: LIB3234-085-B8_FLI.pep
YVIKYKKGKHNVVADALSRRYVLLTSLDARLLGFEQIKDLYANDSDFSKIFQSCEKFAFGKYYRHDGYLFFENRLCVPHSSLRELFLREAHGGGLMGHFGVAKTCKVMQEHFHWPHMKRDVERLCERCATCKQAKAKVQPHGLYTPLPIPLHPWNDISMDFVVGLPRTRTGKDSIFVVVERFSKMA

SEQ ID NO: 41685 - protein, 390 aa, Arabidopsis thaliana
  Clone ID: LIB24-013-H3_FLI.pep
STRRIFFTRKLIWSEPRKMGYMCDFCGEQRSMVYCRSDAACLCLSCDRSVHSANALSKRHSRTLVCERCNAQPATVRCVEERVSLCQNCDWSGHNNSNNNNSSSSSTSPQQHKRQTISCYSGCPSSSELASIWSFCLDLAGQSICEQELGMMNIDDDGPTDKKTCNEDKKDVLVGSSSIPETSSVPQGKSSSAKDVGMCEDDFYGNLGMDEVDMALENYEELFGTAFNPSEELFGHGGIDSLFHKHQTAPEGGNSVQPAGSNDSFMSSKTEPIICFASKPAHSNISFSGVTGESSAGDFQECGASSSIQLSGEPPWYPPTLQDNNACSHSVTRNNAVMRYKEKKKARKFDKRVRYASRKARADVRRRVKGRFVKAGEAYDYDPLTPTRSY

SEQ ID NO: 41686 - protein, 546 aa, Zea mays
  Clone ID: LIB189-021-G10_FLI.pep
ILASPSIIQGLEFPGLDLPDSAGEVVVCGVLVLQGQRVLNMIARFIQAKRQRGDHGVKAQGDGWLLTVALMEGTNLAATKSSGYSDPYVVFTCNGKTKTSSINFHTLDPQWNEIFEFDAMEDPPSVMKIHVYDFDGPFDEVASLGHAEVNFLKYNNISELADIWIPLKGKLAQACQSKLHLRIFLNNTRGTEVVKDYLDKVEKEVGKKIAMRSPHTNLAFQKIFSLPPEEFLINDFTCHLKRKMLTQGRIFLSPRIFGFYTNLFGHKTKFFFLWEDIEDILLVPATLSSMGSPSLVIILRKDRGMDAKHGAKQLDSQGRLKFHFQSFVSFNVAHKTITALWKARSLTPEQKVQLVEEESETEDFQNEEGESLLGIEDAKMSGVFSCTKPFDVSTLMGIFEGGPLECRVMEKVGCMDYSVTAWEPVRADIYQRQVHYKFDKKSARHGGEAMSTQQKSPLPNKNGWLVEEVMTLEGIPVGECFNLHIRYQLESNASKQKTCTIQVFIGIVWLKSCKNRKKITQDVATSASSRLKKIFNQLEKESIPAK

SEQ ID NO: 41687 - protein, 248 aa, Arabidopsis thaliana
  Clone ID: LIB25-108-B7_FLI.pep
LVSLKMYGQCNIESDYALLESITRHLLGGGGENELRLNESTPSSCFTESWGGLPLKENDSEDMLVYGLLKDAFHFDTSSSDLSCLFDFPAVKVEPTENFTAMEEKPKKAIPVTETAVKAKHYRGVRQRPWGKFAAEIRDPAKNGARVWLGTFETAEDAALAYDIAAFRMRGSRALLNFPLRVNSGEPDPVRITSKRSSSSSSSSSSSTSSSENGKLKRRRKAENLTSEVVQVKCEVGDETRVDELLVS

SEQ ID NO: 41688 - protein, 270 aa, Zea mays
  Clone ID: LIB189-028-B1_FLI.pep
VKMVGGTLAEQTYLFLGAGEAGTGIAELIALEISKQTNAPIEECRKKVWLVDSKGLIVDSRKGSLQPFKKPWAHEHEPLKTLYDAVQSIKPTVLIGTSGVGRTFTKEIIEAMSSFNERPIIFSLSNPTSHSECTAEQAYTWSQGRSIFASGSPFAPVEYEGKTFVPGQSNNAYIFPGLGLGLVISGAVRVHEDMLLAASKALADQATQDNFEKGSIFPPFTSIRKISAHIAAAVAAKAYELGLATRLPPPSDLVKYAENCMYTPVYRNYR

SEQ ID NO: 41689 - protein, 508 aa, Zea mays
  Clone ID: LIB3067-050-G5_FLI.pep
LKYESGLLVIFQRRMLLVLYERLKNFGNATQIDLIVDDVGGVLEKAPHEAQIELFDLLIDGCQKAVKENTDIKGTVLDFFGVAVKAYELLARVEELQLLSKRIARYKDPIKQYRIQLPYKKPQWSASCGWTETDDARLMVGIHWYGYGNWEKIRLDPKLGLTTKIAPATLGERETFLPRAPNLDNRASALLQKEYAKFSGNSSKVKGNARQTVNNDSNSGARSMRGRQKDAPDKEDNKPNKDDIQKRKVMMEAEAREEGEISESEAETKYRLDKEEKWLEWCSEVLNEEQETLKRLDRLQNTSVNLPKEKVLSRIRKYLLIIGDKIGEVVRQHSESYRQSRKCSRTSRMTMRLWNYVATFSNMSGEQLHDLYLKLSQDQLEGGVGPSHGANFTSIPSSKGGNSNQLHPTRNHRPTRSLQYNSESLHNNESSGSSEAWKRRRRADPDNQFDTQPLYQPPIMTNGNRLQESSSSAGILGWGPVEMRRYGNERPKRGVHPSHFPTGHGPLL

SEQ ID NO: 41690 - protein, 348 aa, Zea mays
  Clone ID: LIB3062-003-E2_FLI.pep
IPAGKAKASAREASRVPCFVLTCRGPSASPVSARPVPAPSEPAAAEAMQHEPWRPGAEPAAGAGAGPAPTTVDEASMERSMSFVKALQELKNLRPQLYSASEYCEKSYLRSEQKQVVLDNMKDYAVRALVNAVDHLGTVAYKLTDLYEEQASEITTLELKVACLNQQVRTCQTYTDKEGLRQQQMMGAARRHHNHYIVPYAGNKRMQAFSVTQADADLDPTPRPFSSARTLEWHLVSEKNSKTSRPDQSEIALGETKTTKASSSGFRLLGKESSASPLSRNVHSNITSLDIVSAGMKDQPTTRHLSSFSSLDNPRGRQIQKAPLRTKSMLAAFFVKHRSAKMKNVSVR

SEQ ID NO: 41691 - protein, 273 aa, Glycine max
  Clone ID: LIB3139-072-D10_FLI.pep
TTQLSANQTNTNKNISQQMNILGQSLHQSNNGSYSCSSPETANSSNLPTTPKAVHSDEEVNTLASAHPKKRAGRRIFKETRHPVYRGVRRRNNNKWVCEVRVPNDKSTRIWLGTYPTPEMAARAHDVAALSLRGKSACLNFADSAWRLPLPASTNAKEIRRVAAAAAVAIAAEDSRGKQLRTNAIDAVADCEVSSSDIGVDENCNNNKASQRFCDLDEITMPDAPVFEDMHEWLQTMAAEPLRSPTFVTYVNVRDVWNFVEDDAEVSLWSFTV

SEQ ID NO: 41692 - protein, 91 aa, Arabidopsis thaliana
  Clone ID: LIB3168-010-D12_FLI.pep
TCIDSHFWYRYNALDALRLISMEDDSFHCENCNGELVMECNKLISEEVVDRGDNARRRQREKVKVWLQDLEVCVYCFSGYFNESMRKTQID

SEQ ID NO: 41693 - protein, 273 aa, Arabidopsis thaliana columbia
  Clone ID: LIB3175-018-E5_FLI.pep
VRVVRSHKEKRSAYAPEEGVRYDGVYRIEKCWRKVGVQGSFKVCRYLFVRCDNEPAPWTSDENGDRPRPIPNIPELNMATDLFERKETPSWDFDEGEGCWKWMKPPPASKKSVNVLAPEERKNLRKAIKAAHSNTMRARLLKEFKCQICQQVLTLPVTTPCAHNFCKACLEAKFAGKTLVRERSTGGRTLRSRKNVLNCPCCPTDISDFLQNPQVNREVAEVIEKLKTQEEDTAELEDEDEGECSGTTPEEDSEQPKKRIKLDTDATVSATIR

SEQ ID NO: 41694 - protein, 310 aa, Arabidopsis thaliana columbia
  Clone ID: LIB3175-046-B10_FLI.pep
NIPKSMADRIKGPWSPEEDEQLRRLVVKYGPRNWTVISKSIPGRSGKSCRLRWCNQLSPQVEHRPFSAEEDETIARAHAQFGNKWATIARLLNGRTDNAVKNHWNSTLKRKCGGYDHRGYDGSEDHRPVKRSVSAGSPPVVTGLYMSPGSPTGSDVSDSSTIPILPSVELFKPVPRPGAVVLPLPIETSSSSDDPPTSLSLSLPGADVSEESNRSHESTNINNTTSSRHNHNNTVSFMPFSGGFRGAIEEMGKSFPGNGGEFMAVVQEMIKAEVRSYMTEMQRNNGGGFVGGFIDNGMIPMSQIGVGRIE

SEQ ID NO: 41695 - protein, 81 aa, Arabidopsis thaliana columbia
  Clone ID: LIB3175-044-E2_FLI.pep
RNYSQGSVFGGWDTWAVTSMTSCNDMGSKHSMFLFDVIYYRYIIYVFFFWTTYIGICILNTYFHGANCHVRLEKIEFITPF

SEQ ID NO: 41696 - protein, 351 aa, Arabidopsis thaliana columbia
  Clone ID: LIB3176-092-C11_FLI.pep
ISIGFTFLFDLGEMADWYQLAQSIIFGLIFAYLLAKLISILLAFKDENLSLTRNHTTQSEYENLRKVETLTGISGETDSLIAEQGSLRGDEDESDDDDWEGVESTELDEAFSAATAFVAAAASDRLSQKVSNELQLQLYGLYKIATEGPCTAPQPSALKMTARAKWQAWQKLGAMPPEEAMEKYIDLVTQLYPAWVEGGSKRRNRSGEAAGPMGPVFSSLVYEEESDNELKIDAIHAFAREGEVENLLKCIENGIPVNARDSEGRTPLHWAIDRGHLNVAEALVDKNADVNAKDNEGQTSLHYAVVCEREALAEFLVKQKADTTIKDEDGNSPLDLCESEWSWMREKKDSN

SEQ ID NO: 41697 - protein, 193 aa, Arabidopsis thaliana columbia
  Clone ID: LIB3177-092-F10_FLI.pep
KKSRDQANREQSSRQVTFSKRRNGLIEKARQLSILCESSIAVLVVSGSGKLYKSASGDNMSKIIDRYEIHHADELEALDLAEKTRNYLPLKELLEIVQSKLEESNVDNASVDTLISLEEQLETALSVTRARKTELMMGEVKSLQKTENLLREENQTLASQVGKKTFLVIEGDRGMSWENGSGNKVRETLPLLK

SEQ ID NO: 41698 - protein, 134 aa, Arabidopsis thaliana nossen
  Clone ID: LIB3234-050-F8_FLI.pep
KQKHSKLESLHNHRAQKSPNQEEDKNEQNSNGRYRTKRALKDLLYLMMRQASDVILVHNPRSSNSMRTLTFMVHKRLLNPYHNTISSFIPNFPINTSRFPKPRTCRPLHFHLIRVRVLNRREEIPFKIFRLDPS

SEQ ID NO: 41699 - protein, 224 aa, Arabidopsis thaliana
  Clone ID: LIB35-001-A11_FLI.pep
ASNTTCSFSYSPVLSKEKRERKKWRLLRKALIWMLYQKHLFEDLMIPDGFIEDFVFDDTAFVSGLWSLEPFNPVPKLEPSSPVLDPDSYVQEILQMEAESSSSSSTTTSPEVETVSNRKKTKRFEETRHYRGVRRRPWGKFAAEIRDPAKKGSRIWLGTFESDIDAARAYDYAAFKLRGRKAVLNFPLDAGKYDALVNSCRKRRRTDVPQPQGTTTSTSSSSSN

SEQ ID NO: 41700 - protein, 297 aa, Arabidopsis thaliana
  Clone ID: LIB35-042-A4_FLI.pep
RASMASSSRLCDSCKSTAATLFCRADAAFLCGDCDGKIHTANKLASRHERVWLCEVCEQAPAHVTCKADAAALCVTCDRDIHSANPLSRRHERVPITPFYDAVGPAKSASSSVNFVDEDGGDVTASWLLAKEGIEITNLFSDLDYPKIEVTSEENSSGNDGVVPVQNKLFLNEDYFNFDLSASKISQQGFNFINQTVSTRTIDVPLVPESGGVTAEMTNTETPAVQLSPAEREARVLRYREKRKNRKFEKTIRYASRKAYAEMRPRIKGRFAKRTDSRENDGGDVGVYGGFGVVPSF

SEQ ID NO: 41701 - protein, 286 aa, Zea mays
  Clone ID: LIB83-005-G9_FLI.pep
AWRRLIKHKHATRSTHGKQRPGLVLAPRPAKDLCWFARSLAPRRRVGVPMSCAGQAGGWLLDYALVEEEIQGSEFIYMVDDPAVSSVILGFDAPRKEDGVQDNPGAKKRSRPESSAPPGTKACREKLRRDRLNERFNELCAILEPGKPPKADKVAILSDAARLLNQLQGEAQKLKQSNESLQESIKSLKAEKSELRDEKTRLKAEKERLEQMLKGVVSHAAVAAPGPFVPHPAAVAPSFHHHPAAFAQAGKFVPYPSYPPPAAFWQWIPPTSLDTTKDPAHWPPVA

SEQ ID NO: 41702 - protein, 258 aa, Arabidopsis thaliana
  Clone ID: LIB9-038-G10_FLI.pep
LEISLLLFISFADMDGYYSLSPISVLHRIKDSFHFAVSALLANLFSALFTFFFALVGTLLGALTGALIGQETESGFIRGAAVGAISGAVFSIEVFESSLLLWQSDESGIGCLLYLIDVIASLLSGRLVRERIGPAMLSAVQSQVQLPFLFFDASFIILLNFCINNKQMGAVESQFQDHTDIFDTAISKGLTGDSLNRIPKVRITDTSPEIVSCSVCLQDFQVGETVRSLPHCHHMFHLPCIDKWLRRHASCPLCRRHL

SEQ ID NO: 41703 - protein, 214 aa, Arabidopsis thaliana
  Clone ID: LIB9-15-H9_FLI.pep
EKEEEGEKSEGKALRMSFTGTQQKCKACEKTVYAVELLSADGVGYHKSCFKCTHCKSRLQLSSYSSMEGVLYCKPHFEQLFKESGSFNKNFQSPAKSADKSTPELTRTPSRVAGRFSGTQEKCATCSKTVYPIEKVTVESQTYHKSCFKCSHGGCPISPSNYAALEGILYCKHHFAQLFKEKGSYNHLIKSASIKRSAAAAVAAGVPAASVPES

SEQ ID NO: 41704 - protein, 478 aa, Zea mays
  Clone ID: 700075606_FLI.pep
QASQPSCSAAEMAAPASTTAAAAAALLLLLLVSLAAAADMSIVSYGERSDEEARRMYAEWMAAHGRTYNAVGEEERRYQVFRDNLRYIDAHNAAADAGVHSFRLGLNRFADLTNDEYRATYLGARTRPQRERKLGARYHAADNEDLPESVDWRAKGAVAEVKDQGSCGSCWAFSTIAAVEGINQIVTGDLISLSEQELVDCDTSYNQGCNGGLMDYAFEFIINNGGIDTEKDYPYKGTDGRCDVNRKNAKVVTIDSYEDIPANDEKSLQKAVANQPVSVAIEAAGTAFQLYSSGIFTGSCGTALDHGVTAVGYGTENGKDYWIVKNSWGSSWGESGYVRMERNIKASSGKCGIAVEPSYPLKEGANPPNPGPSPPSPTPAPAVCDNYYSCPDSTTCCCIYEYGKYCFAWGCCPLEGATCCDDHYSCCPHDYPICNVRQGTCLMGKDSPLLSVKATKRTLAKPHWAFSGNTADGMKSSA

SEQ ID NO: 41705 - protein, 408 aa, Zea mays
  Clone ID: 700152286_FLI.pep
DEHGHAPHGGAHRLYGARPGVRDRQVHAVALGLRVRVLAHGHDRVREAAAPDELGVGALREHHLRRRVHGRLHGVQDRGADGGAPRVALPLDRPPAALVPQVVGVAPCDQDPGGLLGQGQQRRVARLAVLEEHQRLAHRLPRQVPVLLLPQLVREAGVRHGVLEQAHGELDAQNPSHGVVDPAHRDQAAVDVTRQDGDEVLVVVGHHDHVNASKNRSLHRVGVVRPWRAGDPVDALPIRDREALEVEPALEEACDEVVVGVHLEPVPAGVGDHDGGDALAERVQVGRHVDAHQALLVDDGVVLVDAVLRATVADEVLGARRDLVLSGGEGHAAGEVLRDVALQARDELSHGLHDTVVLAVALVAPAPPRITAHRNAWRERVLDAGGSHFKRGRGADPLHQVWIPGGSE

SEQ ID NO: 41706 - protein, 352 aa, Zea mays
  Clone ID: 700076441_FLI.pep
PLQVSSEAGSGATQQHKAAVMASAAATATMGTGKVVCVTGASGYIASWIVRLLLDRGYTVRATVRDTADPKKTLHLTALDGAKDRLHLFKASLLEEGSFDAAVHGCDTVFHTASPFYHNVKDAKAELLDPAVKGTLNVLGSCKKASIKKVVVTSSMAAVAYNRRPRTPEVTVDETWFSDPQICETNQQWYILSKTLAEEAAWKFSRDNGLEIVTINPAMVIGPLLQPTLNTSAEAILKLINGSSSTYPNFCFGWVNVKDVALAHILAYEVPSSNGRYCMVERVVHYSELVNIIRNMYPTLPLPDKCADDKPFVPPYQVSKEKIKSIGIELIPLETSVKETIESLKEKGFASF

SEQ ID NO: 41707 - protein, 310 aa, Zea mays
  Clone ID: 700152131_FLI.pep
ENVEENRRALRELLFCCPGALQYISGVILFEETLYQKTKDGKPFVDVLKEGGVLPGIKVDKGTIEVVGTDKETTTQGHDDLGKRCAKYYEAGARFAKWRAVLKIGPNEPSQLAIDLNAQGLARYAIICQENGLVPIVEPEILVDGPHDIDRCAYVTETVLAACYKALNEHHVLLEGTLLKPNMVTPGSDSKKVTPEVIAEYTVRTLQRTVPAAVPAVVFLSGGQSEEEATRNLNAMNKLSTKKPWSLSFSFGRALQASTLKAWAGKVENLEKARAAFLARCKANSEATLGTYKGDAAADTESLHVKDYKY

SEQ ID NO: 41708 - protein, 210 aa, Zea mays
  Clone ID: 700101522_FLI.pep
ERRSNITAITKTLDRLYNLDWYSSAAKNECTAAVGLKWMLNQGLMKHHQEIVEYFNRRGVSAIFLLRRNLLRRYVSILANAHDSAMKQLNGTHKAHVHSKHEAEILAQYKPTIDKKTLITELKRSDKLAADALVNFKNTRHVVLYYEDVVSNRTMLMDVLDFLRLPKRKLFSRHVKIHTKRLCDHIDNWADVTDFLKGTPFESFLNGSRR

SEQ ID NO: 41709 - protein, 272 aa, Zea mays
  Clone ID: 700105070_FLI.pep
RFVLGPFVSLSPARPTPRSPSLALPRPRIPPRPPRARTRTAMMNCAGGGDPVEDFLISGAVDDEDLAIFCDGGLGIEGVNGDACGFEQSNLGKRSRDEPCSSGLKSKACREKMRRDKLNDRFLELSSVMNPGKQAKLDKANILSDAARMVAQLRGEAEKLKESNEKLRENIKDLKEEKNELREEKVRLKVEKDRLEQQVKAMSVAPTGYVPHLPHPASYHPAAFAPFVPPQQAAGNKSAPIPAPFPGMAMWQWLPPTIVDTTQDPKLWPPNA

SEQ ID NO: 41710 - protein, 253 aa, Zea mays
  Clone ID: 700236163_FLI.pep
VTRRGGGDLYGEVAGGGGRVRLRGHGEALEAAGLLLLVLHLEEGVECVGRVAVAVHAAARGAVAQRGAVGERARVVDVVGELVHVAGVGVDDAPRPGQVLHAARRHQHRVLPLPAQVHRVLGLPVVPEDAPVPLEVARRHALHVLVQEPEQVHLNVLVRPRGRAGVRRQPPQQAVVEPLRVRVGGVLVAVGGPADLAHHDGHVAVPHRLERRHQGVEVGVEHVGVRHAAARVHQRRGAAVEEGEVHGEVVVQE

SEQ ID NO: 41711 - protein, 354 aa, Zea mays
  Clone ID: 700082248_FLI.pep
KASSSGSTVSCDQGFCAATYGGKLPGCTANVPCEYSVMYGDGSSTTGFFITDALQFDQVTGDGQTQPGNATITFGCGAQQGGDLGNSNQALDGILGFGQANTSMLSQLAAAGKAKKIFAHCLDTIKGGGIFAIGNVVQPKVKTTPLVADMPHYNVNLKSIDVGGTTLQLPAHVFETGEKKGTIIDSGTTLTYLPELVFKQVMDVVFSKHRDIAFHNLQDFLCFQYSGSVDDGFPTITFHFEDDLALHVYPHEYFFPNGNDIYCVGFQNGALQSKDGKDIVLMGDLVLSNKLVVYDLENQVIGWTDYNCSSSIKIKDDKTGTTYTVESHDISSGWKFHWHKSLVLLLVTMVWSYL

SEQ ID NO: 41712 - protein, 420 aa, Zea mays
  Clone ID: 700219955_FLI.pep
IGYSDLLEARGLSLSSVLMKQLRPSVEQALDSNLRRIEESTAALAAADDWILTYPPTGIRPLARSSGNLALQPKLSSSAHRFNSMVQDFFEDVGPLVSLQLGGSAMDGLLKIFNSYVNLLISALPGSVDDEVNLEGLGNKIVRMAETEDQQLALLANASLLAEELLPRAAMKLYSMNPVSKDSLRRRGPENQNRAAEQRAWKRKLNRMVEKLRDSFCRQHALDLIFTEEGDTRLSAEMYIDMDNTVEDPEWVPSAIFQELYAKLNKMASVAADMFVGRERFATLLMMRLTEAVMLWLSDDQSFWEEVEEGPRALGPVGLQQFYLDMQFVILFGQGRFLSRHVHQVILDIIDRAMRAFSATGMDPDRILPSDDWFIDVAQESISRIGGGRARVANGDREVNSPTASVSAQSVSSVRSLGSS

SEQ ID NO: 41713 - protein, 296 aa, Zea mays
  Clone ID: 700087712_FLI.pep
APAEFRRTYLGVRSENLVTPCSDLTPAEFRRTYLGLRKSRRALLRELGESAHEAPVLPTDGLPDDFDWRDHGAVGPVKNQGSCGSCWSFSASGALEGAHYLATGKLEVLSEQQFVDCDHECDSSEPDSCDSGCNGGLMTTAFSYLQKAGGLESEKDYPYTGSDGKCKFDKSKIVASVQNFSVVSVDEAQISANLIKHGPLAIGINAAYMQTYIGGVSCPYICGRHLDHGVLLVGYGASGFAPIRLKDKPYWIIKNSWGENWGENGYYKICRGSNVRNKCGVDSMVSTVSAVHASKE

SEQ ID NO: 41714 - protein, 102 aa, Zea mays
  Clone ID: 700088065_FLI.pep
HHGTGGNTQIIQNNWLIPRYQTMELSNDSFRVGKLGADELGGRDHVGQGGLDLRVLACLETTVRVHPEDVGVQHGEHLLDAVCDLLGGGNPRRVDVVDTRAN

SEQ ID NO: 41715 - protein, 106 aa, Zea mays
  Clone ID: 700224537_FLI.pep
PVPDYEEASSLASEAVEGAALALERVDDVHGGHGLAARVLGVGDGVADDVLEKDLEHAAGLLVDEPRDALHATPPSQPPDRRLGDALDVVAEHLPVALRAALSQTL

SEQ ID NO: 41716 - protein, 162 aa, Zea mays
  Clone ID: 700158360_FLI.pep
GEFRDHLYILLNNILRLHMHGSNCPFTLPYLLEEKPLILSMQSRVHCTENQIGISSTLLCSSHLFGAGFLPDGVVVAVGGNLKTRRDEMADVVPGPDLYDDLAVNLRHIGVAVVLKDGELARRRDAIALAHRHQGGDFVLKPPVEEVVVENARVAGVREDVG

SEQ ID NO: 41717 - protein, 113 aa, Zea mays
  Clone ID: 700163272_FLI.pep
DQQLVVGNHVHFYPCSDHILKSDDMHLLLLSTVYLICAKIISDHILKSDVMYFAVFPLPLFEVVCLICGNLLAVIKNVGYSKYFTQIVTFCNFTSSVIFLSSLTPLQQMLISA

SEQ ID NO: 41718 - protein, 102 aa, Zea mays
  Clone ID: 700163562_FLI.pep
RNSGSSAQTAIILSSFSPLKYLHQYEDIQGVVILTECAWNEAIVMWVNNRGIKNTVHLDQTRCLVQLVLNLAASRNLNHLSPNHAMGEQQHVSGTWKKGYAH

SEQ ID NO: 41719 - protein, 137 aa, Zea mays
  Clone ID: 700164537_FLI.pep
ESAMASENKVFGFEEVAKHNVTKDCWIIIAGKVYDVTPFMDEHPGGDEVLLAVTGKDATADFEDIGHSDSARDMMEKYHIGQIDASTIPAKRAHVQPQQAPSHADKDNDLPIKILQFLVPIMILGLAFGIRQYTKSE

SEQ ID NO: 41720 - protein, 354 aa, Zea mays
  Clone ID: 700165566_FLI.pep
EDQDSWNVQLFRSIDGGACFGFPSTPEAAAQSGLVSGKNNVLDRSIHDAYIHAIRRAKHFIYIENQYFLGSSFAWKADGIKPEEIEALHLVPRELSLKIVSKIEAGEHFAVYVVLPMWPEGPPASGSIQGILDWQRRTMEMMYNDISVALDAKRIDRDPRDYLTFFCLGNREVKMDGEYEPSGRPLDGTDYARAQNARRFMIYVHSKMMIVDDEYIIVGSANINQRSMDGGRDSEIAMGAYQPCHLNTKGQVARGQVHGFRMSLWYEHLGMLHDDFLNPGSLECVRRVNQMADRYWDLYAGDSLDADLLGHLLRYPVTVTKEGTVTELPGAKFFPDTQALVLGALSKLPPILTT

SEQ ID NO: 41721 - protein, 153 aa, Zea mays
  Clone ID: 700207429_FLI.pep
LHHPPRQTFCAVLYSLFLNRIENPAERGEGEGAAEEEERVEEQGLARHDGGGPAAVRPDRHQGRVAGAPDGEAEQGAAAVVRGEDEQGGPHREPATPRRVPHPFPLLDRRPLPACLRGRKPRTSLVSSACQGLPSLRLPYQTIYVHAFRLDLN

SEQ ID NO: 41722 - protein, 99 aa, Zea mays
  Clone ID: 700209552_FLI.pep
DQRGNDQTSKPFPLPSSVLQRESAAAVKMIIPVRCFTCGKVIGNKWDLYLDLLQADYSEGDALDALELFRYCCRRMLMTHVDLIEKLLNYNTLEKTETS

SEQ ID NO: 41723 - protein, 136 aa, Zea mays
  Clone ID: LIB3062-036-A9_FLI.pep
EGRRPESKNEATQYGLDMTEQQYLEHSIPWIAANDAAWRALCRYWASTEFKAKSVRHSSNRGTESYHRYGGDDHFRLAKRMEASTGAVPSDVQIYLRGHRGSDPANPDVLCSQKATDRVLGVWKCLVGSVYMDFCM

SEQ ID NO: 41724 - protein, 168 aa, Zea mays
  Clone ID: 700209977_FLI.pep
ERFDASSIAEADGARFDYFCNKVYPKIQDLDEGGLLLFVSSYFEYIRISNFLKSKEASFCRIGEATSQQDISRARLWFFEGKKKILLYSERSHFYHRYKIRGTKHLLVYSLPGRKEFYPELVNMLGESENRKCNVLFSRLDLLKLERIVGTSSARRLISSEKGMFVFC

SEQ ID NO: 41725 - protein, 132 aa, Zea mays
  Clone ID: 700213045_FLI.pep
KLTSPYAVQFEDCTFEWLYWPQAREPFNDETIEYIKSLDAEEDIKLLKIHGWELPPRCARVLRISTMLLKKGASRGFTPYDIGRILCRETVNRDSEIEVIIQEAEDAVLPWSSENMFLETLSEIMDRHLHKE

SEQ ID NO: 41726 - protein, 242 aa, Glycine max
  Clone ID: 700660706_FLI.pep
NCNNGFLSEVYCSHLFFFQRNNHGPAENTTDPSQATQNGSVDEKNNNVSPLLPKNVQNPIESDFSMTTIQKGNIPGSTTEAVPLPMQMRLDMFDPVVSSSMATQHLLEPVSNVNMLSHTQPQLWLDKRNKGNYILPHNDTMKEQEELVNESGSDSISSAYSQGILDSLTQALHSSGVDMSQTNVSVQIDVGRQENAGLIPSASTSKGHENQSVSNPAIARSGVDYCNIDSEQSSKRLRQEAS

SEQ ID NO: 41727 - protein, 455 aa, Glycine max
  Clone ID: 700831503_FLI.pep
NEHPIFSLFTPTALIYANPAIMDGLGSPSQWLRELRWDSQGLNPISLLIDCAKCVASGSIKNADIGLEYIYQISSPDGNAVQRMVTYFSEALGYRIIKNLPGVYKSLNPSKTSLSSEDILVQKYFYELCPFLKFSYLITNHAIAEAMECEKVVHIIDLHCCEPTQWIDLLLTFKNRQGGPPHLKITGIHEKKEVLDQMNFHLTTEAGKLDFPLQFYPVVSKLEDVDFEKLPVKIGDALAITSVLQLHSLLATDDDMAGRISPAAAASMNVQRALHMGQRTFAEWLERDMINAYTLSPDSALSPLSLGASPKMGIFLNAIRKLQPKLVVITEQESNLNGSNLMERVDRALYFYSALFDCLDSTVMKTSVERQKLESKLLGEQIKNIIACEGVDRKERHEKLEKWIRRLEMAGFEKVPLSYNGRLEAKNLLQRYSNKYKFREENDCLLVCWSDRPLF

SEQ ID NO: 41728 - protein, 95 aa, Glycine max
  Clone ID: 701126772_FLI.pep
ARGRSRLRKQAECDELAQRAEALKEENATLRSEVSQIRSEYEQLRSENAALKERLGDIPGVATPGKEDLRSGQNDQHVSNDTQQSGQTEVVQGVH

SEQ ID NO: 41729 - protein, 279 aa, Glycine max
  Clone ID: 701130256_FLI.pep
GSRGKQLCGGTFLNPGSWDAALLAAGTTLSAMKHLLNGDGKVSYALVRPPGHHAQPSQADGYCFLNNAGLAVQLALDSGCKKVAVIDIDVHYGNGTAEGFYRSNKVLTISLHMNHGSWGPSHPQSGSVDELGEGEGYGFNLNIPLPNGTGDKGYVHAFNELVVPSIQKFGPDMIVLVLGQDSNAFDPNGRQCLTMEGYREIGRIVHLLAKRHSAGRLLIVQEGGYHVTYSAYCLHATLEGVLNLPMPLLADPIAFYLDDETFSVQVIEAIKNYQKDKVR

SEQ ID NO: 41730 - protein, 211 aa, Zea mays
  Clone ID: 701167790_FLI.pep
GSSMTELQAVLQPQIIDANLGAIVEDCMRHYDELFHLRAMLARSDVFHLMTGLWATTAERCFLWMGGFRPSEILKMLIPQLDPLAEPQLLGMYNLQRSSEQTEEALVQGLQQLHQSLADAVGASPLSDGANVANYTALMALALDRLDTLESFYRQADSLRQQTLHQMRRILTTRQTARCFVSISEYHRRLRALSSVWASSRPPTPPSEGVV

SEQ ID NO: 41731 - protein, 252 aa, Zea mays
  Clone ID: LIB3062-036-B7_FLI.pep
SDARALRVVLSLTGVKEGLRGHVVVEMSDLDNEPLVKLVGGELIETVVAHDVIGRLMIQCALQPGLAQIWEDILGFENAEFYIKQWPELDGMRFGDVLISFPDAVPCGVKVASKSGKILMNPDDGYVLREGDEVLVIAEDDDTYAPAPLPEVNKGFLPNIPTPPKYPEKILFCGWRRDIHDMIMVLEAFLAPGSELWMFNEVPEKEREIKLTDGGLDIGGLINIKLVHKEGNAVIRRHLESLPLETFDSMSQ

SEQ ID NO: 41732 - protein, 210 aa, Glycine max
  Clone ID: UC-GMFLMINSOY029B09_FLI.pep
PTTTHFFNVLLLFDMSQLGAVLRTQREPRRSTILGLLTEQMDGVDSGTRRRRSFKERFGFIGMGCCGATWGFRSDALSVTQGEQQQQETDPECVGPAGLGSGMNLAAALAAERQLRGPQEEAVRAPGTPWRVSLMRLLEETEAEKEKEKEKEENVVGNDSVCCVCMGRKKGAAFIPCGHTFCRVCSRELWLNRGSCPLCNRSILEILDIF

SEQ ID NO: 41733 - protein, 397 aa, Zea mays
  Clone ID: LIB3062-038-C5_FLI.pep
TTSTCPHPSRPRRLMESLLASRSIRSSFSAVASIRGAASPRPSRVATLASACAGARSRALRAGHTDSILEVLAQDDMLNAKELVQWENGLSFNDIAARQGIRIRRHCRPTASLKEIEEELGAPLNILEKIIWDKEIEVAEGHAKKPLEEVIQAATKAPPSRDFYGALEAAYKRNGVPALIAEVKKASPSRGVLRENFNPVEIAQAYEKNGAACLSILTDEKYFQGSFDNLEKVRSSGVKCPLLCKEFVIDKWQIYNARSKGADAILLIAAVLPDLDIRKFLQICEELGMTALIEVHDEREMERVLKINGVKLIGINNRSLETFVVDTSNTKMLLEKHGDIIREKGILVVGESGLFTPDDVAYVQNAGVSAVLVGESLVKQECPGRAIVGLFGKELLH

SEQ ID NO: 41734 - protein, 162 aa, Zea mays
  Clone ID: UC-ZMFLMO17290D08_FLI.pep
LRPAAFTSLSLSGSLLTSRARSQALTPSDTPSPPPTYVHEAPERRRRRAALPRAVPGRRRWRGHQARHQQEAPARGGRRVRLQDVQPRLRVVPGAGRAPHQPPAGPPRPRARRARRRAGEGGYRDEAGSGGTRAREPPVPRLRPRLRHGPGARRTHAPPPRG

SEQ ID NO: 41735 - protein, 394 aa, Zea mays
  Clone ID: UC-ZMFLB73016H05_FLI.pep
FPSIFAPARPSAAAWLLSCYFNACLLSLSRLIKKTNNSLGSEGIRVGLVGSRAEILARTGGKPVRSLSMSFGGMFDGAGSGVFSYDATGGGTGMHNPGRLVPAPPLPKPGGFGATGLSLGLQTNMEGAQLGDLGRMGLIGGGGSGSGGDGDSLGRGREDEIDSRSGSDNVDGASGDEIDPDNSNPRRKKKRYHRHTPQQIQELEAVFKECPHPDEKQRMELSKRLNLESRQVKFWFQNRRTQMKTQIERHENALLRQENDKLRAENMTIREAMRNPICANCGGAAVLGEVSLEEQHLRIENARLKDELDRVCALAGKFLGRPISSGSSMSSSLQGCSGLELAVGSNNGYGPGPLGASALQPLPDLLGAGLPGPVGSAAMRLPMGIGALDVALHG

SEQ ID NO: 41736 - protein, 77 aa, Zea mays
  Clone ID: UC-ZMFLMO17038D06_FLI.pep
EPQTPKVSVHDSKGLTDPQQLAREAGRETTDVRLVLTPLVKLELYLISRNSNSSPYRWHSCEITGLFGLLSKAPQHG

SEQ ID NO: 41737 - protein, 222 aa, Zea mays
  Clone ID: UC-ZMFLMO17171C01_FLI.pep
SPMVPRDRAHSAAAATAPPTEKPVQGPIQNNKCEKKAPKKVHKSEREKRKRDKQNDLFGELGNMLEPDRQNNGKACILSDTTRILKDLLSQVESLRKENNTLKNESHYVALERNELLDETNMIRGEISDLQNEMRMRLEDNSIWSHDTSRPNLTAPHPATTVFTLQHSPHPQVIATMTLPLQQPAVVEQSYAAPRRELQLFPEAAPTEDTEPPQNEGTSNHV

SEQ ID NO: 41738 - protein, 117 aa, Zea mays
  Clone ID: 700206836_FLI.pep
SVRHRHTASKLAYAPAELGHGVGEAEHAGADHGGDIVEGGVPPLGVPPRVDGEPVVDGLLLCGPPLRVRPAPSGCQRAAGELQGVESISSVIPKLSAQSDLCKQKKSNKDLSLQVFN

SEQ ID NO: 41739 - protein, 158 aa, Zea mays
  Clone ID: LIB3356-044-C3_FLI.pep
IVAAIMSFSYSSIAVGLSLARTISGRSGTTTLTGTEIGVDVDSAQKVWLALQALGNIAFAYSYSMILIEIQDTVKSPPAENKTMKKATLMGVTTTTAFYMLAGCLGYSAFGNAAPGNILTGFGFYEPYWLIDFANVCIVVHLVGAYQVFSQPIFAALE

SEQ ID NO: 41740 - protein, 242 aa, Zea mays
  Clone ID: 700048751_FLI.pep
VAAAAVRSAAQHLQGVWLLPLVLLIPELAAAGGHQGPGTRRRRSSSSAGGAAAHGHVVVVLALVRGDHGALVVGRALHVLPHRAPRRGALVVAPRVRVPLHHLLPVLAPPEPVVQDVDVAHRLDHQPGLADRLAAAACRAALVLAVLLQRLASGSSPSLRCDPFSASSSPKVTDEFSAVAPECSGPVQPAAATAERLLLPACSSSAAPPPDELRRVDSGLGWLCAPLYTICVMRPSARAPRA

SEQ ID NO: 41741 - protein, 309 aa, Zea mays
  Clone ID: LIB3062-051-C7_FLI.pep
GDGVGGGDRLRRRDEAAAAAAREGGGTMSAVVCGKRSSSIFADELLPPSPSSPHSSHQPAAKRSRRSPSHRGGSDGLRPEALVDYLLALFPDMDPQLLEKALEASGDDLDSAIKSLNLLRLESAEAILSSTGFKPENCLQTAIQPSLEGIPNGGVDTATEHPPSVDNYQTSYNGSEWVELLVTEMRNASDINDARARASRALEALEKTIVERAGAEATQNLHKENMMLKEQLTVVLRENSVLKRAVAIQHERQKEFDERSHEVQNLKQLVLQYQEQVRTLEMNNYALTMHLKQAQQNSSIPGRFNPDVF

SEQ ID NO: 41742 - protein, 193 aa, Zea mays
  Clone ID: LIB3060-045-H12_FLI.pep
SNLSCTTKLVATTRWQRGSSKPRSYAAPPPYMAQAAGTADATDEAPLLLASSAAGSTPSPPGSAPRRNRFAFVCATLASVTTMLHGLTTDPYTCPADLTLMSGAELFMREDVGLTDGEVEVLAGSMNVFMLASILAAGWVADHLGRRRTLVLANAFLMAGALAMSLGTSFAALMAARFVTSVGSGFARVVAPV

SEQ ID NO: 41743 - protein, 246 aa, Zea mays
  Clone ID: 701159801_FLI.pep
RLPNVAPLSKCRLRLLKLERVKDYLLMEEEFVAAQERLRPQEDKAEEDRSKVDDLRGTPMSVGSLEEIIDESHAIVSSSVGPEYYVSILSFVDKDQLEPGCSILMHNKVLSVVGILQDEVDPMVSVMKVEKAPLESYADIGGLDSQIQEIKEAVELPLTHPELYEDIGIRPPKGVILYGEPGTGKTLLAKAVANSTSATFLRVVGSELIQKYLGDGPKLVRELFRVADELSPSIVFIDEIDAVGTK

SEQ ID NO: 41744 - protein, 144 aa, Zea mays
  Clone ID: 701166845_FLI.pep
PPHLLIWRVSLRVGEAGEEESGGGVELNVVEEDVLRSRSVYCDQCRVVGWSGHPVCVKRYHFIIENDSSHLSGRRRTCCLRCGTPMAAGESRCALCNFDMDGEEIEECAYLHLDDPTHLLHAVVHANGYGHLLRVNGREGGSRF

SEQ ID NO: 41745 - protein, 165 aa, Arabidopsis thaliana columbia
  Clone ID: LIB3176-019-F12_FLI.pep
HILVTKALVKFDDGVFFLCTEIATFHIRSEVINPSQTTTLATPQQSFIACIDRIRTRRLEKLKKEAFKDHRHTSLLWERSPILMTILVNERDEFQVFIMAPWSSLHFGFVTTWCSSFAHILSLLSHRHTLLRFPLTKSNCFYVYLYMRSGVCDPDIEKHVINHRH

SEQ ID NO: 41746 - protein, 307 aa, Zea mays
  Clone ID: UC-ZMFLB73113C09_FLI.pep
ANSSGGTLTSNSELGHGSSKSSISASIDSPSGVGNSLEFNFAAVERHVKNTGTNGRVDDSGNSPSSMIAFNQGEPLISLKLGKRAYFENACGGQDAKVSAASDVTSAASVVKKTKVSQQNAKNWYCQVEGCKVDLSSAKDYNRKHKVCVVHSKATKVVVAGLERRFCQQCSRFHGLAEFDQNKRSCRRRLMHHNARRRKPQADTISFNSSTMFYDTRQRTNLFFSQPLYGQVRSNAGSSWDNLGGLKFMETKHPPVHPTKTASPDELHFSALQITSAAAHTGHHHDLDGFMAFKGTSTKVLNQGVEA

SEQ ID NO: 41747 - protein, 220 aa, Zea mays
  Clone ID: LIB3116-006-A12_FLI.pep
ILPCADAAVTAEALRRSKEVNYQLVSKLNQLLSNVSNGNVPPQAGPPLYYNQSGPPVPLLCSPYSADLSDRPCAVGEVTAADAQQVRTVRYGTNKEPVRALLARCLTSRVRFGRNSHRIASAGLAALRVPRGGGVGPGRGVLDGGAPDAGDVLADGRRGRPQRRAEAAVPRPGRRGELRDRAARVPDGGPARLPPAAAGQPPGVPGAARGVGGRDARRGR

SEQ ID NO: 41748 - protein, 499 aa, Zea mays
  Clone ID: LIB3066-035-F12_FLI.pep
TRRGQTRLAREGNARKSPLSLSFSCVQHRARSVDALDGAVGRWHRQADDLAAAEAGLRHVVLVPERPLRRDDAHVQLLAEVLPLPDVGADAPHARVVERHHHRRPRPWVHLDRVPAHRVQEVVRTPRRCRPFAGPHADGEEGVAVDVDGVDALLGVLEDHLDERAELGADDVGCHLGGGRVGGRHVPDEVVLEHAVAGVEVLGELDGGFRVHVRHAVEGEPLLAVDLAAAHGELDGAGDVDLAVVVRPLRVGPRRAGRQVPAEGPALVDGPRPPAGALRQLGRRRGAGALVADHGRGAALLLDEPGGRHQQVVAGLLVRGHQERQALPDVEVQRVVVVLHGVGPLHLHQLHDVVLDADVEGRLDAHVAHAEPVRLAGLHVVHGRVRRVLLVLAVDHQPRRPPDPLAGVQVLGQHGVVLGVPVAHEHREVVGRRVEGDRDQVTAVDADQPVGARRPLHAGAGVVEEAADLVLGLPVVREVGVGLDRAHGARHAVLPRVLP

SEQ ID NO: 41749 - protein, 385 aa, Zea mays
  Clone ID: LIB3066-055-H9_FLI.pep
IFVDLEPTVIDEVRTGSYRQLFHPEQLISGKEDAANNFARGHYTVGKEIVDLCLDRVRKLADNCTGLQGFLVFNAVGGGTGSGLGSLLLERLSVDYGKKSKLGFTIYPSPQVSTAVVEPYNSVLSTHSLLEHTDVAVLLDNEAIYDICRRSLDIERPTYTNLNRLISQIISSLTTSLRFDGAINVDVTEFQTNLVPYPRIHFMLSSYAPVISAEKAYHEQLSVPEITNAVFEPSSMMAKCDPRHGKYMACCLMYRGDVVPKDVNAAVATIKTKRTVQFVDWCPTGFKCGINYQPPSVVPGGDLAKVQRAVCMISNNTAVAEVFSRIDHKFDLMYAKRAFVHWYVGEGMEEGEFSEAREDLAALEKDYEEVGAEGADDEGDEGDDY

SEQ ID NO: 41750 - protein, 475 aa, Zea mays
  Clone ID: LIB3069-006-F1_FLI.pep
IYKRFTTVRAHKILGVDCIIEALDISFGHTREDTCCMAHHSVLSTELKLSGSGGLLTGRVTTAVADVLVVRVLAEELHGVLQAPAHGLRQEEVHEHPACGGDARVEVEAAGDGDGVGEREEGHGGGAAHDPVEPRADGSSLRAQPQRVDLGAVDPGDGAQAGRERRHERQHGRDAHRAQSRGLPLGAAVHHVQGRGQREEEDGHPAAAGQQQRAAADAVQEQSGDGYEEGLARAHRHGRAQRVGLGLDARPLEHPRAVHHHAVHARGLLDEHEAEPGHEHAAHGAGRVDEQLLPHPVVARRRRRRRLAAGADDGGHVVGVGDALGDADHLLDVEQALLGLGGGVGGLLQHAARVVDAAPHDEPARRLRHGEDGDAEEDGRHGADQEHGAPAEVDGQAREGEVGDVAEEDAEVVEDLREGGEEAARGGGRHLGGVDGGDHEREADADARHEAARHEEPVVRGEAHEERAREEDGGR

SEQ ID NO: 41751 - protein, 146 aa, Zea mays
  Clone ID: LIB3279-009-G8_FLI.pep
TPLPISSTPPPSKAVSHHTPHFALYSTAPSYDHFRVFSCACYPNTSTTAPHKLSPRSTRCLFLGYSPDHKGYHCLDLLSHRVIVSRHVILDKDVFPLAGSTLPPDLDSLLEYDLDPPPMIPPLAPLPTPRAIQAPHHTRPRRPRLG

SEQ ID NO: 41752 - protein, 87 aa, Arabidopsis thaliana nossen
  Clone ID: LIB3234-033-A2_FLI.pep
LNINFKHTSIFLSSASTAAFLLFSHDPIEESFFSALFQNIFFKTLMIISWFHCKILLNRVNRHLWINVNMKNVTCSPLCISQPLPKL

SEQ ID NO: 41753 - protein, 359 aa, Zea mays
  Clone ID: 700093371_FLI.pep
AAAFPLSRSHACRPASSIANHRRACSSLVASSRPTPPMARRSSCPAPARAAYFCCCYCSCSRSRRAASAVAGVLPEQALPRASLLPRLPHPVGGAAPVGVRRRRRRDHLAGLDVRERVQVAAGVPVGLLRRVGEAAGRVHGRCHHGLLPVERGRAPGIPRRGGHGVPGHHAGAAVHAADQRVRPRLRRRRAWQGRRAGGQVPPGLVRPTPPTSTNYAILWSPTHIIFYVDDVPIRRYPRRSETFPRRPMWVYGSIWDASSWATDDGRYKADYRYSPFVARFSGCSSAPARRARRQGAARQAAARPAAAAAMRLARSRRPPCGGCSATTWSTTTASTPSETTASPQSALFTTQQLAIPTS

SEQ ID NO: 41754 - protein, 238 aa, Zea mays
  Clone ID: 700094574_FLI.pep
RPLRARRQGGRVGARTLRRHLTGQRACADRGAGDPAGRRARHRAHVRGGAEGVGRNLLRHGGEQRHVRGHPAEAVHGDARRGGQGQGHPGAGGRVHPQAPPPPDPPLRARDHVPLRRAVGGGGDAEPQRHEPGAQPVARVLLLRAGAAEHLPQDLGRPAGQGQGGAGRAAAARQGQLPGAARQVHLRRRGRRGQGGNVRQELQLLINRPAITRDTAAPPRDTCVLIMVKHVLRSIPIP

SEQ ID NO: 41755 - protein, 799 aa, Zea mays
  unsure (1)..(799): unsure at all Xaa locations
  Clone ID: 700150788_FLI.pep
LLPPHVERAMAANSTATKHAFKRILTSLIKPGGGEYGKFFSLPALNDPRIDKLPYSIRVLLESAIRHCDNFQVTESDVEKIIDWENTSPKLAEIPFKPARCILMDNTGVPAVVDLAAMRDMMPKLGCDPYKINPLIPVDAVIDHAVRVDVAGTYDALDRNEELEFQRNKERFAFLKWASNAFHNMQVFPPGSGTVHQVNLEYLARVVFNEDGILYFDSVVGTDSHTTMINSLGVAGWGVGGIEAVVAMLGQPMGMVLPGVVGFKLSGKLQDGVTTTDIVLTMTQMLRKHGAIGKFVEFYGVGVGELSLPARATIANMSPEYGATMGFFPVDQVALDYLKLTGRSDETVSMIEAYLRANKMFVDKHEPETERVFSSYLELDLSEVEPCVSGPKRPHDRVPLKEMKSDWHACLDNEVGFKGYAVPKEQQGKVVKFDFHGRPAEIKHGSVVLAAICSSTNTSNPSVMIGAGLVAKKACELGLEVKPWVKTSLTPGSVVATEYLKHSGLQDYLNQQGFHVAAHGCATCVGNSGDLDGSVSAAITENDIVAAAVLSANRNFEGRVNPLTRANYLASPPLVVAYALAGTVDIGFEEEPIGVGKGGKEIFLRDIWPSNQEIDEVVESSVQTHLFKKVYDSIMERNPRWNQLPVPKEALYPWDDRSTYIRKPTYLEGMSMTPPGPPTVTEAYCLLNLGDSITTDHISYSGKIPEGTPAAKYLLEYGVEPKNFSSYGGRRGNNEVVMRGAFANMRIVNKLLNGEAGPWTIHVPTGEKLYVYDAAMKYKSEGHDMVIIAGXZYXSGKLX

SEQ ID NO: 41756 - protein, 387 aa, Zea mays
  Clone ID: 700163879_FLI.pep
SSGATRPTNAMKEEGGGGDAGFVRADQIDLKSLDEQLERHLTRAWTMEKRKEEASAGAGAGARQHQQSRRPRREDWEIDPAKLVVKGVIARGTFGTVHRGIYDAHDVAVKLLDWGEDGHRSEQDIAALRAAFSQEVSVWHKLDHPNVTKFIGAIMGARDLNIQTENGHIGMPTNICCVVVEYLPGGALKSFLIKNRRKKLAFKVVVQIALDLARGLSYLHSKKIVHRDVKTENMLLDKTRTVKIADFGVARLEASNPSDMTGETGTLGYMAPEVLNGNPYNRKCDVYSFGICLWEIYCCDMPYPDLSFSEVTSAVVRQNLRPEIPRCCPSSLSNVMKRCWDANPDKRPEMAEAVSMLEAIDTSKGGGMIPVDQRPGCLACFRQYRGP

SEQ ID NO: 41757 - protein, 122 aa, Zea mays
  Clone ID: 700164440_FLI.pep
AILYAVSDQEGASEDDIRQIPKYKFRKMEEPEKQSVGVPGSSGGIMIECGTNQPIEKVLAAEDAECCICLSAYDDGAELRELPCGHHFHCVCIDKWLHINATCPLCKYNVRKNSSSSGSEEV

SEQ ID NO: 41758 - protein, 282 aa, Zea mays
  Clone ID: 700210855_FLI.pep
IVEKCTLKLVDEYKHMLCQATEPLSTFLQYITYGHMIDNVVLIVTGTLHERDVNELLEKCHPLGMFDSIASLAVAQNMRELYRLVLVDTPLAPYFSECITSEDLDDMNIEIMRNTLYKAYLEDFYKFCQKLGGATAEIMCDLLSFEADRRAVNITINSIGTELTRDDRRKLYSNFGLLYPYGHEELAVCEDVDQVRGAMEKYPPYQSIFSRISYGESQMLDKAFYEEEVKRLCLSFEQQFHYAVFFAYIRLREQEIRNLMWISECVAQNQKSRVHDSVVFIF

SEQ ID NO: 41759 - protein, 562 aa, Zea mays
  Clone ID: 700211163_FLI.pep
ASLLLDATPSPTSPSRAAAARHCARDLAGGPRGLVACSAMASPPPALEILVREPDGVTVWSGPPYPPGTTSPPQRLPKTACSATSFSTDGARLLATVASASATVYDCRTLAVVKCFELPGLLAAALSPTGAYLQTFQKSSSPQEKNVTVWHVDTAAALYQHYQKSMSKTTWPMVQFSADESVACRMMPNEIQFFDPKDFAKGILYRIRMPGIATMKLATAPGSHVAGFVPEAKGVPASVQIFSCNKDAQNQVVARRSFFRCSTVQLQWNKGSTGLLILAQADVDKTNQSYYGETKLNYLTTDRAFEGIVPLKKDGPVHDVQWSSSGSEFAVVYGVMPPKATIFNKKCNPLVEFGEGPYNTIRWNPKGRFVVLAGFGNLPGDMAFWDYSEKKLVAKTKAECSVTSEWSPDGRHFMTATTAPRLQIDNCIKIFDHNGSLQFKKMFERLYQADWKPEAAERFTDIADLTTSLSTLKIEETKKQVSAQGSKSAQTSSKAPAITAPKPTAYRPPHAKGSAELQDKLFGGLAPAGGEMSKNALRNKKRREKQKEKKAAEASGSPADES

SEQ ID NO: 41760 - protein, 315 aa, Zea mays
  Clone ID: 700219785_FLI.pep
KNASGCNLAVDIWSLGCTVLEMATSKPPWSQYEGIAAMFKIGNSKELPPIPDHLSEEGKDFIRQCLQRDPSSRPTAVDLLQHPFVQNAPPLEKSSASHPLEQLTAISCRTNSKVVEHARNMSSLGLEGQSILQRRAAKFSLPNSDIHIRSNISCPVSPCGSPLLRSRSPQHQNGRMSPSPICSPRTTSGASTPLTGGSGAVPLNHVRQPAYRNEGFTVTSRGFDDHMPSWPVDPVHGRFIRVQQIPVGRQERVISEVDILSSQYGKMRHANVWDLHDRPLPSERSSQQCFGNHAKLKPSLDLRSGPRHPGRNHGH

SEQ ID NO: 41761 - protein, 269 aa, Zea mays
  Clone ID: 700240117_FLI.pep
AHTLRRQRQRDGGRHCGGHPSSGQVRRRGGSLVRGIIGRVVVGRRAICRFIVRGRGGRRSAGGLLLALLLGPLWSRRRREISGFGLEQLLRLQELGASVDGERVVVPDGGLDGGGDDGGVERDGVVLALRFVGVVLLGDAGGGERGDLALVGLEELHGVVVRHGVVQQDGRLGLGREVLELGHEGGHRRVDGAEDGERGVLGAVEGVEDLGVGGEEAREALAVLLGEDVGEVDGRRRGDGCLGLRGGQDAADLEHRVVVAVALDLLHVG

SEQ ID NO: 41762 - protein, 250 aa, Zea mays
  Clone ID: 700262819_FLI.pep
FARVYTAGRELLYLVDRVRVELERLLPDELLYSFFGERWLLEVEAERRRTDGLVVYLVKGRQVWVAQSLINCDMIPRKEKQQQDRFTSNPLAGIEHEHPLKQVHGAARHGGEPHAELLLGMLRQGPHVSAGVVAPEEPEAGVVRKQGLSGDHLAEDAAHGPHVDGLGVLGAVEQELRRPVPPRDDVLHHEVGLRRGPRQPEVPDLQVALGVQQHVARPQVPVQDVRRVHVLEPAEQLVHEVLHRPVVVKE

SEQ ID NO: 41763 - protein, 428 aa, Zea mays
  Clone ID: 700552327_FLI.pep
DHQKQAKAHLLEVEPFEHAFGPKGKRKRPKLTALDYESLLKRADDSQDVFEQKYASSKLPREEEEDGLRDLVRHTMFEKGQSKRIWGELYKVIDSSDVVVQVLDARDPMGTRCYHLERHLKENCKHKHLVFLLNKCDLIPAWATKGWLRTLSKDYPTLAFHASINKSFGKGSLLSVLRQFARLKNDKQAISVGFVGYPNVGKSSVINTLRSKSVCKVAPIPGETKVWQYITLTKKIFLIDCPGVVYQNNDSETDIVLKGVVRVTNLADAAEHIGEVLSRVKKEHLQRAYKIQDWSDDNDFLVQLCRTTGKLLKGGEPDLTTAAKMVLHDWQRGKIPFFVPPPQQSDGGASESAEQPIGITKEDGVSSDRTAAAMKAIAGIISSQQNMNVPCHKENNADNEDTENADNEDIESSDNEDNDDIEPAERSE

SEQ ID NO: 41764 - protein, 323 aa, Zea mays
  Clone ID: 700552474_FLI.pep
AAAAALSAEDRAGLVNALKDKLQSLAGQHADVLETLSPNVRKRVEFLREIQSQHDEIEAKFFEERAALEAKYQKLYEPLYTKRYGIVNGEVEVDGVCDEPASENTVEGKEPDAKGVPDFWLTAMKTNEVLSEEIQERDEAALKYLKDIKWSRIEDPKGFKLDFFFDTNPFFKNSVLTKTYHMVDEDDPILEKAIGTEIEWYPGKNLTQKILKKKPKKGSKNTKPITKTEDCESFFNFFNPPQVPEDDDDIDEDTADELQSQMEHDYDIGTTIRDKIIPHAVSWFTGEAVQGEDFGELGDDDEDDDDEDDDEDDEDEEEDDDEE

SEQ ID NO: 41765 - protein, 439 aa, Zea mays
  Clone ID: 700552571_FLI.pep
TMDYIDTAYVLMSLVLFLIVLVGGRGDGLTSSLMWLRDRANPGFQSLNFSGLGMSPWMQPRLDNSLLGLQSDMYQTIAAAAAFQSTTKQVPPSAMQFQQPQNIADRSALLSSQILQQVQPRFQQIYPQNLNENKIQGHTQPEYLQVQQQLQRCQSFNEQKPPMHPQQQQQEPQKQQCVQTPQDQQMQEQKHLHNFHSLPDALSAFSQLSPATHSPPSALQTVPAFSHQQNFPDTNISSLSPSTGPSMHGMLGRLPSEAASSLPCVAMNAPVSVSDPWSSKRVAVESVNPCRPHVSPHIEHLDMATCNMPQSSALAPLPGRECLVDEDGCSDPQNHLLFGVHIDSHSLLMQGGIPALQNDNSSGTIPYSTSNFLSPSDNDFPLNQPLRSAGCLDESDYLPCAENAEQANQQFATFVKVSDVSISWTICSTKSCSILNSFP

SEQ ID NO: 41766 - protein, 424 aa, Glycine max
  Clone ID: 700737107_FLI.pep
TKMVDLHWKSKMPSSKTPKLSLSDNKSLPSLQLPFRTTDISPAAPSVCAAYDYYLRLPQLRKLWNSTDFPNWNNEPILKPILQALEITFRFLSIVLSDPRPYSNHREWTRRIESLIMHQIEIIAILCEEEEQNSDTRGTAPTADLSSSNSSVSRSYSEASLLPRLATWYKSRDVAQRILLSVECQMRRCSYTLGLGEPNLAGKPSLLYDLVCKPNEIHALKTTPYDERVENHENHAVHATHQIAESWIHASRKVLERIADAVLSRTFLKAAEDCYAVERIWKLLAEVEDLHLMMDPDDFLRLKNQLSVKSSSGETASFCFRSNELVELTKMCRDLRHKVPEILEVEVDPKGGPRIQEAAMKLYVSKSEFEKVHLLQAMQAIEAAMKRFFYAYKQVLAVVMGSSEANGNRVGLSCDSADSLTQIF

SEQ ID NO: 41767 - protein, 165 aa, Glycine max
  Clone ID: 700738944_FLI.pep
RWIIWCWWRPSWSCWLPFFVFFLCHFLEQVKGDDNDDRWPRSREGFMESSGGCDVAETRERARGTQLVRHKRRNFRAFRQVVPSAVVQPAESGGAAPSVHSGGGQDDHKAHAIHGNKWATISRLLPGRTDNAIKNHWNSTLRRRRAVESSSSYSLSAGETSLFLV

SEQ ID NO: 41768 - protein, 200 aa, Glycine max
  Clone ID: 700754890_FLI.pep
ALTMAATISSFTNLRSNLTVSEASPKESPLSSPLNLNLTDARRLLMSLAPTAPASREPDEAVMVAEAMAGDEEVVEVATVEAVATVVVVATVEAVVTVVVEEAVEAVLATTVVNRDIWLGIAVEAVVGTGTEEVVVVADMEAPVAGGTLVVEAAAAAEEAATAVESLGILPEIAHQVLVEFTVRVVYVLRIVLSFYFNMS

SEQ ID NO: 41769 - protein, 217 aa, Zea mays
  Clone ID: 700804682_FLI.pep
ADPDRPETLDGRERADPPQEGRRRPRGLPATRAGAREGRAAAGEDVQQLSVKPNATVEGRAVGAPDDVQRMRHEAQARDQVVSRAAVRPGRTHQEGARARQEEEEGGQEDVLREQRRPAVVGPAREAVRPLPVLQDPAVEGGASGAQDPVQRLRRQVQVRQAAARVPARQQPHLRELLALQLPQEGHADAAGRRAAAVRPTSPGIYRWKRVRGSLRS

SEQ ID NO: 41770 - protein, 219 aa, Zea mays
  Clone ID: 700805836_FLI.pep
LACKNHLQTTQTENASSPASIFSNFSLLSSHHSHPSCPHAAERAYPSSTLLWGRRWTLMERSRPGAAPKPSPEEEVAAEGHAHGDDVTGQEEEEEATPVVLKKGPWTASEDAMLMDHVRHHGEGNWNAVQRMTGLLRCGKSCRLRWTNHLRPNLKKGSFSPDEELLIAQLHAQLGNKWARMAAHVSTLSFALDNKFIYGEWRRPADVTDVCEFVPRANS

SEQ ID NO: 41771 - protein, 229 aa, Glycine max
  Clone ID: 700833392_FLI.pep
ENKKKRRKMSGRVSGKVKWFNDQKGFGFISPDDGSDDLFVHQSQIKSDGFRSLAEGESVEFAIESESDGRAKAVDVTGPDGASVQGTRRGGDGGRSYGGGRGGGGGGYGGGGGYGGGGGYGGGGGYGGGGRGGGGGACYNCGESGHLARDCSGGGGGDRYGGGGGGGRYGAAVAGGTLVVEAAAAAEEAATAVESLGILPEIAHQVLVEFTVRVVYVLRIVLSFYFNMS

SEQ ID NO: 41772 - protein, 425 aa, Glycine max
  Clone ID: 700846348_FLI.pep
QRERESVKVGMAKKAVLIGINYPGTKAELRGCINDVWRMHRCLIERYGFSEDDITVLIDTDESYTEPTGKNIRSALTRLVRSAEPGDVLFVHYSGHGTRLPAETGEDDDTGYDECIVPSDMNLITDDDFREFVDGVPRGCRITIVSDSCHSGGLLEEAKEQIGESTKGEEEQSSSGFGFSSFLHRTVEDAIESRGFHIPSALRHNRGRDDDGDEAQNRDIELPDGGYVKNRSLPLSTLIDILKQKTGKDDIDVGKLRPTLFDVFGEDASPKVKKFMNVIFNKLQHGSDESGGGILGLVGGLAQEFLKQKLDDNDEGYAKPALETKVESKHEAYAGPTKRGLPDGGILMSGCQTDQTSADASPAGNAASAYGAFSNAIQAIIEETDGAITNQELVQRAREKLKNSGFTQKPGLYCSDHHVDAPFVC

SEQ ID NO: 41773 - protein, 240 aa, Glycine max
  Clone ID: 700888221_FLI.pep
GGATVEEVSAVPPLEISINDSSQLTLSFRGQVYVFDAVTPDKVQAVLLLLGGNELTSGSQCAELSSQNQTGEEEYPAKCSLPQRAASLNRFRQKRKERCFDKKVRYSVRQEVALRMHRNKGQFTSSKNQDGTNSWGSDQESGQDAVQSETLCTHCGISSKSTPMMRRGPSGPRSLCNACGLFWANRGTLRDLSKRNQEHSLAPPEQVDEGSNNNDFDCRSGIPAQHNNLVNDNKALVSDR

SEQ ID NO: 41774 - protein, 187 aa, Glycine max
  Clone ID: 700999286_FLI.pep
ELQRQERNLITMAGSSSSAAVSLLPVIRHDVFLNFRGEDTRDNFISHIYAELQRNKIETYIDYRLARGEEISPALHKAIEESMIYVVVFSQNYASSTWCLDELTKILNCKKRYGRVVIPVFYKVDPSIVRHQRETYAEEFVKYKHRFADNIDKVHAWKAALTEAAEIAGWDSQKTRSLIITCSFEMF

SEQ ID NO: 41775 - protein, 213 aa, Glycine max
  Clone ID: 701042534_FLI.pep
TQPNTTASKQTNNTVFLVSIFFRPPQMAAEHDSCCSRCVTFLITIGLTALFLWLSLRVDEPKCYLDYIYVPALNKTLNSNSTHNKNTTILFALKLTNGNKDKGIQYDDVLLSFRVFESVNLTRPLGNATVQRFYQGHQKKATKHGNFSGGGGNLTAAVAGRMWYRVDYATAVKYKILFWYTKRHRLWGGANVEIGDSGMKVYRKAVRLGGKNP

SEQ ID NO: 41776 - protein, 112 aa, Glycine max
  Clone ID: 701043406_FLI.pep
EREGKKKTCVSWEAMSTTESQRYKGTVKWFNEEKGFGFITPEDGGSDLFVHYSAIQTDGGFRTLSEGQSVESLVTQDDSGRAAAVNVTTTTVKSSDSGNGENSGGDAANVEK

SEQ ID NO: 41777 - protein, 206 aa, Glycine max
  Clone ID: 701043646_FLI.pep
KKRRKMSGRVSGKVKWFNDQKGFGFITPDDGSEELFVHQSQIKSDGFRSLAEGESVEFAIESESDGRAKAVDVTGPDGASVQGTRRGGDGCRSYGGGRGGGGGGYGGGGGYGGGGGYGGGGGYGGGGRGGGGGACYNCGESGHLARDCSQGGGGDRYGGGGGGGGRYGGGAGGRYGGGGGGGGGGGSCYSCGESGHFARDCPSSAR

SEQ ID NO: 41778 - protein, 230 aa, Glycine max
  Clone ID: 701053515_FLI.pep
TIAKAIYNKIGRNFEGRSFLEQIGELWRQDAIRFQEQLLFDIYKTKRKIHNVELGKQALKERLCSKRVFLVLDDVNDVEQLSALCGSREWFGSGSRIIITTRDKHILRGDRVDKMYTMKEMDESESIELFSWHAFKQASPREGFTELSNDVIEYSGGLPLALTVLGCHLFDMKIIEWKTVLDKLKRIPHDQVQKKLKISYDGLSDDTERDIFLDIACFFIGMDRNDAMCI

SEQ ID NO: 41779 - protein, 210 aa, Glycine max
  Clone ID: 701055684_FLI.pep
VCENKKKRRKMSGRVSGKVKWFNDQKGFGFISPDDGSDDLFVHQSQIKSDGFRSLAEGESVEFAIESESDGRAKAVDVTGPDGASVQGTRRGGDGGRSYGGGRGGGGGGYGGGGGYGGGGGYGGGGGYGGGGRGGGGGACYNCGESGHLARDCSGGGGGDRYGGGGGGGRYGGGGGGRYGGGGGGGGGGGSCYSCGESGHFARDCPSSAR

SEQ ID NO: 41780 - protein, 91 aa, Glycine max
  Clone ID: 701100913_FLI.pep
RETTDMDTGGNSLPSAPDGVKRKVCYFYDPEVGNYYYGQGHPMKPHRIRMTHALLAHYDCYNTCRSISHFLLETGTFVDFMLMIMLHSFEA

SEQ ID NO: 41781 - protein, 319 aa, Zea mays
  Clone ID: LIB3062-011-B12_FLI.pep
MSKVAGSSMLQAAPAVKANSAVSQTKPRRAKYRQVNAADKSPCPVKVNQGNSEAVSKESLSCGEMLWQLSVAACGLQQREKIVPTSVNFFTGFRKNKFSSSDVNEGMPEKAANTESTLSEQPIADHMQDDYWADILINVEEPLSNLKKKIDESKKRVNKKAPQVKKPPVNSLSTAENVDEPRSEGNQDTGNEEQLRNETKLFSANGSQLNAGTKFGQEMENCFLSGLVLHFSRPCAVPSQCDLIKIFSQYGPVNEVKADVANSASSAQVIFKRRMDAEAAFAGAGKISALGPALVSFRLTDFPASASGNKASHVASKSE

SEQ ID NO: 41782 - protein, 242 aa, Glycine max
  Clone ID: 701103204_FLI.pep
VISLVSLANAGFSEIRGKHLNYSKFWNANPSAEKQVKLSSKAGMLLLYTPAFLAGLASFWIFPHQGLRSTLLQSAVTLHFFKRVFEVVFIHKYSGAMLLDSAIPITLSYFLSTATMIYAQHLTQGLPEPPIDLLYPGIVLFVVGIIGNFYHHYLLSNLRGKGEKEYKIPKGGMFELVICPHYLFEIIEFYGFSFISQTLYAFSFTVGTTLYLLGRSYSTRKWYLSKFEDFPEHVKAIIPFVF

SEQ ID NO: 41783 - protein, 139 aa, Glycine max
  Clone ID: 701105917_FLI.pep
LPFTNTNKATLSFYMAYHHNPQELPLHHFTDQQQHHNQPLVDNSLLSDPASKPASDPHQPAPNWLNNALLRTHYTDNNNNNNNNVNAANNNTNNGTNFLNLHTSTSDSGQWLARPILNRNHSEVIDDVTGAGDSNMAAA

SEQ ID NO: 41784 - protein, 364 aa, Glycine max
  Clone ID: 701108636_FLI.pep
ITSVLMAANNAFQTNPAAICFYLRSFHLRRTMSEAPPSQPPPPTANASPPPYWCYHCEKRVSIETLANLPDVVCGECKNGFVESIHTPSRSRSPSASSDDPYFGSQFLQVLRLIAQSARDDDASPPPPPSRSPENDFLRIELGGWDNDEENDNDNNDDEEFEEHEEAEDRSGNEDPHGRDDEDLRRRRRELLRLRIRDLATRTRSMRNRILDWAEILMGLEDNSIEFRLQLPESDRYVGNPEDYVDAAEYEALLHTLAESDGGGRRGAPPASKAAVEALPTVKVASESEAVACAICKDLLGVGDLAKRLPCGHGYHGDCIVPWLSSRNSCPVCRYELPTDDKEYEEERVVNSASSSGGDGSAIA

SEQ ID NO: 41785 - protein, 233 aa, Glycine max
  Clone ID: 701133186_FLI.pep
VSRIPYPSALRHNRGRDDDGDEAQNRDIELPDGGYVKNRSLPLSTLIDILKQKTGKDDIDVGKLRPTLFDVFGEDASPKVKKFMNVIFNKLQHGSDESGGGILGLVGGLAQEFLKQKLDDNDEGYAKPALETKVESKHEAYAGPTKRGLPDGGILMSGCQTDQTSADASPAGNAASAYGAFSNAIQAIIEETDGAITNQELVQRAREKLKNSGFTQKPGLYCSDHHVDAPFVC

SEQ ID NO: 41786 - protein, 49 aa, Glycine max
  Clone ID: 701146919_FLI.pep
CLLFELHVLFKQFHRSPLLLLVFQQPHCLSFTFFLCNHLQISFFLRMVY

SEQ ID NO: 41787 - protein, 111 aa, Glycine max
  Clone ID: 701147318_FLI.pep
GMIEGVSVEKRGKQKKETDLETCSQRGALGFASLKATSISDLILSKAIVSSLGHRFAAEFRSPSSLCSAFDPSDTAAEPPSAFSVAVSGKVEISSIGYNEITATKLSKGKV

SEQ ID NO: 41788 - protein, 202 aa, Zea mays
  Clone ID: 701177470_FLI.pep
RIISIWLTHTAEGDSSHVRPRPRLISITFRRMGRARTCPAPGPTESSGGRAHGHATTKDAVAPSELALPGTAVRSLHLTPTTRRPCSCRRHPPSSNSSGPRPPSRSLPRRRHGVPRPADRRCSHCSRKSAPCRRGWTGASSSPCCSAGGRTSARGWRPASGSSSARSSWRCLASRPCPACPGRQGTACAPPRSMELTGCELI

SEQ ID NO: 41789 - protein, 98 aa, Zea mays
  Clone ID: 701182729_FLI.pep
GKVTGILYMNISMLIATHRLSIQVTVNNTMYHKSCFKCCHGGCTISPSNYIAHEGKLYCKHHHIQLIKEKGNFSQLENDHEKTSQAGSLEEDDQYSCS

SEQ ID NO: 41790 - protein, 142 aa, Zea mays
  Clone ID: 701183093_FLI.pep
PDQLNFLFRSSGLRFSNLYCDPLIIPGGHKITARQRWQPTPMQLQILESIFDQGNGTPSKQKIKEITAELSQHGQISETNVYNWFQNRRARSKRKQAAASLPNNAESEAEADEEPLADKKPKSDRPPPPPPPIQDNTKATGA

SEQ ID NO: 41791 - protein, 250 aa, Glycine max
  Clone ID: 701205017_FLI.pep
VRVKGENKKHRSTQPQSTFVSFFALPNCTVFSLSLCSVFVCRTTLKLKPYSSVFVIPTMMPPSQPPHWAPSPTPILSKSFLPPTSNSPAVDFTPPLIAMVVVVAAAFLVVTYSRLIARHLRPPVHRLLRRFRRRRFLPSSVGDLESLPYDSPFDGPHVFSPYGLDETVIKTIPFSLYTAKYDARFDESRYDCAVCLLEFEDEDYVRTLPVCSHTFHVDCIDAWLRSHANCPLCRAGVLCTDSPFTPMMAA

SEQ ID NO: 41792 - protein, 206 aa, Glycine max
  Clone ID: 701205560_FLI.pep
KKRRKMSGRVSGKVKWFNDQKGFGFISPDDGSDDLFVHQSQIKSDGFRSLAEGESVEFAIESESDGRAKAVDVTGPDGASVQGTRRGGDGGRSYGGGRGGGGGGYGGGGGYGGGGGYGGGGGYGGGGRGGGGGACYNCGESGHLARDCSGGGGGDRYGGGWWWWQNMEAGGGGRYVGGGGGGGGGGSCYSCGESGHFARDCPSSAR

SEQ ID NO: 41793 - protein, 192 aa, Arabidopsis thaliana
  Clone ID: ARABL1-043-B10_FLI.pep
ISHGGDKQSPILFSSMPIAKPINQNTTVPYPPQHYSKPPLVIILTVILLVVFFIGFFAIYFCKCFYHTLTEAWNHHYHNGLPENQIQAQQEPVQPPVNPGLEPHIIQSYPLFPFSSVKDLREDKYGLECAICLLEFEEEHILLRLLTTCYHVFHQECIDQWLESNKTCPDKFSRSKTTGHSIVRNKPEEEDR

SEQ ID NO: 41794 - protein, 143 aa, Zea mays
  Clone ID: LIB3062-031-F6_FLI.pep
TCLDASAGRRQTASEIRLPMFSACRWHAKQMWELNANGNLVSSYSRLCATVESRDEGGTSGGRAWIATGSEGEIYLAFFNLDSMSRKMTVEISDLGKVLGRNLLEKNPCSYTEVWSGKNFGPVKEEISAVVHSHGSMVFEIIC

SEQ ID NO: 41795 - protein, 470 aa, Arabidopsis thaliana
  Clone ID: LIB146-012-C11_FLI.pep
LDSTMNGALGNSSASVSGGEGAGGPAPFLVKTYEMVDDSSTDQIVSWSANNNSFIVWNHAEFSRLLLPTYFKHNNFSSFIRQLNTYGFRKIDPERWEFLNDDFIKDQKHLLKNIHRRKPIHSHSHPPASSTDQERAVLQEQMDKLSREKAAIETKLLKFKQQKVVAKHQFEEMTEHVDDMENRQKKLLNFLETAIRNPTFVKNFGRKVEQLDISAYNKKRRLPEVEQSKPPSEDSHLDNSSGSSRRESGNIFHQNFSNKLRLELSPAVSDMNMVSHSIQSSNEEGASPKGILSGGDPNTTLTRREGLAFAPEALELADTGTCPRRLLLNDNTRVETLQQRLTSSEETDGSFSCHLNLTLASAPLPDKTASQIAKTTLKSQELNFNSIETSASEKNRGRQEVAVGGSQANAAPPARVNDVFWEQFLTERPGSSDNEEASSTYRGNPYEEQEEKRNGNMMSRNTKNIEQLTL

SEQ ID NO: 41796 - protein, 288 aa, Zea mays
  Clone ID: LIB148-025-F2_FLI.pep
AAAARRRALPPLAGRALPFSPLTTARAPRRRGLGTVTCFVPQDTEHPAAAPAPVAPVPETALDEEARAAAARRVAERKARKRSERRTYLVAAVMSSLGVTSMAVAAVYYRFSWQMEGGAVPVSEMFGTFALSVGAAVGMEFWARWAHRALWHASLWHMHESHHRPREGPFELNDVFAIVNAVPAISLLAYGFFHRGLVPGLCFGAGLGITLFGMAYMFVHDGLVHRRFPVGPIANVPYFRRVAAAHKIHHMDKFEGVPYGLFLGPKELEEVGGLDELEKELARIGRTI

SEQ ID NO: 41797 - protein, 281 aa, Zea mays
  Clone ID: LIB3062-032-A6_FLI.pep
LRLLISGGAPLSNEIEEFMRVTTCAYFIQGYGLTETLGPSTVCYIDDMALVGSAGVPATYTEIRLEEVPEMGYDPLGVPSRGEICIRGKSLFAGYYKSPELTNEAIVDGWFHTGDIGEMTPDGILKVIDRKKNIFKLSQGEYVAVEYLEKVYGFPPLVEDIWVYGDSFRSSLVAVVNPHQENTMKWAESNGYKGSFDEICKLEGLKEYILKELAAVAQKNKLRGFEYIKGVVLDPVPFDIERDLVTATMKKKRKNMLNYYQSEIDTIYKKLEAQKNAARTK

SEQ ID NO: 41798 - protein, 150 aa, Zea mays
  Clone ID: LIB148-043-F4_FLI.pep
RWPATMVAGLGHKTTLISTGLTRSCGVTSTSVALVLVSGHSALNSAASSSWRSGARGSRQRGPRRIPAWGTAARPPAAACHHDRHVEAVHQRLTLYAAAPPGPPTAPRSPVPPSSPVRRLSRNGPAAGASERVISVVRVVVAPGLCHHAA

SEQ ID NO: 41799 - protein, 172 aa, Zea mays
  Clone ID: LIB189-002-B2_FLI.pep
ASSVVERRGRTEKQVIFEDSEHSSTYCLAFKVINPSHLPPLKELQKLMRIQSLRCHALYNHGATRLSVIPIHASRSQALRYLSICWGIELPDAVVIVGETGDSDYEELFGGLHKTVILKGGFNTPANRIHTVRRYPLQDVVALDSSNIIAIEGFSTGDIRSAMQQKLGIPTR

SEQ ID NO: 41800 - protein, 395 aa, Zea mays
  Clone ID: LIB3062-042-B6_FLI.pep
LALLMTLEQGKPMKEALGEVNYGASFIEYFAEEAKRIYGDIIPPTLSDRRLLVLKQPVGVVGAITPWNFPLAMITRKVGPALACGCTVVVKPSEFTPLTALAAADLALQAGIPAGALNVVMGNAAEIGDALLQSTQVRKITFTGSTAVGKKLMAGSANTVKKVSLELGGNAPCIVFDDADIDVAVKGSLAAKFRNSGQTCVCANRILVQEGIYEKFAKAFIQAVQSLKVGNGLEESTSQGPLINEAAVQKVEKFINDATSKGANVMLGGKRHSLGMSFYEPTVVGNVSNDMLLFREEVFGPVAPLIPFKTEEEAVHMANDTNAGLAAYIFTKSIPRSWRVSESLEYGLVGVNEGIISTEVAPFGGVKQSGLGREGSKYGIDEYLELKYICMGNLG

SEQ ID NO: 41801 - protein, 248 aa, Zea mays
  Clone ID: LIB189-030-E11_FLI.pep
YYDGNSLQAAGGANTGVAWCLQDELLAVNVKRLRRGQVRLLHAAEVGDGADGCADGPLQIAAPAAVLHDGPHGAEQVAVGDPARLALQRPDEAVRHGPDDRRVGVGHHGEVAFALAVSADEHGVASAGALPGARRRALVLPLPEPVPGHAAQVGEVQDRGAVAGVHHGVQPGAVHQRAHDDLVDLVVQDGPALERVQRADGLVVPVRLVAVVVRHLRADAREVEHQGVAVAAALHQPVHRHPDVLLRG

SEQ ID NO: 41802 - protein, 399 aa, Zea mays
  Clone ID: LIB3062-056-D10_FLI.pep
HHHGLAQAFPSPSSCGGDEASSAAGAAACDAAFVRVLPGGSRDRPGPFRLDGRRLARGRARERRGHGAGVPRAARHEPDGGGGGTGPAAGAAALPAAASGGEGEGEGEEASGSGGGGDDYDDVDGVVGARAAVGGSDAHGARAASGVPSPGVAGGGGGPGGWSHGTAAAAHGGGVPAPDLRGELHIGGLGGGAAPPEEPGASAHRAAPPARRRPLRGARRRVRRPPPGAAQAAHQDKECGRVGSGDSMGAGEEGGRGRARRRLQHHHHHHQRSIHSMCMVLRLRLHIIGGSGSSSAPSDGRRLRPRLCLRQRPPLGPFQVGPLPHIRARPVAGFDQVRAKVGDGGVQQNEGHHPCRRRLLLQPFSNHGVACRHNAALASPLATLRAIDKDACMLKINIP

SEQ ID NO: 41803 - protein, 65 aa, Homo sapiens
  Clone ID: LIB2-20-H12_FLI.pep
KDKFGKSNKRKGFNEGLWEIENNPGVKFTGYQAIQQQSSSETEGEGGNTADASSEEEGDRVEEDG

SEQ ID NO: 41804 - protein, 295 aa, Zea mays
  Clone ID: LIB3066-011-G6_FLI.pep
HFQFDFDRTVGTHSTPVISFAMQGFTFLLMCLLAFIFSVGLIDYMIGNGQHPEVFHLVQNFNLEDKYPPFSLLKGYIQKAKQTFVEMFKKSQTHESLNWAIPKELWIAHYLAEQKLTDSKQRSAIMAEIKYLMSGYEKKQRSENLSTWASQHPSTESKRRNRKRKEEEQEHHEAQYNQQQQEQNENKLIQGKRHQLHQEENMAQVTQQQHMQPTTRPATLKLPTPAIPLVLNAAQIQNFARPAYAAVPGVHNYPAQPGWPAAQGSPFVPQFMSPQYMGLPFNPFGLHPTCYPRRR

SEQ ID NO: 41805 - protein, 380 aa, Arabidopsis thaliana
  Clone ID: LIB22-004-F12_FLI.pep
SLNFQKMSNDKDSFNVSDLTSALKDEDRAGLVNALKNKLQNLAGQHSDVLENLTPKIRRRVEVLREIQGKHDEIETKFREERAALEAKYQKLYQPLYNKRYEIVNGATEVEGAPEDAKMDQGDEKTAEEKGVPSFWLTALKNNDVISEEITERDEGALIYLKDIKWCKIEEPKGFKLEFFFDQNPYFKNTLLTKAYHMIDEDEPLLEKAIGTEIDWYPGKCLTQKILKKKPKKGAKNAKPITKTEDCESFFNFFNPPQVPDDDEDIDEERAEELQNLMEQDYDIGSTIREKIIPHAVSWFTGEAIEGEEFEIDNDDEDDIDEDEDEDEEDEDEDEEEDDEDEEEEVSKTKKKPSVLHKKGGRPQVTDDQQGERPPECKQQ

SEQ ID NO: 41806 - protein, 460 aa, Zea mays
  Clone ID: LIB3066-023-D7_FLI.pep
IDQRPGSSLDGRRLACKRKNVEGPNGQSSAGASTSFSHRNDNAFHNIASSSYNPAPIRNSSSPNCLPVPSSIDDQLPRYGTNAGLSAGTYDLNGGVNNAGNSQRSFRARITTSQQIAPCSVWPSSNAIRLPNSWNHQLPHFQSAFDDTQEVIPVVSSLNLQYQHPVNVSSVPPAANRFTGHGASSSRAGSLENRILGSQEAPRRNVVPANYSDLVPPSVVDPRRLLPEPSNWSSDVRGTAISGSIPPVSRANNSATVNPPAGFSHQNLTRRHPRNLSEEIGRLSGALRGHQPPRLRPGFLLERQGDGVWGVPLSTRGREGRRLMEIRNALEMIHRGENVRLESIFYGGVDIHDRHRDMRLDIDNMSYEELLALEERIGNVGTGLSEEAVIRLLKQRKFSSWTLKASLDPEPCCICQEEYADGDDLGRLDCGHDFHAGCIKQWLVVKNVCPICKSTALKKT

SEQ ID NO: 41807 - protein, 109 aa, Arabidopsis thaliana
  Clone ID: LIB22-013-D12_FLI.pep
SNNVFVITVTYKKCAIHIYTYKRFQYKNKKLKGRRSIMVHELRINYGCMCVYTFFFLTGVCVYILYTEFTVFQYPIHDLGQRENDPACSKIFPLSKSSGTSLTSKPMIR

SEQ ID NO: 41808 - protein, 156 aa, Zea mays
  Clone ID: LIB3066-051-H12_FLI.pep
QHLSLHVKTSPYACFTLLNKKRERKTITQAHYFRAFAATTHYTIESYIALQDPIGYRWRQRLIGRRRYLCRAASRKSCCWRVPATGSRRSRGQEQERERRRRPPVRPRTPWTCPRRRRCAPRPRTAPWRRRLGGARRGRRRRGPLLVCFLFAFAFW

SEQ ID NO: 41809 - protein, 244 aa, Arabidopsis thaliana
  Clone ID: LIB22-055-D6_FLI.pep
RCPSFSFSFIAMGRRCSHCGNVGHNSRTCSSYQTRVVRLFGVHLDTTSSSPPPPPPPSILAAAIKKSFSMDCLPACSSSSSSFAGYLSDGLAHKTPDRKKGVPWTAEEHRTFLIGLEKLGKGDWRGISRNFVVTKSPTQVASHAQKYFLRQTTTLHHKRRRTSLFDMVSAGNVEENSTTKRICNDHIGSSSKVVWKQGLLNPRLGYPDPKVSVSGSGNSGGLDLELKLASIQSPESNIRPISVT

SEQ ID NO: 41810 - protein, 343 aa, Zea mays
  Clone ID: LIB3061-054-F9_FLI.pep
SFLVKSKTEDSVKCEVIDGGELKSRRHLNVRGKSATLPSITDKDWDDIKFGVDNQVDYYAVSFVKDAQVVHELKDYLKSCNADIHVIVKIESADSIPNLHSIITASDGAMVARGDLGAELPIEEVPLLQEEIIRMCRSMGKAVIVATNMLESMIVHPTPTRAEVSDIAIAVREGADAVMLSGETAHGKFPLKAVKVMHTVALRTEATIPGGETPADLGQAFKNHMSEMFAYHATMMSNTLRTSIVVFTRTGFMAILLSHYRPSGTIFAFTDEERVRQRLALYQGVCPVQMEFSDDAEKTFGNALSYLLKHGMVKDGKEVALVQSGKHPIWRSQSTHNIQVRKI

SEQ ID NO: 41811 - protein, 192 aa, Zea mays
  Clone ID: LIB3061-055-F9_FLI.pep
VIFVDEVDGMLGRRENPGEHEAMRKMKNEFMVNWDGLRTREKERVLVLAATNRPFDLDEAVVRRLPRRLMVNLPDASNRRKILSVILAKEDLADDVDLETIANLTEGYSGSDLKNLCVTAAHRPIREILEKEKKERASAEAENRSLPPSHTSNDVRALRTSDFIHAYQVGLYSQQYFVQFCILCLLMRDLIG

SEQ ID NO: 41812 - protein, 191 aa, Arabidopsis thaliana
  Clone ID: LIB22-075-H8_FLI.pep
WINLFFLLCRGYYRCSSSKGCPARKQVERSRVDPSKLMITYACDHNHPFPSSSANTKSHHRSSVVLKTAKKEEEYEEEEEELTVTAAEEPPAGLDLSHVDSPLLLGGCYSEIGEFGWFYDASISSSSGSSNFLDVTLERGFSVGQEEDESLFGDLGDLPDCASVFRRGTVATEEQHRRCDFGAIPFCDSSR

SEQ ID NO: 41813 - protein, 305 aa, Arabidopsis thaliana
  Clone ID: LIB22-080-G9_FLI.pep
ITDDDFRDLVDKVPPGCRMTIISDSCHSGGLIDEAKEQIGESTKKEAEDEDESEESSSRFGFRKFLRSKVEGAIESRGFHIGGNKKDEDEAEEIETKEIELEDGETIHAKDKSLPLQTLIDILKQQTGNDNIEVGKIRPSLFDAFGDDSSPKVKKFMKVILGKLQAGNGEEGGLMGMLGKLASGFLEGKLNDEDYVKPAMQTHVGSKEEVYAGGSRGSVPLPDSGILISGCQTDQTSADATPAGKPTEAYGAMSNSIQTILEETDGEISNREMVTRARKALKKQGFTQQPGLYCHDGYANAPFIC

SEQ ID NO: 41814 - protein, 421 aa, Zea mays
  Clone ID: LIB3062-012-H8_FLI.pep
KTKNAHRKDKNQESLKGNRGSAGFPPRKDISDVSNKKSDKQELKPIHCKVQTGKRKRGTERRLLSKKQSCQDPGPLPAYRQEIASCNESRKSTHRRIENDPSTEVKLKVGDVRLANIDENINKPSGTQREGIEIFCGPDDWTKEQDMALRKAYFSARPSPHFWKRVSKMVPGRSAEDCFNRIYTDLSTPTPIAPRPRASKTTFSPIGNFTLSDPKPPNILEPTVGMRKSAKQKSLVAQKTVRHLLQKHCRIDQAQEADHFSVFESSPSALQLNLSFDNSPGTPDSYMNSDSLGKHSGRSSARKKPFSRLRTKPSEPSPGVLKPIKNVILHERYIDKLARREGAKRPRRRAPAGSKAADSGKSLSEQQAGSLKAAKNALISEATDFISSFKTLQANSLAHAVENSEDEIECDASDCSHDDKE

SEQ ID NO: 41815 - protein, 393 aa, Zea mays
  Clone ID: LIB3062-044-C4_FLI.pep
SNSQDPLALRSHRPSSTGSNVKSNIEAVWMGHSPPLLRLAIVDLALPKTPNDNSLSLFADPLVPERFYCAHGGGLDMVTLHFLPFSYPEMSSTPPSVHPVLTTGNSETSSPFLSGFVTIADAYGHVQLAGITCLGECFVVEMKGWKEPAPLQLDLESKIVKDVEPPATGMISKELIAGPDPPILPSSSSLKSLTPDSIEGKSTLHHYIKVFHEYYVEYGHKVFIELKEHADYLKTEMEDKQKRLEAVKKSLISVEAKDGDINKRIDRAFKVYELLEKRIDSFKMLPAANKKPLTQAEQEFKSQLDRFADVELDALRSSIAALSARMKRFAQQSTGSAASTGMVPWQAQRAGRSHISESQMSLLKSSLEKLSLLNEENSLKLRLIDHELKNQER

SEQ ID NO: 41816 - protein, 111 aa, Arabidopsis thaliana
  Clone ID: LIB23-027-E11_FLI.pep
RVWWKMEFCPTCGNLLRYEGGGNSRFFCSTCPYVAYIQRQVEIKKKQLLVKKSIEAVVTKDDIPTAAETEAPCPRCGHDKAYFKSMQIRSADEPESRFYRCLKCEFTWREE

SEQ ID NO: 41817 - protein, 274 aa, Zea mays
  Clone ID: LIB3066-014-B1_FLI.pep
LARAPPPRPCSSGVCIARAHPRAAAVAARPGTTRTTTTVAAAAAEAASNGSAAAAVAGISSSSSALVTSTVGKSTNILWHECAIGQKERQGLLNQKGCVVWITGLSGSGKSTLACALSRELHGRGHLTYVLDGDNLRHGLNRDLSFGAEDRAENIRRVGEVAKLFADAGLVCIASLISPYRSDRSACRDLLPKHSFIEVFLDVPLQVCEARDPKGLYKLARAGKIKGFTGIDDPYEPPSDCEIVIQCKVGDCPSPESMAGHVVSYLETNGFLQD

SEQ ID NO: 41818 - protein, 289 aa, Arabidopsis thaliana
  Clone ID: LIB23-029-G7_FLI.pep
KRIDRHKHFRFFYNTQFDNSDMFFSFSCLRSPSFHLDETRTSFLLIFLVRLVRCLLLPHWLTHIRIRWIRTTGITHNHSRISYWSSSCRQVSIRVTSSSSFRDSAPRNTSQDFISEILPGNNIHKEIKNIGSSHSSSNIVLLQRPPLILLSVVPRPECQLQDEHLTGPCKHDRRLSRDHTDIFIRFHDFLDSRKGKAVVLEIGSLLNLFELVLPKCLKLLCQLLLLLLLMDLVERQLAWLCRTSCYSSSSGAHRVGLVWVCAIVHSSRLSMVLLIHSLWKGESEGEETG

SEQ ID NO: 41819 - protein, 611 aa, Zea mays
  Clone ID: LIB3066-025-D3_FLI.pep
ESHTRGRPRKSNLMALSCMRCPAGAGAASARRAAAQPLAAEAAVSFARCRGFGRSATAATSAWFWRNHAVASQGVKAPMDADVKNAVIPPTSPKVESGSPSEITLDEFEDLSALCKNDDSTVSITVVGASGDLAKKKIFPALFALYYEDCLPKHFTIFGYARSKMTDAELRNMVSKTLTCRIDKRENCSEKMEEFLKRCFYHSGQYDSEEHFIDLDKKLKQHEGSRVSNRLFYLSIPPNIFLDVVKCASKSASSVNGWTRVIVEKPFGRDSESSAALTSGLKQYLVEDQIFRIDHYLGKELVENLSVLRFSNLVFEPLWSRQYIRNVQLIFSEDFGTEGRGGYFDGYGIIRDIMQNHLIQILALFAMETPISLEAEDIRNEKVKVLRSMKPLQLEDVVVGQYKSHTKGGTTYPGYTDDKTVPKDSVTPTFAAAALFINNARWDGVPFLMKAGKALHTKRAEIRVQFRHVPGNLYKGSFGTDLDRATNELVIRVQPDEAIYLKINNKIPGLGMRLDRSNLNLHYAARYSKEIPDAYERLLLDAIEGERRLFIRSDELDAAWSLFTPLLKELEEKRIAPELYPYGSRGPVGAHYLAAKYNVRWGDLSAEHYKA

SEQ ID NO: 41820 - protein, 356 aa, Arabidopsis thaliana
  Clone ID: LIB23-035-F1_FLI.pep
LMGFGLESIKSISGGWGAAARSCDACKSVTAAVFCRVDSAFLCIACDTRIHSFTRHERVWVCEVCEQAPAAVTCKADAAALCVSCDADIHSANPLASRHERVPVETFFDSAETAVAKISASSTFGILGSSTTVDLTAVPVMADDLGLCPWLLPNDFNEPAKIEIGTENMKGSSDFMFSDFDRLIDFEFPNSFNHHQNNAGGDSLVPVQTKTEPLPLTNNDHCFDIDFCRSKLSAFTYPSQSVSHSVSTSSIEYGVVPDGNTNNSVNRSTITSSTTGGDHQASSMDREARVLRYREKRKNRKFEKTIRYASRKAYAESRPRIKGRFAKRTETENDDIFLSHVYASAAHAQYGVVPTF

SEQ ID NO: 41821 - protein, 181 aa, Zea mays
  Clone ID: LIB3066-025-H10_FLI.pep
LGRRNLADLVAVGGHADGESDGDAALAGDGGDGAHVDALDAVGEALEAAARRLAVRAGPRRAVEALDAAAARRGERAGPPRRVRDARRQRRPHLPAGDRRRSGRSQQRRRHQHGHHRLRRLPAVQHSRHRRPQLARDRSKSSFVSVQFHTRLQCTCSCLVAHATLYIVVQFILGRPSLHRA

SEQ ID NO: 41822 - protein, 154 aa, Arabidopsis thaliana
  Clone ID: LIB24-005-D2_FLI.pep
LSLIFKLKSNSFLITFYFMARTKQTARKSTGGKAPRKQLATKAARKSAPATGGVKKPHRFRPGTVALREIRKYQKSTELLIRKLPFQRLVREIAQDFKTDLRFQSSAVAALQEAAEAYLVGLFEDTNLCAIHAKRVTIMPKDIQLARRIRGERA

SEQ ID NO: 41823 - protein, 465 aa, Zea mays
  Clone ID: LIB3066-044-C5_FLI.pep
SVCRPYYLHQPPVSPRRGVGGTGTGGEDCLERGDDPGHGGPDLGVLAEAVVREAGHALQAHLRADLAHPPVQDPLQLFGPDKDGPRPVHQAAVAASRPARLQRAPSHQHLQQHHAEAVHVAHHRQVPGGYVLRRGVAVGAHDPGGHVRLTAHRPFLGEPEVRQLGVEFRVEQDVGALEVPVDDGAVGPVEEGEAPGDVERDGHPRRPRESAGAAEQVVLQAALGHELVHQQPVVVLAAVADELHQVRVAVLSEVAHLRQPLPVTLESLRVEHLDGDRGGRVALPHGAVDDPSVHDAEAALADDLPRVEVAGGLPELVVGEELEAAVRRHGPDLLYVLGHGQHQRPLRPHLPQLLRGRGRRRRRRRRRRPRERISMAGGRARLAGVAAARDDPAVHFLEERYAAVHSPRAGRSVGRCPSLSLAGGGGRRERRQPPTTRARTLGRDGTRCALGRVDADGGGTTVSCC

SEQ ID NO: 41824 - protein, 140 aa, Arabidopsis thaliana
  Clone ID: LIB24-045-F2_FLI.pep
ITLSSLLAYLFFNFLYRHSITLPIRKNQVKARKMVRGKIEMKKIENATSRQVTFSKRRNGLLKKAYELSVLCDAQLSLIIFSQRGRLYEFSSSDMQKTIERYRKYTKDHETSNHDSQIHLQEAIGTRNCFLFSRRASRNR

SEQ ID NO: 41825 - protein, 476 aa, Zea mays
  Clone ID: LIB3067-017-C9_FLI.pep
PDLGDIEEAHRFGLSVIAIMMAACLLEPGDNHRYNMFPSDTHVRMHDVVRDAALRLAPAKWLVRAGAGLREPPREEALWRGAQRVSLMHNTIEDVPAKVGGALADAQPASLMLQCNKALPKRMLQAIQHFTKLTYLDLEDTGIQDAFPMEICCLVSLKHLNLSKNKILSLPMELGNLSQLEYFYLRDNYYIQITIPPGLISRLGKLQVLEVFTASIVSVADNYVAPVIDDLESSGARMASLGIWLDTTRDLERLARLAPGVRARSLHLRKLEGTRALPLLSAEHAPELAGVQESLRELVVYSSDVEEVTADAHVPMLEVIKFGFLTKLRVMAWSHAAGSNLREVAMGACHSLTHLTWVQNLPCLESLNLSGCNGLTRLLGGAEDSGSATEEVIVFPRLKLLALLGLPKLEAVRVEGECAFPELRRLQTRGCPRLKRIPMRPARGQQGTVRIECDKHWWNALQWAGEDVKACFVPVL

SEQ ID NO: 41826 - protein, 214 aa, Arabidopsis thaliana
  Clone ID: LIB25-027-A1_FLI.pep
SLFLSLMAATLGRDQYVYMAKLAEQAERYEEMVQFMEQLVTGATPAEELTVEERNLLSVAYKNVIGSLRAAWRIVSSIEQKEESRKNDEHVSLVKDYRSKVESELSSVCSGILKLLDSHLIPSAGASESKVFYLKMKGDYHRYMAEFKSGDERKTAAEDTMLAYKAAQDIAAADMAPTHPIRLGLALNFSVFYYEILNSSDKLVTWPNRLLRRP

SEQ ID NO: 41827 - protein, 442 aa, Zea mays
  Clone ID: LIB3062-002-D11_FLI.pep
HHHRAMGSLRNNSIGSFDKTISVNKYERRIISDTLSEFNPWDDSYSTANNFARMLRESKNNDVHCIAPSWKSGTGIKESRFSFARQDNQGNLFDSSLRNCGTGTEQNFSLLPQNSRGNIYQNGLAFQSLENEFSNNNSPGVLDMATTGTSMSKISAPPGFSAPTRVPPPGFSTAFPSQDSLNPTPVFPSGILCHGGSIPPPRFSSFSSGISTQEVSKPPTRPPSPFSSRFSSQDGLDPSSRFPFSSGFSSHDGSNQSYGSTNPENLLRGTVQGGNSNHYQSQFGRHSSDMEFDDPAILAMGKGLMPGIGDSGLEMKNTPAFQAQLQPASSDPRFQLHVQPNVQSRQNMRFTDPMQDGLNHMNDNYLASRFLAQNQGPLSPYVQIPQQPRNSQVINGHWDGWSDLRQGNNAPMSDMSRILYPSEVNKLHMLGSNDVHNRAFGM

SEQ ID NO: 41828 - protein, 383 aa, Arabidopsis thaliana
  Clone ID: LIB25-035-B3_FLI.pep
LTGLELFHFIKNAAKCSWSASQRDGVPFWKKDSVCSVLQVVSSISSCKLIEEMCKRKFSMHFDYCTTASLDFVLLDQTTFSDILESADLTVTSEEKILNAVLMWCMKAEESHSWGVIDEMMNYADPKSLFKERLQSLDDLLPHVRFSLLPYELLKRLENSNLSKEIPVFNRLLKEAASFLTSGLISPGNEPISRFQHRRSSFKELQYIRDGDSNGVLHFVGTSYGSHQWVNPVLAKKINITSSSPTSRFTDPKALASKAYAGTSFAGPRMEDGHISSWWVVDLGEEHQLMCNYYTFRQDGSRAFTRFWKFQGSMDGKTWTDLRVHEDDQTMCKAGQFASWPITAANALLPFRFFRLVLTGPTADTSTPWNFCICYLELYGYFR

SEQ ID NO: 41829 - protein, 155 aa, Zea mays
  Clone ID: LIB3062-002-D7_FLI.pep
AELARAVGSTGMAAGQFLDLAGATALGEAEVMQVLTKKFGEMAECSAACGAMLGGAGPDEEAALRRYGRTIGVLYELVDDIRSASGNGKMRSNASVLRSLGMDRALGIVEELKAQAKTEADRFSDKYGDRVLPLYSFVDYAVERGFELQDAAATL

SEQ ID NO: 41830 - protein, 464 aa, Arabidopsis thaliana
  Clone ID: LIB25-064-H7_FLI.pep
STGEYSDIKIYLSDHSLTFQSHKVILSLWSVAFAKMFTNGMSESHSSTIYLTDVSPEAFKAMMNFMYSGELNMEDTVNFGTELIHLLFLADRFGVVPLHQECCKMLLECLSEDSVCSVLQVVSSISSCKLIEEMCKRKFSMHFDYCTTASLDFVLLDQTTFSDILESADLTVTSEEKILNAVLMWCMKAEESHSWGVIDEMMNYADPKSLFKERLQSLDDLLPHVRFSLLPYELLKRLENSNLSKEIPVFNRLLKEAASFLTSGLISPGNEPISRFQHRRSSFKELQYIRDGDSNGVLHFVGTSYGSHQWVNPVLAKKINITSSSPTSRFTDPKALASKAYAGTSFAGPRMEDGHISSWWVVDLGEEHQLMCNYYTFRQDGSRAFTRFWKFQGSMDGKTWTDLRVHEDDQTMCKAGQFASWPITAANALLPFRFFRLVLTGPTADTSTPWNFCICYLELYGYFR

SEQ ID NO: 41831 - protein, 152 aa, Arabidopsis thaliana
  Clone ID: LIB25-065-D10_FLI.pep
PVPKLEPSSPVLDPDSYVQEILQMEAESSSSSSTTTSPEVETVSNRKKTKRFEETRHYRGVRRRPWGKFAAEIRDPAKKGSRIWLGTFESDIDAARAYDYAAFKLRGRKAVLNFPLDAGKYDAPVNSCRKRRRTDVPQPQGTTTSTSSSSSN

SEQ ID NO: 41832 - protein, 179 aa, Zea mays
  Clone ID: LIB3066-001-A7_FLI.pep
TILAPLPSVTPPHPASPTKMSRATAAVLFYILAVAALSAAEAPAESPKAGSPAKAPAESPKAGSPAAPAKAPESAATRTAPAKAPQAASTPAAAAAPSSSSSRKSGPAAAPTTAASTPSSSTDEELSPSPSASTAEVASPAADGPAEGPAAADASGAATLGSGAAIAGVAAAVATMIFY

SEQ ID NO: 41833 - protein, 170 aa, Arabidopsis thaliana
  Clone ID: LIB25-069-G1_FLI.pep
ENMEVTNGLNLKDTELRLGLPGAQEEQQLELSCVRSNNKRKNNDSTEESAPPPAKTQIVGWPPVRSNRKNNNNKNVSYVKVSMDGAPYLRKIDLKMYKNYPELLKALENMFKFTVGEYSEREGYKGSGFVPTYEDKDGDWMLVGDVPWDMFSSSCQKLRIMKGSEAPTAL

SEQ ID NO: 41834 - protein, 247 aa, Zea mays
  Clone ID: LIB3066-002-C5_FLI.pep
RATGSSRGPGNRRRMEVGRAPRRRLCPAAAAVPSLLLFAVLFAGRAAAAFGHLQGAGAGATALYKHASFFDRDGDGVVSFSETYGAFRALGFGFGLSSVSAALINGALGSKCRPQNATSSKLDIYIEDIQKGKHGSDSGSYDAEGRFVPDKFEEIFAKHAKTVPDALTSDEIDQLLQANREPGDYSGWAGAEAEWKTLYSLGKDKDGLLRKDVARSVYDGTLFHMLAPNWKSPDEEEEQELSVIRES

SEQ ID NO: 41835 - protein, 245 aa, Zea mays
  Clone ID: LIB3062-007-G7_FLI.pep
STRQTPPPGERRGGEGIGSKGTGEMAILYALVARGTVVLAEHSAAATNAGAIARQVLERLPDGGADSHVSYTQDRYVFHAKRTDGITALCMADDAAGRRIPFAFLEDIHGRFVKTYGRAALTALAYAMNDEFSRVLSQQMDYYSNDPSADRINRMRGEINQVRSVMIDNIDKVLERGDRLELLVDKTANMQGNTVRFKRQARRFRNTVWWRNVKLTAALILLLLVIIYVVLVFVCHGFTLPTCIR

SEQ ID NO: 41836 - protein, 118 aa, Glycine max
  Clone ID: LIB3040-041-E10_FLI.pep
MAHRLVSSKSPTRYASAASCNASTAWLWKTQISLEVLSNFTNQPLEGELPDQKLGTLLVFPNLTKSNGTRTITVGLLHTTSSWCRLTCSLGCKLLPRSLSSCGLTSGLLRTSHLNLEE

SEQ ID NO: 41837 - protein, 184 aa, Zea mays
  Clone ID: LIB3062-010-F10_FLI.pep
ENCRKRSKHIAFYTIDCKDSCGEIFVDLQKHSYVQKKPGGATEQQELTYSSLQEAISVPWNSLPKKTAKLYFAMRVLEDYELSEGRSPGETTLSDIDAVLARRKDMCDKMSLNESRIPTTLVERLLAAGKKEHPPVCAILGGILGQEVIKSISCKGDPVKNFFYFDVADGKGVIEDIPPPPPAK

SEQ ID NO: 41838 - protein, 433 aa, Gossypium hirsutum; identical to SEQ ID NO: 40850
  Clone ID: LIB3048-032-E7_FLI.pep

SEQ ID NO: 41839 - protein, 488 aa, Zea mays
  Clone ID: LIB3062-019-B9_FLI.pep
IDRRLRTRLSPRPKAFPLLPFFSHFSPPPPLPPFDNTMRECISIHIGQAGIQVGNACWELYCLEHGIQADGQMPGDKTIGGGDDAFNTFFSETGAGKHVPRAVFVDLEPTVIDEVRTGTYRQLFHPEQLISGKEDAANNFARGHYTIGKEIVDLCLDRIRKLADNCTGLQGFLVFNAVGGGTGSGLGSLLLERLSVDYGKKSKLGFTVYPSPQVSTSVVEPYNSVLSTHSLLEHTDVAVLLDNEAIYDICRRSLDIERPTYTNLNRLVSQVISSLTASLRFDGALNVDVNEFQTNLVPYPRIHFMLSSYAPVISAEKAYHEQLSVAEITNSAFEPSSMMAKCDPRHGKYMACCLMYRGDVVPKDVNAAVATIKTKRTIQFVDWCPTGFKCGINYQPPSVVPGGDLAKVQRAVCMISNSTSVVEVFSRIDHKFDLMYAKRAFVHWYVGEGMEEGEFSEAREDLAALEKDYEEVGAEFDEGEDGDEGDEY

SEQ ID NO: 41840 - protein, 142 aa, Glycine max
  Clone ID: LIB3051-018-H3_FLI.pep
KESCGVALTVKMGTGWRRAFCTRDPASTISDKHPGSPSPSPRTCTRLGFLSGGSNPSTPRLRCTTKAETASQTVTLSDSPRVQSKNTPRATKSPSVSNPTSPRSPLKLSLFKNSFKFRVCHASFIFLRFPCMEYSMIVICYG

SEQ ID NO: 41841 - protein, 520 aa, Zea mays
  Clone ID: LIB3062-053-C5_FLI.pep
RDLAQSRLQDLLKVVGDNHGSKHPLASSGRNFTFDVPQPCEDEQSTTSEAISSGQNFRLQGRLTTQRDYRSQQSENDVQFATSLSYSISSPPFSGMPPTNGRNDNSHISDEDSEDLCKEVRCIETNETEENECLESSAVGSNSLQGSNVASSMHGNDNTNRSVNSGLNDASSITLEQHLENVKKPFANPGMDLGSSTRNSSSSKVIGRSRSCRSLMGSTLLEDLEKEDRTPPSRSFMDYPGRPETCQRRVPALNYDAESEALSRAGSMLSEITTTRGGLKENSSAVGDTEFVAGIGEFVAELKEMAQGHNGELAEGTIRSVGLDPIMDVLQSPSRWPLEFEKKQQEIIDLWHGCNVSLVHRTYFFLLFKGDPADAIYMEVELRRLSFLKNTYSNGSMGYDMVAGSLSTSLVSSAKKLQREREMLCRQMQKRLTIQERESLYTKWGVSLSSKRRRLQVARRLWTETRDLEHVRESASLVARLIGLLEPGKALREMFGLSFAPQQSTRRSHSSWRYGRSSLD

SEQ ID NO: 41842 - protein, 385 aa, Glycine max
  Clone ID: LIB3051-061-D12_FLI.pep
QNSSSGMRPPTLNIFPSKPMHVEPSSSKAKANIELVSPQTSGSKRPSEPSMELANPRNETASAPQPPKPVKRESNRKGPTSSSEHEGPKTPDPKTLRRLAQNREAARKSRLRKKAYVQQLESSRIRLNQLEQELQRARTQGMFLGGGALLGGEQGLPVTMNTISTEAAMFDVEYARWQEEHHRIVCELRAAVQEHLPENELRLFVDNCLAHYDQVMNLKSLVAKTDVFHLVSGTWKTPAERCFMWIGGFRPSELIKIIVRQIEPLTEQQILGICGLQQSTQEAEEALSQGLEALNQSLSDTITSDSLSYPPNMANYMGQMAVAMNKLSTLEGFVRQADNQRHQTIHRLHQILTTRQAARCFLAIAEYFHRLRALSSLWLARPRQE

SEQ ID NO: 41843 - protein, 405 aa, Zea mays
  Clone ID: LIB3062-053-E4_FLI.pep
RERCSTSDPAPMATACPPLSLPSTSLFRGRSARAGPRRRQLTAVRCSAVGEAVVEEASPGTAEEPLLVSAIRGRKVERPPVWLMRQAGRYMKSYQLLCERYPSFRERSENVDLVVEISLQPWKVFKPDGVILFSDILTPLPGMNIPFDIVKGKGPVIYDPLRTAAAVNEVREFVPEEWVPYVGQALNILRKEVKNEAAVLGFVGAPFTLASYCVEGGSSKNFTLIKKMAFSEPAILHNLLQKFTTSMANYIKYQADNGAQAVQIFDSWATELSPADFEEFSLPYLKQIVDSVRETHPNLPLILYASGSGGLLERLPLTGVDVVSLDWTVDMAEGRKRLGSNTAVQGNVDPGVLFGSKEFISRRIYDTVQKAGNVGHVLNLGHGIKVGTPEENVAHFFEVAKGIRY

SEQ ID NO: 41844 - protein, 286 aa, Zea mays
  Clone ID: LIB3062-056-C10_FLI.pep
TIILVPLTTASGPSPTLQAASAMPSSAQVLLCLAAVLAAAAATTAEAHSQCLDNPPDRSIHGRQLAEAGEVVHDLPGGLRAYVSGAASSSSAVVLASDVFGYEAPLLRQIADKVAKAGYFVVVPDFLKGDYLDDKKNFTEWLEAHSPVKAAEDAKPLFAALKKEGKSVAVGGYCWGGKLSVEVGKTSDVKAVCLSHPYSVTADDMKEVKWPIEILGAQNDTTTPPKEVYRFVHVLRERHEVPYYAKIFQGVEHGFACRYNTTDPFAVKTAETALAYMVSWFNKHLN

SEQ ID NO: 41845 - protein, 308 aa, Zea mays
  Clone ID: LIB3060-001-C5_FLI.pep
STQLCSARAAIEAPSSPPSAASTDRATGTSDRPARRPCWPRCGTWPARRGRAASARGRPPRRPRPATCATSPPSSRAPRRGSARRRRGCWPGAARGWCCRRGASRPPRRPARGCAPSARAPTSPCCRSTSARSPPCAASSRGSSTSGSPSTSSCTCVCPTFLLSFFILLLLHPSVSSPPAKAAAATTAANLHGLTHGSRACVRTCSNNAGKYADRFAVSEDGVEMTFATNYLGHFLLTRLLLDKMADTARATGVQGRIVNVSSTIHSWFPGDGDALGYLDRVTRRKMCVCSLRAVLASSLSPVISFIS

SEQ ID NO: 41846 - protein, 363 aa, Zea mays
  Clone ID: LIB3066-009-H8_FLI.pep
CCTMRIVFVSNRLTAAGVNIHYHRRPLLQSTRMLHVRRALLELPDPVPAGRPAVGASRAHPPPQREAEVSGVLEPPALRLDDVALGERGGVAQRVVAVGVDHVALPEPAHGLLLLHRHDGHVRRPECLGGCGAPLRRRLLDGPVNAAAEEGQVGEGGDEGPVAVVDAVPAPGGGPGGGVPHGGVHGHGLGGEVPAHGGRLPHLAHRHVVHVEGHGGGRPQDGVAVELRGGVEGEHVPLLPAPAHASVAVHVGLHPPWLAPDVAQELEVQLVVPLLEHVAVGRVEGDDDAGGVVGGELDGRAEEAVLVHGRRDETGPGGTVEEEADGAVVGGAEDVAVPEQRRVPVLERHRRHVDRRERGHGRR

SEQ ID NO: 41847 - protein, 132 aa, Zea mays
  Clone ID: LIB3060-029-C9_FLI.pep
HGTLPSQTIFVCFSPFSIRFSIINMFGCTVLTSKFWHITNKGGAVIHSTRIGHHRARAHTHEHNRYSLQCKIGIPIEHGNGRTCFVTILSVFSFLFVDLVVETEAPEGVTVPVYPSAAGQTSDHPWCSRRHR

SEQ ID NO: 41848 - protein, 282 aa, Zea mays
  Clone ID: LIB3066-010-A3_FLI.pep
WHHGGEGLRRAQGLRVRAGAAVPAVLRGGRGSDPPGPLHRARRVAGAAPPQAPVLPAGPVGAVPERDAAGVHVPVHDDAGDGGGAQPERARGRVLRPGGRVRGVQGRGDHGAHAAARAVPGAPGRVRVVPVPARPGRRRAAPAAAGRGAGAGRDGGLRARRRPRRRLGPLEGRHQLDLGSLPPPRQLPRAAHRQRRQGQLRRQHRRRHRILPLPAGSGLCRRRLAVLSLSLSLYQLAVFANSSIESKDDASFVGVHHSRTSRLAAIFFLRLTTFRPVGWLVD

SEQ ID NO: 41849 - protein, 68 aa, Zea mays
  Clone ID: LIB3067-023-D4_FLI.pep
IWTSVVFSTLGKLEEPFELSFFANSGVVVKQSFVCMYQQLKCKHDIIIVEYRNNYLLYLIAKSETVLL

SEQ ID NO: 41850 - protein, 238 aa, Zea mays
  Clone ID: LIB3066-010-D9_FLI.pep
KQIDFCITINYYMANSAYMLAISETVFSSSHQHRYPVSILQAMHTCESNIDFVLQIHPAKMKTTGKRKQKKNLFIPKIAEQQSWRVLYNICAWCSADSSYYNLRGAFVRTALGEARSVAVAAAAAVAVTITMVMAFPVLLLFLLLLIFLLLMVFVLVVAGLVAVLAGDLVLDLLHDALLVLPVVLLVVLLALLVVLLALLVLVLLLVVAPDVERLLDLVDDARHACGYFSLLREGKRM

SEQ ID NO: 41851 - protein, 153 aa, Zea mays
  Clone ID: LIB3067-025-D5_FLI.pep
ISPAVFVLIDLLAPRGGTSPLRSTKGLGSAAMAARLAQLRAQAVQAAEFASKHGGSYYKELMEKNKQYVVQPPTIEKCQELSKQLFYTRLASLPGRYESFWKELDGVKQVWKNRKDLKVEDLGIATLFGVELYAWFCVGEIVGRGFTLTGYKV

SEQ ID NO: 41852 - protein, 220 aa, Zea mays
  Clone ID: LIB3067-033-A2_FLI.pep
PPESDPAAGARNPTPAAMEMGGMSDAERLFFFEMACKNSEVAYEQNPNDADNLTRWGGALLELSQVRTGPDSLKLLEDAEAKLEEALQIDPNKSDALWCLGNAQTSHGFFTPDNAIANEFFTKATGCFQKAVDVEPANELYRKSLDLSMKAPELHLEIQRQMVSQAATQASSASNPRQSRKKKDNDFWYDVCGWVILGAGIVAWVGLARASMPPPTPPAR

SEQ ID NO: 41853 - protein, 345 aa, Zea mays
  Clone ID: LIB3066-018-D5_FLI.pep
SACGGTGKQTILIPKGDFLVGQLNFTGPCKGDVTIQVDGNLLATTDLSQYKDHGNWIEILRVDNLVITGKGNLDGQGPAVWSKNSCTKKYDCKILPNSLVMDFVNNGEVSGVTLLNSKFFHMNMYRCKDMLIKDVTVTAPGDSPNTDGIHMGDSSGITITNTVIGVGDDCISIGPGTSKVNITGVTCGPGHGISIGSLGRYKDEKDVTDINVKDCTLKKTMFGVRIKAYEDAASVLTVSKIHYENIKMEDSANPIFIDMKYCPNKLCTANGASKVTVKDVTFKNITGTSSTPEAVSLLCTAKVPCTGVTMDDVNVEYSGTNNKTMAICTNAKGSTKGCLKELACF

SEQ ID NO: 41854 - protein, 140 aa, Zea mays
  Clone ID: LIB3066-020-D6_FLI.pep
HYEAKSKLLLFFDPSRSFDSFFPPWRLGGSPRCAVPFLCCSSSPPAQRCRLLMTRAAGRTTTTTLSAFPKTAWRPARITATRTAAATGHGRGGRIASACWRTANRREQLRRMASWLPRRPMKDERLRPMIDVSVGMSITH

SEQ ID NO: 41855 - protein, 141 aa, Zea mays
  Clone ID: LIB3067-038-F12_FLI.pep
LGKESIHAIVLGVFSVAIMSEDIKFKFKWKSDGGKFVSLTDKKHVIERGTMIRFSVKRVDTEMSCHITGSLIPPHTGCMRWLSVHDPKYASELKSGESRSRDTSIKIEQNEQEHRILKNEDGMVKSERPYKSRKRGRHIEK

SEQ ID NO: 41856 - protein, 284 aa, Zea mays
  Clone ID: LIB3067-049-D8_FLI.pep
IDPPRFLVRAAMAMAVAHLLPQLSAEGNGASRNRMAILLILQLFLLTALGVDGAASFIFTNACKHAVWVGALHGASSPPLARSGFYLAPSATSSMDAPSSGTWSGTLWARTGCVADPATGRFSCATADCGTGDVACQGRGPAPPVSLVEVTLAAPGSGRPDFYDVSLVDGFNVPVRVAPSGGGGDCRPAACAGDVNAVCPGDLRVVASSGGGVVACKSACIAYGSARYCCTGQYGTPAMCGPTNYSQVFKSACPSAYSYAYDDATSTFTCSGPSSYSVTFCPAN

SEQ ID NO: 41857 - protein, 136 aa, Zea mays
  Clone ID: LIB3066-028-E2_FLI.pep
GWQSTFLTKDKAVAEERAAKLGIKLEWTDDGVKTVMGPIPAVKWDESRGRKIWFNSIVAAYIGWKDARNDPTKAVTFGDGSPLPADVIDACGQVLEEESVAVPWQHGDILLIDNWAVLHSRRSFEPPRRILASICK

SEQ ID NO: 41858 - protein, 382 aa, Zea mays
  Clone ID: LIB3066-028-E3_FLI.pep
PIQTRQARNPPMAHRVLLLLSLASAAAVAAAVDAEDPLIRQVVPGGDDNDLELNAESHFLSFVQRFGKSYKDADEHAYRLSVFKANLRRARRHQLLDPSAEHGVTKFSDLTPAEFRRTYLGLRKSRRALLRELGESAHEAPVLPTDGLPDDFDWRDHGAVGPVKNQGSCGSCWSFSASGALEGAHYLATGKLEVLSEQQFVDCDHECDSSEPDSCDSGCNGGLMTTAFSYLQKAGGLESEKDYPYTGSDGKCKFDKSKIVASVQNFSVVSVDEAQISANLIKHGPLAIGINAAYMQTYIGGVSCPYICGRHLDHGVLLVGYGASGFAPIRLKDKPYWIIKNSWGENWGENGYYKICRGSNVRNKCGVDSMVSTVSAVHASKE

SEQ ID NO: 41859 - protein, 136 aa, Zea mays
  Clone ID: LIB3067-052-D9_FLI.pep
RSPKSFNRRVVPGQAPFDSSTVDNMRRLLEHAGVPGHIYPLLLLCYEVMPPPQQVEKEIGEQRVISFHGVGLSATEETKYGDITCHTKNADEGRELFTNTLYNSVVNQYNVLKSAIFRDRGAAVSNNAISLSQPWR

SEQ ID NO: 41860 - protein, 148 aa, Zea mays
  Clone ID: LIB3068-011-D12_FLI.pep
SAVPSRGLPRPPAIAAHRRQQPPQATNRGARPRQDLQGCSSRGAEEGDRAATPCVPAAADEGGHHRRRRHRRGGFHAGQARAARVRGRCHSIADRGRRRSTGSATTTTPAPNFVPGSSFSQSDKLFVVRGKYTSPVSSLLILFLCSLN

SEQ ID NO: 41861 - protein, 549 aa, Zea mays
  Clone ID: LIB148-039-C7_FLI.pep
ICASSLSFRTFTQYTQTRSLVCRTFNSPVSYMASRRMHGLLLVVGRPRWWLDLAGLAGRAGEGAGVAREPGDVGPVPGLDEVLLVELPVDLAAGDGEVGAFHEEVVLGVPHPVLPHRLRRVMLLGDLLRGKVGRRDVAVALADDGGGLAAADGVHEPVRVVVVDHVEEAPAAPWHPLHEASAEVVEGDSDLHDLVLGMLVAGAEEHDIVVVGEVAVGDGDAGGLGDDVDEAVLAVGEGEVVQPHVGGAEDGDAVAVGDGAPAEVVRRVADVAAVLVGGDDVVDVDVVDDDVVDELQRELRAVGDAHLHAAAVNGLVAADDELLLKRDDHGLGEGDPQRLDLDDAPPERAGARVHHVVVGAVRHHVELAGQPAGGVAPEPLGAPRQALPVRRPVLPAPPAPVDRVRRPARPAELRLPRRRPHHLPPRANVLLLDGSVDCTVKLVGDLDRVMLVRGLSRGVGHELALLPVFIEVADIGLRQGCGQEEEDQVQDERARSDPSEPIHHGYIDLAVYLSSTYIYIYNNSNISSQIIPPRTAPPPTFYLSMQRHC

SEQ ID NO: 41862 - protein, 111 aa, Zea mays
  Clone ID: LIB3068-015-D8_FLI.pep
KNFYFLFFPLRLKFDMFTTLTHFFAWVPTQFRRLVFALQCDNGCEFDNATHSFLTHGIQLRRSCPYTSPRTAEPNASFAAPPNRMCLKMHSSSQLPRSGHQQASYIQFQNI

SEQ ID NO: 41863 - protein, 368 aa, Zea mays
  Clone ID: LIB3059-016-A12_FLI.pep
HCYLVLTGTHGHSLCSLGLGHDHTTAKQLPYLAIDDDASVDVEDLARHVGRILVAGEEDEAGRDLGRLRGALHGHLGPELLHLLLAEGRRDERRPDGARRDAVDADAPVGQLQRERAREGHDGALGGRVVQQRLVALVRVDGGGVDDAGAGLHARHRVLGHQEVGEDVGAEHALQVRLRHVPDALPLVLLRRVVHHHVDAPAVRRRHPLHHLPAVGLVPEVGGQGHRLARARLGPDVAQRTQRLLRVLLLLPPHEGEGHRRALLREAQAHGAPDAGVAAGHERHLVLELVGGLVVLDDGLGPGVHRVLLPRLGLLLLSRELLLLLLLSPEHLLGRHSANCRRRCSRSRSTRRCLPRPRRRKRRAPLRE

SEQ ID NO: 41864 - protein, 144 aa, Zea mays
  Clone ID: LIB3068-024-E10_FLI.pep
QAGRGCSSRPSPRPPDPPSRRSRPPSSRPARKSRGMSALCARTGSRSASASSGCRARTATTTAASCPGSRCATRARSAASSCPPTTRSTSPGKPAGPTPREPANQAVAACSYGMVLLIVLYVWVGFESGALVIRLLLSRIKGKV

SEQ ID NO: 41865 - protein, 143 aa, Zea mays
  Clone ID: LIB3059-014-E2_FLI.pep
TMVLLETLRLYGPVMLMLRKPTSDIRLGSLSIPKGNGIAIPVPFLHRDREVWGDNANDFDPLRFQNGVTNAAKTPQALLSFSIGPRACIGQNFAMLEAKSVMAMIMKKFSFTLSSSYVHAPVDYITLQPKFGLPIVLRPLPDV

SEQ ID NO: 41866 - protein, 128 aa, Zea mays
  Clone ID: LIB3068-025-G2_FLI.pep
IRSEQSQQSQTWICYSTTHEADVILRSFPIGLRMTHLMGSIEPAPVFGPCIAGTRAGDLASTLSPSCDGMKPCRGGAAPAPQPTPAHWSSSSPARTPACPPRIRSAGTWCPSRIAGLGTGSSPRRPRF

SEQ ID NO: 41867 - protein, 252 aa, Zea mays
  Clone ID: LIB3059-034-C9_FLI.pep
PFDVWQNFTKSGHLQENMSSLGREPSSLSPEPAKGNDSLDLWITSNFKESKSNDVGRTNASSDGWQDFASFDQAQRITKVHVEGHVVKDPSGAETLDLWASSHVNEKNLEQISEHNDLFDDWQDFQNSNPQQTTLQVSSDASLFDITLASRPDAFGEQEFGSVLQVASSENSKDKKEGSNESKAFPSDDHLKSTSGMQQMGDVDSLSSLWPANKPEPANTNVEQLLAQMHDLSFMLKDELSVPDKPIDHSKP

SEQ ID NO: 41868 - protein, 112 aa, Zea mays
  Clone ID: LIB3069-008-F12_FLI.pep
SPETLQQLISFQQSLMSQLGQQQTGQERTQSASGAGNVNLNTLMNMFSGLGAGGGLGVPNAPNVPPEELYATQLAQLQEMGFFDTQENIRALAATAGNVHAAVERLLGNMGQ

SEQ ID NO: 41869 - protein, 215 aa, Zea mays
  Clone ID: LIB3137-001-F5_FLI.pep
FRFSPVGSRLPEGEEDMDLASVNEELAEIDGQIGDILRVLQNGFQKLEKIKDANRRSRQLEELTDKMRDCKRLIKDFERVSKAEAEHTDPATAKMLHDRKQSMIKELNSYVALKKQQASENKRIDLFDGPSAEDGFGEENVLLASNMTNQQLMDQGNQLMDETDQAIARSKQTVQETVNVGTETAAALKAQTEQMSRVVNELDSIHFSIKRHLNW

SEQ ID NO: 41870 - protein, 174 aa, Zea mays
  Clone ID: LIB3069-017-B1_FLI.pep
SWPTMSIDDLHSNVAGQTYGCRKFLNIHALSTATDFAGRPRWGRQHCCSVCRSCCVDQCFCMKADSHLRSTSLPAATVTDGDDSPQQLALLVVAMISPASHRLSPRYIADTARCANGAQMPPPPGGRVHQGVEPGRRALDLVQALVTRPSANHRPTPTCFTNLLQVHMRSHPYI

SEQ ID NO: 41871 - protein, 175 aa, Zea mays
  Clone ID: LIB3137-030-G3_FLI.pep
LYGPGPTRSEQTFEYTPPEALLNSNWFQGSRSARLKYDIWSVGVVMLELMMGSPHVFQISDRTRILMDQHLGGWSEQTKELAYKLRSYMELCILVPGISSQHHGSGSPEQGQFGLASWKCSEESFAHQVKIRDPLKIGFPNLWALRLARQLLVWHPEDRLSVDEALNHPYFQEPM

SEQ ID NO: 41872 - protein, 187 aa, Zea mays
  Clone ID: LIB3069-017-C5_FLI.pep
AAAAAAAQVAGGGGGGEGDAAAAARGGGGTEDGMYTELWNLCAGPLVTVPRVGDKVYYFPQGHIEQVEASTNQVAEQHMQFYDLPWKILCEVMNVELKAEPDNDEVYAQLTLLPESKPEENGSSEEMPASPPAALARPRVHSFCKTLTASDTSTHGGFSVLRRHADECLPPLVACWILDLILPVHQL

SEQ ID NO: 41873 - protein, 402 aa, Zea mays
  Clone ID: LIB3137-056-B9_FLI.pep
TCHSLCREHAMRAEGAGGVAVGENAGGDDGACGHAGVQHGGQGWEEDRAAGRGGDHGRVVGVGPGGGQGAGGDRQVARGDGLPRLPQGGQGGQGRRHGGRQLHHHAPGPGLPRQRAAVRGQLPARRHAARLARLQRRHLPAHGKDADVHGGRIRDERRRQPPGPLPPGAPAPGRHAEVRLPVPPPHHPRLHHRQHQHAGREHPAQGRAGRPPRPRGGAARPERLCHDRRLRELRRRQGVQGQQDLQHANNAGAAPAVPRGDGHHVRVALPGVHRHHGAVPRAHPAVPAALPAVPEVRHQGLRVGGGVRQEAGAGGQRPQPHQVGGVLELEQGLGVVREPAVAGGQRSGEGQEALGDQREARGACLSSPARRQRHDESVEQRSFRFVVLCVPLASILFVSRSW

SEQ ID NO: 41874 - protein, 405 aa, Zea mays
  Clone ID: LIB3150-064-A7_FLI.pep
TNSGGGAVMGSCFSLEGGRSESIAPAQRSQIPEDEQVEPTVTSELAIPVPEVAESVVMLEALRTGFITDQRPERHIRVRSFTYDEVCAATHGFEVDRFLGQGGFGQVYRGFLESTNQEVAIKRLDLQGQQGHREFVTEVLILSNVHHPNLVKLVGHCTSHDQRILVYEYMPLGSLNSHIHDLPPGQQPLDWSTRIKILLGAAKGLEHLHHNLNPPVINRDVKCANILLGAGYHPKLSDFGLAKLGPTGDNTHVSTRVMGTPGYCAPEYLMTGKLTVKTDIYSFGVVMLEVLTGRMARDERLPESERNLVAWALNFLRRRELDNLLDPALRGQCPQACLEHAFFVVSRCISESPNTRPSMRDVVASLTVISEFRNRNTRRLERGGRSTPTRTPDRNHRGDDQGEGS

SEQ ID NO: 41875 - protein, 57 aa, Zea mays
  Clone ID: LIB3069-038-C2_FLI.pep
TVLLHPTHFSLVPAKALETLVAFCQIICNHDEHHLVPVVHKEQNMNGVNWMGDIKHV

SEQ ID NO: 41876 - protein, 87 aa, Zea mays
  Clone ID: LIB3070-005-A10_FLI.pep
AREKVRAADVDVITFGQYMRPSKRHMPVSEYVTPEAFEKYRALGVEMGFRYVASGPMVRSSYKAGEFYIKAMIEAERAKGTAADSSA

SEQ ID NO: 41877 - protein, 188 aa, Zea mays
  Clone ID: LIB3136-013-F12_FLI.pep
PRRVATRADKIGSESPAADGVGDAARKRPSGDDGPTPGPADKRRRPEHPSSSSAGSRDRHHHHHGRRPPSSADEKVRASHILIKHEGSRRKASWRDPEGVAISATTRDDAADLARALRDQIVSGDREFEDVAAENSDCSSAKRGGDLGSFGRGKMQKPFEKAAFALKVGEISDVVDTESGVHIIKRTG

SEQ ID NO: 41878 - protein, 90 aa, Zea mays
  Clone ID: LIB3070-007-A6_FLI.pep
VLAEHKKNTRFIKLIKPTVHQSFITRCSEVLSLSPACLSKSAFPREQMLWFQSRNNTVSLSTASILVPVPCRGLCFLDSLLLLLRVLARA

SEQ ID NO: 41879 - protein, 468 aa, Zea mays
  Clone ID: LIB3136-022-G4_FLI.pep
GSPTRAAAPIQPRVVLRVASSAAPASSSSARPRRGAVAEAAMQPAKAVAAEAASPAAALEMGNGAAVAGLQRPDAMGRFGRFGGKYVPETLMHALTELENAFHALATDDEFQKELDGILKDYVGRESPLYFAERLTEHYKRADGTGPLIYLKREDLNHTGAHKINNAVAQALLAKRLGKQRIIAETGAGQHGVATATVCARFGLQCIIYMGAQDMERQALNVFRMKLLGAEVRAVHSGTATLKDATSEAIRDWVTNVETTHYILGSVAGPHPYPMMVREFHKVIGKETRRQAMHKWGGKPDVLVACVGGGSNAMGLFHEFVEDQDVRLIGVEAAGHGVDTDKHAATLTKGQVGVLHGSMSYLLQDDDGQVIEPHSISAGLDYPGVGPEHSFLKDIGRAEYDSVTDQEALDAFKRVSRLEGIIPALETSHALAYLEKLCPTLPDGVRVVLNCSGRGDKDVHTASKYLDV

SEQ ID NO: 41880 - protein, 468 aa, Zea mays
  Clone ID: LIB3075-006-H11_FLI.pep
IDRHSQHHPPRRRDSRQEEGINSLPASEGGEVYCSVDQCAHRPAGLLISSTTSGLIGMAALATSQLVATPAGLGVPDASTFRRGAAQGLRGARASAAADTLSMRTSARAAPRHQQQARRGGRFPSLVVCASAGMNVVFVGAEMAPWSKTGGLGDVLGGLPPAMAANGHRVMVVSPRYDQYKDAWDTSVVSEIKMGDGYETVRFFHCYKRGVDRVFVDHPLFLERVWGKTEEKIYGPVAGTDYRDNQLRFSLLCQAALEAPRILSLNNNPYFSGPYGEDVVFVCNDWHTGPLSCYLKSNYQSHGIYRDAKTAFCIHNISYQGRFAFSDYPELNLPERFKSSFDFIDGYEKPVEGRKINWMKAGILEADRVLTVSPYYAEELISGIARGCELDNIMRLTGITGIVNGMDVSEWDPSRDKYIAVKYDVSTAVEAKALNKEALQAEVGLPVDRNIPLVAFIGRLEEQKGPDV

SEQ ID NO: 41881 - protein, 128 aa, Zea mays
  Clone ID: LIB3136-057-A7_FLI.pep
AEGGDGHGGQSDTPHASPPRSAPDCAHPPMALAASHHGFLPFAPAATPTPSRGHLRFRAARLLPRPARRICCQSINSANVLGASSTTSDEAVPVPVVQIDQDSDRDATIVQLSFGDRLGALLDTWAQG

SEQ ID NO: 41882 - protein, 226 aa, Zea mays
  Clone ID: LIB3136-057-C3_FLI.pep
GFGLIKRKRKDSFVRDRALVLRELHSAAQRESCIGQQEILERENLPRAETSIHGIVTNIDGCSFLFPERPDLKSVVLKEQPFSLQRETSMNKPFFMLLTLNFSDGCSCLSSSIGWPVDFQKRKDSFVRDRALVLRELYSAAQRESCIGQQEILERENLPRAETSIHGIVTNIVRYDTEDEKLAPPKNDLMNHSRSNPAKRHVEGTDCHSSLPKKLKYFLKDKKLNC

SEQ ID NO: 41883 - protein, 136 aa, Zea mays
  Clone ID: LIB3075-045-G5_FLI.pep
QARMELQSVMWEYVGIVRSTGRLKQAEWRIGDLESEWEEFLFRRGWKPTTVGVEVCEMRNLFCCAKLVVRSALARRESRGLHFTEDFPYLEESRRKPTVIFPAAVQELTWSSKPLQRQLQADDNACSSSGWALGIR

SEQ ID NO: 41884 - protein, 308 aa, Zea mays
  Clone ID: LIB3136-059-A2_FLI.pep
RTPPQQEPKPAVLRWRPPVRVTSEFDSERRLFSHRLSCRVLDGLAKLRLRISHGAGGGGILWGPTDVGLLARNFSVVVDPATRGAVLRGAADLAGSLRLRASHNTKEQQGEVAITANLRDSPCKIELSSLVPPNGPPRATFFFPNGEVSIKEKILDERDRILSVNGLVKSRVLHGVCTAVYNDNVMSIKYRYKDDEVSFIPSISLPSNSLSFAFKRQLTPLDKLSYWYNFDTNYWGAIYKHKAHKHLKWKAGYESDNRLGWASLWVGDAGGSTKEAPLKAKIHLTLKVPQDNIQNSVVVFHVKKRWDF

SEQ ID NO: 41885 - protein, 287 aa, Zea mays
  Clone ID: 700336578_FLI.pep
SRGALRIPLDPTLDMKRPRGATPSLSAMPNHQEDDGYGVVGMEADVDVDVDEEMMAFGGGGGGEKKRRLSAEQVRALERSFEVENKLEPERKARLARDLGLQPRQVAVWFQNRRARWKTKQLERDYAALRRSYDALRLDHDALRRDKDALLAEIRELKAKLGDDEDAAASFTSVKAEPAASDGPAPAGVGSSEISDSSAVLNDADPPVAEAPAPAPEVQGTLLVAPAGPVAGAAAANHGGVFFHGSFLKVEEDETGLLDDDGPCGGFFAVEQPPAMAWWNEPAEHWN

SEQ ID NO: 41886 - protein, 441 aa, Zea mays
  Clone ID: LIB3137-027-C1_FLI.pep
QRRARSRGGVRLLALLPSFDTRAQESVGFPNPVTMAAPPSPSSRSPSSEVAVHRFSGTLDVSSSPSRTELLSMVKKHSHLIGWTIIGAEDDASDVGMDDKFWHEMLDLFFVRGRQSKRSEEDDLVFFVNNMKLHGYGFNDNMEDPPPFFVRRWAPTLEKISINTVEVDWERSFYLNLIAHTSYTVTVAIFGIEDLRNRAAKNKQLPPVYKVTKNVYASPSRVNFHLDRRKAVETLPAYPNIFFSVDDFDDTFDAVVLSDPEHCYCVILNAHDGAAFPEESECKNPVSNTQPGVSCGSAQEKPPKRTLFSAYVGYQNVRGAYDACRSKFGSFLSLGHDHNKLDRLFMKGPEGRGEVEVAVSGIADQSSGKSKKDPGDSFRVLVHRAASAASKLVKHAYESSSANRQMDDELVPLKCCLMSVSLPWDYIAHDLLHKDTPPMDL

SEQ ID NO: 41887 - protein, 168 aa, Zea mays
  Clone ID: LIB3079-002-G3_FLI.pep
QPGDEQHQPLPRRLLPRPPHQPGPGAARGLRQHRTAWGDRDDCRVPDSDEDGPWDRPLPSLGVVRGQDHVRQHHQHQRRSVEKPPCFLQEHSVCRLNSGKGEREVVQCLWRLLFKSRILKRNPISFGRRLRFSRQYIPVPSTVWNCSWLPRACNDVSGTEVVLCGPVT

SEQ ID NO: 41888 - protein, 315 aa, Zea mays
  Clone ID: LIB3137-039-C5_FLI.pep
YYLNLMLINMPNIFWRSFTLCNTYSPSNQLQGGCTQRMDLWITSCSQAARHHARTGSVDFPVKKNVKSSQLQNTTCFVGLVRQLQCRRSAKSHILNVKSDTVSHQKVSGVSWSLENTPRRIGCVVSGLGFAAYGLASAEGPVNNNIDSTESAMSSTNLSHGKEVHTDYSVTGIPGDGRCLFRSVVHGAYIRSRKPIPNEDHQRRLADELRTKVADEFIKRRAETEWFVEGDFDTYVSQIRKPHVWGGEPELLMASHVLQMPITVYMHDKAAGGLIAIAEYGQEHGTEAPVQVLYHGYGHYDALQIPGEGGPRPRL

SEQ ID NO: 41889 - protein, 120 aa, Zea mays
  Clone ID: LIB3079-021-A1_FLI.pep
VLLELARSRNRMPLPKSIAPPGSIPLPPEQDTLLAQNYQLLPPLKPPPQYEEIEDETEEPNPSNPANSNPSYSQDQSSKEQQQQHTPQHGQRVSFQLNAVAAAAAAAKRPRMAIDQLNMG

SEQ ID NO: 41890 - protein, 145 aa, Glycine max
  Clone ID: LIB3093-017-G1_FLI.pep
RFAAVIMRIREPKTTALIFASGKMVCTGAKSEQQSKLAARKYARIIQKLGFPAKFKDFKIQNIVGSCDVKFPIRLEGLAYSHSAFSSYEPELFPGLIYRMKQPKIVLLIFVSGKIVLTGAKVRDETYTAFENIYPVLTEFRKNQQ

SEQ ID NO: 41891 - protein, 115 aa, Glycine max
  Clone ID: LIB3107-078-H7_FLI.pep
SEIYQQIKIEPHQSKAIIPLHVHELPFDWFVQLLIIKMTRTRIKIKKIDNITARQVTFSKRRRGLFKKAEELSVLCDAEVGLIVFSSTGKLFDYSSSRYVYGRRLVYYNTPLLSF

SEQ ID NO: 41892 - protein, 277 aa, Zea mays
  Clone ID: LIB3150-069-F10_FLI.pep
QNESSRRGQGVEENNMQNKGRSDVHPRDDSLNSERNSRQEKQNNNRLSGSSDARHAGRDRHRESTRKGRGSELGEHDLHRSSKRRREDHESHHSGKVETKEVNEQESSRGHATLSKKSQNPQPDNSLVNQVEEDASDDENHEDSRRGRSKLERWTSHKEIEYSNIDDDNTETFPTIKADVEADEVGKSEVSAAVGNSDINSNVDTGQTSDKSDRHLDTVERLKRRSERFKLPMPGEKDTPQSKKVDTEMQPPQNESTAADTEVKPERPARKRRWTGS

SEQ ID NO: 41893 - protein, 83 aa, Glycine max
  Clone ID: LIB3109-031-F1_FLI.pep
VFILVLSYSLLAHFHPFFPFIFLSLFFIFIISHRRRKIEKNQNMICSFYFPAPIYTPKNGMYIYWFFSCIRPVHNHNIMIQQY

SEQ ID NO: 41894 - protein, 163 aa, Zea mays
  Clone ID: LIB3115-005-A11_FLI.pep
PAGPAAPAAAGGWRGEMRAARGRGGVGAHPAEPRGADGHDADAGPQLQGGVRHRAVRPALRDVADQGLTERIGWIGRLASQEILDQIVFERTPQWSTAQRWLGCQSETAVTEQDTRGLHSAVVQEEEQTQGEDGARPDMAWNRDRRHRRRGCGRRRDMRNTTC

SEQ ID NO: 41895 - protein, 239 aa, Zea mays
  Clone ID: LIB3150-071-E8_FLI.pep
AAARADKEQAEEELCQATMGISRDSMHKRRATGGKQKAWRKKRKYELGRQPANTKLSSNKTVRRVRVRGGNVKWRALRLDTGNYSWGSEAVTRKTRILDVVYNASNNELVRTQTLVKSAIVQVDAAPFKQWYLTHYGVDIGRKKKTPAAKKDNAEGQEVEAAAEETKKSNHVTRKLEKRKEGRTLDPHIEEQFGSGRLLACISSRPGQCGRADGYILEGKELEFYMKKLQRKKGKSAVA

SEQ ID NO: 41896 - protein, 337 aa, Zea mays
  Clone ID: LIB3116-012-H7_FLI.pep
LMDSRRESSETLRNKCAACFRQYNRMEHLVEHMKVSYHSVHEPRCGVCGKHCRSLESLREHLIGPLPKVECARVFGVRGCSICLNVFDSSAAVRYHRAACQYSRAAPMPRGGGMTGRAVALACKMVGGGSDGSMDLCARVCLVGEDEHVIFQTYVKPTLPVTNYRYEVTGIRPEYLRDAMPLKVAQRRIQEILCNGEPLWKLRPRSYGRAKVLVGHGLDHDLERLGLEYPAFMIRDTAKYPPLMKTSKLSNSLKYLTQAYLGYDIHTGIQDPYEDCVAAMRLYIRMRSQAHQRDYNSGSGEAQNNYPAWRQRELDRMSPEELLALSASDYYCWCLDY

SEQ ID NO: 41897 - protein, 485 aa, Zea mays
  Clone ID: LIB3136-008-E8_FLI.pep
THVYLSFNYFQGVFINCALIEPFGLTLIEAAAYGLPMVATRNGGPVDIHRVLDNGILVDPHNQNEIAEALYKLVSDKHLWSQCRQNGLKNIHKFSWPEHCQNYLARVVTLKPRHPRWQKNDVAAEISEADSPEDSLRDIHDISLNLKLSLDSEKSGSKEGNSNALRRHFEDAAQKLSGVNDIKKDVPGENAKWSSLRRRKHIIVIAVDSVQDADFVQVIKNIFEASRNERSSGAVGFVLSTARAISELHTLLISGGIEASDFDAFICNSGSDLCYPSSSSEDMLNPAELPFMIDLDYHSQIEYRWGGEGLRKTLIRWAAEKNKESGQKIFIEDEECSSTYCISFKVSNTAAAPPVKEIRRTMRIQALRCHVLYSHDGSKLNVIPVLASRSQALRYLYIRWGVELSNITVIVGECGDTDYEGLLGGVHKTIILKGSFNTAPNQVHANRSYSSQDVVSFDKQGIASIEGYGPDNLKSALRQFGILKD

SEQ ID NO: 41898 - protein, 82 aa, Zea mays
  Clone ID: LIB3136-044-C11_FLI.pep
WHGVKHSTEVRAANPSHSMVPFPQTKTQDYRNVHRRCLYKACISPTYIHPGSDGTCTSNQGLKSAHGNYSRFKNINDDGTAQ

SEQ ID NO: 41899 - protein, 162 aa, Zea mays
  Clone ID: LIB3137-011-D3_FLI.pep
PTLVSSSRSQLEEATLQLPLIPSSPSSSWPMVPEASVTHDDVDDALSTAACSSSSSCASPRRARWAGLALLKMRQTTQSAAAAPPPWELTLVGGGALAAQPWRWRPSGKETVVVSPRCKRPVGTKRTLVFCPRRRGGGGARTDWVMHEYRLLPAVEVEAGGE

SEQ ID NO: 41900 - protein, 282 aa, Glycine max
  Clone ID: LIB3170-036-F5_FLI.pep
THNKVLIFSHSFPTMASPASNPQSAETKKSRGRQRVDIKKMSNEANLQVTFSKRRSGLFKKASELCTLCGAEVALVVFSPGQKVFSFGHPSVDGVIERYLTGVAPPEADNMNYIDVHRMAKVVDLNAQLTHIKDQLEAERKRAKELGGIQKEAETHLWWARPVADITDINNLLKLKKAFQQLKQDVSGLAGMALFQSVANGNPGHQFFAGASSSAVPNVVLQSQPLPVAQVFPPAVPQMMFPPPIFENYMVNPNGFDDMGMGGGGFGGAGPSSAGGGGGGFF

SEQ ID NO: 41901 - protein, 188 aa, Arabidopsis thaliana columbia
  Clone ID: LIB3176-002-B9_FLI.pep
KTWKHPFSRIVYSRMYHPGSSPGALLLFSSLLTRDKVLLHFIYWDELPDMQELIGTDSTLASTLVAQHLLAAADRYALERLKAICESKLCEGVAINTVATTLALAEQHHCLQLKAVCLKFVALPENLKAVMQTDGFDYLKESCPSLLTELLQYVARLSEHSVIVSGHRKEIFADGCDASGRRVKPRLH

SEQ ID NO: 41902 - protein, 72 aa, Glycine max
  Clone ID: LIB3242-344-D5_FLI.pep
ATSCGSTLSDSTLLFFWTASILIHKFVYSFSYPIQARVFILCCQLSFHLSKFLHPLRGIGNYMLSSKGLYSG

SEQ ID NO: 41903 - protein, 365 aa, Zea mays
  Clone ID: LIB3136-060-B7_FLI.pep
PAPRRQFSMVAASVAERAYEAATRSALVALERNLIPDAVTRRLTRLLLAQRLRQGYLPSAPLQLQQLLQFVHSLEEMPIAIETDKAKAQHYELPTTFFKLVLGKNLKYSSCYFPGDSSTLEDAEVAMMDLYCERSKLQDGQSILDVGCGWGSLSLYIAKKYRNCSVTGICNSTTQKAFIEEQCRDNELSNIEIIVADISKFEMERSFDRIVSIEMFEHMKNYKSLLKKISRWMKEDGLLFVHLFCHKAFPYHFEDKNDDDWITRYFFTGGTMPSANLLLYFQEDVSVVDHWLVSGTHYARTSEEWLKRMDKSITSVRLIFEETYGKESTTKWIAYWRTFFISVAELFGYNNGDEWMVAHYLFRKK

SEQ ID NO: 41904 - protein, 275 aa, Zea mays
  Clone ID: LIB3245-475-F12_FLI.pep
TPSVLGRRGEGNPGPGRVVGRGSAAEEMEEREKLVCLAKLAEQAERYDDMVEFMKNLARMDVDMSAEERHLFSVGFKNTIGAKRASWRIICSHEQKVAADRQTGVMIDAYKKKVEEELRKVCNEVLSVIAIHCLPLASTGENIVFFYKMKGDYYRYLAEFSTGTEKKAASDQSLMAYQHAMVVASSELSPAHQIRLGLALNLSVFFYEIMNSHERACQVAKQAFDEALTEINSGEGGYKDSTLMMQLLKDNLALWTSELTGGEASKGNDDVDMEG

SEQ ID NO: 41905 - protein, 243 aa, Zea mays
  Clone ID: LIB3245-591-A11_FLI.pep
LKSPTGSSSGDGFDVMTLATDQPAGPVSATPKVPNARDDDKFNDGMYEDLCVDDADLTFEDYEELFGTSHIRTEELFDDAGIDGYFELKETPPFYFNEQPKAMQIECGNVVSADCAMSNPGARADSSLCIPVRQVRSSISHSLSGLTGESSAGDHHDCGVSPMLLMGEPPWHSPGGPEGSVAGGSRDSALTRYKEKKKRRKFDKKIRYASRKARADVRKRVKGRFIKAGEAYDYDPLSQTRSY

SEQ ID NO: 41906 - protein, 74 aa, Zea mays
  Clone ID: LIB3136-060-E4_FLI.pep
DLICTPNSHIHQICSHKNKPRKHMELRHKLNAHSKYQNNSSTKLFESRLSAWVTQIKQPADCSQLVNTEPQFAS

SEQ ID NO: 41907 - protein, 220 aa, Glycine max
  Clone ID: jC-gmfl02220081h06_FLI.pep
SSIPFWPEMSNSNWVLDYDYLDNIPLTTLEPPNFSWSSSSPPPTLSVELDDSFGILDGLKENRSRKRLRPSDSKACREKMRRDRLNDRFMELGSILDPRKPLKMDKAVILSDAVRVVSQLREEAQKLRESTENLQEKINALKDEKNELRDEKQRLKVEKENLEQKVKALSSQPSFLAAAGQVVGSKLVPFMGYPGVAMWQFLSPAAVDTSQDHVLRPPVA

SEQ ID NO: 41908 - protein, 335 aa, Zea mays
  Clone ID: LIB3137-028-C6_FLI.pep
ASAAVFIKKLFLPRLKSWIRNVVAEGNGTEGNQLKPRIDDETADAVKASASAVSAIAKTNQQLLASKDEAEKKILVTLTQALDSQAKELKSLTDSIGHTREPINITRDDRFSQYRPLEDHAPTVIRNGAINSSWRASQQTNMYGVSNGDFGSVRSSFAPAPVEPTAGSFSRSYGEQPMSTAQRSDRSSGSKPWEMQQYSQQRPGYGSNSQLSEEGSYSDAQDSYAPSYHQNGKAPDFQADEPRPLTYNTGVEERPPPQRRWVPPQPPGVAMPEAAAAIRQPKALPKQPSSDASEAAGEMQVNGSSASDAVTEVPVNGATASDAGRSEIQEQSVAA

SEQ ID NO: 41909 - protein, 789 aa, Glycine max
  Clone ID: jC-gmfl02220089g07_FLI.pep
KERVFYFPQGHIEQVEASTNQVADQHMPVYDLPPKILCRVINVQLKAEPDTDEVFAQVTLLPEPNQDENAVEKEPPPPPPPRFHVHSFCKTLTASDTSTHGGFSVLRRHADECLPPLDMSKQPPTQELVAKDLHANEWRFKHIFRGQPRRHLLQSGWSVFVSSKRLVAGDAFIFLRGENGELRVGVRRAMRQQGNVPSSVISSHSMHLGVLATAWHAILTGTIFTVYYKPRTSPAEFIVPYDQYMESLKNSYSIGMRFKMRFEGEEAPEQRFTGTVVGIEDSDPKRWRDSKWRCLKVRWDETSNTPRPERVSPWKIEPALAPPALNPLSMPRPKRPRSNAVPSSPDSSVLTREASSKVSIDPSPANGFPRVLQGQEFSTLRGNFTESNEFDTAEKSVVWPPTAVDDEKMDVSTSRKYGSESWMSMGRNEPTYSDLLSGFGTSGDPSHSSLKDQMSPAYSARKQSLDHEGKLHMPHPWPVMPSSLSLNILDSNAKGPTHGGDTSFQARGNLRFSAFGEYPALHGHKVEDSHGNLMPPPPAPQTQYQSPCSRELMSKHVSAKTCEAVKPKDGDCKLFGFSLISGPIVPEPSLSQRNVSEPAGQMHLTAHQQRTSENDEKSDHSKGSRPVDDLVVDDHDRPLQTSQSHTKDVQAKPLSGSARSCTKVHKKGIALGRSVDLTKYSGYDELVAELDQLFEFGGELLSTKKDWLIVYTDNEGDMMLVGDDPWQEFCAMVCKIYIYPKEEIQKMSPGTLSSKNEENQSVMASDGADAKVVKCQPHQKFNSENGLDA

SEQ ID NO: 41910 - protein, 163 aa, Zea mays
  Clone ID: LIB3150-063-B9_FLI.pep
SYAASEPKPLVERRRIVVILAVARFRTGYIALWRPAVCISTALISSGTIPGPSAHSARNTSIAKPLKQLMTACSMSRPRLSRAVIVDSRMPGLRAQNMWILTACPSLILTSTVACCPVGLGNEPGQSSSLTWPGNVCNVGVDGLKLADVGPTSEELGADSSSL

SEQ ID NO: 41911 - protein, 213 aa, Glycine max
  Clone ID: jC-gmle01810064c12_FLI.pep
LFILLLSLFAQVGNVYVQFREEDHAANALMNLTGRFYSGRPIIVDFSPVTDFREATCRQYEENVCNRGGYCNFMHLKKISRDLRRKLFGRNRRWNGRSGSRSKSPPRNRNHGEHLHSGRGSGRRDFDRSHGHHGRRPRSRSPRYRGKRSRSPVGRDRSPPIRENSAERRAKIEQWNREKEQGETSNKNNTKSNDDYQEQSVAQNGSESGNHQI

SEQ ID NO: 41912 - protein, 274 aa, Zea mays
  Clone ID: LIB3136-010-C8_FLI.pep
LEVCSPRANNEPSEVVRGLDPKSKRLSLGRASTFKEPEEVLHPHSHGTSTPSWRRSKSKSRTEKARPGLSATHDAKSSKVNAADKEDTSSTISDPGPVAVWDSGPKWDDEPKWDNQPNWEPETSIELHSPREDIELGLTKELVPSLDERWTVRKGRYLGVLVCNHSCKTVQSLSSQVVAPKAEYDDNCLDLLLVGGSGRLRLLRFLVLLQFGKHISLPNVEYVKVKSVRLKAGPNTHDGCGIDGELLHVKGQVRCSLLPQQCQLMGRPVKNPVQ

SEQ ID NO: 41913 - protein, 281 aa, Glycine max
  Clone ID: jC-gmst02400014h03_FLI.pep
QNGLRTLQQKVPPVRKNRRGPRSRSSQYRGVTFYRRTGRWESHIWDCGKQVYLGGFDTAQAAARAYDRAAIKFRGVDADINFSLSDYEEDLKQMRNLSKEEFVLLLRRQINGISRRSSTYRGALALRKDAQGEPRMGPFVGMTCYPKPSINCDDGKAEASFKPCSYKGEIIVNSNMTGTCHNLDLSLGISPSSKRLKNNDYSGGYSFGCMTCKIPEERGPMEKVMVDRIKNVPLQKISNLAWQLCSNGSIVPRPFQPNAASSGFVSSSSCLITRTSNQHTY

SEQ ID NO: 41914 - protein, 602 aa, Zea mays
  Clone ID: LIB3136-011-F3_FLI.pep
KMYIKKVVIEGFKSYKEEISTEPFSPKVNVVVGANGSGKSNFFHAIRFVLSDMFQNLRSEDRGALLHEGAGHSVVSAFVEIVFDNSDNRIPVDKEEVRLRRTIASKKDEYYLDGKHVSKTEVMNLLESAGFSRSNPYYVVQQGKIASLTLMKDSERLDLLKEIGGTRVYEDRRKESLKIMTETANKRKQIDQVVHYLEERLRELDEEKEELKKYQQLDKQRRSLEYTILDHELNDARNELASMDDNRRKISESMSLADNEVVDVREMIKSFDKEIKVSTKGINDTKAQKEGVEKRRTEALKVVAKIELDLRDIKDRIVNEKRAKDEAARDLQSVRRESEKSKSELAEISKVHQAKLKEEEDISKSIMDREKRLSILYQKQGRATQFANKAARDKWLQKEIEDLKPVLLSNKKQEGLLQEEIQKLKDEINDLTNYIESRKSESSKLEETLAKRHNDYNDLRKQRDVLQEERKSYWKEESEVTAELDRLQEDLIKAQKSLDQATPGDIRRGLNSVSRIIKDHGITGVFGPVLELVDCEEKFFTAVEVTAANSLFHVVVENDDISTKIIQILTREKGGRVTFIPLNRVKVPDLSCPQSPDFVPLL

SEQ ID NO: 41915 - protein, 311 aa, Glycine max
  Clone ID: uC-gmflminsoy037e05_FLI.pep
STSKSVSSSSEDDNELRRGPWTLEEDNLLSQYIFNHGEGRWNLLAKRSGLKRTGKSCRLRWLNYLKPDVKRGNLTPQEQLIILELHSKWGNRWSKIAQHLPGRTDNEIKNYWRTRIQKQARHLKIYTDSREFQELVRRFWMPRLLQKAKESSSSNMSIQNQAIPMPFDYVSQHLTVGTIPPWQGPCMNEAGPTYMDQHEQNSDSEHNNGSCISLSESANIPKVPQHFGHTTITQFHALNTNDFGTFTYEGYNVNNNVYEMDNFKTTTTWVAEDAQYPIGDCQMVGSNWVNNDFACNMWNMDELWQFSKLQK

SEQ ID NO: 41916 - protein, 475 aa, Zea mays
  Clone ID: LIB3136-050-D12_FLI.pep
GIRAKAPFLLLLLFSSRHRHWRERIHGTRRRGRDFVACVGGASAGCFASMERDFLGAIDRAWKCGEAAKEESRSEPDSPAATRWQFAARSGVAPAFMSFRTEATGEGSEAFSVSELRPAGDAFDGIKKQSSMLSIYQQQRQFGHNSSQATAQQQYPAAAHRQRSQAADYGAAAPHRLPGGGGGGCRLVQPVSVRHPVPFHQANLMVRSSVSQSFHNQQQPFTMSNNGFGGSTAGVYGARNPRNQASTQLTIFYNGSVNVFDNVPVDKAKELMMLASRASVPGATPSSEPDSPPVPAPAPAKVNVAEVFPGARQIAVQKPEPCVPHLSSAATASPVRIVVPQAVAPSRSTSHCATEACGSKPAAAPTSQTVSSSRQLAAASAAAAVTPRAVPQARKASLARFLEKRKERVASVEPYLTSNSKSPLESSDAVGSASAPTKSSSTDVAPASSHNGGGAELVRHGGYPRSISFSTNLQI

SEQ ID NO: 41917 - protein, 340 aa, Glycine max
  Clone ID: uC-gmflminsoy043b11_FLI.pep
NTQVSSIVYLFFFFTKMVRTPSCDKSGMRKGTWTPEEDMKLIAYVTRYGCWNWRQLPKFAGLARCGKSCRLRWMNYLRPNIKRGNFTQQEEECIIRMHKKLGNRWSAIAVELPGRTDNEIKNHWHTALKKRSQQNTLINEETKAIKSKNKESVHNNGVFVTLPATSQISDNSSLSPVSSTCSEFSSITSDLSTAASCMENLVFEDDDLGFLDLYNIDPMNGNLWTELNLDGISFNTPCEIVSGDTNSTFQSSSSSNSNTLDSPHQSTSESIVVNNDFGRFLDSYEEATVDNFWTQSYVADMSHVPSELFVPSVAESEYFTPLYDDLWGQTHLYHENHCLF

SEQ ID NO: 41918 - protein, 163 aa, Zea mays
  Clone ID: LIB3136-051-H1_FLI.pep
MTPDGILKVIDRKKNIFKLSQGEYVAVEYLEKVYGFPPLVEDIWVYGDSFRSSLVAVVNPHQENTMKWAESNGYKGSFDEICKLEGLKEYILKELAAVAQKNKLRGFEYIKGVVLDPVPFDIERDLVTATMKKKRKNMLNYYQSEIDTIYKKLEAQKNAARTK

SEQ ID NO: 41919 - protein, 140 aa, Glycine max
  Clone ID: uC-gmflminsoy119e02_FLI.pep
RKLFQDLPKISSGLSQLSLFDRDSRQSRMSLQQLGVIRSQRQVWRPIRGLPETSVAILRSWLFEHFLHPYPNDSEKLMLASQTGLTKNQVSNWFINARVRLWKPMIEEMYKEEFGEFSEDSNPAGNNYLTREDTTDCVED

SEQ ID NO: 41920 - protein, 242 aa, Glycine max
  Clone ID: uC-gmronoir008e01_FLI.pep
IQLRKTTTRMFQESSVTRWPTQWTRYHDKLFERALLVVPEDLPDRWEKIADQVPGKSAVEVREHYEALVHDVFEIDSGRVEVPSYVDDSVAMPPSGGAGISTWDNANQISFGSKLKQQGENERKKGTPWTEEEHRLFLIGLSKFGKGDWRSISRNVVVTRTPTQVASHAQKYFLRQNSVKKERKRSSIHDITTVDSNSAPMPIDQTWVPPPGGSLQQSQQYPSSNMHDQMGTFGYSNYGFDM

SEQ ID NO: 41921 - protein, 125 aa, Zea mays
  Clone ID: LIB3156-008-C8_FLI.pep
TKLGTPTMFKPYNSYCSIGSGSVAQIKFSVSEIIRLQEPKLFFSTWFLVFSPASTFLQVPKLFFSTWFLGIFSSFNFPCGLLEPSLGCISMLKCYSSVGPGLMPLPLLAALQVLLSVSALAMRLA

SEQ ID NO: 41922 - protein, 265 aa, Glycine max
  Clone ID: uC-gmronoir037e10_FLI.pep
MDLTQLVLVMFRSSSLLSPHPNFYTHTPPPSYLLQSQQSLIGFEQPPSSLLGLNHLSPSQISQIQAQIEAQQSQNQNPHSLNFLGPKPVPMKHVGGPPKPTKLYRGVRQRHWGKWVAEIRLPKNRTRLWLGTFDTAEEAALAYDKAAYRLRGDFARLNFPSLKGSCPGEEYKPVHSAVDAKLDAICANLAEMQKQGKTEKGARSAKKSKQGPNQEAKPEPQASAESEGSADSSPLSDLTFDVTEPQWEHFNLQKFPSYEIDWDSL

SEQ ID NO: 41923 - protein, 264 aa, Zea mays
  Clone ID: LIB3150-081-A11_FLI.pep
ERLIVYDYMPNLSIHAQLHGQHAAECNLSWERRMKIAVDSAEGIAYLHHHATPHIIHRDVKASNVLLDSNFQARVADFGFAKLVPDGATHVTTRVKGTLGYLAPEYAMLGKASESCDVFSLGVMLLELASGKKPVEKLNPTTKRTIAEWALPLARDRKFKEIADPKLNGSFVEDELKRMVLVGLACSQDKPEQRPVMSEVVELLRGESTERLSRLENGDLFKPDISFHGSSGPDSSDCVTEERSPKADATEEAVDSSETVPSAR

SEQ ID NO: 41924 - protein, 447 aa, Glycine max
  Clone ID: uC-gmronoir044b03_FLI.pep
QQMLSQDGYVSSNSKVASVYQQGHFLVKNSKFLVPAQDLLNEFCSLCAKQSDLGKPTKSLKKQWEDQENNGVGSSKKHSLTSLEFVELQKRKTKLLSMLEEVDRRYKHYRNQMKSVVSSFEAVAGNGAATVYSALALKAMSRHFRCLKDGILSQIQATRKAMGEKDPVAPGTTRGETPRLKVIDQTLRQQRAFQQMSMMETHPWRPQRGLPERAVSVLRAWLFEHFLHPYPSDVDKHILARQTGLSRGQVSNWFINARVRLWKPMVEEMYLEEVKDPENNIASSEGATDQDNDINPNNVQYPPPPLSSRSEDQKPSLVRIDSECASSIINNHSTPDNKNDPKGQEQCFGSVELDFSSYTHHSSGMVSYGSSDQNGNNNQSGVSLTLGLQQHGVSLAFPPATQSSLYYPRDQIEDCQPVHQYSLLDGEGQNLPYRNLMGAQLLHDLAG

SEQ ID NO: 41925 - protein, 169 aa, Zea mays
  Clone ID: LIB3180-017-F9_FLI.pep
LNGGLGHGLRNMSLDSVSSGRSFGHANHQQSFVSNPIELAANGWGGTWSSGGTSSSRPVVSSFGAFRGWSSSESSPALPHSDWRANGAAPYDYTSVDWSLDTTLLNPAAKSERLSDTWSTMFMGGRSTRTPGNLSGAGIAGLHDSNHPMDPAPSPRPYEWPTFCRGGSS

SEQ ID NO: 41926 - protein, 111 aa, Zea mays
  Clone ID: LIB3150-093-F6_FLI.pep
GSACGSSSTRRWSSRRPRITRLLPRPPSLLLARRGGFRGCHWLPTPVAAAITIAVTGSAMLTGTAMLHAHITSSTMTTITRGQRLQVTVSSLTRKIMKKRASNCIIVRHNS

SEQ ID NO: 41927 - protein, 224 aa, Zea mays
  Clone ID: 700212015_FLI.pep
QTKGPSGPRPRGRKPTKNDVVDLRTILIHCAQAVAADDRRTANELLKQIRHHSKPNGDGTQRLAHCFADGLEARLAGTGSQLYRKLIAKRTTASDMLKAYHLFLAASPFKRLSHFLSNQTILSLTKNASKVHIIDFGIYFGFQWPCLIRRLSKREGGPPVLRITGIDVPQPGFRPTERIEETGQRLAEYAEKFKVPFEYQGIASKWESIRVEDLKIWQGRSCDC

SEQ ID NO: 41928 - protein, 98 aa, Zea mays
  Clone ID: LIB3150-108-D3_FLI.pep
FGEWKQEMELMAGRIKNVRQKLYDSLSAKDKSGKDWSFILRQIGMFSYTGLNKAQSDNMTDKWHIYMTKDGRISLAGLSLAKCDYLADAIIDSFHNVN

SEQ ID NO: 41929 - protein, 84 aa, Zea mays
  Clone ID: 701176393_FLI.pep
GFGDDQNPYTESVDLLEDLVIQYITEITYKAMEVGKTGRVTVEDIMYLMKKDPRKYTRVKELLLMNEELKKARKAFDEVKYAAL

SEQ ID NO: 41930 - protein, 119 aa, Zea mays
  Clone ID: LIB3150-108-H12_FLI.pep
DKRGTTESSDLKKGLVNAIQDLYDVVHHEAFSVDMSGHIEDWDQINLARAEGHLFNKLKWPNDPKLKDLIKRLYSLLTIKESSATIPKNLEARRSLQFFYDLTVHGNACCTACFGNGLL

SEQ ID NO: 41931 - protein, 113 aa, Zea mays
  Clone ID: 701179408_FLI.pep
FTSYKQAFFLIKPYFVTCTLVCLFRLDRNRLPNTTGIFALNGSLLEWTSIELLPSHIPIHHGTQHDKCHEHNCIVHGLTSHRSGRREEEDNRSECGPDHGPEVNGSGEFTHVP

SEQ ID NO: 41932 - protein, 122 aa, Zea mays
  Clone ID: LIB3279-008-H7_FLI.pep
QSQPVARARPPSICSCYLLNSVSKYWSLLPLSRQSCETHLPPSSSVEQTPFVVACLLCYDGSWSAASPKNWLGTLRASPSAEFVASRLIKESAVHDVADLGRRRGDVVGGWQPLRWLDSQPN

SEQ ID NO: 41933 - protein, 279 aa, Zea mays
  Clone ID: LIB3279-015-C4_FLI.pep
LALPASSVLDDERHTMHAPMHDSYMHEWTHARVAPLYAAAGDHHSSAPPSPAVALLLLLRCPGACDPERAQRAEAVEVVRHGQQRPRHLPRRQDLVQPVQRLLPKVLSLSDEALERGELVHGDGHLTHVVGDVRGAAERVGDHGVRQRLVERLQALAQRFLRLQRRLLQPVHAHDLLFGQGLYVAQQHLDDFGGAEAAEPEEAALGGAPPDAGDEVEDVALDGALLDAHHLVVVRQAALHVHLQLPLRQVLLQRRPKLVHQPVVLLLPPPVLHVEHRRL

SEQ ID NO: 41934 - protein, 107 aa, Zea mays
  Clone ID: LIB3158-017-B4_FLI.pep
QRPGLSTVHVYCCARHVPGLVADKVQHRRRQVLLRIQPSPQGHHLRRCLLRLLLAHGHGELVLQMQAAAGGVNPYLVFPKLHRTQLKHKKNLLAIKRRNANERYRDS

SEQ ID NO: 41935 - protein, 379 aa, Homo sapiens; identical to SEQ ID NO: 37526
  Clone ID: LIB4119-144-D2_FLI.pep

SEQ ID NO: 41936 - protein, 215 aa, Zea mays
  Clone ID: LIB3180-030-B4_FLI.pep
EGEKEGEMVKHNNVIPNGHFKKHWQNYVKTWFNQPARKQRRRIARQKKAVKIFPRPTAGPLRPIVQCQTLKYNMKSRAGRGFTLEELKAAGIPKRLAPTIGISVDHRRKNKSLEGLQANVQRLKTYKAKLVIFPRRARKVKAGDSTLEELTTATQVQGDYMPITRGEKRSVEVVKVTDEMKAFAAYGKLRLERMNKKHLGARQKKAAEAEKEDKK

SEQ ID NO: 41937 - protein, 315 aa, Arabidopsis thaliana
  Clone ID: LIB24-059-D4_FLI.pep
VMIGENKNRPHPTIHIPQWDQINDPTATISSPFSSVNLNSVNDYPHSPSPYLDSFASLFRYLPSNELTNDSDSSSGDESSPLTDSFSSDEFRIYEFKIRRCARGRSHDWTECPFAHPGEKARRRDPRKFHYSGTACPEFRKGSCRRGDSCEFSHGVFECWLHPSRYRTQPCKDGTSCRRRICFFAHTTEQLRVLPCSLDPDLGFFSGLATSPTSILVSPSFSPPSESPPLSPSTGELIASMRKMQLNGGGCSWSSPMRSAVRLPFSSSLRPIQAATWPRIREFEIEEAPAMEFVESGKELRAEMYARLSRENSLG

SEQ ID NO: 41938 - protein, 119 aa, Zea mays
  Clone ID: LIB3150-088-D6_FLI.pep
RGAREQPPPEQLRVVPMDDRRRRDLPHGHRQAERRQRRGLNRAAPLAWDRRHNPKADKKKTTTTLPLPPASAPAGRRAGHLDGASRYRRTSCRMHACPAAQDGYAASVVYIIHEQRRPL

SEQ ID NO: 41939 - protein, 235 aa, Zea mays
  Clone ID: 700468530_FLI.pep
SQWINCDIRNFRMDILGQFGVIMADPPWDIHMELPYGTMADDEMRTLNVPTLQTDGLIFLWVTGRAMELGRECLELWGYKRVEEIIWVKTNQLQRIIRTGRTGHWLNHSKEHCLVGIKGNPLVNRNIDTDVIVAEVRETSRKPDEMYAMLERISPRTRKLELFARMHNTQAGWLSLGNQLNGVRLVDQGLRARYKAAYPDVEVQPPSPPRTSTPMDVDQSSSQKVAALDGGERPA

SEQ ID NO: 41940 - protein, 433 aa, Zea mays
  Clone ID: LIB3150-091-C11_FLI.pep
AMMQQPPPQQPQPGMAPPPPPQAAGGQPPQWGGIPPPMAQQYGAPPPQQPPAMWGQPPPQAHYGQAPTPQQYYAAPPVPVQAPAAPAAADEVRTLWIGDLQYWMDENYVFGCFSNTGEVQNVKLIRDKNSGQLQGYGFVEFTSRAAAERVLQTYNGQMMPNVDLTFRLNWASAGEKRDDTPEYTIFVGDLAADVTDYLLQETFRVHYPSVKGAKVVTDKLTMRTKGYGFVKFGDPTEQARAMTEMNGMPCSSRPMRIGPAASRKNTGGVVQERVPNSQGAQSENDPNNTTIFVGGLDPNVTEDTLKQVFSPYGEVVHVKIPVGKRCGFVQFVTRPSAEQALLMLQGALIGAQNVRLSWGRSLSNKQAQPQQESNQWGAAAGAGGYYGGYGQGYEAYGSGYAQPQDPNMYGYGAYGGYPNYQQQPAAQQQQQQQ

SEQ ID NO: 41941 - protein, 515 aa, Zea mays
  Clone ID: 700468802_FLI.pep
DNYMEMNSRKPNWRCPYCNTSSSFTDLRIDQKMMKILEETGDDVTDVLVFADGSWKVVPAQDEKSDRHRGDTIQQAGDAVETGSPSRDVIDLINGNDDGDMQMDWASAPEDSKPVLNSQDLSVSDYLTDFPMTAQTEDLNRGDGNNGGSNMASTSRQNLLLPPTSGLGSSSLGTLESILPQNVLHPVITDAVSPSLETSSASGMQHVSQETHCGTVQLQPQIGPVHGSEVRRLPIPRNPRREPIGVQGLTVPPQNPGSSTRLQPNILNCPPPIPLSSPSSSTYQAHQVKNPDSVIASRNSGSGPLPRTPSVAAASLHLQSTARDIRNTSSHLPSRVVGLPAPHLMGARPPPGISVQAGGANAYRTMQQTPTMDPLRHTRMSMNQTALAAAGQTTAAAYVRPTQADIQNHLFPVQQSQAPRSQQVPRTTTPPLQRAPPHLQPPSVPPTVPSTPQAGPSHGLPPELPVDDSWRPTGQMRGSLTGNAYSSAIRHYRGHSEQQQGEPRPPNTSGARRPQ

SEQ ID NO: 41942 - protein, 266 aa, Zea mays
  Clone ID: LIB3150-102-D5_FLI.pep
TETWCPAALPFVVHCFASILARKGMGTGEGSPPARRGISGRRRRWPDGEDDDEYVLDEEEEEDYVEELSASSAGEEGVDSDAEYQEAEEEEEEEEDDEIETPRPKRPAKGSNRVRKGKVDLAAARSRRRKYEEDEDYEEEVDEDDEVEEEYHDDLEEADEEEEVAPQRPKSIVKCGARGRNVKLSLAAKRSHQRKQEDDEDMDFDPELDDEEVEIDEDIDFDPDVDGDEEDEYQDEEEEELVPARARKVTVKNPVKRKSISKRRTP

SEQ ID NO: 41943 - protein, 319 aa, Zea mays
  Clone ID: 700551584_FLI.pep
IKGSGPANTSPSIIKSMLPRVRTIVRFRPQLVNPNNSEGGITGIPYANRQAHRRKSKGYQVKKFDVTKRRTVPIHDSNSVCGVLLEDGFCLEHPVHGRKRCSLHKGKRVKGSPKSSPTSHPCQVGIAITEFCLTEDLDSSVPKQESEIRPKNMSTTLKEPQRQSDNLESQKVNTGEASTEDGTQEVSRDACILEEKAFFHADSESQEQQPSGRMWFELLKSQRKPASAHPSRRGLGSQITAMTDNRSCKMVSIAGMERTEKDSGVEVTAASFSRSSGWPCTCGARTSDGSRCMNMPIEGRKRCALHKGQRAAFPPTPSA

SEQ ID NO: 41944 - protein, 192 aa, Zea mays
  Clone ID: LIB3159-021-C8_FLI.pep
QGVRGVPLPLGHACRPRDPGAGSSGPGQLGEGAGVGGRPRRAGHVPGRPGAVGHAADHPGDRVRGHRLRRAPAHHGEGPREEEVPRRRLRPARLLQGPRQVRGVQAQGDQERPPRHAGLRRLLRPAVGVPRHRPAGEPRLPPRRPVAQQHRRHHHPQINLPLSSAQLLVAVSCVRLGPACTTSDDGDFPPGN

SEQ ID NO: 41945 - protein, 155 aa, Zea mays
  Clone ID: LIB3060-010-C7_FLI.pep
TESISNMIYIVHRARVAVPGRPDQRHPAVQGGAGEDEGDGAGQLPAGLRGEPRADERGRGEDVHPDAHGGVQGGAVGAAQEGQHLRLHVRAQGHGEGHRRHHARPRSQGRDQLVGLQEAAQEERAMERRSLLMMILHCIVQLKQSGGDEFALHCT

SEQ ID NO: 41946 - protein, 476 aa, Zea mays
  Clone ID: LIB3180-014-A7_FLI.pep
RSNVGNPRRRRPPPLLIPAPPRDREGVRRGADRGHGHGNTGARLMDRIVGGKFKLGRKIGCGSFGEIYLATHVDTYEIVAVKIESSKTKHPQLFYEAKLYNTLQGGSGIANVKWCGVDGEENVLVIDLLGPSLEDLFCYCGRKFTLKTVLMLADQMITRIEFMHSKGYLHRDIKPDNFLMGLGRKANQVYIIDFGLAKRYRDSTTNRHIPYRENKSLTGTARYASCNTHLGIEQSRRDDLVSLGYVLLYFLRGSLPWQGLKAATKAQKYDKICEKKISTPIEVLCKSCPVQFSSYFHYCHSLAFDQRPDYAFVKRLFRDLFISQDYEFDYVFDWTVLKYKQGHKQKQSPGAPIARPIQAHGPKQAGVNGVINHNEAQEHVETSRPTGQAAWSQDKQATNNDRNPDVRHTVNLRQDMAAGKAQLTTSVALPSSQWKNYSDSRHKGQFDAVHHNQGIVNITSSSNSWLPTFQHNAPGK

SEQ ID NO: 41947 - protein, 163 aa, Zea mays
  Clone ID: 700157834_FLI.pep
TNRDSVMAMMEAFVHDPLINWRLFNFNEVPQVSNYGNVHAHTVVSSEEAVANRELMQPQRGARERELLQAVNQLGDANEVLNERAVAVMARMSDKLTGRDFSSGSALAGAGSSIQHGSEHLASGDARDAQPGLSVKVQVQKLILQATSHENLCQNYVGWCPFW

SEQ ID NO: 41948 - protein, 338 aa, Zea mays
  Clone ID: LIB3180-031-F3_FLI.pep
LDLASGLGGKINKVEVKSAVDEYEKYHGYYGGKEEARKSNYTDMVNKYYDLATSFYEYGWGESFHFAHRWNGESLRESIKRHEHFLALQLGLKPGMKVLDVGCGIGGPLREIARFSSTSVTGLNNNEYQITRGKELNRLAGISGTCDFVKADFMKMPFDDNTFDAVYAIEATCHAPDPVGCYKEIYRVLKPGQCFAVYEWCITDHYDPNNATHKRIKDEIELGNGLPDIRSTRQCLQAVKDAGFEVVWDKDLAEDSPLPWYLPLDPSRFSLSSFRLTSVGRMITRTMVKALEYVGLAPQGSERVSNFLEKAAEGLVEGGKKEIFTPMYFFLVRKPLLE

SEQ ID NO: 41949 - protein, 115 aa, Zea mays
  Clone ID: 700237256_FLI.pep
NNQSSFLHEPRLWAHRSQPLVVARELIQDPALLDRQWTLHLLLLDPPLHPCVLRHGHQVEVKIPQCDARRPRTGRGQGDGRRRAVPVVAALVPAERLARGEPPPADRASVRASSR

SEQ ID NO: 41950 - protein, 76 aa, Zea mays
  Clone ID: LIB3136-020-H8_FLI.pep
KYSIISLEHIMGKRVYFEVQEKRSILETTKHRALHARSHLSCNNKNLVQTNDHHWLQPSGVNNTMMTAYRTGYTYW

SEQ ID NO: 41951 - protein, 176 aa, Zea mays
  Clone ID: LIB3150-093-E5_FLI.pep
QSGRSASVLRSIARQAVGEESSTLTAAMSVELILWLFSFVSVMVLIGLTAYQLICLSDLEYDYINPYDSSSRINAVVLIEYSLQGALCASFLLTLHWFPFLVMTPVTYYHVKLYLARKHLVDVTEIFRQLSDEKKYRMIKLAFYFCLFIITIYRLVMTAVMLFIDEDINLAETRSI

SEQ ID NO: 41952 - protein, 403 aa, Zea mays
  Clone ID: LIB83-014-D6_FLI.pep
RRAKTLTDCPLDLIPGRGSRDGAAADGRGEPAPGGGAGRGGLQVRGAAGAVHGDGGRGGHGLREPPVVHVGGRVRVAVAEAQEREHGHRAARAAATAPALPGGGAGPDGVHLGRAVQAHPGGGVQAQGVEAARARRPGRPQPGGQGRVPVAQVRAEGYQGQPLPAGLLPLLLRPGLPSQEEGAAQRRRPHHPGRHVRGRPQPRPAPATGAGAARRLQPWRQQEAAVAAEAGRRRSGAAPPPAGPAAPAAAGGWRGEMRAARGRGGVGAHPAEPRGADGHDADAGPQLQGGVRHRAVRPALRDVADQGLTERIGWIGRLASQEILDQIVFERTPQWSTAQRWLGCQSETAVTEQDTRGLHSAVVQEEEQTQGEDGARPDMAWNRDRRHRRRGCGRRRDMRNTTC

SEQ ID NO: 41953 - protein, 231 aa, Zea mays
  Clone ID: 700355690_FLI.pep
VKLTNDQELLFRNIQRNEYHNLFNFISGKHLKILNLGDGQGRTSGVTAVLQSTDDDSVDPHLERIKNQAGNEESDEEDEDFVADKDDSGSPTDDSDAEGSDASMSGGEKEKPSKKEASSSKPPVKKKQKSGPDEGSQKKKPKKKKDPNAPKRAIAPFMYFSKAERANIKSSNPELATTEIAKKLGERWQKMTAEERQPYVEQSQVDKQRYAEESAAYRGAAAQQGSGAGSE

SEQ ID NO: 41954 - protein, 304 aa, Zea mays
  Clone ID: LIB3150-118-A11_FLI.pep
DDFKPVLKELLATHPGLEFLQGTPEFQERYAETVIYRIFYSINRSGNGHLTLRELKRGNLIAALQQLDEEEDINKVLRYFSYEHFYVIYCKFWELDADHDFLIDKENLIKYGNHSLTYRIVDRIFAQIPRKFTSMTEGKMGYEDFVYFILSEEDKSSEPSLEYWFKCIDLDGNGILTFNEMQFFYEEQLHRMECMAQEPVLFLDILCQMIDMIGPENESYLTLRDLKRCKLSGNIFNILFNLNKFMAFETRDPFLIRQERENPTLTEWDRFAHREYIRLSMEEDGEDASNGSGDVWDESLEAPF

SEQ ID NO: 41955 - protein, 110 aa, Zea mays
  Clone ID: 700382101_FLI.pep
DELIAELDQMFDFDGELKSPCRNWLVVYTDNEGDMMLVGDDPWNEFCDMVHKIFIYTREEVERMNPGALNSRLEDCLSDSLGRGLASKEPRSGPSTSAVDSENRANLSSQ

SEQ ID NO: 41956 - protein, 216 aa, Zea mays
  Clone ID: 700427219_FLI.pep
ALSASWRRRRPPPGGQAIVGSYSSAPSPVMSTQNKRLKDVEVSFPIVYGTISFWLGKKASEYNSHKWTVYVRSANNEDLSVIVKRAVFQLHPSFQNPTRVVEQPPFELSESGWGEFEIAITLYFHSDVCDKRLDLFHQLKLYPEEEAGPQSTKKPVVVETYDEIVFPEPTEAFFLRVQNHPAANVPRLPPGITLPPPGMCMFLNLQPARLVFQNRK

SEQ ID NO: 41957 - protein, 91 aa, Zea mays
  Clone ID: LIB3150-100-E2_FLI.pep
YRNINDCLLLLGVTSLGLLDTTDLLGPVLPLFHLLAGLLNLSSKTIPDEAVFGLELLGRLEVIVDEAEASGLASTEVGAELEDEDGVGVLH

SEQ ID NO: 41958 - protein, 63 aa, Zea mays
  Clone ID: 700806358_FLI.pep
NGKKHQRALGMSMRVERASLEQLCRRLLIFTWRTMQPRRYTRYKKFNQHFPSMSECRSIKLRR

SEQ ID NO: 41959 - protein, 181 aa, Zea mays
  Clone ID: LIB3075-014-A11_FLI.pep
QGHGRTLRRAHHRESAVHFVQCAPCRRRRRLGRRRGRLQGPHLLAVAAAAVHGVGWVRAGTPGPRHPGDLRQPVLHQPALWRRSAAVRPGTGVVGCRAWGRGGRRQPRRHLRLRRLRILPGLRGVHAADGEACTGRRHQRRGPPELPGGEQLRIKSCMLTLNYLVVRAACIADLLSAKSSQ

SEQ ID NO: 41960 - protein, 335 aa, Zea mays
  Clone ID: 701180711_FLI.pep
HDNAKYPLDEKTQKEKKKGSKRQQNGGPLVPEIDDFDEDELKEASSMVEEEIQYLRVAMGHENESFEDFVKAHDACQDDLMFFPTSNSYGLASVAGNADKISALQNEFETVKKRMDDEAKKASRLEQKIKLLTQGYQIRAGKLWSQVQDTFKQMDTAATELECFQELQKQEHLAASYRIQNLSEEVSKQKALERTLQSRYGELVSGFQRIQEQVEEHKRQLKVQEAVEAESHAQEEEAAASNHAAAEEEDERKEDDERKEEDGRKSLSSEEKPQQTSTATDEEPAGSKGTTEDQMDVDSGNGEGGVVGPVPPAPDTEGGNDEVSVQEISEAQPLP

SEQ ID NO: 41961 - protein, 251 aa, Zea mays
  Clone ID: LIB3066-023-A4_FLI.pep
FNKEELLEFYLKQAARGRKLKFDIIPTVHLYRHDPWELPSLARVVGEREWYFFVPRDGGGRAAKQQPGSGGRPSRTTERGFWKATGSDRAVRCAADPKRLIGLKKTLVYYEGRAPRGTKTDWVMNEYRLPDAADASSDARVPQVDVVLCKVYRKAVSLKELEQRVAMEELARATATPSASHSTGSPADSMSSSEIVMVPVGGVSLSPSAAMSMKREEAAKNQQQQDPFLTQLRSPRMESWWSAYYASVLNF

SEQ ID NO: 41962 - protein, 120 aa, Zea mays
  Clone ID: LIB143-014-E4_FLI.pep
DGGQGKTIPMRRGREAAGQRSGVWMEGLRRSCPTQQQKRMHARWKESERFCWRRESLILAESSGNKRRPRTRANLAPAAAGVTPHLSKISFPLGSVGGGNGNWTTPDPGRRNRRTSQGEG

SEQ ID NO: 41963 - protein, 209 aa, Zea mays
  Clone ID: 700051334_FLI.pep
GMVRHGAREVAGGARQGDAPPAGGAGGGVRRDGDDAAERCFLWIGGFRPSELIKIAARHAEPLTEQQAMSVCGVQQWARDAEAALDHELQAMHSSVSEAISSDAAALLYPHSDVPGFMATMSLAISKLASLEAFVRQADALRLQTLHRLPQILTARQSARCFLAIADYSHRLRALSELWHTRQGHERAASTQAARPSQTPPYQSRDGLL

SEQ ID NO: 41964 - protein, 164 aa, Zea mays
  Clone ID: LIB143-022-H7_FLI.pep
LLKLGYQAVAYIEASAVIYQDGKILIEVDHLQGVSTPYLQIKGTNKEIVTSAGSALCLDGSYTTKSYLQIILESLPADGNVSIGIHNQQAARLQELVEFIQSQGGSFNSDLSSPIRETSSTDSVIDDMQSRIRKLERWNTINMVLWTILLSALVGYSLYQKKRH

SEQ ID NO: 41965 - protein, 208 aa, Zea mays
  Clone ID: 700572124_FLI.pep
RSSYRSRAAPTEKPATSNYNTRRTSTQEKPTKGERASLGGGELGDGLGALRDGVLGELAGEHEAHGGLDLAGGDGGLLVVARELDGLAGQLLEDVVDEGVHDGHGLGGDADVRVHLLQHLEDVDLVRLHALLALLLATLALAALLAGGLASGDPLLRLGLLPGGRLLRRGLLLRRLLRRGLLLGLGRHRSWVGRGEGNRLQGNARRYV

SEQ ID NO: 41966 - protein, 397 aa, Zea mays
  Clone ID: LIB143-046-H1_FLI.pep
KKEKTPCPHQFNASSPFTRRVLCLSLSLVQRPPTRFARPSPATSTHQGLKMSTSTLKEPNVSQSKDVENGKDNSVKSCISKPVLNGNKCANKEQNVLSCCPGAVTNGNEAGNADVEYIDSENLVDLPDVDATLCTLVKRLDSKDWVMTCEALNNVRQLAMYHKERLQELLEPLVPLIVKSVKNPRSAVCKTALMTCADIFKAYGDLLVESIDPLLVQLFLKASQDKRFVCEAAEAALTSMTSWISPLLLLPRMQPYLKNRNPRVRAKASVCFSKSVPCLDMQGVREYGMDKLVQIAATQLSDQLPESREAARNLALELQVLYEKSQASTSDENEGEPSVSQDAESWESFCQSKLSALSAQAILRVTSTTPKEGVASTSNARKEGVTAAPKEGLDVDC

SEQ ID NO: 41967 - protein, 263 aa, Zea mays
  Clone ID: LIB3060-027-B9_FLI.pep
VIGNLISLALLRNGKDGGSITGKNLLFAVFLGCMIVGIVLMCLLSKRDEKKDNTSTHSSFGAMLKYIIAPLKDKRMLLTIPLIAYSGLQQAFVWAVFTKSIVTPVLGISGVGGAMAIYGAADVVCSLVAGRLTSGLRSAAFIVSVGAILQAIVLFWLLLFYSPMDGLLGAAIPLVIGALWGVGDGVLNTQLSALLGLLFEDVKEAAFAQLKVWQSGAIAVIFFLSPSITLQAMLLLMAAALVISFGSFLFLTLVVEKSSPVRA

SEQ ID NO: 41968 - protein, 222 aa, Zea mays
  Clone ID: LIB189-011-G9_FLI.pep
SPPSLPFLFSFSHCDACLGDRRRSTPGAQVFAGAEQPPAAVQQITSVEGMDPYMTRLGAGATHQLSRAEAMPDRRSRFWQTDVQLAPRIDIICPLPRRPSRLPVLNSPKLNGALPLYRADPTFDIVDLILSKNDPDVDTDSSSQAGFFCGSPPARTDNPVINDPQFGKKTPSFSPLFGGSSSGKMTAGRVEVGSPSSCGASSPKVRIEGFACGNKEPPHCFA

SEQ ID NO: 41969 - protein, 158 aa, Zea mays
  Clone ID: 700048774_FLI.pep
QAGGDQFPSWASPQYATGHGNFGTEDNHENGRWNNSEYHDLNDACKLEVTYDQAPVNSAEPCLSSFAPLSEICPSMSNGSSKEDNHQANPGIGMPMQGLPKRSGFDVVPCPDRDSVISRYKAKRKTRRFDRQVRYESRKVRADGRLRIKGRFAKANQT

SEQ ID NO: 41970 - protein, 454 aa, Zea mays
  Clone ID: LIB143-006-H5_FLI.pep
ESDAPSSVCGGGGRRRKRNMQAVARAARGLAAAAVARAARGLAAAAAAARPSVMEAGHSGQVQQARGIVVQVRDGNLEPALSIMERKMRSSGTERLIRAHTLLDIKDSENRLLALKELMQRVRSQELMLRKIVIKQIRTMEEDNADWCDENVKIACEIFAEEVRAKNRSGSHLNKLGYNNVMVKFKERTGKTYSELQFKNKWDKLKKDYSNWKQLGKETGCGWDPNKKLYVAPDWWWEKANIQFKGISKFKDKSLQNAEELSVMFEDLRNTGDDHWVPTSGELPQDTEAQIHDAINIEDENASDCGEDTPSSSTSKRRRVVVTDKGKKPKTTGGQWMQDQMSKLFELNKQTTTSCESMVLARTQETPGSSIKDVMQLDKGKKPKTTGGQWMQDQMSKLVELNKQTTSCESMFLARTQETPGSSIKDVMQLVKACGAIAGSKEHFIATQVFTKKK

SEQ ID NO: 41971 - protein, 360 aa, Glycine max
  Clone ID: 700865271_FLI.pep
THNSMTRRCSHCSNNGHNSRTCPSRGGGGVKLFGVRLTDGSIIKKSASMGNLNLSSAAAHHQFHSSPSSSNLAAAPSSPNPSSPCSDPPQGYLSDDPAHVSTFANRRGDRKKGVPWTEEEHRLFLIGLQKLGKGDWRGIARNFVVSRTPTQVASHAQNYFIRQSHATRRKRRSSLFDMVPDMSSDQPSVPEEQVLLPPSQNSQPCNGKSQPSLNLSLKSEFEPMETTSQENAQQTNETMMGSIGLTPMAPHGFFPAYLPVPFPMWPSTVAPPFEEVKGGETSHHQIHKPIPVIPKEPVNVDELVGMSHLSIGEAKVRDREPSPLSLKLLGEPSRQSAFHANAPVGTSDLNNGKDNAIQAV

SEQ ID NO: 41972 - protein, 149 aa, Zea mays
  Clone ID: LIB143-018-E5_FLI.pep
RYTHQGMILIINESHDGAGVGGVLLADDPVAAAAGVAGVRLGHVLREVLRRGWGRGGGRDRLGGLAAGAAVAPAVAVVAAAVGRPRRVRVRVRPRVGDLHHLGWRRGGLLLLGRCRGGLLLGRLLLGRGWLLLGRLLLRWRGLLLGWLL

SEQ ID NO: 41973 - protein, 176 aa, Zea mays
  Clone ID: 700620119_FLI.pep
PPQQKPPMPQQQSMDIVMVPAETTPHADIPVHEGSSGGAASSRWPKAEVHALIQLRSNLDTRYQEVGPKGPLWEEISAGMRRMGYNRNAKRCKEKWENINKYFKKVKESNNSRIVFPGHGPVIDPSARTQALSPGDSHPPPLLHGFFSFSRSHVTFVSTHLSPPCMLVHISSSLHL

SEQ ID NO: 41974 - protein, 320 aa, Zea mays
  Clone ID: LIB143-019-G9_FLI.pep
KQQIFSDLEKYCPSHCILATNTSTIDLNLIGEKTKAQDRIAGAHFFSPAHVMPLLEIVRTQHTSPQVVVDLLDVGKKIKKTPIVVGNCTGFAVNRMFFPYTQSALFYVDLGMDVYKIDRACTKFGMPMGPFRLADLVGFGVAVATGMQYLENFPERVYKSMLLPLMMEGNRAGEATQKGFYKYEGKRKATPDPEIMKYIEKSRSMAGVTPDPELMKLSEKDIVEMVFFPVINEACRVLDEGIAVKASDLDIASIFGMGFPPYRGGVMHWADSIGAKYIHGKLEEWTKRYGGFFKPCSYLAERAAKGIPLSAPTKKVQARL

SEQ ID NO: 41975 - protein, 342 aa, Zea mays
  Clone ID: LIB3061-007-F5_FLI.pep
ADTSFGGEQKEEQSTESAPQNKVVNVSEQSSTVSRISPAAKLLIKEHGLDTSSLRASGPRGTLLKGDVLAALKSGINSSSTKEKKSPAQPSSQPTRDSQSQASSISQKDDTYEDIPNSQIRKVIAKRLLESKQTTPHLYLSKDVVLDPLLAFRNELKELHGIKVSVNDIIIKAVAIALRNVPEANAYWNNDKEETQKCDSVDISIAVATEKGLMTPIIRNADQKTISAISAEVKQLAEKARAGKLAPNEFQGGTFSISNLGMYPVDHFCAIINPPQSGILAVGRGNKVVEPVVDSDGTEKAAAVTKMSLTLSADHRVFDGQVGGKFFTELALNFSDIRRLLL

SEQ ID NO: 41976 - protein, 233 aa, Zea mays
  Clone ID: LIB189-002-A5_FLI.pep
KCELMISRSSSAAAADSTSPRASSSMSSIAAPIIALPLLPEGDAGAAEAGLFRLAPAPPWPRRRRLLLLTRRMTPAGSRTVTSSSTSSSASGQQQHTAAQFAAACPAPSPHPGWGSCSSSPSPSPCQCSRMRPAPLPDREPAADSFLEPLALPAQVAAGCVRQHPAKFLLKGRYPALCSRTKWYLEREVCIGWWRWSREREGEGEDEERIEAAMACVASASFSFSRSRLLRAS

SEQ ID NO: 41977 - protein, 247 aa, Zea mays
  Clone ID: LIB3061-020-A3_FLI.pep
SSPFSQLPPLYSSPYAASTASGVAGPMGLNQLGPAQIQQIQAQLMFQHQQQRGLHAAFLGPRAQPMKQSGSPPAQSKLYRGVRQRHWGKWVAEIRLPKNRTRLWLGTFDTAEGAALAYDEAAFRLRGDTARLNFPSLRRGGGARLAGPLHASVDAKLTAICQSLAGSKNSSSSDESAASLPDSPKCSASTEGDEDSASAGSPPSPTQAPPVPEMAKLDFTEAPWDETEAFHLRKYPSWEIDWDSILS

SEQ ID NO: 41978 - protein, 228 aa, Zea mays
  Clone ID: LIB3066-018-D9_FLI.pep
EFEEVEAAPVLVDGPLEPQTSNIMSTTTHIQEDPLSAFFSAAANAGGNSAVAVARQPIQLFGATPVATHAATSITTIQSPGLHYLLPSQASSVSGMPADAHGSIGRSTNLVNPSLFSPLTSSQTTMVCTNSVVAIAPPQHPQTAQQPQSAPLLQPFLLPTASPSPPYGTPLLQPFPPPNPSPSLASAPVLSPTLSRDKVRDALLRLVEVYCSVYFISMYDLNALFFFL

SEQ ID NO: 41979 - protein, 152 aa, Zea mays
  Clone ID: LIB3066-031-D7_FLI.pep
LPLPLRSILQRSEVNMSDRAKMSWQAYVDEHLMCEIEGHHLAAAAIVGHDGAAWAQSTAFPEFKTEDMANIMKDFDEPGHLAPTGLFLGPTKYMVIQGEPGAVIRGKKGSGGITVKKTGQALVVGIYDEPMTPGQCNMVVERLGDYLLEQGM

SEQ ID NO: 41980 - protein, 128 aa, Zea mays
  Clone ID: LIB143-040-G4_FLI.pep
TLLLYLYASSSSSSRLSCAIAGPGGPAQLQLQQEQPQLVPQLQVLQSQPPPSVAASKPPALALVVGAARTMVLMLLAAAVSTSGDMQLHELPQEQLEPQLHLPLLQDMITDEGEQALAVLGGGRGGRG

SEQ ID NO: 41981 - protein, 78 aa, Zea mays
  Clone ID: LIB3068-038-B11_FLI.pep
SVFYYEILNSPDRACSLAKQAFDEAISELDTLSEESYKDSTLIMQLLRDNLTLWTSDISEDPAEEIREAPKRDSSEGQ

SEQ ID NO: 41982 - protein, 239 aa, Zea mays
  Clone ID: LIB143-042-G12_FLI.pep
LIILGWLLTVRRRRCHFSPTRHSGGATNDDEARHIARIDAGLPDRHQSVAAAVDGEHVRRWRLQVIAAEPDAVVFASGGCAIEPAEVDGAVAAASGIEKQPRPLDARAVLRLRGGEHGVAPGAGDEAAQHLRVARDLDEEREHLLGPALRLLHAAPHRGHLLLDGPLLPPQPDHLHGHRVLVVGGAGAGAVAVVLALAAAAPADDLAQEMRLAAKEGHVRELPPVRIDLPEALQSGDRD

SEQ ID NO: 41983 - protein, 194 aa, Zea mays
  Clone ID: LIB3069-001-F3_FLI.pep
CLVHQQSPVVGAQGGSCTVAGLLRCLLLPDQAHHGESEQLPPDDHLCRSSPRHSAAYASTTSLSRSGRYCEISTLDECSTWRMATPARFARRPDGDVALAPAPAPAEGGSLLLLHLATAFSSHGNVAPPLLLGLPTVEQFRRRCTSLLCRGFTMKSSAPAFRHRLILWGSSSDDMTMTGIGFSGFSALMALSRS

SEQ ID NO: 41984 - protein, 385 aa, Zea mays
  Clone ID: LIB148-021-F9_FLI.pep
KSKDNDAKASGPGGSFDITKLGASGNGKTDSTKAVQEAWASACGGTGKQTILIPKGDFLVGPLNFTGPCKGDVTIQVNGNLLATTDLSQYKDHGNWIEILRVDNLVITGKGKLDGQGPAVWSKNSCVKKYDCKILPNSLVMDFVNNGEVSGITLLNSKFFHMNMYKCKDMLIKDVNVTAPGDSPNTDGIHMGDSSGVTITNTVIGVGDDCISIGPGTSKVNITGVTCGPGHGISIGSLGRYKDEKDVTDINVKDCTLKKTANGVRIKAYEDAASVLTASKIHYENIKMEDSGYPIIIDMKYCPNKLCTANGASKVTVKDVTFKNITGTSSTPEAVNLLCSAKIPCTGVTMDDVNIKYSGTNNKTMAVCKNAKGSAKGCLKELACF

SEQ ID NO: 41985 - protein, 157 aa, Zea mays
  Clone ID: LIB3150-097-B9_FLI.pep
DELLSDSFTYKELENGVLWEVEGKWVTQGPVDVDIGANPSAEGGEDESVDDTAVKVVDIVDTFRLQEQPPFDKKSFVSYIKKYIKNLTAVLEPEKADEFKKGVEGATKFLLSKLKDLQFFVGESMKDDASVVFAYYKDGATNPTFLYFSHGLKEIKC

SEQ ID NO: 41986 - protein, 291 aa, Zea mays
  Clone ID: LIB148-022-F1_FLI.pep
DIRAPWPCQAGNLPRSATLLDYSIRVHAWPGQVPRCCCSLLRSDAVGSRAGAAVLCVDVDVLAPEPVAAPDEVHLLDGHPLGLRQEEGDEGGHDEHPPGEEVEEPELERAQHAEEGLADDEGEQHVDAHGDALPRRPDLQREHLRGDEPAQRPPRPGEPGDVEADEEHQQPGVGAGHLAHAGGAELERDQRAHHDLGDEHLRTALQEQRAPAQAVHAHDGHHGGEHVDQPRDDGRHQRRVVAEADGQEQHRRVEHDHVDARQLLEEGDQRCHRQLRPVPALQDAAPRVLDG

SEQ ID NO: 41987 - protein, 339 aa, Arabidopsis thaliana
  Clone ID: LIB22-071-H9_FLI.pep
LYLSLNRSMKIRCDVCDKEEASVFCTADEASLCGGCDHQVHHANKLASKHLRFSLLYPSSSNTSSPLCDICQDKKALLFCQQDRAILCKDCDSSIHAANEHTKKHDRFLLTGVKLSATSSVYKPTSKSSSSSSSNQDFSVPGSSISNPPPLKKPLSAPPQSNKIQPFSKINGGDASVNQWGSTSTISEYLMDTLPGWHVEDFLDSSLPTYGFSKSGDDDGVLPYMEPEDDNNTKRNNNNNNNNNNNTVSLPSKNLGIWVPQIPQTLPSSYPNQYFSQDNNIQFGMYNKETSPEVVSFAPIQNMKQQGQNNKRWYDDGGFTVPQITPPPLSSNKKFRSFW

SEQ ID NO: 41988 - protein, 550 aa, Zea mays
  Clone ID: LIB148-032-E5_FLI.pep
DKKEEYYLSYWIGKDSLVDDQVSASQIINTMWNSLKGRPVLGRIYQGKEPPQFVALFQPMVILKGGIGSGYKKLIEEKGAMGETYTTEGIALIRVSETSIYNNKTLQVDAVATSLSSTESFVLQSGNAMFTWFGNSSTYEQQQWAAKVAEFLKPGVAVKHCKEGTESSAFWFALGGKQSYTNKNTPQDIITREPHLYAFSFKNGRLEVTEIFNFSQDDLLTEDMMVLDTHGEVFIWIGQYVESKEKQKAFDIGQKYVEHANSIEDLSPHVPLYKVMEGNEPCFFKTYFSWDNTKSLVHGNSFQKKLSLLFGLRSEGAPRSSGNGGPTQRASALAALSSAFNPSSQQRLSNERPKSTGDGPTQRASALAALSNAFNPSLKPKTSPPSRSGRGSQRAAAVAALSSVLTAEQSGSSEFLRSKASNTAYKTDVDRIVITPAGPSGPSSPQSEAGESNVFHQEKDAAADGAPPDTDGAVAEAGEEETTENVGEATFSYDRLISKSTDPVRGIDYKRREAYLSDSEFQTVFGMTKDAFYRQPNWKQELQKRKADLF

SEQ ID NO: 41989 - protein, 334 aa, Arabidopsis thaliana
  Clone ID: LIB24-134-C12_FLI.pep
MAAAMNLYTCSRSFQDSGGELMDALVPFIKSVSDSPSSSSAASASAFLHPSAFSLPPLPGYYPDSTFLTQPFSYGSDLQQTGSLIGLNNLSSSQIHQIQSQIHHPLPPTHHNNNNSFSNLLSPKPLLMKQSGVAGSCFAYGSGVPSKPTKLYRGVRQRHWGKWVAEIRLPRNRTRLWLGTFDTAEEAALAYDKAAYKLRGDFARLNFPNLRHNGSHIGGDFGEYKPLHSSVDAKLEAICKSMAETQKQDKSTKSSKKREKKVSSPDLSEKVKAEENSVSIGGSPPVTEFEESTAGSSPLSDLTFADPEEPPQWNETFSLEKYPSYEIDWDSILA

SEQ ID NO: 41990 - protein, 219 aa, Zea mays
  Clone ID: 700204208_FLI.pep
CGSTERAHHRIRIAQLALPRVHGSRHINEQIPGIIQIIEREEMDHVAVATATVARLALVTLVLRHTRSSRRLGTLAAAAAGRRNAAAGSVGQLAPEDREPRRDGRRLCCHRRRSVGRILLSSRCHGPRWLGRAVTAVAACSSGGGGVEALPDAGVPVVLDLVVRPAWHPRRDRRPPVAERLLQGDDGLLLALGDGLLLEVRAQVVQPPQPAALAAPPQA

SEQ ID NO: 41991 - protein, 213 aa, Zea mays
  Clone ID: 700045352_FLI.pep
DLPYSSLGLLSCRKPMIYECGESCNCSTNCRNRVTQKGPRLHFEVFRTTNRGWGLRCWEPVRAGSFICEYAGEVIDELKVNLNDTEDDYIFQTVCPGEKTLKWNCGPELLGEASTYVSADEFEPLPIKISAKNMGNVSRFMNHSCSPNVFWQPVQYDHGDDGHPHIMFFALKHIPPMTELTYDYGVAGAESSGSGSRRTKNCMCGSQNCRGLF

SEQ ID NO: 41992 - protein, 93 aa, Zea mays
  Clone ID: 700155775_FLI.pep
AKRGQATNSQSLAERLGRKKISERMKLLQDLVPECSKIIGKAIMLDEIINYVQSLQRQVEIISKQVKPPTRSPYLPLGSSGLTGPFNQGIMQP

SEQ ID NO: 41993 - protein, 64 aa, Zea mays
  Clone ID: 700151223_FLI.pep
GALYPLRRGGWPHHLLQHRQALRFLQHQHESCDRPIWEGKRRAAWQERCNFRTHGTVRKMYTYF

SEQ ID NO: 41994 - protein, 279 aa, Zea mays
  Clone ID: 700151452_FLI.pep
RIISIWLTHTAEGDSSHARPRPRLISITFRRMGRAGTCPAPGPTESSGGRAHGHAMTKDAAAPSELPLPGTAVRSLHLTPTTRRPCSCRRHPPSSNSSGPRPRPPSRSLPRRRHGVPRPADRRCSHCSRRSAPAAGPGYQNSSNYVQKKKREMLVPACAYHVEEAGPALLLPHAALPEEELLRVAGDLRRGPRRHVAPGDASPVALAQLVQAGKELPVLLLAPWNSWRRRYISRVLFLFRNISCYRPTQQGLNNVQGSTSISQSQLLHCYLQLKGCSIS

SEQ ID NO: 41995 - protein, 495 aa, Zea mays
  Clone ID: LIB143-057-E1_FLI.pep
VGEGKAVRRRRARESPQGLLRHQLDMCSRNADLTTALRLYDDALSPDNPIPLSLHHYNCLLYLCSNAAATDSDSHISATAAQRGFDIFARMEADGVQPNEATLTSVARLAAATRDPAMAFSVVRRMAAAGTPPRLRTYGPALFAYCDAKDADGAKQVEAHMDASGVVPEEPELAALLRVNADTGKADEVYRLLHRTRVLVRQVCDTTAQVVEAWFRSDAASQAGVDSWDPTKVKEGVVKGGGGWHGQGWLGKGAWSVGWTEMGKDGTCQRCGERLVCIDIDPAETDNFANSLTELAIKLEAREDFLSFQSWLRRHGPFDAVIDAANVGLYKSKDFCFSQVNSVVNAIQRVTKSKKLPLIVLHRSRVNVGPAKAPYNQKILDSWRNAGALYATPPGSNDDWYWLYAAVSCRSLLVTNDEMRDHLFQLLGTSFFPRWKEKHQVRLTFSGHGPTLHLPPPYSIVIQESEDGSWHVPTTTGDDIEKPRQWLCTTRKSLR

SEQ ID NO: 41996 - protein, 158 aa, Zea mays
  Clone ID: 700072550_FLI.pep
RVLGFSRVATERGGVAENMQSSSMKREISEAHDTIRFGINAGVKADLAPPHPLQSTIQSETKFWADKKKFGTDAIYGSALNIRKDLDAQILSRFQRPPGALPSSLLGYEALTGSLDDFGFEDYLNMPHDSDSFRQPDMHHGMEVRLGLSKGPICPSFN

SEQ ID NO: 41997 - protein, 85 aa, Zea mays
  Clone ID: 700102505_FLI.pep
LRCCSKKYKRCSRPTGRTHLTCKPDTISSSRATCQCTLCETCACMANAGVNHQQQGSPSIYCRVHRNDLHPRLLIVAGCLSDHQR

SEQ ID NO: 41998 - protein, 194 aa, Zea mays
  Clone ID: 700237443_FLI.pep
AGMGRHAASGGGVQQKLRKGLWSPEEDEKLYNHIIRYGVGCWSSVPKLAGLQRCGKSCRLRWINYLRPDLKRGSFSQQEEDAIVGLHQILGNRWSQIASHLPGRTDNEIKNFWNSCLKKKLRQRGIDTSTHKPAVSASVPASEQPVSQDRKPLAAAAADGGSDMKHQQVFDPFPLTDSFGGGFGAALYGHTGGK

SEQ ID NO: 41999 - protein, 209 aa, Zea mays
  Clone ID: 700239494_FLI.pep
RDREEEREGEAADPSLRSSPLIWRKEARGVANPSMATPTTYSVRISSETHKIEAWVVSDEALARQLQEEENTRDAAADTREVAGNVPLESSSPAVEYRPAQNAAQVAREDNVDPDNMSYEQLQALGEAVGIQSRGLSDELISYLEPFRNKCTFFSRKKNSEECVICKTTYRSRQKLIRLPCSHCYHADCITRWLKINKACPVCNEEVFG

SEQ ID NO: 42000 - protein, 168 aa, Zea mays
  Clone ID: 700242203_FLI.pep
AGGETFPAHRCVLAARSPVFAAEFFGAMEESKSGSAVHIHDMEARVFKALLHFIYTDLCWKTNEVEEEEEDDVMAQHLLVAADRYNLPRLKLICEDKLCKYIDVGTVATILALAEQHHCHGLKKACFRFLSSPENLKVAVASESFDHLSKNCPSVMKELVAMLGTLLE

SEQ ID NO: 42001 - protein, 374 aa, Zea mays
  Clone ID: 700103634_FLI.pep
RPIDRSTMSSLLCISRRNNKKDSDGDGEYGGEQIIISTGGAAMRKGPWTDEEDEQLVRFVRLFGERRWDFLAKVSGLRGGGCVDRSASMQLRMHEEGRSASIEQLAVFLTVCFFFFLLIFVAYLRAALVDTDGDVRAGLRRTGKSCRLRWVNYLHPGLRRGRITADEERRIVELHAQWGSRWSRIARSLPGRTDNEIKNFWRTRTRKKALEERRAAVAATTAAESASSVMTVSSSSECRRPPVSSSSSSSSLRRDEARRSGDETEEASTPTAAPATKHDEEPQPQPQECYDFPMDQLWNEIAAADAAAMSYLVVDACWGGAAVGGHCYYYGAAAASAASPPPPASPPWEYCGSDFSLWRIDDQEYYKKMLDSSS

SEQ ID NO: 42002 - protein, 498 aa, Zea mays
  Clone ID: LIB189-010-B6_FLI.pep
RMLRRWICHPLKDIDAINKRLDVVEGFIQNCGLGPTTLGYLQKIPDLERLLGQVRSTVGLSSLLQLPFIGEKIIKKRIKTFIMLINGLRNGIDLLNDLQRADHGILALYKIVDIPSLSYLPELIHKFEERMQNEFPCGQVSDVNANGANDLAALMDVFIGKASEWSLVINAVSTIDVLRSFAAMTLSSFGAMCRPQVLLKDDVPVLRMKGLWHPYAFAGNANSLVPNDLTLGQDLSGLNRFALLLTGPNMGGKSTIMRATCLAVVLAQLGCYVPCTSCELTLADSIFTRLGATDRIMTGESTFLVECTETASVLQKATVDSLVLLDELGRGTSTFDGYAIAYAVFRHLVERVRCRQLFATHYHSLTKEFASHPHVSLQHMACMFKPRSDGNGQKELTFLYRLTSGACPESYGLQVAAMAGIPKSIVEKASVAGQVMRAKIAGNFKSSEQRAEFSTLHEEWLRAALAVSAMDGQPDDDDVMDTLFCIQQELKSHFRKAR

SEQ ID NO: 42003 - protein, 337 aa, Zea mays
  Clone ID: 700102188_FLI.pep
NTTPLPPFPSPPAAASRQPTTEPTNQPTGHSERVKRPMVAMAAVQQQQQQQRRDAEAELNLPPGFRFHPTDEELVAHYLCARAAGRRPPVSIIAEVDLYRFDPWDLPERALFGRREWYFFTPRDRKYPNGSRPNRAAGSGYWKATGADKPVEHEGRTAGIKKALVFYHGKPPRGVKTEWIMHEYRLAEAGGARAKKSGAGTLRLDDWVLCRLYNKKNEWEKMQQQKEKEKKAMESEASLSHSHSDTRTPESEIDDDPFPELGSLPAFDDMGAAPAPAGVVLPKEEVEDFGDLGGDDWLAGINLDDLQMPGDAADFYGSMLVSPMAAKMEPDGGFPFF

SEQ ID NO: 42004 - protein, 298 aa, Zea mays
  Clone ID: 700237333_FLI.pep
LTWTPLRLFPQSHSPRRHHPRRRHRSEITAIVVRRLGRPAFGGAPKMWCQSCKEGYDEEDAGTCKECYEEASETEEELKREIDDLRSRLLFLRLPSPTLDAASAPNCDLLLHAIPSTGAGGERDAGRTPDTPAVPAHRVILASRSPVFRAMLENEMEESRSGVIKIYDVSYDILRAFVHYMYTAEALLDEQMASDLLVLAEKYEVKHLKAYCEKFIASKVNDDNAITHYAFAHRHSAKQLLEASLSVLMANMSTLSDREEYKELVEKDPRLVVEIYEAYLNRQVNTAAGKDTNCSNRK

SEQ ID NO: 42005 - protein, 286 aa, Zea mays
  Clone ID: 700240179_FLI.pep
LGLVIAHRAVGASGGVEQRESSLNHVLHLDVVDFIYLDEDGVHVAAGDGGDVGSDDTEPEVLDGAAHPGHGVASLAARHADHQHVVAHLRHAQLQHLDVRRRGRRRRRSRLRAAGDGLRALHLLRALGFPSQQAPVDVAALHLRGGGGGGVVVEHAQLLQHPPLLRLQLLDVLDGVLDDRRLVHLGDVRHDAAERVELVVELAAAVALHQDVLVAARRRRRRRVGDGAVRRAGVVARHGVLLRLQIDAELLVLQVALRLLPVLVHLRPTALPRLQCCALFFFFLSL

SEQ ID NO: 42006 - protein, 162 aa, Zea mays
  Clone ID: 700240864_FLI.pep
RRSSCFCSSRLFLLGLKKYGKGDWRNISRNFVQTRTPTQVASHAQKYFIRLNSGGKDKRRSSIHDITTVNLTDDQPPSPSQSSLITSQSNAPAPAPGPAPAAGICQVPLAADAKRHGARTLPFSSPNRTSAAPAYRMEFHDQQGLQCGPLHDQLLASQSVLF

SEQ ID NO: 42007 - protein, 246 aa, Zea mays
  Clone ID: 700241308_FLI.pep
ALRYPKDSEKLMLSRQTGLTRSQISNWFINARVRLWKPMIEDMYKEEIGEAELDSNSSSDNGQRNKDKAPSPEENEDLQTPTSQACQTSQLGQSKAIVGGVMGFSGVLAGGFHTEANPDDSFMSLMLKAQRPGETEGTGLLHDAVAHHSDDGARFMAYHLAEFGRYGNSSNVSLTLGLQHAENSLAVPPNTQPGFPGVRDQDMYNATAPPLNVASTSSEYDSASQIDQQQQRQRFEPSPLMHDFVA

SEQ ID NO: 42008 - protein, 193 aa, Zea mays
  Clone ID: 700242418_FLI.pep
SHLRRSSTRAERGRPSSLFEESPRQMFHSLMGERDRHRHITMEGITEVLAALERIEQQAELTYDQLLMLEANLFFGAFASYDRHRDMRMDIDDMSYEELLALEERIGSVSTALSEEQFTKCLKRSIYSQVALEVNKSTVDDMKCSICQEEYAEGEEVGRLPCEHRYHVCCIGQWLGQKNWCPVCKASAVPSKG

SEQ ID NO: 42009 - protein, 254 aa, Zea mays
  Clone ID: LIB143-014-F5_FLI.pep
MFGAVKSVNVVEYPAAGVSAAEENIVELKIECTEFSDTENIAKAVSEYSVPIIPSIDVLNHSVASDTKDVDLIPESQDQKDKHLPSNAALCESEAPVADEDAELDETQSRAALPTPQHAEADHTEAAVDENKHTGAGKVTATATDDDAVEKSHGDPRTSETCNPAGPTDKAEKPGRYSEQGAGDVTEDRPEKEAQAVGTSDTGFVFEPGSVLVEFLREEAACMAAHSLHGRRFGNRTVHAGYAPYDLYLQKYPR

SEQ ID NO: 42010 - protein, 474 aa, Zea mays
  Clone ID: 700086106_FLI.pep
PVASHPTTTHLVVRRFDPVLPTQGESPDPSPSGIRVLSSPSPSPPSDCPPRLPRRRVSGAAAAAAAAACRAVMATKRSVGTLGEADLKGKKVFVRADLNVPLDDAQKITDDTRIRASVPTIKFLLEKGAKVILASHLGRPKGVTPKYSLKPLVPRLSELLGVEVVMANDCIGEEVEKLAAALPEGGVLLLENVRFYKEEEKNEPEFAKKLASVADLYVNDAFGTAHRAHASTEGVTKYLKPAVAGFLMQKELDYLVGAVANPKKPFAAIVGGSKVSSKIGVIESLLAKVDILILGGGMIYTFYKAQGYSVGKSLVEEDKLELATSLIEKAKAKGVSLLLPTDIVVADKFAADAESKIVPATAIPDDWMGLDVGPDATKTFNEALDTTKTVIWNGPMGVFEFEKFAAGTEAIAKKLAELTTTKGVTTIIGGGDSVAAVEKAGLADKMSHISTGGGASLELLEGKTLPGVLALDDA

SEQ ID NO: 42011 - protein, 438 aa, Zea mays
  Clone ID: LIB143-015-C11_FLI.pep
SLYSSMPLDPQRLPKSSVSAVPNYADSMMHARNHNLLASLGGTTTQLPATSRVGSMMPERSYYDPSSVDGNENAGSPAYSKKYHSSPDMSGIIAASRAALLNEAKLGAAIGPQSYLSRLAAERSQYASSTARPAAPLAFDELSPPKLQSDIFSAQSSMRPSARSLWAKQPFEQLFGMSSAELSKGDFNLPGRSGGVAKDDFSYKESETKLLQSLRLCIMKLLKLEGSGWLFKQNGGCDEDLIDRVAAAEKLLMQGTAENQLLLHGGDLQQHSSDQAGIQYMRTLPNCGEDCVWRASLVVSFGVWCVRRVLDMSLVESRPELWGKYTYVLNRLQGILDPAFSKPRGALTICTCLQKDTRVRNSPPHSGLTAMGPVPTPLRGAFTTAGVVLEMIKDVEAAVSGRKGRSGTAAGDVAFPKGKENLASVLKRYKRRLASKGQ

SEQ ID NO: 42012 - protein, 190 aa, Zea mays
  Clone ID: 700219829_FLI.pep
QGNSSLWIPFNSTSTKPALIKLLKLIAGKTCKNKSCFHVVTICSGIYARKALHFITPQEDYKRATHYSSYRLCTAQQCRKVEFRVPAEQVQASKTGKVGFSRAETMSFQDSPTQKRNTVLLDHLSQVVIKQLTPDRHLHLIERILQNEVRVQLINHFQQHFHVWSSSFAYNEKFCPCEGLKAMEIKVMSL

SEQ ID NO: 42013 - protein, 302 aa, Zea mays
  Clone ID: LIB3062-002-A8_FLI.pep
QRNNQKKTTTATYDTRTKQAKHVAAMPSHRGDGGSLDELDGPGVGVDVGGLEPGEAGALCELAELALVPLLAAGVVREHDHVDVEDALRLGGGLRVDRQHALDDDDLAIFRQRVVAVLEQRGAVRVAPVVEDPLHEDGVAGGHGREHVPAHVAHAGERRRLGDDVRQVEVDPGDVRVAGRDGVQRGAHAAAHVHQRRHALEARVEVQQLLGDDHRVVLHALVEHAVEARVRAVVLERRHPVRLVERDAAVQHRVLEVVPGRVAVIRSAHSDDILWFVSIFCNLVLFYLSLFSLKINNRTINI

SEQ ID NO: 42014 - protein, 360 aa, Zea mays
  Clone ID: 700222722_FLI.pep
AALRVAKEVLGMQEGWRKEAIREMNRTGRFSRSLANSATDWPCLLLDVLSRAAEEEFFQPKLILNNVDVLRKAICEDETMVPAAMYHDSFIWRVIALGANEKCLPVIMSTSDGYYSSQAFVDFGFPNIFISRETFGWTPQEAKLHMVSEFFSEQEWKVVDEVLGPNPRQLSEIYMLKQKANSPEVLHDRNIEEIIDTYLAHLQVSVVNPAMEKALKMLQEFASDVREGKVPKIRSSFGAPWRHPPRDDNPDLSYKWAKIQLMDFIQSFVNTEFGVNYLADDSLEILDDPAAVAMMEVGLLYQQREPSFMRPITRGIQRCLARWLAEQRLQLNIQETLAFFWQRLIRGRSYRYLMKEVGYK

SEQ ID NO: 42015 - protein, 443 aa, Zea mays
  Clone ID: LIB3066-032-D5_FLI.pep
VATVIAVLMNRGGKRRPIDRHKTLFALMKKRQRKRGQERLAAVTAPPRLAFLGPKELEAFPVDDGWAGLVVLGLGDPHLLEGAEGCQDGSSDPDTVLPLWRSDHLDLHAAGSQGSDLLAHPVSDPREHGGATGEDDVAVQILPNIHVALHDGVVGGLVDAGSFHPDEGWLEEDLGAAEALGADGDDLSVGELVALLHGRAGLGGLHLLVVVQGDVGELLLHVPHDFPLSGGGEGVAALSQDLHQVVGEVATGQVKTKDGVGEGVSLVDGDGVAHTISRVEHDTCGTATGIQREHGLDGDVHSGGVEGLEHDLGHLLPVSLGVQGRLGEEDGVLLGSHAELVVEGVMPDLLHVVPVADDPVLDGVLEGQDTPLGLRLVTDVGVLLPHPDHDTSVARAPHDAGEDGPRGVVAGEPSLDHASSVVADEGLDILGIGHFLPTPELAR

SEQ ID NO: 42016 - protein, 304 aa, Zea mays
  Clone ID: 700224031_FLI.pep
DTGPCSPRPTDPRPARTRPADRTLSASSLPFPSAALRSTPPSSAQLVSTLPATMAEDLVLDTAIRDWVLIPLSVVMVLIGVLRYFVSKLMRSPATSPSPDPKLVKEGQVVIRARNLRTNAQFIPAKAFKARKVYYTNEENGLLHVPKEDAQKAQAAMFSDPNMAMDMMKKNLSMIVPQTLTFAWVNFFFSGFVAAKIPFPLTQRFRGMLQNGIDLSTVDVSYVSSRSWYFLNLFGLRGLFSLILGEENATDDAQKMMQMGGGFGFNPTMSLGAEKDSLDIMQHDWALPKMERHAEDVLKQLLKK

SEQ ID NO: 42017 - protein, 230 aa, Zea mays
  Clone ID: 700222611_FLI.pep
RSLSLDAAFFDGLSLQGGGGVAGHKRSGSMDGATSPFEGESAPTSVLPDYAKKAVPDDRLAELALLDPKRAKRILANRQSAARSKERKIKYTSELERKVQTLQTEATTLSAQLTLLQRDTSGLTTENRELKLRLQAMEEQAKLRDALNDALREEVQRLKIATGQVPNINGNPFNGGLPQQQQQQVPSYFSQPQGMQYFSSHQGQHQHPNHHPQSSSNGGGQSLSDSMDFM

SEQ ID NO: 42018 - protein, 482 aa, Zea mays
  Clone ID: LIB3062-009-H4_FLI.pep
AADITSEYLSRLRRTEPTLRSFIHVADAAAEREAEELDRRIASGEKDAVGPLAGVLVGVKDNLCTANMPSTGGSRILDGYRPAYDATAVRRLREAGAIVLGKTNLDEFGMGSTTEGSAFQVTTNPWDDSRVPGGSSGGSAAAVSARQCVVSLGSDTGGSVRQPASFCGVVGLKPTYGRVSRFGLMAYASSLDVVGCFGSSVFDTATILSVVAGHDKMDATSSSQVVPEYASELVSLDLLESKPLNGVRIGIIQETLGEGVASGVVSSIKGAASHLEQLGSVVEEVSLPSFSLGLPAYYILASSEASSNLSRYDGIRYGGQVSADDLNELYGESRANGFGHEVKMRILMGTYALSAGYYDAYYKRAQQVRTLVKQSFKDALERYDILISPAAPSAAYKIGEKINDPLAMYAGDIMTVNVNLAGLPALVVPCGFVEGGAAGLPVGLQMMGSPFCEGNLLRVGHIFEQTLQNLSFVPPLLAEGQL

SEQ ID NO: 42019 - protein, 359 aa, Zea mays
  Clone ID: 700549663_FLI.pep
RNFRPESLLGEGGFGCVFKGWIEENGTAPVKPGTGLTVAVKTLNHDGLQGHKEWVAEVDFLGNLHHPNLVRLIGYCVEDDQRLLVYEFMPRGSLDNHLFRRSLPLPWAIRMKVALGAAKGLAFLHEEAERPVIYRDFKTSNILLDAEYNAKLSDFGLAKDGPVGDKTHVSTRVMGTYGYAAPEYVMTGHLTSKSDVYSFGVVLLEMMSGRRSMDKNRPNGEHNLVEWARPLLGERQRFYKLIDPRLEGNFSVKGAQKAAQLARVCLSRDPKARPLMSQVVEVLKPLQNLKDMASASYFFQTMQAERMAHSSSMNGRSSMNGGFKTQSPFGRHGQPPPVRSLSDGPRASPFRYSPKPNVK

SEQ ID NO: 42020 - protein, 200 aa, Zea mays
  Clone ID: 700157909_FLI.pep
PPVPPAIPIRRPVPAPLAAMSPSEPTREESVYMAKLAEQAERYEEMVEFMERVARYAESKVFYLKMKGDYHRYLAEFKSGAERKDAAESTMNAYKAAQDIALADLAPTHPIRLGLALNFSVFYYEILNSPDRACNLAKQAFDEAISELDSLGEESYKDSTLIMQLLRDNLTLWTSDTNEDGGDEIKEAAAAPKESAPEGQ

SEQ ID NO: 42021 - protein, 118 aa, Zea mays
  Clone ID: 700158854_FLI.pep
HEEDHVNDPQEAWQEVDPDEYSYEELVALGEVVGTENRGLSADALASLPSVTYKMQSVQDGNTEQCVICRVELEEGESLIALPCKHLYHPECINQWLQINKVCPMCSAEVSTSSNKEP

SEQ ID NO: 42022 - protein, 163 aa, Zea mays
  Clone ID: 700168569_FLI.pep
VDKYSTHSKNLGKAEQPSLDLNLEHSKYANLNEQLVEASLRLRQMRGEELEGLSVEELQQLEKNLESGLHRVLQTKDQQFLEQISDLEQKSTQLAEENRQLRNQVSHIPPVGKQSVADTENVIAEDGQSSESVMTALHSGSSQDNDDGSDVSLKLGLPCVAWK

SEQ ID NO: 42023 - protein, 76 aa, Zea mays
  Clone ID: 700196512_FLI.pep
ELCTGMEPCSLRTRQGQTGSYTGRAEELRQLFSGRDVSLRNKNDLAPVTTDGHDPSIAAWHTRVINQARYVSFASS

SEQ ID NO: 42024 - protein, 178 aa, Zea mays
  Clone ID: 700421973_FLI.pep
QYVNHGINNMLITRIKKGAAQLPDPTLEVLGGLVRFAELPVAGRDVPGGSLAVVGGHDAERQRLAGEVDLRGPELAPAALHRRPLDALVALHPQRHHVPGAAHVGHLHLAVVLVPCDRVPDAAFPLARHLAVGDGHDAGLLLGDLEERRYGEVKVLALLPAHRRRGLVGGRHHHGALG

SEQ ID NO: 42025 - protein, 336 aa, Zea mays
  Clone ID: 700208029_FLI.pep
ASATLCGSIKKHLLDHFHKKPVPPKPKPEPKPEPEPKPENHPPTPTYGSSTPIYHPPSRQLFDKKHMFDHFHKHHDYHHFFDHFHKKPVPPKPKPEPKPEPKPKPQPEYHSPTPTYGSPTPIYHPPARHLFDKKPLLDHFHKDHDYHHFLDHFHKKPVPQKPKPEPKPQPKPEYHPPTPTYVSPTPIYHPPAETEMKYDKKHFFDHFHKDHDYHHFFDHFHKKPVPPKPKPEPEPKPKPQPKPEYKPPMPTYGSPTPIYHPPAKKEVAFDKKHFLDHFHKDHDYHHFFYHFHKKPVPPKPKPEPKPELKPQPEPEYHPPTPTYGSPTPIYHPPAKH

SEQ ID NO: 42026 - protein, 122 aa, Zea mays
  Clone ID: LIB3059-036-E12_FLI.pep
STNCFSSPVHPLCATAPLPWQRRLAPPLPDFAGHLAGDELPPGLEKVMARSDSCLARVGAGVAIGGAVGGAVGACYGTFEAFRYKIPGLLKIRHIGQTTVGSAAIFGLFLGAGSLIHCGKSY

SEQ ID NO: 42027 - protein, 279 aa, Zea mays
  Clone ID: 700214348_FLI.pep
MGSCFQLVFAPIDELFPDDAPLVSSGFRVIPLDIKTDGPPSGRTLDLASSLEVGATTQQVAGDGSQDVCNLRSVLTIAFQFPYETHLQDTVAAMARQYVRSIVSAVQRVSMAISPSHSGLNTAGQKLISGSPEAATLVRWICQSYRYHLGVDLVSHSDQAGESLLTMFWDHQDAVLCCSFKEKPVFTFGNQMGVDMLETTLVALQDLTLDKIFDEPGRKALHAEVPKLMEQGYAYLPAGVCLSGMGRHVSYEQAVAWKVLGEDGNVHCLAFCFVNWSFV

SEQ ID NO: 42028 - protein, 169 aa, Zea mays
  Clone ID: 700262632_FLI.pep
KKTTHQARREKINARMELLKELVPGCSKVSGTALVLDEIINHVQSLQRQVEYLSMRLATVNPRGDFGGLDSFLTTECGRIASFNCKNGIDLEQVTWPEMGVHGARQLMQLQQQFWHGDLAHPHQVVSQWEKRGDGHPPVFSNSSPSLFGYDLTSSGAQQNPASKLKTEL

SEQ ID NO: 42029 - protein, 246 aa, Zea mays
  Clone ID: 700261644_FLI.pep
AQPLCVRALSHTVCDDCVGGWVGYRRRPSPGADLLTPLTLLSRLPCENVPPRRTMGRPSRGRQRIEIRRIEEGGRLHVTFSKRKSGLQKKAAELSLLCGSPVAVVVFSPGRKVFALGAPSVDHVLRRHAPPIPGEGEEDGLLPTLQDGDVVMSSSAIADRAELENIVRRTEETKARSVAEKARMDAVGKAVRQAAAKAGRRFWWEADSGELGDAELPGFAKALRRLRVNLQRHLDSLSASANKQLQ

SEQ ID NO: 42030 - protein, 152 aa, Zea mays
  Clone ID: 700335463_FLI.pep
EAPAGNSTESKLKQPANSNAVSADSGMSNPGVKGDSSVCTPLRQARSSLSLSFAGLTGESSAGDHQDCVVSSLLLMGEPPWQPPGPEGSIAGGSRDSALTRYKEKKMRRKFDKKIRYASRKARADVRKRVKGRFVKAGEAYDYDPLCQTRSY

SEQ ID NO: 42031 - protein, 123 aa, Zea mays
  Clone ID: 700331857_FLI.pep
IGHNYYDKSLWEGLSRSIPSLQKGPGKDDENETGFAVDASEMGNFAKFINHNCTPNIYAQNVLYDHEDISVPHIMFFACDDIRPNQELAYHYNYKIDQVHDANGNIKKKKCLCGSVECDGWLY

SEQ ID NO: 42032 - protein, 126 aa, Zea mays
  Clone ID: 700331895_FLI.pep
PHNEVELERVEADERVAVGGGLTSSRAREEEIGRGDGVAEVAAVAIGADNASENHAADLGLVARMADNRAELGDAVRELALITVRARAGLLPLVAELCLQHALVVHLELQPAVELLLLLHSAFHAH

SEQ ID NO: 42033 - protein, 175 aa, Zea mays
  Clone ID: 700341946_FLI.pep
QAGAGGGGGAASGGREEARAHGGGQGAEPAEAAAAEPRVRAAGAGAEEGVPDGAGGEGQGPGAPQCGAGAAGVHAPEREQHAPPDSEEHDGAREQEVRRRRRRWRQGRRRRQEAPPRQELVRNERGSWFVPCSRSPDLTIAGVLLFLTTPSLFLLFSYCYPWVSSLASLMHCFNC

SEQ ID NO: 42034 - protein, 418 aa, Zea mays
  Clone ID: LIB3137-017-D8_FLI.pep
SEANSPSASTATMSRDRYFHRLLDLHLHANDDLFFPFPTPASSCPYITASSAHHRFLLDDHPFYPTSCPLGITSRSPIDDTFDLDLLLPLPLHAAVSAPPCAAFDFDPFLLDTLGHRISVLERALALAPPRRKYTYAAEANGRKLKWTAEDRPAGGRNLKWEAELRTPHTDGFDRKWKWESKESATGSTKVKWAKEIKGKGCLEPWSNSYSVEETYGEDDHADDDREKKKPTGVQKKVKGENKQQQKKQGNVEIVEIEDNTAGCVAIRKAFEMNHCKGKRKELSPQDAALLIQMNYRAHLAHRSQVLRCLRDLAVAKAKLKEIRSFFYNITYRRRIAYDNEERQRFAEKIIVLLLTVDALEGPDYMVRNARRSMLEELEGMLEIVEPQPPGKPRTLSRRRFDLPEGGAIEKETREEGK

SEQ ID NO: 42035 - protein, 113 aa, Zea mays
  Clone ID: 700339851_FLI.pep
TKVADVWSCGVMPYVMLTITIPEIRNHPWFLKNLLADQMDDNTMSKQYEEPEQPMQSMNEFMQILVEATIPAVGSRGLNQFLNDDIDLDDDMEDLDSDAGLDLESSGEIVYAI

SEQ ID NO: 42036 - protein, 121 aa, Zea mays
  Clone ID: 700344683_FLI.pep
YSTTTKYRSGRERKKNQVRYSRLNSSTRGRKNVQRRLERLDGRPKQKRGRDWERELTKVAILLAAHLQHLAVGVGVYAAHEGGAASRTVLREQPPGLVTDPARVAQRLGALGARAPLRRLL

SEQ ID NO: 42037 - protein, 510 aa, Zea mays
  Clone ID: LIB3137-058-E9_FLI.pep
EAKPNIYSVVRNHEHNSPNLHNEPMKIILLLTTTSTTQQNTPTSKETRNHGLHAESSSFLLGSRLGHLGSRWVLLLHALYHADCNRLPHVANREAPQWRILGESLHHHGLRGDHLDEAGVTVLEKLGGALQLLARPPVNLGEQLRELHGDVGRVAVQHRGVAVADLPRVVHDDHLRGEAGSLLGGVVLGVGGHVTALQVLDRHVLDVEADVVAGQRLLHRLVVHLHRLDLRRQARGRKGDHHAGLQEPSFHAAHRDGADAADLVHVLQRKPQGLVRGPLGLVDLVQRLKEGGALVPVQVRRPLDHVVTLEPRDGHEGDLVRVVPHLLQVGTHFLDDLVVPSLGVLGGSGIHLVAAADHLPHTKSESKERMLTGLAVLGDTSLKATSGGVNDEHRTISLGGAGDHVLDEVTVPRGTNHGAVVLGCLKLPQGNVNGDAPLALGLELVKDPGVLEGPLVHLGSLLLKPLDDTLVNASKLVDEVAGGCGLAGVDMANDHNVDVNLLLPHGNGSS

SEQ ID NO: 42038 - protein, 283 aa, Zea mays
  Clone ID: 700346374_FLI.pep
DRTGGSFVKCRAVNCLVFFHAWCAHQRGLLQSEPEGEHNENIGFYGRCVSHAIVFSSHVNPKKEYFRNNNWTCARTEGFKGRKGEGFSDSSHKKYEEYSGEFGVSQEQINAWLRINGSKPCGRGQKEYIHYKQLKGWKHLVVYKSGIHGLGLYTSVFIPRGSMVVEYVGEIVGQRVADRREIEYQSGKRQQYKSACYFFKIDREHIIDATRKGGIARFVNHSCQPNCVAKIISVRNEKKVMFFAERHINPGEEITYDYHFNREDEGQRILCFCRSRYCRRYLN

SEQ ID NO: 42039 - protein, 128 aa, Zea mays
  Clone ID: 700344331_FLI.pep
EIKRERRKQSNRESARRSRLRKQQECEELARKVADLTTENSALRAELDNLKKACQDMEAENSRLLGGVADAQVPSVTTTLGMSIEPPKLQLQLQQHHDEEGQLHKKSSNNSNGNCAGGSHKPEANTTR

SEQ ID NO: 42040 - protein, 165 aa, Zea mays
  Clone ID: LIB3150-057-B9_FLI.pep
GPLTLVPLAVSRSHSLHFSSDGGAASSTMADSKATSAVTLRTRKFMTNRLLARKQFVLEVIHPGRANVSKAELKERLAKMYEVKDPNTIFVFKFRTHFGGGKSTGFGLIYDNLESAKKFEPKYRLIRNGLATKVEKSRKQMKERKNRAKKIRGVKKTKAGDAKKK

SEQ ID NO: 42041 - protein, 306 aa, Zea mays
  Clone ID: 700612202_FLI.pep
RFAPDELTLCYKTLNDACPYSKFAHLTANQAILEATGAATKIHIVDFGIVQGIQWAALLQALATRPGEKPSRVRISGVPSPYLGPKPAASLAATSARLRDFAKLLGVDFEFVPLLRPVHELDRSDFLVEPDETVAVNFMLQLYHLLGDSDEPVRRVLRLVKSLDPSVVTLGEYEVSLNRAGFVDRFANALLYYKPAFESLDVAMPRDSPERVRVERCMFGERIRRAIGPEEGAERTDRMAASREWQTLMEWCGFEPVKLSNYAMSQADLLLWNYDSKYKYSLVELPPAFLSLAWEKQPLLTVSAWR

SEQ ID NO: 42042 - protein, 60 aa, Zea mays
  Clone ID: LIB3136-012-B1_FLI.pep
WRSRTADHEEQLACESWRAPEAHRDLVFFFNQRILLPRCAPSEAYLPCASSAFTDRLVDL

SEQ ID NO: 42043 - protein, 86 aa, Zea mays
  Clone ID: 700552649_FLI.pep
RRKRQVILQPIERIKCCGDTRILFTIQGTNNHKCHTLPAMCPQERHRRLVSYLSIIQEGGEEQCEAFELAFFSRVGRPRMRIQQGL

SEQ ID NO: 42044 - protein, 110 aa, Zea mays
  Clone ID: 700381224_FLI.pep
LQISIGGKKDTVPLWFSEVSWINELRRPSFEVAATLKILGCVQLINQDLHQYQNMECTNMLDSKNKLPHYTYLSYIGQTNSTVSQGWCKRKPILRCPVEVASMGNQLRMG

SEQ ID NO: 42045 - protein, 50 aa, Zea mays
  Clone ID: 700381752_FLI.pep
TIFHNRNKCRTFYMLRTVSFFYMTRVATLQRHDNPESIMIYLHILSTYWA

SEQ ID NO: 42046 - protein, 186 aa, Zea mays
  Clone ID: 700356259_FLI.pep
GSNKRGAFISDKQKGVKKFRLHLSLPVVTTMSSGTSSGSSRWVQSSRSEDDLDLQAQMERRRKRRKESNRESARRSRQRKQEHLDDLTSQVNQLKDQNKQLSMALSITSQNLVAVQAQNSVLQTQKMELDSRLGALTEILWYMNSSTSTSTAPTNPAIANDFTAWSRASDILGGTSYSAIDLYQCF

SEQ ID NO: 42047 - protein, 194 aa, Zea mays
  Clone ID: 700468724_FLI.pep
KRKGSGEDSSSLRSLGETSALQREVSMECADEKAGDARAKREDYVHVRAKRGQATNSHSLAERFRREKINERMKLLQDLVPGCNKITGKAMMLDEIINYVQSLQRQIEFLSMKLSAIGPGLNCDLDLQDILCTQDASSAFPGYNLQTSNVHINLYRASEEGFSHRNRIIPSPANVHVTRNAQLSAFPQVFIRRP

SEQ ID NO: 42048 - protein, 257 aa, Zea mays
  Clone ID: 700441361_FLI.pep
SFLPVSSYDSLERAFAEAGTSGMERFYCPFPNCSVLLDLSQHFSRASSSSQSDLSCVECPECHRDICINCGVPWHIMMGCDEYQSLPAEERDAGDLSLHRLAQNNRWRRCQRCRRMIELTQGCFHMTCWCGHEFCYSCGADYASGVQTCQCVFWDDEAMEPSSAARSTQAASEIWAWDTFDCMPTAVEGYSEQERAQLALIQRFLAGGFSLGENPCQSPPRCADSYIVDTMKDLHQLPWLERFVSVISDTYNDDYMQ

SEQ ID NO: 42049 - protein, 87 aa, Zea mays
  Clone ID: 700444480_FLI.pep
CIPAKSIDTASAIGSSTMAWAAIACYKLLSVIIGEFFSYGNILISKQSNVSKLAIFALYQNQPGTEIRGTTVTNITGNISRPCGINK

SEQ ID NO: 42050 - protein, 378 aa, Zea mays
  Clone ID: 700446322_FLI.pep
TLCKGFRKVHADRWEFAHEDFLRDSKHLLKRIVRRRSSPTKQCSVQPGSSSGESSLDPELHTLRREKNALLEEVARLKQEHRQTIEQMSTLNHRLESAEDRQRQMVSFLAKLLQNPSFVRKLKLHREKKEIDSTRVKRKFLKHVPHGSVESGESSSQHAGESGSYFAVSSPMATTTSVHDDITELQNFLLEDDDLNFGMDSENTGLEGTEAPDDIGELIQGFDTQEELDLGSGAELQEMPPASGSLAQDPTIGRFKGKNVLCPGLDATSSEGDCLSPLPDSMGLLSGTMLGTAGSMMAADDEQIWGVDASAALQSSCSGTSQQAFGSHVSDPYLMDIANRPERFWELDFQALDDADLQLDKCAIDDPALQQQPSMKKP

SEQ ID NO: 42051 - protein, 347 aa, Zea mays
  Clone ID: LIB148-017-E10_FLI.pep
ENIHIELNCGGFLEEDFRSILRTPSSLGRSFSHRRINSLPSFDRSFFQDRTGSFTECSIADSEPQFENLQLEDEDWLVKPPLSAGAYAANFNDEEWLVTPLKRSRVMNGIDHEDEEWLVKATKLSGAKDADLEAEEWLVKSGQPNDALDSDFRFIHEFSEQGAAEPLHIYVSDKNEADFQYVKDILKKSGFSCGDVDWYASNQPVSPVVFDEAECSCQEVSMASDEPHSIVRRMLLFDLINEVLLDIYDSSLVIGPWHSRFDLRTRPIPMGYHVLEEVWAKVSCYLSLHWKEGQTVEDIVAHDLMRKDGWMNLVYDAECTALDMEDLMVEDLLDDVVIQIVLESIDE

SEQ ID NO: 42052 - protein, 137 aa, Zea mays
  Clone ID: 700614245_FLI.pep
HPLADDADEDDFLFEDRFSIAYNLDREFGPRLKDHMQYCVNHPEEINKLSKVKAHLSDVKGIMMDNIEKILDRGEKIELLVGKTETLQSQADSFHRHGRELRRKMWLQNLRFKLMVGGGIAALILIIWLMVCRGFKC

SEQ ID NO: 42053 - protein, 404 aa, Zea mays
  Clone ID: 700072924_FLI.pep
ICSGQSPRSTPPATFFLLRSRSGPTEGDHMGAEAAHGHPQQQPPSSLRPGREAAAPPAVVGLQLSALIDHVARVDWSLLDRVPGDRGGSQQVSIDELNHILDEVNAHILPSRNDLTPVTTIAGGSVANTIRGLSAGFGISTGIIGACGDDNQGLLFVNNMSFSGVDLTRLRAKKGHTVQCVCLVDASGNRTMRPCLSSAVKIQANEFRKEDFKGSKWLIVRYAQQNMEQIVEAIRIAKQEGLSVSLDLASFEMVRDSRSKLVNLLETGNIDLCFANEDEAREVIGGSLESDPEEALAFLGKYCKWAVVTLASKGCVAKHGKQVVRVPAIGESNAVDTTGAGDLFASGFLYGLVKGLPLEECCKVGACSGGSVTRALGGEVRPENWQWMYKQMHARGLLLPELKN

SEQ ID NO: 42054 - protein, 73 aa, Zea mays
  Clone ID: LIB3066-004-B9_FLI.pep
SRFKTSVPETSREARLPEKVHKRATAIILRQNGLDQHADILHCFLAATMLSASFFTGSSFSDKISSMWQGEDM

SEQ ID NO: 42055 - protein, 192 aa, Zea mays
  Clone ID: 700424703_FLI.pep
AGPAGRSLLIFLRRLLLSPACFESLSSAPPSRRADMTGSSKKHDLKSKQKLEKKISFYTKVKDAVTSLNAKKTVSKKNKQSRRQKKLRAYDLSALSEFLPEPAAPEQKTEAKLNCKSRQTLVVQESAHLKAVLDNPQFQLDPFAAIHQHLLATQPPAAAKKDDAAGKQGKVSKDKKSRRKKGTSSISQAMDI

SEQ ID NO: 42056 - protein, 136 aa, Zea mays
  Clone ID: 700434680_FLI.pep
QVKADAVSLASRLEALEKTKRMFLGENLEECSIEELHNLEVKLAKSLHVIRGKKTQLLEQQISKLKEKERTLLQDNKELRDKQRNLQSPPEAPPDLNRCVPPWPRSLPAPSNDMDVETELYIGLPGRERSSNRDSD

SEQ ID NO: 42057 - protein, 115 aa, Zea mays
  Clone ID: 700424071_FLI.pep
PCKRINSSYGNLVLTFWRLASSQSLRTGGVFLLLTPSNRRRYTVSTSTRRQTLPVILNFTSQAPTMAVTASSINSAIRMVPHPDTGYFLRFFSCRWRGGWSNLQRAPNPHVPDLM

SEQ ID NO: 42058 - protein, 191 aa, Zea mays
  Clone ID: 700428317_FLI.pep
IESQRSPTSSARFLKCGLCERFLHQKSPWTSNRIVRNADMPVAAVLPCRHVFHADCLEESTAKTEVHEPPCPLCARATDDEGHVSFSEPLHVALRSARRNLLLGTGAGGNSGISDPPRTDRGLKRNNSAVMPRRSGGALFRNRFKKQFPFKARIGKELFGGRVLNKVGLSLSSGQHDDHRQQAPKHDRPMK

SEQ ID NO: 42059 - protein, 288 aa, Zea mays
  Clone ID: 700424842_FLI.pep
SICLDAFCDSNPSTMTKCKHDYHLQCILEWCQRSSQCPMCWQHISMKDPMSQELLEAVEQERNIRANPSRNTAVFHHQMLGDFEIPVGADDAELEERIIQHLAAAAAVRRSHRHHNRRDGHQSRSEASSHPQFLVLSADERTISGQEGDYEQASAVASGRPLRTLVEQERTRGLADASSPSLRCSTPADSTGRSNNRISGIESTPVDQDGTGPSALQSMVQGFHNQSASGWRERWFSRSNSLLDLGSEVRREVNAGIAAVSRMMEWHDARDGTGAGPSPTSASRSGSQ

SEQ ID NO: 42060 - protein, 394 aa, Zea mays
  Clone ID: 700432687_FLI.pep
WGPGFKIVAVAGSSSGIHIYAVFVSKASGEVLKKSSGHTDVEVWILPTFDNSAWSIMAISFISLLAMSAVLATCFFVRRHRIRRDHPRIPEAREFHGMSSQLVKAMPSLIFTKVQEDNCTSSMCAICLEDYSVGEKLRVLPCRHKFHAACVDLWLTSWRTFCPVCKRDATSGVSELPATEATPLLSSAVRLPSQPSSFRSSVAASPPRPISRHPSSHSVSRAYSVSSTPHSPNPFRSHTNLPGVIHASRSTTDLANMSSPHPRISHLSSSTHSLVGSHLSPPISIRYPLPHSRHESPSPHVSSPYISNSGYGSSSYYYLGGSSQHGSYLRRCGESGPSLSTMVPRSSQQQFQSEANVAAGASSAQSSRQSYLRRCGDSDASLSDMASAQSLPGC

SEQ ID NO: 42061 - protein, 269 aa, Zea mays
  Clone ID: 700093733_FLI.pep
IFNLFAEKGVPLLSWSKPDVEALVDLLSYKQNWEPSYIRQRMLPMLSTIYLREVASSSSTPLLLCDQYEFDSIERTKIRHGHPYYLVKWKRATRGMNSNMSSKKPVTEGETSSEVVVLDDDDNEDTVVCESPELLDEPDVPQVLMDDGCCFLLTDEDIQLVGAAFPKETARFQEEQRLKEARSRSRKSKTSLADSGCETPKGPRPSGVQLSITEFYRSKKGGQDMESGKKKPAGEGHAAARDGSRKSSDRDLNNKSLPKSVRRRLLFDC

SEQ ID NO: 42062 - protein, 690 aa, Glycine max
  Clone ID: 700679204_FLI.pep
YPAVSSAARLSKEEANSIAQKPGVVSVFPDPILKLHTTRSWDFLKSQTRVNIDTKPNTLSGSSFSSSDVILGVLDTGIWPEAASFSDKGFGPVPSRWKGTCMTSKDFNSSCCNRKIIGARFYPNPEEKTARDFNGHGTHVSSTAVGVPVSGASFYGLAAGTARGGSPESRLAVYKVCGAFGSCPGSAILAGFDDAIHDGVDILSLSLGGFGGTKTDLTTDPIAIGAFHSVQRGILVVCAAGNDGEPFTVLNDAPWILTVAASTIDRDLQSDVVLGNNQVVKGRAINFSPLLNSPDYPMIYAESAARANISNITDARQCHPDSLDPKKVIGKIVVCDGKNDIYYSTDEKIVIVKALGGIGLVHITDQSGSVAFYYVDFPVTEVKSKHGDAILQYINSTSHPVGTILATVTIPDYKPAPRVGYFSSRGPSLITSNVLKPDIAAPGVNILAAWFGNDTSEVPKGRKPSLYRILSGTSMATPHVSGLACSVKRKNPTWSASAIKSAIMTSAIQNDNLKGPITTDSGLIATPYDYGAGAITTSEPLQPGLVYETNNVDYLNYLCYNGLNITMIKVISGTVPENFNCPKDSSSDLISSINYPSIAVNFTGKADAVVSRTVTNVDEEDETVYFPVVEAPSEVIVTLFPYNLEFTTSIKKQSYNITFRPKTSLKKDLFGSITWSNDKYMVRIPFVLTK

SEQ ID NO: 42063 - protein, 473 aa, Zea mays
  Clone ID: 700081872_FLI.pep
LQVIKYVTNHPDNRWVGVGDATGDYPFSHHKLTVQFSEASAAQDRKLEGLVHKAIRELWRPNPSQLILLQTRGIGALHKELPKACALTGSSDPCYIEAYHLADPTDGRITLHLKILNLTELELNRVDIRVGLSGALYYMDGFSRTVRHLRNLVSQDPVQSSVTVGVSHFERCSLWVQVLYYPFYGSSGSTDYEGDYAEEDSQMMRQKRSHRPELGEPVVLRCQPYKFPLAELLLPLECSPVEYFRLWPSLPAMVECTGTYTYEGSGFKATAAQQYDSSPFLSGLKSISSKPFHQVCSHFIRTVAGFQLCYAAKTWFGGFVGMMIFGASEVSRNVDLGDETTTMICKFVMRASDESITREIKSDLQGWLDDITDGAVEYMPEDEVKSVAAEQLKISMERIALLKAARPKVPPAKTDQEEEEERKQSEELDGFGNPKGPSTLSKLTAEEAEHRALQAAVLQEWHQLCKERAMKAQ

SEQ ID NO: 42064 - protein, 544 aa, Glycine max
  Clone ID: 700738093_FLI.pep
GRDAVVVVGGNREENRGFGLVSYPRERMKREREQLGSIAGTSSCGYSSGKSNLWEEEGGMDELLAVVGYKVRSSDMAEVAQKLERLEEAMGNVQDDLPEISNDVVHYNPSDISNWLETMLSNFDPLPSEEPEKDSASSDYDLKAIPGKAIYGASDALPNPKRVKADESRRAVVVVDSQENGIRLVHSLMACAEAVENNNLAVAEALVKQIGFLAVSQVGAMRKVAIYFAEALARRIYRVFPLQHSLSDSLQIHFYETCPYLKFAHFTANQVILEAFQGKNRVHVIDFGINQGMQWPALMQALAVRTGGPPVFRLTGIGPPAADNSDHLQEVGWKLAQLAEEINVQFEYRGFVANSLADLDASMLDLREGEAVAVNSVFEFHKLLARPGAVEKVLSVVRQIRPEIVTVVEQEANHNRLSFVDRFTESLHYYSTLFDSLEGSPVNPNDKAMSEVYLGKQICNVVACEGMDRVERHETLNQWRNRFVSTGFSSVHLGSNAYKQASMLLALFAGGDGYRVEENNGCLMLGWHTRPLIATSAWQLAATR

SEQ ID NO: 42065 - protein, 338 aa, Glycine max
  Clone ID: 700749025_FLI.pep
DPIQRLGAYMLEGLRARLESSGSIIYKALKCEQPTSNDLMTYMHILYQICPYWKFAYTSANAVIGEAMLNESRIHIIDFQVAQGTQWLLLIQALASRPGGAPFIRVTGVDDSQSFHARGGGLHIVGKRLSDYAKSCGVPFEFHSAAMCGSELELENLVIQPGEALVVNFPFVLHHMPDESVSTENHRDRLLRLVKSLSPKVVTLVEQESNTNTSPFFQRFVETLSYYTAMFESIDVALPRDDKQRINAEQHCVARDIVNMVACEGDERLERHELLGKWRSRFSMAGFAPCPLSSSVTAAVRNMLNEFNENYRLQHRDGALYLGWKSRAMCTSSAWRCY

SEQ ID NO: 42066 - protein, 278 aa, Zea mays
  Clone ID: 700083403_FLI.pep
LKFLKAILDRCLKVYREKMDGLGLPVPVDKLQKLHEMANGDARILFDKQHFGKHHAAQSALKLEDDIKKVYRNLLLANEYQSSKLCEARFSECEDKMDHLQVLKLPSMAKFNAGFTHCNQSFVKECVGPSKESYERRMSKMLAKSRALFIKEYNNKLFNWLVTFSLVMVVIGRFVIKFFLLEIAAWVMFIFLETYTRMFWSAESLYYNPAWHIIVSSWETIVYSPILDLDRWAVPIVIMLLFGVLYWRCFGGRRKRGRGSLLPLYKNSYNSSRRSRSD

SEQ ID NO: 42067 - protein, 629 aa, Glycine max
  Clone ID: 700796826_FLI.pep
GLVSLEPTKIAEILKDRPSWFRDCRSLEVFTMFPAGNGGTIELVYTQTYAPTTLAPARDFWTLRYTTSLENGSLVVCERSLSGSGTGPNPAAAAQFVRAETLPSGYLIRPCEGGGSIIHIVDHLNLEAWSVPEVLRPLYESSKVVAQKMTIAALRYIRQIAQETSGEVVYGLGRQPAVLRTFSQRLSRGFNDAVNGFNDDGWTVLNCDGAEDVIIAVNSTKNLSGTSNPASSLTFLGGILCAKASMLLQNVPPAVLVRFLREHRSEWADFNVDAYSASSLKAGTYAYPGMRPTRFTGSQIIMPLGHTIEHEEMLEVIRLEGHSLAQEDAFVSRDIHLLQICSGIDENAVGACSELVFAPIDEMFPDDAPLVPSGFRIIPLDSKPGDKKDAVATNRTLDLTSGFEVGPATTAGADASSSQNTRSVLTIAFQFPFDSSLQDNVAVMARQYVRSVISSVQRVAMAISPSGINPSIGAKLSPGSPEAVTLAHWICQSYSYYLGSDLLRSDSLVGDMMLKQLWHHQDAILCCSLKSLPVFIFANQAGLDMLETTLVALQDITLDKIFDEAGRKALCTDFAKLMEQGFAYLPAGICMSTMGRHVSYDQAIAWKVLTGEDNTVHCLAFSFINWSFV

SEQ ID NO: 42068 - protein, 306 aa, Glycine max
  Clone ID: 700792796_FLI.pep
ASILMINMATMEDMSNMSGEITLPGFRFHPTEEELLDFYLKNMVVGKKLRYDVIGFLNIYQHDPWDLPGLAKVGEREWYFFVPRDKKHGSGGRPNRTTEKGFWKATGSDRKIVTLSDPKRIIGLRKTLVFYQGRAPRGCKTDWVMNEYRLPDNCKLPKEIVLCKIYRKATSLKVLEQRAALEEEREKKQMVDNSPASPPSSTDTMSFSSPQEEQNVPLPLLQHVLKKESETTEDMVVSKQEKTTNQLTLKDTKSTCGTSLQMPFGKEKLPDLQLPMLSDWTQDTFWAQLNSPWLQNFTPTNILNFY

SEQ ID NO: 42069 - protein, 331 aa, Glycine max
  Clone ID: 700831147_FLI.pep
VGPEYCNQSPNLQAQNGTHLDSGEAVDASSTFSNEEDDQVTHGSVSLGYDGEGDESESKRRKLESYAELSGATRAIREPRVVVQTTSEVDILDDGYRWRKYGQKVVKGNPNPRSYYKCTNAGCTVRKHVERASHDLKSVITTYEGKHNHDVPAARASSHVNANASNAVPGQASLQTHVHRPEPSQVHNGIGRLERPSLGSFNLPGRQQLGPSHGFSFGMNQSMLSNLVMSGLGHAQAKLPVMPVHPFLAAQQQHQQRQQHQQQQQHQQQQQQHQQQQQHQQQQCAANDLGFMLPKGEPNVEAIPEHGGLNLSNGSSVYQEMMSRMPLGPHM

SEQ ID NO: 42070 - protein, 287 aa, Glycine max
  Clone ID: 700954246_FLI.pep
TQSEREGSYSHKEKNFQRGESKRVLLFLFYIYLGAKLCEFIDKPEMATMLTKEHGLNLKETELCLGLPGGGGGGGGGGEVETPRATGKRGFSETVDLKLNLHSKEDLNENLKNVSKEKTLLKDPAKPPAKAQVVGWPPVRSYRKNMMAVQKVSTEDVAEKTTSSTANSGAFVKVSMDGAPYLRKVDLTMYKSYKELSDALAKMFSSFTMGNYGAQGMIDFMNESKLMDLLNSSEYVPSYEDKDGDWMLVGDVPWEMFVESCKRLRIMKGSEAIGLAPRAMEKCKSRS

SEQ ID NO: 42071 - protein, 270 aa, Glycine max
  Clone ID: 700850986_FLI.pep
RTNRATQAGYWKATGKDRPVHSQKKQVGMKKTLVYYRGRAPHGIRTNWVMHEYRLIESVPGTALSSLKDSYSLCRIFKKTIQIPAKPNNNEEEQPEIANKKESMWISEEQMLGEDSSGTEISREMENVDEKILNHEHPKFPCDASSSDLTQGACTPTDTGIAEDFQPQFACDEANSAANSYTMGIGYSTNIFQDVEMPSYADMHYQLPYTPLVMEDFPQINLPETKTTKPEVTDDCMLYDRYRDCMNGTLEEIISLCCTQDNSVPFPMLE

SEQ ID NO: 42072 - protein, 264 aa, Zea mays
  Clone ID: 700083487_FLI.pep
NHSNRWKILNKLNVRHRCIISPPRERRDDPCVATFSVSIPVCNLSKQGMDDMLLINKCQSLSPLVKRSILCQRDHLLDILPHCLCPWLCSLYPPMLQQLCGKPTQQRFPLIRRPVKFRNASPMSHRNYPSTGINQTTDAQSLSSQRRGRGDSRRARGRRRTRGSRPMQPWPPPRARTTNGAFPRGRGGVRGGTYGGKPCSRSRRRSPATGRRRGRPPWRRAEESGRAASWGSGIAGLAGAAGERRRRSALNRITFDTLVLWIGF

SEQ ID NO: 42073 - protein, 406 aa, Glycine max
  Clone ID: 701046638_FLI.pep
LFVPSGGGACWKLEMSQRGLIYSFVAKGTVVLAEHTQYTGNFSTIAVQCLQKLPSNSSKYTYSCDGHTFNFLLDNGFVFLVVADESIGRSVPFVFLERVKDDFMKRYGASIKNDGAHPLADDEDDDDLFEDRFSIAYNLFSKMDVYAAVSLSGDPLHPQGATTHVHKDAGSNPTWNYPVKFSVNESLAKENRLSLEIKLISDRTLGDTVIGTVHVPLRELLDNPGDDSSFRQVSYQVMKQSRKSKGSLNFSYKFGEHVPAPAAKTPKAAKAGQEPVMAYPPAGAGSSSMPYGTPHPPPPQQYAATGYGYPPQQVHGGYPPQAAYGYPPQTGYGYPQQSGYGYPQQSGYGYPPQAQKPKKNKFGMGLGAGLLGGALGGMLIGDMVSDAAEYDAGYDAGFDDAGGFDF

SEQ ID NO: 42074 - protein, 277 aa, Glycine max
  Clone ID: 701063636_FLI.pep
HGRSFNSNFWHFDQGLEPNEYMSSSWKGVIISHFLIGSSSSNAPVDVGGFHNEFGTSRNPTAPQSFHNNLTQTARGVHSNYSQRSTPTFRASSSLRLGRVAPSDDGLHMVSESYSSRQPRPLTTVGWQNNNRNGRSRIPSDRYRSLDDEGFMIVDRTSLYGPRNMLDRHRDMRMDIDNMSYEELLALGERIGHVSTGLSEDLISKYLTETIYCSSEQSQEEEACAICLEEYKNMDDVGTLKACGHDYHVGCIRKWLSMKKVCPICKASALPEDKKGK

SEQ ID NO: 42075 - protein, 304 aa, Zea mays
  Clone ID: 700085123_FLI.pep
LALEYLHSMHIVHRDLKPDNLLIAHDGHIKLTDFGLSKVGLINSTDLSGPAVSGASLYGDDEPQMNELEQMDHRARRQNRSAVGTPDYLAPEILLGTGHGCSADWWSVGVILFELIVGIPPFNAEHPEAIFENIMNRKIPWPHVPEEMSFDAQDLIDRLLTEDPHQRLGANGASEVKQHPFFKDISWDTLARQKAAFVPSSDSAFDTSYFTSRYSWNQSDENIYEAYELEDSSDNGSLSGSSSCVSNQDDMGEDSTGLNEFESSANVNYSFSNFSFKNLSQLASINYDLLTKGLKDDPPPRTEM

SEQ ID NO: 42076 - protein, 112 aa, Zea mays
  Clone ID: 700161183_FLI.pep
LQVLHPLCSWAHMPGLSILVHTPLAIKGEVCSVTRQALSGPDLDRLSIPKLPQQSNPQWSRVLRSGGPNHSKSSRVHVLGDRLARQTKRLSPFLILGFRASALCHPVGEFPL

SEQ ID NO: 42077 - protein, 250 aa, Zea mays
  Clone ID: 700048468_FLI.pep
PLHCWMKHGPLSRGAPSLVIIFILLTTLFIILVIDLRLGLVRLLFIFLLFLLGRSLLSCSALALVVGSDGLVVLELELVSLGYIGSLVRLAQGFPPVASSFPHRSDRLVLRVLLLELLAKFLHEHEESAGSPLRLVGVLAGLPFPALGGLLRPLALHRQLGIGLGGALGFGPLHGGFERRHGAQRSDPRLAEGIPVAGGRIGVESRAKLPLAARGEREGGKGKGRRRALQEGRAGAGDKKEGVAQGHISD

SEQ ID NO: 42078 - protein, 161 aa, Zea mays
  Clone ID: LIB189-002-F8_FLI.pep
YHCQLSLKCKPLPSSSQSPSLHTPSGQTQGKADYKSLSEEEWKKRLTEEQYYVTRQKGTERAFTGEYWNTKTPGIYQCVCCDTPLFQSSTKFDSGTGWPSYYKPIGENVKSKLDMSIIFMPRTEVLCATCDAHLGHVFDDGPPPTGKRYCINSASLKLKPQ

SEQ ID NO: 42079 - protein, 312 aa, Zea mays
  Clone ID: 700082933_FLI.pep
LTQPPYGETFFGRATCRCSDGRLVVDFLAEKFGLPLLKPSKQGGSDFKQGANMAIIGATTMDSGFFQSLGIADKIWNNGPLNTQIQWFQELMPSICGSTQACKSYLSKSLFVLGEFGGNDYNAQIFGGYTPEQASGQSATIVDAIGKGVEQLISLGAMYVVVPGVLPVGCFPIYLTLYQTSSAGDYDQYGCLKRFNALSAQHNSLLQAKVSSLQSKYPGARVMYADFYSHVYDMVKSPASYGFSTNLRACCGAGGGKYNYQNGARCGMPGAYACSDPASSLSWDGIHLTEAAYRKIADGWVSGAYCHPAISA

SEQ ID NO: 42080 - protein, 488 aa, Glycine max
  Clone ID: JC-GMLE01810087C12_FLI.pep
RLYYGDGNVEAMFATLDPLHDMLERGPETLREIAFQQSFGRDLQDARESCRRFQQYGELNDLNQAWDLYYQIFKRIARILPSFSILELQQVSPKLLAARDLELAVPGTYHSGKPIIRISKFAESLDVLTSKQRPRKLKVAGSDGKDHAFLLKGHEDLRQDERVMQLFGLVNTLLSKDPETFKRHLMTIPYPIIPLAPNSGLLGWVDNTDTLHVLVKNYRDSRKILLNIEHRIMLQMAPDYDHMMLIQKMEVFEYALDNTTGQDLYRVLWLKSRNSEAWLDRRTQYTRTLAVMSMVGHILGLGDRHPSNLLLERISGSVVHVDFGDCFEVAMVRDKYPERVPFRLTRMLIQAMEVSGIEGTFRITCENSMRVLRDHKESIMAVLEAFVHDPLINWRLINTGRRGGAGANERGTSKRVGVDESNPLDDETNEALNQRALQVVDRVQQKLTGRDFKPTQVLDVSEQVQKLILQSTSVENLCQTFIGWCAFW

SEQ ID NO: 42081 - protein, 303 aa, Zea mays
  Clone ID: 700087218_FLI.pep
DPRPNPPRAPKSNPFGASFGTSGNKSSGTPFTLTTSPGQLFRPASLSIPSAQPAQPSQSTSSSSFSNSFSSGLTGFGQPAQIGSGQQSAFGKPAQIGAGQHAGFGQTAQIQSGFGQPAQIQSGFGQSAQIGTGQQSGFGKPAQIGAVQSGFGQPAQFAAQQTLGSVLGSFGQPPQLGGIGSGGFGGFSSASTSAGFSSLSSGNAGFAGAASGGGFSAPTASAGGGFAAAATGGGFAALASKSGGFVGAASSGGGFGGASQGGGFGSGGGGFGSFGGNQGAGFSAFGASGAGRPAADFLTQMRK

SEQ ID NO: 42082 - protein, 369 aa, Glycine max; identical to SEQ ID NO: 40320
  Clone ID: UC-GMFLMINSOY029B07_FLI.pep

SEQ ID NO: 42083 - protein, 162 aa, Zea mays
  Clone ID: 700089244_FLI.pep
HRNLASIQKGKRVAGTSPKPPKSLLHCPAAAAYSTSNLSLRLKTSSSSILCALHRLESSLSSPLPSTLPPLITPLLFASLRHSSNTSRTAFAIRCSLLHGTTILHSTFISLPIPLFPFGRVPTASPCSCTITPCSCTITPNLLSATGAAPSWSPRCPGSCSR

SEQ ID NO: 42084 - protein, 257 aa, Glycine max
  Clone ID: UC-GMROPIC068G10_FLI.pep
LVRSSMEDIGPNSCTRQVAEKKARPQEQLNCPRCNSTNTKFCYYNNYSLTQPRYICKTCRRYWTEGGSLRNVPVGGGSRKNKRVTSSKVPPDLNPPSLSSVSAISSQNPKMQGVHDLNLAFPTAIDNYHGMSPYVEMPKLEIGGDHSTSHSHHHSPSAVELLRSGMASRGLNPYAPNSMMSTSDHSLYTTGYPMQEIKPNLSFSVDDGFGNRSYGVQENGGGRLLFPFGDIKHLSAGVEVEHNKERGNNSTGYWTGW

SEQ ID NO: 42085 - protein, 216 aa, Zea mays
  Clone ID: 700073712_FLI.pep
RGSEAEMSAGLVTDEATVGRLYRIRRTVMQMLRDRGYLVVDHELATSRRDFLRKFGESFHREDLLINKYKKNDPSDQIYVFFPNDDKVGMKHIKKYVEMMTHENVSRAVLVLQQNLTPFAKSFLIELEPKIHLEIFQEAEMLINIKEHVLVPEHQVLTNEEKKTLLERYTLKETQLPRIQITDPIARYYGLRRGQVVKIIRPSETAGRYVTYRYVV

SEQ ID NO: 42086 - protein, 167 aa, Zea mays
  Clone ID: UC-ZMFLMO17165A04_FLI.pep
RRCTGTQGSCGGLAAGEVVPEERARRRRGLQQARQVRQGGRRRRALSAEGGPPGVRRLRPAAPRAPGQVLLPLHHQEVRRRREEAGGRGERDGVRAHVRGQGWRLDARRRRPLEDVRGNLPAPSSDERFRGRELGTESRPMRHTSSVGRWHARTHWRLEGKRELCWS

SEQ ID NO: 42087 - protein, 241 aa, Zea mays
  Clone ID: 700092747_FLI.pep
TTPRLVRSTGKKGAEANRLVRPLPVVAMAAVEVCVKAAAGNPDTLGDCPFSQRVLLTLEEKKVPYEVKLVDLGNKPEWFLNISPEGKVPVFNGGDGKCIADSDVIIQVIEEKFPTPSLVTPPEYASVGSKIFPAFVKFLKSKDGSDGSEKALLDELQALDDHLKAHGPYINGENVSATDLSLGPKLFHLQIALEHFKGWKIPENLTNVHAYTKALFSRESFVKTKPSEEHVIAGWAPKVNA

SEQ ID NO: 42088 - protein, 436 aa, Glycine max
  Clone ID: JC-GMLE01810075H06_FLI.pep
QDCKLKLQAIMSFHKCGGNVGDSVLIPLPKWVLEIGESDPDIFYTNRKGIRNKECLSLGVDNQPLFHGRTAIELYTDYMQSFRDNMEDFLESELMIDIEVGLGPAGELRYPSYTKNLGWEFPGIGEFQCYDKYLKADFKGAALRADHPEWELPDNAGESNDVPESTEFFKSGGTYQTEKGKFFLTWYSNKLLTHGDEILDEANNVFLGCKVKLAAKVAGIHWWYKAESHAAELTSGYYNLHHRDGYRPVARMLSRHNAILNFTCLEMRNHEQPAKAQSGAQELVQQVLSCGWMENLEVAGENALARYDREAYNQILLNARPNGVNQFGPPTLKMYGVTYLRLSDKLMQQTNFNIFKAFVRKMHANLEYCPDPEKYYHFTVPMERSKPKIPLEVLLEATKPVEPYPWYKETDMSLDVTGFLDYIVAIIVRIFKLKLN

SEQ ID NO: 42089 - protein, 189 aa, Zea mays
  Clone ID: 700087417_FLI.pep
REFTAAQTPQIQFHPNRREGEAKSMAAAAAGGENSGAGAGAGEGEFYLRYYVGHKGKFGHEFLEFEFRPDGKLRYANNSNYKNDTMIRKEVFVSPSVLREARRIIQESDIMKEDDSNWPEPDRIGRQELEIVMGNEHISFTTSKIGSLVDVQSSKDPEGLRIFYYLVQDLKCFVFSLINLHFKIKPIQS

SEQ ID NO: 42090 - protein, 314 aa, Zea mays subsp. mexicana
  Clone ID: UC-ZMROTEOSINTE047E09_FLI.pep
QVYVKSTLFPHSPSACLKWKSRSGAILTELKSFDADFMCIQELDEYDTFYKKNMENSGYSSIYIQRSGDKRDGCGIFYKPKSAELVQKEVILYNDLVEKYVPSDNVNSALENNSSAEEDKNAKPDNSKRGDPNDPRVRLKRDCVGLLAAFKLSDPCDQILIVANTHIYWDPQWIDVKLAQAKYLLSRVSQFEQLISNKYNCKPSVIIAGDFNSTPGDKVYNYLLSANLGSTDEAPIKLRSLYAANGGEPEYTNYTPGFTGTLDYIFLSDGSSIKPTSLLRLPRGDSEDVKGGLPNFRHPSDHLPIGADFLVVNI

SEQ ID NO: 42091 - protein, 176 aa, Zea mays
  Clone ID: 700090174_FLI.pep
HTTDRSNSTIRNHIHRFRADADGLTSRPAAVQKSEQRPARSQSPYLVGSGPRGPPTSPVALFTCAPPSASCSSSFPASASASAALASAASSPSPFLTASGGGGGGPVEGPELESARRGKRRDRGGVGGRGPWERAEARRRRQWLGLAAMAWLGFVRCPVRRVLFPGTALASCRLSS

SEQ ID NO: 42092 - protein, 229 aa, Zea mays subsp. mexicana
  Clone ID: UC-ZMROTEOSINTE005D12_FLI.pep
EEEGPRRVRKPYTITKSRESWTDPEHDKFLEALQLFDRDWKKIEAYVGSKTVIQIRSHAQKYFLKVQKNGTGEHLPPPRPKRKAAHPYPHKSSKKALQVVLPQQVSHIMEQGCGTPMDVATVATDSSVNNAFPVQHFSPRHTQAMPDFARVYNFLGSIFDPETNGHLQKLKEMDPIDAETVLLLMKNLSINLTSPNFEEHRRLLSSDASSMDQESGSSRVHLPFMITSK

SEQ ID NO: 42093 - protein, 276 aa, Zea mays
  Clone ID: 700047850_FLI.pep
SSEQTQQIPVITFLIYIAMFCSGESSGMTVALILQVFCLVAMEKPVSLKPEHIRDEKVKVLQSVEPIKHEEVVIGQYDGYKDDPTVPDDSNTPTFASVVLRVHNERWEGVPFILKAGKALNSRKAEIRVQFKDAPGDIFRCKKQGRNEFVIRLQPSEAMYMKLTVKKPGLEMATEQSELDLSYGMRYNGVKIPEAYERLILDTIRGDQQHFVRRDELRAAWEIFTPLLHDIDGGKLRSVPYKPGTRGPQEADELSRRMGYVQTHGYVWVPPTLSKV

SEQ ID NO: 42094 - protein, 280 aa, Zea mays
  Clone ID: UC-ZMFLB73119H04_FLI.pep
GSVSRRGPTELASTLHAAAVLLREFDGWSWFINLSASDYPLMPQDDILHIFSYMPRDLNFIEHTSNIGWKEYQRARPIIVDPALQVPNKTEVVTTKEKRSMPSAFKIFVGSSWVMLSRSFLEFCLLGWDNLPRTLLMYFTNFLSSSEGYFHTVICNSEYYQNTTVNSDLRFMAWDNPPRTHPANLTTEHFDAMADSGAPFAHSFANDNSVLDMIDAKLLGRAPDRFTPGGWCLGSSVGGKDPCTFLGRSFILRPTKGSAKLEKLLLKLLEPDNFRPKQCK

SEQ ID NO: 42095 - protein, 332 aa, Zea mays
  Clone ID: 700047922_FLI.pep
LTSAMARGGDGLQVLSALDAAKTQWYHFTAIIVAGMGFFTDAYDLFCISLVTKLLGRIYYTDTSKDSPGSLPPNVAAAVNGVAFCGTLAGQLFFGWLGDKLGRKSVYGMTLMVMVICSVASGLSFGHTPTGVMATLCFFRFWLGFGIGGDYPLSATIMSEYANKRTRGAFIAAVFAMQGFGILAGGIVTLVISAAFRAAYPSPAYRDDHFTSTVPQADFVWRVILMLGAAPALLTYYWRMKMPETARYTALVAKNAKQAAADMSKVQTAAAATATTTGTGGTERWGPLRPSYLVRFCYRVHPSLEGVYLRLWSSRVRMFRFVFVVVVAHLCF

SEQ ID NO: 42096 - protein, 320 aa, Zea mays
  Clone ID: UC-ZMFLMO17030H12_FLI.pep
ERGIAFPTCVSVNDTVCHFSPLATDDAVLEENDMVKIDMGCHIDGFIAVVAHTHVITNGPVTGRAGDVLAAANTAAEVAMRLVRPGKKNKDVTEAIQKVAAAYDCKIVEGVLSHQLKQFVIDGNKVVLSVSNADTKVDDAEFEENEVYAIDIVTSTGEGKPKLLDEKQTTIYKRAVDKNYHLKMKASRFIFSEISQKFPIMPFTARALEEKRARLGLVECMNHELLQPYPVLHEKPGDLVAHIKFTVLLMPNGSDKITSHPLQELKPTKSIEDNAEIKAWLALGTKSKKKGGGKKKKGKKGDAAEADPMEEATNGATSQE

SEQ ID NO: 42097 - protein, 77 aa, Zea mays
  Clone ID: 700049504_FLI.pep
HINNLKSILHHLHSVAMSHPKIKNGKITSMVASYDLCSGCSSSSSLLHSSLSSCAVYLWLEIRNCCVPSTTDAIDIH

SEQ ID NO: 42098 - protein, 431 aa, Zea mays
  Clone ID: UC-ZMFLB73132D06_FLI.pep
NARGTTPTWTPSGRTWVRVAPASLFLFLSYLSASVLAFAHLSMATPLTRASKSNAPRGEAHLALRPVPVPQHVRDRNRLHHHHGDLSQGDREGQLLPQPGPQRSLRRRRRPPLHAALRGGPGGAVPHTQLPQHGLALRRRRRHVLHLRHHRPRPRPRQDHRKWGDQRKRRRSSDEHRAAESLASRAGHRRHRVRLPVHHCPTGDTGHAQIAATRERDDAEGERARGPGHHVLLPRRGVLRVRRLRQRCAGQPAHRLRLLRAVLAHRLRQRLHRAPPAWWLPDVQPADLHLRGPVLGGQVPEQRVREQILRREGARRAGVVELQPQPAAAVFPDGVRGEHHGAGPPLPLLQRGAGRAGRRRLLAPRHLPPRRDVLRPARGPAVDADVGRASGIQRRLLRRRHLRLRRLRRGSHPQEARLVVVLAPFLSSTMS

SEQ ID NO: 42099 - protein, 165 aa, Zea mays
  Clone ID: 700081971_FLI.pep
KRIVRKYVSTFGLCVVTAWDARGKPRSQVLPKNLAGGILRDRIREENSVDPLVEHDLLCNKLLDLVLTDLRAFTAYNECHRDFAGDFIFHRDNSGILDFRMCDEKGFKLRRRYLEALVFDYLLQPVNDEDLVVIVHITNVPGVQPSVLINGVLCRLWIIQITCAS

SEQ ID NO: 42100 - protein, 212 aa, Zea mays
  Clone ID: UC-ZMROMO17010H09_FLI.pep
LLAHRPRQPRHRSPPPRRLPGVHAAGVRVRGPQVRRRGHDRRGAAAAGAGRAPRERVQVVLPHGVRGGDHGDGRLVPLLQPDHRAARLLHLLAARRLLPRRDVPHEEQGGAVDQPVAHHPCIQPRLPAHQRVRLRRLCGWRVRVGDELIQTLQMQLPATFRTCMFCTYTALVYLALYLVLGRSGRAPSLVLRLKRVWAHKVQIFFLIIPCQP

SEQ ID NO: 42101 - protein, 100 aa, Zea mays
  Clone ID: 700082067_FLI.pep
YYCTWGFFPVGFPGCPGFERMVNAQPSGVDQLNAPWLGSAGGVHGNAQNGVPPVSAPVVEVPVKDPIEVPAVTPPAKPMRVKVGAKKRGRPKGSKNKKKL

SEQ ID NO: 42102 - protein, 418 aa, Zea mays
  Clone ID: 700085903_FLI.pep
STPGVSAILFDALAKANINVRAIAQGCSEYNITVVLKQQDCVRALRAAHSRFFLSKTTLAVGIIGPGLIGGALLNQLKNQTAVLKENMNIDLRVIGITGSSTMLLSDTGIDLTQWKQLLQKEAEPADIGSFVHHLSDNHVFPNKVLVDCTADTSVASHYYDWLKKGIHVITPNKKANSGPLDQYLKLRTMQRASYTHYFYEATVGAGLPIISTLRGLLETGDKILHIEGIFSGTLSYIFNNFEGTRAFSDVVAEAREAGYTEPDPRDDLSGTDVARKVVVLARESGLRLELSDIPVESLVPETLAESCSSADEFMQKLPSFDEDWARQRSDAEAAGEVLRYVGALDAVNRSGQVELRRYRRDHPFAQLSGSDNIIAFTTSRYKEQPLIVRGPGAGAEVTAGGVFCDILRLASYLGAPS

SEQ ID NO: 42103 - protein, 282 aa, Zea mays
  Clone ID: 700349742_FLI.pep
LGSGDRQEGTTMQGSYGYDGAASRDPKPRLRWTPDLHQRFVDAVTKLGGPDRATPKSVLRLMGMKDLTLYQLKSHLQKYRLGIQGKKSTGLEPASGGVLRSQGFGSTTAHPPPGVPDQGKNTREIALSDALRYQIQVQRKLQEQTEVQKKLQMRIEAQGKYLKTILEKAQTNISFHTNASNGIESTRSQLMDFNLDGFMNNATQVCKEHREQLVKAMSDENDKDSLGLQLYHLGSQEAKEVKCTPKTEDSLLLDLNIKGGYDLSSRGMQACELELKINQQIV

SEQ ID NO: 42104 - protein, 239 aa, Zea mays
  Clone ID: LIB143-063-G1_FLI.pep
LKPENEDEELDEKRIYRTTYMFSATMPPAVERLARKYLRNPVVVTIGTAGKATDLITQNVIMVKESEKMPRLQKILTDLGDKTAIVFCNTKKTADMRAKDLDKSGFRVTTLHGGKSQDQREISLDGFRNRRFNVLVATDVAGRGIDIPDVAHVINYEMPSSVDTYTHRIGRTGRAGKKGVATSFLTLENTDIFFDLKQMLIQSNSPVPPELARHEASKFKPGSIPDRPPRRNDTVFANH

SEQ ID NO: 42105 - protein, 192 aa, Zea mays
  Clone ID: 700572388_FLI.pep
RKSPLVSPSPIPPAAADAPRLFKMNVEKLKKMAGAVRTGGKGSMRRKKKAVHKTATTDDKRLQSTLKRIGVNTIPGIEEVNIFKDDIVIQFQNPKVQASIPANTWVVSGVPQTKSLQDLLPTIINQLGPDNLENLKRLAEHFQKQVPGAEASASAAAQDEDDVPELVPGETFEEAAEVKEVPEAEPEEKKDS

SEQ ID NO: 42106 - protein, 297 aa, Zea mays
  Clone ID: 700167056_FLI.pep
KARTDQKLVALNKITFFLWLMFLGPGCSSSPPCRISSGLRGTAWPQEIRQGGLEEHIAQLRPDADAHAGGQPRAEVLHQAQLRRQGQEEVQHPRHHHGEPDGRRAGALAVAVLSDHHHQPAKRAGSGRSGDRRALLVGGGGRGQAAPARRWEPATEPDLRGAGCLQDGRFAGPRPAVWPSASSTGRQPPQRSCSRGRQQAVVEREVEKMKSSTLLAILVLQALLVSAAVAKGPAGPTTKKQCWCGECTSWSGVWTCDDLLTKCAATCKNCVPVSTDKGAIKYRCRDFLPENCGCKIH

SEQ ID NO: 42107 - protein, 260 aa, Zea mays
  Clone ID: LIB189-003-A5_FLI.pep
RPVAARTMASSNSAAPAPADGGDDLDQLLDSALDDFTNLDLSASAAPKSSGEASGSGSGGKGPVKGLGLGLPDPKAPKRRAGKQPPPRGACAKEALEELTRETREAVRGLETATGSVPSLDDDAMMEEFVKQFQEFAGAQDMDSIVETMMQQLLSKEILHEPMKDIVEKYPKWLEDNKDKISKEEYGRYNNQLELMVKLIEVYENDPENMTRIFDIMQNMQECGQPPSDLVQDIVPDLDLSKLGQLSPEMLESAPNCCVM

SEQ ID NO: 42108 - protein, 123 aa, Zea mays
  Clone ID: 701161894_FLI.pep
WFPPNARKGRSSGKIPIVIPRAAEKASCLGSAPLLMTCSMGSTILAWSHGRTPVLVRREPIQLSLGHRLVVELKEAGAGPTKIWAPGVGRERRSPSYGTRGEQEKKRRAKVRAVRGPLVLVLR

SEQ ID NO: 42109 - protein, 315 aa, Glycine max
  Clone ID: JC-GMFL02220077H12_FLI.pep
REPPTMASKLCDSCKSATATLYCRPDAAFLCGACDSKVHAANKLASRHPCVVLCEVCEQAPAHVTCKADAAALCLACDRDIHSANPLASRHERIPVTPFFESVHSVKASSPINFHHRFFSDADADADVSTEEAEAASWLLPNPKTDLNSSQYLFSETEPVPYIDLDYAAMDPKTEQKSSATADGVVPVQSNFEPFTYGYKYNTTLSQSQSHMSQSVSSPSSMEVGVVPDGNTMSEISNCSYSKVAPVTVTAQFSAADREARVLRYREKRKNRKFEKTIRYASRKAYAETRPRIKGRFAKRTDADPLAGYGVVPSC

SEQ ID NO: 42110 - protein, 310 aa, Zea mays
  Clone ID: LIB189-010-G7_FLI.pep
DTNTIMADIDSRPRKSVAFAEGETIVDSNGEVTQAVSETEKDTTAESHSKPDAAVDEATDDFEALALSSKKKKKSKTEDGEVDLSALKKKKKKPKAPLVDDFEAKLAAAGGDEEKVLADDAAEKQSAKVEAGLQEGDLIQGTGIWAHDETKPINYESLLSRFFLMLSDSHPDLGGSGMKSYKIPPPQCLREGNKKTIFANIAEICKRMKRTDEHVTQFLFAELGTSGSVDGSRRLVIKGRFQQKQIENVLRRYIVEYVTCKTCRSPDTELNKGENRLYFVTCNSCGSRRSVTAIKTGFSAQVGKRKRMVK

SEQ ID NO: 42111 - protein, 274 aa, Glycine max
  Clone ID: 700686419_FLI.pep
LVYTICLAIPLFLSFSLHSFASYPLFWAFLGLQILLGEGSILVETSHTRKHSFFWVHSTWCLEMVRGKTQLRRIENATSRQVTFSKRRNGLLKKAFELSVLCDAEVALIIFSPRGKLYEFASSSMQDTIERYRRHNRSAQTVNRSDEQNMQHLKQETANLMKKIELLEASKRKLLGEGLGSCSLEELQQIEQQLERSVSSVRARKNQVYKEQIDQLKEKERALYAENARLCEQYGGIQPQPATKDPKEIQPYAESSPSSEVETELFIGLLRSSY

SEQ ID NO: 42112 - protein, 280 aa, Zea mays
  Clone ID: LIB3150-006-G10_FLI.pep
PSSREREARPHPVVGLGMGGSECALGDAAIGEETLNYDGDDVEMADADSDTEEARAAEVSAATGGSAGGVRQAEKDGPDGKKKRKKRRNKGKKNKGRQDGAPTNIADINRFVLNTCKRLKEKKSYLVWNAVGCLGVTAVNDLVREVEAIQKCGGQTIADGSRFRTGGGILWNILKSREPKAYKEIMAKGKELEKQFRCTKRPQISRNEDASSQGSALIDDEIEARDQKETLDDPEQLDDVEVHVSDNKAQRKPLADRIRAPVAYDDLFEEGEIHDGEPRS

SEQ ID NO: 42113 - protein, 275 aa, Glycine max
  Clone ID: 700755407_FLI.pep
IFVYLIPIRFFSIFSSTPFPRSACFFHHQLIMVLHRELDHLFSSPFVDPPKDDAKSSGMSIEKKIEFLESLTGKVTNRRSRRWLNDRLLMELVPRLNAEEIRGLFAPPPWGDEVPPSTFSMTNMEEWDRFRNIDMDKEVNIIHSLENSIEKRKGHIDADKMAVLNGWHRIDCRTRDALRRSCLSELIEGYEECVRAFITESTDGDILELQIQDPFHRLLLHGVCEFYNLASDTVSGYNGVESSRITKIKRKKKGSPVLPNITLSHFLKMSKEGSW

SEQ ID NO: 42114 - protein, 309 aa, Zea mays
  Clone ID: LIB3062-047-C6_FLI.pep
LQQVIIHGGGVQQAGALDRTVEVGVVVEQPRLDRRQRHHQLERRGRRLRLVLEHRATSGRRDDGGATAVRHLRGGPGGRGLGAAGRARSPAAALPVQAGPSVQHPGDVVRGENVRPQGGRRWRRGALRRQARGRRAVTADDAHASAVALRLRLRLEVAERGERLAERAARQVDVRLQPPLPLPLGVGRRRPVRRRLGRPVAVAVAAAGLQLALEVRVPVVLDVIVRPLRQVRRDGRPPVAEEGLEVDDELLLLLREVAAPDARPEVVGPPKPAALAAPHQPGSGGDGAPVAGAVVLDVGDEDEVLLRRP

SEQ ID NO: 42115 - protein, 199 aa, Zea mays
  Clone ID: 700103281_FLI.pep
TKFGGRTGGQPPLLDRQGALHLFLLSPPCRAGGRHQIQIEAPQARRGPRRRRRGERHREPVPVMAPLVPAERLPRGEAPVAHRAPVPPLPGAAAARRRGIRRHRRRRRRRLCERRRRLPVAGLVPAQRLVRREGLAADGAPEAELALLRRHCRRRPGTGCRSVPSSSRGCERHEAQGDVVVVGDGHLSVTARERGLLKS

SEQ ID NO: 42116 - protein, 340 aa, Zea mays
  Clone ID: 700150178_FLI.pep
LSPTRELAQQIADVLSEAGAPCGIKSVCLYGGTKKEPQISALKSGVDIVIGTPGRMKDLIEMGVCCLNEVSFVVLDEADRMLDLGFEPEVRAILSQTSSVRQMVMFSATWPLAVHKLAQEFMDPNPIKVVIGSEDLAANHDVMQIVEVLDDRTRDSRLLALLDKYHQAQSNRVLVFVLYKKEAARVETMLQRRGWKAVSVHGDKAQHDRTKALSLFKEGKCPLMIATDVASRGLDIPDVEVVINYSYPLTTEDYVHRIGRTGRAGKKGVAHTFFTQANKALAGELVNVLREADQVVPPALMKFGTHVKKKESKIYGSHFKELTADAPKSTKITFGDSDED

SEQ ID NO: 42117 - protein, 298 aa, Zea mays
  Clone ID: LIB3068-061-D4_FLI.pep
ACARLSSFLPRPLAFAWLHRAGRAGEEKLASSYQLSAGGGSLPAAGVSCKGWELAMGRGRVELKRIENKINRQVTFAKRRNGLLKKAYELSVLCDAEVALIIFSNRGKLYEFCSGQSITKTLERYEKNSYGGPDTAVQNKENELVQSSRNEYLKLKARVDNLQRTQRNLLGEDLGSLGVKELEQLEKQLDSSLRHIRSTRTQHMLDQLTDLQRREQMLCEANKCLRRKLEETSNQVHGQVWEHGANLLGYERHSPQQQAPSHVGNGLFFHPLEAAAEPTLQIGFAPEHMNNFMPTWLL

SEQ ID NO: 42118 - protein, 372 aa, Zea mays
  Clone ID: 700150242_FLI.pep
QTRIRPTNRLPRSAAMASSQANLDKMQLRQSYRNVWHTDMTNAIQADFPYCCLALWCGPCVSYMLRKRALYNDMSRYVCCAGYMPCSGKCGESRCPEFCLATEVFLCFGNSVASTRFLLQDEFNIQTTQCDNCIIGFMLCLQQVACIFSIVAAIVGSEELSEASQILNCLSDLVYWTVCACMQTQHKVEMDKRDGKFSPQPMAVPPVQQMTRIDQPMPPPAGYAPQPAYGQPYGGYPSPPGQGYPPPPGQGYPPAGYSQGGAYPPPAQGYPQGGGYPPPGQGYPQGQGGAYPPPGSYPPQGSYPPAEGSYPAQGSYHPAQGSYPAQGSYSPAQGPYPAQGSYPPPPAQGSYPPAQGSYPAQGSYPPQAYPGK

SEQ ID NO: 42119 - protein, 340 aa, Zea mays
  Clone ID: 700151727_FLI.pep
LTGEGLDLAMAENTHGSGRHVLGDLTNVICKRAATSDLEKSTGGIKIRRIEKTGTRKEYDANAKASSIGKGIVFGHLFDDVAREKFQSHSIFQNSRVQHIAAEAAGLLSKEANDSKNHYASIGPLDLSDKEQDSSLESEDDYDDEDNDETNGELLHHFFSSELANKMSTNDGECLTQEEIVGSSGNQKPLSSLDATTGGDLPISSAQHASVRTGGLEEAVAPKSCACSFCLKAAFMWMDLHYQDARSRLSVLKKSIKFARSLEEKCRGNEYAANVAGYESKRAVGVEFELSQQQRSLFLYTENALVRESTQLHSAFVKLKELRENCKTDLETLSNSSMRK

SEQ ID NO: 42120 - protein, 133 aa, Zea mays
  Clone ID: LIB3067-060-H11_FLI.pep
FKVLPCAGLALLVHPSTSHNIVNRISWAFCVYLEAVSVLPQLRLMQNTKIVEPFTAHYVFALGVARFLSCAHWVLQVLDTRGRLLTALGYGLWPSMVLFSEIVQTFILADFCYYYVKSLVGGQLVLRLPSGVV

SEQ ID NO: 42121 - protein, 765 aa, Homo sapiens
  Clone ID: LIB4119-204-G9_FLI.pep
KVIGGPPGREGLLVGLKNGQILKIFVDNLFAIVLLKQATAVRCLDMSASRKKLAVVDENDTCLVYDIDTKELLFQEPNANSVAWNTQCEDMLCFSGGGYLNIKASTFPVHRQKLQGFVVGYNGSKIFCLHVFSISAVEVPQSAPMYQYLDRKLFKEAYQIACLGVTDTDWRELAMEALEGLDFETAKKAFIRVQDLRYLELISSIEERKKRGETNNDLFLADVFSYQGKFHEAAKLYKRSGHENLALEMYTDLCMFEYAKDFLGSGDPKETKMLITKQADWARNIKEPKAAVEMYISAGEHVKAIEICGDHGWVDMLIDIARKLDKAEREPLLLCATYLKKLDSPGYAAETYLKMGDLKSLVQLHVETQRWDEAFALGEKHPEFKDDIYMPYAQWLAENDRFEEAQKAFHKAGRQREAVQVLEQLTNNAVAESRFNDAAYYYWMLSMQCLDIAQDPAQKDTMLGKFYHFQRLAELYHGYHAIHRHTEDPFSVHRPETLFNISRFLLHSLPKDTPSGISKVKILFTLAKQSKALGAYRLARHAYDKLRGLYIPARFQKSIELGTLTIRAKPFHDSEELVPLCYRCSTNNPLLNNLGNVCINCRQPFIFSASSYDVLHLVEFYLEEGITDEEAISLIDLEVLRPKRDDRQLEIANNSSQILRLVETKDSIGDEDPFTAKLSFEQGGSEFVPVVVSRLVLRSMSRRDVLIKRWPPPLRWQYFRSLLPDASITMCPSCFQMFHSEDYELLVLQHGCCPYCRRCKDDPGP

SEQ ID NO: 42122 - protein, 165 aa, Zea mays
  Clone ID: 700151981_FLI.pep
AICESLVIVEYVDETFDGPSLLPADPHDRATARFWADFMDRKLLKPFWLAHWTEGDAQKAQVEEAKQKLALMEAQLDGRRFFGGDTVGYVDIAACVLAPWLSVVEEVTGVAVVDEGEFPALRRWSREYSSCEALKQCVPDRDQLVAFYTERKEAYKVFANAWLQQ

SEQ ID NO: 42123 - protein, 77 aa, Glycine max
  Clone ID: 701208549_FLI.pep
KQLCHKVGVKREREEESERKNNYEKSEFNNNSNSNKHVKKEECPLTPSCWKGFWDTDVMGTIFSVPPLSPLSPLMVV

SEQ ID NO: 42124 - protein, 479 aa, Zea mays
  Clone ID: LIB3592-080-D8_FLI.pep
SSGRARGRGGGRGEDPMAGNEWINGYLEAILDSHTSSRGAGGGGGGGDPRSPTKAASPRGAHMNFNPSHYFVEEVVKGVDESDLHRTWIKVVATRNARERSTRLENMCWRIWHLARKKKQLELEGIQRISARRKEQEQVRREATEDLAEDLSEGEKGDTIGELAPVETTKKKFQRNFSDLTVWSDDNKEKKLYIVLISVHGLVRGENMELGRDSDTGGQVKYVVELARAMSMMPGVYRVDLFTRQVSSPDVDWSYGEPTEMLCAGSNDGEGMGESGGAYIVRIPCGPRDKYLKKEALWPYLQEFVDGALAHILNMSKALGEQVGNGRPVLPYVIHGHYADAGDVAALLSGALNVPMVLTGHSLGRNKLEQLLKQGRMSKEEIDSTYKIMRRIEGEELALDASELVITSTRQEIDEQWGLYDGFDVKLEKVLRARARRGVSCHGRYMPRMVVIPPGMDFSNVVVHEDIDGDGDVNDIIFD

SEQ ID NO: 42125 - protein, 62 aa, Zea mays
  Clone ID: 700153304_FLI.pep
KTPSMSLILHNFQWRVQLHCCLSDSVCLFCNSLSFCNNSRRRAVPANEALTFESSSCNCLFF

SEQ ID NO: 42126 - protein, 324 aa, Glycine max
  Clone ID: 700985454_FLI.pep
GTGEVLNCSAENNGDLFHGVLGGLGQFGIITRARIVLEPAPTMVKWIRVLYSDFTAFTRDQERLISAEKTFDYIEGFVIINRTGLLNNWRLSFNPRDPVQASHFKSDGRTLFCLEMAKYLNVEEIDAANQEVEEHLSRLSYIPSTLFSTEVTFVDFLDRVHISEVKLRSKGLWDVPHPWLNLLIPKSQILNFAQVVFGNILSETSNGPVLIYPVNKSKWDNRTSVVIPEEDIFYLVAFLTSAVPSSNGTDGLEHILSQNKRILEFCERAQLGVKQYLPHYNTQQEWRAHFGPQWETFLLRKSVYDPLAILAPGQRIFQKAITFS

SEQ ID NO: 42127 - protein, 461 aa, Zea mays
  Clone ID: 700153481_FLI.pep
SQPNRHSLEALLGVRSLRIYHTMPPPLRCLLLAFVVVLSGFPRLAHPFTALESDQIARFQEYLRIRTAHPSPDYAGASAFLLHYAASLGLHTTTLHFTPCKTKPLLLLTWRGSDPSLPSVLLNSHMDSVPAEPEHWAHPPFAAHRDPTTGRIYARGAQDDKCLPVQYLEAIRGLQAAGFAPARTIHISLVPDEEIGGADGFDKFARSEEFRALNIGFMLDEGQASPTDVFRVFYADRLVWRLVVKAAGAPGHGSRMFDGAAVDNLMDCVETIAGFRDAQFRMVKSGEKGPGEVVSVNPVYMKAGIPSPTGFVMNMQPSEAEVGFDLRLPPTEDIEQIKRRVEEEWAPSHKNLTYELVQKGPATDVSGRPVSTATNASNPWWLTFEKAIASAGGELSKPEILSSTTDSRFARQLGIPALGFSPMTRTPILLHDHNEFLEDRVFLRGIQVYEHVIRALSSFQG

SEQ ID NO: 42128 - protein, 264 aa, Zea mays
  Clone ID: 700356487_FLI.pep
VFRAVRSDSQMFKISGFTLSTAMPLSETLQLLQLGKIPATDFDALICGSGSEVYYPGTANCMDAEGKLRPDQDYLMHISHRWSHDGARQTIAKLMGAQDGSGDAVEQDVASSNAHCVAFLIKDPQKVKTVDEMRERLRMRGLRCHIMYCRNSTRLQVVPLLASRSQALRYLSVRWGVSVGNMYLITGEHGDTDLEEMLSGLHKTVIVRGVTEKGSEALVRSPGSYKRDDVVPSETPLAAYTTGELKADEIMRALKQVSKTSSGM

SEQ ID NO: 42129 - protein, 566 aa, Zea mays
  Clone ID: 700156106_FLI.pep
LGVAKSTIECGTTLWNGDLLAGSKHLRFLDLSGNEIISSGKSCISATEKSCSLETIVIHQGCAGLEKISLAGCAQLENVLLTGSFNELVSLDISGSAVKRLDLSAMIMLKLNELILLDCNMLRAILWPPEGREREYPGKLRIRTKKETTIGSATAPSGLTMMFGSLVPAEYLWWYISVYDERLLWSLLPLKQYFSYHFVHFEISSPGRRPDGLACTSDEMILEVTTPEGYNTSIYVDVAKGQLLHVKGDEGDSPISFTRVWPCPRAPDLVPSNCYLHIQDWPQGRKPQRTSQKTATITIPDTICNRTGSIHVHDSLYITRMPDPAPSGAIWANLFWCRVERCPKMDCVFTSSSMVGAENRDDRIFWRLATLWVSQLPKARFIWSSRKHEISGYSFLDLDFVHVDFCPRLTHVLPLSMALIRGSGLDSLTTLEIVWCGDLRAVFPLDTDAQSYQDHRRNQAITVEFPSLQRIHLHESPKLHGLCGRGRMYAPKLESMVIRGCWNLTRIPSVGDGGDRITKKVKCDCEKEWWDRLEWDWLEERHHPSLYEPTHPKYYKKTLLRTSVLR

SEQ ID NO: 42130 - protein, 54 aa, Glycine max
  Clone ID: 700645867_FLI.pep
SQKSVKAEFKKPSGHGISLHILKKTSRMANSKSCRTKQIQLLLVTSPTSLSTIW

SEQ ID NO: 42131 - protein, 378 aa, Zea mays
  Clone ID: 700096803_FLI.pep
VGGSTTMASPKHSHRHHRAAATKHRRPLALRRAMLHSCVCFLVGLVTGLAPSDWTDAASRAAVHANGAATAQVFRALHAMNQTAAAGALGQLLALQHYQQQPVVEKEKEKEKPLDLVVVVTTTTTSTGLSERERRSAGLTRTAHALRLVSPPLVWLVVEAAREAGPTARLLRRTGVVYRHLTYAENFTSEAWEEERHHQRNQALAHIERHRLRGVVLFAGLADVYDGRLLEQLRRHIRTRSVGAWAVATVWEQEKRVAVEGPVVVCNTTTSTSAASTACAWFSASDSTLLAAAAAAAPPVTVDDSVHGFAFASDLLWDPSRWDRFPTSEPDQSQDSIKFVQRLVMAEYNKTRAIIPADDDYSSNRSQIMVWRVDTTLL

SEQ ID NO: 42132 - protein, 70 aa, Glycine max
  Clone ID: 700790517_FLI.pep
KLPGDTTSVLKNWWQQHAKWPYPTEDDKAKLVEETGLQLKQINNWFINQRKRNWHSNSQSVTSLKSKRKR

SEQ ID NO: 42133 - protein, 193 aa, Zea mays
  Clone ID: 700096970_FLI.pep
KGLQQCKGRDWFDYISALPLSDLGLPFMSIDEVITVNSDDLILEAFKCMKDNKIGGVPVVEGPKRKLVGSVSIRDIRFLLLRPNLFSNFRQLTVIEFMKTLGSTLPDSESNCLVKPPPTCTPDASLGSVIDSIASRITHRIYVVDDDLEVVGVVTLRDVISCFIHEPPGYCDNYLASAMEKLEGKGVRSVEKI

SEQ ID NO: 42134 - protein, 340 aa, Glycine max; identical to SEQ ID NO: 41917
  Clone ID: 700562631_FLI.pep

SEQ ID NO: 42135 - protein, 147 aa, Zea mays
  Clone ID: 700098547_FLI.pep
CVQGVELNAQQASRLQKLKEKPAFRNPDEFYFKMINSRTIGGIHRPKPEDNKYTKEELLLLKNKDMRYILQSVQSEKKKIEKLSSTLHEVDNMPQNKHVYFPEDREEAKEIQSRIGQSSSMPDPLFLLFMESHFYCLLVLTFIFVSI

SEQ ID NO: 42136 - protein, 150 aa, Glycine max; identical to SEQ ID NO: 40352
  Clone ID: 700729859_FLI.pep

SEQ ID NO: 42137 - protein, 346 aa, Zea mays
  Clone ID: 700098572_FLI.pep
HTAHADTLCTTTCRPFPARRCRCALALTPPPAQVHRAEKPMAPSPILVRPPALANSPLPPPRCVAAVAAAPAVRTAPAAPFSRLRTKCRFAASDVREDYSSTPIDIVADVKTEKIVVLGGSGFVGSAICRAAVSKGIEVVSFSRSGRPSYSDPWVDQVNWLPGDVFYARWDEVLVGATAVVSTLGGFGNEEQMKRINGEANVIAVNAAKENGVPKFILISVHDYNLPSFLLTSGYFTGKRKAESEVLSKYPASGVVLRPGFIYGKRKVNGFEVPLDAVGQPLEKLLSSVENFTKPLSSLPASDLILAPPVSVDDVAYAVINGVIDDSFFGVFTIEQIKEAASKVRV

SEQ ID NO: 42138 - protein, 148 aa, Glycine max
  Clone ID: 700738611_FLI.pep
DVDFCRSKLSSFNYPSNSLSQSVSSSSLDVGVVPDGNTVSDMSYSFGRNSSDSSGIVVVSGNSVGQGATQLCGMDREARVLRYREKRKNRKFEKTIRYASRKAYAETRPRIKGRFAKRTEIDSDVERLYSPGPAVLMLDTPYGVVPSF

SEQ ID NO: 42139 - protein, 81 aa, Zea mays
  Clone ID: 700099139_FLI.pep
RQLRTLQYPQHLPTYSSPHPHTLSRHTDRAYVHSSHQIPILKQVQRVQRGSIEIHQKSHTNVMTSEQNFFKSSAEVDDVHS

SEQ ID NO: 42140 - protein, 317 aa, Glycine max
  Clone ID: 700832879_FLI.pep
KAVKEKAGEREETTERSGMTECKYYQRSGGCKFGKSCKYNHTRGKISTAPAPLLELNFLGLPIRLGERECPYYMRTGSCKFGANCKFNHPDPTAVGGVGGDPASGYGNGGSISLQGVSQTSVPSWSSPRTLNESSPFVPMMLSPTQGVSTQSSDWNGYQASVYLPERNMHPPSTFVMNNPAIDTNVYMHHQKQMPVDEFPERPGEPECSYFLKTGDCKFKSNCKFNHPKNRVARLPPCNLSDKGLPLRPDQSVCSHYSRYGICKFGPACKFDHPINLQPVMIPGLGQQSYSNSASVEVAGIFGSTGVVTDATIQQSV

SEQ ID NO: 42141 - protein, 412 aa, Zea mays
  Clone ID: 700101558_FLI.pep
LVESSGHEREEIHAWRKFHVCFADKDREVINIMTKSSGALDLARSTGGSLSKDQVKSAVDQYVKYHDLHGGEQESRKSNYADLANKYYDLVTGFYEYGWGDSFHFAGGYPGETSREAIKRHQHFMALQLGLKKGMKVLDVGCGIGGPLIEIARFSSTSITGLTNNDYHVSRGKVCILAFFLEYKNCIAYGYAPFNFWLQEHIFSAGLSEQCCSLKGDFMNMPIADNTFDAAYAIQATCYAPEAQGVYSEVYRVLKPGQYFALDEWCLTDRFDPKNTKHLTTKAEIELGDGLPDIRTTRQCVQAMKDAGFEVVFAKDLAQDFPCPWYQTMDPNYFSWTNFQCTRPGRIITRAIVNTLEFLRIAPAGSVGAYNVLTSASDGLLKGGREGIFTASFFVLGRKPLKETEIVNGGNL

SEQ ID NO: 42142 - protein, 232 aa, Glycine max
  Clone ID: 700851424_FLI.pep
LCDWCGTWKGDKLCSSCRQARYCSEKHQAMSWRTGHKTACQQMKVSSPVFGPNKSGTTSLESHKVGSKNLWPEFEISIEDESEYNRDISEENSLANSLISRNRNDDTMNSLMDNFKGDDDKKSWASFQERIAEAPEQVLRYYRNTNAKPIWPVSSGRPSNADIPKCSYCSGPMSCEFQILPQLLYYFGVDNEVDSLDWASIVVYACEASCEASLPYKNEFAWVQIYSLSTTL

SEQ ID NO: 42143 - protein, 308 aa, Zea mays
  Clone ID: 700101743_FLI.pep
RSSRCTKRMAAPGSLRLLQAPSFGAAKCQPMAGRASARRAPRPLFAVRASAADAANRDAVLKAFRENRALKIISGLQNFDRSSVASVVTAADKGGATHVDIACDKDLVKLAMDLTNLPICVSSVDPSAFHSAVQAGAKMVEIGNYDSFYEMGIEFSSEQILKLTRETRKMLPDITLSVTVPHTLSLPDQMRLAELLEEEGADIIQTEGGKCSSPTKPGVLGLIEKATPTLAAAYSISRAVSIPVMCSSGLSSVTAPMAVTAGAAGVGVGSAINKLNDVVAMIAEVRSIAQAMELAPRIVSETLRTISY

SEQ ID NO: 42144 - protein, 166 aa, Glycine max
  Clone ID: 700894463_FLI.pep
SSASSTRPLMDADSSGEEVVIKTRKPYTITKQRERWTEEEHNRFLEALKLYGRAWQRIEEHIGTKTAVQIRSHAQKFFTKLEKEAFVKGVPIGQALDIDIPPPRPKRKPSNPYPRKTNVGAPTLHSEAKHGKSLISIASSHGKQALDLEKEPLPEKHNVDLRPTTV

SEQ ID NO: 42145 - protein, 178 aa, Zea mays
  Clone ID: 700103147_FLI.pep
KRTKVIYKTLSPQWNQTFEFLETGEPLILHVKDHNAVLPTASIGHCTVEYSMLSPNQSAEKWIPLQGVKSGEIHVRVALKVSVPGSEKKNMLGAGPFGKGHKMSTQMRDSLKRFTGLIDDGGDPEALALAVAEMEGIQGEQEEYVETLEREKAMLLHKINELGSEIIRTASGPPRTPY

SEQ ID NO: 42146 - protein, 138 aa, Glycine max
  Clone ID: 700730584_FLI.pep
EEDQLIIKLHSLLGNKWSLIAGRLPGRTDNEIKNYWNTHIRRKLLSRGIDPATHRPLNDDKVLERCPDLNLELTISPPRQPQSDQHHLKPVGRNSNLCFACSLGLQNSKDHCSCALNTANAASGHDFLALKTSVLEMK

SEQ ID NO: 42147 - protein, 306 aa, Zea mays
  Clone ID: 700103157_FLI.pep
WKQVGRTYIMGPKTGNQLGTPLMGHRKWITAVSWEPVHLQSPCRRFVSASKDGDARIWDITTRKCVISLTGHTSSVTCVKWGGDGLIYTGSQDCLIKVWETSQGKLVKTLKGHGHWVNSLALSTEYVLRTGAYDHTGKTFSTAEEMKEAALARYKKMRGNAPERLVSGSDDFTMFLWEPTISKQPKARMTGHQKLVNHVYFSPDGQWLASASFDKSVKLWNGITGKFVAAFRGHVADVYQISWSADSRLLLSGSKDSTLKIWDIRTHKLKMDLPGHADEVYTVDWSPDGEKVASGGKDRVLKLWMN

SEQ ID NO: 42148 - protein, 255 aa, Glycine max
  Clone ID: 700980420_FLI.pep
FFSLSQFQTVDLDTLLEKEVFFEGKEGIFCVGGWNPEFGLVGVERMKIQCNVCEAAEAKVLCCADEAGLCWECDEKVHAANKLASKHQRVPLSTSSSHMPKCDICQEALGYFFCLEDRALLCRKCDVAIHTANAYVSGHQRFLLTGVRVGLEATDPGASSTSLKSDSGEKVSDSSVSRKVSTAPQPSNYNEVLPAEVGGVGEFPSAKVSFGGGSTAGNISQWTIDEFIGLNEFSQNYDYMEGSSRYCRVQIHLLS

SEQ ID NO: 42149 - protein, 138 aa, Zea mays
  Clone ID: 700106306_FLI.pep
QMLGSSAGLNHVDGAPRVRSVVSIPARERLDGSTHTTPLSPSEDSSPVESGGKVGLPLNDTNKAEGTNGENRKTSEASASDGSVLSPTEDKSQASIEGKDSFQKKTFSRMHDGETVEVSYKVYIPKRTPALARRKLQR

SEQ ID NO: 42150 - protein, 211 aa, Glycine max
  Clone ID: 700941062_FLI.pep
KMDGELRVIVDGFLSHYDEVFRLKGVAAKTDVFHLINGTWTSPAERCFLWIGGFKPSELITMLIPQLEPLAEQQIMVICELGHSSLQTEEALSQGLEQLQQSLVDTIAGGPIADGVQQMVAAMTKLGHLEEFVAQADNLRQQTLHQLCRLLTVRQAARCFLVIGEYYGRLRALSSLWASRPRESLISDDNSCQTTTELQMVQSSQNHFSSF

SEQ ID NO: 42151 - protein, 246 aa, Zea mays
  Clone ID: 700106442_FLI.pep
QLHLNKNRLKHVKYPSNLSPDGPIDDAAAVPFENLQVLLLGSNDIDDFSSVDSLNLFPSLRDVRLSDNPVADPAKGGAPRFVLVARLGKVGILNGSEISPRERRESEIRYVRLVMGKIESNDQEEIRRLHPRFAELKSFHGIEDEKPTSSISGPQKMASGLISITLKCVGPSMGEKQPLTKKLPATTTVGKLKSLCESFFKLKDIKVKLFVEEEGCPLPQPVEEDTASLMELGIGSGATIVVDEES

SEQ ID NO: 42152 - protein, 274 aa, Zea mays
  Clone ID: 700106613_FLI.pep
AGLAAVTRLTDRACWAAHEHAVCLATDRIRVAGLPKCQPRCPRAGASLEAAQAGKQQQQLVRPPQWRGRQGRRIGHVVVGVGGPGDERRAAERAGALVVRHPAVQAGPVEGVAAVAEPPHLVAAADAAQAHRAVAAAARRAAQLVEPHHGERLLDERRRDGPELRALVLQRGGHVVAPLVLVLVLHHLVRRGRGGRRRRVVAAEVDQVAEPHGVEGPEEEAVEVAEEEEHLQQHAREQHLRLRVPHGEAHRGRGEQAGRWAGWSAVATGRACVR

SEQ ID NO: 42153 - protein, 375 aa, Zea mays
  Clone ID: 700161311_FLI.pep
LAHLHLVGAPLPFPSLCSAPRLRPPRQKQNTAMEGYDREFWQFSDQLRLQTTAFSGLSLGDSIWSPATGAGGRRNNNTDLLAASASAADAGKHNGVGLSLNDGGPGLIGSGKLAFGGSKAGRYNNLPSEKAAPVYNHSGATINGGYARSDNAGLAAFNKMGSYFHNSNGNGGGGGEVKSYFNKSAGRAASNNSHGHAGGGKKGGGGGKHGKNEGNGGAVAATDKRFKTLPASEALPRGEAIGGYIFVCNNDTMDENLRRELFGLPSRYRDSVRAIRPGLPLFLYNYSTHQLHGIFKAASFGGTNIDPTAWEDKKCPGESRFPAQVRVATRKIYDPLEEDAFRPILHHYDGPKFRLELSVAETLALLDIFADKDDA

SEQ ID NO: 42154 - protein, 124 aa, Glycine max
  Clone ID: 701056072_FLI.pep
HFRYYIAPSGKRLRSMVEVQKFLMEHPEYTRDGVTLSQFSFQIPRPLQENYVRKRSARLTSSYEVSEPVEHQQVSPLAWVDPEGCGGRLGLPPPPFMGSHDLDTTINMSISRPAKRQATHKGSL

SEQ ID NO: 42155 - protein, 217 aa, Zea mays
  Clone ID: 700161348_FLI.pep
IKAFVIDVVTSGSDTSAAMAEWMLAELMNHPETLRKVVEEIDAVVGGGRIASEADLPQLPYLMAVYKETLRLHPAGPIAHRQSTEEMVVHGFTVPPQSTVLIHVWAIGRDPAYWEEPLLFRPERFMPGGAAESLEPRGKHFQYIPFGSGRRGCPGMGLAMQSVPAVVAALVQCFHWSTVDGGMDKIDMSESDGLVCARKKPLLLRPTSRLTPFPPVV

SEQ ID NO: 42156 - protein, 73 aa, Glycine max
  Clone ID: 700849819_FLI.pep
HSEEKGRGEGAKGVESQGATEGKLWRFWAQEKWKEIRALYHDCIHPILSPVVYYHDNFCLIVAFFIALMLVLN

SEQ ID NO: 42157 - protein, 350 aa, Zea mays
  Clone ID: 700150727_FLI.pep
SPRSLPEHATMARLSATAALLLLVLSLLAVAHCGALAVAAEHDTEPESTAAVAVSDDNVLSDPTVHAEAGTASATEEEAIPAEQQQHGFELLRLPSHRLHHHHHLWWKRHHGIYRDASHKFPCSGHGARREQAVSHLAILPASAEVAREAGEEMPVAEPDPDRSLPDSDGEGEVAITSEQPSPFTDADGHDDESSAAVRAWKHEMLRRWFHFHHDMRRHRLHHVQYEVEEEATTAPETTGSMGMKRHRFHFHHHDDEDEEKNMAARKRLRHADEHDEDSDDEEDEQVEEMVRRFRKAIMRRRFGHGHGHGRRSRFFHHIHRHAEEAKKQADVEEEESGVLAWIKGLMNRF

SEQ ID NO: 42158 - protein, 235 aa, Glycine max
  Clone ID: 700897446_FLI.pep
TTTPTPTSGMNIFKSPLDHDLNCGGIFHDSAEASYSSETRSTPSDEEVILASARPKKRAGRRVFKETRHPVYRGVRRRNKNKWVCEMRVPNNNSRIWLGTYPTPEMAARAHDVAALALRGKSACLNFADSRWRLTVPATTNAEEIRRAAGEAAEAFAVADGDDVNIEQQQSVMATNDDEVQEPLQQEEVQDLHDLLLSIANEPLMSPPPCARDGRDWNDVDIFDDDEISLWNFSI

SEQ ID NO: 42159 - protein, 556 aa, Zea mays
  Clone ID: 700152291_FLI.pep
DDTVCLFIRCICTEKRYVSFITRQLYMHLQNKHRHASWPGIQVWWQPGHGDGLERDQARHGEPELLLHVQLLRRHAIRQPPREGVQQVGQGDLHHLEPEDVARAHPAAGPEREQLQVVALHVHGAADEPLRAELLRVVAPHGGVAADGPDVDEHQRAPRDVVGARARVLAAQPRRQQRRHRVQAEGLLHDGLQVRQVRDVLLGDQAAVPDDAVQLLGDLGEDLGLPQELRHGPLDGHRRRVRAASDQVQRESLDAIPFDGDLEFGVVGELQQQVHHVRGDEPAALPPPPLVVLVHHVLQEAIEHLAQPLHPPDVALEVQPAEPRDEVPDAEHAVEEEELVDHPAELGRRDRRARGAALADVLPAQRHARDHVEAVHEQVLLERDGAPAAPGHPRGGGRRQSVQKDAQLLAADVLLRPELPVAEQMGLPELARLAPVRPAGRPDDVGVVVGGVLPGRHPGAVDERRVAGPEEEPGRFHGGADDDGDGAEAERHERAVPRGERVDGAVRERADQVEVADHRPRPRPGWHLVLAAGAALPAEDGDEEDGGGEHDAQERV

SEQ ID NO: 42160 - protein, 111 aa, Zea mays
  Clone ID: 701185555_FLI.pep
LASGGKLCPALIVIREHLPSGKACLRVNIDATRVGNVARFINHSCDGGNLHPVLVRSSGLLLPRLCFFAARDIVEGEELTFSYGDARVRPKGLPCFCGSSGCSGVLPSEET

SEQ ID NO: 42161 - protein, 325 aa, Zea mays
  Clone ID: 700152456_FLI.pep
TKGGGKTETTKDGDDSDDSDGMDDDAMFRIDPYIARIFKERNLPGSDTKQSQLMRFKLRVLTLLDIYLQRNPGKVLVLEVYSFLMQAFVKSHGADGTEQFRQRISGILQRRVFKGNEYPKGDAVEFGKLESLLEKALRLTSRSRYNTVASVAQNATFWILKIINSKHCSEQELARVVDLFRSILSDYDRKKSRLKLGFVKQVAKRNPWIGQKLFGFVLQRAENTKAQYRRNQLLELAEFILKSWADGTSEMFLNHLSQLCGLIQAALSAVAENKSRRKEVRNFCTGILQTVLKLGLKDQFQKALSPETYSLCEAKLGAAFTAFKK

SEQ ID NO: 42162 - protein, 247 aa, Glycine max
  Clone ID: 700846492_FLI.pep
KTTSKRELRRRLPAMLRSTFSDDAAPQNSGRHRERERKRGVPWTEEEHKLFLVGLQKVGKGDWRGISKNYVKTRTPTQVASHAQKYFLRRSNLNRRRRRSSLFDITTDTVSAIPMEEEQVQNQDTLCHSQQQPVFPAETSKINGFPAMPVYQFGVGSSGVISVQGTGNPMEELTLGQGNVEKHNVPNKASTVSGIITPGSSSSAIDPPPTLSLGLSFSSDQRQTSSRHSALHAMQCFSNGDSIISVA

SEQ ID NO: 42163 - protein, 662 aa, Zea mays
  Clone ID: 700154689_FLI.pep
ISSPERERKLLYSQVAKALNSSASVDEASASNVVMLSGFSIPKLVLQIVTIETVLRMDKPNKELAVLKDIAFTVYNKARRIPRAVSTSDMFQSPTYLGRSQSTMMHVTSPAPTLWKECLVPRMSGPTLSRETDFDASMRSATWDNSWQPARSGGLLDPSKLPDLCAQDDRKYAFEPLFILADPGSADLNALMEPSKSGADASGSRVYGSISGSNSDSGVSPLLDVSESDSAASLHCCYGWTEDWRWLVCIWTDARGELLDSLIFPFGGISSRQDTKVLQSLFIQILQQGCQIMSSSPEASNMRPRDVIITRIGGFLELEIQEWQKAIYSYGGNEVKKWPVQLRRSIPEGIPPSSNGPTLQQQQQQDMALIQDRNMPSSPNPLYSPHPKSSFMKGALGQSGNKKQILVEQSGMDTSRGSLHLVRSISLVAVSQDHSLHLTCQADLLSRPASAGEGSQGSSGPWSYLEGFTPVKSIGSMSASHSYLLVPSPSMRYLSPATLQLPTCLTSESPPLAHLLHSKGTAIPLAMGYVVSKAVPPVRRDSAQLTKDEQPSVLSVSIIDHYGGSIGTVQEKMSRGGGGGGGSKQARNLSQETTGRECEMEMHSVLEAVAAELHSLSWLTVSPVYTERRTALPFHCDMVLRMRRLLHYADKYLSEPKGETTH

SEQ ID NO: 42164 - protein, 300 aa, Glycine max
  Clone ID: 700953734_FLI.pep
VWLGVKRMKIQCNVCEAAEAKVLCCADEAALCWECDEKVHAANKLASKHQRVPLSTSSSHMPKCDICQEALGYFFCLEDRALLCRKCDVAIHTANAYVSGHQRFLLTGVRVGLEAIDPGASLTSLKSDSGEKVSDTKSSSVSRKVSTVPQPSNYNEVLPIEVGGVGEFPPAKVSFGGGSTDGNISQWTIDEFIGLNEFSQHYDYMEGSSRADGGKLGDSDSPVLKSGEEDMEEEDDYLERVPDSSWTVPQIPSPPTASGLCWPKDPQYSSDSVLFVPDISFSLIQQSQISSICLRRWRQL

SEQ ID NO: 42165 - protein, 464 aa, Zea mays
  Clone ID: 700155052_FLI.pep
LAMATTMAANDPTSIRVVSRRLVKASDASIQPHVMSLSNLDLYVCDSQLGTLCVYPNAGGGFSARIPSLFESLLPSLLNYLYPFAGRLVTNPSSGLPELHCHNQGAELVVGEVGVALGSLNYGATKDSFKKMVLPFPRDVLLSVQLLSFACGGFSVMWWINHLVGDGHVGATIVRTWSQLARTGDIGGAPPLNYDRSVFRPRSPPSYSDSVAATFTTFDEKRLPNALTAEASFVDRVYYVEASDIAALRDTAAAATTAQRPTRVEALSAYLWKALADVVAACPRSNKERCRMGWWVSARRRVTAPKLVALMPGYLGNVTTYALGDAPAEEIVRKPLAEVAAMVRDAITSVDYDEYLQEMVDWVEVHKTEGLMEAAVIGVGAPTLNQSVMTTFPLDTDFGFGQATLATTVSDYGRLCSAFLSVGARPGGDGSWLVTAYIWPQLAAALESDGIFKLLTAEYLGLAM

SEQ ID NO: 42166 - protein, 168 aa, Zea mays
  Clone ID: 700611547_FLI.pep
PSKTVKPLDGPQSDSITENNQPSPEATLNIQNKVQSSSTRSCKKVHKQGSALGRSIDLTKFACYDELIAELDQMFDFDGELKSPCKSWLVVYTDNEGDIMLVGDDPWNEFCDMVHKIFIYTREEVERMNPGALNSRSEDSLSDSLGRGVASRDPRGGGSTSALDSENC

SEQ ID NO: 42167 - protein, 294 aa, Zea mays
  Clone ID: 700096111_FLI.pep
LLLLLPPVPPRLPPRLARSLPKTLALALALALALPHPHWEMDGGGTHRTPEDVFRDFRARRAGMIKALTTDVEKFYQQCDPEKENLCLYGLPNETWEVNLPAEEVPPELPEPALGINFARDGMDEKDWLSLVAVHSDAWLLAVAFYFGARFGFDKESRKRLFVMINNLPTIYEVVTGTAKKQTKEKTPKSSSKSNKAGPKPPRQPEPNSRGSKMPPPKDEDDSGGEEEEEEEDHENTLCGSCGDNYGQDEFWICCDACETWFHGKCVKITPAKAEHIKHYKCPNCSGSGKRARA

SEQ ID NO: 42168 - protein, 304 aa, Zea mays
  Clone ID: 700267629_FLI.pep
LAVRTAAHRLPLPALSLRRPVPRRAMSYNKAPSITAETINPRVKIIRYAPCGEIVKHAARLEQEIEENPASIPFQEIIYCNLGNPQVLGQPPLTFFREVLSLCDNPALMDRDEARALFSPCSIRRARRILNSIPSKDTGGYTDCRGIKCLRQVVADGITARDGFPSTADDIFLTDGATSAINLMMQILIRSHEDGILSPLPEYPLYSASIILHGGTMVPYNLTEDNGWGLEIFEVKRCLEEARSAGLTVRAMVVINPGNPTGQLRLYQSFSSSTHLIPLVIGAIRHKPGGDSRVLSEGRSGYTC

SEQ ID NO: 42169 - protein, 382 aa, Zea mays
  Clone ID: 700097976_FLI.pep
FLYVHTPIITTSDCEGAGEMFQVTTLFSQAEKTEKELRENPKPSDSEIEAAKVLVKEKGDVVAQLKAAKASKQEISTAVDELNRAKEIVSKLEERFKLKPGIPRKDDGSIAFENDFFKRQAFLTVSGQLQVETYACALSSVYTFGPTFRAENSHTSRHLAEFWMVEPEIAFANLQDDMNCAEKYVQYLCKWLLDHCQEDMEFMVKNYDKSAIERLELVSSTPFVRISYTKAVELLKNVTDKKFDNKVEWGIDLASEHERYLTEDIFKKPVIVYNYPKGIKAFYMRLNDDDKTVAAMDVLVPKVGELIGGSQREERLDVLKQRILDAGLPLEPYEWYLDLRRFGSVKHSGFGLGFERMILFATGMENIRDVIPFPRYPGRADL

SEQ ID NO: 42170 - protein, 495 aa, Glycine max
  Clone ID: 700787835_FLI.pep
IHFPDMDGGGSTPAAPIPNANAPPPFLSKTYDMVEDPSTDAIVSWSATNNSFIVWDPPQFARDLLPKYFKHNNFSSFVRQLNTYGFRKVDPDRWEFANEGFLKGQKHLLRSITRRKPAHGQNHQQPQQPHGQSSSVGACVEVGKFGLEEEVERLKRDKNVLMQELVRLRQQQQTTDNQLQTMVQRLQGMEQRQQQMMSFLAKAVQSPGFFAQFVQQQNDSNRRITEVNKKRRLKQEGMAETEHAATPDGQIIKYQPMVNEAAKAMLRQIMKWDTSCVESLNKNSDNYVIGDASSSSSGMDSSSSSGWTSGVTLKEVSPASVQSSHVPAATGTQGHVPSTVKPEILSVPQAVASEKVMKDGAHDPPSIPVSQADVMIPDLPPITEMVTGNILDIPEENYMATETDEGYMDSSLGAGGSFPIDFEGISPDADIDDLLANPIWDEILQTSVPEDIDTNVAEASKGNEVQPMENGWGKTQHMDHLTEQMGLLSSDAKRV

SEQ ID NO: 42171 - protein, 141 aa, Zea mays
  Clone ID: 700097992_FLI.pep
RAIPDPPLQLHSPMASSALPSRTLHRRALPSSTPCHPATETFAPGAVSRRRAAVRLLSAGFLTAVAPPPSLAARRGRVVVPPEDYATAPDGLKYYDLVEGKGPTAEKGSTVLVHFDCIYRGITAVSSRESKLLAGNRSIAQ

SEQ ID NO: 42172 - protein, 524 aa, Glycine max
  Clone ID: 700953783_FLI.pep
IGEIPISPSVFLLWMFFNQKIVLFKSFALMGTSNLLLFFSLMSLCAMAASKVVLIGNNITLSFDDIEANFAPAVKGSGKYGVLYLAEPLDACAELTNKVEQLPNASSPFALVVRGGCSFEEKVRIAQKAGFKAVIVYDNEEGGILVAMAGNSAGIRIHAVFVSKASGEILKKYAGLTNVEIWLIPTFENSAWSIMAISFISLLAMSAVLATCFFVRKHRIRRERPRASLVREFHGMSSRLVKAMPSLVFTSVLEDNCTSRTCAICLEDYCVGEKLRILPCCHKFHAACVDSWLTSWRTFCPVCKRDARTGLTDPPPSESTPLLSSTPASMASSVLSSARSSLASSSAIQIARTASMASSALPSARSSLASSSAIQIARTASMASSALHSARSSLASSSAIQISRAASQTPSVSRNHSIASTPYVQPSLRSSYHQSPSLSISRSSVDLRNASQRSLASHLNSPCSMGYPSLSSLNSRYMSPHIPSPSNASVSYMGSSSHQQHPLRYSESAASFSPFASTHSLPEC

SEQ ID NO: 42173 - protein, 332 aa, Zea mays
  Clone ID: 700099813_FLI.pep
ALEIEARQQRRTADERCAFYEDEVEELRDIVLVREREVRALRKEVDAYRRLLGFSATEEDEEEDDEQEMVTPHSFPMYEGEPSSSKSVDANRMQHFGNDSGFSFKTPSPREQPTVPPLTAGQINVGSDDCVAVQTPAKVPVVQSRLELDSSEDEDEDEDDGAETVEILPLSARSQDLDQGSHFHADTAQGMESTCTKEQTAHAFQEVECPGIDKIVNDQIGSKNDANVYDVHVVDDMRFSTEVKGLIGRSFSEATMQAERLQSRAVADDLLEKSLNAIKGAQDKIRNAANERRQSLQLQLLEDIADQLQGIKDAAEAGRQVFCAAPKSSKRS

SEQ ID NO: 42174 - protein, 325 aa, Zea mays
  Clone ID: 700202543_FLI.pep
CFSFVIFHGKSSVSKFLFQSADQDFRELVQKVPEGCLFTIVSDSCHSGGLLDSAKEQIGNSTKQNKTQSREPDEPRHSGSGSGFRSFLKETVRDVFESEGIHIPHSRRHGDDDQDDGYAQPTGNGRTKNRSLPLSTLIEMLKEQTGKDDIDVGSIRMTLFNIFGDDASPKIKKFMKVMLGKFHQGQSGEQGSGGGGVFGMVGALAQEFLKAKLEGKEEEAFKPALEQEVHSVDEVYAGSKAWAPNNGILISGCQTNQTSADATTPQGVSFGALSNAIQTILADKHGKVTNKDLVMKARELLSKQGYTQQPGLYCSDEHVHVAFIC

SEQ ID NO: 42175 - protein, 378 aa, Zea mays
  Clone ID: 700100671_FLI.pep
IEDDMARLVSSGIIGKGHNIFDDGGFGEVHADPIKVERPHKRPPQKQNAENGTTTKVDEPKELPKHVCFKGDNGLYLSARMVEGYPYLQFASDDIGDPSVRFTTYNYMIDGKRVIRVKSDHFGKFWRRSPNWIWCDTDDTSTDNRDTLFEVVRVGDDADAVYGLRNLGNNHICHRLTYEGKESCLNASIPSVRKEAQLKIEEAVLLRKIYGVDYHLKDAKILNNKVRTLVTREAVNAGSMPSKNTLTLKYVVSNGKIWDASRSLRLGIKSSFQAGVPEVVTGSITLESEFDTSYIWGENTVNTEEFSTDYEVIVPPHTVITVRILATQGTCQVPFSYTQEDILTTGEKKVTKYDDGIFRGVNSFGFKSEVTERKINGE

SEQ ID NO: 42176 - protein, 244 aa, Glycine max
  Clone ID: 701039415_FLI.pep
QNLSKEEFVHILRRQSTGFSRGSSKYRGVTLHKCGRWEARMGQFLGKKAYDKAAIKCNGREAVTNFEPSTYEGELKSAAINEGGSQNLDLNLGIATPGPPKENWGQLQFPSFPYNTHGGRSSMMETNVSSGIGNPSLKRMVATEDRPSLWNGMSPNFFPNGQERAERIGVDPSNGLPNWAWQTHGQVNATPVPTFSAAASSGFSISATFPSAAIFPTSSMNSIPQSLCFTSSSMPTRNASEYYY

SEQ ID NO: 42177 - protein, 445 aa, Zea mays
  Clone ID: 700102210_FLI.pep
NSFIVWNTPEFARDLLPKYFKHSNFSSFVRQLNTYGFRKVDPDRWEFANEGFLRGQKHLLKTINRRKPSLQGNSQPQQPQSQNAPVPSCVEVGKFGLEEEIERLKRDKNVLMQELVRLRQQQQTTDHQLQTLGKRLQGMESRQQQMMSFLAKAMQSPGFLAQFVQQNEKSRRRIVAANKKRRLPRQDGGLDSESAAASLDGQIIKYQPLINEAAKAMLRKILKLDSSHRLESMGNSENGNFLLENYMPGAQAFESSSSTRNSGVTLSEVSANPGLPYGGGGGTSSGLSAICPPEIQCPVVMDNMSSNQVPSMSAVPPVSKATIDMGIPEFSALADLVNEGSVDIPGGAFEMPGPEFPLPEGDDSVPIETDETMYNNNDETQSLPGIIDSFWEQFLVGSPLSADNDEVDSGSPQENGWSKVGNIGDLTEQMGLLSSTNHRDSGNGL

SEQ ID NO: 42178 - protein, 77 aa, Zea mays
  Clone ID: 700428793_FLI.pep
LIENREEAADPMEVDFDDKGSWWYLFKDYWLNLKTNLSLTVEEISAAKSRKSGELPDTNDEVNSESSSGRNLESNTS

SEQ ID NO: 42179 - protein, 309 aa, Zea mays
  Clone ID: 700102231_FLI.pep
LTYAHLHEATNGFSSEALVGTGGFGEVYKARLMDGSVVAVKKLMHFTGQGDREFTAEMETIGKIKHRNLVPLLGYCKVGDERLLVYEYMNNGSLDVLLHERDKTDVGLDWATRKKIAVGSARGLAFLHHSCIPHIIHRDMKSSNVLLDDNLDAYVSDFGMARLVNAVDSHLTVSKLLGTPGYVAPEYFQSVICTTKGDVYSYGVVLLELLSGKKPINPTEFGDNNLIDWAKQMVKEDRCSEIFDPILTDTKSCESELYQYLAIACQCLDDQPSRRPTMIQVMAMFSEFQIDSGSFFLDGFSLDSDRGII

SEQ ID NO: 42180 - protein, 317 aa, Zea mays
  Clone ID: 700350565_FLI.pep
LFFSPAQPCFPSHPFFPLGAFSSFSLAGRPAIKPLCLQVQETAREEQAEISSMGRGRIEIKRIENNTSRQVTFCKRRNGLLKKAYELSVLCDAEVALVVFSSRGRLYEYANNSVKATIERYKKAHAVGSSSGPPLLEHNAQQFYQQESAKLRNQIQMLQNTNRHLVGDSVGNLSLKELKQLESRLEKGISKIRARKSELLAAEINYMAKRETELQNDHMNLRTKIEEGEQQLQQVTVAQSVAAAAATDVELNPFLEMDTKCFFPGGPFATLDMKCFFPGSLQMLEAQQRQMLATELNLGYQLAPPDTDVANNNPQQF

SEQ ID NO: 42181 - protein, 487 aa, Zea mays
  Clone ID: 700102266_FLI.pep
QLRCSFRSSELRNRAKHPSLRRVKPSKLPRFIPFPPPIPRLSPQLRPSVSEAPPPTWPPSAPMALPYLEAVLCFMIFMYIFETYLDIRQHRALKLPTLPKPLLGVISDEKFERSRAYSLDKSYFHFVHEAVTILMDTTILYYRVLPWFWKKSGELVTSVGLSAENEIIHTLAFLAGSMVWSQITDLPFSLYSTFVIEARHGFNKQTIWLFIRDMIKGILLSMILGPPIVAAIIYIVQIGGPYLAIYLWGFMFVLALLMMTIYPIVIAPLFNKFTPLPEGVLREKIEKLAASLKFPLKKLFVVDGSTRSSHSNAYMYGFFKNKRIVLYDTLIQQCSNEDEIVSVIAHELGHWKLNHTVYSFVAVQLLMFLQFGGYTLVRSSKDLFGSFGFKDQPVIIGLIIFQHTIIPIQHLLSFCLNLVSRAFEFQADAFAKNLGYAPQLRAALVKLQEENLSAMNTDPWYSAYHYSHPPLVERLQALEDSDSKKED

SEQ ID NO: 42182 - protein, 153 aa, Zea mays
  Clone ID: 700102311_FLI.pep
LASLTSGTRRSACMPSCSENTSAGPGGLLGLGEVMMREGNFGRTSSWKTDGQPTKLRQNLPLSPWKADGRHSTGDEISAEPPPGKLMIKGAKFGRTSLDPLWKWMFRSRNFGRTSPWDRQQVQVSETRGWMESPNFASTIRTTQTGRTGGVCQ

SEQ ID NO: 42183 - protein, 281 aa, Zea mays
  Clone ID: 700086157_FLI.pep
RDVALREVRPAGHPRHLLAPRPQHQLPHHGRRPLPALRALRQGRRRLHPEGQEVRRPFQFPGRWFDGCFLRFCSSVARRTGDSRGFAFVRYKYADEAQKAIDRLDGRDVDGRNIMVQFAKYGPNAEPIRKGRVKEGVEKSQDRSRSRSPRPRHRDRDHRSQSRSRSRERHVRDRDRGYRRRSRSRSQSLSSSPDNRSHHRARDDDRRKSMSKSRSRSTSRSRSYYSASPARHSASPRKSPPPQRSPTPAKHANGKDSPLSRCVSPLPKRATSRSPGSDGKE

SEQ ID NO: 42184 - protein, 296 aa, Zea mays
  Clone ID: 700102553_FLI.pep
GAPVHSGGAGEPGTKKKRGRPRKYGPDGSMSLALVPASMAGEPAPAALGASGPFSPNGPKAPNTAPSASPDGAKKRGRPKGSTNKKHVAALGPAGAGFTPHLIFVKAGEDVSAKIMSFSQHGTRAVCILSANGAISNVTLRQSATSGGTVTYEGRFEILSLSGSFLLSENGGQRSRTGGLSVSLAGPDGRVLGGCVAGLLTAASPVQIVVGSFDAGGKKQPKQQQQQQLAPSPAPLNLAPTGVAAGPSSPPSRGTLSLSESSSGAPPSPPHAGASGGHGQQQQQPQPGGFSGLFWK

SEQ ID NO: 42185 - protein, 175 aa, Zea mays
  Clone ID: 700219717_FLI.pep
ENLATCGGGGTLRGCKLGNRLGPFGDGVLGELAGEDEAHRGLDLPGGDGGLLVVAGELGCLGGELLEDVVDEGVHDGHGLGRDANVRVHLLEHLEDVDLVRLDALLRLLLSLLLAALLARHALLRPWLLLGLLLRRLLLRGLLLGLGRHQESIKWGAKEMGEGAAWEFAGEWRRV

SEQ ID NO: 42186 - protein, 224 aa, Zea mays
  Clone ID: 700102562_FLI.pep
AGNQQQSPAISVDAMSSRTQPVLAASTSPSDIHVGPLAASALSSLHSVLPSTSLPSSLHPSHLAQRVPPTPNPTLQAGAPKGSNATMPSIPTGMQLPDSGSLSLDAWLTANLGLNDASTAPAKDTASLGLSSDAPRAAPDTNTASLGLSSDVPRGTAPATNTASLGLSSDVPRGTTPATTTTSLGLISDSPRVIAPASSNSPGAIASATNGGSEIDVVCLSDDE

SEQ ID NO: 42187 - protein, 750 aa, Zea mays
  Clone ID: 700343286_FLI.pep
RGVNLADSPCRRPAPPARSPPSSPEGFCLRACGSVSSPAASKYSYRVDQCRSMNPYFVGILVPVAVSLLLRKRRKAQRMRGVPVEVGGEPGYAVRNYRFEQPVETHWEGVSTLADLFEQSCKEYVYMPLLGTRKLISRETEAAPGGRSFEKLHLGEYEWKCYAECFKSVCNFSSGLIRVGHQKNERVAIFAETRAEWQIGLQACFRQNITVVTIYASLGEEALCHSLNETEVTTVVCGQKELKKLIDISGQLDTVKRVVYINEEGISTEVSLAQNCTSWIVESFEEVTRLGAEAPVEANMPLPSDVAVIMYTSGSTGLPKGVMMTHRNVLATLSAVMTIVPALGSKDIYLAYLPLAHILELAAEALMAAVGASIGYGSPLTLIDTSNKIKKGTLGDASALKPTLMTAVPAILDRIRDGVRKKVDTKGGIAKQLFDIAYNRRLAAINGSWLGAWGLEKLLWDTLVFGKVRAILGGKIRFVLSGGAPLSGDTQRFINICLGAPIGQGYGLTETCAGGTFSEYDDTSVGRVGAPLPCSYIKLIDWPEGGYLTADLPMPRGEIVIGGPNITKGYFKNEAKTNEVYKDDEKGMRWFYSGDIGRFHPDGCLEIIDRKKDIVKLQHGEYVSLGKVEAALIVSPYVENIMIHADPFHNYCVALVVAAHIELESWASQQGIKYNDFSDLCQKQEAVKEVLGSLAKAAKQARLEKFEIPVKIKLIPEPWTPESGLVTAALKLKREVIRKTYENDLAELYA

SEQ ID NO: 42188 - protein, 354 aa, Zea mays
  Clone ID: 700104977_FLI.pep
KRNESLESKAREIMESLCQLWKLMDSPEEEKRQFSKVMSSLILPEEGITSPGVLSEETIEKMEFEVERLTRLKTSRLKEIVMKRRAELEAICQNAHIEPDVSTAPEQTDALIDSGLIDPSELLANIESQILKAKEESLSRKDIMDRINRWIAACDEEAWLEEYNQDPKRYSAGRGAHINLKRAEKARILVRKIPSMVDDLINRTFAWENARNKPFLYDGGRLISVLEEYRLSRHQKEEENRRYRDQKKMESILLAEKEAIFGSRPSPRKTSSLSRKANGYRPNGNTNGLKTPTPRRLSLGSATPELLTPRSYSGHNRYFGDVRRLSTSHLNFGDDSLSTFTSISGSEPESPSIG

SEQ ID NO: 42189 - protein, 230 aa, Zea mays
  Clone ID: LIB3066-035-A7_FLI.pep
DGGAARPRRRGCVLAPLGRRAPALTEVRIRRTVLEEPHARSAVVVRDRCSRETRQAGAAVRPSGAAPRGPPVRRAAVTRWRPSARVSRAAMPRSRRGAAPTPCLARAATGGRTPAPPSAGSARATAGRPRVRALGPSARAATGGPRAGACTAHHRGRGRPPGRCRRTRTRARRAEVGAGAAPAWPGRPSVSRSLGSSPVRQERTPTRHAWPKRTDERPHRHGLGRRRQEE

SEQ ID NO: 42190 - protein, 90 aa, Zea mays
  Clone ID: 700105004_FLI.pep
IHDVRDHSKLNTTFRSPFIGEVVGIEKKIVANVSPDNSDVQYQFMLEQRVLRRLCVQKIVVPTPMKDRLDKDTNFTIAEDGSLHVLPKSV

SEQ ID NO: 42191 - protein, 295 aa, Zea mays
  Clone ID: 700156661_FLI.pep
RRRREQEKARHGRGEEAGPAAAGLLGEPIRAALPHRAGREGPGLRVPGAGPGEKERAAPPRQPGAQEDPRAAARRPPRLRVPRHRAVPRRGVPGGGAGAAPRRPLRARAGPLLGGLRRQEAVRLRHPAVEAQGGRPGAGARRDGRDPPHAGGRARRRALLRRRRPRLRRRRARALHVVVPRLRPLRRRQRGEGVPEAGRLGQALRRAPQRRQEPLPAREGLRLRLRDEEEAGHRVESIHRSAGGWPGVIMTNQLSSFGLSVLSRAVRRRCIFYCQRWQRRTCCLVHHIRINGYEF

SEQ ID NO: 42192 - protein, 193 aa, Glycine max
  Clone ID: 700786512_FLI.pep
IEGQRLPEGGDEDAVLAVVDDGGRRVAIAVAIVFVVVERDDRVNNHNKGLSARGGGGNPRPAEGLHGAAHAAARGPVHLDDGLELGGKPMGLVERNLRVVVRLCRAGEGGGNWFWPWARGRIGQPCRRPARHPRRNRRSPAKRAASSTDLESPPRIAPTAASSRHGTASSPWPGPAWDPQRRQRRRRFSLGAS

SEQ ID NO: 42193 - protein, 311 aa, Zea mays
  Clone ID: 700156775_FLI.pep
VLESLLGDNFVPNDTELHADGEYCQIVTGPNMGGKSCYIRQVALITMMAQVGSFVPASSAMLHVVDGIYTRMGASDSIQQGISTFHEEMNEASNILHNCSSRSLVIIDELGRGTSTHDGVAIAYSTLHYLLKEKKCIVIFVTHYPKILDIQREFEGSVGAYHVSYLATRKLLEVTGKQVETSPEANDLGEIIFLYKLVAGASDRSFGLNVALLAQLPSRCIKRASVMAAKLQEELSPREEIKLRRTTDAQTVDGPSESSAEVGLFCAHPYQRLAETCRRILLNITLAQSNNDVTNTLPSLKNAQEIAQKTI

SEQ ID NO: 42194 - protein, 275 aa, Zea mays
  Clone ID: UC-ZMFLB73033D10_FLI.pep
VPAQCQAPLGLLHAVSFPGEEPNQHPRLPQRVGPQRHGGQPRATQPVTPPPQRLVPLPAPRALAAHDVADLALQVGLRRRVARAAARRVQGVEHRRVVEERLREPVQEPRLVVVRLLLHHREHPGAHGRDALQHGVDGRPGVARRGSVGEEAVQLEHGVHGHGLALRDLQHPGPHLVEAVGGHAAEGEVDAHGARQVGEADPDVAEVVAPWRGRRPNAREAERRRPAGAEREGLDQRWPLEALHDAEVDDVHVLAALDGLQDGLVGREVRELEVG

SEQ ID NO: 42195 - protein, 77 aa, Zea mays
  Clone ID: 700156851_FLI.pep
PAFDIMFGYNLHQSMNEKKGKNFGATTNVRQKLQTDKDYKHKIVALSLNSSTSPTGIRLSWTCSLRPSLITHVEFIM

SEQ ID NO: 42196 - protein, 172 aa, Zea mays
  Clone ID: 700579213_FLI.pep
HPADHKCFFHTILIRRKRGGRAGVIPYFLLNQCEHQILLLEIITGAGHTSAVDWWALGILLYEMLYGYTPFRGKTRQRTFANILHKDIRFPASIQVSLAARQLIYRLLHRDPANRLGSYEGAMEIKQHPFFRGINWALVRAATPPELEAPLQDTLEATLPPPAADAAHTDMF

SEQ ID NO: 42197 - protein, 360 aa, Zea mays
  Clone ID: 700159881_FLI.pep
FLCVAIGLWAGLAIGFTTEYFTSNAYSPVRDVADSCRTGAATNVIFGLALGYKSVIVPVFAIAVSIYVGFTLASIYGIAVAALGMLSTVATGLAIDAYGPISDNAGGIAEMAGMSRRIRQRTDALDAAGNTTAAIGKGFAIGSAALVSLALFGAFVSRAGVEDVNVLNPKVFVGLLVGAMLPYWFSAMTMKSVGSAALKMVEEVRRQFITIPGLMEGRAAPDYARCVRISTDASLKEMMPPGALVLLAPLVAGTFFGVSTLAGLLAGALVSGVQIAISASNSGGAWDNAKKYIEAGASDHAKSLGPKGSDAHKAAVIGDTIGDPLKDTSGPSLNILIKLMAVESLVFAPFFAAHGGLIFK

SEQ ID NO: 42198 - protein, 288 aa, Zea mays
  Clone ID: LIB3068-057-F6_FLI.pep
RPLAFAWLHRAGRAGEEKLASSYQLSAGGGSLPAAGVSCKGWELAMGRGRVELKRIENKINRQVTFAKRRNGLLKKAYELSVLCDAEVALIIFSNRGKLYEFCSGQSITKTLERYEKNSYGGPDTAVQNKENELVQSSRNEYLKLKARVDNLQRTQRNLLGEDLGSLGVKELEQLEKQLDSSLRHIRSTRTQHMLDQLTDLQRREQMLCEANKCLRRKLEETSNQVHGQVWEHGANLLGYERHSPQQQAPSHVGNGLFFHPLEAAAEPTLQIGFAPEHMNNFMPTWLP

SEQ ID NO: 42199 - protein, 136 aa, Zea mays
  Clone ID: 700160159_FLI.pep
YFAYRRSTIDMSSLGDLWALAPVIVVNMQLAMDIIRWNWIIHAFVWGTIAATTVCLFVIDSIWVLPGYGAIFHIMGTGLFWFLLLIIVVTAMVPHFVFKAFTEHFRPSDIQIAREMEKFANVNQVNRLEFPTRGLS

SEQ ID NO: 42200 - protein, 205 aa, Zea mays
  Clone ID: LIB3136-023-C11_FLI.pep
TEVVHNVIYDIIQKGGDAGKITKGAKKLKLEKGILLDNYVQRGSRLVDSQARSLLIHSKRSKRHMSLKQHKKCGSFDLDGTFHKYDLYKPMHEMWKDYIRELMDLSPKKKFTENLLSADLHGALLIVAECKAASYKGVNGIMIRDTAETFGIISEDNRFRVVPKAGSVFVLQADRWKFTLIGDKLSPREKLKEDQRQQRAQSLIR

SEQ ID NO: 42201 - protein, 344 aa, Zea mays
  Clone ID: 700166008_FLI.pep
PMRTPPGDNALLSPKTAFLFNVMWQRSHSFSTLFPASFDFIGEAYFGVRPSATELGKGGPSKAAKWLIWQLHPLVTLGLPMVLEEPLLHTFHLPPFLVKGDYRALYKYFSTVAKQALDTAEGLGLSREEACHNLLFATTFNSYGGLKVLFPGLLANVASGGEKLHERLVAEIRGAVADAGGKVTLAAVERMELAKSVVWESLRLDPPVKFQYGHAKKDLLVESHDAVFQVRKGEMLFGYQPCATKDPRVFGDTAGDFVPDRFLGEEGSKLLQYVYWSNGRETENPSVDNKQCPGKNFVVLVGRLLLVELFLRYDTFTAEVGKELLGTSVIFTGVTKATSGPGSE

SEQ ID NO: 42202 - protein, 296 aa, Glycine max
  Clone ID: 700742678_FLI.pep
LSRRRVTIRRRFGRGIMGRCSQTLRFGVPPRAAVLDRLPRPDRRRDALQCRRQRPGLPLRPANRQRNGIGGGERQRRNLSLFRITKFGTLLRHPGRIRPVRHHNSRSSPGSTSPGHGEMDKGGVHRIWRLHSRPEWLVTLREGDGFDYVEGFVFVNSDDPCNGWTTVPVGPNQYFDPVRIPSTAGPVLYCLELALHYRNQDHPSAVDMEVDRLLGRLRFVEGLKFSVDVTYMEFLLRVKRVEEDAKANGIWDAPHPWLNMFVSKSNIAEFDREVFKKILKHGVGGPILVYPLLRSK

SEQ ID NO: 42203 - protein, 628 aa, Zea mays
  Clone ID: 700150837_FLI.pep
SETPGEDPFVVGRYAVNFVRGMQDVDDRPYAAAADPFSRPIKVSSCCKHFAAYDVDAWFKADRLTFDAQVEERDMVETFERPFEMCIRDGDASCVMCSYNRINGIPACADARLLSETVRSQWQLHGYIVSDCDSVRVMVRDAKWLNYTGVEATAAAMKAGLDLDCGMFWEGARDFFTTYGVDAVRQGKIKEGDVDHALSNVYTTLMRLGFFDGMPEFESLGASNVCTDNHKELAADAARQGMVLLKNDARRLPLDPNKINSVSLVGLLEHINATDVMLGDYRGKPCRIVTPYNAIRNMVNATYVHACDSGACNTAEGMGRASGTAKIADATIVIAGLNMSVERESNDREDLLLPWNQSSWINAVAMASPTPIVLVIMSAGGVDVSFAHNNTKIGAIVWAGYPGEEGGTAIADVLFGKYNPGGRLPLTWFKNEYVNQIPMTSMALRPDAALGYPGRTYKFYGGPAVLYPFGHGLSYTNFSYASGTTGATVTIHIGAWEHCKMLTYKMGAPSPSPACPALNVASHMCSEVVSFSLRVANTGGVGGDHVVPVYTAPPPEVGDAPLKQLVAFRRVFVPAGAAVDVPFALNVCKTFAIVEETAYTVVPSGVSTVVVGDDALVLSFPVTINLAV

SEQ ID NO: 42204 - protein, 306 aa, Zea mays
  Clone ID: 700352302_FLI.pep
STAGCITSIVYLGAYDSEEAAARAYDLAALKYWGPETLLNFPVEDYSSEMPEMEAVSREEYLASLRRRSSGFSRGVSKYRGVARHHHNGRWEARIGRVFGNKYLYLGTFDTQEEAAKAYDLAAIEYRGVNAVTNFDISCYLDHPLFLAQLQQEPQVVPALNQEPQPDQSETGTTEQEPESSEAKTPDGSAEPDENAVPDDTAEPLTTVDDSIEEGLWSPCMDYELDTMSRPNFGSSINLSEWFADADFDCNIGCLFDGCSAADEGSKDGVGLADFSLFEAGDVQLKDVLSDMEEGIQPPAMISVCN

SEQ ID NO: 42205 - protein, 266 aa, Zea mays
  Clone ID: 700151077_FLI.pep
RSRGFLSQLRRRLATPPCAGSSSSAATRSVVVVPAAPIPNRMGSLASERKVVGWAARDATGHLSPYSYTLRNTGPEDVVVKVLYCGICHTDIHQAKNHLGASKYPMVPGHEVVGEVVEVGPEVAKYGVGDVVGVGVIVGCCRECSPCKANVEQYCNKKIWSYNDVYTDGRPTQGGFASTMVVDQKFVVKIPAGLAPEQAAPLLCAGVTVYSPLKHFGLTTPGLRGGILGLGGVGHMGVKVAKAMGHHVTVISSSSKKRAEAMDHLG

SEQ ID NO: 42206 - protein, 155 aa, Glycine max
  Clone ID: 700562348_FLI.pep
VREPNKKTRIWLGTFPTPEMAARAHDVAAMALRGRYACLNFADSAWRLPVPATAEAKDIQKAAAEAAQAFRPDQTLKNANTRQECVEAVAVAVAETTTATAQGVFYMEEEEQVLDMPELLRNMVLMSPTHCLGYEYEDADLDAQDAEVSLWNFSI

SEQ ID NO: 42207 - protein, 460 aa, Zea mays
  Clone ID: 700151622_FLI.pep
QLPLRLRTPPKDPRRACSAIRGEGSKAMMKSVSGTGSAGSRSDPGGSGELSRFSVATTASSASQPSANGGARGISFLDAFRSCFVPPEARSPENSMSDESHPSHQLSQSLSSQGSNSGSVFGSKRSIKGMYSPMHKSSLDREIPGSTKFSLPQIQKATKNFSPNFKIGQGGSGTVYKGQLADGTLVAVKRAKKNVYDKHMGREFWNEIETLQRIEHLNLVRFHGYLEFGGEQLIIVEYVPNGNLREHLDCINGKILEFSLRLEIAIDVAHAITYLHTYSGFDLQMYIKDHPVIHRDIKSSNILLMNNCRAKVADFGFAKLAPTDSSHISTQVKGTAGYLDPEYLRTYQLNEKSDVYSFGVLLVELVTGRRPIEPKKAIIERVTTKWAMEKFVEGNAIQTLDPNLEATDAINLAVEKLYELALQCLAPTKRNRPSMKRCAEILWSIRKDYRELVVPTSAMN

SEQ ID NO: 42208 - protein, 161 aa, Glycine max; identical to SEQ ID NO: 40317
  Clone ID: 700807549_FLI.pep

SEQ ID NO: 42209 - protein, 148 aa, Zea mays
  Clone ID: 700152532_FLI.pep
RELATSCSAGRQEGRGSKQQTHAAPAPGSGTAAVLDDRFWSSARFSRRSALALSRSLSFSAMMHRFSRYSFRFTISMASAPPARNLLSLNLLLLLLTASVFFSCRSRLTTTRDGRFSLPPPPPLLQNQEPEHMLLWTADGVGGLLLAS

SEQ ID NO: 42210 - protein, 200 aa, Glycine max
  Clone ID: 700849273_FLI.pep
AINMGGGFHHCSAQKGGGFCAYADISLCIHFAFVRLNISRVMIIDLDAHQGNGHEMDFAYDSRVYILDMYNPGIYPLDYEARNYINQKVEVKSGTVTEEYLQKLDEALEVAGHRFNPELVIYNAGTDILEGDPLGRLEISPEGIALRDEKVFRFAREKNIPIVMLTSGGYMKSSAGVIADSIVNLSKKCLIETSGAPKST

SEQ ID NO: 42211 - protein, 112 aa, Zea mays
  Clone ID: 700155338_FLI.pep
AKHWSSHRHHRRCECMQRGSMLAMPSARSFGAAGWWRVSRDASAVHKKEGKSYRQGKAKPFFQVSLSPSKSFYVFGGGGNRSLLTGLLILSGHVSVCVCDCVLHLRVDLQLE

SEQ ID NO: 42212 - protein, 225 aa, Glycine max
  Clone ID: 700850359_FLI.pep
RSMCGGAIISDFIGVKRGRNLAAQELWSELDPFSDLLGFDTTTTTTNQPPLPDKKVVSSCEKKKKKSVSAEKKSGGRARKNVYRGIRQRPWGKWAAEIRDPHKGVRVWLGTFPTAEEAARAYDDAAKRIRGDKAKLNFPATAPPPSKKQRCLSPDTTTEQSSSSQSTTGSTGSPPSAAFHGGGDELDLKQLERFLGLDNMGAEWDNMDDLWMLDDVVVPNRHLIY

SEQ ID NO: 42213 - protein, 271 aa, Zea mays
  Clone ID: 700096672_FLI.pep
PEEQDGGFTYYCTGDHTMSYYGSSSSGGRSSRRVDYGRTYVVRPKGRHLATIVWLHGIGDNGASWSQLLDSLPLPNIKWICPTAATRPVAAFGGFPCTAWFDVEDTSIDGRDDIEGLDASAAHIANLLSSEPSDVKLGIGGFSMGAAVALHSAACYAHGKFTSGIPYPIALNAVISLSGWLPCSRTLRSKMEGSHIAVRRAGSLPILLSHGRVDEVVVYRDGERSAEVLRNSGFSFLTFKPYNGLGHYTIPEELDDLCKWLSSSLGLGRSR

SEQ ID NO: 42214 - protein, 379 aa, Zea mays
  Clone ID: 700098106_FLI.pep
APAAMITALQVSGGGLPLLFARRRRRAFRPPQAVASDAAAAAEGTAREDGGKVALGGSGVSVTKLGVGAWSWGDTTYWNEFRWDDTKLKAAKGAFDASIDCGITFFDTAEVYGAGVSGAINSESLLGRFINERQRKEQVDVAVATKFAALPWRFGRGSVICALKASLDRLGVSSVELYQLHWPGIWGNEDYLDGLGDAVEQGLVKAVGVSNYSEKRLRDAYERLRKRGVPLASNQVNYSLIYRNPEENGVKAACDELGVTLIAYSPIAQGALTGKYTPESPPKGPRGRIYTPEFLTKLQPLINRIKEIGGSYGRTSTQVVLNWLVCQGNVVPIPGAKNAEQAREFAGALGWSLAPDEVEELRSMARQVKPVIGFPVEKL

SEQ ID NO: 42215 - protein, 329 aa, Glycine max
  Clone ID: 700852179_FLI.pep
TGGASCFHFLSQKSLIMNTRKDMDRIKGPWSPEEDEALQKLVEKHGPRNWSLISKSIPGRSGKSCRLRWCNQLSPQVEHRAFTHEEDDTIIRAHARFGNKWATIARLLHGRTDNAIKNHWNSTLKRKCTSTMIDDDNTPPLKRSLSAGAAIPVSTGLYMNPPTPGSPSGSDVSESSVLVASSSHVFRPVPRTGAVLPPVETTTTLSSNDPPTSLSLSLPGVDSSEVSNRTTEPIHAAPPPPPQPQPQPQPLNTIPLLPMMTVPSVSPTGMAPFNFSAEFLAVMQEMIRKEVRSYMELHNQKNGMCFQAAVNDGFRNASVKRIGISRVDS

SEQ ID NO: 42216 - protein, 177 aa, Zea mays
  Clone ID: 700102787_FLI.pep
TAIRAEQQKHCFDHRSVSALIRLDDMPRLAVIAAGLRPLHVAYLLVRLEAVVEAAMLRRPTSSLPRRCGRRLQRAPRSRGSEAGRRRAGRRQALSRRPRALPACQRLPGRVGVALHLQPLQFPAPLLPPQLVALVHVVLVDEHLHPLLDLTAAITPPTMNYCCCCCSVSFIKLPKNL

SEQ ID NO: 42217 - protein, 177 aa, Glycine max
  Clone ID: 701014122_FLI.pep
FTMTTQQHNNDPPTHPHRLLRRPICNTHATRINDPTRIPVRSFVLSFLSDLLELLALHHRIRLRDLLPPHSLKVELARVLLRVTVGPAKHHPAPALKPREPHAPSASHAPVLLRRLKLLRRAWRVNNHRRSRICCRSGRRRRLRNHRRRRWRNERLIQNHLRVGRLLLFELEIAVAL

SEQ ID NO: 42218 - protein, 498 aa, Zea mays
  Clone ID: LIB3062-035-G5_FLI.pep
SVTSLVANIKGENRFAEVKAEKADVQAEIHRGKKHFYGDDLDAEEGRRSKHSAPAIDTDHLVREMMDKVLLCNGETCSKGVKELREALQHDVAKNSHGVHGKGSGHGKGRGKKQPKKEVVDLETLLVHCAQSVATDDRRGATELLKQIRQHASPNGDGDQRLAHCFANGLEARLAGNGSQIYKSLIMTRFPCTDVLKAYQLYLAACPFKKISHFFANQTIMNAVEKAKKVHIVDYGIYYGFQWPCLIQRLSTRPGGPPRLRITAIDTPHPGFRPAERIEETGRYLKDYAETFNVPFEFRAIPSRFEAVQIEDLHIAKDELLIVNSMFKFKTLMDESVVAESPRNMVLSTIRKMNPHLFIHGIINGSYNAPFFASRFREALYHYSAIFDMLETNIPRDNEQRLLIESALFGREAINVISCEGLERMERPETYKQWQVRYQRAGFRQLPINQDIMKRAREKVRCYHKDFLIDEDNRWLLQGWKGRIVLALSTWKPDHRSS

SEQ ID NO: 42219 - protein, 198 aa, Zea mays
  Clone ID: LIB3062-046-B1_FLI.pep
SRTRRQAGRQRGRKRRKRRRSAWRSGMRRARLPPVPVPTAPGDAGPEVKYRGVRRRPSGRYAAEIRDPARKTPIWLGTFDSAEAAARAYDAAARTIRGAAARTNFPSAPTSAAVAPPLPLPASTAAAAGAATSSLSSAVAVRSERAGPGGRRHGLALRHAAPPLAAAGPQPLPGSRSLRVADADPAERSNACVRTPPP

SEQ ID NO: 42220 - protein, 217 aa, Zea mays
  Clone ID: 700102932_FLI.pep
YIAELRLQLGLLKRETTDTRDGSELSILSDDETARRSLPETGESHAFRNTEERDFSYVFDMLVALGIHAANEDDLLDNCYLLECSAGLDLYDDLEQKYDSLILWPVHERKLLFDITNAVLGDMITSVMNGCSKGLMARCSPGWNREEFAELVWQRVVQLRQEIEFNQEALLLSVEWAGSEDGASLVGRDIGNMLQDDLVQEIIADFLGATKSAKLRG

SEQ ID NO: 42221 - protein, 222 aa, Arabidopsis thaliana
  Clone ID: LIB23-027-H9_FLI.pep
TLSLFDVITAQENGFDRDSTAISTSFRSLLSLSESSVPWETPTNNQSSSLTHCSYPRVFCNPVSVCENPEPDHTQEDSSTNPGSSIMMSTRNHQGSPVEEEVSPNSSSNDMLLDVERSNDTEVANPRSEQGSMTHQRCGICKKLLSQKSPWSSYKILRSRDMPATGVFPCHHVYHVECLDKATPTAQTRDPSCPVCSNTIGVMEQPLIAPEEAINGTNSAAV

SEQ ID NO: 42222 - protein, 167 aa, Zea mays
  Clone ID: 700105386_FLI.pep
NDGGFWCLDIETRAADIRRNPQICQESEGPRLHAIPVIVRHSWQNGTIPARCLPRVTAAVWKPPGSVRRAREVQATGAYKAGSKQHLALGHCLRRPVGCGQPDPGARKPSAVVRSANCRRENGRLIEETTAVHMRAADERAGLLSFAPWQLAIESALSLYMCVYMLE

SEQ ID NO: 42223 - protein, 484 aa, Zea mays
  Clone ID: 700105434_FLI.pep
SVAVAPDGTKVDAVEAFRIAGIEHGFFALQPKEGLAIVNGTAVGSGLAAIVLFEANILAVLVEVLSALYCEVMAGNPEYTDHLIHALKHHPGQIEAAAIMEHILEGSSYMKLAKEQGELDPLTKMKQDRYAIRTTPQWLGPQVEVIRFATKSIEREINSVNDNPIIDVARRKALHGGNFQGTPVGVSMDNTRLAVAAIGKLMFAQFSELVSSFYSNGLPSNLSGGRNPSLDYGFNGAEVAMASYCSELQFLANPVTNHVQTAEQHNQSVNSLGLISSRMTAEAVTILKLMSSTFLIALCQAVDLRQLEESIKAAVKKCVSHVAKKSLAIDDHDLLVAIDRVAVFTYAEDPCRPSYPLMQKLRAVLMEHALINGDSNTERPMETSILAKVAEFEKQLSAVLPDEVEAARAAVESGTTPNRITECRSYPLYRFVREELGAEYLTGEKTRSPGEEVDKVVIAMNQRKHIDPLLQCLSEWKGAPLPII

SEQ ID NO: 42224 - protein, 166 aa, Zea mays
  Clone ID: UC-ZMFLMO17291G03_FLI.pep
AARPTSSTKAPTKALTVLSVYDLFVGSQMVPDRWKAAGQDRQRDQELLEHAHPAEAAEQGDRPGDTPPHQRAHVQHNHIVRGLGPGEGAQVPRPEPGPLHQPAVPGGGGGHAAEAGEAGGGRALLQLQPGAPQERGLQVQQLPRAQDRHARLQKTRDEMRASIHLC

SEQ ID NO: 42225 - protein, 202 aa, Zea mays
  Clone ID: 700160602_FLI.pep
FGFDLWFHDFLEFSSTGRLLRYDPRSGETSVVLDRLGFANGVALPRDEAFVVVCETMRFRCIKVWLKGDKAGEAETFVDLPGWPDNIRLGSDGHFWIAVLQLRSPWLDFITRWTFTKRVVASFPALSEWSKGAAKGAMVAQVSEDGTILRVLDDSQGKVITFVTSVTEFNGDIFLGSLATNFVGKLSLARVAQEQEQGAVSS

SEQ ID NO: 42226 - protein, 520 aa, Zea mays
  Clone ID: UC-ZMFLMO17141D11_FLI.pep
SAATSDLAFTLHASPFRFTVSRRSSGDALFDTSAALVFKDRYLELTTALPPEGRASLYGLGEHTKRTFRLQRNDTFTMWNADIPAANADVNLYGSHPFYLDVRHAGAAHGVLLLNSNGMDVEYGGSYLTYKVIGGVLDLYFFAGPAPLDVVDQYTQLIGRPAPMPYWSFGFHQCRYGYKNLADLEGVVAGYAKARIPLEVMWTDIDYMDAFKDFTLDPVNFPAGPMRQFVDRLHRNGQKYVVIIDPGISVNETYGTYVRGMQQDVFLKRNGTNYLGKVWPGYVYFPDFLNPRAAEFWAREIALFRRTLPVDGLWIDMNEVSNFVDPAPLNALDDPPYRINNSGVRRPINNKTTPASAVHYGGVRDYDAHNLYGFLEARATHGALLADTGRRPFVLSRSTFVGSGRYTAHWTGDNAATWDDLRYSINTMLSFGLFGIPMVGADICGFGGNTTEELCSRWIQLGAFYPFARDHSAIGTVRRELYLWELVARSARKALGLRYRLLPYMYTLMYEAHTTGAPIA

SEQ ID NO: 42227 - protein, 368 aa, Zea mays
  Clone ID: 700166669_FLI.pep
LLMLAVLAATVTYQAGINPPGGVWSDDSSASGKPGDPILQHNNSKRYDVFYYSNSLSFVASVVITILLVNKESCEHGIKSYALRVCLVVGLVSLLIAYSAGSSRKARESIYLIVIAVAVLIALVIQVLLLSCTQDSLRGPTGQFIERLLQLLFGTDKAWHGDTSKQKESSGRPEKKVRKRHKYLMLLAVLAASITYQAGLNPPGGFWSDDNEGHVEGNPGLKPPGALWSDNKGHLAGNPVLLDINPRRYEIFFCFNSISFMASIVVVMFLLNKSARKKAVPLEVLHLIMILDLLALMTAFAAGSCRKFRTSVYVYGLVLGVVVYLVIAVLLSSGIAKCLRPMDRNRVSSQRSPIRAPTASTRILGDHA

SEQ ID NO: 42228 - protein, 168 aa, Glycine max
  Clone ID: 700684235_FLI.pep
FDDHFIALSDWHKLHLKTQISIHRFHCSLSYHTMALECVGGAVLSSFLGALFQKLASPQVLDFFRGTKIDQNLRRDLENKLLSIQAVLDDAEQKQFGNMPVRDWLIELKVAMLDVEDVLDEIQHSRLQVQPQSESQTCTCKVPNFFKSSPVSSFNKEINSSMKNVLDD

SEQ ID NO: 42229 - protein, 165 aa, Zea mays
  Clone ID: 700167006_FLI.pep
EFTRLKNLVEEKEKKIKELQDNVAAVNFTPSSKLGKMLMAKCRTLQEENEEIGAMASEGKIHELGMKIAVLKSQNNELRNQFDVLYKHMDGVTNDVERSNELVAILQEELEAKELEVTRLKEETLSQKEGTPDAPAPAPAPVEEGDGAGNDLKPASDPLQVKLES

SEQ ID NO: 42230 - protein, 172 aa, Glycine max
  Clone ID: LIB3242-087-D10_FLI.pep
HYSNLFRMKADAAKADVLYLLSGVWKASVERIFLWIGGSRPSQLLNIIVPQLEPLTDQQIVSISNLRLSSQQAEDALSLGLEKLQQSLVHDMAVDSLGVGNFGLQMVLAMEKFEALEGFVIQADHLRQQTLLHMSRILSTHQAARGLLALGEYFHRLRTLCSLWYARPYDLA

SEQ ID NO: 42231 - protein, 171 aa, Glycine max
  Clone ID: LIB3242-390-E12_FLI.pep
LDLSEEPMYVNAKQYHAILRRRQYRAKLEAQNKLIKERKPYLHESRHLHALKRARGSGGRFLNAKKLQELKLTSANRGLDVSGCTQLNLSGNMSESKVQAVENLNYRNGASTTTCSDVISTSNSDDVFQQHESDFRLCGYPSHIGRNMQGYSADIGGGGGGGNQHRLSVLM

SEQ ID NO: 42232 - protein, 183 aa, Zea mays
  Clone ID: LIB3245-434-A9_FLI.pep
CKGVAHCHSHGVLHRDLKPQNLLVDKEKGILKIADLGLGRAFTVPMKSYTHEIVTLWYRAPEVLLGATHYSTGVDMWSVGCIFAEMARRQALFPGDSELQQLLHIFRLLGTPTEEQWPGVSDLRDWHEFPQWKPQGLARVVPTLEPEGVDLLSKMLQLDPSNRISALAAMEHPYFNSLDKSQF

SEQ ID NO: 42233 - protein, 551 aa, Zea mays
  Clone ID: LIB3245-457-G8_FLI.pep
AVWMPDETRSTMILTHQLRERDIMDPQKHSIPIDDPDVQEIKATKDAKVLGPDSALGVSSRSKHEAGPVAAIRMPMLRVSNFKGGTPEVMQTSYAILVLVLPNDGSLGWGRRELEIVEVVADQVAVALSHAALLEESQLMREKLAEQHRDLLQAKDEAMRAGDARNSFQTAMYDGMRRPMHSILGLVSMMQQESMNPEQRLVMDAIAKTSSVASTLMNDVMQTSTMNCEHLSLVRRPFNLHSFIKEVVGVVRCLTGCKGVEFEFQVENSLPERIIGDEKRVFHIVLHMVGTLTDRCNAGCISLYVNVHNEVEDRHNHDWMLRRANFSGGYVCVKFEIRIRKSKGYLLSSSSSQISQGSKPNNSEMGLSFNMCKKIVQMMNGNIWSVSDSKSIGETIMLVLQFQLEPVTPVSGASSDLYRSSAIPNFNGLRVLLADSDCTNRAVTHRLLEKLGCRVLSVASGVQCISSFAAESSFQLVVLDLDMQTMDGFEVARAIRKFSSNSWLPLIIALAARIDDNIRDRCQRSGVNGLIQKPVTLAALGDELYRVLQNN

SEQ ID NO: 42234 - protein, 215 aa, Zea mays
  Clone ID: LIB3279-059-H8_FLI.pep
STHKWRFPLMTTKRLTWFETLLISTPLLPHDPTTSTNFREEPAPRATAYPAGRLGALPADAAGELDVLGHDGDALGVDGAEVGVLEQADEVGLGGLLQRGDGGGLEAEVGLEVLRDLADQALEGQLADEKLRALLVLADLAQRHGARAEAVRLLHAAGRRGRLARRLGRQLLPRGLAARGLARRLLRASHRCGDLGWGRRESVGARVFRMEMNEA

SEQ ID NO: 42235 - protein, 257 aa, Glycine max
  Clone ID: uC-gmflminsoy054b12_FLI.pep
HQTTHIVQIHKLPTMEDPNQAPEGSSQKKMGRGKIEIKRIENTTNRQVTFCKRRNGLLKKAYELSVLCDAEVALVVFSTRGRLYEYANNSVRATIERYKKANAAASNAESVSEANTQFYQQESSKLRRQIRDIQNLNRHILGEALGSLSLKELKNLEGRLEKGLSRVRSRKHETLFADVEFMQKREIELQNHNNYLRAKIAEHERAQQQQSNMNMSGTLCESLPSQSYDRNFFPVNLIASDDQQQYSRQDHTALQLV

SEQ ID NO: 42236 - protein, 170 aa, Glycine max
  Clone ID: uC-gmrominsoy098d02_FLI.pep
RWSKIAEHLPGRTDNEIKNYWRTRVVKQAKQLKCEVNSKQFRDTLRFVWMPRMLERIQAQASSSSSSSSGQAHQTTLISNAQAHSDPCGVMTTNPSLLSEVSSSALDAHAPSLYDSSASYNLMGGGSSSSYSAEYCYYSDIAGNGFGGSDLWTDENICFLQQLLADHDLS

SEQ ID NO: 42237 - protein, 357 aa, Glycine max
  Clone ID: uC-gmrominsoy115e11_FLI.pep
ERLRSFLELLFDREREKMGRAPCCDKANVKRGPWSPEEDSKLKDYIEKHGTGGNWIALPQKAGLKRCGKSCRLRWLNYLRPNIKHGEFSDEEDRIICSLYANIGSRWSIIAAQLPGRTDNDIKNYWNTKLKRKLMGLLPSSHQRIAPYQQFSSQNPSSFPSHSSLSSSQYRDYYYNSSHHYYIPAPTSSFTCLEPISAPSSNYTNTTTTSNSLSFYQHQEPLVSVSPRQYYPITDSSMLVFGSETSCSSSDGSCSQVSLGREIKQEDMGFQNFMFGDHQNMNKFMNINHDGGEEYVNQWTQRPNGYIFQTQQTALDYDLEVIKNLICSNSSSNSNNGYLSVDENKTEEKGVYYNYCN

SEQ ID NO: 42238 - protein, 146 aa, Glycine max
  Clone ID: LIB3242-523-E12_FLI.pep
GFLSDSQSSVSPGNLSSTAEFSWQLGSDTSHCKVFMESEDVGRTLDLSCLSSYQELYMRLANMFGIERSDMLSHVLYCDSSGALKQIGEEPFSEFMKTAKRLTILTDSNNKDSRSLFCRVWITGTRNAEHGLDAASNKTGPLSIFA

SEQ ID NO: 42239 - protein, 223 aa, Zea mays
  Clone ID: 700152275_FLI.pep
ERKVSQPNATAAVLAPHATLSSLTPPPPSIPTRETQTNEVGRSAKMGAGDGEVAASKDKASGGGAERTSLDGVRDKNVMQLKKLNTALFPVRYNEKYYQDAIASKDFSKLAYFSDICVGAIACRLEKKEGGAVRVYIMTLGVLAPYRGLGIGTKLLNHVFDLSAKQNISEIYLHVQTNNDDAIAFYKKFGFEITQTIHNYYMNITPPDCYVLMKFIGQAATKK

SEQ ID NO: 42240 - protein, 176 aa, Zea mays; identical to SEQ ID NO: 37650
  Clone ID: LIB3069-037-G10_FLI.pep

SEQ ID NO: 42241 - protein, 339 aa, Glycine max
  Clone ID: LIB3242-010-A8_FLI.pep
EIHSIGGGRFFGGGGDRRLRPHHQNHHQQPPIKCPRCDSLNTKFCYYNNYNLSQPRHFCKNCRRYWTKGGVLRNVPVGGGCRKSKRSNKPKTTTSAAATTSSNNNNNNPSSSSETAAATAPTPPQQPPPPLELEHNSHSHSSSESSTYTVAATEAMSAPTTNAVSNNNLLLDNNRESKMFANPNPYLEQSRSGGLFSDIESFSSLVNLNNQALGFGFGNNNSNISILDATSFRFGVSVTNPHGNDQVLAAPGGGHGQWQQQQQNHHEFGTASFLDHTVPLEFSSLQHKAGHQGGFGPLDWQPGGDQGLFDLPNTVDQPYWTHHTHWSDQDNPSSLFHLP

SEQ ID NO: 42242 - protein, 363 aa, Zea mays
  Clone ID: LIB3180-022-C4_FLI.pep
PPSRRASIMSAYCGKYKDELIKNAAYIGTPGKGILAADESTGTIGKRLSSINVENVEENRRALRELLFCCPGALQYISGVILFEETLYQKTKDGKPFVDVLKEGGVLPGIKVDKGTIEVVGTDKETTTQGHDDLGKRCAKYYEAGARFAKWRAVLKIGPNEPSQLAIDLNAQGLARYAIICQENGLVPIVEPEILVDGPHDIDRCAYVTETVLAACYKALNEHHVLLEGTLLKPNMVTPGSDSKKVTPEVIAEYTVRTLQRTVPAAVPAVVFLSGGQSEEEATRNLNAMNKLSTKKPWSLSFSFGRALQASTLKAWAGKVENLEKARAAFLARCKANSEATLGTYKGDAAADTESLHVKDYKY

SEQ ID NO: 42243 - protein, 217 aa, Zea mays
  Clone ID: 700430083_FLI.pep
NGSLYDFLHLSDDYSKPLTWDTRVRIAVGTACALEYLHDACSPPVIHKNIKASNVLLDADLNPHLTDCGLAYFYEDPSQSLGPGYDPPECTRPSGYVMKSDVYCFGVVMLQLLTGRKPYDSSKPRAEQSLVKFVGPQLHDTNALEALADPGLRGLYPPKALSRFADVLSRCVQSDPELRPSMSEVVQLLLQCVQRTTSNRRLGGHRTVSQRSDDSDW

SEQ ID NO: 42244 - protein, 242 aa, Zea mays
  Clone ID: 700096581_FLI.pep
ACRFHLHPVLRTHPPTHSFPQPMAAAAAGTREEMVYMAKLAEQAERYEEMVEFMEKVAAAAELTVEERNLLSVAYKNVIGARRASWRIVSSIEHKEETRGAAAVDARVFYLKMKGDYHRYLAEFKTGAERKDAADSTLAAYQAAQDIAVKELPPTHPIRLGLALNFSVFYYEILSSPDRACSLAKQAFDEAISELDSLGEESYKDSTLIMQLLRDNLTLWTSDMQEDGGDEMRDANKPDEEQ

SEQ ID NO: 42245 - protein, 172 aa, Zea mays; identical to SEQ ID NO: 36903
  Clone ID: UC-ZMFLB73307A03_FLI.pep

SEQ ID NO: 42246 - protein, 347 aa, Zea mays subsp. mexicana
  Clone ID: UC-ZMROTEOSINTE092C10_FLI.pep
DNVSRPLYDGLKCAFIFPEVACDKYGRKDVMYQHWRWQPHGHGCDIPRFDGIKLLEELRNKRLVFVGDSVNRNQWVSLVCMVEASIPDDRLKMRIFNGSLISFKALEYNATIDFYWSPLLVESNSDNPIIHRVEYRIIRADRIEKHASVWRDADVIVFNSYLWWRKQKDDMRMKVMYGSFEDGDAKLDEMEMADGFEIAIKKLTEWLAENIDKNKTRIFFAGSSPTHSWASNWGGEDKNKCLNETEPIYRPGGYYKAATTDYSLMAKARSYFQRTLEPRGIRVQILNITELSDYRKDGHPTVFRRQFVPLTKEQIADPASYADCTHWCLPGVPDVWNEFLYGYLVHV

SEQ ID NO: 42247 - protein, 297 aa, Glycine max
  Clone ID: JC-GMFL02220070B02_FLI.pep
NMSMAIINTFGNVDVYILLLSSWFLVSAVCVWGRPATFLQDFEITWSKTHIRQIDQGRSIQLILDQNSGCGFASKSKYMFGRVSMKIKLIPGDSAGTVTAFYMNSDTDTVRDELDFEFLGNRSGQPYTVQTNIYAHGKGDREQRVNLWFDPSADFHTYTIMWNHHHIVFYVDDFPIRVYKNSEGKGIPYPTMQPMGVYSTLWEADNWATRGGLEKIDWSKAPFYAYYKDFDIEGCPVPGPANCASNQSNWWEGAAYQALNAIEARRYRWVRLNHIIYDYCQDKSRFPVIPPECLAGI

SEQ ID NO: 42248 - protein, 574 aa, Glycine max
  Clone ID: JC-GMFL02220130A12_FLI.pep
GKLKQVLCNLLSNAVKFTEEGHIAVRAWAQKPSLQSSMIATHQYGSSRLLSRLCCRQNEARDDVEDLNIQQDPNCMDFTIEVDDTGKGIPKEKHKSVFENYVQVKETTLGQEGTGLGLGIVQSLVRLMHGDIEIMDKDIGEKGTCFRFNVLLTAHETQMNDDTRDDQVGSGNKNQSHGLTMSPKLSIWTRSPRSEASRVVLLIQNEERRGTTQRFMERLGIKVKVVKEWRQLHYTLKKIIKQKGLHPNSSSSPESSDSPSASSCTNGVPLSAQDGTNYISSIFKRTDIEASSGFVLIVIDANAGPFSELCKVVAEFKRGLCYPCRVVWLENPLIPSVDNKILNKDVSNSNDIVLSKPLHGHRLFQVIRILPEYGGVWPCNSSETKKEKGQVSLTNEGAIRRVELQECGSSSVTQQSYDRSRARKSHIHQGEIQECEESSNEKPLWGMKCLVVEDIVLLRRITKSTLDRLGASVMECENGEQAVQTVEEGLTRNSSNRPCDFILMDCQMPVMDGYEATRRIREIEKSHGVHIPIFALTANTGKEAILSIEAGMDDHLIKPINKEALLKAIKRIYT

SEQ ID NO: 42249 - protein, 290 aa, Glycine max
  Clone ID: UC-GMFLMINSOY001E01_FLI.pep
AGAERTAGEHPERVGQPVCQYFMRTRTCKFGSSCKYHHPRQAGAGGAAATPVSLNYYGYPLRQGEKECSYYVKTGQCKFGATCKFHHPVPAGIQIPPSPFAPVSPLPVPVPSPLYSTMQPPPGPSSQQIGVLVARPPMLPGSLVQSPYGPVVLSPAMVPISGWGPYQASASGAVLPSGTPSNVGSAQLYGITQLPSPAAAYPGPYPPSGSPVGPPSSSQKEQAFPERSNQPEYQYYLKTGEVKFGPSYRYNPPPDMSVPDMSTPKANVILSPAGLPLRPGLKLKSVDESN

SEQ ID NO: 42250 - protein, 477 aa, Glycine max
  Clone ID: JC-GMLE01810053H07_FLI.pep
MEVEPVEPQSLKKLSFKSLKRALDLFSPIHGHLATPDAESKKIRTSHKVSVEYGGIKSTANQPPPRQVSSATQDPGSSNTLALPGPGDSKDSQKGGPQNALVVGPTIPSTTPNDTGFQNKSTAVVSASGSSERNLSTSALMERMPSKWPRPVWHAPWKNYRVISGHLGWVRSVAVDPSNTWFCTGSADRTIKIWDLASGVLKLTLTGHIEQVRGLAVSNRHTYMFSAGDDKQVKCWDLEQNKVIRSYHGHLSGVYCLALHPTIDVLLTGGRDSVCRVWDIRSKMQIHALSGHDNTVCSVFTRPTDPQVVTGSHDTTIKMWDLRYGKTMSTLTNHKKSVRAMAQHPKEQAFASASADNIKKFTLPKGEFCHNMLSQQKTIINAMAVNEEGVMVTGGDNGSMWFWDWKSGHNFQQSQTIVQPGSLDSEAGIYACTYDLTGSRLITCEADKTIKMWKEDESATPETHPLNFRPPKDIRRF

SEQ ID NO: 42251 - protein, 296 aa, Glycine max
  Clone ID: JC-GMFL02220144D01_FLI.pep
FTEFQQVYLLVHTNEVKLKDWQRTKIEMMQKAKANKEFEAKESHGDPQISSRGSSPDSSLGTKSSGLEIDSNQNKSIMDQGFEIYSSAEGNTANCKLPFNQNGDVSEKTHPGVLWDVFRRQDVPILTKYLKIHWKEFGKSDDLGNEFVEWPLYDGAIFLDKHHKRKLKEEFGVEPWSFEQNLGEAIFVPAGCPFQARNVQSNVQLGLDFLSPESVGDAVRLAEEIRCVPNEHEAKLQVLEVGKISLYAASSAIKEVQKLVLDPKLGAQIGYGDPNLTAMVSENYEKMVKRRQITCA

SEQ ID NO: 42252 - protein, 135 aa, Glycine max
  Clone ID: JC-GMLE01810087E09_FLI.pep
CIKRRNSAFESTDWTSYAKWRTGKFCFIWWGATILSQQSGYAHSFSCTKVSTTPNSFPKAASTSAATAISATTAISAAATAATAAATTTATAAAATTAAAATTAAAAAAAAAAATATAAAAAATGTVISTNGGHE

SEQ ID NO: 42253 - protein, 444 aa, Glycine max
  Clone ID: JC-GMST02400050H08_FLI.pep
NNVLNSQYLKAAQELLDEIVNVRKALKQTGLEKQQSFRDIGLDGSKDSDGKSTSQSVQISSGPNGSAANSSCELSPAERQNLLDKKTKLLSMLDEVDKRYRQYCHQMQIVVSSFDMVAGCGAAEPYTALALRTISRHFRCLRDAISGQIQVTQRNLGEQEGIPRLRYVDQQLRQQKALQQLGVMRQAWRPQRGLPETSVSVLRAWLFEHFLHPYPKDSEKIMLARQTGLTRNQVANWFINARVRLWKPMVEEMYKEEFGDSEMSSNLLSSEKTLKAPRDDVQASDNKREESQDNLINVDDSVQHHGLKLDHASELDRGIQSSDHGENAMDPRIGKLQGDQRFNMNNSNNNSPYYGDGCIMASTPATYDLPELGNIAVDGHVSLALELRNCESQGFGVSNDDMHKRHKKTLASSPETDLLDYHFTDPGKQQNKFGNPHLLHEFVV

SEQ ID NO: 42254 - protein, 589 aa, Glycine max
  Clone ID: JC-GMFL02220050F11_FLI.pep
PPPSWSLVRAIMDHHRHPHHTTPLSEPTTPTTPRPTLFLSTSGKALLLSNSNKSLLLSNSSKRLDTPRKKYVKQVTGRHNDTELHLAAQRGDAASVRQILAEIDSIMMGSFEFDAEVASVRSAIFNEVNELGETALFTAAEKGHLDVVKELLPHTSHDALSSKNRSGFDTLHIAASKGHLAIVQALLDHDPGLIKTFAQSNATPLISAATRGHADVVEELLSRDPTQLEMTRSNGKNALHLAARQGHVSVVKILLRKDQQLARRTDKKGQTALHMAVKGVSCEVVKLILAADAAIVMLPDKFGNTALHVATRKKRTEIVHELLLLPDTNVNTLTRDHKTALDLAEGLPISEEILEIKECLIRYGAVKANDLNQPRDELRKTMTQIKKDVYFQLEQARKTNKNVSGIANELRKLHRAGINNAANSVTVVAVLFAAVAFAAMFTVPGGDNDQGVAVMAHTASFKAFFISNAIALFTSLSVVVVQITIVRGEIKAERRVVEVINKMMWLASVCTSVSFITASYIVVGRRSQWAAILVTIVGAVVMGGVLGTMTYYVVKSKRSRRMRKFSKTGTQLCRLSNSDDSEINPIYAI

SEQ ID NO: 42255 - protein, 70 aa, Glycine max
  Clone ID: UC-GMFLMINSOY062A02_FLI.pep
VTPLTIYKLRGIYIISCSPHVVAHLTKKLILDYFFPFIMCMLERWTGSYIDSRYDGAYDHEVFSQVGCVL

SEQ ID NO: 42256 - protein, 196 aa, Glycine max
  Clone ID: UC-GMROMINSOY300G05_FLI.pep
LLCCMPGEAMFSGCRRMCGHELCVRCALYLCSTNNVSSEMVGPPGSIPCPLCRHGVVSFVKLPGSQAKENKLHVSLGLCTPCMLHPRDLDKPSLSHTPEVGRNRVASVPSEILCPVTCSPFPSMAIPLCTCNDGPCPSFEPREVETQDGLPHHSQASTVDQDKIEGPRLDKTTCSSMFWGRRSCSREHQCNSEINA

SEQ ID NO: 42257 - protein, 304 aa, Zea mays
  Clone ID: 700154036_FLI.pep
LLPGRGRRRNGGRALFPSGGCCWRWSHSCVPDTVSRRSWSSSPVCASSWNASSWSCSFASTPFTAPVVSAWCSVFCNRAIVRCNQSLFFLQLLRFLWVSVEEKIYHDVPLVSWKNCTAHLEDHSGEQPEQTTNALFPLVIGGNADINIAHRGISITEGDGGNVSKGRLLNGLMISPRVSQDKKAWLTEGGLQLVGECTRSVPASNGMGTSVLRKLEDSPLAIGPSRLHDNVLRILNGNDDPGGQLKLVPGLSKVNNVDTISAALVHVALHLEVAVLGAEVDIGGEHHLDVLLPLGQCPRAAACR

SEQ ID NO: 42258 - protein, 231 aa, Zea mays
  Clone ID: UC-ZMROB73057E10_FLI.pep
APKGQKTHWVMHEYRLEGAYAYHFLPSSTRDEWVIARVFQKPGEVPPAARKHRLGALSSTTGTAAGDSCFSDSTSASIGGASSSSTPGPLFASAAAAVANAGAADGDTSSYCGGAANHGNLVTGRELVPCFSTATINGPLVAAALGIGQPYNAAPLPFEQQPPPPAFLPSLRSLQDNLQLPPFLSAGGLGGGGALHWLPAGGMEVKVEGRSAPPQMAVGPGQLDGAFGWSF

SEQ ID NO: 42259 - protein, 468 aa, Glycine max
  Clone ID: UC-GMFLMINSOY077C01_FLI.pep
KMDGKVGEGEFIVSVTKEEIVVPELPMKEQWLPLSNLDLLIPPVDVSVFFCYKKPLPEKYYCFGTMVGSLKNALAQALVYYYPFAGEMVANTMGEPELFCSNRGVDFVEAVADVELQCLNLYNPDDTVEGKLVPRKKHGVLAVQATGLKCGGLVVACTFDHRIADAYSANMFLVSWAEAARPNKPIISAQPCFRRSLLTPRRPPSIHPLLHHMYVPVSALPPPSDPNKKLVFESEPLISRIYYVTSESLNRMQALASSNGTVKRTKLESFSAFLWKMVAEATASVDGKKNVAAKMGVVVDGRKMLCNDEKNMGSYFGNVLSIPYGGNAVDELVEKPLSWVAEKVHEFLKMGVTEDHFLGLVDWVEEHRPVPGLSRIYCGHGKEKGPSFVVSSGQRFPESKVDFGWGKPVFASYHFPWGGDSGYVMPMPCANGNGDWLVYMHLLKAHLNFMEVRAPQILRPFSWDYLLN

SEQ ID NO: 42260 - protein, 120 aa, Glycine max
  Clone ID: UC-GMROPIC061B05_FLI.pep
DVSIHATFHALVVRSKDHISCHGQYRYMPLTAIHLLICLALHHPNSTSCFKSVHFWHLDVHEASIKIVRQLQHFKRLCHFQHTSHQLQTSLVHLLQPSGLPHCHQPPKFSFHREGYVENH

SEQ ID NO: 42261 - protein, 204 aa, Zea mays
  Clone ID: 700154042_FLI.pep
REGGRKRMSASRFIKCVTVGDGAVGKTCMLISYTSNTFPTDYVPTVFDNFSANVVVDGNTVNLGLWDTAGQEDYNRLRPLSYRGADVFLLAFSLISKASYENVSKKWIPELKHYAPGVPIILVGTKLDLRDDKQFFVDHPGAVPITTAQGEELRKQIGAPYYIECSSKTQLNVKGVFDAAIKVVLQPPKAKKKKKVQRGACSIL

SEQ ID NO: 42262 - protein, 394 aa, Glycine max
  Clone ID: UC-GMFLMINSOY091G06_FLI.pep
EVHCRRWKKRSFPRRKTNNNNERNYTMINSTKEADFPLKQEGLSSGDHEKAKAPSTSSSSSQWLKLKDPRIVRVSRAFGGKDRHSKVCTIRGLRDRRVRLSVPTAIHLYDLQDRLGLNQPSKVVDWLLNAAKHEIDELPPLPIPPGNFTLGYPSLVSCNEVSTSREGSGQNTLLWKPKSGEMVSDDKANWMNRSEGDDDNNHNNSNGKEGSNNNICHGGTLVLPNNLLPRPNHPSFLSLMNIMPSLGYQWEANNSAHDVNIGQWQNHGFLNQTDVHSINVVPFPSTLALSTGSDTTTTSQILVCPPHGATTQPYFPSSHHVAAMEMNARQINHYQMLSSSSHQNLLANSLNPSSQQLMSQSEKLPFSLGIRPKLFHSPNRSESHSQKDQDLPSK

SEQ ID NO: 42263 - protein, 257 aa, Glycine max; identical to SEQ ID NO: 42235
  Clone ID: uC-gmflminsoy030f07_FLI.pep

SEQ ID NO: 42264 - protein, 189 aa, Zea mays
  Clone ID: UC-ZMFLMO17336B11_FLI.pep
ATPTADAHMTITRILRRGELRNGLSALGDGVLGELAGEDEAHRGLDLAGGDGGLLVVARQLGGLGRELLEDVVDEGVHDGHGLGRDADVGVHLLQHLEDVDLVGLHGLLRLLFPLLALAALLGLARREALLGLGLLPRRSLLHLLCRGLLLRGLLGRRLLLRLGCHLCGGCGRSGLARVRGCGELPRLV

SEQ ID NO: 42265 - protein, 290 aa, Zea mays
  Clone ID: 700350022_FLI.pep
LRFNSHSHSPFPLSGSHSPPTGYPTHHTQTATPHLPRPPVHVLLLPMSPPLDLDYIGLSPAAAAAAAHDDLKGTELRLGLPGSGSPDRRVVAATATTLDLLPAKGAKRGFSDEAPTPSPGAASGKGKKVAEEEDDKKVAATPQPVAKAQVVGWPPIRSYRKNTMSTTQLKGSKEDAEAKQDQGFLYVKVSMDGAPYLRKIDLKTYKNYKDLSTALEKMFSGFSTGKDGLSEYRKDGEYVLTYEDKDGDWMLVGDVPWEMFADSCRRLRIMKGSDAIGLAPRAADKSKNRN

SEQ ID NO: 42266 - protein, 103 aa, Zea mays
  Clone ID: 700432990_FLI.pep
ETLPSYFFCIFALDRRLAPLGASIWCRLSWSSLVISAKVRRASGSSFQHCRISLVNLGCTLPGMSKRNPCLTPNAACKGVMLSYGTIEVASSQRTMAKLNTSA

SEQ ID NO: 42267 - protein, 382 aa, Zea mays; identical to SEQ ID NO: 41858
  Clone ID: 700456835_FLI.pep

SEQ ID NO: 42268 - protein, 132 aa, Glycine max
  Clone ID: UC-GMROMINSOY104G05_FLI.pep
PFIVFCVFSMAVLPSSSSSLELTISVPGFASSPTLLPSSSVKELDINQVPLEEDWMASNMEDEEESSNGEPPRKKLRLTKEQSLLLEESFRQNHTLNPKQKESLAMQLKLRPRQVEVWFQNRRARYPNNNNE

SEQ ID NO: 42269 - protein, 116 aa, Zea mays
  Clone ID: 700154158_FLI.pep
LPSLSRLMKSAIGEGMTRRDHSDVSNQLYANYAIGKDVQAMKAVVGEEALSSEDLLYLEFLDKFERKFVTQGAYDTRNIFQSLDLAWTLLRIFPRELLHRIPAKTLDQYYSRDASH

SEQ ID NO: 42270 - protein, 202 aa, Glycine max
  Clone ID: LIB3049-043-G8_FLI.pep
EAVAVDISIFYTKHNKLENNTKTLRNKKCIAKRKGDNYAIIIIISLSTFSTDAACELNVLGHDGHSLGVDRTKVGVFKQTHQVSLRSFLKRKNRVTLEPQISLEVLRDFTNKTLKGELADQKLCALLVFSDLTKSNSSRTIAMRLLDSTGGRCRFSCSLGGELLPRSLPTGGFASGLLGTSHERRLREKIDSARCERIMLCD

SEQ ID NO: 42271 - protein, 244 aa, Zea mays; identical to SEQ ID NO: 36891
  Clone ID: LIB3151-044-A5_FLI.pep

SEQ ID NO: 42272 - protein, 265 aa, Zea mays
  Clone ID: LIB3245-520-D1_FLI.pep
NKTVLEPSSPTSASMAHVHVSSPPRAVSTGTHPVRNSVRHLQAGRQPTSCSGSGHPECLPEPDAEAVLQAGLLVGQTRRRLLHHRDELVVVYAAVVVLVDLPDHVLQLDVAQAELLARHLQLVGGDVSAAVLVEVLERREQVVLPLHLVQVQRGRDELAVVDRAVVVHVRGLHQRVDLRLLEVGAHLLQPHLELLERDLPAVVRVDHLEHLLQPRDLVLGQVLCDHPESHLFQLVHGRELLHTRKNSRVQRLVRSQTTNLDPRMP

SEQ ID NO: 42273 - protein, 429 aa, Zea mays
  Clone ID: 700431229_FLI.pep
TTRPRDPSTFFLEKVAAAMNALAATTRNFRRASKLLGLDSKLEQSLLIPFREIKVECTIPKDDGSLATFVGFRVQHDNARGPMKGGIRYHNEVDPDEVNALAQLMTWKTAVAAVPYGGAKGGIGCSPGELSRSELERLTRVFTQKIHDLIGTHTDVPAPDMGTNAQTMAWMLDEYSKFHGHSPAVVTGKPIDLGGSLGRDAATGRGVMYATEALLAEYGKCISGSTFVIQGFGNVGSWAARLIHEKGGKIIAIGDVTGSIRNTAGIDIPALVKHRNEGHAMKDFDGAEVLGSTELLVHDCDVLVPCALGGVLNKDNAPDVKAKFIIEAANHPTDPEADEILAKKGVVVLPDIYANSGGVVVSYFEWVQNIQGFMWAEEKVNDELEKYMSSAFQHMKAMCKSLDCDLRMGAFTLGVNRVARATLLRGWEA

SEQ ID NO: 42274 - protein, 304 aa, Zea mays
  Clone ID: LIB3245-586-B11_FLI.pep
SHQPLQLQDSVLVSGCASVGVVGCLRCVAVQRTLTDGEESKMEAYAAGAKFDCLLFDMDDTLYPLSLGINLACRKNIQEYMLKKLRIEESQVPRMCLDLYREYGTTMAGLKVLGYDFDYDDFHACVHGTLPYEKVKPDPVLRQLLLSLPQRKIIFTNSDKAHAARVLEKLGLQDCFQGIVCFETLNPPPPTETEKNSGSAGTILCKPSLASMEAVIEIAKLDAERTVFFDDSARNIAAGKAAGFRTVIVGSSALVPGADVALESIHNIKEALPELWEVAAAAAAGDRVDAVLRSTTAVETTVIA

SEQ ID NO: 42275 - protein, 132 aa, Zea mays
  Clone ID: 700620982_FLI.pep
YNTFTRRLHCTGRQQSPPAACCLLFPPLAWSTSSPRYTIFLRGQIASMVSELQNGGEWCLTCNKRSTWVLAGHARVQELLQRLEELLLLEGLRDVPVHPVLRALLMGGLDDIGGHCKDRQVPSRRPCRAICF

SEQ ID NO: 42276 - protein, 311 aa, Zea mays
  Clone ID: 700801224_FLI.pep
QEVGFQRQKLSARRAQGAGTSMAGKEILHKVKDKVKDAFSSSGPETGKGKTKLSGKRVKHGYHLVKGKSNHPMEDYLVAEYRQVGEHDLGLFAIFDGHLGHTVPDFLSSHLFNNILSEPEFLSDPETAIRNAYQLTDQKILENAAELGRGGSTAVTAILIGSDKFVKLVVANVGDSRAVISKNGVAKQLSVDHEPNMERQTIEQKGGFVSNLPGDVPRVDGQLAVARAFGDRSLKKHLSSDPYVVEQTIDENTEFLILASDGLWKVMSNQEAVDEIKDCKDAQAAAKHLTEQAVNRKSKDDISVIVVKFMC

SEQ ID NO: 42277 - protein, 404 aa, Zea mays
  Clone ID: 700154167_FLI.pep
NSELQVSLLVATTGRDRRRRRRLSSLEMADGEDIQPLVCDNGTGMVKAGFAGDDAPRAVFPSIVGRPRHTGVMVGMGQKDAYVGDEAQSKRGILTLKYPIEHGIVSNWDDMEKIWHHTFYNELRVAPEEHPVLLTEAPLNPKANREKMTQIMFETFNVPAMYVAIQAVLSLYASGRTTGIVLDSGDGVSHTVPIYEGYALPHAILRLDLAGRDLTDSLMKILTERGYSFTTSAEREIVRDIKEKLAYIALDYEQELETAKNSSSVEKSYELPDGQVITIGAERFRCPEVLFQPSMIGMEAAGIHETTYNSIMKCDVDIRKDLYGNIVLSGGSTMFPGIADRMSKEITSLAPSSMKIKVVAPPERKYSVWIGGSILASLSTFQQMWISKEEYDESGPAIVHRKCF

SEQ ID NO: 42278 - protein, 231 aa, Glycine max
  Clone ID: 700831325_FLI.pep
TPYDERVENHENHAVHATHQIAESWIHASRKVLERIADAVLSRTFLKAAEDCYAVERIWKLLAEVEDLHLMMDPDDFLRLKNQLSVKSSSGETASFCFRSNELVELTKMCRDLRHKVPEILEVEVDPKGGPRIQEAAMKLYVSKSEFEKVHLLQAMQAIEAAMKRFFYAYKQVLAVVMGSSEANGNRVGLSCDSADSLTQIFLEPTYFPSLDAAKTFLGYLWDNNDNNKWI

SEQ ID NO: 42279 - protein, 326 aa, Glycine max
  Clone ID: 700832588_FLI.pep
DGSFIIVVLPPLPFDHIYPSQSLPTFYEHWPTPTLPLFSLSSFKLLTPMKIQCDVCNKHEASVFCTADEAALCDGCDHRVHHANKLASKHQRFSLLRPSPKQHPLCDICQERRAFTFCQQDRAILCKECDVSIHSANEHTLKHDRFLLTGVKLSASAMLRSSETTSDSNSNPSLLNFSHQTTLLPPSSTTTTTTINNNNNKVAVEGTGSTSASSISEYLIETLPGWQVEDFLDSYSVPFGFCKNDEVLPRFDGEMEGHLSSFSTENMGIWVPQAPPTLMCSSQMDRVIVHGETNIKGSSRSRLKDDNFTVPQISPPSNSKRARFLW

SEQ ID NO: 42280 - protein, 220 aa, Zea mays
  Clone ID: 700154395_FLI.pep
MLSRGFKDQIYDVYRYLPPELQVVLISATLPHEILEMTSKFMTEPVRILVKRDELTLEGIKQFFVAVEKEEWKFDTLCDLYDTLTITQAVIFCNTKRKVDWLTEKMRTNNFTVSAMHGDMPQQERDAIMGEFRSGATRVLITTDVWARGLDVQQVSLVINYDLPNNRELYIHRIGRSGRFGRKGVAINFVRKDDIRILRDIEQYYSTQIDEMPMNVADLI

SEQ ID NO: 42281 - protein, 234 aa, Glycine max
  Clone ID: 700889682_FLI.pep
SLSLFILEVFFHFIPFFLFLFTNHYLFNPRMASAGDLFRHGLPEVGGAGKLHVLAVDDSHVDRKVIERLLKISSCKVTVVESGSRALQYLGLDGEKSSIGFDSVDVNLIMTDYSMPGMTGYELLKKIKESSVFREVPVVVMSSENILTRIDSCLEEGAEEFLLKPVKLSDVKRVTDFIMRGEGMKGVKRSKKRSRSDDCIPSLSTAFASVSHPCDLSSPPSPCVSQSKKSRLSI

SEQ ID NO: 42282 - protein, 259 aa, Glycine max
  Clone ID: 701098982_FLI.pep
ESYADIGGLDAQIQEIKEAVELPLTHPELYEDIGIKPPKGVILYGEPGTGKTLLAKAVANSTSATFLRVVGSELIQKYLGDGPKLVRELFRVADDLSPSIVFIDEIDAVGTKRYDAHSGGEREIQRTMLELLNQLDGFDSRGDVKVILATNRIESLDPALLRPGRIDRKIEFPLPDIKTRRRIFQIHTSRMTLADDVNLEEFVMTKDEFSGADIKAICTEAGLLALRERRMKVTHADFKKAKDKVMFKKKEGVPEGLYM

SEQ ID NO: 42283 - protein, 242 aa, Glycine max
  Clone ID: 701099233_FLI.pep
LHFPSVFPPSSTQKYIISMEKVNFVKNGELRLPPGFRFHPTDEELVLQYLKRKVFSCPLPASIIPELHVCKSDPWDLPGDLEQERYFFSTKVAKYPNGNRSNRATNSGYWKATGLDKQIVTSKGNNQVVGMKKTLVFYRGKPPNGSRTDWIMHEYRLILNASQSQSHVVPMENWVLCRIFLKRRIGAKNGEESNSKVVFYDFLAQNKTDSSSSVASGITHESDEHEESSSSNTFPYTIRRKP

SEQ ID NO: 42284 - protein, 214 aa, Zea mays
  Clone ID: 701158984_FLI.pep
FRHIYRGQPRRHLLTTGWSSFVNKKKLVSGDAVLFLRGDDGELRLGVRRAIQLKNEALFEDFNSDSTKRHSLTAVADSLKNRSVFHISYNPRATASEYIIPYAKFLKSLNHPVCIGARINFQCHNEDVSERRSGVVVRISEIDPMKWPGSKWRSLLVRWEDGAECNGQDRVSPWEIEIAGGSVSVSHSLSASSSKRTKLCPQGNLDVPAMCKLS

SEQ ID NO: 42285 - protein, 223 aa, Zea mays
  Clone ID: LIB148-051-E1_FLI.pep
GPALFRHSQGGQEISGHGLDSGDDLRRHLIRPLLCRGWHRRRQRPPRLRHPGPRLLRHLPRRVRDQCHRVHRGRQGEAGVQALRHRQARALHRRGDRRERHVHDRAQGQPRGGHLRGGLGGEPAQGLRPGAGGQGPRRRPAHQERRHQRQPAPRQPARLPQGRAAAHLRLAAQTVGLGRRRRSVIAHRRRRSICNSTSSTTDRSRRRLAGTKPQILFTWITNM

SEQ ID NO: 42286 - protein, 202 aa, Glycine max; identical to SEQ ID NO: 42270
  Clone ID: LIB3049-001-C6_FLI.pep

SEQ ID NO: 42287 - protein, 181 aa, Zea mays
  Clone ID: LIB3245-009-A11_FLI.pep
APSESISRELSRGQGEIDFGVVVDKRRRLSPEEDGSGGCSNSAVADGDNSHVVCVQRGRNTEETRPRKGANSSTTPSCQVDGCQADLSGARDYHKRHKVCEAHTRTTVVCINNVEHRFCQQCSRFHLLHEFDDGKKSCRSRLAQHNGRRRKVQPQPAVNGNSMNEDQSLSSTLFLLLKQLS

SEQ ID NO: 42288 - protein, 275 aa, Zea mays
  Clone ID: 700095459_FLI.pep
EPDGAKDQEPSSPTWGPSVATSVLVQVGDESSSLGNLRLRLSEESASVQQQRSCSQRSSRPPPAFRVKEEWDDSTVSSNVSRMRIQNRIEATTRRERALAYAFSQQLRSCGGGTSKKRSSARAEGQGEFNVGWSWLERWMATRQAEPADDCASRNADTGSATGRRVVVVRRRSDLAVEEKESCASNDVSVVSFDASSGLACHRPTGNKSRLKGGRSLPRRKQVAASASASDHRFQERSHKVSKKGHQRVEQEPHKDRFDAVAALDDDACQPPTDY

SEQ ID NO: 42289 - protein, 299 aa, Zea mays
  Clone ID: 700097075_FLI.pep
DAVAHGVDGEVGEEQHEGDHKGRGAGEDVLEEPDEGGVHLGVDARQDALQVLVQERLPHLQREALELPDDEHHRGEGAPHRGARGLAGAVDQPLVPPPLLQLLLLPPFEHPQGQRQPDAARAPLHARRPPAAAGARVLTHRELLDPPRELLVVPAVAPDAVDARAESAPDRVLPAAPPAETGGVPASQRRLAPRQPGAKNGMLRRRGNGRGRRRRRRGGGGGRRRAGRRDHDRRDLDAHGSRPIPATTATMVGNGPRLHNSGRLNARGGSEGGGRWRGNERWPYFRIRKESWSTSPRSS

SEQ ID NO: 42290 - protein, 221 aa, Zea mays
  Clone ID: LIB3136-006-B7_FLI.pep
SVMEYEEHEKRAWSVDFSRTDSSMLVSGSDDCKVKVWCTNQEASVINIDMKANICSVKYNPGSSFYVAVGSADHHIHYFDLRNPSSPVHIFGGHKKAVSYVKFLSNNELASASTDSTLRLWDVKDNCPVRTFRGHKNEKNFVGLSVNNEYIACGSETNEVFVYHKAISKPAASHRFVSSDPDDADDDPGSYFISAVCWKSDSPTMLTANSQGTIKVLVLAP

SEQ ID NO: 42291 - protein, 376 aa, Zea mays
  Clone ID: 700099354_FLI.pep
ARNPPMAHRVLLLLSLASAAAVAAAVDAEDPLIRQVVPGGDDNDLELNAESHFLSFVQRFGKSYKDADEHAYRLSVFKANLRRARRHQLLDPSAEHGVTKFSDLTPAEFRRTYLGLRKSRRALLRELGESAHEAPVLPTDGLPDDFDWRDHGAVGPVKNQGSCGSCWSFSASGALEGAHYLATGKLEVLSEQQFVDCDHECDSSEPDSCDSGCNGGLMTTAFSYLQKAGGLESEKDYPYTGSDGKCKFDKSKIVASVQNFSVVSVDEAQISANLIKHGPLAIGINAAYMQTYIGGVSCPYICGRHLDHGVLLVGYGASGFAPIRLKDKPYWIIKNSWGENWGENGYYKICRGSNVRNKCGVDSMVSTVSAVHASKE

SEQ ID NO: 42292 - protein, 112 aa, Zea mays
  Clone ID: LIB3136-011-A5_FLI.pep
EDIRDLSREECVTYLRRRSSCFSRGASIYRGVTRRQKDGRWQARIGLVAGTRDIYLGTFKTEEEAAEAYDIAAIEIRGKNAVTNFDRSNYVDKGMHCIEGEGLRLLASKPEE

SEQ ID NO: 42293 - protein, 462 aa, Zea mays
  Clone ID: 700101806_FLI.pep
SLAAGLAVRFLVPRPAEVTPEAWQLLSIFLSTIAGLVLGPLPVGAWAFLGLTATVATRTLPFTAAFGAFTNEVIWLIVISFFFARGFVKTGLGDRVATYFVKWLGRSTLGLSYGLAISEAFISPAMPSTTARAGGVFLPIVKSLSLSSGSKPNDPSAKKLGSYLVQSQLQAAANSSALFLTAAAQNLLCLKLAEEIGVSIGNPWITWFKVSSVPALLGLLVTPYLIYKIFPPEIKDTPEAPALAAEKLKNMGPVTKNEWVMIGTMLLAVSLWIFGETIGVSSVVAAMIGLSILLVLGVLNWEDCLNEKSAWDTLAWFAILVGLAGQLTNLGIVSWMSNCVAKVLQSFSLSWPAAFVVLQASYFFIHYIFASQTAHVGALYSAFLAMHLAAGVPALMSALALAYNANLFGALTHYSSGQSAVYFGAGYVDLPDVFKLGFITAAINAVIWGVAGALWWKFLGLY

SEQ ID NO: 42294 - protein, 149 aa, Arabidopsis thaliana columbia; identical to SEQ ID NO: 40736
  Clone ID: LIB3175-017-E3_FLI.pep

SEQ ID NO: 42295 - protein, 112 aa, Zea mays
  Clone ID: 700101827_FLI.pep
LFVPSVKVWDRADEFIPERFDLEGPVPNESNTDFRFIPFSGGPRKCAGDQFALLEAIVALAVVLQKMDMQLVPDQKINMTTGATIHTTSGLYMNVSLRKVQQEAELALSESK

SEQ ID NO: 42296 - protein, 163 aa, Arabidopsis thaliana columbia
  Clone ID: LIB3177-099-H12_FLI.pep
FNHPLLLLLLRKTKKQNKTKSAQAKNRWLVPSKPLVSPPEVKLQGSNLLLRLLVNLHQLLVESRNHIVTVLGTVALREIRKYQKSTELLIRKLPFQRLVREIAQDFKTDLRFQSHAVLALQEAAEAYLVGLFEDTNLCAIHAKRVTIMPKDIQLARRIRGERA

SEQ ID NO: 42297 - protein, 301 aa, Zea mays
  Clone ID: 700102026_FLI.pep
VQVFSCLRVNTTQHTCVPQTYSLRNTSSTKELIYPQRSSPSWLFVRTMASKNQVDLESQKPTPMHAVVASAPAAAVPASSGTGSVVAGISDAAPETQPLLAEPNGHSQEEGLEDGGATDDETTQLERAMAQAFRSTAELAKHLPTGAVLAFEVLSPVFTNGGKCDDVNRVMTSWLVGLCAAACFFLSFTDSFHDAKGTVRYAVATRRGLWVIDGTPPPPPAEAAEKRIKFIDFFHAFLSVIVFMSVAMFDGNVGACFNPVISYDIRQVLTAVPLAGGLVGTLLFATFPSTRHGIGFPIHAS

SEQ ID NO: 42298 - protein, 173 aa, Zea mays
  Clone ID: 700142588_FLI.pep
FEQRSFKSCRIATHIPVGTHASCSPLDPDHCDGLLTASTKADIYQTYTKGVHNEIVCLRISKSSLGDETKSYKLTGYTRSRQERSPCHSGTTSSSLIALFIIFVDTSTSSLGPSLPSVLLSTVLLPSSPAPDVDFWTSVTRAKVPFGESNSGHGVWLVKGRTWLPSTAVEFTC

SEQ ID NO: 42299 - protein, 131 aa, Zea mays
  Clone ID: LIB3356-044-H6_FLI.pep
RPRPSMMLASISTVPARVSADPRPELKKGSVSSSRTTASTTSSACAPARSRSTPTCRHRASTRFASSCRCSGRFGSTPAPPWMAMAQGAMSLVGGGLILSVSMCAGGRAGYLSLLLEGSIDRCSVPRAMRE

SEQ ID NO: 42300 - protein, 195 aa, Zea mays
  Clone ID: 700158908_FLI.pep
GSTATARTAGSSSPARYVYFVTGRRSTPTVFDAPGLAPAAAALLRCTTSRRSWRSTPAATRSCWRPSVSKVVSDSRPVVVTGELVALTDDMSTTHRRRRRLRRACAGKDATADFEDIGHSASAKELMPQYCIGKVDAATFPAKPAYVVTKDDARSSEKAATSAGAWATLLQLAAPVLLLALAFALQQNYARAKAE

SEQ ID NO: 42301 - protein, 175 aa, Arabidopsis thaliana
  Clone ID: LIB35-037-D7_FLI.pep
SKTIIISWYSPLYLSLTLMGLPTDFKELQIPGYVLKTLYVIGFFRDMVDALCPYIGLPSFLDHNETSRSDPTRLALSTSATLANELIPVVRFSDLLTDPEDCCTVCLSDFVSDDKIRQLPKCGHVFHHRCLDRWIVDCNKITCPICRNRFLPEEKSTPFDWGTSDWFRDEVESTN

SEQ ID NO: 42302 - protein, 235 aa, Zea mays
  Clone ID: 700165481_FLI.pep
QFLRACELDPPAAMATNVPSSLVNWLLSFGNDDSLLIHLSTDQVYEGVKSFYKEEDETMPVNMYGKSKVAAEKLIVEKCSNYAILRSSIIYGPQTISPVAKSLPIQWMDGVLSQGQQVEFFSDEFRCPVYVKDMVDVILSLTKTWFPDDGKKVQVLLNVGGPDRVSRLQMAESVAVVRGYNPSIIKSVSASSVNRGVASPPDISMDITKLTQILGIKPISFQDGVRSTLDAEDST

SEQ ID NO: 42303 - protein, 201 aa, Zea mays; identical to SEQ ID NO: 38773
  Clone ID: 700165819_FLI.pep

SEQ ID NO: 42304 - protein, 388 aa, Zea mays
  Clone ID: LIB3180-054-E1_FLI.pep
SASLASLVEARASSADAFTCVVYDSYEDWVLPVARRMGLPAVPFSTQSCAVSAVYYHFSQGRLAVPPGAAADGSDGGAGAAALSEAFLGLPEMERSELPSFVFDHGPYPTIAMQAIKQFAHAGKDDWVLFNSFEELETEVLAGLTKYLKARAIGPCVPLPTAGRTAGANGRITYGANLVKPEDACTKWLDTKPDRSVAYVSFGSLASLGNAQKEELARGLLAAGKPFLWVVRASDEHQVPRYLLAEATATGAAMVVPWCPQLDVLAHPAVGCFVTHCGWNSTLEALSFGVPMVAMALWTDQPTNARNVELAWGAGVRARRDAGAGVFLRGEVERCVRAVMDGGEAASAARKAAGEWRDRARAAVAPGGSSDRNLDEFVQFVRAGATEK

SEQ ID NO: 42305 - protein, 207 aa, Zea mays
  Clone ID: 700165628_FLI.pep
KTSVEEGKLEKAQQTEKMAARRGREWDGDEQGAALPTPAPLGAPVVCLLSSAGDLAAGAFVGSLVGYGKGLITNQGTKACLSIAGSSAKTFAALAGVQSFIMCLLRRLRGKDDMINAGMAGCCTGIALSFPGAPQAMFHSCVTFAAFSCIMDGLSKQQAAMALTLDVKSPTVKYEEGRVIPPFTLPPLLDALDPLGSFCQTLIKPKH

SEQ ID NO: 42306 - protein, 212 aa, Zea mays
  Clone ID: LIB3060-006-G7_FLI.pep
LSRLHTASQAQVARQELNYYVARAKGVGLQPAATTLHPGAAVPPQSWPDATATATTATRPILVTGLSLKVSIWTSLDPRLKNLADQIVPTRKIYSVSLRSTCYVRVQLHLEGSLVAATPLLTPRPFSACERPTTGSLLNPSPRSSSSARRSGPPRTFSTQIPLPVPGNGSRRGGIGNGARRRRGGRRRGRVHGRSWRGGLGRRASRRPPAPR

SEQ ID NO: 42307 - protein, 97 aa, Zea mays
  Clone ID: LIB3159-007-B5_FLI.pep
SDTYKQLARVALVTRAMACGLRRTTANRFTSQRATQAHKTLGVRSFLQQGLEEEAPVAVSEDLHSPGRQGERLQNVASFSVQVPVVVAAARSVRSPS

SEQ ID NO: 42308 - protein, 373 aa, Zea mays
  Clone ID: LIB3060-046-G8_FLI.pep
VAASTEPTAVFTDVGRVNGTSAERFRSAVSGRRANVLGEITQIDTRSLLLEKAKATVRKKLQELNITSSSRFAERRGSEGKLNPCGNNIKVNGVLSDKPGKGVKLCSSRSIEIQVPDTDDKNPEQRRVPVSIDVPDPDFHDFDKDRTEKAFDSDQVWATYDSEDGMPRLYVMVQKVLSMRPFRIRMSFLNSKSNIELAPISWVASGFQKTCGDFRVGRYQVSETVNIFSHRVSWTKGPRGVIRIVPQKGDTWALYRNWSPDWNELTPDDVIYKYEIVEVVDDFTEEQGLTVIPLLKVAGFKAVFHRHMDPKEVRRIPKEGLFQFSHRVPSRLLTGEEGNNAPKGCHELDPAATPVDLLKVITELKEDAVGADC

SEQ ID NO: 42309 - protein, 331 aa, Zea mays
  Clone ID: LIB148-015-F3_FLI.pep
GKNDESMEDSTRKCIEMLCAPDGELPEKLRNLEPRLIEHVSNEIMDRDPNVRWNDIAGLEHAKKCVTEMVIWPLLRPDIFRGCRSPGRGLLLFGPPGTGKTMIGKAIAGEAKATFFYISASSLTSKWIGEGEKLVRALFGVASCRQPAVIFVDEIDSLLSQRKSDGEHESSRRLKTQFLIEMEGFDTGNEQILLIGATNRPQELDEAARRRLTKRLYIPLPSLEARAWIIRNLLEKDGLFMLSEEETSAICKLTEGYSGSDMKNLVKDASMGPLREALQTGVEIAKLSKEDMRPVMLKDFENAMREVRPSVSSSELGTYEEWNRQFGSLSI

SEQ ID NO: 42310 - protein, 278 aa, Zea mays
  Clone ID: LIB3067-028-H6_FLI.pep
ITSIVNNCRQIHSLLVARQSNGSSSIRRAESAQIATAMGRGKVVLQRIENKISRQVTFAKRRNGLLKKAYELSILCDAEVALVLFSHAGRLYQFSSSSDLLKTLERYQRHIYASADAAVPSCDEMQNNYQEYVKLKARVEVLQHSQRNLLGEELAPLSPSELDQLESQVDKTLKQIRSRKTQVLLDELCDLKRKEQMLQDANRVLKRKLHEFEAEAASPPQLAWQGGGGMLSHDPPQPEHFFVALESNAPLQPTYHTMDMNQQPEPAPGGCYPPAWMA

SEQ ID NO: 42311 - protein, 267 aa, Zea mays
  Clone ID: LIB143-032-B7_FLI.pep
QKSTKKKRFYKTICGIYFLQEIFPTCSLASMALLQPTLLTPPPLCCCSHGLLYPGFLKLPPKFSNGACCSTARASDRSELAGKSGGLAWRAAGRKGRLLGVTGAGRGPFFGGGGRRMDKGTSRVVGNLAFAAVVTYLAVTGQLRWVIDAIVSLWLLTILLPVLALGAFFFFAGQDILQGDCPNCGKSFQILKSALKDGPQLCPYCTQPFSVQGNKFVRESARFSSGRAATATNGPVFNEFFNRNMRGGNAAPSETIVDVEAEVKDVE

SEQ ID NO: 42312 - protein, 354 aa, Zea mays
  Clone ID: LIB3066-002-D7_FLI.pep
IANRASEILGHKRGEKFVHPNDHVNRSQSSNDTFPTVMHIATAVEIHSRFIPSLQQLHDSLHSKTIEFKDIIKIGRTHTQDATPLTLGQEFSGYTTQVKYGIDRINCTLPRMYQLAQGGTAVGTGLNTKKGFDAKIAAAVAEETNLPFVTAENKFEALAAHDAFVESSGVVNTISASLMKIANDIRLLGSGPRCGLGELILPENEPGSSIMPGKVNPTQCEALTMVCAQVMGNHVGVTIGGANGHFELNVFKPMIAAGLLRSLRLLGDASVSFEKNCVRGIQANHKRISQLLHESLMLVTSLNPKIGYDNAAAVAKKAHKEGTTLKEAALDLGVLTEQEFHELVVPEKMIGPSD

SEQ ID NO: 42313 - protein, 257 aa, Zea mays
  Clone ID: LIB143-035-G12_FLI.pep
QARPKQRSDGQGPPQRRGVRPGRGRGRAAHGADGVAQVAALQLRRLHRLRRPRRPGLPRGLLRRLVPPPAPRRRRAHGRHGEAAAHRAPQDAVRLSGALGHLRRRRRRRHDGRGHAAAVRPPPPHRRVLQDAGARPPPPPLRRRGNRRTVVRGGGFLRSARLRGARRPRGRRRRGGAEEGGRRRRRVPPRRGRATPRRAAVHGARHRPRRHVPRRLVGAVAAAHELAGVVLSLAIEATRWSGAHIPGTLPVTRVPLQ

SEQ ID NO: 42314 - protein, 147 aa, Zea mays
  Clone ID: 700168142_FLI.pep
TRIPWCTILGHGKAVSYVRFLDPDTLVSASTDNTLKIWDLNQTNCSGLSTDSCRLTLNGHTNEKNFVGLSVHDGYITCGSETNEVFSYYKTFPMPITSHRFGSIDPITGQVTNEDNQQFVSSVCWRGKSNMVVAANSSGSIKVLELV

SEQ ID NO: 42315 - protein, 126 aa, Zea mays
  Clone ID: LIB3150-023-F1_FLI.pep
IGFYSSSSTLVHVSTTVRSFAQAWNLAVFGLVRVKQVVIRQLFSGRDVSLRNKNDLAPVTTDGHDPSIAAWHTRVINQARYVSFASSIDDNIFTYLEQIAILFFSMVPCFPQISNTLSNLFTTILN

SEQ ID NO: 42316 - protein, 183 aa, Zea mays
  Clone ID: LIB143-013-C11_FLI.pep
NTCSVFFDEVDSLTTKRGKEGGWVVERLLNQLLIELDGAGQRKGVYVIGATNRIDMIDDAMLRPGRFGKKHYVPIPGARERVSILKALARRIPVSSTVDLDVLALREECSNFTGADLASLVDEAAMLAMAERWMYLDSRTSTSPSSLIEPSHFEEALSKVKPSISKKQKRLYEKMRKKHLSTT

SEQ ID NO: 42317 - protein, 378 aa, Arabidopsis thaliana
  Clone ID: LIB24-131-F9_FLI.pep
KMAEADDIQPIVCDNGTGMVKAGFAGDDAPRAVFPSVVGRPRHHGVMVGMNQKDAYVGDEAQSKRGILTLKYPIEHGVVSNWDDMEKIWHHTFYNELRIAPEEHPVLLTEAPLNPKANREKMTQIMFETFNSPAMYVAIQAVLSLYASGRTTGIVLDSGDGVSHTVPIYEGFSLPHAILRLDLAGRDLTDYLMKILTERGYMFTTTAEREIVRDIKEKLSFVAVDYEQEMETSKTSSSIEKNYELPDGQVITIGAERFRCPEVLFQPSFVGMEAAGIHETTYNSIMKCDVDIRKDLYGNIVLSGGTTMFSGIADRMSKEITALAPSSMKIKVVAPPERKYSVWIGGSILASLSTFQQMWISKAEYDEAGPGIVHRKCF

SEQ ID NO: 42318 - protein, 347 aa, Zea mays
  Clone ID: LIB3060-024-B5_FLI.pep
APPPASLRCLASSSVEEEEEENMCPGSVESSSAAAAGKSVCVMDAAGPLGHALVDRLLRRGYTVHAATYARDGEEGAAAAALLGHLSCAADACRHRLKLFRADPFDYHAIADAVRGCAGVFCMFNTPDDQAQCDESTVETEVRAAHNVLEACAQTDAMERVVFTSSVTAVVWSGAGAGAHREEVADERSWSDLAFCRKFKLWHALAKTLSEKTAWALAMDRGVDMVAINAGLLLAAPGLGLTAAHPYLKGAPDMYDGGVLATVDVGFLADAHVAAYESPTAYGRYLCFSNAVCRPEDAVKLAQMLSPAAPRSPPPSDELKVIPQRIQGKKLNKLMLEFASGVYGELD

SEQ ID NO: 42319 - protein, 240 aa, Arabidopsis thaliana
  Clone ID: LIB24-092-H5_FLI.pep
EGDAYRIPTKQNMRMALYWLVQGCTAGDSLVFHYSGHGSRQRNYNGDEVDGYDETLCPLDFETQGMIVDDEINATIVRPLPHGVKLHSIIDACHSGTVLDLPFLCRMNRAGQYVWEDHRPRSGLWKGTAGGEAISISGCDDDQTSADTSALSKITSTGAMTFCFIQAIERSAQGTTYGSLLNSMRTTIRNTGNDGGGSGGVVTTVLSMLLTGGSAIGGLRQEPQLTACQTFDVYAKPFTL

SEQ ID NO: 42320 - protein, 206 aa, Zea mays
  Clone ID: LIB3062-039-B2_FLI.pep
LNIGIALWLAAGGDGWVDGSICRMQDGSRYKYRSRSRVLIVGSGADEQCAGYGRHRTKYRLGGWNALDQEMRLDVQRIWKRNMGRDDRCISDHGKEARFPFLDENVIKTLLEIPLWEIAKLDEPVGRGDKKILREVARLLGLQEAALQPKRAIQFGSRIARESNRKNFGSNRAANQASAGSVQIHQSPASPVASATRQPFLTNNQP

SEQ ID NO: 42321 - protein, 112 aa, Zea mays
  Clone ID: LIB3059-045-F3_FLI.pep
GNGGSRSTTCSVTARSERDIGSRRTGFVSSTAGRNGGFRLFVGATEDELLPVLSVAAVVGAEPEPREKGPGTADGGEKAYGLSLPADMVPTGKRWITDWASHFRLGFQIRMF

SEQ ID NO: 42322 - protein, 405 aa, Zea mays
  Clone ID: 700574919_FLI.pep
VIQPVGRGLNPGQFRDPTTGWIGPDGLWRIAVGAEVDGHSAALLYESEDFVRWDRVDHPLYSSNASAMWECPDFFAAMPGENSGLDMSAAVPDGAKHVLKMSLDGSDKYMVGVYDLKGDAFVPDTVIEDRRLWSRIDYGNYYASKSFFDSKKGRRVIWGWTNETDSSSDDVAKGWAGIHAIPRTIWLDKDSKQLLQWPVEEIESLRGKQVRHQGLELRKGDLFEIKEIDTLQADVEIDFELTSIGSADPFDPSWLLDIEKQCREAGASAHGPFGLVVLASESMEEHTSVHFRVYYRSQEKHMVLMCADLRKSSLRPELYTPAYGGFFELDLEKEKTVVSLRTLIDRSAVESFGGGGRVCIMARVYPAALVDDGGTRMYAFNNGTSTVRVPRLEAWSMRRAQVNKG

SEQ ID NO: 42323 - protein, 334 aa, Zea mays
  Clone ID: LIB3061-038-G8_FLI.pep
PCKSVPAKYSSTDKRRLEGMDASDVKSKGPSGIKEKEPVQVRIDLEDKETTPSFQVLNDKTWSPDPKLSSHMDRLKKQHAEAESYQIRTRNENAVETQSPPKNGVSLLSKPYVDRREQNGDSDLLGHGLRETGVKRKRSHHDVEQNDDLSDSSVESLPGMEISPDDVVSAIGPKHFWKARRAIVNQQRVFAVQVFELHRLIKVQKLIAASPHVLIEGDPCLGKSLAVSKKRLAGDVETQLESAKNDDGVRPTQLEHSKEKTEANQPSPSQDEQAATNGDVAASMHTPSDNKQKSWCIPAPPSQWLIPVMSPSEGLVYKPYTGHCPPVGSLLAPP

SEQ ID NO: 42324 - protein, 74 aa, Zea mays
  Clone ID: 700201408_FLI.pep
RSRTASGRSLPCSEGPFVHDGYSRSNIDRSSMNPMNHQHTVLNHLPSGAPLPGHISQMLPARSDMHTLNCWRPS

SEQ ID NO: 42325 - protein, 267 aa, Zea mays
  Clone ID: LIB3066-053-A4_FLI.pep
GLVAAAAGLGRRRRRRRLVLGADGVQRLHVLLHPLLLRPPRRLHLPFGGDGVQLHQLVHQRLGQRHHVRVHDLAALAHDRLQRRHLGCELVDVEGGAGDGLGGALGLAGPALLEEALGLGGGVLEHDHLGAVLDAGHVQERLGVPLLVLVHHLLVVRVQARLLRQQLLELAEGCLGVDVDLVVDAVELDLEADGGHGRAAGGWVRVGAPLLHQHPAGPDLPHLLLGHRGGLLRRREGHSLLPVRAHHLGLTLSPSDPLLVLLVAIVL

SEQ ID NO: 42326 - protein, 140 aa, Zea mays
  Clone ID: 700218523_FLI.pep
VTQCPHEESVASAAVGSAIKVKAAAIVVFTFSGRAARLVAKYRPTMPILAVIFPREGSDPSKWRSYGTTQARQCFAVRGVYPLMGSTDEAETGGLTKEEYGIKLAMSYGRSVGIVKPFDRLIIFEKIGDSSVVKIIECEG

SEQ ID NO: 42327 - protein, 101 aa, Zea mays
  Clone ID: LIB3067-042-B12_FLI.pep
LPMLFQLRYYNLVGAYINRKMTYRGKFYVITVKRRRLSLAPIYHCIEFVLLRSPDGFFLRMTGVTRSKSSLSRFWCRSSCSLNNSAFSSSRCVTSDSSSAI

SEQ ID NO: 42328 - protein, 111 aa, Zea mays
  Clone ID: 700208767_FLI.pep
RSRCVPLGYSGKRLLSTGAYTVKEMLATRLARMLTTLSGKRLAKATPRMMTREKRMMELNGRTMDTGKISVRKAEEQGKLNLYSRGSQTEQLPKQLLGLMKSAALSSIRSF

SEQ ID NO: 42329 - protein, 294 aa, Zea mays
  Clone ID: LIB3068-058-H12_FLI.pep
LGFSYVRVAPKAPASNSVLKKKSAAAKGTTVTGTDADLRRLSMDAARELLLKFGVPEEQIDKLTRWHRIAMVRKLSSEQAASGITIDEIPVSKFARGQRMSFLQLQQQTREKCQEIWDRQVQSLSALDGDDNASDTEAHSDLDSFAGDLENLLDAEEFDDEDTSTADLRIDKADGMRGLKMRRCSTQAQINKEIEDDETEASLAKKLLEDDGNDVKRKKQPVELTNCGTSLVANKMKQSKTGQTIKSSGYAGALTPKENTPREGKEVENSFVEGGLSSKLKPKMALDVNETVLV

SEQ ID NO: 42330 - protein, 163 aa, Zea mays
  Clone ID: 700210648_FLI.pep
LPQPPVHHLRDSSELDDDDIIFEHSGSQSDRKTSGSMASSDVLTVNQLIESVHETARQVANVPVPANPVPYDQMKSQCEALVMEKQQKMSVLLSLKHSMTDSHGSAGVDGLETNESSLLSEPELQSTRKGRMRRCDSASSESDCSFRLPPASPYDKFLKAAGR

SEQ ID NO: 42331 - protein, 201 aa, Zea mays
  Clone ID: 700212261_FLI.pep
SPPLRLSVSAMAPAAAFLSACAAGSIPRAPFLIPRPLLLPIPLSPARWDRSRSCSLFGVGANTRRAPTLRRNASTETVVPYVPGSGKYIAPDYLVKKVSAEEVQELLRGQRKVPLIVDFYATWCGPCVQMAQDIEMLAVEYEDNALFVKVDTDDEYEFAKDMQVRGLPTLYFFSPDQNKDAIRTEGLIPMDMIRNIIDNEL

SEQ ID NO: 42332 - protein, 275 aa, Zea mays
  Clone ID: 700214553_FLI.pep
ENLFRFGDYDGTGSDVLLQHPLGVVYANDNQVYIADSYNHKIKKLDPVTRKVTTIAGTGSAGYRDGPGLTAQLSEPAGLVEVGDGRLLVADTNNNAIRYITLSDKGAEVKTLELIGVQPPSPKPKVLKRLRRRLSADTDVINVDGGSSKEGFLSLAVTVPDGYHFSKEARSKFDVETEPPNAVEIEPANGFLNSEGLASLKFRRISSSLSMGRINCKVYYCKEDEVCLYQSIAFDVKFREEAEPNPAQITLSYTVSPRDNSGSTQLLAARKNAKV

SEQ ID NO: 42333 - protein, 100 aa, Zea mays
  Clone ID: 700202142_FLI.pep
MHATELTTYPVLQANASYASSRTRADAPPPPLQTPATPILPPFSLRTPRRVTKMRAPLHPRGCPRDTAPPWTLIFSCNPTCVKESQEAFDLQVRQQKMLH

SEQ ID NO: 42334 - protein, 405 aa, Arabidopsis thaliana
  Clone ID: LIB24-003-D5_FLI.pep
LSPTPTKSLSLSLVLDFSRFQENMADQSGGLVMMREYRKGNWTLNETMVLIEAKRMDDERRMRRSIGLPPPEQQQDIRSNKPAELRWKWIEDYCWRKGCMRSQNQCNDKWDNLMRDYKKVREYERRRVESSITAGESSSSSAPAGETASYWKMEKSERKERSLPSNMLPQTYQALFEVVESKTLPSSTAVTAVTAAVAAAAAAISSGNGSGGGQIQKVIQQGLGFVVPKVHQIIQQQPVLLPLQPPPPPPPSQPLPRPLLLPPPPPPSFHAQPILPTDSSTDSDTSEYSDTSPAKRRRTMPTTTTAGPSGGGVDVEEVGRSKRDEETTVAAALSRSVSVIANAIRESEERQDRRHKEVMNVQERRLKIEESNVEMNREGMNGLVEAINKLASSIFALASSSRHNN

SEQ ID NO: 42335 - protein, 340 aa, Zea mays
  Clone ID: 700155036_FLI.pep
VVNTAILLRRLLPCIVNGVGKTTGMEYPERPGQPLCEYYAKNGTCKFGSNCKFDHPRESGFVPVALNNSGFPLRLGEKECSYYMKTGHCKFGGTCKFHHPELGFLTETPGMYPPVQPSPISSPHPYPHHSNWQMGRPAVVPGSFLPGPYPPMMLPPTVMPMQGWNPYVSPMNQTTPAGGQQAVPAGPSYGLSHQEPTSAVTYGSHYAQLYSSGTSSSNIQEYVFPERPGQPECEHYMKTGTCKYGAACKYHHPQYFSGPKSNCILSPLGLPLRPGSQRCAYYAHHGFCKFGPTCKFDHPMGTPNYSLPAPSLTDLPVAPYPHTFSVTPIAPYLLPPDPRP

SEQ ID NO: 42336 - protein, 227 aa, Zea mays
  Clone ID: 700095188_FLI.pep
EKHNMFFCKSCPLESIRNEPSPELCRGHIIRNFIKECGSKCGCNAQCGNRVVQRGITCNLQVFSTREGKGWGLRTLDELPKGAFVCEYVGELLTNTKLHEMTTQNMHNARYSVLLDAGWGPDGVLKDEEALFLDATFCGNVGRFINHRCYDANLVEIPVEKETPDHHYYHFAFFTTKKVEAFEELTWDYGIDFDGDKHPVKSFECLCGSRYCRGRKHSRTRGKAASK

SEQ ID NO: 42337 - protein, 121 aa, Zea mays
  Clone ID: 700237155_FLI.pep
PTFKVRKEKLGDRITALQQLVSPFGKTDTASVLHEAIEYIRFLHDQVASLSSPYLGCGRPVVQQIQQRRQAKDDGGAAAKEDLRSRGLCLVPVASTTTYAVAAGGETAPEFWLPNFGGTLR

SEQ ID NO: 42338 - protein, 211 aa, Zea mays
  Clone ID: 700240638_FLI.pep
RLWEDNYHVCQYPECGRRFTQESKLRAHIRAQHEKAVCLQNPGASAMNHSAIGEQHQPPKPAKVSATPPAPSAERPYVCPYDGCDKAYIHEYKLNLHLKKEHPNHYQDGGPQGAAPSKRSISKSSHRSRPDITARMPPAKVSKRKGGYAAPSPAVNLPEEHLPEEQQWPRKVMYEDDSEETEEEEGGNNVEDRWNYNRAASSDDEETEDEQ

SEQ ID NO: 42339 - protein, 297 aa, Zea mays
  Clone ID: 700236001_FLI.pep
KWRENPSSRDHVILLDISYGVENNPVCLVNEVDDEKGPSRFTYTTNLTYGNSLSSMRKMQGCKCISVCLPGDNNCSCTHRNAGDLPYSASGILVSRMPVLYESGDSCTCSQNCRNRVVQKGTQIRFEVFKTGDRGWGLRSWDPIRAGTFICEYAGEIIDINRVNGEDDYIFETSPLEQNLRWNYAPELLGEPSLSDSNETPKQLPIVISAKRTGNIARFMNHSCSPNVFWQPVLYDHGDEGYPHIAFFAIKHIPPMTELTYDYGQNQRNSIQMGTHSGFRKSKSCLCWSPKCRGSFG

SEQ ID NO: 42340 - protein, 152 aa, Zea mays
  Clone ID: 700202569_FLI.pep
VLDSSFCLPIGKAKIERQGKDVTITAFSKMVGYALQAADILAKEGISAEVINLRSIRPLDRATINASVRKTNRLVTVEEGFPQHGIGAEICMSVVEDSFEYLDAPVERIAGADVPMPYAANLERMAVPQVDDIVRAAKRACYRAAVPMAATA

SEQ ID NO: 42341 - protein, 427 aa, Zea mays
  Clone ID: 700221930_FLI.pep
RRIPSHYHPSRRPPIRSGSSNPGAVMATKRSVGTLGEADLKGKKVFVRADLNVPLDDAQKITDDTRIRASVPTIKFLLEKGAKVILASHLGRPKGVTPKYSLKPLVPRLSELLGVEVVMANDCIGEEVEKLAAALPEGGVLLLENVRFYKEEEKNEPEFAKKLASVADLYVNDAFGTAHRAHASTEGVTKYLKPAVAGFLMQKELDYLVGAVANPKKPFAAIVGGSKVSSKIGVIESLLAKVDILILGGGMIYTFYKAQGYSVGKSLVEEDKLELATSLIEKAKAKGVSLLLPTDIVVADKFAADAESKIVPATAIPDDWMGLDVGPDATKTFNEALDTTKTVIWNGPMGVFEFEKFAAGTEAIAKKLAELTTTKGVTTIIGGGDSVAAVEKAGLADKMSHISTGGGASLELLEGKTLPGVLALDDA

SEQ ID NO: 42342 - protein, 241 aa, Zea mays
  Clone ID: 700209975_FLI.pep
RFSIWADKPTPGNALMNLRYRDERAAPITGKEVRTGLEGPGLSVSQKIFYCISFVGGQYVWSRLQSFSAFRRWGDSEQRPLARRAWALMRNAEVFYRAASFFNLLLFLYGGRYKTVVERILKARLVYGSPNMNRAVSFEYMNRQLVWNEFSEMLLLLLPLLNSSSVKKFLLPFSKDKSGGSSGDEADCPICRSSPSIPFIALPCQHRYCYYCLRTRCSATTSYRCTRCDGAVVAIQRLGSG

SEQ ID NO: 42343 - protein, 105 aa, Zea mays
  Clone ID: 700217015_FLI.pep
RNRDSAMKSRERKKSYIKDLETKSKHLEAECRRLSYALQCYAAENMALRQSLLKDRPLGAPTATQESAVLTGKTCYPSSNLYSFPKLDESICLPSVSPLWLEPWI

SEQ ID NO: 42344 - protein, 175 aa, Zea mays
  Clone ID: 700202976_FLI.pep
RSHMGLIQQDPVIFSTTIRENIIYARHNATEAEMKEAARIANAHHFISSLPHGYDTHVGMRGVDLTPGQKQRIAIARVVLKNAPILLLDEASSAIESESSRVVQEALDTLVMGNKTTILIAHRAAMMKHVDNIVVLNGGRIVEQGTHDSLMDQNGLYVRLMQPHFGKGLRQHRLM

SEQ ID NO: 42345 - protein, 392 aa, Zea mays
  Clone ID: 700208584_FLI.pep
CSPPPPGPAAEIEIRRPRVGAPPPATAAMAGTVTVPGSSTPSTPLLKDELDIVIPTIRNLDFLEMWRPFFQPYHLIIVQDGDPTKTIKVPEGFDYELYNRNDINRILGPKASCISFKDSACRCFGYMVSKKKYIYTIDDDCFVAKDPSGKDINALEQHIKNLLSPSTPFFFNTLYDPYREGADFVRGYPFSLREGAHTAVSHGLWLNIPDYDAPTQLVKPKERNERYVDAVMTIPKGTLFPMCGMNLAFDRDLIGPAMYFGLMGDGQPIGRYDDMWAGWCVKVICDHLSLGVKTGLPYIWHSKASNPFVNLKKEYKGIFWQEDIIPFFQNVTIPKDCDTVQKCYIYLSGQVKEKLGTIDPYFVKLGDAMVTWIEAWDELNPSTPAAANGKAK

SEQ ID NO: 42346 - protein, 372 aa, Zea mays
  Clone ID: 700209575_FLI.pep
CVCSNNSTWVKSTSKLAHTHWLQKSRQVHSAHRPAGPDWDSAAQKHQKVGAGAGAGRAFLACGGCGSSGTANTSLSLSESQVLSLTHPCCCLAAVGTTTTEAGTLSKPRAPTPDHALPRFPGQPAPATTSKRSASRDGTCSCPSSQLSAFDAAENAESSKRRSSTRQPGQMLVRYSEMLLPLPLPPPPPPPDSRDEALAAQEPCAQTAGTASGSAAAPLPRPQSLSSSSGEWGAWASTSAAESLAPTRRKRVCLAVRSLALWMGSSQSGHRMARSSTQNTRPLRSLHTSQSGLASASDSSPEGWARGMRRCLWASLLARWTRRSQAEQSAASSAQQITAAGAAAQTSQSICMARAYRGSAELSRSGRESGRH

SEQ ID NO: 42347 - protein, 249 aa, Zea mays
  Clone ID: 700342458_FLI.pep
FTSDDERDGMVGVPGVSGNIFQEIDGRQFDSPILGSRKQKGGFGKGKGKANFATERERREQFNVKYGALRSLFPNPTKNDRASIVGDAIEYINELNRTVKELKILLEKKRNSADRRKILKLDEEAADDGESSSMQPVSDDQNNQMNGTIRSSWVQRRSKECDVDVRIVDDEINIKFTEKKRANSLLCAAKVLEEFHLELIHVVGGIIGDHHIFMFNTKIPKGSSVYACAVAKKLLEAVEIKKQAYNIFN

SEQ ID NO: 42348 - protein, 127 aa, Zea mays
  Clone ID: 700345248_FLI.pep
QDHHCLTEPASTTEQLAPGGGALSTGATSEGWQRQGLHEATSQTSPRHRGHTLCISFSHLSTHCRWNSCLHGRVLIWSPSSYSVRQIWHMATNQLQIQEPEQTPWKVKVMQVDGEFHPTPQIAPQLT

SEQ ID NO: 42349 - protein, 175 aa, Zea mays
  Clone ID: 700348350_FLI.pep
ATNSHSLAERLRREKISERMKLLQDLVPGCSKVTGKAVMLDEIINYVQSLQRQVEFLSMKLATVNPRLDLNIEGLLSKDLLRFPGVPSSSLGFSPEMMHPQLQLSQPGLIQGGAAGMANPDVFRRIMQAQLSAKDGSQMPPHALNGAFSDVAQQQMAYPSSQDLSIGPSQDGFQM

SEQ ID NO: 42350 - protein, 602 aa, Zea mays
  Clone ID: 700349551_FLI.pep
ILCKVVNVELRAETDSDEVYAQIMLQPEADQSEPTSPDSEPPEPERCNVYSFCKTLTASDTSTHGGFSVLRRHAEECLPQLDMTQNPPWQELLAKDLHGNEWHFRHIFRGQPRRHLLTTGWSVFVSSKRLVAGDAFIFLRGENGELRVGVRRLMRQLNNMPSSVISSHNMHLGVLATASHAISTGTLFSVFYKPRTSRSEFVVSVNKYLEAKNHKVSVGMRFKMRFEGDESPERRLSGTIIGLGSMPANSTSPWANSDWRSLRVQWDEPSAILRPDRVSPWELEPLDATNPQPPQPHLRNKRARPPALLSIAPELPQVFGFLKSPAEPAQAFSFSRPQQTQELYHSNPSSIFSSSLNVGFSSKNDRSTPINSHLYWTMRQTRTESYSASINKAPTEKKQESATSGCRLFGIEIGSAVSPVATVASVGQDQPPALSVDVESDQLSQPSNANKTDAPVASSERSLNESESRQVRSCTKVIMQGMAVGRAVDLTRLDGYADLHRKLEEMFDIQGELSANLKKWKVIYTDDEDDTMLVGDDPWNEFLRMVKRIYIYSYEEAKSLTRKAKPPVVGDTIKPDPNKLPPESDVPHDSNNNAPVAADYQD

SEQ ID NO: 42351 - protein, 78 aa, Zea mays
  Clone ID: 700382010_FLI.pep
ARFINHSCQPNLFVQCVLSSHNDVKLAKVMLFAADTILPLQELSYDYGYRLDSVVGPDGKIVKLACHCGAPDCRKRLY

SEQ ID NO: 42352 - protein, 187 aa, Zea mays
  Clone ID: 700475631_FLI.pep
EMLKEQTGKDDIDVGSIRMTLFNIFGDDASPKIKKFMKVMLGKFHQGQSGEQGSGGGGVFGMVGALAQEFLKAKLEGKEEEAFKPALEQEVHSVDEVYAGSKAWAPNNGILISGCQTNQTSADATTPQGVSFGALSNAIQTILADKHGKVTNKDLVMKARELLSKQGYTQQPGLYCSDEHVHVAFIC

SEQ ID NO: 42353 - protein, 329 aa, Zea mays
  Clone ID: 700441447_FLI.pep
EDLSQQGLCIKCGEGGQLLECNGCFLAAHSSCFGSSATFEGTNFFYCPVCLYKKATEAYKKAKKTYCETRKNLVAFLGTAQATNQPDKQLNGAQPGAANRDEEPHDEQHSKGCGASKGAHENEVYNLAHQDEEHHQQRKKQKINAIGKSYPKEVLTEKVIFQNSDPASINKHSVLQNNNKTPVKDPEKKQQAVNEEARKEGGNDNSSHETGASSPRRCDPPSNQDVEADQDDSLTTSNQSGGSDEIEATSSNDSAKQSSPPWRGMGHNKKGLHEKEPAVSSKSGKGIGKQDQHMHTSRRKKKMHTCKSAIPILLRHLEDANNSVGQKKK

SEQ ID NO: 42354 - protein, 233 aa, Zea mays
  Clone ID: 700455831_FLI.pep
SCHTAGRGASVPTIPYLIPAAAPPRARRRDADPRLADSDHLNGPLAGRRLLAPGPLPCGVLEEYAEQLHALPLLAAALQLADHCAARRGVVTGTRSHVFLHEQPKVELPDVEEAREEAQELLAVPTRLRQLGGQRAVVLLELLVLAGQVVGPWRRRCRRGAALVASASTTATARRGDRRGRRKGQRRRERGVHDVPPPYLDGCGVVDLRRRMPDRRPCSPRRKFSFANSHRSG

SEQ ID NO: 42355 - protein, 119 aa, Zea mays
  Clone ID: 700431146_FLI.pep
VWEKVSPALQRAVQSQMSLMSTPFIDNNDLFETGSTGGMSRALIDRIPKMRFSAASNCDKETDSSCCSVCLQDFGAQQFVRALPQCQHIFHVRCIDNWLLRHASCPLCRAGVHIDHIHM

SEQ ID NO: 42356 - protein, 196 aa, Zea mays
  Clone ID: 701181990_FLI.pep
KGCMMGKGGPENVNCVYRGVRQRTWGKWVAEIREPNRGRRLWLGSFPTAVEAAHAYDEAAKAMYGPKARVNFSESSADANSGCTSALSLLASSVPAAALQRSDEKVETEVESVETEEVVHEVKTEAKNGDLGSVKVTCVIQSAEETVLHKEGDVSYDYFNVEDAVEMIIVELNADKKFEAHEEYLDGDDGFSLFAY

SEQ ID NO: 42357 - protein, 208 aa, Glycine max
  Clone ID: 700751060_FLI.pep
ERKKRRKMSGRVSGKVKWFNDQKGFGFITPDDGSEELFVHQSQIKSDGFRSLAEGESVEFAIESESDGRAKAVDVTGPDGASVQGTRRGGDGGRSYGGGRGGGGGGYGGGGGYGGGGGYGGGGGYGGGGRGGGGGACYNCGESGHLARDCSQGGGGDRYGGGGGGGGRYGGGGGGRYGGGGGGGGGGGSCYSCGESGHFARDCPSSAR

SEQ ID NO: 42358 - protein, 204 aa, Glycine max
  Clone ID: 700875735_FLI.pep
KRRKMSGRVSGKVKWFNDQKGFGFISPDDGSDDLFVHQSQIKSDGFRSLAEGESVEFAIESESDGRAKAVDVTGPDGASVQGTRRGGDGGRSYGGGRGGGGGGYGGGGGYGGGGGYGGGGGYGGGGRGGGGGACYNCGESGHLARDCSGGGGGDRYGGGGGGGRYGGGGGGRYVGGGGGGGGGGSCYSCGESGHFARDCPSSAR

SEQ ID NO: 42359 - protein, 208 aa, Glycine max
  Clone ID: 700841760_FLI.pep
ENKKKRRKMSGRVSGKVKWFNDQKGFGFISPDDGSDDLFVHQSQIKSDGFRSLAEGESVEFAIESESDGRAKAVDVTGPDGASVQGTRRGGDGGRSYGGGRGGGGGGYGGGGGYGGGGGYGGGGGYGGGGRGGGGGACYNCGESGHLARDCSGGGGGDRYGGGGGGGRYGGGGGGRYVGGGGGGGGGGSCYSCGESGHFARDCPSSAR

SEQ ID NO: 42360 - protein, 225 aa, Zea mays
  Clone ID: 700203005_FLI.pep
SPLLPLPPASLFSLRRLGDPCRPPSPAPRRQVPRLSPGPSPAMSTQQEVTENYANPKTCFFHVLFKASALAFYILSTLFVNNFVIIFVITVLLAALDFWVVKNVSGRILVGLRWWNEINDEGESVWKFECLDGESLARMNKKDSWLFWWTLYLTAAAWIILGIFSLIRLQADYLLVVGVCLSLSIANIIGFTKCNKDAKKNIQDWTRNALLSGSVRSHLQSAFGV

SEQ ID NO: 42361 - protein, 84 aa, Glycine max
  Clone ID: 700896888_FLI.pep
VKGGIKLPIGFRFCPTDEELLLHYLKKKAFAQQLPASVISEFDVFQTEPWKLPGWSEFFFSFLQLLHLFFLGCYLVWISAIEKS

SEQ ID NO: 42362 - protein, 99 aa, Zea mays
  Clone ID: 700203027_FLI.pep
HHTKASAHDILQLSQVHQRNLIIVRHIDTPPPPPPLPKLSTATGQPGLVNFPKPIMLIILRQSEAQRINNSRVKQQARRPFVQAQHRHVCVLVDKAHRS

SEQ ID NO: 42363 - protein, 183 aa, Zea mays
  Clone ID: 700205315_FLI.pep
KIGISRYIRGAKQKEVTKPITNISSPNDGTATLQPYSISYNKLGSWLHYDIPIALLLHVTPGGIRRLYRRGGEQERRHRPLQQDAAEGAKRGGGCRQIERSFVVTDGVQRHGEERLRQQLVDRAPAARAVPHWLRDGAQGHGCPAPRQRVPFSADGHVRRLETDRRRAVGAAFYVGVSVDPAS

SEQ ID NO: 42364 - protein, 104 aa, Glycine max
  Clone ID: UC-GMFLMINSOY053C07_FLI.pep
SALAGELCRGDTEQWFFFSPRQEREARGGRPNRTTASGYWKATGSPGHVYSSDNKVIGMKKTMVFYKGKAPTGRKTKWKMHEYKAIEHSDQSNTAPPKVYSSLL

SEQ ID NO: 42365 - protein, 233 aa, Zea mays
  Clone ID: 700205526_FLI.pep
QERNTSATISLSEQRHQHIDIRPLSRIKTIAQRHTRTKPGDRPGPLRTLLPAVAVGRLVGGVTPALPDGDGPRDGLEAERDAAERGQDDNVGGLVAAVRLEDVEPLEDVDGTEDDDGVADGVVVDVPVQPVPVLLVGPEQQREHLQRGQAEDGDADAAVRLVGDAGRLAAELQPQAPAGHAQDVAGALARDVQVEPRRVRGLEHAQVPRDDGADGDQDAPGDRVQHAVDVTAV

SEQ ID NO: 42366 - protein, 264 aa, Zea mays
  Clone ID: UC-ZMFLMO17242H08_FLI.pep
TGDDSVCPVSNCRVRLNTSSLFSRGTLECSLSKLASDFKSDDTCMEMIHAEKRPGMDSSYASSKLRAALDILLSLPKIDPTIDSKCSIGIESEKFDGKGISEQTDTKLTEKAIVFSQWTRMLDLLEVHLKASHVTYRRLDGTMSVAARDKAVNDFNMVPEVTVMIMSLKAASLGLNMVAACHVLMLDLWWNPTTEDQAVDRAHRIGQKRPVTVSRLTIKDTVEDRILALQEKKREMVASAFGEDKSGSRQTRLTVEDLNYLFMV

SEQ ID NO: 42367 - protein, 71 aa, Zea mays
  Clone ID: 700167019_FLI.pep
HINCITCVHLPLQCDFRLRTTNLTSPANACNHLAEQDLSLPYLNNSRLPAAGLQGLDKRHEFLELCVRIVR

SEQ ID NO: 42368 - protein, 407 aa, Zea mays
  Clone ID: UC-ZMFLB73028C07_FLI.pep
SRPPPAMASNGIAPRDVCVVGVARTPLGGFLGALSSLPATKLGSIAIEAALKRANVDPALVQEVFFGNVLSANLGQAPARQAALGAGIPNTVVCTTVNKVCASGMKATMFAAQSIQLGINDIVVAGGMESMSNAPKYIAEARRGSRFGHDTLVDAMLKDGLWDVYNDCAMGMCAELCADNHALTREDQDAFAIQSNQRGIAARDSGAFAWEIVPIEVPVGRGKPPVLIEKDESLDKFDPAKLKKLRPSFKENGGTVTAGNASSISDGAAALVLVSGQKAQELGLQVLARIRGYADAAQAPELFTTTPALAIPKAISNAGLESSHVDFFEINEAFSAVALANQKLLGIPSEKINVHGGAVSLGHPLGCSGARILVTLLGVLREKGGKIGVAGVCNGGGGASALVLELA

SEQ ID NO: 42369 - protein, 186 aa, Zea mays
  Clone ID: 700168647_FLI.pep
AVDDVMWPLCVISEKLFRMAGDDGAQGAPGSPYPDGRISLARRSYYVDVPHVQQAFTWDCGLACVLMVLRTLGIDCCDGIADLERLCRTTSIWTVDLAYLLNKFSVSFSFCTVTLGANPQYSAESFYREQLQEDIDRVDELFGKALDAGISIQVHHRIRHCFSTVIWALHCYCFSGQIEAKFALHE

SEQ ID NO: 42370 - protein, 147 aa, Zea mays
  Clone ID: 700570160_FLI.pep
MISGKAYKAVKDKCGFNGTYTEDCQNAMDLATQEKGNIDNWKDSPETMLPSIKKLISSGTRIWLYSGDMDAVCSFISTQYVLDNLGLPIEAAWRPWRVDNEVAGYVIGYKGLVFVTVRGAGHMVPYYQPRRALALFSSFLEGELPPR

SEQ ID NO: 42371 - protein, 425 aa, Zea mays
  Clone ID: 700235447_FLI.pep
SVSPRSDILSSLQRLQLRSIPFHPSSCSRAMTMAATTTMMSAAAQAATSQLPPGFRFHPTDEELILHYLRNRAASAPCPVPIIADVDIYKFDPWDLPAKALYGDGEYYFFSPRDRKYPNGIRPNRAAGSGYWKATGTDKPIHDAATGEGVGVKKALVFYKGRPPRGSKTNWIMHEYRLAAVAGCTSPLAAYRPPSKFRNVSMRLDDWVLCRIYKKSGHASPMVPPLADYEHLDRDGPSPGGFFDDYFCGSTSLYAAAAPAIGGGAAAAGTTNTTTTPAVVMQQHQQPAALPRLPKIPSISELLWDEYALAQILDPPADVAADHASFAVHPSLNQLLAVGDDGSDLMMFSPPPAAAAGGKRKAMVAMNMSPADECAATAHQHQSPAAKRLNGGSCFDDAPQPASGLPATMSSVLGGGLNHHMLPQF

SEQ ID NO: 42372 - protein, 311 aa, Zea mays
  Clone ID: 700168739_FLI.pep
FWLSVLGVFEWSGNNPVPPEVWLLPYLLPFHPGRMWCHCRMVYLPMCYIYGKRFVGRITPLLLELRKELFKDPYSKIDWDKARNLCAKEDLYYPHPFVQDVLWATLHKFVEPVMMHWPGSKLREKALETVMQHVHYEDENTRYICIGPVNKVLNMLACWIEDPNSEAFKLHIPRVYDYLWLAEDGMKMQGYNGSQLWDTAFTVQAIVATNLIEEFGPTLKLAHNYIKNSQVLDDCPGDLNDWYRHTSKGAWPFSTADHGWPISDCTAEGLKVNAVISITNKEIYFRRLNCLLRSRILCSFSISNSSHINYE

SEQ ID NO: 42373 - protein, 140 aa, Zea mays
  Clone ID: 700171388_FLI.pep
GSEEPDKHRTHSEKRRHKKTHKHKKQYDDSSESDSEPDGKDAKRRRRKEEKRLRKEERRRRREERHRRRAERHASKRKLKNTDTVTMPSDSEKDRDSDSDGDVRKRVSNSGREESDQKKLEIELREKALESLRAKKAINN

SEQ ID NO: 42374 - protein, 114 aa, Glycine max
  Clone ID: LIB3030-007-A1_FLI.pep
GDMGRGRVELKRIENKINRQVTFAKRRNGLLKKAYELSVLCDAEVALIIFSNRGKLYEFCSSSRYAVCVDPFFSVSSLCEILKITFSLLTYEIYLLHYFIFYFFGAFLWICLIC

SEQ ID NO: 42375 - protein, 242 aa, Glycine max
  Clone ID: 701147365_FLI.pep
MEFPNEAIPEGCSQKKTGRGKIGIKRIENTTNRQVTFCKRRNGLLKKAYELSVLCDAEVALVVFSSRGRLYEYANNSVRGTIDRYKKACAASTNPESVSEANTQFYQQEASKLKRQIRDIQNLNRHILGEALSSLSLKELKNLESRLEKGLSRVRSRKHETLFADIEFMQKREIELQNHNNFLRAKIAEHEKAQQRQQDMIPGNVCESTIPPQSYDRNFFPVNLIDSNNQYSNQDQTALQLV

SEQ ID NO: 42376 - protein, 163 aa, Zea mays
  Clone ID: 700171549_FLI.pep
KNDGTSPEPSPLKDKTATEDSYRGSLGSAKGLHGPVTTPVWFSLISLPNQKEDPQLPQLPKTYMRIKDGSLQISSIQRYIMKKLDLANENEVEIICHGEPICPSSTLRGLMELWHRRQPTEPVEASVGAPAEEFVMVLGYRCHRRHPYLAPGTTVAVPPELPS

SEQ ID NO: 42377 - protein, 226 aa, Glycine max
  Clone ID: UC-GMROPIC035H02_FLI.pep
VFLNRMEATNRSSSSTSSSSDCCSSESNPNKPDRIKGPWSAEEDRILTGLVERYGPRNWSLISRYIKGRSGKSCRLRWCNQLSPAVEHRPFSAQEDDTIIAAHAQYGNRWATIARLLPGRTDNAVKNHWNSTLKRRAKGININVNHANNEVAASSSAPSRHFDFEDDPLTALTLAPPGIANGTVAEDAVPDHRASPEGFWDMMRDVIAREVREYVSSNFSDNSGFH

SEQ ID NO: 42378 - protein, 123 aa, Zea mays
  Clone ID: LIB3116-025-B6_FLI.pep
SHLMAESISELQKKERSLQEENKALQKELAERQKAVASRQQQVQWDQQTHAQAQTSSSSSSFMMRQDQQGLPPPHNICFPPLTMGDRGEELAAAAQQQPLPGQAQPQLRIAGLPPWMLSHLNA

SEQ ID NO: 42379 - protein, 198 aa, Zea mays
  Clone ID: 700159205_FLI.pep
SSSLENEPSNVVGSSEGANNSLELWKAESDGSIPCPPKELGGCGGSILDLKCFFPEKMLSNLEERADRIMRSEVFAKAVAKRSDQCPCYDHSGNIRTQDVRETANTKGSSDNHLYCPVATAIKEDDLAHFQMHWTKGEPVIVSDVLHLTSGLSWEPLVMWRALREKKTNGDVEDEHFAVRALDCLDWCEVRSYISLNV

SEQ ID NO: 42380 - protein, 146 aa, Zea mays
  Clone ID: 700193721_FLI.pep
DIHGHSSEATTLFSQNSQATPLWKDDMCWKQTPPRDKFKRLINITGRRIALYLRATSSQCHPTPEMKKEQAAQGVRTLTASNKPGTEERNRYHEHIFHNPFDQQDSLVEMGLYLLSVHGQNLHDEQLLSVVHRLDSFPCHCSEHQE

SEQ ID NO: 42381 - protein, 576 aa, Zea mays
  Clone ID: LIB143-011-G12_FLI.pep
IEWSQLARYSVVVVVVGRTPEEGAREEYRTAASNMAAASSAHLFGLGDGQMQMQPQQQQAPPPPLVNNPAAPPPKKKRNQPADPDAEVIALSPKTLMATNRFVCEVCNKGFQREQNLQLHRRGHNLPWKLKQKNPKETRRRVYLCPEPTCVHHDPSRALGDLTGIKKHYCRKHGEKKWKCDKCNKRYAVQSDWKAHSKTCGTREYRCDCGTLFSRRDSFITHRAFCDALAQESARVPPMGAGMYGTGGMALGLSGMATSQLQSFQDQTHSSATTAISSNPAAQFEHLMQSSTGSPVFRGAQPTSSSSSPFYLGGAEDGHQSLSGHTSLLHGNKQAYHGLMLLPEQQHQAGSNGLLNLGFFSGGSSGQDARLVFPDQFNGAVGGNVRGDGSEHGHSGANTESAAIFSGNLMGNHQMASSAGFSSSLYNSSETVAPAQMSATALLQKAAQMGATTSSGNVNSLLRGLGSSAGGTLNGRPAGAAAGFMAGEGSSSRSTSQAENESQFRDLMNTLAASGSGAAGTAFSGGFPGMDDSKLSTRDFLGVGGGVVRSMGGAAGLPLRHGAAGIGMGSLDTEMK

SEQ ID NO: 42382 - protein, 309 aa, Homo sapiens
  Clone ID: LIB4119-194-C1_FLI.pep
RSPSRDHHGDPSAGPRLREVESRGTTFLLLSFPSSVGKGLSPASASKMKNYKAIGKIGEGTFSEVMKMQSLRDGNYYACKQMKQRFESDRKSGSLALICELMDMNIYELIRGRRYPLSEKKIMHYMYQLCKSLDHIHRNGIFHRDVKPENILIKQDVLKLGDFGSCRSVYSKQPYTEYISTRWYRAPECLLTDGFYTYKMDLWSAGCVFYEIASLQPLFPGVNELDQISKIHDVIGTPAQKILTKFKQSRAMNFDFPFKKGSGIPLLTTNLSPQCLSLLHAMVAYDPDERIAAHQALQHPYFQEQRNSP

SEQ ID NO: 42383 - protein, 233 aa, Glycine max
  Clone ID: 701153567_FLI.pep
GCFCCILDRQSRILLRFHLNKKMVRRKIPIKKIDNVTARQVTFSKRKSGLFKKARELSLLCDSEIALIVFSPGGKLFDYASSSMQKVIERHILWSELNLEKLDQSCPTEQLRCNYADLNKEFGDRIREMRQLNGEELQGLALRELQKLEERLVSSLNRVYKAKVENFTREIDILKQKGNKLMEDNRLMKQRIKPRNEICSVQRHEHEQGRSFDTSLTLGLSFPAGSKYRVSEQ

SEQ ID NO: 42384 - protein, 149 aa, Zea mays
  Clone ID: 700193873_FLI.pep
GAEVCSEHYSISKRDSAEAAMQDAARRALSHYCLVLGGVADGLNMKYYPRRPSGSTGGVIVSPVGEDNPRLSSTVNLAAMLNTELDHALDELSRARAEIAQLRAERAERRHLDDGSPAPIRTQHPYRSPRRGHQSYGNTDCKTKINLEP

SEQ ID NO: 42385 - protein, 80 aa, Zea mays
  Clone ID: LIB83-003-F10_FLI.pep
GKSKHHRVTTEHGVEASSMHDIKSSTFGGTDSGMVWHIPKAHLGSVTKVTTIPNTSLFLTGSKDGDVKLWDAKNSQLVFH

SEQ ID NO: 42386 - protein, 298 aa, Zea mays
  Clone ID: 700194133_FLI.pep
EDKYDREAFGREEAADRVYMHDIMDDGINMSINSIVPDLLDDSIEGVYRFKKDPRADMRAASARLREDDGSAKDGDSHYATEAKDFLNVGIQTKKAVEEVNVKPILKRKEEQADLKPRKRVRFDANVKDRESDMFERDEDSPMVPQSMEVVTGKESTPTLSVSPGVPDYVRNPSKYTRYTLDVPESNDDSNRTALADLHDLLGRSDQNRIHSETAVEIPSSVTFIPRKKSVDAMAVDDGPRAIDSNSSVIGLVAGASDEPDQCEMDEDDSNLSSTPQMHTNSKANSRRYRSSRTDDDE

SEQ ID NO: 42387 - protein, 367 aa, Zea mays
  Clone ID: LIB3079-032-C8_FLI.pep
FLRRMISFSSPSIQIYMSRNSKKKTGRNLQNSRHNNSRRSLKREVVLDEAAVVEAPQRHVLVRRGGGVALHGVGAEQAVQRLVRAGVEEGELVAEEERVEQRVRLGVGGPGRRLVRGALRPRLEVEGRARRGGLVVGRRHALPREVRERVGSGALGGLVLQGRRGRALLLFLEVDDGVGVGGAGALAAGGGPGGGGGGGGEVELGPGPADAARGVVVGARGGLGGGEGAEPDADALDGVADLGGPLAPRAAPDAPVLLLVGRPAPAPLLLARPGLRRRGRGADDEGGLALHHPLVLLLLLGVLVELPERGLEVVRLPPLALAGGPRRAAAARRRGRDELGEDRTTTHLCSLPLCNLYSNSFFSRVFG

SEQ ID NO: 42388 - protein, 202 aa, Zea mays
  Clone ID: 700208031_FLI.pep
SHRGLLPRHAHTPQRIRVRQRTSNPSPMGGEHEEQEGGGAKAGGYSSGLPPSEPPHLQGQPPQEYGYGTFQGPRHPPVGFPQPAPPPGFGGGGGYHNQQQPYAHAETYYAQGYQAVPGYGPVAEGRPVRMRRLPCCGLGLGWCLFIAGFFLAAIPWYIGAFVLICVRVHDHREKPGYVACTIAAVVAAVAIFLGVTKGTHVW

SEQ ID NO: 42389 - protein, 235 aa, Zea mays
  Clone ID: 700801387_FLI.pep
GLLSALGTSLLNRTVESGDNDNNTRCCCPRCHRINHPSNSWTTWSALARTLNRARAASIASFSRAPPVSPVSTNSVWKTVSPRAVMVAVTTRRRSGSSARQILPTASLPLLHQRLTTATLSPACETCTSRIRTGGDDEMELVGLSVKYTDGSGTALGFFLQGTLSTSYAAPPVAAASSVLTAAAAAVPSSEDWRTDISASSRRSCSCRCSMWAMASLTMDALSILVMLGTTLRSA

SEQ ID NO: 42390 - protein, 136 aa, Zea mays
  Clone ID: 700209481_FLI.pep
RHHAKQRRRAFHPRQRQPRRARLRLPPHHLPRGRPPPLRRLVRQLLQARRQDRQARRRRRRRQAREKEEEEQSHVGVVVIVRSSIKHGHTETEHRHRQAQSPSVYSLASSRRPFWFFVCNHVLLKPSLHTCSSSLC

SEQ ID NO: 42391 - protein, 352 aa, Zea mays
  Clone ID: 700211205_FLI.pep
TPSLLLSLLLVAARCCHGWSSFQKPAVTAVIAFGDSIVDPGNNNGLHTVIKANHPPYGKDLFNHEATGRYSNGLIPTDLIAQELGVKLLLPAYLGVDLSPEDLLTGVSFASGATGFDPLTPLVVSVISLEQQLAYFDEYRGKLVDIAGEDETARIIDGALFVVCAGTDDVANTYFTTPFRSAEYDIPSYVELLVGGAEEFLRNVSSRGARKIGFVGMPPVGCVPSQRTLGGGLARACEPKRNEAAQLYNARIQEMVADADRDLATTTVVFLDIYRVLDDLMERGDKYGFSETTRGCCGTGTIEVTGLCDSRFVSVCDNVSQHVFFDSYHPTERAYRIIVKDIFDNYGQVLIG

SEQ ID NO: 42392 - protein, 268 aa, Zea mays
  Clone ID: 700085012_FLI.pep
SYDTKTKPGRSGSDGICKDCGRKADSKGRIICDRCEAAYHVSCLKLAIDEEAPAKWYCPSCVEPDVALKHKNHGRSHEGCDVCEWLVVKPEEPAEDVSEPELAVKTQESSVSSMGEDSEPDLSTTALANLCKNCGTCEDEDRKFMVCGHGLCSFKFYHVLCLKERQIASEKQKNLKCWYCPSCLCRRCFKDKDDEKIVLCDGCDEAYHIYCMDPPCESVPRGKWFCTRCSARRSVQGMQRYEKSILEKVKRAPGANGPKVQASAGPEK

SEQ ID NO: 42393 - protein, 326 aa, Zea mays
  Clone ID: 700211476_FLI.pep
LHMIYIDGQSNPRDFVRPPCMLLLVLGSSLRTQVDRSSSSPISRRSGASSSPRRGGRTPPPPRRPPPRLWPPSCRGARGTRSRRCPGPPPPPRPPRSCAAARAPGPSSPRASRTGRRRRRRGRPSRRGAPCACAPSPPSCTSPSRPGKSRTLRPRPRRHRTACRTRHRRRRRTRRRQRACCRTRRRCHGRIRRRWWCPICCTRCRSRRCRTCCTRRRRCHGRSRRRRTFHTHRRRCGRSRRRRRTCCSHHRRCHGRSRRRRTCRTHRRRCGRSRHRRPTCCSHLRHGRSHQCRTCCCSRCRSRRRRRTCRSRCGRTRPPWFTLIVI

SEQ ID NO: 42394 - protein, 105 aa, Zea mays
  Clone ID: 700151146_FLI.pep
CSNGPAYPVSASSMEALSELGTSSRSAFHCFARALKDATALCKQPTAPIIGHYWKLCLKLPSEPKKNKIKSRVCCVWKSLAFWHGTLFIIVRRAPGLYRIRGPWG

SEQ ID NO: 42395 - protein, 155 aa, Zea mays
  Clone ID: 700170408_FLI.pep
SRHRLRTLRFIREGLSVQKKNKPSTDKAPCYSQMYEHYSQRMTKSISSSIWVGGRTLLIGGESASVSVRRFRYREQPAEEPRDKGPRAVTALAVVLSGALCSSVHIARLVQIFRLFRRQLEPAHGARAVELKPWQDARRVEPMPTGHLLRRGPQL

SEQ ID NO: 42396 - protein, 343 aa, Zea mays
  Clone ID: 700213420_FLI.pep
EIERLKRDKNVLMQELVRLRQQQQTTDHQLQTLGKRLQGMESRQQQMMSFLAKAMQSPGFLAQFVQRNENSRRRIVAANKKRRLPKQDGGLESESSAASLDGQIIKYQPSINEAAKAMLRKILNVDSSHRFESMGNSDNSNNNNILLEDYMPAAQAFESSSSTRNSGVTLAEVPANSGLAYVGTSSAICSPPAAPEMQCPVVLDNKAYKQVASMSAVPPVSSDMGIIPEFSDLADLVSVDILGGAFEMMPGPEFPLPEEGDDGTTMYNNNDEEAQSLPGIINSIWEQFLVGSPLSTDNEEVDSAGGLYAQEDGWSKVGNIANLTEQMGLVSSTNHRDSGNGLY

SEQ ID NO: 42397 - protein, 405 aa, Zea mays
  Clone ID: 700204248_FLI.pep
PKPLAFLSLPPPSATNNFSSDPNPIQRLDPLLQCSPHFSPPPTAAPPTNPQRDTPERVIPDPAAAMRPSLLKSTAELLRRSRGYASSANPERKVAILGAAGGIGQPLSLLMKLNPLVSSLSLYDIAGTPGVAADVSHINSPALVKGFMGDDQLGEALEGSDIVIIPAGVPRKPGMTRDDLFNINAGIVKALCTAIAKHCPNALVNMISNPVNSTVPIAAEVFKKAGTYDEKKLFGVTTLDVVRAKTFYAGKAGVPVTEVNVPVVGGHAGITILPLFSQATPASNSLSQEDIEALTKRTQDGGTEVVEAKAGKGSATLSMAYAGAVFADACLKGLNGVPDIVECSFVQSTVTELPFFASKVRLGKNGVEEVLGLGELNDFEKKGLESLKVELKSSIDKGIKFAHGS

SEQ ID NO: 42398 - protein, 245 aa, Zea mays
  Clone ID: 700217516_FLI.pep
LWALGYGLASTVSQSPGPHRPPVFWSPQISHRGTLPEHQPWRSRRASCAASRSTSTPRSLALSAQFPRPPPRPPRRPPRPPRRPPRSPIASCASSPSISRGRAARSSASPGRHSSARSPTRSSSSRPPTASRISTRAPPSARSTSRRSGSTSCRHRPTRSGTCSRARPGTASSTSTRAWAARSSSRRSCMAWSSLSPSLSRGTSRNGLPRRMARCGFRRCEPSFIPLARSSLCASAIPFYSSSNP

SEQ ID NO: 42399 - protein, 147 aa, Zea mays
  Clone ID: 700217540_FLI.pep
ATSPSIVFRLLIPQPDAAVCPPAFFGLSTPLATHTSGEGAEEVSKFCRSNPDEEMPRIPLIKFPKRNLKAPSAPVPSQPADQHATLMSRLGAKAEAPSSGGIKNYRFSSDVPSPPSHTAVGGPASLLPKRKPLTEEEIEAIMLGGSI

SEQ ID NO: 42400 - protein, 167 aa, Zea mays
  Clone ID: 700209246_FLI.pep
LRLAFIHTIARSSSPELSRQSARDHRLREKQSGVAEMKVQCDVCAAEAAEVFCCADEAALCDACDRRVHRANKLAGKHRRFSLLSPAPPPPPPLCDICQVHSIIHPPIPVQNKSLRTGFFPIVQPARCALPASDRYACRTSGGSCSARRTAPSCAATATCRCTRPAT

SEQ ID NO: 42401 - protein, 298 aa, Zea mays
  Clone ID: 700203093_FLI.pep
ELYVGIPPGVESRLAALTVDTEELQKLSGIRAGADVPAALLNNIAQMASGVPAIFNTLNVRRAIIPAANGHCSARALARYYAALAAGGSVPPPHSSGAMPPLGSHVHTPKFPTAPLKKKKKGAGKKKGAGGGSMGDLKVQDISGGSSDRNGYCQLRTSDADSEAGSGSGGGGRMFGSDRILDAFMGVGEYEGMAHRDGKFGLGFRRYDDAGSGSGRLRCFGHSGMGGSTGFCDVENGFAIAVTVNKLSLGSVTRGVVRLVLEELGLPVPDEYSATGEKGPDMMLNLTTTTTTTPPQLR

SEQ ID NO: 42402 - protein, 171 aa, Zea mays
  Clone ID: 700214091_FLI.pep
RPRPPGPGHVAEEGEVEDGIAVARVDDGVELGAGHQRPDDGLVDLVVQDGALLERVHRADGLVVPVLLVTVRVGDLRAQPREVEHQGVAAAAPLHQPLHRHPDVVLGGHPERVLLVVSEHDDAVAGEGEALAEELPHALDVVDGAPQLAAAPARAAVRDADQDGALLAAAA

SEQ ID NO: 42403 - protein, 397 aa, Zea mays
  Clone ID: 700169543_FLI.pep
LVASWGGVAETSPFGPVSYYPLATALAVCGAECSFLAFTSQHGSLRPPTAAASRAMEQAAMPQVPRVKLGIQGLEVSKLGFGCMGLTGTYNAPLGDEAVAAVVAHAFRRGITFFDTSDAYGPRTNETLLGKALKQLPREQVQVATKFGIGQGAAGMTVCGTPEYVRACCEASLRRLDAGYIDLYYQHRVDTTVPIEDTIGELKKLVEEGKVKYIGLSEASPDTIRRAHAVHPITAVQMEWSLWSRDIEPEIVPLCRELGIGIVAYSPIGRGFFGGRGVTQQVSSESSLQRHPRFTTESLEKNKQIYLKIEDLAKKYQCSPAQLALAWVLHQGDDVVPIPGTTKTKNLDANVDSLKVKLTAEDLKEIGSQIRAEDVAGGRQYNSYAHTSWKYADTPKK

SEQ ID NO: 42404 - protein, 340 aa, Zea mays
  Clone ID: 700217512_FLI.pep
VPSSSVSSSSDLDPLLKGLTEKKLSFRRNVVSLAAELKDVRSKLASQEHLFVRESQTRKLVETKARSMEEEVSKLQKCLQDKDEQLRSSTSSTEQYLHELDDLRTQLSFTQATAEASAASAKSAQMQCLSLLKELNEKDISLKEHGLRVNKLGEQLVLLQRELQARELSQMQLKDEVIRIETDIMDAVAKAGYRSDKDNELLKILSDVSPRNVQNLNNLLNAKDTEIARLREEIRILSAHWTNKTKELESQLEKHRRTDQELKKRVLKLEFCLQESQSQMRKLKRMGERRDKALKELMDQVATKQPNSMCHGNKENFWEGQGFKFIASMSMLALVILAKR

SEQ ID NO: 42405 - protein, 101 aa, Zea mays
  Clone ID: 700195654_FLI.pep
WLDLCHLRLHCPTFCRQVFRDQVGHLLHLHFHQLRASPSSSLLRRHSNHQHQLDSFSHRAWGSFRLRRCSNLHLPNASDSTVALAFMGVKAAAPLCVNFVH

SEQ ID NO: 42406 - protein, 374 aa, Zea mays
  Clone ID: 700239367_FLI.pep
RPPIVACRIPSAILGCRFLQSHSKPPLPEPSRNSPPPPLLAPMAKEPMRVLVTGAAGQIGYALVPMIARGVMLGADQPVILHMLDIPPAAEALNGVKMELVDAAFPLLKGVVATTDVVEACTGVNVAVMVGGFPRKEGMERKDVMSKNVSIYKTQASALEAHAAPNCKVLVVANPANTNALILKEFAPSIPDRNVTCLTRLDHNRALGQISERLSVQVSDVKNVIIWGNHSSTQYPDVNHATVKTSTGEKPVRELVADDEWLNGEFITTVQQRGAAIIKARKFSSALSAASSACDHIRDWVLGTPEGTFVSMGVYSDGSYGVPSGLIYSFPVTCSGGEWKIVQGLPIDELSRKKMDATAQELSEEKSLAYSCLE

SEQ ID NO: 42407 - protein, 119 aa, Zea mays
  Clone ID: 700208195_FLI.pep
SRCQIQTECVVHFIVVHGLGWTSRRPKSLVHTTSPIQMHFDPQDCLKYRSAVTCETLNTELHYLGHKHLVQCSPYLNLQASDLVDVCTRLHCILTSHTKIHQTVLLQTLYGHHPWAENC

SEQ ID NO: 42408 - protein, 356 aa, Zea mays
  Clone ID: 700239649_FLI.pep
IPFLRYFYSLQCRSPSFVMDDDRSMEVVVVGPRPERRRLVDATQEVAEAAGGLRGLDGDGAAVTVLLQLRGGGVQELVHTHAGGNTMSAADGRVERDQAAAGGVVRRRRRRMVHGALGRRRRARDVEVDLGAVLAAVAAGRLRLLVQVDQLRRPPCCLPALQCQYLGLELLVVGEEGVVVGLDGVELAPQRVVVLLQLLRLPPRAPVLEPDGHLPRLQAQRARQLQLALRLQLVPELEVLLQRPHLLHVQPPLLLPGPGVQGAVVRHLVLVRRAAVRLLASDADVVRAAVHRRALPQHWRRHTSEVLQGGALRGGEEGVVVKMKGRSMKVVVFLGVMIGGRLLHLEEEVWREEGRG

SEQ ID NO: 42409 - protein, 227 aa, Zea mays
  Clone ID: 700204926_FLI.pep
ADCFATLEIIHHLWPRIPGKFKDYINSPKPNRYQSLHTVVLTEQTLPLEIQIRTRDMHLQAEFGIAAHWRYKEGERSCCTSVSEIVEWVRWVTWHCQTLNTGYPSSLACDASSKETHTIPSHSEACLLSYSKQCDHKGPVLVILLENEKMSVQEIPQNWTILDLLKRSSNYGMPLRLRLNCHAVHNWNQELKMGDVLELIPSTPCKSRGRTRELHQKFDHRLAVSQS

SEQ ID NO: 42410 - protein, 260 aa, Zea mays
  Clone ID: 700265919_FLI.pep
PQRDKADREPDAAAVHLLQAQGRALQEGKGARRPVRRRPAAAALLRLREAVPLPLAHRAHCQGPGREVRGRDAQQGLGRRSPGAARGAGEGGADVRAHGEGAAVHDGGRRGAVHGAVAGAAGAQPGGGRAQGALREGPQDRRRDRLPPEHYQRTPRGALRVVRQACSFSGLEQRRGRWRVDPTKRRRPGTQTGIQLTLAGLEAGGWIEDYALLHCTLSLCQATSPPAPCWLWFKMVVDQSCPGSNKAQLDVNELRDLMYY

SEQ ID NO: 42411 - protein, 124 aa, Zea mays
  Clone ID: 700197286_FLI.pep
KPQTKEKKPYTPFPPPQQPSKIDLELENGEYFMSDKKKSAKKWQEKLDKQSGRAEENKRKREAAFVPPKENTAGPSKSDKNASDNSEIADIAKSLKRKAKEFRKNEAQESVIAESYIASNDELR

SEQ ID NO: 42412 - protein, 242 aa, Zea mays
  Clone ID: 700381959_FLI.pep
PPSGAHMRSLSLDAAFFDGLSLQGGGGGGGVRGGVAGHKRSGSMDGDTSPFEGESAPPSVLPDYAKKAVPDDKLAELALLDPKRAKRILANRQSAARSKERKIKYTSELERKVQTLQTEATTLSAQLTLLQRDTSGLTTENRELKLRLQAMEEQAKLRDALNDALREEVQRLKIAAGQVPNMNGNPFNGGLSQQQQMPSYFSQPQQMQYFSGHQGQHHHPKHDPQNSSNGGGQPLSDSMDFM

SEQ ID NO: 42413 - protein, 83 aa, Zea mays
  Clone ID: 700213002_FLI.pep
IDFHTWMAHTSQSRTKAISKDLIGHGCSDRHPHSCRHLGYGQSIGHHHGQNHNDRHRHRHRHHTCHLSHHICPLSHHPQMGTL

SEQ ID NO: 42414 - protein, 274 aa, Glycine max
  Clone ID: 700565513_FLI.pep
DGIIREMDRVKGPWSPEEDEALRRLVQAHGPRNWSVISKSVPGRSGKSCRLRWCNQLSPQVAHRPFSPDEDEAIVRAHARFGNKWATIARLLNNGRTDNAVKNHWNSTLKRKKCSAVSDDVTDRPPLKRSASVGPAHLNPGSPSGSDLSDPSLPALSNPSPSAHYRPNLMETASSACDPATSLSLSLPGFGSGSNPVCAPRPVSVSPPSPPPAEPVEQRGKQMFNAEFLRVMQEMIRKEVRSYMSGMEQKNGFRIPTEAIGNAVVKRMGISNIE

SEQ ID NO: 42415 - protein, 229 aa, Zea mays
  Clone ID: 700096952_FLI.pep
ETAPTGTCAVCVVGGERSLIANLSAANCYKSEHLKRPENWALVEKAKYIYIAGFFLTVSPDSIQLVAEHAAANNKVFLMNLSAPFICEFFRDAQEKVLPYADYIFGNETEAKIFAKVRGWETENIEEIALKISQLPLASGKQKRIAVITQGADPVVVAEDGKVKTFPVILLPKEKLVDTNGAGDAFVGGFLSQLVLGKGIEDCVRAGCYAANVIIQRPGCTYPEKPDFN

SEQ ID NO: 42416 - protein, 124 aa, Glycine max
  Clone ID: 700567764_FLI.pep
GLIYRMKQPKIVLLIFVSGKIVLTGAKVRDETYTAFENIYPVLTEFRKNQQWYGSGSFSIAIGYTCCNPWARNIMNQYHCLYYFFFFVQLSEYNCVRCRAEVFLIEMTKFFTQFLFWVIYLYKF

SEQ ID NO: 42417 - protein, 190 aa, Glycine max
  Clone ID: 700897422_FLI.pep
VGLQNVGRHYETWEAGITGPVLLHGLDQGQKDLTWNKWSYKVGLRGEAMNLVSPNGVSSVDWVQESQATQSRSQLKWYKAYFDAPGGKEPLALDLESMGKGQVWINGQSIGRYWMAYAKGDCNSCTYSGTFRPVKCQLGCGQPTQRWYHVPRSWLKPTKNLIVVFEELGGNPWKISLVKRVAHTPAVHGQ

SEQ ID NO: 42418 - protein, 862 aa, Glycine max
  Clone ID: 700654162_FLI.pep
ESVWLKVAKMFPFGQKGQKIKGTMVVMQKNVLDINSITSVGGIVDQGLGFIGSAVDALTFAATKISIQLISATKADGGKGKIGKSTNLRGKITLPTLGAGEQAYDVNFEWDSDFGIPGAFYIKNFMQNEFYLKSLILEDIPNHGTIHFVCNSWVYNSKNYKTDRIFFANNTYLPSETPAPLLKYREEELKNVRGDGTGERKEWDRIYDYDVYNDLGNPDSGDKYARPVLGGSALPYPRRGRTGRGKTRKDPNSEKPSDFVYLPRDEAFGHLKSSDFLAYGIKSVSQDVLPVLTDAFDGNILSLEFDNFAEVHKLYEGGVTLPTNFLSKIAPIPVIKEIFRTDGEQFLKYPPPKVMQVDKSAWMTDEEFARETIAGLNPNVIKIIEEFPLSSKLDTQAYGDHTCIIAKEHLEPNLGGLTVEQAIQNKKLFILDHHDYLIPYLRKINANTTKTYATRTIFFLKDDGTLTPLAIELSKPHPQGEEYGPVSEVYVPASEGVEAYIWLLAKAYVVVNDACYHQIISHWLSTHAIVEPFVIATNRQLSVVHPIYKLLFPHYRDTMNINSLARKALVNADGIIEKTFLWGRYSMEMSAVIYKDWVFTDQALPNDLVKRGVAVKDPSAPHGVRLLIEDYPYASDGLEIWDAIKSWVQEYVSFYYKSDEELQKDPELQAWWKELVEVGHGDLKDKPWWQKMQTREELVEASAILIWIASALHAAVNFGQYPYGGLILNRPTISRRFMPEKGSPEYDALAKNPEKEFLKTITGKKETLIDLTVIEILSRHASDEFYLGQRDGGDYWTSDAGPLEAFKRFGKKLEEIEKKLIEKNKDETLRNRYGPAKMPYTLLYPSSEEGLTFRGIPNSISI

SEQ ID NO: 42419 - protein, 262 aa, Zea mays
  Clone ID: 700101532_FLI.pep
SVMTRDETSVAMPTSFMTGSVVGKRFYRDATVRRADDGNGWTVMLDYRTLKSPAKRVLKLPSRALAMAIAAEWEYQESDGIRPFTMPLMKLACTALERVPLTRRKVIDNLMKKFHQDLVFCRSPADSELTIGVHQKQKEKIDPILEWVDTEFGFKPVVYTSFFGGKQDEGLAKAVETVLKKATDCELASIDAMAAAAHSLVIPLAIFRERLGIEEAIELIRLEEDHQVDRWGLVEGGHDVDIADLKVQMSSAVVFLGLSRGL

SEQ ID NO: 42420 - protein, 337 aa, Zea mays
  Clone ID: 700106469_FLI.pep
AMEEEKAAAYYDELNRKGEGARRFKQGLGFSSSSATAFPSKPTASSFLSGFVRAGAAPGPAKQPLPHSRTPSSPHHRSSSPPLSRPRIRSRSRSRSPSRSSRRQSRSRSRSRERRRRSRSRERDRRASCRRSRSRGSRSPSRRSGRSLHLEARRERHGDQRRRHDDGHQSSKGRSDRDGGKMDYSRLIKGYDKMTPAERVKAKMKFQLSETAAKDSTLGTATVGWERFQFNKDAPLDEDNDDVEVANDDASLVKNIGKSFRLSAVESKREDKIRDAHDEAIFGVPTTSFVDVEIGGDELKTNHEDGKVEDTESDEPSSSLISDKVPGGIGLRSCGRI

SEQ ID NO: 42421 - protein, 244 aa, Glycine max
  Clone ID: 700909874_FLI.pep
DRPNAPLVLKGITCTFKEGSRVGVVGRTGSGKSTLISALFRLVDPAKGYILIDGINICSIGLKDLRMKLSIIPQEPTLFKGSIRTNLDPLGLYSDDEIWEALEKCQLKETISRLPNLLDSSVSDEGGNWSLGQRQLFCLGRVLLKRNRILVLDEATASIDSATDAILQQIIRQEFVECTVITVAHRVPTVIDSDMVMVLSYGKLVEYEEPSRLMETNSSFSKLVAEYWSSCRKNSSSNLSRQQH

SEQ ID NO: 42422 - protein, 369 aa, Zea mays
  Clone ID: 700097896_FLI.pep
DAAGVDPPLCLPHSGVHDLVVLVRNHQLLAQRRRHGPVHGVGPAQGLERQVRRLLAGDHHGAKRRAHPGGAVNLGDLHSGDDHAGNDLAREAHDLVLGGVHVERLHPRHGADHADVLEPLDAGGAEGPVVAAGADHDLGLHDVGVHAGLRVVVHGHERPVGDDAADAPSPDDEVLHGHGVEQLHVGARQEQAHDRGREERGVLDDHVVLGLVVRHAQLVQEQVRRLAHHHGREQLPAQPRAAARRHRLLHDGDAHGGVLGELVRAGQPRGAGAHDDDVGVGVGDHVRHVATGHLAGHDGLLDGAEPEGRQVVGRVGGGHGHGRADGPRAGAARAGGHHEGRRCGPRGGREPGAREGGLEEARRGGGGHG

SEQ ID NO: 42423 - protein, 241 aa, Glycine max
  Clone ID: 700942657_FLI.pep
LLAAYVNCQKVGAPPEVVGRLEEACASAAVIMAGGTASIGEDPALDQFMEAYCEMLIKYEQELSKPFKEAMLFLQRIECQFKSLTISSSLDTTACNEAIDRNGPSEDVDVQTNIIDPQAEDQELKGQLLRKYRGYLGSLKQEFTKKRKKGKLPKEARQQLLEWWSRHYKWPYPSESQKLALAESTGLDQKQINNWFINQRKRHWKPSEDMQFVVVDPSHPHYYMENVLGNPFPMDLSHPML

SEQ ID NO: 42424 - protein, 124 aa, Zea mays
  Clone ID: 700152189_FLI.pep
VVYLCPEPYPETNTEFLEKNGIRLHQFGIEGRKEPFVNIPDDKIREALKVVLDPRNQPLLIHCKRGKHRTGCLVGCLRKLQKWCLSSVFDEYHRFAAAKARITDQRFMELFDVSSLKHLTPSHC

SEQ ID NO: 42425 - protein, 215 aa, Glycine max
  Clone ID: 700967431_FLI.pep
EREGEERERVMGRGRVELKRIENKINRQVTFAKRRNGLLKKAYELSVLCDAEVALIIFSNRGKQYEFCSGSSLLKTLERYQKCNYGAPEDNVATKEALELSSQQEYLRLKARYEALQRSQRNLMGEDLGPLSSKELESLERQLDSSLKQIRSIRTQFMLDQLSDLQRKEHFLGESDRDLRQRLEEFQINPLQLNPSAEDMGYGRHPDIILIQYQW

SEQ ID NO: 42426 - protein, 256 aa, Zea mays
  Clone ID: LIB148-045-E9_FLI.pep
PNPWLAVPCFLPSSPAFPFLRCCQWWLEMTHMFPREGASSSSTSMSSQRSETHDDRMIAMVLSEEYAKLDGAMAKRLTNLTSIPHVPRINTYFPTYSDATMDHYRLLDRLNAYGLFEVRVSGDGNCQFRALSDQLYRSPDYHKHVRKEIVKQLKKCNTLYEGYVPMKYKKYCKKMKKSGEWGDHVTLQAAADKFAAKICLLTSFRDTCFVEIVPQYQAPQREIWLSFWSEIHYNSLYDARDLPSKYKPRKKHWLLF

SEQ ID NO: 42427 - protein, 245 aa, Glycine max; identical to SEQ ID NO: 39906
  Clone ID: 700997703_FLI.pep

SEQ ID NO: 42428 - protein, 232 aa, Glycine max
  Clone ID: 700846936_FLI.pep
DPTREGLVGCDPPSEKGDIEGETSMNDNTDPADVKRVRRMLSNRESARRSRRRKQAHLTDLETQVSQLRGENSTLLKRLTDVSQKYSDSAVDNRVLKADVETLRAKVKMAEETVKRITGLNPMPHAMSDISSLGLPSFDGRSPSDTSADASVPVQDDPHHHFYQPTLNNPIPSHDPIVNNGLGGISSIENVQQQNAAAVVGGNKIGQTASLQRVASLEHLQKRIRGGPPSEQ

SEQ ID NO: 42429 - protein, 150 aa, Glycine max
  Clone ID: 701009174_FLI.pep
SASAFRKQRPKYFEMARTKQTARKSTGGKAPRKQLATKAARKSAPTTGGVKKPHRYRPGTVALREIRKYQKSTELLIRKLPFQRLVREIAQDFKTDLRFQSHAVLALQEAAEAYLVGLFEDTNLCAIHAKRVTIMPKDIQLARRIRGERA

SEQ ID NO: 42430 - protein, 260 aa, Zea mays
  Clone ID: LIB3136-032-F4_FLI.pep
VKQANSVKPDQGFGAFQGVNSSVAAGFGSFQSTDAGSGGFQSAGTTTPSNFTPPPAPASMPTPVAAAVNSSMDPLDNLFASTTSAPTAAAASNGDSGGDMFGEMDGWVDVEAEFAGGDSGGTTTELDGLPPPPSGLTISAAKAKGMDSYKGGQYADAIKWLSWAVVLIEKSGKDFDIVEVLSSRASSYKEVGEYKKAITDCSKVLDQDKDNVSVLVQRALLYESTEKYRLGAEDLRLVLKIDPTNRLARSTIHRLNKLAD

SEQ ID NO: 42431 - protein, 147 aa, Zea mays
  Clone ID: 701174784_FLI.pep
APGCHSRYRHRSNPRCCCYWRYRQHRRRRSTGRGTGSSSWPWRLGTRGRRNRTPWRPPRPCRTCRATRGFSWQGRGSRRRSVPMDASSRLCSAGPCPRLRLLRQRPAPGRWPAVEATCPPPGAPWSTSGVCVRVFRFSEVVWARGGV

SEQ ID NO: 42432 - protein, 94 aa, Zea mays
  Clone ID: LIB3069-041-B2_FLI.pep
PDYIKHLKKFVSSVSKKASSKPDPKETTSKDDTTSKETEEAYPEKPQEAKKCPQISRKSLDSRFGKSKTVDVPDKPRMSSDDIDKFRRSRCLVW

SEQ ID NO: 42433 - protein, 168 aa, Zea mays
  Clone ID: 701183475_FLI.pep
GRPVEEIEVEGRGQRHGRLHRRFDATPAAATARFQGGAVAAGATSTAGDGDGEGEREVSLGLGATELAGGDVVGLGGLLGRVVRAQPHATLLGWVADLRGVASPRPLPHASVVWTQAHASDSSANAKLQAGGQRQWRLVRHPGRHGAQVACVRGSSGSARSCGEAMCV

SEQ ID NO: 42434 - protein, 46 aa, Zea mays
  Clone ID: LIB3066-047-E7_FLI.pep
IQSLVEFPSIHPAVPDESKGIQSLVELEFPSIHPAQRAMDLQQQAN

SEQ ID NO: 42435 - protein, 248 aa, Zea mays
  Clone ID: LIB143-024-F4_FLI.pep
AKSLPLVASKKAVVVGATHTVFTAAGWERPRRSSSRSMEALVGRYWGLGGRRCGACGGSPAAAHCRTCPGGAYLCAGCDAGHARAGHERVWVCEVCECAPAAVTCRADAAALCAACDADIHDANPLARRHERVPVQPIGAAADPAAEKAALLFGLAAEGKDGGDDDAAKVVVDASKLDLLFADDVVDPFLAQDFARFPHADSVVPNDGSSCGAAVDFDFGGGVAVAAKQPSYSSYTAASLGHSVSVPF

SEQ ID NO: 42436 - protein, 262 aa, Zea mays
  Clone ID: LIB143-046-D4_FLI.pep
EIEAVRTPCSRAGLSSTQPRVMAMLREHLDLIRAHLLDDNHDAVSSDDSAPSPSPSPPGRRPLPALSVSLPPRPAVVLQQQHLRAAAPPLQIPQQEQHCCPEPEEDDFRRYRGVRQRPWGKYAAEIRDPARKGARVWLGTYDTAVEAARAYDRAAFRLRGSKAILNFPNEVALSTAAWWATPAPPPQPSATVAGNKRARSPQEQDARCMVREVKKERIQEPASGGADYFWEDESLKGAICSLPPLSPLSPHPHLAVPQLYVS

SEQ ID NO: 42437 - protein, 236 aa, Zea mays
  Clone ID: 700206931_FLI.pep
DIMENGLVDYSPHNPTQIEKLDSASNVILIDNYDSFTWNIYQYLALEGASVTVYRNDQITLEGLIAEKPTQLVISPGPGHPDTDGGISKAAIREFSGKIPVFGVCMGHQCMISVFGGKVDVAGEILHGKTSVLKHDGKGVYHGLPASLDVTRYHSLAGTHPELPDSLEVSSSTNLEQGAKPIIMGCRHKEFTTEGVQFHPESILTKHGRTMFRNFLKLRGGTWKEHDSCKSEPLSI

SEQ ID NO: 42438 - protein, 351 aa, Zea mays
  Clone ID: LIB148-035-E6_FLI.pep
AAAHLPGRRPWLRQAGHLVGVDGADPYHRRAAAGVLRVVELGARLPDLAVLPRENLEGAELLHGLGEDGDEVGGLVRHGLDYGLGRLVHPQQAVDGEGHLLLQHQAEVAPVHVVGRGGVHGDGARVLAVAGVADLLLERLVDGRGVGLDEEAPADADAVAAAQHRDHLLRVEALLVELVDELGHRDVRARQVVGVLAVGHERVAPPKEHRVFGPSRQLHRVAGAHRDDVRARHHVGALLLQLRLDLLDHVVALDGDVGARLLLGGLVRHGVDQDGRVAAVCEAVVEDEAEEAGGGAGVRLEPLLDDAQDDLLGVGARRLVEICRELRGDQRRERRGHEEEEEAEAETGVHH

SEQ ID NO: 42439 - protein, 167 aa, Zea mays
  Clone ID: 700237267_FLI.pep
TMVPLINTLTLVAGYLWYEYIYKLDKHTYNKYHPYTSWIPITIYVCLRNCTQQLRSTHLSLFVWLGKITMESYISQFHIWLRSSIPNGQPKLLLSFLPDYPMLNFLLTTTIFLSVSFRVFKLTNVLKEAFIPTRDNKCLYQNFIAGVAVFACLYCSSLFFKTYQQYS

SEQ ID NO: 42440 - protein, 284 aa, Zea mays
  Clone ID: LIB148-036-H6_FLI.pep
NKQVLGALPLPLPYTITAFQLAFGSLLIFLMWATRLHPAPRLSAAQLGKIAPLAVGHMLGTVFTNMSLGKVAVSFTHTIKASEPFFTVVLSALFLGEVPSLPVLGSLVPIVGGVALASFTEVSFNWTGFWSAMASNLTNQSRNVLSKKLLAGDKDVMDDINLFSVITVLSFLLSCPLMIFAEGIKFTPGYLQSTGLNLQELCVRAALAGLCFHGYQKLSYLILSRVSPVTHSVANCVKRVVVIVSSVLFFSTPISPVNALGTGAALAGVFLYSRLTRTKKPKDA

SEQ ID NO: 42441 - protein, 317 aa, Zea mays
  Clone ID: 700236295_FLI.pep
HPSGWDYIFSYVKTFRAHPDRLLPDRALVGMAQHFMRSYSHLLIHTCHRRGVHAMGGMAAQIPIKDDAAANEAALELVRKDKLREVRAGHDGTWAAHPGLIPAIREVFEGHLGGRPNQIGDAAGHEGASVKEEDLIQPPRGARTVDGLRLNVRVGVQYLAAWLAGSGSVPLYNLMEDAATAEISRVQNWQWLRHGAALDAGGVEVRATPELLARVVEEEMARVEAEVGPDRFRKGRYAEAGRIFSRQCTAPELDDFLTLDAYNLIVAHHPAIEIRTDDQQHDRHEQPCKAHCIFSALGLLVVLMIVQGGLCNKLSFC

SEQ ID NO: 42442 - protein, 303 aa, Glycine max
  Clone ID: LIB3051-059-E10_FLI.pep
NMGRVKLPIKKIENTTNRQVTFSKRRNGLIKKAYELSVLCDVDVALIMFSPSGRATFFSGNKSIEEILERYVNLSEGEHGRMHNKEHIQKLLSKLKDEAGQICQAPSSMTSDSQIEDLRREIFTCKSQLEEMEKRLRIFEGDPSEITTLSEAEYREYVLRDTLKQVQLRKCVLEEYNSHATHSPQVHAAKTVDVNGFISRASKNPVDWFPQGDPLHVQTLNFANVYDTALVRDQQSHHCTVVDMLTPTSTLLHSANMDLNGQMNPRSSLDAGISNTLHPQFGQAIHTNSSSWQHLNPLGTYWS

SEQ ID NO: 42443 - protein, 337 aa, Zea mays
  Clone ID: 700236437_FLI.pep
PLPFHCCPSPTTSEMAGTVTATATTATTEVGTTVTAATSEMEATATAATSELEATATAAAIGPPSAIPDKYMHKNRLQSFAERTYKKTPIYKVESEGQSHQPKFTCTVEVGDQQFSSTGSFSRKKEAEQDAARVAYEILTTVSESDVKEAFELIDQDAVFCKSILIEFAVKTKTTLPSYSVVCVCLKKPLTLFAAIVVFDGNAYHGESAPNKKDAEQNAARVVIKSILAKHDTCMVRIVRSKKQLITAVRSSGNTPATFTPIQFTRPVSYAAYGRPDDTTPVLPNESSSLAVQRGINVVPAVGTSVNPSSANVSRSKKRKGRVEGAGGNDTWVAKGH

SEQ ID NO: 42444 - protein, 218 aa, Zea mays
  Clone ID: LIB3059-045-E8_FLI.pep
KAKVPLLYGFIQSHYWGVGFLRYFQVKQLPNFLLASPVLSLAVYSIVHYAKLLHRCFQRTSVHKQIITALEKRPVVSYRRSDDATILSEPPAGLTKKAQGSSKAKQRKPVATEIAPATFHDSTTPANQNIEEDQDACSILLLPFVLHLAFMAFTALFVMHVQVSTRFLSASPAVYWAAAHVLASPSRANRRWGYLICVYFIAYILLGSLLFSNFYPFT

SEQ ID NO: 42445 - protein, 109 aa, Zea mays
  Clone ID: 700238283_FLI.pep
GLYRSYKQLQSVAIFLWLLLGDRRVEFLWSCFFCRLGRGGGRVLLEPQPELARVAAEEGARPADVGGKEKHPRANHGHRHDEVSQRHRSLVLPSKSGGVPAAAGARGTS

SEQ ID NO: 42446 - protein, 77 aa, Zea mays
  Clone ID: LIB3060-044-H10_FLI.pep
ATRHHQEPCTATNTTITSLLLVATLPIPPMLLQVTISCNGRPIDRSRAQQFKCPAIASYYDVVLRSYRFRFVPTNIA

SEQ ID NO: 42447 - protein, 240 aa, Zea mays
  Clone ID: 700238322_FLI.pep
FSQFLPHLLGRRFPQRAGAASSLPVPTPTPIPSASNAMNPEYDYLFKLLLIGDSGVGKSCLLLRFADDSYLESYISTIGVDFKIRTVEQDGKTIKLQIWDTAGQERFRTITSSYYRGAHGIIVVYDVTDQESFNNVKQWLNEIDRYASENVNKLLVGNKCDLAENRVVSYEAGKALADDIGIPFLETSAKDATNVEKAFMTMAGEIKNRMASQPAASGASRPATVQMRGQPVSQQSSCCS

SEQ ID NO: 42448 - protein, 361 aa, Zea mays
  Clone ID: LIB3060-046-A8_FLI.pep
EEADRGAEILAGGMAKGGVERGALLPVSADDGKGNGGGAGGDDAVLFKGSAMTRRGGTAALSYMACSVLLVMFNKAALSSYNFPCANVITLLQMVCSTCLLYVLRRLKIISFTNSDPSVPSDSLFFVPFRLLLRTTPLSLAYLLYMLASMESVRGVNVPMYTTLRRTTVVFTMTMEYFLAKQKHTPPIIGSVALIVFGAFVAGARDLSFDARGYAIVFVANITTAIYLATINRIGKSSGLNSFGLMWCNGLVCGPSVLLLTYIQGDLKRAMEFPYLYSPGFMTVLLFSCILAFLLNYTIFWNTILNSALTQSMCGNLKDFFTVGIGWVLFGGLPFDLLNVIGQGLGFLGSGLYAYCKIKGK

SEQ ID NO: 42449 - protein, 278 aa, Zea mays
  Clone ID: 700238371_FLI.pep
QRPRCFARYPLKLIAPSRVGPSSCDAVWLYALTYGGGIVSGDTVSCTVSVGDGCTAAITTQASTKVYKAVGSKCSEQLLEARVGEDALLAVIPDPVTCFSTARYHQKQVFHVSVNSNLVLVDWFTSGRYESGERWDFSFYKSVNHIFLGDQPLFIDSTLLEQSSSYSIAERMREYNVVAMVVLLGPKLRDIQDKMQDEVRKLMSGQLRPPTAGGSLYTTRSQRPRRPPLVASCSPFGRTGTGMVARVAAVSTELAYIFLRHHLAALEPFLGAPPYAAS

SEQ ID NO: 42450 - protein, 130 aa, Zea mays
  Clone ID: 700240352_FLI.pep
SNQHNYSTLFLRVLRVTSHVANLSNFILVLLVGGPSARRDGVDVLNVHGVNLLESSVLGLDDEEEDNQDESSTATSEDETVEVVDIVGDESGEERDHKVPEPVRSGGNTHADTAVSDGVQLGVDVPDQRS

SEQ ID NO: 42451 - protein, 177 aa, Zea mays
  Clone ID: LIB3067-058-E12_FLI.pep
ENSGYSSIYIQRSGDKRDGCGIFYKPKSAELVQKEVILYNDLVEKYVPSDNVNSALENNSSAEEDKNAKPDNSKRGDPNDPRVRLKRDCVGLLAAFKLSDPCDQILIVANTHIYWDPQWIDVKLAQAKYLLSRVSQFEQLISNKYNCKPSVIIAGDFNSTPGDKVCLAFISLLPEAY

SEQ ID NO: 42452 - protein, 307 aa, Zea mays
  Clone ID: 700241504_FLI.pep
YSPAFLRWALKPPSFFRAWHIGVRAKESKKLVAFISGVPARIRARDDVVRMAEINFLCVHKKLRSKRLAPVLIREVTRRVHQENIWQAAYTAGVVLPTPITTCRYWHRSLNPKKLIDVGFSRLGPRMTMSRTVRLYKLPDAPLTPGFRRMELRDVAAVTRLLRAYLARFVVAPDFDEVDVEHWLLPQEDVVDSYLVESPETHEVTDFCSFYTLPSSVLNNANYATLKAAYSYYNVSTKTALQQLMNDALIVAKQKNYDVFNALDVMENESFLKELKFGPGDGQLHYYLYNYRIRNGIKPSELGLVLL

SEQ ID NO: 42453 - protein, 441 aa, Zea mays
  Clone ID: 700241792_FLI.pep
LAAAALTADRRWCLTGTPIQNNLEDLYSLFRFLKVEPWRNWALWNKLVQKPYEEGDERGLKLLQSILKPIMLRRTKNCTDKEGRPILNLPPANIEVKYCVLSEAEKDFYEALFRRSKVKFDQFVEQGRVLHNYASILELLLRLRQCCDHPFLVMSRGDTKEYADLNKLAKRFLRGGNGAVNGDSCIPSRAYIEQVVQELQKDEGECPICLEAFEDAVLTPCAHRLCRECLLSSWRSATAGLCPVCRMSMSKQDLITAPTDNRFQIDVEKNWVESSKISALLQELEALRSSGAKSIVFSQWTAFLDLLQIPLSRNNFSFARLDGTLNLQQREKVIKEFSEDKGILVLLMSLKAGGVGINLTAASNAFVMDPWWNPAVEEQAVMRIHRIGQTKTVSIRRFIVKGTVEERMEAVQARKQRMISGALTDQEVRTARIEELKMLFS

SEQ ID NO: 42454 - protein, 154 aa, Zea mays
  Clone ID: LIB3068-037-C1_FLI.pep
HLLSPACARLSSFLPRPLAFAWLHRAGRAGEEKLASSYQLSAGGGSLPAAGVSCKGWELAMGRGRVELKRIENKINRQVTFAKRRNGLLKKAYELSVLCDAEVALIIFSNRGKLYEFCSGQSITKTLERYEKNSYGGPDTAVQNKENCAAVIAV

SEQ ID NO: 42455 - protein, 154 aa, Zea mays
  Clone ID: 700045409_FLI.pep
PQQEEDADAPPVLTPLLGSPDGARPSTLANRCFAVVFMVFVPLVIVVFERSQADVVAYALCLANIIVMVVWLSPDTGSTVSAAKSLLRLSDDEDEGSGGSSGAEDKCCVCLAGMREDQALRALPRCGHSFHDKCIGKWLKAHPTCPVCRATAVP

SEQ ID NO: 42456 - protein, 305 aa, Zea mays
  Clone ID: 700241855_FLI.pep
FASKIDVNPWKGGRRRRKKEGSRPNPPVRRGAMARLAVAARAFSAAASGGGVSMVQGASRGIGLEFVRQLLRRSDGGRVVATCRAPGSAAELQKLREEHAPGRLTVLPLDVTDESTIEAAAASITETHGSLDLLINSAGILSIPNLIQPETTLSKVQKSSLMLAYEVNAVGPILVIKHMWPLLKIGGRSETGRGFALVANMSARVSSIGDNALGGWHAYRASKTALNQLTKTVSVEFGRKDNIACVLLHPGTVDTDLSRPFQRNVPEGKLFTREFSVQKLLSVIDSIKKGDSGKFFAWDGQEIPW

SEQ ID NO: 42457 - protein, 332 aa, Zea mays
  Clone ID: UC-ZMFLMO17027H03_FLI.pep
VFSLTQSRNVQVSLLRTHFMANAGRGLPRTQKNHKSKAYYQRKRGPLPTAHTKNHKSKAYYQHRGMVPGVLDSKSPSHRHAHFLLCSIFILISSNTATLSSAQASNRSEDDRQALLCFKSGLSGNSVGVLGSWSNDSLNFCNWEGVTCSTAIPIRVASLKLRSVQLRGKLSSCVANLTSLVQMDLSNNSISGEIPDEIGSLPLLQTLILSANKFEGSIPPSLGMAASNNSLLTTLILSKNRLSGEIPHFHKMAFLQSLGLTGNLLSGNIPPSLGNISSLTSILLAENSLRGPIPETLAQIPKLDILDLSNNMLSGNVPDLLYNVSSLTSFNI

SEQ ID NO: 42458 - protein, 240 aa, Zea mays
  Clone ID: 700243248_FLI.pep
DGDHHLRIPPKVSRVDANEDSMESSEEMVTPRAAASEPDEEETKAIAAEVPVERTVDADVAGSGEVIVDAFPPETVGQEGEGKVDEAEVEVHAVVAQEPEVKDVLVAEESVVQEPVSDAPVAEASEVKELAKVHSVLESEPRVDEGRDEVVVVDETPVVPEVQEPEVKGVDATVVLKEQEKNSGNVVAKDSAEVSRSQEAAGVHITEVERGPAVAVIASGQRAIWWNFCGLFDAFTGSGR

SEQ ID NO: 42459 - protein, 126 aa, Zea mays
  Clone ID: UC-ZMFLMO17224G11_FLI.pep
KQKMKPKFMTTSPNQTLYQTVADQIHGLISEGTFQPGDRLPSVRKLHQQWSVSISTVLEAYRLLEDRGLIEARPQSGYFVKTILNFLPDEPSPSTPQSADNPVDTSLAFRVNNSMLKPGIIGLGAA

SEQ ID NO: 42460 - protein, 151 aa, Zea mays
  Clone ID: 700223814_FLI.pep
RDPTIAACTPVATLPFLAPHSAVVPFCEGVYKYATAWDALRKDAAVLTQDVTLLAEDAAQKSGITIEQVRDRLRSVLSLTDVTRFPVPKNPQAVIFVGATDDGYIPRHSVMELQKAWPGSEVRWVTGGHVSSFFLHNDAFRKAIVDALDRL

SEQ ID NO: 42461 - protein, 363 aa, Zea mays subsp. mexicana
  Clone ID: UC-ZMROTEOSINTE053E10_FLI.pep
ISALPFPEYTDPRYGPLNLTVKLPDGALKPDLGPKTYIAYGFYQELGRGDSVTKLHCDMSDAVNILTHTAQVPYARYQLEKIEETRKKMKEQDLQELYGVSELNLSSPFTDSRNISADEMSKTSCLDVNDVPPVNTESEVQSGAGQCSDYIDKDRSYAGMHNGERTGGALWDIFRREDSDKIQDYLRKHATEFRHIFCNPVKQVIHPIHDQTFYLTEEHKRKLKEEYGVEPWTFEQKLGEAVFIPAGCPHQVRNLKSCIKVAMDFVSPESVNECMKLTGEFRRLPPDHRAKEDKLEIKKIALHALNQVVNFLDPSSEWSKSWFAQPKNKKKAGAEEQEKPKRKRGRPCRKSNDEAAGDRHRKK

SEQ ID NO: 42462 - protein, 210 aa, Zea mays
  Clone ID: 700223870_FLI.pep
NDHPSRGSGDWKSGGRPETRPPEMEPRSAIYRSGALLLLAAILAEVVIPASAIGDKCAACKAVAAELEIGISSEKPRNHLDLRNRLNSKGQREGKVIDYRVSELRVVELLDGLCDKMQDYTLKKLESGEKGWVKVTDWNSFQTENKAAARAHSKKLSTFCGRLLEETEDELSEWIKTTSTESEYVSKALCEDISKHCRSTSATIQIDDEL

SEQ ID NO: 42463 - protein, 211 aa, Zea mays
  Clone ID: UC-ZMFLB73085C02_FLI.pep
ARRGRRRRRTRRLRPLAAARAQPPLQQPRDVVGARRVRRAPRSRRQRLHLGQRRRRRLQRERVAQSLPRRVDVSLQPPLPLPLGNGRALPSRAPFAALHVLQLLLKMRVPVVLDIVVRPLRQVGCYGRPPARHINKCTACRSTSSAHDHLVPWMIWFVRSICYSGKNKTGTKALRRRQASDHHLLPRRAWRWTMSFSSCSVKLPRLIPGRR

SEQ ID NO: 42464 - protein, 97 aa, Glycine max
  Clone ID: 700741338_FLI.pep
HIRGSQNHVGPAGADENPKWGKKEIVSKCTKNAEPCKVAVSSQPLWSFEVKRFPFSQPYLVWCLPSHLQPSNCYSSQNTSSNFSFSWACLCSERARN

SEQ ID NO: 42465 - protein, 86 aa, Glycine max
  Clone ID: 701147176_FLI.pep
TKDLMGFVCVLPMAAAELIQLATVGEDNKGNLSITEDREFISLFEQTIPPLCKCHLTVYLVLNPLQLHLSPTHVFINCLLYISFRK

SEQ ID NO: 42466 - protein, 343 aa, Zea mays
  Clone ID: 700256906_FLI.pep
EIKLRNGTASQSQKLPRLAEREPRRACACAGVRAVPEQGTSLRGRQEPAGAVQAAGQRAPHVPQRRRATGPHPGDHPLVRPLRAGAEGRGHRLPPVAHHHRLAAVPVRVAVVGHHRPAVPVQGAERRRRQRAGGARGPGRRRRVLAGEAPRAVPAAAAGGAGRAGAEGRRRAGAHRAGRGRGRVLHEPLRPARLRRRGRGRLRLGRQRRNAVPRAVRVAVPPAAVRAPGAGARAAERRRRHGWHGGQHRQHGRRRGHQPVPRRVLPGRQGRAARGRHRLHWGLRQRRLPRFRRQPGGGRHDGGELQCQWCQREEVPASRSIRPCNLYVFDFGLTPKETVLSTV

SEQ ID NO: 42467 - protein, 249 aa, Zea mays
  Clone ID: LIB3059-056-E10_FLI.pep
DIVDDYPYVAMDTEFPGVVCRPLGTYKSAAEFNYATLKANVDMLKLIQLGLTLSDEHGGLPALGPDGRPCVWQFNFRGFDPRTDVAAADSIDLLRRSGIDFSRHAADGVDSRCFAELLMSSGVVLNSDVHWVTFHSGYDFGYLLKLLTGTNLPDTLPGFFDLIKIYFPVIYDIKHLMRFSNSLHGGLNKLAELLDVARVGICHQAGSDSLLTALSFKKLKEAYFNGLTEKYAGVLYGLGFEGVETTSAH

SEQ ID NO: 42468 - protein, 312 aa, Zea mays
  Clone ID: 700257203_FLI.pep
PRRHRRGDRGRRVRGPVLRVRAVQGPHRERGHRGAVRVPGRRRVAGRAAVLGHGGAQAGAPVPGRAGRGLRRGRGLRGGQARGAVHVHRDEPAPGAAQREAVQRRGGGGPDRAAGARRRRGHQLGARVHEPRHAVVHGPQRDGGQGGGQLLRPRRALRRHRRQEAPGHRHDQRRARDEGARHERRRGRDRAPHARGRARHDRHRDGGRRDRRRPEDGPDVRRHDDLRPEGGAPGAEGTGQAQRRGRDHPRGVAGAARGVRDCVQGRRGRGRLSEHPRASMQAASYLGRRHHGVSSFNLGLCCCWTNEFPSIG

SEQ ID NO: 42469 - protein, 175 aa, Zea mays
  Clone ID: 700261105_FLI.pep
ACQGFKHAIYERGATIYAEFLGGSFTCDAYHMTEPHPEGRGITLCIEKALADAGVAREEINYVNAHATSTQAGDLKEYEAIVRCFRQNPQLRVNSTKSMTGHLIGAAGGIEAVASIQAIRTGWVHPNLNLENPEDTVDVGVLVGSQKERCEVKVALSNSFGFGGHNSSILFAPFK

SEQ ID NO: 42470 - protein, 128 aa, Zea mays
  Clone ID: 700263916_FLI.pep
VPAVRVGPPVLPRDGARPVRAGARRRPARARLQLVAARRHQALGDGHERHLRPYCAARHAALRRAYAPAQLPLVLTPCTWRAGTATTHACVWTLVFIPGVGPPWGKLGVWWLSSSVFLFSVYYKFSEP

SEQ ID NO: 42471 - protein, 306 aa, Zea mays
  Clone ID: 701173786_FLI.pep
ILMVFSLNFVKLVYVSFCSPRRHGVEYSSLPPLQEPLLILIDEQVPVVLVLHLPSDGPNRIRIQRELPQPCPFVPHLPLPVRLRPLHPVRALARDGVQGALPKQVLLHQHAVVVVPRRHRVHHVEQRRVVEERLPEPRHEQGRAVRAVLHAQDEHVGPHLPDVTEDCVPRARPAIPIHVVLLLLLHPTETEQAVHDEHLVALDAQLVHRNRVPPGRDAVEPQGDAMPPSEACEPPPGRLEPSIRPEPGLGEVDGGDPHLGRPSLQATPVAQQRRPLEPVVVVAVVHDVHLLPPAAADGLADGQVGE

SEQ ID NO: 42472 - protein, 473 aa, Zea mays
  Clone ID: 700265656_FLI.pep
QRQTQSRNSGMQTRSSAKSTVTRETSRYDPTTPTSNREMPPAAFHQRRELLSYEQLCCLDDVNFANAVIFGNKSFRPLQYEACRAAMDNQDCFVLMPTGGGKSLCYQLPATLHPGVTVVVSPLLSLIQDQIVALTYRFAVPAAFLNSQQTSAQASAVIQELRCGKPAFKLLYVTPERIVTNYSFMETLRGLDQRGLLARFVIDEAHCVSQWGHDFRPDYRGLGCLKQNFPRVPIMALTATATESVRKDVLGALRIPNAVVLKRSFDRLNLNYEVIGKTKTFQKQLGDLLKERFMNESGIVYCLSKNECADTAKFLREKYKIKCAHYHASLAARQRTSVQEKWHSGEVKVICATIAFGMGIDKPDRFVIHNTLSKSIESYYQESGRAGRDELPAHCIVLYQKKDFSRIVCMLRNGENFRSESFRVAMEQAKKMQAYCELKTECRRQALLQHFGEQYDRRRCRDGPSPCDNCLKT

SEQ ID NO: 42473 - protein, 409 aa, Glycine max
  Clone ID: JC-GMLE01810083D10_FLI.pep
SDWKAHSKICGTREYKCDCGTLFSRKDSFITHRAFCDALAEESARVTTVPAALSNLRNDHHHHLTNAQASRIPQINFSGFHSSDQLFGGGSSEALLANHHHHQQQKLRLPLWLDHHQVNNNPQVLHHHTLNNFSTKPNGFTTNSGSGPNSVTDLVQTMDMFGSQTEFVNYRYPEASFGGGNANVSVLPPHELKQEQEENKEHLSHSGASYNNLYLSSSDIQNPPPHHHHYMSATTLLHKAVQMGSSRLMNDNVFGSILGTTTTNSNNNNVVVEVQKLNELVSVEAAGCTNNNLGGGYLLNDSNNSNSFVVVNGTNKGGGLEHMVMPVDEETQQASIMGKQLHSSLSSNNKNQQLGLTRDFLGVGDHNNSIDSIRRPFLQQDLVEFNAMGSASASASVMNLQSQYGGHYC

SEQ ID NO: 42474 - protein, 170 aa, Zea mays
  Clone ID: 700265809_FLI.pep
TVAARQEQALDLPAERSLFPWRVLDFSLESLCRCHDSRRPSLFLSCVQSSAQRARLARFSCARSSVPARLRAARSLARLCPVRVLLAGRILCVARVAFCYSYACCRKAPCSVRLRRVVVRAKLFAVDIKSVTRAPDTVKRCVGLYPSPPDRDLALLLVSLLAKSFPQSAP

SEQ ID NO: 42475 - protein, 361 aa, Glycine max
  Clone ID: UC-GMFLMINSOY052A04_FLI.pep
KCVMQAMENIHQREILEEQRFELPPGFRFHPTDEELITHYLSQKVLDSCFCARAIGEADLNKCEPWDLPWMAKMGEKEWYFFCVRDRKYPTGQRTNRATGVGYWKATGKDREIYKAKALIGMKKTLVFYKGRAPSGEKTSWVMHEYRLEDEHSVHNPPKKAMNDWAICRIFQKSNGGKKMPISGLVRFSNFAKDMPSLMDSSPYNDSESKPVLGESSQPTCFSDPNQSEDQRTQDENIADSYETLMLASSYSSNPSDISPASWTFSKSAPTVSHQSLQVGNSHSSDYFMLHQEQSMLGMLIENHGASAGQRTQKAQDSKGSDADMSSVMYNNYEMFQRSFGNQEYSSPSVGHVYSSGLWGF

SEQ ID NO: 42476 - protein, 318 aa, Zea mays
  Clone ID: 700235424_FLI.pep
SELAALASASRACQKAREKKIRLLLPVAGQAQPPLSPPRHLRRRRSISLTMAAPMSAIDSAWQLLIANFTEFQLATVVTFLLHETVFFLSGLPSLLFERFGLFAKYKIQKKSNTSAYQNRCVLRLILYHVCVNLPVMIFSYPAFKFMGLRSSLPLPHWSVVVSQVLFYFVLEDFIFYWGHRALHTKWLYKHVHSVHHEYATPFGLTSEYAHPAEILFLGFATVVGPALTGPHLFTLWLWMVLRVLETVEAHSGYHFPWSPSNFLPLYGGSDFHDYHHRVLYTKSGNYASTFVYMDWLFGTDKDYRKAKTIEEKEGKNL

SEQ ID NO: 42477 - protein, 145 aa, Zea mays
  Clone ID: 700235453_FLI.pep
PYQSSSIHRNSLPLSPTLSISICRHGCPRSPINGPSLQLCVGVEEAPQSVAQRNTDVSVIRSSCLSFSLSRVSSPSHTGWRALQRPEATMMTGPVEQAGRIPPPRSRDPTQKNRTNKWQRGEKKEKESQRRKNDKQTAKKSIKPC

SEQ ID NO: 42478 - protein, 373 aa, Glycine max
  Clone ID: UC-GMRONOIR056A09_FLI.pep
LPTSLNKNPLTSQTERQRLQLQKVQLSNLVSGDTEHQEESAMADASPRTDISTDVDTDDKNPRFDRSQSLVAVVSDSSDRSKDKSDQKTLRRLAQNREAARKSRLRKKAYVQQLESSRLKLTQLEQELQRARQQGIIISNSGDQAHSMSGNGAMAFDVEYARWLEEQNRQVNELRAAVNSHAGDTELRMIIDGIMAHYDEIFRLKADAAKADVFHLLSGMWKTPAERCFLWLGGFRSSELLKLLVNQLEPLTEQQLVGITNLQQSSQQAEDALSQGMEALQQSLSETLSTGSLGSSGSSGNVANYMGQMAMAMGKLGTLEGFIKQADNLRQQTLQQIHRILTTRQSARALLAIHDYFSRLRALSSLWLARPRD

SEQ ID NO: 42479 - protein, 155 aa, Zea mays
  Clone ID: 700235625_FLI.pep
PLSIRSAERSPSTAARPTSLLSAPTSWLPRPVSRAPCQPSAESFPIPMAPSLVCVTLLSHMVVTVESSLGSLLHNLLLRALLVLWRSASSFLRADSLFPSCVHYKFLSPIIAQLPRALSMPSLELCPCRVVVRRHVVRHQASLSFLLCLASDVFD

SEQ ID NO: 42480 - protein, 256 aa, Zea mays
  Clone ID: LIB3059-043-B7_FLI.pep
APMAGPRRLLLLLLLPLLVLLGAHPPQCGSAEEGTKVSLELYYESLCPYCSRFIVNRLAGIFEDGLIDAVHLRLVPYGNAHVASNSKISCQHGPYECLLNTVEACAIDAWPDLDVHFSFIYCVEDLVVKRQYKDWESCFEKLGLDAKPVTECYKSEHGHKLELKYANQTDALEPPHRYVPWVVVDGQPLLEDYENFEAYICKAYKGTPPKACEGLERLQMALETAAEARNGVSYNSGVSKLATAEDEGGEHKVGEY

SEQ ID NO: 42481 - protein, 239 aa, Zea mays
  Clone ID: 700237707_FLI.pep
SMCLLTLARVFVCFSDIRCEPVVSVDEALAEERAGGEVVELSRPGHAVHGVDAGPPVPVHPEERRHALVAGVVPVIPAAGRDDAVEVGVGVDDARVLPHGPPHVEPPRAGHPAVDEGEAGALARVAPPVRRHRAEPLRRRVQLAVLVEGAGVAEDEVDGALDVAVAEVVAAGVVAQRVLRAVEPAAEEEGLVAGDAERHRLPSLRAGHRRRSCVRKNQPECVARPGCLSLPKPHPANLQ

SEQ ID NO: 42482 - protein, 240 aa, Glycine max
  Clone ID: 700952775_FLI.pep
TVDLDTLLEKEVFFEGKEGIFCVGGWNPEFGLVGVERMKIQCNVCEAAEAKVLCCADEAGLCWECDEKVHAANKLASKHQRVPLSTSSSHMPKCDICQEALGYFFCLEDRALLCRKCDVAIHTANAYVSGHQRFLLTGVRVGLEATDPGASSTSLKSDSGEKVSDSSVSRKVSTAPQPSNYNEVLPAEVGGVGEFPSAKVSFGGGSTAGNISQWTIDEFIGLNEFSQNYDYMEGSSRVCS

SEQ ID NO: 42483 - protein, 200 aa, Zea mays
  Clone ID: 700237741_FLI.pep
SAGCTPEPRRQISPSARAAAGPSLPARVSESREGKRKEKMMTSSACYYLCRSLVRAPPLKSRSAVRCPSAAPPGASGATSTSKTQDPVENQKLCAYLVEKAVNRLPPGAENILGIFDLRGFRVENGDLQFLKFLMDVFYYYYPKRLGQVLFVDAPFVFQPMWQVVKPLLKSYASLVRFCDTETVRKEYFKEETVPPDFRD

SEQ ID NO: 42484 - protein, 215 aa, Zea mays subsp. mexicana
  Clone ID: UC-ZMROTEOSINTE069D05_FLI.pep
LIYAFVARGTVILAEYTEFTGNFTTIASQCLMKLPASNNKFTYNCDGHTFNYLVEDGFTYCVVAVESVGQQIPIAFMDRVKEDFTKRYGGGKAATAAANSLNREFGSKLKEHMQYCVDHPEEVSKLAKVKAQVSEVKGVMMENIEKVLDRGEKIELLVDKTENLRSQAQDFRQQGTNVRRKMWLQNMKIKLIVLGIIIALILIIILSVCHGFKCH

SEQ ID NO: 42485 - protein, 169 aa, Zea mays
  Clone ID: 700237765_FLI.pep
GMPMAGSPPVVAGSLVVAMRSQLAEASNGAAGTAQGRRPGGGTKAGCHCCRETSEPSEQDHTAVVVDIPAPSAERPGVVAPTAATGCCSSSAREACATPTTVTTVNSAPRGCCGGIGEGDTRENARTSCCTDARDSPKKAGQQCNARCCSWGKQNTLKCQAQDTISNLK

SEQ ID NO: 42486 - protein, 247 aa, Glycine max
  Clone ID: 700889004_FLI.pep
AFLGLQILLGEGSILVETSHTRKHSFFWVHSTWCLEMVRGKTQLRRIENATSRQVTFSKRRNGLLKKAFELSVLCDAEVALIIFSPRGKLYEFASSSMQDTIERYRRHNRSAQTVNRSDEQNMQHLKQETANLMKKIELLEASKRKLLGEGLGSCSLEELQQIEQQLERSVSSVRARKNQVYKEQIDQLKEKERALYAENARLCEQYGGIQPQPATKDPKEIQPYAESSPSSEVETELFIGLLRSSY

SEQ ID NO: 42487 - protein, 223 aa, Glycine max
  Clone ID: 700968115_FLI.pep
RMGRGKIEIKRIENTTNRQVTFCKRRNGLLKKAYELSVLCDAEVSLIVFSSRGRLYEYSNNNIRSTIERYKKACSDHSSASTTTEINAQYYQQESAKLRQQIQMLQNSNRHLMGDALSTLTVKELKQLENRLERGITRIRSKKHEMLLAEIEYFQKREIELENENLCLRTKITDVERIQQVNMVSGPELNVIQALASRNFFNPNMLDGGTVYPQTDKKILHLG

SEQ ID NO: 42488 - protein, 432 aa, Zea mays
  Clone ID: 700237868_FLI.pep
LPQGSTRPAAMARKKIREYDSKRLLREHLKRLAGIDLQILSAQVTQSTDFTELANQEPWLSSMKLVVKPDMLFGKRGKSGLVALNLDLAQVRQFVKERLGVEVEMGGCKAPITTFIVEPFVPHDQEYYLSIVSERLGNTISFSECGGIEIEENWDKVKTIFLPTEKQMTPDACAPLIATLPLEVRTKIGGFIRAVFSVFQDLDFSFLEMNPFTLVNGEPYPLDMRGELDDTAAFKNFNKWGNIVFPLPFGRVLSPSESFIHELDEKTSASLKFTVLNPKGRIWTMVAGGGASVIYADTVGDLGYASELGNYAEYSGAPKEEEVLQYARVLLDCATSDPDGRKRALLIGGGIANFTDVASTFSGIIRALREKESKLKAARMNIYVRRGGPNYQTGLAKMRTLGAELGVPIEVYGPEATMTGICKEAIDCIMAA

SEQ ID NO: 42489 - protein, 371 aa, Glycine max
  Clone ID: 700943986_FLI.pep
RICSGCNAEIGHGRFLSCMGGYWHPECFCCHACKLPITDYEFSMSGNRRYHKSCYKELHHPRCDVCKNFIPPNSAGLIEYRAHPFWLQKYCPSHERDGTPRCCSCQRLESVDTKYLLLDDGRKLCLECLDSAIMDIHECQPLYVEIQEFYEGLHMKIEQQVPMLLVERQALNEAMEGEKNGHHHLPETRGLCLSEEQTVPTILRRPRIGAGYQLIDMITEPFRLVRRCEVTAILVLYGLPRLLTGSILAHEMMHAWLRLKGYGNLRPEVEEGICQVLAHMWLESEIIPGTGDEGASSSSSSSSSSPSSSSSSKKGKRSDFEKKLGKYFKHQIESDSSAAYGDGFREGNQAVAKYGLRRTLDHIRLTGSFPY

SEQ ID NO: 42490 - protein, 200 aa, Zea mays
  Clone ID: 700237896_FLI.pep
YLCYVLATSRARTINYNTNISSTSPYCVVTLFARFLGWSTSNPRRTVRWYASNCNGIMLITGWRQSATCGTSMTLHDPPLGHTAAASPLEHITIRRPLRERSCWITDCCLLQEVLKRGWFPATKKGNQSWAHASLSLPEARVAGRNDNDGEVLVHEGQRPVLHLASEHALAVHQRHLLDLQGALQRGGVVVTPSEHEERL

SEQ ID NO: 42491 - protein, 202 aa, Glycine max
  Clone ID: 700952839_FLI.pep
LFMAEQALEGSQPVDLTKHPSGIVPTLQNIVSTVNLDCKLELKSIALQARNAEYNPKRFAAVIMRIREPKTTALIFASGKMVCTGAKSEQQSKLAARKYARIIQKLGFPAKFKDFKIQNIVGSCDVKFPIRLEGLAYSHGAFSSYEPELFPGLIYRMKQPKIVLLIFVSGKIVLTGAKVRDETYTAFENIYPVLTEFRKNQQ

SEQ ID NO: 42492 - protein, 223 aa, Glycine max
  Clone ID: 700958586_FLI.pep
KIQIKRIENTTNRQVTYSKRRNGLFKKANELTVLCDAKVSIIMFSSTGKLHEYISPSTSTKQFFDQYQMTLGVDLWNSHYENMQENLKKLKDVNRNLRKEIRQRMGDCLNDLGMEDLKLLEEEMDKAAKVVRERKYKVITNQIDTQRKKFNNEKEVHNRLLRDLDARAEDPRFALIDNGGEYESVIGFSNLGPRMFALSLQPSHPSAQSGAAGSDLTTYPLLF

SEQ ID NO: 42493 - protein, 164 aa, Zea mays
  Clone ID: 700241026_FLI.pep
VNILVQIIMFTIKQENILIKYTEIHFSCTRTGKNKRVLCCTQDLAHATEAENPRNSWPEKEEKKTHETDSVHRIYAHNMVLPAQFQLLTRGERISDVCSEASQHQCQATWTFCSSDANTHSSRLQRLPIHTTTKTSQHFSHDTSCYLPQGNLAPNTISRTCRLG

SEQ ID NO: 42494 - protein, 260 aa, Glycine max
  Clone ID: 700979179_FLI.pep
KKSDRDMGRGRVELKRIENKINRQVTFAKRRNGLLKKAYELSVLCDAEVALIIFSNRGKLYEFCSSSSMLKTLERYQKCSYGAVEVSKPAKELESSYREYLKLKARFESLQRTQRNLLGEDLGPLNIKELEHLERQLDSSLKQVRSTKTQFMLDQLSDLQTKEQMLVEANRSLTVKLEEINSRNHYRQSWEAGDQSMPYGGGGPENSHSHSHSQGFFQPLECNPTLHIGPDYRYNAVASDQITATTQPQQVSGFIPGWML

SEQ ID NO: 42495 - protein, 222 aa, Zea mays
  Clone ID: 700242408_FLI.pep
KMEANMDVLEDDHGKEMLEQVVSNPALQRHTEVMEEGSLSKQELGDGIEGTIPATIGSGGLDAPPEIPQPEVVVATTAITQFNKDMEDVLPPAIEDGALQATLEHAVGILEVTPGDGLGNVAPSSGDDMEIMPSAMTEPRLGKETAPVASPPDSQEKPSIMHDSETGMEVDKVIDDIHGDGRVSSILGTKLDVAASDGDSEALLVESRVNLSRIPNSPESTH

SEQ ID NO: 42496 - protein, 223 aa, Zea mays
  Clone ID: LIB3068-038-E9_FLI.pep
PPVCRCAARPAPRTRPVLEGHVLDRWRLPLAADTVPLAVSLPLADMQSQIVCHGCRTLLFYPRGAPSVCCAVCHVVTNVPPPAMEMARLICGGCQTLLMYARSATTVRCSCCDTVNLVRPVSSIAHVNCGQCQTVLMYPYGAPSVKCAVCNFITNVGGVTPMIPLPPPALPASSGTSYIIPSISVPTNQPRNVTVVVENPMTVDDKGKLVSNVVVGVTSGGKK

SEQ ID NO: 42497 - protein, 402 aa, Zea mays
  Clone ID: 700242510_FLI.pep
RKGFIASPAMETERSAHNKVHIQSGNASRKTEGFIQQSINANRQKNGTSVQHSESFTTSARRTAGGFPPAPTTEDKFKAARLSSSNEAAPRKEGVGQRISNISISLQKRTENTNKDVAKKEVGTSSPLPPNPANAMHKGNGKVGRPMDNTQGSMQRFGSPSTSSATWGMDRGAPRSSIPSPSITIRRPNGMVRPAENLSVSAKKPDAGGLSPAMGKEKEQGGRLLQANISTDQKLAAESRSASAKKPDAGGLSPAMGKEKEQGGRLLQANISTDQKLAAESRSVSAKKPDAGGLSPAMGKEKEQGGRLLQGNISTDQKLGAENRSVSAKKPDAGGLSPAMGKEKEQGGRLLQANISTDQKLVMSKPPAVEKAADGRAERMEKVRDGAPDIAKKEDKKSDRHE

SEQ ID NO: 42498 - protein, 259 aa, Zea mays
  Clone ID: LIB3069-021-F10_FLI.pep
DRIGAVGERRESHPTPTRRLRLHLDRPPLEWWSHGQTSTPGPPQLVTSLAIRLSRLSRLAAMLCRGELWSCSCSAGDSPVKQASSAPGKSRPDTDSTSGPRHACRGFSAGDSPRLPSPHDSAPRATMSSASFTLTLRASTSDLRILLSVTAVVNCWLASVSCLKSDAFSPRSWSTCVSRSARWACFLFLDRRADSRFDTIRRILFTSCGFVLCSHGPPSMSSSESLSESEPLVPPRAWLSFRYRLVADVGLAAAAAACQ

SEQ ID NO: 42499 - protein, 216 aa, Zea mays
  Clone ID: 700242603_FLI.pep
HSANVIHRDLKPSNLLVNANCDLKICDFGLARPSSESDMMTEYVVTRWYRAPELLLNSTDYSAAIDVWSVGCIFMELINRQPLFPGRDHMHQMRLITEVIGTPTDDELGFIRNEDARKYMRHLPQFPRRPFVSLFPRMQPVALDLIERMLTFNPLQRITVEEALEHPYLERLHDVADEPICTDPFSFDFEQQALTEDQMKQLIFNEAIELNPNFRY

SEQ ID NO: 42500 - protein, 340 aa, Zea mays
  Clone ID: 700244001_FLI.pep
SGTPVVTLCGSPSKPQIETTNPNQGDVGEESRAGRSPALSQPAFTDPLGSEKGSHSPSVVHDRNEHQKTQGDDTLKDEILLHKRKAVAFKREGKMAEAREELKLAKQLEKHLEGAQQDTMDGVGDSITPAVEQNSLVQQPASSSNHTDDITSPPPAQASKRTQPQKAMSSRDRLKIQRESLAHKRNALKLRREGKTAEADAEFELAKELESQLEESDNQSSSSGGKSSEPNDTSVENLLDPQIMSALRSIGWSDMDLSMQSSSAQPLKPVQSSSSQPPQKVEAKSSVAATSKPQSERSQLEEQIKAEKLKALNLKREGKQAEALEALRSAKRLEKKLNSA

SEQ ID NO: 42501 - protein, 234 aa, Zea mays
  Clone ID: 700244194_FLI.pep
QEAAEMDPDAVKSTLSNLAFGNVIAAAARDLQKEMVAKDKAQAAPASHDEVDLDELMDDPELEKLHAERIAALKKEVEKREVLKRQGHGEYREVIEGDFLGEVTGSERVICHFYHREFYRCKIMDKHLKALAPVYVGTKFIKLDAENAPFFVAKLAIKTLPCVILFKKGIAVDRLVGFQDLGSKDDFSTRALENILKMKGIIDEKKKDDDDDDEESESKNRRIRSSTAQDSDSD

SEQ ID NO: 42502 - protein, 380 aa, Zea mays
  Clone ID: 700244377_FLI.pep
IIYGAPTVEQRRPRGRGARRAVVRAHLLIGPPGAGRARRRAPPEAALLRPRVPADGGHRGVPRGEGARGGPAHGGVPAADALPRLLRAGLRRLRAAGRRRQRQVRHREAVQPQQGLAPGVRGHRRDQGRAGARLPAHRLLRRHRRRRRQGLRRPDRRTWLGGATGEEGLADGQPERLQQPHPCSQRLPPHHHRQVRQPRPRHRRPRRTLRRAHHRRLAVRELPAAAVRTEQQRAGGPHAEPGVRGGAAGPVPAVGRRPEPVRAGPGDPVPVRQPVLPQHPGHERAAQLRRDPAHAEPRDHGPRPPLRRRPGPLLRPLRQVHGQDGQHLAAHRERRRDQAQLQEGQPLLASMEWPSVLWCSCFGFISGCMRRVSYLDLSVQ

SEQ ID NO: 42503 - protein, 83 aa, Zea mays
  Clone ID: 700222945_FLI.pep
KRRIVLFDSQVGGDKCHGLIQLMRPVVSVSVMDKLKIFATTAAGVSTGVEVTPRWNGGHEFVLTLGDATICVKVTWSMVDPRL

SEQ ID NO: 42504 - protein, 226 aa, Zea mays
  Clone ID: 700223049_FLI.pep
SSAALALQLNAHSSTKEQEMEVTEHNLKTQLENALKELEAAQHKASTATSGTAENALLEAKSVTDLKSKDLEEKKRELELLDNKVQTLEKEWSVVEEESLKKPTPAQREKVLERQLHSLIEQLTAKQAQAEILATDVHSKEKELERLNHLHRNLYGGANETGAPRSRLSRGLLSGPEDYYYDPKAGRKPYQAGVRTEGQNRLMILRSAIVLYVLLLHVIVFIKISV

SEQ ID NO: 42505 - protein, 428 aa, Zea mays
  Clone ID: 700223053_FLI.pep
QVPAEGDRELGHRRGDVRPAQHDRGRGGPAGPPPRGHGGDGRDLPRRPRRALRPVGGARRRRHPPRRRRRARRQRVHVLAGAVPVGARRAALRPPRGRQGVQPHGHGLQRHAHRARPRQRLLQDARGAGGSSDDIGVDRAQLVRGQQAHLHAGQLPVPLRRLRLLPDQRPAAPAARQAPSPPRGAHPHGRLRRGLQLRAPDGGRGRPPGVPPGQGAAARRGARLRAQPPRAGAPRAAAPGAAPPRLRHPLGAPGAQEAAARRGPWPWPPHHPHEGRRRPLLRAHGRRRRHRRRRQGTHAHGARPGALPHDAAPLRQHLRQQRLVRARLHGGQGPPAPGRPRPHAHLRRRIQVQQLRLDRREARHRRRRLEGPHPPLPAQGRLQPIHGQVRIRQGPHRLVIAPSCCCSTQPHQRTYFLFTPLLLYSLSC

SEQ ID NO: 42506 - protein, 350 aa, Zea mays
  Clone ID: 700224343_FLI.pep
CRNRNPSSLKLPCVQKQAEIRVLIGGGRQRLGLEDEQRVPHPRAKDPVVRVPVHLHLELVDGDALVAPELPLQVPDEDVDVAVDLDDHVDVDAAAAEVAAAALDADVVQLAPVVEPGLGEEPLLAKDVLLLAHQCGVPQRRPGPGAPERLLLEVAEEEDHLLVRHHGDVVVGQRLGLVGVPRAPEVPDHVHGPAVDVELLGAVLAPKVPRLHLHLAGGAAALVGGRGRATVGVAPLPAAAALVLAAARRPFDRHGQPVGEQVPAPRHRHQAVVAGDSRAVDQRRRALPGPGGGRSGRRDVRKLLARRETRRDREQVLHHVDVLWLAFGGTQCNPSYLVYLSGRSIDQGYI

SEQ ID NO: 42507 - protein, 143 aa, Zea mays
  Clone ID: 700224368_FLI.pep
EAIQISAIKEILSDRVDQKQVLNATKRENTRKDKQEKNLNTEIAMKSQENQTDDVQVGHGGVDELVRRKEENDKSNISRSRTEGKRHLVQHLETEIEKLSIRSSPLGKDRQYNRYWFFKREGRLFVETADSREWGYYNTKEEL

SEQ ID NO: 42508 - protein, 254 aa, Zea mays
  Clone ID: 700224449_FLI.pep
HGRGGPHADRAPQVLLLPRLPARLRRALLLLRARALGRQQVPEAAHRHGHHPLRQLHHPGRHRRVARAHRHGHHQLHRQIHLPQQGHLLRDPRHRRPVPALLQPAHARVRRPPQLLPASQQQPHRQRRRGRQQGAAVRRRTHADGGAGGRGQGAAAGQRQGGIGAHGAEDHAALAGLRAGRAGQAQVHARRRVQGAHEPKQAEQAHLARERLPLLMIYLASHTSCSTSPCPCIHLLPTSQLYCNGVFIDLFMLC

SEQ ID NO: 42509 - protein, 206 aa, Zea mays
  Clone ID: 700224572_FLI.pep
LKEYIMKRKGENKSEVGASERLIAGGLAGAVAQTAIYPIELVKTRLQTYSGEVGYVPRIGQLSRDILVHEGPRAFYRGLVPSLLGIVPYAGIDLAVYETLKDVSKTYILKDSDPGPLVQLGCGTVSGALGATCVYPLQVIRTRLQAQQANSESAYRGMSDVFWRTLHHEGVSGFYKGILPNLLKVVPAASITYLVYEAMKKNLSLD

SEQ ID NO: 42510 - protein, 123 aa, Zea mays
  Clone ID: 700259064_FLI.pep
RGEIRQRCSGNHRIWNYRESWWVHFGSHTGIPISKRRLGISITLKQKPNFSPEHGMFFSEGGWWNSGTGTRILARGIQYGKESRWALHRRRSSGRSRENWKPLLGIRRAWCHPGHSHHGQGKA

SEQ ID NO: 42511 - protein, 305 aa, Zea mays
  Clone ID: 700262392_FLI.pep
PTPVELFGALDGSLEKEGVGAKELAIKQRSLKRRYDRDVMKNAPPADKHERRLYLLSKHVWGRVPPTRPPVAKVRSATQAKCAGAQASNAAAQAQAKSADRQSGKEALKPKAKTLDEMRELYPYLVDEATILVEPAVLERVLLNIEDIDAQVLDKKIRKARKQLAGAITESARINNMEMPTIFLFTSSKLQPEKLRVENDNNLLVDHLEKMDDVDICAKQRLARVEHEVMELRQTVIAYQAQAKGIICESAKSGLQSIVAENQTPANVLQKKTEVPNGLIHKKNAAVTSKYYCAVPHNVPPNKPA

SEQ ID NO: 42512 - protein, 120 aa, Zea mays
  Clone ID: 700262918_FLI.pep
IVTVLNESSECIVLFSFYVPDSWSSCISVALAVVPPTVTMQNEEGKTVDLYVPRKCSATNRIITAKDHASVQINIGHLDANGLYDGHFTTFALSGFVRAQGDADSSLDRLWQKKKADIKQ

SEQ ID NO: 42513 - protein, 462 aa, Zea mays
  Clone ID: 700263159_FLI.pep
MIKFIQTHPPKPVHIYFGTMASSTCIYADARTSSEITRRIDHHSSNVKMMKALSRPHAACAVSFQLLHHLLGVGGAPVHRCRRVLEQRAERRGRQRGGRRATRGDCAGAGGRGRGRRQQEAEGPGEDVGREDAEDEEDVVPAGALHVGVAAAGAGHQRPRVRLHVPSQQRRRRRLALSLLLPLHLIRRRAFLVLVQRELAAAGVAADPAVRRHGHAHLLLHLVPERLVEVHHRRLRRRVEAHPGHGQPALDGRVDDDAAVAPPEVGQRSVRRVHVAPEVDVHEVREGRGVAGLLEAEVVAQAHGVHQMVQLPEVADGVGDEPPAVVLLDDVGGDDEDVAGAQQPRVVADREQPLLPPRHQHQVRVPPRVLVRDLLADCGGCAGDDDDLAEHVLLREGLERPLDAAQERQRRPRERQHHHARRRHHQVHHRVHDLLHRSSDPILPVLNAWKSRGRRTRVSLSL

SEQ ID NO: 42514 - protein, 255 aa, Zea mays
  Clone ID: 700264636_FLI.pep
LGIRHHFFALRSSRWQQSPIWMPSQVMDPRRHLSQFSNPTVAASSFSEEQFRLPTERQVGFWKQESLHHIGSKSVASSPIEKPQPIGTKTVGRVEPQPYKLRDQKTAFSLEHKTFGQERHVNLPPSLWRADQDPNLQSDPSLFPDGRRTSPNEAYNENGLFSSSLSEIFDRKLGLRSMDVRLRQPVQKVDLTHVDDEPFELTEEIEAQIIGNILPDDDDLLSDVLDVGYTAHANMGDDVDDDIFYTGGGMELETD

SEQ ID NO: 42515 - protein, 387 aa, Zea mays
  Clone ID: 700265102_FLI.pep
ATIPTTTYPPFPALSFQLLFLQRQGATMGQQQQGPAARRMATLASHLRHPSVSHPQMEDVPLLRGSNCRAKGAAPGFKVAILGAAGGIGQPLALLMKMNPLVSVLHLYDVVNAPGVTADISHMNTGAVVRGFLGQPQLENALAGMDLVIIPAGVPRKPGMTRDDLFNINAGIVRTLCEGIAKCCPNAIVNVISNPVNSTVPIAAEVFKKAGTYDPKRLLGVTTLDVVRANTFVGEVLGLDPREVNVPVIGGHAGITILPLLSQVNPSCSFTSEEVKYLTSRIQNGGTEVVEAKAGAGSATLSMAYAAAKFADACLRGLRGDAGIIECSYVASQVTELPFFASKVRLGRCGIEEILPLGPLNEFERSGLEKAKKELAESIQKGVSFIK

SEQ ID NO: 42516 - protein, 221 aa, Zea mays
  Clone ID: 700265216_FLI.pep
SIFCLLFRCTELAPDRVRPALEKTLKDLQLDYLDLYLIHWPFRLKDGAHMPPEAGEVLEFDMEGVWREMEGLVKDGLVKDIGVCNYTVAKLNRLMRSANVPPAVCQMEMHPGWKNDRIFEACKKHGIHVTAYSPLGPSEKNLAHDPLVEKVANKLDKTPGQVLLRWALQRGTSVIPKSTKDGRIKENIQVFGWEIPEEDFRALCGIKDEVSEGRDDMALGV

SEQ ID NO: 42517 - protein, 499 aa, Zea mays; identical to SEQ ID NO: 40938
  Clone ID: 700265223_FLI.pep

SEQ ID NO: 42518 - protein, 215 aa, Zea mays
  Clone ID: 700235670_FLI.pep
DAKKVSVGIITPYKLQLKCLQREFKDVMNTEEGKDIYINTVDAFQGQERDIIIMSCVRASNHGVGFVADIRRMNVALTRARRALWVVGNANALMQSEDWASLIADAKARKCFMDLDSIPKDFLPMRVPSNTPGRNSSNNIRRTGGGPRPRRLDMFSEPRAGMNMRPDEYERLNSVPRNGSYRNLDDFVHPGDRSRDNMQFGHPRRPNASNGRREV

SEQ ID NO: 42519 - protein, 150 aa, Zea mays
  Clone ID: 700235791_FLI.pep
KNSDLKSFLGDDWIRIHNRKFQQQAMRYERASWNNVLSYLSDDGLCASGDAASRKTIREKIKNFNLSFEEVYRVQTAWSVPDDQLRDDVRISISLKVIQAYRTFVGRYSGFLDGSRHRDRYVKYRAEDLETLLLDLFEGTQKTLQHSCRV

SEQ ID NO: 42520 - protein, 236 aa, Zea mays
  Clone ID: 700235839_FLI.pep
NLLSPRSPPPPPPTSPHGHTCPPRRRGPTPMAKLPRLPCSFAVLALMCIIPLTAPRPALSSRAAPRDGVSFAGAGNTIHQLLKDHGLPGGLLPRGVESYTLDESTGLLEARLSAPCYATYDNGELAYFDNVVRGNLSKGALRGVEGLSQEELFVWLPVKGILVQDQEPGVILFDIGLAHKSLSRSLFEDPPDCKPSASGGMSAASAARREGTQGVTGLRLRREMAAAGSDQSQEQR

SEQ ID NO: 42521 - protein, 141 aa, Zea mays
  Clone ID: 700235843_FLI.pep
FVNGSLAFGGMGGGADSVHPADTLKCLEDLSKISGLKLPDFTELLSETIFRSEVLGNLLATQKLDDHDIEGVIHLYYNIISQPCLVCKNLTDVELLRKYTFLHSLPLDKSLKIVRDFLISATAKDCSLMISFRPRENGYRF

SEQ ID NO: 42522 - protein, 187 aa, Zea mays
  Clone ID: 700239986_FLI.pep
QAATQATMATALLRRALHLRRVLPSPAVTAAASQRLIPAFSTTPTPTPTTSQQNAATTTIDLSSDESRRRLLNRLVYRSKQRGFLELDLVLGTWVEQHVHAMDEANIRALLQVLDLENPDLWKWLTSQEQPPEDLNSNPVFAAIKSKVTDNLTKHASPETRSTPGQPWVRGWDDIKKGKDGPKYGNQ

SEQ ID NO: 42523 - protein, 184 aa, Zea mays
  Clone ID: 700241344_FLI.pep
RGAQEGTGRDRRSRGHLPPTRRRGRAPTRLPAPRHQRDPAHVPGRPAAPAARVVGGLQGRRLRRGPRHAAHRERVRHPQGPAGVGGPGRVQAGAVRGRQGRGAAPDAVRDGAAQVPWGDPRAADHQPGARHADPVLRLGPSGRPRDRHGRGRRAHSAQSRPVGGHVQASCSYAPSSSGALNLML

SEQ ID NO: 42524 - protein, 194 aa, Zea mays
  Clone ID: 700241392_FLI.pep
DVTKWNNSPEHETKKITKVSVRLLPRLPQNPRKHIIITAQTLQSISRAPSAFCSSNPISSICPKLSAEPRLTPTGLLLTLGSLFSINNVKTMVMLVTMRNRRGLVPTNTLVMAPPMSRPQFDRTTRKAMTTDATKRLLSVAEMALVISCGVKSKSSIRVSTDQPELSAWVDWLGGADLGLISASLLGWTLATSS

SEQ ID NO: 42525 - protein, 219 aa, Zea mays
  Clone ID: 700244463_FLI.pep
DAKAELEKACPRTVSCADIVAFAARDATRNLSYGAIDFQMPAGRLDGRVSLKEEAEKNLPGPFDSLDDLQKSFAAQGLGFNDMVTLSGAHSIGVARCRFFTNRLPPNPSDMDRDLARSLKATCDQNGLDSKVVQDPVTPVALDNQYYKNVHNGKVLFTSDAALNSTDDARKVVDGFANNAVDWYRAFADAMVKMGNIRDRTINRPKPEIREKCFIYNTY

SEQ ID NO: 42526 - protein, 112 aa, Zea mays
  Clone ID: 700224738_FLI.pep
LKKELLVQGPYYYSSPALTKINRPMSIVWEQHFSVLHGGDMPQKHLNDIWGDACSLLVELFDFRRCLFLETLDVRTRVTTALCDLPLELSLHLGTVFGYFPLCLLFRLPKPC

SEQ ID NO: 42527 - protein, 309 aa, Zea mays
  Clone ID: 700224868_FLI.pep
VINEYLVEYPEVPQWAPWCMEQPKSVDWDALINSIFSEAENVPEINWCEPGESSAMEVLLGSKDGFLTKRIKNYDTGRNDPTKPHALSCLSPYLHFGHISAQRCALEAKKRRHLSPKSVDTFLEELIIRRELADNFCYYQPQYDSLAGAWEWARKTLTDHTGDKREHIYTREQLENAKTSDPLWNASQLEMVHHGKMHGFMRMYWAKKILEWTSQPEEALSIAIYLNDKYHIDGRDPNGYVGCMWSICGLHDQGWKERPVFGKIRYMNYAGCKRKFDVDAYISYVKRLVPRAKKRKTEEGESTVKESNV

SEQ ID NO: 42528 - protein, 61 aa, Zea mays
  Clone ID: 700260242_FLI.pep
SNSRFISIGKHSWSKSDGAPDRCAKSKHLHEVDDDLGAFLFGVCKIWYAVASVAMFYPFWW

SEQ ID NO: 42529 - protein, 312 aa, Zea mays
  Clone ID: 700260657_FLI.pep
LVVDRRGRLRSHKPDLFAPAMDRLGANPANSCPLTPLGFLERSATVFGDCHSVVYHDTVFTWSQTHRRCLRLASALVSLGINRGDIVSVLLPNVPAMYEMQFGVPMSGAVLNNINMRLDARTVAVLLRHSGSKLVFVDPASLTLIRDALKQLPQGHPAPRVIPVEDPHEKGLPAAPPGSLTYEGLLEKGDPEFAWVRPASEWDPMVLNYTSGTTSEPKGVVHCHRGIFLITLDSLIEWAVPPQPTYLWTLPMFHANGWSFPWGMAVVGGTNVCLRRVDAAEVYATIAGRGVSHLCGAPVVLNMLANAPEGVR

SEQ ID NO: 42530 - protein, 305 aa, Zea mays
  Clone ID: 700263349_FLI.pep
MQAWHFGGINYPVGGVGGIAISLADGLVEKGSEIRYKANVTNIILENGKAVGVRLSNGKEFFAKTVISNATRWDTFGKLVKEELPEEEKNFQKNYVKAPSFLSIHMGVKASVLPAGTDCHHFILEDNWSNLEKPYGSIFLSIPTVLDPSLAPEGHHILHIFTTAGIEDWEGLSRKEYEEKKEVVANEIIRRLEKKLFPGLQDSIVLKEVGSPKTHRRFLARNDGTYGPMPRGKPKGLLAMPFNTTSIDGLYCVGDSCFPGQGVIAVAFSGIMCAHRVAADIGLEQKSPVLDAGLLGLLRWLRTLA

SEQ ID NO: 42531 - protein, 374 aa, Zea mays
  Clone ID: 700263636_FLI.pep
VRPRPRVLAGGRSEEADRGAEIPAGGMAKGGGERGTLLPVSADDGKGNDGGGGGDDAVLFKGSAMTRRGGAAALSYMACSVLLVMFNKAALSSYKFPCANVITLLQMVCSTCLLYVLRRLKIISFTNSDPSVPSDSLFFVPFRLLLRTTPLSLAYLLYMLASMESVRGVNVPMYTTLRRTTVVFTMTMEYFLAKQRHTPPIIGSVALIVFGAFVAGARDLSFDARGYAIVFVANITTAVYLATINRIGKSSGLNSFGLMWCNGLVCGPSVLFLTYIQGDLKRTMEFPYLHSLGFQVVLLFSCILAFLLNYTIFWNTILNSALTQSMCGNLKDFFTVGIGWVLFGGLPFDLLNVIGQGLGFLGSGLYAYCKIRGK

SEQ ID NO: 42532 - protein, 70 aa, Zea mays
  Clone ID: 700263676_FLI.pep
HPNPKYNDGTHKTFTCICLVPSDGPLFLIPSKCQGKCTACSTSHVKPLPVRKYPVPTSTQFMLNNQADVF

SEQ ID NO: 42533 - protein, 250 aa, Zea mays
  Clone ID: 700265457_FLI.pep
ARAAGAEAVYAHGEVSRDEVRAEERVQKAVEKEGINVKYFWGSTLYHVEDLPFRLEDMPSNYGGFREAVKGLEVRKVLEAPEEVKCVPMKNVLEPGDIPTLAELGLTAPPAMSQDSKPAVGSTLIGGETEALERLKKFAAECSMQPNKVDKSNTQDSIYGANFSCKISPWLATGCLSPRFMYEELKKHATKAIPFGSTPKNNDGTSDAGTNWLMFELLWRDFFRFITKKYSSVQKTSEVATGCTPAPALA

SEQ ID NO: 42534 - protein, 104 aa, Zea mays
  Clone ID: 700267963_FLI.pep
HPVRSDAHPTSVVDQAQAAEPAGICGRSGRWRRRRWPSSCCSSSSLRRRRRRWRRRACAGAGARASRGSACPTTTARRCACRKATAAATATASCASASASGSAS

SEQ ID NO: 42535 - protein, 52 aa, Zea mays
  Clone ID: 700237474_FLI.pep
LSAKSRSFLSFIVVCELLATGARGVRKETKSFSFYRQTDLIHTYIQLRRNYI

SEQ ID NO: 42536 - protein, 333 aa, Zea mays
  Clone ID: 700237475_FLI.pep
QMLNCVAGLREYFSQTDEIHTVPRIPVMHTMVNAASMKKDQNLQEPDSKTKQADNKHLDMVDEESEDDDDYQVPDADVEEEPTKSDSDAKNSDPIDLSWFSGIIRQDTNEKSRNCWAVPDSKIFKVRSKNFPHDKSKVPAGKYLMELVAVDWFKDAKRMDHVARRKGSAVQVAAEKGMFTFLVNIQIPGPSHYSLVLYFVSNSLKKGSLLQRFADGDDDFRNSRLKLIPSVPKGSWIVRQSVGSTPCLLGKAVDCSYLRGPDYLEVDVDIGSSAVANGVLGLVFGVVTTLVVDMAFLIQANTYDELPEQLLGAARLSHIEPSAAVYPVLDNIS

SEQ ID NO: 42537 - protein, 379 aa, Zea mays
  Clone ID: 700236724_FLI.pep
QHAQYTLTETRTDYLRIFNPILNLVNKNATRWPDLPMIADKHVGAAHLDHRRGEVRVVLVGRRRLDHLLDVASGDGVVQEAAVGLEQPARGEHVAVVAQVEGVVAAGVQRHLDLPIIVAGSGRRRAELPELGGVGRVQRRVLAVHVAGEVVEPLLDRAAVGGPDAVAPEEDGDVLRVKRLDAEEGLHVDNVGVRRRQVVVDVLGHGDVAVAPPGLHVVPRPVAQVDGVPRRHGDDVGAGDGERADGLEPGLDPLDGVEPSHATVGQRVPLRLPLLPRLEHDRPVAALHEAVVVVHPEQGRRDRGVLHEDEPHLGEDHVLRDGARRMVEPDLQRGLRRRARERGTDQSQRRAGHQQEQRPPPLPPHQEPAVPIQDRSSCS

SEQ ID NO: 42538 - protein, 130 aa, Zea mays
  Clone ID: 700240807_FLI.pep
RQSAEKAFIGGKSCKGHTLRFMWLTASPGSNNHYRHQNTSVHVRPSTIPGHTQSISSESPSPVGKVSSLATSVMVAIPHNKSISTVENTKTSPAGVSKVSCGSSSLSSNDKCPSECGSTRNVISDSDVPQ

SEQ ID NO: 42539 - protein, 268 aa, Zea mays
  Clone ID: 700241888_FLI.pep
NGFSDFACLIETHPVPAPVSISRIPIPLPEAEAMAAAPAVRFPVFGLVRLLGLAAAAAILFWAVHFRGGMALSTEEESKLPLFNVHPVLMLIGLVALNGEALLAYKTVPGTKKLKKLVHLAVQFLAMFLSLIGLWAVWKFHDERKIDHLYTLHSWLGLTCFIFFSLQWAAGFWTFWYPGGSRSGRAFLLPWHVFFGIFIYVLAIATSVTGLLEKSIFMQSAKMIERFSTEAMFMNSLGMLLVLLSSLVILALVSPGPSMIDTYRGSSE

SEQ ID NO: 42540 - protein, 327 aa, Zea mays
  Clone ID: 700242093_FLI.pep
PNKALMWCSCSKPGNINEHSICRPDAPNSKSEKRKQNEGKENRSLLKASCNNKRIGWRTGRRNIHTRAMHACPGHALTPSDEAAADGDAVGDGELADLNALVRGEANVEVPDGGREPPVDVRHGRLRRHGHGPAPERVVVHDGAADAHQAEQLLVVIDVVGLVGVDEGEVEGAEVGLVGEELVQVAQRGALAEVDLARHAGALDEGAADVVVVAVHVEGDDLAVVGERQRRGQQRVARVHAHLQGAARAGELDEHPQQLRLVGRRLHEPPLVLVGHEAQLTHALWLVRQHRRVEDILVEGLALEQRLVAAVHAAVDEGNGVTGGRHG

SEQ ID NO: 42541 - protein, 224 aa, Zea mays
  Clone ID: 700242305_FLI.pep
LTYEQAYTYLDEAHSIGAVGKTGRGVCELLGVDPADVDIMMGTFTKSFGSCGGYIAASNEIIHHLKHTCPAHIYATSMSPPAVQQVISAIKVILGEDGTNRGAKKLAQIRENSNFFRSELQKMGFEVLGDNDSPVMPIMLYNPAKIPAFSRECLRQAVAVVTVAFPATPLLLARARICISASHSREDLIKGLEVISKVGDLVGIKYFPVEQEKTTAVENLKKIQ

SEQ ID NO: 42542 - protein, 152 aa, Zea mays
  Clone ID: 700242361_FLI.pep
GANNLPSPFDPLDKLQEKFRNFNLDDTDLVALQGAHTFGKVQCQFTQENCTAGQPEETLENLDQVTPNVFDNKYYGNLLHGAAQLPSDQVMLSADPVAEMTTAPIVHRFAGNQEDFFRNFAASMVKMGNISPLTRNDGEIRKFCRRINSEGY

SEQ ID NO: 42543 - protein, 370 aa, Zea mays
  Clone ID: 700243577_FLI.pep
AVSAYHMELSPNNSTDQSLLDAQLELWHTTFAFMKSMALKSAIHLRIADAIHLHGGAASLSQILSKVHLHPSRVSSLRRLMRVLTTTNVFGTQQPAGGSDDDSEPVYTLTPVSRLLIASQSSQLAQTPLAAMVLDPTIVSPFFELAAWFQHELPDPCIFKHTHGRGIWELTKDDATFDALVNDGLASDSQLIVDVAIKQSAEVFQGISSLVDVGGGIGAAAQAISKAFPHVKCSVLDLAHVVAKAPTHTDVQFIAGDMFESIPPADAVLLKSVLHDWDHDDCVKILKNCKKAIPPREAGGKVIIINMVVGAGPSDMKHKEMQAIFDVYIMFINGMERDEQEWSKIFSEAGYSDYRIIPVLGVRSIIEVYP

SEQ ID NO: 42544 - protein, 384 aa, Zea mays
  Clone ID: 700222430_FLI.pep
VREEAIMVAVEVVPASAESPIPIEAKTAVTSEAEAEAEAEGEVEAEMKGDAAATAGETAEEEEEEKVYKSDLKKLENLMSKLNPSAQEFVPSSRRTAPAAVAAAKPAGGRVLSADAPVFVSAAEYYGAAGGHLEIGGGGGKVVVGGGGRDSSSDGSSNGGGGGSRHQPNRRRRNSFNHGRRRGAGGRPRRGDREDSVRRTVYVSDIDQHVTEQKLAEVFSNCGRVVDCRICGDPHSVLRFAFIEFSDDAGARAALTLAGTILGCYPVRVLPSKTAILPVNPKFLPQTDDEKEMVSRTVYCTNIDKKVTEEDVKGFFQQACGKVSRLRLLTDIVHSTCIAFVEFAQAESAIMALNFSGMVLGSLPIRVSPSKTPVRPRSPRVMSN

SEQ ID NO: 42545 - protein, 44 aa, Zea mays
  Clone ID: 700222435_FLI.pep
TELLDPMQFELHVINIIFSLKATYRGILGSSYLATCNVLMPMLP

SEQ ID NO: 42546 - protein, 197 aa, Zea mays
  Clone ID: 700223942_FLI.pep
IGLLSLGLARSPHGTLPEHQPWQSRRAPCAASRFTSPPRSPAPSARFPRPPPRLPRPPPPRPPRSLTASCASSPSIPTGRAAMWSASRGRHSFALWPTRGSSSRPPTASRISTRAPPSARSTSRRSGLTSCHHRPTRSDTCSRARPGTASSTSTRAWAARSSSRRSCRGWSSPSPSLSRGTSHNGLPTKGKVRLLTL

SEQ ID NO: 42547 - protein, 248 aa, Zea mays
  Clone ID: 700224123_FLI.pep
VGSGSVPDRHAKSVQSAGARIRLHGVQRGHRPLCRCRPRREGVRRRPAEGARLLVLLLRPLLGRALGTRLGAERLRVRHVVGAVGVAAEEAARALALGRRRERAPPPGAPGPRRRREELGAVAELGDVRWHAQRAQGLGSHAHGRRARHGLLRGRRVLGRRLRHGRVAPAVLLGGHRRARRLVMVAAAPLGTVPPWLAVVHFENLGVLLVVRVPLLHPAVQPVPPARFRPLPTQPLAARRLGRVCLHR

SEQ ID NO: 42548 - protein, 314 aa, Zea mays
  Clone ID: 700258204_FLI.pep
RMINLFELSVGASAKVSSRDGSPVRGTQSERKEYAGSKAPPASLEKTLSFEIRASHFDQPSPTSVFDVQFEDISEKSPISSESAITAKQEPLSRSIPIGSIARTLSWDDASQEAPPQCCTKGDNSHEQEQHEFVEKTLASAGFCNEKTQDIFARWHSLDRPLDPAVVEQLLERKVEDAKCRERRSNQRLLIDSVNAALLDIGQSKVWGGAYPCTARHYSNAPGVGTCDDDVLVTDEAWRLVRSWLFDDENDIAGLGDNAGLAADWVVGREIHGKGWAETLRMEVDEMSREICGEVLGELVGEAFSELAGAAGWH

SEQ ID NO: 42549 - protein, 183 aa, Zea mays
  Clone ID: 700262287_FLI.pep
PHDASAVHRPRRKRASSKRSNSQLSSTSRNRASERAVSAPHGHGRVHLLRVPQAAFRGGVQEEQGRPGQGAGRQGAQAPLQGRRDHAASAVPRRPLLPHQHPLRRERDDRGAGVHGVGGDAPVPAAQGAVRAEREAPRRPLHRQIHPQPLPPEPARPVLATISVSVLYISIASLCIDIHTYIC

SEQ ID NO: 42550 - protein, 250 aa, Zea mays
  Clone ID: 700049035_FLI.pep
LDKTTMKMHEVEEPPAEITRDAHPAHALRLVATDDGAPFRCDGCKEPGSGQGRRYRCGHGCDFDLHVACALAGPTLRHPLFGEGLEFQLLPEAPPPVDKTFCDACGLRAPGLVYHCFDRDLDLHPTCAALKPESAFPGGHLAQLGWEAAEHRCVACDAAAAAAGKRFWAYRWAYGGTHGYLHVACMKKIAFQSWEQAYQASVVGGGLVEASVPTMTAVLHRKRTDEITGGVKIIDTGIRGQYLSSSTWGT

SEQ ID NO: 42551 - protein, 92 aa, Zea mays
  Clone ID: LIB3150-033-F6_FLI.pep
VKGADIVYTDVWASMGQKEEADYRKQKFQGFTVDEALMEIAGPQAYLMHCLPAERGVEVTDGAIEAPNSIVFPQAENRMHAQNAIMLHVLGA

SEQ ID NO: 42552 - protein, 94 aa, Zea mays
  Clone ID: 700045543_FLI.pep
CLVVIINQYNCQGEIDLGMMMSPMLLCQGSARWAARFSSGPVPGYADCWTQKPTKASMARRPFLISLSLYSSSLAGSLEKPSGSKAPPGYFFFS

SEQ ID NO: 42553 - protein, 312 aa, Zea mays
  Clone ID: 700332204_FLI.pep
SMAATEVYSPTTAAAAQQQRGKAASQAWRAVVGWIGFFLQVLLQILRGTPSCAQLLSFVGFRYPLLSGPAASEPLPEVAFMPLHSEIPADAAPAPKPASEPLGRLTVVLDLDETLVSAYESSSLPAIVRTQAVEAGLHCFDMECISSDKDVEGKQKVNHVTVFERPGLHEFLRKTSEFADLILFTAGLEGYARPLVDRIDVHNRFRLRLYRPSTVTTEYREHVKDLTRVSKDFGRIVIVDNNPFSFILQPLNGIPCVPFSAGQHSDDQLMTVIFPLLKHLSLQKDVRPVLRERFHMPEWFQNHGIPQVSQAV

SEQ ID NO: 42554 - protein, 268 aa, Zea mays
  Clone ID: 700335286_FLI.pep
QNSNDSSISSSNSSWEPKVPLLYGGTFSPWGDVMVSREMRREDDDKVSDHDVEGGEEDLDCSEPGSLRRCSWITKNSDEAYVQFHDECWGVPVYSDNRLFELLSLSGMLIDHNWTEILKRRDMYREAFADFDPSAVARMEEEDVAEISGDRELRIAECRVRCIVENARCIQRVAREFGSFSGYMWGHVNHRPVVGKYRHHKYIPFRTPKSEAVSKDLVRRGFRLVGPVIVYSFMQAAGMAIDHLVDCFRFHDCVRLAERSWGITNVAA

SEQ ID NO: 42555 - protein, 359 aa, Zea mays
  Clone ID: 700335650_FLI.pep
EPPPHNPGRGGRRPIRIHHPKLPFCLLFIHLHKDNQGRKAMVLFELDPDIIRWGLHHLLPAPAGYSPHCRTQTTPTTPCTAFARPPHQPIGDMGTSSSVEIKVEHVDGVDNDAIIAQALQEELSNVAFAEASGPTSAADNQQHSAVLTQQWLRPRAVHVEPASQEAGTREEPFSTCSSPGDDNNVQDSQQCLIELMDNFSVIDGEVGKRLNNMVPVPHVPKTNGEIPSVDEAISDHQRLLDRLVVYGLVDLKVKGDGNCQFRALSDQFYRTPEHHRFVRQQVVKQLESHPEIYAGYVPMDYREYLKKMSKSGEWGDHVTLQAAADSYGVKIFILTSFRDTCYIEILPVVEKSRREVLAI

SEQ ID NO: 42556 - protein, 333 aa, Zea mays
  Clone ID: 700336177_FLI.pep
AAMEGSAAAPLRTRICIIGSGPAAHTAAIYAARAELKPVLFEGWMANDIAAGGQLTTTTDVENFPGFPNGIMGADLMDNCRAQSLRFGTNILSETVTAVDFSACPFRVSADSTTVLADAVIVATGAVARRLHFPGSDAYWNRGISACAVCDGAAPIFRNKPIAVIGGGDSAMEESNFLTKYGSHVYIIHRRNTFRASKIMQARALENPKIKVLWDSEVVEAYGGANGGPLAGVKVKNLLNGEVSDLQVSGLFFAIGHEPATKFLGGQLELDSDGYVETKPGSTHTSVKGVFAAGDVQDKKYRQAITAAGSGCMAALDAEHYLQEIGAQEGKSD

SEQ ID NO: 42557 - protein, 104 aa, Zea mays
  Clone ID: 700336186_FLI.pep
PSTRNLRVVYIRQACMVNRFQEQRNMMTQLHLIISYSPLSLGNITISHNYSEIVRNHNEMGIKNIMMPLQMHVPLTFDFLAGDAAVASCLLTPLAIKNWVWSQE

SEQ ID NO: 42558 - protein, 69 aa, Zea mays
  Clone ID: 700339304_FLI.pep
FICTWRGWICAWRPNLGVLMFMSIKSCCPSQIFAIYILREVCYNYILLCIMDYIIFINMDTVLLWINIF

SEQ ID NO: 42559 - protein, 122 aa, Zea mays
  Clone ID: 700339668_FLI.pep
RLWHVIPNCSDNRPVYPRGQGRKLLSAARRGLSARQLYTPRLPRGGVCLRQLYTPRLPPERHFICLLRTVCVSSFFPLYTICCSYTGQEYGMVWRQAAANLFLPTWCSACVTVFDRSCLLCC

SEQ ID NO: 42560 - protein, 123 aa, Zea mays
  Clone ID: 700339924_FLI.pep
SNKPDFSQKGNSKRPKSGNATSENPLSEGASASMVFLKGSVKRKSPGFLSDKPSFKKQKPHKPDSGRPDGKRFVRDSDTSAPFVKNAGKQKQSIAELADLAGKEKLTASEVRKLLKPEMSGKS

SEQ ID NO: 42561 - protein, 352 aa, Zea mays
  Clone ID: 700344846_FLI.pep
IHSTAAPPPCSAEKPAMRGRKRQQVSASSAAALVKGRESTKQKEKEARKEKEAREAGREPAAKERQMRRKAGKEKETETGGEGKEPAKEKEVREEGKENDKHKEKAKTKANVCPQFFKVFFPEQSTERLRIPPMFNQHLKEQQPTGAVSLRGPSGNRWQAALASESESEAAWCFDQGWKEFVTDHSLRLGHFLVFTRDGPAQFSVAVFSSSGVIDPAALDARPTANGGAAVKLEDGEGVGVRGDVDAGGDTSSEVSLLPAEEGDGGATGRRTGATSGGAGGASEMSLVLREEGRGVTGKRARATTSDLPADASAPKKHSALAKKAGKRRPQAATSKDVSMIVHSKNDTRQEP

SEQ ID NO: 42562 - protein, 95 aa, Zea mays
  Clone ID: 700380558_FLI.pep
GWHNTEGNSVQWLCIACVDRKGMMAEVTSALTACGITIWSCVAEVNKRRGMGVMLFHFEGSYENVVSACSSVDMILGVLGWSVGCSWCPLGVLEC

SEQ ID NO: 42563 - protein, 142 aa, Zea mays
  Clone ID: 700349508_FLI.pep
HACMPVWVDHDRDWTRRTPFSWVPEFLDRTTGIKILFLWPSLEPYPQYIFFIKNGQISGIVVFLFFHAWSSVSGFNFFGSPVASLYIISLLCIITSYSIRLYTASWFRVITHSNRSSSPGNRLARCASPKSSFRLERRNTPH

SEQ ID NO: 42564 - protein, 294 aa, Zea mays
  Clone ID: 700349535_FLI.pep
KLMEAAKSNEDALRKTSNELELKLKSSDYVKQQMLEEISGLKLQAQKIMNLQDEVSKLQSSLDEAKFEKGKLEEFLRSVTEECQELKAQKAMLTDKVSYMQETLRNGEEENRNRIAMHAKLMRLESDLTALEASHVHEAELKNELSRIKRSNSEYQRKIQSLGQENEDLTRRVQIMEKGFERMSHAKENLGKQEIGGDNQEAIQSTIQLLETKLAEALEENKIYRAQQKSSMSEGQPAGGDGKEGNTDRILQLEGELRDMKERLLNMSLQYAEVEAQRERLVMELKAIKKGRWF

SEQ ID NO: 42565 - protein, 265 aa, Zea mays
  Clone ID: 700350993_FLI.pep
FLLSCQLDFSPAFKVEKEAVWSIMAFPTPASVFVDENQQINRGKRAAGSRTKGLKPSENPGNLERRALQDLSNFAKGTGLKGTSTLKERSQRKAFSNVTNTIKGTALKDRPITKEKSTQKQRSQNPVKILSDEDIKLCHEWAKDGVEGFHSTQNDSQKVDKDLLAKRVKKKVASVNSALRGWSDTVFDSLMFPAREVLYEPKVLELEPEILRDISWDLPSSVDGKAKLDEDCLAYDQLDQYPSLENNPVTFELRDEPAIPQLGVH

SEQ ID NO: 42566 - protein, 211 aa, Zea mays
  Clone ID: 700381343_FLI.pep
VQGLYVAKLVRSFCRSSSDSEEEDIFEYVASTLVNISKVEAGRRILLEPKRGLLKQIIRQFDSTNQLRKKGVAGTIRNCCFEADTQLLSLLSLAEYLWPALLLPVAGKKIYSEEDRSKMPLELSSALSHEREVVEDSEIRQQALEAIYMIVLQDGGRRSFWSVNGPRILQVGYEDEKDPKVMEAYELIGSLLVGKGEDVQDNKKEQGEKPQ

SEQ ID NO: 42567 - protein, 479 aa, Zea mays
  Clone ID: 700355048_FLI.pep
RVIESLGLQPVRDSLVGTVEQRGISGGQRKRVNVGLEMVMEPSVLILDEPTSGLDSASSLLLLRALRREALEGVNISMVVHQPSYTLYRMFDDLILLAKGGMTVYHGPVKKVEEYFTGLGIVVPERVNPPDYYIDILEGIVKPSLSSGGSVKDLPIRWMVHNGYDVPRDMLQSSSESESTSRGDAGHAPDEPSSVVSLLWGNLRDILGQKKDEYDYNKTSEDLSKRKTPGILRQYRYFLGRCGKQRLRDARIQGVDYLILCLAGICLGTLAKVSDETFGALGYTYTVIAVSLLCKIGALRSFTLDKINYWRERASGMSSLAYFLSKDSIDHFNTVVKPIVYLSMFYFFNNPRSSIWENYIVLLALVYCVTGIGYTFAVFFQPGSAQLWSALLPVVLTLIATQQKDTILADLCYTKWALEAFVIANAQNYSGVWLITRCGSLVRSGYDIEHEALCIAVLIANGVLFRCVAFFCMVTFQKN

SEQ ID NO: 42568 - protein, 220 aa, Zea mays
  Clone ID: 700355666_FLI.pep
QRLLRTRQQCMVSQVAGLYPVRVFHDLPRHAENPCADTNGEHVTLPEENRTFSGGDGTHLPTIIKSPEARGWTFFGWDIMKHKMKQKSYRNKVLQRSAAVLGYAAHAVLLIACYLDVPLRYPLRFGGSRSYVSDRLPSADTASSAALASTRNTESELTEYPLFLECQDDDSTSASYAIYLLHKDTEQLLNYVGAESCGRHVFGNLRELLRIVQSDKFVYR

SEQ ID NO: 42569 - protein, 227 aa, Zea mays
  Clone ID: 700355680_FLI.pep
ADMAAAKIAPSMLSSDFANLASEAERMVRLGADWLHMDIMDGHFVPNLTIGAPVIQSLRKHTKAYLDCHLMVTKPSDYVEPFGKAGASGFTFHIEVARDNWQDLIQSIKSKGMRPGVSLRPGTPVEEVFPLVEAENPVELVLVMTVEPGFGGQKFMPEMMDKVRTLRKKYPSLDIEVDGGLGPSTIDVAASAGANCIVAGSSIFGAADPGAIISVLRKSVEGSQNKN

SEQ ID NO: 42570 - protein, 481 aa, Zea mays
  Clone ID: 700355918_FLI.pep
VPSIFNRTKATCFAYGQTGSGKTYTMRPLPLKASQDILRLMHHAYRNQGFQLHVSFFEIYGGKLFDLLNDRSKLCMREDAKQKVCIVGLQEYRVSDVETIKELIEKGSATRSTGTTGANEESSRSHAILQLAIKRRVDGNDSKPPRPVGKLSFIDLAGSERGADTSDNDKQTRIEGAEINKSLLALKECIRALDNDQTHIPFRGSKLTEVLRDSFIGDSRTVMISCISPSSGSCEHTLNTLRYADRVKSLSKGSNAKKDVSLAVPLRESSPSPLPSVVPSFSASEVMNDITERNNFGWPKQQYVKERPAPTFVERMPKVKDAVEFATSDGAYLKGQRSQGCMAPNIAEIPDTMYQQRRQPARKAKDTALRNNMRNSVAYPTRSVEPDEDDHLNNLLQEEEGLVSAHREQVEATLDILKEEMNILGEADQPGFQLDDYNITRLSSILSQKAAGIVDLQARLEQFQRLLDENNVLLYAQSPRL

SEQ ID NO: 42571 - protein, 476 aa, Zea mays
  Clone ID: 700383137_FLI.pep
AAAAPLLPSHHTPQPQQDRAEAMAKPKPSSAGAKPTAAATAPAPPVTVHSALVTYTSMLALLSLCPPFVILLWYTMVHADGSVVRTYEHLRDHGVLEGLKAIWPMPTLVAWKIIFGFGLFEAVLQLLLPGKRFEGPISPAGNVPVYKANGLQAYAVTLITYLGLWWFGIFNPAIVYDHLGEIYSALVFGSFVFCIFLYIKGHVFPSSSDSGSSGNVIIDFYWGMELYPRIGKYFDIKVFTNCRFGMMSWAVLAVTYCIKQYEMNGRVADSMLVNTALMLIYITKFFWWESGYWCTMDIAHDRAGFYICWGCLVWVPSIYTSPGMYLVNHPLNLGPQLALSILLAGMLCIYINYDCDRQRQEFRRTNGKCSVWGKAPSKIVASYQTTKGETKTSLLLTSGWWGLSRHFHYVPEILSAFFWTVPALFNHFLPYFYVIFLTILLFDRAKRDDDRCSSKYGKYWKIYCNKVPYRVIPGIY

SEQ ID NO: 42572 - protein, 200 aa, Zea mays
  Clone ID: 700423858_FLI.pep
PGPDFGSQPSLSRRKLTSILHESGKKCSLIDDMSILDRYSDTSCNSIAVFSDDDALSRSMKEVKNDKVAFIWTQFSGLISYFRRRAEDPEKLKSCVAEAIALKTCDTKTASKKAKSQICPELKEILCELDKKIKQLYGALPDNSMLIVCTGHGDTPLVRRLRKMLHHEEETIDSRENIVQALGDLQAQAEVALCFCCVKH

SEQ ID NO: 42573 - protein, 627 aa, Zea mays
  Clone ID: 700333641_FLI.pep
SQSTSGLAQISPPGSIFPPQTFARLSRQRRPTRGMAALRAPAATLLVLLALAAAGGVAADGSDHRYKIREPVPLYANKVGPFHNPSETYRYFDLPFCSPDKVKEKSEALGEVLNGDRLVDAPYKLDFRDEVESKAVCSKKLTTEDVVKFRNAVAKDYYFQMYYDDLPLWGFIGKVEKGGKDDPSEWKYYLYRHIIFDILYNNDRVIEINVHTDQSALVDLTEDKETNVEFLYSAKWKETPTPFEKRMEKYSSSSNMPHHLEVHWFSIINSCVTVLLLTGFLATILMRVLKNDFVKYAHDEEAADDQEESGWKYIHGDVFRFPKNKSLFSAALGTGTQLFALTTFIFLLALVGVFYPYNRGALFTALVVIYALTSGIAGYIATSFYCQLEGTNWVRNLLLTGCLFCGPLFLTFCFLNTVAIAYSATAALPFGTICVIVLIWTLVTFPLLVLGGIAGKNSKSEFQAPCRTTKYPREIPPLPWYRRTIPQMAMAGFLPFSAIYIELYYIFASVWGHRIYTIYSILFIVFIILLIVTAFITVALTYFQLAAEDHEWWWRSFLCGGSTGFFVYGYCLYYYYARSDMSGFMQTSFFFGYMACICYAFFLMLGMVGFRASLFFVRHIYKSIKCE

SEQ ID NO: 42574 - protein, 527 aa, Zea mays
  Clone ID: 700333768_FLI.pep
PPCGCCYNEELLRDSCSAVSVYGRYHTMEDHTEGLDECVAEAFLFRLNSLVDASEQLVDFKKGEDDGLNLSALEKELQMLTPYLADEDALESTGLEDDVRGNTNLDVCMVTNEENANGKEFLKDSYCILPSPESAVPFDVYGVEDFKTEDTDLQNPTARKFQEDPKIDPALSKFQQEYEVFDLKIFHRKNRTGFEENKEFPIVMDSVIAGRYRINEYLGSAAFSKVVRAHDLRTGVDVCLKIIKNDKDFFDQSLDEIKLLKFVNKYDPDDDHHILRLYDYFYYQEHLFIVTELLRANLYEFQKYNQESGDEVYFSLPRIQAIARQCLEALVYLHHLNIVHCDLKPENILLKSYSRCEIKVIDLGSSCFLSDNLNLYVQSRSYRSPEVILGLPYDQKIDIWSLGCILSELYTGEVLFPNESMPIILARMIGIIGPIDMEMLASGQETQKYFTDDYDLFHTNEETDQLEYLIPEKSSLRRHLQCPDKKFVDFLSYLLQINPRNRPTASEALQHRWLSFKYSSTANQTRS

SEQ ID NO: 42575 - protein, 392 aa, Zea mays
  Clone ID: 700334184_FLI.pep
NVEAHKPQEYNWTGYRRLFQMIRELKLKLQVVMSFHECGGNVGDDISIPLPHWVIEIGRSNPDIYFTDRAGRRNTECLSWGVDKERVLQGRTAVEVYFDFMRSFRVEFDEYFEDGIISEIEIGLGACGELRYPSYPAKHGWKYPGIGEFQCYDRYLQKSLRKAAEARGHTIWARGPDNAGHYNSEPNLTGFFCDGGDYDSYYGRFFLSWYSQALVDHADRVLMLARLAFEGTNIAVKVSGVHWWYKTASHAAELTAGFYNPCNRDGYAPIAAVLKKYDAALNFTCVELRTMDQHEVYPEAFADPEGLVWQVLNAAWDAGIQVASENALPCYDRDGFNKILENAKPLNDPDGRHLLGFTYLRLGKDLFERPNFFEFERFIKRMHGEAVLDLQV

SEQ ID NO: 42576 - protein, 111 aa, Zea mays
  Clone ID: 700337056_FLI.pep
LEKHILQTKLENSVRQHQVLQTQKVRKKATPLSSCQPPALHHRLEPRTKPPHPSSPRLNLNCGFLQLLTVRGLQSCLVSHPVPRWRPWSPPHQCSRPSSCTASGVFAHMGS

SEQ ID NO: 42577 - protein, 75 aa, Zea mays
  Clone ID: 700337474_FLI.pep
LFRPLIKKSFYPPPSFVFQAPRAGNHVSGPCNSLCGHSGLALGRLKPSMANELSPERALRNLDVFFGCLFPPPLH

SEQ ID NO: 42578 - protein, 86 aa, Zea mays
  Clone ID: 700341991_FLI.pep
VARRLQGITKSISRYPTSKRRFDALVKALSEELARTMGGNQSANGSQVRKIRSGIVRMLSQRSLGKTTGIPGDDHEAQLTSDGFTS

SEQ ID NO: 42579 - protein, 229 aa, Zea mays
  Clone ID: 700342196_FLI.pep
RRVLRWDGLGGGCLSGAGACGASEFRRLRRSLGDSGECDPRAMVFPGDGGDEERVGWKADMDVDSSRQLSPVSVLDLHSDDDDDESLAHSYWGDEKPSTSGSSPPSEPFLGPTSPCFSYYSHSHILHDKFREMEVDEGEEETARTGRSVEEQISSWEKIAGDISRIPAMVELDLARSARQWREPRLEAREVGARIETLIFDDIRRETVCDMLASHCRSAAAAAAAATSC

SEQ ID NO: 42580 - protein, 205 aa, Zea mays
  Clone ID: 700378404_FLI.pep
AFQTSGGVPGLEEIGDVSNRGGRELSTERSTCEDHGNAIIMEEKDTTTRISKAEHASSPLETMCGVTKSAEAPTTVPTVTRKKEVHGVQRTKERENMTTADSACEKDKGSSQRVQEENESERRLEKEREVEEKERRKLEKERELAEEKERRKFEKERELAEEKERRKMEKEKEHAEEKERSKLEKEKELAEEKERHKLKKERELA

SEQ ID NO: 42581 - protein, 170 aa, Zea mays
  Clone ID: 700343783_FLI.pep
NTSSIILLLSASAMHAFLARDAHRTPHLINRVAVNVGADLVRQGDAALAGQRGGAADVGAAPVGAVGDVLEAAADGAAVGGVVGLLQQAADAAAARLGRHGPAHLDERQARHQRAVHGGTRHRRAHRGRGSHHGRRQEHGQRQRRELRSSHASPSLSLGRAHVRYDGRAG

SEQ ID NO: 42582 - protein, 532 aa, Zea mays
  Clone ID: 700344029_FLI.pep
LGLAEFPEDSRFTNVESALVALGCKECLLPADCEKSIDLNPLQDVISNCNVLLTEKKKADFKSRDLAQDLGRIIRGSVEPVRDLLSQFDYALGPLGALLSYAELLADDTNYGNYTIEKYNLNCYMRLDSAAVRALNIAEGKADVNKNFSLFGLMNRTCTVGMGKRLLNRWLKQPLLDVNEINNRLDMVQAFVEDPELRQGLRQQLKRISDIDRLTHSLRKKSANLQPVVKLYQSCSRIPYIKGILQQYNGQFSTLIRSKFLEPLEEWMAKNRFGRFSSLVETAIDLAQLENGEYRISPLYSSDLGVLKDELSVVENHINNLHVDTASDLDLSVDKQLKLEKGSLGHVFRMSKKEEQKVRKKLTGSYLIIETRKDGVKFTNSKLKNLSDQYQALFGEYTSCQKKVVGDVVRVSGTFSEVFENFAAVLSELDVLQSFADLATSCPVPYVRPDITASDEGDIVLLGSRHPCLEAQDGVNFIPNDCTLVRGKSWFQIITGPNMGGKSTFIRQVRFALSCFLMSHSRNLFIMSWIYA

SEQ ID NO: 42583 - protein, 194 aa, Zea mays
  Clone ID: 700348032_FLI.pep
SYVSNVNWMMNRALFTSHCYLSWGFVWPYIMALVHVLAALRAPYSKVVKEASDSSWGLFLVGLLFTCTLIELVSMWNLTKVEIQLCNMLSPEGPKVSLDSYNWGLVFIAVLVDNFLYPVSAIRSHFSQSINWSGIRYYLRDGKISKIERENSSKYTDLGGKHLYGKRTYPPNKSLLGYLSRTLVQWHQPKKYDV

SEQ ID NO: 42584 - protein, 570 aa, Zea mays
  Clone ID: 700348167_FLI.pep
HLVPPQRLLSSPLRHSHLATSATISLKLVANLLTAMGTPLLIPLLVTLQLFTTSSPAVASSHISAIISQSGLDFAKDLLVSHAVATLTPMNVPDIERTMSIPLVGTVRMAASGIVLHGLAVTNSTVAVGDAGVVVAASLASANLTMEWNYSYDAWIVTISDSGNASVQVEGMEVGVSMVMKNQNGSIKLSVTECSCYMEDLDITLNGGASWFYQVFIDGFSNHIISSVENAIKNKVMEGALKLDSFLGNLPKKIDLDSVAAMNVTVVNDPIFKSSSVEFDIDGLFIPSDETAPRDMRLGDTQFALPLGSSSKMLWISLDEDVFNSVSALYFKAGLLQRMVDKIPDQFFLNTASWRFLVPRLYREFPDDNMLLNISAVSPPSVRINVGRIDATVDLDITVNVLDFGEIVPVACLSVSVDVYGAAAVSENNLVGRVELDYFSFTLKWSKVGKLHTILVQTVLRILLKKLFVPYVNSYLKHGFRLPIIKGFSVTDAYILTSYSRMIVSCDVAFIEPEVLSPVQESNTNEDLSYEVLSPVQESKTNEELTNEDLSFEVLSSLLLGSAKTSQPTA

SEQ ID NO: 42585 - protein, 73 aa, Zea mays
  Clone ID: 700348315_FLI.pep
ISHIPNMPSVFYHCRLNKNYLNFIMVRILAFCKLDKFTQHIFHVTSSSKNMRRPAIKAPIIIYFKIEDTEQTQ

SEQ ID NO: 42586 - protein, 214 aa, Zea mays
  Clone ID: 700350517_FLI.pep
HKQELKLSQYKDIEKRYTNQFLQLKTTEMANKDLDRYYTALDKALMRFHSMKMEEINKIIKELWQQTYRGQDIDYISINSDSEGAGTRSYSYRVVMQTGDAELEMRGRCSAGQKVLASLIIRLALAETFCLNCGILALDEPTTNLDGPNAESLAAALLRIMEARKGQENFQLIVITHDERFAHLIGQRQLAEKYYRVSKDENQHSIIESQEIFD

SEQ ID NO: 42587 - protein, 341 aa, Zea mays
  Clone ID: 700350611_FLI.pep
DNGSKDAGTGAQATLERLVSKHRHRRDPDGPPFEGRFSDESSSLLERTLEIRDRSYRLKIGVMSEAHPPVYGDDESAASAADSDGEEFSRNVKEAAEILRKARASMADEETADALLYKSARLLSTAVALRPTSLVAVGQLGNTYLLHGELKLKVSRELRTLLASSGAFLNGRERAPRSRKVDRRMVSRESISSALVDVCEECESLLVEAGRSYRMALSIDSGDAKALYNWGLALIFRAQLLADIGPEAAADADRVYLAAIDKFDAMLSRSNTYAPEALYRWGTALQQRSHLRPRSNGEKIRLLEQAKSLFEDVLYVEADNKMVREALSSCISELNYHGRWL

SEQ ID NO: 42588 - protein, 290 aa, Zea mays
  Clone ID: 700352366_FLI.pep
IFLPRRNGVFQTISSEEPREDVKCGPVDRVGFSNSSEPNASVRNENYVPRMRKPGDNCYIEVSRAGRARSSVSNWEGRDQPPSHEEPTTSSSTLAPTGHPYSSRGSNQASEAPIIASDEDVLSLIMERHDLFLSSTKSRLMKLQIIHQMWERNDIRGVLSAMDRMGDHAVCADMASVLMEKSETITLDLCTSILPVVTDLLESKIDRHLVVALELLVKLVRTFGPMIHSTVSSGPCVGVDLEAEQRRERCNLCFIELEKAKNKLPSLTRRKGAVANAAQELALVFQEIMS

SEQ ID NO: 42589 - protein, 325 aa, Zea mays
  Clone ID: 700352459_FLI.pep
FKLSSALVSSSSCLRCRTSTDDITRLRLITAVKTPYLPDGRFDLEAYDSLINMQIEGGAEGVIVGGTTGEGHLMSWDEHIMLIGHTVNCFGSRIKVIGNTGSNSTREAVHATEQGFAVGMHAALHINPYYGKTSAEGMISHFEAVLPMGPTIIYNVPSRSAQDIPPEVILAISGYTNMAGVKECVGHERVKHYADKGITIWSGNDDECHDSKWKHGATGVISVTSNLVPGLMHSLMYKGENATLNEKLSPLMKWLFCQPNPIALNTALAQLGVARPVFRLPYVPLPLEKRAEFVRIVESIGRENFVGQKEAQVLDDDDFVLISRY

SEQ ID NO: 42590 - protein, 489 aa, Zea mays
  Clone ID: 700353089_FLI.pep
RNHIIEVLSANDLDCDDLSSICEADTMVLSNYIEEIIVSAVSYHLIHNKDPEYRNGKLMLSSKSLSHGLSIFQGSHGGKDTLKLEETKDGLKGALGSKKTETLPVGEGPVPLPKPEVPDNEFEKRIRPEVIPASEIGVTFDDIGALADIKESLQELVMLPLRRPDLFKGGLLKPCRGILLFGPPGTGKTMLAKAIANDAGASFINVSMSTITSKWFGEDEKNVRALFSLAAKVAPTIIFVDEVDSMLGQRARYGEHEAMRKIKNEFMSHWDGLLSKTGEKILVLAATNRPFDLDEAIIRRFERRIMVGLPTLESRELILRTLLSKEKVDEDIDFKELAAMTEGYSGSDLKNLCVTAAYRPVRELLKIERERELERREKESKDKAAAAENSEAPESEKKESSETKEARKSTQSPEGGGKGDEGPDSKAEGEKEAAVVDLRPLTMEDLRQAKNQVAASFAAEGAVMNELRQWNDLYGEGGSRKKQQLTYFL

SEQ ID NO: 42591 - protein, 397 aa, Zea mays
  Clone ID: 700353104_FLI.pep
MAEAAGGGPLLPEELIIWEILTRLPAKPLLRCRAVCLSWCRRLTSDAKFLLAHHRRQPSLPLLTEGDRSTEERRIDALDYRTGERRPIARTTGRTAANGDDLNVLASCEGLLILLANGGLQICNPATRQRAPLTLLHGAYCISALYPHIPSRSYRVLCCFERAEDGHAVYHVHTVGSRELRCVGEPPAPWASGDMVMAMPMMVYLHPHVVADSRIYWQPVKLPVGNGKVNNMLVFDTMTESFQQLLSPVEGPFLELFQMNSGALGLYHCRSGKVDLWVLQDHGSWSWSMNHRIKLDVMFFSLLPVLDPEGDVLVLSKRGETGILWQHLHHISGVNGSLLALYQWSAYLKLSRHRLKESLVHHDFFSMEGNEGGVDEKPLFDGLSTVALLRDDNSEPH

SEQ ID NO: 42592 - protein, 371 aa, Zea mays
  Clone ID: 700353248_FLI.pep
RSETGTAGEGDEEQRLRAALRHLQAEAGVLERLVYKHRNQHRGAAYFQYLLKVRRDLKLLLGAGLAEVLNAVFPVLACRKPANTILVPNKQTKKKPGANHSHHQRLLGVARLLSQMSEPVMKAAIQITFLLARSFFVDLCTAVLSLLARVRVLIQQMLLDVVSIYNKVTDLTERKQAVKISISGVQAFREYYPSMNDACTVLECVWIKDKFVLHEKVKDISQETQVENQKCRDPESTVQYETLALISEDMKILEETNLPDRQTDTALAEQPDKMIHCNDAGDSQKGRQLENESSARLVPDTLSTRKHLKPESRKRVAFVAVGNSKVTGAASEIKSSEVNKKQRLDMISPSNIQSGLYNKLLDCEFAEKSLL

SEQ ID NO: 42593 - protein, 112 aa, Zea mays
  Clone ID: 700382092_FLI.pep
RNGGQVSLPSDNWGGLPSAHGMDNISSLGSGNLGRGTGDNNFGLPSGSYGRNNSTGTIGEPFSAAGNTYEVNNRYTYGSSSIYGGTAWRFASSEVDMPSFVHDIGNVDPTIK

SEQ ID NO: 42594 - protein, 636 aa, Zea mays
  Clone ID: 700382305_FLI.pep
LGCTVAAVSASNLPSRKWAKRYPIKLESKESGICRGSKVCYVYADTSWEKESWCKALRLASTTDKDKLKSHEMLTQEFRSYMSSLKAGYPSFLGPSTLSSQEHVLVDNTVKNDGPSKLRGFLKRLVGKKASAKASQESKTGPAPSKQDTSQPSTPSSTMSFNSQLPASPSAKVDEKLADDGTLCWNLLISRLFFDAKMNDEMNKAIRARIQRTLSNTRTPAYIGEITLTDLNLGKLPPSLHRMRVLPLDLDESWAFEVDFECSSGILLHIETRLEVQAPELEKDIMKTDIRGNPNGDASSDFLDSIEQYGNQFGPSEVSDFAAEVNDEADTLRKSKSAGWASTYMSRWRSILNSIADQVSQVPLSLAIKISSVRGTMRIHLKPPPGDRVWYGFTSMPEIEWELESSVGDRKISSSYIASLIGNRIKASVRQILVMPNCESFPISWMIADTDDWVPRRIAPFIWLNREPADRRAADTTREMMPGEASTSKAIAKNKSSPLPSTKRITNGSWNKTKIRVDGQEQEQAEASTSSQSWLVSANGDATREQLRMPLLSSSGDERAGPVEEQQASPSAAEEEGDAKKRKRRARVMDLGRRMGDKLEEKGKRFVGKMRENARNNRLLLPDLEQATTPPAPAPS

SEQ ID NO: 42595 - protein, 540 aa, Zea mays
  Clone ID: 700382684_FLI.pep
QLSDSGLLLRENASNGGPGYTRSRPVDNVIYSQFISTMCFFAKDPYPRIATIGRRALSLIGVEQVVMKNTRFNSGGAHRGETSASNFGMARSSSWLDMNSGNNLIKFRTPPVSPPQHDFLPGLRRVCSMEFGQHPISSPDGLAVPLLSSAAATSNAELSILPQSTIYNWSCGHFSRPLLIGSDDNEEANARREERERLALDYIAKCQRSSCKMTNQIASWDTRFELGTKTALLLPFSPIVVAADENEQIRVWNYDDALPVNSYQNHNLSDRGLSKLLLINELDESLLLAASSDGNVRVWKNFTQKGGQKLVTAFSSVQGHRTAGRSIVIDWQQQSGYLYASGDMSSILIWDLDKEQQLSTIQSSSDSAISSLSASQVCSGHFAAGFAAGSVRIYDVRSPDRVVYTARPHAPRTEKVVGIGFQPGFDPCKIVSASQAGDIQFLDVRRSAEPYLTIEAHRGSLTALAVHRHAPVVASGSAKQMIKVFSLEGEQLTIIRYQPSFMGQRIGTVNCLSFHPYKSLLSAGAGDNALVSIYAEENYK

SEQ ID NO: 42596 - protein, 343 aa, Zea mays
  Clone ID: 700422062_FLI.pep
ALMNLAAFSSTLATLPWYEMPSINSSATFSSSLLRRSLCASLRTISHMASAAAPTSAPVATTENGAAKAIEQRPVQVAERLEKFKTTIFTQMSMLAIKHGAINLGQGFPNFDGPDFVKEAAIQAINAGKNQYARGFGVPELNSAIAERFLKDSGLQVDPDKEVTVTSGCTEAIAATILGLINPGDEVILFAPFYDSYEATLSMAGANVKAITLRAPDFAVPLEELEAAVSKDTKAIMINTPHNPTGKMFTREELESIAALCKENDVLLFSDEVYDKLVFEADHISMASIPGMYERTVTMNSLGKTFSLTGWKIGWAIAPPHLTWGLRQAHSFLTFATCTPMQA

SEQ ID NO: 42597 - protein, 209 aa, Zea mays
  Clone ID: 700422109_FLI.pep
NEQSFISGIGNWIADEVLYQSRIHPLQIASNLPRESCEALHQSIEEVVKYAVEVDADMDRFPKEWLFHHRWGKKPGKVDGKKIEFITAGGRTTAYVPQLQKLVGTQSSKTISVAENGDAKDPGTEGEDADVLKPRKRAATSSAARGQRNKDTAGSRKARVNGADAEAAEPTTGIVGSNGEQAFGQPNSDAVDKSDRATRRSSRKVKARK

SEQ ID NO: 42598 - protein, 221 aa, Zea mays
  Clone ID: 700425224_FLI.pep
YGCARSIIVAERVVLNFMQRMSGIATLTKAMSDAARPACILETRKTAPGLRLIDKWAVLIGGGKNHRLGLFDMVMIKDNHISVAGGIANAMRSVDQFLQKEKLTIPVEVETRTIEEVKDLLKYAAENKTSLTRIMLDNMVVPLGNGDLDVSMLKDAVRLINGRFETEASGNVTVDTVKKIGETGVTYISSGALTHSVTALDISLKIDTELALQVGRRTNRA

SEQ ID NO: 42599 - protein, 231 aa, Zea mays
  Clone ID: 700425589_FLI.pep
QFSLSPSLISLAMGMGYLERIDIDSQADEVPGCGDAAVHDKVVARYIPGLVAGQEEHRLGDVPGPERGALERGQAPDHLLHLLHLLVAGHGDVEVEVEVSVGVGGGVVVALAPGVDEHGRGDAEGRDAVDPDPVRAQLAGGVLGEPDDGVLGGGVGVRAEAAQHGRDAGDGDDAPRAARRHGARRVLHPERGAQRVDAEHAVELGRVEGQDAPGGARLAAQHPGVVAVDVE

SEQ ID NO: 42600 - protein, 236 aa, Zea mays
  Clone ID: 700334249_FLI.pep
VILRGLATYRAKRGVLPGSTYDISKLHGRIRSELSVKVTTTQLGDKVRRLKQKYNLLASRGKSGRDPDLPSQHEQSVYEIGKKVWGASANGGGSTGGDGYEIGGDSEEEHEFRESDEDVENGRDERARKNRRVMPIAMANGNGAGLGAVNANSRGKFETEKGKDAYPYLWETVEDLSKEHPNGVAFKKAFESIEGPKARGMEEKLRKFRLTEIRHQLRRMELMKETVKMVLDALEG

SEQ ID NO: 42601 - protein, 98 aa, Zea mays
  Clone ID: 700335196_FLI.pep
GGRSILQPPIPSDDMVCVACLLPLFLIPVVNALPYLIDLIISKVYRLFGWEYRRPERVPPACPYKPAAQKNDEGASESKPLAEPHGAGAAAAEDKKVE

SEQ ID NO: 42602 - protein, 39 aa, Zea mays
  Clone ID: 700338020_FLI.pep
SNNDTMSSADLTPEHKITDQTSAFPMTTNLDPAVLLLHC

SEQ ID NO: 42603 - protein, 141 aa, Zea mays
  Clone ID: 700338021_FLI.pep
WQKDGMIVVNVFVGGEMVGLGSSEQKVIAKLNAARDALGKLIGGAKQQVLINCAANGLVDDIAELRECKQKLIEQCIRKHWPKPIFKLEKEGGPAHERNFVCSVQVDTQTGTFVTIGESMSRVKDAENSAAHKMVELLLKL

SEQ ID NO: 42604 - protein, 35 aa, Zea mays
  Clone ID: 700338635_FLI.pep
LSNRHYSLIIHQSNATSIDMHCHLTNTADTTFICQ

SEQ ID NO: 42605 - protein, 79 aa, Zea mays
  Clone ID: 700379307_FLI.pep
DLKKKKSSTSSTKDHYSFYLHRAKLTAYGFHRAEITRFTLDLTNTKQTCKKHSHIPRGGNTRIRDPHRSRFESSTLSFT

SEQ ID NO: 42606 - protein, 439 aa, Zea mays
  Clone ID: 700344659_FLI.pep
LLSGFIFSRQYIWEKTVSGVAGSEILSLSLATPDYKHEDGFSEEAVCRTKNYTGTSSVDPRHLDMEGHSIYSEGDTYQGPCQDLGRHEEQESCMSIPMQAKESGGVLRSSHTKGSVTAAQIDLAGDAHLIVSDNAAAKQVFSEEKEETKSISSSDIDILHEKSYSSGHDDHAACAAETQFYHPQKASISDGLHLGPSSLQVESLDALDSDILYVNTGVLEQHHKEGYYEPSVYQITSGICTMSEAEPFEVLETGKDVKTPSKLDEQLNPGLDGDEAEKHSLDCGTDTSPVMSKRTLSSPGSGPCQQYVNESTTSTQSTDNHPNDLPAPRSPEQSACFQNDNDSGSVGICQSSRRRGIDELCGKLQSFKVSSAVKGSYVAMGAPRPKPGDSTSRSAAALLRNIENTTAVKAGRPPVKPNADGKDSSRRALQPISGRPDSR

SEQ ID NO: 42607 - protein, 117 aa, Zea mays
  Clone ID: 700379843_FLI.pep
WIRYDNPFVSYASLIFCVIQLSKGLYLEALSIELVLLTIWKEALDACSLLMDTSDGENFSKSSQEHFLAKSGHSPMNVVQRLDFTPTASIFSWLESGFMKAYDRAEKISHVLRKSDG

SEQ ID NO: 42608 - protein, 104 aa, Zea mays
  Clone ID: 700348457_FLI.pep
LQYGGKRVPTFQQIIGLMTCLKRRPSTHYALRRGRKKKEAGNDRDSDHSFNQHDKKSYKSRRSTLFQLRLRRREASRENAVRGPYHKGIYCMWIRTNADKQKIP

SEQ ID NO: 42609 - protein, 273 aa, Zea mays
  Clone ID: 700350736_FLI.pep
ILFIVEIWQLIQLDKPYTCGLTSLDILLERLDMSVRRMKYCYIGLNRVLEVQVLELSLIAHLCRLSKIAVCTKVVLGKVLWVINRLEDLCADGSCELSDFSGEIKKACDTNRIGDNLIGNINNLFQLFHLKPTTDFGMLKVISAMLRVCDNDSENPLQYICGLPVGVSFKISLWNISGHHRLWLRMTIGESVQHTFLEFSRFEGNDELRSGSMVVPLYATPKACSFVLRVCLVMECPSAGISTHQGGHGGPTDCVVQLSDELNVYFVSASQWL

SEQ ID NO: 42610 - protein, 174 aa, Zea mays
  Clone ID: 700352503_FLI.pep
ANAKMGNGAQRNAGAMGGIGMLGLSHGLGAGGAAAAAPPPGFQQGYAGFNHPPYAAAAGYGGGLQQQQHHQQQSNSLMASMQGYHHHQYPAATAAVVNNLRGLNGNMVMMHQPQPQPQMMYHSSPQISSPYTGYYNPYNYYYHHPHSGSAGYPASNGDVESMFSDENTKGCVVM

SEQ ID NO: 42611 - protein, 317 aa, Zea mays
  Clone ID: 700380822_FLI.pep
GKSKKGQYEGPDMDLAAMLERDVLDSTPGVRWDDVAGLSEAKRLLEEAVVLPLWMPEYFQGIRRPWKGVLMFGPPGTGKTLLAKAVATECGTTFFNVSSATLASKWRGESERMVRCLFDLARAYAPSTIFIDEIDSLCTSRGASGEHESSRRVKSELLVQIDGVNNSSTTDDGQPKIVMVLAATNFPWDIDEALRRRLEKRIYIPLPDFESRKALININLRTVQIAADVNIDEVARRTEGYSGDDLTNVCRDASMNGMRRKIAGKTRDEIKNMSKDEIAKDPVAMCDFVEALVKVQKSVSPSDIEKHEKWMAEFGSA

SEQ ID NO: 42612 - protein, 119 aa, Zea mays
  Clone ID: 700380835_FLI.pep
DSNHPVSVSSRVSARKMWGKGKKRFGGGGSGEPAAKRQAARDDGPSESAEDGTVVAEISKNKKVSVRSWKGRVFVDLREFYFKDGKTLPTRKGISLQLDQWKILKDNIKAINEAIEENT

SEQ ID NO: 42613 - protein, 488 aa, Zea mays
  Clone ID: 700380861_FLI.pep
LEFMDIEILLVNTTQALMACRSLSELETNRIGFSKILGPRIAEIISIGSLDLIFAVTAAITVIFSPSDYINLAHSLEIAGSIDKLIDLLGACEDTSTLANLSSVLTKISEHVDATIADEILSRIPMVRIADLLTAENEQWHEIVFTTLASLTKVGKLKAVETMIESGIDNKLLVLLGNGSEISQHHAIITLKTFCELGAPLQGCIGPAVLLHLPWHARISLERFVLSDRNVPQSPKPQQSFEVILHNILQRDNKNIIKGIQGLLSLAETANDTRVQDLLLGSHLFDRLAWLLQRREVEKNQVRSQTAFLVMKLACTGGEPYVHRFLELNIVHELIDMLQCNIDELQDSAYYALHQIVFAKGGSLVLQRFLQLRTIEKLVNLLDRKSLKTKDLAMQFLVDITEVGTKPCIERMLASQIVEKLVALEKAGDPFGGAVSRYIQGLNMCKKLQSAERAVMKQHILRKVRSAVRGHKLEAILVASVEASIAEG

SEQ ID NO: 42614 - protein, 374 aa, Zea mays
  Clone ID: 700380962_FLI.pep
VDLSTAGTYLNKNFSDISTEQGWRTTHNHTSKLPISFMGNITSSSGWESGSSTTRSNQNHGSAGGNHSSVSGANIIVPDKIGNKTIMLGRERRKQTSTSSHIGESSSAADEPRGDLQSSKISAGPNHSSHQHNIPVINIDDISPEARPSSSGFTNRTVDPTIEAQLESDELLARQLQEQLYNESARFAPTEEIDAIVAMSLQHEEDTHRTSRTLRRFQNHTRGARATRLSSYRNALRAELATANNMISRQRNTAPINLGLRAALARYPGALHIQPNIDLNDYDALLALDENNHQHTGASESQINNLPQSVVQSNSIEDPCSVCLENPSVGDTIRHLPCFHKFHKEVIPLIVMFQSLSLNFVAFLMTNCLQATVY

SEQ ID NO: 42615 - protein, 444 aa, Zea mays
  Clone ID: 700354261_FLI.pep
KSSDVNITRHACLYETAPAYLTDQPRFLNSAIRGTTRLRPHELLKLLKEIEKDIGRTGGIRYGPRPIDLDILLYGNSQIHSETLIVPHERIHERSFVLAPLVDLLGASSDNGIETSWHSLSKCSGGFFELWNNLGGESIIGTESIKRVLPVGDRLLDWCERTLVMGVLNLTPDSFSDGGKFLEVGAAISQAKSLISEGADIIDIGAQSTRPFAKRLSPNEELERLVPVLDEITKIPEMEGKLLSVDTFYAEVASEAVKRGAHMINDVSSGQLDPIILKVAAELGVPYVAMHMRGDPSTMQSEQNVHYDNVCKEVALELYTQVREAELSGIPLWRLVLDPGIGFSKKSEHNLEVIMGLESIRREMGKMSIGASHVPILLGPSRKSFLGEICNRANPVERDVATVAAVTAGILNGANIVRVHNAGYGVDAAKVCDALRKRKGSCRN

SEQ ID NO: 42616 - protein, 221 aa, Zea mays
  Clone ID: 700354277_FLI.pep
SYRGDRDSTAAYVAAATAFKGHMPPRRQWFKEVARAVRSSVVLLSRPLRLVDAVLCCILDVAGLGRQPRLGVVQLVGARRVLARQVLVHPGEHGQRSDAEAAGGDEPGRHERQRDGGRHQHRAEDHQHGGGHRERDHGAGQDQPGQHQHRPAEGRGRRGLERRHHGALLLLLLRLAVHAAPALEVAVAPATSRRTPVVISHGRLAERARYPTCARCPELLP

SEQ ID NO: 42617 - protein, 262 aa, Zea mays
  Clone ID: 700354721_FLI.pep
SDPSEEFLMSCAPNIAAIVQANSKVDDEVSKYLHITPVGSDDFDFDNLEPEEKEFENQNISEKGLSDAYQNVLNRLAQLQKLGKVGKGTDRRKRLKGGLELEPCMDTVNNGWRKDMLLEDVVDIDVGYDAPPPSFTAGLELQKQRRARIEAAKQRIDATRKAPAAPAAKANNSEDVVRKKLTMKNRGGKKKDDIDHILPSDNMTGCSGARKKRRRGSCDSIDWEDCIIELLLLHGANEAEIEQGQYRRLLELHVFSAVSGEN

SEQ ID NO: 42618 - protein, 237 aa, Zea mays
  Clone ID: 700355025_FLI.pep
RTSRRFLRFSAGLGIPPSLEVLSQYCESWSRDDAQRQYIVELGIPEEWMHEALALYHEYYGDKQGALENLIQCGNWKKAHTIFVTSVAHSMFLSSNHQEVWRITSALENHKYEIADWDLGAGIYIDFYVLKNSMQERNAMDDSGSLEEMSESCRSFFGRLNESLLVWGSKLPVESRACYSKMVEELCALLVDTPSETLNLPMGCLLMMLNAPVPDESRSSYLQDALSVFTEILCSDP

SEQ ID NO: 42619 - protein, 323 aa, Zea mays
  Clone ID: 700382758_FLI.pep
MDQVDQAGMLKQSGCVLPALSDAIDSVLSSADHFSNDSEKLRQALGFDYLNEANASSKSIAPFGVALTGSHAFLNGNFSASRPTNGPLKMELPSLQDTESDPNSWLKYTVAPAMQPTELVDPYLQSPSATPSVKSECASPRNSGLLEELLHEAQALRSGKNQQSSVRSSSSSAGTPYETTTVVSPEFDMGQEYWEEQPSSFLSEYAHFSGNSFTESTPPVSAASPDIFQLSKISPAQSPSMGSGEQALEPKHESAASPRPENLRPDALFSGNTADPSIFNNAIAMLLGNGIDAEYKPVLGDGIVLDSSSWNNMQHAFQMAGFK

SEQ ID NO: 42620 - protein, 315 aa, Zea mays
  Clone ID: 700382769_FLI.pep
GRTQPNPQSSGCSQFVLSARAPGSLPARQFGMALQAATSFLPSALSARKEGSSVKDSAFLGVHLADDGLKLETAALGLRTKRVITSVAIRAQAAAVSSPSVTPASPSGKKTLRKGTAIITGASSGLGLATAKALAETGKWHVIMACRDFLKASRAAKAAGMDKDSFTVVHLDLASLDSVRQFVKNVRQLEMPVDVVVCNAAVYQPTAKEPSYTADGFEMSVGVNHLGHFLLARELLSDLQSSDYPSKRLIIVGSITGTCHALTFGFGCVPLTELGRECSIEQGTRTRWRGTCRRRRTWVTCAASPAASTALAAPR

SEQ ID NO: 42621 - protein, 62 aa, Zea mays
  Clone ID: 700382874_FLI.pep
SCVFLLCSSSFFSHYIHQLDSHVDFLLGAFVFYTLCYLAFVFHILCYLTDVKTLPSRTLHYL

SEQ ID NO: 42622 - protein, 591 aa, Zea mays
  Clone ID: 700382902_FLI.pep
KIDVYQNARACIRLRVACEKLKKVLSANPEAPLNIECLMDEKDVRGFIKREEFEQISASVLERVKGPLEKALAEAGLTTENVHFVEVVGSGSRVPAIIKIITDFFGKEPRRTMNASECVARGCALQCAILSPTFKVREFQVNDGFPFSIALSWNGDSQNTPQQTLVFPKGNAIPSTKVLTFFKSSTFEVDVLYVDPNGLQIPQKISTYTIGPFQTSKGEKAKLKVKVRLNIHGTVTVDSAIMLEDDVEVPVSSANEAPNDTMKMDTDDAPSDPAVASDVNMQEPKSADTAEAAHAAENGPQDTEEKSVPMETDAKVEPSKKKVKKITVPVHELVYGALAAADLQKAVEKEYEMALQDRVMEETKEKKNAVEAYVYDMRNKLYDKYSDFVTSEDKEGLIAKLQEVEDWLYEDGEDETKGVYIAKLEELKKVGDPIELRFKEWEIRSSAVSQLVYCINSFREAAQSTDQKFEHIDMSEKRKVINECSEAETWLIEKKQQQDALPKHANPVLLAADLKKKAETLDRFCKPIMTKPKPAPKPQTPPVAENQAPEPQTPEQQQSGGESTASEGAAEEPRAEQMETDKPEGATDPSA

SEQ ID NO: 42623 - protein, 70 aa, Zea mays
  Clone ID: 700383049_FLI.pep
ITYYAFSVEGSLNNSYPPAIPHFLKLFPKQVLTHLAVKNKNLMFTSNSINVLTNREAESTQEGRCIRTSS

SEQ ID NO: 42624 - protein, 175 aa, Zea mays
  Clone ID: 700422283_FLI.pep
GNTEHLDSRSDSGIAKYRLGSGDGDAQGCRRSMGGAGSRLGQPVSWSKSSPSDSSTLSASSSSTSASYSSLVSPVGFPMIIRWLLVFRISFNLSSRSDSAMARRTSSSWEVAGTGSSVDAGISGGDGHCRISAGNCSISALCCCRRRPAASFWFGVTSGLWSSRAGLGAAVACGG

SEQ ID NO: 42625 - protein, 294 aa, Zea mays
  Clone ID: 700422519_FLI.pep
SEFVSKASPFFLAAEREMASSSTTNTSDGGAKSSSCPRGHWRPGEDEKLKQLVEKYGPQNWNSIAEKLEGRSGKSCRLRWFNQLDPRINKRPFTEEEEERLLNAHRAHGNKWALIARHFPGRTDNAVKNHWHVVMARRSRERSRLLARAASSSSSPSTGGYLFGAVTPATSSLCFGFSKLGGAGSASGSGGLFRSPVPAPPTSLFKNFGTATASKGLLGSSFEASGRYSYSGKQPTAPLSITFSSPREALGMDIGHHGRHEHHQKDYHASESADEPLKKKDVPFFDFLGVGVSS

SEQ ID NO: 42626 - protein, 255 aa, Zea mays
  Clone ID: 700422855_FLI.pep
VLGGCHLYLLGGRDPRRGSAMRRVVFYSARSNRWHRAPDMLRRRQFFDVCVMGNRLYVAGGEGGGGGLRSAEVFDPAKNRWSFVAEMAAPMAPFVSAVHGGRWFVKGIGAQQQVLSQAYSPVSDSWSIVLDGMVTGWRSPSACLNGRLYAAECMDGCRLRAYDEAVDAWSTCADSKQHRGSSQAAAIVALHGRLFVVRNDMSVSAVQVAAEAGKQRWQTLAGKAHTKSFVTGLLSNLSGRSRAKNNILHCQVLEV

SEQ ID NO: 42627 - protein, 228 aa, Zea mays
  Clone ID: 700426675_FLI.pep
SAIRLRLVAVQSALTAALPPLTCPRQCRSKPYRTYRHATAGVACFFCRSLAPSLPPMETSLRLRSGGGLRIHAKEKLPLGHSSLLQAHAELDLHTSPAGVTTPSYLALFVRHFYSQLSANLGAGVQLHNGDDLAYSFRAKKAVLFKPDNGFLGLNLKGRLLTDKELKPTKTTGSVELAWTILDLKQGQDVRLKVGYELCDKVPYFQLRENGWTLNAYMDGKWDVRFEM

SEQ ID NO: 42628 - protein, 220 aa, Zea mays
  Clone ID: 700332641_FLI.pep
HASENAKLGEDGTELQLPPPSMVDISREQLSQEVEVASSGPSGTDETAEMKRLNTEHSPGDETSKLVGTDLGLQLSPSGDAMVDISNKPPSCQDVKEAPSSDILGNDENSDTEKTPAALHGRLNTELAPSGRNTEFSEADTGKQETPVSAEAMVESSSEPRSHEAKEAPTPDLSGDDEKAKSARAAVVAELFGDATEGGSDQPLPSPREQGKEAEADGGF

SEQ ID NO: 42629 - protein, 373 aa, Zea mays
  Clone ID: 700332891_FLI.pep
SLHHKSTSPQHHQAPASSQPLQHTTPHANPPRATTTTVTMAAARYDVEKGGRNNGDGKPSPPPPGHLYPQRDGEREWVPWLVPLVVAVNIVLFAVAMYVNNCPAHAASSRRGGAGSCVARGFLHRFSFQPLSENPLLGPSSATLQKLGALVWDKVVREHQGWRLVTCIWLHAGVAHLLANMISLVLIGLRLEQQFGYVRVGIIYLVSGVGGSVLSSLFIRNNISVGASGALFGLLGAMLSELFTNWTIYANKAAALVTLLVVIAINLAIGILPHVDNFAHIGGFLTGFLLGFVFLMRPHYGWMQRYALPSDVKYTTKKYLVYQWALLAVASVLAVIGFAIGLGMLFRGVNANDHCGWCHYLSCVPTSRWSCGK

SEQ ID NO: 42630 - protein, 292 aa, Zea mays
  Clone ID: 700332949_FLI.pep
DYGKKSKLGFTVYPSPQVSTSVVEPYNSVLSTHSLLEHTDVAVLLDNEAIYDICRRSLDIERPTYTNLNRLVSQVISSLTASLRFDGALNVDVNEFQTNLVPYPRIHFMLSSYAPVISAEKAYHEQLSVAEITNSAFEPSSMMAKCDPRHGKYMACCLMYRGDVVPKDVNAAVATIKTKRTIQFVDWCPTGFKCGINYQPPSVVPGGDLAKVQRAVCMISNSTSVVEVFSRIDHKFDLMYAKRAFVHWYVGEGMEEGEFSEAREDLAALEKDYEEVGAEFDEGEDGDEGDEY

SEQ ID NO: 42631 - protein, 418 aa, Zea mays
  Clone ID: 700333535_FLI.pep
LFIDMALVLHAGSSNKNAFKALIAADYSGIKVELVKDFQMGVSNKTPEFLKMNPIGKVPVLETPDGPVFESNAIARYVTRLKANNPLYGSSLIDYAHIEQWMDFAATEVDASIGKWLYPRMGFYPYAAVTEESAIAALKRAFGSLNTHLASNTFLVGHSVTLADIVLTCNLYMGFSRILTKSFTSEFPHIERYFWTMVNQPNFKKVIGDVKQAEAVPLLPKKIAPAKEQKPKEAKKEAPKPKEAEKPAEEEEAPKPKPKNPLDLLPPSKLILDDWKRLYSNTKTNFREVAIKGFWDMYDPEGYSLWFCDYKYNDENTVSFVTMNKVGGFLQRMDLCRKYAFGKMLVVGSEPPFKVKGLWLFRGPEIPKFVMDEVYDMELYEWTKVDLSDEAQKERVNAMIEDQEPFEGEALLDAKCFK

SEQ ID NO: 42632 - protein, 231 aa, Zea mays
  Clone ID: 700377427_FLI.pep
SARRKKSSLGLDDGHHALELLEADHAVAVAVDEAYHVAAIGDGGPAVALAAQAERAQHGAELLGGDEPVLVAVEHVERLPQVPLLLGLFVVALHRHLPCCPAETVGYGVLVLPLLGYGVVELAELVDVDEPVAVSIDARDHGRGLVGGHCDAEAAQRLLELDRRDEPVAVVVERGEDDAQVLLRVGPRLPLPLLLRLLWRAGAAVPASCLLAGVPAIAVALDVIALLGAGA

SEQ ID NO: 42633 - protein, 455 aa, Zea mays
  Clone ID: 700377732_FLI.pep
ELDKMLELAQSNMKEMEKHISSLQEEVKGHQDKATDHQQIEESLRNTISELKVVQEALELSKSQVADLEQKLASQDADISKLTEELNLHCSSEESLKENNLKLQTELTAALEELQSKLLSLQEMETKLDEQSKDRQTSEAALEKQNEQLLILQAGLDNLKDENETLQGSLADLNSKLSEKDSLLHQAEDELAKAQLVLSEALSQKGELELNLNSLNEQHGESKAFGENASQKIIELEAQIQAMRAAEEALNLELKEAEASVKAAEKKGSDLEQQLSEIENKLVASSEEIELLKERIQQEAAVSAERGMQLEETMTSAEGYKEKINELQCSLDSSMSKNQLLEQEVKELTDKCSEHQEQAHSVQQRSLELEDLLHTSKTHAEGAYSRTQELEQELNGTYEKLKGVEEELEQYKSKASQLSDDLEAYQTKAASLEAVVEAASEKEKELMESLSQITE

SEQ ID NO: 42634 - protein, 82 aa, Zea mays
  Clone ID: 700340421_FLI.pep
SHLYQHLFFLDAKRKNRPELPRSNSRFITTYLTTTTTATGHILQKLFSPPLRRTLASHRSGGREAITMLFVRRPALLPLAAP

SEQ ID NO: 42635 - protein, 90 aa, Zea mays
  Clone ID: 700341263_FLI.pep
EFKGQRKLLNAGGAPTRSSFIIQVRFYNGRGPWASRRRRSYLQTTSRRQRSSELLPEQRGFPFPPHKPARADVLGLGFSNRRRGPVTTTS

SEQ ID NO: 42636 - protein, 117 aa, Zea mays
  Clone ID: 700341886_FLI.pep
KRRRRQSSTKKKTGRVREMDGGKGSGIGGNVVGGGGDGKSGGGAVKGGGSNSVGGAGSGNSGGGVAGHGDGAGKSGSGADGMMKAPGGGGYIPRSDFEANPKEFFQGLHQQGGGGKK

SEQ ID NO: 42637 - protein, 445 aa, Zea mays
  Clone ID: 700343146_FLI.pep
SKKDRCPSHVLQVIEEELTKLQLLEASSSEFSVTRNYLDWLTVLPWGNYSDENFDVHRAQKILDEDHYGLSDVKERILEFIAVGKLRGTSQGKIICLSGPPGVGKTSIGRSIARALNRQFYRFSVGGLADVAEIKGHRRTYVGAMPGKMVQCLKSVGTANPLVLIDEIDKLGKGHSGDPASALLELLDPEQNVNFLDHYLDVPIDLSKVLFVCTANVIETIPNPLLDRMEIIAIAGYITDEKMHIARDYLEKNTRQACGIKPEQVEVTDAALLALIENYCREAGVRNLQKHIEKIYRKIALQLVRQGVSNEPDQESLGVTVNEESNSGDSITAKDEIVKDPAVEDASVANNVTNPASEEANEVNLTTEAPKEDSTSKGNKKTDGVAEDAADKATEKVVVDSSNLGDFVGKPVFQAERIYEQTPVGVVMGLAWTAMGGSTLYIEKT

SEQ ID NO: 42638 - protein, 429 aa, Zea mays
  Clone ID: 700343209_FLI.pep
LVLEHSLSTFSGHISRLRKIVEMVSKDSLVLIDEIGSGTDPAEGVALSTSILKYLASRVNLAIVTTHYADLSRLQSVDNRFENAAMEFCVETLQPTYRILWGSTGNSNALSIAKSIGFDQKVLDRAQEWVEKLLPDKQKERQGLLYDSLVDEKELLESQANEAASVLSQVEGLYNEIRLEADDLESRVAALRARETQKVQQELKVVKYRMDTIIKNFEAQLKNSKLEQYNSLMRKAEAATASVVAAHQPSEIAFDDDDENRISFVPQVGDKVYVQGLGGGTMATVVETLGEDESCMVQYGKIKVRVKRSRIKLVQRGTNNEATTSSSVKAKGRTPKQRSATTTDVSFGPVVQTSKNTVDLRGKRVSEAAFELRMAVDACRPYQVLFVVHGMGTGAVKDCAIDVLRKHPRVARFEDESPLNYGCTVAYIQ

SEQ ID NO: 42639 - protein, 208 aa, Zea mays
  Clone ID: 700343445_FLI.pep
GQDMTGYYPRETDRSGYHSLRENDTLGASYDRYLRNGMASVGANDTSRAAGMGAGLAAGMTAGMGAGMAAGMAGYGVDGQRMMGVVGMDSRGMGYGGRPEPPLPPDASSTLYIEGLPANCTRREVSHIFRPFVGFREVRLVNKESRHPGGDPHVLCFVDFDNPAQATIALEALQGYKFDEHERDSAHLRLQFSRFPGPRSAGGPRGRR

SEQ ID NO: 42640 - protein, 236 aa, Zea mays
  Clone ID: 700345713_FLI.pep
EDDDPAGSEDASTGEEADGDSEANDHALSDDEHDEPAAKKKSSDVKQKKETGSDAKEKDAPGKKGSTKRASKPSQNSKNEPEVEIKKVGKREKSSKETDVSPDSNKSNKKISKSKKGDGKETQNNKAARSSNKSKGKVKGGSVAGTAPTTEQLHAVVSGILKEVDFNTATLADILRQLGTHFEMDLMDRKAEVKRIIEDVINSMSDDEGEEGSEDEAEDDGKADNLKSEPDGGEEK

SEQ ID NO: 42641 - protein, 222 aa, Zea mays
  Clone ID: 700345882_FLI.pep
EAYKHTEARAINTSMTKGTYTMDESSSGIDGACNEHGSCNASAMECSDNSDSECEIFRVKRRSTSFDKPTSEAKTSTLSEQQVLRRLKKVHPEVQQVISKRQEESGNGSVRAAHMSQKSSNPAPADDETEDMAPIMWRIKRRQSETQDATCPGTRPQSYPPSSGGSGEEFVERTRDAAVELRPKRVKIRLPSNASRQIEQQRSSGQRFAREDRLPLGFPRTF

SEQ ID NO: 42642 - protein, 452 aa, Zea mays
  Clone ID: 700347769_FLI.pep
NPGSRWIMDLLSAAYGATSDDEDAADRPFSMPVATRSASFSPPPMKPPRWESHPYLPPTHCFPQPPLPDAALPLASPSSGRYISKRERALLASSGAHIESGSSLPLTRVDFESAVGSITYPNLRADILHSLRCQPKPGPSTSFPLRLSVCLKGHTKAINCVDWSPTHGHLLASAGMDHTVHVWNVWDKGNTTARVLKHHTAAVKDVRWSLHRPFLLSGGLDCSLQLVDVVEGKVMEVFKEDQAVEVIKFNPSNPDLFLSGGSKGSLKLWDIRCGLVTKEFQRSLGTILDIDFSADGRQFISSTDTTRSNISENTIIVWDVLRQVPLSNQVYTEAFTCPCVRYHPREASFVAQSNGNYIAIFSARPPFKLNKYTRFEGHGVWGFPVKCSFSLGGRELASGSSDGSIYFYDYRSARLLRKIEAFKEACTDVAYHPVMPNVIAACSWAGEISVFE

SEQ ID NO: 42643 - protein, 187 aa, Zea mays
  Clone ID: 700349991_FLI.pep
LHSLTIISIRAMTVLCSSPGQDGLFMVCWMTKSYVTWHLNLLSSWERFCIQSIPKSSSHHLELIYVIPAPRMQKLNNKDFGPKDLMHLADTVDGFSLMTYDFSGPQNPGPSAPLKWIHHSLAALPSAKGSSHSNSHSRMIFLGINFYGNDFLLSGVSYKHFGTSRCMTKKWFPKEPEAFAEQPQCLL

SEQ ID NO: 42644 - protein, 429 aa, Zea mays
  Clone ID: 700350005_FLI.pep
CHSLERLEITGCPMITDKGLVAVAQGCPELKSLTIEACSGVANEGLKAIGRCCAKLQAVSVKNCAHVDDQGVSGLVCSATASLAKVRLQGLNITDASLAVIGYYGKSIKDLTLARLPAVGERGFWVMANALGLQKLRCMTVVSCPGLTDLALASVAKFSPSLKTVNLKKCSKVSDGCLKEFAESSRVLESLQIEECSKVTLVGILAFLLNCNPKFKALSLSKCIGIKDICSAPAQLPVCKSLRSLTIKDCPGFTDASLAVVGMICPQLESIDLSGLGAVTDNGFLPLMKGSESGLVSVGLNGCESLTDAAVSALAKAHGASLAHLSLEGCSKITDASLFAISESCSQLAELDLSNCMVSDYGVAVLAAARQLKLRVLSLSGCMKVTQKSVPFLGSMPSSLEALNLQFNFIGNHNIASLEKQLWRCDILA

SEQ ID NO: 42645 - protein, 497 aa, Zea mays
  Clone ID: 700350345_FLI.pep
NNYSLENLMIDPYLNILGIATCVSVDSICLNNYSLENLMIDPYFNRITSLLHNCSEDVNELDVKPDGSWRVMGDAATRDLSQWHMPDGTLCDSKEDTNPGVASVNEFKREGASDEHRTLKLGIKKNPIGLWQVSSKADDMKPVVRNHIQNNTGFSTPNIVPMISSPTGSYRDGEDVSVNQEGGGIQFDISLNQEFDSFAHNFGQTYNTEDRPQHPHHNAADVIVLSDSDEENDPTVQPPAVYENTPTNDDSFPFVTDAAGSGYPERYQEDASVGTSGLGLLRQNTGEFEINNWQMLSYPQPEQGFQFFVTDTDVGNPFVAPHNSFTIAPEDYSLGCNVGIEDPSAAHDVSICRNSNDVHGSLVDNPLALTGDDPSLQIFLPSQPSTVPLQQELSERSDTPNGVHPNDWRISLTLAAGGGGNEESTSVGGLKSQPKVSSKEAGVEPLLDAASALGSMNNDRCTGSNLNPKRIENIFSHPRQPRSVRPRLCLSLDTDSE

SEQ ID NO: 42646 - protein, 357 aa, Zea mays
  Clone ID: 700381680_FLI.pep
QFASNRAEVRLERRKKAMSSAAQQQQKAAAAEQEEVEHGPFPIEQLQASGIAALDVKKLKDSGLHTVEAVAYTPRKDLLQIKGISEAKADKIIEAASKIVPLGFTSASQLHAQRLEIIQVTTGSRELDKILEGGIETGSITEIYGEFRSGKTQLCHTLCVTCQLPLDQGGGEGKALYIDAEGTFRPQRLLQIADRFGLNGADVLENVAYARAYNTDHQSRLLLEAASMMIETRFALMVVDSATALYRTDFSGRGELSARQMHMAKFLRSLQKLADEFGVAVVITNQVVAQVDGSAMFAGPQFKPIGGNIMAHASTTRLALRKGRGEERICKVISSPCLAEAEARFQLASEGIADVKD

SEQ ID NO: 42647 - protein, 376 aa, Zea mays
  Clone ID: 700381685_FLI.pep
IDWSRVVSQYVRDETYEGIEAPHWADLSDPNAGRAAVDDEAWFCRPDCQHPKTAEDFFKLSPSPKGKLLRSVSAMLPFAERDANATSLRDGSSNLKWRGGGAVAASTPPKPKAAPKKRFQEDSENHDPALATPPPRQAPSRPPFGAPRWNKNAKEAIKSSAEKRPDNAEKEALLNKHVPPRQLKSTLSARNLFSGKDILGQISEFYDELKRMVGGGVGRPVTDTQEEHSSDPVNPSYLMEKVAPDETVKEEARQETVKKSPSPMKGKKVGLKVEPGKQRSPSVLKEVRATPPTPQRFLSPSPNRIKNVKPGGITAGSPLKKAPKEKGTPSKDLESKKDAVRQPFGVKDMNNTRACDAEGSSSSMFWFLKPCTFLVE

SEQ ID NO: 42648 - protein, 277 aa, Zea mays
  Clone ID: 700381948_FLI.pep
DSSELNDRKSDMDNSDVDSRPRKKRAEKAKVTKKQKIVTNERKLSTPKAKKVAKQDLGSSTEEQGGNSAEEDNSHSSAEEDNKRKRQQTPAYGKQAEHLKSIIKSCGMTIPPTVYRRVKQAAENKREACLIKELQDILEKEGLSKNPSEKEIKAVKKRKERAKELEGIDMSNIITSSRRRSTSSFIPLPPPPQIEVDSDDDEDDDDDAEGNDAEGDDDDAEGDDEDDAEGDDDDAEGDDAEDDDEVDEENVKGRDEGDNDTAEAANGSADDAEKENN

SEQ ID NO: 42649 - protein, 246 aa, Zea mays
  Clone ID: 700381953_FLI.pep
SVITMHELLHAGWRPGVQVATGQARRAGAGIERRRPSGAPTADVQGADAAVLPGEDQPGRDGPGGAVGRAHGGHRALRLLRQPAVPDAGPDAEQVLRGAAVPDLLNREGLFTSDQDLLTNATTRPIVTRFAVDQDAFFDQFVYSYVKMGQVNVLTGSQGQVRANCSARNGAAAGDSDLPWSSVVIETVADAAGSLVLETTTTSMAMAACSAGRALARAPVDDPCPRGPGLSRPIDVNRGSSSIAKA

SEQ ID NO: 42650 - protein, 303 aa, Zea mays
  Clone ID: 700282472_FLI.pep
LVRHQVTRDGCPVIFHDNFIYTQQDGQVSAKRVTELNLDEFLSYGPQRDQGKAGKPLLRKLKDGRILKWDVQSEDALCTLREVFEGVHRRVGFNVELKFDDDLFYTEERLTCILKSVLKVVFEHANDRPIIFSSFQPDAAQLIRKLQDKYPVLFLTNGGTQVYADPRRNSLEEAVKLCVAGGLQGIVSEVRAILRQPSAVAKIKEANKLSLMTYGQLNNVAEVVYVQHLMGVDGVIVDLVQEIAEAVSAFTVVTAVQASGSQDGGGIVVGERMETAAVAVAGTPSFSPREVSFLLRLIPELVQ

SEQ ID NO: 42651 - protein, 126 aa, Zea mays
  Clone ID: 700352657_FLI.pep
FFFGAAAAPGRFSDPAQNGSAFFFFTHQKTATNTFVRLSGAARPRLKFRVYRTHISPASPFLVYSFSSYTSFYVIRVSNVISPRREPFCRFHFFLTSKKSISTRNNSNFQLQSLKQNCFGPNTRKI

SEQ ID NO: 42652 - protein, 135 aa, Zea mays
  Clone ID: 700356187_FLI.pep
QKLETITAAFKFTSMLQAPLHGFAFWFDVEFNGPVRQKSKKQPSQSLDENTQNASPSNRKRKPDVSIVLSTAPEDAPTHWQQTLLYLFEPIELNKDQIIEGSVTISQSQQHARFLNICLKYFTGDQWYVKESVMR

SEQ ID NO: 42653 - protein, 195 aa, Zea mays
  Clone ID: 700397574_FLI.pep
IALATQDHQRNQERTSKGMQLRSCANAGRRRSLVHLGRWRRVSHRQDIGRVMARREHDRRADGRRRHHVPGDRVAHGRVPVHAHRRNRVVVLHAARPHRHRPRRGRAAARDGRAGRGHLAGGHAGDVVDAGAAPVPVHRVEADEVFLRVARHLRRRPRDDEVARDAPPVALAELVQTQQEQPVLLFRPRHALAPL

SEQ ID NO: 42654 - protein, 191 aa, Zea mays
  Clone ID: 700421567_FLI.pep
LDLNLQRAPTSSLTMVEAKILVLVAVLALLQVSSTVARRHGKPDPCDEDDANTDDLPGGLRHKRTPHPRSHHCAPAHHGGRGGGTPAVMTVNGFKRGESGGGPAECDGHFHGDDELIVALSTEWYAHGRRCHRRIRITSAHHGRTVEARVVDECDSSRGCRHNIVDSSPAVWRALGLDTDIGQVPVTWSDA

SEQ ID NO: 42655 - protein, 156 aa, Zea mays
  Clone ID: 700424038_FLI.pep
SPDLVTQIQDYMKQIFTHVYSRKPLSLVIRQPAAYTHVDTKTLFVRSLSATMASAPITHPQSPHKPPPSPASRRRRSAHGTTVRATRCVGRYNVFLCPTNLRATPKMRALVRSPWSRVQQARATAPPSTRSLAAAWLLVAGFLFSVSCASSAVSGP

SEQ ID NO: 42656 - protein, 168 aa, Zea mays
  Clone ID: 700424308_FLI.pep
ATTTTRRCLLITSGAATRRWATSVFCSRLMMLQLHRMGRAPGISGASTSCSCWQQLVLIENRKKKKCVGAASWRRDEGERQLHHPPSAIVLSLLYLVYICFWQSNSMAMRVYSVLLPSMIGSELESRDWFNNSPLPTVVPPACWTVVCVLHIYAIIMYALLLYKLYYY

SEQ ID NO: 42657 - protein, 145 aa, Zea mays
  Clone ID: 700425034_FLI.pep
QQLVSPAFASRSQGARPPSAALATQPAGAGTRRQPPHRAPPARTPRWTSSGCTPSPCPDKASAPREMPRTGRGCPAGTSRRWGSATAPAGIPARRRPTPTPSAPSHMNCTPRTTLHARLCRPAGRRPSPPAASSPAPAGTAASTP

SEQ ID NO: 42658 - protein, 326 aa, Zea mays
  Clone ID: 700098037_FLI.pep
NITIEAKPNIYSVVRNHEHNSPNLHNEPMKIIFLLTTTSTTQQNTPTSKETRNHGLHAESSSFLLGSRLGHLGSRWVLLLHALYHADRNRLPHVANREAPQWRILGESLHHHGLRGDHLDEAGVTVLEELGGALQLLARPPVNLGEQLRELHGDVGRVAVQHRGVAVADLPRVVHDDHLRGEAGSLLGGVVLGVGGHVAALQVLDRHVLDVEADVVAGQRLLHRLVVHLHRLDLRRQARGRKGDHHAGLQEPSFHAADRDGADAADLVHVLQRKPQGLVRGPLGLVDLVQRLKEGGALVPVQVRRPLDHVVTLEPRDGHEGDLVRA

SEQ ID NO: 42659 - protein, 146 aa, Zea mays
  Clone ID: 700194632_FLI.pep
YDMAYMFAYSMREKTHAHRNYEDDVPEGVKQRRLMELINTFRETTKKNYDSQVGTVQLVLVEGPNKRAPKTEVIGKTDRGHKVSFARVPVPHTFEGEEAREPAVGDFVEVRILRSSTATLFGEPIARTSLSAFHRNVSPGAQAAAA

SEQ ID NO: 42660 - protein, 345 aa, Zea mays
  Clone ID: 700464592_FLI.pep
SQPKFRLQKKRASRRRTGSMAHYQQGRRQQVDEYGNPVPGGHGVQGQQLGEAAGGYGVAGTGSYGGQQQAGYGPTGTGTHDAGGYDGSDHPGYGATGTGVDDAGGPGAYGAATGTRAHGTHGGVTGIQDGAAGLTGGGLHGATGMGTTTGTGAHGATGMLDTGVLGGGGHAATGMPAGHGTRPGATGVAGTGGAFPHAAEHKTGGGILRRSGSSSSSSSSSSEDDGMGGRRKKGLKEKIKEKMPGGHREGQGQATATGAYGGTGYVAGPTTGGPHEKKGVVEKIKEKIPGGHKDYDQHQHTTAATGGGGGYGGTTDTTYGTTTTEGTHEKKGFMDKIKEKLPGQH

SEQ ID NO: 42661 - protein, 353 aa, Zea mays
  Clone ID: 700464720_FLI.pep
TRVIVEKPFGRDSESSAALTSGLKQYLVEDQIFRIDHYLGKELVENLSVLRFSNLVFEPLWSRQYIRNVQLIFSEDFGTEGRGGYFDGYGIIRDIMQNHLIQILALFAMETPISLEAEDIRNEKVKVLRSMKPLQLEDVVVGQYKSHTKGGTTYPGYTDDKTVPKDSVTPTFAAAALFINNARWDGVPFLMKAGKALHTKRAEIRVQFRHVPGNLYKGSFGTDLDRATNELVIRVQPDEAIYLKINNKIPGLGMRLDRSNLNLHYAARYSKEIPDAYERLLLDAIEGERRLFIRSDELDAAWSLFTPLLKELEEKRIAPELYPYGSRGPVGAHYLAAKYNVRWGDLSAEHYKA

SEQ ID NO: 42662 - protein, 145 aa, Zea mays
  Clone ID: 700464882_FLI.pep
PTKCYISNFISSMKCLFTHIAENSYKALILHIFGTLCALSGAGSNIYISGMGSTSHSLSGYPSAQSYTSLESSASLSKDPSTFAPQNNPPCPTLFVANLAPACSEQQLIDVFSSCAGFVKLKMQNKLGAPVAFVDFKADMGKMIS

SEQ ID NO: 42663 - protein, 242 aa, Zea mays
  Clone ID: 700464908_FLI.pep
APADSLPLPRLNHGASAAAPCFRQPSPCARILPRSPQRHRPTSPAKLPRLQSFSRRAPQLAGRDLAEVFPMAGSLLNPSRGLVRNSTFHGRCVALLVLAQLNAILRSVLSDVELSSVSVSLRTSSSLPRAELSVGLQLAMVSNSCTNRDLRLVFPAALTCVDLCSLRSGCRAGSLHTWCTPSWASRCCAPCVTSHSHHGQQLQKHGRPSLFPIFHAHLGLHPQPLPEIWLNGRTRRSPEFYG

SEQ ID NO: 42664 - protein, 520 aa, Zea mays
  Clone ID: 700465028_FLI.pep
DCGALKVNPFASKNNTAVYQSKLGTQPVYVVATRANCFASGSMQTNNSDKELASSAMERIDSVKNRTSKETGFVTEAYNNDAFSGGITEKGFAQFSNSSTHIKPNASGHCSLPESKTPTNGSDINCIKGSSVNRGDVSFTNGSFVNRPINNNEPNVARLEVMEKLNNVMQNRYNDHAPGFDPHAAASASRNANGLMPMHANFGCMSSTVQSVANVSTTSTSQDQCDLQLGFGVQKQHIFSRHGELRTATARSPLPGSIAKRNSVPTESSQFESMDGPKSFPNGTSQFGGFARPTFVPAAPSQFGSMAQPNYVHSSQSSQFTSLVQPNSVPPAESSQFGSKAQSSSAPLAKTSQFKGMAGPNSVPPAEPSQFGSMIRPNLVPPASSQFLGSMVRPNSVTPESSQFGSMTRPNSVPPVSSQFVNMPSQNFVSASEPTLVLGYAPQIGSDPPHQVQLGWDLSLPRMVTGGSMVTCLCIWCNSQFHHFGPVDGQQASSFGFICPTCKDRMSGHHSMPSNGSWQP

SEQ ID NO: 42665 - protein, 86 aa, Zea mays
  Clone ID: 700465055_FLI.pep
KFRFSCSKGKREKPNNLFRSMVSIILVREQKISRGLELSTNEMSYPLDELISMLVSNIPEVGHPPVTEGGGGGGVRFWLCPELGDA

SEQ ID NO: 42666 - protein, 173 aa, Zea mays
  Clone ID: 700465112_FLI.pep
PNSIPPAESSQFGSKAQSSSVPPANTSQFRGMAGQNSVPPAQSFGSTVRPNYVTPESSQFGSMARPNSVPPQYVNMPSQNFVSSSEPTLVLGYAPQIGSGPPPQVQLGWDLSLPRMVTGGSMVTCLCIWCNSQFHHFGPVDGQQPSSFGFICPTCKDRMSGHHSVPNNGSWQP

SEQ ID NO: 42667 - protein, 78 aa, Zea mays
  Clone ID: 700465228_FLI.pep
MPIISARCNHSPNYDLLNGADEFDGELSVPVALLVADPFVCCSTSTSPVPPSAGLLSSERSSFPWSWAAFSLSMSCLA

SEQ ID NO: 42668 - protein, 243 aa, Zea mays
  Clone ID: 700468044_FLI.pep
RKSVVRITTGSQALDELLGGGIETLCITEAFGEFRSGKTQLAHTLCVSTQLPIHMHGGNGKVAYIDTEGTFRPERIVPIAERFGMDANAVLDNIIYARAYTYEHQYNLLLGLAAKMAEEPFKLLIVDSVIALFRVDFSGRGELAERQQKLAQMLSRLTKIAEEFNVAVYITNQVIADPGGGMFITDPKKPAGGHVLAHAATIRLMLRKGKGEQRVCKIFDAPNLPEGEAVFQVTSGGIMDVKD

SEQ ID NO: 42669 - protein, 106 aa, Zea mays
  Clone ID: 700468110_FLI.pep
RNIAPIVHHETFFSNVQNDYNQTGLVPLEGCSASEASQLLSDRWTAAINMYNDQTIDPSEKPVMYSGSSSSSWGHLKLPHQMNFLEELRRAVDAHTEFASPVVTWN

SEQ ID NO: 42670 - protein, 631 aa, Zea mays
  Clone ID: 700471011_FLI.pep
VLSSPSPAPAPPCSVCFRPLCVAIAKLVCSVAMGSLATADGPLPPLKYPQARRDEDIVDDYHGVLVPDPYRWMEQVDSKEVKEFVDAQAAVTSAVLSSCDHRGRLRGQLTALFDHPRFRAPFKRRGSYFYFHNPGLRPHSALYVQHGLGGEPDVLLDPSTFSEDGTVSLGVVGVSDDGEHLAYGTSGSGSDWVTIRVMRVRDKEHLPDTLSWVKFSRIAWTRDGQGFFYSRFPAPRDALDSGMKTGVNLNHEVYYHFLGTEQSQDVLCWRDPDHPKYIYIPQVTEDGKYVILSVSETSEPVNKLYYCDLSALAHGLGGVKSAHGNGMLPFVKLVDRFEAYYGLIANDGTQFTFLTNKDAPRYKLARVDVDDDEPGSPWWTDVVPEDEDGKAVLESACAVHGHKLLVSYLSDVRCVLQMRSLVTGELLHDIPVDIGTVSGISGRRCDAEVFVEFASFLTPGIIYRCDVGSAVPEMDVYREISVPGFDRNEFEAKQVFYPSKDGTKIPMFIVSKKEISLDGSHPALLFGYGGFGVSVTPQFSVARVVLMRNLGFVACVANLRGGGEYGEGWHRAGSLANKQNCFDDFVAAGEFLVSAGYTSPARLCVEGGSNGGLLVAACNKFFSQSPRSRQL

SEQ ID NO: 42671 - protein, 549 aa, Zea mays
  Clone ID: 700472983_FLI.pep
PKSQPNEILVDMAVCAATKLQCLRHLSRYFKQSATTMEQQFQKETRFYSSLIRLQQNWKVKRQRSVGSPGSEGFMFDLVDTSQLDTTTMPRLSPLSLIPIDQDSSGTLSVQIPQKCFHSLSLRFHGDIANNAESSAVKRKEGTLTNTTTGAENDVLENDDVNKSTEHAHSILRDIHKSIFEEQVFDMVIQETFIQSQGINVTGMCEDFLQLAIGQECSLCLSHDLSGQNNNSGTVGQEDHMDIDHTGNLAVATVNGKESSNKDVRGFPNPKSLEIYLLHVFHEGILRKLREKSRHVVRYQSSAQGTPDECGLLSHFCMTVSHRIFSSKVHLELESVVSRVPYLHLCSLPTWHSRTSSWSLCLKVPQPILATDRVRRPSDYSELKCKSRSQFGTKVILKDGQISLMGEGSPSIAGSLAGKPSDGRLVNSYNCDLEDLPMMLLQQVASQVIHWLHDEAVVLGMNATIDFLCLYLDLDQGETLGLVAHVDPDDTYGCVSWYLTLDHHPTEEGKMSAGSPELEERRFLGYLSPELLYSTLMDLVKLCSTGVQR

SEQ ID NO: 42672 - protein, 211 aa, Zea mays
  Clone ID: 700473239_FLI.pep
SVLKDSNTNKTETRKVLPVGDLALPSYHDLKTSDNKKVKRGSFSGPIASRPRSTENIDVISAAPRHSSAHQPVHMRVSPGNSPPPISSPKIKELHELPRPPVNTSKNIAFPSLVAHSAPLAPNPASLTPKVQDHFRTKQTLQRTASPLPTPPPGSIARSFSIPSRGISDSKETEDQHKGAARMSLSSLPSAQTFLEDRQPLSSAAGSVSKT

SEQ ID NO: 42673 - protein, 232 aa, Zea mays
  Clone ID: 700473240_FLI.pep
RTDFWNEADKLASLHHPNVVAFYGVVVDGPGGSVATVTEYMANGSLRQALQRHEKIFDRRRRLLIAMDVAFGMEYLHGKNIVHFDLKSDNLLVNLRDPQRPICKVGDLGLSKVKCQTLISGGVRGTLPWMAPELLNGSSSLVSEKVDVFSFGIVMWELLTGEEPYAELHYGAIIGGIVNNTLRPPVPESCDPQWRSLMERCWSAEPSERPSFTEVGKSLRAMASPTKAQQSK

SEQ ID NO: 42674 - protein, 93 aa, Zea mays
  Clone ID: 700440461_FLI.pep
LGRLLLSAARRRVVCRRVVKHVIPCSTPTSPARSKHDLVVDPRCAHDVLVDFDDLISNFVLLMSTLGTPRRTRPRKSPSRRQSVRQQEIPRIG

SEQ ID NO: 42675 - protein, 176 aa, Zea mays
  Clone ID: 700440618_FLI.pep
AASVRVSNELGAGNPRAAAFSVVVVTLLSFVLSVLVSAVILLCRDYISYIFTEGEDVSQAVSRLTPLLAFTLILNGIQLQPVLSGVAVGCGWQAFVAYVNVGCYYIVGIPLGCLLGFYFDLGAAGIWSGMIGGTLMQTLILIWVTFRTNWNKEVEEAQKRLNKWDDGKAPLLSAQE

SEQ ID NO: 42676 - protein, 156 aa, Zea mays
  Clone ID: 700440982_FLI.pep
SRGRAIRPPELRSDYKTFRKHKAFSHRLSLLAYFGNHSLRLVSTSTYTKEHMASRSSAMEGGAAIQRRNAVKRHLQQRQQEADFLDKKVIASTYFSIGAFLVLACLTVSLLILPLVLPPLPPPPSLLLWLPVCLLVLLVVLAFMPTDVRSMASSYL

SEQ ID NO: 42677 - protein, 256 aa, Zea mays
  Clone ID: 700441010_FLI.pep
ACPFFYSQKNSHLAAERERGEVRAGKMDRLEERNIKKGEREMEEARKEEERKEEAGDRNTQEPQQGQGLSLSLANGSDSGRSGMLPMSNPSANPTQLTIFYGGSVCVYDSVPPEKAQAIMLIAAAAAAAAATKGSAATAFNPPMVHTDTVAPAAVFSPVLTRSPSLQSTSVAAGQAQVVADPSSISKLQADLPIARRHSLQRFLEKRRDRVVSKAPYSPAKSFDGMESAGMEMTADGKQGARPSILKGWGAAKSEV

SEQ ID NO: 42678 - protein, 262 aa, Zea mays
  Clone ID: 700441039_FLI.pep
LLPEPLRPAGAGRSPGSAGSRTAGVTSMASAATATLPKVQLRPRCNSYFQVTGQVHAHTKTCGACKCPTHIHGLLVSAGGRRTFLPVSAVGSGQGSSVTEADRKSDLSLENVKTSVVSRDGEKINVRVQLPGKATQKVFDEALTFLARDAPPVPGFRKSKGGKTSNIPSSILLQMLGKSRVTKFVLQEILSITIEEFVKKENLKVKPEIQTTQSEGEMESAFAPGSAFGFNVVLQLETPDSDDPEEKPGSDDDLQEESGSSE

SEQ ID NO: 42679 - protein, 368 aa, Zea mays
  Clone ID: 700443856_FLI.pep
NIASPAVEMAPRRLLVLAVVALAATAAAANSGFADSNPIRPVTDRAASALESTVFAALGRTRDALRFARFAVRYGKSYESAAEVHKRFRIFSESLQLVRSTNRKGLSYRLGINRFADMSWEEFRATRLGAAQNCSATLTGNHRMRAAAVALPETKDWREDGIVSPVKNQGHCGSCWTFSTTGALEAAYTQATGKPISLSEQQLIDCGFAFNNFGCNGGLPSQAFEYIKYNGGLDTEESYPYQGVNGICKFKNENVGVKVLDSVNITLGAEDELKDAVGLVRPVSVAFEVITGFRLYKSGVYTSDHCGTTPMDVNHAVLAVGYGVEDGVPYWLIKNSWGADWGDEGYFKMEMGKNMCGVATCASYPIVA

SEQ ID NO: 42680 - protein, 292 aa, Zea mays
  Clone ID: 700444319_FLI.pep
PTQAPLTARDRTVGSPQTAAMAELSTSSDGLVDEEARQQEPGQGSAEGSHGLQDTKEQDIIKGKAALVSTELLREDLVQSAVSFLKHPKVVASSDGQRRSFLVNKGLTMDEIDEAFQRLQSPSSNSASSNMCTSQGVFDHSCRITEQEIKVDRKCMDGLERVEPEAGPVAPVVPRHPKSYMEIMEMIQRGERPDDIQDINDDPPNPDQPISEPRMAPKPKPWEKQGQGSLACDLKSPPRESDVLRSEVQHDGTNKATESADGANQTHSLLQVGVAAGSESPAVPDDAASSLE

SEQ ID NO: 42681 - protein, 373 aa, Zea mays
  Clone ID: 700447237_FLI.pep
SSRRAPGGVCSSTASQSLSPGDETMDIINGAVLPRCHAAPVTGAAAASVADARVSGHLQLLRRVRCRGSGSASAGLLHATTPRAGVAARRFFSPPLGNGNGNGRTIGWRPARCTHGGSSSDGDGAAAADFDAREEEFVDSSVMEAVELRSVSDGGFVIKMRDGRNLRCVQNNPRVLRLRDSAPHHAIVLKMEDGSDLLLPIIVMETPSIMLLAALRNIRIPRPTIYNVVLEMTTRMGYEVRLVRITEMVHDAYYSRLYLAKVGNDQDTISFDLKPSDAINIAFRCKVPIQVNRRIAYNNGLKVLQPKAAGSYLGSDDIQITRLDRPDDQHCSEAQEFDLVRNMLIAAVEERYKDAAQYRDQLSMLRSKKKNAI

SEQ ID NO: 42682 - protein, 120 aa, Zea mays
  Clone ID: 700447580_FLI.pep
STSAIFSSFCTVFLPCFLMFHTYSSTYANCKHYTYTGVHVPICCPGPSLEDHDNKLYGKNWCLDHLWAYFWGGEHDDDEDRPENTLPSALSLLNAFSTSSFSSQKRILFTFCSSAVPLWR

SEQ ID NO: 42683 - protein, 142 aa, Zea mays
  Clone ID: 700450486_FLI.pep
KDLVCRGFADSIFGMSVVFAAIVMYDAQGVRREVGNHAKVLNRFWILKEKAPLEYSEVDMAAPEFVSVSEEASSNASPSLKRGCSTESPRVNGLRGSELTELKQAYVEEDYRLSESVGHTELQVTVGALLGFAVSLAVYATL

SEQ ID NO: 42684 - protein, 103 aa, Zea mays
  Clone ID: 700453001_FLI.pep
VVVAFLQTGRPRQLVIMQAVGPGSHLAATAASCWASVHMDIVLCRHTGGWSVRVRPCFPDQAMSPISDDLVHFWRVYGFVSVLVVTCPMEQPYRYCVWCRFVV

SEQ ID NO: 42685 - protein, 330 aa, Zea mays
  Clone ID: 700453085_FLI.pep
CPARTNQQGVCRQRTPPSVRKPAESASLAAAALGREALGEPPAVVAVVVAHVVALGPPDGAPLGVVGLLAHPPVVAAAAAGPAADAGVGGVAPVGDDEGRGGPVHRHLALLGGPVAAVPQRGVQRHGPRVRVRQVGVALEAPDHVAVHLEQDVGRVPDDGVGVVVGGGVEPEVELVLLLAVAAGPHVRVQHHRLPARVAHELHVDLVVPVAVARREVEARDGAGGVAGDELHLDAELAVQVLLLGVEAGAGAAVQAEHRHLLPRRVVLGADGAVRVELVVEPRVRRCDGGRHEGERRREQQGQGPPRHGVRRRLHSAAARARSSFLGIGQ

SEQ ID NO: 42686 - protein, 522 aa, Zea mays
  Clone ID: 700453283_FLI.pep
NPLFPYSRKPTPPAGEAEGKHLGPGKMVLAQLGGSISRALAQMSNATVIDEKVLNECLNEISRALLQADVQFKMVRDMQANIKRIVNLEALAAGTNKRRIMQQAVFTELCTMLDPGKPSFTPKKGKPSVVMFVGLQGSGKTTTCTKYAYYHQKKGFKPALVCADTFRAGAFDQLKQNATKAKIPFYGSYMESDPVKIAVEGVERFKKENCDLIIVDTSGRHKQEAALFEEMRQVSEATKPDLVIFVMDSSIGQAAFDQAQAFKQSVSVGAVIITKMDGHAKGGGALSAVAATKSPVIFIGTGEHIDEFEVFDVKPFVSRLLGMGDWAGFMDKIHEVVPTDQQPELLQKLSEGSFTLRLMYEQFQNILKMGPIGQVFSMLPGFSAELMPKGHEKESQAKIKRYMTMMDSMTDAELDSTNPKLMTESRIIRIARGSGRPVRDVIDMLEEYKRLAKIWGKMKGLKIPKKGEMSALSRNMNVQHMSKVLPPQMLKQIGGMGGLQSLMKQMGSKEMSGMFGGMGGER

SEQ ID NO: 42687 - protein, 367 aa, Zea mays
  Clone ID: 700456578_FLI.pep
ERDKAVQDLARLKQHLLDKDLEDQEKMDEDSKLIEELRVVCEQQRAHIMQLERALKVEMAKQEENKKVISEEHQRSNEQIENLNYKLASCMSALESKNVELLNLQTALGQYYAESEAKDRLGGDLAVAREELSKLSESLKVANQTIEISRREKEDMATKLSQAERMLADGKRSMQKLEDDNSRLRRALEQSMTTVNRMSLDSDNSVDRRIVIKLLVTYFQRNHSKEVLDLMVRMLGFSEEDKQRIGFAQSNAGRGVVRGVLGLPGRLVGGIVGGGPSGKSTQSSQDSQSFADLWVDFLLKETEEREKREASEAARQSQQESHTTTGPSTSSSIQQPSQHNPSNVAPGPSTMPHTAWVSQNRNPQQFR

SEQ ID NO: 42688 - protein, 176 aa, Zea mays
  Clone ID: 700456612_FLI.pep
VVPSPPRRSRRLANVPEVKYAEIAPHRADRMTRSPRRPADLIYLARRGSISMKARLEATRKAEELESQLDPEIPSFVKAMLHSHVVRGFWLGLPSHFCDTYMPKQDATITLVDEKDEEFDTNYLAYKKGLSGGWAGFALYHAIQDGDSTVFQLIKPTTFKVHIVRAATDDSSEVDE

SEQ ID NO: 42689 - protein, 79 aa, Zea mays
  Clone ID: 700456778_FLI.pep
VRTKISANQSIEKVEVLQSRTYPLFVPWKGGVILGVLDIGKDAWIHREDWIKNGVHIGSGRKYKDSYFLQAQVMCYYNV

SEQ ID NO: 42690 - protein, 164 aa, Zea mays
  Clone ID: 700457257_FLI.pep
KRKNRTKEMYFLSTSLSLQSSCVVVSHALLILDESAQHIEVVGEGLPGAPRVPDGHGDLGTGGKGEGHGHPVVVVRVDRRHVQLLRRRDDAVVRPFLNRCSQLWKTQTATEDGATAGKPLRGSELWKDDVRHVKYVALPWLAPSGSQPSSRSPLLSRKPLPTSQ

SEQ ID NO: 42691 - protein, 405 aa, Zea mays
  Clone ID: 700457272_FLI.pep
HKHHQVRDLLVNFGKFDPKRLESSEPDDILKPTVQCDEIFRYRNKMEFSFGTKRWVQKELKDKGEEVEVKQETNETDGYALGLHAPGFFDKVLHVQKCFLQSEPADKVLAVVQETWMDPAIGLTPYDVHKHVGFLKHLMIRTGRNISTGTPEVMVNFVTSCYKPDVLMPLVDKITKIPEVVSVINNVNSSVGNSSVGEQEYTLYGKPNITEMLRGLAFQISANSFFQTNTKQADVLYKLIEDSAGLKGDGSEIVLDLFCGTGTIGLTLARRAKHIYGYEVVPEAIEDARKNAKLNGINNATFVQGDLNKINESFGKEFPKPDIIISDPNRPGMHMKLIKWLLEVKAPRIVYVSCNPATCARDLDYLCHGVEEKDLRGFYELKSVIPVDMFPHTPHIECVCLLELR

SEQ ID NO: 42692 - protein, 464 aa, Zea mays
  Clone ID: 700457507_FLI.pep
AQYRDSVRQHYTELLSGVREGLPTDLARPLAVGQRVIACHPRTRELHDGNVLTVDHNQCRVQFDRPELGVELVKDIDCMPLHPLENFPESLRHQSAINGYYSHLSEAKYEDQMKELASGGAARSTSNLNGTDATFYTPSGHPMSTLMKQAKANTAVNEVAVATQQSMYNQPCTLSQIQEREADIRALGELSRALDKKEALLVELRHMNEEVSGKQKDGEIIKDLEHFRKQYAMVLVQLRDSNDQVAAALLSLRQRNTYHGNSGQSKSMENGIALAGAPDPYNLFSYINPESGSQVIEVIETSKSRAKMMVDVAIQAMCKVSEGENAFSKIGEALDHLNSRGTGSGSSILGIRRIPPDSGQSNASYHDDCTAAPAANSSSRLPNGCDSEAQFPKELISSCVAMMLMIKNCTEKQYHPAEVAHILDSALSSVQPCSSQNIPIFREIEMCMGIIKNQMLALIPTPSG

SEQ ID NO: 42693 - protein, 61 aa, Zea mays
  Clone ID: 700428977_FLI.pep
MWKQTFHSSSYIHRPHSANSASSYHHFTRRPETRLQVVQHGIYFAFCNKFPVLDAILTKKL

SEQ ID NO: 42694 - protein, 62 aa, Zea mays
  Clone ID: 700429049_FLI.pep
TLSAASAYQQNFQLRSSFSRIPVKISSTQMGISKSNHSLFDWEYNLSILYNLTYFELTLSSK

SEQ ID NO: 42695 - protein, 112 aa, Zea mays
  Clone ID: 700429626_FLI.pep
SLRTMHGTFFQRTRLIQWVLQIPCGLKASGTLLASGSTPCKIQLTIGLFFLPGSESLLHLIALYTLAEHTFQRWRSLTEASVSCPTDNGYLELEIELIGLAIRRTLAAHETG

SEQ ID NO: 42696 - protein, 177 aa, Zea mays
  Clone ID: 700429688_FLI.pep
HRPSPQHTNTAQSNSHTGSSPPLRNALSPTSPASAPWLSSRWRSSSCWPWRRPRRPAAGATWISTWASSPLGNAGGSAAARWPSASPRSRMRRALTWLDPTAARSTAAGTSATARCGGTTCPAPAAAPATTTAARAARPTPTTAAAPASPAAAAEAAPDPPDCRGKVWSRSRPFRRQ

SEQ ID NO: 42697 - protein, 276 aa, Zea mays
  Clone ID: 700429776_FLI.pep
LHPSSSAPTMSTRIHPSSSDAAGRAHRRRRAAAAERERRPPAVYTVWKRSSMGFQGTDGFCVYDDAGRLAFRVDNYSRRRKLCAGDLLLMDGHGTPLLSLRPQLLSLHDRWNCYTATEDAVVDKKAPPASSAQQQVFTMSRCSALRSSSDSAEVHMSASRPGSTAAASSSSSSLSLSCNKHNPQAAAPGYRVEGSFSRRSCKIRRGSDGREAARITRKSAGVASRPVATLGDDDVFSLVVRPGVDVATVMAIVVVMDRICRRPYTPMVCVCPSQCE

SEQ ID NO: 42698 - protein, 54 aa, Zea mays
  Clone ID: 700431789_FLI.pep
FFDTLMMFVCVPMTQQNAYHSSVNQKREKRALCTPLAAAGIPKLKIDQESQQRL

SEQ ID NO: 42699 - protein, 323 aa, Zea mays
  Clone ID: 700432406_FLI.pep
DYFNSQKLVETKETELLEARHEVEDMKLKVDSIQFAVREKDLELLEAQRKLDEVNSEVVELQQLINSKEDQLVQVRTELQDKEQCIQLMQDELDKMRLGRSQAESVVQKIVELTSNLIGSVKGEEFDIYNLLDDEILSTSTALEYSLHKHNQLEADIDMLKESLRQKDMDLTAAYKALDAKDRELKAVVGRLDVRDKELENLEELSIDPYGTRKLSRVADEATEDNIAGEAELQKHEMESVEMEALAASTMLKKLADVTKKFLRSGRTDSGTNLDSNVSEGASELEPQRKLNVILEAKKEIVGLFSLTEELVTGAQVKDDEEP

SEQ ID NO: 42700 - protein, 224 aa, Zea mays
  Clone ID: 700432432_FLI.pep
LEVPLTMGMIKAVILDLFGAGSETSASTLQWAMSELVSNPRVMERAQAEVREKLQGKPTVTEDDLVDMRYMKLIIKETLRMHPVVPLLLPRECREPCRVMGYDVPKGTTVFVNVWAISRDPKHWEDAATFRPERFEAAGTVDFKGTDFEYTPFGAGRRMCPGMAFAQASMELVLAALLYHFDWKLPGGMLPSELDMAEEMGITARRKRDLYLHPVVVSVPPHVS

SEQ ID NO: 42701 - protein, 439 aa, Zea mays
  Clone ID: 700466826_FLI.pep
ATFRLFPRAGAADPNDRVFVRVDNNDYTVPGFADEDSFDPSRSDPSAGNGNFGSASGPLPEHVRREILELGLPDDGYNYLSHLRELRPAAAAASSFVPSSTGRPEPLPLDVKAYDASRVRIGLSEGELDEGKTMCKVAAKTAPVRRIEKAVDPDIARLLDESDVSHVGSEDEGLEEDFVIIANQAEEEEEDEDGDMEEKQEWNGVFSDVEEEEFDFEEDEPKPRVRRLLDEQFDLLALEEYGDSDDDDMGVKGGEYELPNEAIDELKLFQNQNVCVDEEYRTPADFVRQKLDSSMADEVDESARVIKKCAEYAEIYLNETAEEEVVVLVSESSDESEVWDCETIVSTFSNLDNHPGTIETPGISRARFPRVFPGETTTTNGIIKLHGKEKLPVEYLPQRRRNGEKEKKVKPVEASVTDKFKKGAEKETKEEKKARKAAV

SEQ ID NO: 42702 - protein, 332 aa, Zea mays
  Clone ID: 700466989_FLI.pep
GVYDPDFIAANQGSRANNVIKGTKKEQVEQIIKDIREFKEKNKVDKVVVLWTANTERYSNVCAGLNDTMENLLASVDKNEAEISPSTLYAIACVTEGVPFINGSPQNTFVPGLIDLAIKNNCLIGGDDFKSGQTKMKSVLVDFLVGAGIKPTSIVSYNHLGNNDGMNLSAPQTFRSKEISKSNVVDDMVSSNAILYGPGEHPDHVVVIKYVPYVGDSKRAMDEYTSEIFMGGKSTIVLHNTCEDSLLAAPIILDLVLLAELSTRIQLKPEGTDKFHSFHPVATILSYLTKAPLVPPGTPVVNALAKQRAMLENIMRACVGLAPENNMILEYK

SEQ ID NO: 42703 - protein, 129 aa, Zea mays
  Clone ID: 700438604_FLI.pep
GAMDGLNYSKLRSSLRPRLQAFSGVLFSSLRSLDGLLHMASVAVLQFVHDPHDDPPVLGCVHLTLARVYALDRARSLSLVKDHFTTLGKDLTVIGYCCDDAEPRRRQLQFYVAESMFRVAASYYLAPFL

SEQ ID NO: 42704 - protein, 141 aa, Zea mays
  Clone ID: 700439055_FLI.pep
GTVVAVEAAATAVAGAVMAAAATAVAAATVVAAAATVVVAAATAVATVAAATATPTGTGGTERWGPRGQVILFATVLFTLVQSVYLRSSRVCCCPSVFLIEGRSVSVVSAVFILGSSRPMHQPAWTADRWVLLPPSGFILS

SEQ ID NO: 42705 - protein, 193 aa, Zea mays
  Clone ID: 700442646_FLI.pep
PSWLPLCAVLAARSARTVLCPLRVAGFSVRRGACALSSVQFVSCSAVRATRHPWPLSVVESLRAHQLPVSRSIHLNRSSPVVPACRCAAALVWILPKSLPWLYGVWPAPIRVRSYRHHSVVVGDSFACVSNSCVESFSCSPVRPLGSLGLNSHRVIDSAGQRRSSSCRVCSSIYVTLLCRRRSVRHQEIPRIE

SEQ ID NO: 42706 - protein, 276 aa, Zea mays
  Clone ID: 700448614_FLI.pep
RRGRVSSKRPKPKQRTLAFPHQGVHPSSHGDGVQDGDGGDEREGGVPALVHGDEVEEGAPLRGVQDRRAVARRAGGQGGRPRGRVRGARGRAARRRLPLRRLRLRLRHRRQLPEEQDLLHRLVTGGVEDQGQDPVRDIEARPAAAAGRGPLRGAGHRPLRDGLRRHQRPRAMRPPLRSAPIYVLTCAWACSPTTHCSVVSSHLRSCVCVCDRPDANWRWCAPVAIDAANLTRLRVCLLCYFRFSGEMVQAWCVDVDGWSRSSGEWQRTNETSTSAT

SEQ ID NO: 42707 - protein, 304 aa, Zea mays
  Clone ID: 700449356_FLI.pep
NLLLKVSVKGNNGNESSVTVRLYGPNTDLVIDRKRELQAIPYLSAAGFGARLLGMFENGVVQSFIYARTLSPADMKEPKIAAEIAKELRKFHQVDIPGSKEPQLWNDIFKFLKKAAALKFEDNEQQKRYVKISFREIQDEVKELKDLLDILHAPVVYAHNDLLSGNLMLNDLEGKLYFIDFEYGSYSYRGYDIANHFNEYAGFDCDYNLYPDKDAQYHFFRNYLHPDRPSEVQAQDMEVLYVETNTFRLASHIYWALWALIQAKVSPIDFDYLGYFFLRYGEYKKQRDSCFALAQSFLSGLRNG

SEQ ID NO: 42708 - protein, 261 aa, Zea mays
  Clone ID: 700449458_FLI.pep
VNPNALIAAASFETLPNRSAYMPMNPPPPPPPGSASSTPAGASYFPLPFHLQQHQPQPQMPPPMAASSYQQYQQQLHQAHQLFQRDAQTITPEALQSVKAALATSDVLDPAAAANARPSDPSTSKKPIPRRAAGQSWEDPTLTDWPENDYRLFCGDLGNEVNDDVLSKAFSRFPSFNMARVVRDKRTGKTKGYGFVSFSNPTDLAAAIKEMNGKYVGNRPIKLRKSNGRRGQMLRLCKDKRIMSKGSLKFPRRVFFTSRDI

SEQ ID NO: 42709 - protein, 133 aa, Zea mays
  Clone ID: 700451595_FLI.pep
QKAVADRRKRKKKRQRARMPCLNVSTNVNLEGVDTSAILAEASKSVANIIGKPEAYVMVVLKGSVPMAFGGTQEPAAYGELVSIGGLNPDVNKKLSAGIASILESKLSVPKSRFYLKFYDSKRSDFGWNGSTF

SEQ ID NO: 42710 - protein, 277 aa, Zea mays
  Clone ID: 700451863_FLI.pep
GFNYASTDLAALWYRLNVEQAEWIIYVTDVGQQQHFDMFFSAAKMAGWLPGPNEKKFPKTSHVGFGLVLGSDGKRFRTRSTEVVRLVELLDEAKSRSKSELLQRLTENGKIVDWTDEELEQTSEAVGYGAVKYADLKNNRLTNYTFSFEQMLSDKGNTAVYLQYAHARICSIIRKSNKDVEDLKMTGAISLDHPDERVLGLYLIRFAEVVEEACTNLLPNVVCEYLYNLSEMFTKFYTNCQVVGSPEETSRLLLCQATAVVMRQCFNLLGITPVYKL

SEQ ID NO: 42711 - protein, 169 aa, Zea mays
  Clone ID: 700428173_FLI.pep
LIAKWRLHYVLEMDARQNTNCLCSTMVGMTAVQRRRSRWHMRIRRNSVISKLHPDHTHSDRNTKSMAVGQEQRTTVCVLHLGTETPHSSSPYFTPNPRLSASMDLIWLASGHHLTLPFLGRIDGRAYGYQAEAQIHGTRERRSRTSSVHQIQQWRTDIHRYYRTSTSSK

SEQ ID NO: 42712 - protein, 120 aa, Zea mays
  Clone ID: 700430518_FLI.pep
HALHSLGYVWDMRISPAILHCPLCPYSAHGQNGRGLRAETSRGQREDIHGEVLLRAAARAVWDGTGLWFGLGPKWYISLTDRLIGGAEIQERVQSTLEFQNQRAPCSIYVLNLNYLGAQH

SEQ ID NO: 42713 - protein, 145 aa, Zea mays
  Clone ID: 700433651_FLI.pep
YLQVLWPTNSGRESTGRPHGDMKTTAGQTTASVLARAWQIFADNSATFLGIRTEVTLLHLSRLTLNKQGASAFLPFAAGGHRHLEVAPSSQQHSSLWYWKTLLDVRLPAPPPTPVSWKTPIVGAAPCRKLQGRRYRHYDRGGYMD

SEQ ID NO: 42714 - protein, 82 aa, Zea mays
  Clone ID: 700433658_FLI.pep
ISPHPTIMSGKKISFQIISVMRPWLSVGTERLNGNAVGDAAAGDARPRCGRHELVRQHASAAPVAAASVSVAPFDLLLGAAH

SEQ ID NO: 42715 - protein, 453 aa, Zea mays
  Clone ID: 700467986_FLI.pep
GISFEVKVVAANHDNKSTQITTLPNEPEIDSFKESEVPGVPPAGNILVNDGVISTSANVVSPVKNDPVVETYVKVVNEDVVKIPVAAPASTPVTAEEVVNKDFVKIPESAPALPSSVEKAAPAPPASVEKAVAAPPASVEKAAPAPRAPVEKADPAPSAPVEKGAPALRAPVEKADPAPRAPVEKEVTRKTYASVVKIPREDTQPAPAARPSKPNLNIKMVQNTEKNVSSPSKPAHATVNALPGDKGVPKNKSPDEPGYSIFVKNLPFEATVEMVEQEFSKFGAIKSGGVQVKCQPDQFCFGFVEFESQQSMLAAIEASRVYFGTRESYVEEKRTKTRVVDGVITRGDDNGNGGGGRFHSGRGGGYYGDGYKRQWGGQNNGYYNGGDNMRNDYSGRVRGPQGNGHPQNGHGYHQNGHGYYSGNGYQQRRPNSNGNGLRVERNNGFRQQGPASA

SEQ ID NO: 42716 - protein, 317 aa, Zea mays
  Clone ID: 700469944_FLI.pep
SFPVLFVGIQGCDEREGNNPSWFNRIEVSKVVSIIRNLTRGEDVHESDIGVITPYRQQVAKIKKALEAFEMPSFKVGSVEQFQGQEREVIIISTVRSTVKHNEFDKFFNLGFLSNHRRFNVAITRAKSLLVIIGNPYIITKDRHWDRLLRYCADNGSYQGCPLPPPESPYSDDARFFSKYDEDQGGPSGQDYSQEPAYCNYNQEPAYCNYDDQEPSDFGSGHDTGVAQPEPASENQESWSEELPEDESQPFSNPQADVEETPKQDGEEGAAAAQGDAQADQSLTNDDSQLQDAGAGKYTFPPGWCDVSSIPATGWGD

SEQ ID NO: 42717 - protein, 371 aa, Zea mays
  Clone ID: 700469963_FLI.pep
PAMEVRSEQGLMAGRDLFGMPKSPPAPAPPSSAAMQSVRMAYTADGTAVFAPVSSSPATPSYQPQGAAHGASMSAATVVGGNGAPAAPSMGEPLAKKKRGRPRKYGPDGSMALAMVPASAASGSPATGQGFSGPFSPPALNPASSLVVASPDGFKKRGRPKGSTNRPRVDAAGSSGAGFTPHVITVQAGEDVASKIMSFSQHGTHGVCVLSANGSISNVTLRQTATSGRTVTYEGQFEILSLSGSFFLAEDGVQRSRNGGLSVSLAGPDGRLLGGGVAGLLVAASPVQIVLGSFNSGGGKEPQKQAPSEPTSAPPRVAPTAGMGGPSSPSSRGTLSESSGGAGSPPPLHRAMAASASNSNQPPFLSSMPWR

SEQ ID NO: 42718 - protein, 305 aa, Zea mays
  Clone ID: 700439775_FLI.pep
LMPMLASSYAFHFATVQLVDKYSEMKKTNDEDLIADVHVLSSGLKAYITSYTAKSISVCREACGGHGYAAVNRFGALRNDHDIFQTFEGDNTVLLQQVAGDLLKQYQEKFKGGTLSVTWNYLRDSMGTYLSQPNPVTARWEGEDHLRDPNFQLDAFRYRTSRLLHSVAARLQKHSKTLGGFGAWNRCLNHLLTLAESHIESVILAKFIESVKSCPDEKSREVLKLVCDLYALDRIWQDIGTYRNVDYVAPNKAKAIHKLTDYLSYQVRLVARELVDAFDLPDLIIRAPIGMQSEAYAQYTQYVGF

SEQ ID NO: 42719 - protein, 496 aa, Zea mays
  Clone ID: 700439811_FLI.pep
QRPAKAAAARPGTDVPAARSSGWHPNGMDASSVSPCDLDREFALQIAQLLATPPLQSAQEYYGELIRSKKLDGIRVSYSGKHGKGVYANRDFGEDDLVLKDQMLVGAQDSLNKIDCVVCSYCFHFIGSIEYQIGRRLYLQSLGGSGDGTTERHCHGSDVGSSTGCSGASNGNSNAVPQEVLLSLMDGNTLLPLTDQFCLPPVVACPGGCEGELYCSQSCADSDWDSYHSLLCAGSKTEPLRKSALQKFVGHANETNDIFLVAAKAITFTLLRYRKLKRQHVSHESSSSLLLEAWKPLSMGFKKRWWECVALPEDVDSSEEELFRQQIRDLAFTSLQLLKDAIFDPECAPLFSLDIYGHIIGMFELNNLDLVVASPVEDYFIYIDGLPESDKEEAEKVTGPFLDALGEDYLVPCEGTAFFPLQSCMNHSCRPNAKAFKRDEDKDGHAVIIALRPISKDEEITIAYIDEDLPYEERQAQLADYGFTCTCLKCQEERPV

SEQ ID NO: 42720 - protein, 198 aa, Zea mays
  Clone ID: 700439966_FLI.pep
CHIRKKMLGHRQLHRQTSKDKISAALRTVWERRIVSVRSRQKVLQIWSNSIAEAAKNGGHGQDMLGWDSYERMKSEMVSTFLWIKERGRMVKKLERAVAKIAAKRLQVVRRREEQATRMKKLKPDKTLLQNADRQPARVVVSARPKLKERLAKWHGRKKELETVISSRARKRGLRNPPRRQMAAESLEALSTSAAGAP

SEQ ID NO: 42721 - protein, 387 aa, Zea mays
  Clone ID: 700440030_FLI.pep
AEQYNEGSSSVDFDVPLLALLELLLVVQPVDPVLGCEVEHDVVDALLHALEPAHVDVGVVLLEQLPQLLLVLRHARLDVHLLPGRVRLLSAHREVQPEVVRRHLLHLLQLLLVQQGVAGRDAQEQPREPGVLVVLVLLEEHLPQEGAERSDAGTRCEHDDCCVGVFGHEHLLAHWPCDLHLSAWLQVTEEVRADSFDDLPLIVGVDQPLHAQRHRLGVAEISEGAAGDGVEPELVRLAVLVLAIRDDADGLALSVGDLAFCAEDHVPRLPGRLVAGDPGVEQAPPDVRLLGLVLVGDEPLLLLLGHLLQLLDRLRLRGLGGGHLHPQPHRARAAVPPRELEVAAWRRRGRGRGRLGLGGGRGGGGGGQRDGRRGHGSHGCGWGRMER

SEQ ID NO: 42722 - protein, 221 aa, Zea mays
  Clone ID: 700442854_FLI.pep
GIEPGVLYPAVSVEQFHEPHAYKLNFLSINRFERKKNLDLAISAFALLRSAAWTIPGDALQEATLTVAGGYDKRLKENVEYLEELKRLALTEGVSGQVKFVTSCSTSERNELLSNCLCVLYTPKDEHFGIVPLEAMAAHKPVIACNSGGPVETVVNEVTGFLCDPSPAEFSKAMLKLVNDHDLAVRLGEQARDHVVQKFSTKTFGDLLNSYVLNIYHERME

SEQ ID NO: 42723 - protein, 261 aa, Zea mays
  Clone ID: 700443224_FLI.pep
AQQTTKSFLLKKKAALGRRFLRLEWLHHLPGEVRVVPSKVAVGRRLEVAPVAAFLEVKVDDDHARPEIEVLLDNLEDLLVGDRAGAVRVDEHGERLGHADGVRHLDDGAASKAAGDDALGSLPCDIGSAAVNLGWVLAGESATTMGSPATVGVNDDLAASEASIAVRSTNDKAARWVKVEDGLLVKVLLRDDRLDDMLLQVSSDLIIGHCLVVLGGDEDGVDTDGDHGTTLIAVLDCHLGLPIRPEPGAGSVLADLGETST

SEQ ID NO: 42724 - protein, 128 aa, Zea mays
  Clone ID: 700443250_FLI.pep
KRKYLSHPNLLTAHPKYLSSFLFQCLAFNSWKYPTVTFFSCPSRATSLLSCNEKKSPSALHIASHAPDAHSLRAPCKLRAHACSYAARSSSSSSLNPLLLKLLFSGLPLCLKIQFLLLQSTLTSFRLF

SEQ ID NO: 42725 - protein, 90 aa, Zea mays
  Clone ID: 700443651_FLI.pep
VIQVLFSQEPSRTKVMYQSCRLASLLCLWLGFLEESFLNPVKWLDEVEAGGAGEDSPGGGSHDVGGLEAAARGDEAEEAGARRRECHRRR

SEQ ID NO: 42726 - protein, 403 aa, Zea mays
  Clone ID: 700446314_FLI.pep
IVSPLVRPPRRRRRPPPPLPLPLRTLCESSLSGLCGAGMALRRLLQGSVLPRIIGRDLAPAVAPFSTESGETIRATLFPGDGIGPEIAESVKQVFNVAGVPIEWEEHYVGTEVDPRTESFLTWESLESVRRNKVGLKGPMATPIGKGHRSLNLTLRKELGLYANVRPCNSLPGYKTRYDDVNLVTIRENTEGEYSGLEHQVVRGVVESLKIITRQASLRVAEYAFHYAKANGRERVSAIHKANIMRKTDGLFLKCCREVSEKYPEIQYEEVIIDNCCMTLVKNPGLFDVLVMPNLYGDIISDLCAGLIGGLGLTPSCNIGEGGICLAEAVHGSAPDIAGKNLANPTALMLSAVMLLRHMQFNDKADRIHNAILQTIAEGKYRTADLGGKASTSEFTNAVCDHI

SEQ ID NO: 42727 - protein, 347 aa, Zea mays
  Clone ID: 700446528_FLI.pep
VALFGPSVDEMNEKASHTPDFRSSVGSDRKKLKISCNRYVSRGSRNEDVHTRHSPQDYSHSKQERSSHNMNYEYRRHKRDSSAADKHRRQDVGDTNDRQFSTMGNDSKSHRHKHEERHRSDHGNGEKEDDSKTRPRKHCSVRRGSLEVGYSDWSPDFTGTDISKGPSGEKSTSRYDDAKGSRRGSSEYYNLERHHSTAQKQSRNEHSTTRRRRHDIEDYHDEKNDGRGESRKHNRHESNDRWVATNSDVDSDVDRYQSSSCKGTRLGRKDDDPGIEVRHQRSGRSTKDDKRRKHHSGNRWHSGTEEGTSDSSGGDLSSDSWSGRSRNSENFSAHRSRRKRSRSKESG

SEQ ID NO: 42728 - protein, 137 aa, Zea mays
  Clone ID: 700450189_FLI.pep
NLVEEEQYLTLVRKSPYHHGDRATVLLNWKLLAVEFLPEEDAVFVLLLCMVIARTMTEIRREDVAGLLVRRRISEARAGQRDWGSVMLPGSLSPDPHLQPWYRNATQVLSSAETGPVLTKYSPADGKDMLYRQALIP

SEQ ID NO: 42729 - protein, 374 aa, Zea mays
  Clone ID: 700452427_FLI.pep
VETRIGNMDNIDGPSVSESDALRQGAIDVPGLQYDLPSVSSHAYSNTTQPSTMEEPQGNTQAQPLSHFSGLLQANTLPNNLLGSNLTPLREFDFSQFLQTQSATKYNPSVAPNNLPPISMQETSKQGGFPNTQSTQHVPSTSISSGLPLPQQLPVYSQPTLPLGPFTSLVGYPYLPQNYYLPSAPFQQAYSSNGPFHQSAAPAVPGAGMKYPMPQYKSSPPASTLPQPSSLSGYGGFGSANNIPGNFSQNQGAPAAPTTLGFDEALGTQFKHPNHYAALQQSDNSTMWLHGGAGSRTISAVPPGNFYGFQGQSQHGGFRQAHQPSQYGGLGYPSFYQSQTSLPQEHPQNPTEGSLNNPQGVPSQPSHQLWQHIY

SEQ ID NO: 42730 - protein, 262 aa, Zea mays
  Clone ID: 700452685_FLI.pep
MSQVDLAREAAHLSRFIYNFRRWKDVSFPRPLYPLVHPAVLVETYEHGESVSHYVDDLEGHDRIKSALAHIGTHALLKMLLVDNFVHADMHPGNILVRVAQPKNSNNTLKKSRPHVVFLDVGMTAELSSNDRVNLLEFFKAVARRDGRTAAESTLKLSKQQNCPNPKAFIEEVERSFSFWGTAEGDAIHPAECMHQLLEQVRCHKVNIDGNVCTVMVTTLVLEGWQRKLDPDYNVMKTLQTLLFKEDWAKSLQYTIQGLMAP

SEQ ID NO: 42731 - protein, 395 aa, Zea mays
  Clone ID: 700452736_FLI.pep
AVSDYYQFDDLLTDEEKALRKKVRGIMEKEIAPIMTEYWEKAEFPFHAIPSLASLGLAGGTIKGYGCPGLSLTASAISIAEVARVDASCSTFILVHSSLAMSTIALCGSEAQKQKYLPSLTQFKTIGCWALTEPDYGSDASSLRTAATKVPGGWHLDGQKRWIGNSTFADVLIILARNADTNQLNGFIVKKGAPGLKATKIENKIGLRMVQNGDIILNKVFVPEEDRLTGINSFQDINKVLAMSRIMVAWQPIGISMGVYDICHRYLKERKQFGAPLAAFQLNQEKLVRMLGNIQAMLLVGWRLCKLYESGKMTPGRSSLGKAWTSKKAREVVSLGRELLGGNGILVDFLVAKAFCDVEPIFSYEGTYDINSLVAGREITGIASFKPAVSAKSRL

SEQ ID NO: 42732 - protein, 384 aa, Zea mays
  Clone ID: 700455972_FLI.pep
SQFCEFITFPCQREIANIAREGEVTTTTRLARFRFLGGAGGRPAEGFPVGGGAAANEEVAERRRAGRRDPVLVTQELPAARALHLPLVVVHHHLRLRALGPRHHRSRVDRRHPPRRPLHEPARAVDEDDVPGDVVELVGEVVDGEATLGEEQVLDGAALGGARGTGGVEEVGELAHRRGVGHVVGLQPRVLALQVGHVVRVLVQEHRAPAVVERAPQRRLRAQPEHQQVARRAPPEHRRDRAHVRLRHARRQVPCRRRVLHQRVEHVPRQAGLRGAGSAVRERRRLARRRPGRGARRGEHGQEGHAGEQGQEHHQPQAPGPAGRRRRRGRHPVQGLVRRRVDDEQLWPGHCLHLLRFCLFVCFACVRGGGCCADGMATHTDILR

SEQ ID NO: 42733 - protein, 355 aa, Zea mays
  Clone ID: 700456110_FLI.pep
ASESKAPKQPPREQVAAKQPRLPAKLELALFYHVFHGAAPRRRPGEAERGGGRARSDDHEQQRHRHGRGRGRPRAPGVGQEEALAPPAIGGGEPRALPPHALPRWPPPRPGAANAGPVRGAGRRGVQVLRLRQVLQLLPGAGGPQDQPPRQAAHPSSSSSCCNCPGSSARPGGPRPDHRRRPAAAASRGRPRAGHVIHRRVLRRGGLEQSPPVLHLPQGVPDRPGARRAQEEALRRGRRQRRRVHRRPGGARRDVRRGRELRRACVRPQPPGRAGVRVPVRQARQDVGGGRGGAEPPRLQEAPPPHDRVKPLRARAADLISSPVQDFGPQLPSSAVEVEHTIRSFISYGASSAIV

SEQ ID NO: 42734 - protein, 382 aa, Zea mays
  Clone ID: 700456337_FLI.pep
TMTSRAAAEAALLLPLRLHSAPLRLRFFCTSASRLRWACSAAALLAVVSLVTAICAMPDAGAGTNVEADADALRLEIEALRLKVARLESLLEANSKALDIKASILEEDNKLNEAMEREIQLLTNGPDRTKNSQSKSYSAGNIKSMEDEVRQLQHEIIKINSNSYTVESLAHDTEKRVEALSLEVKKIEDMTAEQWIQIRQLEQAFVLTKMMMSKVHERSRPSDTVYKWPGKEIIVKYVRNIKLDGIYLRGASYVRSCFSHTYKQSRSFVQAISRCYHEISRFRKAIRHRYTSDINKPDVFFLGGTISRSNISLPYNQFKIFISLARKFHYKAQCFIRDVMESNKYSCGLSNEPVTFILAYLVVISPLWIAWFLYSTWFSSRK

SEQ ID NO: 42735 - protein, 208 aa, Zea mays
  Clone ID: 700456460_FLI.pep
NADIDGGDPSADCSCLIRTAIRCVKETVHVDLSSCTHWNRFVEVHYNRIGKDGLFSHKEITVLFVPNLLECLPSVDIWKNNWILYKKSKAEREQLTVKKSPGDPKEQMQGELNDGKNLDADQLKEADVGCSDMKNEKDDVDIKQQGNDGEGTGKVEEPVQKMGGDVEGKSTGDSSIDHATTGDKKPTKKKIIKKVVKVVRKKNNWTFS

SEQ ID NO: 42736 - protein, 234 aa, Zea mays
  Clone ID: 700428822_FLI.pep
SPSRASDEWPAASAWVRGDLDALAAERRRRGRLVGAEEAVGGEEGEEDETEHGAEGDGHGCARLAAEAAENTTRLAPRHLLVAVVGEVQQLRRRSTCRQDQVREHLVEEEDDPGARHGGGPRHGRVERGRQRVGGAQAVGVDEVFEAPQVGVGDGAVLIALLVTEHEGHGGHAQHQRRRAQQRLDGPRRPRHRSITRRQLLLLRRVRRPGSSESADARRLRHPRISSAFFCILE

SEQ ID NO: 42737 - protein, 246 aa, Zea mays
  Clone ID: 700431553_FLI.pep
CSDVWQKHIYCTDLHKEIPEKLDFTNSDAENLTADKFSSCNVLRCNGFPDMCLLRGDIRGSACRGSRKGWRIHWLHQRVHLHDTDPATHILDDQMELSKKRSKQARAVRLVKCPSTNLAHSDLPSILLRVVHLDLTTAGRGCRRLQGIQIPFHNGAQPRPSLPRRPALAHARRHLLPRVRLRIEHLSADVDGEWPGIEALGNVQLPPIRGHSGGDGLEQVSYGRRHGLRLGEQHVRQLGPGPSRRV

SEQ ID NO: 42738 - protein, 102 aa, Zea mays
  Clone ID: 700434265_FLI.pep
SNPHQFACTPACLPVIMLHCLLLFSPGIVMVTTSLAICSTTLISSDKMTGLNLQVSIHAHYYHSSIWQIPFPWNSELSKVNRQTTHHRIKSHHLHLLTESSL

SEQ ID NO: 42739 - protein, 184 aa, Zea mays
  Clone ID: 700434310_FLI.pep
NRNVIRITPFRRRNGLRCSADAGRLAVASARAMQQIISACKLPHTQRAAAFLPPRPSLRRLPVPAGGAPPPRRLVVRRRCQEENKQQQEAEEGSGADEQEQQKRTFLSLEEAGLVEMSGLSTHERFLCRLTISSLNLLRVISEQEGVPIEELNAGRVCDWFLKDKLKREQNVGTAVLQWDDPGF

SEQ ID NO: 42740 - protein, 178 aa, Zea mays
  Clone ID: 700434582_FLI.pep
LWFFLSDCDLANVQLLVQAVTAIHLTAPFLERICAGAPLVTLFSPGAGAPLSSLVRRRSGALLSLVPAVLLFLMLMITRPSQQCFPASSASPPVLPRSWLCFPATGYRSLRRSVSLPTSTMETPPGAMTSAPAVVIPDDNHDAYRSVTIEDVDHSLIKAPTTLEEIGALPPMDVVKLR

SEQ ID NO: 42741 - protein, 287 aa, Zea mays
  Clone ID: 700434614_FLI.pep
LSLSLSFPVPSVLSSSTEGSVPRSSRGECVGDQGVVDWIHPLACFPHQVSNPHLREELLSQGEIARNCANTCSSIPPQSIEPWCLLSLSLFKMVARRNPSIIEEGSRSEEIQVELERPRRSQTGHGRGQARGDVGGSSSQQPQIVHAAREEPVPQPPLHPSSSRAAAAAASRPMSRGKRSKKRGVRALIRGLNGIYAICRESYVQIAELKRKNDEYNENFRRFMLESDNFRRYVGRVPLRPAPPYNPPPPMPDTLDQWVQQTYGVPFDEDISDDEEEISDDEDESFW

SEQ ID NO: 42742 - protein, 334 aa, Zea mays
  Clone ID: 700468256_FLI.pep
CSSTLGFVDLSTNRLTGDLPSCLNGNLNNKVVKFDGNCFRVDPAHQHEDKYCQQSHNGRGSKKDVGLVVTVVGILFVILVLSLLLMASNKRSCQKVLAEQQIQQKHTQDNLLSGMSSELLVNARCISQAVKLGTQIQPSYHIFSLEELKEATKSFERSAFLGEGAIGKLYKGRLENATLIAIRCLPLHQRYSIRNLKLRLDLLAKLRHPNLVCLLGHCIDSAVDESTVKRVFLVYEYVPGGTLSSYLSACSPDKTLKWCDRLQVLIAIAKAVHFLHTGIIPGSLSNRLKSSSILVDEHHTAKLSDYGLSIITEEIYRHELLCSGNRTKGKILAK

SEQ ID NO: 42743 - protein, 383 aa, Zea mays
  Clone ID: 700468260_FLI.pep
TVNGHRGPKIHLDSGERRPQNRSARKRRSNPPTRHHRPRARRRPMAPLVPMSQPWVEKYRPRQVKDVAHQEEVIRVLNNTLQTADLPHMLFYGPPGTGKTTTALAIAYQLYGPELYKSRVLELNASDDRGINVVRTKIKNFAAVAVGTARKAGYPCPPYKIIILDEADSMTEDAQNALRRTTETYSKVTRFFFICNYISRIIEPLASRCAKFRFKPLSEEVMSSRIMHICNEEGLNLNAQAMSTLSVISQGDLRRAITYLQSAARLFGSSISSSDLISVSGVIPEDVVKSLLAACRSGEFDVANKEVSSIIADGYPVSQLMAQFLDVIVSADDIPDDQKARICKKLGETDKCLVDGADEYLQLLDVASETIRSLFNMPRTLVF

SEQ ID NO: 42744 - protein, 306 aa, Zea mays
  Clone ID: 700468560_FLI.pep
DIFVSDGAKCDISRLQVLFGSNVTIAVQDPSYPAYVDSSVIMGQTDLYQQDVQKYGNIEYMRCGPENGFFPDLSTVPRTDIIFFCSPNNPTGAAASRDQLTKLVKFAKDNGSIIVYDSAYAMYISDDSPKSIFEIPGAKEVAIETASFSKYAGFTGVRLGWTVVPKELLFSDGHPVAKDFNRIVCTCFNGASNIAQAGGLACLSPDGLKAMQDVVGFYKENTEIIVETFTSLGFNVYGAKNAPYVWVHFPGRNSWDVFAEILEKANVVTTPGTGFGPGGEGFVRVSAFGHRENIIEAARRLKQLYK

SEQ ID NO: 42745 - protein, 218 aa, Zea mays
  Clone ID: 700471069_FLI.pep
ARKIETRQIVVEEIRKEEHIEKALNEEANIEDVDTDDELNEAEEYESWKNREIARIKRDREERDARLKEKEEIEKVRNMTEEERREWERKNPKPLRQTKQKWKFMQKYYHKGAFFQEGADDVIQSAGKEDIYTRDFSEPTGEDKMDKSILPKVMQVKHFGRSGRTKWTHLVNEDTTDWNAPWSTNGPLRAKYNAKMAGMNAPIAKPKGSKKLKDWDAK

SEQ ID NO: 42746 - protein, 216 aa, Zea mays
  Clone ID: 700471070_FLI.pep
RRRCLLTKLASTQSMLLSKALRMQQDLKDKKHEIIIEGLESKIKDQAAVLEKKDFELQTMEGLLAKAEAKIAKLDKELLSKSESFEQEKHRFDMKFEAEVKKSSNLQKSLKELQDKCLEFSNRCVQRLRQIFNSVGASSEKFIPSIEDLPGTFKHIKGEVDAPDEVIAGHGDFCALLASRGTAVAFMKSGCTHGKIVNRPNFSLSLADLIYIPSLA

SEQ ID NO: 42747 - protein, 592 aa, Zea mays
  Clone ID: 700471303_FLI.pep
TVSNPTGFLGRPIVPPAAPLPQTPPPIATQGGTPQNSQRPFYPSYPSGPGIVPPQPLWPHPHPPQPTGFQQPPFQYYPAGPVGSLGRPITGASAATMAFANVQPPGVSTGGDRKVQASTNAGSEQSTHAAAEPDSTGHGGQVTEQLEDNRNTGVQDSDAWSAHKTETGVVYYYNALTGESTYQKPTGYKGELEKVATEPVPVSWDKLAGTNWSIVTTSDGKKYYYDNKQKVSSWQLPPEVCEILKNAESGSLKEGSTSLQDAATIENKGVISIDASTPAIQTGGRDSLPLRQTVAPASPSPLDLIKKKLQDAGASSAPSALATSSATSELNGSKPADAALKGQLVANNGEKLKDNNGDVNISDSSSDSDDEEHGPSKEDCIRQFKVMLKERGVAPFSKWEKELPKIVFDPRFKAIPSHSTRRAIFDHYVRTRAEEERKEKRAALKAAVEAYKELLEEASEDINQKTDYQEFKRKWGADTRFEALDRKEREILFSEKVKAVQEKVQSMRKAVIANFKSMLRESKDITSTSRWAKVKENFRSDPRYKAMKHEERETIFNEYIVELKSAEQEAEQAAKAKVDEQAKLKERERETR

SEQ ID NO: 42748 - protein, 276 aa, Zea mays
  Clone ID: 700471467_FLI.pep
QAKAMASLGVRAAAAARLPSLRPRRDGSRVLTGLRVGTGHYGVRLALSSSTSASPREFKVAGLPVDDSSLGPGDEYEFGLYTPKLLAVTGDDYVSNPRMPDEDEFDHFYRVVAKKTDMLLSCHLPKPLAVSEEEKAVQEKFKEMANECIDLLVDAMRRIPAEKRRPLFSVFGELYPVFESVRWTAEGGCAKWWMALQIMEKLEIVRKMVSSACGGTPLDRGTVFARKVDLTGVDGQALAGHGLGSNLSVVIFVLLHNVFSNVKSDIDGMVSASTPY

SEQ ID NO: 42749 - protein, 429 aa, Zea mays
  Clone ID: 700473493_FLI.pep
GCSKLSKLDLEGNKLVALSENMFVSWTMLTELNLAKNLLTAIPGSIGALPKLIRLDMHQNKITSIPPSIKGCSSLAELYMGNNLLSSIPADIGTLSKLGILDLHSNQLKEYPVGACNLKLSFLDLSNNSLSGLPAELGKMTTLRKLLLTGNPMRTLRSSLVSGPTTTLLKYLRSRLSSDEEASGSRSTPTKDDQIAAARRLSLSSKELDLSGLGVTSVPAAAWETSDVVKLDLSKNSIEDLPNELSLCSSLQSLVLSNNKIKRWPHTVVSSLPCLSSLKLDNNPLVEISSTDLVPLSKLEVLDLSGNASALPEPSAVSALPQLQELYLRRMKLHEFPNGLLGLKLLRILDLSQNHLTTVPEGIKNFTALIELDLSDNNITALPAELGLLEANLQVLKLDGNPLRSIRRTLLERGTKAVLKYLKEKLPSE

SEQ ID NO: 42750 - protein, 158 aa, Zea mays
  Clone ID: 700473568_FLI.pep
VIFSVFHISPEVAGHLLNNPQPLLLLVRAMLILVIKMPMSPPPSLSCLPLCWLAGSTVRRATVCAVLKVLLTGLLVDSASRVSRYADTFSPSLDSMLSALTITAPLFAGVRRAYAQPRHRGTYLAFKPCSPQPSHRLPLRSARNRSPYSLVASPFCRH

SEQ ID NO: 42751 - protein, 530 aa, Zea mays
  Clone ID: 700438170_FLI.pep
DVVVGTPGRIIDLINGGSLQLGEVQYLVLDEADQMLAVGFEEDVETILQQLPAGRQSMLFSATMPSWVKKLSRRYLNNPLTIDLVGDQDEKLAEGIKLYAIPLTATSKRTVLSDLITVYAKGGKTIVFTRTKKDADEVSLALTNSIASEALHGDISQHQRERTLNGFRQGKFTVLVATDVAARGLDIPNVDLIIHYELPNDPETFVHRSGRTGRAGKAGTAILMFTSSQKRTVKSLERDVGCNFEFISPPSIEEVLESSAEHVIATLRGVHPESTKYFLGAAEKLTEELGPHALASALAHLSGFSQPPSSRSLISHEQGWVTLQLTREQGFGRGFFSPRSVTGFLSDVCSAAADEVGKIYLTADENVQGAVFDLPEEIAKDLLTMELPPGNTLTKISKLPALQDDGPATDSYGRFSNDRGSRNNRRSRGGGASRGRGGWDTDGEDRFRRGGRSLRSDNDSWSDDDWSGGGRKSNRSSSFGSRSSSYSSRGSPSFGGRSSSFGGRESNRSFSGACFNCGESGHRATDCPNK

SEQ ID NO: 42752 - protein, 606 aa, Zea mays
  Clone ID: 700444341_FLI.pep
LPHPSSPCHPCLRIGAARQSAQPLASPAREPFLHGRGMTLPEVNAGATAQRKKNSPEMEFFSEYGDANRYKIQEIIGKGSYGVVCSAIDQHTGEKVAIKKIQNIFEHLSDAARILREIKLLRLLRHPDIVEIKHVMLPPSRRDYRDIYVVFELMDTDLHQVIKANDDLTKEHHQFFLYQMLRALKYIHTANVYHRDLKPKNILANANCKLKICDFGLARVAFNDSHTTVFWTDYVATRWYRAPELCGSFFSKYSPAIDMWSIGCIFAEILTGKPLFPGKNVVHQLDLMTDLLGTPSADTISQIRNEKARRYLSSMRRKQPIPFSEKFPNADHSALKLLQRLLAFDPKDRPTAEEALADPYFKGIAKVEREPSCQPISKMEFEFEQKFTKEDVKELIFQEILQYHPQLLKDYKNGSEKTSFLYPSAVDRFRRQFASLEENGERNAALDRKHVSLPRTTTVHSTPIPAKEGPAATSQVAQRVPAARPGRVVGPVLPFESASVTDQHIARRVARNPAVPPATNTSSVYCYHLKSDSSDRQEHHLEREKDRRQYRPGQHFMDAKVAPEMGRDIRPSQYYVSRGLPKADLTDRATLHRSALHGVAPFNGIA

SEQ ID NO: 42753 - protein, 170 aa, Zea mays
  Clone ID: 700448008_FLI.pep
EMVSPESQTDARKENIHSDVAETDECTKTQKAALAGTEGENSAEDSGVPVSEMDKCNEMPKDAPTLTAAGANPAEDEASLKDLSVQTENKASSASPAPDDPKASDEKTLAEENQKLKELLQKLLASGNDQMGVITDLSEKVKVLERKLARKKRPKVRVHRSSRHATAKVQ

SEQ ID NO: 42754 - protein, 102 aa, Zea mays
  Clone ID: 700448580_FLI.pep
RTSMHNYSVEPWQTLEDVRRETSMHRIALLSLLQMHSKCVIIYLKSFYLLLILQYQLFKAVDFLSPHIKLFLAFVLYRNAPLQNSILSENYCKLLPMQILHC

SEQ ID NO: 42755 - protein, 165 aa, Zea mays
  Clone ID: 700451245_FLI.pep
LAIIEHACVLDNHKDQQTWPLHCPSISPDLAVVAPGLVAVEPVVDGGGVGLRPVEEVGAHALGGQVAPRVEDAAPHVAGAARRRRRRRRRRRHRRRRGRRHRLRPLVAAAVRVFVDDERTGGGGLAELLEARLRARPGHHVVPQLVQHLLIRSPLSTSQNHQDER

SEQ ID NO: 42756 - protein, 267 aa, Zea mays
  Clone ID: 700451259_FLI.pep
LVAAAAGLGRRRRRRRLVLGADGVQRLHVLLHPLLLRPPRRLHLPFGGDGVQLHQLVHQRLGQRHHVRVHDLAALAHDRLQRRHLGCELVDVEGGAGDGLGGALGLAGPALLEEALGLGGGVLEHDHLGAVLDAGHVQERLGVPLLVLVHHLLVVRVQARLLRQQLLELAEGCLGVDVDLVVDAVELDLDADGGHGRAAGGRVRVGAPLLHQHPAGPDLPHLLLGHRGGLLRRREGHSLLPVRAHHLGLLTLSPSDPLLVLLVAIVL

SEQ ID NO: 42757 - protein, 375 aa, Zea mays
  Clone ID: 700453362_FLI.pep
QQSQRKVVLMSTVTLPTLSRCLVELEGLHHLPGEVGVVTAEVAVGGGLDEPVAALLQVEVDADHPGPEVEVLLHDLEDLLVGDRAGAVRVDEHGQGLRHADGVRHLHEAAAGEAAGHDALGGLPGHVGAAAVHLGGVLAGEGATAVGSPAAVRVDDDLAAGEAGVTVGPADDEAPGRVEVEDGLLVEVLLRDHGLDDVLLEVGGDLVVGDGLVVLGGDEHGVHADGHHGAALVHVLHRHLGLAVGPQPGAGAVLAHLGEARAQLGGQHVAQRHQLGGLVGGVPEHVALVARADLLGPLREVPVHALRDVGGLLLDVHQHLAAVGVEAHVVGGEPDLAAGVAHDLLVVHGRLGRDLAEHHHHVGLGAGLAGHLAVG

SEQ ID NO: 42758 - protein, 295 aa, Zea mays
  Clone ID: 700453736_FLI.pep
AATSVQAKIKSIHDVLDDPRFLKGEPEDVQLSKEQEEMKKVTVQTVRDALISKKVESREQDNAPLSDDFPEDENEEDFDNRMRAQILKKRRELGDVCPHETSKADKPHHKDKELSDRRSNIEHRRDTEDDDQEHELQKAKKLSLKKKGAGSEASAERMSKADANLQLLNPAEQERHLQKQKKRRLQGREDETLAKLQKFKSSFLSKNLATNHVEEKNPSTDKAEKEDEEEDDYKGWHTNLLSFLPSSSKDGMTRKDDPDDYVVVDPLLEKGKEKFNKMQAKLKRREREWAGRSLT

SEQ ID NO: 42759 - protein, 144 aa, Zea mays
  Clone ID: 700453739_FLI.pep
CPSRRRRGLLGSGPLPDGAAAQGVRDPERRAGGAQGAAAGVRGGNQQEQGHQRRDGLAPRSPGQRQGRRHHGQGRHRVFLCHLHWRRTAVSSSAAVVIYGYYYIIIQCERVSSPIFSCHVMCEKLILLFSFRVCFLVLDLRVIM

SEQ ID NO: 42760 - protein, 55 aa, Zea mays
  Clone ID: 700454405_FLI.pep
EFYVTLPYKRICSFIFWMTCNFGLDCIQLQICFAFTLTFEATETIDFFFFLPRCD

SEQ ID NO: 42761 - protein, 210 aa, Zea mays
  Clone ID: 700454470_FLI.pep
GYPMMCFPSFEQINFFINIRTQNNSNLQPWQQINPRASSNRTTTHTAPNSVKVKFHIDPVIDQRLNNRPDLPLELVPFPRRVRAGVHVGLLRPLGQEPPDGQAGRHVGPRPERRLDVLGVGPGDRDLPAGRPVREGRRDEALGDEHVQRERLHVGDGALLERDVLVGVLGPLLLLVRVWPTVVLVHEVLHAEEAPGRTPDLPTVKLTPAS

SEQ ID NO: 42762 - protein, 168 aa, Zea mays
  Clone ID: 700457671_FLI.pep
KLTPLPQRHACIQSLHGDAPGWCATMRLYASSVRKSSSSGAVHCRLKILPASAYRPFRNLSGPTSASTLAISSSTTRASSSGVARTSTPPASSAAPWRSHCQFWTRLISAVAASSIRLYSGTEPEPASHAARYCTPTRTLSRRPSTVRAPRGGWMRSSSFTLAPSCPA

SEQ ID NO: 42763 - protein, 306 aa, Zea mays
  Clone ID: 700457857_FLI.pep
AGLFSWKAICTVRFSPIMEDERNTQQHQGGEQAQDQENEVKDRGLLDSLLGRNKHDDQEKKNQQEEEELATGMEKVTVAEPDHKEEGHEAAEKKDSLLAKLHRTSSSSSSSSDDEEEEVIDENGEIVKRKKKGLKEKVKEKLAAHKAHDEGDHHQPGVPAPAPAPPVAVDTHAHHQEGEHKPHFPAPAPPPHVETHHPVVVHKIEDDDTKTQTPPQAPEEEKKGLLDKIKEKLPGGHKKPEDAAAAAAAPAVHAPPPPAPHAEVDVSSPDGKKGLLGKIMDKIPGYHKSSGEEDRKDAAGEHKTSS

SEQ ID NO: 42764 - protein, 238 aa, Zea mays
  Clone ID: 700458511_FLI.pep
EEDSNTSLVVLVPPIFSPCSSTNHMAALGPASVTSTGLALHTPAIPHRRRRHGNAVACASSSQHQRSLNGLAMSSSGTNNALPIKGITTTRVPAVGRSVPAANPSPSGGNNLPVPKIPPWVKWVAGAVIFAVPMYRRFRALEDKIEKTAEVAIEVIDKVAEATEKVAGEVADEFPGNESIKEAASRIKKVMHVVEEDADKAEALIEKVDEIKKDVDSIVDPIIGKVAKDKSRRMNQKG

SEQ ID NO: 42765 - protein, 235 aa, Zea mays
  Clone ID: 700461101_FLI.pep
GIALVVSPLLSLIQDQVMGLSALGIPAYMLTSTTNKEVEKFIYKTLDKGEGELKILYVTPEKISKSKRFMSKLEKCHHAGRLSLIAIDEAHCCSQWGHDFRPDYKNLGILKIQFPSVPMIALTATATSKVQMDLMEMLHIPRCIKFVSTVNRPNLFYKVSEKSPVGKVVIDEITKFISESYPNNESGIIYCFSRKECEQVAKELRERGISADYYHADMDIVNREKIHMRIDTQGM

SEQ ID NO: 42766 - protein, 178 aa, Zea mays
  Clone ID: 700429932_FLI.pep
VSGPTTFPTGPNQLPSPIPTEATQPPPAEPKPLDAAAAGVGERGTGTARGRKWRRGTAAVAPRLASASPPSPRRSAPRSPPCRTKNASRASAPRSNVRAPRSRHHHHHHGGGFFLSTFPLWSRLSRPPRVTLRALTPPVDPPRRSHGAVPEGADGECRVPGVAAPHPGGDLLLRRRLR

SEQ ID NO: 42767 - protein, 98 aa, Zea mays
  Clone ID: 700430064_FLI.pep
NPIYDRSPYSLDHPSRRRRPTGAAAVAAQSERLQDTFFTCQDLDQPLAIHQTKRGYMRRIALHNDFAMATTMRVLTDYRWCSPGSRAPRPPGRSSTAR

SEQ ID NO: 42768 - protein, 193 aa, Zea mays
  Clone ID: 700430202_FLI.pep
PFSVLWGLSSEVFIRGFISSLPQRAWDKKALLLLLLYSFCRSALKHLKIERVKKFDYCMPYYMPLQPLEDEENTTINFLYPLEPPIVDEFDWEMDDYEDFADQKVQEGSLPEGEKEKFKEFLKEKVRERKRELRQAKEARKKAIDDMDPAMKEAFENIKFYKFYPVKTPDTPDVNNVKARYINRYYRNAHYLK

SEQ ID NO: 42769 - protein, 300 aa, Zea mays
  Clone ID: 700432792_FLI.pep
VSGSGSGVGPIPSPADGSRIASPPPRSLLGSPQLRCRPPPPHSPRLLAPRRSPVMSGGNAWSPLPSHGFGSESSGMANRAGEPVARTNSDGGGGGSKDSGSFECNICLDLAQDPVVTLCGHLFCWPCLYEWLHVHAHSQECPVCKAVVEEGKLVPLYGRGGSSAVPRARSVAGVEIPSRPTGQRPSTAPQPDHNNHYPHQNPWFNGAGAPPVANGRWGSYTFSAAIGGLFPLLSFQVHGFPQATAYGPAAGFPYGYGHSFHGWHGHGFPRQAPQGQQVDAYLKVLLLAVGVLVIASLIAF

SEQ ID NO: 42770 - protein, 89 aa, Zea mays
  Clone ID: 700433023_FLI.pep
LKLKPYFIQADNLERKYADLLLPPYCKKTVHSTIGSIIHRKTSKISSFFTFWPTDGGRKAWTDRVLERVVAPAQPTDVGEQPDELLLVR

SEQ ID NO: 42771 - protein, 84 aa, Zea mays
  Clone ID: 700433102_FLI.pep
ISERPNVHPCIARVVLAGPAAVGRFRRGRRLGLCEVDQVLEERVLRFGRAGRCRPCRAPLVLAAPRVQREAFGLCRQSIVAAFV

SEQ ID NO: 42772 - protein, 264 aa, Zea mays
  Clone ID: 700433287_FLI.pep
RGFLSQLRRRLATPPGAGSSPSPATRSVVVVPAAPIPNRMGSLASERKVVGWAARDATGHLSPYSYTLRNTGPEDVVVKVLYCGICHTDIHQAKNHLGASKYPMVPGHEVVGEVVEVGPEVAKYGVGDVVGVGVIVGCCRECSPCKANVEQYCNKKIWSYNDVYTDGRPTQGGFASTMVVDQKFVVKIPAGLAPEQAAPLLCAGVTVYSPLKHFGLTTPGLRGGILGLGGVGHMGVKVAKAMGHHVTVISSSSKKRAEAMDHLG

SEQ ID NO: 42773 - protein, 115 aa, Zea mays
  Clone ID: 700240927_FLI.pep
ACMLRFVLCIFLQWILHDWDDAKCIKIMERCKEAIGGKERGGKVIIIDTVIGSRPNEEDMIRREAQVLCDLGMMTTSNGAEREEHEWRRIFLAAGFRDYKITDTRGIPSIIEVYP

SEQ ID NO: 42774 - protein, 101 aa, Zea mays
  Clone ID: 700238777_FLI.pep
TTLTYVVLTPQNLVLMLLPFLHLLHTTLQPRCNHQEVALPLLEQLLVEWLLAQPCYLLFLLSVLPIGGTGNHKSIFSMYMASKLVFDYYLSCNIRANNVYM

SEQ ID NO: 42775 - protein, 235 aa, Zea mays
  Clone ID: 700152819_FLI.pep
RQPDGQQRAPGRAAQPQDLRLRAVAADDDGGKLERAGGGGRAGVPRAGAVEAEEGERQDGRVQPRRHHPGAADGQVPRGQHQRHGPAAVGGVHREGGVDQRGVRPGAGARRRRGDGRGRAAHGHAEARAALRRPGACGQAGGARGAAAARADQAWWQRGRRWAKRRRWWWRRRPCAGGFCFCGRRRRVASKQRQTGIYQKEKRSNGEIKREIIYVGILSFVCFTGRIGLIIFLRS

SEQ ID NO: 42776 - protein, 55 aa, Zea mays
  Clone ID: 700214467_FLI.pep
LDKDLASISMSPMLFTGEQAEVAANWKLARERKLRHTHTHYPKAKLNSRGHPPMK

SEQ ID NO: 42777 - protein, 307 aa, Zea mays
  Clone ID: 700167129_FLI.pep
FNLVLIPDMIIITTTKKLYSRLCMNTCVRYKPALHVHPFQLRKAQSRRTSPSDGSVLTPTRPSLVMASTKACSKAVAFCAHATTVGCDRASEKSTWSEANSPRPSTRLAKYWLSKACGVTGSSCSAMLGSTPAGHAACRSSAYVAFIVGSTDCGWIRSENVLQCANPTVCAADKAIMSACDRLLRAKMLVSWSRLKDGGGSLPSTLVDMDTSPSSLPSSTAYDGPPASSMTSRVASARMSAHDTWLAHAGTASTAALAWMTVSKPSPARERLLGWSFSAVLFPVDTRITDASQPSTKQSSDRGRSVG

SEQ ID NO: 42778 - protein, 97 aa, Zea mays
  Clone ID: 700206545_FLI.pep
GRFSATSFQVLGHMKTVCVLILGWILFDSALTVKNILGMLLAVMGMVVYSWAVEAEKKAAAPIPRNKGGMLDGEDVPLKARVSGVPAVDLEDGDVKG

SEQ ID NO: 42779 - protein, 157 aa, Zea mays
  Clone ID: 700219978_FLI.pep
TRPCPGSHPPGRHPPHSATPPGGEAWRPCPNPCSQVAAAASTQIPESQTMPPLRLLILSAEQASSGYIAKGGKADLGRSWLTSREVLEGLVYLHEQGVIHRDIKGANILSTKEGMYHESHEFGGHMFNTLLEGVLDKESLYLKTGGYKKLKWLSEGF

SEQ ID NO: 42780 - protein, 603 aa, Zea mays
  Clone ID: 700473146_FLI.pep
VPAPQASNFGVPTTQQNVTNAPQAASNPENAQGNNFNPVQHGSMGTALQQGSTGPMQGALNAQHQSNSNMISNNAMSTMQTNTNAMQANVNSLQQLKQHQEHQMMQNQQMKQRQQMLQQMQQKKILQQQLPIQQLQKQQQQGPIQVQQLHSGNDVNELKVRQGAAIKSGMYQPLNQRNYYQQIKRGDVFPISSPQNLQASSPQISHYSHVDQHSLLQSQVKTGTPLHSANSPFVPSPSPPVAPSPVPLDSDKPLSNLSSLTSAGQAGHQQTSLAPLTQSIAVNTPGISASPLLAEFTSADGGQVSVPTQVPTKSSAAERPLDRLLKALRTTQPESLSAAVSDIGSVVSMIDRIAGSAPGNGSRAAVGEDLVAMTKCRLQARNFITHDGSGASKRMKRDTGAMPLNVSSAGSLNDSLKQSYTVGTPELQSTATSRVKCQRAEVNHVLLEEIQEINKQLIDTELHVSEDDAESFTTSDMAEGTVIKCTFTAVAVSPSLKSMFASAQMSPILPLRLLVPGSYPKCSPVLLDKFPDEQCRNSDDLSTKAKSKFSVLLRGLAEPMSLREIARTWDACARKVIAEYAQQTGGGSFSSSYGCWESCVGAS

SEQ ID NO: 42781 - protein, 237 aa, Zea mays
  Clone ID: 700425267_FLI.pep
GGVARCKESMAWGGLFLCMGRPTQEQQKSCLAAAGGFNYDTALQGATRPKSVSTLTSDEAGGEIGDKDLTERGFFVNRSRVLVGSGSDAFVHAKSALLSWRHLALGWANVEPDTPVKVGTRFCICYKELIPWVTLPLQIAYVTDVDSDTSKGCSRSKMFAFGSGTLQGHLLAGEERFSVQVDEEERVWYEVLSFSKPAHVLATLCYPYVQLRQKHFAQQSGQALVRHVSTCSSKQKQ

SEQ ID NO: 42782 - protein, 186 aa, Zea mays
  Clone ID: 700354617_FLI.pep
AGARTSKHIKNRSLCLPSGPPTWACCLLLFVLFLILVATASSTVGHCGLGLLRLSCRFHRCHRLLASKQDLEENGNEHDDNGDQNANSDVGLLLSLLDNINDLGFVGCQERNISNLVQDVKNLLLELRKTICTSSSLLLSLLLFLLNIILGLPGLLQNGGGNLLIVSNQDIVKQDAILHCPDLNPN

SEQ ID NO: 42783 - protein, 84 aa, Zea mays
  Clone ID: 700426869_FLI.pep
PPTTRNAVSIYILVNLGMINYLGGASKFNDMIRVGVPQTFCKEAANESWLYLTNCTRRPTTGNTHREPLHTILDLVAGPCCGGA

SEQ ID NO: 42784 - protein, 311 aa, Zea mays
  Clone ID: 700431113_FLI.pep
ASPRLAPVCLLLAGPLPLLRCTPLCNPPPLEQSSRAERQPRRAPAPADMTAGQCGNIQDQEAAPGADLYAVLGLNRECTDAELRVAYRRLAMIWHPDRCSASGSSARVEEAKERFQEIQGAYSVLSDSNKRLLYDVGIYDSEDDDADLSGMGDFLGEMADMMSQATPTESFEELQQLFVDMFQDDLDGAGFFGGLPTSRSAQGPSSTSLPPSTSPLRPTPPARSKGAQTPSSFNGAGRRGSTAKRPRTGWAGLEPDLGLSGFCFMVSKSKERPAAWACDGGDERSGSKQRLSTSRLRLRWWDVALAAEPNQ

SEQ ID NO: 42785 - protein, 138 aa, Zea mays
  Clone ID: 700466578_FLI.pep
GRPRLQRAHGGRGRRGAVRSTRPCRCRPPMWIHGVIALEPACICSTWSSRARSGERSWLQRNSDRAHGRLQLQNCQSRPERVSFCDQSCSVWQVTWDQDTFLFAFPFHTLPYIRQTKMLSLRSVRNWLPSKKVPETAS

SEQ ID NO: 42786 - protein, 78 aa, Zea mays
  Clone ID: 700337561_FLI.pep
QMDHWDQHQEANAKSGSTALASAIAESVTAADPEAPPSIDIASACCSKSSSSCGHSYVCSYGRPFNNQLHVVMCSLQA

SEQ ID NO: 42787 - protein, 269 aa, Zea mays
  Clone ID: 700345535_FLI.pep
LEYIVRGEQRNLFELMHAIATTQGLKGFWKGNFVNILRTAPFKAVNFYAYDSYRKQLLKWSGNEESANFERFIAGAFAGVTATIMCIPMDTIRTKMVAPGGEALGGVIGVARHMIQTEGFFSLYKGLVPSLISMAPSGAVFYGVYDILKMAYLHSPEGKKRVSMMKQQKQETNALDQLELGTVRTLLYGAIAGCCAEAATYPFEVVRRQLQMQVKATRMNALATCLKIVDQGGVPALYAGLIPSLLQVLPSASISYFVYELMKIVLKVE

SEQ ID NO: 42788 - protein, 170 aa, Zea mays
  Clone ID: 700260815_FLI.pep
QARNQAREGAYQGGRRRRDAADRVLRRHAAGGRQDRRLPARRPLRRCPPRRRRPVLIAAGRTTRGGDQQERRHRGVGARRPARERAGRGGGEPCWAGGADRPRSAGHGRAHRRWTSLGIRSPGPGLTIQIKQYSTTATTLPALLVSCFQFSFSVSGVGFAKLLCTNYEYQ

SEQ ID NO: 42789 - protein, 149 aa, Zea mays
  Clone ID: LIB3137-004-D1_FLI.pep
DVDRFLLYYSVYRTVQECVAHTLFYIFLVRGCCSHRASSLCERLPLSQGTGKEVTDRCVGILYSGSSGGSGRHPAARQLSSVLVVPHLGCALVRPVGLVDEELLSGQHALLQIRQHTHTHKRVMQYSSRRIKRLCASNLETIILILDHV

SEQ ID NO: 42790 - protein, 288 aa, Zea mays
  Clone ID: LIB3066-051-D10_FLI.pep
CDVCHAMRPLELETKYVRRAGVLEPHGAVDERPGGERLGLLPSDDVEAGPVDPLAGAGAGPAVVVLGVVERLEGEVAVPGHVPLWLDEVGDGALHDDEARELLPGAAQVRGDLEAVREQLLVGHQAAVLDDEPGLHVGVGAPVRRHRVLLVVHGPPRDDEAVLEHRRRVAEDEVDGAGDHAVAEELPPRVHVQRVLERVEPAVVERREVPLHPERHRLVPLRAGRVVEPHVLADEPGRLDGEGGGLHGGDAVGEALAAGHAALLRPVAVHEDVDLVLGDHDDLVVEAG

SEQ ID NO: 42791 - protein, 117 aa, Zea mays
  Clone ID: 700338078_FLI.pep
HCPLDQSPNPRRRSMHAAHAPPVNTPSWRRSDSRVQTTYAPSHQYGGHLPPVPGAYMSAVLGWKMPRAPLGAVAARSLTRVSPSLGLDGMKGAAQSAVGEERRYSLQLRRSNMPTSY

SEQ ID NO: 42792 - protein, 149 aa, Zea mays
  Clone ID: 700378702_FLI.pep
NGSKQDEAFDLPSDDSDDNDFDPNMPEEHVASKEEGSSEEEEDDDGGSDSDDSDFLTCSDDLEPLIDKKKVDDLGLPSEDSEDDDYDPAGPDSDKDVEKKSNSDESDFTSDSDDFCKEIKKSGGHDEVSSPPLPDVRVGDMEKNTAQSN

SEQ ID NO: 42793 - protein, 260 aa, Zea mays
  Clone ID: 700426003_FLI.pep
VMKATVCWVLTVTTFIARYHTSAASNQGGTGLVGSCSPHDNSSEAVKTDSTYNMKSNSDAAAIKQGSNGSSNNNDMGSTTKDVVTKPSTNNERVMLPSAIKANGYTSTFHPVQQWMVPDNATAGKAKADEVANNAGRNSHPGDVQSNLTQQHRPTLHYVHFENSGSGALQCGSSNVFDPPLEGQATNNYGVKAGSNSGSNKGQNNGSTAGASTAAANAGRTDTEIRAIDKSGPGGGSGSGNDTYVRRLAASMTPRQEQLK

SEQ ID NO: 42794 - protein, 178 aa, Zea mays
  Clone ID: 700432527_FLI.pep
CRHLMLHSSLVLVLYKDSQACHHLGRFKNQHLFSSPIYNHHRFIVVLKLHRLHLQTFNHYSFLAAILSLATRPRIKASTPFQSGISCDIQYPPVWLLAAWCLTRPASVETNDSYFLTHLHACKSTRVKKPSLHLRAHASTIFLLPQARAWARSTHARGQAREQSQPIMQYVMYGEVAM

SEQ ID NO: 42795 - protein, 212 aa, Zea mays
  Clone ID: 700452811_FLI.pep
LQFLEPSLPLVIPLVTMPALAKPASRTAKPAAAPKPKPAAAKPKAATAGASHPPYFEMIKEAITALKERTGSSSQAIAKYVGDKHGASLPANFKKMLSIQLRGSAAKGKLVKVKASYKLSDAAKKASPKTKAKPAKAAAAKTTASKPAKPAAAKSKKAAAAKPKKTAAAGTKRKAPEKKIVAKPKKSPAAKAKAKPKTVKSPASKKARKASA

SEQ ID NO: 42796 - protein, 61 aa, Zea mays
  Clone ID: 700448072_FLI.pep
DFHHGTTCSIQIYRRHLLLSDIEKLYVAMLLNSIHHGALHHHGALHHQDSDHHHAHLQSLH

SEQ ID NO: 42797 - protein, 180 aa, Zea mays
  Clone ID: 700550992_FLI.pep
EERKEPGREELEEMASAEGERWVGLATDFSQGSREALQWAATNLLRAGDHLLLLHVIKEPDYEQSEAILWESTGSPLIPLSEFSDPIIAKKYGAKPDMETLDLLNTTATQKEIMVVVKVLWGDPREKLCQVIHDTPLSCLVIGSRGLGKLKRVLLGSVSDYVVNNATCPVTVVKSSSTEG

SEQ ID NO: 42798 - protein, 117 aa, Zea mays
  Clone ID: 700552758_FLI.pep
AHALPEELKWAWNCLEWVPFKASLDDVLGAVVAAVSLGLPCVALRKTPWALPPRHRPLLAHPPPLRPPSLPFSLASGSDLGGDDLVLDLGDDLVLDLGEGLVLDRGVPGVAGSLTTP

SEQ ID NO: 42799 - protein, 151 aa, Zea mays
  Clone ID: 700477049_FLI.pep
CIKIDGKTPLTTRQTLVTDFQNNDDVKAAVLSIKAGGYGITLTAASTVIFAELSWTPGDIIQAEDRAHRIGQVSSVNVYYLLSNGTIDDLMWDVVQGKLENLGQMLDGQEKTLEVSQRDCRPSPSKKQKTLVGFLKRPSASTSAEEGMPST

SEQ ID NO: 42800 - protein, 100 aa, Zea mays
  Clone ID: 700574444_FLI.pep
IIIISMVVDRCDQQLQGSHLQLPPQLQPWAASPDSAAASTNSGAAFFSGATPRTTVACAAVLVSSRSGYFLPHLQLEPQPQLDPQLQDILDLVVQKKLDL

SEQ ID NO: 42801 - protein, 142 aa, Zea mays
  Clone ID: 700574448_FLI.pep
KNAEATQSTLTPDGWLKTGDLCYIDEDGYLFVVDRLKELIKYKGYQVPPAELEALLLTHPEIEDVAVIPFPDREVGQFPMAYVVRKKGSNLSEREVMEFVAKQVAPYKKVRKVAFVAEIPKNASGKILRKDLIKLATSKSKL

SEQ ID NO: 42802 - protein, 95 aa, Zea mays
  Clone ID: 700578164_FLI.pep
FQLDTAPEIKNLGKRKMGSDSTIDKVPRTDKFITEKTLDNLVVHPESKCKRSHESIQAAVCIPLQDMGHLSISIPQFGELEVGLFVVIKECLLIC

SEQ ID NO: 42803 - protein, 118 aa, Zea mays
  Clone ID: 700578255_FLI.pep
FTSNWKDKIRCSHKGGSRYEAEVRLRHGKYYYKFIVGGQWRHSTSLPTETDEHGNVNNVIRVGDIARIRPAPSQLHIKDPSVVKVIERALTEDERFLLAFAARRMAFAICPIRLSPKQ

SEQ ID NO: 42804 - protein, 75 aa, Zea mays
  Clone ID: 700578768_FLI.pep
CIEEQSFEPWSSLEVLHDWGKKGHGIVAFMSTATSNVHIAWLCNNTVDHHDLTQMTFGYSRDDVGKFIPVYLAQG

SEQ ID NO: 42805 - protein, 78 aa, Zea mays
  Clone ID: 700612479_FLI.pep
SVSFVKRSCCHGQWTSATILCGCRFMGCRRCYRSRSNDDQQMGTRSSLLSAAPFSCTVSMCVFVVGLGCLADLLIIGE

SEQ ID NO: 42806 - protein, 74 aa, Zea mays
  Clone ID: 700613139_FLI.pep
ICTPPAHHTHHHKPNTAQHLLKLERERARQTDRHREIESMVTLAGKGGRTSRGMVSLRRRRPFQLMVLRRLREL

SEQ ID NO: 42807 - protein, 188 aa, Zea mays
  Clone ID: 700615429_FLI.pep
AKAKRLDSHSNCRLDLSNGLEESLPRSTLLKSSMVTEQLCVDTIRNNSTLTLVLQVVGTAELGEAPLSALNNLLAARELELGASQSFTGMCSIVVLASNRKEYLTNVHPSTGALRLAKGTPHSSLEPISPSTRKHLVDTKDMEGVNPDPKVEGILSCRLGHVLVAGNTGSLKSLTGDILLLPRDKVHT

SEQ ID NO: 42808 - protein, 225 aa, Zea mays
  Clone ID: 700615611_FLI.pep
KIFITSSPQALSRSPLIGSFSRSLSWEDPPLEVMSPNSLRLSRLFSKADEDLDSLTFIQKLVHSRGTGRESCILADPLDPSLLEKISDYEEDGIKFGKRRPKQRLLFDAVNEALIELASMAELAAYPWGRSCSSEHGDCKNGSSSNSAAEEIWRVIRNWSILEKYPPGEAIERNLLLEMILKREVAEAASADTTRLETFDLNTTVCAMVLDGLVEETVVDLTNYC

SEQ ID NO: 42809 - protein, 53 aa, Zea mays
  Clone ID: 700800789_FLI.pep
KTRKERRFDEMIQLKKDDPLDKRSRSLMSPFSLYSAFASKMDDAGFHMIFVFK

SEQ ID NO: 42810 - protein, 211 aa, Zea mays
  Clone ID: 700800828_FLI.pep
EYVYPNNPIYRQCVSLRHLFHSIFGGYTATFQRLESRPNNPAQGVAPLGSTNPSVNINDNSLNLVSRPPPYDTDPRYARVQREGLVSRREKSINLAQEESLALRRNASSSGIEHLAAQKKRNSTENEGEYKVHRSESTKSLSAKAYSSSYAVVASEDEDVCPTCLEEYTPDNPKIITKCCHHFHLGCIYEWMERSDTCPICGKEMEFCESP

SEQ ID NO: 42811 - protein, 192 aa, Zea mays
  Clone ID: 700549648_FLI.pep
GDQGRAVSFINAFSTSNVPNFLIKWATFQSGSGALSKPITNTPQSIIKWLVDLEVKGLKVFGDYSSCIMERFAYDGVKNGHGNMIHSDADLFFFDKQSGREFMDTKGSEDEAVEEMETAGNAFMAAAQSMKGVTDGMRKRKSCGYEGAAAVKFVKYKVEDSSLKDYLSAANGISSGSEVENPQSDDEMEESN

SEQ ID NO: 42812 - protein, 363 aa, Zea mays
  Clone ID: 700549711_FLI.pep
GGSKKKRHPETWVFDVLESRWSVCVVPPSSSITTKKGFSMVPLYYRDKIVLVAFGGNKKEPSDKVEVLVVLQNEHCFSWRSAPEVEPLLYDESPPGSRELADHLSSCAPPYPTSSAARSGLAATAENSCGRKPLPDSLLRTSNLGGSSLRRQFRQEEECSSLAQKLQKPIDDDRYKDAADECSEHQPPSATNPKPRNDARRSSPEVVVDAKARRLLGRSSSDMNNHQDARVAALVRRNVALEEQLSAALASKDEAEKNLSLVIDSKDGLEKRLAEKDREVEALREKATGLELAQEEANSLSNTVHADNVRLEREVAFLKAVMDETQKELHSTRGVLAGERARAFQLQTMEGRSPAAPRKPQNT

SEQ ID NO: 42813 - protein, 116 aa, Zea mays
  Clone ID: 700549956_FLI.pep
LTYDYNIMYRFVQFGAAQVCHCGSSNCRKMLGTTKYSGSSQNHHAKKKKRKTSCENCIQQFLRLWHPHKKMYVGCWIIDFDQETKMHTLKFNDLHTEKFNLKEEEWHFLEVDFDED

SEQ ID NO: 42814 - protein, 224 aa, Zea mays
  Clone ID: 700549989_FLI.pep
SSTRDRGRTSTRRTRAAPKNNDQLLAMSTITSEVDDEIVDVKPIVSMSVEGWNTSNSKKSHSRLDNIIMEAIKNLNEPTGSHRTTIANYIEEQYWPPSDFDHLLSAKLKYLATSGKLLKVNRKYRIAPSLLEDVQREPLKLGSDASRTLTRSQVDAELVRMATMTVEAAAAAAAHAVAEAEAIMAEAEAAAREAEAAEAEARAAQAFAEAAVLTLKNRNAAKLV

SEQ ID NO: 42815 - protein, 222 aa, Zea mays
  Clone ID: 700551730_FLI.pep
LNFNFSIHCVMVKGENLMNGECTKIKVWLNDLAGSEWAAKTDAQGERLKQAQNVNNSLSTLGDVICTLVTKTSHIPFSTGGDSKTLMFVQISPNENDVGETLCSFNFTSRVQSIELGRAKKQVDVGELSRYKLMVGRAKRDSKNKNAHNMSMEERIQALEVKNKAKYMLTLNLQEKANSTQYLVMEPNPIDTQSGFNNRLSIIYAIRTYQQCVVHIIEGVVV

SEQ ID NO: 42816 - protein, 152 aa, Zea mays
  Clone ID: 700611202_FLI.pep
GHCKLRYGDGGDDEDADLEEFYDYSSSYVDSEGKQLIAVDDLNNNIELGIGGSELVITNKSEKGTRVRTLGSREFMRYYRQKPRPSVAPDRALALSLASSYKSMGLVTVQSKEQMVRLKVLRAMNRTGVETMRNKIGMKSNVIRNLPKNCPH

SEQ ID NO: 42817 - protein, 339 aa, Zea mays
  Clone ID: 700611881_FLI.pep
SNICSVEIGMALARVSPSSLANLIPPLLQSFFRPFSSDFPIRNSRRRSSPVAAAFSLTSQSAHAAREGLVMEAPRPSSRYPWKPTCLYYTQGKCTMMNDAMHLEKFSHNLKMDLPVNASATDKSKPQKLEYLLILDLEGRVEILEFPVMMIDAQNREFVDSFHRFVRPTAMSEQRTTEYIEGKYGKFGVDRVWHDTATPFKQVLQEFEDWLGNHNLWKKEQGGSLNRGAFVTCGNWDLKTKVPEQCKVSKINLPTYFMEWINLKDIYLNFYNRRATGMMTMMRELQLPIVGNHHLGIDDSKNIARVVQRMLADGAVIQITAKRQSATGDVRFLFKDRIR

SEQ ID NO: 42818 - protein, 87 aa, Zea mays
  Clone ID: 700612028_FLI.pep
KAEVWLQAEAPGTMTMTEELTIQDFFPCHVRCMHVEEELEHKRHRCCEYAFFLHLIDLPLQRCLVSLEDIVRMEKHHFFSCSYKQIR

SEQ ID NO: 42819 - protein, 172 aa, Zea mays
  Clone ID: 700612046_FLI.pep
EGALVRFLQDNRDVFAWQPADMLGVPRELAKHKLKVYPQARPIRQKLRRCTPDKREAIRAELARLVAARFIREVLHPEWLANHVLVLKNNKVGWRMCVDYPDLNKHCPKDPFGLPRIDQVVDSTAGCSMLSFLDCYSRYHQISLAKEDEEKTAFITPFGAFCYTSMPFSLLF

SEQ ID NO: 42820 - protein, 134 aa, Zea mays
  Clone ID: 700475536_FLI.pep
RRVGFPRLDCASLRLLREPAVAHCLLSFYLAHPPPLAVSSLARTGVPIAVSLSPSCSRCCLLSTLVPAAASSSDFLFFTLAASSSPSLRPPQIVETTSTVETTGARSDGGDHANKLVAAFSARAPSSQEVNRLR

SEQ ID NO: 42821 - protein, 458 aa, Zea mays
  Clone ID: 700476017_FLI.pep
KYDHGILQQKADESKLKSQIASLESRVSISEGRLSATREQADSAQEEASEWKRKYEVAVSEAKTALQRAAVAQERTNKKVQEREDALRVELANQLSEKEEEIARLHAKRSQMEIHATSLISRLEATEAKSKSHESDSLALREEIRLLTDNLESIRSEALSREKEVGILEQEKNHLEEKYLSQCKKFDETDIRCKEAEREAKRATELADVARVEASAAQKDKGEAQRLAMERFALIERMERQVEALERDKAKLVEEIERLHQSEKDAVSKVALLERNVGEREKEIDEMLKQNNQQRSSTVQVLESLLATEREARAEANKRAEELSLMLQATQGKLDMLQQETTLDSKLKTSARRLRGDATESVHDMDIDGDNGRRRKRSKSTTSPFKNNHTEDGGSVFIGEDTYNGSQQGTESEDYTKFTVLKLKQELTKHGFGAQLLQLKNPNKKDIVALYEKHVIGK

SEQ ID NO: 42822 - protein, 237 aa, Zea mays
  Clone ID: 700476066_FLI.pep
DGHSDDYCELGDSPDGGNVQSSSDAALSSMRDQDDGTKHLAALDDSLTYFEVERLSILEELKTLEERLFTLEDDDINTSKEVTGHSSSDMDLPHDGLQSPEYILTGDRPRFGGRASISRGKSLLPLFDAVGDEACDRMPPSAGAGEADQADDAATKPASVLVKEQERLAIIEEVDHVYERLQALEADKEFLRHCIKSLKKGDKGMDLLQEILQHLRDLRSVELHVKNAGGAMAANSA

SEQ ID NO: 42823 - protein, 125 aa, Zea mays
  Clone ID: 700570238_FLI.pep
TTKKPSTTAATTTKSLLTSVSGLAVVLNLLRRTKSYLPRSCLRTRSSHYSATPKRISRSRRSRTSSRKGLHREACWPTRHRQPPPTISSRMHMRRSTASLLAGVTFRASRRKAGATDRQTCDPHW

SEQ ID NO: 42824 - protein, 108 aa, Zea mays
  Clone ID: 700570702_FLI.pep
PCSAIFYDLTLASLSLIWSSSPSSTASAIAVLSAGTLVEGCFIFSFSFLTASGSSEAVSPAIAVRTLSTSSSISSSMSSLSRVESKASLTISSITPAFVISLLNSCIV

SEQ ID NO: 42825 - protein, 62 aa, Zea mays
  Clone ID: 700571126_FLI.pep
WQRDPSSYQTQCTSSADFIVRAVDEGAGFHRVFIWSRCETAFVRHPSGHKFRFLSSSMLKFN

SEQ ID NO: 42826 - protein, 108 aa, Zea mays
  Clone ID: 700573078_FLI.pep
LAKKLISFQQSLMSQLGQQQAGQERTQSGSGAGNVNLNTLMNMFSGLGAGGGLGVPNAPNVPPEELYATQLAQLQEMGFFDTQENIRALAATAGNVHAAVERLLGNMG

SEQ ID NO: 42827 - protein, 77 aa, Zea mays
  Clone ID: 700573350_FLI.pep
PRLRARPQQGARRRRPRRDLPAPRRQTATLGSPHPHSNHNRRPAALIIHRLFFWLFLAPVIFLLLFLLGNCRRRFDT

SEQ ID NO: 42828 - protein, 60 aa, Zea mays
  Clone ID: 700573369_FLI.pep
KAMTSACVELKDNKFRTTNLNSYTILGFLNQDTIHKRLLKDPRVRIQHTRWSECTREPAG

SEQ ID NO: 42829 - protein, 205 aa, Zea mays
  Clone ID: 700573370_FLI.pep
ENEVSVSEKELLDEITELEKQRDELEAQLKKVNISLNAAAGRLKQTREERDQFDEANNQIIFSLKKKEDDLSKSIALCNVESNVVKIWIGFLEDSWKLQSSYNEQKDNKTCDELEKCVSDFLKLTKHHLSAFKEVLSQLIENIETYVGNLAVLTSREEEKEHGDDEASERTDPRKSLEEEYLETEKKVILSHLTLTWSHTWFLKR

SEQ ID NO: 42830 - protein, 187 aa, Zea mays
  Clone ID: 700575886_FLI.pep
CSRAGCFLPRCPPWCRRRRRRRSPPHLQPKPPCTLAWRFLPQRLSPAPSRCPPSYSFPRSPRPLVAFGASSASATSPDTAAVSQSASLHHSAWSLLPSLFWLFPMDGWRLKGGWIRWKASFSGSGQIISPGNPFRSTSSGIFSEERLSNGVPVVGFVFGGGGLRLCPLIACCSVRLSGKADVFRLEE

SEQ ID NO: 42831 - protein, 100 aa, Zea mays
  Clone ID: 700576342_FLI.pep
EAQVCCYLKQHAVILNHVRASEGWRWTHLVVATIVNCTFAPKSLHLASSDPLACMFVYFLCDIRGDVLCHVSSVACTFKQIGIKHVVIFVLWNCTFSVCP

SEQ ID NO: 42832 - protein, 169 aa, Zea mays
  Clone ID: 700576453_FLI.pep
LAIACRACGCSRTAWCAWWRTARRWAARRRCGGGRRWCTRRAGRWCGRTRSWRRSCARWAGSATTRTRRCTSSTSAAPSTSSPSPPTSPGSPPSTCTTSSSRTATPSGSSTSDRCRSSSICVLPVYIRVQCMHAWSTPTPILNYIHIYTCILICYFVSCSSVRAYQLAS

SEQ ID NO: 42833 - protein, 76 aa, Zea mays
  Clone ID: 700576635_FLI.pep
GKQKKKVTEELAPPVRPIPKAIPGLHHRLSVLILGLRYVTQLHYLNRALPFRILRFLVPLLEPPLRCFQLPVVIQT

SEQ ID NO: 42834 - protein, 71 aa, Zea mays
  Clone ID: 700577209_FLI.pep
VDSQTSFVGVAHHFIILRSTQFLNSVSRDHVAYHSQIDLVYARTTIVPWCSHFVKHLERTELKHVFFIDFS

SEQ ID NO: 42835 - protein, 290 aa, Zea mays
  Clone ID: 700577321_FLI.pep
LTPVQPQKPVDSRGSHCNAGSDSGEAPFDICMSGNKCAVKLKPSIFETNRERKQRDRECSKDVRPLQLRPGMVLLKRFIKPNDQVKIVKLCSQLGVGPGGFYRPGYRNGALLKLWMMCLGKNWDPDSSSYGDRRLFDGAQPPTIPEEFQKFVQDGIQASHEFLKQQKGATNVVQEIPAMSPDICIVNFYNSSGRLGLHQDKDESQSSLDKGLPVVSFSIGETAEFMFGDVRDEEKISKVDLESGDVLIFGGESRLIFHGVNNTKPKTAPKWLTDETSLRPGRLNLTFRQY

SEQ ID NO: 42836 - protein, 284 aa, Zea mays
  Clone ID: 700580207_FLI.pep
QKPLSLRDIQREQERRTVSIQQQAPSPTPAKVAPNQRSHVNASSWQASGPPPSQAVAPVQMSSNAPSHSRSSAEDDLFWGPSEHSKQDTKQSEFPSLLSQSRSSMMKDHSALNRQKSQAGRLPVPSAATANQSGKGKAEATNKQTEAMDFRDWLESEWAKLTGTNDVSFLEFCIKQSTTEAEILLHENIGSLDRNHEFIDKFLNYKAFLSADVIHMAFQAPSSRGDGAGRANPAAAARGGTVIDADLDGGGKKKGKKGKKVSAAVLGFNVASNRIMMGEIQNVD

SEQ ID NO: 42837 - protein, 57 aa, Zea mays
  Clone ID: 700580620_FLI.pep
SIKTHTHFLVMSMPTLSHGKKLPGTLHLKDYENCIIIMSNTIQGLFNYSRSVLGHSC

SEQ ID NO: 42838 - protein, 76 aa, Zea mays
  Clone ID: 700580787_FLI.pep
DPGICTEFVHSLKEEVSVMCGFSCSRHPSAFTALSLGRSKWNGQVGSSGLVITLETPLDNMARPSLSVQLNGGFEF

SEQ ID NO: 42839 - protein, 81 aa, Zea mays
  Clone ID: 700580916_FLI.pep
AYGRNMALAPFSPYPSEHFVNLMYLAKNKAWMPTNTRRGVHLCTERLTMEGRKKNFCQPSDLPVQSPTPGAKGRTKITVLD

SEQ ID NO: 42840 - protein, 256 aa, Zea mays
  Clone ID: 700580946_FLI.pep
LLSLGAKYEPTPAQVASSCDVTFAMLADPQSAAEVACGSSGAAEGLAPGKGYVDVSTVDGATSKLIGERITSTGASFLEAPVSGSKKPAEDGLLIFLTAGDESLYKRVAPLLDVMGKSRFYLGDVGNGAAMKLVVNMVMGSMMVSFSEGLLLSEKVGLDPNTLVEVISQGAISAPMFSLKGPSMVKAAYPPAFPLKHQQKDLRLALALAESVSQSIPTVAAANELYKAAKSLGLSDHDFSAVIEALKAKVQSQSSQ

SEQ ID NO: 42841 - protein, 54 aa, Zea mays
  Clone ID: 700614444_FLI.pep
RSRIDSNKKTGRHDAVLLSVHGLLLSVSMMEEMKHQKRSTDGYFAFSVRFITSW

SEQ ID NO: 42842 - protein, 151 aa, Zea mays
  Clone ID: 700614662_FLI.pep
QRMMLKKVRFIHALGFQSDDSKLGEIVKGYCCFSVVEATLDADLDSDSPQALITASFCQSRLRRFLALFLRVVVSLMRFHSRPGESFRLTTSSARVAQKAPPNRPPTTIAAGSVGFFFLLFLARRRWRRAAAALGDGKERPEREKGFGKVW

SEQ ID NO: 42843 - protein, 123 aa, Zea mays
  Clone ID: 700618732_FLI.pep
NLTLHVPWNFLTKRLQTLHFCTYYSILVCWPISIQHLVPSSNKLLPLDFMDGNRFPSQFPQAKTQQKFTVASVFQLQLYMILICRTINNVSHSMEATEGNRHEWLGLQLYKKDSTLRALYDDS

SEQ ID NO: 42844 - protein, 185 aa, Zea mays
  Clone ID: 700619237_FLI.pep
RRLGWMGGPSSPRRENDGEGSGGRSPAPATWKERPRSFDEKTRTACWRKAAVLAGRHPERWRQDAVGNVVCRRFWGCHGCLCYEYDHIVPFSKGGESTVENCQILQTRVNRSKSDKAWVAQAEMQGFSCDIMFTDKELDIIEMAVYGDVIRPGKQCRCRTVAEVLGQVKPTNRMAACELPDKGAS

SEQ ID NO: 42845 - protein, 112 aa, Zea mays
  Clone ID: 700619423_FLI.pep
RLAGVLVVVVECRPGDNEEWRRRLESRGSAVANGGGGDGWHKPKTWAELERLLEGYQGCTDYEIGDVPRIVVDTTDPTVDEQVVAEKVVVFIRSHLACSQPSCGRQDSPVCH

SEQ ID NO: 42846 - protein, 197 aa, Zea mays
  Clone ID: 700619633_FLI.pep
SLAYGGDGKPFYDQNAHRQELVSWLDRVGGKASPATTFDFTTKGILNVAVDGELWRLRGADGKAPGLIGWWPAKAVTFVDNHDTGSTQHMWPFPADKVMQGYAYILTHPGNPSIFYDHFFDWGLKNEIAHLVSIRDRHGIQADSELRIIEADADLYLAEIDGKVIVKIGSRYDCGHLIPEGFQVVAHGDGYAVWEKN

SEQ ID NO: 42847 - protein, 84 aa, Zea mays
  Clone ID: 700799131_FLI.pep
RLLSSFIQEHPTSASCRSCARRISALSEPQCLAGLQCLQSASCSSHSRTPEIPPLGQVLCRGSSLLPHRLDLSCHNFPAEPSIV

SEQ ID NO: 42848 - protein, 116 aa, Zea mays
  Clone ID: 700550328_FLI.pep
PVPRSPARSRGAPNCTEPKTSKHGRIGRKIVLPGSIQTTTGTSGPQNHFSSPPSGSLFDFSTLPLSSASSSEPSSPSSSDMLFITSSMMRFTSAFLSMRSISKWVPNCLRISAKVA

SEQ ID NO: 42849 - protein, 82 aa, Zea mays
  Clone ID: 700550479_FLI.pep
LFQYLAAVFATDLHSRAFLRLPKTLGVDFRASCFCHKKTIDMGYVCSICLSIFCKNQKKCSTCGSEFSRAMPDLNSVPDQSK

SEQ ID NO: 42850 - protein, 74 aa, Zea mays
  Clone ID: 700551981_FLI.pep
VMVTSSTLSLSSHSPVINMKYTLACRCDDSYVQLASPLQVKILLNLKCCKMDGCNISDMVSKEYHKPMNKKPSH

SEQ ID NO: 42851 - protein, 144 aa, Zea mays
  Clone ID: 700552168_FLI.pep
STGTFSHSPPAASEEDMLRASQAVLPFANSMISTAQVIFSGEPSMTLKVLPLLLFGAKYGGLVTVWRLLAAGFFISFTVPKLYSCYSSRIHKRVEILRDQALEAWKSCPRKKTCCSYYSNNVLEHVQCEDTRHGSLCFTCNTAL

SEQ ID NO: 42852 - protein, 464 aa, Zea mays
  Clone ID: 700552648_FLI.pep
HNSYLTGNQLNSDSSDVPIVKALQRGVRVIELDMWPNPSKDNVDILHGGTLTAPVEMIKCLKSIKEYAFCASNYPLVITLEDHLTSDLQAKVATMLTETFGDLLFVPNPDPMKEFPSPASLMKRIIISTKPPQEYKEFLKAENNRSGSGNIAELPDQGSLRRIDSNADESDGKDELDEQDEEDSDEDDPKFQQDTACEYRKLITIQAGKPKGHLRDALKVDPDKVRRLSLSETQLAKATISHGAEVIRFTQKNILRVYPKGTRVNSSNYDPMNAWTHGAQMVAFNMQGHDKALRLMQGFFRANGGCGYVKKPDFLLRTGPNGEVFDPKASLPVKKTLKVKVYMGDGWRMDFSKTHFDAFSPPDFYTRVGIAGVKADSVMKKTRVIEDQWVPMWDEEFTFLLTVPELALLRVEVQEYDMSEKHDFGGQTVLPVWELKQGIRAVPLHDRKGVRYKSVRLLMRFDFV

SEQ ID NO: 42853 - protein, 228 aa, Zea mays
  Clone ID: 700612205_FLI.pep
TSSSIPSQSTPEPEQAKGIDEVSLQQDVQTEDSEDHADGKEDQPAQHGQKLGSDMWSSYLDKVSDPAAIGAALAAIIVAAVVAFLYMRQKQTRVASNEPAEQVEQVEQVERVEQVEQVDQVETLSDSGSSQGHVVAKGSLFHSPGVEASGPSQYSSSLSSGLGRRRNTKGEGLEPVVSRRDSTAQSTSSYGSFTTYQKIPAKKGNKEDEAMTPVRRSSRLRNVKTPES

SEQ ID NO: 42854 - protein, 276 aa, Zea mays
  Clone ID: 700473737_FLI.pep
WDDVGGLDSLRKEFHRYIRCIKSPEDCDVFGVRMQDGFLLFGPPGCGKTLIAKAVAHEAGANFIHIKGPDILNKYVGESESEIRKIFNRARINAPCIVFFDEVDSLTTKRGKEGGWVVERLLNQLLIELDGAGQRKGVYVIGATNRIDMIDDAMLRPGRFGKKHYVPIPGARERVSILKALARRIPVSSTVDLDVLALREECSNFTGADLASLVDEAAMLAMAERWMYLDSGTSTSPSSLIEASHFEEALSKVKPSISKKQKRCYEKMRKKHLSTT

SEQ ID NO: 42855 - protein, 497 aa, Zea mays
  Clone ID: 700476288_FLI.pep
PFNGGNQIQLLKNILRTCEIRFPSDCDLSHGCIDLCRKLLRLNSVERLTVEEFVHHPFLSEHAPEKTLSLTQSDIRDGFPRNNSSPTRHSNHSSQEDCMPFPLDDESSGQDEGPVPDSKSLMKSYGFPMGKRLDKTSGQKSPPKHNSLFSRYVLGNNHAPSSQHHGHSGKVTKESKIHEVQGQKVVYPEDSPIIDSLEFVDQEYVFVSGPHLEGSSSSTNASQQLNVPAKYDNSSVSPPKLTFMSAPMPINGLPINRQQLAGTGSFDSHCSPASGTSQGSADISDAMDQPPSDYLTRIRLLEQYASAIAGLVRDEIKGGRHLEAFSIQLIVLATWKQAIHIGNTFVASPARESPSQDIPMKGHIAGASHLPANSKLADDACMQIEKQFLSEVEYAEELASIVGQIADGTEMPDAIEMIFQSALLIGRRGGVDEMFGKAADAMTGYMRAVSMLRFLLVEAPSLALNPPLTLTRSDRNRLRTYIDALNTRLCQMQSQRH

SEQ ID NO: 42856 - protein, 533 aa, Zea mays
  Clone ID: 700476462_FLI.pep
SFMSAISEEYPLIILVYSKGSPRCAQFIEYWKQIGTQLDGIVRTAMVEVGDSQVAGYFAEKRFSKRPFFRNGVPTLVAYPANCKSPSCYMRYPGGLFVDSVVDWVATSVVGLPRILYYSKETLGPQFIGKSGNHKVKTIFFSSTGERAAPFLRQAAQEYSSYSSFGFVLWREDESQIWWNSLGVESAPALVFLKGPGTTPFVHHGFFSKSEFIEMMEEHKHHELRQLRSDTSLELGCDARGHSRAGNDAAIWYCVIVAGRPGAELSKKRQILRKAQDKLLGDVDRSAGNVDNSVETSSAATAFKDDRLTFVWLDGEVQKQICAFYLATDYTGACGPRDFGDDNDKPEIFIVRFQRNATYEALKAEKKNNLVDVLQGQHADASQLVARYKGPVEIEEINRWISQIIKDGDTREIPYFTSKVPDLVPEETSKAWNSKSIRSAGKSLKENIGFHFQDYLTHPMIGSTLLMCGCISMGILWFRNNTPTQSTRQEKARKDKAKRPRPKLSTSLFGEPSVPDVDPKDAHQWEMSGSDSD

SEQ ID NO: 42857 - protein, 437 aa, Zea mays
  Clone ID: 700476463_FLI.pep
RAYIVNYMARNGSLRQQLYKEIEVASVDSFQGREKDYIILSCVRSNEHQGIGFLNDPRRLNVALTRARYGIVILGNPKVLSKQPLWNSLLTHYKEHECLVEGPLNNLKQSMVQFQKPKKIYNDRRLFLGGGQGVMHGTNFGAGASSQAADKRSGRGKEGQSFAPYGPPNGVHKPGVHPVGYAVPRMPFPPFPGAPHSQPYAIPTRGLHGPLGAVPPVHQPGSRNFGSARSNTGGPIGGHLAHQQNSQQAMGSIGSNFNYTGMENPSSQPSGGAQMSQTGLMTQVPVQGLSQTFRDGFSIGGMSQDFFVDDFKSQGSHVPYNIAEFSTQASQGGYGVEFTQAPQSGYSGNYMNQNSHPGYSHIGTTNDIVSQDHMAHGSHGMFTQAGYNDPSQDESSQIHYGMAAAGPLQSQGMMNPLYSQSYAHYNTQPQSLQPPPQ

SEQ ID NO: 42858 - protein, 90 aa, Zea mays
  Clone ID: 700476588_FLI.pep
AIEILACLAVPFLQSHCRARRSVSSALYSSRKETFMLYSALCASRMSNMRLTALGMTPTSVGRSSFYRNGVELWRQLKQQTNCIRIQKHV

SEQ ID NO: 42859 - protein, 349 aa, Zea mays
  Clone ID: 700476631_FLI.pep
LHEKKIVYISKITIERAKLGFRVVDNPYMVKLNKRTIVLEDKDQIQGFPKYTFSLTPLDKLDQYKNKTDRFIDVIAKISGVSNVAKVPTTSGDQQMRRVVLLEDLKGNMIELSLSGKRALEFDGDQVLDVGQQHHVIAIFVGTLVKLYKGEYTFLSGTSACRWYINENDIAEIKAFQKSLPSEPVPIKKTYLQNDDATHKFEEKSLEQLKHVDPFLDMGQRYQCTATIIGITENQTWCYKACKICNSAIIQKENGYKCTKEGCPSTQFEWKYKIPFIASDHTYNLEFMFFEKKGMELIGKSASTLRKQYEPKEIPPDITSWIGYKFTFVVRVLSKKSVKTIDPSFEVLM

SEQ ID NO: 42860 - protein, 102 aa, Zea mays
  Clone ID: 700571450_FLI.pep
CSAWCASGVPSCTTTRCGPVLWRFPPTRRSATSTAGSPPPSGNSTSGFLRIPASRSASSPSPTASPSAAASSDVMMIRRPRSYIIRSSSLSSFNCLPAAVVN

SEQ ID NO: 42861 - protein, 58 aa, Zea mays
  Clone ID: 700571527_FLI.pep
GSGSPKPGLFQVVVVVGGGGDPIPGLSVRRCRRRDSALALPPLKMPGCLVVLVHDDEL

SEQ ID NO: 42862 - protein, 284 aa, Zea mays
  Clone ID: 700571617_FLI.pep
LAAGRRSSSALSFGWTTRKRRPTPTATGDQPAKTWHQDRCSCPELQIPTPRPSCYLRCGLSMRWPLAISTRRRPLLLFVLLVVLYTIPGTFSSRQVTLDTVEIFSTHEWFGKPTVVFGCNGENKTDLPDVREVHTLYTFKGEESWQPLTELPEKKCKRCGLYEEDTITPDDVFDEWEMCSSDFKGGKYTRFKEGQFNATFLCPNCTASTGHGNREPSEDLETKKTSVVVIIIVSVLASVLLTIALFGGYKYWQKKKREQDQARFLKLFEEGDDLEDELGLTNEL

SEQ ID NO: 42863 - protein, 286 aa, Zea mays
  Clone ID: 700571645_FLI.pep
FFTTKPYACDPSNLPKYPPSKEYDAKLRDEEARRQRAAAKGQEAEAGRRKQLPAPDGNSGLQHRRVQVNSKNSTYKFTPKEDVSGFPIDPSARAADNGYPQRVPLMQAGRSSSTLGRSSGMDPKAQRFHTSQIVTITTEMSNQSTASGQRGNAPKMSNLGESARRQYLREHRSSSRYSQLTAADPSDRPEWNHQFQERPSSSHRKDDAAVNKETTVVNGTKKNRIHYSGPLMPHGANMDEILREHERQIQQAVRRARLDKGKGKHNGERDQSEALLYTTGNVRADR

SEQ ID NO: 42864 - protein, 104 aa, Zea mays
  Clone ID: 700571736_FLI.pep
WQFLELMTIGIIGKTYVLADYLGSRLLPFATCSFFPLPSDENGLWPHAYFRHILEPEGDSQAQPTYMSRRSSVQNGSFQYSPDAVEMRSTSQAMDSMEAGQRAQ

SEQ ID NO: 42865 - protein, 145 aa, Zea mays
  Clone ID: 700573734_FLI.pep
QGTLQHYLQSRNVLQGEANTDIQWPWLNQFCCVLIVPFTRALCKSSSNHQECRKKRRKKASGGVKGKQKAHTFLVEQSLRSSLPAPAAQDRVITADDPSLLGNVKGHLEEVRRVCHEHQALVLLLFLIWSLLGGALHIIALLLCL

SEQ ID NO: 42866 - protein, 447 aa, Zea mays
  Clone ID: 700573910_FLI.pep
LELAHASHHEAEEHRLGAAMAKEQDFLAWEKELEEAQAELNQLNEQIASKRNVESKAHENECKLLGLKSELAAYVENKLNEEAGMVQEQGSDEAKEISRSIKQALASKRKELAEFKGKLENARIEANLVRVVVESLSSELDREKASLATLQQTEGMACITVASLEAELDRTEQEIELVHKKEAETREMMAELPRMLQQAAQEADDAKMAAHLAQEELRKAKEEAERTKASATTADTRLRAVLKEIEASKASKGLAIAAVQAMQESNDAGSAGASPRGVTLPISEYHALSKRVHEAEELASERVAAAFAQIELAKESESRNLERLQEASKEMDEKKSDLQIALERAESANEGKLGAEQELRRWRAEHVQRRKAHEATQHPVSPVRTPPRMLVEQKGSYREENELPTDPKLHKSNGSMDQFVSSEKSRKKKSFFPQMSTLLSRKAQTQT

SEQ ID NO: 42867 - protein, 307 aa, Zea mays
  Clone ID: 700574061_FLI.pep
ARSAQEHEELEEAEIELELIEKEKSVPNFVEHTNDTMVLAMPSYDRDGSEVNKRLQQIRENIRSLERSRLKEEITARRQKKLLLRHAREKYLEETCSRETELMQELDRERALEMEREVERQRQLDIERAKSRELQFNIDLEKEKQTQRELQRELEQVELGRSSRREFSANPNSRSRERYRERDGGGRAQQEAGSLRSSSSRGQEGGSAQAPAPAGPGPTVMLAGSRTFSGANLPTILQPRERAADEDSAWAEDASSNGDPELDGVRPHGPRGSRSSSSRQVAERRERDGTAAGTGRREGKWERKQHP

SEQ ID NO: 42868 - protein, 230 aa, Zea mays
  Clone ID: 700574245_FLI.pep
AAEGGLASFPSHLRDIGAVMFDIFGGATTTLGSTMEWAMSELIKKSETMRKTQEDIRRVLGGSRRGVITNTDLVGLTYLPMVIKEVLRLHPPNPLLVPRESREDCQVMGYHIPKGTKVLVNAFAISRDSRYWNNPEDFSPERFQNNNVDYKGTDFEFTPFGAGRRRCPAIMFATSTLEIALANLLYHFDWALPDGVSPKMVEMSEQYGMGVTKKLDLHLRAIPYVYSTMA

SEQ ID NO: 42869 - protein, 201 aa, Zea mays
  Clone ID: 700574406_FLI.pep
TSLCPELRMGHIAEPTGTVVIGCKVLPIFTEHGIVDSAMKKMMAHRIDGKKAVARVKELLKRAAQAKPHSVTVSGKKWKKVLSFHARDSAAATKGGRQQKQQEEAISCSSGKLSFKWDVGSCSSASSVAYSPLSLMSAPAKSSEQTLLTPLRKDYCMSRLSSISQQSMLKNMEGDEEEEEACCCRTAQWITTDSDFVVLEL

SEQ ID NO: 42870 - protein, 120 aa, Zea mays
  Clone ID: 700577438_FLI.pep
PTSPTTSSTASPRPSGTPTRRSTSPSATAATSRASPTTSRARSRATPPSGRPASATPRWTSRTGRTPTTRGTATTTAPRSSPTASGSPTGTGCPPTTTQTDDHRPRGNKLLIDQRSTFLS

SEQ ID NO: 42871 - protein, 108 aa, Zea mays
  Clone ID: 700577467_FLI.pep
AVFSTDADNQTQVGICVLQSEHEMATYNKCLGEFDLMDIPPAPRGLPQIEVTFDIDANGIVTVSTKDKATRKDQTDLRVGCLRLTSRRWCKKLNCVPRRIRNGKALIN

SEQ ID NO: 42872 - protein, 212 aa, Zea mays
  Clone ID: 700577692_FLI.pep
EFPFKPEDFSRFDESSDTLFYSVPRFVTHIDDQAIQALTEYYSEVLPPSNTPGVAILDMCSSWVSHYPPGYRQEKIVGMGMNEDELKKNSVLTQYVVQDLNVNPKLPFEDNTFDVITNVVSVDYLTKPIDVFKEMRRILKPSGLAIMSFSNRCFWTKAISIWTSTGDADHAWIVGAYFHYVGGFEPPQALDISPNPGRTDPMYVVCSRKKIG

SEQ ID NO: 42873 - protein, 68 aa, Zea mays
  Clone ID: 700577816_FLI.pep
IKIQLCVQPDRQTLANPFLQFLQSNRPSSHNQSYSLDIALLLWYSTPRLKTFRTIFMKHQNGAEHTKT

SEQ ID NO: 42874 - protein, 105 aa, Zea mays
  Clone ID: 700581471_FLI.pep
MYRWDGCTCTRIPLFSVPFGKRLLETFYDLGKPYYIHSEQYGGGDRYQNTSKSVHLLNLIIICKDVIKQVDEQNYPDHQPSNKHCNPVGNVCFGIFLSSNVEEPS

SEQ ID NO: 42875 - protein, 417 aa, Zea mays
  Clone ID: 700581855_FLI.pep
TGLMEAYGRGKQYRKAEAVFRRMQTSGPQPSPVTYQIILKSLVEGDKYKEAEAIFEDLLNEKRTSFKPDQKMFHMMIYMYKKAGDYAQARKLFAQMSERGIPLSTVTFNSLMSFETEYKEVSNIYDQMQRAGLKPDVVSYSLLIKAYGKARREEEALAVFEEMLDAGVRPTRKSYNILLDAFAISGLVEEANTVFKAMRRHRVEPDLCSYTTMVLAYVNASEMNGAEKFFRRIKEDGLKPNVVVYGTLMKGYSKLNNLEKVMRVYERMRIQGVEPNQTIYTTIMDAQGRNSDFGNAVIWFKEMEARGYPPDQKAKNILLSLAKTPEEEQEANDLVGNGPVQLEVKPDDGEVDGDDGHEVIQTDVENHRLLDDTVNGRIRAGDYNFDEEDDDDDYEEEEDEEFDLVSFKDKRKLNFAS

SEQ ID NO: 42876 - protein, 502 aa, Zea mays
  Clone ID: 700582055_FLI.pep
QFPSTSSNNAEVLKRKGDVEFELQLEMALSATAAETQNNKLATHMNQLTVSLQDSSSPLKKLRQNVEALSSSSAVWSRSAGAPLYWAEVYCGGQASTGRWVHVDVVNNLIDAEQNVEASSAVCKKPLRYVIAFAGNGAKDVTRRYCLQWHRIAQGRVNSEWWDNVLAPLKQMELAATNNYEDMELQTRALTEPLPTSQQAYKDHHLYALEKWLHKNQIFHPKGPVLGFCKGHPVYPRSCVQTLQSRHGWLREGLQVRENELPAKVVTRPKRTFNAQSVQSSGNEDGLKPTLELYGEWQLEPLQLPHAVNGVVPKNERGQVDLWSDKCLPPGTVHLRLPRLFQVAKRLGIDYAPAMVGFDYRSGRCLPVFDGIVVCTEFRSAILEAYAEEEEQRRAVEKKQEEAQALSRWYQLLCSIVTRQRLKDSYKTPSHGIGNEGLPENDNVHRSTLSSRSSEREPSSSKLQTDHDHDHEFPKEDQSFDEETFVRTKRCPCGFSIQVEEL

SEQ ID NO: 42877 - protein, 81 aa, Zea mays; identical to SEQ ID NO: 42839
  Clone ID: 700582682_FLI.pep

SEQ ID NO: 42878 - protein, 94 aa, Zea mays
  Clone ID: 700615037_FLI.pep
APKDFLQSEQSSLDNDQITGSLMNRGSRAQTSGYNKFDEDNQMTTQKPYDHVKAPSKEIKWQRFLGPLAFRKPYIREFLRPSQIGPKTVVVAEN

SEQ ID NO: 42879 - protein, 379 aa, Zea mays
  Clone ID: 700615193_FLI.pep
HCYLVLTGTHGHSLCSLGLGHDHTTAKQLPYLAIDDDASVDVEDLARHVGRILVAGEEDEAGRDLGRLRGALHGHLGPELLHLLLAEGRRDERRPDGARRDAVDADAPVGQLQRERAREGHDGALGGRVVQQRLVALVRVDGGGVDDAGAGLHARHRVLGHQEVGEDVGAEHALQVRLRHVPDALPLVLLRRVVHHHVDAPAVRRRHPLHHLPAVGLVPEVGGQGHRLARARLGPDVAQRTQRLLRVLLLLPPHEGEGHRRALLREAQAHGAPDAGVAAGHERHLVLELVGGLVVLDDGLGPGVHRVLLPRLGLLLLSRELLLLLLLSPEHLLGRHSANCRRRCSRSRSTRRCLPRPGEGSDERPCGSSGKTGCSGTAR

SEQ ID NO: 42880 - protein, 174 aa, Zea mays
  Clone ID: 700615383_FLI.pep
PKPPTPFLSPSAAAAHAGNKRHGRLHLCVPQQRRRVDRQAALRRDRGFRRYPIRAAAPPRRCRLRGRLCLRRPVVLLHGHPQLRRVPGDRRCCRWWCNDGERRWRRRCCCIWWCCCRGSQGGEEGRGEGRERRRHGILPVRLELCVSSGSQKWWFGPVAVVNFAVLSVNLKNSW

SEQ ID NO: 42881 - protein, 221 aa, Zea mays; identical to SEQ ID NO: 41451
  Clone ID: 700615385_FLI.pep

SEQ ID NO: 42882 - protein, 124 aa, Zea mays
  Clone ID: 700620480_FLI.pep
LLQLPMMTQRKFNPTKDPCSVIWDVLWDDLVTVEMTHGKKDPPDSWPSKLILYLKAKPSNSKEIVRLVKCNRGSDQASIIYSAIDKAYKAYGPNSLKEFLRWKVPRPYAPRNSSGRSILRFYCV

SEQ ID NO: 42883 - protein, 180 aa, Zea mays
  Clone ID: 700620701_FLI.pep
ITKQIFNVPNMPQSNSRLSFKNEPTLNFPGFCLGLPETKTVLVCKTQNQFSMLAGDAELLEPQRAGLKEPLEVAAHSLLQLRGVRLHPFPDAVQELHHADLGMVGLGVERSRLAGEEKAARVRGARESHLTEKERATLETGRRRSGGLAAVRRAQRSMQSSSPSASMERLSALRSLSTLP

SEQ ID NO: 42884 - protein, 165 aa, Zea mays
  Clone ID: 700620760_FLI.pep
ELRRRGRQSTSSSSQSSRSRSAAHEIELAVLRQQAEYHQSVLREQLEYQRQQSEYQRQQAEYQKKRDEYYPSLQAQNQALLSQLSQQAGVPMPTYGMPPPDFALPMPMLAPPPPPPSQFPMGFQTPSASVAAPRDGSGQDDTTHSWVNNLFSTHSPAGGGGDGYE

SEQ ID NO: 42885 - protein, 100 aa, Zea mays
  Clone ID: 700620782_FLI.pep
TPRMFPNLGEGIHLTAHIGRLTGDWLIGWLRSGPRRSVDHAWHVFGWLQSISIACSHACSVVFFLHWVACMRGNATPLVSSGPGWHDAGARCPHNQSCVN

SEQ ID NO: 42886 - protein, 122 aa, Zea mays
  Clone ID: 700799551_FLI.pep
SLLDAVLNRMVKKYGLYQLRIKHLPRKRGASGLGCTRGDVALRAVPNEAKRQKYSCTERISCEAHIGIRTFGAAATFGAEAHIYETCQGEQIPSYTRDCSALSSCELKDFYSVFTRRFHKLV

SEQ ID NO: 42887 - protein, 223 aa, Zea mays
  Clone ID: 700800276_FLI.pep
TSEAIRDWVTNVETTHYILGSVAGPHPYPMMVREFHKVIGKETRRQAMDKWGGKPDVLVACVGGGSNAMGLFHEFVEDQDVRLVGVEAAGHGVDTDKHAATLTKGQVGVLHGSMSYLLQDDDGQVIEPHSISAGLDYPGVGPEHSFLKDIGRAEYDSVTDQEALDAFKRVSRLEGIIPALETSHALAYLEKLCPTLADGVRVVVNCSGRGDKDVHTASKYLDV

SEQ ID NO: 42888 - protein, 226 aa, Zea mays
  Clone ID: 700805505_FLI.pep
KVSSKIGVIGSTNNSGKWLLWVGGSKVSSKIGVIESLLAKVDILILGGGMIYTFYKAQGYSVGKSLVEEDKLELATSLIEKAKAKGVSLLLPTDIVVADKFAADAESKIVPATAIPDDWMGLDVGPDATKTFNEALDTTKTVIWNGPMGVFEFEKFAAGTEAIAKKLAELTTTKGVTTIIGGGDSVAAVEKAGLADKMSHISTGGGASLELLEGKTLPGVLALDDA

SEQ ID NO: 42889 - protein, 199 aa, Zea mays
  Clone ID: 700549103_FLI.pep
DFGLARWQPDGDMGVETRVIGTFGYLAPEYAQSGQITEKADVYSFGVVLVELVTGRKAVDINRPKGQQLLTEWARPFLEEYAIDELIDPRLGERYSENEVYCMLHAANLCIRRDPHSRPRMSHVLRILEGDMVVESGGSVTGSSDSGSRSWRMLNEQQHCQEYSSPAQQESQRAGEGKRSYSALRASWDRDKQSISNRY

SEQ ID NO: 42890 - protein, 365 aa, Zea mays
  Clone ID: 700549321_FLI.pep
VEGMLSHMRWECRWLRFITSKCGIFSQMILHKKRLGIWSTSQPNGLVVPDASLHPVKSTLDVLQLMEIGQTNRAVGSTALNERSSRSHSILTVHVRGVDLKNGSTSRGCLHLIDLAGSERVERSEAIGDRLKEAQYINKSLSALGDVIFSLAQKNAHVPYRNSKLTQVLQSSLGGQAKTLMFVQINPDTGSYSETISTLKFAERVSGVELGAARSNKEGKDIKELLEQVSSLKDTISRKDMEIDQLLKNKAKSPGSSIDRNDSRQQIRRLSGTGSSEAECEDNMSDDGCSVAGTEYSVGGASEATAERMQKAPSRIARLFHTKNGQPANSKPKPRESALKPPGRTTSTGGSQATGGSLVKPPKRR

SEQ ID NO: 42891 - protein, 47 aa, Zea mays
  Clone ID: 700549362_FLI.pep
YGARDTNRSTNREKMAQKDVTSQTMGNLCSGTLTGAKEMIATFYSRC

SEQ ID NO: 42892 - protein, 54 aa, Zea mays
  Clone ID: 700549443_FLI.pep
ISNSLDVNCPAVGWVNDCTVHMSDEIPLIFQCALDQVMHLRRASNASQRDLRLN

SEQ ID NO: 42893 - protein, 273 aa, Zea mays
  Clone ID: 700551178_FLI.pep
APINLSDRLNQVLRWALGSIEILFSRHCPIWYGYGGRLKFLERFAYINTTIYPLTSIPLLLYCILPAVCLLTGKFIIPKISNLESVWFISLFISIFATGILEMRWSGVGIDEWWRNEQFWVIGGISAHLFAVFQGLLKVLAGIDTSFTVTSKATDEEGDFAELYMFKWTTLLIPPTTILIINLVGVVAGISYAINSGYQSWGPLFGKLFFAFWVIVHLYPFLKGLMGKQNRTPTIVVVWAILLASIFSLMWVRIDPFTTRVTGPDIAKCGINC

SEQ ID NO: 42894 - protein, 99 aa, Zea mays
  Clone ID: 700551262_FLI.pep
INHVGVVVQVSSSCRPAVVHCGCLLQSPGTHRVRGCLASIQSLPLWQEEVIVFLGLSAVLVALRVKVACLSWMQFASCWFAFVCRCRSVHLGSGCHCCD

SEQ ID NO: 42895 - protein, 168 aa, Zea mays
  Clone ID: 700551468_FLI.pep
TLRRAQDQQDGPDVDPGRHDRLHEGAAGEDQAAAGRDRAAAGGGARHAQRLPGAQPQRDGGQEHPQVRRGAEGGRRHPGGDLLRRQAGAAAVHGEHAGHARARHPAVRRQLLQRLRHARLLLRDAEGNDQRRRDKAGAVQERWLWRRLLVEGHVIMAWEEEEEEAAIN

SEQ ID NO: 42896 - protein, 370 aa, Zea mays
  Clone ID: 700551486_FLI.pep
ECSSETPRPHFKEPVVDSSGLTSAAPESLTAKQHVHSPDAFIPPKPGAPTGELGDVKSDFKGEEIIQKEQYCESEPIVATRENLLIDLSCGAESIDVSDVLESLMEERSGTSYVPVSIEDFLGASAVEEPQYSSPIALSPWGEPSYYQGDAGDSALWGIQDSINDMWSLLSPRPMLQPSSGIGTEGKETFDINEVAVTHVNSDFFQRGSMLGEENMNQANLSVAADRMLLPEQVPSIPNGMSTSSVDEGTRVIGSQASINQSLDWGTTWRTSQNLSVYSNEIAGPSSKSYWEESRKQEATNSGVSISGEAIRNKRLNPPDNAIRGSHHHRGRYSQISESWLLSSNHSRSSSARFGSGGSSRSTSKGQTRG

SEQ ID NO: 42897 - protein, 345 aa, Zea mays
  Clone ID: 700551528_FLI.pep
IRPNSLSHRVKRLPLPTMSQQPAPAPPYRPYRQVREATPHSRAISCVRFSPCGRLLATASLDGTVALLSPSSLAVIAVLRGHSDGVSDLSWSTESFYLCSASDDRTIRIWDIRPVLAGGAQAAAVSGADRCVRVLKGHTNFVFSANFNPQTSSQIASGGFDCTVRIWDATSGRCTRAIEAHSEPVTSVHFIRDGSIVVSGSHDGSCKIWDAKSGACLKTVIDEKKPAVSFSMFSPNGKFILVAMLDNSLKLCNFATGKFLKVYSGHVNRQYCIQSAFSVTNGKYIVSGSEDNCVYIWDLQGRNVLQKLEGHTDTVISVSCHPTENKIASGGLHNDRTVRLWVQDS

SEQ ID NO: 42898 - protein, 169 aa, Zea mays
  Clone ID: 700553122_FLI.pep
IVRQLGEDSRQAGRGSVGGMIAAVNRVPAGWGEDEMSVLPRHTKVVVTGNNRTKSVLVGLHGVVKKAVGLGGWHWLVLTNGIEVKLQRNALSVIEPPTGNEDDDKFDCENMQWNSSDMASMMHYHQSHSGHGAGSIGVSTENPSAVQCHVTPTPRRLFHLPQELTRKLT

SEQ ID NO: 42899 - protein, 231 aa, Zea mays
  Clone ID: 700553171_FLI.pep
KDKRRAFLKICSNFRPVMHHFFLERFLLPADWFQSRLAYTRSVAASSMVGYIVGLGDRHSMNILIDQDTAEVVHIDLGVAFEQGLMLKTPERVPFRLTRDIIDGMGVTGVEGVFRRCCEKTLCVMRANKEALLTIIEVFVHDPLYKWALSPLKALQRQKETVDTDSCLDDSQEPYDGNKDAARAILRVKQKLDGYEDGEMRSVQGQVQQLIQDAVDVDRLCQMFPGWGPWL

SEQ ID NO: 42900 - protein, 109 aa, Zea mays
  Clone ID: 700610923_FLI.pep
GLPLTVQGSKASTTVYLKEKPSSPYNQSCANLTTPLALANVQCKHSIWPDPCDQILRKWQSSTKPKQTQAEQGTKEKLVLRGHLLLANEASAFAWAGGRALSIGCICWP

SEQ ID NO: 42901 - protein, 113 aa, Zea mays
  Clone ID: 700611004_FLI.pep
AFGKLKQTGEACNVFQHVLTLGVKPNATTYSLLVDAHLANKDPKAALAIIDEMVDAGFTPSKDTLRKVRRRCSRESDFDSDEKVQSLAKQFNYRMGGENRREMLYSMEYNPVY

SEQ ID NO: 42902 - protein, 199 aa, Zea mays
  Clone ID: 700474991_FLI.pep
GIVFGYGFGFLIIMVGVTIGMSIPYWIGLLFRDRLNLWLEKKWPRQIALIKLVGQGSWFQQFRVAALLRISPFPYALFNYAVTVTEMKFVPYIWGSVIGMVPDVFINIYSGRLIRTLAELNYRKHRMTAVEIAYNAISVIVTVVFAIVFTVYARRALDNMEQSEVACAEPVVGDPAGSTESRDHLQGCSTARSVPIDVV

SEQ ID NO: 42903 - protein, 399 aa, Zea mays
  Clone ID: 700475408_FLI.pep
RGAGSVQQGLQSLAKSTLAARLQQRSKGPVKVLNTARPRPPENVEALSSSTQTWPTPDQGLVLSGYSQLRSGTQPTRENAMPTISSNTVWNPVAPNKMKHSVSTPNLVSGGSSAQVSLSTAYGSNKSQDPPQGNQTLPVPEDFRAANKTLVERMRSALGMDEDRYSAFKEIAGEYRQGIIGTLEYLSYVEQFGLSHLVPEMARLLPDPQKQRELADAYYTNTRFKSLQENGGGTSSQEGNRKKKGKGKAPVTESSAANDVNSALADNILETVRRLQSNQQAREGGAEVLSKDGYRPSKGVQPAAGSSSNLDSDTSSNTKSSGAKDNIGKGGGNKQPKKTAKFLRARLGDNSLATLDLSRPSASPERPERELQGPETGLPARGAWKNGGGQKLFSSNGRK

SEQ ID NO: 42904 - protein, 485 aa, Zea mays
  Clone ID: 700477714_FLI.pep
PSASVSLDNHDARRQAKAKRANPAMEKAIDRQRVLLAHLLPSPSAASSQPQLAASACAAGDSAAYQRSSSFGDDVVVVAAYRTPICKAKRGGFKDTYPEDLLTVVLKAVLDNTRINPADIGDIVVGTVLGPGSQRANECRMAALFAGFPETVPVRTVNRQCSSGLQAVADVAAAIKAGYYDIGIGAGLESMSINSIAWEGQVNPKISAFQKAQDCLLPMGITSENVAHRYGVTRQEQDQAAAESHRRAAAATASGKFKDEIVPVPTKIVDPKTGEEKEVVISVDDGIRPGTTASGLAKLKPVFKKDGTTTAGNSSQVSDGAGAVLLMKRSVALKKGLPILGVFRSFAAVGVDPAVMGVGPAVAIPAAVKSAGLEIGDIDLFELNEAFASQFVYCCNKLGLDRSKVNVNGGAIALGHPLGATGARCVATLLNEMKRRGRDCRFGVVTMCIGSGMGAAAVFERGDAVDGLSNVRDIQAHNFLSKDAK

SEQ ID NO: 42905 - protein, 149 aa, Zea mays
  Clone ID: 700569444_FLI.pep
YNARALRRHTIIIFDGKRKTMMLAPCRVTYRLGLILDMHGCAITVSHATRDHGADDAVLHVHGDTRLESSVGGVSGERELPVSVVVLVQETSCLLPDVGVEPGPSGGHGWRRRPRRGHQRRGGFWAVACGAAKRGGRGPTEARRYMEEK

SEQ ID NO: 42906 - protein, 257 aa, Zea mays; identical to SEQ ID NO: 41530
  Clone ID: 700570064_FLI.pep

SEQ ID NO: 42907 - protein, 135 aa, Zea mays
  Clone ID: 700570105_FLI.pep
WHLVQCFITRLGGIGRKSWYPELVADHENQRRGRRFDDDPLAVPALHLQPGHLVLADDAEPVGVLMRPVPDHLLRGVGRLVLRHPEQVPHGRAQRVVVLGHPEPFHHHPPHGLLQLEDPLRRLNDSTAETVAVVA

SEQ ID NO: 42908 - protein, 112 aa, Zea mays
  Clone ID: 700572447_FLI.pep
DLSQIMVQTISSHVYMQVRYNKIYVASDIMRWTLITFSTDRRKPQLKKRVCLYTSAYVSCDLTALQVLQKPDKNLDPTKHTGSVKNPEEKRHFRIVKVAFPNFSMVQTTVGN

SEQ ID NO: 42909 - protein, 279 aa, Zea mays
  Clone ID: 700572454_FLI.pep
VDRVQHLAAEASTSPPFLSPSSFSSDSSASSKYNSDSPSLSPTTSSPPSFGLSPASSNLPQALVPSSRSPLSQSSNAGASKPSGLESIRHPSKTSSIAERRGGFTLLKLPSLQKDLVLPPRVPSSIRRTDEALDKSCTNGVKRPTGDFRSEKCTDNSSSLHSETRLTERTDSNSEACSNVQLLVYQWPSMEKLTTFARKDLDSNSVLIFVTSNAIRREAVKMVYVWVGGEIESSKSVNAVDWQQVTGDFLHRKGLSDALPIKVFKEHETENLLELLNFS

SEQ ID NO: 42910 - protein, 53 aa, Zea mays
  Clone ID: 700572487_FLI.pep
NANISPCQKELTEPILRPLVRPGAPPERDDKSSASKCMAPFLPSLVSDCNKIS

SEQ ID NO: 42911 - protein, 125 aa, Zea mays
  Clone ID: 700572566_FLI.pep
QLPGEPPILDDADVDDWLPRFVVLQGQCLYYYLKCTDLSPQESTLLCDVVEVGQLPDFVPEDEKTRYAFYLLTRQGLRFECSSTSEIQVDSWVRALSSDCKLQDGAGDDKMMNTRSSQVEAGSSW

SEQ ID NO: 42912 - protein, 174 aa, Zea mays
  Clone ID: 700572647_FLI.pep
NIAYVETWILKVISRVIQYPKKFGYPKIPSESLFTIFESGSGRIFFKPYYILTCSHTLLLVQLKLGLVDDNKAGQNGPGVEHQQFFQVGEESHRPHHRLMLLVVVVGLLLCRCSSSLGHYTLPATSSAPLQDSYTQPVASQLAWIDQKVRGSEPANLDFFGEPKKAEKPKPKLG

SEQ ID NO: 42913 - protein, 254 aa, Zea mays
  Clone ID: 700572957_FLI.pep
DWAGVKPPLVEEDREFLEKKEKLQEWEQQLTSASQQAEALVKAQQDMVETMGALGLAFVRLTKFETEEAMYDSQRMRAADSRRVATAAVKASRACRDLNAQTVKYLDTLHEHLSIMLSVRTAFSDRASALLTVQTLMSDLASLESRIEKLEAASLKIFGGDKARTRKVEELRETIRATEDAKFCALREYERIKENNRSELQRLDSERKEEFMRMLKGFVASQAAYADKIVDGWETVAEETSGYVGVRGSDSMTS

SEQ ID NO: 42914 - protein, 180 aa, Zea mays
  Clone ID: 700575158_FLI.pep
NHSSYRNHLPAWPFRSYNRSHHQQSSTTSGIISTGDGNGRRRGRRFEAMAFTMRAVKVPPNSASLEEARHRVFDFFKQACRSIPTVMEIYNLDDVVTPSQLRSTIAKEIRKNQNVTNPKVIDMLLFNATEELNNIVEHAKQRHHVIGQYVIGQEGLVHELGSKDLGNSDFLKKFYTSNYF

SEQ ID NO: 42915 - protein, 75 aa, Zea mays
  Clone ID: 700575223_FLI.pep
TIYFTWQHKCYIVATCDRDLKRRIRKVCLVFSAHSSGHASNIAKAFSCMLVPWAFPQSCRFLVFQSCTSQDIGIR

SEQ ID NO: 42916 - protein, 56 aa, Zea mays
  Clone ID: 700575229_FLI.pep
GMAWGNLNYITALQHSNMDQSNQNPIFLPYNTKNDQTPRSTLIYLFSSRTLTYVKL

SEQ ID NO: 42917 - protein, 377 aa, Zea mays
  Clone ID: 700575259_FLI.pep
RGLDIKNVDWVVQVDCPENIDNYIHRVGRTARYNKKGKSLIFLCPEEEAMLEKLKATESKIPIHIRKPKAEQLEQISQSIASVLVKFPNLQELGKRAFVTYLKAVYLQKDKKVFNLSRFSAEQFAAYAASLGLPVTPKIRFISHKKNVSKKDMEDIDMKQMKSSLEHEVTITPKINIDLTLCDGDDDILYPKKPTADANMDDRLDDVLHPKESATDTNVTGLERPFKKKKLKINVNRPSGTRVKYDDEGNAIPPLASVAEEVSLEPVVHKDKISQRYAEMLREMQKHDKEDKLEHKKTLREKKLQKKMKLKRKRQEDTGAGSEEDSGSESDRGQDTANKGKKRYFNSDDEDNDAAKDGDVLAQQEALALKLLSNMHS

SEQ ID NO: 42918 - protein, 75 aa, Zea mays
  Clone ID: 700575753_FLI.pep
TFKTVSHARDGNVRRAELGPGKGGRPDKRSAATKKGEPTAQAAASLICAFGRLSGNLMLWKSAICSGVLGRPKPM

SEQ ID NO: 42919 - protein, 83 aa, Zea mays
  Clone ID: 700575815_FLI.pep
LCPASIFCSKGQGSTLLIMLATALVVSRMIPQSSKTLQSKTALLGKIVFRFLGESVPAVFCPEESNQRLKTIILVAQSEASNN

SEQ ID NO: 42920 - protein, 193 aa, Zea mays
  Clone ID: 700578788_FLI.pep
TKSLQCGCKADKDDTKSLISVKGKKRKSQLGTEFPLPLKKQLVDDWEFVTQMGKLVKLPRSPTVDDILKKYLEHRAKKDGKINDSYAEILKGLRCYFDKALPAMLLYKKERDQYAEEVKGDVSPSTVYGAEHLLRLFVKLPELLASVNMEEDALNKLQLKLLDVLKFLQKNQITFFTSAYDGSCKGADEDKTK

SEQ ID NO: 42921 - protein, 176 aa, Zea mays
  Clone ID: 700578967_FLI.pep
TTSSQRNHARRESRCRRALSYVASMAAARSSSPCQLIICSMFAMAGLSHRRADDQMSSMLLAVPFPPPNNRPAYADDKVWRMVTAVEMGYYNLCTGLRGHKTNSVGVNRLTLLYLGIQIEHRPNSLRSNEIKQTGERNSLRSNEFRTTPLNPSFTTSQAGSRYHVGLESYVGNQTP

SEQ ID NO: 42922 - protein, 136 aa, Zea mays
  Clone ID: 700579569_FLI.pep
SLPRFTHRPSVQGAMAAACICLQLSLPSNHSSSACPPAYRKRVALAPGRGNRLLCTASGASSSVVVTKEQEEGSPEPEIFSYKDDPNFRGCKGCGRDELQRGCNGQGRIQGGIAAVPGFGWWPIKAYRPCPGFVAS

SEQ ID NO: 42923 - protein, 249 aa, Zea mays
  Clone ID: 700579686_FLI.pep
NVMSSPSPSLPDEQGGYRKTSMTERSPRTGQILYALNPASLNSRYHSSSLRSLPVVTVDMKRSSQSWVSLQIAREDDPSTISMTITFPLAAIASLHRFRMITQSLSLQSCSTFFRRTASAGGMNFVMSPPTKRTGPSIGAASTTCGSSSTVHRVSGNAAATAWAAAPVPPPASTSDAIPSNTWGDPRMAMSMRNRVSDASAPLKKSPRKASRARTSQTSSPCVILNAVPRALQLLSSSLPSTPARAQSA

SEQ ID NO: 42924 - protein, 73 aa, Zea mays
  Clone ID: 700579823_FLI.pep
IEMRLHVFFSQMVIPLRMSKFDQFAYLYEDHICCKVDILFERICCLFPLEITDLNCMLEGNRISCCSFKLIRI

SEQ ID NO: 42925 - protein, 270 aa, Zea mays
  Clone ID: 700613188_FLI.pep
PSWGWTTFQAHACKYLQSVHKRRRRPYGRRRSQVEKAGTATNGKAGDRASFVKSELMEDGSSAPRRATPPTRRSRSADFHNFSERRRRDRINEKLRALQELLPNCTKTDKVSMLDEAIDYLKSLQLQLQMLVMGKGGGMAPVVPPELQQYMHYITADPAHQMMPPPLRPSAGQLQPAAGRQFQITQAAAAAANNDNDPQRRRQSNVESDFLSQMQNLHPSDQPPHHHNFLRPPRLQLFTPEQRGGGGGLPTTSHNAGWISGRSSSYNFME

SEQ ID NO: 42926 - protein, 208 aa, Zea mays
  Clone ID: 700613360_FLI.pep
LNQGCLAPVKILIPKGSFLSPSDKAAVVGGNVLTSQRVTDVILMAFQACACSQGCMNNLTFGDDTFGYYETIGGGCGAGPTWDGTSGVQCHMTNTRMTDPEIFEQRYPVLLHTFSIRENSGGSGLHRGGDGLVREIEFRRPIVVSVLSERRVHAPRGLKGGRDGARGANYLVREDGRKIYLGGKNTVTVSAGDILQIFTPGGGGFGCP

SEQ ID NO: 42927 - protein, 54 aa, Zea mays
  Clone ID: 700613648_FLI.pep
SNSFNWYNFTFSYFICTKVQIVELNPLTSQVQVHKLNKYSTLVCTHLGGEWSII

SEQ ID NO: 42928 - protein, 94 aa, Zea mays
  Clone ID: 700613809_FLI.pep
KKQVDIDEKEKTLKLAGRIGQAVGSLLRRLGISYQGEESHGRMRINGLTIRRWFNPKLNSKSSAAGPADLLPLPSRLAKGIAGQQRDIRNLSLE

SEQ ID NO: 42929 - protein, 203 aa, Zea mays
  Clone ID: 700613831_FLI.pep
HIAHYLPANPSRKKLFPTHPRLAAVATPTRSPNSPAVMASLWRAVMDSVSGSSPSALDAAPGSGVEFWHGAERAGWLNKQGEYIKTWRRRWFVLKQGRLFWFKDPAVTRASVPRGVIPVATCLTVKGAEDVLNRQFAFELSTPAETMYFIADSEKDKEEWINSIGRSIVQHSRSVTDAEVVDYDSRPQPPPQLMTSEESAPAA

SEQ ID NO: 42930 - protein, 298 aa, Zea mays
  Clone ID: 700616639_FLI.pep
ASEGRKAHTGHSSFVFLLPRRSLLHSRTRIDPTTTSSERGLMAAQLRYMISHYFGTPPSKEVIQDLYYALRTKGGLTPKEEETLLACNLLPGVYFIVGSVLGTFAMLLGSHKGLKLLGRPTNSPLRSLTVYGYGFIVGKACANETWHQLPELLLDREEGRMKTELAKIILNKHSDDIYLVEVVRRHFFVEHLFDDLHQGQPLFRWRLRHTYVDSTFVERTKEVEASNSDDVARSISRETITNTTPFGEMMEDSLACILGSPGCNMESNNPPEKTANVLTRSDLRARRRGRRHHRHADD

SEQ ID NO: 42931 - protein, 177 aa, Zea mays
  Clone ID: 700616764_FLI.pep
LTFLATVELNMQDGMEGNHMLKPMKKFSRFFGVLFVPFTIGFPKAIFFYWVTSNFFSLVYGAVLRNPAVRLFLNLPRLESQPTTAEVQPLNLSGGPEPSPGVDSPITDKETEQSSSVLSPGVDSPIADKECEQSSPAVSPEVNSPMVDKESEQSSSVLCDRIRDLEIRAKATGESRE

SEQ ID NO: 42932 - protein, 335 aa, Zea mays
  Clone ID: 700617119_FLI.pep
LGHLGVLRALPLHVLEEAAVVHAPHGLPRQVPLVVPRQHVQDRPLQLRRNPAVEVEGVAEPLRHRPELPVGEPVRGSARVLAEQVLEVHWHEPALVVVGPRVTAMLALVDVVDVDREQRGRQPPRQRGIAHGPVHDKSDQERQDHVEPKRTASGVRLPRVDDAVVVAVEEGDVLLQHAHVVVAVLVGRGAVGVVDVRRHQGSRQIWLGEVLLEVAADGAHDGHRRLQRDDGLGVLRLHGRQAVVHGPGAGLVACVALPYDDVVPSSLGDGGVALRHVGASLGAGGVALPLRRRRLRRAAVTVSRLLLGRRPSLHLGSTTARVRVCCLGVHFVRLK

SEQ ID NO: 42933 - protein, 386 aa, Zea mays
  Clone ID: 700623358_FLI.pep
GYFPSGYDPLTTAAGAESAPGTQLFRHEKHPTWVDLVVRSPGGGHDFVGRSYAGEAAVPQVCDYALGVLDKASGTLRIVPIAGKKILRLEPHLEVQHPAHSQHSEVASEAASAAGNDELKVQDLTMMYGAKTDRDKDNKWRSLKEQRNDPSAYEDIDLGISETNVNANDRQEPVLVRNIPPYDPTADTSENAYLLDEIIPKSMREHLLEIVRHFESGEISSKGYGSFVSKRVHKLKELQGEDKKRFAWILSYIQHLLSLLARNGSMSNRKWKGRNENQISHGPATPQAVYRRLLFMFTEPGSSVMPTEKKELLTNYILVLTLFADDFRSNPSDICEDLKMTRQNLKPYYDQLGCKSVTEGAFKSTFMTLPAPLKFPKEVTRKRRRQ

SEQ ID NO: 42934 - protein, 135 aa, Zea mays
  Clone ID: 700569901_FLI.pep
MLSLTVRPVSCSPARPLGSLGFNSQSCRRFHLLASFVVASRVQLYIRHPPVSSSFHVSPRNSKSRVKMEPAAWCSPSARQKARTSCATQVQFVEIIQSKKRSSAINYRRKEGSWMTSTGTRSRACDYRVELVRVS

SEQ ID NO: 42935 - protein, 135 aa, Zea mays
  Clone ID: 700612065_FLI.pep
KLEIAEANSKILKENAEMINEYFSIHVDHDGNLTRLPVVLDQYTPDMDRLPNFVLTMGNDVTWDDEKECFRTAAAAIGNFYALHPPILPNPSGSGVQVYKKNKACMASGEHVDSTDISRREGALALAYQLFRICR

SEQ ID NO: 42936 - protein, 144 aa, Glycine max
  Clone ID: 700548008_FLI.pep
ADSQRHRLGPNYLQLPANAPKCAHHNNHHEGFMNFIHRDEEVNYFPSRYDPVRHAERFPIPPAICSGRREKCGIEKENNFKQPGERYRSWAPDRQDRFARRWVDALSDPRVTHEIRSVWISYWSQADRSLGQKIASHLSTRPNI

SEQ ID NO: 42937 - protein, 67 aa, Glycine max
  Clone ID: 700556463_FLI.pep
QPCLSDAAVMMARVMLGNGYEPGMGLGKDNGGITSLIKTQGNRGKYGLGYKPTQANMKRSIAGRKKR

SEQ ID NO: 42938 - protein, 274 aa, Glycine max
  Clone ID: 700561972_FLI.pep
ARMALRCLVMSLSVLFTLGLARESHARDEDFWHAVWPNTPIPSSLRDLLKPGPASVEIDDHPMQIEETQYPKTFFYKEDLHPGKTMKVQFSKPPFQQPWGVGTWLKEIKDTTKEGYSFEELCIKKEAIEGEEKFCAKSLGTVIGFAISKLGKNIQVLSSSFVNKQDQYTVEGVQNLGDKAVMCHRLNFRTAVFYCHEVRETTAFMVPLVAGDGTKTQALAICHSNTSGMNHQMLHQLMGVDPGTNPVCHFLGSKAILWVPNLSVDTAYQTNIVA

SEQ ID NO: 42939 - protein, 157 aa, Glycine max
  Clone ID: 700651314_FLI.pep
CRNVKASSVYLDYNLEPRLSDFGLAKIFGSGLDEEIALCSPGYAPPEFSQPEFDASVPKSDVYCFGVVLFELLTGKKPVGDDYPDEKEASLVSWVRGLVRKNKASRAIDPKIRDTGAEVQMEEALKIGYLCTADLPSKRPSMQQIVGLLKDIKPSAN

SEQ ID NO: 42940 - protein, 175 aa, Glycine max
  Clone ID: 700651711_FLI.pep
PPSTTKGNYSSEKKKTLAIPLSRQWAIKSAAAVHVLARLALGDGSDAADVSTGNRFPLGGVKSGGNPKHLHYLQLILAPLSFSFSSVSVLLLLLLLHDAVHEVRHRFLRLLVILLRRVSPVALPRRVGGRRPVMPPAVGALAGRGRARVAGAATVRRTRARSLAACSVSVSVTIV

SEQ ID NO: 42941 - protein, 254 aa, Glycine max
  Clone ID: 700651789_FLI.pep
INQSGHQHAIAYVEGDKYYGAKATINVWEPKIQQTNEFSLSQLWILGGSFGQDLNSIEAGWQVSPDLYGDNNTRLFTYWTSDAYQATGCYNLLCSGFIQVNSEIAMGATISPVSGYRNSQFDISILIWKDPKEGHWWMQFGNDYVLGYWPSFLFSYLADSASMIEWGGEVVNSEPDGQHTSTQMGSGHFPEEGFGKASYFRNIQVVDSSNNLKAPKGIGTFTEQSNCYDVQTGSNGDWGHYFYYGGPGKNPNCQ

SEQ ID NO: 42942 - protein, 199 aa, Glycine max
  Clone ID: 700656015_FLI.pep
FLEQYQNHNDPVTTIDPKRTYGVRAPTMHPIFENFRVVTLKALLTSAASTYQLTALGELLYQCHHSYGTCGLGSDGTDRLVNLVQELQHSAASKAEGGTLYGAKITGGGSGGTVCVVGRNCLKSSEHIFEVQHRYKKATGYLPFIFEGSSPGAGKFGYLKIRRRATPKKANAIKDDGALTSEKANASKDDGAVTMKNNS

SEQ ID NO: 42943 - protein, 62 aa, Glycine max
  Clone ID: 700656209_FLI.pep
KSKFCLCACATSLGPIKTVGSSFWDFYLRSSQGATKRFYGLVVCFLVLWFCSALNFVILRVV

SEQ ID NO: 42944 - protein, 138 aa, Glycine max
  Clone ID: 700662768_FLI.pep
KMRYYESTLLSAYKAYLQRLVALEKKPLFQHVAVRCICSLLDANPHFNFRESLLDATVRNISSPNDAIRKLCCSTINSLFANEGKHGGEVTVEAVRLIADHVKAHNCQMHPDSVDVFLSLSFDEDLVMAKRIEDDQKF

SEQ ID NO: 42945 - protein, 111 aa, Glycine max
  Clone ID: 700605972_FLI.pep
GRIQKAYLKTITPKFQTLIDLSVIEILSRHASDEVYLGERDNPNWTSDTRALEAFKRFGNKLAQIENKLSERNNDEKLRNRCGPVQMPYTLLLPSSKEGLTFRGIPNSISI

SEQ ID NO: 42946 - protein, 266 aa, Glycine max
  Clone ID: 700606044_FLI.pep
NILEASYDTKFEEINKVLFSREEGQQQGEQRLQESVIVEISKEQIRALSKRAKSSSRKTISSEDKPFNLRSRDPIYSNKLGKFFEITPEKNPQLRDLDIFLSIVDMNEGALLLPHFNSKAIVILVINEGDANIELVGLKEQQQEQQQEEQPLEVRKYRAELSEQDIFVIPAGYPVVVNATSNLNFFAIGINAENNQRNFLAGSQDNVISQIPSQVQELAFPGSAQAVEKLLKNQRESYFVDAQPKKKEEGNKGRKGPLSSILRAFY

SEQ ID NO: 42947 - protein, 209 aa, Glycine max
  Clone ID: 700668348_FLI.pep
TQEAVNKRVAQIRNLIEAAEQEYEKEKLNERIAKLSGGVAVIQVGAQTETELKEKKLRVEDALNATKAAVEEGIVVGGGCTLLRLASKVDAIKDSLDNDEEKVGADIVKRALSYPLKLIAKNAGVNGSVVSEKVLSSDNPRYGYNAATGKYEDLMSAGIIDPTKVVRCCLEHAASVAKTFLMSDCVVVEIKEPEAIPAGNPMDNSGYGL

SEQ ID NO: 42948 - protein, 279 aa, Glycine max
  Clone ID: 700671142_FLI.pep
MKSRWFVWLLAVLGIIGATLFIVSLIQTSENNFLCSITRTMQQQQQQFTDGPTSMQLKAILHYATSQIVPQQSLSEITITFDVLQSLHRPANFLVFGLGRDSLMWASLNPHGTTLFLEEDPKWFGIVTKEAPYLRAHTVRYRTQLREADSLMSSYRSEPACFPATATLRGNERCKLALHNLPDEVYEKEWDLIMIDAPKGYFAEAPGRMAAIFSAAVMARDRKGSGVTHVFLHDVDRKVEKVYAEEFLCRKHLVKGVGRLWHFEIPPMGNNTRDYARFC

SEQ ID NO: 42949 - protein, 190 aa, Glycine max
  Clone ID: 700671210_FLI.pep
RQKITSYSKMATVGRNVAAPLLFLNLIMYFIVLGFASWCLNRFINGQTYHPSFGGNGATMFFLTFSILAAVLGIVSKLLGGNHMRTWRSDSLASAGATSMVAWAVTALAFGLACKQIHLGGHRGWRLRVVEAFIIILTFTQLLYLILIHAGLYSSRYGPGYHDTDYGHGHGVGGTTGDPMHKPATAGTRV

SEQ ID NO: 42950 - protein, 207 aa, Glycine max
  Clone ID: 700671479_FLI.pep
YIMADETQNKYESSEVEVQDRGVFDFLGKKKDEEDKPHPQEEVIATEFQKVTVSDQGENKHSLLEKLHRSDSSSSSSSEEEGEDGEKRKKKKKEKKGLKEKIEEKIEGDHHHHKDEDTSVPVEKVEVVETAHAEEKKGLLDKIKEKLPGHKKTEEATATTPPPPPPVASLEHGEGAHHEGEAKEKKGILEKIKEKLPGYHSKTEEEK

SEQ ID NO: 42951 - protein, 203 aa, Glycine max
  Clone ID: 700672175_FLI.pep
SRQRRAMVHVSFYRNYGKTFKKPRRPYEKERLDAELKLVGEYGLRCKRELWRVQYALSRIRNNARNLLTLDEKNPRRIFEGEALLRRMFRYGLLDETQNKLDYVLALTVENFLERRLQTLVFKSGMAKSIHHARVLIRQRHIRVGRQVVNIPSFMVRVDSQKHIDFSLTSPLGGGRPGRVKRKNQRAAAKKAAGGDGDEEDED

SEQ ID NO: 42952 - protein, 177 aa, Glycine max
  Clone ID: 700555183_FLI.pep
LEDHFFILKVEYDCYYIIDTLGERLYEGCNQAYILKFDSNTMMYKMPNVAHSSDNKTSNDQQTVAEILDPNNSQTQQVNSKEVDSVAGEEEQLRSETEEVICRGKEACKEYIKSFLAAIPIRELEADAKKGLISSASLYHRLLQIEFHYTQLLGETSMAEPETLALAITEASTITKL

SEQ ID NO: 42953 - protein, 114 aa, Glycine max
  Clone ID: 700555436_FLI.pep
NQSTLISNARIAILSGLARMKSGVLPKLEGLQFDVPTAISKKGDGGEPCNDLVQNYANWWDNRLNKRNAKAPDFKHKETGKGLWLDSSSEWVLEKLPPPLKPKQSVDTERTLVS

SEQ ID NO: 42954 - protein, 59 aa, Glycine max
  Clone ID: 700557423_FLI.pep
MVFCEMTQQSARHLGNMSACSCLICLFLLEETNHIGRGFWVGGSARGHARDPLWLTIGT

SEQ ID NO: 42955 - protein, 201 aa, Glycine max
  Clone ID: 700557459_FLI.pep
DQGSCGSCWTFSTTGALEAAYAQAFGKSISLSEQQLVDCAGRFNNFGCNGGLPSQAFEYIKYNGGLETEEAYPYTGKDGVCKFSAENVAVQVIDSVNITLGAENELKHAVAFVRPVSVAFQVVNGFHFYENGVYTSDICGSTSQDVNHAVLAVGYGVENGVPYWLIKNSWGESWGENGYFKMELGKNMCGVATCASYPVVA

SEQ ID NO: 42956 - protein, 216 aa, Glycine max
  Clone ID: 700563604_FLI.pep
GYYDLFKRRRSTSKMAMKVNMNRHKLARFWNNVIEMWERNELPHDVAVRAKWVNASHFYKLLVEPLDIAEYYGKGMHTTKGHYIQHGREKRYEIFDRWWKDAMGNTEENNERRSKFASLTQDSCFWARVEEARDWLNSVRSESDTTKLAVLWDNIEKFEKYAMELIDNKEVSEDVLAKNSSYSIWMEDLRGLRELKAKVKTFSHHFNPFLDGEVIP

SEQ ID NO: 42957 - protein, 198 aa, Glycine max
  Clone ID: 700649006_FLI.pep
NHKPSYLTCLCLSIYNILFVLHFHSHSLKQSNFHLSHSLNPSVKMAALNMSTVRLPRASLSGTTPARRSCALIKNPSSLRSVKNVSKVFGLKSSSFRVSAMAVYKVKLIGPDGEENEFEAPDDTYILDAAENAGVELPYSCRAGACSTCAGHVVSGSVDQADQSFLDDHQIKKGYLLTCVSYPKSDCVIHTHKEEDLV

SEQ ID NO: 42958 - protein, 119 aa, Glycine max
  Clone ID: 700649013_FLI.pep
TQFGGGIHSELNKKVYKLGKAGDESHSALTEFDRTEKDITPIGGFPHYGVVKDDYIMVKGCCVGPKKRVITLRQSLLKQTSRVALEEIKLKFIDTSSKFGHGRFQTTQEKQKFFGRLKA

SEQ ID NO: 42959 - protein, 91 aa, Glycine max
  Clone ID: 700649226_FLI.pep
KKHFCNILLKLMKQNLFVVQTPLSWLFIYPEGLYKLMTYIRDNYNNPPVYITENGVAESKNDSLAINEARKDGIRIRYHDGHLKSLLHAIK

SEQ ID NO: 42960 - protein, 81 aa, Glycine max
  Clone ID: 700652993_FLI.pep
SYLFLLVVIVCLSIQLVELKLLVIMDHAIDGYCVGDCSQRVVDLAHLVASKWPGAPKAGSGDPLEDFCETNPADEECKVYE

SEQ ID NO: 42961 - protein, 157 aa, Glycine max
  Clone ID: 700657753_FLI.pep
FEELCIKKEAIEGEEKFCAKSLGTVIGFAISKLGKNIQVLSSSFVNKQDQYTVEGVQNLGDKAVMCHRLNFRTAVFYCHEVRETTAFMVPLVAGDGTKTQALAICHSNTSGMNHQMLHQLMGVDPGTNPVCHFLGSKAILWVPNLSVDTAYQTNIVA

SEQ ID NO: 42962 - protein, 214 aa, Glycine max
  Clone ID: 700657794_FLI.pep
PYNCLSKLQAYVFNCHKNNISSKNKTPPCLKHISTDLELSKNPGNILQMLMSLLIRRLLRVIISFCSLNNVDSTVSIHNVTNFTNFKSKSCFFKRLLHLATTKRTEITPALGGAAIGEARGDVLEGGLARNDVVAEGLELRNRVFSGCALDDATFRILPRGLPSRTFVLYQYVRSPNLNTATTLRRRRRHLRLLMLIPVLLLRRRGRRLLPLPI

SEQ ID NO: 42963 - protein, 98 aa, Glycine max
  Clone ID: 700657947_FLI.pep
RMAALGGNRDVTGSQNSVEIDALARFAVEEHNKKQNALLEFEKVVTAKQQVVSGTLYTITLEAKDGGQKKVYEAKVWEKSWLNFKEVQEFKLVGDAPA

SEQ ID NO: 42964 - protein, 220 aa, Glycine max
  Clone ID: 700605616_FLI.pep
ASSATPHLAASVPSTTMAEIETTVPDPTQIDVKLFNRWSFEDVEVNDMSLADYIGVSPSKHATYVPHTAGRYSVKRFRKAQCPIVERLTNSLMMHGRNNGKKLMAVRIIKHAMEIIHLLTDLNPIQVIVDAVINSGPREDATRIGSAGVVRRQAVDISPLRRVNQAIYLLTTGAREAAFRNIKTIAECLADELINAAKGSSNSYAIKKKDEIERVAKANR

SEQ ID NO: 42965 - protein, 112 aa, Glycine max
  Clone ID: 700661004_FLI.pep
ARGVVHELAKSRLSNSLVQAVSLLRQRNHKGVVSSLNDLLACDKAVPSQPVSWEVPEELADLYTIYLKSDPTPENLSRLQYLLGINDSTAAALREMGDRLLNTTAEEEKFVF

SEQ ID NO: 42966 - protein, 76 aa, Glycine max
  Clone ID: 700661120_FLI.pep
AKLYVEETRSDPLHLLTFTPIHNLTLHIYIFRRINVAPYLIPHRLQRILQAALAFLSFADQTSLCYLSSVSVGQNR

SEQ ID NO: 42967 - protein, 174 aa, Glycine max
  Clone ID: 700665290_FLI.pep
KLSGGVAVFKVGGASEAEVGERKDRVTDALNATRAAVEEGIVPGGGVALLYATKVLDNLQTQNEDEKRGVQIIQNALKAPTSTIASNAGFDGALVHSKLLEQDDHNLGFDAAKGVYVDMVKAGIIDPLKVVRTALVDAASVSLLLTTTEAAVLDNPHDKNKPPSRVPDMDDLDL

SEQ ID NO: 42968 - protein, 65 aa, Glycine max
  Clone ID: 700665970_FLI.pep
VLSANCILAVSFTYSCLCLSQNTDTLLFYIILFHLLPSHIYTAFEFVGPEWVHIFSMIFKTSVVI

SEQ ID NO: 42969 - protein, 64 aa, Glycine max
  Clone ID: 700646428_FLI.pep
KLCPDEITLQANFSFTFSLVIFIVAQIILCHIFVLALDGNTKGSSIHRYYLLNFYTLVVLVFIG

SEQ ID NO: 42970 - protein, 59 aa, Glycine max
  Clone ID: 700669288_FLI.pep
KIIDPRLKNQYSLGAARKVAKLADNCLKKNPEDRPSMSQIVESLKQALQDSETNTLSSI

SEQ ID NO: 42971 - protein, 83 aa, Glycine max
  Clone ID: 700673310_FLI.pep
LLVLIDDIYKYVDDVVEGRVAPDNKIGRFISEAVGSLPKLSPSVFDKLVNDSLQDHLLLLYLSSITRTQLSLAEKLNTAAQIL

SEQ ID NO: 42972 - protein, 136 aa, Glycine max
  Clone ID: 700673421_FLI.pep
PVNNTTRANYTISKLCSVMQFSSFWLSMSATTTCVTIHALQKHHTPDPFLSHQILVMLEYILILKASSIYLALPVRIAVGKILSDSHFFFSFSAVFFISSSSCLWFSSWALLNILVKLSKVDTTCSNGQRAGSSPK

SEQ ID NO: 42973 - protein, 106 aa, Glycine max
  Clone ID: 700673478_FLI.pep
KTNFPPAPPLCLDLNVPSSDHRWPHHVPPRSLVLSDFLHTAVLRDIDPPQQPFPPAAAVAHRNPHGGAMPVGGGVQVMEGSPTASFLGFVRRGIPIDLNEPPPMWL

SEQ ID NO: 42974 - protein, 49 aa, Glycine max
  Clone ID: 700561374_FLI.pep
RKVCITLHSSIAKKIFTNWQPGLFLPLWSFTNNKRKHSNSVQNIFCSFT

SEQ ID NO: 42975 - protein, 167 aa, Glycine max
  Clone ID: 700653953_FLI.pep
RKTKTIYKRFHTLHRTKNAGIYNPTKPMTSFHLQLIKNLLIYNRETKQNILRLYRKQNYSFHFNQRLFKHTLLCGLLNSPDLDRTDSLILVTLGRNPCCFTFNLVFLCRGTTNTRGCSSFSNSPLTFVPQFFHLLSNLIFLFPFALLNYRLFRESWLSGPRHDFRLA

SEQ ID NO: 42976 - protein, 103 aa, Glycine max
  Clone ID: 700654122_FLI.pep
ARERERMAALGGNRDVAGSQNSLEIDGLARFAVEEHNKKQNALLEFEKVVSAKQQVVSGTLYTITLEAKDGGQKKVYEAKVWEKAWLNFKEVQEFKLVGDAPA

SEQ ID NO: 42977 - protein, 70 aa, Glycine max
  Clone ID: 700666713_FLI.pep
SVIYAEACDIRGSMFEGMMPKDLKIYATTASNAQENSWGTYCLGMDPSPPPEYIICLGDLYSVAWMEDKY

SEQ ID NO: 42978 - protein, 70 aa, Glycine max
  Clone ID: 700567840_FLI.pep
KHKGKSIIKLDLINFFHLATLSIGISIGVLERRHVSICFTSIFINAQSKLQHPVNPVTESVGIIKAEPRS

SEQ ID NO: 42979 - protein, 87 aa, Glycine max
  Clone ID: 700657475_FLI.pep
RENGMSIWSGLPNVTRKQDFKMSLNSYFIEINISRFLSTNRLLYISISAFPVLHSSYEVLKIIRGKLYDLFRRLGYFSFSSHLLQSI

SEQ ID NO: 42980 - protein, 129 aa, Glycine max
  Clone ID: 700664703_FLI.pep
STTHAAASASTRVISAWATMDSGVQGCILATLILHDEEIPVTAEKINALLKASNVSAESYWPSLFAKLAQNKNIEDLILNAGGGGAAVAVAAPAGGGGGAAAAAAPAAEEKKEEVKEESDDDMGFGLFD

SEQ ID NO: 42981 - protein, 47 aa, Glycine max
  Clone ID: 700668564_FLI.pep
RPLKTILIHSGIIHVQNNIGLFLNPQLISTIIRGIKVTSSLVFALKS

SEQ ID NO: 42982 - protein, 298 aa, Glycine max
  Clone ID: 700832650_FLI.pep
LSIISYIQITYMASSFSPSLSSLVPLLVSLFIVVCAAGNFNQDFQITWGDGRAKILNNANLLTLSLDKASGSGFQSKNEYLFGKIDMQLKLVPGNSAGTVTAYYLSSKGSTWDEIDFEFLGNLSGDPYILHTNVFSQGKGNREQQFYLWFDPTADFHTYSILWNPQRIVFSVDGTPIREFKNLESIGVPFPKRQPMRIYSSLWNADDWATRGGRIKTDWSKAPFTASYRNFNANACVWNRGKSTCKSNSPSSNAWLSQELDSTAQQRLSWVQKNYMIYNYCSDKNRFAQGLPLECTHS

SEQ ID NO: 42983 - protein, 153 aa, Glycine max
  Clone ID: 700567431_FLI.pep
FGAFYAAKHAAEIMIPRKIGSIVFTSSAVSVTHPGSPHPYTASKYAVVGLMKNLCVELGKHGIRVNCISPYAVATPLLTRGMGMEKEMVEELFAEAGNLKGVVLKEEDLAEAALFLASDESKYVSGVNLVVDGGYSVNNTASAEVALGKFSAD

SEQ ID NO: 42984 - protein, 308 aa, Zea mays
  Clone ID: LIB148-065-F10_FLI.pep
HCCRIEEKYFPFQTNKKEGKTKFVIVVSNTQSCFPFLDPLFFPRKTKEAHASPEELVDSSLAGLSRSPVVVVVQLRRAPPKAGAVEPRPHLLLQLPLFLQLQGGLHGQRHRIGGAGIHLDDAGVVHEELVYLRGLARGGRAPAALAHAGGLAAQRRGRAHRGEHRDLHHDAGEAAAHSGAARRGAAGHLAAGAVLPDVEVAFAALRRAAPRPRAAGWERRRPPQLVVMVVQVLVPRRQRALIPLPDLHEPPRALAQGVIGPRRRHGRGGCRARRLGAAVVVVDPVGPDGCHGKLWLALDARRPPKMDR

SEQ ID NO: 42985 - protein, 335 aa, Zea mays
  Clone ID: 700239487_FLI.pep
HAQGIHARGSRDPHRLHAQPALPPGRSRTAEVNELQKNPEKFLHEQLNLVGYSGALANPLIAPEDALARINDKIIQKFYHENFTADRVVLAASGVDHEHLLGYADLLLKDWHKGTPMEKPKSTYVGGDSRHRADSDMTHVALAFEVPGGWLQERDATIMTVIQTLMGGGGSFSSGGPGKGMHSRLYRRVLNKYHLVDSFSAFNNVYDSSGLFGIYLTTPSDFVAKAVDIAVSELIAVATPGEVTEVELQRAKNSTISSVLMNLESRVVVAEDIGRQLLSYGCRKPIDYFLQCMEEITLDDVATFARKMLATQPTMASWGNVDKVPPYEFICKRLQ

SEQ ID NO: 42986 - protein, 564 aa, Zea mays
  Clone ID: 700470960_FLI.pep
GDGKGGESIYGGKFPDENFRLLHNQPGVLSMANSGPDTNGSQFFITFKALPHLDGKHVVFGKVVSGIALLKKLEAVGSETGNPSYQVKIVDCGEVSNTNSPDLLKGEKEKKLRTADGNSTAEGRAKLKKTSGDHKQRKKRKHYSSDSYSSDTSDSLSYSSDSGSDSESDSSMDTSSSSDHRRKRRKGSKKDKRKPTKRKGKHTRSKRKSRGSKRRSRRSHGSSSDDSVSSKTDNSSSDSEKGGHHTKRSLPKDKESTKMTISEQGRTFQEADKDEQTVTTINRSQSHDGSKPSNKDGNRADERSGNYNSEDRNGPGGSSRNNPIQVDVNLTKPVNVDGNTGGDNAEAGMSRTGEGRHLPSNDSVSTNGKDLGVGSADNGQPQRIRKGRGFTQKYGYARRYRTPSPERPPVRPRYDGGRDDRWNNFNRYERNGPYSRRSPVRRYHGSPRANSPSRYPRRERMRSRSRSPVRRHDRGGYHRPSPRRSRSPAEPRQNVNDRPRSGHGGGDPDHSPPANRSRSKSRDPLGPRSPDAAPAKRESSRYNRRRSSSSRSSSPDGNKGLVSY

SEQ ID NO: 42987 - protein, 223 aa, Zea mays
  Clone ID: 700466142_FLI.pep
SMVSLRRRRLLGLCSGKDSLPVDLPKPIENEKTVEVAHSNVKPFSVHPLPLAKTSDVLIKSSNGSDDSKEEKTQYYPGKEIKCRKRHRRKQYVDQEPCIMRGVYFKNMKWQAAIKVDKKQIHLGTVGTQDEAARLYDRAAFMCGREPNFVLSEEEKQELRRYTWEDFLAVTRNTITSKKQRKVGSLRRSKADLFMGQSDGDTEMANGGGSSNSDNGDAGTSAS

SEQ ID NO: 42988 - protein, 53 aa, Zea mays
  Clone ID: 700624610_FLI.pep
VSYLSWTHYDLNIHKLRAIIACYLQLVRYRTNITKASTPIGPELNLPSYLFSR

SEQ ID NO: 42989 - protein, 210 aa, Zea mays
  Clone ID: 700574201_FLI.pep
IIAMVDMPASSAIPKSLASLANEYRRLAVDCVRVLRLEMQLEAIYHMQEMTKREYVEDQDAEDPDDFIISLTTQIARRDEEMAPYITESERNYIFGGISSVAANASIKALAQMKSINLLGVQQICRNSIALEQALAAIPSIDSEAVQQRLDRVRTFYELLNLPFESLLGFIAEHEYLFSAKEYLSVLKVNVPGREIPADAERRISQILGH

SEQ ID NO: 42990 - protein, 145 aa, Zea mays; identical to SEQ ID NO: 42713
  Clone ID: 700801284_FLI.pep

SEQ ID NO: 42991 - protein, 120 aa, Zea mays
  Clone ID: LIB148-006-A3_FLI.pep
LDLLPWLPLARLPAVTPAAARRSSAPSARSAIPWSEVARTGRDPTCTASSVVSQAPPSAMPTPRPTRTWPSSGRRAPCTTTSSTPRSTFQAQRWSSRGSRSLRSEPISSPTSRNPRLNFF

SEQ ID NO: 42992 - protein, 79 aa, Glycine max
  Clone ID: 700761002_FLI.pep
VHQELEHGVVEALKDQGICRWNHALRSAQHHLKTHFGSFSQANRLSASAMLSTTLKHEKPKQSEESFRNVMYFSCWGPN

SEQ ID NO: 42993 - protein, 170 aa, Glycine max
  Clone ID: 700761173_FLI.pep
LDIFLSIVDMNEGALLLPHFNSKAIVILVINEGDANIELVGLKEQQQEQQQEEQPLEVRKYRAELSEQDIFVIPAGYPVVVNATSNLNFFAIGINAENNQRNFLAGSQDNVISQIPSQVQELAFPGSAQAVEKLLKNQRESYFVDAQPKKKEEGNKGRKGPLSSILRAFY

SEQ ID NO: 42994 - protein, 91 aa, Glycine max
  Clone ID: 700834262_FLI.pep
IHHRECVTVITSLRLKGEMGAITSAVIAVVGVLLGWITIEIACKPCLQQARQAIDRNLNPDYDPDDDDATAIRAPLNPAPTAASSAAVKAV

SEQ ID NO: 42995 - protein, 164 aa, Glycine max
  Clone ID: 700842705_FLI.pep
RTFPSADPAWFYLHVGCQVSAYAIGVAGWGTGMKLGSESVGIQYRSHRYIGIALFCFATLQIFALFLRPVKDHKYRYIWNIYHHSVGYSIVILGIINIFRGFSILHPDQKWKSTYTAVLIALGAVALFLEVITWIVVLKRKSYKSTKTYDGYNNGQSREEPLNI

SEQ ID NO: 42996 - protein, 128 aa, Glycine max
  Clone ID: 700787639_FLI.pep
PPPPPLLLLSSPHGYGMRSSPSDEVNCGDEVKAENKSEAADIKVTLIQTHVNLKIECQRKPGQLLKVIVALEDLRLTILHLNITSSETSVLYSLNLKIEEDCKLCSASDIAETVHQIFSFINGVARDH

SEQ ID NO: 42997 - protein, 189 aa, Glycine max
  Clone ID: 700791340_FLI.pep
TTTMKLMTATTTFDVSATCFRAPPPSCSMNPCHTSFSVINSLNPHKGRRISVAVPPKFPNFRREASLQGNLEAIRVPTSVPVRVAYELLLAGHRYLDVRTPEEFDAGHAPGAINIPYMFRVGSGMTKNSNFIREVSSQFRKDDEIIVGCELGKRSMMAASDLLAAGFTGLTDMAGGYAAWTQNGLPTEL

SEQ ID NO: 42998 - protein, 84 aa, Glycine max
  Clone ID: 700791740_FLI.pep
AALYGRAVPGTVLVRQLKKLPRNKCWLVGYSKAEADAMEIAREFNKEWETNLRIGLHDCRDYTNSKNLFQTLCCLSPFMERTIC

SEQ ID NO: 42999 - protein, 53 aa, Glycine max
  Clone ID: 700792277_FLI.pep
QNRSCVGSSTQTWPKTSVKFHTERKLKSASVKVFFSSCFLFVLVYCMHITVTL

SEQ ID NO: 43000 - protein, 76 aa, Glycine max
  Clone ID: 700752832_FLI.pep
YKRHNNNKLHKHAAAAATESVTTVYATLNYGLQIHPYTYTFLCNLLFLSHFYFTTLNIHNNSNQYGETFSSYLNPL

SEQ ID NO: 43001 - protein, 40 aa, Glycine max
  Clone ID: 700786845_FLI.pep
QKPKIQDDEISKSKNKWECSLSTNKQSGVAATNALQIFHT

SEQ ID NO: 43002 - protein, 74 aa, Glycine max
  Clone ID: 700789129_FLI.pep
IGKFYPGLTQEQIVGIVNGFGELKGAKCEDIDVAKAALYLASDEAKFISGQNLIVDGGFTSFKNLTFPSPDQTA

SEQ ID NO: 43003 - protein, 97 aa, Glycine max
  Clone ID: 700746856_FLI.pep
TIQHNSFGLLLCSLGDLSSSRVLLLDALDDSHSHSLTHVSHSKTTKWRILGEGFNHHGLGGNHLDQTSITILQEFGLLLKFLTRSPVNLGQEFSKLD

SEQ ID NO: 43004 - protein, 491 aa, Glycine max
  Clone ID: 700834677_FLI.pep
YGHKLRSHTHITQHNHPQANNTFSDLTMIFQSCFMMTATLLLFVIAQCVVGVNSLSQADKISTLPGQPPVKFQQYAGYITVDDKQKRALFYYFVEAEVEPASKPLVLWLNGGPGCSSVGAGAFVEHGPFKPSENGLLKNEHSWNKEANMLYLESPAGVGFSYSANKSFYDFVNDEMTARDNLVFLQRWFTKFPELKNNDFFITGESYAGHYVPQLAQLIVQTKTKFNLKGIAIGNPLVEFNTDFNSRAEFFWSHGLISDSTYEIFTKVCNYSQIRRQHQGGTLTPICSGVNRLVSTEVSRYIDTYDVTLDVCLSSADQQAYVPNQLTQLQEGAKIDVCVEDETIAYLNRKDVQEALHAKLVGITSWSTCSDVLKYDMQNLEIPTISILGALAKSGIRVLVYSGDQDSVIPLTGTRSLVNGLAKDFGLNTTVSYRAWFEGRQVAGWTQVYGDILSFATIRGAAHEAPFSQPERSLVLLKAFLEGKPLPEPFL

SEQ ID NO: 43005 - protein, 335 aa, Zea mays
  Clone ID: 700171972_FLI.pep
HGPPTVRAGTRGRALHPILRTRVVLLITTSRDLSHMIASHRATLLGQGITTVMVNHRVLTMANLNTRNMRLSRTTAMGMVILDTMLPLRTSSTMVSRQWARSKAILNSQIPMLGLHTVDLVNGLPGVLRLQMALTRRQLHLMGRLLSTLLLMGKRTVQQLDLMDMLNRVTHSRVGRHQLHMVRVHQQLQAILSSKVAMHSTHRPNQHMVSKQLKPMRAMGTRELKQILTMEVPTHSQDMVLLVRLLVRLVMPPQQPASLRMARQDTPSRLQILQVMSSLRHQQQPRAAMLRPQQIHSSLLQQKGSRHSLVVVLLHMVLVGSGQHDPPRTSNMARW

SEQ ID NO: 43006 - protein, 241 aa, Glycine max
  Clone ID: 700653721_FLI.pep
FEETELRLGLPGNGGTEEVLIRKRGFSETETGHEDESATTVDLMLNLSSKEAATTAAAAADPTDKHKTLPKEKTLLPADPAKPPAKTQVVGWPPVRSFRKNMLAVQKSVGEESEKNSSPNASFVKVSMDGAPYLRKVDLKMYKSYRELSDSLGKMFSSFTFGNCESQGMKDFMNESKLNDLLNSSDYVPTYEDKDGDWMLVGDVPWEMFVESCKRLRIMKGKEAIGLGLAPRAMAKCKNRS

SEQ ID NO: 43007 - protein, 169 aa, Glycine max
  Clone ID: 700652071_FLI.pep
EDAAASANAAEDRENKFLTMAIEEAYKAVESGHGRPFGAVIVRNDEILSSCHNMVVRNADPTAHAEITAIREACRKLNQVELADSEIYASCEPCPMCLSAIHFSKIKKLVYGAKAEAAVAIGFESIIADALKDTGFYEKLNLEVKKAEGSVAVMAEQVFEKTKDKFIIP

SEQ ID NO: 43008 - protein, 145 aa, Zea mays
  Clone ID: 700611907_FLI.pep
DAVDPPLLRLLVAVLVPELPDLAPDHVRHVRLHEHVGRVEHVHDEPLRRRHRRVQVDDELCHRYVAGDEQPLDRVNHLACALDRDNCRCLAPTTTLVVVPRPSRPQDSVLSLRIGSSTLRSPAAPQLLYLSASPFLASPSALFAA

SEQ ID NO: 43009 - protein, 363 aa, Zea mays
  Clone ID: LIB3067-013-F4_FLI.pep
KEMDDGNKSMVELPSKTVLACYIDLSAEEREYYDQMEQEGRNKMQEFGDRDSILSNYSTVLYFILRLRQLCDDVALCPLDMKAWFPASSIEDVSKHPELLKKLALLVDDGDDFDCPICLSPPTKTVITSCTHIYCQTCILKILKSSSSRCPICRRTLSKEDLFLAPEVKHPDEDGSGNLESDRPLSSKVQALLKLLTASQNEDPSSKSVVFSQFRKMLILLEAPLRRAGFKTLRLDGSMSAKKRLQVIQEFSHGGSDSPTVLLASLKAAGAGVNLTAASTVYLFDPWWNPGVEEQAMDRVHRIGQKKEVKVIRLIVKGSIEERILALQERKKRLISGAFGKKGGKNEKEMRVEELRMMLGLGK

SEQ ID NO: 43010 - protein, 364 aa, Zea mays
  Clone ID: 700348053_FLI.pep
VVAPPDKFGETLVNERINGGTFTGSENFQLPNKMMPNGGMRLYGGAQYHRAMAEFRLVVGSTRCPPITRDEIVNACGVEDIHDGTNYSRTACVIAVAKARDTFEPFLDQLGFRLLYILKRLIPISVYLLEKDGEHFNSHEVLIRRVQEAFKRFVESTEQSCRQRCMEDLESTTRYVTWSLHNKNRAGLRHFLDSFVAPEQLSVNTLNVQFSGLNDNKQDKAKGDSKSNHSPDTNSSTAMPETRLVDLLDSTLWNRRLVPSSERLVYALVHQIFHGIKEHFLVTTELKFNCFLLMPIVDKLPALLRQDLESAFEEELDSIFDVTQLRQSLGQKKRELEIELKRIKRLKEKFGEINKKLNSLQVRQ

SEQ ID NO: 43011 - protein, 531 aa, Glycine max
  Clone ID: 700566893_FLI.pep
NILMAEHGFDGHDVGYLPEDPNFPQNHSDEHDVGTVIDSSGFPHLLPDEDDAGNLMEDANFPENDFVGHEHDVGGLAGDADSPPEEHVEEVHGAGDVPEDFDSLPKQGSEIDSKGNEIKKWPGWPGENVFRMLVPVQKVGSIIGRKGEFIKKITEETKARIKILDGPPGISERAVMVSAKEEPDCPIPPAVDGLLRVHKQVINVDRDLADSALAAGRSVVTRLLVADTQAGSLIGKQGSTIKSIQDGSGCTIRVLGSENLPIFALRDDSIVEIQGESAGVHKAVELIAVHLRKFLVDRSIVGVFETQMQMSDVRVNQNLPPHQNWGPPPQGFPAPAGGGGGGGPAFAPNHQYMPPSHHYDSYYPPTELPPMDKHLHQGPPPAYARDASMGIHSSSAQPQQSVVTKVTQHMQIPLTYADAVIGASGTNISYIRRASGASITIQETRGVPGEMTVEISGTSSQIQAAQQLVQNFMAEAASATQDPMGGSVSQGYSAYPTTAPVYAPPPTSAGGHTGHAPSADYGPVYGTNYGY

SEQ ID NO: 43012 - protein, 365 aa, Glycine max
  Clone ID: 700567610_FLI.pep
QTTIEIDSLYEGIDFYTTITRARFEELNMDLFRKCMEPVEKCLRDAKMDKSTVHDVVLVGGSTRIPKVQQLLQDFFNGKELCKSINPDEAVAYGAAVQAAILSGEGNEKVQDLLLLDVTPLSLGLETAGGVMTVLIPRNTTIPTKKEQVFSTYSDNQPGVLIQVYEGERTRTRDNNLLGKFELSGIPPAPRGVPQITVCFDIDANGILNVSAEDKTTGQKNKITITNDKGRLSKEEIEKMVQEAEKYKAEDEEHKKKVEAKNTLENYAYNMRNTIKDDKIASKLSADDKKKIEDAIEQAIQWLDGNQLAEADEFEDKMKELESICNPIIAKMYQGAGGDAGGAMDEDGPAAGSGSGAGPKIEEVD

SEQ ID NO: 43013 - protein, 215 aa, Glycine max
  Clone ID: 700567612_FLI.pep
KKAPNVSLGETVRARLKQFSVMNKLKKRALRVIAEHLTVEEAAGLKEGFQLMDTNNRGKINIDELRVGLHKLGHQVPESDVQALMEAGDVDGDGHLDYGEFVAISVHLRKMGNDEHLRKAFQFFDQNKSEYIEIEELRSALSDDLDTNSEEVISAIMHDVDTDKDGRISYDEFATMMKAGTDWRKASRQYSRERFASLSLTLMRDGSLHLNNEKQ

SEQ ID NO: 43014 - protein, 171 aa, Zea mays
  Clone ID: UC-ZMFLMO17003C04_FLI.pep
RRRARRLPGARCPGSGSAPSSPPSRSSGCRSCQSGSGGGCRSATRPSWTSGAATWASARASSRSGCTTTSTTSWADTAPAAASLPPQALLRSSKPHAPTPALLHRHSTRPGSPLPLPSSHRPRPASTSTAPPPPRRPPSPPTTRTTPTELHRRTPLKLERRGKREWRDKHA

SEQ ID NO: 43015 - protein, 622 aa, Glycine max
  Clone ID: 700663290_FLI.pep
QQHTTFLLPIMSSSFSVRFLAPPSSCFPSSRPKTWLCAATTPTVAPATASSEVEASRLEPRVEERDGFWVLKEEYRGGISPQEKVKLEKDPMKLFMEGGIEDLAKMSLEEIESSKHTKDDIDVRLKWLGLFHRRKQHYGRFMMRLKLPNGVTTSAQTRYLASVIRKYGKDGCADVTTRQNWQIRGVVLPDVPEILKGLDEVGLTSLQSGMDNVRNPVGNPLAGIDPDEIVDTRPYNNLLSQFITANSRGNPAMSNLPRKWNVCVVGSHDLFEHPHINDLAYMPANKDGRFGFNLLVGGFFSAKRCAEAIPLDAWVSADDVIPLCKAVLEAYRDLGFRGNRQKTRMMWLIDELHGLFPLSLSVSAWQVSDKSVWQMKGIEVFRSEVEKRMPGKQLERASEEELVKKKWERRDYLGVHPQKQDGLSYVGIHIPVGRVQADDMDELARLVDKYGTGELRLTVEQNIIIPNVDSNKIDALLNEPLLKERFSPEPSLLMKTLVACTGNQFCGQAIIETKERALKVTEEVERQVAVTRPVRMHWTGCPNTCGQVQVADIGFMGCMARDENGKATEGVDIFLGGRIGSDSHLAEVYKKGVPCKNLVPIVVDILVKHFGAVQRNREEGED

SEQ ID NO: 43016 - protein, 573 aa, Glycine max
  Clone ID: 700792820_FLI.pep
GALATKGRANIEEWQMVCRSLGSEIEGNDKLEDMKKVLSLSFNELPYYLKSCLLYLSIFPEFHAIEHMRLIRLWIAEGFVNGEEGKTLEEVADSYLKELLDRSLLQVVAKTSDGRMKTCRMHDLLREIVNFKSKDQNFATIAKDQDITWPDKVRRLSIINTLNNVQQNRTAFQLRSLLMFALSDNSLENFSIRALCSTGYKLLRVLDLQDAPLEVFPAEIVSLYLLKYLSLKNTKVKSIPGSIKKLQQLETLDLKHTHVTVLPVEIVELQRLRHLLVYRYEIESYANLHSRHGFKVAAPIGLMQSLQKLCFIEADQALMIELGKLTRLRRLGIRKMRKQDGAALCSSIEKMINLRSLSITAIEEDEIIDIHNIFRPPQYLHQLYLSGRLDNFPHWISSLKNLVRVFLKWSRLKEDPLVHLQDLPNLRHVEFLQVYVGETLHFKAKGFPSLKVLGLDYLDGLKSMTVEEGAMPGLKKLIIQRCDSLKQVPLGIEHLTKLKSIELFDMPEEFITALRPNGGEDYWRVQQVPAVYISYWRDRGWDVYSLETLGERESDSSGGTAIRSLEICTLWKV

SEQ ID NO: 43017 - protein, 388 aa, Glycine max
  Clone ID: LIB3029-007-B6_FLI.pep
LDKLKAERERGITIDIALWKFETTKYYCTVIDAPGHRDFIKNMITGTSQADCAVLIIDSTTGGFEAGISKDGQTREHALLAFTLGVKQMICCCNKMDATTPKYSKARYDEIVKEVSSYLKKVGYNPDKIPFVPISGFEGDNMIERSTNLDWYKGPTLLEALDQINEPKRPSDKPLRLPLQDVYKIGGIGTVPVGRVETGVVKPGMVVTFGPTGLTTEVKSVEMHHEALTEALPGDNVGFNVKNVAVKDLKRGFVASNSKDDPAKEAANFTSQVIIMNHPGQIGNGYAPVLDCHTSHIAVKFSEILTKIDRRSGKELEKEPKFLKNGDAGMVKMIPTKPMVVETFSEYPPLGRFAVRDMRQTVAVGVIKSVEKKDPTGAKVTKAAAKKK

SEQ ID NO: 43018 - protein, 450 aa, Glycine max
  Clone ID: 700847216_FLI.pep
HQDFHDLSNLEHLILDYNNLENEFLKNIGELTSLKVLSLQQCDINGTLPPTDWFKLKKLEELYLSRNEFEGPLPSSFVNMTSLRNLEISGNHFIGNFDSNLASLTSLEYFDFTGNQFEVPVSFTPFANLSKIKFIYGEGNRVVLDSQHSLQTWIPKFKLQKLIVSSTTETKSLPLPNFLLYQNNLTYIDLSGWKLEGDFPHWLLENNTKMTDALFRNCSFTGTFQLPMSPLPNIQTIDVSDNTVNGQIPSNNISSIYPNLQYLNLSGNNIQGSIPSELGQMSLLYLLDLSENQLSGKIPENILADGHPLQFLKLSNNMLEGPILNIPNGLETLILSHNRFTGRLPSNIFNSSVVLLDVSNNHLVGKLPSYVEKFSRLQGLYMSNNHFEGSIPIELAEPENLSHLDLSQNNLTGHVPSFANSNLQFIHLNNNHLSGLSKRMFNENSSLVML

SEQ ID NO: 43019 - protein, 482 aa, Glycine max
  Clone ID: 700848338_FLI.pep
TRVKVPDTSKARVAATIGMRECKERCLRDCSCVAYTSANESSGSGCVTWHGNMEDTRTYMQVGQSLFVRVDKLELAKYAKHPYGSLGKKGMVAVLTAAIFLFLLLAITFVYWFVKTRRQGIRRDRKYSFRLTFDDSTDLQEFDTTKNSDLPFFELSSIAAATDNFSDANKLGQGGFGSVYKGLLINGMEIAVKRLSKYSGQGIEEFKNEVVLISKLQHRNLVRILGCCIQGEEKMLIYEYLSNKSLDSLIFDESKRSQLDWKKRFDIICGVARGMLYLHQDSRLRIIHRDLKASNVLMDSSLNPKIADFGMARIFGGDQIAANTNRVVGTYGYMSPEYAMEGQFSVKSDVYSFGVLLLEIVTGRKNSGLYEDITATNLVGHIWDLWREGKTMEIVDQSLGESCSDHEVQRCIQIGLLCVQDYAADRPSMSAVVFMLGNDSTLPDPKQPAFVFKKTNYESSNPSTSEGIYSVNDVSITMIEAR

SEQ ID NO: 43020 - protein, 86 aa, Zea mays
  Clone ID: LIB3076-028-A11_FLI.pep
SGFCLLSYFFKSLSRNKLWNIVIVVFLDLCCRTGSSHLLLHLLGNPLQVLHVVRAWKNRKGVNPSFISFVLWQQASVCFTLVAFCI

SEQ ID NO: 43021 - protein, 969 aa, Glycine max
  Clone ID: 700650840_FLI.pep
NAEIEKIVQTIIKKLGSKFSSLPKDNLVGMESRVEELVKCLRLGSVNDVRVVGISGMSGIGKTELARALYERISDQFDVHCLVDDVSKIYQDSGRLGVQKQLLSQCLNEKNLEIYDVSQGTCLAWKRLQNAKALVVFDEVVNERQLQMFTGNRDSLLRECLGGGSRIIIISRDEHILRTHGVDDVYQVPLLDREEAVQLFCKNAFKDNFIMSGYAEFADVILSQAQGNPLAIKAVGSSLFGLNAPQWRSAVAKLREQKSRDIMDVLRISFDELDDTNKEIFLDIACFFNNFYVKSVMEILDFRGFYPEHGLQVLQDRSLIINEYGIIGMHGLLIDLGRCIVREKSPKEPSNWSRLWKYQDLYKIMSNNMAAEKLEAIAVDYESDDEGFHEIRVDALSKMSHLKLLKLWGVTSSGSLNHLSDELGYITWDKYPFVCLPKSFQPNKLVELCLEYSNIKHLWKDRKPLHNLRRLVLSHSKNLIELPDLGEALNLEWLDLKGCIKLKKINPSIGLLRKLAYLNLKDCTSLVELPHFKEDLNLQHLTLEGCTHLKHINPSVGLLRKLEYLILEDCKSLVSLPNSILCLNSLKYLSLYGCSGLYNSGLLKEPRDAELLKQLCIGEASTDSKSISSIVKRWFMWSPRLWYSRAHNDSVGCLLPSAPTIPPSMIQLDLSYCNLVQIPDAIGNLHCLEILNLEGNSFAALPDLKGLSKLRYLKLDHCKHLKDFPKLPARTDFSYTFLLPILGRAVELPVWGFSVPKAPNVELPRALGLSMFNCPELVEREGCSSMVLSWMIQIVQAHYQSNFAWWPIGMPGFSNPYICSVIPGSEIEGWFTTQHVSKDNLITIDPPPLMQHDKCIGVAYCVVFAAHSTDLEMVPPETERGYPVMGIVWIPVDVHEDVVTDKSDHLCLFYSPTYIGIGDWKLKVKIMDRKGFPVEVKKYGYRRVHEEDLDLEPSLNTAGIRKRKRGTDE

SEQ ID NO: 43022 - protein, 475 aa, Glycine max
  Clone ID: 700746445_FLI.pep
YKYKHSFCLYFDNDPELKKFVELCTLLGHIPFKITRFGLTSIPLHFQKNWLCSPCFQTPSLSFCRRLSSIMAGDSSVMSNGYSKGSVNPLTNLRRTYQVLVAATQDWGIGKDGKLPWRLPTDLKFFKDITVKTSDPGKKNAIVMGRKTWESIPLEYRPLSGRLNVVLTRSGSFDIATAENVVICGSMSSALELLAASPYSLSIEKVFVIGGGQIFREALNAPGCEAIHLTEIQSSIECDTFMPPVDFTMFRPWYSSFPKVENNIRYCFTTYVRVRSSAPESPGQNIDQLLDNNSESMKFEVKEFSFLPKMISERHEEYLYLKLVQDIIAEGTTKDDRTGTGTLSKFGCQMRFNLHGSFPLLTTKRVFWRGVVEELLWFISGSTNAKVLQEKGIHIWDGNASREYLDGVGLTEREEGDLGPVYGFQWRHFGARYTDMHHDYSGQGFDQLLDVINKIKHNLMIGELFSLHGIHLILN

SEQ ID NO: 43023 - protein, 209 aa, Glycine max
  Clone ID: 700568558_FLI.pep
LVKFLGSPTGRSFCCFFFHSSLTLYDYSSIPKRNSAFLLIMASTLRLYLTCIRNTLEAAMCLQNFPCQEVERHNKPEVELKTSPELLLNPVLICRNEAEKCLIETSINSLRISLKVKQADELENILTKKFLRFLSMRAEAFQVLRRKPVQGYDISFLITNYHCEEMQKHKLIDFIVQFMEDIDKEISELKMSVNTRGRLVATEFLKQFI

SEQ ID NO: 43024 - protein, 986 aa, Glycine max
  Clone ID: 700889015_FLI.pep
AVSASLSTPHSLSKPRRPLPPPSQTPTLRPPKRPLRLEPPRRHPMQLDRRHVRRRNRRRRHSRLLQPPTLRPRPRHHPLPPPSLASLNFSYNNLNATLPAAAFSACAALLHLDLSQNLLSGAIPATLPDSLVTLDLSCNNFSGDIPASFGQLRQLQSLSLVSNLLAGTLPSSLGNISTLKILRLAYNTFDAGPIPKEFGNLKNLEELWLAGCSLVGPIPPSLGRLSNLLNLDLSQNNLVGDIPEQLVSGLRNIVQIELYENSLSGALPRAAFTNLANLERFDASTNELTGTIPEELCGLKKLGSLNLYENKLEGSLPETIVKSLNLYELKLFNNSLTGSLPSGLGKNSKLQSLDVSYNRFSGEIPARLCDGGALEELILIYNSFSGRIPETLEECKSLRRVRLGNNNFSGVVPEGLWGLPHLYLLELVYNSLSGSISNSISGAWNLSMLLISGNKFSGSIPEGVGELGNLEKFVANNNSLTGRIPKSVFRLSQLDRLVLGDNQLFGEIPVGVGGCKKLNELDLANNRLGGSIPKELGDLPVLNYLDLSGNQFSGEIPIELQKLKPDLLNLSNNQLSGVIPPLYANENYRKSFLGNPGLCKALSGLCPSLGGESEGKSRKYAWIFRFIFVLAGIVLIVGVAWFYFKFRDFKKMKKGFHFSKWRSFHKLGFSEFEIIKLLSEDNVIGSGASGKVYKVALSNGELVAVKKLWRATKMGNESVDSEKDGFEVEVETLGKIRHKNIVRLWCCCNSKDSKLLVYEYMPNGSLADLLHNSKKSLLDWPTRYKIAIDAAEGLSYLHHDCVPSIVHRDVKSSNILLDDEFGAKVADFGVAKIFKGANQGAESMSVIAGSYGYIAPEYAYTLRVNEKSDIYSFGVVILELVTGKLPLDPEYGENDLVKWVQSTLDQKGLDEVIDPTLDIQFREEISKVLSVGLHCTNSLPITRPSMRGVVKKLKEVTELPKSLSGKLSSPYFQEEASDIDHEGSLV

SEQ ID NO: 43025 - protein, 96 aa, Zea mays
  Clone ID: LIB3067-056-E8_FLI.pep
ASILTLLGEPTLLPISTVMSLPLIACFLIVSKCKEIPLLVCIITHKLFETLIEDVACSAPLNLDDVEWWENPPYYCVVCECTVVTTSELAVSDKNY

SEQ ID NO: 43026 - protein, 182 aa, Zea mays
  Clone ID: LIB3069-052-E7_FLI.pep
NRLYVPSGKKNSTSPLTSNHQICERYATVRNLDSSLGMKFQYLLSSMPVIESALEEIDIHRPPPPLSSQNSFAAVETVPTAKPRVQFLLGQRLRLRRRPGGLPRFPIAGRSDGEEAHVVRQQLGLPDTVPGRGVVERAAEPRHPADLQRVQPEQHLHDAVLRQVAQHRAIASPGPRRAEINW

SEQ ID NO: 43027 - protein, 173 aa, Zea mays
  Clone ID: LIB3069-053-A5_FLI.pep
DQLAEMFGVTTVDVWTSYVAGESEEPTYGNLDMGEEEDEVDIRSPLSSSSKKRTGSNTDTASSPPRKHKSPMIECEALIDTLQSLNSKDLDVAKQIQEDHIAKNKKLEQEKENKEIDKCFELAKECGATEETEEFYVATRIFAERYYRYVFIKMTTNAGRMAWLKKWCRDWTG

SEQ ID NO: 43028 - protein, 605 aa, Glycine max
  Clone ID: 700791930_FLI.pep
AMIGEISLEEQHLRIENARLKDELDRVCALAGKFLGRPISSLTGSIGPPLPNSSLELGVGSNGFGGLSTVPSTMPDFGVGISSPLAMVSPSSTRPTTTVTTTLVTPPSGFDNRSIERSIVLELALAAMDELVKMAQTDEPLWIRSLEGGREILNHDEYTRTITPCIGLRPNGFVTEASRQTGMVIINSLALVETLMDSNRWSEMFPCMIARTSTAEVISNGINGTRNGALQLMHAELQVLSPLVPVREVNFLRFCKQHAEGLWAVVDVSIDTIRDTSGAPTFVNCRRLPSGCVVQDMPNGYSKVTWVEHAEYDESQIHQLYRPLLSSGTGFGAQRWVATLQRQCECLAILISSAVPSREHSVSSGGRRSMLKLAQRMTNNFCAGVCASTVHKWNKLNAGNVGEDVRVMTRKSVDDPGEPPGIVLSAATSVWLPVSPQRLFDFLRDERLRSEWDILSNGGPMQEMAHIAKGQDHANCVSLLRASAINANQSSMLILQETCTDASGSLVVYAPVDIPAMHVVMNGGDSAYVALLPSGFAIVPDGSVEENGGASQQRAASGGCLLTVAFQILVNSLPTAKLTVESVETVNNLISCTVQKIKSALHCES

SEQ ID NO: 43029 - protein, 171 aa, Zea mays
  Clone ID: UC-ZMFLMO17225C08_FLI.pep
RDLSPESFPPECYQRYLNGYIYASRDQLPDCAINCAVQCFTVAESQSRIVAPIVFDHSLWGLLIVHQCSSSRTWQTAEIQLMQSLGNQLAIAIQQSLLYERLQEELSERQRAEQKLLEVNQLQKGIFDVANYMIISTDRRGIISTFNRTAEEILGYTAAELIGQQTPLIFH

SEQ ID NO: 43030 - protein, 258 aa, Glycine max
  Clone ID: 700830431_FLI.pep
ATSFAEALRMGSEVYHVLKGIIKAKYGQDACNVGDEGGFAPNVQDNREGLVLLMDAIDKAGYTGKIKIGMDVAASEFYTKDGKYDLNFKKQPNDGAHVHSAQSLGQLYKDFVKEFPIVSIEDPFDQDDWGSWASLLASVDIQLVGDDLLVTNPKRIAEAIKKKACNGLLLKVNQIGTVTESIQAALDSKAAGWGVMVSHRSGETEDNFIADLSVGLASGQIKTGAPCRSERLAKYNQLLRIEEELGSVRYAGETFRSP

SEQ ID NO: 43031 - protein, 417 aa, Zea mays
  Clone ID: 700569244_FLI.pep
GSAFRSTSARPVSRSETRAGSCTAGKHVPRAVFVDLEPTVIDEVRTGTYRQLFHPEQLISGKEDAANNFARGHYTIGKEIVDLCLDRIRKLADNCTGLQGFLVFNAVGGGTGSGLGSLLLERLSVDYGKKSKLGFTVYPSPQVSTSVVEPYNSVLSTHSLLEHTDVAILLDNEAIYDICRRSLDIERPTYTNLNRLVSQVISSLTASLRFDGALNVDVNEFQTNLVPYPRIHFMLSSYAPVISAEKAYHEQLSVAEITNSAFEPSSMMAKCDPRHGKYMACCLMYRGDVVPKDVNAAVATIKTKRTIQFVDWCPTGFKCGINYQPPSVVPGGDLAKVQRAVCMISNSTSVVEVFSRIDHKFDLMYAKRAFVHWYVGEGMEEGEFSEAREDLAALEKDYEEVGAEFDEGEDGDEGDEY

SEQ ID NO: 43032 - protein, 689 aa, Zea mays
  Clone ID: 700345691_FLI.pep
ESLDDELSTEIIDKCDGIPLAIIAIASLLVERPCEEWSKVYDSISLGNGDNTTKILSYSYYDLPSYLKPCLLQLSIFPEDYQFDTNAAIWMWIGEGLVHLEKEEGSLFVVGERYFKELVNRSMIQPIEDKYDRLVEVFSIHDIVFDLIRKLLKDEDFITLLDSSGQHASQDSLREKKICVPRSDCKLRRLAVRNHHVQRFPEDTMDMPEALRSLNIIYCNIAIMTPLHSFRLCRVLCIEYSYVPISLKHLGKLLHLKYLELYGTPVDELPKEIGHLRSLQTLLLVNTGLDELPPAVCSLTRLMCLIAEGFKRLPADKMGNLTSLEELRLESVVGQSATQALVAELGKLTRLRVVNITFSEELEESLQEALVQSLFNLWGLQELALSSKWWQQGSAMWGDLEPPRQLRRLIIKGIVFSRQPRWINRSCMAHLCFLSLTVLAVEAQDLDNLARLPELRYLKLDGVSWPPRYDAGPGDFRNLRFCDVGTMLVFHMGAMPRLEELVFGVCAGYWSWEQNGVLLEQFPTMDVIEDLDLGLDNLLSLEQVTVIVNCSGTTAAKVQEVEAVVMRAMENHANRPTIKMERVGEKFILSDEEREDLLQRRIEKEGRFLEFKDKSDAFFIRHLRLIRHLRKSVISHNCAGASMCEVRKVEAARRHAAEVHPNHPSIELNRKNNDEMASSSDHPNTELRN

SEQ ID NO: 43033 - protein, 291 aa, Zea mays
  Clone ID: 700426995_FLI.pep
DVTVSLGPNGELRYPPYPPGNQGADGYAGIGELQCYDKYMLARLKRHAELSGQPLWGLSGPHDGPRYDESPETSAFFREPGGSWKSAYGEFFLSWYAGELLAHGDRVLAAASRAFGGKPVELSAKVPLMRGPSPADATAGLYGGYGPVAEMFARHRCAVIASGVEARPDAAAEGRLARVKAACAEHGARLAAESAPLSVARGGASAGSPGVVWLSAGRTRPCQFTYQRMGAEFFSPGHWPLFVQFVRALECPEEAHEDDLPVSAGGGERLTVPSASAPTSEATRTREVQTV

SEQ ID NO: 43034 - protein, 643 aa, Glycine max
  Clone ID: 700555559_FLI.pep
KELSRELGLEPLQVKFWFQNKRTQMKTQHERHENTNLRTENEKLRADNMRYREALSNASCPNCGGPTAIGEMSFDEHHLRLENARLREEIDRISAIAAKYVGKPVVNYSNISPSLPPRPLELGVGGAGFGGQPGIGVDMYGAGDLLRSISGPTEADKPIIIELAVAAMEELIGMAQMGEPLWLTTLDGTSTMLNEDEYIRSFPRGIGPKPSGFKCEASRETAVVIMNHVNLVEILMDVNQWSTVFSGIVSRAMTLEVLSTGVAGNYNGALQVMTAELQLPTPLVPTRESYFVRYCKQHADGTWAVVDVSLDNLRPGPSARCRRRPSGCLIQEMPNGYSKVTWVEHVEVDDRGVHNLYKQLVSSGHAFGAKRWVATLDRQCERLASAMATNIPTVDVGVITNQDGRKSMMKLAERMVISFCAGVSASTAHTWTTLSGTGADDVRVMTRKSVDDPGRPPGIVLSAATSFWLPVPPKRVFDFLRDENSRNEWDILSNGGVVQEMAHIANGRDTGNCVSLLRVNSANSSQSNMLILQESCTNSTGSFVIYAPVDIVAMNVVLNGGDPDYVALLPSGFAILPDGTTSHNGSGGIGETGPSGSLLTVAFQILVDSVPTAKLSLGSVATVNNLIACTVERIKASLSGEPA

SEQ ID NO: 43035 - protein, 739 aa, Glycine max
  Clone ID: 700676494_FLI.pep
TVAAAGLYVHLRIGPYVCAEWNYGGFPLWLHFIPGIKFRTDNEPFKAEMKRFTAKIVDMIKEENLYASQGGPVILSQIENEYGNIDSAYGAAGKSYIKWAATMATSLDTGVPWVMCQQADAPDPIINTCNGFYCDQFTPNSNTKPKMWTENWSGWFLPFGGAVPYRPVEDLAFAVARFFQRGGTFQNYYMYHGGTNFDRTSGGPFIATSYDYDAPIDEYGIIRQPKWGHLKEVHKAIKLCEEALIATDPTITSLGPNLEAAVYKTGSVCAAFLANVDTKSDVTVNFSGNSYHLPAWSVSILPDCKNVVLNTAKINSASAISSFTTESLKEDIGSSEASSTGWSWISEPVGISKADSFPQTGLLEQINTTADKSDYLWYSLSIDYKGDAGSQTVLHIESLGHALHAFINGKLAGSQTGNSGKYKFTVDIPVTLVAGKNTIDLLSLTVGLQNYGAFFDTWGAGITGPVILKGLANGNTLDLSYQKWTYQVGLKGEDLGLSSGSSGQWNSQSTFPKNQPLIWYKTTFAAPSGSDPVAIDFTGMGKGEAWVNGQSIGRYWPTYVASDAGCTDSCNYRGPYSASKCRRNCGKPSQTLYHVPRSWLKPSGNILVLFEEKGGDPTQISFVTKQTESLCAHVSDSHPPPVDLWNSDTESGRKVGPVLSLTCPHDNQVISSIKFASYGTPLGTCGNFYHGRCSSNKALSIVQKACIGSSSCSVGVSSETFGNPCRGVAKSLAVEATCA

SEQ ID NO: 43036 - protein, 606 aa, Glycine max
  Clone ID: 700677051_FLI.pep
EGNALLKLRQRIVSDPFDALSNWVDDEASVDPCNWFGVECSDGRVVVLNLKDLCLGGTLAPELVKLVNIKSIILRNNSFSGTIPEGFVQLKELEVLDLGYNNFSGHLPADLGSNISLTILLLDNNEFLVGLSPEINELRMLSECQVDENQLTNAAKMPACTERATTRHIGQGKGTRGSQHSNTSPAANHYQFNRVAAPPLESPSSPSASPSGSAKPPVPKLAPHRKNASDSSPPHSTSGSGTLSKTKSTSSKVHTVPILAGVIGGAVFLIFSSIGIYLCKTKVANVRPWAMGLSGQLQKAFVTGAQKLKRSDLEAACEDFSNVIGNSPIGILYKGTLSGGVEIAVAFVSITSSKNWSKTLEAQFRSKIDKLSKVNHKNFVNLIGYCEEEEPFTRMLVFEYAPNGTLFEHLHIKEAEHLDWGTRLRVATGVAYCLQHMHQLDPPMALIKLNSSAVYLTDDYAAKLSDLSFSNDIASAETRAMDKPLATPESNVYSLGVLLFEMVTGRLPYSVEHKDSLENWASHYLEVDQPLKEIVDPILVSYQEDQLEQVASLITSCVHPDPQKRPTMKDVSERLREITKITPESAVPKLSPLWWAEIEIASAEAR

SEQ ID NO: 43037 - protein, 492 aa, Glycine max
  Clone ID: 700681177_FLI.pep
LPFLLSLSSPVFHISEKMALSSPSLVFTVQRCQPELVAPAKPTPREVKPLSDIDDQQGLRFQIPFILFYGNEPSMAGKDPAKVIREALAQTLVFYYPFAGRIREGPGRKLVVDCTGEGVMFIEADADATLDQLGDTLQPPFPCFEQLLYDVPGSEGVIDCPLMLFQVTRFKCGGFALAVRLNHTMSDGAGIALFMNTLAEMAQGATEPSVPPVWRRELLQARDPPHITCNHREYEQIPNNMEGIIPSYENKMVLRSFFFGASDIAALRRLVPHYHRKCTSFDLITACFWRCRTKALEIDADEDVRMMVIVNARARFNPPLPAGYYGNAFAYPAAVTTAGKLCENPFGYAVELINKLKGEVTEEYMHSVADLMVTNGRCLFTTVRSFIVSDLRHFGFKQIDFGWGRALYGGVAKGGAGPFPAVFYLMAHKNAKGEEGILLPIWLPAKAMDKFANELDHMLIGNQNQPTDPHPIFYASTLENIKWTPKKLIGTQ

SEQ ID NO: 43038 - protein, 231 aa, Glycine max
  Clone ID: 700682523_FLI.pep
QYSYKLQQHTPRSIVARRMGSLGAILKNPDDFYPLLKLKMAARNAEKQIPPEPHWAFCYTMLHKVSRSFALVIQQLGTELRNAVCIFYLVLRALDTVEDDTSIETDVKVPILIAFHRHIYDRDWHFSCGTKEYKVLMDQFHHVSTAFLELGKNYQEAIEDITKRMGAGMAKFICKEVETIDDYDEYCHYVAGLVGLGLSKLFHASGSEDLAPDDLSNSMGLFLQVSYHGSK

SEQ ID NO: 43039 - protein, 572 aa, Glycine max
  Clone ID: 700682341_FLI.pep
LHLTSFLSGVLSPFPLAFKSHQHNSPFRVSMAVSTSFPGAKLEALLLKCGSSNAATATATTTTHLSCFCKTRKTLVQSQRGPIRCEASSASDVVADATKKAASVSALEQLKTSAADRYTKERSSVMVIGLSVHSTPVEMREKLAIPEAEWPRAIAELCSLNHIEEAAVLSTCNRMEIYVVALSKHRGVKEVTEWMSKTSGIPVADLCQHQFLLYNKDATQHLFEVSAGLDSLVLGEGQILAQVKQVVKVGQGVNGFGRNISGLFKHAITVGKRVRTETNIAAGAVSVSSAAVELALMKLPEASHANARMLVIGAGKMGKLVIKHLVAKGCTKMVVVNRSEERVAAIREEIKDVEIIYKPLSEMLTCIGEADVVFTSTASENPLFLKDDVKELPPATDEVGGRRLFVDISVPRNVGSCLSDLESVRVYNVDDLKEVVAANKEDRLRKAMEAQAIIGEESKQFEAWRDSLETVPTIKKLRAYAERIRLAELEKCLGKMGDDINKKTQRAVDDLSRGIVNKLLHGPMQHLRCDGSDSRTLSETLENMHALNRMFNLETEISVLEQKIRAKVEQKP

SEQ ID NO: 43040 - protein, 323 aa, Glycine max
  Clone ID: 700682990_FLI.pep
VGWFCHSALLVPYFSWKISHGKHHKATGHMERDMVFVPKTREVYATRVGKAVHEISELAEETPIYTLLHSIVQQLGGWPMYLVANVTGHNNHDRQIEGKGKGKKNGVFGGVNHFNPSSPLYEKRDEHLILLSDLGIGLTVAALTVIGKTYGFNNLLVWYILPYLWVNHWLVMITFLQHTDPTLPHYDADTWTYTRGAAATIDREFGFIGRHLLHGIVETHVLHHYISTIPFYHADEATEAIKPVMGRHYRSDTKDGTVGFLKALWKSARWCQWVEPSVGAEGEGKGVLFFRNHNGLGTPPQKLDAPGAKKASKMEVGPESDNE

SEQ ID NO: 43041 - protein, 482 aa, Glycine max
  Clone ID: 700726944_FLI.pep
LSRNELSGDIPNEITGMRILNYLNLSKNHLVGSIPSSISSMQSLTSVDFSYNNLSGLVPGTGQFSYFNYTSFLGNPDLCGPYLGACKGGVANGAHQPHVKGLSSSLKLLLVVGLLLCSIAFAVAAIFKARSLKKASEARAWKLTAFQRLDFTVDDVLHCLKEDNIIGKGGAGIVYKGAMPNGDHVAVKRLPAMSRGSSHDHGFNAEIQTLGRIRHRHIVRLLGFCSNHETNLLVYEYMPNGSLGEVLHGKKGGHLHWDTRYKIAVEAAKGLCYLHHDCSPLIVHRDVKSNNILLDSNHEAHVADFGLAKFLQDSGTSECMSAIAGSYGYIAPEYAYTLKVDEKSDVYSFGVVLLELITGRKPVGEFGDGVDIVQWVRKMTDSNKEGVLKVLDPRLPSVPLHEVMHVFYVAMLCVEEQAVERPTMREVVQILTELPKPPGSKEGDLTITESSLSSSNALESPSSASKEDQNPPQSPPPDLLSI

SEQ ID NO: 43042 - protein, 186 aa, Glycine max
  Clone ID: 700899532_FLI.pep
EPLNHVEAERQRREKLNQRFYALRAVVPNVSKMDKASLLGDAISYITELKSKLQTLESDKDVLHKQLEGVKKELEKTTDNVSSNHACNNNNNNKLSSNQPALIDLVEMDVKIIGWDAMITITCSKKNHPAATLMTALMELDLDVHYATVTLVNDLMIQQATVKMGSRFYTQEQLRAALSAKVGDVR

SEQ ID NO: 43043 - protein, 426 aa, Glycine max
  Clone ID: 700903739_FLI.pep
EDVFEFLGNVPLLQRLPGSSVRKISELVILKHYEPGEYVVREGERGDGLYFIWEGEAEVVGSVNADDDNHPEFQLKRFDYFGFGLSNEVHHADVVALTKLSCLVLPHEHSALLQPKSIWSAEKSHDTCSLVEHILHLDPIEVDIFRGITPPDAPTFGKVFGGQIVGQALAAASKSVDCRKVVHSLHVYFLLVGDFNIPIIYQVKRLRDGKSFATRKVDAIQKGNVIFTLLASFHKEEVGFHHQEVSIPSVPAPDTLLSLEELREQRLTDPRLPRTYRNKVATIEFIPWPIEIRFCEPKISTNQTKSPPSLRYWFRARGKLSDDQALHRCVVAYTSDLIFLQVSLNPNRRKGRKARAVSLDHSMWFHRPLRADDWILFVIFSPTANNARGYVTGQMFNQKGEHLVSVVQEGVMREVISAKSAIKSNL

SEQ ID NO: 43044 - protein, 146 aa, Zea mays
  Clone ID: LIB3069-055-A10_FLI.pep
RYMAGTVKSIKTPKTAYDFEVSWRALSDDTAQQIQLLKSIPPASLPEIFKNALSAPFLIDIVKCAASIFRDAEALAVSILDNLARVPRFDLIIMCLSSMHKFELRKIWDQVFLAEKALADDRMEALRQLRGRYIPGGWQDSMLTSS

SEQ ID NO: 43045 - protein, 455 aa, Glycine max
  Clone ID: 700876062_FLI.pep
KRHRSNINKMDQQNQNNTPDGSGEVPLKRKRGRPRKYPKPDSEESSYILVSQNKRQNPVRAEQAPVPPGFEGVNGNQQLQRGQENHSNNELVGQVVSGVIEAVFDAGYLLSVRVGDSDTTLRGLVFKPGRYVPISPDNDVAPSVPMIQRNEVSFPSRAAQVQTPLPKERNEQPVNVHRVETLAMNGSPSVPQVPRGAVSSSNLVASTGKSVPSVTGQITHQLPRGNVVPVLLQPNNFSNGVPVSNQPSQVKTQVSLGSGVIAAKEIPVDGSHALVSLTQTSQNLLPSSVQSEGVSPHNQSSSNVLNEDQAKSMRMPGMPFEQLVTEVVKRIQAPSDAMDTETDNSKSGDNTVVKYPSCRQEDKVNEMDQPILIKPLQAVQSLPQESSTSAPKPADYTETGRVNELLQVLQHNKTENQASTIAAELGSGNKLDDIRNLGTGLEDGGTFNQQSLSEH

SEQ ID NO: 43046 - protein, 333 aa, Glycine max
  Clone ID: 700558924_FLI.pep
SNLVHVPLQQKMPEIQLGMHTIRSHGTRVARTHMHDWLILLLLVIIDAVLNLIQPFHRFVGEGMMTDLRYPLKANTIPFWAVPIIAILLPLAVFLVYYFIRKDVYDLHHAIMGLLFSVLITAVMTDAIKDAVGRPRPDFFWRCFPDGKGVFDPVTSNVLCTGDKGVIKEGHKSFPSGHTSWSFAGLVYLAWYLSGKLRAFDRRGHVAKLCLVFLPILVAAMIAVSRVDDYWHHWQDVFAGALIGMIIASFCYLQFFPPPYDVDGWGPHAYFQMLAESRNGAQPSTVNNEIHHVQSAELQAVSLYIPPQHDADTRGNSWDSSPMLGASQNVRTH

SEQ ID NO: 43047 - protein, 258 aa, Glycine max
  Clone ID: 700807532_FLI.pep
LLGCCSRGPERILVYEYMANSSLDKFLFGSKKGSLNWKQRYDIILGTARGLAYLHEEFHVSIIHRDIKTGNILLDDYLQPKIADFGLARLLPRDRSHLSTKFAGTLGYTAPEYAMQGQLSEKADTYSYGIVVLEILSGQKSTNVKVDDEGREYLLQRAWKLYERGMQLELVDKDIDPNEYDAEEAKKIIEIALLCTQASAAARPTMSELIVLLKSKSLVEHLRPTMPVFVETNMMNQEGGSSPGTSNATISISVLSAR

SEQ ID NO: 43048 - protein, 360 aa, Glycine max
  Clone ID: 700868263_FLI.pep
FLYCYMAMAVSAIGFEGFEKRLEISFFQPGLFADPEGRGLRALTKSQLGEILTPAACTIVSSLKNDNVDSYVLSESSLFVYAYKIIIKTCGTTKLLLAIPPILKFAEMLSLNVKSVNYTRGSFIFPSAQPYPHRNFSEEVAILDGYFGKLGAGSNAYILGGQDKAQNWHVYSASADSVTQCDNVYTLEMCMTGLDREKAQVFYKEQSASAAMMTVNSGIRKILPDSEICDFDFEPCGYSMNSVEGAAVSTIHVTPEDGFSYASFETVGYDFKAVNLNEMVQRVLACFLPTEFSVAVHVDGASKSFEQTCFLDVKGYCREERSHEGLGMGGSVVYQKFGKTSDCGSPRSTLKCWNEEDEEE

SEQ ID NO: 43049 - protein, 318 aa, Zea mays
  Clone ID: 700352012_FLI.pep
HGRTMSRARGQCASSAAEAALRARRLTVLVPELHRRVHAGPRQRAQRRGQQVDPELPVVPRRHGRPQRPHRVHGPARRRPGDEDVQRYGRSHRDPGEFTHCAGVGGDGGDDEEEVEGDDELGEERLGGGDGGVGHGDAAGEERVEDALEREGGADGCQRLDGHVRGHLQPGEVAQRREGDGERRVQVRPGDVPRRQDDGRHRQPRARRVAERADRAAVLLVHDRRRRREEDEDERAHELRAQLAGERDVRRGDLDDAGVRRHAPPLHRRQRQALAPRHRLALVRQRVHPRPAAGEQRRRRAGRRRRRPVRGRRPRLHG

SEQ ID NO: 43050 - protein, 477 aa, Glycine max
  Clone ID: 700869115_FLI.pep
WQRPEDMTTDRHAYKIDPSNPGSDLAGETAAAMAAASIVFRRSNPAYAAELLRHAYQLFDFADKYRGKYDSSITVAQKYYRSISGYNDELLWAAAWLYQASNNQYYLDYLGRNGDSMGGTGWKMTEFGWDVKYAGVQTLVAKFLMQGKAGHHAPVFERYQQKAESFMCSCLGKGDRNVQKTPGGLIFRQRWNNMQFVTSASFLATVYSDYLASSGRNLRCSSGNVPPAELISLAKSQVDYLLGDNPRATSYMVGYGSNFPQRVHHRGSSIVSIKVNPSFVSCRGGYATWFSSKRSDPNLLTGALVGGPDAYDDFADERDNYEQTEPATYNNAPLIGILARLGGGHGGYNQLLPVVVPAPKPVVTKPQPTPSPKTTPPPASWSGPISIEQKMTTSWIAHGITYYRYSTVVTNKSNKSLNSLNLSISKLYGPIWGVTKSGDSYTFPSWLSSLSAGKSLEFVYIHSASAADVSVTNYVLA

SEQ ID NO: 43051 - protein, 577 aa, Glycine max
  Clone ID: 700893044_FLI.pep
LKALVPALKTLIVDKNLGFPVFSAIDDLFDEGLYLPPLKGIRSILPRLVRHIKDIQEDILLFDPPATMNKDRFFWLRDEEFGRQTLAGLNPCCIQLVTEWPLKSKLDPEIYGPAESAITTEIVEREIRGFNTVEEAIKQKKLFILDYHDLLLPLVKDVRELEGTTLYGSRALFFLTREGTLRPLAIELTRPPMDGKPQWKEVFTPCWHSTGVWLWRLAKLHILAHDSGYHQLVSHWLRTHCATEPYILATNRQLSAMHPIYRLLHPHFRYTMEINALAREALINGDGIIESSFSPGKHSILLSSIAYDQQWQFDLQSLPKDLISRGMAVEDPTAPHGLKLIIEDYPYANDGLVLWDALKTWFTEYVNLYYADDGSIVSDTELQAWWEEIRTVGHGDKKDEPWWPVLKTKLDLIDIVTTIAWTTSGHHAAVNFGQFSFAGYFPNRPTIARNNMPSEDPSDAEWELFLEKPEVIMLKCFPSQIQVTTVMTVLDILSNHSPDEEYLGETVEPAWEEEPLVKAAFEKFRGKLIELEGIIDARNADRTRRNRNGAGIVPYELLKPSSEPGVTGKGVPYSISI

SEQ ID NO: 43052 - protein, 427 aa, Glycine max
  Clone ID: 700891395_FLI.pep
GELFNKVAKGRLKEEVARKYFQQLVSAVEFCHARGVFHRDLKPENLLLDEDGNLKVSDFGLSAVSDQIRHDGLFHTFCGTPAYVAPEVLARKGYDGAKVDIWSCGVVLFVLMAGYLPFHDRNVMAMYKKIYKGEFRCPRWFSSELTRLFSRLLDTNPQTRISIPEIMENRWFKKGFKQIKFYVEDDRVCSFDEKQLQHHDGDDYLATSDSEVEIRRKNSNCNSTSNGNSLPRPASLNAFDIISFSQGFDLSGLFEEKGDEARFVSSAPVSKIISKLEEVAQLVSFTVRKKDCRVSLEGCREGVKGPLTIAAEIFELTPSLVVVEVKKKGGDKAEYEKFCNSELKPALENLGMEDSASSSSSCHQSTHTQSEFQQQHRTFSDSALNRHSDNNECLYDQELGLAEETSIPQLGEPKFEFQQENVPMFTI

SEQ ID NO: 43053 - protein, 629 aa, Glycine max
  Clone ID: 700847896_FLI.pep
KVSLYQDAHVPDNFVPKIPLAGGKNYEAHRCWEDIFDAITNARHFIYITGWSVYTEISLVRDSRRPKPGGDQTLGELLKKKANEGVKVLMLVWDDRTSVGLLKKDGLMATHDEETAQFFEGTEVHCVLCPRNPDDGGSIVQDLQISTMFTHHQKIVVVDGAMPGEGSDRRRIVSFVGGIDLCDGRYDTAFHSLFRTLDTAHHDDFHQPNFPGAAITKGGPREPWHDIHSRLEGPIAWDVLFNFEQRWRKQGGKDVLVPLRELEDVIIPPSPVTFPEDHETWNVQLFRSIDGGAAFGFPETPEDAARAGLISGKDNIIDRSIQDAYINAIRRAKNFIYIENQYFLGSSFAWSADDIKPEDIGALHLIPKELSLKIVSKIEAGERFAVYVVVPMWPEGVPESASVQAILDWQKRTMEMMYKDIIQALRAKGIDEDPRNYLTFFCLGNREVKKPGEYEPSEQPDPDSDYQRAQEARRFMIYVHTKMMIVDDEYIIVGSANINQRSMDGARDSEIAMGAYQPYHLATRQPARGQIHGFRMSLWYEHLGMLHDSFLQPESDECINKVNQVADKYWDLYSNESLEHDLPGHLLRYPIGVASEGDVTELPGFEFFPDTKARILGGKADYLPPILTT

SEQ ID NO: 43054 - protein, 195 aa, Glycine max
  Clone ID: 700847984_FLI.pep
KGQNEEILLELVKPDPAVLSLEDNKGNTALHIATKKGRTQNVRCLLSMECININATNKAGETPLDVAEKFGSPELVSILRDAGAANSTDQRKPPNPSKQLKQTVSDIKHDVQSQLQQTRQTGMRVQKIAKKLKKLHISGLNNAINSATVVAVLIATVAFAAIFTVPGQYVEDKTHGFSLGQANSKQCSFPNIFCV

SEQ ID NO: 43055 - protein, 1087 aa, Glycine max
  Clone ID: 700683892_FLI.pep
TLPRVQRASTISSVVSFFNLFSLSVAAAAVMERARRLANRAILRRLVSEAKQHQKNESVLHSSTTPMLLYSSSRCMSSVLRSRGSKTETLLGRNINMSRGVVVAAAGGFLGVGSARSISVEALRPSDTFPRRHNSATPEEQSKMAESCGFGSLDSLVDATVPKSIRLKDMKFGKFDAGLTENQMIEHMKDLASKNKVFKSYIGMGYYNTHVPPVILRNIMENPAWYTQYTPYQAEISQGRLESLLNYQTMITDLTGLPMSNASLLDEGTAAAEAMSMCNNIQKGKKKTFIIASNCHPQTIDICKTRADGFDLKVVTADLKDIDYKSGDVCGVLVQYPGTEGEVLDYGEFVKKAHAHEVKVVMASDLLALTVLKPPGEFGADIVVGSAQRFGVPMGYGGPHAAFLATSQEYKRMMPGRIIGVSVDSSGKTALRMAMQTREQHIRRDKATSNICTAQALLANMAAMYAVYHGPEGLKNIAHRVHGLAGAFALGIKKLGTVEIQDLPFFDTVKVKTSNAHAIADAALKSGINLRVVDGNTITVAFDETTTLEDVDNLFKVFAGGKPVSFTAASLAPEVQSAIPSGLVRKSPYLTHPIFNTYQTEHELLRYLYRLQSKDLSLCHSMIPLGSCTMKLNATTEMMPVTWPSFSDIHPFAPVDQAQGYQEMFNNLGELLCTITGFDSFSLQPNAGAAGEYAGLMVIRAYHLARGDHHRNVCIIPVSAHGTNPASAAMCGMKIVSVGTDAKGNINIEELRKAAETHKDNLSALMVTYPSTHGVYEEGIDEICNIIHDNGGQVYMDGANMNAQVGLTSPGWIGADVCHLNLHKTFCIPHGGGGPGMGPIGVKKHLAPFLPSHPVIETGGIPAPDKPQPLGTIAAAPWGSALILPISYTYIAMMGSKGLTDASKIAILNANYMAKRLENYYPVLFRGVNGTVAHEFIIDLRGFKNTAGIEPEDVAKRLMDYGFHAPTMSWPVPGTLMIEPTESESKAELDRFCDALISIRQEIAEIEKGKVDINNNVLKGAPHPPSLLMADAWTKPYSREYAAFPAPWLRTAKFWPTTGNHVVVYITISFSFQEIIIILTNLHETQP

SEQ ID NO: 43056 - protein, 990 aa, Glycine max
  Clone ID: 700684713_FLI.pep
GVVVAAAGGFLGVGSARSISVEALRPSDTFPRRHNSATPEEQSKMAESCGFGSLDSLVDATLPKSIRLKDMKFGKFDAGLTENQMIEHMKDLASKNKVFKSYIGMGYYNTHVPPVILRNIMENPAWYTQYTPYQAEISQGRLESLLNYQTMITDLTGLPMSNASLLDEGTAAAEAMSMCNNIQKGKKKTFIIASNCHPQTIDICKTRADGFDLKVVTADLKDIDYKSGDVCGVLVQYPGTEGEVLDYGEFVKKAHAHEVKVVMASDLLALTVLKPPGEFGADIVVGSAQRFGVPMGYGGPHAAFLATSQEYKRMMPGRIIGVSVDSSGKTALRMAMQTREQHIRRDKATSNICTAQALLANMAAMYAVYHGPEGLKNIAHRVHGLAGAFALGIKKLGTVEIQDLPFFDTVKVKTSNAHAIADAALKSGINLRVVDGNTITVAFDETTTLEDVDNLFKVFAGGKPVSFTAASLAPEVQSAIPSGLVRKSPYLTHPIFNTYQTEHELLRYLYRLQSKDLSLCHSMIPLGSCTMKLNATTEMMPVTWPSFSDIHPFAPVDQAQGYQEMFNNLGELLCTITGFDSFSLQPNAGAAGEYAGLMVIRAYHLARGDHHRNVCIIPVSAHGTNPASAAMCGMKIVSVGTDAKGNINIEELRKAAETHKDNLSALMVTYPSTHGVYEEGIDEICNIIHDNGGQVYMDGANMNAQVGLTSPGWIGADVCHLNLHKTFCIPHGGGGPGMGPIGVKKHLAPFLPSHPVIETGGIPAPDKPQPLGTIAAAPWGSALILPISYTYIAMMGSKGLTDASKIAILNANYMAKRLENYYPVLFRGVNGTVAHEFIIDLRGFKNTAGIEPEDVAKRLMDYGFHAPTMSWPVPGTLMIEPTESESKAELDRFCDALISIRQEIAEIEKGKVDINNNVLKGAPHPPSLLMADAWTKPYSREYAAFPAPWLRTAKFWPTTGRVDNVYGDRNLICTLLPASQAVEEQAAATA

SEQ ID NO: 43057 - protein, 491 aa, Glycine max
  Clone ID: 700684820_FLI.pep
SEVTAMASACVTLKSNTHLANSEKGFLGERIKGGFNNSALVMNQLAIRSRSHKRVKHGVGVVSAVLTSNNAKESLTLQVPSFLRRRADPKNVISIILGGGPGTQLFPLTKRAATPAVPVGGCYRLIDIPMSNCLNSGINKIFVLTQFNSASLNRHIARTYFGNGINFGDGIVEVLAATQTPGEAGKNWFQGTADAVRQFTWVFENTNVENVLILAGDHLYRMDYMDLVQSHVDRNADITVSCAAVGDSRASDYGLVKVDDRGRIIQFSEKPNGDDLKAMQADTSLLGLSPQDALKSPYIASMGVYVFKTDVLLNLLKWRYPTSNDFGSEIIPAAVRDHDVQSYFFEDYWEDIGTIKSFYDANLALTEESHKFEFYDPKIPIYTSPGFLPPTKIDKCQIVDAIISHGCFLRECTVQHSIVGERSRLDYGVELLDTVMMGADYYQTESEIASLLAEGKVPIGIGRNTKIRNCIIDKNAKIGKDVIIANKDLSL

SEQ ID NO: 43058 - protein, 367 aa, Glycine max
  Clone ID: 700685483_FLI.pep
HSHLVSMSRIFSAWNKKKLHLHLNLIPTIFSSSHTHFDALAAANSGLLRPSLRLYSSSSSSSNGEPPEDWPHDHYAATQTPISVNFIRASGPRDGWVGGSNLGRDFPTPKEICKGLDKFVIGQHRAKKVLSVAVYNHYQRIYQGSEADEGLSQGLDDGDDVELEKSNVLLMGPTGSGKTLLAKTLARFVNVPFVIADATTLTQAGYVGEDVESILYKLLAAAEFNVQAAQQGIVYIDEVDKITKKAESLNISRDVSGEGVQQALLKMLEGTMVNVPERGARKHPRGDNIQIDTKNILFICGGAFIDLEKTISERYFVFLFMSLFFHHILIICEINQTTRFFNWFWITSPFQYENWWSYKCCSHIIFT

SEQ ID NO: 43059 - protein, 684 aa, Glycine max
  Clone ID: 700685736_FLI.pep
MTGFPGPRRDHASSSSSSHNSNSSGSNVFNLLARREISPRTRYVAKWHWGEPGEASKSKSIPYSRPKKEVVRDARRGLLSWVEAESLRHLSAKYCPLVPPPRSTIAAAFSPDGKVLASTHGDHTVKIIDCETGSCLKVLVGHRRTPWVVRFHPLHPHILASGSLDQEVRLWDANTSECIISHHFYRPIASIAFHAKGEIIAVASGHKLYIWHHNKKGEASSPIFVLKTKRSLRAVHFHPHAAPYLLTAEVNDLDSSDSSMTEATSLGYLQYPPPAVFVTNIHPTEHINLSSELPYVSLPFYVMPAYNVDESRAELQHASHDVVSGSMQIESSAMVQLQADPSAAEHYETTVSPMDTFSEMPSSSQTGAEYPAHTAFSNGMGIGLSNLTMDGMETDETRPAEGNQHGNLTNTYSLNGMLHGLSRQTANRGVPSEFGQFHQFFPSRDPSGWEIPFLHGWIMGQSQVGVPSMLPHMGASRDNLSQQIGSSSYIMASNHSTSNVDAAMPSSAIPGSISIPGSSMRSGLRNHFSQSRVPVSESGNLAASINTPHDGFDMQTIVSRIQSELATSVAATAAELPCTVKLRVWSHDIKNPCAPLNADRCRLTVPHAVLCSEMGAHFSPCGRFLAACVACMLPHIEADPGLQTPVHQDPGVATSPTRHPISAHQVTFLRRPSLESVSEQGLDK

SEQ ID NO: 43060 - protein, 299 aa, Glycine max
  Clone ID: 700892002_FLI.pep
GIDAGVEPKLNFKGYMVGNGVTDEQIDGNALVPFVHGMGLIPDELFEEVNRECNGNFYDPTSANCSSKLSKVDELVDEINIYNILEPCYHGTEAEKITESYIRMPSTFRKLGETERPFPVRKRMFGRAWPLRAPVRDGIVPTWPQLMNSKSAPPCTDDEVANSWLNNEAVRTAIHTAQKSVVSSWDLCTDRIYFDHDAGSMIKYHKNLTSKGYRALIFSGDHDMCVPYTGSQVWTRSVGYKIVDEWRPWSSNGQVAGYTQGYDKNLTFLTVKGSGHTVPEYKPREALDFYKRFLAGLPI

SEQ ID NO: 43061 - protein, 381 aa, Zea mays
  Clone ID: LIB143-032-F5_FLI.pep
SSPPMARRSAPLLRRLVSASSPPALQSLTDHVGVLARRTVTYMPRPGDGAPRAVTLIPGDGIGPLVTGAVRQVMEAMHAPVYFETYDVHGDMPTVPPAVIESIRRNKVCIKGGLATPVGGGVSSLNMQLRKELDLYASLVHCSNLPGLPTRHEGVDIVVIRENTEGEYSGLEHEVVPGVVESLKVITKFCSERIAKYAFEYAYLNNRKKVTAVHKANIMKLADGLFLESCREVASKYPGIQYNEMIVDNCSMQLVSKPEQFDVMVTPNLYGNLVANTAAGIVGGTGIMPGGNVGQDYAIFEQGASAGNVGNENLVEQKKANPVALLLSSAMMLRHLQFPSFADRLETAVKRVVAEGTYRTKDLGGSSTTQEVTDAVVANLD

SEQ ID NO: 43062 - protein, 603 aa, Zea mays
  Clone ID: LIB143-043-C1_FLI.pep
SGGKSEGGSLLFSVKTRAILLLLQRTRRSASKSVASCPPRCLRWALVVMARRALELAAVLLALAALAAVAAGGDIVHQDDEAPKIPGCSNDFVLVKVQTWINKKDKDEFVGVGARFGPKIESKEKHANWTNLLLADPSDCCTPPREKVAGDILLVERGNCKFTTKAKVAESAGASAIIIINDKHELYKMVCETNETNLDIGIHAVLLPKDAGSSLQRSLSSGEVLVELYSPDRPLVDTAEVFLWLMAVGTILCASYWSAWSAREADIEQEKLLKDGREVAPNFEPGGSSGMVDINMVSAILFVVIASCFLITLYKLMSHWFVELLVVIFCIGGVEGLQTCLVALLSMSRRFKPAAESYVKVPFFGAVSYLTLAVCPFCILFAVLWGVYRRLPYAWIGQDILGITLIVTVIQIVRIPNLKVGSALLGCAFLYDIFWVFISKMLFHESVMIVVARGDKTDEDGVPMLLKIPRMFDPWGGYSIIGFGDILLPGLLVAFALRYDWAAKKTLQSGYFLWSMVAYGSGNMSPNYIRCLEPYGWPWPAGSPLHRAFHNRHLLSTGHEERRAQKPVDKRTARESVHAHAPIPQGFACCGQLAVVDKANDLT

SEQ ID NO: 43063 - protein, 490 aa, Zea mays
  Clone ID: LIB143-061-G7_FLI.pep
PDSFAHKPPIPILPPTRPVPLPASVSPAPSPREISRSGDRARRAEGREVPCPPPMLFPKRINYVAPMLASAAILLLLLSGYFELPSISTPAPLLAGAARFPTALDSVGSRDRDPFTSLLEAFASWDAAVGCPRVRAKLAAAGLGLGPGLPLPSASASASANGTAEDPAAASVSGGAAWRGAARCEDLAARHVGVLVKGWTWIPDALDGVYTCRCGVSCVWSKSAAAVDRPDALLFEGATPPPQRMKGLPLRVYLDLEASRKPTGFEDIFVGYHASDDVQVTYAGKSFHTSRSYHISTEKRNDALIYWSSSRCLPHRDKLAKDFLSLVPHHSFGRCLNNVGGPDMALSMYPVCSTNDNGTPHWWDHLHCAMSHYKFVLAIENTKTESYVTEKLFYALEAGSVPIYFGAPNVWDFVPPNSIIDASKFSSLRKLASYVKTLANDPVAYAEYHAWRRCGALGNFGRAREMSLDTLPCRLCEVVSKRGGKGADAL

SEQ ID NO: 43064 - protein, 477 aa, Zea mays
  Clone ID: LIB148-025-D11_FLI.pep
RARAVRAALRPPSQWSVGSWRGRPAQQQPEYPDKADLEDVLRTVGTFPPIVFAGEARTLEERLAEAAVGRAFLLQGGDCAESFKEFNANNIRDTFRVLLQMSVVLMFGGQMPVVKVGRMAGQFAKPRSDGFEERDGLKLPSYRGDNINGDAFNGESRLPDPHRMIRAYSQSAATLNLLRAFATGGYAAMQRVAQWNLDFTENSEQGDRYMELAHRVDEALGFMSAAGLPLDHPIMTTAEFWTSHECLLLPYEQALTREDSTTGLYYDCSAHFLWVGERTRQLDGAHVEFLRGIANPLGIKVSDKMDPAELVRLIDILNPENRAGRITIITRMGPENMRVKLPHLIRAVRGAGQIVTWVTDPMHGNTMKAPCGLKTRSFDRILGEVRAFFDVHEQEGSHPGGVHLEMTGQNVTECIGGSRTVTFDDLGSRYHTHCDPRLNASQSLEMAFIIAERLRKRRMASSPLYTNQLGSIPSMGL

SEQ ID NO: 43065 - protein, 514 aa, Zea mays
  Clone ID: LIB189-009-B6_FLI.pep
TRGRLERVTSPPDFLPRPRSPGDRISGAATSQSPMALQTLNPYRHAAAVSPVPSPVPHRGHPPPHAVLHLPPRRRLAGGAARPLAVAAAVSGAVNEARRRGVPQEGGEDGRKDTDLATLGNLCVDVVLSVPQLPPAQQEERKAYMERLAASPPDQKFWEAGGNCNLAFAAARLGLNCSTLGHVGEEIYGKFLLDVLQAEGISVVGMLENTNAAACRQAYETLLCWVLVDPFQKHGFCSRADFSKEPAFSWIRKLPVDIRTAIHHSKILFCNGYAFDEFFPDVIASSIDCAICSGTAVFFDPGPRGKSLLHGNLDEQRALEHALRLSDVLLLTSDEAESLTNIRNPVQAGQELLKRGIRTKQVVIKMGSRGSIMITKNTISCAPAFKIDVVDTVGCGDSFTAAIAFGFLHDLPAVNTLTLANAVGAATATGCGAGRNVARLDKVLQLMREADLNEDITLWTELTEGNSLRIEVSILSGIARNGFSENIVAVPVTKVVSEVLPMFEAVPVRSAVQA

SEQ ID NO: 43066 - protein, 549 aa, Zea mays
  Clone ID: LIB143-015-H4_FLI.pep
NRITDFIKPTHGGGGKGMRIVERPDEFVDSVLSAQREAAASFGVNTLLIEKYITQPRHVEVQVFGDQHGNAIYLYERDCSLQRRHQKIIEEAPAPNVPAEFRSHIGGAAVSAAKAVGYYNAGTVEFIVDTLSGEFYFMEMNTRLQVEHPVTEMIVGQDLVEWQIRVANGERLPLSQEQVPLNGHAFEARIYAENVPRGFLPATGTLHHYRPVPSDPTVRVETGVEEGDTVSMHYDPMIAKLVVWGESRTAALVKLKKCLSTFQIAGLPTNVDFLQELASHSAFEKGLVDTHFIERYKDDLLSISTKSSKESHGVAELGAILAAACICKKEHITSKESLRANKSLSVWYNNPPFRMHHFARHPLDLELEENDGFSEKLLKLFITHKFDGSYFIETEDGTSGLDVKVDHKGDHDFRVDVSGLQTDVTLASYSKGNSKHIHVWHGNHHHHYRQTVRAEHAVEDSSQPSHASEGKSHPKGSVLAPMAGLVVKVLLEDGAQVDAGQPVMVMEAMKMEHVVKAPRAGYVSGLKVTAGQQVFDSSVLFTIKDSSAN

SEQ ID NO: 43067 - protein, 59 aa, Zea mays
  Clone ID: LIB143-028-G1_FLI.pep
TRKLQRCSGDGHKQRGADDREQEEQGGRPGSAANRPPGEDALGAHCTAQFVGPSSERDG

SEQ ID NO: 43068 - protein, 597 aa, Zea mays
  Clone ID: LIB143-054-G2_FLI.pep
PEATNTRSAPTPQPPETAPQQRMASDSTAAVTVDGSALAGRALAAAGTRHMFGVVGIPVTSLASRAAAAGVRFLAFRNEQSAGYAAAAYGFLTGSPGALLTVSGPGCVHGLAGLSHATANAWPLLMISGSCDQADAGRGDFQELDQIAATKPFAKLAVKATTIADIPRLVFQALAAAVSGRPGGCYLDIPSDVLHQTLPESEAAALIAAAAADSAASDPSPSMHKSLDEGIAKAADLLRCAERPLVVIGKGAAYARAEEAIRKLVDTTGIPFLPTPMGKGVVPDSHPLSATAARSLAIGQCDVALVIGARLNWLLHFGEPPKWSKDVKFILVDVSEEEIELRKPHVGIVGDAKRVTELINREIKDNPFCLARSHPWVEAITKKANDNVLKMEAQLAKDVVPFNFMTPLRIIRDAILAEGSPAPVVVSEGANTMDVGRAVLVQNEPRTRLDAGTWGTMGVGLGYCIAAAAAEPERLVVAVEGDSGFGFSAMEVETLVRYQLPVVVIVFNNNGVYGGDRRSPDEITGPYKDDPAPTSFVPAAGYHKMMEAFGGKGYLVETPDELKSALSESFRARKPAVINVIIDPYAGAESGRMQHKN

SEQ ID NO: 43069 - protein, 889 aa, Zea mays
  Clone ID: LIB3060-016-A3_FLI.pep
QHQRKEVYSYPTLAGASHTNSPSQVPPNGAKMMWQMPVPPVSTTYRKAIGEHNDTNQSCMKFLREGSVQSSPNGFLSSDAAPRTRQGTFDLQLPADHYIDDDDTSDNKPIDFLGLASDAKPQNDAELTLVSAERLGKFSDNSSSSGLRTTNNLGSRQVTNLNESNTGFFMGRANGSVSRGLPHTLENSWHQPILRSSTTTFNFSKEYSKEKHTNEGTSSNFFDTSAKLTHDDKPTINKGKQVSSITFLAPRYNDADPPKYFKAADGRPASYNQFLYQGQNSSAGWIARSPLEPSVINNFARVDRPHHSNLGTFTVPISIPQIDNPSIVSPMGSCTAEPRSSIVNNPALIPRFNGSSTVNSYASLSAVTQSIGTSIPKLKNVDNLDKRYPGFPLDSFSVSHSRHQVAISSNLEQKNSQKFEDSDQQSHGKGMKNFNLNETLSDCQEDGLVEQDGRCAASFQHGKDGGSVFGISWLKNKAVSADPTALEKAGKIFGHSFGTTMELKNAKDQNEPAVTIRNLSDSASTSLGCGIKKDGPSEDIATGTLLVCNKAQEDATCLPLSCQKHVPKDGQDADGVIKISGASIRNFIDLNDAVPNDDNSEESVVSHECQAEPSRNNHPKRAFVIDLEVPACEEDAAWDFDQECAQPKPDAHQEVDGRSDTSALAAAENIVALSRIIPTALEASDDMLQWFADLAVLNIKDLAEQAELQACTNDSSNDESDSFESLTLKLEETKIDEYWSRPLEPEITTDEQLISTAHLLTKPRRGQQRRRRQKRDFQKDILPGLSSLSRPEIIEDVQLLEGLVQASGGSWESSLTRRGRYGGRTRGRKPRKTVVTVIVEEEVEVSPPPKPVGTGDLEADDRGMVGWGRTTRRCRRARCPSGNNLAAAS

SEQ ID NO: 43070 - protein, 160 aa, Zea mays
  Clone ID: 700581727_FLI.pep
KTYYKTASLISNSCKAVAILAGHTAEVSVLAYEYGRNLGLAFQLIDDVLDFTGTSASLGKGSLSDIRHGIITAPMLYAMEEFPQLQEVVDRGFDNPANVEIALDYLQKSRGIEKTKELAREHADRAVKAIESLPDSDDEDVLTSRRALIDITERVITRTK

SEQ ID NO: 43071 - protein, 257 aa, Zea mays
  Clone ID: 700581771_FLI.pep
EKEFRVEVEAIGHVRHKNLVRLLGYCVEGVNRMLVYEFVNNGNLEQWLHEAIEPKVVHRDIKSSNILIDDEFNGKVSDFGLAKLLGSDKSHITTRVMGTFGYVAPEYANTGMLNEKSDVYSFGVLLLETVTGRNPVDYSRSSNEVNLVEWLKTMVANRRAEEVADPSLEARPSIRALKRALLVALRCVDPDSEKRPKMGQVVRMLESEEVPYREDRRNRRSRTGSMDIESIAEGSNSAEFGKKVERTGSSISDRSQP

SEQ ID NO: 43072 - protein, 278 aa, Zea mays
  Clone ID: 700582027_FLI.pep
QSGSTRSFVAECEALRRVRHRCLIKIVTCCSSIDHRGEEFKALVFEFMPNGSLDDWLHPASGAHPLNKTLSLAQRLDIAVDVLDALEYLHNQCQPPIIHCDLKPSNILLAEDMSARVGDFGISKILSDDTSKVLLNSISFTGLRGSIGYVPPEYGEGRSVSALGDVYSLGILLLEMFTGRRPTDDVFQGSLDLHRFAEAALPDRASEIADPSIWQHDEATAKDPADAAALRSRSEECLASAIRLGVSCSKQQPRERVAMRDAAVEMRAIRDAYLRVAS

SEQ ID NO: 43073 - protein, 124 aa, Zea mays
  Clone ID: 700582283_FLI.pep
QHKNVVRFIGACTKPPQFCIITEYMSGGSLYDFVHKQHNVLNLRTLLKFAVDVCRGMCYLHERGIIHRDLKTANLLMDKDHVVKVADFGVARFQDQGGVMTAETGTYRWMAPEVINHQPYDNKA

SEQ ID NO: 43074 - protein, 191 aa, Zea mays
  Clone ID: 700582460_FLI.pep
NIDAYSIYTPTCKKTSLHKRRLIRGRTPWLPRGYDPCTEKYSTKYYNLPEVQRALHANVTGIPYPWVTCSDPVYDFWKDSPRSMLPIYRELIAAGIRIWVFSGDADSVVPLTATRYSIDALFLPTITNWYPWYDDEEVGGWCQVYEGLTLVTVRGAGHEVPLHRPRQGLKLFEHFLRGEPMPRPVDSVQSF

SEQ ID NO: 43075 - protein, 117 aa, Zea mays
  Clone ID: 700583818_FLI.pep
WARGAMPGEDKRRSEEKNIGCRGATSLATQLYRPVFYQLYAKAIEAPSRIVPRCLPPVRASFHHRYKFVVANFPILVCVNFLQYVIDHVHGISSPVLHQGFLKLLGLDETVAILVEK

SEQ ID NO: 43076 - protein, 145 aa, Glycine max
  Clone ID: 700605255_FLI.pep
TGQSSEKTDVFGFGILLLELITGHKALDFGRAANQKGVMLDWVKKLHQDGRLSQMVDKDLKGNFDLIELEEMVQVALLCTQFNPSHRPKMSEVLKMLEGDGLAERWEASQRIETPRFRSCEPQRYSDLIEESSLIVEAMELSGPR

SEQ ID NO: 43077 - protein, 369 aa, Glycine max
  Clone ID: 700605169_FLI.pep
QTGSGTQSNMNANEVIANRAAEILGHKRGEKFVHPNDHVNRSQSSNDTFPTVMHIAAATEINSRLIPSLKTLHDTLNSKSVEFKDIVKIGRTHTQDATPLTLGQEFSGYTTQVKYGIDRVIDTLPRMYQLAQGGTAVGTGLNTKKGFDAKIAAAVAEETNLPFVTAENKFEALAAHDAFVETSGALNTVVASLMKIANDIRLLGSGPRCGLGELILPENEPRSSIMPGKVNPTQCEALTMVCAQVMGNHVAITVGGSNGHFELNVFKPMIANCLLHSLRLLGDSSASFEKNCLRGIQANRERISKLLHESLMLVTSLNPKIGYDKAATVAKTAHKEGTTLKEAALKLGVLCSEDFDKLVVPEKMLGPSD

SEQ ID NO: 43078 - protein, 177 aa, Glycine max
  Clone ID: 700681489_FLI.pep
IFELLSEALGLNPSYLKEMNCAEGLFIQGHYYPPCPEPELTLGTSKHTDSSFMTIVLQGQLGGLQVLHEKLWFNVPPVHGALVVNVGDILQLITNDNFVSVYHRVLSNHGGPRVSVASFFSNSHDPAKGASMVYSPIKELLSEENPAIYRDTTIGEIMAHHFAKGLDGNSALQPFRL

SEQ ID NO: 43079 - protein, 274 aa, Glycine max
  Clone ID: 700683750_FLI.pep
VEIVPVPCRSTDDFNLSITSIERTFNQAKMRGQKVRGIIINNPSNPAGKLLDRETLLDLLDFAREKNIHIISNEMFASSSYGNEEFVSMAEIMEAEDHDRDRVHVVFGLSNELSVPGLKVGVIYSYNDNVVAASSKLARFSTVSAPTQRLLISMLSDTSFVQNFIEVNRLRLRKMYNTFVAGLKQLGIECTRSSGGFCCWADMSRLIRSYSEKGELELWDRLLNVAKINVTPGSSCHCIEPGWFRFCFATSTEKAVSVVMERLRRIVEATNGHS

SEQ ID NO: 43080 - protein, 481 aa, Glycine max
  Clone ID: 700684286_FLI.pep
SSCGGGENNNNNDGGKQGVELSTAQRQELQMKKSKLVTMLDEVEQRYRQYHHQMQVVITSFEQAAGVGAAKSYTALALKTISKQFRCLKDAISSQIKTTSKTLGEDDCLGVKVEGSRLRYVDHQLRQQRALQQLGMIQHNAWRPQRGLPERAVSVLRAWLFEHFLHPYPKDSDKVMLAKQTGLTRSQVSNWFINARVRLWKPMVEEMYLEEVKQEPNNSSQDNTTKRSKESSKELWSEANATAQESGAMRLDHINILQSKAESFNNNNNNQTTSPTEISNNSHNSLQSAGFHLADMQSPNKPIRSTSEMQNSPGSILSVDMEMKPRHHGETNNNTIITREGNNNTTKFGIESHGGGGGGFGAFPNMEDIGRFHHHHHHVTDQQSLAPRFHGNGVSLTLGLPHSTENNNNLSLSGTTHQHGFLSQNMHLGMRSTTNNANNEFCGAINTTPPSNSHSGTSYESIDIIQNRKRFAAQLLRDFVA

SEQ ID NO: 43081 - protein, 378 aa, Glycine max
  Clone ID: 700684449_FLI.pep
HQQEVLEMEITNVSEYEAIAKQKLPKMVFDYYASGAEDQWTLQENRNAFSRILFRPRILIDVSKIDITTTVLGFKISMPIMLAPTAMQKMAHPEGEYATARAASAAGTIMTLSSWATSSVEEVASTGPGIRFFQLYVYKDRNVVAQLVRRAERAGFKAIALTVDTPRLGRREADIKNRFTLPPFLTLKNFEGLDLGKMDKADDSGLASYVAGQIDRTLSWKDVKWLQTITKLPILVKGVLTAEDTRIAVQSGAAGIIVSNHGARQLDYVPATISALEEVVKAAEGRVPVFLDGGVRRGTDVFKALALGASGIFIGRPVVFSLAAEGEAGVRNVLRMLREEFELTMALSGCTSLKDITRDHIVTDWDQPRTIPRALPRL

SEQ ID NO: 43082 - protein, 247 aa, Glycine max
  Clone ID: 700685010_FLI.pep
LDKQPMKIFKEESARFYAAEVVIGLEYLHCLGIIYRDLKPENILLQKDGHVVLADFDLSYMTSCKPQVVKQAIPGKRRSRSEPPPTFVAEPVTQSNSFVGTEEYIAPEIITGAGHTSGIDWWTLGILLYEMLYGRTPFRGKNRQKTFSNILHKDLTFPSSIPASLAARQLINALLQRDPTSRIGSTTGANEIKQHPFFRGINWPLIRNMTPPPLDVPLKLIGNDPVAKDIKWEDDGVLVSSIDMDIF

SEQ ID NO: 43083 - protein, 249 aa, Glycine max
  Clone ID: 700684751_FLI.pep
ERMREVANLILSFPEERPIIVLSAMGKTTNMLLLAGEKAVSCGVTNADSIDELNIIKDLHLRTVEQLGVDRNVIEKHLEELEQLLKGIAMMKELTPRTQDYLVSFGECMSTRIFAAYLNTLGVKARQYDAFEMGIITTDDFTNADILEATYPAVAKRLHSDWVSDPAIPIVTGFLGKARKSCAVTTLGRGGSDLTATTIGKALGLPEIQVWKDVDGVLTCDPNICPQAKPVPYLTFDEAAELAYFGAQC

SEQ ID NO: 43084 - protein, 211 aa, Glycine max
  Clone ID: 700685541_FLI.pep
MQDPTAFQGVKPPQFPEQEQLKCPRCDSNNTKFCYYNNYNLSQPRHFCKNCRRYWTKGGALRNIPVGGGSRKTTKRSSSTLSKRSSAPSSSSAVSDPDPTRICTNPVDQDQRVLNIGGGSFSSLLASSGHFGTLLEGLNPSGSGLKMGEFVEGVSSDPGLNLDSGLNPDLQVQSNENSESFLGLQNGDSSCWNGTHGWSDLAIYTPGPSFQ

SEQ ID NO: 43085 - protein, 440 aa, Glycine max
  Clone ID: 700685655_FLI.pep
QRLTTAKQNQSEMSDQQEIYAAFPNVPQAPPDSIFQLTARYVADKHPNKINLGVGAYRTDEGKPWVLPTVKKASRQLEENPNIDHEYLPITGLPQFTKAAQGLIFGKQNKAVDEGRVISVQTLSGTGANHLAALFFAKFYEFPTDKEIYISNPTWANHNAIISNVGVTPVSYRYYNKETIALDFDGYLEDLQKAPERSVILVHGCAHNPTGVDPTAEQWDKILDVFLQKKHYAFFDSAYQGFATGDLDRDAGSMRKFAEKRVPMLVCQSFAKNAGLYNERVGALHVVAADTKEAERVKSQLSVLQRSEISNPPAYGAHIVSMILTNPELFDSWKNDITTMSGRIIEMRDALFDLLNDKFKTPPPPGRKDWGHIKEQIGMFSFTGLNPDQTKKLVEEHSVYLTGNGRISMAGLNTHNVETFAKAVDEVVRSTSGTVPGSAL

SEQ ID NO: 43086 - protein, 160 aa, Glycine max
  Clone ID: 700685575_FLI.pep
GTSDEVVDCSHGKQLWELCKEKYEPLWLKGGNHCDLELFPEYIRHLKKFITTVEKSPSQRYSFRRSTDQFEQPRKSTDIFEVSRKSTDRREKPRKSTDKPEKLKNLSNNSDMLEKLRMTFDHKERSRRSVDCHEKSRKSIDHQLEKARKSVDRLDRIRSG

SEQ ID NO: 43087 - protein, 261 aa, Glycine max
  Clone ID: 700685906_FLI.pep
SESAMASLLNMVSVPPRISPTSHTRIASLQARPVLPPFSVSFSRRRLSIRATETDTNEVQSQAPGAAPSKDGSSFNQLLGIKGAAQETNKWKIRLQLTKPVTWPPLVWGVVCGAAASGNFHWNFEDVAKSIVCMMMSGPFLTGYTQTLNDWYDREIDAINEPYRPIPSGAISENEVITQIWVLLLGGLSLAGILDIWAGHDFPIVFYLAVGGALLSYIYSAPPLKLKQNGWIGNFALGASYISLPWCGGQVRLCLELLHQI

SEQ ID NO: 43088 - protein, 215 aa, Glycine max
  Clone ID: 700686108_FLI.pep
EVGWPTEGDKNANAGNALRFYNGLLPRLAANRGTPGRPGYIEVYLFGLIDEDAKSIAPGNFERHWGIFRYDGQPKFPMDLSGQNQNKFLIGAQNVKYLAPRWCMFNPDAKDLSKLPDNINYACTFGDCTALGYGSSCNNLDANGNASYAFNMYFQVQNQNPMACNFQGLAKLTTDNISTPTCNFIVQIVNSSASSLMMPSLVAILFVSLFLILFS

SEQ ID NO: 43089 - protein, 118 aa, Glycine max
  Clone ID: 700686166_FLI.pep
MSPSPTNLLQQFQSRGLNFIVVQSLPTFQFKKNEREQDKTISVECAICLGEFEEGEWLKRLPHCSHSFHVSCIGTWFQSHSNCPLCRSFVHHHILQCSIASHTLLQPLRREDFERVQR

SEQ ID NO: 43090 - protein, 138 aa, Glycine max
  Clone ID: 700686070_FLI.pep
AGENALARYDREAYNQILLNARPNGVNQFGPPTLKMYGVTYLRLSDKLMQQTNFNIFKAFVRKMHANLEYCPDPEKYYHFTVPMERSKPKIPLEVLLEATKPVEPYPWYKETDMSLDVTGFLDYIVAIIVRIFKLKLN

SEQ ID NO: 43091 - protein, 196 aa, Glycine max
  Clone ID: 700686588_FLI.pep
QFYGLFSAYAPQISGRIMLPLNMTSDDEPIYVNAKQYHGIIRRRQSRAKAVLDHKLTKRRKPYMHESRHLHAMRRPRGCGGRFLNTKNSVDGNGKIGNEVHKTVGEQLQSSGSQSSEFLQSEVGTFNSSKETNGSSPNISGSEVTSMYSRGGLDSFSLNHLGSAVHSFADMIDGGRGMIIPTKWVAAAGNCCNLKV

SEQ ID NO: 43092 - protein, 410 aa, Glycine max
  Clone ID: 700698367_FLI.pep
QPMEAAATATATVLAPPSAFLGRPSVLAFRSNLRFSTKLSTSVAISKHGHGRHCVGTRRGFVVRAASFTPESSEPSSKIAPLKLESPIGQFLSQILISHPHLVPAAVEQQLEQFQTDLDGDKQKKEPSASGTDLVLYRRIAEVKAKERKTALEEILYALVVQKFMDASISLIPSLTPNHSGQVDSWPSEDGKLEELHSPEAYEMIQNHLALILGNRLGDSTSVAQISKIRVGQVYAASIMYGYFLKRVVQRFQLERTMKILPNATEENSIQQTVVDDSRIRGGEGHSHVMSHPEVSTLPGGGISSGGFGYGSKVSRLRTYVMSFDSETLQRYATIRSKEALSIIEKHTEALFGRPEIVVTPQGVIDSSTDDNIKISFGGLKRLVLEAITFGSFLWDVESYVDSRYHFVLN

SEQ ID NO: 43093 - protein, 194 aa, Glycine max
  Clone ID: 700698386_FLI.pep
AKVADFGLSRLAPVPDTEGNVPGHVSTVVKGTPGYLDPEYFLTRNLTDKSDVYSLGVVLLELLTGRPPIFHGENIIRQVNMAYNSGGISLVVDKRIESYPTECAEKFLALALKCCKDTPDERPKMSEVARELEYICSMLPESDTKGHDYVITSDSSGTIFSSEPSSSVIKTPFISGDVSGSDLVSGSIPTIKPR

SEQ ID NO: 43094 - protein, 106 aa, Glycine max
  Clone ID: 700725695_FLI.pep
PFPYFFLQFSCIQFWSVICCFGERVDMDERYETLKELGSGNFGVARLAKDKETGELVAIKYIERGKKIDANVQREIVNHRSLRHPNIIRFKELSKSKTVQFIGCYC

SEQ ID NO: 43095 - protein, 157 aa, Glycine max
  Clone ID: 700726289_FLI.pep
RNCGKPSQTLYHVPRSWLKPSGNILVLFEEKGGDPTQISFVTKQTESLCAHVSDSHPPPVDLWNSDTESGRKVGPVLSLTCPHDNQVISSIKFASYGTPLGTCGNFYHGRCSSNKALSIVQKACIGSSSCSVGVSSETFGNPCRGVAKSLAVEATCA

SEQ ID NO: 43096 - protein, 304 aa, Glycine max
  Clone ID: 700726770_FLI.pep
FLKWVWVVFLRPPKNLKEYGSWAIITGSTDGIGKAMAFELASKGLNLLLVGRNPLKLEATSKEIRDRLDVEVKFVVIDMQKVEGVEIVKKVEEAIDGLDIGLLVNGAGLAYPYARFFHEVDLELMDAIIKVNLEGATWITKAVLPTMIKKKKGAIVNIGSGSTVVLPSYPLVTLYAATKAYLAMFSRCISLEYKHQGIDIQCQVPLFVSTKMTKMKTSIFVPTPAMYSKTCTRWIGYEKLVEPYFLHSVQGFLIRAIPDSLVDSYMLRYFLYWRGRGLSKDSNIKTSAASNSEEANIINQDHTN

SEQ ID NO: 43097 - protein, 147 aa, Glycine max
  Clone ID: 700727637_FLI.pep
GMKHAARIMIPKKKGSIISLCSVASAIGGLGPHAYTGSKYAVLGLTKNVAAELGKHAIRVNCVSPYGVATGLALAHLPEDERTDDALVSFRDFTGRMANLQGVELTTHDVANAVLFLASDDAKYISGENLMVDGGFTSANHSLQVFR

SEQ ID NO: 43098 - protein, 215 aa, Glycine max
  Clone ID: 700728002_FLI.pep
QGVTFCKDEYAIVGRASLESDVFSFGVVLLELISGRHPIHKSTGKEESLVIWATPRLQDSRRVIRELVDPQLKGNFPEEEVQIMAYLAKECLLLDPDTRPTMSEVVQILLSISPGKSRRRRNIPASLFQEPEDAEKQRQSTPSKFPTHSSLPIYNDHNLSVENKNKAEDAVSAENMESLILLTSKSDGSRASEEEIVDLTEPRFESFCITNGNAP

SEQ ID NO: 43099 - protein, 338 aa, Glycine max
  Clone ID: 700728123_FLI.pep
EKFKRMCEKSMIKKRYMHLTEEFLKENPNMCEYMAPSLDVRQDVVVMEVPKLGKQAATKAIKEWGQPKSKITHLVFCTTSGVDMPGADYQLTKLLGLRPSVKRLMMYQQGCFAGGTVLRLAKDLAENNKGARVLVVCSEITAVTFRGPSDTHLDSLVGQALFGDGAAALIIGSDPDPAVERPIFEMISAAQTILPDSDGAIDGHLREVGLTFHLLKDVPGIISKNIEKSLVEAFEPIGISDWNSIFWIAHPGGPAILDQVEEKLRLKPEKLQSTRHVLSEYGNMSSACVLFILDEMRKKSKEEGKSTTGEGLEWGVLFGFGPGLTVETVVLHSVPLEG

SEQ ID NO: 43100 - protein, 359 aa, Glycine max
  Clone ID: 700729173_FLI.pep
DASSAKKFEATVTRLHSSTQGLKEFINDVNTLASVQHPNLCKLLGFHARDGSEPRMLVYERLCHGSLDRQLFGRSDSPSIDWNSRMKIAICAAQGLTFLHEEGPFQAMYNEFSAANIQIEKDFNAKLSGYGCAGRIPEEEISSSSCAVGNLSVETLEKGILTPKSNVWSFGIVLLELLTGRKNLDSHHPKEERNLVKWSRPFLADDFRLSLIMDPQLKGHFPPKAARTMADIAQRCLQKEPSERPTMRTIVENLKTVQDMKYSCWFPLQEPAKEMSRSPSLNGIICHVPPRLSFSPSVVARPSVSSPRWSTRSGGVPTLHLPLRACSSTFSWRSLVDRKAGSHHPQGVRELVLKDMDCL

SEQ ID NO: 43101 - protein, 289 aa, Glycine max
  Clone ID: 700729080_FLI.pep
FLDKAAILDENCSKEENRENPWIVSTVTQVEEVKMVIKLLPIWSTCILFWTIYSQMNTFTIEQATFMNRKVGSLVVPAGSLSAFLIITILLFTSLNEKLTVPLARKLTHNAQGLTSLQRVGIGLVFSSVAMAVAAIVEKERRANAVKNNTISAFWLVPQFFLVGAGEAFAYVGQLEFFIREAPERMKSMSTGLFLSTLSMGYFVSSLLVAIVDKASKKRWLRSNLNKGRLDYFYWLLAVLGLLNFILFLVLAMRHQYKVQHNIKPNDDAEKELVSANDVKVGVDGKEEA

SEQ ID NO: 43102 - protein, 399 aa, Glycine max
  Clone ID: 700729819_FLI.pep
SGLRKRAYDPELFFKVNGKLYQRLGKIGSGGSSEVHKVISSDCTIYALKRIKLKGRDYATAYGFCQEIEYLNRLKGKNNIIQLIDYEVTDKALFEGVINGSFSNKDGRVKDDGYIYMVLEYGEIDLAHMLSQKWKELDGSNQTIDENWLRFYWQQILQAVNTIHEERIVHSDLKPANFLLVKGSLKLIDFGIAKAIMSDTTNIQRDSQVGTLSYMSPEAFMCNESDASGNIIKCGRPSDIWSLGCILYQMVYGRTPFADYKTFWAKFKVITDPNHEIMYAPVSNPWLLDLMRRCLAWDRNERWRIPQLLQHPFLVPPVPCHSSFYQEQTFKLLQLISEACINDPESSQLCCQLQQVLGNPIKSTSIHSLNSLDQQHKLLSRISELCILLQERLTKTDKL

SEQ ID NO: 43103 - protein, 320 aa, Glycine max
  Clone ID: 700729858_FLI.pep
YMKAKPSYHHHHRRTTTEEKRKRKMLEVKRIGVVGSGQMGSGIAQVAAMHGIDVWLHDLDPQALSKASSSISSSINRFVSKNHISQVAGADALKRLRLTTDLEDLQLADLIIEAIVESEDVKKSLFAQLDRIAKSSAILASNTSSISVTRLATSTSRPRQVIGMHFMNPPPVMKLIEIVRGADTSEETFVATKALSERLGKVVITSHDYSGFIVNRILMPMINEAFFALYTGVATKEDIDTGMKLGTNHPMGPLELADFIGLDVCLSIMRVLHAGLGDNKYAPCPLLVQYVDAGRLGRKRGIGVYEYSKDPRSTKSSSRL

SEQ ID NO: 43104 - protein, 499 aa, Glycine max
  Clone ID: 700730174_FLI.pep
KFPQTPPFRIIAVALEPQQDFPSGNSPQRLLKELAERKKATSPKKGPPRRFILRPPIDDNKLAERFLNSPQLSLKSFPLLSSCLPSSRLNNADKLWIDEYLLEAKQALGYSLEPSETLGDDNDNPAKQFDTLLYLAFQHPSCERTKARHVRSGHSRLSFLGQYVLELALTEFFLQRYPRESPGPMRERVFGLIGKRNLPKWIKAASLHNLVFTFDDMDKIRRTEKEGPVKSVFWALFGAIYLCFGMPEVYRVLFEVFGMDPDAEDCQPKLRRQLEDVDFVSAEFEGKLSWQDIVAYKPPADALFEHPRLFRACVPPGMHRFRGNIWDYDTRPHVMKTLGYPLEMADRIPEITEARNIELGLGLQLCFMHPSKYKFEHPRFCYERLEYVGQKIQDLVMAERLLMKHLDAPGLWLQERHRHLLMNKYCGRYLRAKHLHRVIIFDDKVQDTYEHNRRKRNPATTAVQQALHGLSYLVYGKRDVRRLMFEVFDFEQIQPKEVV

SEQ ID NO: 43105 - protein, 173 aa, Glycine max
  Clone ID: 700731911_FLI.pep
QKCNYGAPEDNVATKEALVLELSSQQEYLRLKARYEALQRSQRNLMGEDLGPLSSKELESLERQLDSSLKQIRSIRTQFMLDQLSDLQRKEHFLGESNRDLRQRLEEFQINPLQLNPSAEDMGYGRHPGQPQGHALFQPLECEPTLQIGYHPDPVSVVTEGPSMNNYMAGWLP

SEQ ID NO: 43106 - protein, 135 aa, Glycine max
  Clone ID: 700732237_FLI.pep
AISLTYIASERIIPGYGGGMSSAKAALESDTRVLAFEAGRKKRIRVNTISAGPLGSRAAKAIGFIDMMIDYSFTNAPLQKELHAEEVGNTAAFLSSPLASAITGAVIYVDNGLNAMGVGVDSPIFKELDIPKEHH

SEQ ID NO: 43107 - protein, 160 aa, Glycine max
  Clone ID: 700732754_FLI.pep
LQDPMATLHQNTRTLRVNEKCDIYSFGVVLLELVTGRPPIDPEYGESDLVKWVSSMLEHEGLDHVIDPTLDSKYREEISKVLSVGLHCTSSIPITRPTMRNVVKMLQEVTTIPKCRSVNDGNVPCFHEGASHNISEMKCSLSNNVLKVNILDSLTFSIAL

SEQ ID NO: 43108 - protein, 241 aa, Glycine max
  Clone ID: 700733495_FLI.pep
GEFPYTANEGPVNLMLQILDDPSPSPLKNKFSPEFCSFVDACLQKDPDTRPTAEQLLSHPFITKHDDAKVDLAGFVRSVFDPTQRLKDLADMLTIHYYLLFDGPDDLWQHTKNLYSESSIFSFSGKQHCGPSNIFTSLSSIRTTLVGDWPPEKLVHVVERLQCRAHGEDGVAIRVSGSFIIGNQFLICGDGIQVEGLPNFKDLGIDIPSKRMGIFHEQFIVEPKSLIGCYTIVKQELYINQ

SEQ ID NO: 43109 - protein, 257 aa, Glycine max
  Clone ID: 700734653_FLI.pep
QVTVQNVRILAPHDSPNTDGIDPDSSDNVCIEDCYISTGDDLIAIKSGWDEYGIAYGRPSTNIIIHRLVGKTQTSGIAIGSEMSGGVSEVHAEDIQFYDSYNGIRIKTSPGRGGYVRNIYVSNVSLANVDIAIWFTGSYGEHPDDAYDPNALPVIEKVTIKDVVGENIKTAGLIEGIEGDNFVNICLSNIILNVTSNYPWNCSYVKGYSDLVQPEACEPLKERIFPDHCSDCYYLTNQIQSSNSQNRAGQTSGDIRG

SEQ ID NO: 43110 - protein, 260 aa, Glycine max
  Clone ID: 700734688_FLI.pep
FAGHCGDWNPCSILEPQIQYCQQKGVKVFLSLGGAKGTYSLCSPEDAKEVANYLYQNFLSGKPGPLGSVTLEGIDFDIELGSNLYWGDLAKELDALRHQNDHYFYLSAAPQCFMPDYHLDNAIKTGLFDHVNVQFYNNPPCQYSPGNTQLLFNSWDDWTSNVLPNNSVFFGLPASPDAAPSGGYIPPQVLISEVLPYVKQASNYGGVMLWDRYHDVLNYHSDQIKDYVPKYAMRFVTAVSDAIYESVSAATHRILQKKPY

SEQ ID NO: 43111 - protein, 180 aa, Glycine max
  Clone ID: 700735202_FLI.pep
QVIAQYYQLIRLGYEGYKMVMENCNDNMAVLKEGLEKTGRFEIISKDIGVPLVAFTLKDHTHFNEFQISDMLRRYGWIVPAYTMPPDAQHVTVLRVVIREDFSRTLAERLVIDVTKVVHELDLLPARVISTNTIMVTGEAGEENDEKVLFAKKSEIETQREITKAWKKFVMDRKKMNGVC

SEQ ID NO: 43112 - protein, 125 aa, Glycine max
  Clone ID: 700897170_FLI.pep
HKGIPFPKDQPMGVYSSLWNADDWATQGGRVKTDWSHAPFIATYKNFEINACECPVSVAAMDNAKKCTSSEGNKYWWDEPNLAELNLHQSHQLMWVRARHIFYDYCTDTARFPVTPAECVHHRHT

SEQ ID NO: 43113 - protein, 198 aa, Glycine max
  Clone ID: 700897731_FLI.pep
DYLDLYLIHWPVSAKNGKLTKPDIPSTWRAMEALYNSGKAQAIGVSNFSVKKLQDLLDVASVPPAVNQVELHPSLQQPELHAFCKSKGVHLSGYSPLGKGYSESNILKNPFLHTTAEKLGKTAAQIALRWGLQMGHSVLPKSTNDARLKENFDLFDWSIPADLLANFSDIKQERIVTGDGFFSKTSPGYKTIEELWDE

SEQ ID NO: 43114 - protein, 207 aa, Glycine max
  Clone ID: 700897784_FLI.pep
FYMSSDGPNHNEFDFEFLGNTTGEPYSVQTNVYVNGVGNREQRLNLWFDPTKDFHSYSIFWNQRQVVFLVDETPIRVHTNMEHKGIPFPKDQPMGVYSSLWNADDWATQGGRVKTDWSHAPFIATYKNFEINACECPVSVAAMDNAKKCTSSEGNKYWWDEPNLAELNLHQSHQLMWVRARHIFYDYCTDTARFPVTPAECVHHRHT

SEQ ID NO: 43115 - protein, 183 aa, Glycine max
  Clone ID: 700898257_FLI.pep
DDSLHRYKVFINPSISDVLCTATAEALAMGKFVVCADHPSNEFFRSFPNCLTYRTSEDFVTKVKEALENEPYPLTPEQRYQLSWEAATQRFMEYSELDGILNKENNGEKSRVDKGKLIAKSASMPNLTELVDGGLAFAHYCLTGNEFLRLCTGAIPGTRDYDKQHCKDLHLLPPQVENPIYGW

SEQ ID NO: 43116 - protein, 84 aa, Glycine max
  Clone ID: 700898745_FLI.pep
FSISSSGSKTRLGYPYVCHLLQRPTEPPRDRIAGVSRFCRVLPQEGVRGEVDGGSALDPPVCVQRPGNLLSGLTRFFFTWIGCI

SEQ ID NO: 43117 - protein, 128 aa, Glycine max
  Clone ID: 700898650_FLI.pep
VFTLAEVSQHNNAKDCWLVIHGKVYNVTKFLEDHPGGDEVLLSSTGKDATNDFEDIGHSTSAVAMMDEFYVGDIDTSTIPSKVKYTPPKQPHYNQDKTPEFIIRILQFLVPLFILGLAVGIRFYTKST

SEQ ID NO: 43118 - protein, 197 aa, Glycine max
  Clone ID: 700898558_FLI.pep
FAEENGLKGDPRLQAISQAIRVVPHFPKHGIMFQDITTLLLDHKAFKDTVDIFVDRYRDMHISVVAGIEARGFMFGPSIALGIGAKFVPLRKPRKLPGEVISEKYALEYGTDCLELHVGAAQPGERAIIIDDLVATGGTLSAGVKLLERVGAEVVECACVIGVPDVKGQCRSIGKPLYVLVEPRKADKCQAQADKCY

SEQ ID NO: 43119 - protein, 161 aa, Glycine max
  Clone ID: 700899609_FLI.pep
MDGRLLTARPAPKAADLGYVGEVARVDPAVLRSLIDTSHIPVVTSVAADESGQPYNINADTVAGELAASLGAEKLILLTDVAGILEDRNDPDSLVKKIDIKGVKKMMEDGKVGGGMIPKVNCCVRSLAQGVITASIIDGRVPHSLLLEILTDEGAGTMITG

SEQ ID NO: 43120 - protein, 78 aa, Glycine max
  Clone ID: 700899352_FLI.pep
LYSNFIFLIFTLCRNGANVKGYYVWSLFDNFEWSSGYTSRFGMIFVDYKNGLKRYQKLSAQWFKNFLKKERRLYSSSK

SEQ ID NO: 43121 - protein, 304 aa, Glycine max
  Clone ID: 700899734_FLI.pep
IAGGFAGALSKTTVAPLERVKILWQTRTPGFHSLGVYQSMNKLLKHEGFLGLYKGNGASVIRIVPYAALHFMTYERYKSWILNNYPALGTGPFIDLLAGSAAGGTSVLCTYPLDLARTKLAYQVADTRGGSIKDGMKGVQPAHNGIKGVLTSVYKEGGVRGLYRGAGPTLTGILPYAGLKFYMYEKLKTHVPEEHQRSIMMRLSCGALAGLFGQTLTYPLDVVKRQMQVGSLQNAAHEDARYKSTIDALRMIVRNQGWRQLFHGVSINYIRIVPSAAISFTTYDMMKSWLGIPPQQKSRSVSAA

SEQ ID NO: 43122 - protein, 322 aa, Glycine max
  Clone ID: 700899773_FLI.pep
MAITCGNTFVLKPSEKDPGASVMLAELALEAGLPEGVLNIVHGTHDIVNAICDDDDIKAISFVGSNVAGMHIYSRAAAKGKRVQSNMGAKNHAIVMADANVDATLNALVAAGFGAAGQRCMALSTVVFVGGSKPWEDKLLEHAKALKVNAGTEPDTDLGPVISKQAKERIHRLVQSGVESGARLLLDGRNIVVPGYESGNFIGPTILSDINANMEADSLEEAINIINSNKYGNGASIFTTSGVAARKFQTEIEAGQVGINVPIPVPLPFFSFTGNKASFAGDLNFYGKAGVNFYTQIKTITQQWKDSTGGSKINLAMPTSQK

SEQ ID NO: 43123 - protein, 245 aa, Glycine max
  Clone ID: 700900078_FLI.pep
DFERLVHLWTLDSAERDAFLANEATKKWTSSNQVLVEIACTRSSEQLFAARKAYHVLYKKSLEEDVAHHTTGDFRKLILPLVSSYRYEGDEVNLTLAKTEAKLLHEKISNKAYNDDDFIRILATRSRAQINATLNHYKDAFGQDINKDLKADPKDEFLSLLRATVKCLIRPEKYFEKVVRLAINKRGTDEGALTRVVATRAEVDLKNIADEYQRRSSVPLERAIVKDTTGDYEKMLVALLGHDDA

SEQ ID NO: 43124 - protein, 95 aa, Glycine max
  Clone ID: 700900218_FLI.pep
AVTAVPPPGTEMAQLVCGGCHTLLMYIRGATSVQCSCCHTVNLALEANQVAHVNCGNCRMLLAYQYGARSVKCAVCNFVTSVGATASTTEQKFST

SEQ ID NO: 43125 - protein, 150 aa, Glycine max
  Clone ID: 700900473_FLI.pep
LWLGTFDTAEEAALAYDKAAYRLRGDLARLNFPNLKGSCPGEEYKPMQAAVDAKLDAICANLAEMQKQGKNEKGARSGKKSKQGPNLEAKPEPEASGSGAAALSPESEGSADSSALSDLTFDVTEPQWEDASAHFNLQKFPSYEIDWDSL

SEQ ID NO: 43126 - protein, 190 aa, Glycine max
  Clone ID: 700901165_FLI.pep
ENPNAKLIITGHSLGGALAILYPTIVFLHDEKLLMERLEGIYTFGQPRVGDEAYAQYMRQKLRENSIRYCRFVYCNDIVPRLPYDNDLLFKHFGICLFFNRRYELRILEEEPNKNYFSPWCVIPMMFNAVLELIRSFTIAFKNGPHYREGWFLFGFRLFGLLIPGLPAHGPQDYINSTLLGSIEKHFKAD

SEQ ID NO: 43127 - protein, 235 aa, Glycine max
  Clone ID: 700901558_FLI.pep
ERIEGVEEQPSSLLGLNHLSTSQISQIQAQAQAQNSLSLNFLGPKPVPMKHVGGPAKPTKLYRGVRQRHWGKWVAEIRLPKNRTRLWLGTFDTAEEAALAYDKAAYRLRGDLARLNFPNLKGSCPGEEYKPMQAAVDAKLDAICANLAEMQKQGKNEKGARSGKKSKQGPNLEAKPEPEASGSGAAALSPESEGSADSSALSDLTFDVTEPQWEDASAHFNLQKFPSYEIDWDSL

SEQ ID NO: 43128 - protein, 191 aa, Glycine max
  Clone ID: 700901566_FLI.pep
MDQHQSLRSSLESFATRMFPLAESLAEVLAYKLNTKSNYFRENCLPKSSYIRLNRYPPCPISSKVHGLLPHSDTSFLTIVHQDQVGGLQLMKDGKWVGVKPNPQALVVNIGDFFQAFSNGVYKSIKHRVVAAEKVERFSMAFFYCPSEDALIESHIKPATYRKFTSREFRQQTEKDVKQTGDKEGLSRFLL

SEQ ID NO: 43129 - protein, 111 aa, Glycine max
  Clone ID: 700901917_FLI.pep
WDKFDTLFQGLFIGVFIQVLCSYSTLPLYAIVTQMGTHYKRAIFNEHLQQNIVGWAQKAKKRKGLKADGNPGQGSSQESANTGIQLGSIFKKASAPGGSSSATKADGTNSV

SEQ ID NO: 43130 - protein, 290 aa, Glycine max
  Clone ID: 700902119_FLI.pep
RLIVWNALTRQKIHAIKLPCAWVMTCAFSPTGQSVACGGLDSVCSIFNLNSPTDKDGNLPVSRMLSGHKGYVSSCQYVPDEDTHLITGSGDQTCVLWDITTGLKTSIFGGEFQSGHTADVLSISINGSNSRMFVSGSCDATARLWDTRVASRAVRTFHGHEGDVNAVKFFPDGNRFGTGSDDGTCRLFDIRTGHQLQVYYQQHSDNDITPVTSIAFFASGRLLFAGYTNGDCYVWDTLLAKVVLNIGSLQDSHEDRISCLGLSADGSALCTGSWDTNLKIWAFGGHRRTT

SEQ ID NO: 43131 - protein, 104 aa, Glycine max
  Clone ID: 700902348_FLI.pep
SELPISARVNVTGVNGRRKRTVVMTSRGGQAGGGPAMPTRGAGWGRRGGPRSGSGRGGAGGRGRGRGRGGAGGRGRGRKDAVEKSAEELDKELETYHAEAMNIS

SEQ ID NO: 43132 - protein, 279 aa, Glycine max
  Clone ID: 700902268_FLI.pep
VTLHWLLASGMGRQPCCDKLGVKKGPWTAEEDKKLINFILSNGQCCWRAVPKLAGLRRCGKSCRLRWTNYLRPDLKRGLLTQAEEQLVIDLHARLGNRWSKIAARLPGRTDNEIKNHWNTHIKKKLLKMGIDPVTHEPLNKQVSSKDSSSPAEHFSQVNNINIHQVEQNDGVLNSEENSTSSPAENSSGEESLLVDSICSDVSLINSMWLDETPLMDTLWDNTPKVENANNNMGLPIGEDNCAWLLDCQDFGIHDFGFNCFSEVETNVLQAIGMDRKGL

SEQ ID NO: 43133 - protein, 408 aa, Glycine max
  Clone ID: 700903277_FLI.pep
IFKRPIFGKPIKLDINKGMERAEQIGGGKAVATVLAIGTANPPNFILQEDYPDFYFRVTNSDHLHRLKQKFKRICENSKIEKRHIVHTEEYLKQNSDSGTYDGLPLETRQNVPTEQVIKLGMEAASKAIKEWGEPLSEITHLIFYTTSCFGSVPGPDHYLSKQLGLRSTVNRLMLFSHGCHAGGTILRVAKDIAENNPGSRVLAVCSETMFASFRAPSESNVEVLVGQALFGDGAAAVIIGADPKHSIEHPLFELVLASQTTVPDTENAIKGSQQENRLVYYLDKDIPNIVTNNVKKCLVDELGEVGFVDEIDWNKFFYAIHPGGAVIVSGVEEKLGLEKEKLSATWHVLSQHGNMWSPTVIFILDEMRNRSKTEGKSTTGEGLEWGILLGFGPGVAMETVLLRSYPC

SEQ ID NO: 43134 - protein, 175 aa, Glycine max
  Clone ID: 700904815_FLI.pep
DITGAIKNSNGLDIPSLLEHSKVHRGVKGFNGSDPIDPNSILVEDCDVLVPAALGGVINRENANEIKAKFIVEAANHPTDPEADEILKKKGVVILPDIFANSGGVTVSYFEWVQNIQGFMWDEEKVNNELKTYMTKGFIDVKEMCKTHECDLRMGAFTLAVNRVARATVLRGWEA

SEQ ID NO: 43135 - protein, 60 aa, Glycine max
  Clone ID: 700905160_FLI.pep
NEATRGISSHMTKSQAMKSIEGKKNQTDKVNHQPDLGSKATISYDSWRPATSNSYPFYGF

SEQ ID NO: 43136 - protein, 290 aa, Glycine max
  Clone ID: 700905073_FLI.pep
KHMLAKQTGLTRSQVSNWFINARVRLWKPMVEEMYLEEMKEHELNGSEEKSSKSGEDPATKTTSPQEKRTSSEIESKSFNSKQDVSKQSQNTPILPTSPPSISPIGGSVKNQSGFSFMGSSELDGITQGSPKKPRNHEILHSPNRVPSINMDVKANEGNNEQQLSMDHERQNNRDSYSFMGNQTNFISGFGQYPIEEIGRFDAEQFTPRFSGKNGVSLTLGLPHCDTLSGTHQSFLPNQNIQLGRGLDIGEPNQFGALNNSNSHNSAAFESINMQNPKRFAAQLLPDFVA

SEQ ID NO: 43137 - protein, 533 aa, Glycine max
  Clone ID: 700905086_FLI.pep
SGCNPLPPEIWLLPKYAPIHPGKMLCYCRLVYMPMSYLFGKRFVGPITGLIISLREEMYNQPYDQIDWNNARSTVAKEDLYYPHPLIQDMLWASLHHVAEPLLNCWPFSMLREKALEVAIDHIRYEDENSGYLCIGSVEKVLCLIARWVEDPNSEAYKLHLARIPDYFWLAEDGLKIQSLGSQLWDATLAIQAIISCDLSEEYGPTLRKAHHFVKASQVLENPSGNFKAMHRHISKGAWTFSMQDQGWQVSDCTAEGLKAALLLSQMSPDLIGEKMEDERFYDAVDVILSLQSGNGGFPAWEPQRAYRWLEKFNPTEIFKDTLIEMEYVECTSSALQGLALFRKLYPKHRRKEVDLCISKAIRYIEKTQNPDGSWFGCWGICYTYGTLFSVKGLTDCGKNYRNSPALRKACKFLLSKQLPNGGWGESYLSSQNKVYTNLKGNRANLVQTSWALMSLIDAGQVEIDPTPVERGIRLLINSQMEDGDFPQQEITGVFMRNCTLNYSSYRNIFLIWALGEYRRRVFTHKSQILSST

SEQ ID NO: 43138 - protein, 376 aa, Glycine max
  Clone ID: 700906093_FLI.pep
KKKKTSNMASRTICFTIQVTLVVAFLTTKVVLSDDTVPIPANKAQLGEWYNTNVGPLDQRKSTVDPALVTAEEGAKVVKVMQDGSGEFKTITDAIKSIPSGNTKRVIIYIGAGNYNEKIKIEKTKPFVTLYGVPEKMPNLTFGGTAQQYGTVDSATLIVESDYFVAANIMISNTAPRPDPKTPGGQAVALRISGDKAAFYNCKMYGFQDTICDDRNRHFFKDCLIQGTMDYIFGSGKSLYVSTELRTLGDNGITVIVAQARKSETEDNAYSFVHCDVTGTGTGTFLGRAWMSHPRVVFAYSNMSDIVNKLGWSNNNHPEHDKTVRFGEYQNSGPGADPKGRATITKQLSETEVKPYITLAMIEGSKWLLPPPTPKV

SEQ ID NO: 43139 - protein, 135 aa, Glycine max
  Clone ID: 700906367_FLI.pep
LYIVYPSLLELPLHISLTSLHSGTVGGRADLVRNVNPTLLRKSSSTVHIGLAIMERTNSVLYALANGLAVWCGVSEVKEGLDPIAARARHGFATIEHIRNAWGEVAHHLVACHCCLGLGSNGNYTQHQAHNCHPK

SEQ ID NO: 43140 - protein, 168 aa, Glycine max
  Clone ID: 700906636_FLI.pep
ANTMDVGRSVLVQTEPRTRLDAGTWGTMGVGLGYCIAAAVASPERLVVAVEGDSGFGFSAMEVETLVRYQLPVVVIVFNNGGVYGGDRRRPEEIDGPHKDDPAPTDFVPNAGYHALIEAFGGKGYLVGTPDELKSALSESFSARKPAVVNVVIDPYAGSESGRMQHKN

SEQ ID NO: 43141 - protein, 317 aa, Glycine max
  Clone ID: 700906933_FLI.pep
LDLLFHGAQVHRHAHNFREVQQCTLLSIKTGGCSEDCSYCPQSSKYDTGVKGQRLMNKEAVLQAAKKAKEAGSTRFCMGAAWRDTLGRKTNFNQILEYVKDIRDMGMEVCCTLGMLEKQQAVELKKAGLTAYNHNLDTSREYYPNIITTRTYDERLQTLEFVRDAGINVCSGGIIGLGEAEEDRVGLLHTLSTLPTHPESVPINALVAVKGTPLEDQKPVEIWEMIRMIATARIIMPKAMVRLSAGRVRFSMPEQALCFLAGANSIFTGEKLLTTPNNDFDADQLMFKVLGLLPKAPSLNEGETNVTEDYKEAAFSS

SEQ ID NO: 43142 - protein, 257 aa, Glycine max
  Clone ID: 700907258_FLI.pep
LRDEECDRQAVKRALAFVVAWSLDPLVFGEYPPEMHSILGSQLPRFSPEEKSLIKGSIDFIGINNYGTLYAKDCSLTACPLGTDRPIRGFVEATGTRDGIPIGDLTGNPRFFVVPRGLEKIVDYIKIRYHNMPMYITENGYSSPHKPNVTMDDLLQDFKRIDYHKAYLAALLRAIRKGADVRGYMIWSLMDNFEWTSGYGVRYGLYYVDRHTLERIPKRSVQWFSSFLNDTSHSNKQDLSEQYVRSKDVTTAGFKVV

SEQ ID NO: 43143 - protein, 231 aa, Glycine max
  Clone ID: 700907535_FLI.pep
GGLSVVYHQLDVVDYSSINQFVEWLRENCGGLDILVNNAGVNFNLGSDNSVENARKVIETNYYGTKRMTEAIISLMKPSLVGARIVNVSSRLGRLNGRRNRISNVALREQLSDVESLSEELIGMTLSTFLQQAEDGTWTTEGWPQVYTDYSVSKLAVNAYTRLMARKLSERPEGQKIYINCYCPGWVKTALTGYAGNNTVEEGADTGVWLALLSDQTFMGKFFAERREINF

SEQ ID NO: 43144 - protein, 170 aa, Glycine max
  Clone ID: 700908449_FLI.pep
LGDGNKNITVQNVNCGPGHGISVGSLGRYDNEEAVEGLLVKNCTLNNTDNGLRIKTWPSTPLTITVTDMHFEDITMENVSNPVIIDQEYCPWNQCSKKNPSKIKISKVSFKNIKGTSGTKEGVIFICSSVAPCEGVEMTDVDLTFNGAATTAKCANVKPVITGKAPTCAA

SEQ ID NO: 43145 - protein, 185 aa, Glycine max
  Clone ID: 700908158_FLI.pep
VIRLVFCQIWNLSSNLFVGEIPSGLGQKSLIHLDLSNNQLTGPIPDSIASSSLQLVLLNGNLLEGRVPEQLYSIGVHGGAIDLSGNKGLCGVPSLPDCPMFWENGKLSTQGKIAIGLSCLFVFCVILLLVYIYIRRRRNDYDFALPHELTSLAAKRNRYQRQKSLMVLEMESQHAKGLPSHFTTQ

SEQ ID NO: 43146 - protein, 228 aa, Glycine max; identical to SEQ ID NO: 37101
  Clone ID: 700908638_FLI.pep

SEQ ID NO: 43147 - protein, 385 aa, Glycine max
  Clone ID: 700909108_FLI.pep
TIVAIVVPITVAVLIFIVGICFLSRRARKKQQGSVKEGKTAYDIPTVDSLQFDFSTIEAATNKFSADNKLGEGGFGEVYKGTLSSGQVVAVKRLSKSSGQGGEEFKNEVVVVAKLQHRNLVRLLGFCLQGEEKILVYEYVPNKSLDYILFDPEKQRELDWGRRYKIIGGIARGIQYLHEDSRLRIIHRDLKASNILLDGDMNPKISDFGMARIFGVDQTQGNTSRIVGTYGYMAPEYAMHGEFSVKSDVYSFGVLLMEILSGKKNSSFYQTDGAEDLLSYAWQLWKDGTPLELMDPILRESYNQNEVIRSIHIGLLCVQEDPADRPTMATIVLMLDSNTVTLPTPTQPAFFVHSGTDPNMPKELPFDQSIPMSVNDMSISEMDPR

SEQ ID NO: 43148 - protein, 187 aa, Glycine max
  Clone ID: 700909142_FLI.pep
IDFEFLGNRTGQPYILQTNVFTGGKGDREQRIYLWFDPTREYHRYSVLWNMYQIVFYVDDYPIRVFKNSNDLGVKFPFNQPMKIYNSLWNADDWATRGGLEKTDWSKAPFIASYKGFHIDGCEASVNAKFCDTQGKRWWDQPEFRDLDAAQWQKLSWVRQKYTIYNYCADRKRYPQVSPECARDRDI

SEQ ID NO: 43149 - protein, 305 aa, Glycine max
  Clone ID: 700908972_FLI.pep
SMASHDLRFFELNTGAKIPSVGLGTWLAEPGVVARALATAINVGYRHIDCAQIYGNEKEIGAALKKLFADGVVKREDMFITSKLWCNDHLPENVPEAFDKTLQDLQLDYLDLYLIHWPVSAKNGKLTKPDIPSTWRAMEALYNSGKAQAIGVSNFSVKKLQDLLDVASVPPAVNQVELHPSLQQPELHAFCKSKGVHLSGYSPLGKGYSESNILKNPFLHTTAEKLGKTAAQIALRWGLQMGHSVLPKSTNDARLKENFDLFDWSIPADLLANFSDIKQERIVTGDGFFSKTSPGYKTIEELWDE

SEQ ID NO: 43150 - protein, 314 aa, Glycine max
  Clone ID: 700908983_FLI.pep
VQRLLVFDYMANGNLRDCLDGVSGKHIDWATRVMIAIGAARGLEYLHEAAAPRILHRDVKSTNILLDENWQAKITDLGMAKNLRSDDLPSCSNSPARMQGTFGYFAPEYAIVGRASLESDVFSFGVVLLELISGRHPIHKSTGKEESLVIWATPRFQDSRRVITELVDPQLKGNFPEEEVQVMAYLAKECLLLDPDTRPTMSEVVQILSSISPGKSRRRRNIPASLFQEPEDAQKQRQAPPSKFPTHSSMPIYNDHNLSVENKNKAEDALSAEYMESLILLTSKSDGSCASEEEIVDLTEPRFESFCITNGNVP

SEQ ID NO: 43151 - protein, 349 aa, Glycine max
  Clone ID: 700909302_FLI.pep
CKAQIKAQKPFSFGALENMGKQSTEFSALNCIDLSNPDINQSVNLLKQACLDSGFFYVVNHGISQEFMEEVFAQSKKFFSLPHKEKMKILRNEKHRGYTPVLDELLDPENQVHVGDYKEGYYIGVEKGEDDPESNKPFYGPNNWPAPGVLPGWRETMEKFHRETLEVGKAVAKIIALALDLDANFFDQPEMLGEPIATLRLLHYEGQVSDPLKGLYGAGAHTDYGLITLLATDDVSGLQICKDRDAKPQKWEDVAPLKGAFIVNLGDMLERWSNCVFKSTLHRVLGNGQGRYSIAYFLEPSHDCLVECLPTCKSDSNPPKFPPILCHDYLTQRYNDTHADLNVYKKQQA

SEQ ID NO: 43152 - protein, 276 aa, Glycine max
  Clone ID: 700909621_FLI.pep
PKMEIFPIPAESYTLGFIGAGKMAESIARGAVRSGVLPPSRIRTAVHFNLARRGAFESFGVTVLPSNDDVVRESDVVVLSVKPQLVKDVVSKLTPLLTKNKLLVSVAAGTKLKDLQEWAGNDRFIRVMPNTPAAVGQAASVMSLGGSATEEDGNIIAQLFGSIGKIWKAEEKYFDAITGLSGSGPAYVYLAIEALADGGVAAGLPRDLSLSLASQTVLGAASMVSQTGKHPGQLKDDVTSPGGTTITGIHELENGGFRGTLMNAVVAAAKRSRELS

SEQ ID NO: 43153 - protein, 159 aa, Glycine max
  Clone ID: 700909520_FLI.pep
EELADIKDQFDAIDVDKNGSISLEEMRQALAKDLPWKLKESRVLEILQAIDNNTDGLVDFREFVAATLHVHQLEEDSDKWQQLSQAAFEKFDLDKDGYITPEELRMHTCLRGSVDPLLEEADIDKDGKISLPEFRRLLRTASMGSQNVSSPSVHRRQRF

SEQ ID NO: 43154 - protein, 73 aa, Glycine max
  Clone ID: 700909342_FLI.pep
TRIHMWLGTSVDLCSKVSKRLRFLNNFLPKDHDPVHAWSVVFFIFILTLAGKNAKLKFIRNHNNYAAFLFFII

SEQ ID NO: 43155 - protein, 245 aa, Glycine max
  Clone ID: 700909378_FLI.pep
PSKKTTVKHKNLNPEWNEEFNMVVKDPDSQVLEINVYDWEQVGKHDKMGMNVIPLKEVSPEETKRFSLDLLKNMDPNDVQNEKSRGQIVVELTYKPFKEEDLGKGFEETQTVPKAPEGTPAGGGLLVVIVHEAQDVEGKYHTNPHVRLIFRGEEKKTKRIKKNRDPRWEDEFQFMVEEPPTNDRLHVEVVSTSSRNLLHQKEPLGYIDINLGDVVANKRINEKYHLIDSKNGRLQIELQWRTLEA

SEQ ID NO: 43156 - protein, 98 aa, Glycine max
  Clone ID: 700909943_FLI.pep
WCHFFLTYQLVYTMSPKLYRHDPPRCINCIPICRFTWSGINLLTSSEDAPDNSCLKLNRGGNGRPFGKRALGSRSSSKKGCAHASSAVHRRLGEYCKS

SEQ ID NO: 43157 - protein, 143 aa, Glycine max
  Clone ID: 700909752_FLI.pep
ALYEELTRKVVTLVAENENLKREKELALKEYESLETTNKNLKTQIAKSINTEVEKTPVEPVSSVAEITPSSGNGPWFLYNLFPVPQIFWPSILQSSNPIHLQNTSFNSIAIPPNANVSCSSESESHHKQNNLINDNRTRVITF

SEQ ID NO: 43158 - protein, 329 aa, Glycine max
  Clone ID: 700910094_FLI.pep
LGGFDTAHAAARAYDRAAIKFRGVEADINFNIEDYEDDLKQMSNLTKEEFVHVLRRQSTGFPRGSSKYRGVTLHKCGRWEARMGQFLGKKYVYLGLFDTEIEAARAYDKAAIKCNGKEAVTNFDPSIYNNELNTESTGNAPDHNLDLSLGNATSKPGNNQALGNHATNAVTHDQHLPSESNWRNGGNKPKLVNILPKPCNRSNNKDSHGRDVHGESETLRMLSQTHLHSPASNEMQLRYGPYKSHGGESQMLQNFAHIHPPNFHFPSSSIGGRIGSDLSLSMTDQQQWQTGPSHYLATAAASSSFQQQIRPSSQGWLQKNGFHILMRPS

SEQ ID NO: 43159 - protein, 144 aa, Zea mays
  Clone ID: LIB3068-002-B9_FLI.pep
PWIASCAPCPAATTSSSSTAPADRPAPAAAAAPRPATSTGPARRTAPRGAACGTSTAPGRCARCGRDRFANLPLPAVLQRQAARMPFCLRGGNSRTGDRRRRRRVVLVDKDGTEQLLPRTFTLQPHHCISSYTARRLSRGHVCR

SEQ ID NO: 43160 - protein, 69 aa, Glycine max
  Clone ID: 700749381_FLI.pep
QVIKLKSINQNSLGQYKCNFTAIAKHRKSAIKCRIHNIYELVFTKNYLTTQTQSLFLLPGSQNSKKDDN

SEQ ID NO: 43161 - protein, 163 aa, Glycine max
  Clone ID: 700872206_FLI.pep
LLLNPVHAIARLGGYRAPEQEQNKRLSQQADVYSFGVLLLEVLTGRAPSSQYPSPARPRMEVEPEQAAVDLPKWVRSVVREEWTAEVFDQELLRYKNIEEELVSMLHVGLTCVVAQPEKRPTMEEVVKMIEEIRVEQSPLGEDYDVSCNSLSPSIPTTEDGLA

SEQ ID NO: 43162 - protein, 102 aa, Glycine max
  Clone ID: 700867888_FLI.pep
TLNKILYLRPPKNIYSFNELVALWENKIGKTLEKIYVPEEKVLKDIEEAPLPINVVLAINHSVFVKGDHTNFEIEPSFGVEASELYPDVNYTTVEEYLGQFA

SEQ ID NO: 43163 - protein, 249 aa, Glycine max
  Clone ID: 700670424_FLI.pep
QLLTMTMSGPEEHGSMSLMGSLRVIELQLVAFALVFSASGLVPLLDLAYSALISIYLMLLGRFAFPSHGCAPGPMFHESGLFQVYVVVGTTVGLFLPLAYVLGGFGRGDKQAVRSASPHLFLLAFQILTENVISSFSLFSPPVRAMVPLMYTVRRIFVDIGWIHDVCLNKTLPPYANLKDKAWFWFGRVLAVANLVYFSINLFGFLIPRFLPRAFMRYFQERGEIYAKLVEEKRYVNVVNNKSHPPDKK

SEQ ID NO: 43164 - protein, 401 aa, Zea mays
  Clone ID: 700342738_FLI.pep
LAEAHRGVLYVDEINLLDDGISNLLLNVLTEGVNIVEREGISFRHPCKPLLIATYNPEEGSVREHLLDRIAINLSADLPMSFDDRVEAVDIATRFQESSKEVFKMVEEKTETAKTQIIFAREYLKDVTISTEQLKYLVMEAIRGGCQGHRAELYAARVAKCLAAMEGREKVFVDDLKKAVELVILPRSILSDNPQDQQQEQPPPPPPPPPPENQDSSEDQDEEDEDQEDDEEENEQQDQQIPEEFIFDAEGGLVDDKLLFFAQQAQRRRGKAGRAKNVIFSEDRGRYIKPMLPKGPVRRLAVDATLRAAAPYQKLRREKERDKTRKVFVEKTDMRAKRMARKAGALVIFVVDASGSMALNRMQNAKGAALKLLAESYTSRDQLCALASLSGFNYSFSWRLC

SEQ ID NO: 43165 - protein, 481 aa, Zea mays
  Clone ID: 700342811_FLI.pep
DGTGYCHISTLFFYHSHTKGIPVATPVFFADTQDPELRKVETSFLLGPLLVCASTLPNKGAHEYAHKLPKGIWLSFDFADSHPDLPVLYLQGGAILPVGLPIKHVSEASLEDDLSLIIALNENGKAEGVLFEDAGDGYAFTQGDYLLTYYIAELHSSVVTVKILKSEGSWKRPKRNLKINILLGGGAMISTDGVDGEVIHLTMPSESVVSSLVATSEFEHKKRMEMIQPIPDIEEPSGQEGAELSKIPVDLKSGDWFLKIVPWIGGRIISMAHIPSDSQWLHSRIEINGYEEYSGAEYRSAGCTEEYKVIRRHLEQSGEEESICMEGDIGGGLVLQRQISILKDNPKIVQIDSSIQARSVGAGSGGFSRLVCLRVHPTFTLLHPTEVVVAFTAINGSKQEISPEAGEITFEGDLKPNGEWMLVDKCVGLSLVNRFNPREVSKCFVHWGTGDVNMELWSEERPVSNETPLRICHQYEVQQTT

SEQ ID NO: 43166 - protein, 261 aa, Zea mays
  Clone ID: 700333069_FLI.pep
DVCLNQATKLLIALQHSQCMSSTLQSMVHLLSRFQDCPIFSLDVDLIVEVVEQEMPKCIFLTSPNNPDGSVINDEDLLKILDLPILVVLDEAYIEFSSLQSRMAWVKKHDNLIVLRTFSKRAGLAGLRVGYGAFPLSIIEYLWRAKQPYNVSVAAEVSACAALQNPTYLENVKNLLVKERERLFNLLKGIPFLKPFPSHSNFILCEVTSGKDAKKIKEDLAKMGVMIRHYDKKELKGYIRISVGKPEHTDALMKGLNALRL

SEQ ID NO: 43167 - protein, 247 aa, Glycine max
  Clone ID: 700756224_FLI.pep
FMKKMVHLGFFLLGCLSMISYANGYVSNGGWTNAHATFYGGSDASGTMGGACGYGNLYSQGYGTNTAALSTALFNNGLSCGSCYQIKCANDPQWCLRGTIVVTATNFCPPGGWCDPPNHHFDLSQPVFQQIAQYRAGIVPVVYRRVRCMRRGGIRFTINGHSYFNLVLVTNVGGAGDVHSVAIKGSRTRWQPMSRNWGQNWQSNSYLNGQSLSFLVTTSDGRSVLSYNAAPPSWSFGQTYTGRQFRY

SEQ ID NO: 43168 - protein, 511 aa, Glycine max
  Clone ID: 700748475_FLI.pep
FLFFNSSVLKKTAIERESLRMVKKEEFLRENGDNENRSVSRSDFPPNFIFGVATSAYQIEGACKEGGRGPSIWDAFTHTEGKILDKSNGDVAVNHYHRYMEDIDLIAKLGFDAYRFSISWSRIFPDGLGTKINDEGITFYNNIINGLLERGIQPYVTLYHWDLPLHLHESMGGWLNKQIIEYFAVYADTCFASFGDRVKNWITINEPLQTAVNGYDVAIFAPGRRENSLIEPYLAAHHQILAHAAAVSIYRSKYKDKQGGQVGFVVDCEWAEANSDKIEDKSAAARRLDFQLGWFLHPLYYGDYPEVMRERLGDQLPKFSEEDKKILLNALDFIGLNHYTSRFISHVTECAEENHYYKVQEMERIVEWEGGQAIGEKAASEWLYVVPWGLRKILNYVSQKYATPIFVTENGMDDEDNDNLPLHEMLDDKLRVRYFKGYLASVAQAIKDGADVRGYFAWSLLDNFEWAQGYTKRFGLVYVDYKNGLSRHPKSSAYWFSRFLKAGENKKGKEE

SEQ ID NO: 43169 - protein, 595 aa, Glycine max
  Clone ID: 700750047_FLI.pep
GKKLFRSQLKVNEVSQHTQISLLFLQFHCCLVPFTLTMRILVLLSLATLLLFSSFSPTFCDHLADDEDLSFLDEPSAAPEHDHHYGADDSNFGDFEDFEEDDAEAYKQPEVDEKDVVVLKENNFTDAVKNNRFVMVEFYAPWCGHCQALAPEYAAAATELKGEDVILAKVDATEENELAQQYDVQGFPTVHFFVDGIHKPYNGQRTKDAIVTWIRKKIGPGIYNLTTVEEAQRILTNETKVVLGFLNSLVGPESEELAAASRLEDDVNFYQTVNPDVAKLFHIDQDVKRPALILIKKEEEKLNHFDGKFEKSAIADFVFSNKLPLVTIFTRESAPSVFENPIKKQLLLFATSNDSETLVPAFKEAAKSFKGKLIFVYVEMDNEDVGKPVSEYFGISGNAPKVLGYTGNDDGKKFVLDGEVTTDKIKAFGEDFVEDKLKPFYKSDPVPESNDGDVKIVVGNNFDEIVLDESKDVLLEIYAPWCGHCQSLEPIYNKLAKHLRNIDSLVIAKMDGTTNEHPRAKPDGFPTLLFFPAGNKSFDPITVDTDRTVVAFYKFLKKHASIPFKLQKPTSTSESDSKGSSDAKESQSSDVKDEL

SEQ ID NO: 43170 - protein, 414 aa, Glycine max
  Clone ID: 700751156_FLI.pep
RLHCSVKNYDWGLPGRVSEVARLHALNSASEFHAEDPYAELWMGTHDSGPSFLASSNGNENGVSLKAWISENPDVLGHKVLHKWGSDLPFLFKVLSVGKALSIQAHPDKELARTLHKLHPDLYKDGNHKPEMALALTNFEALCGFITLKELKGVLHTVPEIVELVGATNTNLVLQTNDQDGEEKVKPVLQAVFTDLMSASKDRVTDAVNRLKSRLLKESEVRQLTDKEQLVLRLEKQYPADVGVIAAFFLNHVKLNPGEALFLGANEPHAYLSGECVECMATSDNVVRAGLTPKHRDVQTLCSMLTYKQGSPEILRGVSVNPYVNKYTPPFEEFEIDRCILPQGETVVFPAVPGPSIFLVTVGEGTMNTGLPKGHVVTEGDVLFAAANTEISVTSASELNLYRTGVNSKFFQAS

SEQ ID NO: 43171 - protein, 364 aa, Glycine max
  Clone ID: 700740910_FLI.pep
KIEDDYVSGETIGQGKFGSVWLCRSKVSGAEYACKTLKKGEETVHREVEIMQHLSGHSGVVTLQAVYEEAECFHLVMELCSGGRLIDGMVKDGLYSEQRVANVLKEVMLVIKYCHDMGVVHRDIKPENILLTASGKIKLADFGLAMRVSEGQNLTGLAGSPAYVAPEVLLGRYSEKVDIWSAGVLLHALLVGSLPFQGDSLEAVFEAIKTVKLDFQNGMWKSISKPAQDLIGRMLTRDISARISAEEVLRHPWILFYTANTLKMLPIKTKLKNQIGATCQQLVAVREPRLGGNRIDNYSLSEGSSSESCYSDDQDECVLIDVLASAISHVRISEPKRSRVCGPTGPIVQQGSSNMKPNNLCKAF

SEQ ID NO: 43172 - protein, 330 aa, Glycine max
  Clone ID: 700750148_FLI.pep
YTVPMATTEGCLVASTNRGCKAIHVSGGASSMLLRDAMTRAPVVRFNSAKRASQLKFYLEDPLNFDSLAVVFNKSSRFARLQDIKAAIAGKNLYIRFSCTTGDAMGMNMVSKGVQNVLTFLQSDFPDMDVIGISGNFCSDKKAAAVNWIEGRGKSVVCEAVIKEEVVKKVLKTSVEALVELNMLKNLTGSAMAGALGGFNAHASNIVSAVYLATGQDPAQNVESSHCITMMEAVNDGKDLHISVTMPSLEVGTVGGGTQLASQSACLNLLGVKGASKESPGANSRLLATIVAGSVLAGELSLMSAIAAGQLVNSHMKYNRSSKDITKIGS

SEQ ID NO: 43173 - protein, 389 aa, Glycine max
  Clone ID: 700754894_FLI.pep
EREREREMVMHSRVRSVAGNIKCAARLFCSSSTTTPPAAPLQFPQTLAGLRARLAEESPSLSDFLALKSESAYSVEVGTKKKPLPKPKWMKEAVPGGEKYVQIKKKLRELKLHTVCEEARCPNLGECWSGGETGTATATIMILGDTCTRGCRFCNVKTSRTPPPPDPDEPTNVAEAIASWGLDYVVITSVDRDDLPDQGSGHFTETVQKLKALKPNMLIEALVPDFRGDADCVEKVAKSGLDVFAHNIETVEELQSVVRDHRANFKQSLDVLMMAKENAPAGTLTKTSIMLGCGETPDQVVKTMEKVRAAGVDVMTFGQYMRPSKRHMPVSEYVTPEAFDKYQKLGMEMGFRYVASGPMVRSSYKAGEFYIKSMIESDRAASPSKLTSS

SEQ ID NO: 43174 - protein, 377 aa, Glycine max
  Clone ID: 700745012_FLI.pep
HQNMVATSTNELEAGTVSRYDRKSEIKVFDESKTGVQGLVENGVTKVPRMFYCEHSNLSDGLTTESNSNFTIPSIDLTGINDDPILRDAVVGKVRYACEKWGFFQVTNHGIPTQVLDEMIKGTGRFHEQDAKVRKEYYTRDMSRKVIYLSNFSLYQDPSADWRDTLAFFWAPNSPNDEELPAVCRDIVPEYSTKVMALASTLFELLSEALGLDRFHLKEMGCDEGLLHLCHYYPACPEPELTMGTSRHTDGNFMTILLQDQMGGLQILHENQWIDVPAAHGALVVNIGDLLQLVTNEKFISVQHRVLANHQGPRTSIASFFRIGDQSPEGLSRVFGPIKELLSEHNPPVYRETSLKDYLAHQYAKSIGASSLSLFKL

SEQ ID NO: 43175 - protein, 679 aa, Glycine max
  Clone ID: 700753222_FLI.pep
NNLKATIKQRLLSGCVCDSSLLTMLPHKHTLVVVATVATLALAAVLAAPQADLASERAALLSLRSSVGGRTLFWNATRDSPCNWAGVQCEHGHVVELHLPGVALSGEIPVGIFGNLTQLRTLSLRFNALRGSLPSDLASCVNLRNLYIQRNLLTGQIPPFLFHLPDLVRLNMGFNNFSGPFPSAFNNLTRLKTLFLENNQLSGPIPDLNKLTLDQFNVSDNLLNGSVPLKLQTFPQDSFLGNSLCGRPLSLCPGDVADPLSVDNNAKGNNNDNKKNKLSGGAIAGIVVGSVVFLLLLVFLLIFLCRNKSAKNTSAVDIATVKHPETESEVLADKGVSDVENGGHANVNPAIASVAAVAAGNGGSKAEGNAKKLVFFGNAARAFDLEDLLRASAEVLGKGTFGTAYKAVLEAGPVVAVKRLKDVTISEKEFKEKIEAVGAMDHESLVPLRAYYFSRDEKLLVYDYMPMGSLSALLHGNKGAGRTPLNWEVRSGIALGAARGIEYLHSRGPNVSHGNIKSSNILLTKSYDARVSDFGLAHLVGPSSTPNRVAGYRAPEVTDPRKVSQMADVYSFGVLLLELLTGKAPTHALLNEEGVDLPRWVQSVVREEWTSEVFDLELLRYQNVEEEMVQLLQLAVDCAAQYPDKRPSMSEVVRSIQELRRSSLKEDQDQIQHDNDILL

SEQ ID NO: 43176 - protein, 535 aa, Glycine max
  Clone ID: 700741124_FLI.pep
ETSNRKIEILEALSESSTKEVANEGDNVESKGENPPPLAGANVMNVILVAAECAPFVKTGGLGDVAGSLPKALARRGHRVMVVVPRYSHYADAQDIGVWKRYKVDGQDMEVTYFHSYIDGVDFVFIDSPNFRHLQDNIYGGNREDILKRMVLFCKAAAEVPWHVPCGGVCYGDGNLAFIANDWHTALLPVYLKAYYRDHGLMKYTRSVLVIHNIAHQGRGPIDDFRYTDLPEHYIDLFKLYDPVGGEHFNIFSAGLKAADRIVTVSHGYAWEIKTSEGGWGLHGIINENDWKLRGIVNGIDTKDWNPKIDVHLKSDGYTNYTLETLQSGKRQCKAALQKELGLPVREDVPLLGFIGRLDQQKGIDLIAEAIPWIVGQDVQLVMLGTGRPDLEDMLRQFESQHRDKVRGWVGFSVKMAHRITAGADILLMPSRFEPCGLNQLYAMNYGTIPVVHAVGGLRDTVKPFNPFEESGLGWTFDSAETNKLINALGNCLLTFRQYKQSWEGLQRRGMTQDLSWDNAAQQYEEVLVAAKYQW

SEQ ID NO: 43177 - protein, 623 aa, Glycine max
  Clone ID: 700747276_FLI.pep
KMENTCLWIQKEGRRRKDSLHGLLNDREISEEESSKSQLKKLIKRSNSHRAIVVNAIQSQISKVFFKDLFFRRVHGLDNRIPKHVVSVDEKYIRRCLEFIHNTALKAAQFNIPESLRATNMETLSESLNTVKFFGGNACGLGHFVFECPVATENGRVVISANAGDQWTLGSIMGSKSMINILNSTLLQQFGASHRTDNLNRMNFSDPEGLVCYDFMDSPSDLCISSSHKLGKEKQLVRSHKYGSISVHKRLVSTSSTTSTSSDWLSSTSSTLSQGMIQCSWKQGIPHFVFSADDQKEVYVAKLKKVDSTDNKALDYVYEFHLNKGGQKGREIPDGDFPFVGKMHVSTSFTLCPNNCRIRETEFTLFHNMEISDKEMSTSEHSHRKSKGLSKVSKVFKTSPSSKRRTLSRFGGSSAIKESCPWEPYALGGTNLLDTDVPPNFEMATIVVKNHLPCKKPEKVGGWGLKFLNKSGENQITLPSESSNQNNGDCSSSTSILIPAGFHGGPRTRNGGPSSLIDRWKSGGHCDCGGWDEGCPLTVLERRSNKAEVMSKIDTGDGCKSVDLVIQGSSDYGPTLRMVNVHDGLYYIHFHPPLSALQSFSIAVAIIHAQSPTLQPNGAKKLS

SEQ ID NO: 43178 - protein, 328 aa, Glycine max
  Clone ID: 700750362_FLI.pep
ARGRLREETARLYFQQLISAVDFCHSRGVFHRDLKPENLLLDDDGNLKVTDFGLSTFSEHLRHDGLLHTTCGTPAYVAPEVIGKRGYDGAKADIWSCGVILYVLLAGFLPFQDENLVALYKKIYRGDFKCPPWFSSEARRLITKLLDPNPNTRITISKIMDSSWFKKPVPKNLVGKKREELNLEEKIKHQEQEVSTTMNAFHIISLSEGFDLSPLFEEKKREEKELRFATTRPASSVISRLEDLAKAVKFDVKKSETKVRLQGQENGRKGKLAIAADLYAVTPSFLVVEVKKDNGDTLEYNQFCSKELRPALKDIVWRTSPAENPTLA

SEQ ID NO: 43179 - protein, 574 aa, Glycine max
  Clone ID: 700745763_FLI.pep
VEVNPCNWFGVECSDGRVVVLNLKDLCLEGNLVPELANLVHIKSIILRNNSFHGIIPQGIAHLNEMEVLDLGYNNFSGPLPTDLGNNIPLTILLLDNNDHLCGFSPEINELKMVSEYQVDENQLSSAEKVPIRSIKRHAGQNNGVRKLLQVRTREGGSPFNRVFPDSPAPFPSAPSPAPATPPVVQKPAPVDRNNSASPSPLPEPRSAPLSKSSSSKNHLVVILAGVMGGVVFLLISIIGLYLCKTNKVATVKPWATGLSGQLQKAFVTGVPKLKRSELEAACEDFSNVIGTSSIGTVYKGTLSSGVEIAVASVAATSSKDWSKTLEAQFRNKIDTLSKVNHKNFVNLLGHCEEDEPFTRMVVFEYAPNGTLFEHLHIKESEHLDWGTRLRVAMGMAYCLQHMHQLEPPLVLSNLNSSGVQLTDDYAAKISDLSFLNEIASAVIKSPARKNTDMTPASNIYSFGVILFEMVTGRLPYSVDNDGSLDDWASHYLQGDQPLKEMVDPTLASFQEEQLEQVDALIKSCVHPDQKQRPTMKEVCVRLREITKITPDAAVPKLSPLWWAELEIASVDAS

SEQ ID NO: 43180 - protein, 313 aa, Glycine max
  Clone ID: 700786268_FLI.pep
DQMSVEDELYQLRPMNCPYHILVYKSKLHSYRDFPIRVAELGTVYRYELSGSLHGLFRVRGFTQDDAHIFCLDDQIKDEIRGVLDLTEEILLQFGFEKYEVNLSTRPEKAVGDDDIWEKATSALEDALDDKGWTYQIDDGGGAFYGPKVDIKIEDALGRKWQCSTIQRFDITYVDSNTEKRRPIMIHRAVLGSLERFFGILIEHYAGDFPLWLSPIQARVLPVTDAQLEYCNVVTNKLKMYGIRAEVCHGERLPKLIRNAEKQKIPLMVVVGSKEVETETVTVRSRFGGELGTMPVDDFIDRIKLGTENPISL

SEQ ID NO: 43181 - protein, 303 aa, Glycine max
  Clone ID: 700749265_FLI.pep
MNINGLARQSLINAGGIIEQSFLPGPFAVEMSSAVYKGWVFTDQALPADLIKRGMAVEDPSSPYGLRLVIDDYPYAVDGLEIWSAIQTWVKDYVSLYYATDDAVKKDSELQAWWKEAVEKGHGDLKDKPWWPKLNTLQDLIHICCIIIWTASALHAAVNFGQYPYGGFILNRPTLTRRLLPEPGTKEYGELTSNHQKAYLRTITGKTEALVDLTVIEILSRHASDEVYLGQRDNPNWTDDTKAIQAFKKFGNKLKEIEDKISGRNKNSSLRNRNGPAQMPYTVLLPTSGEGLTFRGIPNSISI

SEQ ID NO: 43182 - protein, 442 aa, Glycine max
  Clone ID: 700757362_FLI.pep
YTHTHTLRIMASILHYFLALSLSFSFLFFLSDSVPIPQHHTNPTKPINLLVLPVQNDASTGLHWANLQKRTPLMQVPVLVDLNGNHLWVNCEQHYSSKTYQAPFCHSTQCSRANTHQCLSCPAASRPGCHKNTCGLMSTNPITQQTGLGELGQDVLAIHATQGSTQQLGPLVTVPQFLFSCAPSFLLQKGLPRNIQGVAGLGHAPISLPNQLASHFGLQHQFTTCLSRYPTSKGALIFGDAPNNMQQFHNQDIFHDLAFTPLTVTPQGEYNVRVSSIRINQHSVFPPNKISSTIVGSSGGTMISTSTPHMVLQQSLYQAFTQVFAQQLEKQAQVKSVAPFGLCFNSNKINAYPSVDLVMDKPNGPVWRISGEDLMVQAQPGVTCLGVMNGGMQPRAEVTLGTRQLEEKLMVFDLARSRVGFSTSSLHSHGVKCGDLFNFANA

SEQ ID NO: 43183 - protein, 347 aa, Glycine max
  Clone ID: 700755470_FLI.pep
LFLSSMAGIRLQPEDSDVSQQSRAVALSATDLVSDDDRSVAADSWSIKSEYGSTLDDDQRHADAAEALSNANLRPPSDYSSDKDEPDSEAVTSMLGFQSYWDSAYADELTNFREHGHTGEVWFGVDVMEVVASWTKALCVEISQGHIPNGVDEVKAEADKLGDKVLSTWSVLDIGTGNGLLLQELAKQGFSDLTGTDYSERAISLAQSLANRDGFSNVKFLVDDVLETKLEQEFRLVMDKGTLDAIGLHPDGPVKRMMYWDSVSRLVASGGILVITSCNNTKDELVQEVESFNQRKIATAQELGAVKDEEPCREPPFQYVNHVRTYPTFMFGGSVGSRVATVAFLRK

SEQ ID NO: 43184 - protein, 280 aa, Glycine max
  Clone ID: 700741988_FLI.pep
DYLFDKRFNLSLRFYKPQQQHIALSNKKVPIVIFLHGGGFCFGSRTWPHIHNCCMRLASGLQAAVVSPDYRLAPEHRLPAAVDDAVEAVRWLQRQGLSLREDAWLSGGVDFDRVFVVGDSSGGNIAHHLAVRLGSGSREMDPVRVRGYVLFAPFFGGEVRTKSEEGPPEHMLSLELLDRFWRLSMPVGKSRDHPLANPFGPGSPNLEQEKLDPILVIVGGNELLKDRAKNYATRLKELDKDIKYVEFEGCEHGFFTHDSFSSEVAEEVIQILKRFMLANF

SEQ ID NO: 43185 - protein, 81 aa, Glycine max
  Clone ID: 700754179_FLI.pep
KLHSLHKFHYFHNSSIGIPRSSATSRNCFIFCTAATVALALLSALLLPSCFPKALSTPAISRTILTDPPAITPVPGEAGLS

SEQ ID NO: 43186 - protein, 409 aa, Glycine max
  Clone ID: 700763420_FLI.pep
KQHHTMGGEEVARVKAELFDDNESDRNDDDVLSESKDSGVTTAHAVKEEMDDGAANWSSSSSTSPKPMEGLHEVGPPPFLKKTFEMVEDPHTNPIVSWSQTRHSFVVWDSHEFSKTLLPKYFKHSNFSSFVRQLNTYGFRKVDSDRWEFANEGFQGGKKHLLKNIRRRSKCNKLHQGAFNMMKPDVDSEVEKLKKDQNILKVEILKLRQQQENSHVQLTNVQERIRCAEMKQFQMMYFLTRMARRPAFVEQLVHKIRRKREIDGNDMVKRPRLMGNPCHVPFPKTMETTPNFDYRHQQGHKQFATLQSELNVTEVNSSRMEHPTPSPLEDELGNSLQGLRAHGCSRARAQDASSSAYHVMSEKLMRENSIVDEELDVNDSNIYLELEDLITKPTDWSVGSASGLVEQTS

SEQ ID NO: 43187 - protein, 322 aa, Glycine max
  Clone ID: 700755596_FLI.pep
TLTDKDKEDILAWGIPNKIDMIALSFVRKGSDLVEVRKVLGKHAKNIMLMSKVENQEGVANFDEILANSDAFMVARGDLGMEIPIEKIFLAQKVMIYKCNIQGKPVVTATQMLESMIKSPRPTRAEATDVANAVLDGTDCVMLSGETAAGAYPDLAVQTMAKICIEAESTLDYGDVFKRIMEHSPVPMSPLESLASSAVRTANSARAALILVLTRGGSTAKLVAKYRPGMPILSVVVPELKTDSFDWACSDEAPARHSLIFRGLVPVLSAASARASHAETTEEAIEFAMQHAKSKGLCHNGDSVVALHRVGTASIIKILTVK

SEQ ID NO: 43188 - protein, 240 aa, Glycine max
  Clone ID: 700746472_FLI.pep
MSMADVGAGGEDAIVTFEGIAILTPRGRYSVELHMSFLRLQGQANDFKIQYSSVVRLFLLPKSNQPHTFVIISLDPPIRKGQTLYPHIVMQFETDYVVESELAINEDLYNTKFKDKLELSYKGLIHEVFTTILRGLSGAKVTKPGKFRSCQDGYAVKSSLKAEDGILYPLEKSFFFLPKPPTLILHEEIDYVEFERHAAGGSNMHYFDLLIRLKSEQEHLFLIFREMSTTICMNLSVQRA

SEQ ID NO: 43189 - protein, 116 aa, Glycine max
  Clone ID: 700748151_FLI.pep
LVVLGILMLLILMEYFNVVFLHLDYPLLFSGCRFRVPVDQRRAANGGFAAKQPLPSPQKQQENVDIVPKQKPQTLDSLFANMKEQRMRFLSMQNNAVQRNGGGNKRLPWRRGRFGN

SEQ ID NO: 43190 - protein, 362 aa, Glycine max
  Clone ID: 700752370_FLI.pep
KSMTSQNGDESHHPPPQAQAEKVTEVGWYVLGEDQQQIGPYAFSELCQHFLNGYLSENTFVWSEGSSEWQPLSSVSDLWAQINRQGPDSSTTVSAPDVDEFERWQKEIQEVEAQVEGSEFGSLSGNVGGTGAGEDSERPSTPPEGEEGFTDDDGTVYKWDRSLRAWVPQDYPTGSTKPYGVEEMTFLEEEEVFPTIPNSDASEKFEDSPKLSVSVPPLKEEENNTNVISGGKRMLSDQQTDKKEANKPPDSWFELKINTHVYVTGLPEDVTTDEIVEVFSKCGIIKEDPETKRPRVKLYVDKETGRKKGDALVTYLKEPSVALAIQILDGAPLRPGGKIPMSVSQAKFEQKGDKFVSKQVDG

SEQ ID NO: 43191 - protein, 259 aa, Glycine max
  Clone ID: 700755617_FLI.pep
NDPNSFFICSIKMSGSNDGSGSWSSRFLKVASAAAATAAVAGGLYAILSSSTSASSEMEVPFGSARRESKERDDGGSGSHPREGATTVSRWKKPEIGWVKLNVDGSRDPYKSSSAGCGGVLRDASAKWLRGFAKKLNPTYAVHQTELEAILTGLKVASEMNVKKLIVESDSDSVVSMVENGVKPNHPDYGVVELIRTKRRRFDWEVRFVSVSNKANRVADRLANDARKLACDDVCEEYLHPPANCNQLLLEDEIGCESF

SEQ ID NO: 43192 - protein, 408 aa, Glycine max
  Clone ID: 700757648_FLI.pep
APEEQIATTYFDLRSVCLFGFTSGLKVRNAKKMGRKGNSWFSTVKKALSPEPKEKNDQNSSRSKKKWFQKQKLQTSESTSQSDNAPPLPLPEIILTHVESEINHDRVEVATAVDAEEPVLAVQTAAAEVQATTIVQFDNKPTEEMAAIRIQKAFRGYLARRALRALRGLVRLRSLMEGPVVKRQAISTLRSMQTFAHLQTQIRSRRLRMLEENQALQKQLLQKHAKELESMRLGEEWDDSVQSKEQVEAKLLSKYEASMRRERAMAYSFSHQHNWKNASRSINPMFMDPTNPAWGWSWLERWTAARPWESHSQMEKEKNGNKSLRSSSRGITSAEISKAFAKFQLNSEKHSPTASQNPGSPNFESHSQSHSNPPKPPSPAVAKKLKKASPKDILAIDDDTKSMISVQS

SEQ ID NO: 43193 - protein, 282 aa, Glycine max
  Clone ID: 700762414_FLI.pep
ERLNRIGSGSGGTVYKVVHRTSGRVYALKVIYGHHEESVRRQIHREIQILRDVNDPNVVKCHEMYDQNSEIQVLLEFMDGGSLEGKHIPQEQQLADLSRQILRGLAYLHRRHIVHRDIKPSNLLINSRKQVKIADFGVGRILNQTMDPCNSSVGTIAYMSPERINTDINDGQYDAYAGDIWSFGVSILEFYMGRFPFAVGRQGDWASLMCAICMSQPPEAPPSASPHFKDFILRCLQRDPSRRWSASRLLEHPFIAPPLPNHNQTPPNLHQLLPPPPRPLPS

SEQ ID NO: 43194 - protein, 354 aa, Glycine max
  Clone ID: 700748737_FLI.pep
GLLRFFDLRLKCTKEEAFLNKRGSVQWWDEEERNMARGKWVCSYKKTTLLVCFFNIAVALYVLRSLYASLYIYSGNVSRNAALYSPDQIRKMEESIQIRWEFKPVELIKWVKALEAEFSSETEAVKLPWHLKQNIIDEILQRLRSLNSSRTDIAMEREVVESWRKEKLEEVKSALVKGTSNSTIPHEEAGMLVRALESDWAVLCEEIGLWIPAQVSNKEHDDKPEGAEEFEEEVLPGRPVSPECHAELHTDYDGAAVRWGLTFHKDSAADCCQACLDHAKHAKEGEKKCNIWVYCPSEFGCHSPDIYQHKHQECWLKYAEKPRLNFKDKYPESYRNSHPSAPVIVPWVSGVISS

SEQ ID NO: 43195 - protein, 520 aa, Zea mays
  Clone ID: LIB189-027-D5_FLI.pep
QVGFRPPAMADSAPSIPGVIASLQAYSTALSAFTAAWRAVETHASTLDSALAARLAGFSELELICSAMDGAGLRAYLTEHRDELKDPTRALDAALQVAPDPGLLVLSAAASFCRTLPEVAKSDGSVKASCRLLIALLDRLRAIGVKPSPEAREEARAVATDWKRGKRIGTETMFKQETFAFLHLVGVFGLVEDVGGTSEVLDLVVSISGRERAVDAFVVLGLDLDQHMPILIQKMVNKNKQLEAVKFIQALNIAHKYALLPIMRSYIDHAAVAGKMIRIRGDDLATQNAADAKERTLIGTLQKFIKEQKLEELPIFEEANKRMAHLDQQSAERKRTAAAAAAAARKVSKNIEEQQKRIQELMQPAKRPRSENVVKGSSGQNVNFAGTSTQQFKPQQSIHKAGVSNQYQAALTQNVLPAIAQISQLVAGSHRPVGIPNQALAVPPQYGSGSANYYGVTSTRPYRPITLPPGPGALNGPSAQASSRSRLYSGDPLAAVSRSSDKKGSSYKYSLSSMSTYDRK

SEQ ID NO: 43196 - protein, 379 aa, Zea mays
  Clone ID: LIB3059-009-C9_FLI.pep
DVTSLGSLNDFLSTSRSHDQYLQLQSDFSKTSRFRASAASAIKPSSVYQASLSPRSGTFKDGVPRASCARVVGRDKLKRRVEWLGPLTAPLDTNPLTINPDSASEKCDADCSKNNVSSVPLDLPLSFPLLPSIYSLGTRPVPEVSLEKQFKPYYCWCPPCPSSLQYTVTHLHLPATPVDPLPLPPLSSLLASEQPPSSTVSVKLDTTDLPSLNLPSILHSPLIPLHGPQVPTFTPLMSDPIVHVPVIDVCSAGQAYLVSCGPSITSAVPLLPSLKPLLPEAESLVERSARETLMRLIASTPPASNPLPGSISWANNNVKKHVDVCPNEKASGTSCVAAVFGSGIAHAEDEVPSGGDSQEPFAEYDGTSNECDVHHWQKF

SEQ ID NO: 43197 - protein, 571 aa, Zea mays
  Clone ID: LIB3060-019-F7_FLI.pep
PNKPLPPGGSSSDAKPLRAPIRKRRRRRSTGRRPMLRSALFRSAPGLRRSPATAHLSTAAAAAAAWLSNGPASAPSRVRLLIGGEFVESRADEHVDVTNPATQEVVSRIPLTTADEFKAAVDAARTAFPGWRNTPVTTRQRVMFKFQELIRANMDKLAENITTEQGKTLKDAWGDVFRGLEVVEHACGMGTLQMGEYVSNVSNGIDTFSIREPLGVCAGICPFNFPAMIPLWMFPIAVTCGNTFVLKPSEKDPGAAMMLAELAMEAGLPKGVLNIVHGTNDVVNNICDDEDIKAVSFVGSNTAGMHIYSRASAAGKRVQCNMGAKNHAIILPDADRDATLNALIAAGFGAAGQRCMALSTAVFVGGSESWEDELVKRASGLVVSSGMVNDADLGPVISRQAKDRICKLVQSGVDSGARILLDGRKIVVPRYEDGNFVGPTILADVKSDMECYKEEIFGPVLLLMKAESLEDAIQIINRNKYGNGASIFTTSGVSARKFQTDIEAGQVGINVPIPVPLPFFSFTGSKASFAGDLNFYGKAGVQFFTQIKTITQQWKESPVQRVSLSMPTSQK

SEQ ID NO: 43198 - protein, 692 aa, Zea mays
  Clone ID: LIB3060-020-C9_FLI.pep
KDDYQPCDVTLEISTSHYDRTPSKDKHTSPKQLSEKSPSSGDHRFSGRLSGGRSLDNKGERKSLTKYRDRDGDIAQERSHHQDRMPAKVPFREPTPSNSSISRGGHFLGSSPNNPLPPARNGDPSFQGLHDDDRRPQNGDRRFHGHQKRNDMNSVRGHGHGWNSQPNWPSPVSNGFVPIQHGGAPGFHPPVHQFPGPPMFNLRPQMKLNQPGVSYPMHDAVDRFSTHMRPFGWPNHLDESCPPHMQVWNGGSGVFPGEPYIYGRQEWDQNRPHAGSRGWELTGDVSKGPNDVPDAELLVPKKDPDSAITAVSDSGGQHNLQPESDQKEIGRLTAENFEAKNHTKSSKSLEAPQGAQLVTSMLSKNSVVFCKNYLSRISVSHDLVEPELYKRCISLLGDLDVTKTSHLVRNEIQDNGNIGKMSTKYGNLNPFSSRYLKSDNTIFERALALHKNQTRKGLTTASASVKMEEKMAVPEDDHDMELLEPVVSNPAPQRHTDVMEEGSVSKHELGDGIGRTIAATIGSGVLDAPPEISLPQPEVVVATTVITQPNKDMEDVLPPAIEDGALQATLEHAVGIPEVTPADVLLDVAPSAVGESGDDMEIIPSAMAEPQLGKEPAPVASPDSQEKPFMLDSETGMEVEVKVIDDNPGDGRVSSIVGTKLDFAAIDGDSEALLVESRVNLSRIPNSPESTH

SEQ ID NO: 43199 - protein, 212 aa, Zea mays
  Clone ID: LIB3061-042-C1_FLI.pep
FDIFAAGSETSSTVLAWAMSELVRNPRVLHKAQSEVRETFKGQERLTEDDMPRLSYLHLVIKEALRLHAPVPLLLPRECREPCRVMGYDVPEGTRVFVNVWAIGRDDGFWGDGEVFRPERFDGGGGGVDFRGNDFEFTPFGAGRRICPGIALGLANMELALASLLYHFDWEQPADGPGTGSSGSLDMAEAFGITLRRKSKLLLKATPRVETK

SEQ ID NO: 43200 - protein, 818 aa, Zea mays
  Clone ID: LIB189-022-B3_FLI.pep
KKWKDVANDSRKQLHDKEKEVLDLRQEVIGLKHSLKEANDQCILLFNEVQKAWRVSSSLQADLKSENLMLAEKHKTEKEQNNQLRDQISHLLKVEQEQNLKMQERDLTIQSLQTKLKSIESQLNEALNASDARSTIGSESASVISSPKITESTADSSSVTKRLEEELAKRDALIEKLHEENEKLFDRLTEKSGLGSAPQASSPSANKPANGQGREIGRSDSSKSRSPDVFASPVSQDKTGNSGAIVKSSNELAKTTPAGEYLTSALMDFDPDQFEGFAAIADGANKLLMLVLAAVIKAGAAREHEILAEIRDAVFSFIRKMEPKKVMDTMLVSRVKILYIRSLLAKSPELQSIKVSPVERFLEKSNTGRSRSSSRGSSPGRSPVHHHGHGSRTALVDEHVHGFKVNIKQEKKSKFSSIVLKLRGIEEETWRQHVTGGKLREITEEAKAFSIGNKALAALFVHTPAGELQRQIRAWLAENFEFLSVTGADAAGGAAGQLELLSTAIMDGWMAGLGTAQPPTTDALGQLLSEYTKRVYTSQLQHLKDIAGTLATEEADDPAHVSKLRSALESVDHKRRKIMQQMRTDTALLTKEEGGSPIRNPLTAAEDARLASLISLDNILKQVKEVIRQSSTGPMRKSKRKALLELLDDLLTQMPSLLDIDHPCAQKQIMEARKVVESLQEDPDDPAPQSNALGEGEVSQWNVLQFNTGTTAPFIIKCGANSSGELVIKADLRVQEPKGGEVIRVVPRPTVLADLSFEEIKGVFEQLPEAVSLLALARTADGTRARYSRLYRTLASKVTALKETVAEMERGGVFKDVR

SEQ ID NO: 43201 - protein, 731 aa, Zea mays
  Clone ID: LIB3060-014-E9_FLI.pep
SPQSSASAPSLTRPAAAMAATTSTAAAAVSFSLPSPPHCRGARRRRAPSLLRAASTAAPPSPDLSIQLSPRASPPASTNGAATALGPPVSASFARDRAEDLQAEARAMARAAGATVYSPELLAARYGSRPFKVALRAGEVLSKLASFGVKVLLDERRGESSSERRRARAVELRTIFTRLGPTFVKIGQGLSTRPDLCPAEYLEELAELQDSLPTFPDEEAFACIERELGFTLDSIYSTISPSPIAAASLGQVYKARLKYSGKLVAVKVQRPSIEKAIGLDFYLLRGLGFLINKYVDIVTSDVVALIDEFARRVFQELNYVQEGQNARRFKKLYADKQDVLVPDIFWDYTSAKVLTMEWIEGVKLNQQAVIESQGLKVLDLVNIGIQCSLRQLLEYGYFHADPHPGNILATPEGKLAFLDFGMMSETPEDARVAIIGHVVHLVNRDYEAMARDYYALDFLEPDVDVSPIVPALKNFFDDALNATVSELNFKTIVDGLGAVLYQYPFNVPAYYALILRSLTVLEGLALYADPDFKVLAASYPYFAKRLLTDPNPYLRDALIELVFKDGKFRWNRLENLLVQGRQDREFAAKDALQPVLKLLLGPGGEELRALVVKEAVRVTEAIAIGTLVDSYNAAPSFLKPLISSGNLAEPFKFSETEQEQMMELRDQVFRVWGLLRSSNNFDPSLLQPIVQVLQEPEARVLGSRVAGGVTQRLAARLLQQLLRTPPAPGSS

SEQ ID NO: 43202 - protein, 468 aa, Zea mays
  Clone ID: LIB3060-036-C1_FLI.pep
KDPSSPPFLMVMAAPRVLVLPYPAQGHVIPMMELSHCLIEHGVKVTFVNTEVNHRLILGALATGDKELGGVDMVSIPDGLGSGEDRKDLGRLTDSFSKVMPGELEKLITSINADGREREKASWLIADVNMAWAFPVAKKHGLRTAGFCPSSAAMFAMRIRIPEMISDGVLDERGWPKRRGAFQLAPAMPAIDTSEFSWNRAADAKGQPIIFQLILRNNAATHLAETIVCNSVQELEPGALALVPDVFPVGPLSSDKPVGCFWAEDASCAAWLDAQPASSVVYVAFGSLAAYDAAQLVELAEGLLLTSRPFLWVVRPGSAGEQHLEQLRRRAAPRGRVVSWCPQQNVLAHPAVACFLTHCGWNSTMEAVRNGVPLLCWPYFTDQFLNQSYICDVWRTGLKVPLPPGTAHGTGLVGRDVVRDKIEELLRDSETKARALALRDLASRAVGDGGSSRRNLRQFLGLVRGSES

SEQ ID NO: 43203 - protein, 106 aa, Zea mays
  Clone ID: LIB3060-037-F7_FLI.pep
GDGILNCKPRKKGPLYDKDKTNIIATGNNDPVWKMEEMYLISILVSVPAAVPIPLPPSSLPFLPCPPCFLWKSNVLLTPPRLTFTVSELLTGNSDQSRKRVRFHVN

SEQ ID NO: 43204 - protein, 208 aa, Zea mays
  Clone ID: LIB3059-042-C7_FLI.pep
SYRGDRDSTAAYVAAATAFKGHMPPRRQWFKEVARAVRSSVVLLSRPLRLVDAVLCCILDVAGLGRQPRLGVVQLVGARRVLARQVLVHPGEHGQRSDAEAAGGDEPGRHERQRDGGRHQHRAEDHQHGGGHRERDHGAGQDQPGQHQHRPAEGRGRRGLERRHHGALLLLLLRLAVHAAPALEVAVAPATSRRAPVVISHGRLAERA

SEQ ID NO: 43205 - protein, 537 aa, Zea mays
  Clone ID: LIB3060-016-B8_FLI.pep
IDLLYASVSLLVVPADLDISQGSVLYDVDEATVRSLNGCRVADQIIRLVPNFENFRTALRCLKYWAKRRGVYSNVTGFLGGVNWALLVARVCQLYPNAVPSMLVSRFFRVFTQWQWPNPVMLCSIEEEELGFPVWDPRKNPRDRCHHMPIITPAYPCMNSSYNVSTSTLRVMLEQFQFGNRICQEIEMNKTSWPALFEPFQFFEAYKNYLQVDIIAEDDEDLRLWKGWVESRLRQLTLKIERDTYGMLQCHPYPHEYADPSRQCAHCAFFMGLSRKEGVKIQEGQQFDIRGTVDEFRHEINMYMFWKPGMELAVSHVRRKQVPAYVFPEGYKRPRPSRHVNHQSDKNDTEDGTATRSPDSQLKRKHDSVGTDDIRYAKRSSTSPVHPKNSPQSGSTGDETRCNNQIKRAPSDASGGSPASPQASERSPDTILSAPRCTTTGAVCSGDAISKHSSVPLVENCTTPTVAVCTTLKRVAEKVVSELVGSERLGSNNSAELLESMEKEDVLAENVRFGGNGVAQGGLPEELEPNNRIEAVS

SEQ ID NO: 43206 - protein, 521 aa, Zea mays
  Clone ID: LIB3060-044-G7_FLI.pep
LVSPGPGLLICSSRGFGPMAAAALAMAEQVVAELRVRCETPPSMLREVAVEMAREMGAGLEKDGGSRVKMLLSYVDKLPTGREEGLFYGLDLGGTNFRVLKVQLGGNAKHVVDRDSREVGIPPHLMSGSSSELFGFIASELAKFVDDDEKCANISNGKKREIGFTFSFPVKQRSVASGTLVKWTKAFSINDAVGEDVVAELQTAMEKQGLDMHVAALINDAVGTLAGARYYDKDVVAGVIFGTGTNAAYVEKANAIPKWEGELPHSGDMVINMEWGNFFSSHLPITEYDQELDKESLNPGEQIYEKLTSGMYLGEIVRRVLLKISLQSAIFGDIDHTKLQTHFLLRTPHISAMHHDETSDLKIVAENFEQNLEITGTSLEARKLVVEIRDIVATRAARLAAAGLAGILMKIGRDHSVEDQRSVIAIDGGLFEHYTKFRRCLETTLGELLGDEASKAVAIKHADDGSGIGAALIAASQSQYKNDLVAVKHADDGSGVKYAEDKRADDGSEIGAALIAASQSQ

SEQ ID NO: 43207 - protein, 573 aa, Zea mays
  Clone ID: LIB3061-030-B11_FLI.pep
SACRADAAGATMHDPSEIRNLPIDIAFGRLQEWLVDRKRVPHDWRKRLAGIRARIAPAFSALPRNLHPSLLALDPEEIGYLEAKKIYSILLESNTESRNIFGRLTGSAGEWESIIKAYEKDHVFLGEAAQIMVQNVNYDIPYQRKQMQKTQQQLAELDRREADIKRLAALSATRYVEACQELGLQGINVREELIESAKTLPSTFSKILEVLNSDPVSNAMEYYTTFVKDCHTEDKRNSDSVLPKLKDLQANPPSLHVSVYNEIKSSLGEASKSPGFTVIAGEIDSNVAAADDIDWDISVDTNEIDWDIGAVEQPGEESGDGFGSYEIIDANIELAGSENYNVGVSDKSMNKEDLASSESGICWDITADSSEEIASIQNASSVLEQSQSQMIAEDRSLLLEKEYRNNILDDLLEVKSFLTQRLGEMRNADTSSLQHQVQAVSPFVLQQHAPDSLENMLVEISSAISLLTNQKTLDLIMILNSKRFLDRLVSSLEEKKHHEVKLREGLGDLSVKRMELQNALSSSWPKQEAAITKTRELKKLCESTLSSVFDGRPVYIIGEINTLLSSSVSQLAG

SEQ ID NO: 43208 - protein, 546 aa, Zea mays
  Clone ID: LIB3062-050-H7_FLI.pep
MVFPAILPKVAVRLLFTFYRAARKLRRHAFQLYNRRTAAKPPSFSVSQQQAGAATFKTDAAIPDAAGRTVVCDVHGALLRSSALFPYFMVVAYEGGSLLRAMLLLCAFPLVWALGERSGGAGAVRVMAFVTFAGLRPRDMDLVGRAVLPKHYMEQLNALVYGSLWLPARRKVAVTGAPRVMSEWFLKEYLAADAVVGLELQLVTVGRCRYFTGLLSGPATGPELRHKALMEALGAEDDTVADVGIISNSNPLDHVPYCKEVYVVNTENTENDKLPRVKYPKPLIFHDGRLAFLPTPAAMLAFFLFLPLGVILSVIRINIGIVLPYKVNFVAGAIFGVRFRASGLRAPPADGEQRRGVLYVCTHRTLVDPIMLTTALQKPVPALTYSLSRLSELIAPIKTVRLTRDRARDADTMSRLLKQGDLAVCPEGTTCREPYLLRFSPLFAELADDMEPVALDAQVTMLYGTTASGHKWLDPVAFFANPVPSYRVEFLGTVPREWTRAGGRTGVEVANWVQRRLGEALEFECTELTRRDKYMMLAGNDGVVAK

SEQ ID NO: 43209 - protein, 156 aa, Zea mays
  Clone ID: LIB3066-035-B11_FLI.pep
ERSPLPLPLRSILQRSEVNMSDRAKMSWQAYVDEHLMCEIEGHHLAAAAIVGHDGAAWAQSTAFPEFKTEDMANIMKDFDEPGHLAPTGLFLGPTKYMVIQGEPGAVIRGKKGSGGITVKKTGQALVVGIYDEPMTPGQCNMVVERLGDYLLEQGM

SEQ ID NO: 43210 - protein, 106 aa, Zea mays
  Clone ID: LIB3066-047-C8_FLI.pep
EKKLLVDRKQGNHNNATSLFGIMKKKGNRKIEEIQLLHSQRRTFMLWKTYNTYGTKTALYSCSRHMTHMSNTNWSFLLLGSVSDEPMLPSASLACLCAAALRTLYG

SEQ ID NO: 43211 - protein, 376 aa, Zea mays
  Clone ID: LIB3062-021-H2_FLI.pep
RPARQDRGLPAGHRHPGGELQPVRADAVLRGHGHAPVQAPRGRAQRAPRRDGVQRGARLRGAGPEPAAGGAAGHARSGGVHGDHHPQLLHGRGARDAAAQLPVPHGRRGGAAVHRRRRRAVPPGARGAHAARRVGRRVPLRVPGGGRARQRGHQPVQGPDEHRGRRAEGEHHGDGAPGAAGVGAAAVRAVLHRAQGAEQPDQALHPGLPHGVRALLHPRGRARRDRRAPAQPDAVGRAGGGVADDAAPVRQHLQQLPLVRARLRRGQGPHAQGRPRLDDRLRLRFQVQQRRLGVHPPRRQRRRAVGQLHPPVPRAHSRRAQALSPAPAPVPCRALPFPFPPRPVAIAPAATFGLWTSKRTAGTAIGRGRELGWWNM

SEQ ID NO: 43212 - protein, 572 aa, Zea mays
  Clone ID: LIB3062-031-D12_FLI.pep
AEAGAEEKVAEADSEEEKKAEEAEEAAAGDEAAVIDGTGSFKEESNLVSELPDPERTALAQLKELVATALANGEFNLPPPPAKEEAKKEEPAKEEAPADKEDEPKAEEAAAQEPVKEEAKPEEPKTEAPAEAAPEEVKDETPVPEETKTEAPAPEEPKAEEPAKEELKAEAATEAVAEETKPAEPVPEEEEKTVVVAEEEATKTVEAIEETVAAAAAASEEPEAGEPKEELIWGVPLAGDDERTDTVLLKFLRAREFKVKEAMAMLKSAVLWRKRFGIDELLLDADLGLRELEGVVFYRGADREGHPVCYNVYGEFQDKELYERAFGDEEKRERFLKWRIQLLERGIREQLDFSPSGICSMVQVTDLKNSPPMLGKHRAVTRQALALLQDNYPEFVAKKVFINVPWWYLAANKVMSPFLTQRTKSKIVFCSPGKSAETLFRYIAPEQVPVQFGGLYKEDDTEFSTSDAVTELTVKPSSKETVEIPATENSTVVWELRVLGWEVSYGAEFTPDAEGGYTVIVQKTRKVPAHEEPIMKGSFKATEPGKLVLGVNNPASRKKKLLCRFKVRSAAA

SEQ ID NO: 43213 - protein, 301 aa, Zea mays
  Clone ID: LIB3062-057-F6_FLI.pep
ASPWARSRSPHTAAARQPTYSGRLPGRGPRSMAARRSRGWARGAAAFAAVALAVGAGRRYGWDGASAVAAFREAQGALGHWAAPAYVAAHALTLALCPPYAIFFEGGAALIFGFLPGVACVFSAKVLGASLSFWIGRAIFRYFTSAMEWLQRNKYFHVVVKGVERDGWKFVLLARFSPLPSYIINYALSATDVGFFRDFLFPTVIGCLPMILQNVSIVSLAGAAVASTTGSNKSHIYSYLFPAIGIVSSVLISWRIKQYSSALAVPEELQSSPTNGDHNGDAMLASAPSKNTGSGKTRKRR

SEQ ID NO: 43214 - protein, 598 aa, Zea mays
  Clone ID: LIB3066-011-D7_FLI.pep
APATGRIDSTDHPDRLRAAALTPVTRRARIGEGLPPRRGMVWSAGMATMRGASAAALLVLALAAAVARAEDPYHFFEWKVTYGTRTIMGTAQKVILINDMFPGPTINCSSNNNILVNVFNMLDQPLLFTWHGIQQRKNSWQDGMPGTMCPIQPNTNFTYHWQPKDQIGSFFYYPSTGMQRAAGAYGLISVHSRDLIPVPFDTPADDFPVLVGDWYTKDHAVLAKNLDAGKGIGRPAGLVINGKNEKDASNPPMYNVEAGKTYRFRVCNVGIKASFNIRIQDHIMKLVEMEGSHTMQNDYDSLDLHIGQCLSFLVTADQKPGDYLLVASTRFIKEKSSTTAVIRYKGSSAPPPAKLPEGPSGWAWSINQCRSFRWNLTASAARPNPQGSYHYGQINITRTIKLAMGRGKVDGKERFAFNGVSHVDPETPVKLAEYFNASDGVFKYNLIGDVPPSNTAPTKMAPNVISAEFRTFIEVVFENPEKSIDTIHIDGYAFFAVGMGPGKWTAASRSTYNLLDTVSRHTIQVYPRSWTAVMMTFDNAGMWSVRSNIWERQYLGEQLYVSVISPERSLRDEYNMPETSLRCGKVVGLPMPPSYRAV

SEQ ID NO: 43215 - protein, 284 aa, Zea mays
  Clone ID: LIB3066-052-B10_FLI.pep
HIDQSELLKNMTHGFARLAGGLQRDGPGHGEPAALGHVDLSVIDPVPVEALDERGEHEAGGPQSERLPGAPAPSHPERQHQPALGLAVAEPLRPELVRLLPRRRVPVDGVRVDEQQRAAGHVVAADRAVRRRLVRQQQRGHRVQAQRLVDDALQVAQPGHVVHGDEAGRAHGRLDLCLGLLQRLRVVQQQRHGPFYRGRRRLRSGCKQVPAQCHDHGVRVHVRLRLLQREHHGDHALLLVAVAVAVQPPPLRVDEPLQEGVPPADNVPDLVPHPEHVEPPQERQ

SEQ ID NO: 43216 - protein, 243 aa, Zea mays
  Clone ID: LIB3067-013-A12_FLI.pep
LAVRPWLCICNPARSIFLVPPLPRLRQRGEATDRTFPSGGAYQPQGAMALSATLRISLSVAFFGVLAFVLGVIAENKKPASGTPILGKDVVICTFPSDPTLAMGSLSIVALVVAAIVGHVAIFFPYLGKSVPRGALFQSTSLIVFFVVAELVSALALAMSLWATVTEGLHRSKNIHHDMDYQCPTAKTGLFGGAAFLALDAALFWLVCQMLALNARADYLDEDDGKGEYGQIYAAQVDDGSKV

SEQ ID NO: 43217 - protein, 591 aa, Zea mays
  Clone ID: LIB3066-030-D2_FLI.pep
SALDGHYDEKRKSNVEYTEDEKKAVIAALKKKALSASQKFRHSMKRGRKSSKVMSISILDEREPEEVQAVDAFRQLLVLEELLPSQHDDYHMMLRFLKARKFDIEKAKQMWSDMLKWRKEFGADTILEEFEFEEADKVAECYPQGYHGVDKEGRPVYFERLGQIDVNRLMQVTTMDRFVKNHVKEFEKNFAVKFPACSIAAKHHIDQSTTILDVQGVGMKQFSKAARELIGMLQKIDGDNYPETLCRMFIINAGQGFRLLWGTVKSFLDPKTTAKIHVLGNKYQSKLLEVIDASELPEIFGGTCRCEGGCMKADKGPWKDPEIMKMVQSGDGRCGSLGTASFEAPEKMICEDDTYPKKQALFDGETQLAGDEHSQSQKISRGRIEHPHVSPLHEELIPTSIHTPGSPYSCDVPMVEEAIDAICKSHGTPPDEKIAITKAIINVSNGSKPPLFAGIIALVMSIATMVRLTRSMMPGKVLGAAIGGATLSEGKSKVQERQRSKLSEEAVEEAEDAVSAKRLSELEEKVIALLTKPASMPADKEEVLQAAVSRVSALEEELAATKKTLQETLERQLEIVAYIEKKKKSKRFFRW

SEQ ID NO: 43218 - protein, 483 aa, Zea mays
  Clone ID: LIB3067-008-A2_FLI.pep
VASNPESMRGWGLLVLSLHVLSCLVSGVASGRTSSYVRTEFPSTDIPLESEWFAIPKGYNAPQQVHITQGDYDGKAVIVSWVTPEEPGPSEVFYGKEKLYDQKAEGTTTNYTFYDYKSGYIHHCLVDGLEYNTKYYYKIGSGNSAREFWFETPPAIDPDASYTFGIIGDLGQTFNSLSTLQHYEKTGGQTVLFVGDLSYADRYEHNDGIRWDSWGRFVEHSTAYQPWIWNTGNHEIEYRPDLGETSVFKPYLHRYMTPYLASKSSSPMWYAVRRASAHIIVLSSYSPFVKYTPQWLWLKNEFKRVDREKTPWLIVLMHSPMYNSNEAHYMEGESMRAAFEKWFVKYKVDLVFAGHVHAYERSYRISNVNYNITSGNRYPVPDKSAPVYITVGDGGNQEGLASRFYNPQPDYSAFREASYGHSVLQLKNRTHAIYQWNRNDDGNPVPADTVMFHNQYWTSSTRRRRLKKNHLHLEDLEDLISLL

SEQ ID NO: 43219 - protein, 126 aa, Zea mays
  Clone ID: LIB3079-045-E8_FLI.pep
ALWMQIIGFSVRFLSSFLWIQMYRLGASSSTPTYFETNHEARISFLSPRSDSVRRSPTADDILGGSIYDPSYYSSLFEDVRNNACNHQGDKQSGSNDSGSTSAGQTPRLKSFANDVEGGLKRPLNS

SEQ ID NO: 43220 - protein, 117 aa, Zea mays
  Clone ID: LIB3088-043-E7_FLI.pep
RASPGGLRKTKSLPTRSFLPIHLLCYRVCDYSTPQRMLATLQPAAATVSPSLVRTHITKPLHITSGFLAESVSLRQYTSARHGLLVWYAARRLRLAAPCHGLRRRSRSTGERGPARR

SEQ ID NO: 43221 - protein, 222 aa, Zea mays
  Clone ID: LIB3088-043-F3_FLI.pep
FSGWCRLLLLRCRARGPCGPLRLRRMRKQEADARPAVPPCAPIARGRPSCSPAPSGPVVEESSSPASRPSLCFPCRGGVLLCAGAAQPHVSFRRCDAHGRRCAPPYSTPTFARPSAARRDAARLELRVPVRVDLLLPSASSGLRPCRAPLLASRSCSIEQQSCSCPVRGTIRLRQAGTLATSAASSPRGGVSVNDSRLVGSLCCRSFAEMTEICMCCKSFAD

SEQ ID NO: 43222 - protein, 159 aa, Zea mays
  Clone ID: LIB3116-017-E9_FLI.pep
SLFLLKKELYLWGLGRTQSYFLFHSSAEVMAHLLGLAICGGRGRRVQLIPGLDPGDHGVTELDKVGVNRAQLLLHLSREVDVALLDGVAVLGDGHVLEEGDDVLLPEDALVFLLQVNEGVASLAVPDVWQASLDSQAQVVADDLSYCFSRKIIIRPMYI

SEQ ID NO: 43223 - protein, 144 aa, Zea mays
  Clone ID: LIB3115-031-G7_FLI.pep
RLRNAGSPAHAARKPEAERGLSKRPARNWCSGPPRGWARATRRPTPFLPSSATPARSPSPVASPWRATPPPHPCQRSAPGSLTSSRSSSSSSSPPTSSPSVTGSTGSPRTGPGSPRGARSTKGTAPAAGCLKPVCYFSPASLAC

SEQ ID NO: 43224 - protein, 185 aa, Zea mays
  Clone ID: LIB3079-041-C2_FLI.pep
KTAGLHPTMSAPNSDSNMQQLVPIAPPGKASGGDSGKELVVADPAGKRSGGVKLREDEEDLEVKLRRIMENVPVRVSNTSGSSAGSGSGDFHQYRQMRRREQDRLARMDADYQKRKEIAEFELRREERMKAAEERTAKKRLKRQKKKQRKKEKRAKTGDNGGEEPNRVESSDDDEGSDDDDKSKQ

SEQ ID NO: 43225 - protein, 68 aa, Zea mays
  Clone ID: LIB3115-025-B11_FLI.pep
CPRSLHIFTIIVAVKQAKKTKERKLPFLLLQGNLIQEEEASKEEFQRVKKKTSLASLGLNSCLTQESN

SEQ ID NO: 43226 - protein, 173 aa, Zea mays
  Clone ID: LIB3136-002-F11_FLI.pep
ERRHSFPHSARLGKLAVKLRPSGDTTTSLQCLPLRRLERERPAMTKTTPPAFVYRISTADEWAEFQRTGATLGGDLDSSTGCIHLSDLNQVKMTLKNFFLGRNDLYLLQIDTFKLADGLIYELSDGDNYFPHFYGPGRSFAPLQLDTVVKADKIEFADNDFTCGLLDGSYLPS

SEQ ID NO: 43227 - protein, 192 aa, Zea mays
  Clone ID: LIB3116-004-C2_FLI.pep
TANKGEGNIILKLITYSYIRWPDNIYLRKPWAILNSPPPPALSSPPPCLFPPTSCSAPFMTSPRPNPSDDLLPSSAAGAGTAAGSLGASGAGDLGAASSPAAAAGCSCSVACPALNSFRYPSAFSTYCPAGLSSSLPYADAACRSSAAAPATSCLSTFSTLFCWNTDTAAPATSLPLENRSPPELLLPSAIG

SEQ ID NO: 43228 - protein, 140 aa, Zea mays
  Clone ID: LIB189-012-D11_FLI.pep
ELPSPLSLIRNFLPHLSSAHLPPSWPPPPLPTPEHPAPSTPLHPDSPRPSWPRWGRPWHRLRGDRSGRKCWSTWRRTTSSNGGRSYARASPTPAVSSRSLSGVVGTTPPPRPLGHRTRTCLLSTSLKSLDPMAKVCVYGS

SEQ ID NO: 43229 - protein, 576 aa, Zea mays
  Clone ID: LIB3060-046-E4_FLI.pep
SAPCGGGGGGSADDLDSAATEGEQQADEERAARRTTAVAAAAAMGESLLTALSMDTATAHHPHQGPSTFLSMDTASHDDFDLFLQPQGPFRRCLHAAAVAPPDINLPLAADPSPPPLASLDANVDMLDVGLGGSQHYDSDSPAAAGPVSAPAAAATTMVAVSHTKGSGSSAARKCVKRNVSIWGAWFFFTHYFKPVMSADKAGKAKAATTTGGNGNSATLDAFLVQHDMENIYMWVFKERPENALGKMQLRSFMNGHSRLGEPQFPFSADKGFVRSHRMQRKHYRGLSNPQCLHGIEIVRAPNLAGVPEADLKRWMELTGRDANFSVPTEASDFESWRNLPSTDFELERPATAAPAKSSSHGHHKKLLNGSGLNLSTQPSNHSSGDGMEITATCNKRRKDSSPTAMEEDCSNSNSDKAQDMDVSHTFEPSWMNDFSGVMRHASGPVTAAKTIYEDSKGYLIIVSLPFADFQKVKVSWKNTLTNGIVKVSCTSVGRMPLLKRHDRTFRLADPAPEHCPPGEFVREIPLPTRIPEDATLEAYCDETGTGLEIIVPKFRVGPEEHEVHVSMRPPSSWCQ

SEQ ID NO: 43230 - protein, 216 aa, Zea mays
  Clone ID: LIB3060-045-F8_FLI.pep
PPSKLPWRRSSLKLPCTASLSLWSPSSREVPCAPAPCRSPSVARCGAPAMAAKLPSSFPPRFALCSLAPLSSSVPFSSARSGHGIHPRAVPWKSQLGSVFSRRFSLMRAQPCRSSARKFSVGHARSSLFAADFAIEFSSSPTLQLIVIAKSFPSPRHKIHSDTISSSFRASVKKSQESGEDEASSAIFPKRSTNCLDRKIATDLVDSCQLWKRYVN

SEQ ID NO: 43231 - protein, 207 aa, Zea mays
  Clone ID: LIB3137-002-D11_FLI.pep
GMSEFQESLQHLIWLVQLLEWVQNHSPPLPKVSKSQTMSKPAVHSVPVEVERIDIGEPENPGPKYNSRSTYQPVSIDPFALSPDPNEQENLDIFGDDDGNASPNNLASGEGAPTRGFDVNLPNQDNMDDEIADVDVNDEADEGLNAADALRAQVNAEGQQGQDSSSSSGTSSSSSSGSGSGSGSGSSSSDSDGSDADSASSGGDVDI

SEQ ID NO: 43232 - protein, 519 aa, Zea mays
  Clone ID: LIB3137-057-E1_FLI.pep
GRAPWPRPLSPARRCPHRLPVPYCHPSVRPSAQAACPAPWPPGRWLSAQAPGRRSHRPRPPANQSAAGCRPPSLQFAGQIINHSDTPAPPRRESSATMVAAVSLPSQAQAVLRSRLCDPVFIHSALSSSLDTNYSKLKYLVASSVSEACNNSVLLLGPRGCGKAAVVDMVLDDLKEEHPDAISVIRLNGMLHNDDNCAMKEIARQLCLEHQLSFSKMASSDDNTEFMIDMLRECGLAHKTILFILEEFDLFAQGKQRLLYSLLDAMQSLTSQAVVIGVSCRLDADQLLEKRVRSRFSHRKLLFISPSLDDIQRLVEHLLILAKDSGLPSKYIADYNSRLTSIFSDKKFKGCLNSLMDADATTSNIQRFLFRAVSYMDMESGFLSVESFLKALSSMQRQPKMDSLQDLSILELYILVCMHRLESKEQTSYNFTSIMKEYRSIQDAYKTSDKYASTVCFRAFEHLLDRELISFGDNRWRNQALEYRPVKLLISSRELAESLKLNTTCPAVLQKLFDRERYM

SEQ ID NO: 43233 - protein, 83 aa, Zea mays
  Clone ID: LIB3136-038-F9_FLI.pep
HAPHESLSHLVQTPPPPTNPKNPKKKEETIICALAQNPCSHGVKASHCLIATPADQNCLQLPVPYQKAIRSGRHHDGSAPLRQ

SEQ ID NO: 43234 - protein, 251 aa, Zea mays
  Clone ID: LIB3137-040-F2_FLI.pep
DPLSPNSPPKQPRREIPRSTTASRPRPPSVLLPSFPPVAAGDGERRSLHHSFPPLVAGDGERISLPPSFPPVVAGDGERILHSSFLPPVVARDEGPGSKMFYGAMVWDPWLIVSQIVCLQCLYYLSLGVAMALLVGTRVPRLTLLYFFDFATLTPRTPTGWCAIASFILAAVAGAGFMLYVIERAKKCLDFAATLYIIHLFICIVYGGWPASITWWVVNITGLAIMALLGEYLCIRRELKEIPISRLRASV

SEQ ID NO: 43235 - protein, 186 aa, Zea mays
  Clone ID: LIB3150-020-F5_FLI.pep
PTRTVNVNSIMHTVGFVDAEDMNLRKHKYRSWLGYSNSKLAQVKFSSMLHKKIPAEAGIGVVCASPGIVDTNVARDLPKIVVAAYHLIPYFIFDAQEGSRSALFAASDPQVPEYCETLKSEDWPVCACINYDCSPMNASEEAHNLETSQLVWEKTLEMVGLPPDALEKLIAGESVQCRYGQQDTTF

SEQ ID NO: 43236 - protein, 333 aa, Zea mays
  Clone ID: LIB3150-056-B1_FLI.pep
QDLLALVYFGSLFDVKQQSDFVSLVYTRELERSSCLTYDYVGDDPEDSLAETDLNAVSALASLAALRPPAAAGVSHRDALQACAHHARLWLCRADEPIHPDSTITYAGVRAKLDRIMASGYFTAQLEMRTPLDLAAAVASFGAGGVQVQESMVVSPQAPEAVEESQAVEGHKNEKEDSQATEIYNDHPVVDSEHVEDEVLVHPTDEVPPAETEQEQETFDADVKDQEQKDQQFIQRRSYQNQRGGGRGGSRRGYPNGRGGRGGRGGGYQNGRGGYQNGRGGAGGYYYESGYYQPRNYNRGRGGRSGGGNSYYNSHGGGAQGHHPGSVELGANA

SEQ ID NO: 43237 - protein, 442 aa, Zea mays
  Clone ID: LIB3150-007-B5_FLI.pep
GRRQGSAAQERRRQGPGPGPEAAAAQGWSGRRRRRRESGGAAALAADAAAADADAAADADERDEVCSSGAHGHGRRSHADADAVPGGSAGAGAGRRGQGPQDRQVRPPGGRGVRGRRQRPRRRVRRTRRRGFRGRRPRRRRRRRPVRRPRDGDEAHGHAPGRCCRWRQRKRRRQEGWRRERGPGSDQWERQQRRRGEAERGRQKRGQERQGRRRRRRRRCPGRREPGWAGQAERRLPRRRRSRRADDGRRAAAACGHDDEAAEHDGRRGRFPRHGPDGRPPPHGWRRHAAGRRGRRARHAGWWQHQHGRWRNAWGRVLSARRWRRHAGRRGDAGHVAAASAAAAAHGGGDAAAAAAHGCDHAAAAATDDDDERARPRPRPPWPRRVRVRAPGDAAVPAAAGVLLPDAAAPPARQHVQRREPQRVLGDVRRGAAAACGGLRRK

SEQ ID NO: 43238 - protein, 310 aa, Zea mays
  Clone ID: LIB3150-045-D1_FLI.pep
PAHAPPPALSFSTMAGRPPPSYARYSALQGGRPFAGEEHPSDSRVVYPSYLAPEGSVASYYASRPVLPVGSDVLRNDVISQPRTHGYDGPARVTNPALAGLTGLPAGVTARGPSALEDPSLAGLSGLAPVRATGGATARGSGALEDPSLAGLSGLAPARALAPRALKEELDVVGRSSSVGRGASIPDVEHHSSIPNFDGPSENESNILFVDCLPTDCTRREVAHLFRCFPGFKDIRVVHKEPRRSGDKAYVLCFVEFENAKFARTPMQALQGYRFDDRKPDDRCLEIHFARFPFALPGAGAGAARDHRKR

SEQ ID NO: 43239 - protein, 308 aa, Zea mays
  Clone ID: LIB3137-009-E10_FLI.pep
RDIEVATIDVAIGNTYLALARFDEAVFSYQKALTVLKSARGDDHPTVASVYVRLADLYHRTGRLRESKSYCENALRVYAKPAPGAAPDEIGGGLMEIAAIYEALDDLDEALRLLQRALKLLEDAPGQWSTVAGIEAQMGVLYYMVGRYAESRSSFESAVAKLRASGERKSAFFGVLLNQMGLGCVQLFKIDEAAQLFEEARAVLEQECGASHPDTLGVYSNLAAIYDAMGRVDDAIEILEHVLKVREEKLGTANPDVEDEKKRLAELLKEAGRSRNRKQKSLENLFGTNSQRAKKEAGRRWSNFGFRS

SEQ ID NO: 43240 - protein, 386 aa, Zea mays
  Clone ID: LIB3137-059-F9_FLI.pep
FSIPQQEFVSAKLTDKLEQQMHDPLVSRSCCLPLWCIELMSACPFLFSFEARWKYFQLTAFGSLKNHHGHMMDASVNSVAERGSSHSRKKFKVDRDDILVSAAKMMKSHAKSNALLEVEYKEEVGTGLGPTMEFYTLISHEFQKSGLGMWRGELPCKSGTHDTHVSRFVVASNGLFPRPWSASEDPASFQEVSERFHLLGLVVAKAIKDNRILDIPFSKAFYKLILGQELNIYDIQSLDSELAICLVEFQALACQRKYAESNLTRDCQISDLTYRGCRIEDLAIEFALPGYPEYVLSPGSRSDCLNAENLEEYVRHVVDATVKSGIARQMEAFKSGFNEVFPLKKLQVFSEDELERLLCGEQDTWDVCIYLLLASVHVLLLFYSGC

SEQ ID NO: 43241 - protein, 69 aa, Zea mays
  Clone ID: LIB3159-012-H3_FLI.pep
QGRRPARQQQLSKYSNQQRYQFYEHHVYCDMTSIALDLCMESYYFLPGDGHCLGNLSHGWGPRLLVLSS

SEQ ID NO: 43242 - protein, 179 aa, Zea mays
  Clone ID: LIB3156-004-F4_FLI.pep
WLPSPPRGVFSVAAPCVITLASALDYSAMEVAAPSFPDLPPSVQSSASLLLSLPWTPPLPQLTPSSRHGARPCPNSVASVSPSLCWWLASHLPCVGRLPLRSRRWRSSLLQLVLMAMPLFPRSELAQLPSHLCSPLSVSVRAAARRGRPMSSTRTRCLMGGLNWSSLFSIRDPQVFAQR

SEQ ID NO: 43243 - protein, 314 aa, Zea mays
  Clone ID: LIB3150-108-G10_FLI.pep
AVDPTFVSVDVHVLRLPERRCRKPANADEAGPSEPPFSVLQPPQPAERTNNCRPLRWQHLRNFRMMRHEQAQTRDQDPTIPLRVTFCAETFIPYKKFPPESQGPHLNAPATVEPLLCEANLPFDPATVFPPPYDTVSSFTSAKNLVFCEGNLYQVWRNASCTVTLQLPTGGQRRVAENEILVLRYYPRRQPCWDVVKNLGGHSLFVGRNNAVSMYAEGVPGLRGNCVYWIGGRGRDQGMVFDMESGSSTPCRAPPVSLLPGHPHSTICWYFLSDLMSINNSYNSSCSSGSSSGGRKVYQTRARARADLGHDMEE

SEQ ID NO: 43244 - protein, 295 aa, Zea mays
  Clone ID: LIB3151-014-E10_FLI.pep
PRRFIVTIARFRARGGATPSTRPEGPAVHRCRLASLAGEVGPRVDAELAAVLPVVADARVHLGGVVPAALEGAVDGPGGGAEPLRHHPVHAVHPEPERRLERHHGVPRHPAGVPEPVEADGPPRGPVVVVPRDLQRAAPVVLLPRGARPLPLGRVAVGVALVDLADVAEMPGLVRGVREEGGDLALALHLRPAMGEAWVRLDGAQERAPGVEVLALAPAPGLALDAVEEGAGDDASHVRTTAATAAAAARAARARLAPVAAVLVGRAAVAKLAAAYVWLAAAVLRGGRAGDSAEE

SEQ ID NO: 43245 - protein, 245 aa, Zea mays
  Clone ID: LIB3180-009-C11_FLI.pep
PCVLFISLLSAVTFIKDITGGPSLRVQQQTPKLTIRCMPFVRRRRHSFGNSRNKVKFLRPAKRHPELIGHVHLGPGALHLGGHLPVEMVDEVREHDLDGGDGERGPRADPAPRPERHEPDVLAVHVDLGVAALFQEALREELLGLVPARRVPGERPRVDDDARAGGDGVAVDLAVVGGEVRQEERRRRVDAHGLLDGGLQVWHPAQVLLHHHAAVGRRRPHLLLELGQDVAVVHQLAHGVLQHQE

SEQ ID NO: 43246 - protein, 627 aa, Zea mays
  Clone ID: LIB3180-024-G12_FLI.pep
SPVPITADTRDAEMLNKTPLSLPLKRKLVDVKDNNSVSATKRLATTDQTYQPSVFQTPAPTRKGLSVAVDSPTSFHCGRTNFNYVSTENLDNSQSTPGTLITTTLPGVNDQQSGNLERMTLDSLVVQYLKHQHRQCPAPVTTLPPLSLLHPHVCPEPSRSLSAPANIAARMGSREIRRQFSGIQIPRRDRHFIYSRFKQCRVCRDEASLLTCMTFLGDASRVVAGNHTGELRIFDCNTANLLETQTCHLHLVTTMEATCSGGHELILTSSLNEVKIWDAFSVSAGPLHTFEACKAARFNHSGTSFAALSTDTAQREVQLYDVQTYTLATQLPDNTSSSGSGRGYIQPIIHFSPSDTMLLWNGVLWDTRQPNFVHQFDQFTDYCGGGFHPAGNEVILNSEVWDLRKFKLLRSVPSLDQTVIKFNGTGDVIYAILRRNLDDVTSSINARRVRHPLFPAFRTIDAVTYSDIATVQIDRCVLDLATEPNDSLIGVVAMDDHQELFSSARLFEVGRKRITDDDSDPEDAGETDDDDDDDGDSDDDVLLAPVLEGDTDSEEISSSSDDGDEDGGDDDIPSSDDIEDDPEYIDGGGDFEGGGGLMDILGDDEGEGDESDMMESFSSGDEEGWIM

SEQ ID NO: 43247 - protein, 195 aa, Zea mays
  Clone ID: LIB3150-088-G1_FLI.pep
PILHTKPRIALPCSATSSDPDHPTPTPDNRLMEAKMGRFFESVSNFFTGGDHIPWCDRDLIAGCEGELVNAANEEQRNESLMRLSWALVHSRQTDDVNRGISMLQASLDNSASPLQTREKLYLLAVGFYRIGDYSKSRQLADRCLEIQADWRQAISLKKAIEDKIAKDGLIGIGIATTAVGLLVGGIAAAVARKK

SEQ ID NO: 43248 - protein, 401 aa, Zea mays
  Clone ID: LIB3150-113-G12_FLI.pep
RRRFEKKRFLLVLDDVWYSKNGNRHDDLQQILSPLNVAKAGSKILATSRTLDALLALGATRRIPIRDLDDGAFLNLFMHYALDFASIDERDRGEFQMVGAEIAKKLKRSPLAARTVGRQLCIRPNMEFWRNTRDRDLLDETMGALWWSYQHLDEQVRRCFSYCSIFPRRRWLDPEYLVRLWVAEGFVTASRNTGEELEAVGRGYFDELVSASFLQPVDGDKERYTIHDLLHDLVSKVAGSDCFRADNGWEGEFPQDVRHLWVENCKLDLIAHKITRLKKLRTLFISAGENGTPVEEKALLENIFTGVTTLRVLQITPWTAGTLSFPASVGRLKHLRYLSVGRHIGGTKVILPSTVVLGLYHLQLLDCPSVAFSSCEDIVKGLFGCTGMSQDSFQLIKIYIN

SEQ ID NO: 43249 - protein, 490 aa, Zea mays
  Clone ID: LIB3151-015-C12_FLI.pep
ISQEIDRFKATDANRLRAEYNRLVDGLAQRGNLPISDAWLANPSLPDDILKEAVPGNIRRAEHFLAVLRRLVRFLDGRLETENVENEMPVSFVASIHSQAGIDQKMLRFCYDRLHSLMMTLEITDTDEFMHIQTICDFATLIGTYTRGFSIIIEPYDDRMPDIRDPVIQLSCHDASLAIRPVFDRFETVVITSGTLSPIDLYPRLLNFNPVISRSFTMSLTRDCICPMVLTRGSDQLPVSTKFDMRSDPGVVRNYGRLLLEMASAVPDGIVCFFVSYSYMDGIVNSWHEMGILQDIMQHKLVFIETPDVVETTLALDNYRKACDCGRGAIFFSVARGKVAEGIDFDRHYGRLVIMFGVPFQYTLSRILLARLEYLRETFQIKEGDFLTFDALRQAAQCVGRVIRSKADYGMMIFADKRYSRHDKRSKLPGWILSHLHDAHLNLSTDMALHIAREFLRRMAQPYDKAGSGGKKTLLTEEDLENLAQDGMAM

SEQ ID NO: 43250 - protein, 168 aa, Zea mays
  Clone ID: LIB3151-019-F1_FLI.pep
FCEGNLYQVWRNASCTVTLQLPTGGQRRVAENEILVLRYYPRRQPCWDVVKNLGGHSLFVGRNNAVSMYAEGVPGLRGNCVYWIGGRGRDQGMVFDMESGSSTPCRAPPVSLLPGHPHSTICWYFLSDLMSINNSYNSSCSSGSSSGGRKVYQTRARARADLGHDMEE

SEQ ID NO: 43251 - protein, 189 aa, Zea mays
  Clone ID: LIB3159-011-A5_FLI.pep
NSYSFKRFNGVSEVCLIRSAYSFFDGHNQHTAACVRGEDYVVVLSPGGWSGGSANARRVVGILLRERRRRVSRPHETASGQGRGRRPGLLSPPPPLPPARLSLSVRAACSQVANEALVAWCNLSREYKELAIDDAGNRIWRLCGVEGEMASEAKDVGILTMIIYFLPNCVIQERLPSQEVLHVVLGTRL

SEQ ID NO: 43252 - protein, 206 aa, Zea mays
  Clone ID: LIB3150-079-F10_FLI.pep
NLLPPSLQAPSCRRFPRMGGSRRKLKRSRTKVRVGLPRRKPNEFKAAFELPEALAAAAGAGAGWDAEGSVVKNYAAFGVVANPNLLGAHSRGTPRLVQSAALQAPDVAAAHAPVPEFEPIDTGSDLEDDDLKSALGKKRKDGKSAPLQPLTKVQRVCIGRLIEKYGDDYKAMFMDTKLNAMQHSVGTLKKLCERHHVDGKIFVYPL

SEQ ID NO: 43253 - protein, 307 aa, Zea mays
  Clone ID: LIB3180-015-C1_FLI.pep
REKGRKTEGNSNGAADQGLTRATMLLKRVAADDGSGAGAGAGVGRPRLFAMPRLLVGLEAPRCGAPDCASPMTARSPTSPLDLRPFASLLRSPRSPRTRSWDSHRLGLGGLVDDTLAEPVACARSRLLGLGPQARQPFKLPQRLAKPLATQPRDCSHASSELGNVGTAAGCKPLPCSRSYGDVKSGPEVTVPGGAPPGASSHPADVGKFPAPGSLPVSIGGPRWYIGSVSATEVEQSEDYTCIIAHGPNPKTTRIFGDCILEPCTPSVSDGDGMDAMEVKEGAESYWLVKCFDASEPGEFLDSCISC

SEQ ID NO: 43254 - protein, 412 aa, Zea mays
  Clone ID: LIB3150-092-B1_FLI.pep
AFFLCVCRSEEAMAAPRKGTATPLGTVFSPEETKRAVARVAESVAGRRAELARLQGFAADNAALVSLVNRLPDELSHDIMVPFGGAAFFPGRLIHTNELLVLLGEGYYAERSAKQTTNILHRRGQELEAQVEAMKATIADLEAEAKFFESTATEASEGLVEIREEYDEDLETNSSRSEASVATVVMSDKDREHARIMARLDELEREEKDAGSACEDDNDGDDDDGDAGTSDDGEENKESGNALSDVNEDYSSGFGASFSGSGGNDRSHGNIKSALKKPGGDEMLIGISHKPSSHTSHLAFPGQTSATNSDVRVHTKAVTFEDDKYVVSSSKSPPLLLDSIQSDPVLKNSSDPALSRDRKIISSGRKAFTGSIIEHDDNVSTIEPSVASPLAKPGTCASSRPVSRFKMQKGGR

SEQ ID NO: 43255 - protein, 193 aa, Zea mays
  Clone ID: LIB3159-002-E7_FLI.pep
KHERHCSAGDASQERATDTPVRALWSSSPILALEGPSRRPPCLWIFSNLTIPASRLPSQCKTPTLLRCIPLRYIYGQWGCEGHATIVPDTVLTLLAVCLPASDGRGPGQQRHHLPGAAGPGASSALPPAAAGGGGIAIFFPLPFLLLLLAPRAIHHQLPDPRAHGAGHPRRLRPHPCLLRLRHPLLPHLAPRP

SEQ ID NO: 43256 - protein, 201 aa, Zea mays
  Clone ID: LIB3150-109-F10_FLI.pep
EKAGYTGKIKIGMDVAASEFLTKDGNYDLNFKNQPNDGAHILSAQHLGDLYRDFVKDFPIVSIEDPFDQDDWSSWASLQSSVDIQIVGDDLLVTNPKRIADAIDKKACNALLLKVNQIGTVTESIQAALDSKAAGWGVMVSHRSGETEDNFIADLAVGLASGQIKTGAPCRSERLAKYNQLLRIEEELGNVRYAGEAFRSP

SEQ ID NO: 43257 - protein, 270 aa, Zea mays
  Clone ID: LIB3150-110-C12_FLI.pep
PALVRLLRAFLRKIPNELNQEGRLPNILAISRSLLSRSSTEDSAFYMLNTIVENVGFDILNPYITEIWSALFTRLQTRQAVKYVNSLVVFMSLVLVKYGSSVLVSSVDSIQPNLFTQILQRFWIPNLKLIKGALEVKLTAVASTKLLCESAVLLDAAAAQLWGKLLDSIVTLLSRTNQDGTQEQNDGTDAVDIQKTSSYSVSFVRLQYAGKSEDDLLKEVNDPKQFVVTSLATLSAQFPGRFGLVIEQHVDPANKSVLLQLCAAYSANIV

SEQ ID NO: 43258 - protein, 348 aa, Zea mays
  Clone ID: LIB143-065-F4_FLI.pep
CPSSLPVPQPPIPRSPLASFLRTGTVEQKLAATPESRLPIAITCRGTSTPAATMSSGKRSFFAPKKKATNPFDSDSDDDKPQQRPARASSVPPPDEQRGSSSLFGAGDRGGLFSSAANHHYRNDFRDAGGLEGQSVQELEGYAAYKAEETTRRTRGCVRIAEEMRDTASKTLVTVHQQGQQIHRTHMMAVDIDQDLSRSEKLLGDLGGLFSKKWKPKKNGAIRGPMLTRDDSFIRKGSHLEQRQKLGLADHPPPSNARQFRSEPSSALEKVEIEKAKQDDDLSDLSNILTELKGMAVDMGSEIERYCYISLSCRLICVVSNSFIFFLLYSQFSRKYPKLPKRKYYLSV

SEQ ID NO: 43259 - protein, 439 aa, Zea mays
  Clone ID: LIB148-029-A3_FLI.pep
VHQQCGDEGSRGRSAGVRRGVACRARGGGGGGGEGEGCGRRAVGARWLAGHRAAGRQGRRQVGQHPDGAQGVEARVRGDGAAEDRHPQGQLPDGRAGPGGPLQVLHHHPPRRQPARHRRPQRVQEELDRDPERRQPVHQRPRHHRRAGSPGVEQERVPAFLQLQNPPQQPGAGLRDERPDPRHHAAEQQVLPHEHLREQERGDRQGDDQGPRQQPQHGRHPHRRLEQRDHQRHHHRRRRRLRLHRPREQDHPREGRQVRPGPRHQRRQPGAVQGREGRGGREGDGVHARRHHQRPAHQVVRGLQVVAQGHQVPVPGRHHGQRLLPHHHRPEVLPQQHLRQVRRLQGGRQRRRLQEHPRHLQHAGGHHAQLRQQPALPGRAAHQRRHQVQQVRQQDHVRLQERHRQVHWHGEGARLRLNLLASITHSSSPLSFSLSPVFF

SEQ ID NO: 43260 - protein, 618 aa, Zea mays
  Clone ID: LIB143-004-D5_FLI.pep
SGGVAGLFYQGTEWCDSLIGLQSGSLLHQMVEQGKPRSIPTKAKKSPFVEVEVDEIGQASGVVFARESPLAPKSDQGCSVSHSHGDDETHESDGCVQSQGLDEHGWVDFGHSLQLVLFSRQWSLAESLVDLADQQPMLDYGLSIALDAIWFLRTKQDLEGLNSLISKIVASGAKDFARAILRTSLLASCVAACQSKAITVGNSKEIVAERLHDRLRDCPGAEHLKIEAGAKVQKFMEWALQCIHMHHCSEDTHMYRWNYNTLQEVQLHVSAFRTFLDIAGDNLSGKIFTEAFDAVCFPLTLFSSLFEPGWSSGSSAVSIKGLLSLLVEGGADNVNQCFLEAARFGSTELVRILLKVAYQNSLAVDTDLALVYASHYCKFKTMECLVDEGNVSSFLGPLIKAAERGCLQVVHWFVSRGVSDIEMCLALTTAASSGHFVVASYMLAHIPQQILEALSTQILKAARGQGSRPLDGVTFLLRSNFLRDAAATYEAADIIATGGTNGELPDLVAFLKEHWSQDAFAEGVSAGEMHFVNVMRVLRRGASPICLEDLPPEMVLGITYLPLYRECLSAGGQLLPQRLRGELLEAVHRLGEPVGPESQGKDLVLALERHMPSFLVGS

SEQ ID NO: 43261 - protein, 219 aa, Zea mays
  Clone ID: LIB143-011-B5_FLI.pep
LTDDEVSNLCSEFLTAGTDTTSTALQWIMAELVKNPDAQEKLYSEIRATCGDDQAEVGEEDTHRMPYLKAVVLEGLRRHPPAHFVLSHKAAEDTEVGGYLIPKGATVNFTVAEMGWDEREWDRPMEFVPERFLSGGDGEGVDVTGSREIKMMPFGAGRRICAGLGIAMLHLEYFVANLVREFEWKEVAGDEVDLSETREFTTVMKKPLRAQLVRRTTCV

SEQ ID NO: 43262 - protein, 766 aa, Zea mays
  Clone ID: LIB143-019-H6_FLI.pep
DYDNLDKKEDTDEFLTPLQSNEVPGVPAEGEVGHLLQNTEPVTDGDHVVGEEANQFDNLIASDGNQDPPPPLPILDAAGPSEEIPDVEETSDPKMDLPENQHFDETLTSDAMVLDSDVVPIQDISEGAIAAAFHPEDKGVEQNPQTLDKDELSPSGLPDYMEHVSADGMHPLGSNELSMATRTSETGDGEETIVEDLYKGESELENQNKQLESTPPDQYFSSPGIPAPSVVSTALQVPAGPIVVPASVDPTQENAIAALQILKVIESSAQAGELCTRREYARWLVAASNCLSRNTFSKVYPAMYIDNVTELAFDDVTPEDPDFPFIQGLAEAGLISSKLSRSDMNIPEDVHDNHILFSPESPLSRQDLVSWKMALDKRQLPEVDRNCLFKLSGYIDIDKINTAAWPALAADLDAGDQSITALAFGFTRLFQPNKPVTKGQAALAFSAGDSGEVVLEEVARIEAEKIAEAAVNAHAALVAQVEKDLNASFERELKEERERVETLEKVAEEARVELDRLRAEREEEKNILVRGRAAVESEMEVLLKLRSEVEEQLQNVLSKKVEVSFEKSRIEKLQKEIESDNSAVVQLQYELEVERKALSMARAWAEEEAKKAREHARALEEARNQWERQGIRVVVEGELKDDASAGVTWANAGKENAVDESINQAEALLEKLKTMSGEMEVRSRGAVERVMQHVRSFIAILKQQAADARQWCTEFGACAASRANEVSAQVKGSVSAFGATLGDKSKRAMEECKDGLERISHRFKTD

SEQ ID NO: 43263 - protein, 307 aa, Zea mays
  Clone ID: LIB143-040-A12_FLI.pep
FAGESLEDALRQLYLIDAIDENGQITDVGRVMAELPLEPSLSRTLIEANELGCLSQALTVASILSAEITLRSVSKDVVDGKRKRQELPDGSGWGDHIQLLQIFESWDQTGYDTKWCSHHDLQVRGMKLSKDVRNQLCQIIQKIAKGSTDVDARKSRKNDPDYRKLRRALCVGYGNQLAERMLHHNGYHTVGYRTQLVQVHPSSVLEGDEYGKFPMYVIYHELISTTRPYMRNVCAVEQAWVQPILKKLDKLDINRLSGGSSAPGDSELLGDNKQVNSSKNDVGVKQSEVDSKIQAARERYLARKGKK

SEQ ID NO: 43264 - protein, 459 aa, Zea mays
  Clone ID: LIB143-052-E11_FLI.pep
AVASSSILSYANRLTGGTHPPCGLPNCPLGPGPARAWPVAIHPFPSLRRTNLVPAPAKSSKATQPEAGRAAQEQGASSARAMAASSGTRSVRLLVLLLCLLGFCVALSHQESAADSCARAKVAVASLVPFDSTSFRCTAAWKQQDFVLRYKNTGPSEWSFILSAPDRGSYVAVGFSGKGAMVGSSAVVGWAANGRGTVKQYYLGGKSPEECAPNRGLLKLVRNRTAVASRSGRLYLAFQLSTDYPQPYLIYAVGPDGSLPQSDSLRLPAHQNMASRSFNYTSGLSYNVAGSGDAAFPPERKHGLLGMMGWGVLMPIGMITARYFRQLDPCWFYTHMAIQVAGYAVGIAGIVLGFRLSEDGLRNVDVHKALGIAILAMASLQVMAILARPDKTSKVRRFWNWYHHNIGRAAILLAIGNIFLGLSIAQETSAYIVSYGVFVAVWVLAVAAFEMKRCYADDD

SEQ ID NO: 43265 - protein, 134 aa, Zea mays
  Clone ID: LIB148-023-G4_FLI.pep
NEWINRHVQTQIKVLKYIYKRNPTEYRQWQPAASPSDPPLILLQVVGEEGEHGGAQHGADGRERGRGGAGGGGRRGLGGEDHGGGGGGGEDGAGDLLHLHRDLMWFAGAERSVVGIETRKNEGHAGLLARWING

SEQ ID NO: 43266 - protein, 208 aa, Zea mays
  Clone ID: LIB189-008-G12_FLI.pep
YQAQRPRRKKIRVPVSLLDDDILNSETAMSRLLPPVLSPLPAFSLPPPLLPRIHIRTSAVRGGAAENAMASGTTARERRLVKVREERRRREYDREHTYPGWAKVLENACRDDEELRAILGDSIGNPELMKQRIQERVRKKGRAQFNKSKTGSIVAFKVSFRDFNPLNSFIWFELFGEPTDRDVDLLGGVKWHCTISLDSPYSENNILS

SEQ ID NO: 43267 - protein, 137 aa, Zea mays
  Clone ID: LIB143-018-F6_FLI.pep
IAEGCIRDILEHFPHSHEKSSSVQKQLQPERFLADIYYFRICSYTEQIAVINYMEKFLREHKDVRIVIIDSVTFHFRQDFEDLALRTRVLSGLSLKLMKIAKTYNLAVVLLNQVTTKFTEGSFQLTLALGQFCVIQV

SEQ ID NO: 43268 - protein, 209 aa, Zea mays
  Clone ID: LIB3115-016-D12_FLI.pep
VKRSRLASVLHAGGDALHGEDERVFQAGRVLARRVQLDQSGGLVLVGELLGQRRLGRHLEVGVPYPLQRVGLEHVQGGDVGVAQHQPLLQEWIAFKNILVPSDLEEKLLCLHVFVPELLPKGLEFFRHKQLVIQAGNAGVSLGENHLQQVQGDPEEWPLVVHLFEDLEVPDVLVDGELEGGADSQPHGKVEPGLSPREDPGDGAQGRDA

SEQ ID NO: 43269 - protein, 251 aa, Zea mays
  Clone ID: LIB3180-014-B9_FLI.pep
FIESPWPTNEIRTQPLKPSLIISASKDESVRLWNVHTGICILIFAGAGGHRNEVLSVDFHPSDIERFASCGMDNTVKIWSMKEFWLYVDKSYSWTDLPSKFPTKYVQFPVLIAAVHSNYVDCTRWLGDFILSKSVDNEIVLWEPKTKEQSPGEGSIDILQKYPVPECDIWFIKFSCDFHFNQLAIGNREGKIYVWEVQSSPPVLIARLYNQQCKSPIRQTAVSFDGSTILGAGEDGTIWRWDEVDHPSSRN

SEQ ID NO: 43270 - protein, 431 aa, Zea mays
  Clone ID: LIB143-017-D4_FLI.pep
AFDVSILTIDNGVFEVLATNGDTHLGGEDFDQRIMEYFIKLIKKKYSKDISKDNRALGKLRREAERAKRALSNQHQVRVEIESLFDGTDFSEPLTRARFEELNNDLFRKTMGPVKKAMEDAGLEKSQIHEIVLVGGSTRIPKVQQLLKDYFNGKEPNKGVNPDEAVAFGAAVQGSILSGEGGDETKDILLLDVAPLTLGIETVGGVMTKLIPRNTVIPTKKSQVFTTYQDQQTTVSIQVFEGERSMTKDCRLLGKFDLNGIPSAPRGTPQIEVTFEVDANGILNVKAEDKGTGKSEKITITNEKGRLSQEEIDRMVREAEEFAEEDKKVKERIDARNQLETYVYNMKNTVGDKDKLADKLEAEEKEKVEEALKEALEWLDYNQSAEKEDYEEKLKEVEAVCNPIVSAVYQRSGGAPGGDADGGVDDDHDEL

SEQ ID NO: 43271 - protein, 393 aa, Glycine max
  Clone ID: 700899224_FLI.pep
LFGNQIRSMMHCASIVSAPSYAFPFLSGSASTTPTAISLTKRSWKPPPSMAKGPVRATVSIEKETPEANRPETFLRGVDEAQSSTSVRARFEKMIREAQDTVCSALEAADGGAQFKEDVWSRPGGGGGISRVLQDGAVWEKAGVNVSVVYGVMPPDAYRAAKGVPTDQKPGPVPFFAAGISSVLHPKNPFAPTLHFNYRYFETDAPKDAPGAPRQWWFGGGTDLTPAYIFEEDVKHFHSIQKQACDKFEPTFYPRFKKWCDDYFYIKHRGERRGLGGIFFDDLNDYDQEMLLSFATECANSVIPAYLPIIEKRKDLPFNDHQKAWQQLRRGRYVEFNLVYDRGTTFGLKTGGRIESILVSLPLTARWEYDHKPEEGSEEWKLLDACINPKEWI

SEQ ID NO: 43272 - protein, 201 aa, Glycine max
  Clone ID: 700845806_FLI.pep
AIKKDHELQAWWKEVVEKGHGDLKDKPWWPKMQTLQELIQSCSTIIWIASALHAAVNFGQYPYGGFILNRPTLSRRWIPEEGTPEYDEMTKNPQKAYLRTITPKFQALVDLSVIEILSRHASDEVYLGQRDNPNWTSNPKAIEAFKKFGKKLAEIETKISERNHDPNLRNRTGPAQLPYTVLLPTSETGLTFRGIPNSISI

SEQ ID NO: 43273 - protein, 255 aa, Zea mays
  Clone ID: 700045586_FLI.pep
LAMLPNAITSSLGSKVKLSWKLTSITKSDDKGYVLEYETPEGVVSVQAKSVIMTIPSYVASNILRPLSSDAADALSRFYYPPVAAVTVSYPKEAIRKECLIDGELQGFGQLHPRSQGVETLGTIYSSSLFPNRAPDGRVLLLNYIGGATNTGIVSKTESELVEAVDRDLRKMLINSTAVDPLVLGVRVWPQAIPQFLVGHLDLLEAAKAALDRGGYDGLFLGGNYVAGVALGRCVEGAYESASQISDFLTKYAYK

SEQ ID NO: 43274 - protein, 350 aa, Zea mays
  Clone ID: 700074243_FLI.pep
ASVQEREGGTQNPSTVADGRQSREMAVDEVNSVYVGSLPYEANEEMLRDAFGYYGTIVSVKVINDHTIKGKCYGFVTFTHPRAAEQAIAGMDGKKLGNRIIRVNEVRTRGPRDFGRDGFRRDPRRYGRDPYWDRRDREQSYDRERDPYHDRDSDRSHEHDRERDYEHGGFNREIDYPMDRDHEVDGIHPREHDRAAETHNMDSDNDKYKEHGSRKSHPKGRDSKDLSSSSDLQNDGKHQLDKTIQMREDLENEVSQIKDKISAKGQHIADLQKKAQKLEDELAAARKVSSERQLAVTDLYKHFLQLQDYNDRVKTAEHRLQSLVDAAMAELDMAEDATTRDGSMYENGVV

SEQ ID NO: 43275 - protein, 65 aa, Zea mays
  Clone ID: 700074572_FLI.pep
TIATTNPFHQLQKNHLLHDNKEFIKAAAELISLPSQKRAISMGPRQDPIILSFSLQCRSDGTSTW

SEQ ID NO: 43276 - protein, 662 aa, Zea mays
  Clone ID: 700076492_FLI.pep
LLARMMASNLYCSQIEDLMFELSMWRCSDELRMRADVLHLSTKKDAKHYIEFWKKVPPNEPYRVILSDVRDKLYNTRERSRELLSSGHSDIPEEATLTNVEQLLEPLELCYRSLCACGDSVIADGTLLDFLRQVSTFGLSLVRLDIRQESDRHTDVLDAITTYLGIGSYREWTEERRQEWLLSELNGKRPLFGSDLPKTEEISDVLDTFHVIAELPSDNFGAYIISMATAPSDVLAVELLQRECHVKTPLRVVPLFEKLADLEAAPAALARLFSIDWYRQRINGKQEVMIGYSDSGKDAGRLSAAWQLYKAQEELIKVAKDFGVKLTMFHGRGGTVGRGGGPTHLAILSQPPDTIHGSLRVTVQGEVIEQSFGEEHLCFRTLQRFTAATLEHGMHPPNAPKPEWRALLDEMAVVATEEYRSIVFKEPRFVEYFRLATPETEYGRMNIGSRPSKRKPSGGIDSLRAIPWIFAWTQTRFHLPVWLGFGAAFKNVLQKDIRNLHMLQEMYNEWPFFRVTIDLVEMVFAKGNPGIAALYDKLLVSEELHPLGEKLRANYEETQKLLLQVAGHRDLLEGDLYLKQRLRLRDAYITTLNVCQAYTLKRIRDPDYHVALRPHLSKEIMDSTKAAAELVKLNPGSEYAPGLEDTLILTMKGIAAGLQNTG

SEQ ID NO: 43277 - protein, 487 aa, Zea mays
  Clone ID: 700093685_FLI.pep
DKVVKFDFHGQPAEIKHGSVVIAAITSCTNTSNPSVMLGAGLVAKKACELGLEVKPWVKTSLAPGSGVVTKYLLQSGLQEYLNQQGFHIVGYGCTTCIGNSGDLDESVSTAITENDVVAAAVLSGNRNFEGRVHPLTRANYLASPPLVVAYALAGTVDIDFEKEPIGFGKDGKEVYFRDIWPSTEEIAQVVQSSVLPDMFKGTYEAITKGNPMWNQLTVPEASLYSWDSKSTYIHEPPYFKDMTMSPPGPSTVKDAYCLLNFGDSITTDHISPAGSIHKDSPAAKYLMERGVDRKDFNSYGSRRGNDEVMARGTFANIRIVNKFLNGEVGPKTIHVPTGEKLSVFDAAMRYKSEGHATIILAGAEYGSGSSRDWAAKGPMLLGVKAVIAKSFERIHRSNLVGMGIIPLCFKAGEDADSLGLTGHERYSIDLPTNLSEIRPGQDVTVTTDNGKSFTCIVRFDTEVELAYFNHGGILPYVIRNLAAAHN

SEQ ID NO: 43278 - protein, 232 aa, Zea mays
  Clone ID: 700083273_FLI.pep
HVYGFRFALAFYGNPTRPQLIALVAQEEVTSSGRQFEPPGMHMIYLPYSDDIRYPEEVHVTSDDAPRATDEQIKKASNIFKRIDLINFSACQFANPALQRHYGILEALALGEDEMPDIKDETLPDEEGLSKPGVANAIEEFKTSVYGENYDQEEAEAAAGKASRGNASKKRKEVTDAAAQISAAYDWAELADNGKLKEMPTVELRSYLTAHDLPVSGKKEVLISRILTHLGK

SEQ ID NO: 43279 - protein, 513 aa, Zea mays
  Clone ID: 700050092_FLI.pep
AMERRRRRRRPPRLPLLVFVLVATTCPLGSSGIGSFGVGAESNGASSSFRTRSLLQIGDRNEDGLFHLPHTRALTHKSRSHRKVPTPAPAPASAPAPSPSMSPPDSSPSPSPHGSHPMPRQSTPHRHPSITPPHLVRPVPRQDGNDPLVDTPAHSRHKHFWTTYGLVAAGIAVFLLVSAASILCFRAKKMGTVRPWATGLSGQLQKAFVTGVPSLKRSELETACEDFSNIIGSTSTCMLYKGTLSSGVEIAVASSLVTSAKDWSKENESQYRKKITNLSKVSHKNFMNLLGYCEEEHPFTRVMVFEYAPNGTLFEHLHVREAEKLDWMARLRISMGIAYCLEHMHQLQTPAALRNFDSTTVYLTDDFAAKVSDLEFWNDAKGHNSTTNNELAFSPDMEDIVRKYGMVLLEILTGRVPSSEDDGPLENWVSRYFEGGMRLEELIDPSIGFFPEDTARALCEVVRSCIDRDPKKRPQMKEVAARMREITALGPDGATPKVSPLWWAELEIMTSES

SEQ ID NO: 43280 - protein, 214 aa, Zea mays
  Clone ID: 700073330_FLI.pep
KPLFLVLVHHSRPAPRLPRRTASARPLRFLSCSTSAPPLFAAVASMDSPPQGYRTNVGICLADPSLTKIFSASRIDIPSAWQMPQGGIDAGEEPRAAAFRELREETGVTSAEIVAEAPVWLTYDFPPDVRTKLNARWGTDWKGQAQKWFLFRLTGNDDEINLNGDGSEKPEFGEWTWMTPKEVIEKAVDFKKPVYEEALKHFAPYLQSDPAASS

SEQ ID NO: 43281 - protein, 330 aa, Zea mays
  Clone ID: 700075370_FLI.pep
FEVNTCRWIGCDFCSHWTHTDCAIHNGQIGMGQSVKSSIGHAEMLFRCRACQRTSELLGWVKDVFQQCAPGWDRDALLRELEFVCKIFRLSEDAKGRVLFRKCLDLIERLRNTPADSINPRMILQALQELEMDSPKISENEDVGHLITPQEACNRIAEVVQEAVRKMELVAEEKMRLYKKARLAVEACDRELEEKVREAQELKAERQRKKQQVEELESIVRLKQAEAEMFQLKANEARQEAERLQSIALTKSKTAEQDYASMYLKRRLEEAEAEKQFLFEKIKLQENQRPTVGVGSSSGAGGDSTPTMMLSKIQDLLKNVRSMPAKSEGH

SEQ ID NO: 43282 - protein, 207 aa, Zea mays
  Clone ID: 700077413_FLI.pep
YDYLFKVVLIGDSGVGKSNLLSRFTKNEFSLESKSTIGVEFATRSLQVDGKVIKAQIWDTAGQERYRAITSAYYRGAVGALLVYDVTRRATFDNVGRWLRELRDHTDQSIVVMLVGNKSDLRHLVAVSTDDAKEFAEAESMYFMETSALDATNVDSSFSEVLTQIYQIVSKKTVEASEEGAVAPGKGEKINVKDDVSAMKRVGCCSN

SEQ ID NO: 43283 - protein, 701 aa, Zea mays
  Clone ID: 700089741_FLI.pep
DLKKLVPCTIEEFAKRIAGAEESTSSESSETPESPEEEKRPFQRGDRVKYVGTSAVVEADQRIILGKIPTQDGSRNAYTFISGRGLSNGQRGEVYEVNGDQVAVIFDPSIEKSHNAHEDVTNKEENGSATVYWVDSQDIAHDHDTESDDWHIALEALCEVLPSLLPIIVYFPDSSQWLSRAVSKSDRREFVQRVEKMFDRLTGPVVLICGQNLLAAAPKDKEQPALMFHNLSRLSSLPSPLKRLVGGLKGERYSRSSDISKLFTNSLTVPLPEEDEQLQLFNNQIEEDRKIMISRHNLVKLHKVLEEHDLSCVELLDVKLDGIVLTKQKAEKAVGWARNHYLSSTTLPSIKGDRLIIPRESLDISIERLKEQGITAKKSSQNLKVLAKDEYERNFISAVVPPNEIGVKFDDIGALEDVKRTLDELVTLPMRRPELFSRGNLLRPCKGVLLFGPPGTGKTLLAKALATEAGANFISITGSTLTSKWFGDAEKLTKALFSFATRLAPVIIFVDEVDSLLGARGGAFEHEATRRMRNEFMAAWDGLRSKENQRILILGATNRPFDLDDAVIRRLPRRIYVDLPDAQNRMKILKILLAKEKLESDFKFDELANATEGYSGSDLKNLCVAAAYRPVHELLEEEKKGRVSNENSYLRPLCLDDFIQAKAKVSSSVSYDATSMNELRKWNEQYGEGGSRTKSPFGFGN

SEQ ID NO: 43284 - protein, 261 aa, Zea mays
  Clone ID: 700048904_FLI.pep
DVVVSFRGTVTGSEWVANMMSSLEQARFDPADPRPDVKVESGFLSVYTSDDATCRFTYGSCRNQLLSEVTRLISKYKHEEMSITLAGHSMGSSLALLLGYDLAELGLNCDGCGDTVPITVYSFAGPRVGNTGFKNRCDELGVKVLRVVNVNDPITKLPGIFLNENFFGAGRLELPWSCACYTHVGVELALDFFKARDPACVHDLEAYIGLLKCPNKVAVVKNDGEHVLSKAMKFVLQHSFDTWRWQMAAIQVGELVQAIGL

SEQ ID NO: 43285 - protein, 283 aa, Zea mays
  Clone ID: 700073691_FLI.pep
LPDPFPFPSPPAPPPRPLRQPPAPPLRRAPPLHRRRREAGGLTKSVGCGGGDPGAGAESRAMGQQSLIYAFVARGTVVLAEYTEFTGNFTTIAAQCLQKLPASNNKFTYNCDGHTFNYLVEDGFTYCVVAVESVGRQIPIAFLDRVKEDFTKKYGGGKAATAAANSLNREFGSKLKEHMQYCVDHPEEVSKLAKVKAQVSEVKGVMMENIEKVLDRGEKIELLVDKTENLRSQAQDFRQQGTKVRRKMWLQNMKIKLIVLGIIIALILIIILSVCHGFKCGSK

SEQ ID NO: 43286 - protein, 298 aa, Zea mays
  Clone ID: 700075965_FLI.pep
SASQVLRSRRATQQDGEARIRKRRRLLQRHLHQGLRGGVHRHPPLRLRRRGFRHRLRATDEWRRAGPCGTGGDRGGARAGPLRGRLRGREHLRRPPEPRRDVRPGRGRPHHRPHRPLLLGGPAAGRVRGVPAPQVRDPRQGHPDARRLRRHHRAGGRGVRDRHHLRARLHRLRHRRRPQEGLPRHHRAHRHRLHRRRQHPRRGALQRRLHEPRPLLRPRRRRGRLRRQLGLLGRPAHRRRPRWPRLRRRLHRRLLPAGRRPGLRLSSVLRSSGLSSSNAAARFDRRRHLLCSSFHHVM

SEQ ID NO: 43287 - protein, 536 aa, Zea mays
  Clone ID: 700090328_FLI.pep
RSSLESNRNNSSLESVDSLMLAKSATRIAILGISTSNLNDARRINVSVMQQRGDPLLIVGSPFGLMPPFHFFNSVSVGAVANCLPPCTARSSLLMADMHCLPGMEGAPVFDQNSCLVGLLMNPLTQKGSNIEVQLVITWDAICTEWNSKKLEEIERPPRKLPNDKNTDSKSMELRHVYNYVRVFSSTDNKTNQHCISPRSLREAISAVVLVTVGDTSWASGIVLNKRGLVLTNAHLLEPWRFGRTSPSDLQASFAGEHLNAGENKSLQPQQGKISNEDAVKHKVSSFNLGFKRGKRISVRLDHEERQIWCNASVVFISKGPLDVALLQIEKVPVELNTIRPEFVCPTAGSPVYVVGHGLFGPRSGLHSSLYSGVVSKVVQIPANQLSHLARAEADNMDIPVMLQTTAAVHPGASGGVLVNTHGLMVGIITSNAKHGGGSTIPHLNFSIPCKLLVAVFEYSANGNLVVLEQLDKPNEVLSSVWALAPSSSPFVRSSPEKGKEEKVLEFSKFLSDKQQALKSNVDLKELFRYKTPSKI

SEQ ID NO: 43288 - protein, 172 aa, Zea mays
  Clone ID: 700048191_FLI.pep
TMRSPDGKKLDMLAEEDLGSMPYLKATIKETLRLHPPAPFLLPHYSTADSEIDGYFVPAGTRVLVNAWALGRDRTTWEKPEEFMPERFVQEPGAVDVHMKGKDLRFIPFGSGRRICPGMNFGFATMEIMLANLMYHFDWEVPGSAAGVSMDESFGLTLRRKEKLLLVPRIAS

SEQ ID NO: 43289 - protein, 147 aa, Zea mays
  Clone ID: 700051863_FLI.pep
LRSSTATRLTLLPRPPPSPSLIALALSPSLSSPPPLSSATTALLLPPTTATTPPWSPFTLPVSPATVVRAASLALLLVPVLPPPLVLLPRSPPRVPARSPLSPVPVSLRSSVLLLSCKSTASKPAPRRAYDALRSVILNSRGGFRHS

SEQ ID NO: 43290 - protein, 362 aa, Zea mays
  Clone ID: 700046086_FLI.pep
FTMCNTVSGLNKINTSLLLQAAGWPCMNHDRCNASGSFTTRMHLAFHSKQLAAAAAAAGMLMHHVLVELEAGEHVVVDGVGEVVEQVLERADAGDEPLDEVTEDGEHGEPAVLDLLELELIHLLLGLAEAERVEEGPAGVGRVAGAGEELLEAEEVLLAHGARVVPVLEAAVLGEAHERHVEDEERVGVGPVVVGARGRDDARLEPRQRGLRGDDAHLAEDLRGDGAHRAQHGVAAVDHLAIGQPLGLDEAPGALRVREAQRVEAIVAGQRAIEVGEGLLGREPQLPVGTLLGWRAGAGPDDEGRLPRRRPRDGRLHGAAQQLPAGEESLGRHRSGTGASSNLSFRQRTCLRSRSCRWLAAL

SEQ ID NO: 43291 - protein, 375 aa, Zea mays
  Clone ID: 700073247_FLI.pep
SHIKVDYSRHAANNYRRRSLELVVDLRAHLPDLGTVAGAGDDPDLSHLHHGVPEVFLPLAITAGVGIHLVNRLAGLERSVRREEHELVDVLVVLVVQDVGALVVLVHLVAVPASVAGGIQRGSVSGVHGRQAVFEEEAAGEADAVRARQRDGVREAEPLGGEALLEVLDAGARPGQLVGLVGEGLAPVVAAGRHVVVDLLVAEDVGRVARGEGQDVGAGDDAGALFLHCRLGRVDHFEAAQAVLVGWACLLRVVVARRGLVQENGSIAAPNEGVVEVETDETRVKATVWAVGGVRHGFPHELLRFRAAAAFVVVTDAQALPRGRRLRARKSAGALEQAEQGGHGFERGPTHEAAESGAPPVARRRPGGDERQQHH

SEQ ID NO: 43292 - protein, 475 aa, Zea mays
  Clone ID: 700093956_FLI.pep
VAIGGQKSMAAPAAAPLDEGKAKKVLRQVEFYFSDSNLPRDKFLRETVEQSDDGLVSLPLICSFSRMKSHLGLDADVKPETVPEETVLAVAEVLRPSPALRVSEDGKKIGRASELLKPDEIIEQVDSRTIAVSPLPCNVKQEDVQSFFTNYAKVNSVRLPRNIANKKHFCGTALVEFSEEEEAKRIMETALVFAGANLEIRPKKEFDAEQKSKKEAYEKTHLKKDNQYEGYQKGLIVAFKLEKATADTVVQQDNIDKENDSATKLDVSSSMEKPSGQGPEESILESDVIKQGMPSDDMTKEKDLNTGEATESEKCISDVPIESDKHGDSEPLSREGKIISGNVNVKNQISREDLKEAFKKFGAVRYVDFSIGDNSGYLRFEDSKAAEKARMSAVLADGGLIIKDHIITLEPVTGEAEKDYWDTIRSIQGKYKDSRSYKGRASNNQRGGKRFNAKRDRNPDSEKNSNKARKVEAVA

SEQ ID NO: 43293 - protein, 292 aa, Zea mays
  Clone ID: 700082137_FLI.pep
LVRLWLSSCDFGSLWLTDSGIRGVTMKQEFHGVLPLQGKRPQDAGVQLCAPLQQHPPHHLEAVPYHQGQPGQMVVPGTHQGQALPAAYQAITMPDTAMLIDVQDSHPDSVQLSLGIAEQCARQEKLLKFLVSGSDVKELDESLLAEFTGQQTLAINMGTHPYLPDDKLSIPEFVLNEPQHYLPEKELVIPDPLLHFIQSHGAALTIDQSGRVLLAGNGDEMRDLLSIFLAFNMSRRETGGCKAAFLVPYFERKRRSRANSQVSNLKLAGTTADVSKRRGNIWTFNFYVLATF

SEQ ID NO: 43294 - protein, 485 aa, Zea mays
  Clone ID: 700086107_FLI.pep
LGLHLLDLSVNNLTGEIPVALVKKLTSMDRFNFSYNNLTVCASELSAEAFATAFAQSRNDCPIAVNPDSIVKSRGKHKGMKLVLAVVLSLFFSVLGLLCLAAACRRGRKRCDELPVVKQVSSFDEPAVSGPFSFQTDSTTWVADVKVATSVPVVIFEKPLLSLTFADLLAATSNFDRGTLLAEGRFGPVYRGFLPGGIQVAVKVLVHGSAIGDQDAARELERLGRIKHPNLVPLTGYCVAGVQRIAIYEYMESGNLHNLLHDLPLGVQATEDWSGDTWEDNTGGVATTEIVTPEGTATWMFRHKIALGAARALAFLHHGCIPQIVHRDVKASSIYFDCAMEPRLSDFGLSMVAGTRADLLHHSPGYAPPEFSGSENAAATAKSDVYSFGVVLFELVTGKKPLGDEYPGVQKEASLVSWARAMVKASLAPSIIDPKIRDTGPERQMEEALRIAYLCTAELPSKRPAMQQIVGLLKDIEPKVEEEGD

SEQ ID NO: 43295 - protein, 220 aa, Zea mays
  Clone ID: 700086234_FLI.pep
NGYVCSALSINPWSHCCPTTGDRFSCQGCELDLQCCNSYEYCVSCCLNPSKIKKEDVLKLKVAKPVTAGTYTNVFDFCMGRCRHSSASVVHENAYASDFHHCFSVQQNSSGSTESSSVSKLLGINVVVGRPRESCSLVCKVRGQSCVPSRLSVLNKCEILQKYMRCKSGCFPSLGPDQPAEVVDEAPTSLNPGACLYMQMDERLTCDGSHHHTRRLCPCA

SEQ ID NO: 43296 - protein, 533 aa, Zea mays
  Clone ID: 700149803_FLI.pep
ASWVLMASTAYSRPSKPPGPAAGDRSGPRLAKELGRIEPKKLGIGLVAGCCFALLTYLSFARLFAIYSPVFDSSSSMVLKNMPPATTTVPGTATGALPVEEQKEVRDPEADPHMPNLPEVTEKDQQEEATATKPAGGAIITEAKITCDENGVDEGFPYARPPVCELAGDIRVSPKEKTMYFVNPSGAGPFDSNGEKKIRPFARKDDFLLPGVVEVTIKSVSSAAAAPRCTRRHDVPVVVFSVAGYTDNFFHDNTDVLIPLFLTTAHLQGEVQLLVTNYKPWWVRKFTPLLRKLSNYDVIDFGKDDEVHCFRAGHLGMYRDRDLIISPHPTRNPRNYSMVDYNRFLRRAFNLPRDAPAVLGEETSAKPQMLIIERKGTRKLLNLPEVSALCEALGFAVTVAEADADVRVFAEKVNAADVLLAVHGAGLTNQIFLPTGAVLVQIVPWGKMDWMATNFYGQPARDMRLRYVEYYVSEEETTLKDKYPRDHYVFKDPMHIHAQGWPAIAEIIMKQDVMVNMTRFKPFLLQALNELQD

SEQ ID NO: 43297 - protein, 313 aa, Zea mays
  Clone ID: 700150064_FLI.pep
FVVGLGDKVSPTDIEEGMRVGVDRNKYQIQIPLPPKIDPSVTMMTVEEKPDVTYNDVGGCKEQIEKMREVVELPMLHPEKFVKLGIDPPKGVLCYGPPGTGKTLLARAVANRTDACFIRVIGSELVQKYVGEGARMVRELFQMARSKKACIVFFDEVDAIGGARFDDGVGGDNEVQRTMLEIVNQLDGFDARGNIKVLMATNRPDTLDPALLRPGRLDRKVEFGLPDLEGRTQIFKIHTRTMNCERDIRFELLARLCPNSTGADIRSVCTEAGMYAIRARRKTVTEKDFLDAVNKVIKGYQKFSATPKYMVYN

SEQ ID NO: 43298 - protein, 395 aa, Zea mays
  Clone ID: 700153476_FLI.pep
NSLPAPLPTRHTSCQLYTLSHVQTQGNTDQRYRRARQSERTEAMASDDSNQGAAAKPKPPPLPLSVRLQLAGLTAAIDAVERRDGTVNRCLYGVIDRLLSARASPRPDASGVRSYDVTMDASRGIWARVFAPAAADRPLPVVVYFHGGGFALFSPAIGPFNGVCRRLCAALGAVVVSVNYRLAPEHRWPAAYDDGVDALRFLDARGGVPGLDDGVPVDLGSCFLAGESAGGNIVHHVANRWAAAWQPSARALRVAGVFPVQPYFGGVERTPSELELEGVAPVVNLRRSDFSWTAFLPDGATRDHPAAHVTDDNADLADDFPPAMVIIGGFDPLMDWQRRYADVLRRKGKEVLVAEYPGMFHGFYGFPELPEATKVLQDMKAFVDSHIPTPKLADA

SEQ ID NO: 43299 - protein, 434 aa, Zea mays
  Clone ID: 700156105_FLI.pep
SHHRAAVGVLVAEHVVVRVPLRHRVVVVRRRRRRWVLHRRPAVPVPHRRVPAGAAGAGAVTIHHLLLLHHRHVLLLLLMRRHGHGVPGRLQHLWPGRHAAAGCTTTALVEPSSMSRHGAGWHAMHGTATATARLHLHAIATRTHVLVRVRVVRVAHRRAAHLAHARPHATTGETGAAHHVRRPHHHARARLLLLRQRRPRRWHCHAAHHRGAGTGRRPTTAAAALLALLVPVPAALAVLRRLRAAAAAAVLPASLVLLRGRVLLAAAAVRVPLHLHGYLVPTATALLATVPAFLAGGRRHGHGLRHHLGVTVQVVIVEAVVLEVVLIVEVIELVVELAAFVPELVVLGVAELGGLGVLGRRRRRAGRRRGRRERRHLAAAHAHEELRRQLHALHLHLLLHLLWCRLRQHHVRVFPALASSSSAAASLGLLALPA

SEQ ID NO: 43300 - protein, 272 aa, Zea mays
  Clone ID: 700098870_FLI.pep
PETSLPSCWRRAEGRRPGRQEEMTLAAGLGYALIALGPAFSLFSGVVVRKPFLVLTLLSSTLFWLISLIVLSGIWRGFLPIKSGAWWAYVILILTSVALQEGTRLVFWMLYKKMEEMLDAFADRISKPRLRLTDKMLISLAGGLGHGVAHAVFFCLSLLTPAFGRATFYTERCSKLPFFLASALIALGFLVIHTFSMIIAFNAYDEGKKSDQVFVPVIHLAAAAMTLVNLAPGGCLIGTPLLLVMAALTLQHCWRVACRRLTEHRHQQHNSS

SEQ ID NO: 43301 - protein, 332 aa, Zea mays
  Clone ID: 700101582_FLI.pep
SIAVAGASYNFKMAATATAMAIATISPAAPIPSAPFPSLPLPLGLRLRSQPLLFAASRRRFLHVPKAASWDESVPEDGGDAEESVAAGDDEDEDEKPRPEPVSSSEFQFAAPPEGYVEPAAFDELPPESPEDVAAAYESLYGPAFSGETLLGNNVFEVKVVDPIDMDREQRPNDDFTERVVQVNRVTKVVKGGRQLSYRAIVVVGDMKGHVGVGVGKAKEVTEAITKAAMNGRRNLVTVPLTKYSTFPHRADADYGAAKVMLRPACPGSGVIAGGAVRVVLEMAGVENALGKQLRSKNPLNNARATIKATQMMKQFKDVAEERGIPMEELWK

SEQ ID NO: 43302 - protein, 192 aa, Zea mays
  Clone ID: 700106609_FLI.pep
PLAIHTRNLLADPRCTLVVQVPGWSGLSNARVTIFGDVYPLPAEQQEWAHKQYVAKHQQWASQQWGNFYYYRMHNISDIYFIGGFGTVAWIDVKEYETIQPDKIAVDGGDLQSLKELNAIFSKPLREVLSSEGEVDDAALISVDSKGIDIRVRQGAQFNIQRLAFDVPHKVETLEEAKKALHKIIKDKQQIK

SEQ ID NO: 43303 - protein, 251 aa, Zea mays
  Clone ID: 700150827_FLI.pep
SKAGGAGKGKRGMRMRAVVITCAGGPEVLEAREVEDHPALGEGEVLLEVAAAGVNRADTVQRMGRYPPPAGASPYPGLECSGTILALGPNVPSRWAVGDKVCALLSGGGYADKVVAPAGQLLPIPEGVSLTHAAGLPEVACTVWSTVFMTSHLSPGESFLIHGGSSGIGTFAIQIAKHLGIKVFVTAGSEEKLAACKALGADVCINYRTEDFVERIKQETNGKGTTSMLSFLAASMYRALSSNSATSLTVI

SEQ ID NO: 43304 - protein, 250 aa, Zea mays
  Clone ID: 700155144_FLI.pep
TGPSGNSFANISNSTQLVTTNNLPLQSLEPSNQQHLGRLHSSADPFNSFVGEPPQFADLGRCNTTWPTAVSSSNVQEIGQKDRIVNRPKLEPLSSFTEASSQIPLLGSEMQSHQVASLASNGLPMPFTQEAVPFAYGSSTNSREMLNNNLALSNSGVNSTLPNLRIDGSVVPGQTLGGSNSGGCVVPPLQDGRIDHQAVSSHLNYNNELMGTGRLQRGLSGGLDDIVVDMFRPDRADDGVSFIDGDWELV

SEQ ID NO: 43305 - protein, 807 aa, Zea mays
  Clone ID: 700096110_FLI.pep
CRCPLVLGAHHHSSVAGRRRRGRGGRCGRPTAGSSHQMDTPDRPRAAAAAGFEDSPVFNFINNLSPIPPPKPLDSAHNVQLFKSSDLAPVSSIFASPHVNPVKETKVLIRDESVHLPQELHSPSSVRTRIDTSGSFRMIRCKDIVSDNCNITCQLNEASIDSSDHTSNSTGQLTQSIQDAAGSMESDKDQCDANKTDLTISQECTGLEGMNLDESGPDKMDSSHSGIVVHENQLSEQNNDEPAAYNEGYIITHQSTSDMLTLAIPSGTETQPVNDTQMADNPYSCESLLDDQSSGYCTQNSVHEPHLYWTGAVEGSAVSYTPQTLPGALQSQLMPCNKLSEPKDYVPTEQNALSQHLRGMRRRSLFNEKAGISNKGVDKTSDHHPVNSTTPKCKTISGDNSKPLRTPPCALPGIGLHLNALATIPKEKIVPREIQSTINESSNLIGPAGSSPAPFEQNIINDDFTQTTDVATAEASSQGSPKKKRHKFDNGDGTSCKRCSCKKSKCLKLYCECFAAGVYCSEPCSCIGCQNNQSHMETVLSTRQQIESRNPLAFAPKVIHTSEPGMDLGDFSNKTPASARHKRGCNCKKSSCLKKYCECFQGGVGCSVSCRCEGCKNAFGKREGASVLGIGEPKQGLEEKDVCVKEEKSEIDKQLVVYQTTDAAPAENVLTTPSMVECRPLACLPPASSKKSSKKPRSSTKLTGHPSRPCNLQAPPKTDVVLSPFENYAEMVLGDSTSDILKGNSSPHTSVKVVSPNKKRISPPRMGIGLSPICRSGRKLILKSIPSFPSLGGDVNNEDPKAKLPAP

SEQ ID NO: 43306 - protein, 609 aa, Zea mays
  Clone ID: 700097743_FLI.pep
WKQIPPNEPYRVILGHVRDKLYNTRERARHLLASGVSEISAESSFTSIEEFLEPLELCYKSLCDCGDKAIADGSLLDLLRQVFTFGLSLVKLDIRQESERHTDVIDAITTHLGIGSYREWSEDKRQEWLLSELRGKRPLLPPDLPQTDEIADVIGAFHVLAELPPDSFGPYIISMATAPSDVLAVELLQRECGVRQPLPVVPLFERLADLQSAPASVERLFSVDWYMDRIKGKQQVMVGYSDSGKDAGRLSAAWQLYRAQEEMAQVAKRYGVKLTLFHGRGGTVGRGGGPTHLAILSQPPDTINGSIRVTVQGEVIEFCFGEEHLCFQTLQRFTAATLEHGMHPPVSPKPEWRKLMDEMAVVATEEYRSVVVKEPRFVEYFRSATPETEYGRMNIGSRPAKRRPGGGITTLRAIPWIFSWTQTRFHLPVWLGVGAAFKFAIDKDVRNFQVLKEMYNEWPFFRVTLDLLEMVFAKGDPGIPGLYDELLVAEELKPFGKQLRDKYVETQQLLLQIAGHKDILEGDPFLKQGLVLRNPYITTLNVFQAYTLKRIRDPNFKVTPQPPLSKEFADENKPAGLVKLNPASEYPPGLEDTLILTMKGIAAGMQNTG

SEQ ID NO: 43307 - protein, 369 aa, Zea mays
  Clone ID: 700097971_FLI.pep
SAVAMALAVAVLVAGTPRYRYRRPQGSPLTAVGRVLAAAWRKRRLPLPADAAELHGFAAAKVAHTDRLRWLDKAAIVEAELAGKQRASAAAASTVTEVEEVKMVAKLLPIWFTCILFWTVYSQMTTFSVEQATRMDRHLRPGSGAGAGGFAVPAGSFSVFLFLSILLFTSLNERLLVPLAARLTGRPQGLTSLQRVGAGLALSVAAMAVSALVERKRRDAANGPDHVAVSAFWLVPQYFLVGAGEAFAYVGQLEFFIREAPERMKSMSTGLFLVTLSMGFFLSSFLVFAVDAATAGAWIRNNLDRGRLDLFYWMLALLGVANFAVFVVFARRHQYKATSLPASVAPDGTGHKEMDDFVAVTEAVEGVDV

SEQ ID NO: 43308 - protein, 603 aa, Zea mays
  Clone ID: 700100787_FLI.pep
QKEAFVRILESDKKEASGGSIARLPLLAHLGVEFPLEFDPWVILQKHILSDYANNEGHELTICILNRLYHEAEQDHDFLSSRTATSVYESFLLNIAENLRDMFPASDKSLGKLLCEIPYLPEGVLKLLESLCSPGSNERQDKDIQSGDRVTQGLSAVWNLIMLRPSNRDRCLEIALQSSTHHLEEVRMKAIRLVANKLFPMTSISKKIEDFANEKLNSVLEMTPSGDCVTTEMATPEAHKDIGLENLTASVTGMQTLMSLYFALCTKKHSLLRHVFAIYGNLPQAAKQAVHQQVPILIRTIGSSSDLLGIISDPPADCRDLLMQVLQTLTDAAVPSKDLISSIKILYSKTKDVEFLFAILVHLPKDEVLPVFPSIVNLPIDKFQSAISRILQGSPRNGPSLDPSEILIAIHVIAPDKEGIPLKKVMDACSSCFEQRTIFTQQVLAKALNQLVEQIPLPLLFMRTVMQAIGVFPALVDFVMEIMSRLVSKQIWKYPKLWVGFLKCAILTKPQSYGVLLQLPAPQLENALSKNPTLKTPLAEHAEQPNIRSTLPRSTLVVLGLAEDQPQQPAVTQVQSSQNQAAETSSSAADTATEVTQESSGAS

SEQ ID NO: 43309 - protein, 298 aa, Zea mays
  Clone ID: 700100831_FLI.pep
PVYIIYRSPSPSTRRSKSRSRSPIKYRRSRRSRSYSPPVRRSREQRSRSPSKSRHSKYGSDRSHRDDKDRYSRSGRRESERSRDHHSSSSRRNRSKSRSPRHKKPSRVDSRSPKKQREESLSPSKSRSARAGSRSPHHHKGSKSSPTRDRHSRHSRHSRSRSPGRKHRHSDKRDSRKSEIQDDKRRSHRGSRHDKDESSVKDEGERSHRSNRGDKDERSVKDPVEDKGMDTKVVAHKRSSTVSEDEILNNNSSNHKKYRHEVGLEVDGNDVCSAAADLDRKHETGVDGSLGGAAESAM

SEQ ID NO: 43310 - protein, 320 aa, Zea mays
  Clone ID: 700100876_FLI.pep
RSEAGTMPAAAVASPLLLSLSSSSSHFLSSSSTSFFPPSSAAVAPHAAVRTKAAVSVLRALRAEAATLPVLSFTGEKVGEVTLDLKSAPPSTARAVVHRAIITDRQNARRGTASTLTRGEVRGGGRKPYQQKKTGKARRGSQRTPLRPGGGVVFGPKPRDWSIKINRKEKRLAISTAIVSAAKDAFVVEEFEEAFASGPKTRDFVAALQRWGLDPKQKAMFFATDFDDNVRLSGRNIGSLKMLTPRTLNLYDILDARKLFFTPAAVDYLNSRYGASVSDDYYTDDEDDGEEELVEQEAEEGTTADAAPDATEEGEADSSS

SEQ ID NO: 43311 - protein, 473 aa, Zea mays
  Clone ID: 700105257_FLI.pep
TNSSVVTLGKMRIKCLEELSTLLSCLKLPLTSSKPTIRDFCIKSASIVFCTVSSSTKITANKKVEFLVVDEAAQLKECETLIPLRLWTLKHAVLIGDECQLPATVKSKVCTDALFGRSLFERLSSLGHEKHLLNMQYRMHPSISIFPNTSFYEGRISDATNVMEKEHRRMYLPGSMFGPYSFINIEDGREERDELGHSKRNFVEAAVIEEILYRLRRACFKTKRKVTVGVICPYNAQVVAIQGKIEKMRFDPLQVKTNSVDGFQGGEEDIIILSTVRSNSVGKVGFLSNAQRANVCLTRARHCLWILGNATTLASSGSIWSDLVRDAKDRRCFFNASSDYVISHVIAKQRRDLDRVNVEKSIHISSSKNCRVWVETRSPNDLNEQGTSSTSVSHYAGIPSSDIVVVSEFQRPSNKNEDVEDITVIPNKENDKDINAMPVIPDKGNVVDGNHILAIPCAMLSNLARWCIRSFRS

SEQ ID NO: 43312 - protein, 477 aa, Zea mays
  Clone ID: 700166327_FLI.pep
ADWSEQHTSESPSKQRTSALFSRTETQLSDNLGTNKSDIPSPHSYHNMRPAFDSDGGSSDEEIATTTHAVPLRSHSGGSASSVLNKGGGPDASPIFDYSGAHAVRNLNRVQSRDSDLSEEETDLDKFKGSSFARANEQQLLPSAIRTSATSDDKEDDISLNFGKLTPGLRNKPRQPPPYTKVSRESILPKQSLPKVSAGTEESVDSEENTTFKQDRSSPQSSFSARTSSGKDYDSGLYERNRSVGTHWEAKSTIARNSSGLDDAEKLSDLPTNISLPTTKSSERWNSSKVPYHEKPGIGTRREVRSTLARNYFDSDDSEEELEQQQIPQSKQSGVLIQSRRTREVTSDTKRDGRFQTGAQYGDETESVTSKTQVHQGFNSSSTERSERRDPSVYPRVAVQRSSSKAEQIESPMERGKPQGAEMRSTLFRGNEEDTETSSGTPKESTPKTPPAHVHPKLPTDYDSFAAHFRSLRTNRP

SEQ ID NO: 43313 - protein, 138 aa, Zea mays
  Clone ID: 700153035_FLI.pep
ASRAGRMGIQLRFRFSPSAVVSPPRATCVPLPFLRFDGQATCWPRMALALCLLPSIQAPSRPAAQRRGVYIEPDPRDPRQSAIAAPCLKFSSSPASLLGTALCLLLALPFFLYIAPLHHNPPAAARRRLRLMQGAVTS

SEQ ID NO: 43314 - protein, 143 aa, Zea mays
  Clone ID: 700098530_FLI.pep
VTQPRRQQQQKETLRRGSSSSRRAGEPPRQPTGRSPSSEESSPPRRAVKMPPRHRSMTPRRRTVQVLRMTTAWWSETQNPPQLYYSWIITATVLLNAHFRMVPRTNKTTPVHPLVWPKVCSVVNIHYSTGIKEKKKNAGRVLP

SEQ ID NO: 43315 - protein, 412 aa, Zea mays
  Clone ID: 700101143_FLI.pep
LANPDTLSSHPSRERDQLTQIRIQTSSESIPLCISASPSSLPRPPSPLTIFSKRPEMVSLRCTTAHHSLLGSPTCLARPRRRPCPVVRAAVAVEAGAQAKVSLIRIGTRGSPLALAQAHETREKLKAAHSELAEEGAIEIVIIKTTGDMILDKPLADIGGKGLFTKEIDDALLQGRIDIAVHSMKDVPTYLPEGTILPCNLPREDVRDAFICLTANSLAELPAGSVVGSASLRRQSQILYRYPSLKVVNFRGNVQTRLRKLKEGDVSATLLALAGLRRLNMAENATAVLSVEEMLPAVAQGAIGIACRSNDDKMMEYLSSLNHEDTRLAVTCEREFLAVLDGNCRTPIAAYAYRDKDGNCSFRGLLSSPDGSKVFETARSGPYSFDDMVLMGKDAGHELKAKAGPGFFDSLQ

SEQ ID NO: 43316 - protein, 299 aa, Zea mays
  Clone ID: 700101202_FLI.pep
EMISGNLNNEELGGGGCTKAEGPGAAGGAGAVVAKSPVLSSSRHWPPSTESRIVRVSRVFGGKDRHSKVRTVKGLRDRRVRLSVPTAIQLYDLQDRLGLSQPSKVVDWLLDAAQDEIDKLPPLQFPPQGQDLVAHLPPSMVAPFANVAADRAAAAAAAANASAAMAEGGKRHCHGGIKGLMGMGLNNSIGLANATMPLAHGLYYTPGESWTNGGNAAVHDHQVSHGGTSPQTVAHHSPFSSLLSLAAPGPQLVFYSPEGGGFAMKEATDHQFAVDSLDHSQGQLSLSSARSFLHPGNQG

SEQ ID NO: 43317 - protein, 88 aa, Zea mays
  Clone ID: 700101424_FLI.pep
LQDKEGDELHRNSDVLEIFMNTRFLMVYVQYERSLETIIGHNQIIWLGGLNYRIMLSHQLVKALVEMRNSRERLGESLVTLRFLLVTQ

SEQ ID NO: 43318 - protein, 320 aa, Zea mays
  Clone ID: 700105374_FLI.pep
LIQDLNSLKSRNRAPNPFQTQSPISDPMPPTGDDPSAAAGISFPDAGGGGDSEDGDFAGSHLLDPTDPGLPNPTTSSATGLPHAIPAAGSGGGPVTSGNGGERRPLFQRLWTEEDEIVILRGFAEFTAARGTAFASHQYDTDPSTRTCAAASSSTSPRASSWRSSAASSASTATASPAFASPAPPSPSAPRTNRPSLRLRATSGAPQTNTAAIPRLTPTMKTPPPPPRHRYLPTPAPTEKSGPRPLHGSVAAGGRRNSPLPQTCCSPLSQCHCLCQCLSRRMTPSQHSPRPQCRPWMAQSLSGCQSCRLNQEFLMPRRLA

SEQ ID NO: 43319 - protein, 267 aa, Zea mays
  Clone ID: 700106139_FLI.pep
EANGRAIRRASSPSSIGGRGMSGAASVERVKDRATGLDKFVLREARGSSVEVYLYGGQVTFWKNNFGQQLLFVSNKATFKPRKAVRGGIQICFPQLGNHGVLEQHGFARNRFWSVDESPPPFPVATSNCHIDLILKSSPEDLKIWPHSYEFRLRVALTPRGDLILTSRIKNISSDSKPFQFTFAYHTYFSVSDISEVRVEGLETLDYLDNLQSRKRFTEQGDAVVFESEVDKVYLSAPPKVVVIDHEKKRTFVLRKEGLPDVGELQN

SEQ ID NO: 43320 - protein, 433 aa, Zea mays
  Clone ID: 700106267_FLI.pep
FITPSSSKIFCRNKGVIRPPSTWAAVAATAAAAAASAGAGDVRASVPLEMAAAGAGTGSEGKKRGASRSWILLDAAGEEQLLDADKYAIMRRVDINARDLRILDPLLSYPSTILGRERAIVLNLEHIKAIITSNEVLLRDPSDENVIPVVEELHRRLAPSSATQHDGKENLSGQHDVEGAEEDESPFEFRALEVTLEAICSFLDARTTELETDAYPALDELTSKISSRNLDRVRKLKSGMTRLTARVQKVRDELEQLLDDDDDMADLYLSRKLAGASSPVSGSGGPNWFPASPTIGSKISRASRASAATVHGNENDVEELEMLLEAYFMQVDGTLNKLTTLREYIDDTEDYINIQLDNHRNQLIQLELFLSSGTVCLSLYSLVAGVFGMNIPYTWNDGHGYIFKWVVLVSGLFCAFIFVSIVAYARHKGLVGS

SEQ ID NO: 43321 - protein, 307 aa, Zea mays
  Clone ID: 700150426_FLI.pep
NKEWVAKFEKPKGDPSAFVKPSTTVLSPYLKFGCLSSRYFYHCIQDVHRSVRNHTKPPVSLTGQLLWRDFFYTVSYGTPNFDRMKGNKICKQIPWSENEDLFVAWRDGQTGYPWIDAIMIQLRKWGWMHHLARHSVACFLTRGDMFIHWEKGRDVFERLLIDSDWAINNGNWLWLSCSSFFYQYHRIYSPITFGKKYDPNGNYIRHFIPVLKDMPREYIYEPWTAPTSIQKKANCIIGKDYPKPVVDHETASKECRKRMGEAYASSRVDAKPSKGKTLNSRRKMLHGDRDTSNSTIAKRLKRNSRVE

SEQ ID NO: 43322 - protein, 321 aa, Zea mays
  Clone ID: 700150522_FLI.pep
RNTDCTVKIWDPSLRGSELRATLKGHTRAIRTISSDRGKIVSGADDQSVIVWDKQTFKLLEELKGHEAPVSSVRMLSGERVLIASHDGTVKMWDVRTDTCVVTVGRCQSAVLCMEYDDSTGILAAAGRDITAHVWDIRSSKQMFKLQGHTKWIRSMRMTGETIITGSDDWTARVWSLNRGTCDAVLACHAGPVLCVEYSPSDKGIITGSADGLIRFWENEGGIKCVKNLTLHTASVLSISASDHWLAIGAADNSMSLFHRPQERFGGFSNAGSKVAGWQLYRTPQKTAAVVRCIASDLDRKRICSGGRNGLLRLWDATTSI

SEQ ID NO: 43323 - protein, 593 aa, Zea mays
  Clone ID: 700152172_FLI.pep
LSYHLTGGQRCARRRRLPVVRHNVSFDETWLHNASAFDNLTFFFGCHWGPRDTLPEFAGNNISCAGFSTPTVSGGSFVFKPEDLDEQEEQELASHCDEVFSVPVGSDALRATDTFSLTGYGYGDLLRQGFELEWNRTSEDQCGQCEGSGSGSGSGSGGWCAYSQKREFLGCLCSGGKVGNPFCKPSKSKRKARILAGALGGGAAALLVGAAIFLFVIMRKRKQKKKVINSSSKLLKYSGSGGTPRSRVGDMESGSIEDPPTHHFTYEELEEATNRFDESRELGDGGFGTVYKGYLRDGRVVAVKRLYNNGYRRVEQFQNEAAILSGLRHPNLVMFYGCTSSHSRELLLVYEFVANGTVADHLHGQRAPERALSWPLRLSVAVESAAALTYLHAIEPPVVHRDVKTTNILLDADYHVKVADFGLSRLFPLDVTHVSTAPQGTPGYVDPEYHQCYQLTDKSDVYSFGVVLVELISSKPAVDITRHRSEINLASMAISKIQKCQLEELVDLGLGYDTDPATRKMMTMVAELAFRCLQQNGEMRPPIKEVLEVLRNIQGECLTSGKDGDKSKDGPFSPTTVHAPWDSRSTTPNTSRD

SEQ ID NO: 43324 - protein, 390 aa, Zea mays
  Clone ID: 700152288_FLI.pep
SSWLVITTSKSQVRAGEVEVEEEQRNPFQECLMAGGKEAHGWAARDVSGHLSPYHFSRRVQRDDDVTIKVLFCGLCHTDLHVIKNEFGNAKYPVVPGHEIVGVVTDVGSGVTSFKPGDTVGVGYFVDSCRSCDSCSKGYESYCPQLVETSNGVSLDDDDGGATTKGGFSDALVVHQRYVVRVPASLPPAGAAPLLCAGVTVFSPMVQYGLNAPGKHLGVVGLGGLGHLAVRFGKAFGMKVTVISTSLGKRDEALGRLGADAFLVSRDPEQMRAAAGTLDGVIDTVSADHPVVPLLDLLKPMGQMVVVGLPTKPLQVPAFSLVAGGKRVAGSAGGGVGECQAMLDFAGEHGITADVEVVGMDYVNTAIQRLERNDVRYRFVVDVAGSKIGG

SEQ ID NO: 43325 - protein, 167 aa, Zea mays
  Clone ID: 700095393_FLI.pep
APARLIFHLTVLVSSTATILRCCGFMDGAEQEAKLLAAAAGLQLLAARPAVQMYLNEAVFCWYQRLHASRAPDTEYGRAKVFLHNHHLCAVATQLVAPPLLVLSLLALWRVQGKDFFEGLEGMYWLVGWSVAMKEAALLAARWIVAVWSAATVITLMCYKRGWLFVS

SEQ ID NO: 43326 - protein, 537 aa, Zea mays
  Clone ID: 700095468_FLI.pep
SLLPFLSFLTPRRPRARRAGRGEDLAEAEAMGRPQPARAGAINIEACARPIAVDHRISLPYYFRIAGSLLRQANIYRNESNLLDLYVILLRYSSLLCETIPKHRDYHAFKLREKAFFDKLIDIIKELETLKPVVQRQVVEHNRGSTVEFNTNSLNGNYGTTRRIEQCTPSSYTPQTFVGSSNGALQKPFHAGRQVASLSSVQKQFMNLPYPKEETLARHSILGPNGLNGRWNGPVTGIKVQYPSNFELTQNGITSLVPSILNQDDLHGSNTAPAPPPPSSSSNDNDNMKSVLSLDDGRWSVPAEEHTPLPSANLEEELFQLNIKQPSPPPVLAEVQRPISPSRVADPTPGLPTSGTARFQNLHVPIKLMECFLRVAESNTKRSLETCGVLAGTLKNRTFYVTTLIIPKQKSTSDTCEATNEEELFEVQDTYSLFTLGWIHTHPTQSCFLSSIDVHNHYSYQVMLPEAIAIVMAPTDTRKHGIFHLTDPGGMGVIHDCQERGFHPHKAPLDGSPIYEQCSHVYMDTDIKFDMIDLRQR

SEQ ID NO: 43327 - protein, 522 aa, Zea mays
  Clone ID: 700097336_FLI.pep
VRVKPLSSEVEVDLSINTQSENYDQEAPLRLTKQTLSSSKAVDVTNYAVGVLNGNLVHLNHIDAVVQMRPSMSHIISGRAHTRQASQPREMNGGASTSMDSSHKGNERPEDSKDRAEDSEPWISLIYQPAGSNTATKYHDKMIANEGVPIDFTMSSSCYLTSLCPGASTSRKRINKFQAIREMLLLPLEERLKKWFTEVSGVNRFDALKDLAPTCSEVEILKMLPECAYLVRGLWVCKSSLLFDGVYSGPMDRILLEFTKRDPVPSNILEPFINLIGNRAMRDWILSPLCKRRQILKDHKFISADLSFIKRYPHIVNEQECAWSARETTLRESLEMSTTLAKKTMNSTRPNVASKGPHSNMSKGRDGPSQGSDDLARSVLGTVFTANKVRSMQAVVRDLRQLAAKYASNRKDGSKLQALCNAAKNCASLPHDELNRKIHLVAVPVHSVFVAKHEDKRALRNIFILLFRHKEPNGTLTKQEVVAAAAKHIKREITDREYHQVVTEICISTEDGHLLLKNGDEP

SEQ ID NO: 43328 - protein, 469 aa, Zea mays
  Clone ID: 700099414_FLI.pep
DTRCWKGCSIPASDALHVECPLFTGWLLSSLPPLSAAVFSSGAASGSAPGAASAAAASALVPGAGSAAAASDLISGAGSAAAAGSASDLVSGAGAATASAADSATGLVSGTGAAAGSASDLVSGAGAATASAADSATSLVPGTGAAAAGSATDLVSGAGAAAAAGSATDLVSGTGAAAAAGSASGLVSGAGAGTAAGLASGLVSGAGARTAAGSATGSVSGAGAGTAAGSAGARAEFSVGLLTGAGATASGSSGLTSSFFSSDCAGGATTASAGFSVSFSSSIGAGAGVSSTLSEAFSASSVSVGVSFASSAGFISTSVSFVPSSLGASCPVSASLASSVSGASFFPCLPFLPLEFLLRFGIFSPSGLSKTLTFSLMRAERLGVSPVPQSKSEAAGPPGCAFRYWLSCLLFLISSPVGETKTISDLPPLWGVNFLVHPSGAGISTDTTYSAAAGACCSPGVAMVGVGYT

SEQ ID NO: 43329 - protein, 572 aa, Zea mays
  Clone ID: 700099501_FLI.pep
SQERAKQLMLEYAGSERGQGDTDLDSVVSSMPSSPGSEDFDNMSIDSSSSRYSFLSKRSNLMQKFKRWGRSKDDSSSLASSISGSPRRKPKGPLEALMLKNAGDGTAITTYGKRDPNDVLDDENVASSFQLMSKTVEGFADEKYPAYKDRHKLATEREKAIKEKAGQARAQRFGGGHSSALISSPKGALPPKLAQIKERSPAANAESSEQSSDNQNNTLVVSQMKLANVEKRATRVPRPPPPRSTTASGATSIASGVQTPRAPGAPPPPPPPPGKVGGPPPPPPPPGALPRNLGGGDKVHRAPEIVEFYQSLMKREAKRETSLGSISSNVSDARSNMIGEIENRSTFLLAVKADVETQGEFVESLANEVRAASFINIDDVAAFVNWLDEELSFLVDERAVLKHFDWPESKTDAIREAAFEYQDLIKLQNRVSSFTDDPQLACEEALKKMYSLLEKVEQSVYALLRTRDMTVSRYKEYGIPFDWLSDSGVVGKIKVASVQLANKYMKRVASELDALEGTEKEPNREFLLLQGVRFAFRVHQFAGGFDAESMKAFEELRSKMTTQASAPPISQG

SEQ ID NO: 43330 - protein, 277 aa, Zea mays
  Clone ID: 700101928_FLI.pep
GRRVHGERGGREEARQPHVRRRRHRQDRHQGQPQRRRRLHHLPLGHSRCGGQQLLGPRPDDRELGRAVEAPGGGAPRGGGPVGVLPVQLRGVPGHSVRALAAAVLPRLRRLRHHRLRVRQRGRGAAGLQPVRAQAAAEPEQHLHGAGAGGPQPEHGHLHPEVQGGGGGRPRRRPVLHQDLPGPPMEAVLPHGVPAVGAGLAGRPGRLARVERQLRARHALYGEYMNTGPGAGTSGRVKWKGYRVITSAAEASAFTVGNFIDGDLWLAGTSIPFTTGL

SEQ ID NO: 43331 - protein, 108 aa, Zea mays
  Clone ID: 700102091_FLI.pep
AAVNSLKTGMLQRFKSSFVSGSSNTPSSSAPSFVRPALRGFVSGGTIGGDTRPAQAAPTFIPASRPAQPAPAVPASQPAGNNNENGNPNPESSRDQFRERKRPSGWDR

SEQ ID NO: 43332 - protein, 511 aa, Zea mays
  Clone ID: 700103482_FLI.pep
VRFLSPTASMDHAPAPPFAVHLVTGGGSSSGIALLLRSLAAARVVALDAEWKPRRRGSPAAADPAALGDDTTPASETSPAPPKFPTVTLLQVACRFSDGGGGEGERSEVFVVDLLSVPLADLWAPLRELFERPETLKLGFRFKQDLVYLSSTFSAALGCDSGFDRPFLDVTNIYYYLKGHDRQKKLPKETKSLATICEELLGILLSKELQCSDWSCRPLSEGQIQYAASDAYYLLDIFDLFQKRITMEGKCSSTTELTSDRHCSSVVIECSSSGYGICSGSCLMSIVTKYSEKIILTESDAKPRTSRRKEKLKIPANAKRKDNVDCSSEWQGPPPWDPSIGGDGYPKFLCDVMIEGLAKHLRCVGIDAAIPSSKKPEPRDLLNQTYKEGRILLTRDAKLLKYQYLAGNQVYRVKSLLKHDQLAEVINIFQLKISEDQLMSRCTKCNGSFIQKPLTLEEAVEASKGFQIIPTCLFNRNLEFWKCTDCNQLYWEGTQYHNAVQRFLSVCNISD

SEQ ID NO: 43333 - protein, 491 aa, Zea mays
  Clone ID: 700103821_FLI.pep
APRRGAAVHGHVADRAGREGVPGRGQLRGEAAAPASGAGVQVRPRRGGGCGIPGLSHGARPDPHVQREGGLPAINRGSLQAHMAGRSTNSAGAGRLHRLRHQGAGEGRVRAVGHGGGDQRQVRDAQGQGRVQGRQPQGGMRHAYVRACEFVAMFDADFQPPPDFLVRTVPFLVHNPSLALVQTRWKFVNANDCLLTRMQEMSMDYHFKVEQEAGSSLCNFFGYNGTAGVWRTQAIVESGGWEDRTTAEDMDLALRAGLLGWEFVYVGSIKVKSELPSTLKAYRSQQHRWSCGPALLFKKMFWQILAAERVSVWKKWYMVYDFFIARRIVGTFYTFFFFSVLIPLNILLPEAQIPVWELIYIPIAITLLNSVGTPRSIHLVILWVLFENVMALHRFKAILIGFLEADRANEWIVTQKLGNLQKLKSIARLTGSYRFKDRFHFLEVFIGLFLLASACFDYLYRDDYVYLFVLPQSIMYFAIGFQFIGLNVSED

SEQ ID NO: 43334 - protein, 248 aa, Zea mays
  Clone ID: 700104706_FLI.pep
EIEIIDKLISIPYVEMTLRLMERFGVKAEHSDSWDRFYIKGGQKYKSPKNAYVEGDASSASYFLAGAAITGGTVTVEGCGTTSLQGDVKFAEVLEMMGAKVTWTETSVTVTGPPREPFGRKHLKAIDVNMNKMPDVAMTLAVVALFADGPTAIRDVASWRVKETERMVAIRTELTKLGASVEEGPDYCIITPPEKLNVTAIDTYDDHRMAMAFSLAACAEVPVTIRDPGCTRKTFPDYFDVLSTFVKN

SEQ ID NO: 43335 - protein, 235 aa, Zea mays
  Clone ID: 700165062_FLI.pep
VSKLWGQFRQSKRNAKKDGCFKCGAPDHLARDCDQDGEQKNKGPSYVLKDENTQRGGNHRRSYDLVFDEDEADCSEERDHENGHRRKNRRIDDRKSELPPRGGRDRNSHERTHSDEKGSKHGKDDRNRGDRKHDDYHSYSRSGDRSSGRNDDRDYSKRHDRSRSGEEEKGYRRRDKSDGERHHRDDGYDRRRRDEDSHRKRSPDSKHRREDGGHHVRNQQSDDRSYKERRHRDGR

SEQ ID NO: 43336 - protein, 298 aa, Zea mays
  Clone ID: 700165213_FLI.pep
ESNICNQVAESMAFHEKETQGETEEMEEQKNIPRHYEVEDNNETNELSPTFASCQNNFSLQVEKGIQIYNLDTPPQDEVLIDPPDKGKTVDSELSPNIKAEDAVTIEEEKLGQSSSFKIRDLNLVGSPEVADMRGDPRLGQSFTAGCSVDLQDNQQIDLGTALGNNPNNTDTCTPFLLGNKAVQVIDIEDDSPIEAGACDTSKSKGEMVYSSMEGSMNPLANNDALHGIPDGYSLAISDYLGADMSCYQSIQTELQGGMNLNGSEGITVMDDSIYSSLGDIGFMEVWDQQPQDYEKFF

SEQ ID NO: 43337 - protein, 306 aa, Zea mays
  Clone ID: LIB3151-020-E3_FLI.pep
YKEKGMAEITLEPSDLMAQTNKRIVPKFTEIFPVEDANYPYSAFIASVRKDVIKHCTDHKGIFQPVLPPEKKVPELWFYTELKTRTSSITLAIRMDNLYLVGFRTPGGVWWEFGKDGDTHLLGDNPRWLGFGGRYQDLIGNKGLETVTMGRAEMTRAVNDLAKKKKMATLEEEEVQMQMQMPEAADLAAAAAADPQADTKSKLVKLVVMVCEGLRFNTVSRTVDAGFNSQHGVTLTVTQGKQVQKWDRISKAAFEWADHPTAVIPDMQKLGIKDKNEAARIVALVKNQTTAAAATAASADNDDDEA

SEQ ID NO: 43338 - protein, 98 aa, Zea mays
  Clone ID: LIB3152-017-C5_FLI.pep
KTVQYLIGSGMDPGTENNPYLGFVYTSFQERATAVSHGNTARLARAPRTGPRRTSPGRSSSAGSLIGKPLFRHLLLTVICAQIMSLAVSVFVTMCLCV

SEQ ID NO: 43339 - protein, 322 aa, Zea mays
  Clone ID: LIB143-028-B11_FLI.pep
ILKVIRKNLVKKCIEMFFEIAENKDDYAKFYDAFSKNIKLGIHEDSQNRAKLADLLRYHSTKSGDETTSLKDYVTRMKEGQKDIYYITGESRKAVENSPFLERLKKKGYEVLFMVDAIDEYAVGQLKEYDGKKLVSATKEGLKLDDEDDEEAKKRREERKKRFEELCKVIKDILGDRVEKVVVSDRIVDSPCCLVTGEYGWTANMERIMKAQALRDSSMSAYMSSKKTMEINPDNGIMEELRKRAEADRNDKSVKDLVLLLFETALLTSGFSLDDPNTFAARIHRMLKLGLNIDEDAAGDEDADMPALDEGAAEESKMEEVD

SEQ ID NO: 43340 - protein, 602 aa, Zea mays
  Clone ID: LIB3180-037-C12_FLI.pep
SLPLLRRRGPGRRDERLSTTMARRATPQEAAVAAAEAAIRSVGLGFDVVSDVRLKFCKQRGAPDPWLIELDHGEVQDIVLPGGVTVAGVTASVKCDKGERMRFRSDVLSFQQMSEQFNQELSLSGKIPSGFFNTMFEFSGSWQKDAANTKALAFDGWYVTLYSVALSKGQIVLRDHVKQSVPSTWDPAALARFIKKFGTHIVVGLKMGGKDVIYLKQQHSSTLQAVDVQKRLKEMSDSRFLDANVQYDMSRNNQDLVMMLKRRGGRDKESISHSEWLNTVQAEPDVTSMSFIPITSLLNGVPGSGFLIHAINLYLRHKPPIEELHQFLEFQLPRQWAPVYSDLALGPQRKRQGSTSLPVNLIGPKLYVCTNMVDVGKRPVTGLRLFLEGRKSNKLAVHLQHLCSLPQIIQLEDDPYNHQTPEYDRKYYEPIGPWKHFSHVCTAPVESDDLCIVTGAQLDVVHQGLKKILFLRLHFSKACNAVVRNSEWENSPNIAQKSGLISTLISTHFSSVAQTPPPRPADVNINSAVYPGGPPVPVQTPKLLKFVDPTEMMRGPQDSPGYWVVSGAKLNLERSKISLRVKYSLLTAMMPDDEFPLDDDEF

SEQ ID NO: 43341 - protein, 314 aa, Zea mays
  Clone ID: LIB3067-033-B6_FLI.pep
FTKLNGIVIQGNGIINGRGQQWWTYSDPEDEDDDDTYHVEFQRMPQIKPTALRFYGSFNVVVSGITIVNSSQCHLKFDNCQGVMVHDVTISSPENSLNTDGIHLQNSKDVSIHHTTLACGDDCISIQTGCSNINIHNVNCGPGHGISIGGLGRDNTKACVSNVTVRDVNMFRTMNGVRIKTWQGGVGSVQDIRFSNIQVSEVQTPIIIDQFYCDRSTCRNQTSAVAVSGVQYENIRGTFTIKPVHFACSDSLPCSGISLTGVQLRPVQVPHYHLNNPFCWQAFGELYTPTVPPIACLQIGKPAGNNLQSYDDIC

SEQ ID NO: 43342 - protein, 348 aa, Zea mays
  Clone ID: LIB143-022-G4_FLI.pep
IFFFPALPAACSSLEMALVRRCLCGSEEDCRALLGMENLRLFSYREIRAGTNNFDQSNKLGRGGFGTVYKGVLRDGTEFAAKVLSSESEQGIKEFLAEIESISQVKHANLVRLLGCCVQRKKRILVYEYLANNSLDHALKGAAADLPWSTRSGICLGTAKGLSYLHEEHEPNIVHRDIKASNVLLDRDYLPKIGDFGLAKLFPDNITHISTAVVGTSGYLAPEYFVHGQLTKKADVYSFGVLVLEIVSGRRVSQTIQSDMFPVREAWMMYQQGRLLEIVDASMGSYPEKEVLRYIKVGLACTQATPSSRPTMRQVLALLSERRCSRRVSPSTAATTRPLPWGVCPPVR

SEQ ID NO: 43343 - protein, 87 aa, Zea mays
  Clone ID: LIB148-038-E9_FLI.pep
KATTHTGKQARIIGIMARACVFLVVLLLAAIAVAPFAGAARVDVVEGRSMASADAPEAAADAPAPSPDSASSPDSSSEAPSSSSSSD

SEQ ID NO: 43344 - protein, 120 aa, Glycine max
  Clone ID: 700680182_FLI.pep
DEVFTNWKDSPRTVLNIYHELIQMGLRIWVFSGNTDVVIPVTSTRYSIKALDLPTVSPWRAWYDDGEVGGWTQEYAGLTFVVVRGAGHEVPLHSPKLALTLFKAFLAGTSMPNLELVGAS

SEQ ID NO: 43345 - protein, 185 aa, Glycine max
  Clone ID: 700680023_FLI.pep
MGSLAKKGLNNYVKQLQQHPLRTKVITAGVLSAISDVVSQKLTGIQKIQLKRLLFKVIFGAAYLGPFGHFFHLILDKIFKGKRDSKTVAKKVLIEQLTSNPWNNLLFMIYYGLVVEGQPWVNVKAKVKKDYLSVQYTSWTVWPVVGWINHKFMPLHFRVVFQSLVAFFWGVFLNLRARSMALIKA

SEQ ID NO: 43346 - protein, 251 aa, Zea mays
  Clone ID: 700204330_FLI.pep
EAQETVDPAENHVQHQDYLEYKAGNVIDDETHLEEHIPPFPSSTDVKRDSPLALPHPPSPTLEEPVEEAPKTYASVLRTKSKATLAITESQQAQQLAQQPQSASVHEKSNLDNHRDVSVPEDEEFLSVYVGNLSPSTSVFDLEKVFQAFGRIKPDGVAIRSRKEAGVFFGFVEFEDMSGIQNALSASPVELNGRFVHVEERRPNCGFPRGRRGRGRADFSRDQAGGRYDGEYATRSKGIGHQKKTGRQYDY

SEQ ID NO: 43347 - protein, 396 aa, Zea mays
  Clone ID: 700206831_FLI.pep
LTLVVFYAVNQKKRAQRLVSINNPFASWGSLGEDIGAAPQLKSAKFFSLEELKLCTNDFREINAIGAGGYGTVYRGKLPDGQLVAIKRSKEGSMQGGLEFKTEIELLSRVHHNNLVGLVGFCFEKGEKMLVYEFIPNGTLSEALYGMKGIQLDWSRRLKIALDSAKGLAYLHDHANPPIIHRDVKSTNILLNEKMTAKVSDFGLSLLVTDSEEGQLCTNVKGTLGYLDPEYYMTQQLTAKSDVYSFGVVLLELIVGKPPIHNNKYIVREVKMALDEDDGTHYGLKDVMDPVLQKIGGLFGFPRFLKLALQCVEEVATARPSMNSIVREIEAIMLDNGLTPGSMSTSSSFSIESRTMKVGPKHPYSSSSMSTSTFDMDSRAFEYSGVFPSSHGSLKP

SEQ ID NO: 43348 - protein, 105 aa, Zea mays
  Clone ID: 700220713_FLI.pep
PLAMLHVSFIIYIVSIQIAISASNTGGAWDNAKKYIEAGASEHARTLGPKGSDPHKAAVIGDTIGDPLKDTSGPSLNILIKLMAVESLVFAPFFATHGGILFKWL

SEQ ID NO: 43349 - protein, 74 aa, Zea mays
  Clone ID: 700167535_FLI.pep
ERPATGFELRLRYILFSGPDNQSISLLGDAFVGGFLSQLVLGKGIEDCVRAGCYAANVIIQRPGCTYPEKPDFN

SEQ ID NO: 43350 - protein, 190 aa, Zea mays
  Clone ID: 700167917_FLI.pep
HGLWFASDPGARSPRLPGVVRAARGALVPQHVEPHARGRAAVVAQDPHLHSHHSVHLPFSSSNRHPGQVQSSSNSEPWLWKRCNGTTNEWAVGFLPCASGRCQASAWPRPPRRASAMWPTCRRRTSSTLGMRSCQRPNRAETVRSLRLKEDVVRWHRFSAPKRTVYMLTDGVLSSRSCTPNGWYAHIAAR

SEQ ID NO: 43351 - protein, 235 aa, Zea mays
  Clone ID: 700168054_FLI.pep
LSFFSVLAASDLLLYELVFRWAARVLVNSVEACRHGRKEVGLPSHVATFSSKNEAASLGDRPLARPNSFLNMLGIGSTAFEQGNGREIEVSESKGGSSTRHLCNISLPFTGSHKDHQWAGPAIRMSLPSFSGRTVDHPDLLKYSCQVECRVRPVKPARIWSARTTEPQQEKSDGEVSSSGSSVAADLDARSHSISVLLSRPIFALEFSSLRMHVDAPRTVVPHRDDKKVGYSSST

SEQ ID NO: 43352 - protein, 197 aa, Zea mays
  Clone ID: 700168111_FLI.pep
TSPGCNAVGMIDRKILGIQHLYGRPVYARSKQCSIDSPQNGPLPPDAPSWCEAPFDPEGLLSSVMAIVTCLIGLQYGHVIVHFQKHRERMMNWLIPSFSMLVLAFAMDFFGLHMNKPLYTLSYTLGTAGAAGLLFSGIYTLVDIYGYRRPTVAMEWMGMHALMIYVLIACNVLPIFIHGFYWKEPKNNLLKFIGIGA

SEQ ID NO: 43353 - protein, 373 aa, Zea mays
  Clone ID: 700168115_FLI.pep
FEDYFLKRELLMGIYEKGFERPSPIQEESIPIALTGSDILARAKNGTGKTAAFCISALEKIDPEKNAIQVVILVPTRELALQTSQVCKELGKYLNIQVMVSTGGTSLKDDIMRLYQPVHLLVGTPGRILDLTRKGICVLKDCSMLVMDEADKLLAPEFQPSVEALIHFLPPSRQLLMFSATFPVTVKEFKDKYLPRPYVINLMDELTLKGITQYYAFVEERQKVHCLNTLFSKLQINQSIIFCNSVNRVELLAKKITELGYSCFYIHAKMLQDHRNRVFHDFRNGACRNLVCTDLFTRGIDIQAVNVVINFDFPKTSETYLHRVGRSGRYGHLGLAVNLITYEDRFNLYRIEQELGTEIKTIPPQIDLSIYCQ

SEQ ID NO: 43354 - protein, 133 aa, Zea mays
  Clone ID: 700169581_FLI.pep
PSKPEELCSQACTDRLAEYGQEMVRRHEKDYDRRKAPIDPMVVYATGGRKSHGRYSMFNGVIDSREVRSQRSGSSSERSGARTHRQSEHELEVARVQEEIRQRDAFQRHNMSTLPHSWRSSRPCFKQLSNSRG

SEQ ID NO: 43355 - protein, 317 aa, Zea mays
  Clone ID: 700169670_FLI.pep
RLQHQEAAQNFKAYEPDSGYGMSFITKVDGEAAQGIAYSSEAMVLHSVNGYQLPASTATQQPVPQMFSQQFQAPQYPNFLPYRHVFSPQFGSLMVVPNYSSNHAFPQLPHASSYLVMPNGASQLAANGMKYGSNHQYKQVFQGAPAGYGYGNHNGYPNGVIGGTGAIEDMNMSKYKDNCLYAPNPQPFIFRDCQVETADVWIQSQKESPNMPSAPFYNMVGQPVSPHAAYLPPQSGHTAFSPAPSHPGHLQYPGFVHALQPTSMTMVQNPQTMIHQPAAPPLAGNLGLDMSAMVPGNQVGAFQHNQLAHLGWTTQSF

SEQ ID NO: 43356 - protein, 149 aa, Zea mays
  Clone ID: 700169810_FLI.pep
KYLDAAHFAVPRGSRAVAAGGRHGGRAGAGGADDTRAVLHAVLLRRGRGRRVRGRPARGRVRGAGQAAGLVRVPRHGRVRAQRAGVRRGGEPHPRRLPEHGPLHEARRDALRAGRRRCLPSRRAQTRCPPVVHVVRFPACSVSTTMYQL

SEQ ID NO: 43357 - protein, 432 aa, Zea mays
  Clone ID: 700169889_FLI.pep
QQSQRKVVLMSTVTLPTLSRCLVELEGLHHLPGEVGVVTAEVAVGGGLDEPVAALLQVEVDADHPGPEVEVLLHDLEDLLVGDRAGAVRVDEHGQGLRHADGVRHLHEAAAGEAAGHDALGGLPGHVGAAAVHLGGVLAGEGATAVGSPAAVRVDDDLAAGEAGVTVGPADDEAPGRVEVEDGLLVEVLLRDHGLDDVLLEVGGDLVVGDGLVVLGGDEHGVHADGHHGAALVHVLHRHLGLAVGPQPGAGAVLAHLGEARAQLGGQHVAQRHQLGGLVGGVPEHVALVARADLLGPLREVPVHALRDVGGLLLDVHQHLAAVGVEAHVVGGEPDLAAGVAHDLLVVHGRLGRDLAEHHHHVGLGAGLAGHLAVGVLREACVKHGVRHLVAQLVGVPLVHGLRGEKEALGRHCLLLALPTSCAAALYSGPAS

SEQ ID NO: 43358 - protein, 168 aa, Zea mays
  Clone ID: 700170303_FLI.pep
EARPRLREELRTLPAGHEHGLQRRTLPARHHVGRLPLPRHVASSQDHGCWEGLCRPMPRRGICGHPAYHPTRIAPPVTAKSARPPTARPAEWPGFCGPKASKTKGETHRSNPREKKARTRGRCGSHYLEDRNSVYKLFARPFSSTHQTLFLGYLQRRSGEGTRKTSSF

SEQ ID NO: 43359 - protein, 96 aa, Zea mays
  Clone ID: 700172649_FLI.pep
SLTDDTGGSDAPAKKSFSHLDLDNDGLLSADELKPVIGNLHPSEYFYAKQQADYVISQADTNKDGQLSMNEMIENPYVFYNALFTEDDYGFHDELR

SEQ ID NO: 43360 - protein, 127 aa, Zea mays
  Clone ID: 700172705_FLI.pep
AGDGLMELEGFTSVYKNTYTKSSLLTHEAFENMHGNTKAALDYYVSVNSDAYVATFFGNMDKMVTATRTMQGLQRTLVLSRRAFANYTAAGLAGQQLAKAMWDAHREEYVRGRGSALPEYCFCEFKL

SEQ ID NO: 43361 - protein, 82 aa, Zea mays
  Clone ID: 700196278_FLI.pep
AVFLHIPDKLVWTGLERLAGKLRPHRGRIFVSHNIKFCSRLGGDECTRRLAKLGLEYVGKHTHDSLLFNHYEVWFEFRRPKV

SEQ ID NO: 43362 - protein, 193 aa, Zea mays
  Clone ID: 700196436_FLI.pep
KAVLSALSWRWLLALSSLPCFLLLLFFRITPESPRYLCAQNRMTDARFVLERMAIANQAALPMGVLTYHQETKTECITHVSEDEHLIPVREKEHTDRNAISSKSGAVAVLHKLLSHNLLKSTLLLWFVYYASSFAYYGITLLTSQLSDVNRSCKSDLVFEVHQNNGNLYKDTFITSLAGRLQDPRLDFIRFAC

SEQ ID NO: 43363 - protein, 242 aa, Zea mays
  Clone ID: 700205091_FLI.pep
FDPGDCNILITSGSDRSLTLYDLRMSSPARKLIMKTRCNSVCWNPREPMNFTAANEDTNCYSFDARKLDEAKIVHKGHVSAVMDIDYSPTGREFVTGSYDRTVRIFNYLGDHSREIYHTKRMQRVFCVKYTYDGTYLVSGSDDTNLRLWKSKASEQLGVLLPRERKKQEYQDALKERYKHLPEVKRIVRHRHLPKPIYKAANLRRTMIEAESRKEERRRKHSAPGSMPVQPFRKRRIIREVE

SEQ ID NO: 43364 - protein, 183 aa, Zea mays
  Clone ID: 700205154_FLI.pep
PVGPRTWFDQTRTQPVALPSSPSVLFRPPPVHRPVQFGGDMAAAGDLSDDEKRAMRGSKFAPLPPPPPSSRPQPRMAHPGGALTTNKAAALAKFLERKLQQPDGLDSLDPDLVKLAVKNAKETIKASNGEPSTSGRVVRHVSSFVDGTEDSEDEAEVKGIKRKRKNKKVKTHQGDKQQSKKKK

SEQ ID NO: 43365 - protein, 305 aa, Zea mays
  Clone ID: 700219551_FLI.pep
RNLIESEDASFRSSYRRMGSHEPFEGSVRFSRTLSVGRLRDRVLRRPPFSDGLFTPSLLYDRAVWPSGNASARQDSAVMQRTNSDRSSEPRSDPSTSDMYNSSSERQASNGDLLERRSAFLERRRRIRSQVRALQRLGSRFENLSGHERSCILSGQHRTGNCNCRTGSRQGNPDEETSTRASISRIVMLAEALFEVLDEIHHQSAALSSSRPSFSSIGSVPAPREIVERLPSKVYRKPLKYQSEEAAQCYICLVEYEEGDCLRILPCHHEFHLTCVDKWLKEIHRVCPLCRGDVCRSDAPIGKTS

SEQ ID NO: 43366 - protein, 382 aa, Zea mays
  Clone ID: 700221264_FLI.pep
TAVPAMATRYWIVSLPVQSPGATATSLWSRLQDGISRHSFDTPLYRFNVPDLRVGTLDSLLALSDDLVKSNVFVEGVSHKIRRQIEDLERAGGVDSGALTVDGVPVDTYLTRFVWDEGKYPTMSSLKEIVGSIQSQVAKIEDDMKVRAAEYNNVRSQLTAINRKQSGSLAVRDLSNLVKPEDMVCSEHLVTLLAIVPKYSQKDWLSSYESLDTFVVPRSSKQLYEDNEYALYTITLFAKVVDNFKVRAREKGFQIRDFEYSPEAQESRKQEMEKLLLEQEVMRTSLLQWCYASYSEVFSSWMHFCAVRIFVESILRYGLPPSFLSAVLAPSTKGEKKVRSILEDLCGNVHSIYWKGEDDVAVAGLGGESEVHPYVSFTINFV

SEQ ID NO: 43367 - protein, 295 aa, Zea mays
  Clone ID: 700168917_FLI.pep
SFIYIGHQPDDACVVALLKMLIISSTPHLGVKAWKMVAWPGSARWAKRLSMGPVPVYSAWNQAPMTASMARRPFLISLVRSSLIFSGEPLPQPSGSNQRPPGYPTSVPVSLLLGKMGSVLTLPGLMMSAQRRPSAQPMRMSSMMKRVVVSVKYCCSPAVYQKGVLRTPILVRNSGMKMPAAPSIAHRQCTSSACTFHRRLSGSDPRPQGSKPKSPGRLPSSHGGGVLPGNQIGLLGSAAARTANDGRAASACLSSVLPPRKEDDARCPFLGSAVTAVVEDEEAETSAIAGASCGV

SEQ ID NO: 43368 - protein, 185 aa, Zea mays
  Clone ID: 700171527_FLI.pep
SEGGREMGHEAAAPGSSVLGRAVEEVRSALNEHADVVADLFGRVSSEVRTGFAPAVDSFVGFFHAVDWKEPWLISILSFHAILLLVTIISRRNINFQLILSALTFSGVFLAERLNTFLAQNWKSFSTQNYFDPQGLFISVIWSGPLLLITILILVNTLVTLCTLMVRWKRAKLRHRARQARDKQD

SEQ ID NO: 43369 - protein, 263 aa, Zea mays
  Clone ID: 700194387_FLI.pep
NAHRIGYVAPRFGRNTEAGDGEDSPENTASAQPSPYHSGKGYTHAKDLSNNIKKGGKASTSFGIQQRAEKSARTKRSTKSILHGLSDSDNSDSEFMGTLSRSRSHTLKTNRKLFQNGSTGLITPQSSGLIERERVRTKSQPLDPKATSNGDLHTMDEYQSVIMQLRDENSSLKERLSKMEESMSQELVVECDKNKSLTERVEDLQRQLESATKEQEALIDIFSEERNRRDQEEESLRKKLKDASSTIQDLLEQLNAARKGRKV

SEQ ID NO: 43370 - protein, 90 aa, Zea mays
  Clone ID: 700209286_FLI.pep
MAGWHSSSRRRACWQDQCATRTTPGTGAYSTATRSHVRRCGRACSRLVRPSPSSRPSWARCTTSATPSPGTPPVVPPTAAPALAWALTTN

SEQ ID NO: 43371 - protein, 161 aa, Zea mays
  Clone ID: 700213382_FLI.pep
SSREDLDDGRDASGVRDLVVTEPSRQEDPPPLVLLPLRPVHEAQYVEIQHIRLPARLVVVVVVCPRSEHRVYYYHLPPCFLATDRFLAALHYLDALVLIPVVQDPLEHECVSRRDVLEHVAAVEGQAGGAGGSLGDDVGEVHDGAPLDVREGGDDGGGGGA

SEQ ID NO: 43372 - protein, 171 aa, Zea mays
  Clone ID: 700204124_FLI.pep
RIVVGQRDDGQQYQHNFLGPSAESRVFARPTQSFAHTPDYSVLSYPSQPAMPFTPAFFAPGGSPYLVDAKGAPVIPPLSGLSLGISHPSFNTRATQPSSNELSYFHPSMDFSYGVSSEGARREAGSYWPMSYQGQTMFVDERMRNVSQDGTSGLVLKRKEPESGWDLYPRR

SEQ ID NO: 43373 - protein, 215 aa, Zea mays
  Clone ID: 700204162_FLI.pep
RSGGGGRKAGEGEGAREGAPAMVHVNFYRNYGKTFKKPRRPYEKERLDAELKLVGEYGLRCKRELWRVQYALSRIRNAARHLLTLDEKNPRRIFEGEALLRRMNRYGLLAEGQNKLDYVLALTAENFLARRLQTLVFKAGMAKSIHHARVLIKQRHIRVGRQIVNVPSFMVRVESEKHIDFSLSSPFGGGPAGRVKRKNQKKASGGGDAGDEDEE

SEQ ID NO: 43374 - protein, 264 aa, Zea mays
  Clone ID: 700205796_FLI.pep
ASVIASSISLMGRNTTTTLPSSSSSSSSMRSDLVEGFYRLVELLQLLHPQPLALAYELQQPVDQRGFLVALLVVGLEAHLVLLLLFEARLAERLELPVDLVDALADGVDLPARGVRHELQLLADEGQAFGLLLHPAQHGEHLVPHLHLLALDLLLLLLEQRQRRPRRLLRPLPHLLAAACALGPRAHAHRATRPMPRTVMSAHSSEASTMTTSWSSGLSGLVPHMSFLAPLCILAARAAGTTVGSRACLSAQGRKLTESACVPV

SEQ ID NO: 43375 - protein, 118 aa, Zea mays
  Clone ID: 700206319_FLI.pep
PDQAAARGLCSLTTLSPPCSIVCTCAGSSSLAFPLPPPSSSSSFSCLRISSLLACRSCSLVSTFSSFALSFTGSVVFSLAPLSFFFSFFSLSFFSPLSFLSFFSLPFSSPPSSPAPSF

SEQ ID NO: 43376 - protein, 237 aa, Zea mays
  Clone ID: 700167361_FLI.pep
GFSPGELQQERLAVLEAFQRMYGVHLDRDLDSLLHMPNDGDTWSVMQSWVLPTRSFLEFVMFSRMFVDALDAQMYDKHHQTGHCILSLHKDQHCYSRLLELIVNVWAFHSARRMVYVNPATGEMQEQHHLSGRRGQMSVQFFSYATLKSMDEELAEEFDLDHPDRRWLWPQTGEVFWQGLYERERSMRQHDKERRKQQSREKIQRIKSRARQKTLGKYIKPPPDDTVVSNDTTTVDL

SEQ ID NO: 43377 - protein, 204 aa, Zea mays
  Clone ID: 700172022_FLI.pep
PAVRRRDLGRHRDPSPPRRRLRPRHGSLLGSLRRRQGNNGDCRGRPAGQNANPCLFLLLAPRICLLGLWDWGSSVLVQLTERFRAIYAVLQGVEPAVLVDDGGEGGGGARRRRPRGGDAGAGAQGVLQRETLLRRRRRRARGHRARELRGVDQGGRRGGRRKASGRGQVPGLDGVGGALLGSGRREGGDAGRRKAVGALQGISG

SEQ ID NO: 43378 - protein, 268 aa, Zea mays
  Clone ID: 700172436_FLI.pep
PAMEVRSEQGLMAGRDLFGMPKSPPAPAPPSSAAMQSVRMAYTADGTAVFAPVSSSPATPSYQPQGAAHGASMSAATVVGGNGAPAAPSMGEPLAKKKRGRPRKYGPDGSMALAMVPASAASGSPATGQGFSGPFSPPALNPASSLVVASPDGFKKRGRPKGSTNRPRVDAAGSSGAGFTPHVITVQAGEDVASKIMSFSQHGTHGVCVLSANGSISNVTLRQTATSGRTVTYEGQFEILSLSGSFFLAEDGVQRSRNGGPQRVAGWS

SEQ ID NO: 43379 - protein, 71 aa, Zea mays
  Clone ID: 700172454_FLI.pep
GIVAPLIPFNPFAPKQVLSVVHSRTSLSSPRIDRENGAIATLNVDDPALSMCFISKSPSILPFGVLNGHAE

SEQ ID NO: 43380 - protein, 135 aa, Zea mays
  Clone ID: 700195290_FLI.pep
PYKLSGIIHISPFWTEFLRRISLLLWKANVYRVQQIGDTSSPNKHKRDRLKDIILLQIQQSYFSNIRLQDSARRELLQPIQNLLHHSVVTIGLKQTSFTHLSPQSILYSMGLALYLFLEAYPLLLETFSCGRSRF

SEQ ID NO: 43381 - protein, 105 aa, Zea mays
  Clone ID: 700195318_FLI.pep
FVPDPRFEEVKEFVRSGVFGTYSYDELMGSLEGNEGYGRADYFLVGKDFPSYIECQEKVDEAYRDQKLWTRMSILNTAGSSKFSSDRTIHEYAKDIWDISPAILP

SEQ ID NO: 43382 - protein, 403 aa, Zea mays
  Clone ID: 700208165_FLI.pep
AKIYFVMELVRGGELFSRVSKGRLREDTARRYFQQLVSAVGFCHARGVFHRDLKPENLLVDEQGNLKVSDFGLSAVAEQFRPDGLLHTFCGTPAYVAPEVLGRRGYDGAKADVWSCGVILFVLMAGYLPFHDKNIMAMYKKIYKGEFRCARWFSKDLTSLLMRILHTNPNTRITLPEIMESRWFKKGFKPVKFYIEDDQLHNVIDDEDGLLDMGPAGPVPPPLPPPPPPLPPPKVDGDESGSDSDSSISSCPASMLSDESQRPRGSLPRPASLNAFDIISFSRGFNLSGLFEEKGDEVRFISAEPMSDIITKLEDIAKLKSFKLRRKDWRICLEGTREGVKGPLTIGAEIFELTPPLVMVEVKKKAGDNEEYENFCDKELKPGMQHLVHHMVRASSMLLTDAK

SEQ ID NO: 43383 - protein, 304 aa, Zea mays
  Clone ID: 700210017_FLI.pep
CALPFPPPTSTAGLRRRRPDRVQEQRRREGRAGQRVARRRRLRHHQPGQGGRREEVPRRGVLRRHHRARRQRRRLPGNRRHHPLHVSSQSVSPVVVPRPAGDVSVFGGDELAMQADGPYWRVELGRLDGLDSRASDVKGKLPDPDMHVKDLTPVFQRNGFTEVDMVALSGAHTVGFAHCSRFTDRLYSYGGARTDPSFNPAYAYQLKQACPIDVGPTIAVNMDPVSPIRFDNAYYANLQDGLGLFTSDQVLYADEATRPIVDMFAASQKDFFDAFVAAMLKLGRLGVKTGKDGEIRRVCTAFNH

SEQ ID NO: 43384 - protein, 189 aa, Zea mays
  Clone ID: 700212127_FLI.pep
STTVQYIYRSILHAAPGNTASFILFLPWLHHSCSARDVRVRSVGLLAWSSYNLADLVAVGGHADGESDGDAALAGDGGDGAHVDALDAVGEALEAAARRLAVRAGPRRAVEALDAAAARRGERAGPPRRVRDARSQRRPHLPAGDRRRSGRRQQRRRHQHGNHLRRLPAVQHSRHRRCSISRRRPQFVR

SEQ ID NO: 43385 - protein, 106 aa, Zea mays
  Clone ID: 700213785_FLI.pep
AKLLADIMIRDEKMKQMDDHLNQLQLEHAKLMAEFDNAHRSLSELHAQVSELEDEVEKQKLVISESAEGKREAIRQLCFSIEHYRSGYQQLRQLLQGHRRPLVMAT

SEQ ID NO: 43386 - protein, 133 aa, Zea mays
  Clone ID: 700217779_FLI.pep
DAGGSQFYAWERDRFAPFPLMPVDCEISWWTSQQQSHSTSEPSSAPRRLFGQWLGVGRSSPENRPPEGSSYRQMMPVDCETSWWSSQHQSHSTSEPTSAPRRLFGQWLGVSRSSPENRSPEGSSYRQMHSPRM

SEQ ID NO: 43387 - protein, 242 aa, Zea mays
  Clone ID: 700217984_FLI.pep
VSLVVGGDSIGEMGMVASMCTEPIKRHRVERDLDGKVADALRERTRSRQRTFRSVNSITMRLPRFKEGLRDVKNIFDQYDEDSDGTIDSEELQSFGSRVRVHMSEEEMSNLHRYCDIDSRKGVQFQEFVVLLCLAYLLFGPDVTRRVSEFESGKLNYVFDELIDAYIFFDKDGDGMLRRRDVTHRMNEASHQERTPSHITAQLFKEMDLNRNGKVNLKEFLYSMIRWAGLGTEDDGSDEASP

SEQ ID NO: 43388 - protein, 357 aa, Zea mays
  Clone ID: 700204754_FLI.pep
WTKAKHPLHSAALTGMWECPDFFPVSGPGMQAGLDTSAPGRKYVLKSSLDLTRYDYYTIGSYDGGKDRYYPDDPAGDYHHRRRYDYGNYYASKTFYDPVERRRVLLGWANESDSVPDDKAKGWAGIHAIPRKIWLDPTGKQLLQWPIHEVEKLRGKAVSVDAKLVKPGDHFEVTGIATYQADVEVSFELEAGTSLLDKAEAFDPAYDDDAQKLCGVKGADARGGVGPFGLWVLASADLQERTAVFFRVFRDGHGKPKVLMCTDPTKSSLSPDLYKPTFAGFVDADISSGKIALRSLIDRSVVESFGAGGKTCILSRVYPSIAVGKDAHLYVFNNGEVDVTVSGLTAWEMKKPLMNGA

SEQ ID NO: 43389 - protein, 83 aa, Zea mays
  Clone ID: 700204790_FLI.pep
ENVEGTAGFLLSPMNGIRVLGRNVVWSKQLDSESSDGRNLTIKRKRQYGHVSRRALPNHQLQAGSLVVILVHGCLHASSFFPC

SEQ ID NO: 43390 - protein, 123 aa, Zea mays
  Clone ID: 700204883_FLI.pep
RAPRRDPGGAPVVVAGPMEWGSAAYTAATLVCAAAASVVALTHIYRHLLHYAEPIYQRFIVRIIFLVPVTLSARRSHPQQTLVAKGALAPDLSPAFAVAFPYRMSSRGTARSGLVSWRGSHEC

SEQ ID NO: 43391 - protein, 231 aa, Zea mays
  Clone ID: 700219042_FLI.pep
GVMAVSFANLNSEAGLKKLDEYLLTRSYITGYQASKDDLAVYTSFSAAPSSKYINVARWFNHIDALVRLSGITAEGQGVKVESSAVPSAPTPDVAEAQAPVAEEDDDDDVDLFGEETEDEKKAAEERAAAAKASGKKKESGKSSVLLDVKPWDDETDMAKLEEAVRSVQMEGLLWGASKLVPVGYGIKKLQIMMTIVDDLVSVDTLIEDYLCAEPVNEYVQSCDIVAFNKI

SEQ ID NO: 43392 - protein, 268 aa, Zea mays
  Clone ID: 700219168_FLI.pep
VDFSVFLKLTPKQKDIVHKLEMHDRFKRSAVGSALYIHPCLSGLSEVNAENRAHTLRDDSVDSLMDSINVRDGVKANFFMNILSLANSAGEKVLAFSQYILPMTFFERLLVKKKGWHVGREIFMISGDTSQEDREAAVDRFNISADAKVLFGSIRACGEGISIVGASRVVILDVHLNPSVTRQAIGRAFRPGQQKKVFVYRLVAADSDEVKVHETAFKKEVIQKLWFEWSEQCTTEDFKLGQVDIDDSGDELLDTRAIRQDIKALYRR

SEQ ID NO: 43393 - protein, 187 aa, Zea mays
  Clone ID: 700193217_FLI.pep
SRAFHACWTCVIRDHCFVKMTYRQHWFLVPCKMPVFPYQGRAPSSSVHLEICFLNWECQNLYILMLELHSLCWSLHCLGHSYWGKLILFAGHLLPLHLVSTHIDRWIEILERHPTLYSSWMRITLHDNYALPNDLRGRGEASTRRHHHRLLLYLHLGLLLGLLRSRAALHKLEVPEGARDLPLRRHR

SEQ ID NO: 43394 - protein, 191 aa, Zea mays
  Clone ID: 700197014_FLI.pep
EVHKLRDLVRSLQEREKTLELQLLECYGLQEQDAAVRELENQLKINNVESKLYLLKIESLQTENQRLQTQLSENSKIFSELEATRTKCKFLKKKFISDAEQAKEQIISLQKMVDSLQNKQTDEEKKFIEFENKLKRLEELEKEATELRAANSRLQQENAHLIRRLEVTRLPPVPKPKTSMEVILYRSWIVL

SEQ ID NO: 43395 - protein, 164 aa, Zea mays
  Clone ID: 700212957_FLI.pep
PFSAHRNLSTTHVPASMARLFAARALTLARPSAAPSALRFCPSRALSDKVDFIEIDLSEESPSSSSGGGGAGDPATVQAQMGSRRLEDAIHGVLVRRAAPEWLPFVPGASYWVPPLPRALGVAELLSSAMHITRGAEAMTEEEALSFTTVRGWPSAAYFVAGSY

SEQ ID NO: 43396 - protein, 251 aa, Zea mays
  Clone ID: 700217044_FLI.pep
IPQHGKSEPDFANGGLEGRGVGGAGCGDGELAGDLSLGPADLERPDLHPELGVEVDVDGEVARGLLLPELGGGDVALEELRAAEPGAELGGRLGALVEGVERGVAEALVAEQGQRLDVVVVEPHARVGVAHRHGDVEVVGERGGRRQRELGERGRVHGGRDHVRLEDEVEDEGDDAQDDGERDEDAAQAAQEPARQALAGAAQARDGTARGAHGGRRRILVGCPPLLRSDPVRSHPLVLRPADLGSNRRMG

SEQ ID NO: 43397 - protein, 277 aa, Zea mays
  Clone ID: 700152516_FLI.pep
SFCLLWGEGERESERDLVERLARWSSNEDVGGVQRAGGGGAGGAGGGGQPDAVAQDEGVAAGGALPGRLRAGRVRAARRPRPPRLLPHQPGAPPPQVVRGEGRGVLPVRGGAGQPGSSEPAARAVKQGRQRGAPRHRGLQDAARPRALPGQLHARPAHRLLRLRPLRQVHQLPARRIRPRGQGAALLGDHRRRLRRLLRRHRHAQRLMRQVARAVPARLLLLQRPRRAQVLREPQAQGHRCPRRRRRDLRCHFQGGGRVYCPDGAALIYHHQAEAMR

SEQ ID NO: 43398 - protein, 490 aa, Zea mays
  Clone ID: LIB148-001-F8_FLI.pep
AMATARKDPQQVDKVNLKPSESGKGVVRRARSVPTSPDRRSSPSPAPVSDNASRPASSLNTRTTSSRSTTTSSSAASSSHGKTMRSASSSVGGASASARQTNAARRRAEKPGATSVWPAAGGAVTNASSSKDVASRAAKSPSTAAQKTRPAGVEKAAASSSVKLKTKPQKTTAGAGKTQAAPPARAPPGTVIAKKSTGAENYVPIQRTTSVPAARPTETLKNEEQEVDELLMQFDEKESISTSSIEEHLQERLPDPVDLKSVDLDSSKTTSSSSSQEECKDQEENTGDILEEKRDGKDSEDLSSTGDKACVGLGSSDINIPMEEAVDEPVKPAEAVDEAGLKRDVCCSPAEPNEAVGQNELNEAAVVGETTTEPKEAEDEAKIIKQVDCETASKEVASTGAESRDDAATMEREPLVAAAAAPQEEKAKAEEKTTQPTKAVESAKWRTKDEGRSNEATEEGRGKSTTTAATQERKNKVMALVGRFETAMSG

SEQ ID NO: 43399 - protein, 68 aa, Zea mays
  Clone ID: 700083466_FLI.pep
ILVPKFPPKKAVSWSERRAPSFQIMGMLVCYLHACHQSISPNAGFLTPVRMPPSRHDLISSSVHPSIF

SEQ ID NO: 43400 - protein, 302 aa, Zea mays
  Clone ID: 700237160_FLI.pep
KVGACINDKESKLMRLEDRVDELIKEKEHISVLLRSALQATTSEVLKVAEDGLREAGIEIGLDERKVHGPGNVEKDEVYTLAGALENTMKESQVRIIELQHLVEALRAESGLLRTRLEGQEKEIGQLRKQIKHVEEKERVANESVEGLMMDVTAAEEEIKRWKMAAEEEAEAGRSIEQEFQIQISSLRKELDEAKQAMVELENKLKFKEETAAAAMAARDAAEKSLKLADMRSSRLRERLEELNRQLEESDSRIDSVNRNGHRRYMCWPWQWLGLNYNYVRLPPVEADETSNEMELSEPLII

SEQ ID NO: 43401 - protein, 754 aa, Zea mays
  Clone ID: 700237276_FLI.pep
FASAAMPQIQNTMRQNCTLLAVLCGEFAEKRQTPASLAPDTKRLRLSYPFPELASSGRLEVHTLINPTLEQFREAQQAVHPVFLYLQGQQQENEEEIGTLVWGDTDLSDPQMFVSLITPPFPTMVYLEVPTGEKLAQSLHSKGIPYVVYWRNLFSSYTASHFRHALMSVIQSSCSHTWDAFQLAHASFRLYCVKNNHVQSVKLGPCLLGDAPKTNVIPAGDEVNEEQGCSEGFPDIRIYDEDVSMKFLLCGVPCTLDACLLGALEDGLNALLNIEIRASKLQNRASAHPPLQAEDLPHGFVTMRCDITTCSSAHVSFLVSCSAQTCFDDQLLGSRIKNEIIEKRQLVRVLLNNEDNKPSSYEPLPSMCVACGASTFEVWITVPKWAAQVLKHLAPEISYRSLVALGIAWVNGTPVSSFDRQDADRLLFFCSNQCGDQAIQNGSYAHVSSWSAPLTKDRTTGSLESKQMSFGAKGVVGDNTISLSSLKPRLKPATMRPLPHSRKQQMHPFMGFPQSIIHDASQVKPSLPAPPVKHNAVPVTAVTPRKSSSGSPSSWSRVQLPIPLNPLPIKKHECNRLPIHICSEEDFLKDVMQFLLQRGHIRLVPQGGLAEFPDAVLNSKRLDLYNLYKEVVYRGGFYVGNGINWKGQIFSKMHNHTVTNKMTGVGNTLKRHYETYLLEYELAHDDIDGECCLICHSGALGDWVNCGLCGEWAHLGCDRRKELGTFKDYSKADGMEYICPQCSLAKYKPPLPAP

SEQ ID NO: 43402 - protein, 311 aa, Zea mays
  Clone ID: 700237304_FLI.pep
LPFQFPHTHVSAHSLLQFRQLVIINRTQSSRFHSRMLLNPASETSVLDTIRQHLLEEPAAAEARPADESFGSLVADQWSGSLPFRTDDADDMVVFGVLQDAFAYGWLPDGSFVHVKPEPVRSPDSSSYHPCSYDGSPCFGLLDPEPPLTPGTTTPGRGQEEAAAAMARGKHYRGVRQRPWGKFAAEIRDPARNGARVWLGTYDTAEDAALAYDRAAYRMRGSRALLNFPLRIGSGDKRPSPAPPEPATSSDSSSSASGSHKRRKRGEAAAANMAMALVPPPSQLNRPPQPWFPAAPVEQAAMAPRVEQIVV

SEQ ID NO: 43403 - protein, 405 aa, Zea mays
  Clone ID: 700236233_FLI.pep
PIRERNKPINKIVNPAQRSNTSENAAAARCQWAASRSLGLVLGERERHGRRAEPHQVLLLLLLLGRGAPARRGRGREPAGARRGGAAHVVQAGRQPDPGAGARRRDGQARRRRHRRHPRRQVHLLQGHALHVGRVVLEAADARARGRRPLERRPPAHRRLRRLRVRGRARALLHDVHRGQLRHGSWLLFCRHWGCLLCCLLLLFCTRRRLLERRELVVVHRASLDVGEVDVVVLEEGDELPEVLLGREVVAAVGPYRPEDALLGDQPPGGRGGGPGQEARVLELALALLPHVQRPAGAQHEDPLGLLVRAHRVPALPVHEPPFLHDDFVRRPLVWSEVHDELRVELAPWTLVVMQVPAVADVQPVEEGLAAGAGGPDVVVEMQVVAVAVARVNSFEPVLERELLR

SEQ ID NO: 43404 - protein, 393 aa, Zea mays
  Clone ID: 700236274_FLI.pep
TIESAVHSLAQSTGEEDQRLKDWLRTLIVSFIESIRFNSVASAVAEALRNDQVNQLEQHHIHQIRNWSAISTALLAAANDVVQDPDTNLFSQFANECRIRNAYQAAITLGLVLVTARTNRRHPRAADTAALGLTLVEVVSVRILYIDGERPGDLYGTVRVVDSFGGVHVYDQPRASAQSVYPGDNAKLVWPSRVVSAADDFVIDVHLMDRDTDPSPDDEVAKGMVAWNSRDALSSHRNVVTSQLITGEYGSAQVFYAVLTNAVVATVAVLLINGDDESVPDVYGSITARTDMSGASNSLQYQLFKRGQNQDVGVPANTYIPLNRKVVAAALGSPFKVDADLWDRDRDPSPDDQIALGSVSFNPRFVGTDKARITGKYGEIEVQVTWSPSVIQP

SEQ ID NO: 43405 - protein, 409 aa, Zea mays
  Clone ID: 700238302_FLI.pep
VRHHLLAKPNLFTEASASASVASFQRPVLCLFDRNLDLSVGIQHDWSYRPLVHDVLGLKLNKLKMPADKSGPAKAYDLDDSDAFWVANSWSPFPRVAEEIESQLAKYKQDVDEVNQRTGGNKDGIEFDGTDLIGNTQHLMNAVNSLPELTERKKMIDKHTNIATALLGHIKERSLDGYCDCGNDMLTKGTVDRSTLLGLLRGKGTKADKLRLAVTYLLCFETPELEQVEAALRESEVDMSAFQYVKRIKSLNTQFSASSSSSATRSNIVDWAEKLYGQSISAVTAGVKNLLSSGRQLALTRTVEALMEGKPNPEVDNYLLFDPRAPRSGSGGQFKGPFREAIVFMIGGGNYIEYRSLMELAECSQPPSSKHVIYGATEIVNGVEFIEQLAELGQKAGLGLGGGNNPPLQ

SEQ ID NO: 43406 - protein, 168 aa, Zea mays
  Clone ID: 700240246_FLI.pep
SATHASLSSAPPSSPRHRRRHHRIRPKMPPPHAPESSRHTPSRLRRPRISPPHLGARVVARVRGGVHPGTGLTHRLQLPTLLLSVLPPHFAFSPFLSKQRPPRLDPYKRQITSPAARQMESTSGEDAPKHNPIPSALVSNLQSVLTARRLSAAEVSTAATASEVEALA

SEQ ID NO: 43407 - protein, 375 aa, Zea mays
  Clone ID: 700241691_FLI.pep
QRPWLPVGASRMSGRKNAGKVSPWLLVLICLGCFFVTYNLLTMPSRGRDGPRKFLGGGGDRHSTASLGSGSDSDPAKRFHVALTATDALYSQWQSRIMHYWYKEMRDRPGSDMGGFTRILHSGKPDGLMDEIPTMVVDPLPEGKDQGYIVLNRPWAFVQWIQKAKIVEEYILMAEPDHVFVKPLPNLSHGDEPAAFPFFYIKPTENEKILRKFFPEEKGPISNIDPIGNSPVIIKKAQLEKIAPTWMNVSLKMKEDQETDKAFGWVLEMYAYAVASALHGVHHSLHKDFMIQPPWDLKTDNTFIIHYTYGCDYSMKGQLTYGKIGEWRFDKRSYLQSPPPRNLSLPPPGVPESVVTLVKMVNEATANIPGWEDDR

SEQ ID NO: 43408 - protein, 279 aa, Zea mays
  Clone ID: 700243281_FLI.pep
QLNPETKEPTSTPTSKLKQAATTSSDQRQPWTWAGTSSSSSTRPPRPPPRRRPRPSRTSRSAALVPRSAPRGAPSSGRRGTRCSAACGGGAPRGGGCARCASPGGAARGCGSAPTSAPRRRRARTTPRCSPWAAARPASTSPTPRGCSPCRPRPRSRAAWTAPAGPRSRPSRSSRDAASGRQPPTKRPRARLLPPPPPRRRSRRRRLSACLWRPVRRWRWTAPCSSPTGSGTWTWTCTMPASRKGCSWSRRHRHRPPPGIMVTAATPELTSRSGATSKL

SEQ ID NO: 43409 - protein, 362 aa, Zea mays
  Clone ID: 700243404_FLI.pep
CQQGSFLPLFLSLMDLPMLVVALEKVERSSGTLIGSSIATIQKSAAPEMLLALMDEAYTGSAVEEPSGNSGSDDSGPLDLTDPMFLDLLKDENDGIAAKHWISPTISSTLQAAFNSPQSDRLKQSLEMAPRFLTLYFATALRDVNDSLLCALIPVVMSRYAAMFPDKVFSFKVRERLSDFILAAFQRSPNIIAVLKKPITDRLGEAHDNLAKTELALHLCWAIGEHGAGGVGHKDVARELFENLELLLYENLATSRLGLSQEPGSDSMGASSRKSSQARLLCFVVTAIAKLATCHSELLPRARVSLGKVARSRTSDRRVWQRACDYLGLMNEPAICLSVLGPSTAQGNGPGIVNWSEGEQRW

SEQ ID NO: 43410 - protein, 171 aa, Zea mays
  Clone ID: 700243427_FLI.pep
YPMEEQHSGFRQWQWQWRLFSLLSSQPELLPPPRPANHVRWEETAAAHLFSASLPGNPPHSIPDSRVLLAVVGLCSQPAELTAEQGLLLLCAVRSAQGGDQGGGGGRQVPRHPHRAGRRHRHRRRRRGREELRPEVSAAGDGGRGRHLGGVHPRRADREGPADAHPGQACS

SEQ ID NO: 43411 - protein, 252 aa, Zea mays
  Clone ID: 700244578_FLI.pep
EMEYCDRLESSLDFLVGITALLFLGLEGLALEGQINSSSGRLTTPIGTSFVVCVFAASLMLVETMPPRRLVRYLTETIDILTGFAVSLAMFFIMYPLMGLRALLLLAAPFLILMAYVFYVAIGKDDGNNNHQVASANGDEESSGVSSSRRSGAAADGDNKPASLELTKVTFAGFLAVSIPSISKGSVTIYSECFLHLAAAAVVSGLVWRLLTHYKKSQTTVATVADIASFCTHLCVAVAVIPFTIMAGNALS

SEQ ID NO: 43412 - protein, 326 aa, Zea mays
  Clone ID: 700260909_FLI.pep
IQHVVRTYRPCAYSTLSSRPHTAEAWTDGMDMARYESCYRHWIAGQEAGLAELEAASANAAAGRATDAELRTVVERCMLGYQDYATRRRALSREDGVAFFAPPWCTAFENSVLWLGGCRPSLTVRLLYNLSGEGLEAQVEELLGGLSNGVIPTGALGITSAQLVLINDLHSRTVHQENALSDRLATLQEDIADRPLLPIVRQRELAAAARLGAAAAASGSCDGAARRRLRAARLGAADAEVDAALDSYKAALSRLLVEADELRMATARALATEILTPRQAVEMLAAGKHLHLSVRDWSRRREAAAGAQQQLGGQSAGTDNTVRPST

SEQ ID NO: 43413 - protein, 573 aa, Zea mays
  Clone ID: 700265640_FLI.pep
AARDGRPAGPSRAIALLLSLARPRFMGMGMKWGATKAMTQLKLLSSRVSLPLFKHPLSFPQAQKPCPSLLCSSSFSVMLRLKALTFLLLLLLLALCSGVHLCDARSGTRWSRTTRGGGSGAAPSASAAAIGRKGKARSSGSSHRQSGEGSRSPTDGDPVQGDGSQAPPPQDTTVFSVVEFGAKGDGVTDDTQAFEAAWAAACKVEASTVLVPSGLEFVVGPISFSGPYCKPNILFQLDGTILAQTSARAWGSAGLLQWLEFTKLTGIAVQGSGVINGRGQDWWTYADPNDADDESVEMLLPRTKPTALRFYGSSNVTVAGITIVNSSQCHLKFDSCEGVMVHDLSVSSPEDSPNTDGIHLQNSRGVDIHHATLACGDDCISIQTGCSDVNIHSVNCGPGHGISIGGLGRFNTKACVSNVTVRDVKMFRTTTGVRIKTWQGGSGLVQGVRFSNIQVTEVQTPIMIDQFYCDRATCRNQTSAVAVSGVQYEDVRGTFTVRPAHLACSDSSPCSGITLAGIQLQPLPLPQHRRLSYDPFCWQAFGELYTPTVPPIPCLQIGRPAAGNSVLSDGDLC

SEQ ID NO: 43414 - protein, 167 aa, Zea mays
  Clone ID: 700235293_FLI.pep
SQPKSCLRSGHPSLHATMSRRKTREPKEENVTLGPTVREGEYVFGVAHIFASFNDTFIHITDLSGRETLVRITGGMKVKADRDESSPYAAMLAAQDVAQRCKELGITALHIKLRATGGNKTKTPGPGAQSALRALARSGMKIGRIEDVTPVPTDSTRRKGGRRGRRL

SEQ ID NO: 43415 - protein, 718 aa, Zea mays
  Clone ID: 700235645_FLI.pep
TLQSSSYPFLCLADGQGLAVPLLKALEQRIDVLALVDGNEHFVQLLAGRARLLAGEVHGSELLAHEAVERVGAAVGDSVRYRCRAVLDSRPCSLHRLGQRRAQVLLELGDLGEHGGLRVELSSAVGEGALHEHVTKLLHQRVVSAAGVVGIREHRLALDLLEQVLLAEAGDVEATGGVGAQSLLRHRHHAALDGALDILLDVAQVHGLAQGDQERRGHELQDLDGLSSLPGGDEPQRVDVLVVLLCALDVVGDRVPQKLQLGAVGRHGDLGALKAVVQAGVAPTGQVGGQAVVIVVVDELRELRKHELADGCDGETGVVHRYPDGRALEVATVKCLASGDIDERVVVDGVDLALNGFGGGADNLNLWAKPLRRRAERVPVLLGLHQGVELAELLGKLHVGAALQDVLHDGSSLNLSRVVLELVGQVVGVLRLAVHDFAEHGGQDLGEDGKDVSLEEHSGGEARAHGRAVHHRKTLLGLQLEEAALDSGNLECLGSVHLAAVWSDRNRVLTPGDEAGNVGERHEVAGRGDRAAERQARRDVGVEQLDDRLEDLEADPGVPLEEGVDADEHGRARRIGRQDVAVRAGAEGACVEEPDELPLERAALLGPPVRRGAEAGGDAVAVGAVHHAAHDPVAACLDPATGGLVQLDPGLASAGGHSGHLRDAEAGALDLHQGLAVLGHHPLDLVQVAAHQLLRRLPPVKRVGAGRRHARGIASHWN

SEQ ID NO: 43416 - protein, 208 aa, Zea mays
  Clone ID: 700237614_FLI.pep
PTQLEHSKEKTEANQPSPSQDEQAATNGDVAASMHTPSDNKQKSWCIPAPPSQWLIPVMSPSEGLVYKPYTGHCPPVGSLLAPPFFASYPTSSSSTAGGDFMSSACGARLMSAPVYFPSFSMPAVSGSAVEQVSHVAASQHKRNSCSEAVLASRDSEVQGSSASSPASSETAAQPRVIRVVPHTARTASESAARIFRSIQMERKQNDP

SEQ ID NO: 43417 - protein, 260 aa, Zea mays
  Clone ID: 700239316_FLI.pep
LEHKLRQGKRNPHHPRLKQGSDHHHHQKKMCPTKKGMTGEPSSPCSSASASTLPEHHQTVWTSPPKRPAGRTKFRETRHPVFRGVRRRGSAGRWVCEVRVPGRRGCRLWLGTFDTAEAAARAHDAAMLALAGAGACCLNFADSAWLLAVPASCASLAEVRHAVADAVDDFLRHQLVPEDDALAATPSSPSSEDGNTSDGGESSSDSSPPTGASPFEFDVFNDMSWDLHYASLAQGLLVEPPSAVTAFMDEGFADVPLWSY

SEQ ID NO: 43418 - protein, 308 aa, Zea mays
  Clone ID: 700239361_FLI.pep
FMSWVLSTPFGLGNCLSRYVRDKFRSLAADSVEESSVSTVSTTFDTSDVYLLTRGRAWAIALSLRNKLSEKLLSASVIGMDTEDLLYRSSVHGKGLSRFWSCVEGYKGPMLILLSAFSKGGGENVDSDRRWVIGVLTEEGFENKDTFYGSSGFLCAAHPIFRMLPPSGKEKNFMYCHLHPQIRAYEANPKPVGLAFGGTIGNERIFLDEDFSGVLVRHHAVDKTYQHGSLIPNQGYLPVEASVLDVEVWGLGGEATKRQQNMYKKREDIFSEQRRKVDLKTFASWEDSPEKMMMDMMSDPNTVRREDR

SEQ ID NO: 43419 - protein, 288 aa, Zea mays
  Clone ID: 700239377_FLI.pep
RIVRPASVNRSQGAASTDADRLVWAIQRTHNSLEATRRQKLDDNNLCGNGSAKKDESCDCNSSFECNICLDPAKQPVVTPCGHLFCWPCLYQWLHAHSPHSECPVCKGEVLELNVTPIYGRGGEEGNSTNPDFPPRPRANRRESLRQQLQMTDTRGIATVVRQLIQNQGIISVLPSPTGIEMSVVPAGRQRARARRQQRQDNNASSSIHVVAQNMGNVAPESSNQIQLSHSNGDNAAQMVLAAPQQSSSVEQLSTSSTTAVILGEPGSSRRSRPSESPTIRRTRRRPQ

SEQ ID NO: 43420 - protein, 382 aa, Zea mays
  Clone ID: 700240862_FLI.pep
PLPSAASAEPLFVEAKLRQQMRAEERPARGAVPRIAYLVSGSAGDGAALRRTLRALYHPANTYVVHLDLEAPAAERAELAAAVRADPVYARFRNVKVVTRANLVTYRGPTMVANTLHAAAILLREGGDWDWFINLSASDYPLVTQDDLLHVLSELPRQLNFIEHTSDIGWKEYQRAKPVIIDPGLYSLQKSDVFWITEKRSVPTAFKLFTGSAWMVLTHQFIEYCIWGWDNLPRTVLMYYANFLSSPEGYFHTVICNVPEFRNTTVNHDLHFISWDNPPKQHPHYLTLADFDGMVNSNAPFARKFGREDPVLDKIDQELLGRRPDGFVPGGWTYLLNATTEEGRPFAVERVQDLRPGPGVDRLKKLVTGLLTQEGFDDKHCL

SEQ ID NO: 43421 - protein, 500 aa, Zea mays
  Clone ID: 700262823_FLI.pep
LCLAGEAMQPLHQPPMNGQHGPPPPQGSGVPTASQQQAPPPSYYQQQQQGPPPQYYQQGPPQPWAQQQQYAPPPPQYPPQMQQYAPPPQQYAAPPQQQYAAPPQQQYAAPPPQYATPPQQYAQLQQYAQPPQYGTTPGSGEVRTLWIGDLQYWMDENYLHYNAFAPVAQQIASVKIIRNKQTGHSEGYGFIEFYSQAAAEHTLMNFNGQMMPNIEMAFKLNWASASTGDKRGDNGSDHAIFVGDLAPDVTDSMLEDVFRANYPSVRGAKVVVDRITGRPKGYGFVHFGDLNEQARAMTEMNGMMLSTRKMRIGAAASKKNTDAQQTYATNGAYQSSQGNCSENDPNNTTVFVGGLDSNVDEEYLRQIFTPYGEISYVKIPVGKHCGFVQFTSRSCAEEAIQMLNGSQIGGQKARLSWGRSTQNRQASQHDANSQYNGNNYYRYQQPGNEGYSYGAPNAQDPSIQNYYGYPGYGNYEQQSTQEQQQQQPPPAQEQPPPAPQ

SEQ ID NO: 43422 - protein, 521 aa, Zea mays
  Clone ID: 700265015_FLI.pep
QEQLLKESAPSASEEQAMMNNFSKNSETSHFLDSNAVEVRTGTSEPTVQSSNDEGDSDISPETDLAVCNVPLVSSEGQLKSESRADDQQAAEPTVSVRSVSREKPSVEIARSKSAAGKRKKKKEMLAKADAAGSSDLYNAYKGPEEKSEMVGTADGADSSSIVDTTHVLLDEAERDVSTFADDCKKKVELDDWEDAADMSTPKLAPDSGNQAGTTQVLDSDTSEANSRKKYSRDFLLTLQHHCTGLPVGFQMNEAVNAIMNNLVGKSYVVDREPYPSPGRGLDRPTSRGDRRGAAMTDDRWTKTGVPLSPGRDVHMDLPNGTSVVNYRSSGGNHGVLRNPRGQPSNQYGGGLLAGPVHSVGPQVPRSGSDSDRWQQKGLMPSPVTPMQTMHKAERKYVVGKVSDEEEAKQRQLKGILNKLTPQNFEKLFEQVKEVNIDSVATLTGVISQIFDKALMEPTFCEMYANFCFHLAGALPDFSEDNEKITFKRLLLNKCQEEFERGEREEAEADKTEEEGEIKQT

SEQ ID NO: 43423 - protein, 408 aa, Zea mays
  Clone ID: 700266538_FLI.pep
RHELAAMSWFARSIAATLSSAHSDDDESEPASGDNSPPRASDPTSAETGESDEQPDTPSRGVKGDISELTESLTRRFWGVASFLAPPPTEGETEEEEEETAAAAEVPQSPRIDGIRSDLAEIGGRVKTGISMLSNAGAVAEISRFASSFLPFGPGDQGEEEEGEAVGVTEEVVVFVGNISKHPKTWLDFPLFVDDRHADDFELSDEQYGHAVAIERLVPSLSYLRTELCSTNMSEACFWKIYFVLLHSKLSKQDAEILSTPQILEAREGLLQSSPTKHKLLSESRNTTEPEESELSPASIQNKHGVSEAPSFQELTSDPVPNVEADKHPISSTEAEIVDKSVIQEELVMKTEAKSLPTEESNPDPADDDDEKEVDDWLQDVDSVPSKTGNNTAVGEEEDVSFSDLEDD

SEQ ID NO: 43424 - protein, 653 aa, Zea mays
  Clone ID: 700267114_FLI.pep
FAQGQICRPLGFRRAVLNPPSLFPSLRFGSGIGMEVDRKKNLQIGSKGKEVQSKNPRREEPLASSEVDMDEPDAPESGDMIVDGNNGCSRGSPLQPMDSKNSKGCAVKPTSVSSDFGEELDLDLGGEKSETQQERKLSRQDRVELCRSFQLAVSSHDWESAEGLVGMADAQGLNDVLCVAVDAIWFLSDRDELLAIVGLIKRVVSEGAKDFTRAALRTSFLASCVSACRGRSTSLADAVSFMGQKLHERLQESQGDEVLKAEASAKVHRFTEWALKCIGLHSRVRENRGKGNHDTVIEVQLQLSAFKIFLDLADNELTGKDFTEAFDAACFPLTLFSTTFDQGWASGISAAAVQGLLELLVEGGADNVNQCFLEAARYGSTELVRILLQVAQRNSLDIDVDLALGFAAHYGKIETMGCLVEEGNAIGFLGPLMRAAERGCLQVVEWFVNHGCREMELCLALTAATSNSQIAVAAYLLPLVPQHVLAPLSIEIIKAAGERTTGSLQGVDFLLRSDFLNDPAATYAVADSIARCTDEAVDAKLRSFMNEHWSEAAFCAGFESAQQHFVNFMRIMERGESPIRLGDLPLELVIAMAYLPLYKECMNSNGRLLPQRLRGQLVEAASRLEDRQVERDSQSRELLAILEHHIPRFMMQT

SEQ ID NO: 43425 - protein, 365 aa, Zea mays
  Clone ID: 700238143_FLI.pep
APAVGQGPVARVVGPVQQRRLPGGGVPARVPDGARDLRHDLRRAGLLGGQGGHHAPRRHPRPPARRRLRLAPRHGGAAPPRFQALRPRHLHLPQARPGGVRRHQVRAHAALPAVARRRRRGALQGGLRARLGRAGRHRRHVHHPHPHHRAQDLGGGLLQPPPHGAQPEDVLLHHSPGRRRPRRRLHRRLHRLARLHARRPGPGEVHAPPARRGGDDARLVAGGWRQLPAHGLGAGAVHAPQPDVDAARVQREGGRAPARRGGGVRAPQGALGVPAEAHRGQAAGPPRRAGRLLRAPQHLRDSGRGGGPSHPLRTGGRRDHAGEPRALRDGQSRQGQHRAQPAPPWLGRQHILLISSVTFFFFMLC

SEQ ID NO: 43426 - protein, 283 aa, Zea mays
  Clone ID: 700239784_FLI.pep
RAAIQPPSPRPHRPSSTSVPSPHLDPDSAPRLTSTYICLVPMEAAASRKRAYSIIVPTYNERLNVALIVYLIFKHLPDVNFEIIIVDDGSPDGTQDIVKQLQQVYGEDFVLLRARPRKLGLGTAYLHGLKHASGEFVIIMDADLSHHPKYLPSFIRKQKETGADIVTGTRYVKNGGVHGWNLMRKLTSRGANVLAQTLLQPGASDLTGSFRLYKRDVLEDLISSCVSKGYVFQMEMIVRATRKGYHIEEVPITFVDRVFGISKLGGSEIVEYLKGLVYLLLTT

SEQ ID NO: 43427 - protein, 412 aa, Zea mays
  Clone ID: 700240073_FLI.pep
RPPPRHVRGRPPLPRPRCGRRRPRDRRPLRLRRAARLRHDRAPQAGPGHRGAPRAQLRRHQEAVPQVLLLQARRHQVRRRGDPAGAAHDDPRLRHHRELRGCARPPGGVQAPGDAARRVARGAGQGEDVAVRRAPQARRGRVGDGVGGRAGLLLLPPVERVGGRGDGRGGGDRLLHDPRRLHLQRVRRAPGERADGDPPGRAHGPVHAPRRPAAVAAGEPGGGHGEPQPPGPRDPVRVPRGGGAVAQGVGLRQGGPVHGRAHQVRVRRGPVRRRALLRAHGPGRGPPARRGRRVRAHLRPRRARRHVGATCGQCRRHAAGGHGPAAVPRALRLPRHLHHGPGARGPGGLTELHVSRRRNRGASHGSGEKSPEGAQISSPGSSCPPTHTRVTVGSCFAFLFIISFDTSVSKLG

SEQ ID NO: 43428 - protein, 264 aa, Zea mays
  Clone ID: 700242966_FLI.pep
HGRTMSRARGQCASSAAEAALRARRLTVLVPELHRRVHAGPRQRAQRRGQQVDPELPVVPRRHGRPQRPHRVHGPARRRPGDEDVQRYGRSHRDPGEFTHCAGVGGDGGDDEEEVEGDDELGEERLGGGDGGVGHGDAAGEERVEDALEREGGADGCQRLDGHVRGHLQPGEVAQRREGDGERRVQVRPGDVPRRQDDGRHRQPRARRVAERADRAAVLLVHDRRRRREEDEDERAHELRAQLRAAATTQMLSARGVLSAHGQI

SEQ ID NO: 43429 - protein, 250 aa, Zea mays
  Clone ID: 700243123_FLI.pep
AVTQSGPLTRTLGLRILPPFFGPASSSLLLGRPTSSNSSPGGTLLTPTYLVLYTTSSSNCLMIFSKLFTSSIMNYPRTIQEMFQLLQAQLRASLRLSCGCHGQCSVLQRRPERLTRRGRLAPPCCCCCCRGRWVVVEASREWRGDPGGGAPRREVDLLQRLLLELGRVVAHAADAGPGPRGPLEGQLLAQLVRLGPLLGVDPLQDLLPRHGRLPLLLLLGLGRLLLLLLPGHRRRRLLVDVFRWVSASCR

SEQ ID NO: 43430 - protein, 301 aa, Zea mays
  Clone ID: 700244473_FLI.pep
INSTKNPTAVILHTEDVGDFKPAPVVASFSARGPGLTESILKPDLMAPGVSILAATIPSTDSEDVPPGKKQSAYAIKSGTSMACPHVAGAAAFVKSAHPGWTPSMIRSALMTTATTTNNLGKPLASSTGAAATGHDMGAGEMSPLRALSPGLVFDTSTQDYLDLLCYYGYKEQQVRKISGAARFSCPAGAPSPDLIASAVNYPSISVPRLKRGRPATVARTAMNVGPSNATYAATVDAPPGLAVRVSPDRLVFSRRWTTARYEVSFDVAAAAAVSKGYVHGAVTWSDGAHSVRTPFAVNVL

SEQ ID NO: 43431 - protein, 398 aa, Zea mays
  Clone ID: 700244477_FLI.pep
IRIYTSHLPVPVCKYTARLECTLHSTYTAMAVRPQHWHTYVRTGSSIEAVTSRGAIDARLGDSGAGVDEVAVDEVGGEDLQLVAEALGEGLGDEEPRVAVDPLRDGPHAQHRVVGLGRHRVLHPVEEPPAGHRRLLPQELEVALELGLRQVRVDPVVLEVAGAPQRVPGPGRRRLAGLPDADDPPREQLRDGPVEHRLVLRDQVLAQLVGQEPVEPRRVLVPELGADLQDDQLGLGLAQEPAHVVQHHVHGVRRQDAVADPALLLHAHVDDARAHGQLLVHGHGLALREGAGHQRHADLVGGRVVRAGPHHLVHAQLVGAQLRHPPLPVRRPVLRPRERVAGGGQPRGQRPLLGGHQLPPVHLLREEGAHGFQRVAAAVGIGGSHGWINYKGSPVPRA

SEQ ID NO: 43432 - protein, 174 aa, Zea mays
  Clone ID: 700223062_FLI.pep
KSKKERVVLYSNRAQCYLLLQQPSAAISDATRALCLHSPVNRHAKSLWRRAQAYDMLGFAKESLLDTILFINECSQSNDPDLSLKQNKVPDYAERLVKKQMRAAWLFREAALKHGGVRRAGDASDAAFGQEADDSEWETASESDGENGAATGGEADGETGWKNGGRQEDFCEKS

SEQ ID NO: 43433 - protein, 458 aa, Zea mays
  Clone ID: 700223117_FLI.pep
NVEKLEDAPQDLALERYKMFLKQYKEWVEANRDRLEQESYQFDQDYFPGRRKRGKDYSEDMRELPFYYPGQICYGQVTTVHLYQGAFVNIGCVHEGWVPIKGNDWYWIRHHIKPGMKVYVEILAKRDPYRFRFPLEMRFVYPNIDHLIFNRFDFPPIFHRKEDTNLEQLWREAGRPPIPRKKPLKDMEKEPLVSDHPFVDTLWEWHNAEQMILDYEEQNPDKFKNTTYESTVDAPSIDEEKRVEYTEGYFKETLLKKKVVNISIKELDLDAARAERQLIKRLKKEAEERGEEYKVRKLRRNKEMDEYDLMQWRRSFEEREALIRDICCRKALDLPIEEPGRYDVDETEVYGKDYYDPEKPMYRYDYWGEPKNTEKTKLERDVERHNQQVVGDAKKWCEMSYDDYVRKKLRLEAAEARERRRKAAEAQEDEQEYDDGMDLDLKKMTDPRAPHNRFYITK

SEQ ID NO: 43434 - protein, 418 aa, Zea mays
  Clone ID: 700259535_FLI.pep
VRGVVSAAAEQAGNLPQRAPPMLKPQTSWTASLPLLLIRRCSRTAASPSPAGDRPLSFVPVCKRRMSTLAHPRFAPLPTEQTESQTDGGAARYQFRLVSYNILAQVYVKSTLFPHSPSACLKWKSRSGAILTELKSFDADFMCIQELDEYDTFYKKNMENSGYSSIYIQRSGDKRDGCGIFYKPKSAELVQKEVILYNDLVEKYVPSDNVNSALENNSSAEEDKNAKPDNSKRGDPNDPRVRLKRDCVGLLAAFKLSDPCDQILIVANTHIYWDPQWIDVKLAQAKYLLSRVSQFEQLISNKYNCKPSVIIAGDFNSTPGDKVYNYLLSANLGSTDEAPIKLRSLYAANGGEPEYTNYTPGFTGTLDYIFLSDGSSIKPTSLLRLPRGDSEDVKGGLPNFRHPSDHLPIGADFLVVNI

SEQ ID NO: 43435 - protein, 328 aa, Zea mays
  Clone ID: 700260124_FLI.pep
PDLVVALLPAMRRLYQALQLEGLPKVRVTTPHYLGILAPSDGIPSNASFRPGLDAKVLAPMLRFHNDTGSPFMVNAYPYFSYNAATLDYAVFRPNAGVYDPATRLNYTSMFDAQMDAIHTAMKKLGYGGVQIAVGEAGWPTKAEAGQVGVGPEEARDFNAGMIRVCSGGKGTPLMPGRTFETYVFSLFDENQKPGPVAERNFGIFNTDLTPKYDLGLLRQGPQSGSPTPSPEPSPSVGGGKWCVAKSGASATDLQNNINYACAYVDCRPIQSGGACLDPNNIHSHASYVMNAYYQANGMHDYDCDFKGTGVVTSSDPSYGSCKYNASS

SEQ ID NO: 43436 - protein, 322 aa, Zea mays
  Clone ID: 700260205_FLI.pep
AANSSHPISSISEQRQRNPAKRRFFLALFGTGHRHRARRRNRRRLSFFFVFPGRAQVAMAFAVSDELLGTFVPIAVYWLYSGLYVVLDGLGMDDYRLHPKGEEEAKNIVSRWTVVRGVLVQQAFQIAVSLLLFTVLGDENEAARKQPPALVLALQFIVAMFVMDTWQYFMHRYMHINKFLYKHVHSKHHTLVVPYAFGALYNHPLEGLILDTIGGALSFLISGMTPRTGIFFFSFATIKTVDDHCGLWLPGNILHVFFSNNSAYHDIHHQLYGNKYNFSQPFFVMWDKILGTYMPYTLETRKGGGLEARPVKLNQAQQTKAD

SEQ ID NO: 43437 - protein, 317 aa, Zea mays
  Clone ID: 700263765_FLI.pep
LYGRPVGAMTMEHGEDCCVKVAVHARPLIGDEKLQGCKDCVAVVPGKPQVQIGSHSFTFDHVYGSTGTPSAAMFDECVAPLVDGLFQGYNATVLAYGQTGSGKTYTMGTACKEGSHIGIIPRAMAALFDKIENLKTQVEFQLRVSFIEILKEEVRDLLDPTAGTVGKAENGNGHAKLSVPGKPPVQIREASNGVITLAGSTEVHVTTQKEMAACLEQGSLSRATGSTNMNNQSSRSHAIFTITLEQMRKIDPIMTADGMPIEEMNEDYLCAKLHLVDLAGSERAKRTGSDGLRFKEGVHINRGLLALGNVISALGDE

SEQ ID NO: 43438 - protein, 82 aa, Zea mays
  Clone ID: 700265419_FLI.pep
RAKAKCKFLQQHTHPRIRQHAAKFYKQCDPSTYNIDMTKFCCTNSLSDHTDEYMQQKLSCSNICYTLQFTSSTRVKSTAFLH

SEQ ID NO: 43439 - protein, 433 aa, Zea mays
  Clone ID: 700265480_FLI.pep
SDPKWAEVAERVAEAEAHFVPEEAKAVEGRAKKAEERLLSVDPRSGDPVPAIEEWKEDLRPNRVDWISLLERIKARNVELYLKVAEILLDQESFEANIRDYSKLIDLHAKANNVESAERVLGKMKEKGIAPDVIISIVLVHMYSRAGKLEQAKEAFDFIRREDFKPDRKLFSSMIKCYINHGEPEQAENLIKVMRDTRVKPTREIYIGLLRSYVQRGLMAYAERVLKTMSFDRVEPTQELYTICIEAYGRVGDPKEACAMFDQMRRKFGHEADDSSIAGVVAAYMKNNQLDHALQWLLSLEKEGLQLGVKTNLMLLDWLSMLQLVPEAEQFVQKIKNLGEEPIEVHVFLADMYAKSSQEDKARRSLKILEEKKKLLKSDQFERVIRGLVDGGFSEEANKFYKMMKSCGFEPSKTIEVAVKALRIRGGSHRTGR

SEQ ID NO: 43440 - protein, 351 aa, Zea mays
  Clone ID: 700265541_FLI.pep
PINNNESNVARLEAMGKLNDEMQNRYNYHAPGIDPHVAASASRNANGFMPMQANFGCMSSTVQSVVDVSVSSTSQDQCDLQLGFGAQKQQIFSNHGELRTATPGSPLPGSIARKDSVPTEPSHFGSMNGPKSFPTGTSQFGGFAKPTFVPAAPSQFGSMAQANYVHSAQSSQFTSWVQPNSIPPAESSQFGSKAQSSSVPPANTSQFRGMAGQNSVPPAQSFGSTVRPNYVTPESSQFGSMARPNSVPPQYVNMPSQNFVSSSEPTLVLGYAPQIGSGPPPQVQLGWDLSLPRMVTGGSMVTCLCIWCNSQFHHFGPVDGQQPSSFGFICPTCKDRMSGHHSVPNNGSWQP

SEQ ID NO: 43441 - protein, 383 aa, Zea mays
  Clone ID: 700239281_FLI.pep
GYIDNIQTKVPPEPRAGGKSPAVGGEEMSDGAGSRTGVAGALGLSVTSSVAIVICNKYLISTLGFFFATTLTSWHLMVTFFTLYVAQRLRFFEPKPIDARTVISFGLLNGISIGLLNLCLGFNSVGFYQMTKLAIIPFTIVLETLFLSKKFSQSIKASLMVLLLGVGIASVTDLQLNLLGSIIAVLTIAATCVGQILTNQIQRRLKVSSTQLLYQSSPYQSAVLLVTGPFVDKLLTKRDVFAFSYTTQVVVFILLSCSIAVCVNFSTFLVIGTTSPVTYQVLGHLKTCLVLSFGYIILKDPFSARNVVGILIAIFGMGLYSYYSVVESRKKTEDASSLPVAAQMSEKDSAPLLGAKSSPRTENKAEETFDYMPRTAKSAFTGR

SEQ ID NO: 43442 - protein, 448 aa, Zea mays
  Clone ID: 700240618_FLI.pep
KAIGDELGDIYDYVAPCFPPRYEIFQLMVNLYTERFIQMLRLLSDRANDIQNINILKVTGWVVQYQENLIGLGVDESLAQVCSESGALDPLMNMYVERMQATTKKWYSNILEADKTQPPKSTEDGKLYTPAAVDLFRILTEQVQIVRDNSTDVMLYRIALAVIQVMLDFQAAERQRLEEPASDVGLESLCALINNNLRCYELSSELSSSTLEALPQNYAEQVNFEDTCKGFLEVAKEAVLQTVSVIFEDPGVQDLLVKLYQKDWLEGMVTEYLVATFADYFGDVKMYIEERSFRRFVEACIEETIVVYVDHLLSQKNYIKEETIERMRLDEEVLMDFFREHINVTKVESRVRILADMRELASAESLDSFTLIYTNILEHQPDCPPEVVEKLVAMREGIPKKEAKEVVQECKEIYENSLVDGNPQKSGFVFGKLKCLTAKKGIWRKLGQ

SEQ ID NO: 43443 - protein, 356 aa, Zea mays
  Clone ID: 700242096_FLI.pep
NPPMASINTVLGAIFVASFYFCGSLAFFPPGPGHHHEGAHHPPIGSAPIPGLSTDYYRLTCPQADETVAPILKKAIAKEPRVAASLLRLLFHDCFVQGCDASVLLDDAEEVVSEKNAIPNKDSIRGFEVIDEIKAALEEACPQTVSCADTVALAARGSTVLSGGPYWELPLGRRDSRTANMKLANKNLPPPNATLHRLIKFFRRQGLDKVDLVALSGSHTIGSARCVSFKQRLYNQHRDNRPDSTLETSFYHTLASACPRAGGDGEIRPLDLVSPSRFDNSYYKLVLEGKGLLNSDEVLWTGRDPEIAGLVKSYAEDEALFFEHYVSSVTKMGNINPLTGHDGEIRKNCRRVNQEI

SEQ ID NO: 43444 - protein, 512 aa, Zea mays
  Clone ID: 700242232_FLI.pep
DDLYLYLAATVTVARRHISKPSPRPPPRLATLRLRHMAHPHLVLPSPKSLLPAAATPSRRAVAIRAALSTALSPAKAAAGAEAVRSIRARQIVDSRGNPTVEVDLVAGDGRLHRSAVPSGASTGIYEALELRDGDKAVYGGKGVLQAVRNINEVIAPKLIGVDVRNQSDVDAVMLDIDGTQNKSKLGANAILGVSLSVCRAGAGAKGVPLYKHIQELAGIKELVMPVPAFNVINGGSHAGNNLAMQEFMILPVGATTFAEALRMGSEVYHVLKSIIKSKYGQDACNVGDEGGFAPNVQDNREGLILLMDAIEKAGYTGKIKIGMDVAASEFLTKDGNYDLNFKNQPNDGAHILSAQHLGDLYRDFVKDFPIVSIEDPFDQDDWSSWASLQSSVDIQIVGDDLLVTNPKRIADAIDKKACNALLLKVNQIGTVTESIQAALDSKAAGWGVMVSHRSGETEDNFIADLAVGLASGQIKTGAPCRSERLAKYNQLLRIEEELGNVRYAGEAFRSP

SEQ ID NO: 43445 - protein, 201 aa, Zea mays
  Clone ID: 700243806_FLI.pep
FSHHQRKKKPFEAKFFNKPLENYHYMAVIFGNHQATGLFAKCTSDPLGFDTSESAGTYGVGYSGDLAGHESNNASPTRDSGESLNPSGPIRDGGDSSTRSGARRKRGRMMMEDEDPLICTVTEAFKTLSDAIKQSAPQPRPIIPPNLWTMMKQIPVFEREHIAHYYGYLCENPALAYAFLEMGLDDQMVWVSRYIKTHLSD

SEQ ID NO: 43446 - protein, 207 aa, Zea mays
  Clone ID: 700243829_FLI.pep
MSGTFGANSGFISNSNGRQMGSYFNGSSNRLSSSIGYLGYDSGSMLSSMSRNFNAGVNYPINPTNMSAFAALGNGGGVNYMGLPSIAPELAQLGNISSLGSGNFSRGAGVNNLSLPSGSYGRSNSTGTIGEPFSASGNAYEVNNPDTYGNNSIYGGTSWRFPSSEVDVPSFSHDLGNVDPNMKSDISANYMGNYSVSNNQPSRGITS

SEQ ID NO: 43447 - protein, 317 aa, Zea mays
  Clone ID: 700243918_FLI.pep
VARRKALHGGNFQGTPVGVSMDNTRLAVAAIGKLMFAQFSELVSSFYSNGLPSNLSGGRNPSLDYGFNGAEVAMASYCSELQFLANPVTNHVQTAEQHNQSVNSLGLISSRMTAEAVTILKLMSSTFLIALCQAVDLRQLEESIKAAVKKCVSHVAKKSLAIDDHDLLVAIDRVAVFTYAEDPCRPSYPLMQKLRAVLMEHALINGDSNTERPMETSILAKVAEFEKQLSAVLPDEVEAARAAVESGTTPNRITECRSYPLYRFVREELGAEYLTGEKTRSPGEEVDKVVIAMNQRKHIDPLLQCLSEWKGAPLPII

SEQ ID NO: 43448 - protein, 250 aa, Zea mays
  Clone ID: 700222406_FLI.pep
CFFDCRRRGRCSSRRQQPSWRYLIPILYVSVELVKALQAHIINWDIHMFDEEIGNTTQGGKFDHADRLFQSIENAYINSLSNTSDVKELIPEFFYMPEFLENSNSYHLGVKQDGEPIGDVALPPWAKDDNSSDEFDKDSIESDDRSLEELSWETLELLVVPHIFSIRRSTWRSTFTSSVSVSPTVMFAFSASRPLRSLPTFSPRGCRRVYSLSFDLVSTSVQDRIETVGGVRLLLRVRPGPSCIYLITPM

SEQ ID NO: 43449 - protein, 414 aa, Zea mays
  Clone ID: 700222667_FLI.pep
SKNRKIFGGEGMMLEGKSYLVSRSVPSSCEPEAEWEYLAHAVLSGKRPAPEDDVEVEDPDETGSGGKRSKPASPQPHTPDICEGHGSNRHATGSGEQRITGSNPMTSIGRDLTLNCLLRLSRSDYGSVASLSRDFRSMVRSGEIYRLRRQNGVAEHWVYFSCNVLEWDAYDPYRERWIQVPKMPPDECFKCSDKESLAVGTELLVFGMARIVFRYSILTNSWSRADPMNYPRCLFGSTSVGGKAFVAGGTDCVGNILSSAEMYDSETHTWTPLPSMNTARKMCSGVFMDGKFYVIGGVANSNRVLTCGEEYDLKRGSWRTIENMSGGLNGVTGAPPLIAVVSNELYAADYGEKDLKKYDKKNNRWITLGKLPERSVSMNGWGLAFRACGDRLIVIGGPRTYTGGTIELNSWIPD

SEQ ID NO: 43450 - protein, 590 aa, Zea mays
  Clone ID: 700224026_FLI.pep
GPSRRPLRHGLHRASPYGGAPRRWLSKLPVTSRIFPTMPRDRAASGNNQEVHCEPLEVIRERHSTEPNINAAAILPSRPVSNTFNLLLEGDMNPSHGNGLAEIENIINQRYFSRDETLRLIEIMQSRTSDFTVEDQRPPVSTAKGFETTFFTPAKLIEAQPSWRTDIVPSSNVHDIGSSPVEIAKAFMEAQTSASVHESKKRKFRALSHGVAVDNSTSEVFPTITTDSSVRWPGSVQGGPNYLTPQSNKGRTLSQPLSRTPYNSSVIRRYIKNSRHGDIHNNGQTQFPTPFSIGSKRILEDKQVASGGIAQPSSSRGQIDVFGSIPREGSTAINNVAFNLQESDGKSMTESRTTFGRASGVDNISRVASVSVHPKSSETAFKILKQLDRTIPSPTSKPLGLRQTLAKKNTFSVATNRQIKEPDIIIGNDNKQSSINESGSASSETTYGKKVQQPQSSPISGESSERVQRSGANSDVYEAGTSQRPLKSNLTPTSVAEVLDNKNTSKGFSFTFPIPKAPSSLLEPPPTPTMASPPRTLPITNEDVPKFTFGSSSTANKLVFSFNSTSSSPVAGGTDPTFKFGSDNKRELVF

SEQ ID NO: 43451 - protein, 334 aa, Zea mays
  Clone ID: 700224128_FLI.pep
LQESSKINQSLFALSNVISALNKNEHRIPYRQSKLTRLLRDSLGGGSRTVMIACLNPAEYQESANTVSLAARSCHIENFTSSSKQETPKLKIDMEAKLRAWLESKGKTKSIQRMDGLFSPIASKTPLSVSHMKQPTSSRIPCRVKAMDQDGGKIKKILFDPVVHVPTENIPREHRQTEVNTPKKVVLPSVTPCNEKHEASLRKALSPISSNMVPVEQQIPDNGNCPVLLEPQTPIEKRNIVEETPGATPLERFNALGSNLKEALVQQYLDLLNVANKEELQQLKGIGARRAEYILELREDSPKPFKTLEDLGNIGLSSKQIRDILKKTATGIFK

SEQ ID NO: 43452 - protein, 249 aa, Zea mays
  Clone ID: 700224150_FLI.pep
AQLKEKYQLRLKVLEDGLRGTPSGSCRPPMEGKCISNGPPRRLSLGGADSISKISPNGVLMRRSPSFNSRSSLSTSSCLVLKHAGRTSKSFDGGTRSLDQGKVLGSGPHSLNRSTDAVRDCETADSWKANAEEKSNETANNDSADMVSGVLYDVLQKEVVSLRKACHEKDQTLKDKEDAMEMLAKKVDTLHKAKEVEAKKKRQEIAALEKKFAAVCLEQERLGNLRGPGTSQTVSGRTASRGGLTRNLQ

SEQ ID NO: 43453 - protein, 139 aa, Zea mays
  Clone ID: 700224336_FLI.pep
AGKGRRCQDHRPQAGQGRRRQVKEGSGCQAKEGRCCWDQAQSAREEGRGEAEEVPRRQGQGQAEDREVPCLQEGTEGLRMRWVALGLSSDCGWCQLGTVQTKCVPKVSQAVCYVLSKFYLSECFSLTMVLPLAFVVRFL

SEQ ID NO: 43454 - protein, 494 aa, Zea mays
  Clone ID: 700257752_FLI.pep
LDKASLETDTCPFTEQIKSGTISLQEAHMKTEVSCTLNSSVIPEGHKSSLSLPVPSGHSLSSNFATRSLSTAGESVKNTYDLVVFKGSRESSRAGDCISSPGVHHNIPPIMIDQGSNMNPSMESSNNSHRLTASNTNATQFYSYKDQMHVTPETRASVMTEKDSSQASAASSQPFAGTVLRAQSVSQEASPSVFTSKPLIDSSLVKNTYVGLSSGGAHIGHPNFGNQQPSDECLKRKSESLSGSEARGHSAALVQPALGNHNGSGGAHKGLRMANVVHRFKSLVESLEIGVVLSGRLWSSSQAIFPKGFRSRVKYFSIVDPTQMAYYISEILDAGPQGPLFMVTLENCPGELFINVSPAKCWSMVRERLNMEIRRQLSTGRANLPALQPPGSVDGFEMFGLLSPAIVQAIEARDRDRICTEYWRSRPHVVTEDRATAPPQAQGPLHALRGLFQRANRNELLALRSLLVSNISPDDFSRRQATQILDEEIAKQWR

SEQ ID NO: 43455 - protein, 750 aa, Zea mays
  Clone ID: 700258155_FLI.pep
SWLQIVPLEHLVLKRHLANKVGNLERPFLKEFFPRWIESCGCPVMRLGISYSKKRNMVELAVSRGCTGKATPDPDSHTNGDTREGDAPGWPGMMSVRVHETDGAYDHPVLPMAGEALQVVEIQCHSKLAAKRVWKSKKNTKLDGSDDNIDTSNQENRTSMDSPLLWIRVDPEMEYLAEIHFHQPVQMWINQLEKDKDVISQSQAISALEKLPQLSFAVINALNNFLNDTKAFWRVRIEAAYALAVTSSEATDLAGLLHLVKFYKSRRFDSDIGMPRPNDFHDVPEYFVLEAIPHAVALVRSSDKNSPKGAIEFILQLLKYNDNNGNVYSDVYWLSAMVLAIGELEFGQQGTGFLPSLLKRIDRLLQFDNFMPGYNGVLTVSCIRTLARIARRLSSSVSLDPIRELIAPFRDMDKPWKVRIEASMVLIDLELHHKGLDAALLLFLKYVDEEKSLRGATKLAVHILRICQANIVPSANDQINLTTLIGLLHLLAGTKAYNNVFLRHHVFCILQVAAGRSPTLFGVPKVVTPPLVVKDICSDQHTKADSSIPQPSKPQEPSTSTPSVREVLPTSGPTKDADNISNCSERRNVVKIRVKLTASSSKASDADHRGHFHGGRNENEPGPCSSMSVDAPMVGTANEPLNVSNHNIEEQNSCHDRESRMSASVSTVKLLDRHDISRELQCTADSRLDALPKNQFSPAINLPEALDKPGSQLEGVSTSYEGNQAPESVNGVETKERKKKDKKDKKRKRD

SEQ ID NO: 43456 - protein, 413 aa, Zea mays
  Clone ID: 700262127_FLI.pep
RCVHGSPLCLSRTGSRSPRQLVFRSLLALRRLVGCRRRRRQTPGAEAFASVFDGDEHVPAPSIMSERGRLAGRLIDNRSRGYHVVPLVEDPRGHPEVLVDGDRRGYSDIRGVQQRRGYPDTHLLEEPRGYPGVRVVDHRGYPGSRGVDERRAYPELHQGSRMRAAPPPYPAAFEDELELQEVELRRLSAHNRALVEERELLSREIQAGKDEVRHLNVIIADINTEKEAYISKLMDKRRKLEAELGASEHLCDEVRHLRGEIDKLVTARKELSAEAASLVEELNREQSVKQQLPVLKTEIDGLQQELVHVRTACGLEQKGNLELLEQRKAMEKNMLSMAQEIEQMRGELANFEVRPRGPGGAYGMQIGSSEVTFTKNPYEDGYNAYVGVPEKDPLHPPEYASWGTYDRSRLQYR

SEQ ID NO: 43457 - protein, 589 aa, Zea mays
  Clone ID: 700264410_FLI.pep
AMDLSRPTSSDLSLGLHSHGHAHAHARRHAVAAPLRLFDDAEEPKPERVVAGEADAERDDEDGGDQHFSLLGHSLFVKRPRRAGNGGGGGETSSCSSTSAALRPAKRQATGEGSGADLETRRAAVRAWGNQSLAEADPDVHSLMEQELDRQVRGIELIASENFVCRAVLDALGSHLTNKYSEGAPGARYYGGNQHIDAIERLCHERALTAFGLDPACWGVNVQPYSCTSANLAVYTGLLQPKDRIMGLEPPSGGHVSHGYYTPSGKKVSGASIFFESMSYKVNPQTGYIDYDKLEERAMDFHPKILICGGSSYPREWDFARMRLIADKCGAVLLCDMAHISGLVAAKECRSPFDYCDVVTSTTHKNLRGPRGGIIFFRKGKNLRKRAGSFSQGDENEYDFEDRINFGVFPSMQGGPHNNHIAGLAITLKQVATSEYKAYIQQVKKNAQALASALIRRKCRLVTGGTDNHLVLWDLRTLGLTGKIFEKVCEACHISVNKTPIYGDNGSISPGGVRIGTPAMTTRGCLEEDFEVIADFLIRATQIANNVLKEHGKVQKEFLRGLQNNNDVIELRNQVEAFASQFAMPGFDV

SEQ ID NO: 43458 - protein, 273 aa, Zea mays
  Clone ID: 700266053_FLI.pep
LLAVSSRPVAMVHETRSRVHAAAQEEGKLASKKQKPDNETKERGQNVPSKNKKSADNEGKDGEPEAPTKSKKLKAEESEPNGREAAAREFAEFCKAIGERLSLEDMRKILQANEQDASGSEDAVVPRCEDMMFYGPLEKCPVCEGQLEFKEWKYKCTGNYSEWARCTFSTNDPSRRSGSIEVPDDIKDDFIRKWLKQQEGKEFPKRDLDEEAHIFSGMMIALSGRMSRSHGYFKEQIMKHGGKVKNSVLGATCVVASPAERDKGGSGGFAEAL

SEQ ID NO: 43459 - protein, 611 aa, Zea mays
  Clone ID: 700266336_FLI.pep
VWFTSHFIIFLDQLLSDAETVRWLNYAVEKIWPVCMERVASQQFLLPIFPWFLEKFKPWTARKAVIQSLYLGRNPPMFTDIRVVNQSTDDDHLVLEIGMNFLSADDMDARMAVQLRKRLGFGITTNMHITGMHVEGKVLVGVRFLRQWPFIGRVRVCFVEPPYFQMTVKPLFGHGLDVTELPGISGWLDRMLDVAFGQTLVEPNMLVIDLEKFASESTDNWFSVDEKPPIAYARVEILEGADMKPSDPNGLADPYVKGQLGPYRFRTKIHKKTLDPKWLEEFKIPITSWEALNLLHLQVRDKDPIFDDALGDCSISINKLRGGIRHDIWIALKNIKTGRIHVAVTVLEEENEKVSNDEEEQCGIHKVDKASTPRSSFSSRTNHESECSDEFRKMSDEFEPVDIEGSEKPDVWVHRPGSYVTSTWEPRKGRARCQDSRIHRENDSCSDSPRSSVSGSHRSDSSTEEPTSSKSHRHLQKVKKGLGKLAGAVLHRSPKENDDEASPCVTPHQNIRPVGESRVSVTYVVDQDPAGVDGSGSRRDDHQQSPEREELDSPSKRHLRKKAVHMVKHAGKTAHNLKSMFSKKGLDKSKEEHRSDEECDEEGDVVAARRV

SEQ ID NO: 43460 - protein, 387 aa, Zea mays
  Clone ID: 700208080_FLI.pep
RAGVRGDGPVGPRPREPVPWHAPARRHPGGPAVDRVRVGHGHPAERGAAGEQLQDDRRARRARARGRRRRVHHAAVRVERDHPQRARARLRAGGERRRAVVADALRVAHAVGRRRHLAVRRAGRVGGPLRAVAVRGRAGGRHHGVHRHHRVQQLLRAPRRGDAAGRQRRVPARLRDAGHHRLQPVRPGAGAADAPLPTRLLPHRQQRLHVVGDVRHRRQRRPHHQQPGQPLHRAGRPQRQGGDEAGGDGGGAVGRVELADGGRHDGERRLLRAFRRGDGGHLRQGLQHRPQVVRARRRAHAERRRPRRPQERRRRNRVQGRQLRRRENWRRRRLRIRLPRDGLRRRRRPEMEIALGAVTGFFSYHRRCARMLAFVVTCRRVILSWKS

SEQ ID NO: 43461 - protein, 264 aa, Zea mays
  Clone ID: LIB3158-010-B11_FLI.pep
KRSVVVPKSPMTIEEALPFTRQWWPSWDTRKHISVITTEAAGIEQTCERLGGMVRESRGVLSQARQMQIIHQCRVSNLIWVGRDRLGPLEPRQVEKILGYPYNHTNLFELNQPDRLAAMKYAFQTDTLSYLLSVLKGKYQDGIRVLSIYSGIGGAEVALHRLGIPLKCVISVEESEVNRKILRRWWLKTEQTGVLRQHAGIWKLKTHVIEDLVKEFGGFDLIIGGNYTSCKGGTTVNTTMGMDSNRFYEYNRVVKRVRTAVGLS

SEQ ID NO: 43462 - protein, 209 aa, Zea mays
  Clone ID: LIB3180-013-F9_FLI.pep
PPGGDFSDPVTSATLSIVQVFWGLDKKLAQRKHFPSVNWLISYSKYSKALESFYEKFDPDFIDIRTKAREVLQREDDLNEIVQLVGKDALAESDKITLETAKLLREDYLAQNAFTPYDKFCPFYKSVWMMRNIIHFNTLANQAVERAAGTDGHKITYSVIKHRLGDLFYRLVSQKFEDPAEGEEALVGKFKKLYDDLTTGFRNLEDEAR

SEQ ID NO: 43463 - protein, 247 aa, Zea mays
  Clone ID: 700268014_FLI.pep
SRICMTVSQQIAYQYAKKVARLALVARMVGSLHDVAARARDGGSPDVLVVAGDVAKPEDCRRFVQATVEHFGRLDHLVNNAGVANVCWFEDVPDVAALKRVLAVNFWGAVHATHCALPHLKKSGGGKVFVNSSAAAALAMPGMSLYNASEAAVLNFFETLRVELRDEVGITIATSGWIVSEMTGGKQLSKEGTVEVAVRCAEATVDAICRGRRHLTVPLWYRALFLWRALAPEVVEFSQRLLCRRTA

SEQ ID NO: 43464 - protein, 795 aa, Zea mays
  Clone ID: 700332606_FLI.pep
PDPHIVNCAIKISKQSIHLSKLDSLPNRIVSLAFDVISRVLETGPGWRLVSPHFSSLLDSAIFPALALNEKDIEEWEEDTDEYMQKNLPSELDDISGWTEDLFTARKSAINLLGVIALSKGPPVASAASKRKKGDKNKGKSEMSSIGELLVTPFLSKFPIPSHGEDASSVAVRNYFGVLMAYGGLQDFLTEKKDLTITLIRNRILPLYSLDPCSPYLISTANWVIGQLAICLPEDMSSSIYESLMKALTMEYVEDITCYPVCASASGAIAELIENSYVPPDWLILLQVVLKRISTGDENESALLFKLLGTIVEGGQEKVLSHIPEIVSNIASTVMELLPPVPDPWPQVVEQGFAALVAMVQAWESSAPDENKTPEKRFWQSGQSAIAQTISLLLQKAWLLQADNMEGSALPPPSCVNDASVLLEFVMSSVTCMEETANLKVFELVATWADAIANWDSWEEMEDQGVFNTIKEAVNFHQRFDLDGLFLKTLPSQSENGSQSSVIGRVSNFVTRAIAAYPSATWRACSCVHTLLHAPKFSLGAQDTRKTISESFAQAAFSRFKSVSDSPAGLWKPLLLAISSCYICYPDAIEQVLNNVDGNGFAIWASALAQVSSSLFNPGLSSESEIKLAVLTLSTVINHLVSLSTGGTKLLQDCYASLMESCIQLKEVQDDGDNDDDDDGAEDVDDNDEEEDTEDDDEDSDDDDDAREETEEEFLERYALAAAAGESVEEGDIDEETQDIELGSLDDVDIQQVVIPLMQKLPALQPAGAFPDSLVERIAETFPEYEQFLQALRRA

SEQ ID NO: 43465 - protein, 139 aa, Zea mays
  Clone ID: 700339376_FLI.pep
TSIFSPLSIYFRLGSTLDERVTWTSIEAHHNIGTSWENKLHEQDQAQVTNLQPLTKAGAKKKRSLIRKRLIRSPPLSSSSRRPKTARRSRKGDRTKRKEKKKKKKERKKEISSRCRWLVVQDRPHGFSSPPLTTPSSFS

SEQ ID NO: 43466 - protein, 422 aa, Zea mays
  Clone ID: 700342462_FLI.pep
GSSDPMTDGDDEYKREESVALLVIVFLAALSLLSVIAAFAYYCYITRKVSRRLQAFHIPKRSSSHHTLPPRALPPQQQGTDNPSSNSTRDGVGAAAMSVVAAGERGVQVFSYRQLHAATGGFDRAHMVGQGSFGTVYRGVLPDGRKVAVKLMDRPGKQGEDEFEMEVELLSRLRSPYLLGLIGHCSEGEHCLLVYEFMANGGLQEHLYPNRGSCGGISKLDWDTRMRIALEAAKGLEYLHEHVNPPVIHRDFKSSNILLDKDFHARISDFGLAKLGSDRAGGHVSTRVLGTQGYVAPEYALAGHLTTKSDVYSYGVVLLELLTGRVPVDMKRSPGEGVLVNWALPMLTDRDKVVRILDPASEGQYSLKDAVQVAAIAAMCVQPEADYRPLMADVVQSLVPLVKNRYNQKSCNPNVQPSKPLD

SEQ ID NO: 43467 - protein, 420 aa, Zea mays
  Clone ID: 700342875_FLI.pep
SQETEGAEKLIERMLQTGTFPDDESYNLVVGLLIRQNLVDSSLKYLDLMLKSGYMLSLTVFTDYIRACMRSGRLDTLTSIIEKCKTTDKNKVLCPEWTWCIDIADAAFEANNSKLALFALEYLARWIARGENVKPPVQLSVNEGLVISALSAAGRTYNTDLLNAAWSLLRKSLRQKRAPTQETYLAKIYAHSSIGQLQRAFGTLREFENAYGNSEDIDLELFSPFTSLHPLVVACCKDGFSTLDSVYGQLENLIHADPPYKSLAALNCVVLGCANIWDINRAYETFVAIKEKFDLTPDIHSYNALLCAFGKLKQTGEACNVFQHVLTLGVKPNATTYSLLVDAHLANKDPKAALAIIDEMVDAGFTPSKDTLRKVRRRCSRESDFDSDEKVQSLAKQFNYRMGGENRREMLYSIEYNPVY

SEQ ID NO: 43468 - protein, 198 aa, Zea mays
  Clone ID: 700345282_FLI.pep
QLQGEIQGAYQIKVTTTALALLISTRHPELSKVEVQGHLIKTSAGITTRSKARVTPDQWTKIPLPVKIFSLLADTLTEIQEQIGAGDDDDSEEDNDWEEVQNGDASISDDIIHSASVPSMTNPSVEHLNAMAKVFDEDDDDSYDDDLTKTDPLNEVKLADFLTNIFANLWENNRPIFEYLCQGLSDSQRSAVEKVLRR

SEQ ID NO: 43469 - protein, 309 aa, Zea mays
  Clone ID: 700282066_FLI.pep
SKPFRLFLRLLAMAPPRRALLVLAALLLSLSLGAASFHSDELLLNDDEEFEGVVARPSAPSPPAAPVVSSSRRRSADAPLPGSGESNAVQFTLEHDLGDGKGFVSAGTFSARLKTFAHGTQTLTKLRFTRNDFTEDDKAAFKKVLQEDGFYTIRLPSNVLDTTKKHHVVSSIRARCIPRDSLDEHIVIHMDGVNILAVNYGSVDGCQYPRPMKLPSKWTFSSYTILKTAEQAPRTPSFADQLIEADNGLGEVMKPPEKSFWAKYWMYIIPLGLIVMNAVTAAANIPEEAAGQGQPGAQRAPAAVAGRRR

SEQ ID NO: 43470 - protein, 366 aa, Zea mays
  Clone ID: 700349518_FLI.pep
LLSTNPSRSVRVPVMLPLPTVGVGAVAASPATAAGVAAPIRFRPLRLVASRASTTPSSPSTSSSAISSASPAGHSREHLSGRDGSPSKTSKPRVFFLDVNPLCFRGSQRSLGAFARWLALFFAHVSIRDPVVAVLDGDGGNEYRRRLLPSYKAHRARGVGTGADTRVVDVLRQCNVAVVRVDGYEADDVVATLTEQVLQKGYRVAIASPDKDFKQLISDDVQLVVPIPEIGRWSFYTLRHYVAQYKCDPTADLSLRCFMGDEADGVPGIQHLVPGFGRKTAVKLLQKHGSLENLLNTAAIRTVGRGYAQDALTKHADYLRKNYQVLSLKRDVNVQFDDSWLSPRNTCSDANVLADFLLKLSGQGRS

SEQ ID NO: 43471 - protein, 305 aa, Zea mays
  Clone ID: 700349579_FLI.pep
RFPMASVTYIDDSHAEVIDPPKNEEMLDATELVGDHIQNSPKPNVASYGNVRELLECPVCLSAMYPPIHQCSNGHTLCSGCKPRVHNRCPTCRHELGNIRCLALEKVAASLELPCKYQNFGCLGIYPYYCKLKHESQCQYRPYTCPYAGSECTVAGDIPYLVNHLKDDHKVDMHNGSTFNHRYVKSNPHEVENATWMLTVFSCFGQYFCLHFEAFQLGMAPVYIAFLRFMGDDAEAKNYSYSLEVGGSGRKMTWQGVPRSIRDSHRKVRDSYDGLIIQRNMALFFSGGDRKELKLRVTGRIWKEQ

SEQ ID NO: 43472 - protein, 338 aa, Zea mays
  Clone ID: 700351094_FLI.pep
QQTTTPMSTSVSVSVSVSVSAAAVAALVPPLTGRRSPPASRVPQICRRRIRSKPRIFSSSPSFPIVPAAAMATGGAAPTAFDAGSKKKLLIFDSEEDLSVSLAKYTAELSEKFAAERGAFTAVLSGGSLIEALRKLTEPPYLDSVDWSKWHVFWVDERVVPKDHVDSNYKLAYDGFLSKVPIPPGQVYAINDALSAEGAADDYEACLKQLVKNGVISMSAATGFPRFDLQLLGMGPDGHIASLFPGHPLVNEKERWVTYIKDSPKPPPERITFTFPVINSSAYVAMVVTGAGKAAAVQKALSDKQTSSDLLPVEMAVLQDGEFTWFTDKAAVSLLQNK

SEQ ID NO: 43473 - protein, 638 aa, Zea mays
  Clone ID: 700351146_FLI.pep
ASSPASIFARRRGGQRRRRRFRFDLDLGFGFHENSSKSSGEYNPHLFILLHFGMDESACRSTAPVGFLRRGSGISLRNQSNEDRSNQYNKQPGKSSNPNPVKLLFTENKEKPRYFQGTFHSSGSRASSVSSSKAPARKYCDERQKQPFLAETDIAESSNRRTEVRRLQSGKKASVFGDGHPYTQKSISEASSSSTITGGLPEEHDLGALYFSGSSGSSAHPVNPRNAALNASAHMQKDKEEMSSGRPQGAPTFVRRHTLPQSFSTGVKSPTAPGTGAQRRGLKNLGCTSISDVLPSGCSSSDSARDRRIEVTKKRTSGAGSSSRSRISEQSNFSQPRASYPGSTGPRARAAEQSASQQTARTNSRNIPDHTDSIRTRRPFTLRARERMMPGEREDSVFALHETVASIHPECGHFHMDGTPPERLGRPFYAELPHAIYSSNRQGSSSQTARRRSTSRTEESPQRMFHGMFWERDGYRGINMEGIAQALLALDRIEHDVELTYEQLLLLETNLLLSGLDLHDQHEDMRLDIDNMSYEELLALEEHIGSVTTALTEEQFTKCVNQSVYEARNSYRDVSKIAADDVKCSVCQEEYVDGEEIGTMQCEHQYHVRCIHEWLRQKNWCPICKASAIPSEMTKGDA

SEQ ID NO: 43474 - protein, 188 aa, Zea mays
  Clone ID: 700381041_FLI.pep
PLCSSELQRNSDSVLPKLKDLQANPPSLHVSVYNEIKSSLGEASKSPGFTVIAGEIDSNVAAADDIDWDISVDTNEIDWDIGAVEQPGEESGDGFGSYEIIDANIELAGSENYNVGVSDKSMNKEDLASSESGICWDITADSSEEIASIQNASSVLEQSQSQMIAEDRSLLLEKEYRNNILDDLLEVC

SEQ ID NO: 43475 - protein, 337 aa, Zea mays
  Clone ID: 700381188_FLI.pep
QQRPPAVLTSVVIVVVLLLLLLEAGGSTLFAYGQLHVAEGSVDIDLSLDGVSRAPPPDHVPDSGSEVLGPEAEGHLHPGDPLLLDLGGLCELGGGDAVVAEPHLVLEQVEAEVEVVLVLELEVERGGGLLEGEVVELDLLHVDVGLVRDGDLAVLLDRDLDAADDGDVDEEHDADEVGDDAARLDVLVGALDVVEDERHRDLDGLLAVRVDGAGVRDEARHQLAAVAVDEVVDVHERDRDRVRVLDEHVHDEVGAVEADVRDVDAAHVGRGLAEPDDLLDLLADVVDEVLHLVDEAAAALLLVAAVLVLVLASALGHRHRGVVLRRRRHACSARLLL

SEQ ID NO: 43476 - protein, 412 aa, Zea mays
  Clone ID: 700381361_FLI.pep
FGRVQLHLLELYPILETIQKYLWPRLCKLDQQTLYELHYQMITFGKVFCTKRQPNCNACPMRSECKHFASAFASARLALPAPQEESLVKLSNPFAFQNSSMHAMNSTHLPRLEGSIHSREFLPKNSEPIIEEPASPREERPPETMENDIEDFYEDGEIPTIKLNMEAFAQNLENCIKESNNELQSDDIAKALVAISTEAASIPVPKLKNVLRLRTEHYVYELPDAHPLLQQLGLDQREHDDPTPYLLAIWTPDGIKEITKTPKPCCDPQMGGDLCNNEMCHNCTAEKENQSRYVRGTILVPCRTAMRGSFPLNGTYFQVNEVFADHRSSHNPIHVEREMLWNLQRRMVFFGTSVPTIFKGLRTEEIQQCFWRGFVCVRGFDMETRAPRPLCPHLHIIARPKARKTAATEQVL

SEQ ID NO: 43477 - protein, 75 aa, Zea mays
  Clone ID: 700423529_FLI.pep
IVARQLELVESYQLLAETFGSDSNSRLQILPMKITKRGSSKDNGASKPTKQTGSDLIVSENGGGSSFSRLPFLPK

SEQ ID NO: 43478 - protein, 277 aa, Zea mays
  Clone ID: 700423863_FLI.pep
SHPSHASVHAPTQPHQRQLRGAGVQLRRRGDGRGRRGGGQRRRTERRQAAADPQRAGRGQRRPRGGAVPRVRHGPVGVEPRAPLPHPRPPRGALRPRLRRQRQPGALRLPPLRHARLVRRRPPRHPRRAPHRALRLRRPLRLRHDRHPRLHPPPRALRQARTNRRVAQVPERPRLPRRVRAAGDPAGVRRDGGQLLGVGDRVRPSGGGRGRAGGGAGVQPHPVQHAAGHLPPRVPHRVQHRPPRRAGHGALPLRGGADHPRRLRPGLRRRLPQGPPR

SEQ ID NO: 43479 - protein, 403 aa, Zea mays
  Clone ID: 700333684_FLI.pep
NLPSPLATMYTWQLKPRNGDLNPYSIYKLTHAPSHIYTRIPSSIASSRAGSYEAKTDQVLLDKAPEREDPRTAAAAARVALRRAQARPPLLVHPEALRADPLDHLVDGLGVRGSAGHVGDVEHVHGHVAPGGDHGVRDREAVLPEHTRDVGEQPAAVVDAQLQPHALGCAPLDGRLQALDHAPPLGRRANWPLVQPPDVELLPGVIVVCVERAVVHHVIQVRQGADDVEEQLGPVAAAHCHHRVPPLPPILHGDRCGRGRLRLVGAAPGFPVLVEKLVEPPVHVDGRGVCPDHPRAERAAAEDVPEPGLHAPDPRRVVDRRAGLLVAHEHERRRRARAVVHHHPRVVHVAHEELVHLGGVVPLHRRRNPLPASASPPPVPRFSFPRRGDGSLCPGGRAFLSFP

SEQ ID NO: 43480 - protein, 255 aa, Zea mays
  Clone ID: 700333777_FLI.pep
STETEMALVVKRYRCTHSVSCACLKGHVREDAMYLVFKHMNWNPKMIAILSSVCKWFDEFAKRVLWKEFCHARAPKMMKDLHSDGSHIVDGNWKALGKLLIYCAGCPSGDLFSNIHDPVPGHFVYRTRFSRTLGKSLLAPQCRSDALYVSESCEHLDQGEEGDLGLFRGIFKSFAASKMKKMLIERQANFHSNKMCPYCKTKLWDLMQPNMIPSSAAVRLGAEDGSVEYYICLNGHILGSCTLIPISDSEGTKEE

SEQ ID NO: 43481 - protein, 768 aa, Zea mays
  Clone ID: 700378286_FLI.pep
VSLGRSSEHTNKSIDRSYHQAGISTPSIPPMDSGVLNYAEEYDLESVLMNFLGEIYSCHDECPHSDCKNKNELCPSLKSLIHKKVNELNNLPRNIGCAQSQEGNDAKLSDQNNLSNTMAARSKQFKDALEILGSNNELFMKLLQKPNQHIVDSIQKHENSKVAAGLEPNKIHGQTNFLVGRGGSRQHPLATKEQAKERKYMFFWRKGKSNRRQMLEATDTDQTVTKIVILKPNPERGFNQKAATARTLHQQPCTSHAPECGGIDNSKFSIKEVKTRFRFVNSESRRESNLAPAEDLQGYPRKFKDSFVAINKDFRHFPEGSLANKSGSDIKNAIKPFISSKQNGSISGNSGHIVAPKGASIFYEEARRHLSEMLKDNDCSVNYPAVQISKSLEGILSLPHGNVSTPRSSLWGKDYLGPSPGETDVFVACEVQREECTQERSQSQEDFGSIARCTSAAVDDQVTVRDGYYTNEAQEGSRHAQNEPGLLYTEGIHKFICGKNICDEQSVPAEQSRHDVCQEILEEIKQGKEHIKMSPTSAEGIVETLGQQEPETPEPRASTELISDGSPEQSDEKQERPSPVSVLESFFEDIDNPDCINKKECELHGLQRTLYFPDNEPDVSLLGEDRSVRVDYIKLVLELSELCAEQNLEVWYLEDELISPCLFEELQSQGDQTDDLKLLFDCICEALTEIQERYFRLSWLTFLKQDIRTPPIGENLITEVDRYVYGYIQHSLPITLEQIIKRDLEVQTWMNIRSKTEGIYGDVGVCIG

SEQ ID NO: 43482 - protein, 551 aa, Zea mays
  Clone ID: 700346245_FLI.pep
SNGLSYSPPKLTTPPPTDKPAISSAVSTSIFAVSSSSPAISSSPAFTGFSFSSSAPVGLSLVTSAKSDGTTAENKAASTLSFGIGGTKAEVKSVAPDASSKASSELFISPVSSSIASFSSSPATSTPTFTAVAPSSDAAGISVAAPSSTSTAPGLQSASTPSFTFPSSGNNLFGFSSPAQSTGLSTSSLAGSTSQPPAASTLFGSKPTQSDGTIQQTSQSSKPQSGSPFPVMTPGVGASSSGPGTLSFGLGASSTGSGTASFGVGASSSAPGTLSTFGAAAHSSGPGVFSFGAGTSSSGPSTASFGAATSTSGTGFGNSPFGTGATFANPFSSSSSTGFTFSSPSSSAGASTAASTSVFASTSTASSASAFSNPFGSSSSPPSTFTFGQSGSSGNTFAFGAQPAPTFPSQPSLFSFSSANTSMNSSPQPAFGMINTNTAFSMASPGNDQMNEDSMADDTSQAAPAPAPVFGSSFGQQNNSSAAPVFGAPAVQPGGVFQFGGQQGSAQQNPSFPAVGSLEFQGGNFSLGSGGGGGDKSNRRVIKVKRTPKKR

SEQ ID NO: 43483 - protein, 312 aa, Zea mays
  Clone ID: 700350616_FLI.pep
FLTRPRPVYLLDFACYKPESERKCTRETFMHCSKLTGSFTDENLEFQRKILERSGLGEDTYLPPAVLRVPPNPCMDEARKEARAVMFGAIDQLLEKTGVRPKDIGVLVVNCSLFNPTPSLSAMVVNHYKLRGNIVSYNLGGMGCSAGLLSIDLAKDLLQVHPNSYALVISMENITLNWYFGNNRSMLVSNCLFRMGGAAILLSNRRSDRRRSKYELVHTVRTHKGADDKCFGCVTQEEDEIGKIGVSLSKDLMAVAGDALKTNITTLGPLVLPLSEQLLFMGTLIAKKVLKMKIKPYIPDFKLAFEHFCIHA

SEQ ID NO: 43484 - protein, 447 aa, Zea mays
  Clone ID: 700351984_FLI.pep
PSRLPQSFLRSMSTQNLLTGACTSSAPAPSEAEEGDRTPLADAANAAEELYRLRDTFFPRDPSEKVAALRARADAALALLDAFPSEQKKSRQLRGVYEFLRGKILDVFPDYHKEAEDHLSKAVKLNPSLVDAWLCLGNCIWKKGDLSAAKNCFSLALSKGSDKKILCQISMLERSMAQGSVDQALLVEESIKHAKEAIMLDIRDGNSWYNMGNAYLTSFFVGGAWDHTKLHHSVKAYQNAEKDKTMNLNPDLYYNWATADKYLENYERALRGFEVAALKDPGLGANTEVQKIISLLDKLDNAMKGQLRSKRLASFVSSLSGVKLKSSHKKATISTLSVGLNKAVAVLGKVILFIRHDNVAPLYYLICDLERSYFILSVYGLHNDAIKDGDQVVLFEPYYRILDASCKDKHYQFKSIRVDFPEQILVNERVPAPHHVARASIHAHNKS

SEQ ID NO: 43485 - protein, 315 aa, Zea mays
  Clone ID: 700353759_FLI.pep
SRLNGRTDVMGNSSSRGRSEPRQGEQRTMKWSVDGFASLLDKGDGWTYSRVFELMGYNWYLKLNPRDKKSGDDGTEYVSLVLQLDDLSVKPDTVVKASFKLLIYDQAYGKHSEHQVRHSFQTASTSSGASCMVSLEKLKERPSKFIVNNSCTFGVEFIKVKASKVSTTSETLFVRKPSVFDEARTYTWDIEDFFALKNSGHSPEFEVGGHKWSIGVYTSSDGNHLTLDLCMKNTDGVQHDGSANLVEFSLAIKHQEGGNHWKATGRSQFTSNARCWGWTKFISLEDFKDSSNGYLVKNKCCIEAEVALVGSSKMK

SEQ ID NO: 43486 - protein, 548 aa, Zea mays
  Clone ID: 700382713_FLI.pep
GVLGMGNQCPNGTLGSDYYNRPASRFADGCLEDDRYSDLKKFDKPWPEVNSFKPTAVGILKRGLDPTSITVLERKTADVREHYIIGRRLGQGQFGTTFLCTEISTGCEYACKTIPKRKLITKEDVEDVRREIQIMHHLSGHKNVVSIKDVYEDGQAVYIVMELCAGGELFDRIQEKGHYSEQKAADLIRIIISLVAMCHSLGVMHRDLKPENFLLWDKEDDLSIKAIDFGLSVFFKPGQVFTELVGSPYYVAPEVLHKRYGPEADVWSAGVILYVLLSGVPPFWAETQQGIFDAVLKGHIDFDSDPWPKISESAKNLIRKMLCPCPSERLKAHEVLRHPWICENGVATDQALDPGVLSRLKQFSAMNKLKKLALRVIAERLSEEEIAGLRQMFKAVDVQNRGVITFGELRQGLKRYGSELENREISDIMEVADNDNNVTINYEEFIAATVPLNKIEREEHLMAAFTYFDKDGSGYITVDKLQRACGEHDMDDTFLEEIILEVDQNNDGQIDYAEFVAMMQGNKVGLGWQQMETTLNVTLRDAPQVHCH

SEQ ID NO: 43487 - protein, 227 aa, Zea mays
  Clone ID: 700425940_FLI.pep
ILNDPFPGAHQGYGGDAWRITKLEGPCVGRAGAGHHHAREVLEADEAVAVSVDAADHAAAVVEAAPAAEDGVQDGAELLGGDAAVAVRVEHAERLHEVAVGVGVGVARRGLRGERGHGVELGVGRLRVAQAPQHGLQLPPRDLQRRRRRRRQHGPRRRGGGGGGGGGRRGRERRRLAARQRALLLLLPVLDDAAAAPLRGRQGQLPGERLDGQLHLRLRLLWRRCVA

SEQ ID NO: 43488 - protein, 220 aa, Zea mays
  Clone ID: 700335116_FLI.pep
ALSEHSSFVFLCHFFSVPEVTAPWRCSARLRLVFAGNRAALYARVPSALLPGAGASSFPCARRRSDLRDSAPARISLPSRGPSSLVSHGHRSSVELLSAEGSGPCRARLELPPTLCPAPAPSPCVWCLYLLRFGDRVPWFLKFVAVPACLGTVGSDHHPHVDGALDSSVPRRASSAPAIPAQNSPLHLVLVEDTSPSTRFMALGLQLAKLPWWPLPRRFL

SEQ ID NO: 43489 - protein, 299 aa, Zea mays
  Clone ID: 700281866_FLI.pep
ATQNKEQSKTLLQGIPQLPKALFQAQIMLGMVTPQMMHMAKSQQPSGSLSQSSSHLNEPYPQTDAMIPLVSRPSSLPTNIPPNPTVLQEQTATLHSIPQHQHASQPLVKMFPHGHQSGIAAQSPMLHQPLDGSSSVPTQSLVTSVGLTSQVQLPLVPQHPGPSVMPTSVPQLPLTHPHLAQVAVAPETLPNEISTLAEFTHPSKLRKLEDGTSVPGIVNSSHAVYTVPLQAVGPSGPSGSYSAGSVSLQQPGNEEQLTPDVESALLQQVLQLTPEQLSSLPPEQQQQVIELQKMLSVSK

SEQ ID NO: 43490 - protein, 481 aa, Zea mays
  Clone ID: 700344115_FLI.pep
DLLEEVSDSADSAKHPSASNINKTEAVEKYSAVDNSQVQNASTSSAAKPATGSSSMIQIHPVRPAEEDSTTECDSGLDNASTSSFEFHGVEKATAATQNPAAGYLSRQTSISSKWNDAEKWIVSRQNVSQNNVAKGALQNQTVNQMSSAAARGAVVPKISARPVQKMKRVNPALSAPRSILERLSFASYQPKLVRHADVCPVSNAGANSEHHKATDTGSSIEVKPCNDTNDIPTVQSSVSVRDVGTEMTPIPSQEPSRTGTPLGSRTPTRSPNCSVPSTPVGGRSIASPPGEDCTDDGPFFHRKCGVHANELSDTETRLKTRQEIAALGIQLGKMNIATWASKEELELVSAAPSIADLERIRKEYAARAASYEEAENTKHTARFKKEEVKIEAWEGRQRAKIEYEMRRIEEFAERMRSEAMEKMAEKLEMTRRIAEEKRASANAKMNQQAAIAVQKAEKIRQTGRVPGSSILRCGGCFCGP

SEQ ID NO: 43491 - protein, 98 aa, Zea mays
  Clone ID: 700344123_FLI.pep
DPFCETDHDIVVNRLVHPISFLDLNVGDIVDIALLYQRFENVSEWRVYLSMSTASLLVDEDHMSMEKLILILGIIKFSQTGDTYTQPITAISNHKVTY

SEQ ID NO: 43492 - protein, 464 aa, Zea mays
  Clone ID: 700344168_FLI.pep
ILLHNLLSSLSRSTGKHAGALEMVRSGVWGKLIRYSEDMQLESQLRVYALQLMQCITGRNLKSLPNEMVCQVEPWESWYEHGAGAAIADESINSSSSITGTLVALRSTQMVAAVLPDANITPENLATLDSAVSCFLKLSERASGVSVAVFEAVLEEWEQLFSPKEEHVAPHESPKETSDWSDGWDDGWEALPEELESPKNKQEGVLLSVHPLHSCWMEIIRKRVELGELHKVLELLDRASLKHSVFLEEEEAHSLVELVSALDCFMALKTVLLLPYESLRLQCLQMVEVKMREGIVSTSSNADDQELLALVLSSGTMQKIITEEAYSKFFSYICHLVGHLARSFQTDLLVQWNEATSKINRSLLFARVLFPCFVSELVLGGQYLLAGFVISRWMHTHPSLGLMDITETSVRCFLQGQVAQLDEVGGSDAALTDGEVCVRHTISTLQPKLVSLLQSALALSNKEL

SEQ ID NO: 43493 - protein, 639 aa, Zea mays
  Clone ID: 700344373_FLI.pep
LAKSDLDLQVDELSRRSVAHESENSHLKEYIIYLVEILRTRLVLSEFDLDTNQSVCQELVVKLENCMTQLAQKDGELMEAEEEVQLLQEKNQELCGVVRSLQVATEGAKVVEGELEKKITRLIEQCSCKDVEILLLHQDNEALQSEVEQCEREFVVLMDDAITSSVNSAVYEETAFKLMMNGKATENRAISLKELLMKEVSSRDAHIEELQKKLAGIQDEHAELKAELNTHLALVASLADHVSVLEEDCRSLSKPCSTEDKEETACVHHVQEGNDGLESHCLPKGTPELQGLIARIEALQVVVSNAKDRQDQESAESAAKLAAVSAEIQDLKARGGSRMEGKEIYSDHEKQDVEISKGKQVQIMKDIELDQISTCPPYGARAALYPLGTGANAELDDDMLQLWEAAERSCKNQTAKSSSSEHDIQAVEDLKSEHPSSELARGRDLGINKLEASKGAAEPHEAWSKNVLERLTSDAQRLLSIQASIEELKQKMEGQSKGKSPMNSEYSSVSAQVHETEGHVLEQINLNNKLTRTAEDYPTLSDNMSTEREGYSSRRKISEQVQKGSENVARLELELQKIQYVLLKLEEEHEYRRLKVSDKRTRVLLRDYLYGRKDRGGGQKKKKRVPFCGCVRPKSRTEP

SEQ ID NO: 43494 - protein, 575 aa, Zea mays
  Clone ID: 700344392_FLI.pep
LQEYCNELENRLLARFDAASQRRELSTMAECAKILSQFNRGTSAMQHYVAIRPMFIDVEIMNTDIQVVLGDEGLQADCDSIADGLSTLYKEIADTVRKEAATITAVFPSPNEVMAILVQRVLEQRVTTILDRIIVKPSLASLPPLEGGLLQYLRILAVAYDKTKELAKDLQSIGCGDLDIEGLTESIYVAHKDEYTEFEQASLRQLFQSKMAELRAEAKQQSESTGSIGRAKGASLTTSPQQQISVTVVTEFVRWNEEAITRCTLLFSQPTTVAANVRSIFACLLDQVSQYLTEGLDRARESLNEAAALRDRYVIGTSVSRRVAAAAASAQEVAASAGESSFRSFMIAVQRCTSSVAILQQYFSNTISRLLLPVDGAHPSACEDMGSAVSVVEAAAHKGLLQCIDTVMSEVERLLSSEQKATDYRTPDDGAAPDHRPTNACIRIVAYLSRVLEVAFSALEGLNKQSFLTELGNRLHKGLLNHWQKFTFSPSGGLRLKRDITEYGDFVRSFNAPSIDEKFELLGIVANVFIVAPESLASLFEGTPSIRKDALRFIQLRDDYKTAKIASMLNYIMSE

SEQ ID NO: 43495 - protein, 233 aa, Zea mays
  Clone ID: 700348787_FLI.pep
VILNFGKSVARKHIPAESAWSTPLTPPMPWGQSSRPVNGSRHPQSPKHYGYAPISGVLPAPPVGAHHVPPSDGMQPLFVAPAPISAAAIPFTPTVPLQNTSAAWIQEVTPRPAPPRFPGPGTGVFLPPGSGHPLPHQMMPASHGHGEPNSPQGSSAYLHSKVNGKETSNGNLSPKNSPRKTSCTAEEKPECNGSLNGGGGSADEKSTVGMEQQNGVQKNVGSSKVQPHGHATE

SEQ ID NO: 43496 - protein, 124 aa, Zea mays
  Clone ID: 700349016_FLI.pep
PEGEEDTGGPGQLGKRTPAAGTLDGWGRGRIWWWAGGSVFLLSHATPAAPAFFPIIHVLSRNSSCPSFHVHLFSRSSFPRAEHRLSAPSSRLSARNAKKAPPTRAQHGNNRLGPKRSVTMPLCV

SEQ ID NO: 43497 - protein, 410 aa, Zea mays
  Clone ID: 700350812_FLI.pep
LSYHKKLHGFIQSEYQRGVSAWNFDIEDLKAQASLIHDDEPPEIKEDEDIARNIEVEKDLSSRNHLGKSFANECNSRQRAFVTTLKSDGNSPTTNEAFDFDFDFSEAATTRRADGHERNIRENDSLPSTAKRDPESNHWTNDVGQRQLSSGGSNSSTAERGYGFERDAVVQTIPDKQRSEARKTASLSGPLSLPTRASANSLSAPIRSSGGFVDSSGDKSKRSVVEIKGRFSVTSENVDLAKVQEGPLSSLSRKSPEGSLLRKSASTGDCLINTKLMRNANQLKEFCNSSVSSSVLIPHLNNLVQQTMFQQDVIMNLLSNLQQDEKVDRTQPGISSQVRTMENGKVADTANSEKERSLLVKISELQSRMITLTDELIAAKTKHVQLQQELNALYYREEIEDVRDEDIEET

SEQ ID NO: 43498 - protein, 639 aa, Zea mays
  Clone ID: 700350903_FLI.pep
IGVIPATLDPNRLIDNNAWSLSAAERDQALLSIGVIPATLDPNRLIDYSYLLKLSSLADNLALLGHTVLEDRANASIGLEKGSEHAIDFWNISENDEFCYGGACEVRALSSLQALASRENQSVFMECFQCEKTVCKACCAGKGAFLLLNTYRELKIYGGSQSGGYSALTDSFVCKSCCSEIIKRALYVDYVRVLHSLRRKDRSEKAALSAVNQVCQLEYKKASDLSQSIQFGQRQLKQILDGEESLAEFPYANFLQMVETANDSEPLLSLLAPFGTGEYTSYWKAPQGITSVEFSIVLGGLSDIAGVSIIVSSCGYSASDCPIVEIWASNKIHREDRTFIGKWDVQDIISSSPQLRGPEKSSRLSEEPRHIKFHFPNPIRCRIISIKMTLSHRGSHSTKFSEEFDLLSLNDSSSYESKPTNLHNSFIHAKRIVVFGSLLRKEMEPDTSGGIMRMKSYLDRSPALGRFRIPVEAERLRDNDLVLEQYLLANSPGIAGFRLDSFSVIRPRVTHSPSSSELDMREFSLTRMEDRFINPAILYIQVTVVKESGKLVVEEYRLPEVKANTPLYFDFPDLQQDARCVIFRLLGDVTAFVDDISELENLNLRNLPLASGLSLSNKIKLYYYADTYEMGKIGSLSAV

SEQ ID NO: 43499 - protein, 317 aa, Zea mays
  Clone ID: 700352579_FLI.pep
PVHRHPIQSHPHNRVPPPSMADFGDELFLDVGDDGFGDLSYVSFSESIELDLACPRDVFSAGFDPETLTHIPGSPISFDSDPDLRHLSPSLTCSPPFWGCLDDAASFEWEEIADAALGVGGGAGGAGGGGQGLEGDADADADVFGFLDEREMLGVMEGIDSGDDDSIFSDEPPFDFGDGDTELEGIFRSGVGWELLPVPLDEDEFEVLPGHVVEVGGAPPAALAVVERLQVVAVRGEEVVQECAVCKEGMEQGELTTGLPCGHFYHGACIGPWLAIRNTCPVCRYELPTDDPEYEKRRTRRHSAGGSTPQLGAPMQV

SEQ ID NO: 43500 - protein, 749 aa, Zea mays
  Clone ID: 700354762_FLI.pep
PRASGVGECARPAEEMALRHLVTGQNNCVPDGASSSNPLNALANAFLGQSSKAQSIKELPGSVNVPSTSDFSVSAPLSNIPGSENKFKQDQRPLARGADFIRGGPANDWIESFRPPRVPQLGVEAQFPDFEQIYNNAGTTFQPPLDGPPQRVLSGVLHSFLTSGPAGVPFQPLPVPAALGLSESDKQCIRDRSCIMARHIFSDQPEEYIQSQVNTLLHSLDIDNRMRGPMHGQYPELQEYWKQSQSSTRPAPMHNAADKWITEFGKQNNNPENWANSFEQQYGPNGWASEFEQHQSQMAMRQMGGANMANLAAMEQSRVLAQTLASNNDPKFQNSKFFQFVSKMSRGELIIEDNQVKEGSASQSSGWADEFQTPYIANANSWADQFAHEELSQGADKWVSEFSSQPNHGALNENWVDEFSKLNVTDEWAEEFSGGGFGESSADPWVDEFQEHLSSFKQSPGASRGVYVFSENNPYVGHPNPMQEGQELFRKGLLSEAVLALEAEVLKNPDNAEGWRLLGVTHAENDDDQQAIAAMMRALEANPTNLEVLLALGVSHTNELEQGEALRYLYRWLQNQPKYGGLVPLQSTDSPYGPDVVRLFNEAAQMSPEDADVHIVLGVLYNLSREYDKAIASFKTALQLKPQDYSLWNKLGATQANSIQSADAILAYQQALDLKPNYVRAWANMGISYANQGLYEDSIRYYVRAVAMNPKADNAWQYLRISLSNASRADMIAACDARNLDALQKEFPL

SEQ ID NO: 43501 - protein, 359 aa, Zea mays
  Clone ID: 700354793_FLI.pep
IHPHPAVPMASGEGVVDQLYEAAGGEAVAKIEGEAKVEAEAKMTEEPVLYLDLTSYQLHDLSEVEIPPTLEEVDLTANRLSSVDPRIGQLPHLRKLSFRQNLLDDDAVAPLTSWEAIAGLKEFVLRDNKLTRIPDAGIFKDLLVFDVSFNEISSLTGLSKVSIKLKELYVSKNEVAKMEELEHFHALEILELGSNRLRVMENLETLTNLQELWLGRNRIRAVNLCGLKLIKKISLQSNRLTSMHGFQECAALEELYLSHNGIQKMEGLSTLHNLRILDVSANKLTTIENIETLTRLEDLWLNDNQIPSLEGIETALAGSREKLTTIYLERNPCAKTPDYSSTLRKIFPNLEQIDSDIIA

SEQ ID NO: 43502 - protein, 509 aa, Zea mays
  Clone ID: 700382959_FLI.pep
SRAPRTVRLLPRVGEVLAAPAARCARRARLWAEATGGRARRRAICFRVRSSYLSTTHPSRRDRVLKYTSAYAAGFGVVKTGTEELVDQRCGEMYRGGLDRFKKAQTLEPFSVKSESGTKKAPAAAGTAKALAPLTLPLNSNFVPGQNHQSPQGTISRVAGQGGDAPGHVGTQVGGGQSTWQPPDWAFEPRPGVYYLDVVKDGEVIDRINLDNRRHLFGRQVPACDFVLDHQSVSRQHAAVIPHRNGSIYVIDLGSVHGTFVANERLTKDNPVELEVGQSLRFAASTRTYILRKNAAALFPTPSLPSDVSLPSPPDPNDEDAVVAYNTVLNRYGISKSDILSSSKDSSGGASSANDGKHAVERLLKRGKKRRVSFRDQVGGELIQVVGISDGADVETEPGPIGVKEGSLVGKYESLVQVTVIPKGKEQASRKECTSTSPSGVTDKLQEVLKKVKSATRPGIYDDLYGDSVPAKVGSSWAYKSDDQPVEEKTHGMNLNMNSADDSDDLFGD

SEQ ID NO: 43503 - protein, 380 aa, Zea mays
  Clone ID: 700426203_FLI.pep
SKPTNSNTPASTAAAASASISQQQQQHLQMQAQQKHQQHQQLIQHHHLNRPRSAAPSTQNSAGGYQDRINMANFQNMMYPSSAAQGRVQSPQLKASSGRGTPSSTATTTPAATPPNLIMMKNSSLHQQQAKVPMQALYTPGHQSQTSLSSSKVGPSLTNLSTGGGDLSRSSNAPVASGSPSNSVSKSTGGSPPATGNAKGVQQPVQLPSPQQQSAKNSASTSGSRTTPTNHFSMAMPSILGQQPNASPGSNPGSKQHSHTQPASMKQQPFPQGHFFISNTYAPPAPGAGGAAALGLYQKRPGDKTQQQQQQQASHQQNAMSAAAGNNVKALHPSSGGFMHLAAQSAGGMAHTHVSAGQLTFGTMPTPLKPSSDQKPAAGK

SEQ ID NO: 43504 - protein, 465 aa, Zea mays
  Clone ID: 700426274_FLI.pep
ANHPSWTPPSTEYMHSRLCCQICKVDIIGTDNLLVCDACERGVHLKCLHQYGNKGVPKAEWHCSACLTQSKGKPLPPKYGKVTRTVVASKTAPPGGGAQLSLQESAENMAAKENHQKLAANGNLMKPFSIHGGSTVPDSNVLALSAVMAGSQSQLVSTLRPSIVVKAETPSNGKEGTGQPCNTAIQPNVRSSSLNNRLRSDSCLNPADSANEIMHGKHAAEISGVEAKVKSEANSEVVVSTDEELVHSSGTSIETERAKVVAIEENRAQSTFETDKMKVGETTINTGTTDQCINTEEKLPSLATSEAHTITDVKMTSNTGIPVQQHNIATIEEKTQIDAVSDPHPHAIQDIQDMEMGTNNGPPIDQTSSLVEENPPGQSSSIADACVTANTGIPTDQTQHPNESTENAVKKSPNRELYKEKPGCNITSDITQKVTSNGIMCPEDKTLCVHEDKAVGCDTEAKEEN

SEQ ID NO: 43505 - protein, 60 aa, Zea mays
  Clone ID: 700333235_FLI.pep
DDKDDRALTDIEDGDEPWSGQRVQGRNGTVLTKRPITPSQEEEKLNQRCRSAKLRVIQKT

SEQ ID NO: 43506 - protein, 583 aa, Zea mays
  Clone ID: 700333623_FLI.pep
EELRRLLELLPRELSGRVETHPELPALVEVVMDLGRPPLARFPSGDFLLSQRPISFDDLRHATSQVGDFGADNRAGISRTLHRISAIRNRKGVIVGLTCRVGRAVPGSANLLQDLVKDGGSLLLIGPPGVGKTTVIREIARMLADDYKKRVMIVDTSNEIGGDGDIPHPGIGNARRLQVPNQDMQHKVLIEAVENHMPQAIVIDEIGTKLEAMAASTIAQRGIQLVATAHGVTIENLIMNPSLEMLVGGIQSVTLGDEEANRRGVQKTVLERKGPSTFTCAAEIVSKKELRVHRSLEATVDALLAGKLPNFEIRKLDSKGSMQEVSVQKEQSHLGIYDATEFGSDSLRNARRSLDSAFSLDSAEGHIVRSDGADSSFNLYAYGISESTALQAIHQLELDGSVTLTYNISEADAVIALHSKLKKNSQIQAVLKSQDIPVFLVKTNSLPQITRALRALVDDHMDEVIDYNDKEEARSSEETDALEEARLAIEQVVIPKGESVQLLPRPSSIISSQVGLVESFSLKWEVVGQEPKACVRILPHFAPKQVEAVARETPAEPADSDWESHDDSDHTQSGITRLPFLPD

SEQ ID NO: 43507 - protein, 447 aa, Zea mays
  Clone ID: 700336783_FLI.pep
RRSCSGHHVKQPVTDLSDKMVKICCIGAGYVGGPTMAVIALKCPDIEVVVVDISKPRIEAWNSDTLPIYEPGLDDVVKQCRGRNLFFSTDVEKHVAEADIIFVSVNTPTKTRGLGAGKAADLTYWESAARMIADVSKSDKIVVEKSTVPVKTAEAIEKILTHNSKGINYQILTTNLWSAELSKLAANAFLAQRISSVNAISALCEATGANVTEVAYAVGKDTRIGPKFLNASVGFGGSCFQKDILNLVYICECNGLPEVANYWKQVIKINDYQKSRFVNRVVSSMFNTVAGKKIAVLGFAFKKDTGDTRETPAIDVCKGLLGDKAQISIYDPQVTEDQIQRDLAMNKFDWDHPMHLQPTSPTAVKQVSCVWDAYEATKGAHGLCILTEWDEFKTLDYQKIFDNMQKPAFVFDGRNIVDSEKLREIGFIVYSIGKPLDAWLKDMPAVA

SEQ ID NO: 43508 - protein, 312 aa, Zea mays
  Clone ID: 700378210_FLI.pep
CSTGVLLDDLLVAEDLAAAETTSAANHAAAAAAASSNVQREPGRYAYNDEQSGQTVTVSSPDGAVVLGTPVAPPVNGDMYTDISPENAIIQGQRRLSKGVDYLVEASAAEAEAISATLAAVKARQVNGEMEHSPDREQSPDAAPSAKQNSSLIKPDPALMNNSTPPPGVRLHHRAVVVAAETGGALGGMVRQLSIDQFENEGRRVIYGTPENATAARKLLDRQMSINSVPKKVIASLLKPRGWKPPVRRQFFLDCNEIADLCDNAERIFSSEPSVLQLKAPIKIFGDLHGQFGDLMRLFDEYGAPSTAGDIA

SEQ ID NO: 43509 - protein, 93 aa, Zea mays
  Clone ID: 700349664_FLI.pep
ERQQELEEEERIRQLRRTELVPKAQPMPYFDRPFIPKRSTKPATVPMEPKFHLRPEKISCYCRQQCMELGKLNPQQQCQHPLWQSRSTEHQHT

SEQ ID NO: 43510 - protein, 558 aa, Zea mays
  Clone ID: 700351742_FLI.pep
GHRLKNHECALARTLVSGYQIRRRLLLTGTPIQNSLQELWSLLNFILPNIFNSSQNFEEWFNAPFACDVSLNDEEQLLIIHRLHQVLRPFLLRRKKDEVEKYLPVKTQVILKCDMSAWQKAYYEQVTSREKVALGFGLRSKALQNLSMQLRKCCNHPYLFVEHYNMYQREEIVRASGKFELLDRLLPKLQRAGHRVLLFSQMTKLLDVLEIYLQMYNFKYMRLDGSTKTEERGRLLADFNKKDSEYFMFLLSTRAGGLGLNLQTADTVIIFDSDWNPQMDQQAEDRAHRIGQKNEVRVFVLVSVGSIEEEILDRAKQKMGIDAKVIQAGLFNTTSTAQDRRALLQEILRRGTSSLGTDIPSEREINRLAARTDEEFWLFEKMDEERRLRENYKSRLMDGNEVPDWVFANNDLPKRTVADEFQNIMVGAKRRRKEVVYSDSFGDQWMKSDEGFEDIPKATQRSKKTAYSSDIQVEFSERRKRPRSVENSADGVSNPTWTPDKGRAGVSSYSKDETEDDGEDEVITSGLQKGNSFTWNTLGRRRSSHFSSSSDSRGRPTF

SEQ ID NO: 43511 - protein, 380 aa, Zea mays
  Clone ID: 700351851_FLI.pep
PTFGSFPSVLPSLLAAAHCRSPTNPQRDTPERVIPDPAAAMRPSLLKSTAELLRRSRGYASTANPERKVAILGAAGGIGQPLSLLMKLNPLVSSLSLYDIAGTPGVAADVSHINSPALMKGFMGDDQLGEALEGSDIVIIPAGVPRKPGMTRDDLFNINAGIVKALCTAIAKHCPNALVNMISNPVNSTVPIAAEVFKKAGTYDEKKLFGVTTLDVVRAKTFYAGKAGVPVTEVNVPVVGGHAGITILPLFSQATPASNSLSQEDIEALTKRTQDGGTEVVEAKAGKGSATLSMAYAGAVFADACLKGLNGVPDIVECSFVQSTVTELPFFASKVRLGKNGVEEVLGLGELNDFEKKGLESLKVELKSSIEKGIKFAHGN

SEQ ID NO: 43512 - protein, 416 aa, Zea mays
  Clone ID: 700381673_FLI.pep
NPPVPLGFPRNPPPKPQSGEERKMFGFGHHGHHGQNPPAHGGVHQPTFKIFCKADEGYCLTVRDGNVVLAPANPRDEHQHWYKDMRFSTQVKDEEGNPAFALVNKATGLAIKHSLGQSHPVPVCTPVLLSIGQDEGGLDFILVLVSICSGEAGAVQPGVPGRVGAVDGERRRGQGLPLHPHGEQHPPQLRRLPRRQGPRRRARRHHRGAVGVGQGRQPELEDPALGRRSLRRGRQQRRQRAPLRRRRRAHRPHLLQGRRGVQRHGPQRRRVPRAHQPARRVPALDQGHAPQQQRQGRGRVPGLRARQQGHRRGHQALPGRGPPGQAGALQPRLPGRVGAVDGEPRRRPRLPLRPHGQQHLPQLRRLPRRQGPRRRARRHQHRALEVVRGRQPALEDRPLVNVLFCGCTGHHHDLEL

SEQ ID NO: 43513 - protein, 86 aa, Zea mays
  Clone ID: 700421660_FLI.pep
TQAARRTEKSDHPPKARTFPPLPAGNPPDWGLPLNRLIYRLPLADRRRSGLGHHETALWKASKNENPPRLGASSSVVAAARRRRRC

SEQ ID NO: 43514 - protein, 94 aa, Zea mays
  Clone ID: 700423935_FLI.pep
LASLLARTLRHFTCSLLHFCSYVIGLECFMVSLQDLFYVCWGSKENQRRAVLRAQELHHRRDEASSLLRRRKLTRGTACGLRMAREIKGPVWAQ

SEQ ID NO: 43515 - protein, 70 aa, Zea mays
  Clone ID: 700425055_FLI.pep
LHRRLFLPPLLGLFSCAAALLFLPLPGLSSCAPAPLFLPLMGLPSCAPAPLFLPFMGLSSCAPAILCPLF

SEQ ID NO: 43516 - protein, 327 aa, Zea mays
  Clone ID: 700218560_FLI.pep
QQLVQARKEVAELQLQKSQLEELLQKAQGDLGSVQDQHRVKVQQLITLVDFKSKEIDRLLMELKSKSDEFHNQKRCDEAKLNALSEEIDLLNSKIDKLSSERNELFEKNEQKEKELAGISEKDMQLQDKTAEITSLNKELVFLKDQVKMHLDELHSLKRLKNEREETIGKLQIDIGSLKLQCDNLKTSLSKKESEKDSLASQVLKLRRSVETRERAKANGQISDVKDNQHANNKRTKHNTGSTGSIAALPGTNRQGEDGDCNGPDMRNSTDQSAKELASLKEKNRAIEEELKELHERYSEISLRFAEVEGERQQLVMTVRSLKNSLR

SEQ ID NO: 43517 - protein, 480 aa, Zea mays
  Clone ID: 700205430_FLI.pep
SRSRLASANNASRQNPSTGGGVASLHPVNPQRRSKILSTPAMAATYQTGLVAEPQLLNTEIITRRATNCVADTNRKDKCVGYLDVFVHQARDIHNVCIYHKQDVYAKLCLTSSPDVSCSTKVINSAGRNPVFEESLRLDVQTVDASLKCEIWMLSRVRNYLEDQLLGFALVPLVDILIGNGKLVQEFSLTSTDLFHTPAGFVHLSLSYAGCSPDVVLISSPNNSPSTVYDSGIDHVVPSQLEKIVFPDLNVEKEDEIMVSKYLEMTSDSETPIKVENGVSLHSANDDDVPSKLEKIKFIDSESRAKAENGKMLLFGVAVPSTAICADKVEEHHDESPLSCVSTTGSSTTLSATTQSVSEPSETSVEASPRQCHREKSQDVTGGEANSSETPPKDEVIKPVISVNLQPEQSVVQQDIVDMYMKSMQQFTESLAKMKLPLDVENSSPSNEDSYSSTVEKTSPSPSSSAAKGSRVFYGSRAFF

SEQ ID NO: 43518 - protein, 368 aa, Zea mays
  Clone ID: 700217311_FLI.pep
HGDGGRGDGVPDAHQGVAVPLLLHLPARLHRHRPHQPDGAAVPGAPLVHGFPGDLLLPEQPAVREHVPAPAAARGVHQHHDVPVHGHLPHLLHDGAGAVVRDGALHRAAAHHHVLRVPGHRAGHAADPGRPGGEVGGRDGVRVVQERAVLDDGQLLRVPGRGVPGAGEGGVQAGHLVQADVEAARGGREEGPLRRPVRGALDLAHGDAHHHHPRQHHRLRRGLRQGAGRRVDALAQGGRRRLLQLLGALPPLPFRQGHPGEARQDPRGGARLVGLHLRHHRRAVHQHPTHPRARRQARRRDRKARRRRTPPWQEVRRLLPLAVKRRAASIVMHAHIPPALMVTMVSRQGEECTRSRSSIHRLLSTAAR

SEQ ID NO: 43519 - protein, 774 aa, Zea mays
  Clone ID: 700468168_FLI.pep
SKLKDHISSISEEKRQMQLNTSAVQEELEKTNEELAINFRNLESANTTINSLQDALSQARSNIFILAAEKNEAEAKYETEINALNAELTKCLEELDKTHGHLQSHSTEYHGYLEKLGMFMMDDSLLSLIAEEYGKTFNSLRDMCLIVKSMHEQLSVKSFQNDSIVEDSELSSLLSLPDYESFVRERLVKNINRKGNIDDTSSFSTIVEQLSNQTEYLSSFLKDLSTYMNSNIIVVLRSLQLVSNTFAHTLEEHDMLKVELGNKDAHNRAQESEVLSLQKDLRAMSSKCIYCVQQIEIVFDDMVDLGYAIDLATGSSSIGSELEVTVSDLKNEDTSDYSKVADTLLATIDTLKSKSEKLSTIKGLVITSLDDFKMKLKQAEAAAETASHEHQLSVERVCMLEKELKILQDECNKMELNIQEYKEREGALKARELELLSVEHTQISADRGLTDNAISKDQTEALVEKISKLNMLSGESNVQREEATSPLDKLFVVIDEFSALQHEVETLRYENEDLQLNIESYTREIEQLREVSRNSDLTNRELESKGSELLEVAVSMERMIQRLGYLGGKDVLEDNKPASTQALLSKLEKLIIASSTESGNSKSIIQELGAKLQSREKAVDELSTKVKMLEDLCHAQLSQPEPSKDRSFEASSSTIGSDMSDIEDAGPVGKTTSVSSVSTAAHARTMRKGSADHLVVNIGSESERLIAAQDSDDKGRIKSLHTSGFIPAQGKHIADRVDAFWVSGSQILMNRPRARLGLMLYWLAVHLWLMGSIL

SEQ ID NO: 43520 - protein, 1073 aa, Zea mays
  Clone ID: 700468241_FLI.pep
QPVNAGQDLAWGMHAQDSSSTNPFLDPAYLMSHTQIYSSSSMSSQPCFPEEEDFLSELVIQHDNMGVTADALWEPATPPDDAPLPSEIMTEDDFRSFCQEYHEIDFSSVTNCSHSEPASDSNKIPNAFLIRESDFPCYNSALPVKLDQEACIHSKFCSECVEYSCAVERQGTTSMVVSGKEDRVDKDETPGVDFHLNFLEFSNDNRSPELNMLSVPVDLRQELHGLPEVDSRDSSPLLHKEKTSEECCFSLSNNVVEVKQELEIRADLVPHSSINEKVDGLDEAVPVEPEAHACALDEYDNQDVPHISTSEKNETLTLGKPVLVQGPEVCAFGGFECDPPIIPSPSVDETKDNLEVRMNMILQSFHHSLRTSFQAEQKSECYTSGEHDSQTVPFPLHDENINELDDPPLSNADELDRESKACVPHECDAQIAPCSTDEDIHELDHPPLSSPALVDLESEDHVSDDRDSEVTPCLVKDKIDESVDAQPNLLPGELEQETHAPPELDFRVAPQSAKESDCSTEFDSQAAPCSSNIPVLANTTVSTCISAMPSSEETYQLSPVPPPTVQFQNDSYKDPQALLADSYKDPQAPPPLPPLQWRLGKPRLGLLSRKGCMTEPARVIDPVLQISSQEMDIRPGLLDPTDRSIEPVSCQEIKEDRCESSLIDHNDQNVDFDRLSTRVAVTDVARTEHRLSLETSEDIKQQGHISSSATGVGEHLDAGFTSTMADEEHLDDSGMTHGTALYLSDPLFPLPTYELQDPQPDTRENSEHPSQTHGAASGDDKSMDAVGSMESTLTKGHVSGNRCYQQPQHGESSSETSDHKEHITNASEDGVKHQSGTSEAPSDTAKHSAPGTLLKGNVQESQILQEHNVGSSEDDQPGGLLYSLEPVAPQGENKNQVNNPGLLLEWPGDTSELVTGLEKSCYAHAEQPPVMGWTVGPQMLHPKYGILEEESQFEPNIADNHLIRKPISIKNIPRNPLVDAVAAHDRSSMRKVSELAPPTDKPKPNERNMLLEQIRNKTFSLKPVAPAQQTAMRSPARTSTRNLKVAAIIEKANAIRQAVGSDDEDDADSWSDT

SEQ ID NO: 43521 - protein, 263 aa, Zea mays
  Clone ID: 700473131_FLI.pep
QHIPYCSTLFLVSIGSHTNRTIFSVDFDGRFGSQLDELEKKLAGEVRVRNRAERRLRRAIKKLESLKILDVELSEGSIGSLSSNGRSDHQAPEAEERNGPGSLTTRGSVLASGPSGDPDADADRESSEGSCTQVNSSSRDGSWCSVASEQSRPGSCMDLAGNTTNCGSEGSCGDHDSEREHLDASSGCGSAKSEEAFYESDDRLALSRGLVEPPPAAAGEGPRTQDNDTHAGEVRAMDHEEEEETNKLAIVLADPQPQSQGDV

SEQ ID NO: 43522 - protein, 605 aa, Zea mays
  Clone ID: 700473318_FLI.pep
PKPRATAPLLLLAAVRLSADEQARRHPMAMEVRRRVPPPHGSAPRRQQATGGEGQRVRVQAGDALPLPIRHTNLIFSALFAASLVYLMRRWREKIRSSTPLHVVSLAEIFAICGLVASLIYLLSFFGIAFVQSVVSNSDDEEDFIIDSRHGQARAPPPPAPAAPCALLGSPAAAPEKMPEEDEEIVAAVVAGKIPSYVLETRLGDCRRAAGIRREALRRITGREMDGLPLDGFDYASILGQCCELPVGFVQLPVGVAGPLLLDGRRLYVPMATTEGCLVASTNRGCKAIAESGGASSVVLKDGMTRAPAVRFPSARRAAELKAFLEDPANFDTLAMVFNRSSRFGRLQGVKCAIAGRNLYMRFSCSTGDAMGMNMVSKGVQNVLDYLQADFPDMDVISISGNFCSDKKSAAVNWIDGRGKSVVCEAVIKEEVVKKVLKTNVQALVELNVIKNLAGSAVAGALGGFNAHASNIVAAIFIATGQDPAQNVESSQCITMLEAINDGKDLHISVTMPSIEVGTVGGGTQLASQSACLDLLGVKGANRESPGSNARLLATVVAGAVLAGELSLISAQAAGHLVKSHMKYNRSSKDMSKTLAEETDKPKKC

SEQ ID NO: 43523 - protein, 381 aa, Zea mays
  Clone ID: 700440496_FLI.pep
LPQLTWRRQERTEAVGPWKAKVYEMNHVVVSVKSRRVPGAMTDEEFFSSCNDNDIESEGFDDVLTEEEKKQLEAALKMDSPDAGGEDQSDSFAGPRHSCFEPREREVPIEDMSVSGNGEGKHDKKGWFSNWGKRSQVSKSEGVKKMASPRNSLCVDDKVSDLVIESPSNVQTRPGRHSVDVVRPDDNRRIRERDSRRHVASAENGHRRKEGSKESEYKKGLRPVLWLSPNFPLRTEELLPLLDILANKVKAIRRLRDLLTTKLPPGTFPVKVAIPVVPTIRVLVTFTKFEELQPLDEFTTPPSSPDNSKSPAVQPSSSSWIQWIKAPYLQNLSTAPGPSSRVEDIQDPFAIPSNYVWTTPEEKKKKTQENKNKSKKGRSGA

SEQ ID NO: 43524 - protein, 240 aa, Zea mays
  Clone ID: 700440689_FLI.pep
WNELKAKLETETVCVKPARDGCSTGVARLCCPKDLEVYTNALRRKFQHLPANCLSRAHGVIEMPVPSPESLIFEPFIETDEIIIANKLEDGSARHLVWKGENDWLEITVGVVGKRGEMHSLNPSITVKESGDILSLEEKFQGGTGINLTPPPATIMGEDALQRCKKSIETMANALGLEGFSRIDAFVNVRSGEVLLIEVNTVPGMTPSTVLIHQALAEEPPVYPHRFFRTLLDLVFARAK

SEQ ID NO: 43525 - protein, 364 aa, Zea mays
  Clone ID: 700444094_FLI.pep
TMCGGAILANLREPAPRRLTERDIWQQKKKLKRGGGGGRRSFAAEDDEDFEADFEVFEADSSDSDLELREGTDDDVVEIKPFTAKRTFSSDGLSTMTSAVARSAKRKRKNLYRGIRQRPWGKWAAEIRDPQKGVRVWLGTFNSPEEAARAYDAEARRIRGKKAKVNFPDAPEVGQKRRSGSASAKASKSSFGQKPIVKVTMNSLANTNASFFQSVSYPSNSFVQHGNIPFVPAMNSTGSVEDPIMNLHSDQGSNSFGCSDLGWENDTKTPDITSIAPISTIAEGDESAFVDSNSNNSFVLPALENSAVDLTDGLTDLESYMRFVLDGGPSDSVDSLLNLDGSQDVGSNMDLWSFDDMPIAGDFF

SEQ ID NO: 43526 - protein, 544 aa, Zea mays
  Clone ID: 700444335_FLI.pep
RLVSLMDSPLMEPLLVPNNHSPGPVVAATPGEHGGAAVDESSTLVDAASGTDESHRALADADVKMNDDGDVQGDELSASVQRRLDESSAVEGEDEEEEIGDDAEADDMAARMGRRLAALPGNAHESEPFTIFRVAGPMRDRNRHLYEPQMISIGPFHRGAGRHLAAMEEHKWRYLRDILARPGGATLASYARAARSMEASARRRYAEPVLLPAAEFAEMLLLDGCFLVEFFLKGQESAEDALIDASWAMQNVYNDMLLLENQLPFFVLERFYDLATGGLGRDYFVTNVLVNYLTVDMCVGPRDPESTRPPDGEIHHLLHLYYYWFLPPEDRDGSGTGSKDKEDGEALEELMSTSADERMPWQLPPASELKDSGVTFRAKKSPRSMVDVTFDRRSGALEIPAVESYTNHAIFANLLAYEQSRGRWELQRLVSYVLLMASVVDARRDVEVLQRAGVFVRGDEETAAFYAHLGELCPPPEFVNNCYADLFRDVLEYCGRSWNRHRAVLVHDYFSNPWTSMSAAAAVFLLVLTVVQTVYTVLPYYSQN

SEQ ID NO: 43527 - protein, 311 aa, Zea mays
  Clone ID: 700456807_FLI.pep
MDLAEELQREKRINAGKKGGSKAAPKKPRKKAASKKLDSDTEDDDFEPAVAKRGAQPKKTSSKANDSASEDGDYVAAENQKKQSKKASAHVDEEVDMPSLKDRLAAFNISDSSPDHSAMETEVTELTEQQNENKATEGASKRGGRKKASSSLATIPSDVDEEVLEVQAQKKGRGRKPAAVVKPKAPAAARKRAPAQGKVTQKKIDEMLKATEDNNTSASSPEKKVRKMRSSPFNKKSGSILQRGSTASASSGTTVEASPPSGSSAEPVGAAQPRRTARATKKPIYISDSDPEDEVELIDDSDFDADGDSDE

SEQ ID NO: 43528 - protein, 146 aa, Zea mays
  Clone ID: 700456869_FLI.pep
FLRNLGPTKILKLLTESPKQSLPRFSELLELSGFGHKLHEDMVATAVILTRYLRWRLRGEHSWNLSPACSAALLPLFAVRCPSLLGGTVSRHRTATLPPPPASVATSATTPLAAPDPDRPATVHCPPAGARRGSRPSQAERRAACL

SEQ ID NO: 43529 - protein, 486 aa, Zea mays
  Clone ID: 700466755_FLI.pep
GAATPRPTLETLPAACQAATARDFASSSPEMDFQVVVLAGGTSEKLSPLVSKDVPKALLPVANRPVLSYALDLLEASDLKDLIVVVEGQEAAQLVDAWVSSAYLDRLRVEVVVVSEDLGSAGALRAISKRLMANDILVVSGDLVTDVLPGAVAATHRRNGAAVTALLCSVPVSGPSDTSSSSGKDKAKKPNRLNIVGLDRSKQFLLHIVSGTDVEKDIQVHKRKIQAVGQMEIRSDLMDAHLYAFKRTILQDVLEQKEAYRSIRLEVLPYLVRSQLRSTPSGGSGTSVDEIESSAFQSSGNLQCLSQHRVIAPSAFKQDVLSRSSGGHRCCAYIASKSKYCHRLNSIQSYCDINRDVIGEVSHLSGYSFSAQNNIIHPSSVLGSKTTIGPHCILAEGSQLGDKCSVKRSVIGRHCRIGSNVKIVNSVVMNHVVIEDGCHIQGSVVCNNVQLQERAVLKDCQVGAGYIVTAGSEHKAESLARKYSEL

SEQ ID NO: 43530 - protein, 449 aa, Zea mays
  Clone ID: 700467061_FLI.pep
TDEAKPKARTVVSSILLPASEGTFKCSSGGIRSGGEKGIVEVTMLRQSSSRNQRSRGLKLKKALQISLLLLVSVWLLYQVKHSYEKKAAYSEGEVNDLHKDDKGQGEAVRLGRKDVPPKMEADSSTLDERVEDEENDEVEQEMKHDENDEDPIDEQDLEKDEDLPEPGEHSSEKDEDVGVFEDEERKERSQEDQEKSFHGDDVSSAVTHDPQSSEQDELFHHAQDTVLFVDDASTAVPNENHVAGNDEEEVQRARERSFRGDDVSSSVDHDAKVAKPLPEEQLNSMDKIFEGTTNLSNGISFRAPGINGSYAGMDNVATVPTNSPSQKNAGTPSNDIESKTHPSPANLTGPEQSNSTLKDHPDQQVNSTAVLGNQVQPLTNQTPWPELDSPNGTLALVTDVQKSTSGAGDDGSSTVDKRTDGRDGPKEDVDVSTKIMNRAISEDEVVPE

SEQ ID NO: 43531 - protein, 633 aa, Zea mays
  Clone ID: 700468937_FLI.pep
SRLNQTKQDLDQREEDIIKAYSRQHEMEKALMKASRDLTLQVRQINNLKVMIEEQDKKLVSSQDALSKKVIEVDKLKQEMLKKNDEVALLHSEIESKEQELLVANQAIARQEATIRELRSETKRKETEVERLNELAKANEDKLKFAEQELEKQNSGWIAAQQELKELAQMAFKDKDDIKNTINDFKRVRYLLDAVRSELIASKEALTFSRKQVEDQAAQLSNQVQELTDQKALIISYTRNLEAAQLEIQGKSNELSTVQSRCSELESQLLEETEKVEFLEAMLTKEREILEQKTKEVAFLQEEVVQKEKDYFNSQKLVETKETELLEARHEVEDMKLKVDSIQFAVREKDLELLEAQRKLDEVNSEVVELQQLINSKEDQLVQVRTELQDKEQCIQLMQDELDKMRLGRSQAESVVQKIVELTSNLIGSVKGEEFNIYNLLDDEILSTSTALEYSLHKHNQLEADIDMLKESLRQKDMDLTAAYKALDAKDRELKAVVGRLDVRDKELDKLEELSIDPYGTRKLSRVADEATEDNIAGEAELQKHEMESVEMEALAASTMLKKLADVTKKFLRSGRTDSGTNLDSNVSEGASELEPQRKLNVILEAKKEIVGLFSLTEELVTGAQTKDDDEEP

SEQ ID NO: 43532 - protein, 346 aa, Zea mays
  Clone ID: 700471545_FLI.pep
WLKSSYPSERFIVFQSFGQHGRELITSEVALRLLYVLTEKPKIAGVDISSFEKLLENLVIKVVPMENMNGRKRVEEGELCDRRNGRGVDLNRNWSVDWGKKEKDYDPYEENPGIAPFSEPEAQIMRELSRSFKPHIWVNVHSGMEALFMPYDHKNTTPNGASAHSMRSVLENLNRRHFQDSCLVGSGGGSVGYLAHGTTTDYMYDIAKVPMPFTFEIYGDEKASSDDCFKMFNPVDKKTFDRVVNKWCMAFLILFEEGLRNLRDAQIVSQGTLENWVPIGGDIVEINVERKSSIRERRKLEGLDLGMQELRTYFRLFLLSTFLLMFMFCARISKNRNRDSGNLFDP

SEQ ID NO: 43533 - protein, 406 aa, Zea mays
  Clone ID: 700471753_FLI.pep
PFTIVSPLVRPPRRRRRPPPPLPLPLRTLCESSLSGLCGAGMALRRLLQGSVLPRIIGRDLAPAVAPFSTESGETIRATLFPGDGIGPEIAESVKQVFNVAGVPIEWEEHYVGTEVDPRTESFLTWESLESVRRNKVGLKGPMATPIGKGHRSLNLTLRKELGLYANVRPCNSLPGYKTRYDDVNLVTIRENTEGEYSGLEHQVVRGVVESLKIITRQASLRVAEYAFHYAKANGRERVSAIHKANIMRKTDGLFLKCCREVSEKYPEIQYEEVIIDNCCMTLVKNPGLFDVLVMPNLYGDIISDLCAGLIGGLGLTPSCNIGEGGICLAEAVHGSAPDIAGKNLANPTALMLSAVMLLRHMQFNDKADRIHNAILQTIAEGKYRTADLGGKASTSEFTNAVCDHI

SEQ ID NO: 43534 - protein, 104 aa, Zea mays
  Clone ID: 700439061_FLI.pep
RSPYLLRIRRPPASPSSSTTRASPAIMDSDPSSQNPTDMTAFVQNLLGQMQTRFESMSQNIVSKIDEMGTKIDELEQSINDLKAEMGTETPVKKPDEPKPADSA

SEQ ID NO: 43535 - protein, 311 aa, Zea mays
  Clone ID: 700439179_FLI.pep
DDRLDDEEDGFDCEIGTLENVKKAKGTVNVSATYNTRHHDFESSVVARGDLWRLESSRGNLTSGNDSSPLFLVQLGPLLFVRDSTLLLPVHLSKQHLLWYGYDRKNGMHSLCPAIWSKHRKWMLMSMMCLNPVACSFMDVQFPNGQMTYVAGEGITASGFIPLFGGLLQAHAKCPGDTRVSFSFKNKQGTRFSPTFQWPDNSVSFGVAQAVAWKRSGLMVRPSIQISVCPTFGGTDPGICTEFVHSLKEEVSVMCGFSCSRHPSAFTALSLGRSKWNGQVGSSGLVITLETPLDNMARPSLSVQLNGGFEF

SEQ ID NO: 43536 - protein, 287 aa, Zea mays
  Clone ID: 700439603_FLI.pep
IGVVAKEFPFAGVPISGCLGDQHAAMLGQLCQKGEAKSTYGTGAFILLNTGEEPTQSSHGLLSTIAYKLGPAAPTNYALEGSIAIAGAAVQWLRDSLGIIQSAAEIEKLAETVPDSGGVYFVPAFNGLFAPWWRDDARGICIGITRFTNKGHIARAVLESMCFQVNDVLSSMHKDAGEAGEVKSAEGEFLLRVDGGATVNNLLMQIQADLLGSPVVRPADIETTALGAAYAAGLAAGVWTKEKVFAGLHKENTTVFRPKLDEAHRKKRADSWYKAVSRSFDLADLSL

SEQ ID NO: 43537 - protein, 352 aa, Glycine max
  Clone ID: 700684006_FLI.pep
EEEEELPFGPDPPKIGPSDFHILRVVGQGAFGKVFLVRKKGDCFDDADGVFAMKVMRKDTIIKKNHVDYMKAERDILTKVLHPFIVQLRYSFQTKSKLYLVLDFINGGHLFFQLYRQGIFSEDQARLYTAEIVSAVSHLHKNGIVHRDLKPENILMDADGHVMLTDFGLSKEINELGRSNSFCGTVEYMAPEILLAKGHNKDADWWSVGILLYEMLTGKAPFTHNNRKKLQEKIIKEKVKLPPFLTSEAHSLLKGLLQKDPSTRLGNGPNGDGHIKSHKWFRSINWKKLEARELEPKFKPDVSAKDCTSNFDQCWTAMPADDSPAPTPTAGDHFQGYTYVAPNPWLSSRSLD

SEQ ID NO: 43538 - protein, 324 aa, Glycine max
  Clone ID: 700684117_FLI.pep
VGRELKGLESQTSLFTLRQIKAATNNFDKSLKIGEGGFGPVYKGVLSDGTVVAVKQLSARSRQGSREFVNEIGLISALQHPCLVKLYGCCMEEDQLLLIYEYMENNSLAHALFAKNDDSEKCQLRLDWQTRHRICVGIAKGLAYLHEESKLKIVHRDIKANNVLLDKDLNPKISDFGLAKLNDGDKTHLSTRIAGTYGYIAPEYAMHGYLTDKADVYSFGIVALEIVSGMSNTISQPTEECFSLIDRVHLLKENGNLMEIVDKRLGEHFNKTEAMMMINVALLCTKVSLALRPTMSLVVSMLEGRTHIQEVVLDKREVLDDVKF

SEQ ID NO: 43539 - protein, 153 aa, Glycine max
  Clone ID: 700685831_FLI.pep
RISHRIVMAETDVPETPAASETPATGPSVKEFTLEDVKSHNLAKDCWMVIRDGGIRKVYDVTTFLDDHPGGPEIMVDVAGQDATDEFEDIGHSNDARAQLKQYEIGKIKGDTKQQVPSASTSSGRQDISGQNGPLYAVVAAVVVFAAFYIQYK

SEQ ID NO: 43540 - protein, 435 aa, Glycine max
  Clone ID: 700686007_FLI.pep
TNFLSSVMIHATRPFVVNEWIQTKIEGYEVSGTVEHVGWWSPTIIRGEDREAVHIPNHKFTVNVVRNLSQKTHWRIKTHLAISHLDVNKINNIVADMRKVLAKNPQVEQQRLHRRVFLDNINPENQALLILVSCFVKTSHFEEYLCVKEAILLDLLRVIGHHRARLATPVRTLQKIYSDADLENIPFADSTFGHGAGTVPHRPLLVIEPSYKINGDDKKSRAARPAVDQDNKTATQTKVDTKTHNVARGTQDDTEGDNKVLTPNSDANGNSKTVVTPKPDPEVGENKPLKSDSNKENVEVPESPSKSKVTGLVVDNSAQKDVDVKQSKVQITKNIKPNIDSDNVVSSSTNNADKIGGFNTNMPMKQQGEKKPAAQAHASRTVLEENIVLGVALEGSKRTLPIDEEIDNVTCREAKEMAALQGGNGSPKASDGNDK

SEQ ID NO: 43541 - protein, 193 aa, Glycine max
  Clone ID: 700686201_FLI.pep
NSYMSSVRKMACEILELMAEGLKIQQKNVFSKLLMDKESDSVFRVNHYPACPELVNGQNMIGFGEHTDPQIISLLRSNNTSGLQIFLRDGNWISVPPDHKSFFINVGDSLQVMTNGRFRSVKHRVLTNGFKSRLSMIYFGGPPLSEKIVPLSSLMKGKESLYKEFTWFEYKNLTYASRLADNRLGHFERIVAS

SEQ ID NO: 43542 - protein, 715 aa, Glycine max
  Clone ID: 700686212_FLI.pep
VVCYEDTITQLHIIGERRDTPLPRNFSIDSFVTTLVRLPSLKVLTLVSLGIWGPLPSKIARLSSLEIVNMSSNFLYGSIPQELSSLSSLQTLIFDNNMLADTFPHWLDSLQALTVLSLKNNKFNGSLPKSLGNVENLRTLSLSHNHFYGAVPDLSRLTNLQVLELDDNAFGPQFPQLGNKLVILVLRKNSFRSGIPAELSSYYQLERLDISSNSFVGPFQPGLLSLPSITYLNISGNKLTGMLFENLSCNSELDVVDLSSNLLTGSLPRCLVSNSSDSTVLYARNCLDTTNQNQQPQPFCHTEALAVGILPETKKHKQVSKVVLSLGIVGGTLGGVALVLLVFFIVRRGNDRSKTKNPPTRLISENAASGYTSKLFSDARYISQTKKLGAVGLPTYRSFSLEEIESATNYFDTASLMGEDSYGKMYRGQLKNGSLVAIRCVEMKKRHSTQNFVQHIELISKLRHRHLVSAIGHCFECSLDDSSVSKVFLVFEYVPNGTLRNWISDEHARKSFSWTQRIGAAIGVAKGIQFLHTGIVPGVYSNDLKIEDVLLDQNLVAKISSYHLPLLSNMGKVRRGNSSSGLKNSSNSKSVKQEDKSDIYNFGVILLELILGRQIKTVNDADAFRDLLQASLGGDEEGRRGVVDPAFRKACLDQSLKTMMEICVRCLVKEPADRPSIEDVLWNLQFASQVQDAWRGDSQSSEGSPGSESRGLPFH

SEQ ID NO: 43543 - protein, 149 aa, Glycine max
  Clone ID: 700686636_FLI.pep
ARDMLNHITLQHGHLFKLQRRRRLRRVAIPNSQTLSLLGRDLREAHLQVLLGGGGGYRSNSAAVSNAAATDPFLSSFILNFPACEAEEISKSVVTSADDSSSKNATPVHIWKSSFDPSLSTEEREKRMRQAAGRSGFVQDLFLSTLLGE

SEQ ID NO: 43544 - protein, 388 aa, Glycine max
  Clone ID: 700561429_FLI.pep
NIECFWLHQACEFSTHQVTSLEKLNLSRCHSLESFPEILGKMENIRELQCEYTSIKELPSSIHNLTRLQELQLANCGVVQLPSSIVMMPELTELIGWKWKGWQWLKQEEGEEKFGSSIVSSKVELLWASDCNLYDDFFSIGFTRFAHVKDLNLSKNNFTMLPECIKEFQFLRKLNVNDCKHLQEIRGIPPSLKHFLATNCKSLTSSSTSMFLNQELHETGKTQFYLPGERIPEWFDHQSRGPSISFWFRNKFPGKVLCLVIGPMDDDSGMLISKVIINGNKYFRGSGYFMMGMDHTYLFDLQIMEFEDNLYVPLENEWNHAEVTYEGLEETSTPKECGIHVFKQESSMKDIRFADPYGKRKLGNDRNSLESQNQQLLKKHRFVDMEVS

SEQ ID NO: 43545 - protein, 180 aa, Glycine max
  Clone ID: 700725477_FLI.pep
GTYGYAAPEYVMTGHLTSKSDVYSFGVVLLEMLTGRRSIDKNRPNGEHNLVEWARPVLGDRRMLLRIIDPRLEGHFSVKGSQKAAQLAAQCLNRDPKSRPMMSEVVQALKPLQNLKDMAISSYHFQVARVDRTMSMPKNGMQAQLASLSRKGQPVRILSSPKGPHGSPYHHYIKSPKPNG

SEQ ID NO: 43546 - protein, 167 aa, Glycine max
  Clone ID: 700725871_FLI.pep
PSFTKMNREKLMKMAGSVRTGGKGTVRRKKKAVHKTTTTDDKRLQSTLKRIGVNAIPAIEEVNIFKDDVVIQFLNPKVQASIAANTWVVSGSPQTKKLQDILPSIIHQLGPDNLENLKKLAEQFQKQAPEGATGSTTAQEENDDDDVPELVPGQDFETAAEETKAAS

SEQ ID NO: 43547 - protein, 371 aa, Glycine max
  Clone ID: 700725965_FLI.pep
GKRPFILSRSTFVSSGKYAAHWTGDNAATWNDLAYSIPAILNSGIFGIPMVGADICGFGGNTTEELCRRWIQLGAFYPFARDHSDKNSNRQELYLWDSVADSAKKVLGLRYRLLPYLYTLMYEAHTKGTPIARPLFFSFPEDVTTYEISSQFLLGKGVLVSPVLQSGATSVVAYFPKGSWFDLFNVSNSVNAESGKYVTLDAPSDHINVHVGEGNILALQGEAITTVAARKTAFQLVVVISNSGSSFGQVYLDDGEALDIAGVNDQWTLASFYGALHNNSVLVTSKVTNARFALDQRWIIDNVSFLGIPKNKRFNGMDLAGNELKIVNGMDSMRTAVVKSEFDSSSQFVNVQVSKLSLPIGEEFKLEIEIK

SEQ ID NO: 43548 - protein, 527 aa, Glycine max
  Clone ID: 700726816_FLI.pep
DHPVFLWLDDPNGPMYYKGWYHFFYQYNPNGAVWGDIVWGHAVSRDMIHWLHLPLAMVADQWYDMQGVWTGSATILPNGEIIMLYTGSTNESVQVQNLAYPADPSDPLLVDWIKYPGNPVLVPPPGIGTKDFRDPTTAWLTSEGKWRITIGSKLNKTGIALVYDTEDFKSYELKEGLLRAVDGTGMWECVDFFPVSKKNENGLDTSVNGDEVKHVMKVSLDDDRHDYYAIGTYDEKSVLFTPDDAKNDVGVGLRYDYGIFYASKTFYDQNKERRLLWGWIGESDSEYADVAKGWASVQSIPRTVELDRKTGSNLLQWPVAEVESLRLRSDEFKNLKAKPGSVVSIDIETATQLDIVAEFEIDKETLEKTPESNEEYTCGNSGGSKQRGALGPFGLLVLADEGLFEYTPQYFYVIKGSNGNLKTSFCADQSRSSQANDVRKQIVGSAVPVLKDEKFSLRILVDHSIVESFAQGGRTVVTSRVYPTKAIYGAARLFLFNNATEATVTASLNVWQMNSAFIRPFHPDQKN

SEQ ID NO: 43549 - protein, 530 aa, Glycine max
  Clone ID: 700727034_FLI.pep
SRYLDTELEMDSNGSLRANTWARSSSLTSPASGLSSDPLSFPGFGLQHNQQKWDVPSNSDFGIRAEAPFKEFNQPSQTQSPLPCNSNNEIEIPGQENCHLSESSQTNTLQDWDPSVMLNNLSFLEEKIHQLQDLVHLIARQKGIGQPNELVTQEQQLVTTDLTSIIIQLISTAGSLLPSARHNLVNTSSLVGQIDQLRGTTIPPGTGASNGCIQPQNNGGKILSDQSMQTDLPNSGEMEQKYNMVEHDLKDEEDVEDGENLAPGSYEILQLEKEEILAPHTHFCTICGKGFKRDANLRMHMRGHGDEYKTPAALAKPHKESASPKPIKRYSCPYPGCKRNKDHKKFQPLKTILCVKNHYKRTHCDKSYTCSRCNTKKFSVMADLKTHEKHCGKDKWLCSCGTTFSRKDKLFGHIALFQGHAPAIPLDDTKGAGVAEAPIHDSKENNSKVQSMNFTFGSNPSNANEVPNAMDVKGDSDDPINYFSSLNFEANFGEFNEFTRPLFDDPEGSFSFVMPGSFKSGGESSSDNLL

SEQ ID NO: 43550 - protein, 319 aa, Glycine max
  Clone ID: 700727910_FLI.pep
FGIVFQAKCLETGESVAIKKVLQDRRYKNRELQVMRTVDNSNVVKLKHYFFSTTDKDELYLNLVLEYVPETVYKVSKHYVRMHQHMPIIYVQLYTYQICRALNYLHQVIGVCHRDIKPQNLLVNTQTHQLKICDFGSAKVLVPGEPNISYICSRYYRAPELIFGATEYTTAIDMWSVGCVLAELLLGQPLFPGESGIDQLVEIIKILGTPTREEIRCMNPNYNEFKFPQIKAHPWHKVFHKRMPPEAVDLVSRLLQYSPNLRCTALAACAHPFFDDLRDPNACLPNGRPLPPLFNFTSQELANAPEELRQRLIPEYARS

SEQ ID NO: 43551 - protein, 327 aa, Glycine max
  Clone ID: 700729273_FLI.pep
TLLMREDILSEDVARFYIAESILAIHSIHQHNYVHRDIKPDNLILDKNGHLKLSDFGLCKPLDDKYSSILLENDDLTSQESTSETEGYSVSPWLMPKEQLQQWKRNRRALAYSTVGTLDYMAPEVLLKKGYGIECDWWSLGAIMYEMLIGYPPFCSDDPRMACRKIVNWKTCLKFPDEPKISAEAKDLICRLLCDVDSRLGTRGIEEIKAHPWFKGVQWDMLYESEAAYKPTVTGDLDTQNFEKFPEVDGPPSVTATVGPWRKMLTSKDNNFIGYTFKKSDILKSLESSDADIRVNGSSKTPSLITLLGRIDLQDTIIPESEQKPEA

SEQ ID NO: 43552 - protein, 141 aa, Glycine max
  Clone ID: 700729344_FLI.pep
KVNESKCTHMKCTFGGIWNGGGGDGQKNLFVASFFFDRAAEAGFANPNLPVVKVRPVDFEAAAKQACKTKLEDAKSTYQRVEEGNLPYLCMDLLYQYTLLVVGFGLDPWQQITLVKKVKYHDAFVEAAWPLGSAIEAVSST

SEQ ID NO: 43553 - protein, 670 aa, Glycine max
  Clone ID: 700756809_FLI.pep
CENESHNTLFSLPSLSRICVSFCCSASRSCSTSSFLSWLKGFYSRVSRKKKKKKMTTTMESLIGLVNRIQRACTVLGDYGGADNNTFSSLWEALPSVAVVGGQSSGKSSVLESIVGRDFLPRGSGIVTRRPLVLQLHKLESGSQEYAEFLHLPRRKFTDFALVRQEIQDETDRVTGKTKQISPIPIHLSIYSPNVVNLTLIDLPGLTKVAIEGQPENIVQEIETMVRSYVEKPNCIILAISPANQDIATSDAIKLAKEVDPTGERTFGVLTKLDLMDKGTNALDVLEGRSYRLQHPWVGIVNRSQADINRNVDMIVARRKEREYFATSSDYGHLANKMGSEYLAKLLSQHLESVIRARIPSITSLINKSIEELESEMDHLGRPIALDAGAQLYTILELCRAFERIFKEHLDGGRPGGDRIYNVFDNQLPAALRKLPLDRHLSLQNVRKVVSEADGYQPHLIAPEQGYRRLIEGALGYFRGPAEASVDAVNFVLKELVRKSIAETKELKRFPTFQAELAAAANEALERFREESKKTTVRLVDMESSYLTVDFFRRLPQEVEKSGTPAATNIDRYAEGHFRRIASNVSSYIGLVADTLRNTIPKAVVYCQVRQAKQSLLNHFYTQIGKKEGKQLSQMLDEDPALMERRQQCAKRLELYKAARDEIDSVSWVR

SEQ ID NO: 43554 - protein, 383 aa, Glycine max
  Clone ID: 700851332_FLI.pep
GRRYVDAFGGIATVCCGHCHPDVVEAIVNQTKKLQHSTVLYLNNAIADFAQALTSKLPGNLKVVFFTNSGTEANELAILIARLYTGCHDIISLRNAYHGNAAGTMGATAQSIWKFNVVQSGVHHAVNPDPYRGIFGSDGEKYARDVQDIINFGTSGNVAAFISEAIQGVGGIIELAPGYLPAVYNTIKKTGGLFIADEVQAGFGRTGSHFWGFEAHNVVPDIVTMAKGIGNGIPLGAVVTTPEIAEVLTRRSYFNTFGGNPVCTAAGLAVLKVIEKEQLQQNAFVVGSYLKERLTALKDKYELIGDVRGRGLMLGVELVTDRELKTPAKGETLHVMDQMKELGVLIGKGGYYGNVFRITPPLCFTKEDADFVADAMDLTLSRM

SEQ ID NO: 43555 - protein, 341 aa, Glycine max
  Clone ID: 700854421_FLI.pep
ILLHFLSRNLRLPSTPPSLLLTSLTMMSFAMDSVSVLNPKLSHSHSSLPFSRFPHSLNFHPLLKPRAVNAAVPRNGLAACFLTLHRRKPLTVAFTASHQDSEHREIEVEKERDVHAGSEESQEAWKQVLETFREQAEKFQGVSQEAYEVYSKKAAVILTDATEQLKVLADKTKNELSVAAKEITDEGKEYLSAAADSSPEVKEIVETFTSPPEDIQKLSGVRDFYVGVPYGLMLSLGGFLSFMVTGNTAAIRFGMILGGVLLALSILSLKSYKKGRTSPLALKGQAAIASILFLREISSIGKGSSYFTALISGAVVAFYIYRIVLERNHQKSSNLETEPGN

SEQ ID NO: 43556 - protein, 273 aa, Glycine max
  Clone ID: 700856237_FLI.pep
FTAEMETIGKIKHRNLVPLLGYCKVGEERLLVYEYMKYGSLEDVLHDQKKAGIKLNWAIRRKIAIGAARGLAFLHHNCIPHIIHRDMKSSNVLLDENLEARVSDFGMARLMSAMDTHLSVSTLAGTPGYVPPEYYQSFRCSTKGDVYSYGVVLLELLTGKRPTDSADFGDNNLVGWVKQHAKLKISDIFDPELMKEDPNLEMELLQHLKIAVSCLDDRPWRRPTMIQVMAMFKEIQAGSGIDSQSTIANDEEGFNAVEMVEMSIKEAPELSKH

SEQ ID NO: 43557 - protein, 269 aa, Zea mays
  Clone ID: UC-ZMFLMO17253C04_FLI.pep
VYVRYQIDCGAQVVQLFDSWAGQLSPQDYDTFALPYQQKVVKLVKEIHPDTPLILYISGSAGILERMGKSGVDIVSVDWTVDMADARQRLGKEMKVQGNMDPGVLFGSQDFIKERILDTVRKAGQGGHIFNLGHGVLVGTPEDNVRFFFETAKQVDRKFSQESKHIEYAAVRFKDDYRILCNSKENAKKLLDILSHQLSQYNLSLNESKTSFLNLPDGLYREHNRAYFPHVLRRKKYISFRKFEHTLLIALDIHRKHPGTSIIEKFIAE

SEQ ID NO: 43558 - protein, 290 aa, Zea mays
  Clone ID: 700577217_FLI.pep
KDAKVIHELKDYLKGVNADIHVIPKIESADSIPNLQSIIAASDGAMVARGDLGAELPIEDVPLLQAEIVQTCRNMEKPVIVATNMLESMIDHPTPTRAEVSDIAIAVREGADAIMLSGETAHGKYPLKAVKVMHTVALRTESSIYNPTTSPSVIASAQGLQNEEFSPSQLSKMFGSHATMMANTLRTPIIVFTQTGSMAVLLSHYRPSSTIFAFTNEERVKLRLALYQGVIPIHMEFSDDAEETFSRAISSLLKAQYVKKGDYVTLVQSGVTSIWREESTHNIQVRRAQV

SEQ ID NO: 43559 - protein, 306 aa, Zea mays
  Clone ID: 700577493_FLI.pep
HGTHTPVEIINRFPVGSHVVGAFIMPCGNCFYCVKGQEDLCESFFAYNRAKGTLYDGETRLFLRGNGKPVYMYSMGGLAEYCVVPANALAVLPDSLPYTESAILGCAVFTAYGALRHAAEMRPGDSVAVIGVGGVGSSCLQIAKAFGASQVIAVDVLDEKLQNATTLGATHTVNAAKDDAVERIKEITDGRGVDVAIEALGKALTFSQCAKSVRDGGKAVMIGLAATNVMGEVDITRLVRRQVKIIGSYGARARQDLPQIVKLAESGAFNLQNTISRKCKFEEANGAYEDLNQGKIVGRAVVEIME

SEQ ID NO: 43560 - protein, 195 aa, Zea mays
  Clone ID: 700578571_FLI.pep
DIVMHSATKFIAGHSDLMAGILAVKGESLAKEVGFLQNAEGSGLAPFDCWLCLRGIKTMALRVEKQQANAQKIAEFLASHPRVKQVNYAGLPDHPGRALHYSQAKGAGSVLSFLTGSLALSKHVVETTKYFSVTVSFGSVKSLISLPCFMSHASIPASVREERGLTDDLVRISVGIEDVEDLIADLDRALRTGPV

SEQ ID NO: 43561 - protein, 139 aa, Zea mays
  Clone ID: 700579572_FLI.pep
GKNETMLRVPLATLGLATNSPITISGLYYSTNHNMIKLQRCCKCILHIHTSQCHVIASSHTAADCGNHHPGSSLILGLDRTRHMDHPVGSLDLQLHSHCHRCPVDQLFHPFHLQDKEALALAGDMGHCHSHHPDLHGSD

SEQ ID NO: 43562 - protein, 183 aa, Zea mays
  Clone ID: 700582462_FLI.pep
QQGNCNHTAFTFYRKHGNLNQDLMSHKQAYRFLVDAAKVPGFFSLFCLYSGYTIVSNYPCQVRFAPVSATDPAVRLAAALVSAPVIVVVPEVAVGRFAGLMIATALLGAALRAAGGPALVGVAAAADGPAIVGATAAEGLQLRLRVELQLRLEVVLCLRMQLNLRLHGLLWFSMQLKLGLCLW

SEQ ID NO: 43563 - protein, 115 aa, Zea mays
  Clone ID: 700576383_FLI.pep
ENGTCLCINGLFVIYIFLACEMVYQRKLLFLYRSLFLLYFMSYVLLFPATYSSSGLFLGIMLQIPLIILTSYLKNKFSDTMVGNMIFWFFFCIYGQPMCVLLYYHDVMNRTEKAK

SEQ ID NO: 43564 - protein, 168 aa, Zea mays
  Clone ID: 700574535_FLI.pep
STGLSSGLPAKKASRLDGDVTEVGPGLCREDRDVMRQHHIVHGEELCRHLRLLIKDIQAGSGDPPLLERRDQLRLVDVRAPADVYHDPVLPERRQHVLVHDVARLPGQRARDDEHVRFRREVVDAREVPVGDGFLGLSGAVADDAAEGCQPLRDQRADVAQADDAHAL

SEQ ID NO: 43565 - protein, 479 aa, Glycine max
  Clone ID: 700833775_FLI.pep
LIEFLIPQKPSTMAAETIPYQNGVVASSNDSTATGKKSRENDRRRRRRKQKKNNKASEAPVPNSSEESDDAKENNDSKQLVEQIEIEYVPEKAELVEGMDEEFRKIFEKFTFTDATALEDTDKKDGSEENAATNKKANSDSEEEENDNEQKEKGISNKKKKLQRRMKIAELKQICLRPDVVEVWDATASDPKLLVFLKSYRNTVPVPRHWCQKRKFLQGKRGIEKPPFQLPDFIAATGIEKIRQAYIEKEDSKKLKQKQRERMQPKMGKMDIDYQVLHDAFFKYQTKPKLTSLGDLYHEGKEFEVKLREMKPGMLSHELKEALGMPEGSPPPWLINMQRYGPPPSYPHLKIPGLNAPIPPGASFGYHPGGWGKPPVDEYGRPLYGDVFGVQQQDQPNYEEEPVDKTKHWGDLEEEEEEEEEEEEEEEEEEMEEEELEAGIQSVDSLSSTPTGVETPDVIDLRKQQRKEPERPLYQVLEE

SEQ ID NO: 43566 - protein, 244 aa, Glycine max
  Clone ID: 700834170_FLI.pep
YTLGLGEANIAGKKIFLFDAVCRPREIHSLETTPFDDYVGNHENKTLHATQQIAECWTRSVKKLLERVTESVEKKALEKAASECHAVERIWKLLTEVGDMNLMMDPEDFLRLKKELGMMRTAGETVAFCFRSRELVEVARVCRNLREKVPEILEVEVDPKGGPGMMEAAMKVYSEKEKGKVHVLQGMQGIEVAMKRFFYAYKQVVTVMMGSSEADNGFTKIFLEPTYFPSLDAAKTFLGYYNQN

SEQ ID NO: 43567 - protein, 444 aa, Zea mays
  Clone ID: 700621324_FLI.pep
PPVHRHSSRKRQELKNMANRGLHLALFLVLLGLSSNLAAGQILFQGFNWESWKQNGGWYNFLMGKVDDIAEAGITHVWLPPASHSLAEQGYLPGRLYDLDASKYGNEAQLKSLIEAFHSKGVKVIADIVINHRTAEHQDGRGIYCIFEGGTPDSRLDWGPHMICSDDRAYSDGTGNPDTGADFGGAPDIDHLNPRVQQELTGWLNWLKTDVGFDAWRLDFAKGYSADVAKVYIDGTQPCFAVAEIWTSLAYGGDGKPFYDQNAHRQELVSWLDRVGGKASPATTFDFTTKGILNVAVDGELWRLRGADGKAPGLIGWWPAKAVTFVDNHDTGSTQHMWPFPADKVMQGYAYILTHPGNPSIFYDHFFDWGLKNEIAHLVSIRDRHGIQADSELRIIEADADLYLAEIDGKVIVKIGSRYDCGHLIPEGFQVVAHGDGYAVWEKN

SEQ ID NO: 43568 - protein, 195 aa, Zea mays
  Clone ID: 700622579_FLI.pep
GSLLKPYTQPVVTLWYRAPELLLGAKEYSTAIDMWSLGCIMAELLSKEPLFTGKSEIDQLDKIFRILGTPNEERWHGCSKLPGFKGNFVKRPYNRLRDKFPAVSFTGGLTLSEAGFDLLNRLLAYDPEKRISAADALNHEWFREVPLPKMKEFMPTFPALNEQDRRIKRYMKSPDPLVEQQMKEQGSIGDHGLFD

SEQ ID NO: 43569 - protein, 54 aa, Zea mays
  Clone ID: 700331905_FLI.pep
SLANGRGFLLSGPERQTTMRGGEEHRQQATTSLATQFYRPIFYKLYAKAIEAPS

SEQ ID NO: 43570 - protein, 104 aa, Glycine max
  Clone ID: 700742258_FLI.pep
CPLHSLRDLIELTISIILVFLGFVFWWIVLVNQLWVRTNFLFLFGFYEHGPRHSCLIFVHCCSVKNCLIFSIAQYLHLVANVNNEGIGDILNIVPMAIPTCLKA

SEQ ID NO: 43571 - protein, 66 aa, Glycine max
  Clone ID: 700892521_FLI.pep
IESEFSEVGSLDEAINLVKSCGGIERAQELAKEKADLAIQSLQCLPQSVFRLALEDMVAYNLQRIA

SEQ ID NO: 43572 - protein, 367 aa, Glycine max
  Clone ID: 700906377_FLI.pep
RVSAELFGFLKMSLLSDLINLNLSDITDKVIAEYIWVGGSGMDMRSKARTLSGLVNDPSKLPKWNYDGSSTGQAPGQDSEVILYPQAIFRDPFRRGNNILVMCDAYTPAGEPIPTNKRNKAAKIFSNPDVAAEEPWYGLEQEYTLLQKDVQWPLGWPLGGFPGPQGPYYCGTGANKAFGRDIVDSHYKACIYAGINISGINGEVMPGQWEFQVGPSVGISAADELWVARYILERITEIAGVVLSFDPKPIQGDWNGAGAHTNYSTKLMRNDGGYEIIKKAIAKLEKRHKEHIAAYGEGNERRLTGRHETADMNTFLWGVANRGASIRVGRDTEKAGKGYFEDRRPASNMDPYVVTSMIAETTILWKP

SEQ ID NO: 43573 - protein, 327 aa, Glycine max
  Clone ID: 700831677_FLI.pep
YMGVDDEQEMEEEEEEEREEEKKKHKQAPPSLFPISVRKGFSGERVKRDEWSEGAVSTLLEAYEAKWVLRNRAKLKGHDWEDVARHVSSRANCTKSPKTSTQCKNKVESMKKRYRSESATADHASSSWPLYSRLDLLLRGTGPVFSSPPGPLMVAAPMPPLSPVEPSQPLAPSGPLANAQNSHGSNGVDEKLAKEDGLGTKSSDQVSSKNPLDTDSSTPALYSQKEELRSNKRKKKTIDHNTGRRRKEYVEIAESLRWLAEAMIRSEQARMDTMKEIERMRVEAEAKRGEMDLKRTEIIANTQLEIARIFASVNSKGVDSSLRIGRS

SEQ ID NO: 43574 - protein, 172 aa, Glycine max
  Clone ID: 700854246_FLI.pep
QEIEKVTDFKNHSLPLARIKKIMKADEDVRMISAEAPVIFARACEMFILELTLRSWNHTEENKRRTLQKNDIAAAITRTDIFDFLVDIVPREDLKDEVLASIPRGTMPVAGPADALPYCYMPPQHPSQVGAAGVIMGKPVMDPNMYAQQSHPYMAPQMWPQPPDQRQSSPEH

SEQ ID NO: 43575 - protein, 151 aa, Glycine max
  Clone ID: 700846152_FLI.pep
QAQLSELELQVEKLKVENATLYKQFTDASQHFREADTNNRVLKSDVEALRAKVKLAEDMVTRSSFTTLNYQLLQTQQHQMSTPPQLNTTNLRRMAHVSPTITVHGNDASYNGVTVGEQNSSALGNLDMTFNNINNGVMNNAMSCGTIWPLD

SEQ ID NO: 43576 - protein, 125 aa, Glycine max
  Clone ID: 700846721_FLI.pep
QQTVKEEDDEGPPPGWQPLPAQPPPPPRPSGWAQMVCGSCRRLLSYPRGAKHVKCSCCQTVNIVLEADQVGQVKCGSCAVLLMYPYGASQVRCSSCRFVTEIGAHNKRPPWSVQQRKPSPPKTGC

SEQ ID NO: 43577 - protein, 174 aa, Glycine max
  Clone ID: 700678135_FLI.pep
LKAGVKTGKTSLEQISRVYGNQAVVVSIDPRRVYVKDPNDLQLKTIRVSSPGPNGEEYAWYQCTVNGGREGRPIGAYELAKAVEELGAGEILLNCIDCDGQGKGFDVDLIKLISDAVSIPVIASSGAGAPEHFSEVFYKTNASAALAAGIFHRKEVPIQSVKEHLLKEGIEVRI

SEQ ID NO: 43578 - protein, 143 aa, Zea mays
  Clone ID: 700578555_FLI.pep
ALASDDVLRTLREMQARSAMGGFEFMAPPTSDYYDGVRRRAGDVLTEAQIKECQELGVLVDRDDQGVLLQIFTKPVGDRPTLFLEIIQRIGCMEKDEKGQEYQKGGCGGFGKGNFSQLFKSIEDYEKSLEAKQAAAAAAAQGS

SEQ ID NO: 43579 - protein, 101 aa, Zea mays
  Clone ID: 700582617_FLI.pep
REKTATALPLVVLLFCSSTVRSLVMRLLIPHLLQPSPMALTRPTPAHTHARCRRGRALAPCSIALAASSSAWPPSSPGVAVLTCCSSPCPLGEANIDRCLC

SEQ ID NO: 43580 - protein, 133 aa, Zea mays
  Clone ID: 700583144_FLI.pep
CHRYLKERKQFGAPLAAFQLNQEKLVRMLGNIQAMLLVGWRLCKLYESGKMTPGRSSLGKAWTSKKAREVVSLGRELLGGNGILVDFLVAKAFCDVEPIFSYEGTYDINSLVAGREITGIASFKPAVSAKSRL

SEQ ID NO: 43581 - protein, 120 aa, Zea mays
  Clone ID: 700582420_FLI.pep
HEISQKFLAVISATLPVYSKIPSSCRPAAGILPPPRTPPRKKWYLLLTYNLIFRFYLICRTFSNFSSRAPHCDEFLSGCGVNANGGIKILLRQSSFNSNCNSLNYLRCIITTHVHSYNFV

SEQ ID NO: 43582 - protein, 527 aa, Zea mays
  Clone ID: LIB3069-004-D11_FLI.pep
EGMLAVLEPLHAMLERGDETIKENAFIQAYGHELLEAHECCLKYRATGEDAELTKAWDLYYHVFRRIDKQLPSLTTLDLHSVSPELLKCRKLELAVPGTYAADSPLVTIEYFVPQLIVITSKQRPRKLTIHGSDGNDYAFLLKGHEDLRQDERVMQLFGLVNTLLENSRETSEKDLSIQRYAVIPLSPNSGLIGWVPNCDTLHALIREYRDARKIFLNQEHRLMLAFAPDYDHLPLIAKVEVFQHALQNTEGNDLAKVLWLKSRTSEVWLERRTNYARSLAVMSMVGYLLGLGDRHPSNLMLDRYSGKILHIDFGDCFEASMNREKFPEKVPFRLTRMLVKAMEVSGIEGTFRTTCENVMQVLRTNRDSVMAMMEAFVHDPLINWRLFNFNEVPQVSNYGNVHAHTVVSSEEAVANRELMQPQRGARERELLQAVNQLGDANEVLNERAVAVMARMSDKLTGRDFSSGSALAGAGSSIQHGSEHLASGDARDAQPGLSVKVQVQKLILQATSHENLCQNYVGWCPFW

SEQ ID NO: 43583 - protein, 181 aa, Glycine max
  Clone ID: 700898308_FLI.pep
KPHVNLGQLTYLHSPNHQQQLLVLDRQPELPCNNNSGSHIKKHAMLHNPSKLQNSITSSLQIPNTPLEIQIHNKVPIIRHIRLLLLLLPKSSEPGNAPSLLKKLLQPRRGEPPTELNNLNGHGQPTTPQIVYELGLINDDDELLACAFDHFFSEEGAATALDEVEEGVDLVGAVDGEIDGG

SEQ ID NO: 43584 - protein, 421 aa, Glycine max
  Clone ID: 700788278_FLI.pep
FIMVATAATASFLPVPSPDAGKGKPKGGGGGGVSVNLGGLKEKQGLCGCLQVKANAQAPPKTMEKVENDLPWLPSSSISHAPRTFINQLPDWSMLLAAITTVFLAAEKQWMMLDWKPRRPDMLIDPFGIGKIVQDGLVFRQNFPIRSYEIGADKTASIETLMNHLQETALNHVKTAGLLGDGFGSTPEMCKKNLIWVVTKMQVVVDKYPTWGDVVQVDTWVSASGKNGMRRDWLVRDAKTGEILTRASSVWVMMNKVTRRLSKIPEEVRAEISSYFVDSAPVVPEDNRKLTKLDDSANFIRTGLSPRWHDLDVNQHVNNVKYVGWILESAPQPLLESHELCAMTLEYRRECGRNSVLDSLSDLSGADVGNLADDGFFECKHLLRLDDGAEIVRGRTEWRPKPLNRNFGHVLSQVPVPAEST

SEQ ID NO: 43585 - protein, 188 aa, Zea mays
  Clone ID: LIB3069-050-G12_FLI.pep
QIRQFGSTGALVSGVEAKIVDVETLICLPPNQLGEICVRGPNIMQGYFNNVQATEFTIKQGWLHTGDIGYFDEGGQLFVVDRLKELIKYKGFQIAPAELEGLLLSHPEILDAVVIPFPDAEAGEVPIAYVVRSSESSLTEVDVQKFIEKQVAYYKKLRRVTFVDSVPKSASGKILRRELISKVRSSKL

SEQ ID NO: 43586 - protein, 247 aa, Glycine max
  Clone ID: 700787411_FLI.pep
SPNARMARIASLENMLSISSNSLVAMASQLSEAEERERAFSNRGRWNQLRSMGEAKNLLQYMFNSVADARCQLWEKDMEIREMKDQIKELVGLLRQSEMKRKEVEKELKVREQAVGTTLATPPSGDSPNPSKQYAEDMKGLLSPVSMPVPKQLKYTPGVANGLVRESAAFVDQGRRMVPIGQLSMKKLAIVGQASGKLWRWKRSHHQWLLQFKWKWQKPWRLSEWIRHSDETIMRTKPRSQALSRIR

SEQ ID NO: 43587 - protein, 134 aa, Zea mays
  Clone ID: 700578414_FLI.pep
DPGVLTVLAQDGVGGLQVKHQDEDGKISWVDVKPVPGALVINVGDLLQIMSNDEYTSVEHRVVMNTREEPRVSIGIFFSPGKRGDSVFYGPLPELVSSANPPKYRNFTMSEFYGTFFSRDLASKALLDNFKLSP

SEQ ID NO: 43588 - protein, 185 aa, Glycine max
  Clone ID: 700900377_FLI.pep
AADLKEHVIKPVIPEKYLDEKTIFHLNPSGRFVIGGPHGDAGLTGRKIIIDTYGGWGAHGGGAFSGKDPTKVDRSGAYIVRQAAKSIVASGLARRCIVQVSYAIGVPEPLSVFVDTYGTGKIHDKEILNIVKENFDFRPGMISINLDLKRGGNNRFLKTAAYGHFGREDPDFTWEVVKPLKWEKA

SEQ ID NO: 43589 - protein, 68 aa, Glycine max
  Clone ID: 700901412_FLI.pep
SQRFTTRETAFFLSMLLPRKSQGTTRSSFSLCWGKKTKYFFSEGICDYEFRTPSYTCVCVMVDGVNLC

SEQ ID NO: 43590 - protein, 252 aa, Glycine max
  Clone ID: 700764581_FLI.pep
TVTMAAAFTSTSATLRLSNVGESRGLQLRKCNPNPNKLKVMGGFGGCSGVAVGVRERKGIGRVRVRVRASSSSDEAVSAQSKVTQKVFFDVSIGNPVGKLVGRIVIGLYGDDVPQTAENFRALCTGEKGFGYKGSTFHRVIKDFMIQGGDFDKGNGTGGKSIYGRTFKDENFNLSHTGPGVVSMANAGPNTNGSQFFICTVKTPWLDQRHVVFGQVLEGMDIVRLIESQETDRGDRPTKKVTISDCGELPNA

SEQ ID NO: 43591 - protein, 225 aa, Glycine max
  Clone ID: 700747614_FLI.pep
SVSAITMAPRDKTSAVKPSGNAGVKDLHFRGVRKRPWGRFAAEIRDPAKKTRVWLGTFDTAEEAARAYDAAAREFRGPKAKTNFPLPSENFKNASPSQSSTVESSSRDRDVAADSSPLDLNLAPVAVSSARFPFRNQFPVFPGAVPAANQVMYFDAVLRAGMAGPRGFAFGYNPHPVAASEYHATTSDSDSSSVIDLNHNEGVVKGNGSRMFDLDLNHPPPHEIA

SEQ ID NO: 43592 - protein, 491 aa, Glycine max
  Clone ID: 700752239_FLI.pep
TILFQKHTEKSVEMTTPSLVESLVLQLHEISAVKFGNFKLKSGIFSPIYIDLRLIISYPSLLQQISQTLISSVSSTSFDLVCGVPYTALPIATCVSLAQNIPMVMRRKEIKDYGTAKAIEGDFKPGQSCLIIEDLVTSGTSVLETAAPLRAVGLKISDAVVLIDREQGGRENLEENGIKLHAIIKLTEMVKILGNHGKLDEEMVGVVTKFLEDNRKVAALAKVEKPVTKVKALPFGERAKLSKNPMGKRLFEIMAEKESNLCLAADVGTAAELLEIAEKVGPEICLLKTHVDIFPDFTADFGSKLLSIAEKHNFLIFEDRKFADIGNTVTMQYEGGVFRILDWAHIVNAHIISGPGIVDGLKLKGLPRGRGLLLLAEMSSAGNLAKGDYTTSAVKIAEDHSDFVIGFISVNPASWPGAPINPSFIQATPGVQMVTGGDALGQQYNTPYSVIHDRGSDIIIVGRGIIKAANPAEIAREYRLQGWNAYLAKCN

SEQ ID NO: 43593 - protein, 434 aa, Glycine max
  Clone ID: 700757601_FLI.pep
HFRRAGPRQKVYFKSDEVHACIVTCGGLCPGLNTVIREIVCGLSYMYGVNKVLGIDGGYRGFYSKNTITLTPKVVNDIHKRGGTILGTSRGGHDTGKIVDSIQDRGINQVYIIGGDGTQRGATVIYEEVRRRGLKVAIAGIPKTIDNDIPVIDKSFGFDTAVEEAQRAINAAHVEAESIENGIGVVKLMGRYSGFIAMYATLASRDVDCCLIPESPFYLEGKGGLFEFIQKRLKENGHMVIVIAEGAGQDLLTESMQAMDQKDASGNKLLQDVGLWISHKIKDHFARKDKIPINLKYIDPTYMIRAIQSNASDNVYCTLLAQSAVHGAMAGYTGFTVGLVNGRHTYIPFNRINERQNKVVITDRMWARLLSSTNQPSFLSPKDLEEAKKAEQPPTELLEGNNCNDVGDAGKEEQPPKDEQESGNHADNGIKTEN

SEQ ID NO: 43594 - protein, 199 aa, Glycine max
  Clone ID: 700665233_FLI.pep
MYEMLVGYPPFYSDEPMLTCRKIVNWRSYLKFPEEVKLSAEAKDLISRLLCNVDQRLGTKGADEIKAHPWFKGIEWDKLYQMKAAFIPEVNDELDTQNFEKFEEVDNQTQPSSKSGPWRKMLSSKDVNFVGYTYKNYEIVNDDQLPEIAELKKSTKPKRPSIKTLFYDESATTANQPAQGSFLKLLPTQPEVPEKSESQ

SEQ ID NO: 43595 - protein, 411 aa, Zea mays
  Clone ID: 700332962_FLI.pep
CRQWLRSIKKHAFVASPYPVIITLEDHLPSQLQEKVAKMVVEVFGNILYYPPDDTHELKELPSPEQLKGRVLLSTKPPKEYLETKLSDSTKEGDADLHLGKGTGDDAVWGKEVPDFRTEIQSAEKDDENDDVDDEEEQKLQPHIAPQYKHLITIRAGKPKDSLADALKSDPEKVRRLSLSEQQLAKAAKDHATEIVRFTQRNILRIYPKGTRVTSSNYNPFVGWVHGAQMVAFNMQGYGRALWLMHGFYKANGGCGYVKKPDFLMQTEPQVFDPREPQPVKKTLKVKVYMGDGWRMDFKQTHFDQYSPPDFYTRVGIAGVPADSVMKKTNAIEDNWTPVWEKEFSFPLTVPELALLRVEVHEYDMSEKDDFGGQTVLPVSELRPGIRAVALFDRKGMKYNHVKLLMRFEFA

SEQ ID NO: 43596 - protein, 361 aa, Glycine max
  Clone ID: 700847377_FLI.pep
VVFVPHRYTMPSLSEAYRAHPVHVQHKHPDLNSLQELPESYTWTHHSHDDHTPAASNESVPVIDLNDPNASKLIHHACITWGAYQVVNHAIPMSLLQDIQWVGETLFSLPCHQKQKAARSPDGADGYGLARISSFFPKLMWSEGFTIVGSPLEHFRQLWPQDYHKYCDIVKRYDEAMKKLVGKLMWLMLDSLGITKEDLKWAGSKGQFKKTCAALQLNSYPTCPDPDRAMGLAAHTDSTLLTILYQNNISGLQVHRKGGGWVTVAPVPEGLVINVGDLLHILSNGLYPSVLHRVLVNRIQQRLSVAYLCGPPPNVEICPHAKLVGPNKPPLYKAVTWNEYLGTKAKHFNKALSTVRLCAPS

SEQ ID NO: 43597 - protein, 300 aa, Glycine max
  Clone ID: LIB3027-001-B11_FLI.pep
LITLAIPVNKPGRFESFFLSSTEAQQSYLQGFSRNILEASYDTKFEEINKVLFSREEGQQQGEQRLQESVIVEISKEQIRALSKRAKSSSRKTISSEDKPFNLRSRDPIYSNKLGKFFEITPEKNPQLRDLDIFLSIVDMNEGALLLPHFNSKAIVILVINEGDANIELVGLKEQQQEQQQEEQPLEVRKYRAELSEQDIFVIPAGYPVVVNATSNLNFFAIGINAENNQRNFLAGSQDNVISQIPSQVQELAFPGSAQAVEKLLKNQRESYFVDAQPKKKEEGNKGRKGPLSSILRAFY

SEQ ID NO: 43598 - protein, 131 aa, Glycine max
  Clone ID: 700751866_FLI.pep
AVLKWAIGLSIGMVLSYVSTFSVGAGPITWVYSSEIFPLRLRAQGAAMGVVVNRVTSGVISMTFLSLSNKITIGGAFFLFGGIAMCGWIFFYTMLPETQGKTLEEMEGSFGKFASWSKGKDGDNGDIQLAN

SEQ ID NO: 43599 - protein, 241 aa, Glycine max
  Clone ID: 701139705_FLI.pep
TSSKAMVARGDLGAELPIEEVPLLQEDIIRRCQIMQKPVIVATNMLESMINHPTPTRAEVSDIAIAVRQGADAIMLSGETAHGKFPLKAVKVMHTVALRNESSVQSGVSYPSQLSSHESHMGEMFAFHATTMSNTLNTPIIVFTRTGSMAILLSHYRPYSTIFAFTNEARIKQRLALYHGVMSIYMQFSNDVEETFSRALKLLLSKSHLHEGQHVTLVQSGAQPIWREESTHHIQVRKVHG

SEQ ID NO: 43600 - protein, 201 aa, Glycine max
  Clone ID: LIB3055-001-B7_FLI.pep
KIGVIESLLEKVDILLLGGGMIFTFYKAQGLSVGSSLVEEDKLDLATSLLAKAKEKGVSLLLPSDVVIADKFAPDANSKVVPASAIPDGWMGLDIGPDSVKSFSEALDTTQTIIWNGPMGVFEFDKFAVGTEAIAKKLADLSGKGVTTIIGGGDSVAAVEKVGVASVMSHISTGGGASLELLEGKELPGVLALDEAVPVAV

SEQ ID NO: 43601 - protein, 250 aa, Glycine max
  Clone ID: LIB3053-002-E12_FLI.pep
ASIITSRKSASKSEEDMLQCFIDSKYKDGRSTTEAEVTGLLIAALFAGQHTSSITSTWTGAYLLSNNQYLSAVQEEQKMLIEKHGDRVDHDVLAEMDVLYRCIKEALRLHPPLIMLMRSSHTDFSVTTREGKEYDIPKGHIIATSPAFANRLGHVFKDPDRYDPDRFAVGREEDKVAGAFSYISFGGGRHGCLGEPFAYLQIKAIWTHLLRNFELELVSPFPEIDWNAMVVGVKGKVMVRYKRKELSVNQ

SEQ ID NO: 43602 - protein, 148 aa, Glycine max
  Clone ID: LIB3053-002-D8_FLI.pep
LKHFLPILNPGGSSISLTYIASERIIPGYGGGMSSAKAALESDTRVLAFEAGRKRKIRVNTISAGPLRSRAAKAIGFIDMMIDYSSANAPLQKELSAEEVGNTAAFLASPLASAITGTVLYVDNGLNAMGVGVDSPIFKDLDIPKDQH

SEQ ID NO: 43603 - protein, 290 aa, Glycine max
  Clone ID: LIB3055-001-C10_FLI.pep
AAKVDEYARGMISGSGSSLFEELGLYYIGPVDGHNINDLVAILNEVKSTNTTGPVLIHVITEKGRGYPYAEKAADKYHGVTKFDPPTGKQFKSKATTRSYTTYFAEALIAEAEADKDVVAIHAAMGGGTGMNLFHRRFPTRCFDVGIAEQHAVTFAAGLACEGLKPFCAIYSSFMQRAYDQVVHDVDLQKLPVRFAMDRAGLVGADGPTHCGSFDVTFMACLPNMVVMAPSDEAELFHMVATAAAINDRPSCFRYPRGNGIGVQLPTGNKGTPLEVKSGLYPHTHPRRDY

SEQ ID NO: 43604 - protein, 181 aa, Glycine max
  Clone ID: LIB3050-017-B3_FLI.pep
GIMAHYDEIFRLKANAAKADVFHLLSGMWKTPAERCFLWLGGFRSSELLKLLVNQLEPLTEQQLVGITNLQQSSQQAEDALSQGMEALQQSLSETLSTGSLGSSGSSGNVANYMGQMAMAMGKLGTLEGFIKQADNLRQQTLHQIHRILTTRLSARALLAIHDYFSRLRALSSLWLARPRD

SEQ ID NO: 43605 - protein, 305 aa, Glycine max
  Clone ID: LIB3029-003-G12_FLI.pep
PLLYKNNISRQRPYLAPNMSSLNLGTWPRPTSMLNTPSHLLPPFHTLTLTTTLPKLASGTPKLISSFPLVSAVPTKEHTVTTQEIQLQDTPLNFDFKGYMIAKAHTVNQALDAAIALRDPHKIHQAMRYSLLAGGKRVRPVLCIAACELVGGTEATAIPAACAVEMIHTMSLIHDDLPCMDNDDLRRGKPTNHKVYGEDVAVLAGDALLAFAFEHVAASTEGVSPSRVVRAIGELAKSIGTEGLVAGQVVDIDSEGVANVGLETLEFIHVHKTAALLEAAVVLGAIVGGGSDEEVEKLRKFARCI

SEQ ID NO: 43606 - protein, 199 aa, Glycine max
  Clone ID: LIB3050-017-E9_FLI.pep
VEFVVKNTEAIQAKAGRYKNPEENAFFPENLPPSIVPSYSFKQFLHPGAASININKSIWKMYFQELLPLVATSGDDGNYAQTAANDLSLLQAISRRIHYGKFVAEVKFRDAPQDYEPLIRAKDKEGLMKLLTFTSVEETVRKRVEKKAAVFGQEVSLDNEDDDEENHKFDPSVASSLYKNWVIPFTKEVQVEYLLRRLD

SEQ ID NO: 43607 - protein, 247 aa, Glycine max
  Clone ID: LIB3050-008-H5_FLI.pep
HKSLVDAVKQVDVVISAISGVHIGSHSITLQLKLVEAIKEAGNVKRFLPSEFGPDPARMGHALEPGRVTFEDKMAVRKAIEEANIPFTYISANLFAGYFAGSLSQMGSFVPPRGKVHLFGDGTLKAIFLDEDDVATYTIKAIDDPRTLNKTLYLRPPENIISQAELIGIWEKLIGKELEKTYIPPEGFLTTLKGLDYKLQVGIGHFYHIFYEGCLANFEIGEEGEEASKLYPEVNYTRMDEYLKIYV

SEQ ID NO: 43608 - protein, 83 aa, Glycine max
  Clone ID: LIB3050-007-A6_FLI.pep
GKDATNDFEDIGHSTSAVAMMDEFYVGDIDTSTIPSKVKYTPPKQPHYNQDKMPEFIIRILQFLVPLFILGLAVGIRFYTKST

SEQ ID NO: 43609 - protein, 215 aa, Glycine max
  Clone ID: LIB3028-008-B3_FLI.pep
SFIAAVEKGNMRSMPNRSMPASPYPTPGALLMGDAFNMRHPLTGGGMTVALSDIVLLRNLLRPLHDLHDANALCKYLESFSTLRKPVASTINTLAGALYKVFCASPDPASKEMRQACFDYLSLGGVFSDGPIALLSGLNPRPLSLVLHFFAVAIYGVGRLLIPFPSPKRMWIGARLISGASAIIFPIIKAEGIRQMFFPVIVPAYYRTPPTNLDD

SEQ ID NO: 43610 - protein, 159 aa, Glycine max
  Clone ID: 700978528_FLI.pep
IRLVQQPVYLSGEVVSNHDELMSNFFAQPDALAYGKTAEQLQKENVPPHLVPHKTFSGNRPSLSLLLPSLNAYNIGQLLAIYEHRVAVEGFIWGINSFDQWGVELGKSLASQVRKQLNASRTKGEPVQGFNFSTTAMLTRYLQASADVPADLPTRLPQI

SEQ ID NO: 43611 - protein, 134 aa, Glycine max
  Clone ID: 700984931_FLI.pep
ASFAVCSIQHIQFCLNHFAANVYVGLPSGNDWFEKQTSGTLDISCSSSMDWFFGGLQFQLEHHLFPRLPRCQLRNISPLVSDLCKKHNLPYRSLSFWEANQWTIRTLRTAALQARDLTNPAPKNLLWEAVNTHG

SEQ ID NO: 43612 - protein, 180 aa, Glycine max
  Clone ID: LIB3052-016-E11_FLI.pep
EISFSETIPSSISIFNISSHREASRTKTKNPRQIHSIAMSGVGPLSQDWEPVVLRKKAPTAAAKKDEKAVNAARRSGAEIETLKKYNAGTNKAASSSTSLNTKRLDDDTENLAHEKVPTELKKAIMQARMDKKLTQAQLAQLINEKPQVIQEYESGKAIPNQQIIGKLERALGAKLRGKK

SEQ ID NO: 43613 - protein, 254 aa, Glycine max
  Clone ID: LIB3056-008-B4_FLI.pep
DGIILARGNLGIELPPEKVFLFQKAAIYKCNMVGKPVVVTRVVDSMTDNLRPTRAEATDVANAVLDGSDAILLGAETLRGQYPVETISIVGKICAEAEKVHNQDLYFKKAVKYVGEPMSHLESIASSAVRAAIKVKASVIICFTSSGRAARLIAKYRPTMPVISVVIPQLKTNQLRWTFTGAFEARQSLIVRGLFPMLADPRHPAESRSGTNESILKVALDHGKAFGIIKPHDRVVVCQKVADSSVVKILELED

SEQ ID NO: 43614 - protein, 282 aa, Glycine max
  Clone ID: 700848426_FLI.pep
IVAIKQLDRNGLQGNREFLVEVLMLSLLHHPNLVNLIGYCADGDQRLLVYEFMSLGSLEDHLHDISPGKKELDWNTRMKIAAGAARGLEYLHDKANPPVIYRDLKCSNILLGEGYHPKLSDFGLAKLGPVGENTHVSTRVMGTYGYCAPEYAMTGQLTLKSDVYSFGVVLLEIITGRKAIDNSKAAGEQNLVAWARPLFKDRRKFSQMADPMLQGQYPSRGLYQALAVAAMCVQEQANMRPVIADVVTALSYLALQKYDPNTQTVQSSRLAPGTPPRSKRGY

SEQ ID NO: 43615 - protein, 357 aa, Glycine max
  Clone ID: 700830687_FLI.pep
LVWFFPFIVFLLKVLKLFCYVFARGRERAMALEAVVFPQSQDPFGGSGYGSVNNKDFYNCTLLAATSPNSWGDYEQHININKEEEQGGASISTFQPESNYPYGNWTSSSSSMLPHFNNELQETTTTDPSNTLDSLNTRPKRRRAKSRKNKEEIENQRMTHIAVERNRRKQMNEYLSVLRSLMPDSYIQRGDQASIIGGAINFVKELEQRMHFLGAQKEGEGKSEAGGATNMPFSEFFTFPQYSTSGGGGCSDNSAAVGEDVGEVKCGIADIEVTMVESHANLKIRSKKRPKQLLKLVSGLHTMRLTILHLNVTTTGEVVLYSLSVKVEDDCKLGSVDDIAAAVYQMLDKIQQEAMLN

SEQ ID NO: 43616 - protein, 400 aa, Glycine max
  Clone ID: 700837723_FLI.pep
ICLSFRKILFLGKFLRRFLALTIYQICCFRITCSLGRFLRKLGCWIILWSLLLVIIISRVWIPESVMKLSQLVNVDLSYNQLSGELNLGGIGELSKVTDLNLSHNRFDGSVPSELGKFPVLNNLDLSWNKFSGEIPMMLQNLKLTGLNLSYNQLSGDIPPFFANDKYKTSFIGNPGLCGHQLGLCDCHCHGKSKNRRYVWILWSIFALAGVVFIIGVAWFYFRYRKAKKLKVLSVSRWKSFHKLGFSKFEVSKLLSEDNVIGSGASGKVYKVVLSNGEVVAVKRLCGAPMNVDGNVGARKDEFDAEVETQGRIRHKNIMRWLWCCCNSEDQRLLVYEYMPNGSLADLLKGNNKSLLDLPTRYKIAVDAAEGLSYLHHDCVPPIVQDVKSNNILVDAEFVA

SEQ ID NO: 43617 - protein, 374 aa, Glycine max
  Clone ID: LIB3028-054-G5_FLI.pep
SKGCFQVNSMALPSGLVSMLIVLFGMVLVVGVEAKARAFFVFGDSLVDSGNNNYLATTARADSPPYGIDYPTRRPTGRFSNGLNIPDLISERIGGESVLPYLSPQLKGENLLNGANFASAGIGILNDTGSQFLNIIRMYRQLDYFEEYQQRVSILIGVARAKKLVNQALVLITVGGNDFVNNYYLVPYSARSRQYSLQDYVKFLIVEYRKLLMRLYDLGARRVIVTGTGPMGCVPAELAMRGTNGGCSAELQRAASLYNPQLTHMIQGLNKKIGKDVFIAANTALMHNDFVSNPAAYGFTTSQIACCGQGPYNGIGLCTPLSDLCPNRNLHAFWDPFHPSEKSNRLIVEQIMSGSKRYMKPMNLSTVISLDARK

SEQ ID NO: 43618 - protein, 326 aa, Glycine max
  Clone ID: LIB3028-019-G10_FLI.pep
TSIKELEAMGKSKVLVVGGTGYVGRRIVKASLEQGHETYVLQRPEIGLDIEKVQMLLSFKKQGAHLVEASVSDHQSLVEAVKLVDVVICTMSGVHFRSHNLLVQLKLVEAIKAAGNVKRFLPSEFGMDPALMGHALEPGRVTFDEKMTVRKAIEDANIPFTYISANCFAGYFAGNLSQMGTLLPPRDKVLLYGDGNVKVVYMNEDDVAAYTIKTIDDPRTLNKTVYLRPPENILTQRQLIEKWEKLIGKQLEKSSINEQDFLASIKGLDYAAQVGVGHFYHIFYEGCLTNFEIGEGGEEASELYPEVKYTRMDEYLKVYKHEKLCI

SEQ ID NO: 43619 - protein, 531 aa, Glycine max
  Clone ID: LIB3053-001-F1_FLI.pep
YLKDIGVKKGDAVIIYLPMLMELPIAMLACARIGAVHSVVFAGFSAEALSQRIIDCKPKVVITCNAVKRGPKPIYLKDIVDAAINDSAQNGVSIDKCLVYENPLAMKRVDTKWKEGRDIWWQDVIPQYPTTCPLEWVDAEDPLFLLYTSGSTGKPKGVLHTTGGYMVYTATTFKYAFDYKPSDIYWCTADCGWITGHSYVTYGPMLNGASVIVYEGAPNYPDAGRCWDIVDKYKVTIFYTAPTLVRSLMRDGDAFVTRYSRKSLRVLGSVGEPINPSAWRWFYNVVGDSRCPISDTWWQTETGGFMITPLPGAWPQKPGSATFPFFGVQPVILDEKGVEIEGECNGYLCVKKSWPGAFRTLYGDHERYETTYFKPFAGYYFSGDGCSRDKDGYHWLIGRVDDVINVSGHRIGTAEVESALVSHPQCAEAAVVGVEHEVKGQGIYAFVTVVDGVPYSEELRKDLVLIVRKQIGAFAAPDKIHWAPGLPKTRSGKIMRRILRKIASRQLDELGDTSTLADPNVVNQLIELADS

SEQ ID NO: 43620 - protein, 209 aa, Glycine max
  Clone ID: 700798021_FLI.pep
DELFGLQAMLFGGTDSSTGTLEWALSNLVNDPEVLQKARDELDAQVGPDRLLNESDLPKLPYLRKIVLETLRLYPPAPILIPHVASEDINIEGFNVPRDTIVIINGWAMQRDPKIWKDATSFKPERFDEEGEEKKLVAFGMGRRACPGEPMAMQSVSYTLGLMIQCFDWKRVSEKKLDMTENNWITLSRLIPLEAMCKARPLASKVGSY

SEQ ID NO: 43621 - protein, 392 aa, Glycine max
  Clone ID: 700808306_FLI.pep
LRALHKAIKQSEPALVATDPKVQSLGYNLEAHVFSAPGACAAFIANYDTKSYAKAKFGNGQYDLPPWSISILPDCKTVVYNTAKVGYGWLKKMTPVNSAFAWQSYNEEPASSSQADSIAAYALWEQVNVTRDSSDYLWYMTDVNVNANEGFLKNGQSPLLTVMSAGHVLHVFINGQLAGTVWGGLGNPKLTFSDNVKLRAGNNKLSLLSVAVGLPNVGVHFETWNAGVLGPVTLKGLNEGTRDLSRQKWSYKVGLKGESLSLHTESGSSSVEWIQGSLVAKKQPLTWYKTTFSAPAGNDPLALDLGSMGKGEVWVNGRSIGRHWPGYIAHGSCNACNYAGYYTDTKCRTNCGQPSQRWYHVPRSWLSSGGNSLVVFEEWGGDPNGIALVKRT

SEQ ID NO: 43622 - protein, 55 aa, Glycine max
  Clone ID: 700870518_FLI.pep
KQYTNFSLRLSILKDCTVTWISKLIISFLSQVLRAINFLVCDHSSVRYFQLHTRF

SEQ ID NO: 43623 - protein, 205 aa, Zea mays
  Clone ID: 700332560_FLI.pep
GRAPLNWETRVKISLDVAHGIAHLHAEGGGKFIHGNIKASNVLLSQNLDGCVSEFGLAQIMTTPQTPPRPVGYRAPEVLENKKSTQQSDVYSFGVLLLEMLTGKAPLRSPGREDPSVEHLPRWVQSVVREEWTAEVFDVDLLRHPNVEDEMVQMLQVAMACVAAHPEERPKMEEVIRRVTEVRNSYSSGTRTPLEDKPSETARAP

SEQ ID NO: 43624 - protein, 239 aa, Zea mays
  Clone ID: 700331949_FLI.pep
IISKSLFFVGEVGGNDYNHLIVRDKSVDELHEVVPNVVGAISSAITDLINLGAKKLVVPGNFPIGCVPLYLAIFQSQKEDYYEEQTGCIKWLNDFAEYHNKMLQEELEKLRNLHPDVTIIYADYYGAALNIFRAPLQFGFTVPLNACCGSDAPYNCSPSILCGRPGSTVCPDPSKYISWDGLHFTEASYKVVIQGVLGGYAKPPLSETCKGAEFKVSQLHQCTDNPTNTVSYDALSSFI

SEQ ID NO: 43625 - protein, 126 aa, Glycine max
  Clone ID: 700874924_FLI.pep
LDLRQTDVAKRERGKHFEKHRSSFVVCENNARLERTVRARDDRLSREHHKPRDVARIVLDSVRHHVQAVELRRACARDGGGVAEIVAGDELGSAGGVVHGLARHVQAEFGESVLALRECLRMRNHA

SEQ ID NO: 43626 - protein, 135 aa, Glycine max
  Clone ID: 700793295_FLI.pep
SLLGADKFVVSSNQEEMTALAKSLDFIIDTASGDHPFDPYMSLLKTYGVFVLVGFPSQVKFSPASLNIGSKTVAGSVTGGTKDIQEMIDFCAANEIHPNIEVIPIEYANEALERLINRDVKYRFVIDIENSLKEK

SEQ ID NO: 43627 - protein, 281 aa, Zea mays
  Clone ID: 700439722_FLI.pep
RTTRDASRGESRRSGKHHPAEMTVLLSPSSSLFLAKPSAVAKGRAAAAAVTCFSGPSLSVGREEEGVAVVVGRRALASAAAVASVLGFAGRGLAANQGLLAGRVPGLSEPDENGWRTYRRPDDKSGGHGVGWSPIIPYSFKVPDGWDEVPVSIADLGGTEIDLRFANPKEGRLFVIVAPVRRFADDLDDATIEKIGSPEKVITAFGPEVIGENVEGKVLSSATAAHSGRTYYQFELEPPHVFITATAAGNRLYLFSVTANGLQWKRHYKDLKQIAQSFRVV

SEQ ID NO: 43628 - protein, 264 aa, Zea mays
  Clone ID: 700442111_FLI.pep
NFLYRKHGILADAGEAEATSSPVGAAAQALANAMGSADLVLKMACEGCGNTSDLYGTGCKHTTLCSDCGKSMARSRARCLVCSAPITRLIREYNVRANSVMDKTYSIGRFVTGLPPFSKKKNAENKWSLHKEGLQGRQIAENMREKYNKKPWILEDETGQYQYQGQMEGSQSATATYYLLMRHGKEFNAYPAGSWFNFSKIAQYKQLTLEEAEEKMNKRKTSATGYERWMMKAAANGPAAFGSDMKKLEATNGGEKESARPKKG

SEQ ID NO: 43629 - protein, 136 aa, Zea mays
  Clone ID: 700442156_FLI.pep
RSDPSSAELPSAVRSLLPRENGNSVGSSRSAATTTTEEDGCGVPTSSDVNSLRSTRLANNSGGSERSSGSSDINRSAAGRGARGILMPKKMLSKLWSGKTNAGENSSSDTSQSPGSVNNPEEVKSTQSRITRRSVS

SEQ ID NO: 43630 - protein, 497 aa, Zea mays
  Clone ID: 700442545_FLI.pep
SLPYTLSGGETYDDVASEFANLTTASWLGVTNADPAGKLPAAGKINVTVNCSCGDKRVSPRYGLFLTYPLWEGETLSSVAEQYGFSSPAQLELLRRYNPGIGMDRASGKGIVFVPVKDADGSYRPLESDAGNILSGGAVAGIVIACIIILIAGIWLFAMYYRKQKMRKAIPLTCLEDSVQLSKVSQDEGIKVDRSIEFSYEELSDATNNFSMDHKIGQGGFGSVYYAELRGEKAAIKKMDTKASQEFLNELKILTRVHHTNLVRLIGYCVESCLFLVYEFIENGNLSQHLHGTGYEPLSWTSRVQIALDSARGLEYIHEHTVPVYVHRDIKSANILIDRDLRAKVADFGLTKLSEIGTTSQSLPSLRVVGTFGYMPPEYARYGEVSPKVDVYAFGIVLYELLSAKEAIVRSTEFTDAQGLVYLFEETLSMPNPMEALQEMIDPRLGGDYPIDSAVKIAYLAKSCTHEEPRMRPTMRSVVVALMALSSKDHELTRGHD

SEQ ID NO: 43631 - protein, 158 aa, Zea mays
  Clone ID: 700445047_FLI.pep
VVLEDGISLTEVGGLLQEWDGREEPAGQHALEDSLASEDLGSMLESIKVERAKYSLMCFQFPVGRIHRQLKQRTQANGRVGATAAVYSAAILEYLTTEVLELAGNASKDLKVKRITPRHLQLAIHGDEELDTLTKGTIAGGGVIPHIHKSLINKSSKE

SEQ ID NO: 43632 - protein, 400 aa, Zea mays
  Clone ID: 700455269_FLI.pep
ALPRFPFSARHLLLSAWLVNHLLRSTRRRRLQLLLPWLQRRRVWGEDNLNQLDLGVSDLKSQVFIKVEKETFLYGMAFPTAAAVLLNENMQIHKGNRVDAPSAKPLKSSAKPERKALQDVSNIPKGTALKNRSTVKEGSALKERPALHNVSNTRNERSILKEKSALCSHEAIKNPVNIFADDEETKGCHEWAKDGMEGTHFTGNDSQKLDKDVQHKRIKKKVAKVTSALYGWSHEVYGHVMFMAMVPKFSEESKELELEPEILPDITRCMSTSGKRDDAPSAKRLKPKLQEPKALQVQDLSNTVKGSPSLCSHEAVKNPVKIFTVEETKKCHESANDVSEGTHFTGNDRQKLDKDVQGDKTQLVEDSPTDDELDDYPFLDNSPVKFELKDESVIPDIGAI

SEQ ID NO: 43633 - protein, 434 aa, Zea mays
  Clone ID: 700455835_FLI.pep
FVANDPTTKGGTYYPLTVKKHLRAQEIASECKLPCIYLVDSGGANLPRQADVFPDRDNFGRIFYNQAKMSSDGIPQIAVVLGSCTAGGAYIPAMADESVIVKGNGTIFLAGPPLVKAATGEEISAEDLGGASVHCKVSGVSDHFAQDEIHGLELGRNIVKNLHLAAKGTNIQSSACGYQEPLYDVEELRSIAPADVKQSFDIRSIIARIVDGSEFDEFKKLYGTTLVTGFARICGQPVGIIGNNGILFTESALKGSHFIELCAQRHIPLIFLQNITGFMVGSKSEASGIAKAGAKMVMAVSCAKVPKITIIVGGSFGAGNYGMCGRAYSPNFLFLWPTARISVMGGIQAAGVLAQIEKNNKRRQGVEWSKDEEEAFKAKVVEAYDREGSPYYSTARLWDDGVIDPADTRRVLSLCLSASAKPVPEDTRYGVFRM

SEQ ID NO: 43634 - protein, 243 aa, Zea mays
  Clone ID: 700428531_FLI.pep
QVLPRRALPGAGLLLPPPHHRRMRARRRHRAQLQHGWIHGGNDLQPGIRRPDHLLQEGDEGQVRERDELLRLPLHHVAGDPPALRRRHGGAQGVGSGLADSSRRDRSQLRLVGGGAERVLPPVQPGVLHVPGRDLAPHLLHRQHHEAHLRHRRVHHHLPDARPAHQRARGRHRHPRNLHLLPGQAVAALGARVWLSGLSSVHRRISSALEDITDYITFEDIYLACIIVLLLDPLFFFSYFLFS

SEQ ID NO: 43635 - protein, 277 aa, Zea mays
  Clone ID: 700467318_FLI.pep
YHLFVEDPVERPDNAARAVSMKGLDLIAIAFNDACHKFKSLEHIDRNELLALLCTPVVRLKLGVRVRENSYPKSPRNNVHSRIRGQMWRDRGQAPSARGFTGTRSVHENPLANTTAHETAVQYHNHVQPTTVRQTAIRNQVTNTAVHQTAPYQNHTARQVYPTWSQTAEPYQNHNQQVYATGFQTGPYQSHNQVHAYRAGLPPGGIYEIHNQQVYNAGFQTDGPHQNQQRRKGYTSNHQTNRLSATAARYEPVRGQFNNGSTWDSRSQAPGSAALRR

SEQ ID NO: 43636 - protein, 217 aa, Zea mays
  Clone ID: 700467376_FLI.pep
SIHLKGMSEINDRVKELRSKGCGADSVRAKRKSTANTGNGVVLINEEAAALLQDVIRKYLVPAECLPFHEIVCFKNVDILRSALIGNPRRMIQLDLLRSQSHLKCSCCSRSGAAVSGSLHDTSILCSLAQEYGDMINLHDWYTAFEGIIKSTNSKAKGKSCSSPSKKKKKSNPTPLEGDGMIQARFCSAVTEMQVTGLVRMPSKRRPDLVQRIAFGP

SEQ ID NO: 43637 - protein, 774 aa, Zea mays
  Clone ID: 700467980_FLI.pep
PRSKTREIRLPSSPARARSGYVSMAAGEEQEEFFDSREVLSPASVSSSPSSSGRHDDGGWLFAQQLLEVWVRDPGSVHERRQRFVKSLGLMDPSPHGARPGEETCSRPEAREEILPASPSTELFSAVPTFASMGGEPTASGGDGAGTEEEPECVFKNLDDGTVFVVDEMGKDGSFRSLRERLSNRTVTAAEFEQAFGSSPFIRELMRRVDDSDEPSTPEKTVLRRRRRRRIGWLRRLGIGVCVVDADAEEEDDEVNSTSSTSSRGCSRKVDWVKVRPYKKRSKELSAVYKGQVIKAHEGAIVTMKFSSDGQLLATGGEDGVVRVWRVVEGKRPDDRHFVDDDPSCVFFTVNENSELAPINSCEGGKGKHNNSSKVATDPACVVIPHQTFALSEDPVHEFRGHHDAILDLSWSKNRELLSASKDKTVRLWKVGCDSCLKVFSHNNYVTCVQFKPTNDNYFISGCIDGMVRIWDVPRCLVVDWADSKEIITAVCYRPDGKGAVVGTITGNCHCYEASENHLALESQVPLYGRKKSPLKRIVGFQYCPSDPKKLMVTSGDSQVRILDGAHVVSSYKGLRSPSQVPAAFTPDGDHIIAASDDSSIYMWNYANQLAPVTSRVKTVWSYEHFFCNDVSVAIPWNALPARSSISLACNIPLSRQEVSEELHNSQESVSCCSAEGSPKADSSCRLPSGNFTLSNAFSAELAPRGKATWPEEQLPSSDSVTPSSSSALRKSQYKFLKTSCQSAATHAWGQVIVTAGWDGNIRSFQNYGLPMQV

SEQ ID NO: 43638 - protein, 605 aa, Zea mays
  Clone ID: 700470515_FLI.pep
GLSCYSHLLPRLLSFYSHHPSLLPAASSLAAGSTCPEPYNVLISNCLNHGLPHHALAAYHEMIDKDAVPPDAFTYPKVLRACAETGNLALGRAVHVRAVDAGMDGHLFFQNALVSMYAKCWDLAAARTVFDGMEHRDVVSWNSMISGYAASGQWRKAVELFLRMQAEGAEMNSVTWNTIAGGYIQMHDYRAAVGLIRDMVRGGASIDFVTLVIGSNACSRAGWLRLGKEIHGLAVRMQCHEIDSVINAVITMYARCNDMERALMLFKMIRCPGLVAWNTTIAGFALLDDAEAASRLFREMVVCGDVQPNYVTVVTYLALYARVANLQHGRELHTHIVKQGFKGYRLLWNSLIDMYSKSGRLSVAQNVFDTMDDPDMISFTSMIAGYGMQGKGIISLRFFKQMIDSGIMPDAIIMVTVLSACSHSGLVGEGEELFDKMVKSYGIKPQMEHYSCMVDLYARAGLLEKAEELLNQTPFPPTSTMVAALVGACHEQGNIIIGERSARRLLEMKTENAGHFVLIANMYAAAGCWNELATVRKLMRDLGVMKAPGLAWADLGNGFTPFLVGDRSNPLAPEIYEVLDELTEQMSNMNNCSDPDILSMEEHME

SEQ ID NO: 43639 - protein, 278 aa, Zea mays
  Clone ID: 700472530_FLI.pep
ILSAAHHPRQVQSSPSPQPSAATRAHHAVAPPPPLVNGSVHPVHLPWPPPPSPQPSSTTRAHLRPPVAQGRSRPSSGWRWAPASCASRGRWALASFRTRRQLTDRAVLVEQSWWKLLDCAVLEFGRLSLSLMLPCWTQEPSSGQMKEQFVVEMLARPSSAAGSGPGRSQQRQEDASSAQGSRPQSSAASDTPVAQQPDANSVRAKLELAKNTKLEAAKRKLQEGYQEFDNAKKQRSIQMVHPQNLPKQANNTQNFQPSGPAASQGMAATGIGSSSNSF

SEQ ID NO: 43640 - protein, 296 aa, Zea mays
  Clone ID: 700472796_FLI.pep
DTSPIATVPSTNPSPAIITVPSTNPTITIPSLNPLPTPITAPSTNIPSPSTMLPPVPVIYPLPTPSTSSPPAVPVTNPAVTTPSTSPPSTPTPFNNPPLLNPTPTPAPTVTAPAASGREVWCVAKAAGSSEAALQNALDYACGIGGVDCSAIQPSGSCYYPNTIQAHASYAFNTYYQRNPVSSSCDFGGTAMLVTANPSSGSCVFASSLPSSSSSTVGYDPASTATPSSPSSGSDSGAPVLNASGAGSSESSDFGFDIPGAVNLGSGWRSVSPPNWPWAALVWILVALCVHKEGMV

SEQ ID NO: 43641 - protein, 453 aa, Zea mays
  Clone ID: 700442687_FLI.pep
EKPRLQYRRCYPPESFAVSNGRVGGTPNKNTGPKQVWEPMDARKKIGNGRGSEITPETTGAADGSDQVECSKDISECEKLEVVCETLAETCCEISAEACKSDQPCRQGEKNQSACSDGSKCVDKPNCCLTKDTVRTTNLTSSDSFSCLSEGDRDSSMSSMTSLSAQNVESSSTSDSDEYSDRNDSSPGDPPVKNVSRSLLEMCAGNGFREYQPKGLNPPNGNQFGFMVAPLQDQMLHQQKIHAPPYSSPFVGFHNHPLAVPTNGYLPYPQPGHFYPGLMTPVGCGVAGSQCVDFPMQYSNNIHPYSGPEFGFLPAKPVHKTPVSFHAVPVPPLAPLCRSEVPVVINQERQQGSAPPKFKQAVLVPENGCSAEDNTFKQKGDDTDSTPFSLFQFNLPIAPPTLATSKEEQSGAMPSMALPPAQITRAQLCSREETNVKEYNLFSGCNGVMFQLN

SEQ ID NO: 43642 - protein, 648 aa, Zea mays
  Clone ID: 700446984_FLI.pep
DVSLMPDVSVELVSNMMEEGKKPSVAAIQGLALGGGLELTMGCHARISTPEAQLGLPELTLGIIPGFGGTQRLPRLVGLPKAIEMMLQSKFITAKEGNERGLIDALCSPDELIKTSRLWALEIANCRKPWMRSLGRTDRLGPLSEARAVLNAARQQAMKIAPNMPQNQACLDVMEEGILCGGQAGVLKEAVVFKELVIAPTSKALVHVFFAQRSTTKVPGVTDVQLKPRPIRKVAVIGGGLMGSGIATSLLVSNISVVLKEVNPQFLQRGEKTIAGNLEGLVKRGSLTKDRMHKAMALLKGALDYSDFKDVDMVIEAVIEKIPLKQSIFADIEKICPKHCILATNTSTIDLNVVGKKTNSQDRIIGAHFFSPAHIMPLLEIVRTEKTSPQAILDLITIGKIIKKVPIVVGNCTGFAVNRTFFPYTQGSHLLVSLGIDVFRIDRVISTFGMPMGPFQLQDVAGYGVALAVKDIYADAFGERNLDSDLVDLMVKDGRQGKVNGKGYYIYEKGGKPKPDPSVKHVIEEYRKHANTMPGGKPVTLTDQDILEMIFFPVVNEACRVMDENVVIRASDLDIASVLGMGFPKYRGGLVFWADTVGAPYIHSKLSKWAEIYGPFFKPSSYLEQRAKSGVPLSAPGASQQGSARSRM

SEQ ID NO: 43643 - protein, 643 aa, Zea mays
  Clone ID: 700455980_FLI.pep
SLSAGGCSKVAECRTSKHGVVGKFVEFYGEGMGKLSLADRATIANMSPEYGATMGFFPVDHVTLDYLKLTGRSDETVSMIEAYLRANKMFVDYNEPPTERIYSSYLELNLDEVEPSMSGPKRPHDRVPLKEMKSDWHACLDNKVGFKGFAVPKEQQDKVVKFDFHGQPAEIKHGSVVIAAITSCTNTSNPSVMLGAGLVAKKACELGLEVKPWVKTSLAPGSGVVTKYLLQSGLQEYLNQQGFHIVGYGCTTCIGNSGDLDESVSTAITENDVVAAAVLSGNRNFEGRVHPLTRANYLASPPLVVAYALAGTVDIDFEKEPIGFGKDGKEVYFRDIWPSTEEIAQVVQSSVLPDMFKGTYEAITKGNPMWNQLTVPEASLYSWDSKSTYIHEPPYFKDMTMSPPGPSTVKDAYCLLNFGDSITTDHISPAGSIHKDSPAAKYLMERGVDRKDFNSYGSRRGNDEVMARGTFANIRIVNKFLNGEVGPKTIHVPTGEKLSVFDAAMRYKSEGHATIILAGAEYGSGSSRDWAAKGPMLLGVKAVIAKSFERIHRSNLVGMGIIPLCFKAGEDADSLGLTGHERYSIDLPTNLSEIRPGQDVTVTTDNGKSFTCIVRFDTEVELAYFNHGGILPYVIRNLAAAHN

SEQ ID NO: 43644 - protein, 578 aa, Zea mays
  Clone ID: 700465270_FLI.pep
REPHFSTRKRSGKKSEMAASGLGLSTSFLPGHDTLLRRRRRRPAGHAAASFRPVTAELGGVATELGRQLVEAVGVGLPCTVMQCGDVIYRSTLPRNDGLTITAPGLTLALATVSYLWSTPGVAPGFFDMFVLAFAERLFRPTFRKDDLVFGKKLGEGAFGVVCKASLANPEAAKKQGDLVVKKATEYGAVEIWMNERVRRACASSCADFIYGFCETKAKGKGAEEYWLIWRFEGEDTLYDLMQSKEFPYNVETKILGGIQDLPKGIARENKIIQTVMRQLLFALDGLHSTGIVHRDIKPQNVIFSEGSRTFKIIDLGAAADLRVGINYIPKEFLLDPRYAAPEQYIMSTQTPSAPSVPVATTLSPVLWQLNLPDRFDIYSLGLIFLQMAFPSLRTDSNLIQFNRQLKRCDYDLQAWRNLVEPRASAELRRGFDIMDLDGGIGWELLTSMVRYKARQRTSAKAALAHPYFNREGLLGLSVMQNVRLQLFRATQKDYSEAARWVIGLMARSGTEDVGGFTEAQLQELREIKPKKSSTQRNALASVLRLQRKIMRTIKESMDELNSQRKSIWWSRWIPREE

SEQ ID NO: 43645 - protein, 265 aa, Zea mays
  Clone ID: 700466207_FLI.pep
VLGQLAFVFFGGCPRTWTGFSSAAFADLAAIVRLSLSSGVMLCLELWYNTILVLLTGYMKNAEVALDALSICLNINGWEMMISIGFLAATGVRVANELGAGSARRAKFAIYNVVATSSIIGSVLFVLFLLFRGGLAYIFTDSQAVADAVAGLSPLLAFSILLNSVQPVLSGVAVGAGWQSVVAYVNITSYYLIGIPLGAVLGYALGLHVKGIWIGMLLGTLVQTVVLLFITLKTDWEKQVEVAQERLKRWYMEENRRLQGSRRNP

SEQ ID NO: 43646 - protein, 750 aa, Zea mays
  Clone ID: 700466512_FLI.pep
ISQSGKQRHHVPYRDSKLTFLLQESLGGNAKLAMICAVSPSQSCKSETLSTLRFAQRAKAIKNNAVVNEEKIEDVNALREQIRQLKDELHRMKSNGGIEGNSGSFATGWNPRRSLHLLKMSLGHPTTFQCIKEDSDEEMEIDENDVEKPYNHENMAMSSINVKESKRFQASMNVSAGTSQVEDLDRDKILISIKRSCCSANKFNTGTDVGDGKCKLNIAASIQRGLQVIESHQNNSAWKRASVGLNARIMDIQPCKVDVAIQTDPEEYETRDNPLALVPSCLLEASANESRDPSTCRDLQLVPVDVTVPSDDQKQRHFLKAVEKVLAGAIRREMARDEQCAKQAAEIQQLNRLVQQYKHERECNAVIAQTLEGKIARLESLMDGTLPAEEFMNEEFLSLMNEHKILQKKYENHPDVLHAEIEVKRLQEELDMFRNSVDEKEVLQEEIQDLKNQLHYMLSSSSSIRRLWPPVPLSQGSNSERGTKDIDGDTNFVDTPNWTEAESKWITLTEELRVELEATKSLVGKLQSELDSEKKCSEELKEALQTAIQGAARHLEQYADLQENHFRLLALHRRMREGVEDVKMRAEKAGIKGAELRLINSLAAEISVIKAQNEGLQGQLRDTAEAVQAAGELLNRLKDAEEAETLAKKQALVAEQETEKAYQEIDNLKKNYDQEILALKQRLAEPSPCKDDMVQPQEPNNLEPPMYDTAGSHSRQNWKEFNTLQQGGSFEVSKSTDLNSWFYGYDKCNI

SEQ ID NO: 43647 - protein, 133 aa, Zea mays
  Clone ID: 700468728_FLI.pep
TARSWTAATSPSTRPSPAAAVEAAAVGTVVAVEAAATAVAGAVMAVAATAVAAATVAAAATVVVAAATAVATVAAATATPTGTGGTERWGPRGQVILFATVMFTLVQRVYLRSCRVCCCPSVFLIARSLCVSC

SEQ ID NO: 43648 - protein, 653 aa, Zea mays
  Clone ID: 700471422_FLI.pep
SRHRRRDSAVYPSSDTGAAASCRLLLVCCKMSTEATLNNSGGSESALLLLEQLAEVFGKLKTHTETFLHLQNGIKWEDIEGHFLSLDESYRSKFDELVEKEKALEEKKAEACRLIAEKEAKVSTKEHASLNQLQELRDAAVSSLAEVRQKYKVELAEILEASGSKDKKVSTSINDNNASRASEENTPASGSGEASEALPVETKPRPVLKQLCEQMDTKGLLKFLSENCRKLASFRDELSVALKCATDPARFVLNSLEGFFPPDQTNSPGSKHNALEVQRKSCILLMEAIAPALGMKEPGGDDPWSSEIKEQAKEIAEEWKSKLAEIDLDASNGYSLEAQAFLQLLTTFNVDSVLDEDELCKIVVAVSRRKQTAVSCRSLGLNEKVPGIIEELVKRHRQIDAVHFIQAFGLSETFPPAPLLKTYVEEQKDTIENNGDATAISLTDDPKSRELIALRAVIKCIEEHKLQKECSLGPLQKRVSELKPKGEKRPSSDAGRTYAKKPRGPGISFPRRPAGSVGSAARRPPFPGYTWQRAPAPMPSRGPAPVPSRAPLPAPLPDRYGAADRYHYTPPAPAYDSGAFSSYSEPFSAPKPFQYTPGSVAASYNSSPYKVAYGGPGAPVRSTYPGYASASGPAASSSYANYMGSVYRPPQQP

SEQ ID NO: 43649 - protein, 703 aa, Zea mays
  Clone ID: 700471484_FLI.pep
ALPKVFLQLVLKRLALVRRPGKLFSCFWREYVILQVPKKSNKQQRNEEMVARILPYLTYGEPTAMEALIQHFEPYLRDWSEFDQLQKQHEDNPKDDNISQKLSTQRSAIDNFVRVSESLKTSSCGERLKDIILEKGITKAAVEHVKESFASAGQTGFRTSEEWTTGLKLPSIPPILSMLKGLAKGHLPTQKCIDEEGILPLLHALEGVPGENEIGARAENLLDTLANNENNGDGFLGEKIQELRHATRDEMRRRALEKRVMLLQGMGMRQEFASDGGRRIVVSQPTIEGLDDVEEEEDGVACMVCREGYTLRPTDMLGVYAFSKRVNLGATSSGSGRGDCVYTTVSHFNIIHYQCHQEAKRADAALKNPKKEWDGATLRNNETLCNCIFPLRGPSVPLGQYTRCVDQYWDQLNSLGRADGSRLRLLTYDIVLMLARFATGASFSTDCKGGGRESNSRFLPFMVQMASYLSDGSANQQRHVMAKAVTTYLSGSPTLESPIRVSASLSGSRGGSGSSEETVQFMMVYSLLSESYESWLQHRPVFLQRGIYHAYMQHRHGRSTLKLSSDSSSSAVRADESSSSDTSDNKKLFAIVQPMLVYTGLIEQLQQFFKKGKSSSLIKTDEKDESSASLQQWEIQMKEKLGNMKEMVGLSKDLLSWLEDMTSSGDLQEAFDVMGALTDVFSSGYATCEGFVRAAMNASRSWS

SEQ ID NO: 43650 - protein, 264 aa, Zea mays
  Clone ID: 700444542_FLI.pep
WLQSKSSSGLISAKEDKYKKEVVLLAINHKHPDYMAFRPEKRVQELVEHEKDVAESSVTKQLEVAEIYKPSSHVKPIFVAVEADMEKYYSAPEASDIVFRYVEKEKLVKPTDRAKVILDVTLCDALYKGAIKKGSAYPTEIHKKDLGSAFLNRMQVHHKVSRGTQEVIRKGAIRTIQIMTERRQGNKKMTRLSGLECFLMDPDSLASELQKKFACSTTTAELPGKKGQYEVLVQGGVIDDLAKHLVDHYDVPKRYIEVYDKTKR

SEQ ID NO: 43651 - protein, 315 aa, Zea mays
  Clone ID: 700458188_FLI.pep
AAAGGGHRPGARSCFFVAGMGKDGIQYAVVDAFTADPFKGNPAAVCLLEDAAKAADERWMQSVAAEFNISETAFLLREKSSAAGAVPLFQLRWFTPVAEVELCGHATLASAHFLFTSVLAEHEKLVEFSTKSGILTAKKVPAPQSTGVSGEGKLFIELDFPTIDLVDCHPSELPAIPETLNGASIVSVHKSTTAGDLIVELSSGKEVADIIPNLHEIKKCSGRGIIVTGPAPAGSGYDFFTRFFCPKFGIDEDPVCGSAHCVLAPYWGGKLGKHKLIAFQASPRSGILYLELEAAGRRVRIQGEAVSVMTGTLLA

SEQ ID NO: 43652 - protein, 226 aa, Zea mays
  Clone ID: 700430176_FLI.pep
RPARAGRQAMEKKLLLPLAVAHKHAHGGGGERPWARPWRWAKTAFFVAAMLASLLLVCAPPLLVVLLDLALPPALLLRGGDGGGGGSLALAVVAQARAFDFRSSLVDLPAVSAARALLILCAYVACGGGGAYLGVVVACAAASVCYVLAKAAAVLPRRAAGGARAVAAAGGPEAMLLLSLALAAAHLAVAYRTSCRERRRMLVYRIDVEGAVRLKGGHQTPKGLKQ

SEQ ID NO: 43653 - protein, 130 aa, Zea mays
  Clone ID: 700430248_FLI.pep
VIYQNITFENVRVGIVIKTDYNEHPDEGFDPKAVPTIGNISYTSIHGHRVRVPVRIQGSAQIPVKNVTFHDMSIGIVDKKHHVFQCSFVQGQVIGYVFPVPCKNLDLYDERRGLVKQSTLQNISDIDYSF

SEQ ID NO: 43654 - protein, 64 aa, Zea mays
  Clone ID: 700433529_FLI.pep
NRKTKLRKNTTKVKNEHTSKTKDTTLKNPLYINESQSLYIQNYLYYIFESLCFVSHNVGFLYIR

SEQ ID NO: 43655 - protein, 270 aa, Zea mays
  Clone ID: 700243238_FLI.pep
TVKMAAMTAYKYQAQALMRDYLLADPLVPYTSVLIGIVLCKMAYDFTRILSSFYFKGYTLLTKIQRIEWNNRGMSSAHAIFITAVSLYLVMSTDLFSDRVKGPITFRYSIISTSALGVSVGYFITDLAMIFWLYPSLGGMEYVLHHTVSLVAIAYTMLSGEGQFYTYMVLISETTTPEINLRWFLDTAGLKKSSAYLVNGILMFVAWLVARIFLFMYVFYHIYLHYGQIMQMHAFGYYLTFVVPSVLFVMNTMWFMKILKGVMKTLAKWP

SEQ ID NO: 43656 - protein, 184 aa, Zea mays
  Clone ID: 700257165_FLI.pep
HLRHSEKEYLQFEIDENEFERTRQLYERLLDRTKHLKVWISYAEFEASAGLGGEDGEDKEKKNEVSYQEQQMERVQKCRAVFERAFDYFRTSAPELKEERAMLLEEWLNKEVNFGDLGDVSLVQKKAPRKVKRKRPIPTEDGSTIAYEEYIDYIFPDEVALAPNLKILEAAYKWKKQKTGDGDE

SEQ ID NO: 43657 - protein, 292 aa, Zea mays
  Clone ID: 700241322_FLI.pep
LTSLATLELEYNMALTTLPSEEVFQHLTNLDMLILSGCWCLKSLGGLRVASSLSILHCWDCPSLELARGAELMPLNLASNLSIRGCILAADSFINGLPHLKHLSIDVCRSSPSLSIGHLTSLELLDLNGLPDLCFVEGLSSLHLKHLSLVDVANLTAKCISQFRVQESLTVSSSVLLNHMLMAEGFTAPPNLTLLDCKEPSFSFEEPANLSSVKRLDFSLCEMESLPRNLKSLSSLESLHIGRCPNVASLPDLPSSLQRIAIWCCPVLKKNCQEPDGESWPKISHLRWKHIY

SEQ ID NO: 43658 - protein, 204 aa, Zea mays
  Clone ID: 700224156_FLI.pep
TSQSSIGQPVTQYAVACGLVCGVREKERERHRLGLGEKEMMSRERKKAAALQEKLKILRSITHSHALSNTSIIMDASAYIKELKQKVVRLNQEIACAQDALRHKSSSSYPTVTVEALGVQGSSFLVNVFSDKSCPGLLVAVLEAFDELGLSVLQATASCADSFRLEAVGGENVADNVDEHVVKQAVLQAVRSCSEGGSEHDDEE

SEQ ID NO: 43659 - protein, 149 aa, Zea mays
  Clone ID: 700210403_FLI.pep
SSGEIQANPWNFASLCWLFSDSENPMGDVSLNGPVKAEPTAGGIAKGNRVLDTMSAGWTDERHMLYISSMEASFVDQLYNHGNHPHRVTRSRLRWATMSRVLRQAARALQCLMEGNGKLVREDPRFFMKAQRSLIKILLTMRLKLKQNR

SEQ ID NO: 43660 - protein, 473 aa, Zea mays
  Clone ID: LIB3180-023-G11_FLI.pep
GVRPRPNLSTSEQPNTPAATAAILPQVGRTLAGDEHTPQQELSGVEQREARDPMAAAEGQWVLMATGRTPTNIAVIKYWGKRDEALILPINDSISVTLDPDHLSATTTVAVSPSFPSDRMWLNGKEISLLGGRFQSCLREIRKRARDFEDKEKGVKIKKEDWDKLHVHIASYNNFPTAAGLASSAAGLACFVFTLGKLMNAKEDYGELSSIARQGSGSACRSIYGGFVKWCMGEKDDGSDSIAVQLADETHWNDLVIIIAVVSSKQKETSSTSGMRDSVETSPLLQYRAQTVVPGRVLKMEEAIKNRDFESFAKLTCADSNQFHAVCLDTSPPIFYMNDTSHRIISLVEKWNHSEGTPQVAYTFDAGPNAVLIAQNRKTAAHLLQKLLYYFPPQDNDLSSYLVGDKSILGVAGLHSMKDVEALPAPPETKIPDQKFKGDVSYFICSRLGAGPKVVSDEGQALIDSVTGLPKGV

SEQ ID NO: 43661 - protein, 308 aa, Zea mays
  Clone ID: 700156247_FLI.pep
QGKRSEPSPRELAMAGEDAAAARRPPKEEEEEEDDDDLDNVPLALSRAKKPGNASASKVKKEEEDDDDDLDNVPLALSRAKKGNEKQKGNNSNMKASSKVKKEVSSDDDFVMPTAQKKSAGAAGSNAKTSKVKKIKDEDLDDLKEDKKRKKRVGVKEEAKLALAIVKGEKVKKERKVYGLPGQKHDPPEERDPLRIFYESLYEQVPTSDMAATWLMEWGLLPVDVARKCFEKKQGQKVKSPVKAITAKRIPSSPAKTLPSSAKKLVMASNSAGKLKSQKKRKASDDTDDDDDDDDFVASKAKTKRHKA

SEQ ID NO: 43662 - protein, 517 aa, Zea mays
  Clone ID: 700096901_FLI.pep
YMLFYVRNSIGKSVVCKDNNAANLLKKKTSEKISSLNGIAQTNVRAQNLNGVSPFGDKTHGTIIGYSTISSKTKTIHCSKNEVKAEDAPASQNNALPSTQAPIARNDVGILPTKPMQFAVKNEEKTSSHQPAPFTNTCGEQTVVGRPLQEMEPKAGAGENTSVVSAVANDAATLSKADKLTSQPQTAPSSKPTANVKDTATEFATLSLSKKDSVVSNGAVLSIGCLTSGEKAMNLSESVDQANEITKALPTSQNNTAPVIAQADCGVEISSGVIMHVAVSASCNGTTEKKVNSKSKKFVRYPVVNMWLGSRHLKPGKKANRKRSKMIRRVVACKDAANLSCLSEQLTSTSSTACSETVECTSSHQKRSHASARSKDDTQSSGNKHKVDGARVGAGTGAPSCSADVPKSDPSPSTDAKLVATQPASIRATDLMEATVPRWDDVDVPNIKVAEPQSKRKSGGYILDEWDEEYDRGKTKKVRRSKQDFGGPNPFQEEADYVSQRRTKQKSYRGKSWNKRA

SEQ ID NO: 43663 - protein, 191 aa, Zea mays
  Clone ID: 700103173_FLI.pep
ARVAPRATLCLYKKQSEYYAPGIQVTKPTQCIEKGVLASKVINPTLLSVVPKDGVIAEAKRKAKPDLDKNVMTAASRHKTMPEVVKNEFAIKVRDNQNDELNKKVTKVKAKAVYKDLLNSKTRTKAKPDVASDELIAKVIDHHRRGELRLLTVSDLKCFLGAKKAKVGGTKEVLIQRVTELLLDKCIAISN

SEQ ID NO: 43664 - protein, 382 aa, Zea mays
  Clone ID: 700101841_FLI.pep
HRGRRKPMAAVASPALRLRPRAASTSATSSSAPPRCRFGSFSHSCFKFGRSFPVQRVNGSTMQHFGTLKAQVFSSTGDHDGRFHIKRTICFAATDKQEPVVSRYSDMPVLHEAESGTKVTPASENSYFAGRGAGKPGFISFQESTFRKSTVESVPHPGKEASRLVWFIGPTILVSFLVLPSLYLRKVLSAVFEDSLLTDFLILFFTEALFYGGVAIFVFLIDKVWRPLQQVAPKSYIWSKSRFFRISSVTTMVLSLIIPLLTMGMVWPWTGPAASATLAPYLVGLVVQFAFEQYARHRKSPSWPVIPIIFKVYRLHQLNRAAQLVTALTFSVRGTETTNQTLAIMNSLGALLTVLQILGVICVWSLSSFLMRFLPSSDIPDP

SEQ ID NO: 43665 - protein, 237 aa, Zea mays
  Clone ID: 700101915_FLI.pep
LSQARFLDFLSRLSQVTTLDLPPTPTTGSADPSGSDRFFCPDPQRQAEMNCETCQLKELELELTEIRDVLRCILHTIFFHRTLSLVRPKDVDCDFLDITYVQCGLPELEKEVDEKIDQFSAWVEKHPNRRSQICLSFFDEKHRHPGWFVNKTERIYWEQWFINLQVMFPKRYSKSNSSKGLTNIQANAVEETSTRRAALEASINEVLFQIIKFANEKKDHIPAIPDRIFNHEIMIPR

SEQ ID NO: 43666 - protein, 320 aa, Zea mays
  Clone ID: 700171384_FLI.pep
AASSSKRTKLCPQGNLDVPTMYVTGNGNGCTDSVETGKFPRVLQGQDLMSFRTRHVPSAPQTVEAAKLQSSGASRFLSNACGCALGGPTSRLAVHNSDFTYQSVGFNESIGFSEVLQGQEISRAVPMFQGMMSEACSLKGGYGLHSYMRTPVAVTGLSATTQECSLTLSTPPGAQVPSVYPDNIFNRTVVRQLGLASKFDGGATNAQQSGPFDRPREIWSKPQHEISDQTKMDHFETRRASAPGDDAAKHGSGGEVVRKTSCRLFGFSLTEKILPADDDGIKEVTYEPECQNPRMLDLFGYNCSAPSAALPALCAAPFGM

SEQ ID NO: 43667 - protein, 303 aa, Zea mays
  Clone ID: 700203252_FLI.pep
DDIHVGFDDIGGLDMIIEELKESVIYPLTMPHLYQHAASLLSAPSGVLLYGPPGCGKTMLAKALAKESGASFINLHISTLTEKWYGDSNKIVRAVFSLARKMQPAIVFIDEIDAVLGTRRSGEHEASGMVKAEFMTLWDGLTSSNSSGIPAQIVVLGATNRIHDIDEAILRRMPKKFPITLPALEQRRRILQLILKDAKVDAEHFDLDHVSRLTAGMSGSDIKEACRDAAMAPVREYMRQHGRDGSKRPVDPADFRGIRTDDFLKHSTDQYMIEVLQQRQRGSNILANDVLAEIDETFVEPQD

SEQ ID NO: 43668 - protein, 298 aa, Zea mays
  Clone ID: 700219214_FLI.pep
QYQMIISTRQSRVPGLEVLHEGDELLDAGERHGIVDGGADAADRPVPLELHHALLGRLGDELLLEVRALGQGEGHVHVRAHGLVDGADVVPSAGVDGVVEGAGLARVLLLDLGKAALREQVLEDEAADVDGEAGRGVIEGGVVGVRLEVEHDGRDGLSGANEVLAHDGDGDAGGPDVLLCAGVDDAEAGDVDGLGAEVGGHVGDEDARPVAGLRVVLELHAVDGLIGADVEEPGLGVLGDGVERWEGRVLAVFTRPGDGGGGELLGLLEGLVAPGSGHDEVGRVGGPRAEVERNGGEP

SEQ ID NO: 43669 - protein, 316 aa, Zea mays
  Clone ID: 700204267_FLI.pep
HTRQCGTPTILRACGRPAMDPFYFGPDQLDAAAAVDEDYLTSLGLVVLSPEPVAPLPGGAFEAYQRRAPALLEHSLQTMSRRYSGEQNMHRRMFSYLRRVAHDAGAAVVAAPAFPAPARESVPGFGVGTSQAPRSSRFRNIMRERLRRERLSQGFADLHALLPHGASSKGGKNDIVGAAAGYVRELVARKEQLSARNQELLEKAASRWKQQGGTRSGVGRGMVVKVQAESQDHSMALGAFVRVLQRLKAMEAGLQVTAIRTRFSAGGVWMNIGVEGQVSACDVDKSITNALIELEGNDPRSSKPRFSCQVETVQMD

SEQ ID NO: 43670 - protein, 348 aa, Zea mays
  Clone ID: 700446170_FLI.pep
RTTSPLTEAERSAEAQREVASALLRCGSAVSCRFPHPQGQRRPTSATQKRRTPFRRPNLPLPRSPSPAAAPSYAPLAGLVARRGCGGAATVRGMSFGGSSSLASGAKRPFEYGRTHVVRPKGTHKATIVWLHGLGDNGASWSQLLETLPLPNIKWICPTAPSRPVSVFGGFPSTAWFDVADLSEDAPDDIEGIDASAAHVANLLSTEPADIKLGVGGFSMGAATALYSATCFAHGKYGNGKPFPVNLSLAVGLSGWLPCARTLKNRIEASPECSQKASSIPLLLCHGKADDVVAYKHGERSAGALKANGFSNVLFKSYNSLGHYTVPEEMDEVCKWITANLGLGTKSS

SEQ ID NO: 43671 - protein, 228 aa, Zea mays
  Clone ID: 700455156_FLI.pep
PDPDGGGTLLYPFSGDVWAELRLASASDVPHIHRLIHQMAEFELLTDLFAATEELLTSTLFPSPTPPPFTSFTALILDLSPSPVAPDPSSTIASRRLDLSASPLADPEAAAFASPRGGGRVTAGFVICFPNYSTFLSKPGLYVEDIFVRAPWRRRGLGRMMLSAVAGRAAELGMGRVEWCVLDWNKNAIDFYEGMGADVLPQWRICRLAGKALDKYKGSAGGKAAAAE

SEQ ID NO: 43672 - protein, 135 aa, Zea mays
  Clone ID: 700429964_FLI.pep
ASCIKLAEISSLNAAIPASLQRPSRSAPVNSSVHSATFQRSTSSPNFIFRVWMRSISCRPSTSGGGTYSTCRSMGNYGQCLYVHVSLTEALKDLIETPWTQKSSINCIWAIRSTQYDNSLKKGLPSSEYTCRYNQ

SEQ ID NO: 43673 - protein, 430 aa, Zea mays
  Clone ID: 700450713_FLI.pep
LSGISEFDLSAEALPWLMPPEEADKRTTHTRQEAQELEERMTCLRLLFEDAADDRILARRELGAAADEFLLRLTTRQQALTREYSRLANLKRPLDLSGMTEADRAAEAERLREEKLQKARQLQDQGDMSGARECEGLARIIDFDVKQGGEYLNSICCVGNIYTFDHTEESPVGPMRFTNRPWQDKMCVNCASINILSVKIACSDIDFPIQVYGTVVARDCIDYKCVYLFRRDNDHCQLISSNEESLILTGPKRGLALWYGADYVQTDLWVKDRQGHCKQFSKGIVRIPGTANQVFDKCEPETVSLATRLSTVDVTYDVVECAVEATVAAEVTQGEFFGAMTAHTTRSKRRIVLFDSQVGGDKCHGMIQLMRPVVSVSVMDKLKIFVTTAAGVSTGIEVTPRWNGGHEFVLTLGDATICVKVTWSMVDPRL

SEQ ID NO: 43674 - protein, 391 aa, Zea mays
  Clone ID: 700469008_FLI.pep
EGTLRGEGKGGERQPRGGGKTRKEKGLCTFRFVAWLWYWVPRSAAQLSPAPEPLTCRPPSFPPRESPYGGTGSPPRRPGMADGSLYAWWCCALGWALALVAADGFLVDITYVESAVAKGAVCLDGSAPAYHLARGSGSGENSWLVHFEGGGWCNNVTTCLQRKRTRLGSSKEMATQIAFSGILSDTPDDNPDFYNWNKVKVRYCDGSSFTGDVEEVDPATKLHYRGARIWQAVMDDLLAKGMDKAENALISGCSAGGLTSILHCDRFHDLLPPAARVKCLSDAGFFINEKDVAGVGYIAAFFNDVVTTHGSAKNLPPSCTSTLPPGTCFFPQNEVKQIQTPLFILNAAYDSWQVRNILVPGVADPHGKWHSCKHDIDQCSASQLRDSGVIF

SEQ ID NO: 43675 - protein, 268 aa, Zea mays
  Clone ID: 700447049_FLI.pep
SSQSQPLTMAATLSSVAAPSLPKHVSVTRAQQQAPPSIISASTKTAFHGVSLVVDRRWAAGHRRGSGRRRLLQVNARTAAKNIEVEVEKPLGLALGQKPGGGVVITSVESGGNAARAGLKTGDQVLYTSSFFGDELWPADKLGFTKTAIQAKSDSVYFVVSRGAEVDVKRLPKRPAPPRFGRKLTDSQKERATHVCLDCGYIYFLPKPFDEQPDDYGCPQCNAPKKRFARYDAATGKAIGGALPPIAVIVSLVIGIAGVGALLVYGLQ

SEQ ID NO: 43676 - protein, 493 aa, Zea mays
  Clone ID: 700333832_FLI.pep
NTPTRSLRSTVPPSTARGASSTLRTSASHRFRSLAPSPRLASSFSSVPTMREILHIQGGQCGNQIGAKFWEVICDEHGIDHTGKYAGDSDLQLERINVYYNEAGGGRFVPRAVLMDLEPGTMDSVRSGPYGQIFRPDNFVFGQSGAGNNWAKGHYTEGAELIDSVLDVVRKEAENCDCLQGFQVCHSLGGGTGSGMGTLLISKIREEYPDRMMLTFSVFPSPKVSDTVVEPYNATLSVHQLVENADECMVLDNEALYDICFRTLKLATPTFGDLNHLISATMSGVTCCLRFPGQLNSDLRKLAVNLIPFPRLHFFMVGFAPLTSRGSQQYRALTVPELTQQMWDAKNMMCAADPRHGRYLTASAMFRGKMSTKEVDEQMLNVQNKNSSYFVEWIPNNVKSSVCDIPPTGLAMASTFVGNSTSIQEMFRRVSEQFTAMFRRKAFLHWYTGEGMDEMEFTEAESNMNDLVAEYQQYQDATAEEEEYEEEGDEVAA

SEQ ID NO: 43677 - protein, 533 aa, Zea mays
  Clone ID: 700381522_FLI.pep
SLLTAVRILQKCASAMQFSSVLPLEGKACMSPVRRGSGGYGSERMRINCCSIRRNKALRRMCFSARGAVSSTQCVLTSDAGPDTLVVRTSFRRNYADPNEVAAVILGGGTGTQLFPLTSTRATPAVPIGGCYRLIDIPMSNCFNSGINKIFVMTQFNSASLNRHIHRTYLGGGINFTDGSVEVLAATQMPGEAAGWFQGTADAVRKFIWVLEDYYKHKAIEHILILSGDQLYRMDYMELVQKHVDDNADITLSCAPVGESRASDYGLVKFDSSGRVIQFSEKPKGAALEEMKVDTSFLNFAIDSPAEYPYIASMGVYVFKRDVLLDLLKSRYAELHDFGSEILPKALHEHNVQAYVFTDYWEDIGTIRSFFDANMALCEQPPKFEFYDPKTPFFTSPRYLPPTKSDKCRIKDAIISHGCFLRECAIEHSIVGVRSRLNSGCELKNTMMMGADLYETEDEISRLLAEGKVPIGVGENTKISNCIIDMNARVGRNVSITNKEGVQEADRPDEGYYIRSGIVVVLKNATIKDGTVI

SEQ ID NO: 43678 - protein, 291 aa, Zea mays
  Clone ID: 700422477_FLI.pep
GRQAATAVGAPLRDELGGEVPASAGVEVQDLQVGPPPRALPPPVEVVAGGPELGVEVLEPRLRPQRRYGHLHQHYPRRVHVEQVRAVQLPEDRGEDGGDGLRRGLGRLLGEDVELGRAVVRVEQRAVGHVVLADAEVGGGSEVDELHLPAAGHDEVGRLDVAVHDARGVDALQRRDQLPHHLLHHQRLALQRAQALQHAPEHETLQVGREAALAQVIGQRPVALKLPDEPLAALDELRLVLVGDEAPEEVGARLRRRSRHAVVEPLLVVPTLLRPHRHDLDLLEYDLLLVP

SEQ ID NO: 43679 - protein, 245 aa, Zea mays
  Clone ID: 700453235_FLI.pep
PQIPQQAKIINRIIKQLTNQTMGSRRAGGRPQPVHRSIVVQGASASVLPEVGEVQDRVVELGQELVRRRGHRRRDLRVGVGAQPGLAGRADRRRRRLPRHHLLLRLAVPPDRRGKDVAGVHRRQREVLARVVGRRGRRRRRRLLVLHVQQRVLLHLDREVAVARARRAGGGRGAVEVDHLVDVGADEGRQLGGVEELAEEAQRADALELARAGRRHYWFGPRRQLLVEHLAHGPLVLHATTKQTN

SEQ ID NO: 43680 - protein, 392 aa, Zea mays
  Clone ID: 700469752_FLI.pep
IDGSSYYIADGIAGCKASVLNCNHPVTQKLILDSLRHWVLDFHVDGFCFINAPFLVRGPRGEGLSRPPLLEAIAFDPVLSKTKIIADPWSPLDISNVQFPFPHWKRWAEMNTRFSMDVRKFLKGEALISDLATRLCGSGDLFSSRAPAFSFNYVSRNSGLTLVDLVSFSSDELASEFSWNCGEEGPSENNAVLQTRLRQIRNFLFILFISLGIPVLNMGDECGNSAAGSTSYKDRGPLNWKALKTAFVKEVTGFISFLSALRSRRADIFQRCEFLKLENIHWYGSDLSEPCWEDPTSNFLCLHINAELDEKLPDSTGGDLYICFNANEESASATLPAIAEGSMWLRLVDTSLAFPGFFSRGSSHETHQVLGFSSYQVKAHSCVLFESKRVLS

SEQ ID NO: 43681 - protein, 160 aa, Zea mays
  Clone ID: 700548546_FLI.pep
KPAVEAEADERAAEEMAPKKAAAAKKAAEEVEVEEVVDGDEAVDGEGDGDEDDDDDDEDSDDEEEVDGEDDQEEELGTEYLVQPLGRAEDEEHSSDFEPEENGEGADDEEIDEEDDDGEDSVKAQTSTKRKRSGDEEEEDDDDGDDDGDDDDDGRPPSKR

SEQ ID NO: 43682 - protein, 176 aa, Zea mays
  Clone ID: 700548561_FLI.pep
CPYSDGSGRTGSILPVQGMVVALVDVVIALEDQIVLLAMMMIDMMVGAMWTAGILIMVPGAIAMHRQQNAILVTGTVVQIDMRPAALPEKGAMREMEGGPMEVTTVMNRGALVAMAEVVHVAAAAVGLLALVGVTEIGLLHTIVPAGEEQLVLMMIVTEECSPEAEQRYLCISAMH

SEQ ID NO: 43683 - protein, 72 aa, Zea mays
  Clone ID: 700550701_FLI.pep
TVPKCNMFIKFKGLHKDIHQFDSHFRYNQFDSISSSFQSSSRHPTTQYIFRTPRSPRNRSGTRAAHTATTTQ

SEQ ID NO: 43684 - protein, 314 aa, Zea mays
  Clone ID: 700550751_FLI.pep
GSLKENRASEQVGAPSDQKGSGEPKRKVIKHSKLEKDKELFQLAQQYHKVVAERDQAIAVKDRLESLCREFQRQNKMLKEECQRVSTEGQNMRTELSEKFDHAIKGVSAKLEEQRVERISQLEENNTLRSKLKDLADQYNITQQKYAHQLKEKMLELELADLRLQQHQEKAAQEHTQMQLYAEQVSQLMTTEKNLRLQLASDGERFQHFQDALSKSNEVFETYKQEMEKMISVIKNLKKENEFLKGKCENSDIAIVKLIEERELTKKQIEKLKNQREKLESLCRTLQAERKQGPSASIPDAPSSQEVSATSQES

SEQ ID NO: 43685 - protein, 230 aa, Zea mays
  Clone ID: 700550772_FLI.pep
RQILKDHKFISADLSFIKRYPHIVNEQECAWSARETTLRESLEMSTTLAKKTMNSTRPNVASKGPHSNMSKGRDGPSQGSDDLARSVLGTVFTANKVRSMQAVVRDLRQLAAKYASNRKDGSKLQALCNAAKNCASLPHDELNRKIHLVAVPVHSVFVAKHEDKRALRNIFILLFRHKEPNGTLTKQEVVAAAAKHIKREITDREYHQVVTEICISTEDGHLLLKNGDEP

SEQ ID NO: 43686 - protein, 169 aa, Zea mays
  Clone ID: 700552679_FLI.pep
GVAQAGISVQAGGANAYRTMQQTPTMDPLRHTRMSMNQTALAAAGQTTAAAYVRPTQADIQNHLFPVQQSQAPRSQQVPRTTTPPLQRAPPHLQPPSVPPTVPSTPQAGPSHGLPPELPVDDSWRPTGQMRGSLTGNAYSSAIRHYRGHSEQQQGEPRPPNTSGARRPQ

SEQ ID NO: 43687 - protein, 226 aa, Zea mays
  Clone ID: 700552762_FLI.pep
CSKDSKVKVWDTVAPSSGSSSCVGSAHLNSNGPPIAMKCHESLCYIAAGAEVTAIDLRTMKKASVLALQNHRILSCEMMPSEWLICTGTKDRALLWDIRKAQELPNTVAEMQSNGPVTLLHLDQYKVVTGVPSDGQVHVWETRTGDSLNTLGCGEPSRLGVPSRVSAMAVDGCRIAMAGSSPEGCMLHYRDFATASAPVVSLPGKEKEVSRFWRPQEFDDSEEEEY

SEQ ID NO: 43688 - protein, 224 aa, Zea mays
  Clone ID: 700473850_FLI.pep
ELDYLVGAVANPKKPFAAIVGGSKVSTKIGVIESLLAKVDILILGGGMIYTFYKAQGYSVGKSLVEEDKLELATSLIEKAKAKGVSLLLPTDIVVADKFAADAESKIVPATAIPDDWMGLDVGPDATKTFDEALDTTKTVIWNGPMGVFEFQKFAAGTEAIAKKLAELTTTKGVTTIIGGGDSVAAVEKAGLADKMSHISTGGGASLELLEGKTLPGVLALDDA

SEQ ID NO: 43689 - protein, 426 aa, Zea mays
  Clone ID: 700473881_FLI.pep
QADASLKAGKWQRNKYVGVSLVGKTLAILGFGKVGSEVARRAKGLGMHVIAHDPYASADRARAIGVELVSMEEAMTTADFISLHMPLTPATDKMLNDEAFAKMKKGVRIINVARGGVIDEEALVRALDSGVVAQAALDVFTKEPPAADNKLVLHGNVTVTPHLGASTVEAQEGVAIEIAEAVIGALKGELAASAVNAPMVPAEVLSELAPFVVLAEKLGRLAVQLVAGGGGIKSVKVTYASARAPDDLDTRLLRAMITKGLIEPISSVFVNLVNADFTAKQRGVRITEERILLDGSPETPIDYIQVQIANVESKFPSAISETGEITVEGRVKDGVPHLTKVGAFQVDVSLEGSLILCRQVDQPGMIGSVGSVLGEENVNVSFMSVGRIAPRKHAVMAIGVDEEPSKGTLTKIGEIPAIEEFVFLKL

SEQ ID NO: 43690 - protein, 327 aa, Zea mays
  Clone ID: 700572336_FLI.pep
RRMARGNQRRHAVLVQPLVYLQFTPPAVLVRREAIDLAAEGGRRSQLGGAGPQHVLVVRRGDGGADEWTHPEDPVVIPGLVVVVDDSSAQAPGRVDAGAGDGDRGQMDHEHRKPDGERGKHGDMRVTGVALGVGGGEDGVDEHEGADDLRGEAGALGVAGAELVGAAAVAHVEGALEALDEPDAADGAEALRHDVEQRAHQRDLARQEEAEGDGRVDVPTRHPRGAVDEDEDHAAEGPGDAEHADAAARRVGARRRRVRLVLVPDHRGHRDVEEEQRGHELGDHRAVQRPLGQLLRVHQRRRGRVRVVLALVRRRGLDVLGHSRASR

SEQ ID NO: 43691 - protein, 193 aa, Zea mays
  Clone ID: 700574788_FLI.pep
KNCSPNIETYSKMIKAFLRGRRVADALQMFDDMLIQGVLPNTGMITSFINPLCTFGPPHAALMIYKKSRKAGCVISLKAYKLLLERLAKFGKSGIVLDIWEEMQECGYQPDKEIYEFIVNGLCNVGKVDAAVSVVEESLRNGFCLGRVVYSKLNNKLLEMDKVETAYNLFKKVKHARALTNSRNYCRANGWHF

SEQ ID NO: 43692 - protein, 346 aa, Zea mays
  Clone ID: 700574835_FLI.pep
VANAVQQGFSNVVSSLPSQPYAPPVSVLPAQIQANAPPSLPLLAVSVNPPVQHVSPVNNLLNRASVHQHGQQQYALLSDPVATPLHQQAAGSKPAVAHPSLPEPNASSHAAFPWQSNAADMTHAGRNATADPWAAARAANSYSTASAGTVPSVNQNAYGDQGKQGAYSSYGSSAASSRPVVLPGHGHDRNGYSRSALVEYPWDGHHQRHSRSPDPGVVRDYDTDYGGAQGYSQQPLTQWSAGKVQQQSYNPEPSRQWSSSQAHQGGYAPAEPSRQWSSSQAHQSYAPELPRQWSSERRGYDDAEPSRTWSSGQQNPEASRQWSRGKQDPYYSPSHGRRSYDQHRRR

SEQ ID NO: 43693 - protein, 180 aa, Zea mays
  Clone ID: 700582864_FLI.pep
TITITIFILICIENTYYSLRSQYLLLTLIFKLKRTHNITISSAVHISSDGSYHGEAARQQHGRASPSHPTTRKAARGPSLLLRPSEHRHRTAPAPAPHNAGPSSPRPACSTAPAAADLGCCSRDTPWSSVWKETGRLDRPVLESACYDRQSSRHLCVGWTWRWMQARARRCARLCPRRVR

SEQ ID NO: 43694 - protein, 225 aa, Zea mays
  Clone ID: 700612414_FLI.pep
ARTHANSKECDHGTEAMAVTVEKGAMGEPALLLERSRAITLHGRDRKGRAVVRIVGNYFPARALGGRAEEALRSYLRERVLPEIGDREFVVVYMHSRVDRGHNFPGVGAIRGAYETLPAAAKERLRAVYFVHPALQSRIFFATFGRFLFSSGLYEKLRYMSRLEYVWAHIDKEQLEVPDCVREHDDELERRPLMDYGIEATETRCMYDAASMDTSASLHSLRCVS

SEQ ID NO: 43695 - protein, 132 aa, Zea mays
  Clone ID: 700616114_FLI.pep
SNSVISLGTNQTQELSFMSDLDVQLPSAFDPFAEANAEDSSAGAGSKDYVHVRIQQRNGRKSLTTVQGLKKEYSYNKILKDLKKEFCCNGTVVQDPELGQVIQLQGDQRKNVATFLVQAGIVKKDSIKIHGF

SEQ ID NO: 43696 - protein, 70 aa, Zea mays
  Clone ID: 700622028_FLI.pep
SMHDLLPTIKNSESLCIFLLEKAQVALVPGDAFGDDKCIRISYAASLTTLQTAMSKLKEAVALLKPCVAA

SEQ ID NO: 43697 - protein, 380 aa, Zea mays
  Clone ID: 700622456_FLI.pep
VIPLPRLHRRSRRTIATMASASGTPNPVVLGCGGISVDYLATVASFPNPDDKIRSLALKVQGGGNTGNALTAAARLGLRPRIISKVANDAQGRSILSELQTDGVDTSYILVAENGNSPFTYIIVDEQTKTRTCIHTPGSPPMVPEELTKANSSSALDGVDIVYFDVRLHDIALLVAEEASQRKIPILIDAERKREGLDELLNFASYVVCSAKFPQAWTGASSIPVALVSMLSRLPNIKFVIVTLGEKGCLMLERSSTDASEAGEIDAEALFESLEKSIDQSSTIPKCVASKSNLRISADGVGSISGRLLLGTAEVIPPGELIDTTGAGDAFIGAVLYGLCTSMPPERMLPFAARVAGCGCRGLGARTSLPHRADPRLAGY

SEQ ID NO: 43698 - protein, 373 aa, Zea mays
  Clone ID: 700549530_FLI.pep
RSSPYSACKQPLGLIRPAALRLRLRRSPPLNRIEESSAATGEGLAVGAQRGMASGSSNGEPSTAPQANRWYDLRLGSSCRDPSPTAKFCTLRYEFKPASIDKTQAGSLQSTKDNRVTVEFHNNQPGKPKVTFEGSQEEYKDNDGVLFFDGETFRLERLHRAVKRLRHVRVPGESAALNLAGTTTGVGAESQSPPLPKVSKSQTMSKPAVHSVPVEVERIDIGEPENPGPKYNSRSTYQPVSIDPFALSPDPNEQENLDIFGDDDGNASPNNLASGEGAPTRGFDVNLPNQDNMDDEIADVDVNDEADEGLNAADALRAQVNAEGQQGQDSSSSSGTSSSSSSGSGSGSGSGSSSSDSDGSDADSASSGGDVDI

SEQ ID NO: 43699 - protein, 374 aa, Zea mays
  Clone ID: 700549568_FLI.pep
GFAPNTRSERRRGIGSSAAMEDEVQRAAVSSWNELDYEAEARLVAEARASWDRKARGEEEDEEEHDPEMTLDYYAYQAKKFRNTWNILYFGHFGRFEDTTRIPPMRFTEKPPDSPAYPRTTLQVFSIKVAGIEGGLQWPLHVFGKVALRDAVDHNRNMVFDRTRDNCQILTKEVPNLKLTGPSRAVLLVDPVTIEADLKVKGRTESEDKHLSFLAVPFLVMIPLESCLRTRDFTSKLSTLRFALAIVVFSVEATISVRVRGGSWPDGLRAQFAAHTVSIGREEVVLLDSGDDKLPVSDDGTITLGRRVASVEVSGELNVSVKAWQGGEVFTHRERGFKPKEAGWSYGTLDVGFCQMDVSVAWSLLSSYGENEAL

SEQ ID NO: 43700 - protein, 295 aa, Zea mays
  Clone ID: 700551628_FLI.pep
KDLEQLMNSRNTYLAKQEECTKKIRDLGLLPADAFEAYKRKNKKQLHKILYDCNEQLKQFSHVNQKALDQYVNFTEQREQLQRRRAELDAGDVKIMELISVLDQRKDESIERTFKGVARHFREVFSELVQGGHGYLVMMKKKDGDAVDDDEEEDGPRDPGPDGRIEKYIGVKVKVSFTGKGETQSMKQLSGGQKTVVALTLIFAIQRCDPAPFYLFDEIDAALDPQYRTAVGNMIRRLADMADTQFIATTFRPEIAKVADKIYAVRHKNRVSNIDVVSKEEALDFIERDQTYNAS

SEQ ID NO: 43701 - protein, 304 aa, Zea mays
  Clone ID: 700551736_FLI.pep
GKMSRSLHNRLSKTETRHVREANPGKRSKPSNIVANVASFIPLVKPKVQPTTCVKKDVRVKALETAEAAKRLEEKKRSEREMRKAAAKLEREKLKQEKELKQKEEEEQKKKRGADVATRKRQRDEEERREKERKRKCIEEARKQQKRPIERKHANINKDAHPEGHDNKELQQNSAEAVKGPVKFDEMTGLGGNATNSNNEMVVITDERPAISGPNCQENIPNSIEESYIMTPYKDSDDDDDEDFKHIEHSRRRRKLVPSWARGENLEKILLSNYVLDPRKIFARKRSSDLSEICPAHIPQRGFR

SEQ ID NO: 43702 - protein, 214 aa, Zea mays
  Clone ID: 700551930_FLI.pep
NATVVSISSIEELRAIISRGSERRHTAGTNMNDESSRSHLILSVIIESTNLQTQSYARGKLSFVDLAGSERVKKSGSAGKQLKEAQSINKSLSALADVIGALSSDGQHIPYRNHKLTMLMSDSLGGNAKTLMFVNVSPAESNLEETYNSLMYASRVRCIVNDTSKHVAPKEIMRLKKLIAYWKEQAGKRSDEDELEEVKEERISKERADNRLTG

SEQ ID NO: 43703 - protein, 142 aa, Zea mays
  Clone ID: 700611479_FLI.pep
RISKAGGNTSTSGFESASPGCSYLDSASFIARIRWVMRYWSFSFSMVSFLFFSFSVKHSAVTTSSFDWRSFTAEEVASDPPLGPSLLYSKASSFAMRISASEALSWKGLRASSSADVAGPPSAAMFAVGRLNPRIRRRSSTW

SEQ ID NO: 43704 - protein, 384 aa, Zea mays
  Clone ID: 700611966_FLI.pep
FLGLEGLADDGGMLGDLVAELAGLLRGVDLVQPRRRQQLEVLHQPAQGDADDRQREDDPRAAPAADPKGHESEVVAVGLHGLLLLQEALGPELVGAHPPLGVVGEEPGIDEDLGLGGDVEAGELAVVEVHVGDQQRDGHAQAERLLDDGLKVGEALEVRLRHRHAGAQHRGELLPELVLDGRVVHQLGDAPLDRPQRRLDRCDVDVLDDVEDVVVVDLALPLGLEDVIHGAPDLTSLSHHLLALLYEVVLEDLHAARLEVVAAVEVAAEEGAEHGDEVAVVVLEALRQAAALRVERLELVEERVVLAVEPAVEHDAEHVVVHHQLEAAAEHDAAGRGLGVLPHVLHHQPGLLLPPGAVLGHHLVGEEGDGHDAPHLAPVVAVHR

SEQ ID NO: 43705 - protein, 448 aa, Zea mays
  Clone ID: 700475822_FLI.pep
QSLRRRANSPVHTASPYDSPHLPIPNGSINMNSVRNTGDASPRIAGLIGYDRMPNPFTPPNGSILYRVGGHDVPAAMENTSAFGPRSSPTAAQYVQPFIAPESIQHQPGVPLREVYPERAYPEPMPSSYADGKVAVSALPLTDQLFRLDINTMKKLEGQDDGNSTRNVNETTLLHAVDEPSTLPHHVGSVHEVDPKQEKLTEKESRQKQHEAGATALQECGDISEDMLNFLPELIASVKKVTLDDAAETQIAQSDANAAVSPVPDDDDNGKKLDEATAGNTNANQDPDLQGNLDRQKSFKIESTTAEAEALSKGLQTIKNDDLEEIRELGSGTYGAVYHGKWRGCDVAIKRIKASCFAGRPSERERLITDFWKEALILSSLHHPNVVAFYGVVRDGPDGSLATVTEFMVNGSLKQFLRKKDRSPEESNISHGCCIWHGIFAREEYSPF

SEQ ID NO: 43706 - protein, 574 aa, Zea mays
  Clone ID: 700571335_FLI.pep
ISEIPEEATFTNVEQFLEPLELCYRSLCACGDKPIADGSLLDFLRQVSTFGLALVKLDIRQESDRHTDVLDSITTHLGIGSYAEWSEEKRQDWLLSELRGKRPLFGSDLPQTEETADVLGTFHVLAELPADCFGAYIISMATAPSDVLAVELLQRECHVKQPLRVVPLFEKLADLEAAPAAVARLFSIDWYMNRINGKQEVMIGYSDSGKDAGRLSAAWQMYKAQEELIKVAKHYGVKLTMFHGRGGTVGRGGGPTHLAILSQPPDTIHGSLRVTVQGEVIEHSFGEEHLCFRTLQRYTAATLEHGMHPPISPKPEWRALMDEMAVVATKEYRSIVFQEPRFVEYFRSATPETEYGRMNIGSRPSKRKPSGGIESLRAIPWIFAWTQTRFHLPVWLGFGAAIKHIMQKDIRNIHILKEMYNEWPFFRVTLDLLEMVFAKGDPGIAAVYDKLLVADDLQSFGEQLRKNYEETKELLLQVAGHKDVLEGDPYLKQRLRLRESYITTLNVCQAYTLKRIRDPSFQVSPQPPLSKEFTDESQPAELVQLNEQSEYAPGLEDTLILTMKGIAAGMQNTG

SEQ ID NO: 43707 - protein, 167 aa, Zea mays
  Clone ID: 700580846_FLI.pep
ETFGPIIPIMKFSSDEEAIKLANDSKYGLGCAVFSGNQKRAIRIASQLHCGVAAINDFASSYMCQSLPFGGVKDSGFGRFAGVEGLRACCLVKSVVEDRLWPYIRTVIPKPIQYPVSEHGFEFQQLLVETLYGYSVWDRLRSLVNLIKMVTEQNSAPASNATTKKRR

SEQ ID NO: 43708 - protein, 390 aa, Zea mays
  Clone ID: 700614504_FLI.pep
QKHKEVNLGTPGASSSTLTNRSTIPGNSTMGVRPAYGHVNGGQIHGLKNLGCSSVPDAQPSGCPSESVISRRRFEFMRKRAFDQESSSRSVNLSLGHSTPTDIRRIRMNEQSLCQQIPRSSSRSHQESAGSVRTRRPSPHATRMSVPDGRADGVLSLHESSTKDVQPAQEHLSLEEVSTESSIRPFFVEFDNNIFSSSHLRRSSTRAERGRPSSLFEESPRQMFHSLMGERDRHRHITMEGITEVLAALERIEQQAELTYDQLLMLEANLFFGAFASYDRHRDMRMDIDDMSYEELLALEERIGSVSTALSEEQFTKCLKRSIYSQVALEVNKSTVDDMKCSICQEEYAEGEEVGRLPCEHRYHVCCIGQWLGQKNWCPVCKASAVPSKG

SEQ ID NO: 43709 - protein, 682 aa, Zea mays
  Clone ID: 700803470_FLI.pep
KGPPPPHSASNLLHCSAASHEWRLFKSPPSAPGNSFLCIAEFFGFSGSAAIPSPSPPCRCRCRPPRFSRSFLSGRRSREARQNCGGACPRKGNNQHCLPKAAPDAWLVLKDTLCAVQTMKIDDERPYQTHIFHDLASNGSPKLDCEAERQSNHKVEADKMVEQTNQSEVSFVKAEHLNGGKIRKTRIEDYSYDKDVVEIKLPDTDLSSDYGVHFVKDVCIDEGVLPDQKISSEKQVDQKVSINFDSSEYTNGDLREDISADSTKTAHELKTEIVVLPVLCDTHNNNTVEQNSSCKKQDLEDNNTTDVSTDSHDEGLNPKQLPFHEVAQDYQEVDSVIPESNENQDRLFTGDATHQVSSNDCYEAGIGIASEASNIIHNDLPEESAAADFPVVIPEEVAVTAALGMEVSNQVNHYNPFIAYGSLDETWEPNLSLPTTVDAASIAPICPVEKTDSFSDLVNRPLEGFDPIELDEAIIEENRSDSVEESSSTLDVQASEQRDDQRESLTNNDVKTDAAHETGTAISLSTSNGEHSGVKGEKCQKHETDGRDTDDFNPRDVEPGTKVSEDTTDVKSSAHVQTESVVQQNGPDSAKVTTAQTVIRNPFESSFSGPSITSGPLTPSGHIPYSGNISLRSESSTTSTRSFAFPVLQNEWNSSPVKMAKADRRRQKEDRGWGYRILCCKF

SEQ ID NO: 43710 - protein, 487 aa, Zea mays
  Clone ID: 700804929_FLI.pep
FVRSIIILELQTMDMALASKASPPPWNATAAEQPIPKRDKAAANDSTYLNPQAHDSVLGIILGGGAGTRLYPLTKKRAKPAVPLGANYRLIDIPVSNCLNSNISKIYVLTQFNSASLNRHLSRAYGSNIGGYKNEGFVEVLAAQQSPDNPNWFQGTADAVRQYLWLFEEHNVMEFLILAGDHLYRMDYEKFIQAHRETNADITVAALPMDEKRATAFGLMKIDEEGRIIEFAEKPKGEQLKAMMVDTTILGLDDVRAKEMPYIASMGIYVFSKDVMLQLLREQFPEANDFGSEVIPGATSIGKRVQAYLYDGYWEDIGTIAAFYNANLGITKKPMPDFSFYDRFAPIYTQPRHLPPSKVLDADVTDSVIGEGCVIKNCKINHSVVGLRSCISEGAIIEDSLLMGADYYETEADKKLLAEKGGIPIGIGKNSCIRRAIIDKNARIGDNVKILNADNVQEAARETDGYFIKGGIVTVIKDALLPSGTVI

SEQ ID NO: 43711 - protein, 146 aa, Zea mays
  Clone ID: 700550660_FLI.pep
APASRLQLSSKQAGSKHAELHKCITSYISITIPKASDSLTGFSVLNHQLLSINQKHDLHLSKIPKASSSFYQPKAPNTCIAPSSSCMPGNCSADTPGHGARCTRGGARTMTTNSEVSSHQPTAARPSIMSPKHARLLGTNSWTRRR

SEQ ID NO: 43712 - protein, 334 aa, Zea mays
  Clone ID: 700552011_FLI.pep
NKEMKLETVTAAMSDGKLLSQKQQHGIESKVEECGIPMSEEEAAAFAAAEAARAAAIAAAQAYASVEAEISVPRELPKIPSFQSFVMRDHHLDESDARKRTLKDNFGRLECISENDSKNGEVKDLPENTKYADGDSLKMSHDNFTQQSHSNETACLANAQDHSTDTGVVDGRFTRAWVDTDTICIDGVKDPLAIERWQAQAMEADKEFYSRIRIPDEDDSSSQKHTCRSSASQGADSKPASERQSRGVEHIKQGLVNFIASLLMPLYRGKKIDREGYKTIMRKSVNKIIDTCSEGEKSMTTLEFLDDKRKIKIESFVGKMVDKHLHVVSKSAKP

SEQ ID NO: 43713 - protein, 324 aa, Zea mays
  Clone ID: 700612174_FLI.pep
IATPPFLSLEVSLPERTAQSQNRKAESSAAMRGGGAGPTAAFMSDEPPPADAEEVEENSGAEEEDEETVVEQDDDELELGLCLGSKQQQQQHPPPCRILTARDLQPRSLSPDSSVSSSSPAAGAGTAAPSKRAKADAAPNSPGTVASGHPQSSFGVVGWPPIRTFRMNSLFNQAKENASEAGAKKPIVEPDMQEDKEESKKGRTVGWVKVNMEGDIIGRKVDLNAHRSYKTLASALELMFMKPSIGLCTSSSSKTLKLLDSSSEYQLTYEDRDGDWMLVGDVPWEMFVGSVKRLKIMRTSDAKGLGPRFQGSHRPTAACTRGRT

SEQ ID NO: 43714 - protein, 410 aa, Zea mays
  Clone ID: 700473587_FLI.pep
LTPSLSVSGLRTTTSIRSHHSLLPPRLLPLPLPFHSRNQGVMGQMGGPDGDGDGGAGPHHQYHYQALLAAVQNPSQGLHPFPLPFHVPLHAGAGAPAAGPGPGADADASTHNANAAHHSQPPRGFTDWSASNSAFAAVASQPAPATTNTPFHYNLSQSYALWTHYMLNKNVSYSTYPTPHEEHPHPLRHTHIQENPHPLRHTHIPDKDSGCASSLGFDSFTTMSLGPNICSHMTPMEGSISAKEPENSEDLPAIVRSSDEMDTRNSGKVHRDTVGTLPESKQSHESCASVNNKFNSGEYQVILRKELTKSDVANSGRIVLPKKDAEAGLPPLVQGDPLILQMDDMVLPIIWKFKYRFWPNNKSRMYILEAAGEFVKTHGLQAGDALIIYKNSVPGKFIIRGEKSIQQTNP

SEQ ID NO: 43715 - protein, 331 aa, Zea mays
  Clone ID: 700476495_FLI.pep
SFYTFLNTHNGLNCSSISHDGSLVVGGFSDSSVKVWDMSKMGQPAKISRSQGENGPSQGERISTLDEGKRTYTLFQGHSGPVYSAAFSPFGDFLLSSSSDSTIRLWSTKLNANLVCYKGHNYPVWDVQFSPVGHYFASASHDRTARIWSMDKIQPLRIMAGHLSDVDCVQWHVNCNYIATGSSDKTVRLWDVQTGECIRMFIGHRSMVLSLAMSPDGRYMASGDEDGTIMIWDLSTGRCVSPLLGHSSCVWTLAFSCEGALLASGSADCTVKLWDVASSTKTLKTEDTKGSSANRLRLLKALPTKSTPVYSLRFSRRNLLFASGALSLSSS

SEQ ID NO: 43716 - protein, 221 aa, Zea mays
  Clone ID: 700574081_FLI.pep
ELVSIRSLCAFARRARHKYKSEESLPSYSVVGSSSAFGISSQRLSNGHLKLPSYFGAIAVLVCFVSAGFSLAFAFAIIPRQVMPWTGLLLMLEWTFVAFFLLFGSYLRFVYRWGSISANHVGFSNSDSSENHMGPGHQRNMSDCDMDATFYWIGMASIATITVLLPTILGITALFTKLGLMVAGGIVLASFMTYAAEHLAISVFNKGQKYRNASRTRSFCF

SEQ ID NO: 43717 - protein, 200 aa, Zea mays
  Clone ID: 700577440_FLI.pep
EFASGAPYDPLVDSIEPSSSSINKVDLRKEKNWSAADRRDASKFMNLEVDSENMHGLGVVAESEVEGLGEVAADTETGVVENASPEFLGGKDWNSDIPVDFDNDQTLDKNKKGKDSRSMKLFKSAIADFVKEVLKPSWRQGNMSKEAFKTIVRKTVDKVSGSVPSSHIPKTPAKIKHYVQSSQRKVTKLVMGYVDKYVKP

SEQ ID NO: 43718 - protein, 248 aa, Zea mays
  Clone ID: 700582856_FLI.pep
ASPVHYKYNPIKTIKTNVVGTLNMLGLAKRIGARFLLTSTSEIYGDPLQHPQVETYWGNVNPIGVRSCYDEGKRTAETLTMDYHRGANLEVRIARIFNTYGPRMCIDDGRVVSNFVAQALRKEPLTVYGDGKQTRSFQYVSDLVEGLMKLMEGEHIGPFNLGNPGEFSMLELAKVVQDTIDPEAHIEFRPNTADDPHKRKPDISRAKELLGWEPKVPLREGLPRMVTDFRKRIFGDQEGSTEAAGGLS

SEQ ID NO: 43719 - protein, 254 aa, Zea mays
  Clone ID: 700615349_FLI.pep
TYQTMLNTLDGVRDETGASPTAWAVWTRAWTAEENRHGDLLNKYMYLTGRVDMRQIEKTIQYLIGSGMDPRTENNPYLGFIYTSFQERATFISHGNTARHAKDFGDLKLAQICGIIASDEKRHETAYTKIVEKLFEIDPDGTVVALADMMKKKISMPAHLMFDGQDDKLFEHFSMVAQRLGVYTARDYADILEFLVDRWKVADLTGLSGEGNKAQDYLCTLASRIRRLDERAQSRAKKAGTLPFSWVYGREVQL

SEQ ID NO: 43720 - protein, 235 aa, Zea mays
  Clone ID: 700805353_FLI.pep
VEKTDSFSDLVNRPLEGFDPIELDEAIIEENRSDSVEESSSTLDVQASEQRDDQRESLTNNDVKTDAAHETGTAISLSTSNGEHSGVKGEKCQKHETDGRDTDDFNPRDVEPGTKVSEDTTDVKSSAHVQTESVVQQNGPDSAKVTTAQTVIRNPFESSFSGPSITSGPLTPSGHIPYSGNISLRSESSTTSTRSFAFPVLQNEWNSSPVKMAKADRRRQKEDRGWGYRILCCKF

SEQ ID NO: 43721 - protein, 427 aa, Zea mays
  Clone ID: 700549105_FLI.pep
KHSVSSPGKNSFRDHAEESNYDSIGVSGRPSLQADHQQLSRRHEKRSPRKFSETSLSNGFHGREHRHSNNHPPLPPMPPPISSVSMQNTDSVNRQSSSFSARDRPTPNPSGYPTQSFDSSMPSAFTGLQGQTQYMLAGAGSSSANELPNVEAKLLWNTFPANRIPLETFSSGLPARPMPPLTPYSAVATQHATMNSGSPANLYSQGSVVQPSPTASIISDSNLAMNSASGSMLASNLLPSFASQFLMSRPSMPTPFFGTPLQQVQFSSGLPQNISNPQPPVSIQPRPPPPPPPPQQPHPSQTLQQLGAIQLPHQDQQHSYPHSAILPQVTLQFPNQLPIPQVQLYHQSQQESGQTLRQVGEQSQLQNQGMQADSFSQQQQDSGINLNQFFSSPEAIQSLLSDREKLCQLLEQNPKLMQMLQDRIGQL

SEQ ID NO: 43722 - protein, 332 aa, Zea mays
  Clone ID: 700551121_FLI.pep
KLRPGIPLKCMHGRMKHVVQQAIVADFNEATSVLFSTDITSRGLDIKNVDWVVQVDCPENIDNYIHRVGRTARYNKKGKSLIFLCPEEEAMLEKLKATESKIPIHIRKPKAEQLEQISQSIASVLVKFPNLQELGKRAFVTYLKAVYLQKDKKVFNLSRFSAEQFAAYAASLGLPVTPKIRFISHKKNVSKKDMEDIDMKQMKSSLEHEVTITPKINIDLTLCDGDDDILYPKKPTADANMDDRLDDVLHPKESATDTNVTGLERPFKKKKLKINVNRPSGTRVKYDDEGNAIPPLASVAEEVSLEPVVHKDKSLFCLCFFVVNNLREGCEP

SEQ ID NO: 43723 - protein, 676 aa, Zea mays
  Clone ID: 700553159_FLI.pep
LRRYSKARSGNSVTSQNDVNQAYKPPNIEMYEKRVQELTKTAEDSQKKADQLREDLQLKTKQETEMQEELEGLRDTLQSERQSSKDIKNELDKLKSLCDEKESALQASLMEKSRLETRLTSGQGRERDTLTTVGSVNNDIEMLAKLKEELKSYQKEFDASKEISKKLMSEKNILDQKVQRLERMKNEEKSAMEKVYADECCKLKSQIAELEQKLEVATRSLNVAESNLAVRNADVDSLQNSLKELDELREFKADVDRKNQQTVEILKRQGAQLVELENLYKQEQVLRKRYYNTIEDMKGKIRVFCRLRPLSDKEISFEEKNIVCSPDEFTISHPWKDEKSKQHIYDRVFDANTSQEEVFEDTKYLVQSAVDGYNVCIFAYGQTGSGKTFTIYGSEINPGLTPRATSELFRVIKRDGNKYSFSLKAYMVELYQDNLVDLLLPRNAKQLKLEIKKDSKGVVTVENVTVVSISSIEELRAIISRGSERRHTAGTNMNDESSRSHLILSIIIESTNLQTQSYARGKLSFVDLAGSERVKKSGSAGKQLKEAQSINKSLSALADVIGALSSDGQHIPYRNHKLTMLMSDSLGGNAKTLMFVNVSPAESNLEETYNSLMYASRVRCIVNDTSKHVAPKEIMRLKKLIAYWKEQAGKRSDEDELEEIQEERISKERADNRMTS

SEQ ID NO: 43724 - protein, 289 aa, Zea mays
  Clone ID: 700475313_FLI.pep
RVWYTTNSVIVTWLLASMSSSVSKMVEAMRAVAQIWKTLNNMYSRKENVMMMMEIRSKADAVKHTGRPVEQYASEIQYLWRELDHYAPLQMVCPQDAQVVHKWVEDRRVTHFLKNLDPEFESRRDAFCHQESLPTMDEAVSAMINEESRLRVMTSNDPAKSAYTANDDRDCYNCGEKGHLSYNCPHPRGSGERGGGTRGATCSTYGRGRGGYGRGRGGRARGRGRGGPHVNVAVTEDTPSITLTREQAKRWEEWHKGKESECPTSTPLGSVATTSTQHFGEENWEEDWD

SEQ ID NO: 43725 - protein, 633 aa, Zea mays
  Clone ID: 700475463_FLI.pep
CGLRHRSSAMNAVEPSAAAIAEDPITPAASAAPYPGRLREALTALSEACESGNFNASETASFTISDILDTAAGVSGELDDGSDDSQDASRSGASEVLLREVLEFLSRPSSISNQMALDALSLVLPKPVAKLGARMGRCRDVAAAILKFFVTNCNPRDMLSILCEALDAPMELPNGLSSFVLLLDALAKVFTLIQRRHIEQVKVALPVVLKVMHATVSECVEEHGSAAVDLFNAAHGVGKAIQEMCISMFNKNKDLCAILGLYSLQNIALVSRSRQQDILSACGSVVFQSFRFLKTSGFTYRGLLTGSDVTAATVELSKEEDADFMEHFSFAMDGAALSVVWTLMHDDKDMSKYAGEELELAVKEVQGNHMEKWEAINMLKYVLSSIHYPWIIKSHSLNLMLILSGEDHVEEINNHVDFTCFAHRIFETLKAIESVMIAAPMALVRKKAFAALKKVISMVPSSQRFDILHGLVNNSTSPALTAILLDLVRQEVSRESRQADNDCIEDEGFRGNGLPRWASHALELVELILRPPEGGPPCLPDHSEQVISALNLLRFILIIDSRGQRSAKLFRKETLHKVHSEWLTPLRPIAEQIQLENEKDADEITKQIVCMLNLVQLVLYRCIELVEEKMKGC

SEQ ID NO: 43726 - protein, 264 aa, Zea mays
  Clone ID: 700579192_FLI.pep
AYLCGGNNRCHITCPHVHINKSYRNPDSTMVGLGYDRLFTSHSRALIRSPSVWTCALVTSATLRQPQSAMANSSSLFSISITCLAPASPRAASPKNTGLPTMTALAPSASAFNTSVPRRTPPSTSTGTAPATALTTCNATHTTPRHPGGPSQFTAAARRNNSSTAGPTACVPHRERSGPGPGPARPLRFACVALQARRINVAGLPPPGRRSVTLPLRAPRWWPAHSPAAGRRGWTRSSRPPPPPRPSSLLDAATESSQFSETRQ

SEQ ID NO: 43727 - protein, 241 aa, Zea mays
  Clone ID: 700617007_FLI.pep
LHRPPISPRASAPIRGSAAAGSGRPAMAHRVDNEYDYLFKIVLIGDSGVGKSNILSRFTRNEFCLESKSTIGVEFATRTLQIEGKTIKAQIWDTAGQERYRAITSAYYRGAVGALLVYDITKKQTFENIQRWLRELRDHADSNIVIMMVGNKSDLNHLRSVPEEDGQALAEKEGLSFLETSALEALNVEKAFQTVLSDIHQIISKKALAAQEAAGSGPPGQGTTINVADSSANTKGGCCSS

SEQ ID NO: 43728 - protein, 371 aa, Zea mays
  Clone ID: 700617054_FLI.pep
VSKGSLRIANKQFKTVKNDYELSLNENAIVEEAEGETFLPPVQYNLVKIDQLGPYVGGRELVDIVGVVQSVSPTLSVRRKIDNETIPKRDIVVADDSGKTVTISLWNDLATTTGQELLDMVDSLPVVAIKSLKVSDFQGVSLSTIGRSTLEINPDLPEAKNLKSWYDSEGKDTSLAPISAEAGATRAGGFKSMYSDRVFLSHITSDPAMGQEKPVFFSLYAIISHIKPDQNMWYRACTTCNKKVTEAFGSGYWCEGCQKNYSECSLRYIMVIKLSDPTGEAWVSVFNEHAEKIIGCSADELDRIRKEEGDDSYVLKLKEATWVPHLFRVSVTQHEYMNEKRQRITVRGEAPVDFAAESKYLLDEIAKLTAC

SEQ ID NO: 43729 - protein, 88 aa, Zea mays
  Clone ID: 700623103_FLI.pep
MNGSFNSCFCRIQGFSKFSRSDISFDYSRLQVLDTRGRLLTALGYGLWPSMVLLSEIVQTFILADFCYYYVKSVFGGQLVLRLPSGVV

SEQ ID NO: 43730 - protein, 116 aa, Zea mays
  Clone ID: 700623774_FLI.pep
KQEMNLEAPPALGGGCAAPMLGDSMAKAPSSPWMPFSMLFAAISTKVSPQIMDMVIGCYEEFKSKKISRCELIKELRHVVGDRVLISTIMRLQDKLPPVERREGPGASAAKMVAKP

SEQ ID NO: 43731 - protein, 134 aa, Zea mays
  Clone ID: 700623869_FLI.pep
KSPSSPNLETRDGHDDDPRFHAHRRRRSCRPVLRRSRCISARGATTAADRRRVETDQERERPPRPRDRPVGGFGAHQDGQRRAGLRQGGERRGADRRREKLQAAYSSDEGRRAEGDVPCGGVRAAYQHKAAPIV

SEQ ID NO: 43732 - protein, 229 aa, Zea mays
  Clone ID: 700802379_FLI.pep
TDPAILTGPSSLISHSLAPSTSTTTSLLVDDLVAAAHMASDGAAATPAKVTPKKANLLDPHSIKHLLDETISEVVKSKGYTEDTRLGNWKLGIGAAVIAVALLAQFYPKKFPQNRDFLLGCIALYVVLNVVLLILSYTKEKDAILFTHPPMGSFSSTGLTISSKLPRFSDMYTLTIASADPQSISANKPVHFTKSVTKWFTKEGVLVEGLFWKDVEKLIDDYNSERKSK

SEQ ID NO: 43733 - protein, 170 aa, Zea mays
  Clone ID: 700802705_FLI.pep
KTWTRANDHSQHGRNIGTTKAFTPVTHHTQIHPSRSATSPRAGDREGLSQYHFIYCAPQEPDGAPHDCWGCEFIPVSSGGGLGLAYSAKITHPSRNFPSFPSIPLAASSVVAYLTKPNPLENPLTRSVTTRAAVVREMRSFESLSQKEQQRKERTIPCKTSPNSAKASLS

SEQ ID NO: 43734 - protein, 586 aa, Zea mays
  Clone ID: 700381136_FLI.pep
AGFPNVIEAAHHPVVTLSWSIINFSRQCLDPGIRAKYFSPRLMEAVIWFLARWVATYLVPLDVSRGKVSREIDNVGTNGSQHSRKLLNSFAWENNQGELVLDFVVLISMLALTTYQGENELQTLTCQKLLATVVRRKHTCTYLVQLDSWRDLTRAFASGRSLLSLSGRLQRSLAETLASAASCIKDPEASAQYLRDLMGPVAGCLVENASRSDLKSVAQQADVIYMVCCLLERLRGAARATQPRTQKVLFEMAHTVMNPLLTLLEVYKNHSTVVYMILKFVVDFVDGQAVFLDAKETSALVSFCLQLLQIYSSHNIGKVMLSLSSSLRNESQAEKYKDLRALLRLLTNICSKDLVGFLSDCGGEGSPDIAEVIYIGLDIVTPLISLDLLKYPKLSRDYFVLISHLLELYPEKVAHLNSDAFTRIIGSLDFGLRNQDSDVVERCLAAVNALASYNFKERLGGRGRLNSQLMESEGSNGKLQESISSHFLRLLLQILLFEDFRSELAGYAADALLPLLFCEQELYQRLVHELLDKQQNPTVKSRLATAFHNLTSSNNLSSSLDRPNRQRFRKNLLSFMADVSGFMQIK

SEQ ID NO: 43735 - protein, 79 aa, Zea mays
  Clone ID: 700572330_FLI.pep
PLLRASQLSPQQQKGIEARAETSYQANILQETFYQDLHPYTPGIFRRISEQRYKHTEMAIPAIKFWYRRLLSLLGIKAD

SEQ ID NO: 43736 - protein, 277 aa, Zea mays
  Clone ID: 700548931_FLI.pep
SDEKNGREEQLKQMHLDMEALLKYLSSVSFRSSDNEDKGKDERYLSSDEKNGREEQLKQMHLDMEALREDKSKLEAILEKKTDEERKLCSRVEDLELQLNKEKDDFQRMTSKTKKLIKAHGRYIKAQEDLKRSQARFERLADLLASDILKPYTKEQGSIGITANDDPYNGNEMSPSDQRQNHVSASRKRPISLPRSEEAKTGKRQRENGDDMIPTPENYRPEDALEHVQDSKGTDRLESFTVKKLRVGDYDDEGNIVSSSNIFADRYKGDDEEVDVD

SEQ ID NO: 43737 - protein, 286 aa, Glycine max
  Clone ID: 700553763_FLI.pep
PHTMSTKFKVFREFTSDDSFLNQVIPENITEFQVTLSLARDYDGNNSTNGKFIPYWDTEKVTPEVIKKFKKKYEPTALRVKVLVSIGNKNKQFPFTIGSDSNSEAWVSEATASLKSIIKTYNLDGIDVSYEDIAANEADFVNSVGGLVRNLKQNKLITVASFATSADAANNKFYNLLYAEYATFFDTVVFLSWVGFTPSRANPVASLEEKILAVANEYKAVKAFLVAYSTVAEDWANFSPPIFFITLHGLLGNSAVKGASIKVISDATASFPAKWIPEILLLAASK

SEQ ID NO: 43738 - protein, 283 aa, Glycine max
  Clone ID: 700556360_FLI.pep
KVPLILGIWGGKGQGKSFQCELVFAKMGINPIMMSAGELESGNAGEPAKLIRQRYREAADLIKKGKMCALFINDLDAGAGRLGGTTQYTVNNQMVNATLMNIADNPTNVQLPGMYNKEENPRVPIIVTGNDFSTLYAPLIRDGRMEKFYWAPTRDDRIGVCTGIFRTDSIPEQDVVKIVDTFPGQSIDFFGALRARVYDDEVRKWISGVGVDGIGKKLVNSKDGPPTFEQPKMTLEKLLTYGNMLVQEQENVKRVQLADKYLNEAALGNANEDAINRGTFFQS

SEQ ID NO: 43739 - protein, 433 aa, Glycine max
  Clone ID: 700556639_FLI.pep
NKAREKRSVKTDTVRMMKRRFLLVLLVLYVTVEFYVEADGSGGFVRTRGVQLMLNGSPYYANGFNAYWLMYLASDPSQRNKVSSVFQQASNHGLNIARTWAFSDGGYQPLQYSPGSYNYQMFQGLDFAIAEARKYGIKMVLSLVNNYENMGGKKQYVEWAKSQGQSINSEDDFFTNPVVKGYYKNHIKAVLTRRNSITGVAYKDDPTIMAWELMNEIRCPSDQSGRTVQAWITEMASYLKSIDGNHLLEAGLEGFYGQSKPQSNPNFNVGTDFIANNQIPGIDFATVHSYPDQWLSSSSYEDQISFLGRWLDEHIQDAQNTLHKPLLFAEFGISTKSYGGNSTPRDRLFNTVYSAIYSSASSGGAAVGGLFWQLMVQGMDSYRDGYEVVLDESPSTANLIAQESQKLNRIRKMYARLRNIEKWNEAKQIRGGN

SEQ ID NO: 43740 - protein, 602 aa, Glycine max
  Clone ID: 700556787_FLI.pep
FLLLLPIMSSSFSVRFLAPLPPSSSSCFPTSSLPKTWLCAAATPTVAPSTTTSSSEVEASRLEPRVEERDGFWVLKEEYRGGISPQEKVKLEKDPMKLFMEGGIEELAKMSLEEIESSKHTKDDIDVRLKWLGLFHRRKQHHGRFMMRLKLPNGVTTSAQTRYLASVIRKYGKDGCADVTTRQNWQIRGVVLPDVPEILKGLDEVGLTSLQSGMDNVRNPVGNPLAGIDPDEIVDTRPYNNLLSQFITANSRGNPAMSNLPRKWNVCVVGSHDLFEHPHINDLAYMPANKDGRFGFNLLVGGFFSAKRCAEAIPLDAWVSADDVIPLCKAVLEAYRDLGFRGNRQKTRMMWLIDELGIEVFRSEVEKRMPGKKLERASKEELVKKQWERRDYLGVHPQKQEGLSYVGIHIPVGRVQADDMDELARLADEYATGELRLTVEQNIIIPNVDNNKIDGLLNEPLLKGRFSPEPSLLMKTLVACTGNQFCGQAIIETKERALKVTEEVERQVAVTRPVRMHWTGCPNTCGQVQVADIGFMGCMARDDNGKATEGVDIFLGGRIGSDSHLAQVYKKGVPCKDLVPVVVDILVKHFGAVLRNREEGED

SEQ ID NO: 43741 - protein, 251 aa, Glycine max
  Clone ID: 700559125_FLI.pep
AMGKSYPTVSADYQKAVEKAKKKLRGFIAEKRCAPLMLRLAWHSAGTYDVSSKTGGPFGTIKHPSELAHGANNGLDIAVRLLEPLKAEFPILSYADFYQLAGVVAVEVTGGPEVPFHPGREDKPEPPPEGRLPDATKGSDHLRDVFGKAMGLSDRDIVALSGGHTIGAAHKERSGFEGPWTSNPLIFDNSYFKELLSGEKEGLLQLPSDKALLSDPVFRPLVEKYASDEDAFFADYAEAHQKLSELGFAEA

SEQ ID NO: 43742 - protein, 330 aa, Glycine max
  Clone ID: 700561696_FLI.pep
EVSKSFGSGVQGAEKNKLFFFEGSSHSFDLEDLLKASAEVLGKGSYGTAYKAVLEEGTTVVVKRLKEVVVGKKEFEQQLEIVGRVGSHPNVMPLRAYYYSKDEKLLVYNYMPGGSLFFLLHGNRGAGRTPLDWDSRVKILLGAAKGIAFIHSEGGPKFAHGNIKSTNVLINQELDGCISDVGLPPLMNTPATMSRANGYRAPEVTDSKKITHKSDVYSFGVLLLEMLTGKTPLRYPGYEDVVDLPRWVRSVVREEWTAEVFDEELLRGQYVEEEMVQMLQIALACVAKGPDQRPRMDQVVRMLEEIKHPELKNYHRQSSESESNVQTPTP

SEQ ID NO: 43743 - protein, 275 aa, Glycine max
  Clone ID: 700561928_FLI.pep
VRFELTFFALNPKLNVVAPWREWDITGREDAIEYAKKHNIPVPVTKKSIYSRDRNLWHLSHEGDILEDPANEPKKDMYMMSVDAEDAPDEAEYVEIEIESGLPVSVNGKRLSPATLLTELNEIGGRHGIGRIDMVENRLVGMKSRGVYETPGGTILFAAARELEFLTLDRETIQVKDSLALKYAELVYAGRWFDPLRESMDAFMQKITETTTGSVTLKLYKGSVTVTSRKSPFSLYRQDISSFESGQIYDQADAAGFIRLYGLPMRVRAMLEQGI

SEQ ID NO: 43744 - protein, 265 aa, Glycine max; identical to SEQ ID NO: 40021
  Clone ID: 700561979_FLI.pep

SEQ ID NO: 43745 - protein, 229 aa, Glycine max
  Clone ID: 700562033_FLI.pep
SKSINAFIQRFLSAQTRLAHFVEQVAVAVDFKDQTGEQQTMQQNLQNVCLKTGAPMESHAATILTPFAFSKLQEQLVLAAHYASFSIEDGFLVRHHTKAEGGRKVYWAPQEGIISCSCHQFEFTGILCRHSLRVLSTGNCFQIPDRYLPIRWRRINMPSSKLLQSAPNDHAERVKLLQNMVSSLMTESAKSKERLDIATEQVTLLLSRIREQPISLQVGRDISSINRNL

SEQ ID NO: 43746 - protein, 273 aa, Glycine max
  Clone ID: 700565536_FLI.pep
KMSHSDTIPLHPSSQSDIDEIENLINASVHQSVPSARPPSPPRASIPVSVSAAPSPFISSNLPPPPPLPKSSVSAVPPPPPPPRADISSSGFGSAPNTLTEPVWDTVKRDLSRIVSNLKLVVFPNPFREDPGKALRDWDLWGPFFFIVFLGLTLSWSASVKKSEVFAVAFALLAAGAVILTLNVLLLGGHIIFFQSLSLLGYCLFPLDVGALICMLKDNVIVKVVVVCVTLAWSSWAAYPFMSSAVNPRRKALALYPVFLMYVSVGFLIIAID

SEQ ID NO: 43747 - protein, 354 aa, Glycine max
  Clone ID: 700565660_FLI.pep
SLMGTEGYTYMGRSLSELRINDDSSSSAFSDCNSDRSGEFATASSQTRRFLIACATENSDDLIRQLVADLHSSSIDDQKQAAMEIRLLAKNKPENRIKIAKAGAIKPLISLISSPDLQLQEYGVTAILNLSLCDENKEVIASSGAIKPLVRALNSGTATAKENAACALLRLSQVEENKAAIGRSGAIPLLVSLLESGGFRAKKDASTALYSLCTVKENKIRAVKAGIMKVLVELMADFESNMVDKSAYVVSVLVAVPEARVALVEEGGVPVLVEIVEVGTQRQKEIAVVILLQVCEDSVTYRTMVAREGAIPPLVALSQSGTNRAKQKAEKLIELLRQPRSGNGAARSTSEVVA

SEQ ID NO: 43748 - protein, 134 aa, Glycine max
  Clone ID: 700565837_FLI.pep
EFVYTCINQQALKVYVPTFESYGRMWPHIHNRILASLILYQITMFGYFGTQKFYYTPLVLPLPILSLIFGFVCAKKFYPAFQHPALEVAANTLKEVPNMELIFRAYIPPSLRSEKIDDDRVEDALSQCSRTAPV

SEQ ID NO: 43749 - protein, 228 aa, Glycine max
  Clone ID: 700566935_FLI.pep
SGTSMACPHVSGIAALIRSVHPRWSPAAIKSAIMTTAEVTDHTGRPILDEDQPAGVFDMGAGHVNPQRALNPGLVYDIRPDDYITHLCSLGYTKSEIFSITHRNVSCNAIMKMNRGFSLNYPSFSVIFKGGVRRKMFSRRLTNVGSANSIYSMEVKAPEGVKVIVKPKRLVFKQVNQSLSYRVWFISRKRVKRGDDLVNYAEGSLTWVHSQNGSYRVRSPVAVTWKSK

SEQ ID NO: 43750 - protein, 193 aa, Glycine max
  Clone ID: 700651179_FLI.pep
GFYGQSTPQRKTMNPGFNIGTDFIANNRIPAIDFATVHCYPDQWVSSSNIQYQLSFLNNWLSAHFIDAQYHIKKPILVAEFGKSFKGSSSYERDEVFNSVYYKIYASAKRGGAASGALFWQLLTEGMESFQDGYGIILGQSSSTANLIARQSRKLYLIRKIFARVANMRRWQRARARGFSGSGGGNGGRYIDN

SEQ ID NO: 43751 - protein, 246 aa, Glycine max
  Clone ID: 700651545_FLI.pep
QIRSPPQRRNDAQNDYFSVVSQGIGKLSFVAASAANVVQVGTKEFTSKVKEGGYDHKVNETVNVVTQKTSEIGQRTWGIMKGVMAMASQKIEEYTKDDPNWKNDNWQRNENDTNGYYQDFNREKKGWNSSTGREQSSSGEYKTESSSSWDDWDHKDSRKEEPAKGSTHSSGGQFSTYNSSSWDDWEHKDSRKEEPAKGSAPHNNDDWAGWDNAKDDGFDNIYEGANKKGVGHKGKSDGTWTEEGFL

SEQ ID NO: 43752 - protein, 449 aa, Glycine max
  Clone ID: 700651839_FLI.pep
FGKMLLGFSTLALLVCFSCCWLLVLGEGETASCSNIVALGHRTDNISITEFGGVGDGRTLNTKAFREAIYRVQHLPREGGTLLYVPPGVYLTEPFNLTSHMTLYLAAGAVIMATQDSLNWPLIAPLPSYGRGRERPGGRYMSFIHGDGVQDVVITGENGTIDGQGDAWWNKWRQGTLQFTRPNLVEFVNSRDIIISNVIFKNSPFWNIHPVYCSNVVVRYVTILAPRDSPNTDGIDPDSSSNVCIEDSYISTGDDLVAVKSGWDEYGIAYGRPSSDITIRRITGSSPFAGIAIGSETSGGVENVLAEHINLYNMGIGIHIKTNTGRGGFIKNITMSHVYMEEARKGIRISGDVGDHPDDKFDANALPLVKGVTIKNVWGMKVLQAGLIQGLRNSPFTDICLYDINLHGVTGPRTPPWKCSDVSGFAHQVSPWPCSELSSNQQGSCANYS

SEQ ID NO: 43753 - protein, 166 aa, Glycine max
  Clone ID: 700605475_FLI.pep
EERDDTLRIQRLRKKFYFHFQDYVDLIIWKVQFLDRHHLLIKFGSVDGGVSRNADHHPAFVAVYNMDTTEIVSFYQNSPDELYLLFEQFCDHFHATSRNSMYMNFISSHSNNIHALEQLRSIKDKASSSAQFVKKMLASLPFSCQSQSPSPYFDQSLFRFDDKVYY

SEQ ID NO: 43754 - protein, 423 aa, Glycine max
  Clone ID: 700654923_FLI.pep
ARQAPLNHHTSPRSRYPFLLFFYLSSFKSIKMAETFLFTSESVNEGHPDKLCDQISDAVLDACLEQDPDSKVACETCTKTNLVMVFGEITTKANVDYEKIVRDTCRNIGFVSNDVGLDADNCKVLVNIEQQSPDIAQGVHGHLTKKPEEIGAGDQGHMFGYATDETPELMPLSHVLATKLGARLTEVRKNGTCPWLRPDGKTQVTVEYYNDNGARVPIRVHTVLISTQHDETVTNDEIAADLKEHVIKPVIPEKYLDEKTIFHLNPSGRFVIGGPHGDAGLTGRKIIIDTYGGWGAHGGGAFSGKDPTKVDRSGAYIVRQAAKSIVASGLARRCIVQVSYAIGVPEPLSVFVDTYGTGKIHDKEILNIVKENFDFRPGMISINLDLKRGGNNRFLKTAAYGHFGREDPDFTWEVVKPLKWEKA

SEQ ID NO: 43755 - protein, 587 aa, Glycine max
  Clone ID: 700659079_FLI.pep
KKEHITMEYGRLGPSDPGGSSRLNPPRSSGRKNIVFLSLFAVLLIAASAVTAVAVRSRTKNTGGDGTSLGKFTQAISRTCSKTRFKMLCMKSLLDFPGSQGASEKDLVHISFNVTLQHFSKALYSSATISYTAMDPRVRAAYHDCLELLDDSVDALARSLNTVSVGAVGSANDDVLTWLSAALTNQDTCAEGFADAAGTVKDQMANNLKDLSELVSNCLAIFSGAGAGDDFAGVPIQNRRRLMAMREDNFPTWLNGRDRRLLSLPLSQIQADIVVSKDGNGTVKTIAEAIKKVPEYSSRRIIIYIRAGRYEEDNLKLGRKKTNVMFIGDGKGKTVITGGRNYYQNLTTFHTASFAASGSGFIAKDMTFENYAGPGRHQAVALRVGADHAVVYRCNIIGYQDTMYVHSNRQFYRECDIYGTVDFIFGNAAVVFQNCTLWARKPMAQQKNTITAQNRKDPNQNTGISIHNCRIMATPDLEASKGSYPTYLGRPWKLYARTVFMLSYIGDHVHPRGWLEWNTSSFALDTCYYGEYMNYGPGSALGQRVNWAGYRAINSTVEASRFTVGQFISGSSWLPSTGVAFIAGLST

SEQ ID NO: 43756 - protein, 141 aa, Glycine max
  Clone ID: 700659189_FLI.pep
SDFFRFCRLMTKFRQECESLGLADFPTSERLQWHGHFPGKPDWSETSRFVACTMVDSVKGEIYIAFNMSHLPFTVTLPERPGYKWEPLVDTSKPTPYDFLTPDLPGRDIAIQQYAQFLDANMYPMLSYSSIILLRIPDENL

SEQ ID NO: 43757 - protein, 264 aa, Glycine max
  Clone ID: 700662226_FLI.pep
NPLLQLKFGCSTSEDHQFVRGIPIYAISQVLDKIISGANGSPLLINGVKRPMPLVRILEVELYPTLLSKARSFGLSDDWIQALVKKDPVRRQVLRVKGCLAGSKAENLLEQGDMVLAINKEPVTCFRDIENACQALDKSDANDGKLHLTIFRQGQEVELFVGTDVRDGNGTARAINWCGCIVQDPHPAVRALGFLPEEGHGVYVARWCHGSPVHRYGLYALQWIVEINGKPTPNIDSFVNVTKVWNLLCMYVTHTYMLLPPLSS

SEQ ID NO: 43758 - protein, 451 aa, Glycine max
  Clone ID: 700662287_FLI.pep
LGSMVWKLLGARPLCSYSSSLLLTPLLFRSKISLVHGQEPIFGHLCYMKPSPFLGNVSFHSYPFLKFNDKVVEQQHQDSQKASSANVDGDGNAKVKRNKLKGKRAVVRWLKFFRFKKKKEYERMTAEEKNLYKLLKARKKEERLCEALKKIEPAESSETTHDPEILTPEEHFFFLKMGLKSKNYVPVGRRGIYQGVILNMHLHWKKHQTLKVVVKTFSAEEVKEIAAELARLSGGIVLDIHEDNTIIMYRGKNYSQPPTEIMSPRVSLSRKKALDKSKYRDALRAVRRYIPRLEQELEILRAQFKSSAESNTDAAEAIQNSGRESIESGSISNFQLQNSYKDREMMNVNIGSTEDETDMNSELDSDSDKLSDIFETDSDTENFVKEEKPLYLDEFDNFPEQSDGEMNDFEEHMRQMSLKSKNMEKDDNLPKLDEVDKIFLQATSFLKKKIK

SEQ ID NO: 43759 - protein, 340 aa, Glycine max
  Clone ID: 700663586_FLI.pep
VQLPTRRNIAPHVIDINGGTLVAETLGDTIVVKQQDAWDLTLNTKTGLVESWKVKGVHVMKKGILPCFWRAPIDNDKGGGSASYLSRWKAAGMDCLHFITESCSVQNITENSVRILVVFLGVTKGEDGSLSNQDKSKVLFTTEMAYTIYASGDVIIECNVKPNPDLPPLPRVGIELNVEKSLDQVTWYGRGPFECYPDRKAAALVAVYEHNVSELHVPYIVPGESSGRADVRWATFRNKDAFGIYASKYGSSPPMQMSASYYSTSELDRATHNEELIEGDSIEIHLDHKHMGLGGDDSWSPCVHEQYLIPPVPYSFSVRLCPVNPATSGHDIYKSQFQNS

SEQ ID NO: 43760 - protein, 331 aa, Glycine max
  Clone ID: 700663736_FLI.pep
IQMKTGSMIFSLLHVPRFRIQSLANCWGETFHSFSTTCGNNSNVRLLGSRIYGLQGGQRKKWTRPITTNIEGKGSTKSKSIKHEILSETILANATVNVNKTQLDKSQEIQYCDIQQEIAENKDLSSYTVIVFDIETTGFSRENERIIEIALRDLQGGENSTFQTLVNPQCKVPNSHIHGITTHMVNKPGVPRMEDLIPILLQYVRSREKPGGDVIFVAHNARCFDVPFIINELRRYSVEIPPNWLFLDTLPLARELIKSGGTTLSSTSLAALRDLYGIKVDGSAHRAMVDVNALSLILSRLTSDLKLTLSDLVKKSFTESDIINSKNKKKN

SEQ ID NO: 43761 - protein, 393 aa, Glycine max
  Clone ID: 700667095_FLI.pep
IGCEVVSLESYYKQNIDDIRNGQRTKVPIFDLESGARSGFKELEVSEDCGVIIFEGIYALHPDIRISLDLWIAVVGGVHSHLISRVQRDKSRVGCFISQNEIMMTVFPMFQQLIEPHLVHAHLKIRNDFDPVLSPESSLFVLKSNKKVAYQDIVAILDSAKFCSSVQKFIDIYIRLPGIPSNGQLRDSDCIRVRICEGRFALLIREPIKEGNFIIQPKVDFDIGISTVAGLLNLGYQAVAYIEASAFIYQDGKILIEVDHLQDVPGPYIQIKGVNKDAVAAAGSMLKLDGSYTTKSYLEIILERLPAIERTSGGIHSQQSARLLEIVEFIQSQGCSSASESSSSRVVSPIEGVIEEMQSRIRRLERWLAINTVLWTFLMSALVGYSLYQRKRQ

SEQ ID NO: 43762 - protein, 242 aa, Glycine max
  Clone ID: 700605926_FLI.pep
YQNYSSCGCGCCCHCCSLYIPCLHLCIPCSSFPCIPCSCLPCIPCSCLPCILCLALNILPNLLGLLPHFLRLLPHVLRRLGEVMLRGGGEVLRGWLGLPDVVQDPGEGRQRREPEGPRRQEPGHGQADGDRGWNQHRAEEDEERRGNCQSGEGSCQGQSRQEEQDATDREAGEDGEDLGSRWTSLGMVNGGRFDAGFITRRFETGSGGDDEGSEQIQNTLISSIHIHYRVVVPLFLRHERTS

SEQ ID NO: 43763 - protein, 330 aa, Glycine max
  Clone ID: 700606004_FLI.pep
IDTNSLENQLDQMPRRFYLAGNQEQEFLKYQQEQGGHQSQKGKHQQEEENEGGSILSGFTLEFLEHAFSVDKQIAKNLQGENEGEDKGAIVTVKGGLSVIKPPTDEQQQRPQEEEEEEEDEKPQCKGKDKHCQRPRGSQSKSRRNGIDETICTMRLRHNIGQTSSPDIYNPQAGSVTTATSLDFPALSWLRLSAEFGSLRKNAMFVPHYNLNANSIIYALNGRALIQVVNCNGERVFDGELQEGRVLIVPQNFVVAARSQSDNFEYVSFKTNDTPMIGTLAGANSLLNALPEEVIQHTFNLKSQQARQIKNNNPFKFLVPPQESQKRAVA

SEQ ID NO: 43764 - protein, 345 aa, Glycine max
  Clone ID: 700606027_FLI.pep
WMYNNEDTPVVAVSIIDTNSLENQLDQMPRRFYLAGNQEQEFLKYQQEQGGHQSQKGKHQQEEENEGGSILSGFTLEFLEHAFSVDKQIAKNLQGENEGEDKGAIVTVKGGLSVIKPPTDEQQQRPQEEEEEEEDEKPQCKGKDKHCQRPRGSQSKSRRNGIDETICTMRLRHNIGQTSSPDIYNPQAGSVTTATSLDFPALSWLRLSAEFGSLRKNAMFVPHYNLNANSIIYALNGRALIQVVNCNGERVFDGELQEGRVLIVPQNFVVAARSQSDNFEYVSFKTNDTPMIGTLAGANSLLNALPEEVIQHTFNLKSQQARQIKNNNPFKFLVPPQESQKRAVA

SEQ ID NO: 43765 - protein, 237 aa, Glycine max
  Clone ID: 700606274_FLI.pep
GVELNLKHVHASGIYGWASVCETTVGEWLEDISQNQIHKILRGLPTVRSLIAVGAGAAKLVSSPVQSYKKERRVLKGVQRGTMAFLRSISLEAVGLGVHLAAGAHDILLQAEGILASIPSPVPLPVKDKSKTDVRSNQPKDAQEGIQQAYESLSDGLGKSAAVLVQNPLKKFQRGSGAGPALAAAVRAVPAAAIAPASACASAVHYALLGFRNSLDPERKKESMEKYCPTQPLWEED

SEQ ID NO: 43766 - protein, 504 aa, Glycine max
  Clone ID: 700667830_FLI.pep
LILLCLSLSTIAMDPYKLRPSSAFNSPFWTTNSGAPVWNNNSSLTVGARGPILLEDYHLVEKLANFDRERIPERVVHARGASAKGFFEVTHDISHLTCADFLRAPGVQTPVIVRFSTVIHERGSPETLRDPRGFAVKFYTREGNFDLVGNNLPVFFVRDGMKFPDMVHALKPNPKNHIQENWRILDFFSHFPESLHMFTFLFDDLGVPQDYRHMDGFGVNTYTLINKAGKAVYVKFHWKTTSGIKCLLEEEAIKVGGANHSHATQDLHDSIAAGNYPEWKLFVQTIDPEHEDKFDFDPLDVTKTWPEDIIPLQPVGRLVLNKNIDNFFAENEQLAFCPAIVVPGVYYSDDKMLQTRIFSYADSQRHRLGPNYLQLPANAPKCAHHNNHHEGFMNFIHRDEEVNYFPSRYDPVRHAETFPIPPAICSGRREKCGIEKENNFKQPGERYRSWAPDRQDRFNRRWVDALSDPRVTHEIRSVWISYWSQADRSLGQKIASRLSMRPNI

SEQ ID NO: 43767 - protein, 376 aa, Glycine max
  Clone ID: 700668304_FLI.pep
VLLLHHHQRMAATVSSAWSKPGAWALDSEEHEAELLQQNNNNPNDKPLADFPSLAAAAATKPKKKKAQTYSLAEFTAKPDSAFADQDPVVLPTGPRQRTAEELDRTRLGGGFRNYGDRPNRNNSSGGDESSNSRWGSSRVSDEPRRNGFGARDSNRELPPSRADETDNWAAAKKPSGGFERRERDKGGFFDSQSRADESDSWVSNKSFVPSEGRRFGSNGGGFERERRVVGFGSSGGADSDNWNTKKGESNVGSESVGGRPKLVLQPRTVSVSDEGVDGNNAGKPKGVNPFGEARPREQVLAEKGQDWKKIDEQLESVKIKEASGGDGFGKRGFGSSNGGGGRATLPESRTERSWRKPQFDDDRPKSAEKVEDEPD

SEQ ID NO: 43768 - protein, 480 aa, Glycine max
  Clone ID: 700671273_FLI.pep
GEGKVSSNGHGCCKSGPGYASPLEAISGPRESLIYVTSVYTGTGIEKPDYLATVDVDPNSPTYSKVIHRLPVPYLGDELHHTGWNSCSSCHGDPSADRRFLIVPALVSGRVYVVDVKTNPRAPSLHKVVEPADIIQKTGLAYPHTSHCLASGDIMISCLGDKDGNAAGNGFLLLDSEFNVKGRWEKPGHSPLFGYDFWYQPRHNTMISTSWGAPSAFTKGFNLQHLSDGLYGRHLHVYSWPGGELRQTMDLGDSGLIPLEIRFLHDPAKDTGFVGSALTSNMIRFFKTQDESWSHEVAISVKPLKVQNWILPEMPGLITDFLISLDDRFLYFVNWLHGDIRQYNIEDVKNPKLTGQVWVGGLIQKGSPVVAITDDGETWQAEVPEIQGNKLRGGPQMIQLSLDGKRLYATNSLFSTWDKQFYPELVQKGSHIIQIDVDTEKGGLKINPNFFVDFGTEPDGPSLAHEMRYPGGDCTSDIWI

SEQ ID NO: 43769 - protein, 337 aa, Glycine max
  Clone ID: 700555147_FLI.pep
LPFLLIQIRWQPWQPQPSLQTPNSHSSTESPSHILPASRPPPNYPHPNKESIVSREMTRRYMTDMITYADTDVVIVGAGSAGLSCAYELSKNPAVSVAIVEQSVSPGGGAWLGGQLFSAMVVRKPAHLFLDELGVAYDEQEDYVVIKHAALFTSTIMSRLLARPNVKLFNAVAAEDLIVKEGRVAGVVTNWALVSMNHDTQSCMDPNVMEAKVVVSSCGHDGPFGATGVKRLKSIGMIDSVPGMKALDMNAAEDAIVRLTREIVPGMIVTGMEVAEIDGSPRMGPTFGAMMISGQKAAHLALKALGRNNAIDGTCGVGREEPQLILASADTEEIVDA

SEQ ID NO: 43770 - protein, 248 aa, Glycine max
  Clone ID: 700555601_FLI.pep
YFMTHIGVTRRLYQSNYFFFSSNVNQNVSENKKNITRKKKNESLELELETRNRAKAEYPDQRNLESSISNQEKDIENDYVGSDSEKNSKGIKKKKDKNKMEAELNFLLRNFLILHLNWNNFLGQRIFNNVKVYCLLIRLKNLREITIASIQRGELGLDIMMIQNQKNLILLGLRKKKNNKFMKKEIFVIEPVRLSRKNNKQFFMYQTIGLSLIQKNKRKIYHKYPEKIHVNKKNFYKYITRTRDQKIT

SEQ ID NO: 43771 - protein, 288 aa, Glycine max
  Clone ID: 700555694_FLI.pep
TLPNIKVPLILGIWGGKGQGKSFQCELVFAKMGINPIMMSAGELESGNAGEPAKLIRQRYREAADLIKKGKMCALFINYLDAGAGRLGGTTQYTVNNQMVNATLMNIADNPTNVQLPGMYNKEENPRVPIIVTGNDFSTLYAPLIRDGRMEKFYWAPTRDDRIGVCTGIFRTDSIPEQDVVKIVDTFPGQSIDFFGALRARVYDDEVRKWISGVGVDGIGKKLVNSKDGPPTFEQPKMTLEKLLTYGNMLVQEQENVKRVQLADKYLNEAALGNANEDAINRGTFFQS

SEQ ID NO: 43772 - protein, 270 aa, Glycine max
  Clone ID: 700557417_FLI.pep
GNPSSGDIFHAAPNVDHSQDFVRKDIKEWLNWLRNDIGFDGWRLDFVRGFSGTYVKEYIEASTPVFAIGEYWDSLGYEHGSLCYNQDAHRQRIINWINATGGTSSAFDMTTKGILHSALHNEYWRLIDPQGKPTGVMGWWASRAVTFLENHDTGSTQGHWPFPRDKLMQGYAYILTHPGTPTIFYDHFYDFGIHDVLTELIDARRRAGIHCRSSIKIYHANNEGYVAQVGDALVMKLGQFDWNPSKENQLEGSWQKFVDKGPDYQVWLRQ

SEQ ID NO: 43773 - protein, 462 aa, Glycine max
  Clone ID: 700557585_FLI.pep
AGSNCTMDSYTLQTVLRRGATPFESYFLPVAVGEGASSANFPLEPLLNKSSNVGESGDIWTYFTLDIPRGAAGRNIHIRLSADVKISYEVYARFGGLPSLHSWDYYYANRTRKSDQSVFFMLYDSSDDEIDFYIIYAREGTWGIGLRHLYIGSDSLKAQTVMSISLEGCPKQCSSHGDCKYSFDASGLTSYSFCSCDRNHGGFDCSIEIVSHKGHILQSIFLIGSNAAAILPAYWSLRQKAFAEWILFTSSGIASGLYHACDVGTWCALNFNVLQFMDFWLSFMAVVSTFVYLATVDEVYKRAIHTAVAILTALLAATKATRSSNVVLVIVIGALGLLIGWLIEISKKYRSLSFSFGLSLSFIQSLQTIKQWFCNLVKTLLRRFRWGFLLAGFIALAMAGLSWTLETSANYWFWHSFWHVTIYTSSFFFLCSKANIVDAEDSSSPSSGNYALTRQDSFPRGD

SEQ ID NO: 43774 - protein, 430 aa, Glycine max
  Clone ID: 700557659_FLI.pep
EIQKSVRKAAHGLRLTREVAMSIASKAVRKIFINYIKRARAAGNRTESAKELKKMIAFNTLVVTNLVEDIKGESTDISSEEPVKEDITQTDDEEWESLQTLKKIRPNKELTEKLGKPGQTEITLKDDLPERDRTDLYKTYLLYCLTGEVTRVPFGAQITTKKDDSEYLLLNQLGGILGLSSQEIVEVHRGLAEQAFRQQAEVILADGQLTKARVEQLNNLQKQVGLPQEYAQKIIKSITTTKMAAAIETAVTQGRLNMKQIRELKEADVDLDSMVSENLRETLFKKTVDDIFSSGTGEFDTEDVYEKIPSDLNINKEKARGVVHELAKGRLSNSLIQAVSLLRQRNQQGVVSSLNDLLACDKAVPSQPVSWEVPEELSDLYTIYLKSNPTPENLSRLQYLLGINDSTAAALREIGDRLLNTTAEEEKFVF

SEQ ID NO: 43775 - protein, 460 aa, Glycine max
  Clone ID: 700558318_FLI.pep
RIGNGSSGPQNVNVALSVDNQWVNGGQVEVADDRWHEIGGSFRIEKQPSKVMVYIQGPASGVDLMLAGLQIFAVDRHARFKYLRRQTDKIRKREIILKFSGLDSIGNLGTLVRVKQVQNDFPIGSCISRSNIDNEDFVDFFVKHFNWAVFGNELKWYWTEPHQGNLNYKDADEMLDLCQKNKIDTRGHCIFWDVDNTVQQWIKSLNKTDLMTAVQNRLNGLLTRYKGKFKHYDVNNEMLHGSFYQDRLGKDIRANMFKTAHQIDPSATLFVNDYHVEDGCDTRSSPEKYIQHILDLKEQGAPVSGIGIQGHIDSPVGPIVCSALDKMGTLGIPIWFTELDVSSTNEYVRADDLEVMLRESLAHPAIDGVMLWGFWELFMSRENSHLVNAEGELNEAGKRYLALKQEWLSHSHGYVDEQGQFSFRGFSGTYNVEVVTLAKKVTKTFVVDKGDSSLVVSIDL

SEQ ID NO: 43776 - protein, 404 aa, Glycine max
  Clone ID: 700559952_FLI.pep
VIASRVPNSKVSGGSFKIVAVEEKKEIEETQQTDKDRWKGLAYDISDDQQDITRGKGLVDSLFQAPQDAGTHYAVMSSYEYLSTGLRQYLDNKMDGFYIAPAFMDKLVVHISKNFMTLPNIKVPLILGIWGGKGQGKSFQCELVFAKMGINPIMMSAGELESGNAGEPAKLIRQRYREAADMIKKGKMCALFINDLDAGAGRLGGTTQYTVNNQMVNATLMNIADNPTNVQLPGMYNKEENPRVPIIVTGNDFSTLYAPLIRDGRMEKFYWAPTREDRIGVCTGIFRTDGIPEQDIVKLVDTFPGQSIDFFGALRARVYDDEVRKWISGVGVDSVGKKLVNSKDGPPTFEQPKMTLEKLLLYGNMLVQEQENVKRVQLADKYLNEAALGNANEDAIQRGTFFQS

SEQ ID NO: 43777 - protein, 381 aa, Glycine max
  Clone ID: 700560148_FLI.pep
SKLVYPLFSPLPDTNMASMTMIYTLLFLSFTLSYAIKTSTIINYTDNEVMAMYEEWLVKHQKVYNELGKKDKRFQVFKDNLGFIQEHNNNLNNTYKLGLNKFADMTNEEYRAMYLGTKSNAKRRLMKTKSTGHRYAFSARDRLPVHVDWRMKGAVAPIKDQGSCGSCWAFSTVATVEAINKIVTGKFVSLSEQELVDCDRAYNEGCNGGLMDYAFEFIIQNGGIDTDKDYPYRGFDGICDPTKKNAKVVNIDGYEDVPPYDENALKKAVAHQPVSVAIEASGRALQLYQSGVFTGKCGTSLDHGVVVVGYGSENGVDYWLVRNSWGTGWGEDGYFKMQRNVRTSTGKCGITMEASYPVKNGLNSAVPNSVYESTEVYVSSA

SEQ ID NO: 43778 - protein, 541 aa, Glycine max
  Clone ID: 700560418_FLI.pep
SSITTSEHFHCFYLTGSIDITSITMAEVAPPKKENPNLLLGRFELGKLLGHGTFAKVHHARNIKTGEGVAIKIINKEKILKGGLVSHIKREISILRRVRHPNIVQLFEVMATKTKIYFVMEYVRGGELFNKVAKGRLKEEVARNYFQQLVSAVEFCHARGVFHRDLKPENLLLDEDGNLKVSDFGLSAVSDQIRQDGLFHTFCGTPAYVAPEVLSRKGYDGAKVDIWSCGVVLFVLMAGYLPFNDRNVMAMYKKIYKGEFRCPRWFSSELTRLLSRLLDTNPQTRISIPEVMENRWFKKGFKQIKFYVEDDRVCSFDEKLLLHHDDDLATSDSEVEIRRKNSNGSLPRPASLNAFDIISFSQGFDLSGLFEEKGDEARFVSSAPVSKIISKLEEVAQLVSFSVRKKDCRVSLEGCREGVKGPLTIAAEVFELTPSLVVVEVKKKGGDKAEYEKFCNSELRPALENLGMEESASSSSSCHQSTHTQSEFQQHRTLSDSALNRHSDNECLFERELGLADETSISQHGESKFECQQENMAMFTI

SEQ ID NO: 43779 - protein, 339 aa, Glycine max
  Clone ID: 700560541_FLI.pep
SFRTPSDQISVANSSPLESICEDAEIVDKKQNLMNFVPTLRSGEWSDIGDRTSMEDTHICIGDLAEKFGNNELYKEAISFYGVFDGHGGKSAAQFVRDHLPRVIVEDADFPLELEKVVTRSFLEIDAEFARSCSTESSLSSGTTALTAIILGRSLLVANAGDCRAVLSRGGGAIEMSKDHRPLCIKERKRIESLGGYIDDGYLNGQLGVTRALGNWHLQGMKEINGKGGPLSAEPELKLITLTKEDEFLIIGSDGIWDVFRSQNAVDFARRRLQEHNDVKQCCKEVIGEAIKRGATDNLTVVMICFHSEPPAPMVVERPRVRRSISAEGLQNLKCLLEG

SEQ ID NO: 43780 - protein, 483 aa, Glycine max
  Clone ID: 700560684_FLI.pep
KSKMVKICCIGAGYVGGPTMAVIALKCPSIEVAVVDISKSRIAAWNSDQLPIYEPGLDGVVKQCRGKNLFFSTDVEKHVFEADIVFVSVNTPTKTQGLGAGKAADLTYWESAARMIADVSKSDKIVVEKSTVPVKTAEAIEKILTHNSKGIRFQILSNPEFLAEGTAIKDLFNPDRVLIGGRETPEGQKAIQALKDVYAQWVPEERILTTNLWSAELSKLAANAFLAQRISSVNAMSALCEATGANVQQVSYSVGTDSRIGPKFLNASVGFGGSCFQKDILNLVYICECNGLPEVAEYWKQVIKINDYQKSRFVNRVVASMFNTVSNKKIAILGFAFKKDTGDTRETPAIDVCQGLLGDKANLSIYDPQVTEDQIQRDLSMNKFDWDHPIHLQPTSPTTVKKVSVVWDAYEATKDAHGLCILTEWDEFKTLDYQRIFDNMQKPAFVFDGRNIVDADKLREIGFIVYSIGKPLDPWLKDMPALA

SEQ ID NO: 43781 - protein, 331 aa, Glycine max
  Clone ID: 700563012_FLI.pep
KKKRRGKMMMMTMEGMMDKGVLDDVIRRLLEGKGGKQVQLSESEIRQLCVNARQIFLSQPILLDLRAPIRICGDIHGQYQDLLRLFEYGGYPPAANYLFLGDYVDRGKQSLETICLLLAYKIRYPDKIYLLRGNHEEAKINRIYGFYDECKRRFNVRLWKIFTDCFNCLPVAALIDEKILCMHGGLSPELENLDQIREIQRPTEIPDSGLLCDLLWSDPDASIEGWAESDRGVSCTFGADVVAEFLDKNDVDLVCRGHQVVEDGYEFFAKRRLVTIFSAPNYGGEFDNAGALLSVDDSLVCSFEILKPADRASGSGSSKMNFKKPPKLGKI

SEQ ID NO: 43782 - protein, 227 aa, Glycine max
  Clone ID: 700563087_FLI.pep
VFQDGVILGADTRATEGPIVADKNCEKIHYMAPNIYCCGAGTAADTEAVTDMVSSQLQLHRYHTGRESRVVTALTLLKKHLFNYQGHVSAALVLGGVDITGPHLHTIYPHGSTDTLPFATMGSGSLAAMSVFESKYKESLSRDEGIKLVVEAICAGIFNDLGSGSNVDVCVITKGHKEYLRNHLLPNPRTYVNPKGFDFPKKTEVLLTKITPLKEKVEVIEGDAMEE

SEQ ID NO: 43783 - protein, 224 aa, Glycine max
  Clone ID: 700563229_FLI.pep
VKSKLKGHQKRITGLAFSTCLNILVSSGADAQLCVWSIDTWEKRKSVPIQLPAGKAPVGDTRVQFHLDQIRLLVAHETQLAIYDASKMDRIRQWVPQDVLAAPISYAAYSCNSQLIYATFCDGNTGVFDADSLRLRCRIALSTYFSPPAALSGNQSTYPVAIAAHPLEPNQFAVGLTDGSVKVIEPSESEGKWGTSPPMDNGILNGRAASTSITSNLTPDQAQR

SEQ ID NO: 43784 - protein, 301 aa, Glycine max
  Clone ID: 700563289_FLI.pep
KRIRGEEKRKIKMEGKEQDVSLGANKFPERQPIGTAAQSQDDGKDYQEPAPAPLVDPTEFTSWSFYRAGIAEFVATFLFLYITVLTVMGVAGAKSKCSTVGIQGIAWAFGGMIFALVYCTAGISGGHINPAVTFGLFLARKLSLPRAIFYIVMQCLGAICGAGVVKGFEGKTKYGTLNGGANFVAPGYTKGDGLGAEIVGTFVLVYTVFSATDAKRNARDSHVPILAPLPIGFAVFLVHLATIPITGTGINPARSLGAAIIFNKDLGWDDHWIFWVGPFIGAALAALYHQVVIRAIPFKSK

SEQ ID NO: 43785 - protein, 324 aa, Glycine max
  Clone ID: 700649594_FLI.pep
IVRDTCRNIGFVSNDVGLDADNCKVLVNIEQQSPDIAQGVHGHLTKRPEEIGAGDQGHMFGYATDETPELMPLSHVLATKLGARLTEVRKNGTCPWLRPDGKTQVTVEYYNDNGAMVPVRVHTVLISTQHDETVTNDEIAADLKEHVIKPVIPEKYLDEKTIFHLNPSGRFVIGGPHGDAGLTGRKIIIDTYGGWGAHGGGAFSGKDPTKVDRSGAYIVRQAAKSIVASGLARRCIVQVSYAIGVPEPLSVFVDTYGTGKIHDKEILNIVKENFDFRPGMISINLDLKRGGNNRFLKTAAYGHFGREDPDFTWEVVKPLKWEKA

SEQ ID NO: 43786 - protein, 274 aa, Glycine max; identical to SEQ ID NO: 42938
  Clone ID: 700652990_FLI.pep

SEQ ID NO: 43787 - protein, 368 aa, Glycine max
  Clone ID: 700653073_FLI.pep
KMGTNRSLMATILIVFFTVLAVSSALDMSIISYDRSHADKSGWKSDEEVMSIYEEWLVKHGKVYNAVEEKEKRFQIFKDNLNFIEEHNAVNRTYKVGLNRFSDLSNEEYRSKYLGTKIDPSRMMARPSRRYSPRVADNLPESVDWRKEGAVVRVKNQSECEGCWAFSAIAAVEGINKIVTGNLTALSEQELLDCDRTVNAGCSGGLVDYAFEFIINNGGIDTEEDYPFQGADGICDQYKINARAVTIDGYERVPAYDELALKKAVANQPVSVAIEAYGKEFQLYESGIFTGTCGTSIDHGVTAVGYGTENGIDYWIVKNSWGENWGEAGYVRMERNIAEDTAGKCGIAILTLYPIKIGQNPSNPDNSS

SEQ ID NO: 43788 - protein, 705 aa, Glycine max
  Clone ID: 700653637_FLI.pep
IYCLALPSPISELKRGVAAENKNMSSWLRSAVNKAVEVGNKNNLTRTVKNYADTVVQHAGQAVAEGAKILQDRISARNYRSVAQTIKRLEEAAVSYRGPERVQLLRRWVVVLQEIQKLSEASLAEGKERTLEQHLAVEEAKENPRKPSLVLYYDSDVGGEPLNFRDVFLQSQALEGITLSMIIHAPNEEEVSLLLEMFGLCLTGGKEVHNAIVSSLQDLATAFSSYEDEVLVKQEELLQFAQGAITGLKINSDASRIDAEASNLKKKLTEITTSQGPVSKVDYKAAEETIATLEALKIALAQIRICSRLEALLLKKKNLSNGDSPEIHAQKVDKLKVLTESLANSATKAEKRILDNRLQKEEALKVRVTKDGEASEKEKELVTEISELQCKKEDLEAELKKVSTTLAAAQARLWNVREERDQFEEANNQIVEHLKIKEDELSKSISSCRVEADVIKTWINFLEDTWVLQWSNAEINDKQVNDELERHEDYFVNLAIQLLTTYQKELEPCINHIKTFVVNLKNLSQRLEMTPSADTDESEVLSPRRNLEEEYLTYEAKIITTFSVVDNMKQQFYAQHGKISRKDEERVIELFDAIEKLRTQFESIERPILEIEIPAKAETPPLEKKSDATPSVSVPAQGAAAQGIELSKPETDEQPKSPSVKTDQILDHEAELAKLESEFGKVSKDYSAEEIGDWEFDELERELSK

SEQ ID NO: 43789 - protein, 469 aa, Glycine max
  Clone ID: 700653658_FLI.pep
TQSCITGEREREREMFGRGTVWSVLRRGKEACGGFHKLRGTPFSYSSSSTPFKFLSPPVSTHCFHAFRSQLIPKGHHVHVPQMRNFSKMVSAEQKEEGLKLLVSGGSRAQKLVGIWLFGSAAWVFSMVVLGGLTRLTRSGLSMTDWKFTGTLPPFSDEEWLQEFDKYKQSPEFKRVNRGMKIEEFKFIYWMEYAHRMWGRALGVMFALPYSYFLHKGYITLRLGLRLSALFALGAGQGLIGWWMVKSGLEEPPSEYSQPRVSPYRLAAHLTSAFAIYCGLFWTALSVVMPEPPAESLTWVRGAAKVRRLALPISILVGLTAVSGAFVAGNDAGHAFNTFPKMGDTWIPGDIFEMKPLIRNFFENTATVQLDHRILATATLISVSILWWSTRKLEIHPAVRSVIGGAVGMATLQVTLGISTLLSYVPVSLGTAHQAGALTLLTFMLLLNHTVRRPSLSLLKSLPQVGKAH

SEQ ID NO: 43790 - protein, 150 aa, Glycine max
  Clone ID: 700658011_FLI.pep
YRIVSICIIIKWHREIYVKVKGKCISWCFNSSSFIYFIIGSFLHVHISFICLSTADLVLTPKGPMGFSRSTPQCLHSEWVVLALETSSSISVADGIVVRAATVVVITAGSTLKRTATPLKASISELENTATSSTISTAVVVVTDIWWLHR

SEQ ID NO: 43791 - protein, 382 aa, Glycine max
  Clone ID: 700658278_FLI.pep
FFQPLKSNLPLFLLPPTSPSSSSIMSHFKGKYHDELIANAAYIGTPGKGILAADESTGTIGKRLASISVENVESNRRALRELLFTAPGALKYLSGVILFEETLYQSTAAGKPFVEVLKEAGVLPGIKVDKGTVELAGTNGETTTQGLDGLGQRCAKYYEAGARFAKWRAVLKIGPNEPSELAIHENAYGLARYAVICQENGLVPIVEPEILVDGSHDIHKCAAVTERVLAACYKALNDHHVLLEGTLLKPNMVTPGSNSAKVSPQVVAEHTVRALQRTVPAAVPAIVFLSGGQSEEEASVNLNAINQVNGKKPWSLSFSFGRALQQSTLKAWSGKEENVKKAQEALLVRAKANSEATLGTYKGNSKLADGASESLHVEDYKY

SEQ ID NO: 43792 - protein, 179 aa, Glycine max
  Clone ID: 700660963_FLI.pep
LFSAEQLKDLGCKWVVLGHSERRHIIGENDEFIGKKAAYALSQGLGVIACIGELLEEREAGKTFDVCFQQLKAYADAVPSWDNIVIAYEPVWAIGTGKVATPQQAQEVHVAVRDWLKKNVPDEVASKTRIIYGGSVNGGNSAELAKQEDIDGFLVGGASLKGPEFATIVNSVTSKKVAA

SEQ ID NO: 43793 - protein, 275 aa, Glycine max
  Clone ID: 700661163_FLI.pep
LNKGFSVCFFTFSRFNRNQNKNMGRKFFVGGNWKCNGTTEEVKKIVTTLNEAKVPGEDVVEVVVSPPFVFLPVVKSLLRPDFHVSAQNCWVRKGGAYTGEVSAEMLVNLGIPWVIIGHSERRQLLNESNEFVGDKVAYALQQGLKVIACIGETLEQREAGTTTAVVSEQTKAIAAKISNWDNVVLAYEPVWAIGTGKVATPAQAQEVHADLRKWVHDNVSAEVAASVRIIYGGSVNGGNCKELAAQPDVDGFLVGGASLKPEFVDIINAATVKKN

SEQ ID NO: 43794 - protein, 383 aa, Glycine max
  Clone ID: 700661172_FLI.pep
NDDNGDANNLERKPSEGNNDANENHSVKPPMLQRGVLRTNCIDCLDRTNVAQYAYGLAALGHQLHALGVIDHPKIDLDDPVADDLMGFYERMGDTLAHQYGGSAAHNKIFSERRGQWRAATQSQEFFRTLQRYYSNAYMDAMKQDAINVFLGHFQPQQGKPALWELGSDQLYDAGRHGDDDARSFFKRSFSDGNILNESSTPMSAPKAKHEKFPSQGGLPDRSEEGSKGLCESSPEISTTESDISFSRYTPSMPRRQLFGDMQRERCLESEHIYYSDHGDSFSCSNFVDLDWLSSSGNSCEEEPFERSSITNSPIAGVSSENVVNGIMVGEATASTSDWGASSLKGREQTESELSYGDARSNTPEEFPDTFVNWVTYGQTLCH

SEQ ID NO: 43795 - protein, 408 aa, Glycine max
  Clone ID: 700665294_FLI.pep
LDLYERVIKTIISKGNVSGTVIGEALNAYASRRMPGFNKGVIQGDIVRNRLLLETIIRILPLDVGSVSFSFLVKLLRVAIQLEREELERSELIRRIGMCLEEAKVSDLLICAPVGDTVFDVDIVQRLVEEFVACDQHVQTDTLLEDDFQEEIRSPGMVSESSKAKVAKLVDGYLAEIARDPNLPFAKFVNLAELVSSFPRASHDGLYRAIDMYLKEHPGISKSEKKRICRLMNCRKLSAEACMHAVQNERLPMRVVVQVLFFEQLRATTSSGGNGTPDHPGSIRALLPGGSHGSSRSTITNTEEEWDAVGTMEDIKSLKGELDALKLSGGTSGASSRSDNNDGGKDNAEKVAASKMKGLMSKKIISKIWSSKERSGELSSSDTSESPASTVVEETKSTPSRSRRHSLS

SEQ ID NO: 43796 - protein, 325 aa, Glycine max
  Clone ID: 700665591_FLI.pep
RSNLIPWRKTDDLSLPGDIFNDVVGSPYYVAPDVLRKRYGPEADVWSAGVILYILLSGVPPFWAENEQGIFEQVLRGDLDFSSDPWPSISESAKDLVRKMLVRDPRRRLTAHQVLCHPWIQVDGVAPDKPLDSAVLSRLKQFSAMNKLKKMALIIIAESLSEEEIAGLKEMFKMIDADNSGQITFEELKAGLKRVGANLKESEIYDLMQAADVDNSGTIDYGEFLAATLHRNKIEREDNLFAAFSYFDKDGSGYITQEELQQACDEFGIKDVRLEEIIKEIDEDNDGRIDYNEFVAMMQKGNLPAVGKKGLENSFSVKFREALKL

SEQ ID NO: 43797 - protein, 393 aa, Glycine max
  Clone ID: 700665771_FLI.pep
YLKLLVLNSVMTCFPLLFSKSSSSARHDPEIDEGIHNVKLYSYKQLRNATEKFSPANKIGEGGFGSVYKGRLKDGKVAAIKVLSAESRQGVKEFLTEINVISEIEHENLVKLYGCCVEKNNRILVYNYLENNSLSQTLLGGGHNSLYFDWGTRCKICIGVARGLAYLHEEVRPHIVHRDIKASNILLDKDLTPKISDFGLAKLIPANMTHVSTRVAGTLGYLAPEYAIGGKLTRKADIYSFGVLLAEIISGRCNINSRLPIEEQFLLERTWDLYERKELVELVDISLNGEFDAEQACKFLKISLLCTQESPKLRPSMSSVVKMLTGKMDVNDSKITKPALISDFMDLKVRRNEESSIDMKNSSMYTTSSSDNHDSTMSFATTTTFAAIYDESM

SEQ ID NO: 43798 - protein, 317 aa, Glycine max
  Clone ID: 700666092_FLI.pep
AEKLLDKMIEKEIVLRQKNAYETELFEMEPSAYNLMIGYLCEHGRTGKAETFFRQLMKKGVQDSVSFNNLICGHSKEGNPDSAFEIIKIMGRRGVARDADSYRLLIESYLRKGEPADAKTALDGMLESGHLPESSLYRSVMESLFDDGRVQTASRVMKSMVEKGVKENMDLVSKVLEALLMRGHVEEALGRIHLLMLNGCEPDFDHLLSVLCEKEKTIAALKLLDFVLERDCIIDFSIYDKVLDALLAAGKTLNAYSILCKILEKGGSTDWSSRDELIKSLNQEGNTKQADVLSRMIKGTDGGPPKRGGKRKTTVST

SEQ ID NO: 43799 - protein, 274 aa, Glycine max; identical to SEQ ID NO: 42938
  Clone ID: 700646588_FLI.pep

SEQ ID NO: 43800 - protein, 264 aa, Glycine max
  Clone ID: 700669423_FLI.pep
TLPLIGDFLDMAEHHEHEEVKGESLLEKISGKIHDHDSSSSSDSDNEKTSASDSLKSKVFRLFGREKPIHHVLGGGKPADVFLWRNKKISASTLGVATAIWVLFELLEYHLLTLVCHFLILGLAVLFLWSNASTFINKSPPKIPQVHIPEKPVLEFASALRVEINRAFALLRDIASGRDLKKFLSVIAGLWVFSILGSWANFLTLFYIAFVLLHTVPVLYEKYEDHVDSFGGKAIAEIKKQYAVFDAKVLSKIPRGPLKDKKKD

SEQ ID NO: 43801 - protein, 264 aa, Glycine max
  Clone ID: 700669443_FLI.pep
DSTFSPAYSLAEIWPGMPHFPPPFPHPSSADHSTLTDLTATPRKRKDCSSSSSSASAAAADEDDCSKVLSSTTTATANLFNNDSGSNKQMKLGGSSVENDGFKAEAEASSAGGNKSSEQSNKPCEAPKQDYIHVRARRGQATDSHSLAERARREKISERMKILQDLVPGCNKVIGKALVLDEIINYIQSLQRQVEFLSMKLEAVNSRMNMNPTIDGFPSKDVGTQPFDIAGMVFGSQAARGYAQGSSPPGWLHMQIGGGFERTT

SEQ ID NO: 43802 - protein, 439 aa, Glycine max
  Clone ID: 700669677_FLI.pep
CSILHSTHTRRIMASILHYFLALSLSCSFLFFLSDSVTPTKPINLVVLPVQNDGSTGLHWANLQKRTPLMQVPVLVDLNGNHLWVNCEQQYSSKTYQAPFCHSTQCSRANTHQCLSCPAASRPGCHKNTCGLMSTNPITQQTGLGELGEDVLAIHATQGSTQQLGPLVTVPQFLFSCAPSFLVQKGLPRNTQGVAGLGHAPISLPNQLASHFGLQRQFTTCLSRYPTSKGAIIFGDAPNNMRQFQNQDIFHDLAFTPLTITLQGEYNVRVNSIRINQHSVFPLNKISSTIVGSTSGGTMISTSTPHMVLQQSVYQAFTQVFAQQLPKQAQVKSVAPFGLCFNSNKINAYPSVDLVMDKPNGPVWRISGEDLMVQAQPGVTRLGVMNGGMQPRAEITLGARQLEENLVVFDLARSRVGFSTSSLHSHGVKCADLFNFANA

SEQ ID NO: 43803 - protein, 301 aa, Glycine max; identical to SEQ ID NO: 43784
  Clone ID: 700669924_FLI.pep

SEQ ID NO: 43804 - protein, 192 aa, Glycine max
  Clone ID: 700670024_FLI.pep
LGDEDEVKERENKQEYNLLCDWIKQQLGDKVAKVQISKRLSSSPCVLVSGKFGWSANMERLMKAQALGDTASLEFMRGRRILEINTDHPIIKDLSAACKNAPDSSEAKRAVDLLYDTALISSGFSPDSPAELGNKIYEMMALALGGRWGRSEEEEGDAPVEAADSSTSEESSEPEVYEPSEVIAESDPWTTD

SEQ ID NO: 43805 - protein, 218 aa, Glycine max
  Clone ID: 700673353_FLI.pep
TLSFKVNNRKHAFCLHLHLQLSSKGSTWDEIDYEFLGNLSGDPYILHTNVFSQGKGDREQQFYLWFDPTADFHTYSIMWNPQRIIFSVDGTPIREFKNSEAIGVPFPKNQPMRIYSSLWNADDWATRGGLVKTDWTQAPFTASYRNFNAEACIWSSGASSCAKTSSTPTSGSGSWLSQELDATGHQRLKWVQKNYMIYNYCTDTKRFPQGLPPECNIS

SEQ ID NO: 43806 - protein, 185 aa, Glycine max
  Clone ID: 700555795_FLI.pep
LFLRSTTIITSFSLRTDHTMATSSAKSVHDFTVKDAKGNDINLGDYKGKVLIIVNVASQCGLTNSNYTELSQLYEKYKQKGLEILAFPCNQFGAQEPGSNEQIQEFVCTRFKAEFPVFDKVDVNGDKAAPLYKYLKSSKGGLFGDGIKWNFSKFLVDKEGNVVDRYAPTTSPLSIEKDLLKLLDA

SEQ ID NO: 43807 - protein, 163 aa, Glycine max
  Clone ID: 700555962_FLI.pep
PRCGGHAPNLKKRKCCNIPKQRDRDSSSSMASKAMSVAAEKIGTAARRQAVSLTDAAASRIRQLLQQRQRAFLKLGVKTRGCNGLSYTLNYADEKGKFDELVEDKGVMILIDPKALMHVIGTKMDFVDDKLRSEFIFVNPNSKGQCGCGESFMTTGSSGSSKP

SEQ ID NO: 43808 - protein, 293 aa, Glycine max
  Clone ID: 700556044_FLI.pep
GFQSMASLAASTAAASLGMSEMLGNPINLSGATRPAPSASSPASFKTVALFSKKKAAPPKKAAAAAPANDELAKWYGPDRRIFLPEGLLDRSEIPEYLTGEVPGDYGYDPFGLSKKPEDFSKYQAFELIHARWAMLGAAGFIIPEAFNKYGANCGPEAVWFKTGALLLDGGTLNYFGKPIPINLIVAVIAEIVLVGGAEYYRIINGLNFEDKLHPGGPFDPLGLANDPDQAALLKVKEIKNGRLAMFAMLGFYFQAYVTGEGPVENLAKHLSDPFGNNLLTVISGSAERAPTL

SEQ ID NO: 43809 - protein, 158 aa, Glycine max
  Clone ID: 700558793_FLI.pep
MPQHPNQTDYTKGWSARVTLFNWGDTNFADWFAAVQMDKAASGFEKMYSFNATLLDGVNNTIIMQGLPGLNYLVAEADGADPLRDPRVPGKQQSVISFTKKTTPGINVARGDGFPTKVFFNGEECSLPSVYPSSSGFRNGFSLATSLLLTLLMILLMR

SEQ ID NO: 43810 - protein, 380 aa, Glycine max
  Clone ID: 700558834_FLI.pep
KGFHIPQGFRKIDTDKWEFFNEAFQRGKKHLLKNIQRRRSSQSQQVGSYIGIECSTEAGRSDVEIEIERLRKERTMLMEEVVDLKQEQRRMAHRAGEVNQRLQSTEQRQKQMVSFLVKLIQNPAFLARLRHEEQKEIDSPRVVRKFVKQHQHETGTAETLQEGQIVRYQHDWRNIGMSSETPKLSPVSIEQSPHYLSQGLAGEVSVGAEDLTAQIENIVSNDLAAVHGITVSQEIMIGEGLSSFGAEDPLFKGKSVMSPILEVPPEYFASFPEGLTKGKDFQDFSALGTEGMIKLEDIWDSGLNVSGAASGSGNELWSNHVNYEEFPEFGVTSGMSDSDIWDIGLGSLGIDKWPTDEPSLGETNGQAGQPKEDRPKNFGP

SEQ ID NO: 43811 - protein, 142 aa, Glycine max
  Clone ID: 700559088_FLI.pep
VENNKFCVSVHYRNVDEKYWNWVGQRVHDVLKGYPRLRLTHGRKVLEIRPVINWDKGKAVTFLLESLGLNNCDDVLPIYIGDDRTDEDAFKVLREGNKGYGILVSSAPKESNAIYSLRDPSEVMEFLKSLVLWKSSTLKSLI

SEQ ID NO: 43812 - protein, 361 aa, Glycine max
  Clone ID: 700560716_FLI.pep
FFFLLLISNMEWHRGHTIGQGSSATVSTATCCGGVLAVKSSELPQSEPLKKEQKILSSLSSPYVVAYKGCDITMENNKLLFNLFMEYMPFGTLAQATRRCDGRLQEPAIACYTRQIVQGLEYLHSKGLVHCDIKGANILIGENGAKIGDLGCAKSAADSTGAIGGTPMFMAPEVARGEEQGCASDIWSLGCTVIEMVTGGAPWPNVEDPFSVLYHIAYSSEVPEIPCFLSKEAKDFLGKCLRRNPQERWKASELLKHPFIEKLCFNKEVLESNTSSPTSVLEQGYWSCVEESESLGDLIHKTRKFETLAAGRVRMLALSSGVPYWARHDDENWITARGNGVEGFANCGAETASSASHGLSH

SEQ ID NO: 43813 - protein, 309 aa, Glycine max
  Clone ID: 700560950_FLI.pep
GFYIAPAFMDKLVVHISKNFMTLPNIKVPLILGIWGGKGQGKSFQCELVFAKMGINPIMMSAGELESGNAGEPAKLIRQRYREAADMIKKGKMCALFINDLDAGAGRLGGTTQYTVNNQMVNATLMNIADNPTNVQLPGMYNKEENPRVPIIVTGNDFSTLYAPLIRDGRMEKFYWAPTREDRIGVCTGIFRTDGIPEQDIVKLVDTFPGQSIDFFGALRARVYDDEVRKWISGVGVDSVGKKLVNSKDGPPTFEQPKMTLEKLLLYGNMLVQEQENVKRVQLADKYLNEAALGNANEDAIQRGTFFQS

SEQ ID NO: 43814 - protein, 612 aa, Glycine max
  Clone ID: 700561392_FLI.pep
TFESMEQLVNFIIRPPRAEYDPKSDLLDQEFMLKGKWYQRKDVEIKNSRGDVLQCSHYLPIVSPEGKPLPCVIYCHGNSGCRADASEAAIILLPSNITVFTLDFSGSGISGGEHVTLGWNEKDDLKAVVNYLRDDGNVSLIGLWGRSMGAVTSLMYGAEDPSIAGMVLDSPFSDLVDLMMELVDTYKVRLPKFTVKFAIQYMRRAIQKKAKFDITDLNTIKVAKSCFVPALLGHAIDDDFIQPHHSDRIFEAYMGDKNIIKFDGDHNSPRPQFYFDSINIFFHNVLQPPEDEVGESFFDPMNDYFGKDVWRSVHELGYSNESSSKNKDAEPSTSSTINAIEQVRSRRPMSRMEVPSDISSKDEHREHEEKCGNISPSSSSMISFELSNGDPFGSHVPATLEDDQYVEYQLDDLAGFPSTAEEEERMFMEAVMESLKDLEVRNPNAEQPTSSVSSVYVDAVEPSDKDASSGEISRPVETESSSLKHTTESKFKTTSSTSEEFEPLNGESNSISVKHSQNVVSEPSPVPSVSLEGPAHLQLQPPPSAPTDTSSVTESSNTSGSASSDSSASLQSSSETDVSHNTKATVTVVRNPAGHVMDGLMRRWDFNFFKNK

SEQ ID NO: 43815 - protein, 142 aa, Glycine max
  Clone ID: 700564246_FLI.pep
CDIVVEPLRDRIVTSLLQASLDGLLRVILDGGPSRVFFPGDVKLLEEDLEVLKEFFISGGDGLPRGVVENQVARVRNVINLHGYETRELIEDLKSASGMEMQGGKSKLGTDSKTLLRILCHRSDSEASQFLKKQYKIPSSSA

SEQ ID NO: 43816 - protein, 304 aa, Glycine max
  Clone ID: 700565235_FLI.pep
MELEASNQPKQERSRTRWTASLDKIFADLVVKQIQLGNRPNNVFDKKTWNHIRDEFNRQTDLNFNNNQLRKHLDVLRTRFYNLKSAYDQNNDFVMDDSCCIGFEQWEDIGVQPRNETVKVKDCPIYEQLCTIFIDSAADGKYAQSSHYEELDKSIGADATGFTPCPEAKVSHYVNPSTSKFIPGNISTAEKLTKNSIDRKRKRSCETQTTSLDQDTCNAMAEALLGMVAVSRLRAVVSSVSDDKFSITNCIKALDEIEGIDQQLYFSALDLFENPSLRETFISLKSVKIRLTWLQGKCSKTPFH

SEQ ID NO: 43817 - protein, 414 aa, Glycine max
  Clone ID: 700649684_FLI.pep
TSPRSRYPFLLFFYLSSFKSIKMAETFLFTSESVNEGHPDKLCDQISDAVLDACLEQDPDSKVACETCTKTNLVMVFGEITTKANVDYEKIVRDTCRNIGFVSNDVGLDADNCKVLVNIEQQSPDIAQGVHGHLTKKPEEIGAGDQGHMFGYATDETPELMPLSHVLATKLGARLTEVRKNGTCPWLRPDGKTQVTVEYYNDNGARVPIRVHTVLISTQHDETVTNDEIAADLKEHVIKPVIPEKYLDEKTIFHLNPSGRFVIGGPHGDAGLTGRKIIIDTYGGWGAHGGGAFSGKDPTKVDRSGAYIVRQAAKSIVASGLARRCIVQVSYAIGVPEPLSVFVDTYGTGKIHDKEILNIVKENFDFRPGMISINLDLKRGGNNRFLKTAAYGHFGREDPDFTWEVVKPLKWEKA

SEQ ID NO: 43818 - protein, 273 aa, Glycine max
  Clone ID: 700649704_FLI.pep
ASVNTHLGVEQSRRDDLESLGYLLMYFLRGSLPWQGLRAGTKKQKYDKISEKKMLTPIEVLCKSYPLEFTSYFHYCRTLRFEDKPDYSYLKRLFRDLFIREGYQFDYVFDWTMLKYPQIGSSSRARPSGKPVINPGQSGDRIERPSGAVEAFARRNGSGLVLQSEHSRHRSSDDVPSSKDVQADSERPRSSSRNGSSSKKPVLSSSRPSSSGEPSESRTSRLVLSSGRLSTTQRLQPGFESKTSLSRASATRGGRDDTLRSFELLSLGSGKRK

SEQ ID NO: 43819 - protein, 276 aa, Glycine max
  Clone ID: 700650175_FLI.pep
PNLPPSPFVHRVASTSIFSQIQSPILASLSQANMSAALDMTLEDIIKNNKKSSLANTRGRGRASGPGPARRLPNRAANRAAPYAAAKAPETAWKHDMYANQPVAAAYPGGRASSIETGTKLYISNLDYGVSNDDIKELFLEVGDVKRHTVHYDRSGRSKGTAEVVFSRRADAVAAVKRYNNVQLDGKPMKVEIVGTNIATHAAPPAVNGTFGNPTGVPRSGQGRSGSLGRPRGGSRGRGSIQRGRGRGRGGRDEKVSAEDLDADLEKYHAEAMQLN

SEQ ID NO: 43820 - protein, 199 aa, Glycine max
  Clone ID: 700650345_FLI.pep
ATKEFLQSLHSACDEAGALLVFDEVQCGLGRSGFLWAHEAFGVFPDMMTLAKPLAGGLPIGAVLVTERVASSINYGDHGSTFAGNPLVCSAALAVFDKISKPDFLSSVSKKGLYFKELLKQKLGGNQHVKEIRGVGLIIGIDLDVPASPFVDACRNSGLLVLTAGKGNVVRLVPPLIITEKELELAADILCKTLPVLDN

SEQ ID NO: 43821 - protein, 354 aa, Glycine max
  Clone ID: 700653705_FLI.pep
GVEHANVLLPPLETLCTVEETSVRDKSVESLCRIGAQMREQDLVEYLIPLVKRLAAGEWFTARVSSCGLFHIAYPSAPEAVKTELRAIYGQLCQDDMPMVRRSAATNLGKFAATVEAPHLKSDIMSVFEDLTHDDQDSVRLLAVEGCAALGKLLEPQDCVAHILPVIVNFSQDKSWRVRYMVANQLYELCEAVGPDPTRSELVPAYVRLLRDNEAEVRIAAAGKVTKFSRILNPDLAIQHILPCVKELSTDSSQHVRSALASVIMGMAPVLGKDATIEQLLPIFLSLLKDEFPDVRLNIISKLDQVNQVIGIDLLSQSLLPAIVELAEDRHWRVRLAIIEYIPLLASQLGVSFF

SEQ ID NO: 43822 - protein, 233 aa, Glycine max
  Clone ID: 700653806_FLI.pep
VRNMASLSSLVLLLAALILSPQVLANYENPPVYKPPTEKPPVYKPPVEKPPVYKPPVENPPIYKPPVEKPPVYKPPVEKPPVYKPPVEKPPVYKPPVEKPPVYKPPVEKPPVYKPPVEKPPVYKPPVEKPPVYKPPVEKPPVYKPPVEKPPVYKPPVEKPPVYKPPVEKPPVYKPPVEKPPVYKPPVEKPPVYKPPVEKPPIYKPPVEKPPVYKPPYGKPPYPKYPPTDDTHF

SEQ ID NO: 43823 - protein, 435 aa, Glycine max
  Clone ID: 700653980_FLI.pep
EIKVDQVPANNHPQNGVFTSLNDKFGDRESEKVLNQTKNGDNSSQSGSSNHLEKDANGSQSGEDSGVKSVSAYRSSSHPITAPSPLSGLPEFSHLGWGHWFTLRDLELATNRFAKDNVIGEGGYGIVYHGQLINGNPVAIKKLLNNLGQAEKEFRVEVEAIGHVRHKNLVRLLGYCIEGTHRLLVYEYVNNGNLEQWLHGAMRQHGFLTWDARIKILLGTAKALAYLHEAIEPKVVHRDIKSSNILIDEDFNAKISDFGLAKLLGAGKSHITTRVMGTFGYVAPEYANSGLLNEKSDVYSFGVLLLEAITGRDPVDYSRPAAEVNLVDWLKMMVGCRRSEEVLDPNIETRPSTSALKRALLTALRCVDPDAEKRPRMSQVVRMLESEEYPILREDRRRRRSQAGNMEVETQRENSDTDKSDNPDYKPSGRRNQRM

SEQ ID NO: 43824 - protein, 308 aa, Glycine max
  Clone ID: 700661208_FLI.pep
GIKAPIGFKTIATSAYHYNGVLEYDAHSLYGFSQTIATHKGLQGLQGKRPFILSRSTYVGSGKYAAHWTGDNQGTWENLRYSISTMLNFGIFGVPMVGSDICGFYPQPTEELCNRWIEVGAFYPFSRDHANYYSPRQELYQWQSVAESARNALGIRYKLLPFLYTLNYEAHVSGAPIARPLFFSFPTYTECYGLSTQFLLGSSLMVSPVLEQGKTQVKALFPPGSWYSLLDWTHTITSKDGVYITLDAPLHVVNVHLYQNTILPMQQGGMVSKEARATPFTLIVTFPSDATQGGLRGTFSSTTMSCLT

SEQ ID NO: 43825 - protein, 651 aa, Glycine max
  Clone ID: 700661328_FLI.pep
VSMAGKGEGPAIGIDLGTTYSCVGVWQHDRVEIIANDQGNRTTPSYVAFTDTERLIGDAAKNQVAMNPTNTVFDAKRLIGRRFSDASVQGDMKLWPFKVIPGPAEKPMIVVNYKGEEKQFSAEEISSMVLMKMKEIAEAYLGSTIKNAVVTVPAYFNDSQRQATKDAGVISGLNVMRIINEPTAAAIAYGLDKKATSSGEKNVLIFDLGGGTFDVSLLTIEEGIFEVKATAGDTHLGGEDFDNRMVNHFVQEFKRKNKKDISGNARALRRLRTACERAKRTLSSTAQTTIEIDSLYEGIDFYTTITRARFEELNMDLFRKCMEPVEKCLRDAKMDKSTVHDVVLVGGSTRIPKVQQLLQDFFNGKELCKSINPDEAVAYGAAVQAAILSGEGNEKVQDLLLLDVTPLSTGLETAGGVMTVLIPRNTTIPTKKEQVFSTYSDNQPGVLIQVYEGERTRTRDNNLLGKFELSGIPPAPRGVPQITVCFDIDANGILNVSAEDKTTGQKNKITITNDKGRLSKEEIEKMVQEAEKYKSEDEEHKKKVEAKNALENYAYNMRNTIKDDKIASKLSSDDKKKIEDAIEQAIQWLDGNQLAEADEFEDKMKELESICNPIIAKMYQGAGGDAGGAMDEDGPAAGSGSGAGPKIEEVD

SEQ ID NO: 43826 - protein, 393 aa, Glycine max
  Clone ID: 700661714_FLI.pep
KKENNFEDKVKRERKEERVRGGNGCKVGDDNGSLMLMWEDGFCRGRVSDCLEEIDGEDPIRKSFSKMSIQLYNYGEGLMGKVTSDKCHKWVFKEPTECEPNISNYWQSSFDALPPEWIDQFESGIQTIAVIQAGHGLLQLGSCKIIPEDLHFVLRMRHTFESLGYQSGFYLSQLFSSTRNTSSSTSLSSKPSSIPTRPPPPLLNWGQRPLGSSASMLPSPTFQHAARMGFPQAKDETHMFLMPHASEHARMGDIMGEHENDIKWPNGLSIFNALTGRSDDAKLLFNQESLGGKPSDDHNHHHHHHHSLNPNNPTSSVQNANSVANPNEFLSLDSHTEGGGARKLDKFKRCFTLPARMTSSSSSTSMDHHQQAGVEYRNSGGSMYQDVMETFLE

SEQ ID NO: 43827 - protein, 364 aa, Glycine max
  Clone ID: 700666220_FLI.pep
WRSDPATAYNLQSIRPAFSAIRHFSSAAKEITVRDALNSALDEEMSADPKVFLMGEEVGEYQGAYKISKGLLDKYGPERVLDTPITEAGFAGIGVGAAYYGLRPVVEFMTFNFSMQAIDHIINSAAKSNYMSAGQISVPIVFRGPNGAAAGVGAQHSQCYASLYGSCPGLKVLSPYSSEDARGLLKAAIRDPDPVVFLENELLYGESFPVSAEVLDSSFCLPIGKAKIEREGKDVTITAYSKMVGYALKAAETLAKEGISAEVINLRSIRPLDRSTINASVRKTNRLVTVEEGFPQHGVGAEICTSVIEESFGYLDAPVERIAGADVPMPYAANLERMAVPQVEDIVRAAKRACYRSVPLAASA

SEQ ID NO: 43828 - protein, 170 aa, Glycine max
  Clone ID: 700666475_FLI.pep
KPFIRDNLTNKITMSIIPNLFGGRRSNVFDPFSLDVWDPFEGFPFSTGHVPSSGGESSAIANTRVDWKETPAAHVFNVDLPGLKKEEVKVEVEDGRVLQISGERTKEQEQKDDRWHRVERSTGKFMRRFRLPENAKMDQVKAAMENGVLTVTVPKEEDKKPQVKSIQISA

SEQ ID NO: 43829 - protein, 345 aa, Glycine max
  Clone ID: 700666969_FLI.pep
TGVGFLTVVPFQCRCMASSLVRTGFVRGSLTQGNGCYQHRCINNSLEVAVDGIWKVCPQAGGPLQFPGFNGKLICPAYHELCNTNPVVVSGQCPSACNSNGDCVDGRCHCLLGFHGHDCSRRSCPSNCTGNGMCLSSGICECKSGYTGIDCSTAVCDEQCSLHGGVCDNGVCEFRCSDYAGYTCHNSSMLFSSLSVCRNVLGNDISGQHCAPSESSILQQLEEVVVMPNYHRLFPGGARKLFNIFGSSYCDEAAKRLACWISIQKCEKDGDNRLRVCHSACQAYNLACGASLDCGDQTLFSSEGGDEGLCTGSGEMKLSWFNRLRNSFSLRNSFSKGISVRYRQF

SEQ ID NO: 43830 - protein, 609 aa, Glycine max
  Clone ID: 700646607_FLI.pep
ENKLYGEFLINAQGEDVVAGIRTPEDLEVMKTCMPEAYKELEENCEILEKHYKDMMDIEFTVQENRLWMLQCRSGKRTGKGAFKIAVDMVDEGLVDIRSAIKMVEPQHLDQLLHPQFEDPSTYKDKVIAIGLPASPGAAVGQVVFTADDAEEWHAQGKSVILVRNETSPEDVGGMHAATGILTARGGMTSHAAVVARGWGKCCVSGCSDILVNDAEKVFVVGDKVITEGEWVSLNGSTGEVILGKQPLSPPALSDDLETFMSWADEIRHLKVMANADTPEDAVTARQNGAQGIGLCRTEHMFFASDERIKAVRMMIMAVTPEQRKAALDLLLPYQRSDFEGIFRAMDGLPVTIRLLDPPLHEFLPEGDLEHIVSELTSETGMKEEEIFSRIEKLSEVNPMLGFRGCRLGISYPELTEMQARAIFQAAVSVSNHGITVLPEIMVPLIGTPQELRHQVNLIRNVADKVLSEMGSSLSYKVGTMIEVPRAALVADEIAKEAEFFSFGTNDLTQMTFGYSRDDVGKFLPIYLSSGILQHDPFEVLDQKGVGQLIKICTEKGRAARPNLKVGICGEHGGEPSSVAFFAEIGLDYVSCSPFRVPIARLAAAQVAV

SEQ ID NO: 43831 - protein, 142 aa, Glycine max
  Clone ID: 700667729_FLI.pep
EIIPLCLRTMEMGSELSKTVATFIVQKILLDDVGLDYICTTAERFFAVGRVLGNMVAALAEQPSSRLLKHIIRCYLRLSDNPRACDALRSCLPDMLRDATFSTCLREDPTTRRWLQQLLHNVGVNRVPALQAGGGFDHMIVT

SEQ ID NO: 43832 - protein, 245 aa, Glycine max
  Clone ID: 700667779_FLI.pep
KKNPNNTTEVILIFLVKKKKRRKMTSIHLINTLAAPLRSFSPPSLFPQCHSPLRSSAAPKRRRFANSSGFRLASSQTVNSVPRGNGTYTVADFMTKKQDLHVVKTTTTVDEALEALVNYRISGLPVIDEVWNLVGVVSDYDLLAIDSISGGPQSDANLFPNVDSTWKTFNELQKLLSKTNGQVVGDLMTPTPLVVHESTSLEEAARLLLETKYRRLPVVDDDGKLVGLITRGNIVKAALLSKRAG

SEQ ID NO: 43833 - protein, 176 aa, Glycine max
  Clone ID: 700667785_FLI.pep
SLKMQGGKKAGESIKETATNIGASAKAGMEKTKATVQEKAERMTARDPVQKELATQKKEAKMNQAELDKQAARQHNTAAKQSATTAGHMGHGHHTTGTGTGTATYSTTGEYGQPMGAHQTSAMPGHGTGQPTGHVTEGVVGSHPIGTNRGPGGTATAHNTRAGGKPNDYGYGTGGT

SEQ ID NO: 43834 - protein, 247 aa, Glycine max
  Clone ID: 700670156_FLI.pep
CCYPFAGMDLKDDAVKGIVPWDGTLSSFDFSLSAHTFSDKWKRFNPSFPAWQWITCPKQHHLVASHKVEGYLSLENMCHIKSSQEQESDRSLTWKEESNISQREEPFDKATLVCPEHEVNHYDFHIVYSASYRVPVLYFRSYRSDGQLLPFNEIEKDLPGHSAKLRSESKWTFITHEEHPYLNRPWYKLHPCGTSDWMKLLFHSDSSLNKNGFVIEQYLISWFSVIGQVVGLKIPLEMLDTVVSNDS

SEQ ID NO: 43835 - protein, 403 aa, Glycine max
  Clone ID: 700670980_FLI.pep
STHPTMSRFRRFELIEQPPFFPSCYSSPFLVQDSLSLDLDLLPLPSPFDAFADLLHAPSLAYRRLERQLDNELRLQSLSDRVAELESRFHRVLGGDRKYTWTAEIKGAEKNGFDRKYKWVAEIAEEEEKKKKKMKKQVKVPKDRNVTWDAEEEEENKKRLLKGVAKNVKWTAEITGKGEKSGSSRKYTFQVQSGDAEKKKEKEKEKEKKKGNGSRIVEIHEPSGHRDVVLRQAFAKRFGAVQNERGKKKDLSPQDAALLIQISFRAYLIRRSKALRALRELAIAKSKLKEIRAQFNNFSYRRHVACNAEERQRFSEKIIVLLLTVDAIEGADIMVRSAKRSMVDELEAMLDVVDPQPGGRSASLSSFKRRTFDMPDGVIRKEIEEGVAQVVQMLEEAENSSEA

SEQ ID NO: 43836 - protein, 492 aa, Glycine max
  Clone ID: 700673875_FLI.pep
SLHLSLNIILSMAKLVLSLCFLLFSGCCFAFSFREQPQQNECQIQRLNALKPDNRIESEGGFIETWNPNNKPFQCAGVALSRCTLNRNALRRPSYTNAPQEIYIQQGSGIFGMIFPGCPSTFEEPQQKGQSSRPQDRHQKIYHFREGDLIAVPTGFAYWMYNNEDTPVVAVSLIDTNSFQNQLDQMPRRFYLAGNQEQEFLQYQPQKQQGGTQSQKGKRQQEEENEGGSILSGFAPEFLEHAFVVDRQIVRKLQGENEEEEKGAIVTVKGGLSVISPPTEEQQQRPEEEEKPDCDEKDKHCQSQSRNGIDETICTMRLRHNIGQTSSPDIFNPQAGSITTATSLDFPALSWLKLSAQFGSLRKNAMFVPHYNLNANSIIYALNGRALVQVVNCNGERVFDGELQEGQVLIVPQNFAVAARSQSDNFEYVSFKTNDRPSIGNLAGANSLLNALPEEVIQQTFNLRRQQARQVKNNNPFSFLVPPKESQRRVVA

SEQ ID NO: 43837 - protein, 204 aa, Glycine max
  Clone ID: 700674030_FLI.pep
EMKSTIFFALFLVCAFTISYLPSATAQFVLDTDDDPLQNGGTYYMLPVMRGKGGGIEVDSTGKEICPLTVVQSPNELDKGIGLVFTSPLHALFIAEGYPLSIKFGSFAVITLCAGMPTEWAIVEREGLQAVKLAARDTVDGWFNIERVSREYNDYKLVFCPQQAEDNKCEDIGIQIDDDGIRRLVLSKNKPLVVQFQKFRSSTA

SEQ ID NO: 43838 - protein, 346 aa, Glycine max
  Clone ID: 700554673_FLI.pep
LHSIVMAKSVANPPFLRPLHQLEFLRCPRLSSKSQFHPRRFRSQTQSIIRAISAVAAESELGTQQDQAIEADIFACPVCYEPLIRKGPSGLNLPAIYRSGFMCKRCKKSYSSKDRYLDLTVTAGLRDYTEIQPARTELFRSPLVSFLYERGWRQNFRQSGFPGPDEEFKMAQEYFESAKGGLIVDVSCGSGLFSRKFAKSGAYSGVIALDFSENMLRQCYEFIKKDDTLSTTNIALVRADVSRLPFPSGSVDAVHAGAALHCWPSPSNAVAEITRVLKSGGVFVGSTFLRYSSLTPWFLRPFRERIPQGYGYLTEEEIKDLCTSCGLTNYSSKIQQAFIMFTAQKP

SEQ ID NO: 43839 - protein, 267 aa, Glycine max
  Clone ID: 700554813_FLI.pep
TSSRTCCLYSPKLKFLYNDGSVLQLSITVSSEGQKKYATENLSNFGLVTTLCSTLLYTPLLHAWNKSPMMIIRASGFGFTAIHLPSFSICKSEIFKASQEWGFFQVVKHGISNGVFSGLKLEQEKIFKQPFEKKTKENKFFNFSAGSYRWGSLNATCIRQLSWSEAFHIPLTDMLGSGGSDTFSATIQQFATQVSILSEAFHIPLTDMLGSGGSDTFSATIQQFATQVSILSKTLADILAEKMGHKSTFFEENCLPRSCYIRLNRYP

SEQ ID NO: 43840 - protein, 171 aa, Glycine max
  Clone ID: 700554852_FLI.pep
ILHFSKAQFMLNLAKIRGGAKSKFSLVFLLHLLLPPSLLVIQQHLGHLLHQLRCVCALFGRNPITFVSFPPGLHLLPFRIVGPIFPSKEDFLANSSTMPSTDTQRLPCPQLPVSPHTLGKLILIFPQLLTPRILIFCYRLSHRTNTFARHNITSFSTLWDCRALLSNSQCQ

SEQ ID NO: 43841 - protein, 207 aa, Glycine max
  Clone ID: 700555020_FLI.pep
RIVHAFISCITTGNVKVQWNVCHALGNLFLNETLRLQDMDWTPVVFGVLLQLLRNSSNFKIRIQAAAALAVPMSMQDYGLSFSEIVQSVEHVMENIDDDQISGPSNFKYRVSLQKQLTLTMLHILRFTSSTNDQNLKDFLVKKASILEDWFKGLCSSGEGMLDVQDKCIADRKRVLISGALQSLIEVYKEKQQDAIAQKFEELKNNM

SEQ ID NO: 43842 - protein, 178 aa, Glycine max
  Clone ID: 700556872_FLI.pep
EGVTLAIFENCSVLEGKQSREEKRVSRMGSEEEKGEFYLRYYVGHKGKFGHEFLEFEFRPDGKLRYANNSNYKNDTIIRKEVYLNPAVLRECRRIIAESEIMKEDDNNWPEPDRVGRQELEIVMGNEHISFTTSKIGSLVDVQSSADPDGLRIFYYLVQDLKCFVFSLISLHFKIKPI

SEQ ID NO: 43843 - protein, 408 aa, Glycine max
  Clone ID: 700556967_FLI.pep
NDVINYVLNSPTQRLVSSAPGQNQGPIYASFDSHSCSFFLRTFSSSSLRAMSSSLALPSTPFFANGTRIFALKHSLPRSRVSMSVSAGSQASVHQALFADYKASTSFLFPGQGAQAVGMGKEAQNVPAAAVLFNKANDILGFDLLDICINGPKEKLDSTVISQPAIYVTSLAAIELLRAREGGQQIIDSVDVTCGLSLGEYTALAFAGAFSFEDGLKLVKLRGEAMQDAADAARSAMVSVIGLDSEKVQQLCDAANQEVPEAEKVQIANYLCPGNYAVSGGLKGVEVLESKAKSFKARMTVRLAVAGAFHTSFMEPAVSRLEAALATTEIRTPRIPVISNVNAQPHTDPNTIKKILARQVTSPVQWETTVKTLLTKGLKKSYELGPGKVIAGIVKRMDKGADIENIGA

SEQ ID NO: 43844 - protein, 284 aa, Glycine max
  Clone ID: 700559413_FLI.pep
GSHAGNKLAMQEFMVLPVGASSFKEAMKMGVEVYHNLKSVIKKKYGQDAINVGDEGGFAPNIQENKEGLELLKTAIAKAGYTGKVVIGMDVAASEFYKEDKTYDLNFKEDNNDGSQRISGDALKDLYKSFVSEYPIVSIEDPFDQDDWEHYAKLTAEVGANVQIVGDDLLVTNPKRVQKAIDTKACNALLLKVNQIGSVTESIEAVRMSKKAGWGVMASHRSGETEDTFIADLSVGLATGQIKTGAPCRSERLAKYNQLLRIEEELGAEAVYAGANFRTPVEPY

SEQ ID NO: 43845 - protein, 101 aa, Glycine max
  Clone ID: 700559517_FLI.pep
ERERMAALGGNRDVAGSQNSLEIDGLARFAVEEHNKKQNALLEFEKVVSAKQQVVSGTLYTITLEAKDGGQKKVYEAKVWEKAWLNFKEVQEFKLVGDAPA

SEQ ID NO: 43846 - protein, 138 aa, Glycine max
  Clone ID: 700559734_FLI.pep
WAIGKEICHEPLRINAWRRLCAAWVSSGVPDMTIILSLVPGRGSWTTTLAPDICLRRAKLLPFSPYTQSIVSSGTTISTIVLVTIADLLPLTSSKPPFRDVNPKLKSLMPLEFIPATVGGAHNPGEEGRSKFLVHNPG

SEQ ID NO: 43847 - protein, 115 aa, Glycine max
  Clone ID: 700562244_FLI.pep
SKISQTRSSLCIVKKNSVTVQAIWCLMFNANNYMFYSSRNNYSYRWHQQIQQFDVTIYVRRICQAHYRTTERKESYLQQQGPTIYVRGNINNLTFPDSHVKNINPLNKRRSTSNQ

SEQ ID NO: 43848 - protein, 422 aa, Glycine max
  Clone ID: 700562326_FLI.pep
QQHKAGYCLFKLPSLSLFLSASLPEVKMAQETFLFTSESVNEGHPDKLCDQISDAVLDACLEQDPDSKVACETCTKTNMVMVFGEITTKANVDYEKIVRDTCRNIGFVSDDVGLDADNCKVLVNIEQQSPDIAQGVHGHLTKRPEEIGAGDQGHMFGYATDETPELMPLSHVLATKLGAKLTEVRKNGTCPWLRPDGKTQVTVEYYNDKGAMVPIRVHTVLISTQHDETVTNDEIAADLKEHVIKPVIPEKYLDEKTIFHLNPSGRFVIGGPHGDAGLTGRKIIIDTYGGWGAHGGGAFSGKDPTKVDRSGAYIVRQAAKSIVANGLARRAIVQVSYAIGVPEPLSVFVDTYGTGKIPDKEILSIVKESFDFRPGMISINLDLKRGGNGRFLKTAAYGHFGRDDPDFTWEVVKPLKGEKVPA

SEQ ID NO: 43849 - protein, 101 aa, Glycine max
  Clone ID: 700562506_FLI.pep
YWNSPVGPKTTHFWGPIANWGFVAAGLADLNKPPEMISGNMTGAMCVYSALFMRFAWMVQPRNYLLFACHASNETVQLYHFSRWAKAQGLLSEKKEEASSQ

SEQ ID NO: 43850 - protein, 193 aa, Glycine max
  Clone ID: 700567372_FLI.pep
PGKTMKVQFSKPPFQQPWGVGTWLKEIKDTTKEGYSFEELCIKKEAIEGEEKFCAKSLGTVIGFAISKLGKNIQVLSSSFVNKQDQYTVEGVQNLGDKAVMCHRLNFRTAVFYCHEVRETTAFMVPLVAGDGTKTQALAICHSNTSGMNHQMLHQLMGVDPGTNPVCHFLGSKAILWVPNLSVDTAYQTNIVA

SEQ ID NO: 43851 - protein, 282 aa, Glycine max
  Clone ID: 700567825_FLI.pep
DSQGSTVVAYGAAVQAAILSGEGNEKVQDLLLLDVTPLSTGLETAGGVMTVLIPRNTTIPTKKEQVFSTYSDNQPGVLIQVYEGERTRTRDNNLLGKFELSGIPPAPRGVPQITVCFDIDANGILNVSAEDKTTGQKNKITITNDKGRLSKEEIEKMVQEAEKYKSEDEEHKKKVEAKNALENYAYNMRNTIKDDKIASKLSSDDKKKIEDAIEQAIQWLDGNQLAEADEFEDKMKELESICNPIIAKMYQGAGGDAGGAMDEDGPAAGSGSGAGPKIEEVD

SEQ ID NO: 43852 - protein, 372 aa, Glycine max
  Clone ID: 700648112_FLI.pep
FSSLSTTSPSSSSIMSHFKGKYHDELIANAAYIGTPGKGILAADESTGTIGKRLASISVENIESNRRALRELLFTAPGVLQYLSGVILFEETLYQSTAAGKPFVNVLKEAGVLPGIKVDKGTVELAGTNGETTTQGLDGLGQRCAKYYEAGARFAKWRAVLKIGPNEPSELSIHENAYGLARYAVICQENGLVPIVEPEILVDGPHDIHKCAAVTERVLAACYKALNDHHVLLEGTLLKPNMVTPGSQSAKVSPQVVAEHTVRALQRTVPAAVPAVVFLSGGQSEEEASVNLNAINQVNGKKPWSLSFSFGRALQQSTLKAWGGKEENVKKAQEALLVRAKANSEATLGTYKGNSQLADGASESLHVSNYSY

SEQ ID NO: 43853 - protein, 194 aa, Glycine max
  Clone ID: 700648338_FLI.pep
GSAGFKPENLVQPNIPNTWKAMEALYDSGKARTIGVSNFSTKKLSDLLLIARVPPAVNQVECHPSWQQDKLQAFCNSKGVHLSGYSPLGSPGTTWLKSDVLKHQVINMIAEKLGKTPAQVALRWGLQMGHSVLPKSTNETRIKENFDVFGWSIPEDLLAKFSEIQQARLLRGTTFAHETYGAYRSLEELWDGEI

SEQ ID NO: 43854 - protein, 179 aa, Glycine max
  Clone ID: 700652236_FLI.pep
EFQKGSSHMAAVVKARGKGKETPQIIDEEKNEENKSIGGDSQLTTPLLQKQDAKSGSVVVDIVKPSKPSSINKLSVLQRSDSTTNGPSSENIEDGEVIGIITLEDVFEELLQEEIVDETDEYVDVHKRIRVAAAAAASSVARAPSSRRLTSQKGAGIQSKPGQAPKKSAEENGLNSTKQ

SEQ ID NO: 43855 - protein, 218 aa, Glycine max
  Clone ID: 700652631_FLI.pep
TLTHRTSNYLSPLPQPRLHRLRVITGGEDGGVGTAVGGRTAVAIGGGGGGGRRGFGDEGVVVALVDGVVEAESGQSIGEALIELVLGGGIESEAQLDAGFELVHVLIGDALAAAVLAVPLAPEPRLIAEGVRRPRSLLEEWRGRLQERRALEQERRRVDVGFRHERGRRRRQAQPLGVGVVRRSRDLARWVRKRYGVVRFLSFGAFEWEGTPLALWIK

SEQ ID NO: 43856 - protein, 155 aa, Glycine max
  Clone ID: 700652811_FLI.pep
MGFATGGKTFFLWGGCMMMHADDFRQDRYGVVSGLKDGGYSDDMTLAAISGAHKRLITSPPVAVFPHPLASDLNFGRYWNYLRKQTFVLESYLTNVNWVMNRALFTTHCYLSWGFVAPYFMAMIHVAAAVRFYYKGFSPEEMAYTSGGENNTFPF

SEQ ID NO: 43857 - protein, 255 aa, Glycine max
  Clone ID: 700656920_FLI.pep
ISAAEVLGRHNDTIIKRVTKYQSKLPPTKVARDGSIMEWAEDFVDPDVHHRHVSHLFGLFPGHTISVEKTPDLCKAVEVSLIKRGDDGPGWSTTWKASLWAHLHNSEHAYRMIKHLIVLVEPDHERDFEGGLYSNLFTAHPPFQIDANFGFSGAIAEMLVQSTTKDLYLLPALPRDKWANGCVKGLKARGGVTVNICWKEGDLLEFGLWTENQNSQLRLHYRGNVVLTSLSPGRVYSYNNLLKCVKAYSLNEVNP

SEQ ID NO: 43858 - protein, 353 aa, Glycine max
  Clone ID: 700657119_FLI.pep
VVNDSCYHQLVSHWLNTHAVVEPFVIATNRHLSVVHPIYKLLFPHYRDTMNINSLARKSLVNADGIIEKTFLWGRYSLEMSAVIYKDWVFTDQALPNDLVKRGVAVKDPSAPHGVRLLIEDYPYASDGLEIWDAIKSWVHEYVSFYYKSDAAIQQDPELQAWWKELVQVGHGDLKDKPWWQKMQTREELIEASATLVWIASALHAAVNFGQYPYGGLILNRPTISRRFMPEKGSAEYAALAKNPEKEFLKTITGKKETLIDLTIIEILSRHTSDEFYLGERDGGDYWTSDAGPLEAFKRFGKKLQEIEQKLIQKNKDETLRNRSGPAKMPYTLLYPSSEEGLTFRGIPNSISI

SEQ ID NO: 43859 - protein, 277 aa, Glycine max
  Clone ID: 700657218_FLI.pep
YSPNHTFHTPIKLMQMQSMSTTMASFSPPTHFSATPSSSKPRLVYKNNFFFSLRSRSLSLSPLKAAASENGVGTAVEPPPEQAVPVPEPSLPPVDNSSVGTNGSAVAVESEVVKVQSSFVDPRWVAGTWDLKQFQKNGTTDWDAVIDAEARRRKWLEDNPESSSNENPVVFDTSIVPWWAWMKRFHLPEAELLNGRAAMIGFFMAYFVDSLTGVGLVDQMSNFFCKTLLFVAVLGVLLIRKNEDLENLKKLFDETTLYDKQWQATWQDENSSTSKNE

SEQ ID NO: 43860 - protein, 53 aa, Glycine max
  Clone ID: 700657564_FLI.pep
EYVQRIKESDGKRFAMHEREEMEAKFPRFVFHKKNVKLLFSMIGLVSCLFSLV

SEQ ID NO: 43861 - protein, 158 aa, Glycine max
  Clone ID: 700659687_FLI.pep
DNNKLLNCMEGIQIYVIGDSSKLPESLRSTIANAEKSTKHNSRLQLIVAMNYGGKYDVVQACKSVAKKVKDGLLHLDNINEKIIEKELETKCTEFPYPDLLIRAGGELRLSNFLLWQLAYTEFYFNKTPWPDFGKEEFVDALRSFQQRQRHYGGERHS

SEQ ID NO: 43862 - protein, 193 aa, Glycine max
  Clone ID: 700660051_FLI.pep
LWLKRQEKDQRRCATGLVGSEDQQAMEAEGLLITGVLDLAQLPDHARHLITLVLEIDIAQGPILLLQDDKAITLFPLGGKLSTPDHQEVLPGRRMVIKSVGLILLLMAMVSNRIKAMDMLRNLCTSLRLIVASGSHRDHPLDLDQDLLNCHQGVEDEVAGSWQCAAGASVHFLQLIATFAKSCILLEVCEYDG

SEQ ID NO: 43863 - protein, 271 aa, Glycine max
  Clone ID: 700664914_FLI.pep
RVDEPLIRGKEKGSESEVERGNVLAEEAAAEGMSGPAVGEEHTIWEALKTVDFWILFVSFLCGVGTGLAVMNNMGQIGLALGYSDVSLFVSLTSIWGFFGRIVSGSVSEHFIKKAATPRPLWNAASQILMAVGYILLAMAMPGSLYIGSVVVGICYGVRLAITVPTASELFGLKYYGLIYNILILNLPLGSFLFSGLLAGILYDMEATTTVGGGNTCIGAHCYRLVFIIMAVACVVGFFLDILLSFRTKKVYNKISSSKNSNKNSLNSSRR

SEQ ID NO: 43864 - protein, 272 aa, Glycine max
  Clone ID: 700665239_FLI.pep
ENFFVPSFLRAIKENTEANFRSIMAEPCKGVYTFEMLQPQFCKKLMSEVDHFERWVHGTKLKIMRPNAMNKNKHGVILDDFAFEAMLDRFMCDFIRPISQVFYPELGGSSLDSHHGFVVEYGINKDVELGLHEDEAEVTLNVCLGKEFSGGELFFQGVRCDAHVTSNAQPEEAFNYSHVPGHAILHPGRNRHGARPTTSGNRMNLILWCRRHSSGQLLSASAFMLSHSSVFRELKRYQRDFYSWCGECKQKKAERVCLSVMATKQELLKSEI

SEQ ID NO: 43865 - protein, 488 aa, Glycine max
  Clone ID: 700645818_FLI.pep
SLNIILSMAKLVLSLCFLLFSGCCFAFSFREQPQQNECQIQRLNALKPDNRIESEGGFIETWNPNNKPFQCAGVALSRCTLNRNALRRPSYTNAPQEIYIQQGSGIFGMIFPGCPSTFEEPQQKGQSSRPQDRHQKIYHFREGDLIAVPTGFAYWMYNNEDTPVVAVSLIDTNSFQNQLDQMPRRFYLAGNQEQEFLQYQPQKQQGGTQSQKGKRQQEEENEGGSILSGFAPEFLEHAFVVDRQIVRKLQGENEEEEKGAIVTVKGGLSVISPPTEEQQQRPEEEEKPDCDEKDKHCQSQSRNGIDETICTMRLRHNIGQTSSPDIFNPQAGSITTATSLDFPALSWLKLSAQFGSLRKNAMFVPHYNLNANSIIYALNGRALVQVVNCNGERVFDGELQEGQVLIVPQNFAVAARSQSDNFEYVSFKTNDRPSIGNLAGANSLLNALPEEVIQQTFNLRRQQARQVKNNNPFSFLVPPKESQRRVVA

SEQ ID NO: 43866 - protein, 197 aa, Glycine max
  Clone ID: 700669131_FLI.pep
LESILKGPISITLRHRLQCHVIRDAAKNEYETEEPILVLNEVTIDRGISSFLTNLECYCDNSFVTCVQGDGLILSTTSGSTAYSLAAGGSMVHPQVPGILFTPICPHSLSFRPLIFPEHVTLRVQVPFNSRSPAWASFDGKDRKQLAPGDALVCSMAPWPVPTACLDDSTNDFLRSIHEGLHWNLRKTQSFDGPRET

SEQ ID NO: 43867 - protein, 233 aa, Glycine max
  Clone ID: 700672302_FLI.pep
SFVKLLVNEMRSAGWDIDASVKAIMEQNVVYWKEDHKCFAIESFVCREMFDSFNFPNFSLPNESLPDRNRRQLFFGRFNELKPEKAKDFLAGKPRSPFAKFCRIKYLRLVHPKMEASFFGNLNQRSLLNAGEFPNTNFFTSFAEMAKRVWLLHCLAFSFEPPQASIFQVGKWCRFSDVYMESVNENDEEMPVESETQIAFTVVPGFRIGKTVIQCQVYLSQRQVKNFTSTKQR

SEQ ID NO: 43868 - protein, 248 aa, Glycine max
  Clone ID: 700672322_FLI.pep
PKPTTTMASYQKHYDDQGRKVDEYGNVERQTDEYGNPVHATSVTYVATKSVGGYNDDANKQHDITGVYPEKDTGRHHFGRGYDGDTNKQHDATGVYPGIDIGRDHGTTGVYGLNTDRHHGTSGVNPGIDTHNQQHGTTVGYAGDTGRQHGNTGGLYYGTDTADTGTGPRSGNTGGTGYGGTGGTDYGTAGGTGYGSGTGYGINTGGAHTEAGYGKEHRQHEQSHGGQHEKKGILDKIKEKLPGGHSDK

SEQ ID NO: 43869 - protein, 193 aa, Glycine max
  Clone ID: 700672423_FLI.pep
SMVLWEITLGTAYFLGLKRTYRLALRIQRRIVSPKYPKLLQFLHRRTRAVFDVAIRVHRNIQVRDIEVGRNFGNFILRWLDRMKPSAQIRGPPPSNGITSRESVGKRLSAGRSSNQKGSGTSRRDSDRHLFTSSRIMHFPTVARMMRPPNPAGITIHGRHFSTSTPQTVGSIYRVNWSEGVIRKDIMQWLRHN

SEQ ID NO: 43870 - protein, 402 aa, Glycine max
  Clone ID: 700673043_FLI.pep
ISDYINPNIKTMSSSCLSGAGGRTYGFDFEFVKSPSSSTFTSHTSSSPSSTISESSNSPLAISTKKPRTPRKRPNQTYNEAAALLSTAYPNLFSTKNLKTQGKGKGKFSRPTSENFDYDSSELLLPFRVFDGTASCFLLDQTGPKPMERPKVVSVQEKDNNNKACESPGEISSIVNFNSVELNDDGEESLDAESILDEEIEEGIDSIMGSSIQEVSNDAVSNLPWILPFGGKLEFPRPRVRALRHVDDGNWWNFPAVDILSISPKINTKPPPVAAEKKMKKKKVAAAPSPVVLELKNTELPKPKQGLMLKLDYDGVRNAWSDSGTPFTDDSPLADVPENDVTARLSQIDLLWDNGGVREASVLRYKEKRRTRLFSKKIRYQVRKVNADRRPRMKVRVSSQLS

SEQ ID NO: 43871 - protein, 400 aa, Glycine max
  Clone ID: 700680002_FLI.pep
TMASASASLLKSSLVLDKSEWVKGQTLRQPSAASVVRCNPTTPSGLTIRAGSYADELVKTAKTVASPGRGILAMDESNATCGKRLASIGLENTEANRQAYRTLLVTVPGLGQYISGAILFEETLYQSTTDGRKIVDVLLEQNIVPGIKVDKGLVPLAGSNDESWCQGLDGLASRSAAYYQQGARFAKWRTVVSIPNGPSALAVKEAAWGLARYAAIAQDNGLVPIVEPEILLDGEHGIDRTFEVAKKVWAEVFFYLAENNVLFEGILLKPSMVTPGAESKDKASPQTVADYTLKLLHRRIPPAVPGIMFLSGGQSEVEATLNLNAMNQSPNPWHVSFSYARALQNTALKTWGGRPENVKAAQDALLFRAKSNSLAQLGKYTGEGESEEAKKELFVKGYSY

SEQ ID NO: 43872 - protein, 314 aa, Glycine max
  Clone ID: 700680249_FLI.pep
DNKMDGFYIAPAFMDKLVVHISKNFMTLPNIKVPLILGIWGGKGQGKSFQCELVFAKMGINPIMMSAGELESGNAGEPAKLIRQRYREAADMIKKGKMCALFINDLDAGAGRLGGTTQYTVNNQMVNATLMNIADNPTNVQLPGMYNKEENPRVPIIVTGNDFSTLYAPLIRDGRMEKFYWAPTREDRIGVCTGIFRTDGIPEQDIVKLVDTFPGQSIDFFGALRARVYDDEVRKWISGVGVDSVGKKLVNSKDGPPTFEQPKMTLEKLLLYGNMLVQEQENVKRVQLADKYLNEAALGNANEDAIQRGTFFQS

SEQ ID NO: 43873 - protein, 183 aa, Glycine max
  Clone ID: 700680580_FLI.pep
TNYLGHFLLTNLLLDKMKQTAKDTGIEGRIVNLSSIAHLYTYEEGIRFDTINDEDGYHEKKAYGQSKLANILHTNELSRRLQAEGVNITANSVHPGVIMTPLMRHSSLLMNFLKMFSFMIWKNVPQGAATTCYVALHPSLKGVTGKYLQDCNESPPSAHASNELLGRKLWDFSNKMINSLSKA

SEQ ID NO: 43874 - protein, 160 aa, Glycine max
  Clone ID: 700680612_FLI.pep
GVYAIGDVIPGPMLAHKAEEDGVACVEYIAGKVGHVDYDKVPGVVYTMPEVASVGKTEEQVKELGVEYRVGKFPFMANSRAKAIDNAEGLVKILAEKETDKILGVHIMAPNAGELIHEAAIALQYDASSEDIARVCHAHPTMSEAVKEAAMATYDKPIHI

SEQ ID NO: 43875 - protein, 462 aa, Glycine max
  Clone ID: 700682385_FLI.pep
LKLKALAFPTTPNTKTSSSMAASVSTVGAVNRALLNLNGSGAGASAPSSAFFGTSLKKVIASRVPNSKVSGGSFKIVAVEEKKEIEETQQTDKDRWKGLAYDISDDQQDITRGKGLVDSLFQAPQDAGTHYAVMSSYEYLSTGLRQYLDNKMDGFYIAPAFMDKLVVHISKNFMTLPNIKVPLILGIWGGKGQGKSFQCELVFAKMGINPIMMSAGELESGNAGEPAKLIRQRYREAADMIKKGKMCALFINDLDAGAGRLGGTTQYTVNNQMVNATLMNIADNPTNVQLPGMYNKEENPRVPIIVTGNDFSTLYAPLIRDGRMEKFYWAPTREDRIGVCTGIFRTDGIPEQDIVKLVDTFPGQSIDFFGALRARVYDDEVRKWISGVGVDSVGKKLVNSKDGPPTFEQPKMTLEKLLLYGNMLVQEQENVKRVQLADKYLNEAALGNANEDAIQRGTFFQS

SEQ ID NO: 43876 - protein, 231 aa, Glycine max
  Clone ID: 700682628_FLI.pep
KEVNQQVGLDKGKSSSDKSTKFQGRRRVDHVIFDLAKFIGRGKIPSKVLKEVGELINLTLSQAQSHHQLSGSTIFNRIEIPASFDPLNGLYIGAHGLYSSEVIHLRRRFGQWQEDNGAKEPSNIEFYEYVEALKLTGDPYVPAGQVAFRAKIGKRYQLPHKGIIPEEFGVIARYKGEGRLAEPGFQNARWVDGELVILDGKHLKAGPVVGFVYWAPGYHFLVFFNRLRLQQ

SEQ ID NO: 43877 - protein, 427 aa, Glycine max
  Clone ID: 700684617_FLI.pep
KALAFPTTPNTKTSSSMAASVSTVGAVNRALLNLNGSGAGASAPSSAFFGTSLKKVIASRVPNSKVSGGSFKIVAVEEKKEIEETQQTDKDRWKGLAYDISDDQQDITRGKGLVDSLFQAPQDAGTHYAVMSSYEYLSTGLRQYLDNKMDGFYIAPAFMDKLVVHISKNFMTLPNIKVPLILGIWGGKGQGKSFQCELVFAKMGINPIMMSAGELESGNAGEPAKLIRQRYREAADMIKKGKMCALFINDLDAGAGRLGGTTQYTVNNQMVNATLMNIADNPTNVQLPGMYNKEENPRVPIIVTGNDFSTLYAPLIRDGRMEKFYWAPTREDRIGVCTGIFRTDGIPEQDIVKLVDSVGKKLVNSKDGPPTFEQPKMTLEKLLLYGNMLVQEQENVKRVQLADKYLNEAALGNANEDAIQRGTFFQS

SEQ ID NO: 43878 - protein, 141 aa, Glycine max
  Clone ID: 700684680_FLI.pep
KIMSAPTLHHFSSLFTLFIVLLHHSNADVGTASRYSPPYLPSGCYGTEATQFPSSNLFAAAGDGIWDNGAACGRQYLVRCISAEQPRTCIPDQSIQIKIVDYAATAVSPASAGGTTMVLSDKAFGTIANMSATLINIELQQ

SEQ ID NO: 43879 - protein, 150 aa, Glycine max
  Clone ID: 700725187_FLI.pep
TKPNGAEHKFCAKSLETLIGFAISKLGKNIQVLSSSFVNKQELYKVEGVQNLGDKAVMCHRLNFRTVAFYCHEVRGTTAFMVPLVAGDGTKTQALAVCHSDTSGMNRHILHQTMGVDPGTNTVCHFLGSKAILWVPNLAMDTAYQTNIVV

SEQ ID NO: 43880 - protein, 164 aa, Glycine max
  Clone ID: 700725212_FLI.pep
WFFGKFNEMKSMKAKYYLAEKPRSSFAKFCRVKYSRLVHPKMESSFFGNQSHRNLVNAGGFPDTEFFASFAEMAKRVWLLHCLAFSYEPQASIFQVGKGCRFSDVYMESVNDEVFLYSEVESDPQVAFTVVPGFRIGKTVLQCQVYLSQHQTKVKKKITSTKQR

SEQ ID NO: 43881 - protein, 95 aa, Glycine max
  Clone ID: 700725874_FLI.pep
RTTAFNSLLEELNEERQKARSKMKMMFNRSFGATFLASTGQESAFAYNIHQYADVYTSKPENFLLHSPEAWLHVPFDVKIMPHHVKVPSSLFKTG

SEQ ID NO: 43882 - protein, 217 aa, Glycine max
  Clone ID: 700726336_FLI.pep
AALGQRINLEGILCSTMVILKDPKLAMPHISVPDIRYVDWAELRRKGFKGVVFDKDNTITAPYSLKSWPPLESSLECCKSEFGHDIAVFSNSAGLHEYDHDGSKARMLEGAIGIKVIRHRVKKPAGTAEEIEKHFGCEASQLIMVGDRPFTDIVYGNRNGFLTILTEPLSLAEEPFIVKQVRKLETSFVSFWSRRGLDPLSQKLLSDPKPCVKEPYH

SEQ ID NO: 43883 - protein, 276 aa, Glycine max
  Clone ID: 700729809_FLI.pep
FPLPTIYHQPISSLSLLLSVFPAMDSGAWLLFLVVVAVSTSGHIHSEAILRLPSESEEISRDYCDSWMLAVETNNAGTWNRVPASCVDFVAEYITGDRYRRDCDVIRNLSAAFAKSVGLAGDGRDAWVFDVDETLLSNVPYYQGVGFGSEIFNETSFDNWVDLAAAPALPAILSLYNELKELGFKIFFLTGRSEFQRNATETNLLLSGYRDWERLILRGSSDQGKPATTYKSEKRAELENEGYRIHGNSGDQWSDLWGYAVSARSFKLPNPMYYIP

SEQ ID NO: 43884 - protein, 644 aa, Glycine max
  Clone ID: 700730041_FLI.pep
QTFACDVGKSPAVAGYGFCDKSLGVEARVKDLVGRLTLQEKIGNLVNSAVDVSRLGIPKYEWWSEALHGVSNVGPGTRFSNVIPGATSFPMPILTAASFNTSLFEVIGRVVSTEARAMYNVGLAGLTYWSPNINIFRDPRWGRGLETPGEDPVLTSKYAAGYVKGLQQTDGGDPNKLKVAACCKHYTAYDVDNWKGIQRYTFNAVVTKQDMEDTFQPPFKSCVIDGNVASVMCSYNKVNGKPTCADPDLLKGVVRGEWKLNGYIVSDCDSVEVLYKDQHYTKTPEEAAAISILAGLDLNCGRFLGQYTEGAVKQGLIDEASINNAVANNFATLMRLGFFDGDPRKQPYGNLGPKDVCTQENQELAREAARQGIVLLKNSPASLPLNAKAIKSLAVIGPNANATRVMIGNYEGIPCKYISPLQGLTAFAPTSYAAGCLDVRCPNPVLDDAKKIAASADATVMVVGASLAIEAESLDRVNILLPGQQQLLVSEVANASKGPVILVIMSGGGMDVSFAKNNNKITSILWVGYPGEAGGAAIADVIFGFHNPSGRLPMTWYPQSYVDKVPMTNMNMRPDPATGYPGRTYRFYKGETVFAFGDGLSYSSIVHKLVKAPQLVSVQLAEDHVCRSSECKSIDVVGEHCQKF

SEQ ID NO: 43885 - protein, 572 aa, Glycine max
  Clone ID: 700730185_FLI.pep
DDEGRDTFWHSSAHILGQSLETEYGCKLCIGPCTTRGEGFYYDAFYGDLGLNDDHFKQIEAGALKAVAEKQPFERIEVTRDQALEMFSDNKFKIEIINDLPADKTITVYRCGPLVDLCRGPHIPNTSFVKAIACLKASSAYWRGDKDRESLQRVYGISYPDQKSLKEYLHRLEEAKKYDHRILGVKQELILHHEWSPGSWFFLPHGARIYNKLMDFIRNQYRDRGYQEVISPNVFNMDLWVQSGHAANYREDMFILEVDKQEFGLKPMNCPGHCLMFKHRVRSYRELPLRFADFGVLHRNEASGALSGLTRVRRFQQDDAHIFCRESQIKDEVRNGLNFINYVYKIFGFTYELKLSTRPEKYLGDIATWDKAESALKEALDDFGKPWQLNEGDGAFYGPKIDISVSDALSRKFQCATLQLDFQLPDRFKLEFSAEDEAKIERPVMIHRAILGSVERMFAILLEHYKGKWPFWLSPRQAIVCPVSEKSQSYALQVRDQIHQAGYHVDADTTDRKIQKKVREAQLAQYNFILVVGEEEANSGQVSVRVRDLAEHKVMSIEKLLEHFRDKTAAFE

SEQ ID NO: 43886 - protein, 147 aa, Glycine max
  Clone ID: 700730303_FLI.pep
PLEIYFKFKLQPLQEGKATQHIHSSQNQAGWHRSPHSCVESTQRRHPPSCKRSKALLISESVKVWVMYSSTLISFFKYLSTSQGTCDLLLKPPKAVPFQTRPLTNWKGRVDISCPDAATPTITDVPQPWKLSKNISCLGNNVQKLCQ

SEQ ID NO: 43887 - protein, 99 aa, Glycine max
  Clone ID: 700730567_FLI.pep
ESRRVNASACYWDGCQVNHEHSKANWKWSQNRHMRISSINPARSLGAAVMYNQQKAWDDHWIFWVGPFIGAAIAAFYHQFILRASAAKALGSFRSNPTI

SEQ ID NO: 43888 - protein, 565 aa, Glycine max
  Clone ID: 700732890_FLI.pep
FNMGKPFTLSLSSLCLLLLSSACFAISSSKLNECQLNNLNALEPDHRVESEGGLIQTWNSQHPELKCAGVTVSKLTLNRNGLHLPSYSPYPRMIIIAQGKGALGVAIPGCPETFEEPQEQSNRRGSRSQKQQLQDSHQKIRHFNEGDVLVIPPGVPYWTYNTGDEPVVAISLLDTSNFNNQLDQTPRVFYLAGNPDIEYPETMQQQQQQKSHGGRKQGQHQQEEEEEGGSVLSGFSKHFLAQSFNTNEDIAEKLQSPDDERKQIVTVEGGLSVISPKWQEQQDEDEDEDEDDEDEQIPSHPPRRPSHGKREQDEDEDEDEDKPRPSRPSQGKREQDQDQDEDEDEDEDQPRKSREWRSKKTQPRRPRQEEPRERGCETRNGVEENICTLKLHENIARPSRADFYNPKAGRISTLNSLTLPALRQFQLSAQYVVLYKNGIYSPHWNLNANSVIYVTRGQGKVRVVNCQGNAVFDGELRRGQLLVVPQNFVVAEQAGEQGFEYIVFKTHHNAVTSYLKDVFRAIPSEVLAHSYNLRQSQVSELKYEGNWGPLVNPESQQGSPRVKVA

SEQ ID NO: 43889 - protein, 180 aa, Glycine max
  Clone ID: 700732904_FLI.pep
ICTMRLRQNIGQNSSPDIYNPQAGSITTATSLDFPALWLLKLSAQYGSLRKNAMFVPHYTLNANSIIYALNGRALVQVVNCNGERVFDGELQEGGVLIVPQNFAVAAKSQSDNFEYVSFKTNDRPSIGNLAGANSLLNALPEEVIQHTFNLKSQQARQVKNNNPFSFLVPPQESQRRAVA

SEQ ID NO: 43890 - protein, 69 aa, Glycine max
  Clone ID: 700734472_FLI.pep
SEGLLFSEKPSQLDSNPLCIQRMQFMMELEIDLLALDQPERLQTYFSGWNLNDFLTQAATDRGELLYSL

SEQ ID NO: 43891 - protein, 489 aa, Glycine max
  Clone ID: 700736453_FLI.pep
TLITMAKLVLSLCFLLFSGCFALREQAQQNECQIQKLNALKPDNRIESEGGFIETWNPNNKPFQCAGVALSPCTLNRNALRRPSYTNGPQEIYIQQGNGIFGMIFPGCPSTYQEPQESQQRGRSQRPQDRHQKVHRFREGDLIAVPTGVAWWMYNNEDTPVVAVSIIDTNSLENQLDQMPRRFYLAGNQEQEFLKYQQQQQGGSQSQKGKQQEEENEGSNILSGFAPEFLKEAFGVNMQIVRNLQGENEEEDSGAIVTVKGGLRVTAPAMRKPQQEEDDDDEEEQPQCVETDKGCQRQSKRSRNGIDETICTMRLRQNIGQNSSPDIYNPQAGSITTATSLDFPALWLLKLSAQYGSLRKNAMFVPHYTLNANSIIYALNGRALVQVVNCNGERVFDGELQEGGVLIVPQNFAVAAKSQSDNFEYVSFKTNDRPSIGNLAGANSLLNALPEEVIQHTFNLKSQQARQVKNNNPFSFLVPPQESQRRAVA

SEQ ID NO: 43892 - protein, 114 aa, Glycine max
  Clone ID: 700736570_FLI.pep
ANIELVGLKEQQQEQQQEEQPLEVRKYRAELSEQDIFVIPAGYPVVVNATSNLNFFAIGINAENNQRNFLAGSQDNVISQIPSQVQELAFPGSAQAVEKLLKNQRESYFVDAQP

SEQ ID NO: 43893 - protein, 485 aa, Glycine max
  Clone ID: 700738950_FLI.pep
MLREKRESALKMGKFSSSYSTSDFVHFGVLLPFLLLSQLFFQLAWCGSIVKFLPGLEGPLPFVLETGYVGVGESEDVQAFYYFIESENNPKEDPLMLWLTGGPGCSAFSGLVIEIGPIAFKNEEYNGSLPNLVLRPHSWTKVSSIIFVDLPVSTGFTYATTEFATQRSDWIQVHQVHQFLRKWLIEHPNFLSTDVYIGGDSYSGITIPAIVQEISLGNEKGLQPWINLQGYLLGNPATTRRHENYRISFAHGMGLISDELYRSLQKNCKGEYINVDTKNVLCSRNIETFNEVTSGLSMVNILDPSCDWLDTETSWRRSLLKKYPRKNFLNTHLKLPSLNCRSYAYFLCGYWANDDSVRSALHIRKGTIGKWRRCTFNIPNKEDISSSYEYHVNLSRKGYRSLIYSGDHDMKIPFLETQAWISSLNYSIVDDWRQWHTDGQVAGYTRTYSNRMTFATVKGGGHTAPEYKPEECLAMFRRWISNKAL

SEQ ID NO: 43894 - protein, 379 aa, Glycine max
  Clone ID: 700738987_FLI.pep
CFASTFSSMASSICALSPSVQSQLTKTTLVAPIPLYQRSKCEMSRRSFAFKGIVASGVSVAASTLTAEAEPSSKGFERLPYKPEGYNYWTWRGHKIHYVVQGEGSPIVLIHGFGASAFHWRYNIPELAKKHKVYALDLLGFGWSDKALIDYDAMVWRDQVVDFVKEIVKEPTVLVGNSLGGFTALVAATGLPDLVNGVALLNSAGQFGDGKRESETSEETALQKFLLKPLKEVFQRVVLGFLFWQAKQPARVLSVLKSVYINSSNVDDYLVESITRPAQDPNAGEVYYRLMTRFMMNQSKYTLDAVLSELSCPLLLLWGDLDPWVGPAKANRIKEFYPKTTLVNLQAGHCPHDETPELVNKALLDWLTTLTPEVTLQTV

SEQ ID NO: 43895 - protein, 97 aa, Glycine max
  Clone ID: 700739218_FLI.pep
ECYTQVPSQLLALGLVQQPSRTEIFTCQVCFASNSRLEESSPLNSILVSISKSSLVQVLVSQLDSLDILLFLDKHVTIQQELLQSHLGLLKGWRSIF

SEQ ID NO: 43896 - protein, 42 aa, Glycine max
  Clone ID: 700739327_FLI.pep
DFKVRILLHNEKAEKIDGSVSQYKFKRKMKQQVLYAYYYYYH

SEQ ID NO: 43897 - protein, 399 aa, Glycine max
  Clone ID: 700739416_FLI.pep
TMASASASLLKSSLVLDKSEWVKGQTLRQPSASVVRCNPTTPSGLTIRAGSYADELVKTAKTVASPGRGILAMDESNATCGKRLASIGLENTEANRQAYRTLLVTVPGLGQYISGAILFEETLYQSTTDGRKIVDVLLEQNIVPGIKVDKGLVPLAGSNDESWCQGLDGLASRSAAYYEQGARFAKWRTVVSIPNGPSALAVKEAAWGLARYAAIAQDNGLVPIVEPEILLDGEHGIDRTFEVAQKVWAEVFFYLAENNVLFEGILLKPSMVTPGAESKDKASPQTVADYTLKLLHRRIPPAVPGIMFLSGGQSEVEATLNLNAMNQSPNPWHVSFSYARALQNTALKTWGGRPENVKAAQDALAFRAKSNSLAQLGKYTGEGESEEAKKELFVKSYSY

SEQ ID NO: 43898 - protein, 221 aa, Glycine max
  Clone ID: 700743838_FLI.pep
RPKVESWSSEFSMIDWVKIFGGVPVSASNIFKLLSTKSHVLLYPGGAREALHYKGEAYKLTWPDHPEFVRMAARFGATIVPFGAVGEDDLAELVLDYNDLMKIPIVNDRIRNMNRDSVKFRDETSGEVANQNLTFPVLLPKIPGRFYFLFGKPIKTKGMDKILKDRESANQMYLEIKSEVEHNLNYLIKKREEDPYRNFVDRKMYQIFYPHETDPTPSFKP

SEQ ID NO: 43899 - protein, 565 aa, Glycine max; identical to SEQ ID NO: 43888
  Clone ID: 700697910_FLI.pep

SEQ ID NO: 43900 - protein, 258 aa, Glycine max
  Clone ID: 700674904_FLI.pep
SFSATLVQDSLRLATDVIPNYSFGCVNAITGASVPAQGLLGLGRGPLSLLSQSGSNYSGIFSYCLPSFKSYYFSGSLKLGPVGQPKSIRTTPLLRSPHRPSLYYVNFTGISVGRVLVPFPSEYLGFNPNTGSGTIIDSGTVITRFVEPVYNAVREEFRKQVGGTTFTSIGAFDTCFVKTYETLAPPITLHFEGLDLKLPLENSLIHSSAGSLACLAMAAAPDNVNSVLNVIANFQQQNLRILFDTVNNKVGIAREVCN

SEQ ID NO: 43901 - protein, 506 aa, Glycine max
  Clone ID: 700675231_FLI.pep
PLVLKHSSVITMAKLVFSLCFLLFSGCCFAFSSREQPQQNECQIQKLNALKPDNRIESEGGLIETWNPNNKPFQCAGVALSRCTLNRNALRRPSYTNGPQEIYIQQGKGIFGMIYPGCPSTFEEPQQPQQRGQSSRPQDRHQKIYNFREGDLIAVPTGVAWWMYNNEDTPVVAVSIIDTNSLENQLDQMPRRFYLAGNQEQEFLKYQQEQGGHQSQKGKHQQEEENEGGSILSGFTLEFLEHAFSVDKQIAKNLQGENEGEDKGAIVTVKGGLSVIKPPTDEQQQRPQEEEEEEEDEKPQCKVKDKHCQRPRGSQSKSRRNGIDETICTMRLRHNIGQTSSPDIYNPQAGSVTTATSLDFPALSWLRLSAEFGSLRKNAMFVPHYNLNANSIIYALNGRALIQVVNCNGERVFDGELQEGRVLIVPQNFVVAARSQSDNFEYVSFKTNDTPMIGTLAGANSLLNALPEEVIQHTFNLKSQQARQIKNNNPFKFLVPPQESQKRAVA

SEQ ID NO: 43902 - protein, 519 aa, Glycine max
  Clone ID: 700675281_FLI.pep
FNMGKPFFTLSLSSLCLLLLSSACFAITSSKFNECQLNNLNALEPDHRVESEGGLIETWNSQHPELQCAGVTVSKRTLNRNGLHLPSYSPYPQMIIVVQGKGAIGFAFPGCPETFEKPQQQSSRRGSRSQQQLQDSHQKIRHFNEGDVLVIPPGVPYWTYNTGDEPVVAISLLDTSNFNNQLDQNPRVFYLAGNPDIEHPETMQQQQQQKSHGGRKQGQHQQQEEEGGSVLSGFSKHFLAQSFNTNEDTAEKLRSPDDERKQIVTVEGGLSVISPKWQEQEDEDEDEDEEYEQTPSYPPRRPSHGKHEDDEDEDEEEDQPRPDHPPQRPSRPEQQEPRGRGCQTRNGVEENICTMKLHENIARPSRADFYNPKAGRISTLNSLTLPALRQFGLSAQYVVLYRNGIYSPHWNLNANSVIYVTRGKGRVRVVNCQGNAVFDGELRRGQLLVVPQNFVVAEQGGEQGLEYVVFKTHHNAVSSYIKDVFRAIPSEVLSNSYNLGQSQVRQLKYQGNSGPLVNP

SEQ ID NO: 43903 - protein, 115 aa, Glycine max
  Clone ID: 700677191_FLI.pep
KALETEVMKIDPPPRPPNWGELDLPLNASSWSEEDLQDPDKFYEMTVLLNAQREISDKILDAQWETKWRQDKLNEMLEAKVKPYIQDIDNAVLPEPILLKPQNQEKRQRRRWFFF

SEQ ID NO: 43904 - protein, 501 aa, Glycine max
  Clone ID: 700677249_FLI.pep
TLISHHHGQASFFPLFSAFQWLLLRFSSREQPQQNECQIQKLNALKPDNRIESEGGLIETWNPNNKPFQCAGVALSRCTLNRNALRRPSYTNGPQEIYIQQGKGIFGMIYPGCPSTFEEPQQPQQRGQSSRPQDRHQKIYNFREGDLIAVPTGVAWWMYNNEDTPVVAVSIIDTNSLENQLDQMPRRFYLAGNQEQEFLKYQQEQGGHQSQKGKHQQEEENEGGSILSGFTLEFLEHAFSVDKQIAKNLQGENEGEDKGAIVTVKGGLSVIKPPTDEQQQRPQEEEEEEEDEKPQCKGKDKHCQRPRGSQSKSRRNGIDETICTMRLRHNIGQTSSPDIYNPQAGSVTTATSLDFPALSWLRLSAEFGSLRKNAMFVPHYNLNANSIIYALNGRALIQVVNCNGERVFDGELQEGRVLIVPQNFVVAARSQSDNFEYVSFKTNDTPMIGTLAGANSLLNALPEEVIQHTFNLKSQQARQIKNNNPFKFLVPPQESQKRAVA

SEQ ID NO: 43905 - protein, 316 aa, Glycine max
  Clone ID: 700677424_FLI.pep
GTTYYVVNPDNNENLRLITLAIPVNKPGRFESFFLSSTEAQQSYLQGFSRNILEASYDTKFEEINKVLFSREEGQQQGEQRLQESVIVEISKEQIRALSKRAKSSSRKTISSEDKPFNLRSRDPIYSNKLGKFFEITPEKNPQLRDLDIFLSIVDMNEGALLLPHFNSKAIVILVINEGDANIELVGLKEQQQEQQQEEQPLEVRKYRAELSEQDIFVIPAGYPVVVNATSNLNFFAIGINAENNQRNFLAGSQDNVISQIPSQVQELAFPGSAQAVEKLLKNQRESYFVDAQPKKKEEGNKGRKGPLSSILRAFY

SEQ ID NO: 43906 - protein, 139 aa, Glycine max
  Clone ID: 700681325_FLI.pep
LPNSLGSDRVNLLEFFKAVARRDGRTAAECALNLSNQQNCPNPEAFIEEVEESFTFWGTPEGDIVHPAECMEQLLEKVRRHRVNIDGNVCTVMVTTLVLEGWQRKLDPGYNVMQTLQTLLLRADWAKSLSYTIDGLMAP

SEQ ID NO: 43907 - protein, 232 aa, Glycine max
  Clone ID: 700681333_FLI.pep
AAQDIMTQSWKTSLRELNGSLKDVPWKAFFQNRAVWAMIYAHFCGSWGHYNCLSWLPTFFSEELNLNLTEAAWVSILPPLASIFVTSLAAQLADNLISRGVETTVVRKICQSIAFLSPAICMTLSSLDLGLPPWEIVGILTSGLALSSFALSGLYCTHQDMSPEYASILLGITNTVGAIPGIVGVALTGYLLDSTHSWSISLFAPSIFFYVTGTIIWLAFASSKPQSFSEQN

SEQ ID NO: 43908 - protein, 204 aa, Glycine max
  Clone ID: 700681568_FLI.pep
KIKKPFTQTPPPTMSTKLLLTLILISYTLSNVIGEETGFVGTLHPKSLGLHKKQTLSHFKFYWHDIVSSGANSTSATIIPPLPKYNTTTSFGMVNVMDNPLTLGPELGSKLVGRAEGFYALTSQSQINLLMVMNFALFEGKYNGSTITIVGRNAVSENEKDIPVVGGSGVFKFAKGYAHAKTYFFDPKTGDATTEYNIYVLHYE

SEQ ID NO: 43909 - protein, 97 aa, Glycine max; identical to SEQ ID NO: 43895
  Clone ID: 700683674_FLI.pep

SEQ ID NO: 43910 - protein, 454 aa, Glycine max
  Clone ID: 700683795_FLI.pep
GKIIHRKGGVLYLFRGRNYNYKTRPHFPLMLWKPVPPVYPRLVQRVPEGLTLEEATKMRQKGSTLIPICKLGKNGVYCDLVKTVREAFEECELVRINCQGLNKSDYRKIGAKLRDLVPCTLLSFEYEHILMWRGPNWKSFIPDRGDDRKESKQIEVDHKNYKPLPSEALEFSAPSLQMNPLEHESNLLHDTSISSISSDVTLDKVEVSYPNENSHQSMSGVTEVPSLTKIYDVETTNDSTDSYAEPEPRTSLIPSMTIPHYDSHAEFSSKAMSESHGTEHIMDSKSCSDGLSASISGSHATLGGSDNSTNGMVDSHSNKLLDALGEEDVSQAPRSAAPSMKAIWLLLEQAVEKGSALVLDKDSLDADNIYQNTVAFAKSAPPGPAFRKNTKAVSQKNPKQEGSTLETKETTIDSMKRKKENSTKIPRKANFDDQLLNVVPQGTLGVDELAKLLT

SEQ ID NO: 43911 - protein, 346 aa, Glycine max
  Clone ID: 700684215_FLI.pep
MAHPTSSSGQSNDLTKEDCKETSSVVVCFGEMLIDFVPMVGGVSLAEAPAFKKAPGGAPANVAVGISRLGSSSAFIGKVGADEFGYMLADILKQNNVETSGMRFDSNARTALAFVTLRADGEREFLFFRNPSADMLLQESELDKDLLKKARIFHYGSISLIDEPCKSAHLAAMSIAKNSGCILSYDPNLRLALWPSADAARKGIMDIWDQADVIKISEDEITFLTGGDDPYDDNVVLKKLFHPNLKLLIVTEGSQGCRYYTKAFKGRVSGVKVKPVDTTGAGDAFVSGILHCIASDQTIFQDEKRLRKALYFANVCGALTVTQRGAIPALPTKEAILQFLLEAAVI

SEQ ID NO: 43912 - protein, 280 aa, Glycine max
  Clone ID: 700685226_FLI.pep
AAVRVAEQEQVVPLNKGVEGLSTPLLENRLSDGAEVEMEVIPMGVNNRDISNTFRITSPLVVDEAMLEKVLGPPKFDGREAEDRVATPGASVGLVWTTFGGEVQFVEATAMVGKGELHLTGQLGDVIKESAQIALTWVRARATELRLAAAEGINLLEGRDIHIHFPAGAVPKDGPSAGVTLVTALVSLFSQRRVRSDTAMTGEMTLRGLVLPVGGIKDKILAAHRCGIKRVILPERNLKDLVEVPSSVLADLEILLAKRMEDVLEQAFDGGCPWRQHSKL

SEQ ID NO: 43913 - protein, 119 aa, Glycine max
  Clone ID: 700685405_FLI.pep
KNWDDPTTKYVENCKYPRDGSSPKSLRYIGSMVADVHRTLLYGGIFLYPADKKSPNGKLRVLYEVFPMSFLMEQAGGQAFTGNQRALDLVPKKLHERSPIFLGSYEDVEEIKALYAAEE

SEQ ID NO: 43914 - protein, 399 aa, Glycine max; identical to SEQ ID NO: 43897
  Clone ID: 700685790_FLI.pep

SEQ ID NO: 43915 - protein, 252 aa, Glycine max
  Clone ID: 700685816_FLI.pep
VYSTSEPTPFPSGPGSDIAKDTRNEEVSMLENVYWKEFGLLVFVWVSFLGIQIAMNQTSKCSTIYWVLNMLQIPISVGVSGYEAASLYKGRRQISSVGDQGKTFTSQQLTIYCIFGVLAGIVGGLLGIGGGFVMGPLFLELGVPPQVSSATATFAMTFSSSMSVVEYYLLKRFPVPYALYFIAVAAISAIVGQHIVRKLIDVLGRASLIIFVLAFTILVSAVSLGGVGIVAMVKKIENHEYMGFDDLCTYDS

SEQ ID NO: 43916 - protein, 306 aa, Glycine max
  Clone ID: 700686133_FLI.pep
IAPAFMDKLVVHITKNFMTLPNIKVPLILGIWGGKGQGKSFQCELVFAKMGINPIMMSAGELESGNAGEPAKLIRQRYREAADLIKKGKMCALFINDLDAGAGRLGGTTQYTVNNQMVNATLMNIADNPTNVQLPGMYNKEENPRVPIIVTGNDFSTLYAPLIRDGRMEKFYWAPTRDDRIGVCTGIFRTDSIPEQDVVKIVDTFPGQSIDFFGALRARVYDDEVRKWISGVGVDGIGKKLVNSKDGPPTFEQPKMTLEKLLTYGNMLVQEQENVKRVQLADKYLNEAALGNANEDAINRGTFFQS

SEQ ID NO: 43917 - protein, 297 aa, Glycine max
  Clone ID: 700686151_FLI.pep
RFSRYSTLSNMSFETTGTIASFGGKLLKLKHKSESTNTDMELNMFLPPQALKSGAKVPVLFYLSGLTCTGNNCSEKGFFQHGAAKHGIAVVYPDTSPRGLQIEGEDEAYDFGSGAGFYVDATKDPWSKGYKMYSYITKELPEALFSSFKELDSSKVSITGHSMGGHGALTLFLKNPGMYKSVSAFAPIANPINCPWGQKAFKGYFGEDQQQKWKEHDASELVKQWKGPLEVLIDVGTGDNFYKQGQLLPENFVKAAKESGNDKGIQLRMQPDYDHSYYFMATFADDHVEWAAKHLNA

SEQ ID NO: 43918 - protein, 482 aa, Glycine max
  Clone ID: 700728326_FLI.pep
DYTAMAASVSTVGAVNGAPLSLNSSGAGASVPSSAFFGTSLKKVIASRVPNVKISSGSFKIVAAEKEIDEKQQTDKDRWKGLAYDVSDDQQDITRGKGLVDSLFQAPQDTGTHYAIMSSYEYLSTGLKQYNLDNNMDGFYIAPAFMDKLVVHISKNFMTLPNIKVPLILGIWGGKGQGKSFQCELVFAKMGINPIMMSAGELESGNAGEPAKLIRQRYREAADMIKKGKMCALFINDLDAGAGRLGGTTQYTVNNQMVNATLMNIADNPTNVQLPGMYNKEENPRVPIIVTGNDFSTLYAPLIRDGRMEKFYWAPTRDDRVGVCNGIFRTDNVPKDDIVKLVDTFPGQSIDFFGALRARVYDDEVRKWISVVGVDFIGKKLVNSKEGPPTFDQPKMTLSKLLEYGNMLVQEQENVKRVQLADKYLKEAALGDANQDSINRGTFYGKAAQQVNIPVPEGCTDPNASNFDPTARSDDGTCLYTP

SEQ ID NO: 43919 - protein, 366 aa, Glycine max
  Clone ID: 700728520_FLI.pep
KKMEMYQIWSRRIALGAFAFVLLFLSASADDVVVLSEDNFEKEVGQDRGALVEFYAPWCGHCKKLAPEYEKLGSSFKKAKSVLIGKVDCDEHKSLCSKYGVSGYPTIQWFPKGSLEPKKYEGPRTADSLAEFVNTEGGTNVKIATAPSNVVVLTSENFNEVVLDETKDVLVEFYAPWCGHCKSLAPTYEKVATAFKLEEDVVIANLDADKYKDLAEKYDVSGFPTLKFFPKGNKAGEEYGDGRDLDDFVAFINEKSGTSRDVKGQLTSQAGIVESLDVLVKEFVAASDEEKKFVFTRMEEEVEKLKGSASRHGKIYLKAAKNYLEKGSDYAKNEIQRLQRILDKSISPAKADELTLKKNILSTYAA

SEQ ID NO: 43920 - protein, 170 aa, Glycine max
  Clone ID: 700728590_FLI.pep
RYFNPVGAHPSGCIGEDPRGIPNNLMPFVQQVAVGRRPALTVFGNDYNTTDGTGVRDYIHVVDLADGHIAALLKLDDPNIGCEVYNLGTGKGTSVLEMVRAFEMASGKKIPLVMAGRRPGDAEIVYASTKKAERELKWKAKYGIDEMCRDQWNWASKNPYGYGDQEDSTV

SEQ ID NO: 43921 - protein, 195 aa, Glycine max
  Clone ID: 700728860_FLI.pep
LTAAAATALRGAATLKARALKEVWNIAAVIPVEKNLAVAGGHNNNNNASNGNSKSSFSGELVPEENFLGICSRELLARGCELLKRTRKGDLHWKVVSVYVNRMNQVILKMKSRHVAGTITKKKKNVVLEVIKDVPAWPGRHLLEGGEDRRYFGLKTVMRGLVEFECRNQREYDVWTQGVSRLLSIAAEKNNKNRI

SEQ ID NO: 43922 - protein, 330 aa, Glycine max
  Clone ID: 700728881_FLI.pep
RSFSISSILFFLNYCLVLGFENQHCVAMSNHHRSSSKNGLPPQELLDDLCSRFVLNVPKEDLQSFERILFLVEYAHWFYEDNSVENNPSLKSLNLKEFTSLHDIFKDFTSYKVRVPVTGAIILDETYERCLLVKGWKGSSWSFPRGKKSKDEEDHACAIREVMEETGFDVSKLLNKDEYLEVIFGQQRVRLYIIAGVKDDTAFAPLTKKEISEIAWHRLDELQPASDEVISRSITGLKLYMVAPFLASLKSWISTHQPAMAPRPDLPLKGICVWKAKPGSIGSSSTVMDIQPTKPEPDSHTPDLGPGKSFRNFRFDTASILQAMETSFSS

SEQ ID NO: 43923 - protein, 216 aa, Glycine max
  Clone ID: 700731455_FLI.pep
QQEEDDDDEEEQPQCVETDKGCQRQSKRSRNGIDETICTMRLRQNIGQNSSPDIYNPQAGSITTATSLDFPALWLLKLSAQYGSLRKNAMFVPHYTLNANSIIYALNGRALVQVVNCNGERVFDGELQEGGVLIVPQNFAVAAKSQSDNFEYVSFKTNDRPSIGNLAGANSLLNALPEEVIQHTFNLKSQQARQVKNNNPFSFLVPPQESQRRAVA

SEQ ID NO: 43924 - protein, 519 aa, Glycine max; identical to SEQ ID NO: 43902
  Clone ID: 700731617_FLI.pep

SEQ ID NO: 43925 - protein, 173 aa, Glycine max
  Clone ID: 700733463_FLI.pep
ILPFPLRTLDHSHALLYPLLHRRSLQRSQQHRHPMANAASGMAVHDDCKLRFLELKTKRTHRFIVFKIEEQQKQVIVEKLGEPAQGYEDFTASLPADECRYAVYDFEYLTEGNVPKSRIFFIAWSPDTSRVRSKMIYASSKDRFKRELDGIQVELQATDPTEMGLDVFKSRAN

SEQ ID NO: 43926 - protein, 258 aa, Glycine max
  Clone ID: 700733488_FLI.pep
GKREQDEDEDEDEDKPRPSRPSQGKREQDQDQDEDEDEDEDQPRKSREWRSKKTQPRRPRQEEPRERGCETRNGVEENICTLKLHENIARPSRADFYNPKAGRISTLNSLTLPALRQFQLSAQYVVLYKNGIYSPHWNLNANSVIYVTRGQGKVRVVNCQGNAVFDGELRRGQLLVVPQNFVVAEQAGEQGFEYIVFKTHHNAVTSYLKDVFRAIPSEVLAHSYNLRQSQVSELKYEGNWGPLVNPESQQGSPRVKVA

SEQ ID NO: 43927 - protein, 128 aa, Glycine max
  Clone ID: 700735514_FLI.pep
VVMAVALTIVLSLLSVLSSASCARMVGGKTEVPDVRTNREVQELGRFAVEEYNRGLKQWKNNGSEQLNFSEVVEAQQQVVSGMKYYLKISATHKGVHKMFTSVVVVKPWLHSKQLLHFAPAAPSSKDF

SEQ ID NO: 43928 - protein, 160 aa, Glycine max
  Clone ID: 700735616_FLI.pep
NEGALFLPHFNSKAIVVLVINEGEANIELVGIKEQQQRQQQEEQPLEVRKYRAELSEQDIFVIPAGYPVVVNATSDLNFFAFGINAENNQRNFLAGSKDNVISQIPSQVQELAFPGSAKDIENLIKSQSESYFVDAQPQQKEEGNKGRKGPLSSILRAFY

SEQ ID NO: 43929 - protein, 507 aa, Glycine max
  Clone ID: 700735794_FLI.pep
SPLVLKHSSVITMAKLVFSLCFLLFSGCCFAFSSREQPQQNECQIQKLNALKPDNRIESEGGLIETWNPNNKPFQCAGVALSRCTLNRNALRRPSYTNGPQEIYIQQGKGIFGMIYPGCPSTFEEPQQPQQRGQSSRPQDRHQKIYNFREGDLIAVPTGVAWWMYNNEDTPVVAVSIIDTNSLENQLDQMPRRFYLAGNQEQEFLKYQQEQGGHQSQKGKHQQEEENEGGSILSGFTLEFLEHAFSVDKQIAKNLQGENEGEDKGAIVTVKGGLSVIKPPTDEQQQRPQEEEEEEEDEKPQCKGKDKHCQRPRGSQSKSRRNGIDETICTMRLRHNIGQTSSPDIYNPQAGSVTTATSLDFPALSWLRLSAEFGSLRKNAMFVPHYNLNANSIIYALNGRALIQVVNCNGERVFDGELQEGRVLIVPQNFVVAARSQSDNFEYVSFKTNDTPMIGTLAGANSLLNALPEEVIQHTFNLKSQQARQIKNNNPFKFLVPPQESQKRAVA

SEQ ID NO: 43930 - protein, 213 aa, Glycine max
  Clone ID: 700737254_FLI.pep
KNPKQSKAVRMGNTEKLMNQIMELKFTSKSLQRQSRKCEKEEKSEKLKVKKAIEKGNMDGARIYAENAIRKRTEQMNYLRLASRLDAVVARLDTQAKMTTISKSMGNIVKSLESSLATGNLQKMSETMDSFEKQFVNMEVQAEFMESAMAGSTSLSTPEGEVNSLMQQVADDYGLEVSVGLPQPAAHAVPAKEADKVDEDDLSRRLAELKARG

SEQ ID NO: 43931 - protein, 180 aa, Glycine max
  Clone ID: 700737518_FLI.pep
TKMSPVEVARNASEDARAICCREYGSAPDVHIYGDPDFTFPYVPAHLHLMVFELVKNSLRAVQERFMDSDKVAPPIRIIVADGIEDVTIKVSDEGGGIARSGLPKIFTYLYSTARNPLDEHSDLGIGDNVTMAGYGYGLPISRLYARYFGGDLQIISMEGYGTDAYLHLSRLGDSQEPLP

SEQ ID NO: 43932 - protein, 78 aa, Glycine max
  Clone ID: 700737615_FLI.pep
LNSPILSSLTMSYYSIHFSTTYLFSKKPSKLKTKDPFFPCSPPLSAEAEHPQSRTHFGSLLGSQYLLQTQGTQAPALD

SEQ ID NO: 43933 - protein, 296 aa, Glycine max
  Clone ID: 700737638_FLI.pep
GLSVISPKWQEQQDEDEDEDEDDEDEQIPSHPPRRPSHGKREQDEDEDEDEDKPRPSRPSQGKREQDQDQDEDEDEDEDQPRKSREWRSKKTQPRRPRQEEPRERGCETRNGVEENICTLKLHENIARPSRADFYNPKAGRISTLNSLTLPALRQFQLSAQYVVLYKNGIYSPHWNLNANSVIYVTRGQGKVRVVNCQGNAVFDGELRRGQLLVVPQNFVVAEQAGEQGFEYIVFKTHHNAVTSYLKDVFRAIPSEVLAHSYNLRQSQVSELKYEGNWGPLVNPESQQGSPRVKVA

SEQ ID NO: 43934 - protein, 245 aa, Glycine max
  Clone ID: 700737677_FLI.pep
DKPRPSRPSQGKREQDQDQDEDEDEDEDQPRKSREWRSKKTQPRRPRQEEPRERGCETRNGVEENICTLKLHENIARPSRADFYNPKAGRISTLNSLTLPALRQFQLSAQYVVLYKNGIYSPHWNLNANSVIYVTRGQGKVRVVNCQGNAVFDGELRRGQLLVVPQNFVVAEQAGEQGFEYIVFKTHHNAVTSYLKDVFRAIPSEVLAHSYNLRQSQVSELKYEGNWGPLVNPESQQGSPRVKVA

SEQ ID NO: 43935 - protein, 409 aa, Glycine max
  Clone ID: 700741346_FLI.pep
EKMAACTVYSTQSLSTNCSISTPSKTQLSFFHQKQVVFWRNSNRGNSSSRRSYVITCAAGDSQTVVIGLAADSGCGKSTFMRRLTSVFGGAAEPPKGGNPDSNTLISDTTTVICLDDYHSLDRTGRKEKGVTALDPRANDFDLMYEQVKALKDGIAVEKPIYNHVTGLLDPPELIKPPKILVIEGLHPMYDSRVRDLLDFSIYLDISNEVKFAWKIQRDMAERGHSLESIKASIEARKPDFEAYIDPQKQYADAVIEVLPTQLIPDDNEGKILRVRLIQKEGVKYFSPVYLFDDGSTISWIPCGRKLTCSYPGIKFFYGPETYYGNEVSLVEMDGQFDRLDELIYVESHLSNLSTKFYGEVTQQMLKHADFPGSNNGTGLFQTIVGLKIRDLYEQLIATKAETPVAAKA

SEQ ID NO: 43936 - protein, 394 aa, Glycine max
  Clone ID: 700741350_FLI.pep
IPSPSHGSWTRTHPNPSPPSSTSSSPCASSGSAPATRPPKPAPSTSTTSVLRTFFITVGVDTELCFMRTLGYIITKLHMIKELSVGLGLKTIFPSPRFSYANETHGLWILKGYAPVMTMKLARSNNVKKSQFSGIDAKESILRYSLAHHQLEAHVQLEYTVGFFDAFIQVRARVDNIRLHVARLGFTQNDDVDDFVEEKHFPSRVRVWVGPEIGATYCAGLSLGRSTENKESEVETKRVVEGNLEKSQGSNVKALAKSSRRTRSRSWRMDQDAEGNAAIFDVVLHDNTTGQEMGSWRPISETGGDPGHGLRGRYARANRAFNKSGSVVIAGDEYGEEVGWRLCKEMEGSVMKWRIGGEFWVSYLPNQAKGSSFETRYMEWCDEVDLPLIHGKTT

SEQ ID NO: 43937 - protein, 364 aa, Glycine max
  Clone ID: 700741828_FLI.pep
DATPPPHQASPSELVPMLMSSLRPRKQWLHQGGVFWPWMSPIATCGKRLASIGLENTEANRQAYRTLLVTVPGLGQYISGAILFEETLYQSTTDGRKIVDVLLEQNIVPGIKVDKGLVPLAGSNDESWCQGLDGLASRSAAYYEQGARFAKWRTVVSIPNGPSALAVKEAAWGLARYAAIAQDNGLVPIVEPEILLDGEHGIDRTFEVAQKVWAEVFFYLAENNVLFEGILLKPSMVTPGAESKDKASPQTVADYTLKLLHRRIPPAVPGIMFLSGGQSEVEATLNLNAMNQSPNPWHVSFSYARALQNTALKTWGGRPENVKAAQDALAFRAKSNSLAQLGKYTGEGESEEAKKELFVKSYSY

SEQ ID NO: 43938 - protein, 245 aa, Glycine max
  Clone ID: 700674336_FLI.pep
EEGQQQGEQRLQESVIVEISKEQIRALSKRAKSSSRKTISSEDKPFNLRSRDPIYSNKLGKFFEITPEKNPQLRDLDIFLSIVDMNEGALLLPHFNSKAIVILVINEGDANIELVGLKEQQQEQQQEEQPLEVRKYRAELSEQDIFVIPAGYPVVVNATSNLNFFAIGINAENNQRNFLAGSQDNVISQIPSQVQELAFPGSAQAVEKLLKNQRESYFVDAQPKKKEEGNKGRKGPLSSILRAFY

SEQ ID NO: 43939 - protein, 136 aa, Glycine max
  Clone ID: 700674385_FLI.pep
ANIELVGLKEQQQEQQQEEQPLEVRKYRAELSEQDIFVIPAGYPVVVNATSNLNFFAIGINAENNQRNFLAGSQDNVISQIPSQVQELAFPGSAQAVEKLLKNQRESYFVDAQPKKKEEGNKGRKGPLSSILRAFY

SEQ ID NO: 43940 - protein, 301 aa, Glycine max
  Clone ID: 700676116_FLI.pep
MQTENHPILNRLGLNKFADITPQEFSKKYLQAPKDVSQQIKMANKKMKKEQYSCDHPPASWDWRKKGVITQVKYQGGCGSGWAFSATGAIEAAHAIATGDLVSLSEQELVDCVEESEGCYNGWHYQSFEWVLEHGGIATDDDYPYRAKEGRCKANKIQDKVTIDGYETLIMSDESTESETEQAFLSAILEQPISVSIDAKDFHLYTGGIYDGENCTSPYGINHFVLLVGYGSADGVDYWIAKNSWGEDWGEDGYIWIQRNTGNLLGVCGMNYFASYPTKEESETLVSARVKGHRRVDHSPL

SEQ ID NO: 43941 - protein, 129 aa, Glycine max
  Clone ID: 700676128_FLI.pep
FLSNFLLRKAFAKRFGAVQNERGKKKDLSPQDAALLIQISFRAYLIRRSKALRALRELAIAKSKLKEIRAQFNNFSYRRHVARDAEERQRFSEKIIVLLLTVDAIEVVISIFGSFFVEQIELFPQFLNC

SEQ ID NO: 43942 - protein, 339 aa, Glycine max
  Clone ID: 700678542_FLI.pep
DTPVVAVSIIDTNSLENQLDQMPRRFYLAGNQEQEFLKYQQEQGGHQSQKGKHQQEEENEGGSILSGFTLEFLEHAFSVDKQIAKNLQGENEGEDKGAIVTVKGGLSVIKPPTDEQQQRPQEEEEEEEDEKPQCKGKDKHCQRPRGSQSKSRRNGIDETICTMRLRHNIGQTSSPDIYNPQAGSVTTATSLDFPALSWLRLSAEFGSLRKNAMFVPHYNLNANSIIYALNGRALIQVVNCNGERVFDGELQEGRVLIVPQNFVVAARSQSDNFEYVSFKTNDTPMIGTLAGANSLLNALPEEVIQHTFNLKSQQARQIKNNNPFKFLVPPQESQKRAVA

SEQ ID NO: 43943 - protein, 233 aa, Glycine max
  Clone ID: 700678725_FLI.pep
YQNYSSCGCGCCCHCCSLYIPCLHLCIPCSSFPCIPCSCLPCIPCSCLPCILCLALNILPNLLGLLPHFLRLLPHVLRRLGEVMLRGGGEVLRGWLGLPDVVQDPGEGRQRREPEGPRRQEPGHGQADGDRGWNQHRAEEDEERRGNCQSGEGSCQGQSRQEEQDATDREAGEDGEDLGSRWTSLGMVNGGRFDAGFITRRFETGSGGDDASFVAVCCCVDLDTVWWYLCGHG

SEQ ID NO: 43944 - protein, 331 aa, Glycine max
  Clone ID: 700679170_FLI.pep
TPVVAVSIIDTNSLENQLDQMPRRFYLAGNQEQEFLKYQQQQQGGSQSQKGKQQEEENEGSNILSGFAPEFLKEAFGVNMQIVRNLQGENEEEDSGAIVTVKGGLRVTAPAMRKPQQEEDDDDEEEQPQCVETDKGCQRQSKRSRNGIDETICTMRLRQNIGQNSSPDIYNPQAGSITTATSLDFPALWLLKLSAQYGSLRKNAMFVPHYTLNANSIIYALNGRALVQVVNCNGERVFDGELQEGGVLIVPQNFAVAAKSQSDNFEYVSFKTNDRPSIGNLAGANSLLNALPEEVIQHTFNLKSQQARQVKNNNPFSFLVPPQESQRRAVA

SEQ ID NO: 43945 - protein, 546 aa, Glycine max
  Clone ID: 700681729_FLI.pep
KLLLDAGADAECLDASGNKPVNLIAPAFDSLSKSRRKALEMFLRGGGERDELMSQEMELQMFSVPEKKEGSDNKKEYPVDISLPDINNGVYGTDEFRMYNFKVKPCSRAYSHDWTECPFVHPGENARRRDPRKYPYSCVPCPEFRKGTCQKGDSCEYAHGVFESWLHPAQYRTRLCKDETGCARKVCFFAHKPEELRPVYASTGSAMPSPKSYSASGLDMTAMSPLALSSTSLPMPTVSTPPMSPLAAASSPKSGSMWQNKINLTPPSLQLPGSRLKAALSARDLEMEMELLGLESPARQQQQQQQQLIEEIARISSPSFRSKEFNRIVDLNPTNLDDLLASADPSVFSQLHGLSVQPSTPTQSGLQMRQNMNHLRASYPSNIPSSPVRKPSAFGFDSSAAVATAVMNSRSAAFAKRSQSFIDRGAATHHLGLSSASNSSCRVSSTLSDWSSPTGKLDWGVNGDKLNKLRKSTSFGFRNSGVTASPIAQPEFGAEPDVSWVHSLVKDVPSERSEIFGAEKQQYDLSKEMLPPWMEQLYIEQEQMVA

SEQ ID NO: 43946 - protein, 511 aa, Glycine max
  Clone ID: 700682144_FLI.pep
AKLKPNSSAVCFCLASSSAFAFSTTTTTMYSATASNTFFLLSCFLLFCLLSAPSCVSMFSGIETGDLEKRDDLFPQILRDEAVARLYELGKVSDASGYLERTFLSPASMKAIDLIRKWMEDAGLRTWVDQMGNVHGRVDGANENAEALLIGSHMDTVVDAGMFDGSLGIVSAISAVKAMHVNGKLQKLKRPVEVIAFSDEEGVRFQTTFLGSGAIAGILPGTTLEISDKREVMIKDFLKENSMDITEESLLKLKYDPKSIWGYVEVHIEQGPVLEQVGFPLGVVKGIAGQTRLKVTVRGSQGHAGTVPMSMRQDPMAAAAEQIVVLESLCKHPEEYLSYDGHCSDSTVKSLSSSLVCTVGEISTWPSASNVIPGQVTYTVDIRAIDDLGREAVIYDLSKQIYQICDKRSVSCIIEHKHDAGAVICDSDLSSQLKSAAYSALKKMEGDIQDEVPTLMSGAGHDAMAISHLTKVGMLFVRCRGGISHSPQEHVLDNDVWAAGLATLSFLENLS

SEQ ID NO: 43947 - protein, 461 aa, Glycine max
  Clone ID: 700682285_FLI.pep
KLKALAFPTTPNTKTSSSMAASVSTVGAVNRALLNLNGSGAGASAPSSAFFGTSLKKVIASRVPNSKVSGGSFKIVAVEEKKEIEETQQTDKDRWKGLAYDISDDQQDITRGKGLVDSLFQAPQDAGTHYAVMSSYEYLSTGLRQYLDNKMDGFYIAPAFMDKLVVHISKNFMTLPNIKVPLILGIWGGKGQGKSFQCELVFAKMGINPIMMSAGELESGNAGEPAKLIRQRYREAADMIKKGKMCALFINDLDAGAGRLGGTTQYTVNNQMVNATLMNIADNPTNVQLPGMYNKEENPRVPIIVTGNDFSTLYAPLIRDGRMEKFYWAPTREDRIGVCTGIFRTDGIPEQDIVKLVDTFPGQSIDFFGALRARVYDDEVRKWISGVGVDSVGKKLVNSKDGPPTFEQPKMTLEKLLLYGNMLVQEQENVKRVQLADKYLNEAALGNANEDAIQRGTFFQS

SEQ ID NO: 43948 - protein, 336 aa, Glycine max
  Clone ID: 700684221_FLI.pep
KLQQITSLTLINSEKVGLELFTRLSNGQVIAVKRLSSDPGQGGVEFKNEVLLLAKLQHRNLVRLLGFSLEGKEKLLVYEFVPNKSLDYFIFDPTKKARLDWDRRYKIIRGIARGLLYLHEDSRLRIIHRDLKASNVLLDEEMIPKISDFGMARLIVAGQTQENTSRVVGTYGYMAPEYIMHGQFSIKSDVFSFGVLVLEIVSGQKNHGIRHGENVEDLLNFAWRSWQEGTVTNIIDPILNNSSQNEMIRCTHIGLLCVQENLANRPTMANVALMLNSCSITLPVPTKPAFFMDSATTSLPNMSWEVNSGTTRSNQSTTKSAHDSVSEASISELYPR

SEQ ID NO: 43949 - protein, 138 aa, Glycine max
  Clone ID: 700684271_FLI.pep
LGNQGSFLIGSTHLNRDAFKPPINLQRSCSIHLGHSHYLHSFSCSLYYSLKDHHLDPSHHRHCQQLQLHYFVCFLSLVEYYPSPIALTFDHGKCFQETSYHERMLIILFSDPVIILSSSSFNIASIELEERSVNRSLH

SEQ ID NO: 43950 - protein, 274 aa, Glycine max
  Clone ID: 700684348_FLI.pep
NHFIMASSCASSAIAAVAISTPSSQKNGSLLGSTKASFLSGRKLKVNNFTAPVGARSSTTVCAVAEPDRPLWFPGSTPPPWLDGSLPGDFGFDPLGLASDPESLRWNVQAELVHCRWAMLGAAGIFIPEFLTKIGILNTPSWYTAGELEYFTDTTTLFIVELFFIGWAEGRRWADIIKPGCVNTDPIFPNNKLTGTDVGYPGGLWFDPLGWGSGSPEKIKELRTKEIKNGRLAMLAVMGAWFQHIYTGTGPIDNLFAHLADPGHATIFAAFTPK

SEQ ID NO: 43951 - protein, 226 aa, Glycine max
  Clone ID: 700684366_FLI.pep
LLLSVFQCVKDTMNIMSTHQCSWPVRIQDHPDKGSINKAPFSRGSEFLNVGYHAQKYGHSARKCRPIFASSVSNSMDPSDSDDTDKKKPQNGEMGGVNSEMLRESLEKIVGEDDSTFSGFDLATLIRNKYGRSYDVQLIKKEFMGRNLLAMNVMWKYMEQRSFPLTEEEYILRLDDIANTLKCWGAVSHIRNSLEKSKERPRIGKAVSIFIDMDESGARSNEWIYK

SEQ ID NO: 43952 - protein, 167 aa, Glycine max
  Clone ID: 700684396_FLI.pep
EDVSLLLGLAIDGEPVIGPISAPSSVCEKLLGRVPEDLNGGMVKLTWLKEFFSECPEDASQEEIERCTCAFLLYLVGSTIFSTTTGNKVPVIYLSLFEDFDKAGKFAWGPGALAFLYRALGNASLKSQSTISGCLTLVQCWCYSRLNVGLPKFNQEPDNNCFPFLLK

SEQ ID NO: 43953 - protein, 442 aa, Glycine max
  Clone ID: 700684418_FLI.pep
IFINKYIDIITSDVVALIDEFARRVFQELNYVQEGQNARRFKKLYADKEDICVPDVFWDYTSAKVLTMEWVEGVKLNEQEAIERQGLKVLDLVNTGIQCSLRQLLEYGYFHADPHPGNLLATPEGKLAFLDFGMMSETPEEARSAIIGHVVHLVNRDYEAMARDYYALDFLSPDVDVSPIVPALRDFFDDALNYTVSELNFKTLVDGLGNVLYQFPFNVPAYYALILRSLTVLEGLALYADPNFKVLAASYPYFAKRLLTDPNPYLRDALIELLFQDGRFRWGRLENLLAQGRMDRDFSAKEALQPVLKVLLSPDGEEIRTLVIKEAVRVTEAFTLSTISDTYKSVPDFMRVLVFNGNANGPIITSETEMQNLIELRDQVIRIWELLRSSNDYDPDLLLPILQVLQQPEARRLGERVMGGITQRLAARFLQQVLRVPMPASS

SEQ ID NO: 43954 - protein, 190 aa, Glycine max
  Clone ID: 700686205_FLI.pep
AKIADFGLARSFQEDKSHISTAIAGTLGYMAPEYLAHGQLTEKADVYSFGVLLLEIVTARQNNRSKASEYSDSLVTVAWKHFQAGTAEQLFDPNLDLQEDHNSNVNVKDEILRVVHIGLLCTQEVSSLRPSMSKALQMLTKKEEDLVAPSNPPFLDESTMELHDTSGDPFYPLTAPDSIATMSHSSFYPR

SEQ ID NO: 43955 - protein, 191 aa, Glycine max
  Clone ID: 700686555_FLI.pep
LKKKVAKRLKGKKYLVVLDDIWETQIWDEVKGALPDDHTGSRILITSRIKEVAYYAGTALPYYLPILNENESWELFTKKIFRGEECPSDLEPLGRSIVKTCGGLPLAIVGLAGLVAKKEKSQREWSRIKEVSWRLTQDKNGVMDMLNLRYDNLPERLMPCFLYFGICPRDYVESYEERKAKELETVEVFIH

SEQ ID NO: 43956 - protein, 188 aa, Glycine max
  Clone ID: 700686571_FLI.pep
AGEDLLSIAADQPFRFPATFTFVVRAFSVLDGIGKGLDPRFDITEIAKPYALELLRFREAGVEVVLKDFRKRWDRQSQAFYNLIRQADRVDKLANIIQRLEQGDLKLRVRTLESERAFQRVAAVQKTIGNAVAAGSLINLATVLYLNSIRVPAIAAYIFCAIFGFQVLLGIVKVKKLDERERLITGIA

SEQ ID NO: 43957 - protein, 162 aa, Glycine max
  Clone ID: 700728946_FLI.pep
NPNTFKERSSGSVMAPKAEKKPAEKKPAEEKKSTVGDKAPAEKKPKAGKKLPKEGGAGGEGGKKKKRNKKSVETYKIYIFKVLKQVHPDIGISSKAMGIMNSFINDIFEKLAQESSRLARYNKKPTITSREIQTAVRLVLPGELAKHAVSEGTKAVTKFTSS

SEQ ID NO: 43958 - protein, 432 aa, Glycine max
  Clone ID: 700729047_FLI.pep
TLTLFLGSLFFISLHFIHLSAMNALAATNRNFRRAAHILGLDTKLENSLLIPFREIKVECTIPKDDGTLVSYVGFRIQHDNARGPMKGGIRYHPEVDPDEVNALAQLMTWKTAVADIPYGGAKGGIGCNPRDLSVSELERLTRVFTQKIHDLIGIQRDVPAPDMGTNSQTMAWILDEYSKFHGHSPAVVTGKPIDLGGSLGREAATGLGVIFATEALFAEYGKSISDMTFVIQGFGNVGTWAAKSIYERGGKVIAVSDISGAIRNPNGIDIPALLKHKEGNGNLKEFSGADIMDPDELLVHECDVLIPCALGGVLNKENAADVKAKFIIEAANHPTDPDADEILSKKGVIILPDIYANAGGVTVSYFEWVQNIQGFMWDEEKVNRELKKYMTKAFRNIKAMCQIHNCDLRMGAFSLGVNRVARATLLRGWEA

SEQ ID NO: 43959 - protein, 265 aa, Glycine max
  Clone ID: 700729112_FLI.pep
RTSASKRQIFSNQILAPGSLIWAAWCPNGTDEPNYVGEGFAMISGTSMAAPHIAGIAALIKQKHPHWSPAAIKSALMTTSTTLDRAGNPLLAQQTSESEAMRLVKATPFDYGSGHVDPTAALDPGLIFDAGYKDYVGFLCTTPSIDVHEIRHYTHTPCNTTMGKPSNLNTPSITISYLVRTQVVTRTVTNVAEEETYVITARMEPAVAIEVNPPAMTIKAGASRQFSVSLTVRSVTRRYSFGEVLMKGSRGHKVRIPVLANGHRR

SEQ ID NO: 43960 - protein, 145 aa, Glycine max
  Clone ID: 700729434_FLI.pep
GECCSFLLSIQDQAFKREGNLIWPLLLDNVRPDMRIAWEEPFGPVLPVIRINSVEEGIHHCNASNFGLQGCVFTKDVNKAIMISDAMETGTVQINSAPARGPDHFPFQGIKDSGIGSQGITNSINMMTKVKTTVINLPSPSYTMG

SEQ ID NO: 43961 - protein, 126 aa, Glycine max
  Clone ID: 700729527_FLI.pep
KVSMHLDVKILPLDLSSGEDSLRIAVEKAESFFPDSGVDYMVHNAAFERPKTSILDVTEEGLKATFDVNVLGTITLTKLLAPFMLKRGHGHFVVMSSAAGKTPAPGQAVYSASKYALNGYFHTLRS

SEQ ID NO: 43962 - protein, 324 aa, Glycine max
  Clone ID: 700729743_FLI.pep
KHYRKNDIHSSMATLIAPSNHSPQEDAEALRKAFEGWGTDEKTVIVILGHRTVYQRQQIRRVYEEIFQEDLVKRLESEIKGDFEKAVYRWILEPADRDAVLANVAIKNGKNYNVIVEIATILSPEELLAVRRAYLNRYKHSLEEDVAAHTSGHLRQLLVGLVTSYRYVGDEINPKLAQTEAEILHDAVKEKKGSYEETIRVLTTRSRTQLVATFNCYREIHGTSISKKLVDEGSDEFQRALYTAIRGIKDPIKYYEKVVRNAIKKVGTDEDALTRVVVSRAEKDLKIISEVYYKRNSVLLEHAIAKETSGDYKKFLLTLLGKED

SEQ ID NO: 43963 - protein, 565 aa, Glycine max; identical to SEQ ID NO: 43888
  Clone ID: 700731843_FLI.pep

SEQ ID NO: 43964 - protein, 178 aa, Glycine max
  Clone ID: 700731864_FLI.pep
PMFWRSLIVQNSSPDIYNPQAGSITTATSLDFPALWLLKLSAQYGSLRKNAMFVPHYTLNANSIIYALNGRALVQVVNCNGERVFDGELQEGGVLIVPQNFAVAAKSQSDNFEYVSFKTNDRPSIGNLAGANSLLNALPEEVIQHTFNLKSQQARQVKNNNPFSFLVPPQESQRRAVA

SEQ ID NO: 43965 - protein, 565 aa, Glycine max; identical to SEQ ID NO: 43888
  Clone ID: 700732183_FLI.pep

SEQ ID NO: 43966 - protein, 329 aa, Glycine max
  Clone ID: 700732219_FLI.pep
TLITMAKLVLSLCFLLFSGCFALREQAQQNECQIQKLNALKPDNRIESEGGFIETWNPNNILSGFAPEFLKEAFGVNMQIVRNLQGENEEEDSGAIVTVKGGLRVTAPAMRKPQQEEDDDDEEEQPQCVETDKGCQRQSKRSRNGIDETICTMRLRQNIGQNSSPDIYNPQAGSITTATSLDFPALWLLKLSAQYGSLRKNAMFVPHYTLNANSIIYALNGRALVQVVNCNGERVFDGELQEGGVLIVPQNFAVAAKSQSDNFEYVSFKTNDRPSIGNLAGANSLLNALPEEVIQHTFNLKSQQARQVKNNNPFSFLVPPQESQRRAVA

SEQ ID NO: 43967 - protein, 249 aa, Glycine max
  Clone ID: 700733946_FLI.pep
SSSNQWLVRPVLETHGWDHDVGYEGLNVERLFVVKEKIPLSFSGQVTKDKKDANVQMEISSSVKHGKGKATSLGFDLQTVGKDLAYTLRSETRFTNFRRNNATAGLSFTLLGDALSSGLKIEDKLVASKRFKLVVSGGAMTGRGDIAYGGSLEAQLRDKDYPLGRFLTTLGLSVMDWHGDLAVGCNVQSQIPVGRHTNLVARANLNNRGAGQISIRLNSSEQLQIALIGLIPLLKKLVGYHQQTQFGQY

SEQ ID NO: 43968 - protein, 427 aa, Glycine max
  Clone ID: 700733990_FLI.pep
LFAFAASRRRRQGKDSGTSEGPSGWLPLSLYGNSHSAASAKTNTTGSYASSLPSNLCRHFSFAEIKAATNNFDEALLLGVGGFGKVYKGEIDGGTTKVAIKRGNPLSEQGVHEFQTEIEMLSKLRHRHLVSLIGYCEENTEMILVYDCMAYGTLREHLYKTQKPPRPWKQRLEICIGAARGLHYLHTGAKHTIIHRDVKTTNILLDENWVAKVSDFGLSKTGPTLDNTHVSTVVKGSFGYLDPEYFRRQQLTDKSDVYSFGVVLFEVLCARPALNPTLAKEQVSLAEWAAHCYKKGILDSIIDPYLKGKIASECFKKFAETAMKCVADQGIDRPSMGDVLWNLEFALQLQESAEESGNGFGDIHCEVEPLYTDSKGKDSNPGYDGNATDSRSSGISMSIGGRSLASEDSDGLTPSAVFSQIMNPKGR

SEQ ID NO: 43969 - protein, 452 aa, Glycine max
  Clone ID: 700735922_FLI.pep
SKFHKMEPRKASPLSWVLIFFLTISLWGVKVSSEEHHHHGKSKEGPVVERDQRRTLLVTEFGEITAIDIKEGQKELPYHLQFITLEPNSLFLPVLLQADMVFYVHTGSGKLTWANDDGTSTIRLREGDVCSLNEGSVFYIQSNLEAERRKLRIYAMFTNTDDNTYDPSIGAYSRINELVKGFDKKIMQAALKVPEDLIEAIINKTETPAIVHAVPEKRNIVQELEASFLKNFLGVGSNSKKLETYNIFEHDPDFKNPIGWSTAVTKKQLKSLKRTNIGFLMVNLNMGSILGPHWNAKATELTVGVDGEGMVRVVCGSGNENETECQNMRFKVKEGDAFLVPRFHPMAQMSFNNGPFVFLGFSTSAKKNHPQFLAGKGSVLHILDKKILARSLGVSNRTIDELLRSPEDSIIFRCSSCAEEEEKIMKEEEEEEESKKEEEERKKKEEEEEEEE

SEQ ID NO: 43970 - protein, 169 aa, Glycine max
  Clone ID: 700735975_FLI.pep
SFGIILLRLLTGRPALGITKEVKYALDTGKLKSLLDPLAGDWPFVQAEQLARLALRCCDMNRKSRPDLYSDVWRILDAMRVSSGGANSFGLSSEGLLQPPSYFICPIFQEVMRDPHVAADGFTYEAEAIRGWLDGGHDNSPMTNSKLAHHNLVPNRALRSAIQDWLQNH

SEQ ID NO: 43971 - protein, 315 aa, Glycine max
  Clone ID: 700736209_FLI.pep
TTYYVVNPDNNENLRLITLAIPVNKPGRFESFFLSSTEAQQSYLQGFSRNILEASYDTKFEEINKVLFSREEGQQQGEQRLQESVIVEISKEQIRALSKRAKSSSRKTISSEDKPFNLRSRDPIYSNKLGKFFEITPEKNPQLRDLDIFLSIVDMNEGALLLPHFNSKAIVILVINEGDANIELVGLKEQQQEQQQEEQPLEVRKYRAELSEQDIFVIPAGYPVVVNATSNLNFFAIGINAENNQRNFLAGSQDNVISQIPSQVQELAFPGSAQAVEKLLKNQRESYFVDAQPKKKEEGNKGRKGPLSSILRAFY

SEQ ID NO: 43972 - protein, 114 aa, Glycine max
  Clone ID: 700737722_FLI.pep
DRIRNMNRDSVKFRDETSGEVANQNLTFPVLLPKIPGRFYFLFGKPIKTKGMDKILKDRESANQMYLEIKSEVEHNLNYLIKKREEDPYRNFVDRKMYQIFYPHETDPTPSFKP

SEQ ID NO: 43973 - protein, 147 aa, Glycine max
  Clone ID: 700738568_FLI.pep
PSRETREKIYIWRNICMRLIMSVQSELHGLAALQWSICQDSLSRSNEARGMYEKLKSHPNPKVSKKARQFMYSFQAMEMMKMTTGSQFYLKNSDYQNYFDAFVENKSNYPGGDGPVQESAMNQVLPYILFLVSPIFVVLLIAVRKGI

SEQ ID NO: 43974 - protein, 402 aa, Glycine max
  Clone ID: 700742482_FLI.pep
EMAKKHGLKVQAVMSFHQCGGNVGDSCTIPLPKWVVEEIDNDHDLAYTDQWGRRNYEYISLGCDTLPVLKGRSPVQCYADFMRAFRDTFKHLLGDTIVEIQVGMGPAGELRYPSYPEQNGTWKFPGIGAFQCYDKYMLSSLKAAAEAHGKPEWGSTGPTDAGHYNNWPEDTQFFRKEGGGWDGPYGEFFLTWYSQMLLEHGDRILSSATSIFDNTGVKISVKVAGIHWHYGTRSHAPELTAGYYNTRFRDGYLPIAQMLARHGAIFNFTCIEMRDHEQPQEALCAPEKLVKQVALATQKAQVPLAGENALPRYDEYAHEQIIRASQLDVDGESGDREMCAFTYLRMNPHLFEPNNWRKFVGFVKKMKEGKSAHKCWEEVEREAEHFVHVTQPLVQEAAVLMH

SEQ ID NO: 43975 - protein, 245 aa, Glycine max
  Clone ID: 700742914_FLI.pep
KNLATKEGSKRMAQAMASMAGLRGSSQAVLEGSLQVSGSTRLNVGSGSRVASVTRAGFTVRAQQQQVSGEVQSSRRAVLSLVAAGLATGSFVQAVLADAKSIKVGPPPPPSGGLPGTLNSDEARDLQLPLKDRFFLQPLSPTEAAQRAKESAKEIVGVKKLIEKKAWPYVQNDLRLRAEYLRFDLNTVIAGKPKDEKKSLKELTGKLFQDISNLDHAAKIKSSPEAEKYYAATVSSLNDVLAKLG

SEQ ID NO: 43976 - protein, 122 aa, Glycine max
  Clone ID: 700674436_FLI.pep
QGGWFYFCLLATMAVANKLLSVLIIALIAISMLQTVVMASHGHGGHHYNDKKKYGPGSLKSFQCPSQCSRRCGKTQYHKPCMFFCQKCCRKCLCVPPGYYGNKAVCPCYNNWKTKEGGPKCP

SEQ ID NO: 43977 - protein, 281 aa, Glycine max
  Clone ID: 700674464_FLI.pep
LFPQEQFSQHYFSVCGNGVDNTVLQDVTDTGGDFPLDESYGQDPDNDIGGYPNTSESHLPCTSTEDTKFVNGLNSLDTPCSDINVEKIESVKNDTSSNNFCQNDDHLETQYGSAVWDIFRRQDVPKLTEYLKKHHREFRHINNLPVNSVIHPIHDQILYLNEKHKKQLKQEFGVEPWTFEQHLGDAVFVPAGCPHQVRNRKSCIKVALDFVSPENVQECIRLTEEFRLLPKGHRSKEDKLEIKKMALYAADVAITEATKLMRGNDMSDEAKEVPQQHIFTK

SEQ ID NO: 43978 - protein, 460 aa, Glycine max
  Clone ID: 700674780_FLI.pep
LNALKPDNRIESEGGLIETWNPNNKPFQCAGVALSRCTLNRNALRRPSYTNGPQEIYIQQGKGIFGMIYPGCPSTFEEPQQPQQRGQSSRPQDRHQKIYNFREGDLIAVPTGVAWWMYNNEDTPVVAVSIIDTNSLENQLDQMPRRFYLAGNQEQEFLKYQQEQGGHQSQKGKHQQEEENEGGSILSGFTLEFLEHAFSVDKQIAKNLQGENEGEDKGAIVTVKGGLSVIKPPTDEQQQRPQEEEEEEEDEKPQCKGKDKHCQRPRGSQSKSRRNGIDETICTMRLRHNIGQTSSPDIYNPQAGSVTTATSLDFPALSWLRLSAEFGSLRKNAMFVPHYNLNANSIIYALNGRALIQVVNCNGERVFDGELQEGRVLIVPQNFVVAARSQSDNFEYVSFKTNDTPMIGTLAGANSLLNALPEEVIQHTFNLKSQQARQIKNNNPFKFLVPPQESQKRAVA

SEQ ID NO: 43979 - protein, 386 aa, Glycine max
  Clone ID: 700674863_FLI.pep
IKFFHQVMGFLVLLLFSLLGLSSSSSISTHRSILDLDLTKFTTQKQVSSLFQLWKSEHGRVYHNHEEEAKRLEIFKNNLNYIRDMNANRKSPHSHRLGLNKFADITPQEFSKKYLQAPKDVSQQIKMANKKMKKEQYSCDHPPASWDWRKKGVITQVKYQGGCGSGWAFSATGAIEAAHAIATGDLVSLSEQELVDCVEESEGCYNGWHYQSFEWVLEHGGIATDDDYPYRAKEGRCKANKIQDKVTIDGYETLIMSDESTESETEQAFLSAILEQPISVSIDAKDFHLYTGGIYDGENCTSPYGINHFVLLVGYGSADGVDYWIAKNSWGEDWGEDGYIWIQRNTGNLLGVCGMNYFASYPTKEESETLVSARVKGHRRVDHSPL

SEQ ID NO: 43980 - protein, 49 aa, Glycine max
  Clone ID: 700676765_FLI.pep
FTNYGKGYTWLASAFRSFVYSAMATTRVLWVHECKTKKKKIVFILYFKL

SEQ ID NO: 43981 - protein, 376 aa, Glycine max
  Clone ID: 700676858_FLI.pep
RGQSSRPQDRHQKIYNFREGDLIAVPTGVAWWMYNNEDTPVVAVSIIDTNSLENQLDQMPRRFYLAGNQEQEFLKYQQEQGGHQSQKGKHQQEEENEGGSILSGFTLEFLEHAFSVDKQIAKNLQGENEGEDKGAIVTVKGGLSVIKPPTDEQQQRPQEEEEEEEDEKPQCKGKDKHCQRPRGSQSKSRRNGIDETICTMRLRHNIGQTSSPDIYNPQAGSVTTATSLDFPALSWLRLSAEFGSLRKNAMFVPHYNLNANSIIYALNGRALIQVVNCNGERVFDGELQEGRVLIVPQNFVVAARSQSDNFEYVSFKTNDTPMIGTLAGANSLLNALPEEVIQHTFNLKSQQARQIKNNNPFKFLVPPQESQKRAVA

SEQ ID NO: 43982 - protein, 541 aa, Glycine max
  Clone ID: 700676958_FLI.pep
LRIPSSLGDLEHLLKLNLSRNNLTGIIPAEFGNLRSVMEIDLSNNQLSGLIPDELSQLQNMISLRLENNKLTGDVASLSNCISLSLLNVSYNKLFGVIPTSNNFTRFPPDSFIGNPGLCGNWLNLPCHGARPSERVTLSKAAILGITLGALVILLMVLLAACRPHSPSPFPDGSFDKPVNFSPPKLVILHMNMALHVYEDIMRMTENLSEKYIIGYGASSTVYKCVLKNCKPVAIKRIYSHYPQCIKEFETELETVGSIKHRNLVSLQGYSLSPYGHLLFYDYMENGSLWDLLHGPTKKKKLDWELRLKIALGAAQGLAYLHHDCCPRIIHRDVKSSNILLDADFEPHLTDFGIAKSLCPSKSHTSTYIMGTIGYIDPEYARTSRLTEKSDVYSYGIVLLELLTGRKAVDNESNLHHLILSKAATNAVMETVDPDITATCKDLGAVKKVYQLALLCTKRQPADRPTMHEVTRVLGSLVLSNTPPKQLAALPPASNPSAKVPCYVDEYANLKTPHLVNCPSMSTSDAQLFLKFGEVISQNSE

SEQ ID NO: 43983 - protein, 489 aa, Glycine max
  Clone ID: 700679184_FLI.pep
TLITMAKLVLSLCFLLFSGCFALREQAQQNECQIQKLNALKPDNRIESEGGFIETWNPNNKPFQCAGVALSRCTLNRNALRRPSYTNGPQEIYIQQGNGIFGMIFPGCPSTYQEPQESQQRGRSQRPQDRHQKVHRFREGDLIAVPTGVAWWMYNNEDTPVVAVSIIDTNSLENQLDQMPRRFYLAGNQEQEFLKYQQQQQGGSQSQKGKQQEEENEGSNILSGFAPEFLKEAFGVNMQIVRNLQGENEEEDSGAIVTVKGGLRVTAPAMRKPQQEEDDDDEEEQPQCVETDKGCQRQSKRSRNGIDETICTMRLRQNIGQNSSPDIYNPQAGSITTATSLDFPALWLLKLSAQYGSLRKNAMFVPHYTLNANSIIYALNGRALVQVVNCNGERVFDGELQEGGVLIVPQNFAVAAKSQSDNFEYVSFKTNDRPSIGNLAGANSLLNALPEEVIQHTFNLKSQQARQVKNNNPFSFLVPPQESQRRAVA

SEQ ID NO: 43984 - protein, 296 aa, Glycine max
  Clone ID: 700679667_FLI.pep
AIPVNKPGRFESFFLSSTEAQQSYLQGFSRNILEASYDTKFEEINKVLFSREEGQQQGEQRLQESVIVEISKEQIRALSKRAKSSSRKTISSEDKPFNLRSRDPIYSNKLGKFFEITPEKNPQLRDLDIFLSIVDMNEGALLLPHFNSKAIVILVINEGDANIELVGLKEQQQEQQQEEQPLEVRKYRAELSEQDIFVIPAGYPVVVNATSNLNFFAIGINAENNQRNFLAGSQDNVISQIPSQVQELAFPGSAQAVEKLLKNQRESYFVDAQPKKKEEGNKGRKGPLSSILRAFY

SEQ ID NO: 43985 - protein, 158 aa, Glycine max
  Clone ID: 700679817_FLI.pep
AGSITTATSLDFPALWLLKLSAQYGSLRKNAMFVPHYTLNANSIIYALNGRALVQVVNCNGERVFDGELQEGGVLIVPQNFAVAAKSQSDNFEYVSFKTNDRPSIGNLAGANSLLNALPEEVIQHTFNLKSQQARQVKNNNPFSFLVPPQESQRRAVA

SEQ ID NO: 43986 - protein, 460 aa, Glycine max
  Clone ID: 700681047_FLI.pep
LKALAFPTTPNTKTSSSMAASVSTVGAVNRALLNLNGSGAGASAPSSAFFGTSLKKVIASRVPNSKVSGGSFKIVAVEEKKEIEETQQTDKDRWKGLAYDISDDQQDITRGKGLVDSLFQAPQDAGTHYAVMSSYEYLSTGLRQYLDNKMDGFYIAPAFMDKLVVHISKNFMTLPNIKVPLILGIWGGKGQGKSFQCELVFAKMGINPIMMSAGELESGNAGEPAKLIRQRYREAADMIKKGKMCALFINDLDAGAGRLGGTTQYTVNNQMVNATLMNIADNPTNVQLPGMYNKEENPRVPIIVTGNDFSTLYAPLIRDGRMEKFYWAPTREDRIGVCTGIFRTDGIPEQDIVKLVDTFPGQSIDFFGALRARVYDDEVRKWISGVGVDSVGKKLVNSKDGPPTFEQPKMTLEKLLLYGNMLVQEQENVKRVQLADKYLNEAALGNANEDAIQRGTFFQS

SEQ ID NO: 43987 - protein, 69 aa, Glycine max
  Clone ID: 700681121_FLI.pep
ARELKRPTNYTRIIRLLINKFDYMYDSFKPSTKVYVIDVLSMCLTRMPVSFRKRPYSMYILLFCYSYTT

SEQ ID NO: 43988 - protein, 283 aa, Glycine max
  Clone ID: 700682772_FLI.pep
GNGKSTHTKNSTDCFMQSNGYSQTQDNHGCFSCISGTGGTMELKCPPNGQMQMLNEFDGALPLVTVPAVAEFSKENGVVWACSPDRLELPSKPFHHSNCSDSPCVSESGSDIFSKREVIQKLRQQLKRRDDMILEMQDQMAELQNSLNAQMGLSSHLQLQLDATNSDLFDSEREIQRLRKAIADHCVGFVHHDKSSKVTVFPAEIRNDLSNGHLDGENNCESPEKLRDEEERIELLKRQVGELKEVIEGKEYLLQNYKEQKAELSLKIRELQQRLDSQLPNIL

SEQ ID NO: 43989 - protein, 360 aa, Glycine max
  Clone ID: 700682893_FLI.pep
ALTMSAFVGKYADELIKNAKYIATPGKGILAADESTGTIGKRLSSINVENIEANRQALRELLFTAPDALQYLSGVILFEETLYQKTSDGKPFVEVLQENNVIPGIKVDKGVVELAGTNGETTTQGFDSLGARCQQYYKAGARFAKWRAVLKIGPTEPSELSIQQNAQGLARYAIICQENGLVPIVEPEILTDGAHDIAKCAAVTETVLAAVYKALNEQHVLLEGTLLKPNMVTPGSDSPKVPPEVIAEYTVQALRRTVPAAVPGVVFLSGGQSEEEATLNLNAMNKLEVLKPWTLSFSFGRALQQSTLKTWGGKKENVAKAQEAFLARCKANSDATLGKYVGGSGSGLTSESLYVKNYKY

SEQ ID NO: 43990 - protein, 475 aa, Glycine max
  Clone ID: 700683191_FLI.pep
IPSPTMALAVSTTSSSSAAAAASSSFFSRLGSSSDAKAPQIGSFRFPERSLVSSVVVNVTQRRSLVRPLNAEPQRNDSIVPLAATIVAPEVEKEEEDFEQIAKDLENASPLEIMDRALEKFGNDIAIAFSGAEDVALIEYAHLTGRPYRVFSLDTGRLNPETYKFFDAVEKHYGIHIEYMFPDAVEVQALVRTKGLFSFYEDGHQECCRVRKVRPLRRALKGLKAWITGQRKDQSPGTRSEIPVVQVDPVFEGLDGGIGSLVKWNPVANVNGLDIWSFLRTMDVPVNSLHSQGYVSIGCEPCTRPVLPGQHEREGRWWWEDAKAKECGLHKGNIKHEDAAQLNGNGASQANGSATVADIFNSQDVVSLSRSGIENLAKLENRKEPWLVVLYAPWCRFCQAMEESYVDLAEKLAGSGVKVAKFRADGDQKEYAKTELQLGSFPTILLFPKHSSQPIKYPSEKRDVDSLTAFVNALR

SEQ ID NO: 43991 - protein, 235 aa, Glycine max
  Clone ID: 700685048_FLI.pep
TTDVAQRALKAGLQQSQIKIFGLPVRPSFVKPVRPKDELRRELGMDEDLPAVLLMGGGEGMGPIEATARALGDSLYDENIGAPVGQILVICGRNKKLANKLSSISWKVPVQVKGFVTKMEECMGACDCIITKAGPGTIAEAQIRGLPIILNDYIAGQEAGNVPYVVENGCGKFSKSPKEIAKIVAEWFGPKAYELQQMSQNALRLARPDAVFKIVHDLHELVRQRSYLPEYSCTT

SEQ ID NO: 43992 - protein, 640 aa, Glycine max
  Clone ID: 700685085_FLI.pep
QNAIPGPNGGGAAGNQFVTTSLYVGDLDPNVTDAQLYDLFNQLGQVVSVRVCRDLTSRRSLGYGYVNFSNPQDAARALDVLNFTPLNNRPIRIMYSHRDPSIRKSGQGNIFIKNLDRAIDHKALHDTFSTFGNILSCKVATDSSGQSKGYGFVQFDNEESAQKAIEKLNGMLLNDKQVYVGPFLRKQERESTADKAKFNNVFVKNLSESTTDDELKNVFGEFGTITSAVVMRDGDGKSKCFGFVNFENADDAARAVEALNGKKFDDKEWYVGKAQKKSERENELKQRFEQSMKEAADKYQGANLYVKNLDDSLGDDKLKELFSPFGTITSCKVMRDPNGISRGSGFVAFSTPDEASRALLEMNGKMVVSKPLYVTLAQRKEDRRARLQAQFAQMRPVGMPPSVGPRVPMYPPGGPGIGQQIFYAQGPPAIIPSQPGFGYQQQLVPGMRPGAAPVPNFFVPMVQQGQQGQRPGGRRTGAVQQSQQPVPMMPQQMLPRGRVYRYPPGRGMPDVSMPGVAGGMFSVPYDVGGMPLRDASISQQIPVGALATALANASPEQQRTMLGENLYPLVEQLEPDNAAKVTGMLLEMDQTEVLHLLESPEALKAKVAEAMDVLRNVAQQQAGGTADQLASLSLNDNLVS

SEQ ID NO: 43993 - protein, 274 aa, Glycine max
  Clone ID: 700685156_FLI.pep
LIRRRFGGVLCQCGARVWDMAETTSASVSSPAGDSNWRENKLWKGTFAVAGIMLTLVTYGVLQEKIMRVPYGVNKDYFKYSLFLVFCNRITTSAVSAGALLASKKALDPVAPIYKYCLVSVSNILTTSCQYEALKYVSFPVQTLAKCAKMIPVMVWGTAIMQKRYRGTDYLLAFVVTLGCSVFILYPAGTDISPYGRGRENTVWGVLLMLGYLGCDGFTSTFQDKMFKGYNMEIHNQIFYTTLCSCILSLAGLIIQGHLLPAVEFVYIHKDCFF

SEQ ID NO: 43994 - protein, 305 aa, Glycine max
  Clone ID: 700726366_FLI.pep
TPDCLLPQTGLSLPSHSIVVLEEANNQIVEHLKIKEDELSKSISSCRVEADVIKTWINFLEDTWVLQWSNAEINDKQVNDELERHEDYFVNLAIQLLTTYQKELEPCINHIKTFVVNLKNLSQRYRLEMTPSADTDESEVLSPRRNLEEEYLTYEAKIITTFSVVDNMKQQFYAQHGKISRKDEERVIELFDAIEKLRTQFESIERPILEIEIPAKAETPPLEKKSDATPSVSVPAQGAAAQGIELSKPETDEQPKSPSVKTDQILDHEAELAKLESEFGKVSKDYSAEEIGDWEFDELERELSK

SEQ ID NO: 43995 - protein, 396 aa, Glycine max
  Clone ID: 700726923_FLI.pep
ADKHVRKALEKGQVHVEHMCSNALAMTKNMTDSDIANYEYNMRVENNGQNGNSNRKLLVENDVEWPEWISAADRRLLQASTVKADVTVAADGSGDFKTVTEAVDAAPLKSSKRFVIRIKAGVYRENVEVPKKKNNIMFLGDGRTNTIITASRNVVDGSTTFHSATVAVVGSNFLARDLTFQNTAGPSKHQAVALRVGGDLSAFFNCDILAFQDTLYVHNNRQFFVKCLIAGTVDFIFGNSAVVFQDCDIHARLPSSGQKNMVTAQGRVDPNQNTGIVIQKCRIGATNDLESVKKNFKTYLGRPWKEYSRTVIMQSSISDVIDPIGWHEWSGNFGLSTLVYREYQNTGPGAGTSNRVTWKGYKVITDTAEAREYTPGSFIGGSSWLGSTGFPFSLGL

SEQ ID NO: 43996 - protein, 399 aa, Glycine max; identical to SEQ ID NO: 43897
  Clone ID: 700727070_FLI.pep

SEQ ID NO: 43997 - protein, 505 aa, Glycine max
  Clone ID: 700727744_FLI.pep
MLPQPPFKPVYYTLVIIDLCKALPGAFPAVVAGAVRTLFERIADLDMECRTRLILWFSHHLSNFQFIWPWEEWAYVLDLPRWAPQRVFVQEVLEREVRLSYWDKVKQSIENAPGLEELLPPKGGPNFSFGAEDDKESNEHVLSGQLNNMVKGKAPVREIISWIDESVLPNNGLEVTLRVVVQTLLNIGSKSFTHLMTVLERYGQVFAKLCPDQDKQVMLIAEVSSFWKSNTQMTAIAIDRMMGYRLVSNLAIVRWVFSAENIEQFHMSDRPWEILRNAVSKTHNRISDLRKEILSLKKNISSSEEAAKEAKAELDAAESKLTLVDGEPVIGDNPARLNRLKSHAEKTKEEVVSLQESLEAKEALLSRAIEENEALFLLLYKSFSNVLTERLPEGSRTLHELKSAQVDVVMAVDPEEPSSMELDNQNQRPQNSHTNGEKKGGAYNVGEKEQWCITTLGYVKAFSRQYAAEIWPHVEKLDAEVLTEDAPLLFRSAVYSGLRRPIHEA

SEQ ID NO: 43998 - protein, 400 aa, Glycine max; identical to SEQ ID NO: 43871
  Clone ID: 700730716_FLI.pep

SEQ ID NO: 43999 - protein, 199 aa, Glycine max
  Clone ID: 700731162_FLI.pep
QDLHPGKTMNVQFSKSPFTQPFTILTWLKGLKIKDIDKEGYTFDELCIKTKPNGAEHKFCAKSLETLIGFAISKLGKNIQVLSSSFVNKQELYKVEGVQNLGDKAVMCHRLNFRTVAFYCHEVRGTTAFMVPLVAGDGTKTQALAVCHSDTSGMNRHILHQTMGVDPGTNTVCHFLGSKAILWVPNLAMDTAYQTNIVV

SEQ ID NO: 44000 - protein, 385 aa, Glycine max
  Clone ID: 700732991_FLI.pep
QASTEMEAKRGHALMCLARVSLFLCALTLSAAHGSTTVQDIARKLKLGDNELLRTEKKFKVFMENYGRSYSTEEEYLRRLGIFAQNMVRAAEHQALDPTAVHGVTQFSDLTEDEFEKLYTGVNGGFPSSNNAAGGIAPPLEVDGLPENFDWREKGAVTEVKLQGRCGSCWAFSTTGSIEGANFLATGKLVSLSEQQLLDCDNKCDITEKTSCDNGCNGGLMTNAYNYLLESGGLEEESSYPYTGERGECKFDPEKIAVKITNFTNIPADENQIAAYLVKNGPLAMGVNAIFMQTYIGGVSCPLICSKKRLNHGVLLVGYGAKGFSILRLGNKPYWIIKNSWGEKWGEDGYYKLCRGHGMCGINTMVSAAMVPQPQTTPTKNYASY

SEQ ID NO: 44001 - protein, 49 aa, Glycine max
  Clone ID: 700734586_FLI.pep
SECRGKLGILQFVTLYICCNVIFQLIMTRNFISFSRGLDIIVLLFSFAF

SEQ ID NO: 44002 - protein, 385 aa, Glycine max; identical to SEQ ID NO: 44000
  Clone ID: 700678168_FLI.pep

SEQ ID NO: 44003 - protein, 323 aa, Zea mays
  Clone ID: LIB3061-030-F8_FLI.pep
APNQICNINYLTPKTMKLVLVVLAFIALVSSVSCTQTGGCSCGQQQSHEQQHHPQQHHPQKQQHQPPPQHHQQQQHQQQQVHMQPQKHQQQQEVHVQQQQQQPQHHHQQQQQQHQQQHQCEGQQQHHQQSQGHVQQHEQSHEQHQGQSHEQQHQQQFQGHDKQQQPQQPQQYQQGQEKSQQQQCHCQEQQQTTRCSYNYYSSSSNLKNCHEFLRQQCSPLVMPFLQSRLIQPSSCQVLQQQCCHDLRQIEPQYIHQAIYNMVQSIIQEEQQQQPCELCGSQQATQSAVAILTAAQYLPSMCGLYHSYYQNNPCSSNDISGVCN

SEQ ID NO: 44004 - protein, 176 aa, Zea mays
  Clone ID: 700425273_FLI.pep
ASATSTRTTTALPGIPGGAASRVIETVSKAPRRRSRSPAAAAARTRSRTVAARPTSGPTAASTAARRVRAQPRIVTWCTRIRTSSAVSRRSTASRRAASDGDAEGSPSSSAVPSTRSSSSSSNSSSSSSSSRSWLTEGGRWVLSDAAAISSRSWLTEGGRWVLSDAAAMAAVESRD

SEQ ID NO: 44005 - protein, 923 aa, Zea mays
  Clone ID: 700349524_FLI.pep
LDILQDLHGPHLREFVQECYELSAEYENDRDEARLGELGSKLTSLPPGDSIVVASSFSHMLNLANLAEEVQIAHRRRIKLKRGDFADEASAPTESDIEETLKRLVSQLGKSREEVFDALKNQTVDLVFTAHPTQSVRRSLLQKHGRIRNCLRQLYAKDITADDKQELDEALQREIQAAFRTDEIRRTPPTPQDEMRAGMSYFHETIWKGVPKFLRRIDTALKNIGINERLPYNAPLIQFSSWMGGDRDGNPRVTPEVTRDVCLLARMMAANLYFSQIEDLMFELSMWRCSDELRIRADELHRSSRKAAKHYIEFWKQVPPNEPYRVILGDVRDKLYYTRERSRHLLTSGISEILEEATFTNVEQFLEPLELCYRSLCACGDKPIADGSLLDFLRQVSTFGLALVKLDIRQESDRHTDVLDSITTHLGIGSYAEWSEEKRQDWLLSELRGKRPLFGSDLPQTEETADVLGTFHVLAELPADCFGAYIISMATAPSDVLAVELLQRECHVKHPLRVVPLFEKLADLEAAPAAVARLFSIDWYMDRINGKQEVMIGYSDSGKDAGRLSAAWQMYKAQEELIKVAKHYGVKLTMFHGRGGTVGRGGGPTHLAILSQPPDTIHGSLRVTVQGEVIEHSFGEELLCFRTLQRYTAATLEHGMHPPISPKPEWRALMDEMAVVATKEYRSIVFQEPRFVEYFRSATPETEYGRMNIGSRPSKRKPSGGIESLRAIPWIFAWTQTRFHLPVWLGFGAAIKHIMQKDIRNIHILREMYNEWPFFRVTLDLLEMVFAKGDPGIAAVYDKLLVADDLQSFGEQLRKNYEETKELLLQVAGHKDVLEGDPYLKQRLRLRESYITTLNVCQAYTLKRIRDPSFQVSPQPPLSKEFTDESQPAELVQLNQQSEYAPGLEDTLILTMKGIAAGMQNTG

SEQ ID NO: 44006 - protein, 446 aa, Zea mays
  Clone ID: 700475984_FLI.pep
SALLKKAEDAEIDTAEQSAIKLRSQQQTSSALVVADHPPANGFAPPVNNLTLVKMPSQTVSDTQESGVSYEEAPKPPVEAPKENGTPVEVQNRDTNITEINNEIKAEPPSTSHSTSPGDLLLADLLGPLAIEGPPAVEQNPAQGLNANQSPAGDLALATLDDQSNSVQPIVNVEEKFHILCTKDSGVLYEDPYIQIGLKAEWRAHHGRLVLFLGNKNTSALTSVRALILPPSHLKMELSSVPDTIPPRAQVQVPLEVANLLASRDVAVLDFSYAFGTSLVDAKLRLPVVLNKFLQTITLTPEEFFSQWKALTVHSLKVQEVVKGVKPMPLSEMANLFMSLHLAVAPGLDNNPNNLVACTTFFSEATRAMLCLIRVETDPQDRTQLRLTVASGDQYLTFELKEFIKEHLVDIPRTQVAPPRAAVQPQLPTTAPATYNDPGTMLAGLL

SEQ ID NO: 44007 - protein, 234 aa, Zea mays
  Clone ID: 700168817_FLI.pep
DISLHPSGVPSSPSLSRLFSSLLFFVTVGVGNSASAQILRLLSACSTVLFVWLQNNDLQLIQPTTAEEEIQLSQPPNLEDKTVEELLNIDPDMFPEEGCTVTISSIVQNSRWWYPSCSRCHKSSSQTSTGYHCTSCGCTNIKFRYKLSFIATDGTCEAEFFCFDSIARKIVGEPWGNLVTAVTTSESPSSPSRYCVSEIYSCSCHQYVSLLCHEQSILYSIYFNKSWKTDLHTI

SEQ ID NO: 44008 - protein, 142 aa, Glycine max
  Clone ID: 700789174_FLI.pep
NRDLQEDKEPVFDSVKTILGMLEVSAEFALKITFNRERIQKALPAGHLDATTLADYLVNKGVPFRTSHDIAGKSVALCTLKNCQLLDLSLDELRSINPVFEEDVYEFLGVENAIKKFVSYGSTGSACVASQLDYWLKKLEMK

SEQ ID NO: 44009 - protein, 277 aa, Glycine max
  Clone ID: 700788722_FLI.pep
LYQSTTDGRKIVDVLLEQNIVPGIKVDKGLVPLAGSNDESWCQGLDGLASRSAAYYQQGARFAKWRTVVSIPNGPSALAVKEAAWGLARYAAIAQDNGLVPIVEPEILLDGEHGIDRTFEVAKKVWAEVFFYLAENNVLFEGILLKPSMVTPGAESKDKASPQTVADYTLKLLHRRIPPAVPGIMFLSGGQSEVEATLNLNAMNQSPNPWHVSFSYARALQNTALKTWGGRPENVKAAQDALLFRAKSNSLAQLGKYTGEGESEEAKKELFVKGYSY

SEQ ID NO: 44010 - protein, 219 aa, Glycine max
  Clone ID: 700750617_FLI.pep
PGKFFREKMMKEGTVMPMPDIKDKMPERSFLPRSILSKLPFSVSKIDELKQVFKASDNGSMEKMMKDSLEECERAPSSGETKRCVGSLEDMIDFATSVLGRNVAVRTTQNVNGSKKSVVVGPVRGINGGKVTQSVSCHQSLFPYLLYYCHAVPKVRVYEADLLDPKTKAKINRGVAICHLDTSDWSPTHGAFLSLGSVPGRIEVCHWIFENDMAWTIAD

SEQ ID NO: 44011 - protein, 516 aa, Glycine max
  Clone ID: 700750635_FLI.pep
ACCVLGGEKNEKKRKIMAMANLARRKGYAVVLSSRSSLCLTRWRGFASGSDENDVVVIGGGPGGYVAAIKAAQLGLKTTCIEKRGTLGGTCLNVGCIPSKALLHSSHMYHEAKHAFANHGVKFSSVEVDLPAMMAQKDKAVSNLTKGIEGLFKKNKVNYVKGYGKLVSPSEVSVDTTEGGNTVVKGKHIIIATGSDVKSLPGITIDEKKVVSSTGALALTEIPKRLIVIGAGYIGLEMGSVWGRLGSEITVVEFASEIVPTMDAEVRKQFQRSLEKQGMKFKLKTKVVGVDTSGDGVKLTLEPAAGGDQTTLEADVVLVSAGRTPFTAELGLDKIGVETDKIGRILVNERFATNVSGVYAIGDVIPGPMLAHKAEEDGVACVEYIAGKVGHVDYDKVPGVVYTMPEVASVGKTEEQVKELGVEYRVGKFPFLANSRAKAIDNAEGLVKILAEKETDKILGVHIMAPNAGELIHEAAIALQYDASSEDIARVCHAHPTMSEAVKEAAMATYDKPIHI

SEQ ID NO: 44012 - protein, 168 aa, Glycine max
  Clone ID: 700751401_FLI.pep
EIKDTTKEGYSFEELCIKKEAIEGEEKFCAKSLGTVIGFAISKLGKNIQVLSSSFVNKQDQYTVEGVQNLGDKAVMCHRLNFRTAVFYCHEVRETTAFMVPLVAGDGTKTQALAICHSNTSGMNHQMLHQLMGVDPGTNPVCHFLGSKAILWVPNLSVDTAYQTNIVA

SEQ ID NO: 44013 - protein, 515 aa, Glycine max
  Clone ID: 700755951_FLI.pep
VSSWVETILPPGFALANPPLFPPSASDFSLSIFVHQSAASLSLSYLTRQLQPHYSMDAKVFKFQILQGSIAKRVVIRSILLACAVSIVSIYRAQSLFDFGTLAPIATYFDCVSGFEGVTFRPGSHLLRTRFWASANCEKDANLTLSVVTDLTGNNLLYTGAKSLCVGEGSSMAVTAMKQLGFSSVSAVQTHRFVQRNVLYEDNSFDFVFSRDLDKVSVPALLVLEVERVLKPRGIGAFLVGTTSSHPNDLIRAATPVSSLLRSSNVVHVGSVNELNLVVFKKRVGNATSFYQHGNLPADCPSLTFTKSLIELMEPLVSEKQKPPPLEFHKRIPYLPKFVDVSTRKRLVYIDIGVGELLDANVSDWFLPSYPIDQKDFNIYFVHYNTSIMLSHVKQPGITFVYHPGLSGIDKVNAKLGSDDDDDMDPLLGEEEKFDFLAWFKETVQYADFVVLKMNAGSVELKFLSDIFENGAICYVDELFLKCPERGGDASKGSCMDIYKDLRSNGVYVHQWWGD

SEQ ID NO: 44014 - protein, 421 aa, Glycine max
  Clone ID: 700756233_FLI.pep
SYFYFPSLGMHKAAGAFGGIRIWSRPLIPVPFPPPAGDFTILAGDWFKLDHRRLRRLLENGHNLPFPDGLLINGRGWNGNTFTVDQGKTYRFRISNVGLTTSINFRIQGHRLKLVEVEGSHTLQNSYSSLDIHLGQSYSVLVTADQPVKDYYIVVSTRFTRRILTTTSVLHYSYSKTGVSGPVPPGPTLDITSSVYQARTIRWNLTASGPRPNPQGSYHYGLIKPSRTIMLANSAPYINGKQRYAVNGVSYNAPDTPLKLADYFNIPGVFYVGSIPTYPNGGNNAYLQTSVMGANFHEFVEIVFQNWEDSVQSWHIDGYSFFVVGFGSGQWTADSRVHYNLRDTVARCTTQVYPRSWTAIYMSLDNVGMWNIRSENWGRQYLGQQLYLRVYTPSKSWRDEYPVPKNALLCGRASGRRTRPF

SEQ ID NO: 44015 - protein, 275 aa, Glycine max
  Clone ID: 700756694_FLI.pep
LDRTMAAPRNVTATRDEEKGEDDDSPSAKKPKSERFPLNTWEFAVAVAVFLVFSTGLFCIYLTMPSAAYTNLKLPRTLSDLRLLKEHLSTYASNHPAQFILGYCSTYIFMQTFMIPGTIFMSLLAGALFGVVRGILLVVFNATAGASSCFFLSKLIGRPLVSWLWPEKLRFFQAEIAKRRDRLLNYMLFLRITPTLPNLFINLASPIVDVPFHIFFSATLIGLVPASYITVRAGLALGDLKSIKDLYDFKTLSVLFLIGFVSIAPTLLKRKRVYE

SEQ ID NO: 44016 - protein, 168 aa, Glycine max
  Clone ID: 700758467_FLI.pep
EKSWLQRLNLMLTFTNITQRSMSTIHYNSHATKIALVIDGRGHLQISCPHMSSRSSHSKHDKSSPSYHRISSDLKPGMVFVVPPGHPFVTIASNKENLLMICFEVNARDNKKFTFAGKDNIVSSLDNVAKELAFNYPSEMVNGVFDRKESFFFPFELPREERGRRADA

SEQ ID NO: 44017 - protein, 336 aa, Glycine max
  Clone ID: 700761096_FLI.pep
EKSKSMSVRDHTQKIDLVETMKELWAQMGSLMATIVFMYTIFERFFPPHLREKLQAYTQKLTNHFNPYIQISFPEFSGERLKKSEAYTAIQTYLSANSSQRAKRLKAEVVNDSQTPLVLSMDDNEEITDEFHGIKLWWSANKVSNNPQRYNPFSYYGSSDEKRFYKLTFHKRHRDIVTMSYIKHVLDEGKDIEMRNRQLKLYTNNPSSGWYGYKQSKWSHIVFEHPATFETLAMDRRKKEDILKDLVKFKKGKDYYAKIGKAWKRGYLLYGPPGTGKSTMIAAIANFMNYDVYDLELTAVKDNTELRKLLIETPSKSITVIEDIDCSLDLTGQRKK

SEQ ID NO: 44018 - protein, 442 aa, Glycine max; identical to SEQ ID NO: 43182
  Clone ID: 700761316_FLI.pep

SEQ ID NO: 44019 - protein, 429 aa, Glycine max
  Clone ID: 700793444_FLI.pep
LCYQTGNKAQGTSIVSIMGVCLSTQIKAGLNSKHVSADAKDHSSPISNKITKDVSTPISKVSEVSVPQTPRIEGEILQSSNLKNFSLTELTAATRNFRKDSVLGGEGDFGSVFKGWIDNQSLAAAKPGTGVVVAVKRLSLDSFQGQKDWLDEVNYLGQLSHPHLVKLIGYCFEDEDRLLVYEFMPRGSLEYHLFMRGSYFQPLSWGLRLKVALGAAKGLAFLHSAETKVIYRDFKTSNVLLDSNYNAKLADLGLAKDRPTREKSHVSTRVMGTYGYAAPEYQTTGNLSAKSDVFSFGVVLLEMLSGRRAVDKNRPSGQHNLVEWAKPYLANKHKLLRVLDNRLEGQYALDEACKVATLSLRCLATESKLRPTMDEVVTDLEQLQVPHVNQNRSVNASRGRRKSADDFTHGRIATASVSPLSHDIANTRP

SEQ ID NO: 44020 - protein, 154 aa, Glycine max
  Clone ID: 700794384_FLI.pep
KALMRRTWDTATAWLGVLHCQTRRRRSHSTPNWLLVPMEGLLGSSLSNTKQKEMLSPTKTNSKLEKPRLMLSSRPLRLTFWPIPITTNPLQLTCHHFLAWRLIQSLCSQLKLPSNVSSLSFLLSFSHIIVRLMIYLYLTSSIINYNKDEQSLQL

SEQ ID NO: 44021 - protein, 380 aa, Glycine max
  Clone ID: 700829626_FLI.pep
FTFEFGQQEVSPRTSGRLSHSSGPLNGSLTDSPPVSPSEIDDFKYNRSNNNHNTVNMITGLNGQYWGAGGAATTAGGGKTVGRWLKDRKEKKKEETRAHNAQLHAAVSVAGVAAAMAAIAAATAASSGSRKDEQMAKTDMAVASAATLVAAQCVEAAEAMGAERDHLASVVSSAVNVRSAGDITTLTAAAATALRGAATLKARVLKEVWNIAAVIPVEKNLGSGSGGGDNGNGSNGSSNSSFSGEIVPEENFLGICSRELLARGCELLKRTRTGELHWKIVSVYINRMNQVMVKMKSRHVAGTITKKKKNVVLGVIKDMPAWPGRHLLEGGENRRYFGLKTVMRGVVEFECRNQREYDVWTQGVSRLLSIAAERNNRNRI

SEQ ID NO: 44022 - protein, 278 aa, Glycine max
  Clone ID: 700829708_FLI.pep
KLVLTLAAKRIMASLSTFLTLTLFFLSHVNAKEIVITEEGYTVTTVFDGHKPHIFPFTVLQRPFSSDLILLDSVNSTFYTAQFPITEESVFTRLSGDGSVGYSDGDVGSARFAKPRSFAFDMRGNVYVADKSNRAIRKISAKGVTTIAGGEFSEKSRTKDGPALNASFSNDFDLTFIPGLCALLVSDHMHRLVRQINLMEEDCTLGSKPGLGAVMTWTLGLGLSCLLGLVIGIVVRPYIIPNTERHQPLPLHRDMEALPNQSGEASTDALLRCQKRNC

SEQ ID NO: 44023 - protein, 196 aa, Glycine max
  Clone ID: 700829957_FLI.pep
TLSSHNSAAATAPNPMASEKKLSNPMREIKVQKLVLNISVGESGDRLTRAAKVLEQLSGQAPVFSKARYTVRSFGIRRNEKIACYVTVRGDKAMQLLESGLKVKEYELLRRNFSDTGCFGFGIQEHIDLGIKYDPSTGIYGMDFFVVLERPGYRVGRRRRCKSRVGIQHRVTKEDAMKWFQVKYEGVILNKSQAIV

SEQ ID NO: 44024 - protein, 142 aa, Glycine max
  Clone ID: 700830288_FLI.pep
KKEAIENIGADSFVVSREQDQMQAVMGTMDGIIDTVSAVHPLVPLIGLLKPHGKLVMVGAPEKPLELPAFSLLMGRKMVGGSSIGGMKETQEMIDFAAKHGVKPDIEVIPIDYVNTAIERLAKADVKYRFVIDIGNTLKPSS

SEQ ID NO: 44025 - protein, 454 aa, Glycine max
  Clone ID: 700830512_FLI.pep
MEPRVGNKFRLGRKIGSGSFGEIYLGTNIQTNEEVAIKLENVKTKHPQLLYESKLYRILQGGTGIPNVRWFGVEGDYNVLVMDLLGPSLEDLFNFCSRKLSLKTVLMLADQMINRVEFIHSKSFLHRDIKPDNFLMGLGRRANQVYAIDFGLAKKYRDSSTHQHIPYRENKNLTGTARYASMNTHLGIEQSRRDDLESLGYVLMYFLRGSLPWQGLKAGTKKQKYEKISEKKVSTSIEALCRGYPTEFASYFHYCRSLRFDDKPDYAYLKRIFRDLFIREGFQFDYVFDWTILKYQQSQLATPPTRAIGPSAGTSSGMPPAVTNADRHTGGEEGRPPALVSVDSSRRRMSGPILNTLSSANALGQSSGSSRRVAVSSSRDAFVGAESDIRTRTAEASPGAAHRALSGQRSSPIGSSDPKRVVSSGRNASHVKNYDTALRGMEGLQLENDERTHY

SEQ ID NO: 44026 - protein, 268 aa, Glycine max
  Clone ID: 700833785_FLI.pep
NHYRFVVTMPQGDYIERHRRDYGYRLDHFERKRKKEARQVHKRSSIAQKALGIKGKMIAKKNYAEKAQMKKTLAMHEESTSRRKTDDNVQDGAVPAYLLDRDNTTRAKVLSNTIKQKRKEKAGKWDVPLPKVRPVAEDEMFKVVRTGKRKTKQWKRMVTKATFVGPGFTRKPPKYERFIRPTGLRFTKAHVTHPELKCTFNLELIGVKKNPNGPMYTSLGVITRGTIIEVNVSELGLVTPAGKVVWGKYAQVTNNPENDGCINAVLLV

SEQ ID NO: 44027 - protein, 161 aa, Glycine max; identical to SEQ ID NO: 40317
  Clone ID: 700833967_FLI.pep

SEQ ID NO: 44028 - protein, 182 aa, Glycine max
  Clone ID: 700833986_FLI.pep
NDCFLIPVEFGDSFATKSENQHRYKVGDDGFSGDEDVVLDFDINSGAESAPVIENWHTSGDTVSLFSDPGCTKVFKANGFELRSEHLEQNYLDMKFAQSTEDSSINGNVEANMKRRDVELCSVVPQVSEGVTQMRGDELEAEVSTQDQDILEDSSQQIQEVPPSSSTTFTIQDDSDGRRNSS

SEQ ID NO: 44029 - protein, 408 aa, Glycine max
  Clone ID: 700836435_FLI.pep
TNCTATEHTAMAASSSLFSSSMHMEMFAPKTSKCPQNFVCCHSKISYIEPNYLKPVCCPNSRSLSMNMSSKWEQTDRRDALHCRALKIEPAPSFSVGQKFQFDDIIEAQQFDRDILSAIFEVARNMENVEKDSPGSQILKGFLMATLFYEPSTRTRLSFESAMRRLGGEVLTTENAREFSSAAKGETLEDTIRTIEGYSDIIVMRHFESGAARRAAAIADIPIINAGDGPGQHPTQALLDVYTIQREIGKIDDIKVGLVGDLANGRTVRSLAYLLAKFKDVKIYFVSPDVVKMKDDIKDYLTSKGVEWEECADLVEVASECDVVYQTRIQKERFGEKIDLYEKARGKYIVNQGILNVMQRHAVVMHPLPRLDEITLEVDADPRAAYFRQAKYGLYIRMALLKLLLVGW

SEQ ID NO: 44030 - protein, 385 aa, Glycine max
  Clone ID: 700836546_FLI.pep
QASTEMEAKRGHALMCLARVSLFLCALTLSAAHGSTTVQDIARKLKLGDNELLRTEKKFKVFMENYGRSYSTEEEYLRRLGIFAQNMVRAAEHQALDPTAVHGVTQFSDLTEDEFEKLYTGVNGGFPSSNNAAGGIAPPLEVDGPPENFDWREKGAVTEVKLQGRCGSCWAFSTTGSIEGANFLATGKLVSLSEQQLLDCDNKCDITEKTSCDNGCNGGLMTNAYNYLLESGGLEEESSYPYTGERGECKFDPEKIAVKITNFTNIPADENQIAAYLVKNGPLAMGVNAIFMQTYIGGVSCPLICSKKRLNHGVLLVGYGAKGFSILRLGNKPYWIIKNSWGEKWGEDGYYKLCRGHGMCGINTMVSAAMVPQPQTTPTKNYASY

SEQ ID NO: 44031 - protein, 268 aa, Glycine max
  Clone ID: 700836730_FLI.pep
TKFSHRISKGAKMSQEQPRRPQGQDPIKYGDVFDVYGDLAQMPIAPEDAAMMQSAEARVLGKTQPGGASSVMQSAATRNEQAGLVGHQDVTDITGDHGVTVTETTFHGRRIITEAVGGQVVEQYVEPNPVEAGRTSAIKESAITIGEALEATAQTVGHKPVDQSDASAIQAAEVRATGSNVITPGGLAAMAQSAAAYNADCKHDQDKVKLADVLTGATAKLPADKAATLQDAEGVASAEARNNPDATATPGGVAASVAAAARLNENVK

SEQ ID NO: 44032 - protein, 385 aa, Glycine max; identical to SEQ ID NO: 44000
  Clone ID: 700836738_FLI.pep

SEQ ID NO: 44033 - protein, 135 aa, Glycine max
  Clone ID: 700838570_FLI.pep
KENRLQKFKLPEPVLCIGGFLQIELLGRIQRQEMDGLLYICVSHVQVLGGSLSPPFNVDILQPSGMFVLKRDQLADHQPVVTSGNESQEISAEQREVRDFQHIVTILSGQALGIVEDEWDEEEFDVDDFDPEYAL

SEQ ID NO: 44034 - protein, 430 aa, Glycine max
  Clone ID: 700838676_FLI.pep
ILLNLFYYTATMEHLPVEVIGNTLSLLGSARDVVVASVTCKKWREAWRNHLHSLSFNYCDWPLFHDFTSARLEILITQTIFQTKALQSLTIFLDDEHKFSAAPVIAWLMYTRDSLRQLLYNVRTTPCFNIIEKCSRQRLEVLALARNPITGVDPSYLKFPCLKSLSLSFISISALDLTLLLSACPKLETLAMVGVEIAMSDSQASVELSSVSLKFFDLELFSSDKFILEADLLEKLHLKDCSFEAFELIGKGTLKVLKIDDVNIIHLDIGDSTENLEIIDVCNFTVMWPKFYHMISKASKLYKLRLWGVVFDDEDEVVDIETISVCFPQLTHLSLSYDLRDGVLHYGLQGLSCLMNVVVLELGWTVISDLFSVWVAGLLEGCPNLKKLVIYGFVSEVKTHEECQILARFSEFILQLGRKYGHVKFEFEYE

SEQ ID NO: 44035 - protein, 194 aa, Glycine max
  Clone ID: 700838767_FLI.pep
EHNLAFSDLNGLDIGLLDIHLGNSDSEHSVLHAGLHLIEFRVLRQAEAAEKAAAGAFEAVPRVVLVLLLLCSLSAYLQHPSLLLDLHLHLFLLQPRQVCLEHVRLRRLLPVDARVGEGRRLGARSGEGGGAGEAMEWVPHVEGEGVEDVGSSPGAEETWNQRHCYVGFQFSVEYERTGKLYIYIGGFLVIGMFA

SEQ ID NO: 44036 - protein, 175 aa, Glycine max
  Clone ID: 700841903_FLI.pep
LVTTTMASDGSEEFRLVSPAFKNGGKLPRHYTDDGQGTKKNISPPLEWYNLPEGTKTLALVVEDIDATDSGGPMVPWTHWVVANILATVKGLPEGFSGKSAEMGGDYAAIKEGNNDLKVPGWNGPRLPTPGHRIQFRLYALDDELKLGNKLTKEKLLEDTIEGHVLGEATLMAIF

SEQ ID NO: 44037 - protein, 371 aa, Glycine max
  Clone ID: 700787621_FLI.pep
FSSSLSSSSSSLSISPSFLSYTSSNSTHFATHAAFSISASAAEKKKVLIVNTNSGGHAIIGFYFAKELLGAGHSVTILTVGDEGSDKMKKPPFNRFSEIVSAGGRTVWGNPAQVGSVVGGEVFDVVLDNNGKDLGTVRPVIDWAKSSGVKQFLFISSAGIYKPTDEPPHVEGDVVKADAGHVEVEKYIEETYGSWAVFRPQYMIGSGNNKDCEEWFFDRIVRDRPVPIPGSGLQLSNIAHVRDLSSMLTLAVENPEAANQTIFNCVSDRAVTLNGIAKLCAQAAGRPVNIVHYDPKAVGVDAKKAFPFRTYHFYAEPRAAKAKLGWQSTTNLPEDLKERFEEYVKIGRDKKSIQFELDDKILEALKVPVSV

SEQ ID NO: 44038 - protein, 394 aa, Glycine max
  Clone ID: 700787648_FLI.pep
RKFVTKAAMEGEEGSQQPQLVLGDKLFLLRQPDVQDIDKVRYKEDVFTHINQNDMVPLYETLVADSVLDLDRALLDSMRAKIHDELANLDEKIADAEENLGESEVREAHLAKSLFFIRIMDKEKALEHLKVTETKTVAVGQKMDLVFYTLQLGFFDMDFDLISKSIDKAKNLFEEGGDWERKNRLKVYEGLYCMSTRNFEKAAKLFLDSISTFTTYELFPYDTFIFYTVLTSIISLDRVSLKQKVVDAPEILTVIGKIPYLSEFLNSLYDCQYKSFFSAFAGLTEQIKLDRYLHPHFRYYMREVRTVVYSQFLESYKSVTIEAMAKAFGVTEDFIDVELSRFIAAGKLHCKIDKVEGVLETNRPDAKNALYQATIKQGDFLLNRIQKLSRVIDL

SEQ ID NO: 44039 - protein, 162 aa, Glycine max
  Clone ID: 700787743_FLI.pep
KLKSECEEALKDGDLLMNVGKLKEALPYYEKVMDKLTFQSELHGLAALQWSICQDSLSRSNEARGMYEKLKSHPNPKVSKKARQFMYSFQAMEMMKMTTGSQFYLKNSDYQNYFDAFVENKSNYPGGDGPVQESAMNQVLPYILFLVSPIFVVLLIAVRKGI

SEQ ID NO: 44040 - protein, 377 aa, Glycine max
  Clone ID: 700788114_FLI.pep
KSNLPLFLLPPTSPSSSSIMSHFKGKYHDELIVNAAYIGTPGKGILAADESTGTIGKRLASISVENVESNRRALRELLFTAPGALKYLSGVILFEETLYQSTAAGKPFVEVLKEAGVLPGIKVDKGTVELAGTNGETTTQGLDGLGQRCAKYYEAGARFAKWRAVLKIGPNEPSELAIHENAYGLARYAVICQENGLVPIVEPEILVDGSHDIHKCAAVTERVLAACYKALNDHHVLLEGTLLKPNMVTPGSNSAKVSPQVVAEHTVRALQRTVPAAVPAIVFLSGGQSEEEASVNLNAINQVNGKKPWSLSFSFGRALQQSTLKAWSGKEENVKKAQEALLVRAKANSEATLGTYKGNSKLADGASESLHVEDYKY

SEQ ID NO: 44041 - protein, 194 aa, Glycine max; identical to SEQ ID NO: 40102
  Clone ID: 700792046_FLI.pep

SEQ ID NO: 44042 - protein, 332 aa, Glycine max
  Clone ID: 700746523_FLI.pep
LAADESTGTIGKRLASISVENIESNRRALRELLFTAPGVLQYLSGVILFEETLYQSTAAGKPFVNVLKEAGVLPGIKVDKGTVELAGTNGETTTQGLDGLGQRCAKYYEAGARFAKWRAVLKIGPNEPSELSIHENAYGLARYAVICQENGLVPIVEPEILVDGPHDIHKCAAVTERVLAACYKALNDHHVLLEGTLLKPNMVTPGSQSAKVSPQVVAEHTVRALQRTVPAAVPAVVFLSGGQSEEEASVNLNAINQVNGKKPWSLSFSFGRALQQSTLKAWGGKEENVKKAQEALLVRAKANSEATLGTYKGNSQLADGASESLHVSNYSY

SEQ ID NO: 44043 - protein, 274 aa, Glycine max; identical to SEQ ID NO: 42938
  Clone ID: 700746570_FLI.pep

SEQ ID NO: 44044 - protein, 319 aa, Glycine max
  Clone ID: 700759544_FLI.pep
EMYQIWSRRIALGAFAFVLLFLSASADDVVVLSEDNFEKEVGQDRGALVEFYAPWCGHCKKLAPEYEKLGSSFKKAKSVLIGKVDCDEHKSLCSKYGVSGYPTIQWFPKGSLEPKKYEGPRTADSLAEFVNTEGGTNVKIATAPSNVVVLTSENFNEVVLDETKDVLVEFYAPWCGHCKSLAPTYEKVATAFKLEEDVVIANLDADKYKDLAEKYDVSGFPTLKFFPKGNKAGEEYGGGRDLDDFVAFINEKSGTSRDVKGQLTSQAGIVESLDVLVKEFVAASDEEKIMKEEEEEEESKKEEEERKKKEEEEEEEEKK

SEQ ID NO: 44045 - protein, 167 aa, Glycine max
  Clone ID: 700759569_FLI.pep
CSSYLDRIRCETIICEVDRQRRQQIRMASNPKPLTFEEVANHNNKKDCWIIINGKVYDITPFLDEHPGGDEVLVTSTGKDATIDFEDVGHSDSAIEMMEKYFVGKVDTSTLPAKVNHSLPQPTQAGGAGNQSSGFVVKILQFLLPFLILGLAFALQYYGKKKHASTS

SEQ ID NO: 44046 - protein, 209 aa, Glycine max
  Clone ID: 700762915_FLI.pep
LESFSNPSNKDQLEERMARIKEDPSLKHILEEIETGGPAAMMRYWNNEEVLQKLGQAMGLANSGDAGASAENSGADETEDLGNEDESIVHHTASVGDVEGLKNALASGADKDEEDSEGRTALHFACGYGEVKCAQVLLEAGAKVDALDKNKNTALHYAAGYGRKECVALLLENGAAVTLQNMDGKTPIDVAKLNNQNEVLKLLEKDAFL

SEQ ID NO: 44047 - protein, 491 aa, Glycine max
  Clone ID: 700763253_FLI.pep
LHLSLNIILSMAKLVLSLCFLLFSGCCFAFSFREQPQQNECQIQRLNALKPDNRIESEGGFIETWNPNNKPFQCAGVALSRCTLNRNALRRPSYTNAPQEIYIQQGSGIFGMIFPGCPSTFEEPQQKGQSSRPQDRHQKIYHFREGDLIAVPTGFAYWMYNNEDTPVVAVSLIDTNSFQNQLDQMPRRFYLAGNQEQEFLQYQPQKQQGGTQSQKGKRQQEEENEGGSILSGFAPEFLEHAFVVDRQIVRKLQGENEEEEKGAIVTVKGGLSVISPPTEEQQQRPEEEEKPDCDEKDKHCQSQSRNGIDETICTMRLRHNIGQTSSPDIFNPQAGSITTATSLDFPALSWLKLSAQFGSLRKNAMFVPHYNLNANSIIYALNGRALVQVVNCNGERVFDGELQEGQVLIVPQNFAVAARSQSDNFEYVSFKTNDRPSIGNLAGANSLLNALPEEVIQQTFNLRRQQARQVKNNNPFSFLVPPKESQRRVVA

SEQ ID NO: 44048 - protein, 201 aa, Glycine max
  Clone ID: 700796938_FLI.pep
EMYVASMRKSFKDSLKVLEADIQHANTLASDFPREYDGACLQMRMSYSPAAHLFLFLVQWTDCHLAGALGLLRILIYKVYVDGTTTMSTHERKASIREFYAVIYPSLLQLEKGVTDTEDKKQKVVCMERYRRRDDEEYRQSSDIDIEREDECGICMDMNSKIVLPNCNHAMCLKCYREWCACSIGTMHMKANDITIMPILP

SEQ ID NO: 44049 - protein, 264 aa, Glycine max
  Clone ID: 700797487_FLI.pep
RYFGFLISRKKYVVCIDDDCVPAKDNSGILVDAVAQHIVNLQTPATPFFFNTLYDPFCKGADFVRGYPFSLRSGVDCALSCGLWLNLADLDAPTQALKPGQRNLRYVDAVLTVPSRAMVPVSGINIAFNREAVGPALVPALRLAGEGKLRWETMEDIWCGMCVKVICDHLGLGVKSGLPYVWRTERGDAIQSLKKEWEGVKLMEDVVPFFQSLRLPQSATTAEACVVEVAKTVKEHLGKVDPMFSEAAQAMEEWVKLWKSVRSG

SEQ ID NO: 44050 - protein, 231 aa, Glycine max
  Clone ID: 700763723_FLI.pep
KKSKKEIMVRGKTQMKRIENATSRQVTFSKRRNGLLKKAFELSVLCDAEVALIIFSPRGKLYEFASSSMQESIERYRRHTKHVNPTTFRSVEQNMQHLKQEAENMMKKIDLLEAAKRKFLGEGLGACSIEELQRIEQQLERSLSNVRARKVFKEQIEQLKEKEKALLDENAKLTENARLSEKHDIHLQPATKNQNVNQPQCNAESSSSSDVETELFIGLPDTRARHISHHV

SEQ ID NO: 44051 - protein, 240 aa, Glycine max
  Clone ID: 700763741_FLI.pep
DLSAPWAGEIEQKILSSPEVGIGPYVEVAFYHKPSKTLLVTDAVIFVPRQPPECISKESLLASAKNGLAVKLLSKGKEVPDEPVVDDKRNRQKGWERMVLQILFLGPSNLLEPNASFEQMSQKLIVSPIVKTLVFSKVPEKVREWVDSISRDWRFKRIIPAHFAAPISASRSDFRAAFAFLDEFLGESNAAWPSLSLLFSSIMGKAASYFPPDDMRTLSSLDQFLVSVGAVKKTVSGRKR

SEQ ID NO: 44052 - protein, 79 aa, Glycine max
  Clone ID: 700831614_FLI.pep
FYRQMHETKLHGNNKKHPWLQILFRVPRGSKGCLVGAFTFPFYNDNIHIHLTPCGVVFCSKFQEVSSVISNSSFTEFCF

SEQ ID NO: 44053 - protein, 519 aa, Glycine max
  Clone ID: 700832220_FLI.pep
KMETSEWHIERRSSFGSESPLAREAGNVPETGSLSIVVLGASGDLAKKKTFPALFHLYLQGFLPPDEVHIFGYARTKISDDELRNRLRGYLVPKKGASPQQLEDVEKFLQLIKYVSGSYDSEDGFRLLDKEISEHEYLKNSVEGLSRRLFYLALPPSVYPSVCKMIKTCCMNKSDLGGWTRVVVEKPFGKDLESAEELSTEIGKLFEEPQIYRIDHYLGKELVQNLLVLRFANRFFLPLWNRDNIDNVQIVFREDFGTDGRGGYFDQYGIIRDIIQNHLLQVLCLVAMEKPVSLRPEHIRDEKVKVLESVLPINDDEVVLGQYEGYKDDPTVPDESNTPTFATVVLRIHNERWEGVPFILKAGKALNSRKAEIRVQFKDVPGDIFKCKKQGRNEFVIRLQPSEAIYMKLTVKQPGLEMSTVQSELDLSYGQRYQGVTIPEAYERLILDTIRGDQQHFVRRDELKASWQIFTPLLHRIDEGEFKPLPYKPGSRGPAEADQLLEKAGYVQTHGYIWIPPTL

SEQ ID NO: 44054 - protein, 141 aa, Glycine max
  Clone ID: 700835540_FLI.pep
NFFNFFSLFECNPLFFSISMSLFGVGTWLFIIIHICIFFFVHHDILHFPLRHPPYFYGGFLAFRHEPPSAINNIGLFSVSNSCATLKCIQKFIYNNKSLILLDEVSYLHGSHIIIWHVSNSNKNMNNLHVMFYQNTSLSSF

SEQ ID NO: 44055 - protein, 267 aa, Glycine max
  Clone ID: 700837258_FLI.pep
YTGVNGGFPSSNNAAGGIAPPLEVDGLPENFDWREKGAVTEVKLQGRCGSCWAFSTTGSIEGANFLATGKLVSLSEQQLLDCDNKCDITEKTSCDNGCNGGLMTNAYNYLLESGGLEEESSYPYTGERGECKFDPEKIAVKITNFTNIPADENQIAAYLVKNGPLAMGVNAIFMQTYIGGVSCPLICSKKRLNHGVLLVGYGAKGFSILRLGNKPYWIIKNSWGEKWGEDGYYKLCRGHGMCGINTMVSAAMVPQPQTTPTKNYASY

SEQ ID NO: 44056 - protein, 238 aa, Glycine max
  Clone ID: 700837677_FLI.pep
FTVCYYSFQRHAASLGAAGSSRDCKMKFNIANPTTGCQKKLEIDDDLKLRAFWDKRISQEVLGDALGEEFKGYVFKITGGCDKQGFPMKQGVLTPGRVRLLLHRGTPCFRGYGRRNGERRRKSVRGCIVSPDLSVLNLVIVKKGESDLPGLTDVEKPRMRGPKRASKIRKLFNLSKEDDVRKYVNTYRRTFITKAGKKVSKAPKIQRLVTPLTLQRKRARIADKKKRIAKAKSEAAEY

SEQ ID NO: 44057 - protein, 326 aa, Glycine max
  Clone ID: 700839974_FLI.pep
LVPFSPFSYLHTQHTQSRLGIFAQNMVRAAEHQALDPTAVHGVTQFSDLTEDEFEKLYTGVNGGFPSSNNAAGGIAPPLEVDGLPENFDWREKGAVTEVKLQIQGRCGSCWAFSTTGSIEGANFLATGKLVSLSEQQLLDCDNKCDITEKTSCDNGCNGGLMTNAYNYLLESGGLEEESSYPYTGERGECKFDPEKIAVKITNFTNIPADENQIAAYLVKNGPLAMGVNAIFMQTYIGGVSCPLICSKKRLNHGVLLVGYGAKGFSILRLGNKPYWIIKNSWGEKWGEDGYYKLCRGHGMCGINTMVSAAMVPQPQTTPTKNYASY

SEQ ID NO: 44058 - protein, 385 aa, Glycine max; identical to SEQ ID NO: 44000
  Clone ID: 700839991_FLI.pep

SEQ ID NO: 44059 - protein, 343 aa, Glycine max
  Clone ID: 700840012_FLI.pep
GSIRLIEKPFPFPMANEIPHDEVVCVTGANGFIGSWLVRTLLEKENPRYTIHATIFPGSDASHLFNLHPSAASRLTLFPADLLDAAALSRAITACSGVFHVASPCTLEDPTDPQRDLLEPAVQGTLNVLTAARRVGVRRVVLTSSISAMVPNPGWPAGRAADEASWTDVEYCKGRGKWYPVAKTEAERAAWAFDGVEVVAVLPATCLGPLLQPDLNASSAVLRELMMGSRETQEYHWLGAVHVKDVAKAHVLLYETPTAAGRYLCTNGIYQFSSFAAMVSELYPEFPIHRFPEETQPGLTACKDAAKRLIDLGLVLTPIQDAVREAVESLIAKGFLQCTPSQS

SEQ ID NO: 44060 - protein, 385 aa, Glycine max; identical to SEQ ID NO: 44000
  Clone ID: 700840078_FLI.pep

SEQ ID NO: 44061 - protein, 254 aa, Glycine max
  Clone ID: 700840115_FLI.pep
KFPLNCPPLTRIYFLFLFQEIVSIYPVLSPPNLTPAQSNRVCNALALLQCVASHPDTRMLFLNAHIPLYLYPFLNTTSKSRPFEYLRLTSLGVIGALVKVDDTEVISFLLSTEIIPLCLRTMEMGSELSKTVATFIVQKILLDDVGLDYICTTAERFFAVGRVLGNMVAALAEQPSSRLLKHIIRCYLRLSDNPRACDALRSCLPDMLRDATFSTCLREDPTTRRWLQQLLHNVGVNRVPALQAGGGFDHMIVT

SEQ ID NO: 44062 - protein, 165 aa, Glycine max
  Clone ID: 700840639_FLI.pep
AAVNALQHQPIVNAVIDGDDIIYRDYIDISIAVGTPKGLVVPVIRNADTMNFADIEKQINTFAKKANDGSLSIDEMAGGTLTISNGGVYGSLLSTPIINPPQSAILGMHSIVSRPTVVGGNIVPRPMMYVALTYDHRIIDGREAVFFLRRIKDIVEDPRRLLLDI

SEQ ID NO: 44063 - protein, 61 aa, Glycine max
  Clone ID: 700808473_FLI.pep
ETIEGGRTTKQQFHYSFLEVLEFSSCQVACHCLSYNVVSSNSFLRFSKSSFFRIRSTPNTA

SEQ ID NO: 44064 - protein, 204 aa, Glycine max
  Clone ID: 700785931_FLI.pep
AAMAFAVTPKIITVSFDKQNQRRSFEGLFGKRYRVRVKRSQDHSVKCGIERSSSDGKKGGGGGGVSNSNYVVPLDNMANSSCITRPLAEILRDLNKRIPDTIVKHDRFIPWYHANRMLSFYAPGWCGEIRDVIFSDNGSVTVVYRLTVRGSDGEAYRESTGTISPSDGSIGDPVSAAEEIAFCKSCARFGLGLYLYHEDQMSNF

SEQ ID NO: 44065 - protein, 248 aa, Glycine max
  Clone ID: 700786118_FLI.pep
SNTEVKRETMANVSIPLPRNGFSKPNYSTKRPCFTPSASTLRISCSGVAEFDGSHQKKGGLFNFNGIKGVACGILAACAVTSAAFPVTAATQRLPPLSTEPNRCERAFVGNTIGQANGVYDKPLDLRQCDFTNEKTNLKGKSLSAALMSDAKFDGADMTEVVMSKAYAAGASFKGVDFSNAVLDRVNFEKADLEGAIFKNTVLSGSTFDDAKLDNAVFEDTIIGYIDLQKLCTNKTIGDEWRVELGCR

SEQ ID NO: 44066 - protein, 483 aa, Glycine max; identical to SEQ ID NO: 43780
  Clone ID: 700786227_FLI.pep

SEQ ID NO: 44067 - protein, 245 aa, Glycine max
  Clone ID: 700786691_FLI.pep
NMGFEETELRLGLPGNVGGTGTEEVLIRKRGFSETETETEEDESATTVDLMLNLSSKEAAAAADPTDKHKTLPKEKTLLPADPAKPPAKAQVVGWPPVRSFRKNMLAVQKSVGEENEKNSSSPNASFVKVSMDGAPYLRKVDLKMYKSYRELSDSLGKMFSSFTIGNCESQGMKDFMNESKLNDLLNSSDYVPTYEDKDGDWMLVGDVPWEMFVESCKRLRIMKGKEAIGLGLAPRAMAKSKNRS

SEQ ID NO: 44068 - protein, 442 aa, Glycine max
  Clone ID: 700789722_FLI.pep
ELYPVLESIQKYLWPRLCKLDQRTLYELHYQLITFGKVFCTKSKPNCNACPMRGECRHFASAFASARLALPGSEQKSIVITTGNNATEQNPSLVINQLPLLLPENINQAELQQTEVIRQLEAKSEINISQPIIEEPATPEPECSQVSENDIEDTFNEESCEIPTIKLDIEEFTLNLQNYMQENMELQEGEMSKALVALHPGAACIPTPKLKNVSRLRTEHYVYELPDSHPLLNGWNKREPDDPGKYLLAIWTPGETADSIQPPESKCSSQECGRLCNENECFSCNSFREASSQIVRGTLLIPCRTAMRGSFPLNGTYFQVNEVFADNDSSLNPISVPRSWIWNLDRRTVYFGTSIPSIFKGLSTREIQQCFWRGYVCVRGFDREKRAPRPLLARLHFPVSRLPKNRDKTQQESASANSQGLNFKQNPEQPELLSNIRQTGGS

SEQ ID NO: 44069 - protein, 489 aa, Glycine max
  Clone ID: 700789817_FLI.pep
VQEKLNELLDGDGGISKRKDATKGYLKLLFLTVASGDRINGEAIQSNRDLSMILDALLKTKSRAVLNDIINKNGLQMLHNIMKQYRHDFKKIPILRKLLKVLEFLEASKILTSEHINGGPPCHGMESFRESMLSLTEHEDKQVHQIARNFRDRWFPRHARKHGYMDRDDNRVESHRSFKCNRFSASHSQRHEQDLRTTEAIDCSQQAMLVTTPVDAETWEGCPVQSLDGVEIKRAKKRKRKSRWDQPADTNSHSDAVMSSIGESQNIPEDGPPGFSCPVGSLNASLNSGNLALQNASRSGCPSDIVIGHPKEKFNSHLPVSYGMPWSAQQYGTPHAEFPECWVTAPGMPFNPFPPLPPYPRDNKDCQPSNTTNAMIIDQPAEVKQGDTSGMVNCCSDDMIPSTTGVNSEDSNLLFEDDKHISKRLKGDSNDLGTRYFRQQKIHRPWFKRNAWKCDENNSCGDMCSIDVGDVPKESKVTCDAEDAICREE

SEQ ID NO: 44070 - protein, 163 aa, Glycine max
  Clone ID: 700790333_FLI.pep
VLLLLRPANMSSIVQGFSKSLAMTILSEIGDKTFFAAAILAMRHPRRLVLSGCLSALIVMTILSALVGWAAPNLISRTWTHHITTFLFLGFGLWSLKDAIFEQGDAEELAEVEAKLDKDWKASNGATKNSNKDDDATKKHKRSFLSQFFFSYLFTGIFNHLFW

SEQ ID NO: 44071 - protein, 294 aa, Glycine max
  Clone ID: 700790363_FLI.pep
YSVCSAVGVLPLSLQYGFSVIEKFLKGASSIDQHMYSEPFERNLPVLLGMLSVWNVSFLGYPARAILPYSQALEKFAPHIQQVSMESNGKGVSIDGVPLPFEAGEIDFGEPGTNGQHSFYQLIHQGRVIPCDFIGVVKSQQPVYLSGEVVSNHDELMSNFFAQPDALAYGKTAEQLQKENVPPHLVPHKTFSGNRPSLSLLLPSLNAYNIGQLLAIYEHRVAVEGFIWGINSFDQWGVELGKSLASQVRKQLNASRTKGEPVQGFNFSTTAMLTRYLQASADVPADLPTRLPQI

SEQ ID NO: 44072 - protein, 169 aa, Glycine max
  Clone ID: 700754394_FLI.pep
ITKHHPQPPIIIFTTTTTTTTSSTLTTNPSCQLDIFGHNSYTLSVNGTQISILKESNKVCLSSFLQCKHSMALETQISLEVLSNFTNQPLEGELPDQKLGTLLVFPNLTKSNGTRTITMWLLHTTSSWCRLTCSLGCELLPRCLSSCGLTSSLLRTCHLEQLFFFFPTV

SEQ ID NO: 44073 - protein, 78 aa, Glycine max; identical to SEQ ID NO: 43932
  Clone ID: 700757871_FLI.pep

SEQ ID NO: 44074 - protein, 439 aa, Glycine max
  Clone ID: 700760275_FLI.pep
CSILHSTHTRRIMASILHYFLALSLSCSFLFFLSDSVTPTKPINLVVLPVQNDGSTGLHWANLQKRTPLMQVPVLVDLNGNHLWVNCEQQYSSKTYQAPFCHSTQCSRANTHQCLSCPAASRPGCHKNTCGLMSTNPITQQTGLGELGEDVLAIHATQGSTQQLGPLVTVPQFLFSCAPSFLVQKGLPRNTQGVAGLGHAPISLPNQLASHFGLQRQFTTCLSRYPTSKGAIIFGDAPNNMRQFQNQDIFHDLAFTPLTITLQGEYNVRVNSIRINQHSVFPLNKISSTIVGSTSGGTMISTSTPHMVLQQSVYQAFTQVFAQQLPKQAQVKSVAPFGLCFNSNKINAYPSVDLVMDKPNGPVWRISGEDLMVQAQPGVTCLGVMNGGMQPRAEITLGARQLEENLVVFDLARSRVGFSTSSLHSHGVKCADLFNFANA

SEQ ID NO: 44075 - protein, 218 aa, Glycine max
  Clone ID: 700763650_FLI.pep
EEEEEEEDEKPQCKGKDKHCQRPRGSQSKSRRNGIDETICTMRLRHNIGQTSSPDIYNPQAGSVTTATSLDFPALSWLRLSAEFGSLRKNAMFVPHYNLNANSIIYALNGRALIQVVNCNGERVFDGELQEGRVLIVPQNFVVAARSQSDNFEYVSFKTNDTPMIGTLAGANSLLNALPEEVIQHTFNLKSQQARQIKNNNPFKFLVPPQESQKRAVA

SEQ ID NO: 44076 - protein, 173 aa, Glycine max
  Clone ID: 700832843_FLI.pep
LPMGAITARYLRHIQALGPAWFYAHAGMQVFGFVLGTVGFVIGIRLGQLSPGVEYRLHRKLGMAVFCLGGLQTLALLFRPNTRNKFRKYWKSYHHFVGYSCVVLGFVNVFQGFEVMGASRSYAKLTYCLGLSTLIGLCIALEVNSWVVFCRKSKEDKMRREGLIGTSHKPIHN

SEQ ID NO: 44077 - protein, 329 aa, Glycine max
  Clone ID: 700833279_FLI.pep
NKMASFHIQYSFLVLVLAMVITLMNPTNATLSPHFYDKVCPQALPVIKSVVQRAIIRERRIGASLLRLHFHDCFVNGCDGSILLDDTRNFTGEKTALPNLNSVRGFSVVDEIKAAVDKACKRHVVSCADILAIAARDSIAIYGGPHYWYQVLLGRRDARTASKAAANSNLPPPTFSFSQLVSNFKSHGLNVRDLVALSGGHTIGFARCTTFRNRIYNVSNNIIDPTFAASVRKTCPKSGGDNNLHPLDATPTRVDTTYYTDLLHKKGLLHSDQELFKGKGTESDKLVQLYSRIPLAFARDFKASMIKMGNMKPLTGRQGEIRCNCRRVN

SEQ ID NO: 44078 - protein, 264 aa, Glycine max
  Clone ID: 700835878_FLI.pep
YSLLFRKKKMVQQEVRKGPWTEQEDFKLVSFVGLFGDRRWDFIAKVSGLNRTGKSCRLRWVNYLHPGLKRGKMTPQEERLVLELHSKWGNRWSRIARKLPGRTDNEIKNYWRTLMRKKAQDKKRGEAASSSSSSVDSSISSNNHAVDPHASKKAGEESFYDTGGHGVTASTQDQGQKGEQGLFSMDDIWKDIDNMSEENNTLQPVYEGNSEEGCNFSCPPQVPSPSSWEYSSDPLWVMDEESLFCPLSEPYFSCYAQGSVFLTG

SEQ ID NO: 44079 - protein, 170 aa, Glycine max
  Clone ID: 700836236_FLI.pep
TNEKIPSDDEEISDHQRLLDRLQLYDLIECKVQGDGNCQFRSLSDQLYRSPDHHKFVRQQIVQQLKSYPDLYAGYVPMAYIDYLKNMSKSGEWGDHVTLQAAADWYGVKIFVITSFKDTCYIEILPQIQKSGRVIFLSFWAEVHYNSIYPEGELPSSHTKKKKKWWNFGG

SEQ ID NO: 44080 - protein, 270 aa, Glycine max
  Clone ID: 700764144_FLI.pep
FSKSNSAAEYQAEKMSQEQPRRPKGQNPIKYGDVFVVSGDLAQKPVAPEDAAMMQSAETRVLGQTQPGGAASVMQSAATRNEQAGLVGHRDVTDVTGDRGVTVTETKVPGRRIITEAVGGQVVEQYVEATPVEAGRSSAIKENAITIGEALEATAQTVGQKAVDQSDASAIQAAEVRATGSNVITPGGLAAMAQSAAAYNADCKLDQDKVKLADILAGATAKLPADKAATLQDAEGVACAEVRNNPDATATPGGVAASVAAAARLNENVK

SEQ ID NO: 44081 - protein, 244 aa, Glycine max
  Clone ID: 700837984_FLI.pep
DPIKYGDVFDVYGDLAQMPIAPEDAAMMQSAEARVLGKTQPGGASSVMQSAATRNEQAGLVGHQDVTDITGDHGVTVTETTFHGRRIITEAVGGQVVEQYVEPNPVEAGRTSAIKESAITIGEALEATAQTVGHKPVDQSDASAIQAAEVRATGSNVITPGGLAAMAQSAAAYNADCKHDQDKVKLADVLTGATAKLPADKAATLQDAEGVASAEARNNPDATATPGGVAASVAAAARLNENVK

SEQ ID NO: 44082 - protein, 155 aa, Glycine max
  Clone ID: 700838125_FLI.pep
QEKKKRRVEIPFEEKMASHRQSYEAGQTKGRTEEKTNQTMGNIGEKAQAAKEKTQEMAQAAKEKTQQTAQAAKDKTCDTSQAAKEKTQQNTGAAQQKTSEMGQSTKESAQSGKDNTQGFLQQTGEKVKGAAQGATEAVKQTLGLGEHDQDNRRNY

SEQ ID NO: 44083 - protein, 525 aa, Glycine max
  Clone ID: 700838201_FLI.pep
LSLLGGSWGNQALCATTPFRPPFFTLWRASKQVTMATRDGGMKSTSINGVKMYTIASQQPSLASWLPSSKKQNSHRNVKSYTQNLQLLEDLRFATAATKIKATPDGEYIIASGIYPPQVKVYEVRELGLKFERHLDSEIVDFQVLSDDYSKLAFLCADRSVYLHAKYGKHYSLRIPRMGRDISYDCWSCDLLCAASSPDLYRINLEQGRFLSSLNTQSPALNVVSRSKLHGLVACGGEDGAVECFDMRVRSSVGRIDAVGPSGDVDQEVTALEFDEDGGFLMAVGSSAGKVLIYDLRSSNPVRIQDHMYGSSILDIKWHHTLNYEQPMLITSDNHVVRIWDPETGEGLTSIEPTTGTINDVCTFPGSGLILLALDCSQIPSYFIPSLGPAPKWCSSLENFTEELDMGGQTTIYDHYKFLTKEELERLNLTNLIGTNLLRAYMHGFFINHALYKKAKALVDPFEYEAYIEQQKREKMEAERASRITVRKKLPKVNRALAARLLETEEAENEKRDEDADDGETKKAS

SEQ ID NO: 44084 - protein, 108 aa, Glycine max
  Clone ID: 700841461_FLI.pep
LKANNVFTAPCDTSVLYPQSGGNIHEFTAITPCAVLDVLGPPYSKDDGRDCSFYRDHPYTAFPTADGESGKVKEENDSYGWLEEIEMPENSQMDGIEYLGPPIIETAL

SEQ ID NO: 44085 - protein, 276 aa, Glycine max
  Clone ID: 700841467_FLI.pep
QASTEMEAKRGHALMCLARVSLFLCALTLSAAHGSTTVQDIARKLKLGDNELLRTEKKFKVFMENYGRSYSTEEEYLRRLGIFAQNMVRAAEHQALDPTAVHGVTQFSDLTEDEFEKLYTGVNGGFPSSNNAAGGIAPPLEVDGLPENFDWREKGAVTEVKLQGRCGSCWAFSTTGSIEGANFLATGKLVSLSEQQLLDCDNKCDITEKTSCDNGCNGGLMTNAYNYLLESGGLEEESSYPYTGERGECKFDPEKIAVKITNSPISLLMRTKLPHI

SEQ ID NO: 44086 - protein, 104 aa, Glycine max
  Clone ID: 700841557_FLI.pep
VLKAVVHGDENLFNSYPELQDALVWVYFHSNIPEFNKVECWGPLKEASAPTGGVQEEGLAIPQPCQEECQCCFPPLTLSPIQWSKQVPSRHYEPCDGIGTQQNL

SEQ ID NO: 44087 - protein, 174 aa, Glycine max
  Clone ID: 700787184_FLI.pep
FFADLEMATATYPPPPPYYRLYKDYLQDPNSAPDPPPPIEGTYLCFGANYTTSDVLPTLEEQGVRQLYSKGPNVDFKKELRSLNGELQLHVLELADILIERPSQYARRVEEISTVFKNLHHLLNSLRPHQARATLIHILELQIQRRKQAVEDIKKRREEARRLLNESLATLDGH

SEQ ID NO: 44088 - protein, 361 aa, Glycine max
  Clone ID: 700791036_FLI.pep
SRMAIKAIELLKGSGNHEEIFEVLAAVAASLGDVIDDVNTLQVTPLKGAMTNEVFEVNWPTKSDGHQRRVLVRLYGEGVEVFFNRVDEIQTFECMSKHGQGPRLLGRFTTGRVEEFIHAKTLSAADLRDPEISALIASKMREFHNLHMPGAKKAQLWQRMRKWLSHAKSLCSPKETKNFGLDNLDAEINMLVELLSQGNQQIGFCHNDLQYGNIMMDEDTRAITLIDYEYASYNPIGYDLANHFCEMVANYHSDEPHVLDYSKYPGLEERQRFVYNYLSSEGKKPSNSEVDQLVNLAEKYTLANHLFWGLWGLISSHVNTIDFDYKEYARQRFQQYWLKKPTLLDSPSIVSQDGIANGVNH

SEQ ID NO: 44089 - protein, 460 aa, Glycine max; identical to SEQ ID NO: 43986
  Clone ID: 700791043_FLI.pep

SEQ ID NO: 44090 - protein, 309 aa, Glycine max
  Clone ID: 700791071_FLI.pep
VESILYKLLVAADFNVAAAQQGIIYIDEVDKITKKAESLNISRDVSGEGVQQALLKMLEGTIVNVPEKGARKNPRGDNIQMDTKNILFICGGAFIDLEKTISERRQDSSIGFGAPVRANMRAVGITDSAVTSSLLESVESADLIAYGLIPEFIGRFPILVSLSALTEDQLTMVLTEPKNALGKQYKKLFSMNNVKLHFTENALRLIAKKAMAKNTGARGLRALLESILTEAMFEIPDIKTGSDRVDAVVIDEESVGSLTAPGCGGKILHGDGALKQYLAKMKDSAVNVDVGESDLQEGDLELSSRAISL

SEQ ID NO: 44091 - protein, 395 aa, Glycine max
  Clone ID: 700748595_FLI.pep
GMLSRLMDFLTACWRRRSFSDGKGGSEVTGRKEGLLWYKDAGQHLFGEYSMAVVQANNLLEDQSQIESGPLSLLDTGPYGTFVGVYDGHGGPETSRYVCDHLFQHLKRFASEQKSMSEEVIRKAYQATEEGFLSVVTKQWPMNPQIAAVGSCCLVGVICGGILYIANLGDSRAVLGRVVRATGEVLAIQLSSEHNVARESVRQEMHSLHPDDSKIVVLKHNVWRVKGLIQISRSIGDVYLKKAEFNKEPLYAKFRVREGFKRPILSSDPSISVHEIQQHDQFLIFASDGLWEHLSNQDAVDIVQNNPHNGIARRLIKAALQEAAKKREMRYSDLKKIDRGVRRHFHDDITVVVVFLDSNLVSRASSVRGPPLSVRGGGIPLPSRTLAPCAAPMET

SEQ ID NO: 44092 - protein, 113 aa, Glycine max
  Clone ID: 700748825_FLI.pep
PHSCVESTQRRHPPSCKRSKALLISERVKVWVIYSSTLISFFKYLSTSQGTCDLLLKPPKAVPFQTRPLTNWKGRVDISCPDAATPTITDVPQPLWQHSKAALITETFPMHSK

SEQ ID NO: 44093 - protein, 211 aa, Glycine max
  Clone ID: 700749096_FLI.pep
WPLRHDVASYLQNHLFQNILQQHDFWTETESAVKKAYVETDEKILEQELVLGRGGSTAVTAILIDGQKLVVANVGDSRAIICENGKARQLSVDHEPSKEKKSIERRGGFVSNIPGDVPRVDGQLAVARAFGDRSLKMHLSSEPDVIVQEVDQHTEFLILASDGIWKVMSNEEAVESIRQIKDAQAAAKQLIEEAVCKKSKDDISCIVVRFQ

SEQ ID NO: 44094 - protein, 125 aa, Glycine max
  Clone ID: 700749617_FLI.pep
KCTVLYPASAKASNEIEEGLSNRGFEVTRMNTYTTVPVQHVDHTVLKIALAAPVVTVASPSSIRAWKNLLSDSEWNNSVACIGETTATMARSLGFTNVYYPAQPGIEGWVESILEALGSYDELLR

SEQ ID NO: 44095 - protein, 292 aa, Glycine max
  Clone ID: 700749863_FLI.pep
MGLIRSMRSRSQRVVQEQEAAECVGVVVGDSMRQSCWANMPQELLREVLLRIEASEDTWPPRKSVVSCAGVCRSWRHITKDIVKTPELSSKITFPISVKQPGPRENLLRCFIKRNRSTQTYYLFLSLTSTLAEDGKFLLAARKCRRPTCTDYIISLDADDMSKGSNSYVGKLRSNFLGTKFTIYDSQLPHTGAKIMKSRSTRLVNLKQVSPKVPTGNYPVAHISYELNVLGSRGPRRMHCVMDSIPATAIEPGGVAPTQTEFSLNNIDMFPSFPFFSIKIKSCGKFHVWTIG

SEQ ID NO: 44096 - protein, 366 aa, Glycine max; identical to SEQ ID NO: 37097
  Clone ID: 700750243_FLI.pep

SEQ ID NO: 44097 - protein, 372 aa, Glycine max; identical to SEQ ID NO: 43852
  Clone ID: 700751677_FLI.pep

SEQ ID NO: 44098 - protein, 393 aa, Glycine max
  Clone ID: 700751791_FLI.pep
LAGLTRSSLGVSDSPGDGSQFCLRKSKGHHITMKALILVGGFGTRLRPLTLSVPKPLVDFANKPMILHQIEALKAIGVNEVVLAINYQPEVMLNFLKEFEAKLGIKITCSQETEPLGTAGPLALARDKLIDDSGEPFFVLNSDVISEYPLKEMIEFHKTHGGEATIMVTKVDEPSKYGVVVMEETTGQVERFVEKPKLFVGNKINAGIYLLNPSVLDRIELRPTSIEKEVFPKIAAEKKLYAMVLPGFWMDIGQPKDYISGLTLYLDSLRKKSPSKLASGPHFVGNVIVHETATIGEGCLVGPDVAIGPGCVVESGVRLSRCTVMRGVRIKKHTCISNSIIGWHSTVGQWARVENMTILGEDVHVCDEVYSNGGVVLPHKEIKSNILKPEIVM

SEQ ID NO: 44099 - protein, 418 aa, Glycine max
  Clone ID: 700752432_FLI.pep
MKRRFLLVLLVLYVTVEQSKLLHHVEADGGFVKTRGVQLMLNGSPYYANGFNAYWLMYLASDPSQRNKISSVFQQASNHGLNIARTWAFSDGGYQPLQYSPGSYNDQMFQGLDFAIAEARKYGIKMVLSLVNNYENMGGKKQYVEWARSQGQSINSEDDFFTNPVVKGYYKNHIKAVLTRRNSITGVAYKDDPTIMAWELMNEIRCPSDQSGRTVQAWITEMASYLKSIDGNHLLEAGLEGFYGQSKPESNPNFNVGTDFIANNQIPGIDFATVHSYPDQWISSSGYEDQISFLGRWLNEHIQDAQNTLHKPLLFAEFGISTKSYGGNSTPRDRLFNTVYSAIYSSASSGGAAVGGLFWQLMAQGMDSYRDGYEVVLDESPSTANLIAQESQKLNRIRKMYARLRNIEKWNEAKQIRG

SEQ ID NO: 44100 - protein, 210 aa, Glycine max
  Clone ID: 700756728_FLI.pep
AELMLLAVEGGGFFSASASGYTKGLSLLLLGQRNEDKPMRVAPWNQYQLVDQESDPELQLASTKNRLSRGCASFVCFGRTSAGLDTPSPLKVGPAQQHDVSPGPLVSNKGKDPSAHVDDESDNRKATLKSSIKKPQNRKSVPVEVANEHEASSGQGICTPGGQPERRKVQWTDNCGSELVEIREFEPSEVDGSDDEFDSGNDRTCSCAIM

SEQ ID NO: 44101 - protein, 519 aa, Glycine max; identical to SEQ ID NO: 43902
  Clone ID: 700756934_FLI.pep

SEQ ID NO: 44102 - protein, 199 aa, Glycine max
  Clone ID: 700756960_FLI.pep
EIKVPPFTSANEFKSIEKFKIFNTNNLWVNLNAVKRLVEADALKMEIIPNPKEVDGIKVLQLETAAGAAIRFFDKAIGINVPRSRFLPVKATSDLLLVQSDLYTLEDGFVIRNKARENPENPSIELGPEFKKVSNFLGRFKSIPSIVELDSLKVAGDVWFGAGVILKGKVSIVSKPGVKLEVPDGVAIVDKEINGPEDL

SEQ ID NO: 44103 - protein, 233 aa, Glycine max; identical to SEQ ID NO: 43943
  Clone ID: 700759006_FLI.pep

SEQ ID NO: 44104 - protein, 270 aa, Glycine max; identical to SEQ ID NO: 44080
  Clone ID: 700759066_FLI.pep

SEQ ID NO: 44105 - protein, 263 aa, Glycine max
  Clone ID: 700759079_FLI.pep
FSVDKQIAKNLQGENEGEDKGAIVTVKGGLSVIKPPTDEQQQRPQEEEEEEEDEKPQCKGKDKHCQRPRGSQSKSRRNGIDETICTMRLRHNIGQTSSPDIYNPQAGSVTTATSLDFPALSWLRLSAEFGSLRKNAMFVPHYNLNANSIIYALNGRALIQVVNCNGERVFDGELQEGRVLIVPQNFVVAARSQSDNFEYVSFKTNDTPMIGTLAGANSLLNALPEEVIQHTFNLKSQQARQIKNNNPFKFLVPPQESQKRAVA

SEQ ID NO: 44106 - protein, 276 aa, Glycine max
  Clone ID: 700762391_FLI.pep
QQSYLQGFSRNILEASYDTKFEEINKVLFSREEGQQQGEQRLQESVIVEISKEQIRALSKRAKSSSRKTISSEDKPFNLRSRDPIYSNKLGKFFEITPEKNPQLRDLDIFLSIVDMNEGALLLPHFNSKAIVILVINEGDANIELVGLKEQQQEQQQEEQPLEVRKYRAELSEQDIFVIPAGYPVVVNATSNLNFFAIGINAENNQRNFLAGSQDNVISQIPSQVQELAFPGSAQAVEKLLKNQRESYFVDAQPKKKEEGNKGRKGPLSSILRAFY

SEQ ID NO: 44107 - protein, 229 aa, Glycine max
  Clone ID: 700794645_FLI.pep
IGLNRTGKSCRLRWVNYLHPDLKRGKLTPQEEHLVMDLHSKWGNRWSRIARRLPGRTDNEIKNYWRTHMRKKKAQEKKHASAASPVSSSCQSSLSSNNHVVDSHASKEVGEESCYDTGGYDDGMMMGLIGGEKGYSMDDIWKDIMSEEENNIYNNNLQPVYEGHSEEGCNFSCPPPPMIMPSPPSWDQYNISSQPLWVMDEEESNKMLFPTLSDQYFPYYEQGNAFLTG

SEQ ID NO: 44108 - protein, 164 aa, Glycine max
  Clone ID: 700795673_FLI.pep
RRKKGKGRVDQAGFSSAMRTHTHTYTYTIFSLILLSLFLRTHSEVITLTSDTFNDKIKEKDTAWFVKFCVPWCKHCKNLGSLWDDLGKAMEGEDEIEVGEVDCGMDKAVCSKVDIHSYPTFKVFYDGEEVARYQGTRDVESMKTFVLEEAEKAAAKALESNKEL

SEQ ID NO: 44109 - protein, 637 aa, Glycine max
  Clone ID: 700795853_FLI.pep
LYQTIGDQNFPKKFLMVFTFPTLLSMKLQPLSLLLVMYFCAFATSSEIASEANALLKWKASLDNHSQASLSSWIGNNPCNWLGIACDVSSSVSNINLTRVGLRGTLQSLNFSLLPNILILNMSYNSLSGSIPPQIDALSNLNTLDLSTNKLFGSIPNTIGNLSKLQYLNLSANGLSGPIPNEVGNLKSLLTFDIFTNNLSGPIPPSLGNLPHLQSIHIFENQLSGSIPSTLGNLSKLTMLSLSSNKLTGTIPPSIGNLTNAKVICFIGNDLSGEIPIELEKLTGLECLQLADNNFIGQIPQNVCLGGNLKFFTAGNNNFTGQIPESLRKCYSLKRLRLQQNLLSGDITDFFDVLPNLNYIDLSDNSFHGQVSPKWGKFHSLTSLMISNNNLSGVIPPELGGAFNLRVLHLSSNHLTGTIPLELCNLTYLFDLLISNNSLSGNIPIKISSLQELKYLELGSNDFTGLIPGQLGDLLNLLSMDLSQNRLEGNIPLEIGSLDYLTSLDLSGNLLSGTIPPTLGGIQHLERLNLSHNSLSGGLSSLEGMISLTSFDVSYNQFEGPLPNILAFQNTTIDTLRNNKGLCGNVSGLTPCTLLSGKKSHNHVTKKVLISVLPLSLAILMLALFVFGVWYHLRQNS

SEQ ID NO: 44110 - protein, 237 aa, Glycine max; identical to SEQ ID NO: 39927
  Clone ID: 700796263_FLI.pep

SEQ ID NO: 44111 - protein, 340 aa, Glycine max
  Clone ID: 700796373_FLI.pep
IFEIDVKSADRISDAALESAVLQFIPCIRSGSFADIGPRRYMEDEHIRIDDLSSHLGSLYNFPKPSAFYGVFDGHGGPEAAAYIRKHVIKFFFEDVSFPQTSEVDNVFLEEVEDSLRKAFLLADSALADDCSVNSSSGTTALTALIFGRLLMVANAGDCRAVLCRKGEAIDMSEDHRPIYLSERRRVEELGGYIEDGYLNGVLSVTRALGDWDMKLPKGAPSPLIAEPEFRQVVLTDDDEFLIIGCDGIWDVMSSQHAVSLVRKGLRRHDDPEKCARDLVMEALRLNTFDNLTVIIVCFSSLDHAEPEPSPPRQRKLRCCSLSAEALCSLRSLLEGSASN

SEQ ID NO: 44112 - protein, 480 aa, Glycine max
  Clone ID: 700796917_FLI.pep
EEHGEDFVDMLDGIFSFVLLDTRDNSFIVARDAIGVTSLYIGWGLDGSVWISSEMKGLNDDCEHFECFPPGHLYSSKERGFRRWYNPPWFSEAIPSAPYDPLVLRHAFEQAVIKRLMTDVPFGVLLSGGLDSSLVASITSRYLANTKAAEQWGSKLHSFCVGLEGSPDLKAAKEVADYLGTVHHEFTFTVQDGIDAIEDVIYHIETYDVTTIRASTPMFLMSRKIKSLGVKWVISGEGSDEIFGGYLYFHKAPNKEEFHRETCRKIKALHQYDCLRANKSTFAWGLEARVPFLDKAFINAAMSIDPEWKMIKRDEGRIEKWILRRAFDDEEHPYLPKHILYRQKEQFSDGVGYSWIDGLKAHAAKHVTEKMMLNAGNIYPHNTPKTKEAYYYRMIFERFFPQNSARLTVPGGASVACSTAKAVEWDAAWSNNLDPSGRAALGVHISAYENQNNKGVEIEKIINLWMLLPLVLPSRANTKM

SEQ ID NO: 44113 - protein, 255 aa, Glycine max
  Clone ID: 700830813_FLI.pep
AGALWGLSVSETNSVAIGREGGVAPLIALARSEAEDVHETAAGALWNLAFNASNALRIVEEGGVSALVDLCSSSVSKMARFMSALALAYMFDGRMDEYALVVTSSESISKSVSLDGARRMALKHIEAFVLMFSDLQAFAAAAASSAPAALAQVTEGARIQEAGHLRCSGAEIGRFITMLRNPSSILKACAAFALLQFTIPGGRHAMHHASLMQSLGASRVLRGAAAAATAPLEAKIFARIVLRNLEYHQIEQALA

SEQ ID NO: 44114 - protein, 192 aa, Glycine max
  Clone ID: 700834294_FLI.pep
GGMIFALVYCTAGISGGHINPAVTFGLFLARKLSLPRAIFYIVMQCLGAICGAGVVKGFEGKTKYGALNGGANFVAPGYTKGDGLGAEIVGTFILVYTVFSATDAKRSARDSHVPILAPLPIGFAVFLVHLATIPITGTGINPARSLGAAIIFNKDLGWDEHWIFWVGPFIGAALAALYHQVVIRAIPFKSK

SEQ ID NO: 44115 - protein, 394 aa, Glycine max
  Clone ID: 700834748_FLI.pep
TIARRLGQQSLRPSTSLKSIYPISDHHYGMDHERYVSTLATKGVGHLVRKGTGGRSSVSGIIATVFGATGFLGRYVVQQLAKMGSQVLVPFRGSEDNPRHLKLMGDLGQIVPMKYNPRDESSVKAVMAKANVVINLIGRDYETRNYSFEEVHYHMAEQLAKISKEHGGILRFIQVSCLGASPSSPSRMLRTKSAAEEMILRELPEATILKPAVMIGTEDRILNPWAHFAKKYGFLPLFGDGSTKIQPVYVIDVAAALTSLLKDDGTSMGKIYELGGPEIFTVHELADVMFDTIREWPRYVKVPFPIAKALATPREILLNKVPFPLPVPEILNLDKIQALTTDTVVSENALTFNDLGIVPHKLKGYPIEFLISYRKGGPQFGSTISERVTPDSWP

SEQ ID NO: 44116 - protein, 385 aa, Glycine max; identical to SEQ ID NO: 44000
  Clone ID: 700836884_FLI.pep

SEQ ID NO: 44117 - protein, 229 aa, Glycine max
  Clone ID: 700836967_FLI.pep
NLDSRTGKCSTSGKQSSKEELSRCKNICAYPSYKISKAFWPHWAYRMFDSYSLAQRAADMWKRIVGMPDMDSLIKKPDILSFHIASKIPVSESTRQELLDIDGIAYRLRREIELLESIDLIRCKSCETIIAKRSDMLVMSSEGPLSAYVNPGGYVHEIMTLYKANGLALVGSAATDYSWFPGYAWTIATCATCKTQMGWLFTARNKQLKPSYFWGIRSCQLAEEIRQNL

SEQ ID NO: 44118 - protein, 121 aa, Glycine max
  Clone ID: 700837002_FLI.pep
PSPRVSCTLFDLSCNTDSTTAFSDSRDGSGNPTAQISRPQNPRDAGAAAYLPLLHLHNLHHLLPLSLASLQSPHQTASDSSPPAPSPPRPHRSFASPASNPAASPPSCRTLNFRARHRRRL

SEQ ID NO: 44119 - protein, 177 aa, Glycine max
  Clone ID: 700839140_FLI.pep
QGEYNVRVNSIRINQHSVFPLNKISSTIVGSTSGGTMISTSTPHMVLQQSVYQAFTQVFAQQLPKQAQVKSVAPFGLCFNSNKINAYPSVDLVMDKPNGPVWRISGEDLMVQAQPGVTCLGVMNGGMQPRAEITLGARQLEENLVVFDLARSRVGFSTSSLHSHGVKCADLFNFANA

SEQ ID NO: 44120 - protein, 267 aa, Glycine max
  Clone ID: 700839183_FLI.pep
SNSAAEYQAEKMSQEQPRRPKGQNPIKYGDVFVVSGDLAQKPVAPEDAAMMQSAETRVLGQTQPGGAASVMQSAATRNEQAGLVGHRDVTDVTGDRGVTVTETKVPGRRIITEAVGGQVVEQYVEATPVEAGRSSAIKENAITIGEALEATAQTVGQKAVDQSDASAIQAAEVRATGSNVITPGGLAAMAQSAAAYNADCKLDQDKVKLADILAGATAKLPADKAATLQDAEGVACAEVRNNPDATATPGGVAASVAAAARLNENVK

SEQ ID NO: 44121 - protein, 180 aa, Glycine max
  Clone ID: 700839582_FLI.pep
QKQITITNKLYFRQPSIFLKVMDFRVMGLEPPLFHTLQHMMDMSEDAAGENKTYSAPTRSYVRDAKAMAATPADVKEYPNSYVFEIDMPGLKSGDIKVQVEDDNVLLISGERKRDEEKEGVKYLRMERRVGKFMRKFVLPENANTDAISAVCQDGVLSVTVQKLPPPEPKKPRTIEVKVF

SEQ ID NO: 44122 - protein, 154 aa, Glycine max
  Clone ID: 700789208_FLI.pep
SKLKFYFNNLHNRSLHVDYRDKLQFWSKIKTKYTYKITSKFYPSTNDTSIGILFHAWSIVVCGHVGVICPISLDPFQNRIWGWLFLLIILLLLFFLSFFLLSLLFLFSLLLCFCFLGILLLLRFLHWSNCYYVCLPVFAQFAHHSYRINCSYHC

SEQ ID NO: 44123 - protein, 257 aa, Glycine max
  Clone ID: 700789335_FLI.pep
FVCMVQGIIPEKKKSMKRGRVHSVFKAKEYNATIEFYWAPFLVESNTDIRIIGDPKKRIIKVDQITERAKNWTGVDILVFNTYVWWMSGLRLKALWGSFANGEEGFEELDTPVAYKLGLRTWANWVDSTIDPNKTRVFFTTMSPAHTKSADWGHKDGIKCFNETRPVKKKNHWGSGSNKDMMSVVAKVVKRMKVPVNVINITQISEYRIDAHSSVYTETGGKILSEEERANPLNADCIHWCLPGVPDTWNQIFLAML

SEQ ID NO: 44124 - protein, 146 aa, Glycine max
  Clone ID: 700789480_FLI.pep
GKLTEKADVYSFGVLVIEIVSGKKISSYIMNSSSLLQTVWSLYGSNRLYEVVDPTLEGAFPAEEACQLLQIGLLCAQASAELRPSMSVVVKMVNNNHEIPQPAQPPFINSSSSEFSKSGLPGYNFQPGSNTQSSGNTISESQIEPR

SEQ ID NO: 44125 - protein, 96 aa, Glycine max
  Clone ID: 700789481_FLI.pep
VHIPQGLPHASIVIQVSEHRPSFWQRSGRCCAVRVLSLLARPVIVHLARCKFHRECQNSGDGLSCWPLHSNLLQNDTLFAEHEVTEPMLKISFCCH

SEQ ID NO: 44126 - protein, 598 aa, Glycine max
  Clone ID: 700864136_FLI.pep
HDTAHWEELYNTRERARQLLANGSSEIPEETTFTNVEQFLEPLELCYRSLCACGDQPIADGSLLDFLRQVSTFGLSLVRLDIRQESDRHTDVMDAITNHLEIGSYREWSEERRQEWLLSELSGKRPLFGPDLPKTEEIADVLETFHVIAELPSDSFGAYIISMATAPSDVLSVELLQRECHVKQPLRVVPLFEKLADLEAAPAAVARLFSIDWYRDRINGKQEVMIGYSDSGKDAGRFSAAWALYKAQEELIKVAKEFGVKLTMFHGRGGTVGRGGGPTHLAILSQPPDTIHGSLRVTVQGEVIEQSFGEEHLCFRTLQRFTAATLEHGMHPPVAPKPEWRALMDEMAVIATEEYRSIVFQEPRFVEYFRCATPELEYGRMNIGSRPSKRKPSGGIESLRAIPWIFAWTQTRFHLPVWLGFGAAFSHVIKKDPKNLQMLQDMYNQWPFFRVSLDLVEMVFAKGDPGIAALYDKLLVSEELWPFGERLRSMFEETKSLLLQVAGHKDLLEGDPYLKQRLRLRDSYITTLNVLQAYTLKRIRDPDYHVKLRPHLSKDYMESNKPAAELVKLNPTSDYAPGLEDTLILTMKGIAAGMQNTG

SEQ ID NO: 44127 - protein, 116 aa, Glycine max
  Clone ID: 700864767_FLI.pep
NSTYTLDSLLTREPQRSRSYFIKSKKTNPFQRLCNSIDGSKFLDRVYITPITIPRNIRGSILCMLKCASAKAIELTSIAHHTGMYLVRDGSRKPRKTISSHTGAQTDTTVAYKSIA

SEQ ID NO: 44128 - protein, 170 aa, Glycine max
  Clone ID: 700865210_FLI.pep
FPLRTLDHSHALLYPLLHRRSLQRSQQHRHPMANAASGMAVHDDCKLRFLELKTKRTHRFIVFKIEEQQKQVIVEKLGEPAQGYEDFTASLPADECRYAVYDFEYLTEGNVPKSRIFFIAWSPDTSRVRSKMIYASSKDRFKRELDGIQVELQATDPTEMGLDVFKSRAN

SEQ ID NO: 44129 - protein, 197 aa, Glycine max
  Clone ID: 700865758_FLI.pep
IIFQETALNHVTSSGIGGEGFGATREMSLRKLIWVVTRIQVQVQRYNKWGDEIEVDTWVDAAGKNGMRRDWIIRDHYTKEIITRATSTWVIMNRQTRRLSKIPEEVKQELLPFYLNRLAVPTEETDCEKIDKLTDETAQIRILSGLAPRWNDMDANQHVNNVKYIGWILEVRIRNGKTNYLCGKDCNTLFLIDVTRF

SEQ ID NO: 44130 - protein, 257 aa, Glycine max
  Clone ID: 700865886_FLI.pep
SITSESHNQIVGNGLILGTGLIPYCATFFVFTDYMRGAIRLSALSEAGVIYVMTHDSIGLGEDGPTHQPIEHLASFRAMPNILMLRPADGNETAGAYKVAVLNRKRPSILALSRQKLPQLPGTSIEGVEKGGYTISDNSTGNKPDVILIGTGSELEIAAKAADDLRKEGKAVRVVSLVSWELFDEQSEAYKESVFPAAVSARVSIEAGSTFGWEKIVGAKGKAIGIDRFGASAPAGRIYKEFGITKEAVVAAAKELI

SEQ ID NO: 44131 - protein, 369 aa, Glycine max
  Clone ID: 700871050_FLI.pep
DNMLPSTNEAQRLVGLLQNCKVRVFKDSGHTLLLEDGIGLLTIIKGTCMYRRSRRHDLVRDFIPPSMTEFRYAMDQVVGSFRSATGSVFFSTLEDGKIVKGLSGVLDEGPVLYVGYHMLLGLELISLTDGFLSEKGIALRGIAHPDLFRPEVESWSSEFSMFDWVKIFGGVPVSASNIFKLLSTKSHVLLYPGGAREALHYKGEEYKLIWPDHPEFVRMAARFGATIVPFGAVGEDDIAELVLDYNDLMKIPIVNDQIRNMNRDSVKFRDETSGEVANQNLSFPVLLPKIPGRFYFLFGKPIRTKGMDKMLKDRESANQMYLQIKSEVEHNLNYLIKKREEDPYRNFIDRKMYQIFYPPETDSTPSFNP

SEQ ID NO: 44132 - protein, 86 aa, Glycine max
  Clone ID: 700871346_FLI.pep
CFSNNIHLAYQKKKKETGQCHIVPYQFTFACTEIGYTASQNLIQPHSKYLINKESSMHPPTWDQGLNGEILTLKPFKSATAHIYIC

SEQ ID NO: 44133 - protein, 365 aa, Glycine max
  Clone ID: 700871534_FLI.pep
KMEKYQIWSRRIALAAFAFALLFQSASADDVVVLSEDNFEKEVGQDRGALVEFYAPWCGHCKKLAPEYEKLGSSFKKAKSVLIGKVDCDEHKSLCSKYGVSGYPTIQWFPKGSLEAKKYEGPRTAESLVEFVNTEGGTNVKIATVPSNVVVLTPENFNEVVLDEAKDVLVEFYAPWCGHCKSLAPTYEKVATAFKLEEDVVIANLDADKYRDLAEKYDVSGFPTLKFFPKGNKAGEDYGGGRDLDDFVAFINEKSGASRDGKGQLTSQAGIVESLDVLVKEFVAASDEEKKSVFTRLEEEVVKLKGSASRYGKIYLKAAKNYREKGSDYAKNEIQRLQRILDKSISPAKADELTLKKNILSTYAA

SEQ ID NO: 44134 - protein, 131 aa, Glycine max
  Clone ID: 700875949_FLI.pep
PKNALGKQYKKMFQMNGVKLHFTENALRSIARKAISKNTGARGLRSILENVLVDAMYEIPDIRTGDDVIDAVVVDEEAVGGEGRGRGAKILYGKDALDRYLSEQKNDSETMEASAADNEADTELPSIVASM

SEQ ID NO: 44135 - protein, 213 aa, Glycine max
  Clone ID: 700876081_FLI.pep
AIKSSLKIFVIPCPTPYPENMVAEREVNGNGVGEGRTTLIFTYGTLKRGFSNHPLLQDLIRSGDASFVGTYRTAAKYPLVCGPYKVPFLLNIPGSGHGVHGELYSVSTRGLERMDELEGTSRAHYERLPIKVVPAAEEEDDDGFDGEEEAAAGLTCAEAYYAHGNYAMELWKKNGKRGLRCYSQKETIGYVKRKDRPQHLTFLDHIRFFLSSN

SEQ ID NO: 44136 - protein, 88 aa, Glycine max
  Clone ID: 700844589_FLI.pep
MASLSSSLVLLLAALILSPQVLADYEKPPIYKPPVYTPPVYKPPVEKPPVYKPPVYKPPVYKPPVYKPPVKKPPIYKPPYPKYPPGSN

SEQ ID NO: 44137 - protein, 387 aa, Glycine max
  Clone ID: 700845218_FLI.pep
HLQCQGVGGDALPSYMRGAVYWEPNKPLTIEEFNMPRPKAGEVLIKTKACGVCHSDLHVMKGEIPFSSPCVVGHEITGEVVEHGALTDSKTIERLPVGSRVVGAFIMPCGNCSYCSKGHDDLCEAFFAYNRAKGTLYDGETRLFFRNSGKPAFMYSMGGLAEYCVVPANGVSVLPDSLPYTESAILGCAVFTAYGAMAHAAQVRPGDSVAVIGTGGVGSSCLQIARAFGASDIIAVDVRDEKLQKAKTFGATHTVNSAKEDPIEKILEITGGKGVDVAVEALGKPQTFAQCTQSVKDGGKAVMIGLAQAGSLGEVDINRLVRRKIQVIGSYGGRARQDLPKLIRLAETGIFNLGHAVSRTYTFDEAGKAFQDLNEGKIVGRAVIEII

SEQ ID NO: 44138 - protein, 293 aa, Glycine max
  Clone ID: 700845315_FLI.pep
DQSLVKEKKTSSKLRQLLSDKLRVVIENKDMVFSSLRRYFSMRHQSSKVQALYEHCKTILSPSGSPPPSSQALQKLSSILDTIQPADVGLKEEIADDDRGHGFFGANALSRLARWAQPITYVDIHECDSFTMCIFCFPTSSVIPLHDHPGMTVFSKLLYGSLHVKAYDWVEPPCIIESKEPGYAQVRLAKLAVDKVLNAPCDTSVLYPKHGGNLHCFTAVTPCAMLDILTPPYREEEGRRCTYYHDYPYSAFSVANAPICDGEEEEYAWLTELESPSDLYMRQGVYAGPAIQL

SEQ ID NO: 44139 - protein, 170 aa, Glycine max
  Clone ID: 700845470_FLI.pep
FPLRTLDHSHALLYSLLHRRSLEQPQHHLHHMANAASGMAVHDDCKLRFLELKAKRTHRFIVFKIEEQQKQVIVEKLGEPAQGYEDFTASLPADECRYAVYDFEYLTEGNVPKSRIFFIAWSPDTSRVRSKMIYASSKDRFKRELDGIQVELQATDPTEMGLDVFKSRAN

SEQ ID NO: 44140 - protein, 154 aa, Glycine max
  Clone ID: 700848441_FLI.pep
NCGFDLNFSGFVDFVAVIKRMASDRKLHTFEEVAKHNQTKDCWLIISGKVYDVTPFMEDHPGGDEVLLSATGKDATNDFEDVGHSDSARDMMEKYYIGEIDASTVPLKRTYIPPQQAQYNPDKTPEFVIKILQFLVPLLILGLAFVVRHYTKKE

SEQ ID NO: 44141 - protein, 474 aa, Glycine max
  Clone ID: 700849068_FLI.pep
CSSMEDLENLALGGMSVARLNMCHGTREWHRDVIRKIKKLNEEKGFCVSVMIDTEGSQIHVVDHGAPSSVKVEEGSNWVFTAEHYEGSRPFTVQTNYRGFSEGTEVGDELVIDGGMACFEVTEKTGNDLHCKCIDAGLFLPGAKFSFWRDGKLVRGNNKLPTLSTKDWADIDFGIAEGVDFFALSFVNHADSVKDLKMYLSTKSTKSIKVLAKIESLESLHKLEEIVQASDGIMVARGDLGVEIPLEQIPTVQEDIIYVCRQLNKPVIVASQLLESMVEYPTPTRAEVADVSEAVRQYADALMLSGESAIGSYGRKALAVLDMASSRMESWSREENRQSLVSHHQLGESLPECITEQICNCAVEMANNLGVDAIFVYTKYGHMASLLSRNRPNPPIFAFTNDDSTRMALTLQWGVVPILVDLSDDAESNISKSVQLMKSRGLISQGDVVLVVSDVAPTRASPMAFQSIQVKTII

SEQ ID NO: 44142 - protein, 430 aa, Glycine max
  Clone ID: 700904771_FLI.pep
RLISGAPHLNINLEMNYWPALPCNLSECQEPLFDYISLLSVNGSKTAHVNYQANGWVAHSKSDIWARTSAGQGDVVWALWPMGGAWLCTHLWEHYAYTMDEDFLKYKAYPLMEGCVSFLLSWLIEDSEGYLETNPSTSPEHYFIAPNGEPACVSQSSTMDVAIINEVFSTFLSAAEVIGRTKDNIVGEVRKAQPRLRPINIAQDGSIMEWVKDFKDPEVHHRHLSHLFGLFPGHTITFKETPALIEAAEKSLYKRGEEGPGWSTTWKTACWARLQNSSNAYKMIKHLINLVDPDHERPFQGGLYSNLFAAHPPFQIDANFGFAAAVAEMLVQSTLSDLFLLPALPWEKWPNGSLKGLKARGGTTVNIYWREGDLQEVGIWSEDQTRTTLRKRIHYRGTMVTADLVSGLFYKFNGQLKCLNTCSLSEMPCS

SEQ ID NO: 44143 - protein, 367 aa, Glycine max
  Clone ID: 700904810_FLI.pep
LKSCDYRTLAIGDGGNDVRMIQQADIGVGISGREGLQAARAADYSIGKFRFLKRLILVHGRYSYNRTAFLSQYSFYKSLLICFIQILFSFISGVSGTSLFNSVSLMAYNVFYTSVPVLVSVLDKDLSEKTVMQHPQILFYCQAGRLLNPSTFAGWFGRSLFHAIVVFVISIHAYAYDKSEMEEVSMVALSGCIWIQAFVVTMETNSFTILQYMAIWGNLAAFYVINWIFSALPSSGMYTIMFRLCRQPSYWIAIFLMVAAGMGPILAIKYFRYTYRPSKINALQQAERLGGPILSLGTIEPQLRSVEKDVSTLSITQPKTRNPVYEPLLSDSPNATRRSFGAGTPFDFFQSQSRLSLSSYTRNCKDN

SEQ ID NO: 44144 - protein, 145 aa, Glycine max
  Clone ID: 700905368_FLI.pep
STQHIEIGRQNILTPNKMSINSESTPPPLIGKIGPYTVFMTPPSTPKPSDDHPVTTKIAPPPPQIPKAVPSPKPVSDPDDSVFGFFRNAVTKVQTAHSSLDDHLARWFGLNQSKYQWALDDYYESKGMEKGDIKVKEISSKVQSV

SEQ ID NO: 44145 - protein, 270 aa, Glycine max
  Clone ID: 700851401_FLI.pep
FSKSNSAAEYQAEKMSQEQPRRPKGQNPIKYGDVFVVSGDLAQKPVAPEDAAMMQSAEARVLGQTQPGGAASVMQSAATRNEQAGLVGHRDVTDVTGDRGVTVTETKVPGRRIITEAVGGQVVEQYVEATPVEAGRSSAIKENAITIGEALEATAQTVGQKAVDQSDASAIQAAEVRATGSNVITPGGLAAMAQSAAAYNADCKLDQDKVKLADVLAGATAKLPADKAATLQDAEGVACAEVRNNPDATATPGGVAASVAAAARLNENVK

SEQ ID NO: 44146 - protein, 385 aa, Glycine max; identical to SEQ ID NO: 44000
  Clone ID: 700851455_FLI.pep

SEQ ID NO: 44147 - protein, 272 aa, Glycine max
  Clone ID: 700851854_FLI.pep
TVIVVVDSSTMSQEQLKKPQGEQDPIKYGDVFKVSDELAFKPIAPRDAALMQATENQALGQTQKGGPASVMQSAATENLRAGVVGRQDISDVARNEGVSVTETKVGCHRVITEFVGRHVVGQFVEPDVPMNTPGTALERDAITIGEALEASAIAGASDKPVDESDAAAIQAAEMRATGKNETEPGGLGARAQSAATRNTRTVSHSHKTTLSDVLTDAKEKLPADKAVTREDAEGVIGAELRNKLDMRTTPGGVAASMAAAATLNQNRQVTDA

SEQ ID NO: 44148 - protein, 270 aa, Glycine max; identical to SEQ ID NO: 44145
  Clone ID: 700852044_FLI.pep

SEQ ID NO: 44149 - protein, 186 aa, Glycine max
  Clone ID: 700853905_FLI.pep
PFIEENKHQDRPQCTTPTLINKMKTKKRKRKKIPKLCNKVSSHSYQTYIDSYGRHVVTNLYSNMHSCAHTHNIKLIQTLQVLMMLHHHQTTSICLTFLFSGFFSTLGTVTFSTPFSSVQLIWLGLASSGSRKRRRKLPHCLSTRCHLSFWSSFSFTLSPLICRILFSSTCTFRSSFFTPGRSARKI

SEQ ID NO: 44150 - protein, 183 aa, Glycine max
  Clone ID: 700854135_FLI.pep
ENPVHAVKKACKATDDEILENIADSRGGSTAVAAILINGVKLLVANIGDSRAISCKNGRAKPLTVDHEPEKEKDLIESRGGFVSKKPGNVPRVDGQLEMTRAFGDGKLKEHITAEPDVTIRKIDEDTEFIILASDGLWKVMTNQEACDCIRDEDDAQKASKKLVKEAKSQGSYDDISCIVIIF

SEQ ID NO: 44151 - protein, 159 aa, Glycine max
  Clone ID: 700854393_FLI.pep
ERYQQEKKKRRVEIPFEEKMASHRQSYEAGQTKGRTEEKTNQTMGNIGEKAQAAKEKTQEMAQAAKEKTQQTAQAAKDKTCDTSQAAKEKAQQNTGAAQQKTSEMGQSTKESAQSGKDNTQGFLQQTGEKVKGAAQGATEAVKQTLGLGEHDQDNRRNY

SEQ ID NO: 44152 - protein, 180 aa, Glycine max
  Clone ID: 700854789_FLI.pep
LDKERNPRDGFDRVRACTRLRSLHPTDLLLSIVLDLTRLVHDLVRRAVQLIRARWVLPGDVPVDPRQHRDRRHTEPAGGKEPQAQQRDGDHRGDENRTEDDERWCDDGEGDDGAGKDQRGEDQEGAARGDGGGRLDDLSGVASLLFVWIIRVSVRVLVLLLVVKLSHSVGIIKMKDKSFE

SEQ ID NO: 44153 - protein, 170 aa, Glycine max
  Clone ID: 700855064_FLI.pep
TKTRIRHHSSTSRCGILGGIPEDILKRRAKLFAAELVILQGIPIVLLDLHHHKRRRHGVDIRGNRQLPLPPTLLTLKPHLGLATPDVELPGLGHLLQPRNDGAGRPRGGEPHLLPPLVLEQGRQIEPLRQGNYVESIDGLQLALNLLLLQIHLFGSKLPRHRFLKPRRLH

SEQ ID NO: 44154 - protein, 142 aa, Glycine max
  Clone ID: 700889272_FLI.pep
LLVILPILTFAFHKFCQRRFEPAFRKYPLEEAMSKDLLEKSTEPDLNIEAYLADAYLHPIFRSFEVDDELVEVRVDNHQTNVADSQPSEPSSPSPPHHVQQPSPPHHIHEPSPPQYSEYQTSPPSYYYQYHPPSPPHYVYQY

SEQ ID NO: 44155 - protein, 162 aa, Glycine max
  Clone ID: 700889335_FLI.pep
DWMSVIEKEDWKSVTDLVTNAKQFVSSVQDVARRLADYANFRRNKSLAVGTADKELPVATEAPLPSKAAKENSGVTKVEGTKPAVIEELFIPGTVYYLKRNLASQNVGKDFFTLYKREPGEHFQKVIFSGNFITDHRCDSHYYALRDVLKGLPWCGKEGIFK

SEQ ID NO: 44156 - protein, 202 aa, Glycine max
  Clone ID: 700889465_FLI.pep
KMATLPLLRPCCFLPTPTLKPSLTRPTPFLPLKSKKNPQNGAVGTRMSNTATPPPTERLISIASYALPFFNSLQYGRYLLAQNPTLAVLFDPIVPLLAFYRSIPYSSFVAFFALYLGIVRNPSFPRYVRFNAMQAVTLDVLLVLPLLFHRIFSPARGGPILVWSSNAIFIFSLICFVYSVASCVLGRTPHLPFVADAASRQI

SEQ ID NO: 44157 - protein, 113 aa, Glycine max
  Clone ID: 700889518_FLI.pep
IDKIRSDTIHSLVKVICLPHRSSGPLISLSTMATPSGTSSFTPGFDTMLTFPLRITPAPNHTSPATFRLSSSTILGIDLKRPKKLLTFLNSGPSSIEGFSGFSLALFRMTNPS

SEQ ID NO: 44158 - protein, 151 aa, Glycine max
  Clone ID: 700889715_FLI.pep
IELLLPITCGSDLEMADLPGYLHACLNTGKLASLAILVSGGIVLQILACALYNNWWPMLSVLTYVLLPMPLLFFAGSDDSIFSESDNSWVNFTKFLTGASTVGGIAIPSILKHAGVIGWGAFAMELSSYFVFGMAVICYLWMSGDDDYSIL

SEQ ID NO: 44159 - protein, 182 aa, Glycine max
  Clone ID: 700889717_FLI.pep
FDPKISDFGLARSFLGDQFDAKTNRVAGTYGYIPPEYAARGHFSVKSDVFSYGVILLEIVSGKKNREFSDPQHYNNLLGHAWRLWTEGRALELLDEVLGEQCTLSEIIRCIQIGLLCVQQRPEDRPDMSSVGLFLNGDKLLSKPKVPGFYTEKDVTSEANSSSANHKLCSVNELSITILDAR

SEQ ID NO: 44160 - protein, 181 aa, Glycine max
  Clone ID: 700889724_FLI.pep
IPLSPFQMASVEVAHQTPTTVPENETTEVIKTQETTPEPVPATEAPATEQAAAEVPAQEEQQATEVPAPESTTEAPKEETTEAPTTETVETTTTEEAKPEEPKEVAVETEEVVTKETEEEKPAAEEKSEEKTEEVKEEAEEPKETTETETESAPAATTEEENKPAETVEAPVEVPVEKTEA

SEQ ID NO: 44161 - protein, 212 aa, Glycine max
  Clone ID: 700889742_FLI.pep
YPTGFHPRSKSDVTRWQSFLRERQRHALFCFAGAPRRAFPDDFRGLLLSQCRDSGESCRAVNCTGTRCSNGTSAIMETFLDSDFCLQPRGDSFTRRSIFDCMVAGSIPVFFWRRTAYLQYEWFLPVEPESYSVFIDRNAVKNGTLTVKNVLEKFTKEEVRKMREKVIEYIPRLVYANTKQGLDGVEDAFDVAIEGVFKRIKEQEQPQFHKWK

SEQ ID NO: 44162 - protein, 103 aa, Glycine max
  Clone ID: 700891870_FLI.pep
SLDQPFISPRNFYRSRHLLRALMAENVPFTHPKVLRKIRIHVQATTSTVELTLPYCSGNSFWRRSKLRLSQASNMSFLEAQLNEILKYCHAFSAFGFMASART

SEQ ID NO: 44163 - protein, 223 aa, Glycine max
  Clone ID: 700892068_FLI.pep
VKNELPSTFKAYRYQQHRWSCGPANLFRKMVMEIINNKKVSLWKKIHVIYSFFFVRKVVAHINTFVFYCIVLPATVLVPEVVVPKWGAVYIPSIITILNAVGTPRSLHLMVFWILFENVMSLHRTKATIIGLLEASRVNEWVVTEKLGDALKTKAGGKAPKKPRFRIGDRIHLLELGVAFYLFFCGCYDIMFGKNHFFIFLFIQSLAFLIMAFGYVGTIVPNS

SEQ ID NO: 44164 - protein, 183 aa, Glycine max
  Clone ID: 700892119_FLI.pep
ARMALRCLVMSLSVLFTLGLARESHARDEDFWHAVWPNTPIPSSLRDLLKPGPASVEIDDHPMQIEETQYPKTFFYKEDLHPGKTMKVQFSKPPFQQPWGVGTWLKEIKDTTKEGYSFEELCIKKEAIEGEEKFCAKSLGTVIGFAISKLGKNIQVLSSSFVNKQDQYTVEGVQNLGDKAVMS

SEQ ID NO: 44165 - protein, 210 aa, Glycine max
  Clone ID: 700892242_FLI.pep
HNIFSEKIKPSDVGLEQEAQVVQNWSGSMLERNGSHQSLPPIKYLHLHESDSFSIGIFCMPPSSIIPLHNHPGMTVLSKLLYGSMYVKSYDWIDAPGSTDPSEARPAKLVKDTEMTALIPTTVLYPTSGGNIHCFRAITPCAIFDILSPPYSSDHGRHCTYFRRSQRKDLPVNVLLNGVTVSEVTWLEDFQPPDDFVIRKGQYRGPVIRT

SEQ ID NO: 44166 - protein, 264 aa, Glycine max
  Clone ID: 700894132_FLI.pep
SLKYSSAVSTLLAVAFVGICCGLAITALVQGKTQTPRLFPRLDYQTSFFDLFTAVPVVVTAFTFHFNVHPIGFELAKASQMTTAVRLALLLCAVIYLAIGLFGYMLFGDSTQSDILINFDQNAGSAVGSLLNSLVRVSYALHIMLVFPLLNFSLRTNIDEVLFPKKPMLATDNKRFMILTLVLLVFSYLAAIAIPDIWYFFQFLGSSSAVCLAFIFPGSIVLRDVKGISTRRDKIIALIMIILAVVTSVLAISTNIYNAFSSKS

SEQ ID NO: 44167 - protein, 125 aa, Glycine max
  Clone ID: 700894402_FLI.pep
SVTDESNFEAPSMVVMAMVEGFVLINQALNRAEVLHVARNGDGAFLVEPVFLFSFFQQLHEQWVVHVHHRDHKPLLLLPLPYQDGQTPFWNVLQILLLLLLLVVVVMLLIMMIAKDPHNVAKKLS

SEQ ID NO: 44168 - protein, 104 aa, Glycine max
  Clone ID: 700894562_FLI.pep
RARERERMAALGGNRDVAGSQNSLEIDGLARFAVEEHNKKQNALLEFEKVVSAKQQVVSGTLYTITLEAKDGGQKKVYEAKVWEKAWLNFKEVQEFKLVGDAPA

SEQ ID NO: 44169 - protein, 328 aa, Glycine max
  Clone ID: 700897809_FLI.pep
PFFEGYHLIIVQDGDPSKVIKVPEGFDYELYNRNDINRVLGPKAHCISFKDSACRCFGFLLSKKKYIFTIDDDCFVAKDPSGKEINALEQHLKNLLSPSTPFFFNTLYDPYREGVDFVRGYPFSLREGVPTAASHGLWLNIPDYDAPTQLVKPLERNNRYVDAVMTIPKGTLFPMCGMNLAFNRELIGPAMYFGLMGDGQPIGRYDDMWAGWCVKVISDHLGLGVKTGLPYIWHSKASNPFVNLKKEYKGIYWQEELIPFFQSVSLPKECTTAQKCYIELSKQVKAKLGKVDEYFNKLADAMVTWIEAWDELNPSGPKSEALPNGSAK

SEQ ID NO: 44170 - protein, 200 aa, Glycine max
  Clone ID: 700898322_FLI.pep
NSVIRVMATSGGDEGQNNPALDPDLDAPDDPDHEFAEFGSGCFWGAELAFQRVVGVVKTEVGYTQGHTPDPNYKLVCTGTTNHVEVVRVQFDPKVCPYNDLLALFWSRHDPTSINRQGNDVGAQYRSGIYYYNDTQARLGQESKDAKQLELKEKIVTEILPAKRFYKAEEYHQQYLEKGGGQGNKQSAEKGCTDPIRCYG

SEQ ID NO: 44171 - protein, 59 aa, Glycine max
  Clone ID: 700898772_FLI.pep
HNFLVPLRGRTCMPSYGMPWSFFLHNRLLQLVNGGCLLRVHMTNHHNVDLSLFLSHLAN

SEQ ID NO: 44172 - protein, 334 aa, Glycine max
  Clone ID: 700868419_FLI.pep
LKSNLPLFLLPPTSPSSSSIMSHFKGKYHDELIANAAYIGTPGKGILAADESTGTIGKRLASISVENVESNRRALRELLFTAPGALKYLSGVILFEETLYQSTAAGKPFVEVLKEAGVLPGIKVDKGTVELAGTNGETTTQGLDGLGQRCAKYYEAGARFAKWRAVLKIGPNEPSELAIHENAYGLARYAVICQENGLVPIVEPEILVDGSHDIHKCAAVTERVLAACYKALNDHHVLLEGTLLKPNMVTPGSNSAKVSPQVVAEHTVRALQRTVPAAVPAIVSCLVGRVRRRHPLTSMPLTRSMERSHGHSLSPLEGHFNRAPLRHGVEKRRM

SEQ ID NO: 44173 - protein, 218 aa, Glycine max
  Clone ID: 700869552_FLI.pep
QSIPLSPPTKYSLQHFKKPWAHEHEPVRNLVDAVNKIKPTVLIGTSGQGRTFTKEVIEAMASINERPIILSLSNPTSQSECTAEEAYKWSQGRAIFASGSPFPPVEYEGKVFVPGQANNAYIFPGFGLGLIMSGTIRVHDDLLLAASEALAAQVSQENFDKGLIYPPFTNIRKISAHIAANVAAKAYELGLATRLPQPKDLVKFAESCMYTPSYRSYR

SEQ ID NO: 44174 - protein, 156 aa, Glycine max
  Clone ID: 700869710_FLI.pep
KPGPTSERNFGLFYPDERRVYNVPLTVEELKDYHDRPSAPVSGGGQQKETPAPVVSGGVSKSTTGNTWCVANPDADKVKLQAALDFACGEGGSDCGPIQRGATCYDPNTLVAHASFAFNSYYQKQSRKGGSCYFGGTSYVVTQEPRYGSCEFPTGY

SEQ ID NO: 44175 - protein, 375 aa, Glycine max
  Clone ID: 700873392_FLI.pep
QVVFWRNSNRGNSSSRRSYVITCAAGDSQTVVIGLAADSGCGKSTFMRRLTSVFGGAAEPPKGGNPDSNTLISDTTTVICLDDYHSLDRTGRKEKGVTALDPRANDFDLMYEQVKALKDGIAVEKPIYNHVTGLLDPPELIKPPKILVIEGLHPMYDSRVRDLLDFSIYLDISNEVKFAWKIQRDMAERGHSLESIKASIEARKPDFEAYIDPQKQYADAVIEVLPTQLIPDDNEGKILRVRLIQKEGVKYFSPVYLFDDGSTISWIPCGRKLTCSYPGIKFFYGPETYYGNEVSLVEMDGQFDRLDELIYVESHLSNLSTKFYGEVTQQMLKHADFPGSNNGTGLFQTIVGLKIRDLYEQLIATKAETPVAAKA

SEQ ID NO: 44176 - protein, 43 aa, Glycine max
  Clone ID: 700877279_FLI.pep
SSNIYNHSQRLFLDFQSYRKKMTKYSKLKLLTYFINAAIGLIS

SEQ ID NO: 44177 - protein, 287 aa, Glycine max
  Clone ID: 700877293_FLI.pep
KMGQAFGCYQVDQSNVAIKEHFGKFDDVLEPGCHCLPWCLGYQIAGSLSLRVQQLDVRCETKTKDNVFVNVVASVQYRAVSEKASDAFYRLTNTREQIQSYVFDVIRASVPKLELDSVFEQKNDIAKAVEEELEKAMSTYGFEIVQTLIVDIEPDVNVKRAMNEINAAARLRLAANEKAEAEKILQIKKAEGEAESKYLSGLGIARQRQAIVDGLRDSVLAFSENVPGTSAKDVMDMVLVTQYFDTMKEIGASSRSSSVFIPHGPGAVKDIAVQIRDGLLQATASQN

SEQ ID NO: 44178 - protein, 346 aa, Glycine max
  Clone ID: 700842903_FLI.pep
TKDYAGDTAQKTKDYAGDTAQTSKDYAGDAAQKSKGYVGDAAQKTKEYVGDAAQKTMDYATDAAQKTKDYATQKTKDYASDATDAAKKTKDYAAQKTKDYASDATDAAKKTKDYAAQKTKDYASGGAQKTKDYASGAAQKTKDYASDAAQRTKDHASDGAQKSKEYAGDVAQNAKDYAQKSKDYAGDAVQNIKDYANDAAHKSKDYAGDASHKSKEASDYASETAQKTKDYVGDAAQKSKEASEYASDAAQRTKEYAGDATKRSKEASDHANDMARKTKDYASDTAQRTKEKLQDIASEAGQYSTEKAREMKDAAAEKASDIAKAAKQKSQELKDKLGGQHRDAEL

SEQ ID NO: 44179 - protein, 171 aa, Glycine max
  Clone ID: 700846556_FLI.pep
PFPLRTLDHSHALLYPLLHRRSLQRSQQHRHPMANAASGMAVHDDCKLRFLELKTKRTHRFIVFKIEEQQKQVIVEKLGEPAQGYEDFTASLPADECRYAVYDFEYLTEGNVLKSRIFFIAWSPDTSRVRSKMIYASSKDRFKRELDGIQVELQATDPTEMGLDVFKSRAN

SEQ ID NO: 44180 - protein, 342 aa, Glycine max
  Clone ID: 700846585_FLI.pep
QLPGEDLDALISVTNDDDLDHMMHEYDRLYRASARPSRMRLFLFPSDTLPSPPPAASAPHDSVIKPNNVDFLFGLQPQPPPIDVKFNDPLPEPVAPPPEHPLRFNFNPAVSDPSAIQRQLQQLQIAENEQAAHRRKGEDNYPAGDYYVQKVPEKFPPPNFLASSPGYWPEKHVSGDVYPPAVTATSGGGEPSVYMVPAPGTFYHAPVMRPPPPATQGYYTVQRMGSDNYREAPVYGGVPPPKAAVPASMAPAQQPIKAPAYTEGFGMVRPGGIVDNTGVPYAQVAYDSGSGRQVYYTAPGGGVTHAPPYHGVFPPVTADMRLGGVSFGQDVKVISKLTQGSV

SEQ ID NO: 44181 - protein, 147 aa, Glycine max
  Clone ID: 700847082_FLI.pep
GDAVSYMHELQAQASMLKAEVEGLETSSLNSKNYQGLIENPMRVQLITNKKIIQMDMFQVDEKGFHVKIMCNKGEGVAASLYKSLESLTGFNVQNSNLTTISDRSFLLTFSLNAKGPEPEINLPNLKLWVTEAFVKQGFEFIPFFYA

SEQ ID NO: 44182 - protein, 207 aa, Glycine max
  Clone ID: 700849579_FLI.pep
CTPQTYWSRQELKSVAMAIVIKVAALSGSLRKASYHSGLIRAAIELSKGEIEGIEIEFIEISELPMLNTDLEINGTYPPIVEAFRQKILQADSILFASPEYNYSVTALLKNAIDWASRPPNVWAGKAASIVSAGGDFGGGRSHYHLRQIGVYIDLRFINKPEFFLLAFKPPPKFNDDGDLIDEEAKDKLKQVLLSLRAFTLRLQGKN

SEQ ID NO: 44183 - protein, 287 aa, Glycine max
  Clone ID: 700903424_FLI.pep
EMAKDVEVQEQGGEYSAKDYHDPPPAPLFDPEELTQWSFYRALIAEFIATLLFLYVTVLTIIGYKRQTDTTVGGTDCDGVGILGIAWAFGGMIFILVYCTAGISGGHINPAVTFGLFLGRKVSLIRALLYMVAQCAGAICGTGLAKGFQKAYYNRYGGGANSVADGYNNGTALGAEIIGTFVLVYTVFSATDPKRNARDSHVPVLAPLPIGFAVFMVHLATIPITGTGINPARSFGAAVIYNEDKIWDDQWIFWVGPIVGAAVAAFYHQYILRAAAIKALGSFRSNA

SEQ ID NO: 44184 - protein, 51 aa, Glycine max
  Clone ID: 700907868_FLI.pep
LSMNRLIESLGLEGNGPVLRPGDSIKRFMLNQWTTHKIKPMFVGFGFISLR

SEQ ID NO: 44185 - protein, 442 aa, Glycine max
  Clone ID: 700908654_FLI.pep
TFHASSVCSHTSFFSFCCFGANSTTTPCLILKNNELQQPTMLHCLNTSCSDITVLERQREATIKCQNHQPPYLTDFNAVFPSSSSSSSSSSSSSHSQGLLMMCSDSSLGQVLTHSVKPDPGVWPEFGFLPAISRTCSRDGDLVSPKENMASGKENAKKRKPQNSKVVAEIDNNKDKDKRVKVTGEEGESKVTEHHTRNKNAKSNANKNNRETSADTSKGSEVQNQKPDYIHVRARRGQATDSHSLAERVRREKISERMKYLQDLIPGCNKVAGKAGMLDEIINYVQSLQRQVEFLSMKLAAVNPRLDFNIDELFAKEVFPSCAQSFPNIGIPSDMSISNNPSYLQFNSAQQLVSCCGGLINSMGISPPNMGLRTNIISTSTVPLPETFLDSSCFAQILPSSNWEGGDFQSLYNVAFDQGRTASFPPQPFTGLVEASNLKMEM

SEQ ID NO: 44186 - protein, 367 aa, Glycine max
  Clone ID: 700909093_FLI.pep
GLQPLNSEAAIAQHRMGRKEKQNAKAIDEEHDVVNFNGASTPSLVFSSDDDEANQDLSLKIVEKAMRIRAAKHAPNDDVSSPFSQKSELAVPLNDVVSDLPSAIADSEVTEKKKTAKLKREAAGDQSVVIAEEQEMEETSNATENHEFVEGSPVLIGHNMVLRKLLRGPRYFDPPDSSWGACFNCGEDGHAAVNCSAAKRKKPCYVCGGLGHNARQCTKAQDCFICKKGGHRAKDCLEKHTSRSKSVAICLKCGNSGHDMFSCRNDYSPDDLKEIQCYVCKRVGHLCCVNTDDATPGEISCYKCGQLGHTGLACSRLRDEITSGATPSSCFKCGEEGHFARECTSSIKSGKRNWESSPPKNKRTPPP

SEQ ID NO: 44187 - protein, 388 aa, Glycine max
  Clone ID: 700909103_FLI.pep
AELPNLQANINTMEAVQVISTTTIKAPPSHNNHDSVQKIDLTPWDLQFLPIETIQKGLLFRNKKHTENQIEHLQHSLSSTLAFFPPLAGRLVILQHHDNTVSSHIVCNNAGALFVHAVADNTTVVDILQPKYVPPIVYSFFPLNGVKNHEGTSQPALAVQVTELLDGVFIAFTINHVVADGKSFWHFVNSWAEISRGNPKISKIPFFERFFPVGIDRAIRFPFTKVEGKEEGEHSQNLEPKTLSERVFHFTKRKISELKSKANAEANTDKISSLQAVLTLLWRTVSRCKHMGPQEEVHFVLLIGARPRLIPPLADDYFGNAALVGRATMKAEELLQKGGFGKGASEINKVISSHSHEKVRSYYEYWVRTPRLFTIGSLAKNPKAFHDR

SEQ ID NO: 44188 - protein, 247 aa, Glycine max
  Clone ID: 700852843_FLI.pep
VRALFTLAAKVSPTIIFLDEVDSMLGQRTRVGEHEAMRKIKNEFMTHWDGLLTKQGERILVLAATNRPFDLDEAIIRRFERRIMVELPSVENREKILRTLLAKEKVDNELDFKELATMTEGYTGSDLKNLCTTAAYRPVRELIQQERLKSLDKKQKAAKGQNKDVQESQGGQSILGNTQDAIDGEEEVKQERVITLGPLNMQDFKEAKNQVAASFAAEGAGMSEMKQWNDLYGEGGSRKQQQLSYFL

SEQ ID NO: 44189 - protein, 377 aa, Glycine max
  Clone ID: 700856629_FLI.pep
DYLSIIAIFNPIVYQFTMEERENKEIKIARFSSCRGVAFEINPNRSNPFAIGSPPKQERIGTWLWLPWTRNSSFKVLPQPHTISPTRSRASSHFCDIDIDASDFEVEFIAEVQDIEKPDKANVVKVQKLLPKSDPPRRSRLSIILLDQGFTCYKGLFLVCMALNVVALALSAAGCFPYAKTRAALFSIGNILALTLCRSEAALRVIFWLTVQTLGRPCVSLRIKTATTSFLQSVGGIHSGCGVSSIAWLAYSLVLTLKNKDKTSPEIIGVAFTILSLILLSSFAAFPLIRHLHHNVFERIHRFAGWMALILLWLFILLSISYEPYSHTYDLTMSKVVKKQECWFTLAITILIIIPWLSVRKVQVNVSSASSHASIIK

SEQ ID NO: 44190 - protein, 126 aa, Glycine max
  Clone ID: 700890409_FLI.pep
ILIIYEYLSCSAKQMVVLLSMSFLIFFLNFLFLMVFMQDKTTSTNSSCCRNLLFYLVPVSMLWVFLGLMLLMQGISTGSRSTKFPKVLKMLVVLLLLLIINLARHIIALVVVEVVVVFLLSHDACN

SEQ ID NO: 44191 - protein, 471 aa, Glycine max
  Clone ID: 700890843_FLI.pep
SRFYLSFLPLPIFNNSRLLPRSLSLSHNPTMANTGNLDAAIEQLLNVEKQMRLAGDVAGTRKAATDILQLCFDARAWKTLNDQIVVLSKRRGQLKQAVTAMVQQAMQYIDETPDIETRIELIKTLNSVSAGKIYVEIERARLIKKLAKIKEEQGLIAEAADLMQEIAVETFGAMAKTEKIAFILEQVRLCLDRQDYVRAQILSRKISPRVFDADLSKEKKKPKEGDNVVEEAPADIPSLLELKQIYYELMIRYYSHNNDYLEICRCYKAIYEIPSVKEDPAKWIPILRKICWYLVLAPYDPMQSSFLNSTLADKNLSEIPNFKLLLKQLVTMEVIQWTTLWDTYKSDFENEKASGKSLGEKAAEDLRQRIIEHNILVVSKYYARITLKRLAELLCLSVQDAEKHLSDMVVSKALVAKIDRPLGIVCFQTAKDSNDILNSWAANLEKLLDLVEKSCHQIHKETMVHKAALKV

SEQ ID NO: 44192 - protein, 219 aa, Glycine max
  Clone ID: 700893606_FLI.pep
RIPNKAIISSREISSNSTASDDRRFVRHIITFSKIWSSEQEYNGRCSLCSRKQISQDGRICSIWRPVCPVGYIYIGDIARVGIHPPNVAAVYRKIDGFFALPMGYDLVWRNCPEDYVTPLSIWHPRAPDGFVAPGCVAIAGYLEPEPDLVYCIAESLVEETEFEELKVWSAPDSYPWTCHIYPVQSDALHFVALRQSKEESDWKPKRVRDNPHCQLQSP

SEQ ID NO: 44193 - protein, 67 aa, Glycine max
  Clone ID: 700893691_FLI.pep
IYPYMYRTASLMKTGNVQGALAEINRILGFKLSLECLELRFFIYLALEDYKAAVRDVQAILTLCPSY

SEQ ID NO: 44194 - protein, 477 aa, Glycine max
  Clone ID: 700863673_FLI.pep
SSNTNPLFECTGKIMNPDKFTHKTNEALVSAHEIATSNGHAQFTPLHLASSLISDKDGIFSQALSNAAGEESARAAERVINNALKKLPSQSPLPDEVPASNALVKAIRRAQTLQKKRGDTHLAVDQLILGLLEDSQIAELLNEAGVAASKVKSEVERLRGKEGKKVESATGDSTFQALKTYGRDLVEQAGKLDPVIGRDEEIRRVVRILSRRTKNNPVLIGEPGVGKTAVVEGLAQRIVKGDVPSNLCDVKLIALDMGALVAGAKYRGEFEERLKAVLKEVEDAEGKVILFIDEIHLVLGAGKGEGSMDAANLFKPMLARGQLRCIGATTLEEYRKYVEKDAAFERRFQQVYVAEPSVVDTISILRGLKERYEGHHGVRILDRALVVAAQLSSRYITGRHLPDKAIDLVDEACANVRVQLDSHPEEIDNLERKRMQLEVELHALEKEKDKASKARLVEVRKELDDLRDKLQPLMMKY

SEQ ID NO: 44195 - protein, 227 aa, Glycine max
  Clone ID: 700863674_FLI.pep
LHPLQVLVRIGTIGAAADKDLKRMKANFEELCDEDKILVFFKKLLNEWKQELREMPEAEKRTAKGKSMVATFKQCARYLNPLFKFCRKKVLPDDIRQALLLMVECCMRRDYLAAMDHYIKLAIGNAPWPIGVTMVGIHERSAREKIYTNSVAHIMNDETTRKYLQSVKRLMTFCQRRYPTLPSKAVEFNSLANGSDLHSLLAEERFSGGNQAASEERLRIMPAPRDS

SEQ ID NO: 44196 - protein, 79 aa, Glycine max
  Clone ID: 700901379_FLI.pep
NNICLELYIPLNIFLSMAKINSILYKKNNYFSFSFIKPQRICSSGKPPEITTTQNQTHCSNLQTAPRPISNDIRYNRLK

SEQ ID NO: 44197 - protein, 150 aa, Glycine max
  Clone ID: 700869954_FLI.pep
VGSQLAEPEIKMLMEVADVDGNGVLDYGEFVAVTIHLQRMENDEHFRKAFMYFDKDGSGYIELGELEKALTDESGDTDTAVLNDIMREVDTDKDGRISYEEFVAMMKTGTDWRKASRQYSRERFKSLSINLMKDGSLQLHDDISGQAEVV

SEQ ID NO: 44198 - protein, 283 aa, Glycine max
  Clone ID: 700874591_FLI.pep
SLVSIYINMESLEERVFMLMNEQYYYSNSNVSDQLHMHHHRSVSVENLNLWWENNTDSDDSAERILYWESQISLLQEILERYHLSGSKLRLEVGRIIKEVKASDFCSCLKANSSDCITCLRRRVVDGLCERGFSTNLCISKWRTTKKFPGGCHEYIEVIANTSTRKKIHFLVELELREQFQIAKASENYRKLVSCLPEFYIGKLEYLTAIVRVMCNAAKKSMKEKKMHVGPWRKSSFMQMKWSGFNQICNSNKSLGSVATYPHAQASESYFRISGAPTPLVVT

SEQ ID NO: 44199 - protein, 78 aa, Glycine max
  Clone ID: 700874769_FLI.pep
YVKVYLSVSLAVFCFCESFNHATCNLPEPKYVQNCQHRRHHDQGVKTKKKDFLHLIQTGPYVVKKEHEQENPCNLSHS

SEQ ID NO: 44200 - protein, 321 aa, Glycine max
  Clone ID: 700847483_FLI.pep
HNQSSGHYFTIASDKSNRTTTHPLSDLMATVIDGKAVAQIIRSEIADEVRLLSQKYGKVPGLAVVIVGNRKDSQSYVGMKRKACAELGIKSFDVDLPEQVSQAELIKQVHELNVNPDVHGILVQLPLPKHINEEKVLTEISLEKDVDGFHPLNIGKLAMKGRDPLFLPCTPKACIELLQRSGVSIKGKKAVVVGRSNIVGLPASLLLLKADATVTIVHSHTSQPESIIHEADIVIAAAGQPMMIKGNWIKPGAAVIDVGTNAVDDPTKKSGYRLVGDVDFEEASKVAGWITPVPGGVGSMTVTMLLKNTVEGAKRYIEQNN

SEQ ID NO: 44201 - protein, 182 aa, Glycine max
  Clone ID: 700904295_FLI.pep
EMGLSFTKLFSRLFAKKEMRILMVGLDAAGKTTILYKLKLGEIVTTIPTIGFNVETVEYKNISFTVWDVGGQDKIRPLWRHYFQNTQGLIFVVDSNDRDRVVEARDELHRMLNEDELRDAVLLVFANKQDLPNAMNAAEITDKLGLHSLRQRHWYIQSTCATSGEGLYEGLEWLSNNIANKA

SEQ ID NO: 44202 - protein, 636 aa, Glycine max
  Clone ID: 700904315_FLI.pep
CVVLFFSAVYFFGIKVVESMDSDYGIPRELSDLQKIRSLYQPELPPCLQGTTVRVEFGDATTTADPTDALTVCRAFPNTYGHPLAHFLRATAKVPDAQIITEFPPIRVGIVFCGRQSPGGHNVIWGIHNALKIHNPNSVLLGFLGGSEGLFAQKTLEITDDILSTYKNQGGYDLLGRTKDQIRTTEQVNAALAACNNLKLDGLVIIGGVTSNTDAAQLAETFVVAKCPTKVVGVPVTLNGDLKNQFVETNVGFDTICKVNSQLISNVCTDALSAEKYYYFIRLMGRKASHVALECTLQSHPNMVILGEEVAASKLTLSEIAKQITDAIQARAEQDKYHGVILLPEGLIESIPEVYALLKEIHGLLRQGVEVDKISSQLTPWASALFEFLPPFIRRQLLLYPESDDSAQLSQIETEKLLAYLVEVEINKRLKEGTYKGKKFNAICHFFGYQARGSLPSKFDCDYAYVLGHICYHILAAGLNGYMATLTNLKNPVNKWKCGAAPIASMMTVKRWSPNPGATSIGKPAIHPATVDLRGKAYELLRQKAQSFLMDDIYRNPGPLQFDGPGADAKVITLSVEDQDYMGRIKKLQEYLEQVRTIVKPGCPQEVLKAALSVMASVTEVLAAMSTSYTNTLASL

SEQ ID NO: 44203 - protein, 324 aa, Glycine max
  Clone ID: 700850745_FLI.pep
FWKRRWLLRERRELLVWEGGNWNWVWLGVKRMKIQCNVCEAAEAKVLCCADEAALCWECDEKVHAANKLASKHQRVPLSTSSSHMPKCDICQEALGYFFCLEDRALLCRKCDVAIHTANAYVSGHQRFLLTGVRVGLEAIDPGASLTSLKSDSGEKVSDTKSSSVSRKVSTVPQPSNYNEVLPIEVGGVGEFPPAKVSFGGGSTDGNISQWTIDEFIGLNEFSQHYDYMEGSSRADGGKLGDSDSPVLKSGEEDMEEEDDYLERVPDSSWTVPQIPSPPTASGLCWPKDPQYSSDSVLFVPDISFSLIQQSQISSICLRRWRQL

SEQ ID NO: 44204 - protein, 101 aa, Glycine max
  Clone ID: 700852989_FLI.pep
ICGNLVLISRDIGGVSCPLICSKKRLNHGVLLVGYGAKGFSILRLGNKPYWIIKNSWGEKWGEDGYYKLCRGHGMCGINTMVSAAMVPQPQTTPTKNYASY

SEQ ID NO: 44205 - protein, 270 aa, Glycine max
  Clone ID: 700853130_FLI.pep
FSKSNSAAEYQAEKMSQEQPRRPKGQNPIKYGDVFVVSGDLAQKPVAPEDAAMMQSAEARVLGQTQPGGAASVMQSAATRNEQAGLVGHRDVTDVTGDRGVTVTETKVPGSRIITEAVGGQVVEQYVEATPVEAGRSSAIKENAITIGEALEATAQTVGQKAVDQSDASAIQAAEVRATGSNVITPGGLAAMAQSAAAYNADCKLDQDKVKLADVLAGATAKLPADKAATLQDAEGVACAEVRNNPDATATPGGVAASVAAAARLNENVK

SEQ ID NO: 44206 - protein, 216 aa, Glycine max
  Clone ID: 700889134_FLI.pep
NRFDAVIHFAGLKGVGESVAKPRRYYDNNLVGTINLFEAMAKYKCKKMVISSSATVYGEADRVPCVEEEVHLQAMNPYGRTKLFVEEIARDIQRAETEWRIILLRYFNPVGAHESGQIGEDPRGIPNNLMPYIHQVAVGRLPQLNVYGHDYPTKDGTPVTHSLTHSCLSFSFLPSFLPSSAYNNISADPGLYPCNGLGRWPHCCPPKAFCNRPHRL

SEQ ID NO: 44207 - protein, 539 aa, Glycine max
  Clone ID: 700891389_FLI.pep
YVERLRDEPLFLVLAQNVQEYLERVGNFKAASKVALRRVELIYYKPQEVYVAMKKLTELTEDGDNGVEASEEKGFEESRIPTAFVATPEVVARKPTFPENSRTIMDVLVSLIYKYGDERTKARAMLCDIYHHALLDEFSIARDLLLMSHLQDSVQHMDISTQILFNRAMSQLGLCAFRVGLISEAHGCLSELYSGGRVKELLAQGVSQSRYYEKTPEQERLERRRQMPYHMHINLELLETVHLVSAMLLEVPNMAANVHDAKRKLISKTFRRLLEVSDRQTFTGPPENVRDHVMAATRFLSKGDFQKAFDIIVSLDVWKFVRNRDTVLEMLKDKIKEEALRTYLFTFSSSYESLSLDQLTKFFDLPVSCTHSIVSRMMINEELHASWDQPTGCILFQDVEHSRLQALAFQLTEKLSILAESNERATEARIGGGGLDLPLRRRDGQDYAAAAAGSGTASSGGRWQDLSLSQPRQSSGRAGYVGGGGRPMALGQGSGYSRDRSGRGSGAGYQSGRYQGGSALRGPHGDVSTRMVSLKGVRA

SEQ ID NO: 44208 - protein, 64 aa, Glycine max
  Clone ID: 700891569_FLI.pep
VGFCGLWLGLLSAQVCCAGLMLYMIGTTDWEYQACRAQLLTALDEGSDGHKQPLIATLDNNNYS

SEQ ID NO: 44209 - protein, 185 aa, Glycine max
  Clone ID: 700891583_FLI.pep
QLFRGFGFTKQNELFVGRVAMLGFAASLLGEGITGKGILAQLNLETGIPLYEAEPLLLFFILFTLLGAIGGLGDRGKFVDDEPTTGGVIPPGKGFREALGLGSGPLFGFTKANELFVGRLAQLGFVFSLIGEIITGKGALAQLNIETGVPINEIEPLVLFNVLFFFIAALNPGTGKFVTDEGEDD

SEQ ID NO: 44210 - protein, 261 aa, Glycine max
  Clone ID: 700891618_FLI.pep
LVRSMEDIGPNSCTRPVTEKKARPQEQLNCPRCSSTNTKFCYYNNYSLTQPRYFCKTCRRYWTEGGSLRNVPVGGGSRKNKRVTSSKVPDLNPPISLSSVSAISSQNPKMQGVHDLNLAFPAAMDKYHHGTSPYVEMPKLEIGGDHSTSHHSHHHSHSPSSAVELLRSGMDSRGLNPYAPNSLMSGSDHSLYTPGYPMQEIKPNLSFSVDDGFGNRSYGVQENGGGRLLFPFGDIKHLSAGLEVEHNKEQGNNSTGYWTGW

SEQ ID NO: 44211 - protein, 232 aa, Glycine max
  Clone ID: 700893974_FLI.pep
WGKGEVGKMRTVLNGIDESTTGGIQAQSFFVQDSIQLSGSAIGFRLDSLLKLTETRARDKKMTLMHYLCKVLDDQLPDVLDFSKDVANLEPAAKMQLKFLAEEMQAINKGLEKVVQELSTSENDGPISETFCKKLKKFLGSAEADVRSLASLYSSVGRNVDQLILYFGEDPARCPFEQVVSTLLNFTRMFNKAHEENRKQLELEMKKTAESEKKKCESERILPTAIRTGNVK

SEQ ID NO: 44212 - protein, 395 aa, Glycine max
  Clone ID: 700896469_FLI.pep
SIKMAETFLFTSESVNEGHPDKLCDQISDAVLDACLEQDPDSKVACETCTKTNLVMVFGEITTKANVDYEKIVRDTCRNIGFVSNDVGLDADNCKVLVNIEQQSPDIAQGVHGHLTKRPEEIGAGDQGHMFGYATDETPELMPLSHVLATKLGARLTEVRKNGTCPWLRPDGKTQVTVEYYNDNGAMVPVRVHTVLISTQHDETVTNDEIAADLKEHVIKPVIPEKYLDEKTIFHLNPSGRFVIGGPHGDAGLTGRKIIIDTYGGWGAHGGGAFSGKDPTKVDRSGAYIVRQAAKSIVASGLARRCIVQVSYAIGVPEPLSVFVDTYGTGKIHDKEILNIVKENFDFRPGMISINLDLKRGGNNRFLKTAAYGHFGREDPDFTWEVVKPLKWEKA

SEQ ID NO: 44213 - protein, 281 aa, Glycine max
  Clone ID: 700897136_FLI.pep
KSPVESAPFSYCDHQHGRDVYPSTNFNSTATGFLGFGGNCYASNKSIYWSSRMENSTESFSPVALKEFGEKRQGTANGCRLFRIQLHDNSNSNEESLPMVTLSGRMGDDGPLPSLDAESDQHSEPSNVNRSDIPSVSCDAEKSCLRSPQESQSRQIRSCTKVHMQGMAVGRAVDLTRFDGYEDLLRKLEEMFDITGELCGSTKKWQVVYTDNEDDMMMVGDDPWLEFCSIVRKIFIYTAEEVRKLSPKIGLPISEEVKPSKMDSEAVANPEDQSSIVGPGC

SEQ ID NO: 44214 - protein, 184 aa, Glycine max
  Clone ID: 700901740_FLI.pep
RRRRGPLPGLLQAHKQRRPSLPDQAPQQDLRHRRRQRGNGHRADHPHSGPHRRARPRRHQLRQAPTSASSPPAPARSPASHASTSSRGTSPSSAPLFPLSSVTPPTQLSSSFPTPSTSSPTSRGSSPASPPTASSAPAPTWTLPASVSSSPITLTSTPRTYRSINVTSPFSFSLNYKMWTNILN

SEQ ID NO: 44215 - protein, 307 aa, Glycine max
  Clone ID: 700901902_FLI.pep
FLSLLFVFSDTFGALLSVFLQEGMAKDVEVAERGSFSGKDYQDPPPAPLIDAEELTKWSFYRALIAEFIATLLFLYITVLTVIGYKHQTDHADACGGVGILGIAWAFGGMIFILVYCTAGISGGHINPAVTFGLFLARKVSLIRAIMYMVAQCLGAICGVGLVKAFQKSYFNKYGGGANSLADGYSTGTGLGAEIIGTFVLVYTVFSATDPKRNARDSHVPVLAPLPIGFAVFMVHLATIPVTGTGINPARSLGAAVIYNQDKPWDDHWIFWVGPFIGAAIAAFYHQFILRAGAAKALGSFRSNPHN

SEQ ID NO: 44216 - protein, 423 aa, Glycine max; identical to SEQ ID NO: 43754
  Clone ID: 700901925_FLI.pep

SEQ ID NO: 44217 - protein, 46 aa, Glycine max
  Clone ID: 700902026_FLI.pep
CSRSTGLKYYCYIICECYGGSDKCSVVDDLSQGLDILNNKIICISI

SEQ ID NO: 44218 - protein, 129 aa, Glycine max
  Clone ID: 700902142_FLI.pep
LSVMSVTTVGYGDHAFKTMHGRIFAAIWLLVSTLAVARAFLYLAEARVDKRHRRMAKWILGQDMTVSEFLAADIDNNGFVSKSEYVIYKLKEMGKVSEKDIMQVSEKFDRLDAGNCGKITLADLMGNHN

SEQ ID NO: 44219 - protein, 295 aa, Glycine max
  Clone ID: 700902415_FLI.pep
SVFWQEGGMAKDVEVAERGSFSGKDYQDPPPAPLIDAEELTKWSFYRALIAEFIATLLFLYITVLTVIGYKHQTDLKENGEICGGVGILGIAWAFGGMIFILVYCTAGISGGHINPAVTFGLFLARKVSLIRAIMYMVAQCLGAICGVGLVKAFQKSYFNKYGGGANSLAAGYSTGTGLGAEIIGTFVLVYTVFSATDPKRNARDSHVPVLAPLPIGFAVFMVHLATIPVTGTGINPARSLGAAVIYNQDNPWDDHWIFWVGPFIGAAIAAFYHQFILRAGAAKALGSFRSNPHN

SEQ ID NO: 44220 - protein, 355 aa, Glycine max
  Clone ID: 700866138_FLI.pep
LMDLLADELIANAAYIGTPGKGILAADESTGTIGKRLASISVENIESNRRALRELLFTAPGVLQYLSGVILFEETLYQSTAAGKPFVNVLKEAGVLPGIKVDKGTVELAGTNGETTTQGLDGLGQRCAKYYEAGARFAKWRAVLKIGPNEPSELSIHENAYGLARYAVICQENGLVPIVEPEILVDGPHDIHKCAAVTERVLAACYKALNDHHVLLEGTLLKPNMVTPGSQSAKVSPQVVAEHTVRALQRTVPAAVPAVVFLSGGQSEEEASVNLNAINQVNGKKPWSLSFSFGRALQQSTLKAWGGKEENVKKAQEALLVRAKANSEATLGTYKGNSQLADGASESLHVSNYSY

SEQ ID NO: 44221 - protein, 371 aa, Glycine max
  Clone ID: 700866411_FLI.pep
AETEKKKMEMYQIWSRRIALGAFAFVLLFLSASADDVVVLSEDNFEKEVGQDRGALVEFYAPWCGHCKKLAPEYEKLGSSFKKAKSVLIGKVDCDEHKSLCSKYGVSGYPTIQWFPKGSLEPKKYEGPRTADSLAEFVNTEGGTNVKIATAPSNVVVLTSENFNEVVLDETKDVLVEFYAPWCGHCKSLAPTYEKVATAFKLEEDVVIANLDADKYKDLAEKYDVSGFPTLKFFPKGNKAGEEYGGGRDLDDFVAFINEKSGTSRDVKGQLTSQAGIVESLDVLVKEFVAASDEEKKFVFTRMEEEVEKLKGSASRHGKIYLKAAKNYLEKGSDYAKNEIQRLQRILDKSISPAKADELTLKKNILSTYAA

SEQ ID NO: 44222 - protein, 135 aa, Glycine max
  Clone ID: 700872446_FLI.pep
IYFVIYVLMSTFYFYVMLLLVPIAALFCDFVYQGVQRWFFPYDYQIIQEMHRDEVDSTGRAQLLEIGNQLTPAEARSHAISQLPREISKHTGFAFDSPGYESFFASQLGVYAPPKAWDVARRASMRSRPKIGQQK

SEQ ID NO: 44223 - protein, 135 aa, Glycine max
  Clone ID: 700872707_FLI.pep
RGRGKGKKLTVANFEDPASGEDEKVPTQKRRGRPQKPLKDDFDEEEVEKIEDDSDNVKNGTAYKEMKSPTATENGRKRKRNSQVKEKLDSVEKENSIGNGTSTTDELTKANGFRHNGSRRKSTPRRAAEAGVQCK

SEQ ID NO: 44224 - protein, 276 aa, Glycine max
  Clone ID: 700872742_FLI.pep
FPSKGIFLSSFLLCFAILSLGAEARRSPSPISSLISKELFDSIFIHKDNNACPARNFYTYDSFINASKRFPRFGTTGSPATRKREIAAFLAQISHETTGGWATAPDGPYAWGLCFKEEISPQSNYCDSTNTQWPCYPGQSYKGRGPIQLSWNYNYGPAGKALGFDGLRNPDVVSNNSLIAFQTGLWFWMTEQKPKPSCHNVMVGKYVPTQADIAANRTKGYGLVTNIINGGLECGIPDDSRVNDRIEYFKRYATLFKVDTGPNLDCAYQKSFQTVA

SEQ ID NO: 44225 - protein, 188 aa, Glycine max
  Clone ID: 700872896_FLI.pep
ERGHSLESIKASIEARKPDFEAYIDPQKQYADAVIEVLPTQLIPDDNEGKILRVRLIQKEGVKYFSPVYLFDDGSTISWIPCGRKLTCSYPGIKFFYGPETYYGNEVSLVEMDGQFDRLDELIYVESHLSNLSTKFYGEVTQQMLKHADFPGSNNGTGLFQTIVGLKIRDLYEQLIATKAETPVAAKA

SEQ ID NO: 44226 - protein, 420 aa, Glycine max
  Clone ID: 700872978_FLI.pep
KKPTLCSRYVKTYKYTMENDAGFPLIPNVFSGFNSLVASAARGSLSAARFLTGQFNPANGIGLANTSLAFFGNRLFALGESDLPYVVNVTPDGDIETLGRHDFDGKLTFSMTAHPKIDPDTAECFAFRYGPVPPFLTYFRFDGNGKKHEDVPIFSMLTPSFLHDFAITKKYAIFCDIQLGLNPLDMISGGSPVGSVASKVPRIGILPRDAKDESMMKWFEVPGFNIIHAINAWEEDEGRTVVLVAPNILSMEHALERMELVHAMVEKVRIELDTGIITRQPVSARNLDFAVINPAFVGKKNRFVYAAVGDPMPKISGVVKLDVSKGEERRDCTVGCRMYGEGCYGGEPFFVAREEGGEEDDGYLVSYVHDERKGESRFLVMDAKSPELDVVAAVRLPRRVPYGFHGLFVKESELRKVSLS

SEQ ID NO: 44227 - protein, 366 aa, Glycine max; identical to SEQ ID NO: 37097
  Clone ID: 700876304_FLI.pep

SEQ ID NO: 44228 - protein, 463 aa, Glycine max
  Clone ID: 700876320_FLI.pep
DDEFYESGMYASSYSFSSFSTEVPDGTLNINDNNGSLFNMSYKISLSVISYSKIGDNTSVFNLSSERVKISAEGVYDAGAGTLCMVGCRDLLSNTNTEIPIAHSVDCEILLKFQFPSLDTYDGGYIKGSIESTRHESDPLYFKRLDISAVAYYREAARRNVWRMDVEVMMALISTTLSCVFVGLQLNKVKKEPNLLPFISLIMMSILTLGFMIPLVLNFEALLTQNPNNTMRVFRNNGWLEVNEISVRLITMVAFLLQFRLLYLTWSARKSGESKKGLWIAERNSAYVTSLLYAAGLLIAWLLKLKNGDNKDSVYVPMYQPSPWENIKSYGGLVLDGFLLPQIILNLFLNMRDNVLSFSFYFGTTFVRLLPHAYDLYRTHSDAALDSRSYYYADPSEDFYSTAWDIAIPLGGILFAMIIYLQQRFGSHYILPHRFKGSKVYEKVPEKVPVVTESEAEVDTTKI

SEQ ID NO: 44229 - protein, 355 aa, Glycine max
  Clone ID: 700876446_FLI.pep
LILATPSQQPRYYFSYSIRQKHHQMGEEKEQPKNDTEKKPEEVAPKKDDGPIPVVYKLDLHCEGCVKKIKRTCRHFEGVETVKADLSSNKVTVTGKMDAEKLRDKIAERTKKKVDIISAPPKKEAAVAEKPPEKKAEDKKPEEKKPEEKPKESTVVLKIKLHCDGCIAKIRRIILRFKGVQLVSLDGSKDLVTVKGTMDVKEMLPYLNEKLKRNVEVVPPPKKDDDKKEKEGGGGGGGGEKKEGGGEKKEKEGDGEKKEKDGAAAAAAEVINKMEYMHRMAPPSFWYDGGHFPGQTSYAMEVHPGYGASANNHYVEPGYVNQGYPLQPPLPYYMHPHAPPPQMFSDENPNACSIM

SEQ ID NO: 44230 - protein, 151 aa, Glycine max
  Clone ID: 700845729_FLI.pep
HQYQSIKKTRKSSLKNKHGLPLLAANIRLFVPNPTMEEFRSKSYGDGRMQIEAYRGTNMQDLRCYSASYASSVHPTTTQQTQMGNNDAKFKKGKSTNGSTSKSWSFSDPELQRKKRVASYKVYAVEGKLKGSLRKSFKWFKDRCNRVVYGW

SEQ ID NO: 44231 - protein, 360 aa, Glycine max
  Clone ID: 700849208_FLI.pep
AGERQGRVEMAEAESVQIPQVKLGTQGLVVSKLGLGCMTLSGRYNDPLPEEEGISVIKHAFSQGITFFDTSDVYGLDHANEFLLGKALKQLPRKKIQVATKFGVAVAKFPNFQIKGTPEYVRSCCEASLKRLDVEYIDLYYQHRIDQTVPIEETVGELKKLVEEGKVKYIGLSEASPDTIRRAHAVHPITALQIEWSLWTRDIEEEIIPLCRELGIGIVPYSPLGRGFFGGKGVLENMPASTVLTLHHPRFQAENINKNKRIYEQIESLAKKYQSTPPQLALAWVLHQGNDVVPIPGTTKIKNLDQNIGALSLKFTESDLREISEAVPIHDVAGSQYFFGNDKDSWKFANTPPKDPRVST

SEQ ID NO: 44232 - protein, 105 aa, Glycine max
  Clone ID: 700906708_FLI.pep
REESRVAVDLESVATHEIGHVLGLGHSSVKEAVMYPSLSPRRKKVDLRIDDVAGVQALYGSNPNFTFSSLLQSQNSLNAAVGLETGFYKWTLTLPLAFFLLFLSA

SEQ ID NO: 44233 - protein, 297 aa, Glycine max
  Clone ID: 700907016_FLI.pep
SVSKPKGWLQIAMAKHDVEGGSFAAKDYHDPPPAPLIDAEELTQWSFYRALIAEFIATMLFLYITVLTVIGYKSQSDVKAGGDVCGGVGILGIAWAFGGMIFILVYCTAGISGGHINPAVTFGLFLARKVSLIRAIMYMVAQCLGAICGVGLVKAFQKAYYNRYGGGANELSEGYSTGVGLGAEIIGTFVLVYTVFSATDPKRNARDSHVPVLAPLPIGFAVFMVHLATIPVTGTGINPARSLGAAVMYNQQKAWDDHWIFWVGPFIGAAIAAFYHQFILRASAAKALGSFRSNPTI

SEQ ID NO: 44234 - protein, 277 aa, Glycine max
  Clone ID: 700907616_FLI.pep
KKERKCNFLCFAPLFKPYHKLRMAHKEFSIALVTLIVLFVNTNLQGATADYGGGWQSAHATFYGGGDASGTMGGACGYGNLYSQGYGTDTVALSTALFNNGLSCGSCYEMRCDDDPRWCKPGSITVTATNFCPPNPSLPNNNGGWCNPPLQHFDMAEPAFLQIAEYRAGIVPVAFRRVPCVKKGGIRFTINGHSYFNLVLITNVAGAGDVNSVSIKGSKTGWQPMSRNWGQNWQSNSYLNGQSLSFQVTTSDGRTVTSFNVAPANWQFGQTFQGGQF

SEQ ID NO: 44235 - protein, 270 aa, Glycine max; identical to SEQ ID NO: 44145
  Clone ID: 700852128_FLI.pep

SEQ ID NO: 44236 - protein, 405 aa, Glycine max
  Clone ID: 700852387_FLI.pep
DSVTPTKPINLVVLPVQNDGSTGLHWANLQKRTPLMQVPVLVDLNGNHLWVNCEQQYSSKTYQAPFCHSTQCSRANTHQCLSCPAASRPGCHKNTCGLMSTNPITQQTGLGELGEDVLAIHATQGSTQQLGPLVTVPQFLFSCAPSFLVQKGLPRNTQGVAGLGHAPISLPNQLASHFGLQRQFTTCLSRYPTSKGAIIFGDAPNNMRQFQNQDIFHDLAFTPLTITLQGEYNVRVNSIRINQHSVFPLNKISSTIVGSTSGGTMISTSTPHMVLQQSVYQAFTQVFAQQLPKQAQVKSVAPFGLCFNSNKINAYPSVDLVMDKPNGPVWRISGEDLMVQAQPGVTCLGVMNGGMQPRAEITLGARQLEENLVVFDLARSRVGFSTSSLHSHGVKCADLFNFANA

SEQ ID NO: 44237 - protein, 371 aa, Glycine max
  Clone ID: 700892405_FLI.pep
IDYRLKCVKLTMILTLLPPPKSPFLNTLLLLCTTLLLPPCYLALPDPDADAVQPIIPNPSSSTGTIPAFPEQADAAGCPLSLSDEHYEGIKSACGSNKHAADDDDDLHRSRCCPVLAAWLYSAYSATALSGGMQHERASKGHTTSYDMPLLPDDSETCVSDLGKALKIRGIQLFQPNETCDLVYCYCGIRLHPLTCPESFSVTPSGTLVVNQSVKRLERDCFSSSTNVNKFPGLGGCSKCLHSLYSLRKNSSNSSKSEDRTTKIHNKDCELMGLTWLLAKNRTAYIHTVSGVLRALMLSTEGSDPQSCTLNSDGMPLAVDSSEMSDESSSTNLQAPIFLSLLLFLHYFTLLWHLTENECKEIDPHSPTWHL

SEQ ID NO: 44238 - protein, 150 aa, Glycine max
  Clone ID: 700893145_FLI.pep
QTMNQILGVNNEQRGMPDLNSLREVMQNPEFLRLFSSPETLQQLLSFQQTLLSQLGQQQSAQEPGQTGGGTGPLNNMGLEMLSSMFGGLGAGSLAVPNRSNEPPEQLYATQLSQLQEMGFFDTQENIRALIATSGNVHAAVERLLGNPGQ

SEQ ID NO: 44239 - protein, 307 aa, Glycine max
  Clone ID: 700894679_FLI.pep
KKHTEYKLGSANSSHADPAIHLNSSVNFNQDRGFKNSDTTQKREVTDAIEKPNINESNAVQDNVFQHHLPLRQEILAHKRKAVTLKREGKLTEAKEELRQAKLLEKGLEDGNMLPDTASSSASATVNYASHASNVVQKKQESSNVSAKPLSSRDRFKLQQESLGHKRQALKLRREGQIEEAEALFELAKAIETQLEELTAQDSNKSEGVDDVAVEDFLDPQLLSALKAVGLDDVSVVSKPHPERQETVKSNAKVENSNQERIQLEERIKEEKVKALNLKRSGKQAEALDALRRAKLYEKKLNSLTSG

SEQ ID NO: 44240 - protein, 284 aa, Glycine max
  Clone ID: 700895047_FLI.pep
FGITVVPSVLLALGMTISPESPRWLFQQGKISEAEKAVKTLYGKERVALVMHDLTAASEGSSEPEAGWFDLFSSRYRKVVSVGATLFLLQQLAGINAVVYYSTSVFRSAGITSDVAASALVGASNVFGTIVAWRLIRDRLPTKSNLRRRQIDISDSLCPFCSIKDETASHLFFECSKIQHLWWESQSWIGTSGAYPINPRHHFLQHNIGMKGGKIYKRWKCWWVALNWSIWQQRNKVIFMNAPFNGSKLLEDALFVAWTWFRAMEENFTIHFNFWSSNLPAGFQ

SEQ ID NO: 44241 - protein, 108 aa, Glycine max
  Clone ID: 700899590_FLI.pep
RTQDGGTEVVEAKAGKGSATLSMAYAGALFADACLKGLNGVPDVVECSFVQSTVTELPFFASKVRLGTVGVEEVLGLGHLSDFEQQGLESLKPELKSSIEKGIKFANQ

SEQ ID NO: 44242 - protein, 259 aa, Glycine max
  Clone ID: 700899771_FLI.pep
KNDEIAFSSQKNGSLLGSTKASFLSGRKLKVNNFTAPVGARSSTTVCAVAEPDRPLWFPGSTPPPWLDGSLPGDFGFDPLGLASDPESLRWNVQAELVHCRWAMLGAAGIFIPEFLTKIGILNTPSWYTAGELEYFTDTTTLFIVELFFIGWAEGRRWADIIKPGCVNTDPIFPNNKLTGTDVGYPGGLWFDPLGWGSGSPEKIKELRTKEIKNGRLAMLAVMGAWFQHIYTGTGPIDNLFAHLADPGHATIFAAFTPK

SEQ ID NO: 44243 - protein, 191 aa, Glycine max
  Clone ID: 700899924_FLI.pep
LRAREGLDFINILILELDVVVGGGVVLLVQAGADALVEASGIGELAVGLEEPGLVGHVLEDDVSLVVLVVPESNQDDVSGGDPHLLVHLPADVAEPLRPVDAHRLAPPVPQHPEHLRVLLPVLLEHQLPLLVVRLVLSPLPVLTSLSLVLRHPQSNPNPNPNPNPILFLSLTLSLCSTQHNTTQILITSLP

SEQ ID NO: 44244 - protein, 536 aa, Zea mays
  Clone ID: LIB3066-016-G7_FLI.pep
DELPMQAAIDQSPHLRFRAGMDDKSCYVATGLSLAAILLVLHRLVVRAGGKGNAAARRLPPSPPAVPFLGHLHLLASECPLHSSLARLAARHGPVLSLRLGSRAAMVVSSPECAEACFTEHDVAFANRPRLTSQALASFGGAALAVSSYGPYWRNLRRVAAVRLLSTHRVACMCPVISAEVRAMLRRVGRAAEATGRVQLKASLFELSLSVLMETIAQTKTSRADDADDAVSPEAHEFRRIVDEILPYLGATNLWDYLPLLRRFDVLGVRNKIRDVVGRRDAFLQRLIDAERRRLDGDGDGDEKKSMIAVMLSLQKSEPDVYTDTMIMALCGNLFTAGTETTSSTIEWAMSLLLNHPEALKKAEAEIEAAVGASRLITMDDVPGLGYLQCVINETLRLYPVAPLLLPHESAADCTVGGYDVPRGTLLFVNAYAIHRDPAAWEEPDEFRPERFRDGKAEGRLMLPFGMGRRRCPGETLALRTAGLVLATLIQCFHWDRIDDAEIDMTESGGLTMPRAVPLEATCKPREAMRHVLQQL

SEQ ID NO: 44245 - protein, 467 aa, Zea mays
  Clone ID: 700237308_FLI.pep
KCKERTPIKLRRTTPDGKHLQSPRPHGPSPPGKRRSLRRTAMAPEPEDDIMNEKNPRPLDEDDIALLKTYGLGPYSTSIKKVEKEIKEMAKKINDLCGIKESDTGLAPPSQWDLVSDKQMMQEEQPLQVARCTKIISPNTDDAKYVINVKQIAKFVVGLGDKVSPTDIEEGMRVGVDRNKYQIQIPLPPKIDPSVTMMTVEEKPDVTYNDVGGCKEQIEKMREVVELPMLHPEKFVKLGIDPPKGVLCYGPPGTGKTLLARAVANRTDACFIRVIGSELVQKYVGEGARMVRELFQMARSKKACIVFFDEVDAIGGARFDDGVGGDNEVQRTMLEIVNQLDGFDARGNIKVLMATNRPDTLDPALLRPGRLDRKVEFGLPDLEGRTQIFKIHTRTMNCERDIRFELLARLCPNSTGADIRSVCTEAGMYAIRARRKTVTEKDFLDAVNKVIKGYQKFSATPKYMVYN

SEQ ID NO: 44246 - protein, 106 aa, Zea mays
  Clone ID: 700806560_FLI.pep
SIKCRTRNTRGIREVAHHSLWFSLLVRCCSSPCRVYHNIVDLSLMLVVDPSPRLDAGSYMTSRTCVYTKNPRRLGVEGKKSVRSRKILDVDREGSEVRVVLTTCST

SEQ ID NO: 44247 - protein, 172 aa, Zea mays
  Clone ID: 701158340_FLI.pep
NKLGLDRSKVNVNGGAIALGHPLGATGARCVATLLNEMKRRGRDCRFGVVTMCIGSGMGAAIDKLRGEGLIQFKQINVANLKACRLHSSRNGHSRTNTHNSWIHSNSRKAPENTKNGQPFLQSHRSFHEKNSSSTITHLTGIACSCSSILFKNWFQFRQSRCCGPWPNPIIN

SEQ ID NO: 44248 - protein, 132 aa, Zea mays
  Clone ID: 701158380_FLI.pep
QDISFTKAIFNTSPIKEINSLFQLHVFIKVRGRPEVPAAISSGVEKLRRPVGFPLNFPLPMAAASEGWARLVQVESELEGAEGGGVLRGRFLNRRLGRLLLSLWRMRRVEGREKREGRDRGGGGCGYSWERS

SEQ ID NO: 44249 - protein, 141 aa, Zea mays
  Clone ID: 701161339_FLI.pep
RMFLCELGGGEERNSSASHTLCLTKCLNQNLSSHPQFGLIMHYGMINGVTEEGHPIQLPPVADRTFHLLKQKLVQAPVLGLPNDFSKGFVLETAVFMQSKNLVAYLNKHLCPRNQASSRSVWQSLWQLLTNGGHTCSTVKS

SEQ ID NO: 44250 - protein, 371 aa, Zea mays
  Clone ID: 701161419_FLI.pep
SAFSSLLLPSFFLFPGQPLQLLPNPPTRFSRLRCHRRDSTSVATMVKSKAIRVHELGGPEVLRWEEVEVGEPGEGEIRIRTTAVGVNFIDIYFRKGVYAAPTMPFTPGMEAVGVVTAVGPGLTGRKVGDVVAYAGNPMGSYAQEQILPAAVAVPVPPSVDHKQAASVMLKGMTAHVLLRRVFKVESGHTILVHAAAGGVGSLLCQWANALGATVIGTVSNQEKAAQAAQDGCHHPIIYTSEDVVARVKDITSGKGVNVVYDSVGKDTYKASLECLASRGFLVSFGQSSGKPDPIPTSDLASKSLFLTRPSLMHYTATHDELLESAGEVFANVANGVLHVRVNHTYPLSEAAQAHADLEGRKTSGSIVLIPG

SEQ ID NO: 44251 - protein, 157 aa, Zea mays
  Clone ID: 701161436_FLI.pep
PNLPPAPQLAREADEEETDRRRRAPSVPGFPGAQSRQLFLVRLYPWPPPRARPSLSSSPRCSSRWSRPRWPAGSWRRRTLSWEAFRRRLPPPRAEPRGSLAARRGRGPSPLWSLSSPSSRTERVLRSGLLRAEGNIYARPVCSRLSVPVLLSSLLAV

SEQ ID NO: 44252 - protein, 57 aa, Zea mays
  Clone ID: 701164768_FLI.pep
LCSCVTSLDTFTQRPEFQKGRRLKERVERKQWLWELWTMKEQLRLSESRALYYTCRC

SEQ ID NO: 44253 - protein, 303 aa, Zea mays
  Clone ID: 701164876_FLI.pep
LFRRVFSRFPLPTRSITPDLCKLPLTSSSSSMESKDGTHDPATTAAPPAGAPQPAMPSAETARWGTRQMGPPAAPGAHPENQEAARWTAARGDQELPPYVIIGEPVAAPPPPQHRGKGDSPMEHILDFFNTWSRKAEELASNIWFNLKAAPSMSDAAMGKLSLGAKALSEGGFEKLYKQTFSSSPDEHLKKTFACYLSTATGPVAGTLYLTNLNVAFCSDRPLSFAAPSGQTAWSYYKVMIPLGKIATVEPVTMKESPPEKYVHVVTVDSHDFWFMGFVSYDKAVHNLVEAVSQHGVATAGGK

SEQ ID NO: 44254 - protein, 244 aa, Zea mays
  Clone ID: 701164929_FLI.pep
DEKQMPAWNDIFKEDLVNLECLNLDSCKIGDEGLFHLKGLIQLKNLELSDTEVGSNGLRHLSGLRNLQSINLSFTLVTDIGLKKISGLSSLKSLNLDNRQITDTGLASLTGLTGLTHLDLFGARITDSGMSCFRFFKNIQSLEVCGGLITDAGVKNIKDLKALTLLNLSQNGKLTDKTLELISGLTALVSLNVSNSRVSNSGLHHLKPLQNLRSLSLESCRVTASEMDKLRLVALPNLISVRPE

SEQ ID NO: 44255 - protein, 116 aa, Zea mays
  Clone ID: 701164932_FLI.pep
HSPVVSSPHELVVVVVVRGVRVEEREVRRREEWRGRRRSRGRRRLPPVDLAQQLLLPLPEELVPELPPLRDDLPEPLHYCPLQHCRHRRSPSVRAPRGLQGLAKPRPSAKATHVGV

SEQ ID NO: 44256 - protein, 97 aa, Zea mays
  Clone ID: 701165106_FLI.pep
DVADSCRTGAATNVIFGLALGYKSVIIPIFAIAFSIFLSFSLAAMYGVVVAALGMLSTIATGLAIDAYGPISDNAGSLSLYGCILSYICISESLSIF

SEQ ID NO: 44257 - protein, 88 aa, Zea mays
  Clone ID: 701167685_FLI.pep
HPSASATTGRRAADRRRRLSCHLVVRRSGGRRLLCSGSPRLLFTPWQLRERLCCVIQGSGCVASCQLSLFRTGRGDFECFVSMALSHL

SEQ ID NO: 44258 - protein, 172 aa, Zea mays
  Clone ID: 701168874_FLI.pep
HFPLISSSSSAPHPPPPPPPPHRSRRGHRFLYGRASPPPSPARRHRSWSPGAPRGGPDQGGVLQGGPALVHHVRKIRPHGPPRDRRHQHLQMGRGEPRRIHPRRPRHREGGQGLLRGPQAGVQHGPLRRHRHDRRDHHPVEWKLIKHVHSRGSPLFFFCTTHPPWCRFGFEI

SEQ ID NO: 44259 - protein, 237 aa, Zea mays
  Clone ID: 701173532_FLI.pep
YAKCVLFSATPRPSDSRPDPEVDEEGEPPAPPPDFRCPITLDIMRDPVVVASGQTYDRDSISRWFDSGKSTCPKTGQVLTVLELVPNKALKNLIAKWCRENGVAMESSAASRSEPAQAVAANKAALEAARMTASFLVKKLSISFSPDAANRVVHDIRLLSKSGADSRAFVGEAGAVPLLVPLLYSEDAGLQLNAVTALLNLSILEANKKRIMHAEGAVEAVAHIMSAGATLRAKENA

SEQ ID NO: 44260 - protein, 147 aa, Zea mays; identical to SEQ ID NO: 42431
  Clone ID: 701173721_FLI.pep

SEQ ID NO: 44261 - protein, 68 aa, Zea mays
  Clone ID: 701173746_FLI.pep
IWGARFRCPSTATRRTSPPSLPLMPLVDLSSSPPPSTDLLVVSSKHGSGALKFYLNRFCRLDNLNSKG

SEQ ID NO: 44262 - protein, 68 aa, Zea mays
  Clone ID: 701173760_FLI.pep
SSKGFSFSQVPFAYDGKFDSHDVGLNANILKCVMALDGTSTSGPHPHTQNVNCKATIFNEMYLIFFCS

SEQ ID NO: 44263 - protein, 229 aa, Zea mays
  Clone ID: 701173817_FLI.pep
TFALVHTKLRNRLSYDKLHKLVYVHYNLKLRIQHFETDIESFEQMKNSKDRNIDPCSIMIDVAMYDEGNPIMEWLCSSRSESVPTLDENDEPESPNRPSGFVLEELGGLNEEEMVLLNSRIGSGRKNGRKRNVVEEDIGDDFLSDSSEGGGSPTYNESGDSDSNDGGGDDEDGEPSGPCFAARTQPKLATDQYNGPGQDEQAAPLRPRSKRQKKLSIKGLYMLQKVKYI

SEQ ID NO: 44264 - protein, 257 aa, Zea mays
  Clone ID: 701176828_FLI.pep
AGWRAKMLDIQKRRVRLLLFITAVLALSITAEKFRELVGKEAASKSGQFTFMNCFDMGSGSLACTAKEGVKLYVNNIRSAHLEMVRQRAMEKALADAVTEGLTPSEAAKQAQKISAKATKLAARQAKRILGPIISCGWDFFEAMYFGGSMTEGFLRGTGTLFGTYMGGFHGEERFGKLGYLAGSHLGSWGGGRIGLMIYDIISGLKFMFQSIQPEYESSSYAEDGPEYAESYTNQEDSTYYETSEEKQEESKWFGLF

SEQ ID NO: 44265 - protein, 119 aa, Zea mays
  Clone ID: 701176853_FLI.pep
TLLPRMNYLLEMGLSKKDLCSMIFRFSPLLGYSIELVMKPKLEFLLRTMKKPLKAVVEYPRYFSYSLEGKIKPRFWVLQSRNIDCTLTEMLAKNDELFAEEYLGLGGLLEKPLQSSIGS

SEQ ID NO: 44266 - protein, 196 aa, Zea mays
  Clone ID: 701178965_FLI.pep
NILFGSQMDRQRYKRVIAACCLKKDLELLQYGDQTVIGDRGINLSGGQKQRVQLARALYQDADIYLLDDPFSAVDAHTGSELFKEYILTALATKTVIYVTHQVEFLPAADLILVLKDGHITQAGKYDDLLQAGTDFNALVSAHKEAIETMDIFEDSDSDTVSSIPNKRLTPSISNIDNLKNKMCENGQPSNTRGIK

SEQ ID NO: 44267 - protein, 249 aa, Zea mays
  Clone ID: 701178972_FLI.pep
AAAAAKPHRAPLWRIADSDFDRRSSDLSPARPAMEKTKLPLPLPLPLVHGERLWARPWRWLKTAFFIVAMLASLLLVCAPPLLVVLLDLLLPPALLSSFLRAQPPSSASFAAALAAQARPFRFASSLADLPALSAARSLLILCAYAAAGGGGAAYRWVAVACSAASVCYVLAKAVAVFGAAPVWRGNGQLVAVEALFLMSLALAVAHLAMAYRASCRERRRLQLVYRIDVEAVRLKGGQTPKALKQCMI

SEQ ID NO: 44268 - protein, 185 aa, Zea mays
  Clone ID: 701179020_FLI.pep
ASVIASSISLMGRNTTTTLPSSSSSSSSMRSDLVEGFYRLVELLQLLHPQPLALAYELQQPVDQRGFLVALLVVGLEAHLVLLLLFEARLAERLELPVDLVDALADGVDLPARGVRHELQLLADEGQAFGLLLHPAQHGEHLVPHLHLLALDLLLLLLEQRQRRPRRLLRPLPHLLAAARRRAAH

SEQ ID NO: 44269 - protein, 230 aa, Zea mays
  Clone ID: 701180736_FLI.pep
MPSVLLVTGLTWLSWFPFILYDTDWMGREIYHGDPKGTNAQISAFDEGVRVGSFGLLLNSIILGFSSFLIEPMCRKVGPRVVWVTSNFMVCVAMAATALISFWSLKDYHGYVQDAITASTSIKAVCLVLFAFLGVPLAILYSVPFAVTAQLAATKGGGQGLCTGVLNISIVIPQVIIALGAGPWDALFGKGNIPAFGVASGFALIGGVVGVFLLPKISKRQFRAVSAGGH

SEQ ID NO: 44270 - protein, 317 aa, Zea mays
  Clone ID: 701181075_FLI.pep
RAAASQLSLYCTAIGGIGAALMAAFMYHMLRRTDQLTGLWVVSIFCGLIWFIGICHGLFTNRPSSSSPTTAFEPNFFTKLSYSMTLLRYPQAIGSLVAVFLSSFATMCIFTSGTLYAIGGVCIKPVLVLALWILYFLFPLISLPLLHPIQIIIRADAVRMQLLGFIICLFVSGAGFYFKSHRWRAAHIIVIALVQSTANGILYAFGRILLLDASPPGKEGAFSVWYAFVRVTGAMIGFAASSAGPGRAGGSFAAAFLGSFLGIIVLIFGNVSNIGALKAAGHLKGMDDEKRMGGLGMEKGEGMGSAVADSGESRGRV

SEQ ID NO: 44271 - protein, 188 aa, Zea mays
  Clone ID: 701181412_FLI.pep
SILQSSSSSPSRTPPPPAMPPGSASAAAIATRFATHWIADALAGDEYIDFSVLKVLVGASSKPLAGAPEFTRERVALRCIQEVSSVIAAGGDAADTAGVLRVDGAQSCQNVLFQLMREVGSPGDLEKDLLPHFSQDIQEYLCTEKFMLPETSFQMFQSCCESSKTQKTLVDSRRRSNVEGWDGKILST

SEQ ID NO: 44272 - protein, 381 aa, Zea mays
  Clone ID: 701181470_FLI.pep
RTDGTEVMEAAPTTITVQVKFAGRTIPVEVPAAASGAELKRLLQPLTNVLPRGQRIICKGKVLQDAASLSSMQVVGGSKVMLIASQGLHQGDGPITNNSSSSATTVRRPSNVKENQTQKPEVVVTKSRSERWKLTGVVALQDCDLKVIPEEVWDCGTSIRILDISYNCIKEIPHKISALKSLNKLLLTENDIVDDSICWEGLSCLQKLLNLSLSENRLVSLPPTLGSLTSLRELCVAKNRLDNLPVEIGLLKHLQVLIANNNRITSLPSSIGDCESLTVVHLSSNLLTELPETFANLRNLKNLLISNNGLTSLPAAFFKKCSQLTTLDLHGTEITNDVLRQVEGWEEFDQRRRQKHQKQLDFRVGSSGVFDEGADDDNRRR

SEQ ID NO: 44273 - protein, 60 aa, Zea mays
  Clone ID: 701183312_FLI.pep
LTMACVGWRRSVYISGTSARNTLNFWMSLWPQLGRTMDKRSLSSSCRDYCCSEVCWWDSS

SEQ ID NO: 44274 - protein, 139 aa, Zea mays
  Clone ID: 701183701_FLI.pep
RKVIFEIEELKDEKPGNRADNSKTLGQVVMVEQNEIENRLNQEHLQSLRLKQELTGLENRNAELTEELHLVQDQLSIEQTRASKFENEISDIQQRLQKMDTLEKEIESLRYELDSTVSEEESSSGNELHRSRGFWRWNG

SEQ ID NO: 44275 - protein, 297 aa, Glycine max
  Clone ID: 700830206_FLI.pep
SSGDRTFASPLARKLGEEKNVPLSSIKGTGPEGLIVKADIDDYLASGAKEVSASSKAKVATDAALDYTDIPVSQIRKVTASRLLLSKQTIPHYYLTVDTCVDKLTSLRTQLNSLQEASGGSRISVNDLVIKAAALALRKVPQCNSSWANDYIRQYNNVNINVAVQTDNGLFVPVIRDADKKGLSTIGEEVKQLAKKAKENSLKPQDYEGGTFTVSNLGGPFGVRQFCAIINPPQAGILAVGSSERRVVPGSGAEEFKFASFMSVTLSCDHRVIDGAIGAEWLKAFKGYIENPETMLL

SEQ ID NO: 44276 - protein, 101 aa, Glycine max
  Clone ID: 700836954_FLI.pep
AFFLRPDKDSKYRNIWNLYHSWFGRMALFFAALNIVLGMRAAGAGNDWKAGYGFLLSIVLVAVIVLEVLAYLKRSEKRSLPQTFQMDPVGDANFPTNLAKG

SEQ ID NO: 44277 - protein, 210 aa, Zea mays
  Clone ID: 701159828_FLI.pep
DVSLAISSSTPDWRTRHHEGADRCPCSPGARCERRLQYKRRLWLPDTTVSSTASVLYAASVLSAAAAAAAAMAIPHSTTAAKPVPAVRILRRRQRRQPVPGPVRRVPEAPVQPGGDALRLATVPGAAAAVLPPDQAGGAAAPVPGDIRCGPAVLPAAAAAGRARGADGGPGSAAADGDVRPAAAAARSLPLQRSCRRCLLLRKLCTVVIM

SEQ ID NO: 44278 - protein, 97 aa, Zea mays
  Clone ID: 701160334_FLI.pep
LTRGRSLLFPNSMRHVVNSTPNHEHAGGSKCKRDGNGGDHIVAPFQVGVLGHVLEMMLQLEEPLTWQKWCFCHPGCQGERCVGRRRSRWGIRRGRLT

SEQ ID NO: 44279 - protein, 95 aa, Zea mays
  Clone ID: 701160382_FLI.pep
IDKKISMGTEDCRQRTRNMGGDISGWSARQSNQMPVTTNETNRYNLHRPQPNTYLKSPIKKRNQQIMKTQEQIQNPIPRMKSVDPHRREEKASLR

SEQ ID NO: 44280 - protein, 188 aa, Zea mays
  Clone ID: 701162862_FLI.pep
CRRQTCGLGAAPRPPARLLLLVHAVLVLLHDPHLLDGLRSVAPGGAVGDLDQDVRLHPRLSVHQTAAPVHPVDQLVLAGRGVDVDRAVLVDLLLDQHLRQLRHHPLLDPPPDWPRAIHRIVRERQDDVQCGVGHSQSDAPFGKTDGHILHLKASDLPQLLVGQRIEDHDLVETVQQLRAEVPPHLLHD

SEQ ID NO: 44281 - protein, 258 aa, Zea mays
  Clone ID: 701162939_FLI.pep
TKPYDSRWREAFLDNVSFHSSQFSVKELPDNTVEFSTLYYGVPGHLPKPDDEASESILFRVKMVCRIHGSGDVVLDYEVNPRSDLPPLPRVGVVFSAGRSLSHVTWYGRGPFECYPDRKAAAHVGVYESSVEELHVPYIAPVECGGRADVRWVALRDAGGLGLYASAHGGSPPMQMSASYYGAAELDRATHVHRLVKGDDIEVHLDHRHMGLGGDDSWSPCVHEQYLLPPTRYAFSLRLCPLLPSSSCHDIYRSQLPS

SEQ ID NO: 44282 - protein, 69 aa, Zea mays
  Clone ID: 701162952_FLI.pep
RDVRAELCLARTSIKCFFLPSSYLCSVEHCQRQRSMKLVQLQCKEIQPSHSPRAVRKECSWVIYLSRPR

SEQ ID NO: 44283 - protein, 299 aa, Zea mays
  Clone ID: 701162958_FLI.pep
QRTMVLAHWRASPEAVDEGEERVDVPLLGRVLDGPGGAAREQEHGGEALQLQLGLSERLLLAVGAEPGHLHAAGPRQPLGQLHVGGLHGLAERAPGRVQHHEPRLGAALQAQQVLDPGAGEGHDGGALEDVRGARRAVAVGSPGGRRRRRRRLAVLVDVALVEAALLGLGVLPPPPAFPLVLPRQDRPGARLAPDGHVALGMQGVDRDVHGPQESPDVLAVDVGHGVPLDQATSPAVQAFEGRVNLDQRDAGPGAGGLVLPLAGDPRPEPPERPAQGPHLAHAAALLVAVLVEGEEALG

SEQ ID NO: 44284 - protein, 143 aa, Zea mays
  Clone ID: 701163059_FLI.pep
ASAITTTVRATLRPPDASAITTLRATVRSADAAGGADVPDRHAEAERVRGRAERADPPGDRAGGQVQVLPAGAGGGGPGRGAVPLHHHPRAPAQHQHLPPHRAQPAHHLRQARAVGLPVPAALRLMNTTTSQHFYTRRHACMM

SEQ ID NO: 44285 - protein, 85 aa, Zea mays
  Clone ID: 701166637_FLI.pep
QHQRLRRRLLHELEVPQPLLLLLLRRRGPLHRHLLLRGLVAGDQGGVVGCGIGHGSSPRGWIEEGWGDFRLRSVGILGFVWIFIR

SEQ ID NO: 44286 - protein, 373 aa, Zea mays
  Clone ID: 701166747_FLI.pep
ALSQLSNCALTQTGASRRYLLRGSARSRVGNCSGAAACVPAVSFIAPYQASLGCQRATTSATQPGTPTTLAARAALSRSVVPMDPPQELAAAGRKRRRRGGVRNRKRLSSQKGLPPATAPPTPASPPVKRRRKDIAGQAAAMPKRGNTSSLLDKMRARLSGGHFRMLNEKLYTCSGEDAFDYFKNDPNLFDVYHTGYQEQMSHWPEQPVNVIINWLKSQNASWTVADFGCGNAAVAKNLKNKVFSIDLVSDEPSVIACDMAHTPLEPSSIDVAIFCLSLMGINYPSYLEEANRVLKPSGWLVIAEVRSRLDPSNGGADPEKFSKAIIQLGFSLVSKDVKNRMFILFYFRKKEKSKVAKSIDWPQLKPCLYKRR

SEQ ID NO: 44287 - protein, 83 aa, Zea mays
  Clone ID: 701166759_FLI.pep
MITPATVLPAPAVSAATPSPTGPGASASLAEGALALERLVLVGASATGAGAGALDFFFLFLEDEEGFFFFLDGAGAGTSAGLV

SEQ ID NO: 44288 - protein, 135 aa, Zea mays
  Clone ID: 701169356_FLI.pep
DLALGLQSHSDMGAITLLIQDDVGGLEVLKDGMWIPVPALRDGILVILADQTEIITNGRYKSSVHRAVVNAEHARLSVATFYDPSKSRKICTAPQLVSENEPQKYRDVIYGDYVSSWYSKGPEGKRNIDALLIQH

SEQ ID NO: 44289 - protein, 121 aa, Zea mays
  Clone ID: 701172304_FLI.pep
HAVQISSRINGLLGNGGGVVIVGCWKCLESLSVMVSSTRCSAYVAQNILLLCLLILMAGLGKQNIESIFFRHFYRYSILHSLRVKRFDFKCNVFVGFFQTTGDDLLSPKMRFKWFPFCRLL

SEQ ID NO: 44290 - protein, 88 aa, Zea mays
  Clone ID: 701174568_FLI.pep
LSLLPFDSYKQQPTDGTAFFSLLLFYRCRGVMALLSEKLCPMNRTMTVAQYYLFFNLTSHFLLDPRSETILFMLRIFGSESTWQFFGT

SEQ ID NO: 44291 - protein, 181 aa, Zea mays
  Clone ID: 701174755_FLI.pep
KEEWDKKQAEEADKNKKQTEADGSGATELEKEKEESRPKNVKPNKEEDDKMRANAANVAARQAVGGSDMLSKWQLMAEQARQKREGIDVSAASQPGRGPGSRQLSKFGKGPGEHPEGSKRSHSMAFGTGGMKRPGRTAFAGPQRLISVKDVICALEREPQMTKSRLIYRLHERLPVDSTVD

SEQ ID NO: 44292 - protein, 88 aa, Zea mays
  Clone ID: 701175504_FLI.pep
SLPPLLLIYQGICASKLTTGQLWAGAKCLIYLFLFPAEPPPAAAFPPDPVALDLAAGAFFPRGPSPLLFRSSCTWIPFFLSLCRSSFG

SEQ ID NO: 44293 - protein, 219 aa, Zea mays
  Clone ID: 701175682_FLI.pep
ADLLSRPASAGEGSQGSSGPWSYLEGFTPVKSIGSMSASHSYLLVPSPSMRYLSPATLQLPTCLTSESPPLAHLLHSKGTAIPLAMGYVVSKAVPPVRRDSAQLTKDEQPSVLSVSIIDHYGGSSGTVQEKMSRGGGGGSKQARNLSQETTGRECEMEMHSVLEAVAAELHSLSWLTVSPVYTERRTALPFHCDMVLRMRRLLHYADKYLSEPKGETTH

SEQ ID NO: 44294 - protein, 120 aa, Zea mays
  Clone ID: 701177615_FLI.pep
VNARVWTGDEPRHPGGGRGGHAARGAGVLPPAGVGAAQVLLRRPQQGDPAVHQLQRAHGEGQQLARLPAPALLPPPELRRPVAVKPAVLQVTVPSSLNPSLNLISSLSLSLSGEADFTAL

SEQ ID NO: 44295 - protein, 306 aa, Zea mays
  Clone ID: 701178420_FLI.pep
RAVQPPDAGRELQPDLRRHPAVRRRAAVDHQPHPLPQPAHRRRPVVPGLVPAAPAGPQAQCALRRRARPAGRAAVPVAVREQAQRHGGPGAAPAGPAELPGPEREPAGGPDPGVGVRAAAVRAAAAEELLRGAGAAVGRRDDPSGGPELQPVLGPAVAAPRGRRAAVPEQQPVQRRGPRAAGAGAGGLRRPAGAVPAAQLPDGHRDIAVVVAPFHGVALPDVQLHGAAGVRAVPDQGQVAEHAAGRPVPGVEGLRRQCQIPDHRRRTTDGDCETAVSDSLIVFCPVVTSVSYYSFPVWGRRIVTDM

SEQ ID NO: 44296 - protein, 74 aa, Zea mays
  Clone ID: 701179930_FLI.pep
LISSYPRRYDEYQQGRKKEFFFVLAKEFSNRQLNKPIMVISYPANNSPELKQPFYWCKCQGGPNTYIFLRPGNS

SEQ ID NO: 44297 - protein, 205 aa, Zea mays
  Clone ID: 701179970_FLI.pep
HARRDRGHDQQLPHQDRRRRVRRRVQGRAPERLAGGREEDRGRRDAGQARVLHRNRRHWQHPPRQPRPAPRLLHRGPAPPPRVRVHEPRLSRQVAVQADRPSAGVEGADGRRRRGGEGAGVPPLRLRPEDHPLRRQAGEHPARGRRPGEDRRLRAREIPHAGAVRPLHDDEGHPRVPRAGVAQQRGHHRPHRRVQLRNGAPGAGA

SEQ ID NO: 44298 - protein, 159 aa, Zea mays
  Clone ID: 701180507_FLI.pep
RTGPMSLVAYDASSDEEDAGEPAAAAAPHPAPIGPQPRPPSPTAVSPAPRPTPTLTPPPPAASQSVAPISSSDVSLPTSSLDLPDVADLFAPPADNASRKRESNGSALHDSRNKFPRMQSQSQGIGSAAGNALIPPQLRGRSNVVTEDMSKLFVAKRKE

SEQ ID NO: 44299 - protein, 187 aa, Zea mays
  Clone ID: 701182722_FLI.pep
SYLTRVFQTDRYRRTTRRVGEAQKQGSNFFFSIETRYMLLLKSFEASSKLLRRLGLVGRLNEARNFSVHHPPRPPVELGRHDRHRLAGVILPVLLLVELLGDGGPDDAGVEGGDVGADEWREGARRAVGLHHVPQHRLLPLVELPVRVPPPEPARHRSHLLLPLLPSQYHPCLRSRDLAAGGPVLET

SEQ ID NO: 44300 - protein, 175 aa, Zea mays
  Clone ID: 701182906_FLI.pep
TTSTQTLSRRFHFHRRPQPHQSSSTAGVTNGNPAATTASDIDPLFPTGPSFLRPLARYCLSVEGVLRVSLGRFIIFVLCPMPPLHLSYPPAQPLPLSSLLSRIGNQLGMAELMAVYPWQVMAGFLTLSMFVMLEKMIKHDHLSPITENCEEFLIQKNTLKGPRSPDGDNMLALGK

SEQ ID NO: 44301 - protein, 102 aa, Zea mays
  Clone ID: 701184374_FLI.pep
LWSQILNHARNFVPARRRRRHLRPLQRQHRGRLRFECDRLVPRLPRRRGRPAAPPSDPGVPVVLRDAALLRTQPPLRHVGHSAAGRHRGRHRASPRAGGRTL

SEQ ID NO: 44302 - protein, 166 aa, Zea mays
  Clone ID: 701184582_FLI.pep
PVEEIEVEGRGQRHGRLHRRFDATPAAATARFQGGAVAAGATSTAGDGDGEGEREVSLGLGATELAGGDVVGLGGLLGRVVRAQPHATLLGWVADLRGVASPRPLPHASVVWTQAHASDSSANAKLQAGGQRQWRLVRHPGRHGAQVACVRGSSGSARSCGEAMCV

SEQ ID NO: 44303 - protein, 93 aa, Zea mays
  Clone ID: 701185127_FLI.pep
PLPNLSLAASTHRNNKANDDAGPAAHGLHVLLIGQRRGAEGGGGGGGAAGGAVRARRAGGGAGGDGHADAHLLLPAEEGDLHGHEGHGAPGGR

SEQ ID NO: 44304 - protein, 81 aa, Zea mays
  Clone ID: 701185342_FLI.pep
KASSKPAAINVRIICQLTRLHFFLISPCCWPVSTSMVDILTMESAKSRKNSAVKSPVAWRWTYALVAGSVSSAASEWKSPR

SEQ ID NO: 44305 - protein, 405 aa, Glycine max
  Clone ID: 700832181_FLI.pep
VFFQSHACESLEGNSNQTSSATTLIRKMGVSGNNEVLVTTKVVVDYDRASELKAFDDTQDGVMGLTDAGVTKIPLIFHNPKNSHHDESDDGSGSTQLSVPSIDLVGVAEDPATRKVVVEKIRQACETWGFFQVVNHGIPLSVLEEMKSGVNRFYEQDSEVKRELYTRDPLRPLVYNSNFDLFTSPAANWRDTFYCFMAPHPPKPEDLPSVCRDILLEYAKEVKKLGSVLFELLSEALELNPNYLNDIGCNEGLTLVCHCYPACPEPELTLGATKHTDNDFITVLLQDHIGGLQVLHENRWVDVSPVPGALVINIGDLLQLITNDKFKSVEHRVVANRVGPRVSVASFFSTSLQPSTKLYGPIKDLVSEDNPPKYRETTVQGYVSYSLGRGLDGTSPLPHFRIKDF

SEQ ID NO: 44306 - protein, 54 aa, Glycine max
  Clone ID: 700888545_FLI.pep
LLNAFISQTPLGRIGEAEEVSSLVAFLCLPAASYITGQTICVDGGLTVNGLYIN

SEQ ID NO: 44307 - protein, 74 aa, Zea mays; identical to SEQ ID NO: 37926
  Clone ID: 701160493_FLI.pep

SEQ ID NO: 44308 - protein, 172 aa, Zea mays
  Clone ID: 701160796_FLI.pep
VDTAAQYGVEKEVGRGLKAAMEGGINRKDLFVTSKLWCTELAPDRVRPALEKTLKDLQLDYLDLYLIHWPFRLKDGAHMPPEAGEVLEFDMEGVWREMEGLVKDGLVKDIGVCNYTVAKLNRLMRSANVPPAVCQMEMHPGWKNDRIFEACKKHGIHVTAYSPLGSSLTDPA

SEQ ID NO: 44309 - protein, 123 aa, Zea mays
  Clone ID: 701160868_FLI.pep
ERVRGSIDRRVIQIAAIVLLRCSTLTLSHRALNTLPEPVQVIVPQTLKTRSGNTEGSRRREGTGGTAHHHHLLNLSLRQTVIRMTRTAGGRVKEGVVGAESSELHKAVWMLNIIIIYLCSIHE

SEQ ID NO: 44310 - protein, 226 aa, Zea mays
  Clone ID: 701163301_FLI.pep
TSLPTSEKGSFIKSVLREKLKALEEFSASDSLPLRPGVEKFIDDALGEAVPLAILAAYGRNGEKISRSIAMKLGPERISKIKIVGNVEVEESFYGQLVLGKGATSGLDEQLVREAQKAASAEKQRIAEKVASILKLSVDITASESSDKVIAALRAGSEYVGCDVQNCILVAGSQSGVLAAERIGMPCIVVRSSFTARAEFHSAKAVMDGFGDTDLTVSKLLSKKWF

SEQ ID NO: 44311 - protein, 140 aa, Zea mays
  Clone ID: 701163326_FLI.pep
NMLRQCYEFIKQDDSLLNANLALVRADISRLPFASCSVDAIHAGAAIHCWPSPSNAVAEISRVLRPGGVFVGTTFLSSPRNNPFSVEALRPLRQIVGPVNTSYNYFTEGELEDLCKSCGLVNYSSNVQRSFIMFSGQKPY

SEQ ID NO: 44312 - protein, 132 aa, Zea mays
  Clone ID: 701163715_FLI.pep
SCKFRIQSSPVRGIALDGAGQMEGLTSSEIAGFVVGALLLGATIAAPKVDGFIASSQRRSLGMCKRCGDLRIVACSQCKGTGSARSGGMLSLGVLDDLYESLGAEAKTENLVPCTKCRSRGRLMCPECSKVA

SEQ ID NO: 44313 - protein, 291 aa, Zea mays
  Clone ID: 701164171_FLI.pep
GLVTLWQVETRGPSLSFRGKTDFFSPKHRWPEDIAWHPDSETIFAVYTADNGDSQVSMTNLISGQRKVTFLPEKPHTKGIINDISFMPWSDVCFVTGGSDHGVILWEDKDDLWKPKRVHKDFHSSAVMGVAGMQQKKTILSVGCDKRIIGFDLSAGRTEFKNLIDSKCMSVLANPCDCNLYMVQTGAPGRQLRLFDVRLRQSEVHAFGWKQESSESQSALINQSWSPDGWYMSSGSADPVIHIFDIRHHGQNPCQSVQAHQKRVFKAVWHRTLPYLTSISSDLNIGIHKYS

SEQ ID NO: 44314 - protein, 251 aa, Zea mays
  Clone ID: 701167204_FLI.pep
AQDSSILYKDRLAKTGRFTVGIDPDKFNETLKQDEVQARIKELNERYKDMKVIVGVDRLDYIKGLTQKLHGFEQFLTDHPKWQGKVVLIQVAVPSREDVKQYQDLETEISCQVGKINGKFSKPEYSPIIYLHRSIPFTELTALYSIADMCLLTSSRDGMNLVAFEYIACQEQRHGVLALSEFAGASVFMADGAVQFHPANIKEMVQGIYKGLTMSKEERKERYDKLEKFVHTNTSAKWGQDFVTELSKLHA

SEQ ID NO: 44315 - protein, 92 aa, Zea mays
  Clone ID: 701167273_FLI.pep
MEFTRVTVPSVLGSLVMMSAVLSGIQYFQYCTSSCECCYACARLLCNLKDFCSSCIKQRQTNFEYLGLVWLFQFYVYRTVLEWIEMNFDFYG

SEQ ID NO: 44316 - protein, 333 aa, Zea mays
  Clone ID: 701167287_FLI.pep
GRAVDVGSVAFTTSLNLLSRTIFSCDLTNLDDHTGSAKEFQEVVTEIMEVAASPNLSDLFPALACADLQGLRRRLAKLFARLHQVFDVEVDRRLCERDAGDRRKNDFLDLLLDTDGGTAALDRDSLLSLFTDLFAAGSDTSSSTVEWALTELLRNPVPMAKTCDELLAATGAARNIEESEIEQLPYLQAVVKETFRLHPPVPLLLPRRAGAATRAMGHTIPKGARVLVNVWAMGRDGDVWPDPEKFMPERFLGRPTDFRGGDLELIPFGAGRRICPGMPLASRMVHLVLASLLNQFRWRLPAEVERDGTDEMAESFGVTLKKASPLCAIATPV

SEQ ID NO: 44317 - protein, 165 aa, Zea mays
  Clone ID: 701167363_FLI.pep
YSLPLPSTVMHSKSPEKQSLLGSRRNPANNGSTEDEKGDGGIPWLTFLGFVFLTFNSGMAIYRSDRDPGSIAFVSGSYVDLLLLFLCLRLFERTPPDSPRRGWIKACVWGLTTLLTVMFSQKVAAIMPPLLALVVWAMAFATIGGGFYAFFIHKDKAALVEAENP

SEQ ID NO: 44318 - protein, 158 aa, Zea mays
  Clone ID: 701172714_FLI.pep
AQIINYTECFTQEQQYWGWQITPTTALHLPFWNAYTWKTQMVLTCSGVSTELPPLILGCNPTLFYFVNKRGDAIFQKKQKQHTEASPWQVNLCTLKAKSSHPNPPSQQCAVVHFLLSVFAFNPSGSPAKLTGRCRTLHFPSFLHHLSIIHTCHSSQER

SEQ ID NO: 44319 - protein, 77 aa, Zea mays
  Clone ID: 701173419_FLI.pep
FRHIKLQFLNGRCCCYPKKAASAPCNLEPQVKPSVRDSAHKLLPNSGLLQVLIYAGQCYWLTLQLGRSLSIQFTGML

SEQ ID NO: 44320 - protein, 105 aa, Zea mays
  Clone ID: 701175701_FLI.pep
SSSRGEHCGVGERGIYNGSAECFGNGGAGAALGMAASPLGVLSRRSLNAAPVSSPRASVAPATKRNPDEQTQLPFDDPLMSQQGLFTIGASSIDAAHYMVYVCAT

SEQ ID NO: 44321 - protein, 275 aa, Zea mays
  Clone ID: 701175975_FLI.pep
IEELGLSCCDMVTDRGLGFLAAGCPNLKKLDLLQCTRLTDQGLINLASGCHKLEEVILYECEEVGDEGLMALCENCPNLQALMLSNTSITDRTLRHIAAYCKNLRVLHLSRCAVSSAGIAEISLECPNLQTLVANSCKNVDDTALEKLSRGCKQLNVLHLSGCPVTDTGIKKVSRECKAIQVLNLNGCARLTDESIQSIALGCPQLHTITLNNIENITDTSFEVLINTCKDLQKVHIMSCPNITSQEVQAVQQKSPKLYIQSQYNLSPVAPSLMK

SEQ ID NO: 44322 - protein, 457 aa, Zea mays
  Clone ID: 701176046_FLI.pep
DCVRLNFSHGTQEDHRKLFNLVKSLSVKYQHQVSIMCDIQGPKIRTGRMEKPFEIRAGEKIDVTPEDVLGTPQLIQIKYATMLKDLDAGDVIFINDGIIKLTVESKSEKALHCVCNAGGQISDRKGCNIPSGNISLDVVTPKDDKDLQLIAELNPEYVASSFIGTAEDVLKVKKVLAGYGNTNIKIISKIERPVALENIDAIIEVTDGLMVARGDLGVEIDTWDVPSAQKMLCQKANAAGKPVIVATQMLESMTQNSRPTRAEANDVYNAVLDGADAVMLSGETATGKYPIAAIQVMDKIVEAAEGHMPERLSTNFLSTKVGMTETIALSVYETAKNFTRIGRKCKIIVITYPPSAYTARMVSKFRPPADVITITSDLRIAREINLLWGVRSVHFPELSEENNMEVRNLTAIKKLIEVGLVQLDNYVICVSRSLFGKHTGACSNVYCLPVLKEEGLL

SEQ ID NO: 44323 - protein, 183 aa, Zea mays
  Clone ID: 701176117_FLI.pep
DLQIAPPNPLLPPSRARPRSRARSVGHGAGVGGAGLRGGRGGDHAAAADAAGARRPAPGHDLRGAERAEAHDVGGALLPLPAHGHLLEVRDAPHLRRRARLHPLRAPPPPEVHHEVAAERAPHRRRAAPLLDPLLRHPARRQARADAAARRQAQEARRLMDPHPSGGLVLPLPALSSCFMLWC

SEQ ID NO: 44324 - protein, 230 aa, Zea mays
  Clone ID: 701176186_FLI.pep
GMTRDDLFNTNASIVAALADACAQYCPKAFLAIISNPVNSTVPIASEVFKKRGVYDPKRIFGVTTLDVVRANTFVAELKKLDVASTKVDVIGGHAGITIIPLLSRVQPSVSFSDEERASLTTRIQDAGTEVVKAKAGTGSATLSMAFAGAKFAFSLLEALNGKEVVECSYVKSDVTEASYFSTPVKIDKNGVKENLGLGKLSSYEEGLVKASIAELKASIKKGEEFVNKN

SEQ ID NO: 44325 - protein, 79 aa, Zea mays
  Clone ID: 701176265_FLI.pep
KVIIVPQIRNTRCSIQTDSIAGMRSTQQHNQSTYNDSAVNIHKRNCTKSSRIYRVTVTLMHLHFSTTANQQVNSMHMSN

SEQ ID NO: 44326 - protein, 92 aa, Zea mays
  Clone ID: 701176283_FLI.pep
LFYKLLKKVDKFQWTSEAQEALEALKKFLATPLVLKPPQRATSTQPAEDLLLYISCTTHVVSTALVVERAEEGHAYPVQHHVYFISEVLGPS

SEQ ID NO: 44327 - protein, 71 aa, Zea mays
  Clone ID: 701178481_FLI.pep
IRTRCRAEYKHNGCYTDCARNCSYRQDWTFIYKKTIFLVNFSIMLNKKVALPSLHQNSDLQQEATSPNSTI

SEQ ID NO: 44328 - protein, 194 aa, Zea mays
  Clone ID: 701178645_FLI.pep
GGRGGASRRGGLDLPTCLLRWRPGLVGLPEVPPDASASVHGQPGHPAPVLWRRHEQSLRRRCRHDRFLRWSRRRQHEWFLGLLLLVPGLLCFCRHRAVLYFLCFGVLLLVAARLATQRGVRGGGLELGERAGLARLEPVPAATSHSVAAASSGLLLFSVTISKVSTVARRETRGNAKQNKADQQEEDAFISFVL

SEQ ID NO: 44329 - protein, 168 aa, Zea mays
  Clone ID: 701178687_FLI.pep
AAMTTTAAGYGCCWAGIPPFALLPRILSTRRETPPPPPPRASLVASSSKLRALAPRLRVSNRPRRLIVSASSSGEANSDAAPSPTEAAIDIKLPRRSLLVQFTCNACGERTKRLINRVAYERGTVFLQCAGCQVYHKFVDNLGLVVEYDLREENELQGENAVDTSSED

SEQ ID NO: 44330 - protein, 133 aa, Zea mays
  Clone ID: 701178735_FLI.pep
WVATADHFKKKPRFPITLKYIDPTYMIRAVSSNASDNVYCTLLAHSALHGAMAGYTGFIVAPVNGRHAYIPFYRITEKQNKVVITDRMWARVLCSTNQPCFLSHEDVENMKHDDDEHHLHNTLLLDSPENSSK

SEQ ID NO: 44331 - protein, 156 aa, Zea mays
  Clone ID: 701178737_FLI.pep
YCSDQTHFAFRKAAHIAGIHRDNCREIATYRDDMFALSPAELQAAMQADVDAGLVPLFLCATVGTTQTTAVDPIRGLCAVAATHGVWVHVDAAYAGSALVCPEFRHLIDGADAVDSFSMNAHKWLLANNDCCALWVKKPALLVAALGTEQEYILKD

SEQ ID NO: 44332 - protein, 175 aa, Zea mays
  Clone ID: 701178783_FLI.pep
IGHAFKERQARKQRSWSRLNVSELSGPILNENNPDARCLCWMLLVLVPPGMESQTNSFVSKWLLRKLMGYGTGYIGLVVSSAGLSIWTEWISFPNACCLSVVRASDQQVIDNDIWSCFGQYDMAAVVSTMLLVTGVTTLLHMFVGTRLSTCAGSILFIPGSCPCDHQLTRILWDQ

SEQ ID NO: 44333 - protein, 174 aa, Zea mays
  Clone ID: 701178895_FLI.pep
RATADRQEMVTKQNNGRKHYTYLHAHKAATAKRMAVTSLSAPALVKTAPFVGPEQSSLLPLKHPGWMAAFGTSPSTLKLVVGLPSLNRTHQKYGPPPSVPLTAAPTSVWFLLRSIWRPFASFTNKTPKASAGAKYWDWQATSLPVILERVVAWTPQVGANVSVKLDSIGFLSST

SEQ ID NO: 44334 - protein, 124 aa, Zea mays
  Clone ID: 701180577_FLI.pep
PPAPQARSVDGRRTWRTRGATRRPHSSMPPGEDRNLRAQVGGAQGRKLPPSGERVDLQREHRSCCCSAELIARNCGLGSETSLAPATSPPAIPRTLGRGTFWKIQASTISVDAFELMCVFLQER

SEQ ID NO: 44335 - protein, 77 aa, Zea mays
  Clone ID: 701180596_FLI.pep
VSSSSRAHTKVDLSKLELTALLRYWRHFNLDACPNPSREQLVDAVQRHFTAQQLDELQVIVGFVQAAKRLKTTMKVA

SEQ ID NO: 44336 - protein, 155 aa, Zea mays
  Clone ID: 701180632_FLI.pep
MGRVQGAPQRGRRGQRRQEVRRRGRRGALLLHRNAQRQLRRRRRRVPRRLPAGLLQLLQLLRNRWLASAQHDGQLSRSTCNERRRLLLEHASSRAGRPASNGGELQLAPPGNEGENCRRRHLPEFLRWFAELAGGGLRGKRCFWLPYKQLLINDG

SEQ ID NO: 44337 - protein, 218 aa, Zea mays
  Clone ID: 701180666_FLI.pep
IWCEKPHSSYSRSPAEDRKRSFHHVHFTRIVGFSIVIHEVKATWSSTSNVTGSSHYPNAGDHHSSTNKTPPGPNGSSWDLDGQFRVQQRKHRVGAEAPQLTKRGDAARGGTHGDDEARVCLAQVLPGETAEDAGQHMTAARVHGTGARVRYANSEVYTNTIQYNPEVVFSVSSVVTDGTDANRERWIVVCRGICRKAELQDPGIAFDVNSWSFPIALG

SEQ ID NO: 44338 - protein, 105 aa, Zea mays
  Clone ID: 700930374_FLI.pep
QNEYNHQLFSMESSLDSPSSGTASNVGKSSETTPVIGTSTTCSLKPFLVIPDRIETSAWRVSFSQLSMESSLDSASHWHCFEHWQKFRNHFGNRNSHNVLTKTIS

SEQ ID NO: 44339 - protein, 185 aa, Zea mays
  Clone ID: 700930453_FLI.pep
TLLLQIIYKHSYYYMIITGVLPNASDDNLRSDSRTSHVSEAAAAFLQHAAAAESSQTSFEEPRGATLVSLVVVVLMLSMRRRVVRTLLVVEVALVPRWRLLWWGVRTLRRRRVHAMGWWWMSMAPRGRRVHIWWRWVRVRLRSRMSWRRVGFLGRDSLVAHLSISPFFVFSLWRQLFLHNLLTNN

SEQ ID NO: 44340 - protein, 132 aa, Zea mays
  Clone ID: 701182986_FLI.pep
NFFNPNRGLYTTSQLHEYFGSKTLNFSSKSVFQVHLHVQQGAFGKDALFGFGLTTYSLLGLGVLGGPLSLPWGLYVLICQRTPEKPCLNDVSDVGSWRRAALIASVFLVVLTLIPLWDELAEELGVGLVSSF

SEQ ID NO: 44341 - protein, 99 aa, Zea mays
  Clone ID: 701183035_FLI.pep
DLLSLVYNKDQSNGEGAKTAAESSKETTKENDTGGKDAPYSVSSSSSLKRQRLDDSFNSMWCDKFDMLTSALKDDGPKLPSSAEVLVVLQEVEGLDEDT

SEQ ID NO: 44342 - protein, 472 aa, Zea mays
  Clone ID: 701183193_FLI.pep
TLQKSQSSASNLSDRIDLAWTGSGQLVNDSSSSMEAVSFIPASLKDNPAYQKVIAPIRIKSFDSAISSRNVDDSNASIRRSYSQRPPKAIERTGKGLSPTFLNKLSLPGMIHGESRLLLSQNDSGVIVPIYDDEPSSMIAHAMTVPEYHSFLLPLLYQNNESNLLNYGSDQPQPITRNDSKYNHFTISFEDEDSNSVDKAKFSVTCYFAKQFDAIRRKCCPDELDYIRSLSRCKRWSAQGGKSNVYFAKTLDDRFVIKQVTRTELDSFEDYAADYFKYLIDSVSSGSPTCLTKVLGLYQITAKNLRDGKELKMDVMVMENLFFKRKVSRIYDLKGSLRSRYNPDTSGNNKVLLDLNLLETLHTKPIFLGSKAKRRLERAVWNDTSFLASVDVMDYSLLVGIDEERKELVMGIIDYLRQYTWDKQLETWVKATGFLGGSKDVLPTIISPDQYKKRFRKAMSKYFLALPDQWSP

SEQ ID NO: 44343 - protein, 140 aa, Zea mays
  Clone ID: 701183195_FLI.pep
APAHPSTDPLGTGPFAIGLPCSPAHHFISSCSPVVPQLQVAYRNTDILVQAAAAKEQSRASRNPAPSIGGTTGLGETWRTAELGELQGEEGSLGARESSAPASARNSRAICRTSTHSAHIKRTGAAAKISRSEVRRLRRG

SEQ ID NO: 44344 - protein, 375 aa, Zea mays
  Clone ID: 701183210_FLI.pep
HLQPRQHVRRAGAHRRVEGPRVHPHRLPQGPLAQQGVPLPDRAAVSAARDRVRRHGEGGAGRVERVRGVPARVAQHHGRADRGPGQLRHRVPHRGHALRQRLHLAVGPVHGAGGAHHRPQALHGGQRQPRAGLARHGGVLGRDGLGRRVRRPRRDLLLLPRREPGQLLVQGGLRHVPLLRGRLGARLARRHAAVRLHRALPLHGGPQAPAVAHLRHAPRAGLLLQRLVRRRRVLRGARGPREPAAPVAEVPRRHRLLRPRTQLRADLPHVPEPVHDQREDPLLRDHERHHLRRRRRRRLPPVQLHHGHPQVEHLPRLRLRLRQAHGVQPLVAAVRVQEEQRQQGLRLLHHRQGLPRRAQMRARQLLPHHASHLVN

SEQ ID NO: 44345 - protein, 236 aa, Zea mays
  Clone ID: 701183270_FLI.pep
RRHVQVQSVISELRERLQSHSMKSYRARFQKIYDSCMCANAPIFTGIEQLPQFSHLQELIGLTATDSVELGDIVDPPVIRTATSILPLGWTGLPGGKNAEPLKVDIIGHDLQMCTLFQAQINGNWYSTVIETLPSATSYSPNGELQPTLQKMRILVGQPLKQPPNYISGDFMIPVMAGADSTPDFGFESFFEDKDCCKGLSGFLIYGTSDFVTVRKEVHVRTRRVRLLGLEVSPCI

SEQ ID NO: 44346 - protein, 67 aa, Zea mays
  Clone ID: 701185506_FLI.pep
YSFLNVSCTKKTNCTWPLYMPLKSLTCRPHAFEHQQNGTLGIRPHHHPTFQIPCRFNQLGTWHCIPS

SEQ ID NO: 44347 - protein, 318 aa, Zea mays
  Clone ID: 701185646_FLI.pep
GLQYLSGDISGGNARCIAMLLAFREAINDYSMPSEKILNRDLTAKISSYVSFLIECRPLSISMGNAIRFLKNRITKLPLAFSESEAKVSLQSDIDRFINEKIIVADKVIVSHAVTKIRDGDVLLTFGSASVVEMIFDNAHELGKKFRVVVVDSRPNHEGQGLLRRLVAKGISCTYTHINAVSYIMHEVTRVFLGASSVLSNGTVYSRVGTALVAMVAHAFGVPVLVCCEAYKFHERVQLDSICFNELGDPDAISRVPRDESLSNLKNWAENENLHLLNLKYDITPSDYVSMLITDYGMLPPTSVPVIVREYRREHVWI

SEQ ID NO: 44348 - protein, 226 aa, Zea mays
  Clone ID: 701185825_FLI.pep
HSNRLMLISDVTCSEIQYQTHSYALLSLLKLAFAISRSCPSHHRSLLELPPLPPSATVDADTLSPAPPPPSGGGGSRWSPSADDGSTSRSRPRPAVLAPSRKELRSALSSRACRYSAFHSLHTCAANPSTKAPSIASPTPRASPSGSHPPLDAVLSMSARHAANTATSLATDRVSTSCTRFLTKGFPSSMNRSWNEATDSTATACARDDRPDDACAPATMPTATRF

SEQ ID NO: 44349 - protein, 133 aa, Zea mays
  Clone ID: 701185927_FLI.pep
NQVTTFFRFLAEIIFWTTKNLQPRNERMSSLVTAQVAMNISTTMELQSCCCYFCTTPLEQDISKNFFCCCWFHEENLNYTQFALRCIRSSPESPKDLRRRGSRRPAPSWRPSARRAWSRRNRRRPPASAGRRG

SEQ ID NO: 44350 - protein, 145 aa, Zea mays
  Clone ID: 701186075_FLI.pep
SDSCDGEPVHCGTCGSCHRRPCCHLLSILGQVSSSWSAVSKHSLTVFFVVAELVSALALAMSLWATVTEGLHRSKNIHHDMDYQCPTAKTGLFGGAAFLALDAALFWLVCQMLALNARADYLDEDDGKGEYGQIYAAQVDDGSKV

SEQ ID NO: 44351 - protein, 395 aa, Glycine max
  Clone ID: 700832621_FLI.pep
LAQNIPMVMRRKEIKDYGTAKAIEGDFKPGQSCLIIEDLVTSGTSVLETAAPLRAVGLKISDAVVLIDREQGGRENLEENGIKLHAIIKLTEMVKILGNHGKLDEEMVGVVTKFLEDNRKVAALAKVEKPVTKVKALPFGERAKLSKNPMGKRLFEIMAEKESNLCLAADVGTAAELLEIAEKVGPEICLLKTHVDIFPDFTADFGSKLLSIAEKHNFLIFEDRKFADIGNTVTMQYEGGVFRILDWAHIVNAHIISGPGIVDGLKLKGLPRGRGLLLLAEMSSAGNLAKGDYTTSAVKIAEDHSDFVIGFISVNPASWPGAPINPSFIQATPGVQMVTGGDALGQQYNTPYSVIHDRGSDIIIVGRGIIKAANPAEIAREYRLQGWNAYLAKCN

SEQ ID NO: 44352 - protein, 326 aa, Glycine max
  Clone ID: 700835672_FLI.pep
LASLFCRKLQNCVVFSPLGVKQAVLFMMPSVNPDKDSEPFVETDPTGRYGRYSELLGCGAVKKVYRAFDQEEGIEVAWNQVKLRNFCDDPAMLDRLYSEVRLLRSLTNKNIIALYNVWRDEQRNTLNFITEVCTSGNLREYRKKHRHVSIKALKKWSKQILKGLNYLHLHDPCIIHRDLNCSNVFVNGNTGQVKIGDLGLAAIVGKNHCAHTILGTPEFMAPELYDEDYTELVDIYSFGMCVLEMVTVEIPYSECDNVAKIYKKVSSGVRPAALNKVKDPEVKAFIEKCLAQPRARPSAAELLRDPFFDEIVDDDDENDDCSCSYQ

SEQ ID NO: 44353 - protein, 338 aa, Zea mays
  Clone ID: 701158593_FLI.pep
GSAATSAFRPAPPRRTPDAEKSLSASSHKTSNILFDLNVADNGSATSGEPLSTAILPASSELPSEVASKAVDVSGGLKLDLNFSCGDEEDAITASNVPSLWNHQQFNGNWSQPSFSSSKQPAARNFDLNDNMSIADVSVRGMDGSSVKTPSRPRDMSDHSAVTIMGKRIVVGQRDDGQQYQHNFLGPSAESRVFARPTQSFAHTPDYSVLSYPSQPAMPFTPAFFAPGGSPYLVDAKGAPVIPPLSGLSLGISHPSFNTRATQPSSNELSYFHPSVDFSYGVSSEGARREAGSYWPMSYQGQTMFVDERMRNVSQDGTSGLVLKRKEPESGWDLYPRR

SEQ ID NO: 44354 - protein, 104 aa, Zea mays
  Clone ID: 701158755_FLI.pep
SNIFTKCFKLLVRKKTSRQSSCSHHLPSLTRLQTHLACQIFCARMMLQQMEGMDGTRTRLQYQLLLGSRLPIDHLEGHIHGPCHPAHQWLDVYRRAQYQNVFFD

SEQ ID NO: 44355 - protein, 268 aa, Zea mays
  Clone ID: 701158873_FLI.pep
EARRRELRVHANAGGGAPRWASAPFTHPATLDTVAMDPDLKARVRADLESFLKGRAYYHRLGRVWRRSYLLYGAPGTGKSTFAAAMARFLGYDVYDVDLSRGGCDDLRALLLDTAPRSLILVEDLDRYLRGGDGETAAARTARVLGFMDGISSSCGEERVMVFTMSGGKDGVDPAVLRPGRLDVHIHFTMCDFEGFKALASNYLGLKDHKLYPQVEEGFHAGARLSPAELGEIMLANRGSASRALRTVISALQHVAPSPPPQRTVTAA

SEQ ID NO: 44356 - protein, 117 aa, Zea mays
  Clone ID: 701159017_FLI.pep
AATCYLQLLHTASVCCIAQAYALLLLGGAVQVQAKPSGEHVVGPLPVDARRLGRRPEDDVEGVRDAGDVAQQRQEEGDEELGAAAAVAEEDAERREDGGEDDLEARRAAAGAHPGPP

SEQ ID NO: 44357 - protein, 77 aa, Zea mays
  Clone ID: 701161531_FLI.pep
RRRKPSPVLTPNPRPTQIYLPRAAVAMPFTPGPYSGVSTLALVARASVFGFGVVYGSIKLSILKATKPKKEEAHAHH

SEQ ID NO: 44358 - protein, 108 aa, Zea mays
  Clone ID: 701161837_FLI.pep
PCATPPPPRFRAFASSRASPPPSSPSQTGSIASAAAAACEHVAEKPATCTADELHYAPVPGTEWRLALWRYLPPPEAPKRNHPLMLLSGVATNAIGFDLSPGVSEAVS

SEQ ID NO: 44359 - protein, 180 aa, Zea mays
  Clone ID: 701161875_FLI.pep
YNSQTFQNIQNIQDIRHHHRANFKTEQKKQQHSVQLVFHQYQKSRTFRTAHCGHLIGTKSEAAESSRGPETRGSLGLGVGSGELLLLEALERLLVRPRLDCKVGLRVEADAEDDDGEEGGHVAGQLPILPLARFPRRRRRPVEEVPLGALLVTWGRPPPGPLAAAAANARCPAQPCPQHT

SEQ ID NO: 44360 - protein, 114 aa, Zea mays
  Clone ID: 701162750_FLI.pep
LFCQADELWALVYSSISFLYAAMAGAAFAFQACLSSPLSSFHFTVMSAFRVELLMPGRSSISCFLSSLLKRRKEEAGLLGRLGSAFSCFFFWRFSLVFLMILSAFSFFLSSWRA

SEQ ID NO: 44361 - protein, 201 aa, Zea mays
  Clone ID: 701162760_FLI.pep
AARGVLHGRGRAWHMGDPRAGAERRTCASRSACRERDELRSARVRGELEPGARHRGRRPSRGLRGCEQEIQPKKRHGTSAGWLWLGEWRSARRNRARRQGSRPANRERRRRCSMAESRACWLAGIHARGHRGTGAGQHMEGTSARRKLDAGESTARREMELNLEKGGTCSEAARLGVGHGRGRAGSSGEQSPGEGTTAASA

SEQ ID NO: 44362 - protein, 382 aa, Zea mays
  Clone ID: 701165213_FLI.pep
CYRDLSFNNLSGPLPKISARTFIIAGNPMICGNKSGDSCSSVSLDPLSYPPDDLKTQPQQGIGRSHHIATICGATVGSVAFVTVVVGMLLWWRHRRNQQIFFDVNDQYDPEVCLGHLKRYAFKELRAATNNFNSKNILGEGGYGIVYKGYLRDGSVVAVKRLKDYNAVGGEVQFQTEVEVISLAVHRNLLRLIGFCTSESERLLVYPYMPNGSVASQLREHINGKPALDWPRRKRIALGTARGLLYLHEQCDPKIIHRDVKASNVLLDEYFEAIVGDFGLAKLLDHRESHVTTAVRGTVGHIAPEYLSTGQSSEKTDVFGFGVLLVELITGQKALDFGRVANQKGGVLDWVSMHACSLCLLYLSDFRFALKLQNEERLSVCL

SEQ ID NO: 44363 - protein, 75 aa, Zea mays
  Clone ID: 701165362_FLI.pep
KKMDIGLRVGHGHPIYSETSFNKFLLSCSRCTQSWRGSMMHTCKFPHSKPRFLKINQTHLHHNHQDYLNNLHVIL

SEQ ID NO: 44364 - protein, 66 aa, Zea mays
  Clone ID: 701165478_FLI.pep
IITVFFLFYRSFFFQSNNSWKVKNQSLGTNQETQTPQSQTSSVSEIGLGGVQNQSIIGQKTDGTIH

SEQ ID NO: 44365 - protein, 100 aa, Zea mays
  Clone ID: 701165863_FLI.pep
VWPGTGWRPTSSRSNPSRGSCSCSHRTFSPHRLGHRSLSTGNRLPFPRPSLSREIDPAVGTYDEHPKIAGFNYIPDFVRPRRLERYRGWQATPLNMKGEK

SEQ ID NO: 44366 - protein, 314 aa, Zea mays
  Clone ID: 701166216_FLI.pep
SSCINALVEGKKHIPYRNSKLTQLLKDSLGGACNTVMIANISPSNLSFGETQNTLHWADRAKEIKTKTQQTTVNEEVLDQPDSETMLVLELQKENRVLREQLAKQQQKLLTAEAQLLASKTSPQRSPAPSSHVSTPGSTQRKTRRSILAAGGGNYFSTLDSKRHAADNAQVRELQRKVSTLESEIEKMKKEHLLQLKRKDEFIRDLINRKDPNNNSEETATVDRRVVTRASVRKAQRDASAAVELKSPSRVFTSPAPTAKKRTFWDIGGNSPSVLAANGRKTRSHVATETPKKASSKLLQPGFARQTSTHQRFT

SEQ ID NO: 44367 - protein, 332 aa, Zea mays
  Clone ID: 701168951_FLI.pep
CIKTLSMNSKYLVSGGTDEALRFYNLETKKEEGMLLHHEGSITCSALHENKYIFSGGDDGEVAIWRTYDMELVGTLGGHSLAINSLSVHPSGKLALTCSRDRSLMLWDLSSGRAAFNQKLSYEAEIIQWSPSANVYAVCAYHTIRIFSSQGGKLHEFEEPGLKHILAFTFLTDTVFASAGESKVITIWDLESESKVLTTLGGFENRVKGLAAVQRGASHKYPYLISISSDESLSVWDLDVSTTQPLVRTTLAGRLVCVSGAMVGGSSKDTPKKKPKRKRLASERQEQDSDAIVELSSEPEQPRKKRKANNNSNNNKNNNNNNNTNNNNQLPA

SEQ ID NO: 44368 - protein, 227 aa, Zea mays
  Clone ID: 701169046_FLI.pep
RAVLTAVRVRRQVPGQVRQQHRGGEELLRLRQRLPRRAPLGRALAPPRHRTRRVPGLRRRQRRRLRRHRLGHHRVQLGRQVRRRPDPRRKGTRASCVYATVFFPFFLSFYPEYIIYIKRTYIQYKCLRVVARVVSFQLLLSGEHSPRHRETLEQYRAKAEHYVCACLGRNAADGNVERSPGGMLYVRQWNNMQYVTSAAFLLSAYSGYLSSSSSSSSVTCAAGGGSS

SEQ ID NO: 44369 - protein, 116 aa, Zea mays
  Clone ID: 701169186_FLI.pep
MAKIPNAVLGQGYGMTEAGPVLAMCLAFAKEPFEVKSGSCGTVVRNAELKIVDPDTSASLGRNQPGEICIRGEQIMKGYLNDPEATKNTIDKDGWLHTGDIGYVDDDDEIFIVDRL

SEQ ID NO: 44370 - protein, 146 aa, Zea mays
  Clone ID: 701169325_FLI.pep
HITVGILFQQQAQHNTCTDVHTGNSTRGLVAFERAAVVVRHFQKPSSEHSRQEPVPQEADDRAVTLLDEANGVGGGDELDAPPPPDPGVLAQGRLDPVLLAPATATASWRRQQGVAEAAGQDDAVLQRRAGALAEVRRHRVQRVAG

SEQ ID NO: 44371 - protein, 107 aa, Zea mays
  Clone ID: 701173844_FLI.pep
VQALKLVCDEGSEFNGSTSFSQDLRIQDVEAMSRASGDVDFVDPTLSAELFTSSARYDAMDASGSFRRYSSSGPLRVGRAGLDKERGLSTGSSSEHVGLQRFRIDSE

SEQ ID NO: 44372 - protein, 145 aa, Zea mays
  Clone ID: 701173901_FLI.pep
LDERRDLLLLSVHLQVLVNTIGGGGTEQEERVETDADTARARAGGGARGGGAGGLGGRVAGLALEDTDLQSLENFAGLVAVADILECLGGILTADIEEDFLTTWVLVDEGSDIVDLVVNDHVQVLLGGVGRDFGVGECFFGHGDG

SEQ ID NO: 44373 - protein, 125 aa, Zea mays
  Clone ID: 701173962_FLI.pep
ASFLEQQSNRWPPGVVGDSALNTRQLRLRGQGSRQAVDGSAGSSRSRLGPVPVSRGYLAGVWRRPQALGRQGNRRFSREGNAGVASSGGDRTADQKAWRCVQSFAPHPWRTGPLVSDLRGEIKRR

SEQ ID NO: 44374 - protein, 72 aa, Zea mays
  Clone ID: 701173965_FLI.pep
DDVCLEDGILAIVKQGDERPLELLAKAYAIKSFDIDPQNPSDVVFTLEWESIGVLPCGEMARRKIIFTTKGS

SEQ ID NO: 44375 - protein, 111 aa, Zea mays
  Clone ID: 701174014_FLI.pep
DQGITKGFTTRWRWSRSYFIFTIAQIFIFILFFFRLKLFSFIELSHSCTSTRLKLFFCSHCLSNNRPRYPCTFHLIFLISKDNLCTIISTLLEKTLSFSCITRQENISDFL

SEQ ID NO: 44376 - protein, 93 aa, Zea mays
  Clone ID: 701174365_FLI.pep
HLRLLVAFEAAVIVEVPGHAFYEARHRRHRRRGGAAVHVPAEGVVDGLAGRGEQLDVGERDVGARHGVAAPEVDGRGARVVGAPDAGVGDAGD

SEQ ID NO: 44377 - protein, 160 aa, Zea mays
  Clone ID: 701174367_FLI.pep
AGWPHRLRQHAVERLHRAPGRRAHAQVHPLLPRLRARPQHGARRRRARRDLPAPSFMWCCVSEENATRGARAASSAVALGFSGEAEKPREEGKLMLSSADEGPGDDDAVEEPTPRTVQLRVRGAAPVTVPILGSGTASSPYRRLCLAPRLRPCSSHPFEC

SEQ ID NO: 44378 - protein, 41 aa, Zea mays
  Clone ID: 701176980_FLI.pep
RRYNHGRSTLNDQAVSSNGTFCFGPEGPVAKGSGLITLTTR

SEQ ID NO: 44379 - protein, 143 aa, Zea mays
  Clone ID: 701177151_FLI.pep
SKRRSQRSRGMDGKSFSNEQQAQQKNPDAVTNSVPSQGQEPLNTFPDSDDGNTNTGPLNGHAAAHVNMEAAISTEDVIRAGGFGAKDDIGSLLPTAIDSTDFEASLRDARGFEGEKAAPSHPGLGWKGEKADGGTKLADVAEQ

SEQ ID NO: 44380 - protein, 159 aa, Zea mays
  Clone ID: 701177172_FLI.pep
NPAKSRRNFSCRLLVRSKIVAESVGRALIGGTCIDSCVLTVPARRQDKSWCLPIAGTGTVFVELPPWRRLVRGRKDDDAMGSRGLHRGHGVGGARRLGVHLPGHRQRGRPRHAQWRDRSVRCRLSYSIGFRWLSCSCILDSVFFVPVHFIHIAMLYRRR

SEQ ID NO: 44381 - protein, 66 aa, Zea mays
  Clone ID: 701177361_FLI.pep
AHSSSPEVSAATSLLLPCVYTVYCYLHRSFSFPAVSHSVLSALLDLEPVFCYELVIMEVRKCRVMN

SEQ ID NO: 44382 - protein, 244 aa, Zea mays
  Clone ID: 701177430_FLI.pep
FDEILKDTEHHACTHTHTCNPPVHDLSHTHTCVHVHTKIVAASPGDDTADSPSENNTNGSGGNGSNAASKKRPSGNRAAVRKYREKKKAHTASLEEEVVHLRALNQQLVKKLQSHAALEAEVARLRCLLVDIRGRIEGEIGAFPYQRPPPAAKNVDLVSGVDQGGFLAGAAAQVTSSCDFRCNDQMYCSPGMQGAVSGQVLGQGACDVSSIQCVGSTRSASTKLPVCGGMDAVPAACLPNVQNK

SEQ ID NO: 44383 - protein, 136 aa, Zea mays
  Clone ID: 701179163_FLI.pep
HGGGGGEAGERDGGWAGGVFLLEGLAPGVPRGGASRGWDGGRQYGADFGPGGAVWRRQGERVWQGGVVVWYFRVSDHQDGDVWGDGEAAAGEGVRVRHGGGGDGEDVLTMTDGVENQDMLFVLLGKTVTEQESAHE

SEQ ID NO: 44384 - protein, 117 aa, Zea mays
  Clone ID: 701179537_FLI.pep
CSVDRPLFRVNRVALPISRLDIPWCTCMVPGGGTAAPPMLRHVRPGAEAQAYVAGKLVPSNLCEVIKDDNRWSWLSLYASFSKKIKRRFCKLYAPRNHIEIDHTCLSTGFSGSGHVD

SEQ ID NO: 44385 - protein, 118 aa, Zea mays
  Clone ID: 701179624_FLI.pep
PANTSQFFPNTTVFMDLITPERFDNKYYVGLTNNLGLFKSDVALLTNATMKALVDSFVRSEATFRTKFARSMIKMGQIEVLTGTQGEIRRNCRVINPVSATDDVVLARPSGFTGVAAS

SEQ ID NO: 44386 - protein, 87 aa, Zea mays
  Clone ID: 701181820_FLI.pep
TFPLDPANCPWQEHLQPIPKVGYLTYLEPWYRKPNMPQGQGRTKKCGEVHIPKATLRLNATSKYHLVKAKFNRNAVPASCLGTDVVK

SEQ ID NO: 44387 - protein, 205 aa, Zea mays
  Clone ID: 701181840_FLI.pep
VTTKCSAALKQKINKFLAYKRAGKSFNAEVRNRKDYRNPDFLQHAVRYQEIDQIGTCFSKDVFDPYGYDKGDYYDEIEAEMKRELERKEQEKKRNPKVEFITGGVQTPHSASIPKIPGLAGVCTLPVPTEGVQKETRPNKKSKWDKVDDDVKNHVVPSGHDNLSATASVALLTSANVGAGYAAFAQQKRKEAEEKRSDHKSDRRS

SEQ ID NO: 44388 - protein, 125 aa, Zea mays
  Clone ID: 701181905_FLI.pep
ACDRIWRCWDHRVQPRRAPARLCSCDYQLPGRGTPTKSFCDSELQSLQGGKGEKLACASWLSMFLSAEVFTIKCDVNSGRQGSERPATGVPRRRRPPWHGRLQGPGVGSFRSVRKDDDDDAPTAC

SEQ ID NO: 44389 - protein, 265 aa, Zea mays
  Clone ID: 701181916_FLI.pep
QLKWENIPVVHRDFLLVVLSGGCFNLFIMGDKVNPWCHWPNPQWKFNTESSAGNLHPPDVGLANADSVALPAYHLNAAPMPFFAASSIAERPLPMGPRHVTTLAPSFESPAPCPSRKRPSVLYQKETHGPTAAPLRRSKGPLDPVPELQGSNETNVTDVGAEETEGVHENTDEIDALLDSSDSDEGPHELDRARRQPAAENETSSVESVASAAGSAPPAKKRRLSSCTDRSVVDTASSARPDHSVEQKPLASDCDAQSCCVGEVV

SEQ ID NO: 44390 - protein, 96 aa, Zea mays
  Clone ID: 701181948_FLI.pep
KAGGKEPALEPESHRIEAPKVVRSSTIMSASGLSLLAGTTTPPKRDQPGAFSRASSMKEGSSELPSGVRSSAEPSPRRSGGSTLFGGLGFLRSYTS

SEQ ID NO: 44391 - protein, 160 aa, Zea mays
  Clone ID: 701182124_FLI.pep
SLKASSGAVSGGSCSRCLWTRTSSRCCRGTSWKWAAPRRRRLQWWSGSRWWPSEARRLCRSALFARKGWNRGSSPLGCRVGISTTGRALVHGLPSGTRARCAGMSCLLMTLSMRSGGRGAILLVVQHHSWVHRCRFELGLIGAMSWMQFHHSTEVRNLTH

SEQ ID NO: 44392 - protein, 206 aa, Zea mays
  Clone ID: 701183718_FLI.pep
RAHDLHGPPPRRRSRDPRRHGSRARRDCQEQGPRRGADLGGPAPHEVHMARGPGDAANDPSHLRQLPAGAGGHRVRRLLHPQGVAGVLGVQRDAHGPQHLHGPGQVRAVPVREPGAALLVRGVRRRAEAVRGDRVRQGGDAGDHAPPGETLQVEALLRGQGQHVRQGPHAVAAERTARRARAQRHGSKQERLLSTLIPTKALFLYL

SEQ ID NO: 44393 - protein, 178 aa, Zea mays
  Clone ID: 701183939_FLI.pep
PEAVAGAGAGGENRVRVGVEHIPRHLQVQLLKQNTSGHHQSLKNEVSSPISVLERKSGELHKVQLHATSAMLPVATMEKATKWEPGDIKGMESHDAYLIASQLNLLDEQQDTVYVAGLQMELQQARDRISELETERRSARKKLDHLFKKLAEEKAAWRNREHEKVRAILEDMKADLDH

SEQ ID NO: 44394 - protein, 223 aa, Zea mays
  Clone ID: 701184169_FLI.pep
HIVCLEKSNFLLTDAAPVPRHRLRYARRPNTSARLRSCLRCPSPRRLFGLLPLVTTCAVGAVRQQDVRSRMMNNNSGGGAGGPGGGMGTGVGGGGDGRHDDEAALTEFLSSLMDYTPTIPDELVEHYLGRSGFHCPDLRLTRLVAVATQKFLSDIASDSLQHCKARVAAPIKDNKSKQPKDRRLVLTMDDLSKALREHGVNLKHAEYFADSPSAGMAPSTREE

SEQ ID NO: 44395 - protein, 184 aa, Zea mays
  Clone ID: 701184261_FLI.pep
GAFMMDGENVDQILAGMEDPQLMDEPEPEEVKAQDSVAAPDADDATGKKSKKKKKKGGFTMDVDGEEFDQILAVIDDLPPPEEEPEPKDPKDEGTAATAALVDDAEGKKSKKKKKKSGRTAKEEEELDKILAELDGVPPVEEDKPTQAPQSAALAKEDVGAAEDGNVEDKAEEGGEVESAAAKK

SEQ ID NO: 44396 - protein, 359 aa, Zea mays
  Clone ID: 701184342_FLI.pep
CWKQREAASVMSSADINAKPPNATLSPYVGSAKSVPIEEAPKRAAENIDSQYWRYDVKRQRHGEAGGGGLCFKFVSSGSCQRGSRCSYRHDEEAVEHYQRNVCFDFLNKGKCERGPECKFVHSLSGETALRDARPPSERRRVESSCWFCLSSPDVESHLVISIGEGYYCTLAKGPLVPNHVLMIPVEHCPSTLMMPPEAEAELGRYKIALSKYFEKQGKTAVYFEWVSPRSHHANLQAVPVPLSKADAVNKIFHLAAKKLGFEFSMVNPDGAKTARESLMSQCESKSGLFYVELPEGRILLHMVDSNEKFPVQFGREVLAGLLSMADRADWRNCKISKEEEIKLVDDFKQGFREFDPAE

SEQ ID NO: 44397 - protein, 225 aa, Glycine max
  Clone ID: 700838611_FLI.pep
TTIIYGQTMSMMYKIVADALEKAGLSYQYHPQDYLNFYCLGKREPQSTNISPTPNPSENRALVSVKKFRRFMIYVHAKGMVVDDEYVIIGSANINQRSLDGSRDTEIAMGAYQPKYTWTEKNAHPRGQVYGYRMSLWAEHLGSLDHCFAEPHNLECVRHVNKIAKRNWDIYVSEEENRMRGHLMQYPVKISRDGKVSALDDYESFPDVGGKILGSPNSLPDALTT

SEQ ID NO: 44398 - protein, 303 aa, Glycine max
  Clone ID: 700838837_FLI.pep
ILLCHNGEFREGIMDGRGGCCIARYVPGASHGSTVDKIMLRFRPIAPKPAAAATASDGSSSESSDAFLKNGTTKRKYVRDNNYTSKRRIRRRKNTSSPEKKQKPVVTLPLLPETPDRKDSRAKDLTPSPAKPVRNNNNNNNKSKNLNIINKNVPVWVSFENRSLTMMGGWCSCVTVEGVTDTCLESEWLGSTDEERRLNLSNDTCPGFISDGYGRVTWTNEAYGKMMMMKGEGDEGQGPVLLVNKVNTVVPHASFTCLVRVVQYSCGKERNSLTVPCDVWRMDCGGFAWRLDVKTALSLRLGY

SEQ ID NO: 44399 - protein, 115 aa, Glycine max
  Clone ID: 700555760_FLI.pep
VELVMQDTSILGAESHPLHLHGFNFFVVGQGFGNFDPKKDPVNFNLVDPVERNTVGVPSGGWVAIRFLTDNPGVWFMHCHLEVHTSWGLKMAWIVLDGKLPNQKLLPPPADLPNC

SEQ ID NO: 44400 - protein, 61 aa, Glycine max
  Clone ID: 700648140_FLI.pep
KEKRKDTPLAAHLYGYTVLHKKAVNHSHATFRPTRSSPRRHLLEKQNGCRQIQGFCQLIMS

SEQ ID NO: 44401 - protein, 249 aa, Glycine max
  Clone ID: 700660235_FLI.pep
TGHRYAYSAGDQLPVHVDWRVKGAVAPIKDQGSCGSCWAFSTVATVEAINKIVTGKFVSLSEQELVDCDRAYNQGCNGGLMDYAFEFIIQNGGIDTDKDYPYRGFDGICDPTKKNAKAVNIDGYEDVPPYDENALKKAVARQPVSIAIEASGRALQLYQSGVFTGECGTSLDHGVVVVGYGSENGVDYWLVRNSWGTGWGEDGYFKMQRNVRTPTGKCGITMEASYPVKNGLNSANSVYESTEVYVSSA

SEQ ID NO: 44402 - protein, 257 aa, Glycine max
  Clone ID: 700668537_FLI.pep
FMRIRCILLSYCHTSYIQHQYADESFSPEPIKGEVQEAKDQAGSFSPELFHGDENEEAIDPEEDRALLEQKRMAVKEEQQRQIQEAMASKPAPSEDNFEMKAMKAMGAMEDGDAVFGSGAEVNLDSEVYWWHDKYRARKPKYFNRVHTGYEWNKYNQTHYDHDNPPPKVVQGYKFNIFYPDLVDKTKAPTYTIEKDGSNGETCIIRFHAGPPYEDIVSLLFLDVTKAFKFFNQITDFMCLQTLAYILVFSPTGWLPF

SEQ ID NO: 44403 - protein, 160 aa, Glycine max
  Clone ID: 700672743_FLI.pep
LMKALQIAEKARDAILSGKFDQVRVNLPNGDMVGHTGDIEATVVACKAADAAVKMILDAIEQVGGIYVVTADHGNAEDMVKRDKSGKPLLGKDGKIQILTSHTLEPVPIAIGGPGLAPGVRFRNNVPTGGLANVAATVMNLHGFEAPSDYETTLIEVVDN

SEQ ID NO: 44404 - protein, 73 aa, Glycine max
  Clone ID: 700680992_FLI.pep
EIGEKYDKTPTQVSLNWLVAQGNVVPIPGAKTAEQAEEFRGALGWRLTDEEVAELRSVASEIKPVIGFPVEKL

SEQ ID NO: 44405 - protein, 333 aa, Glycine max
  Clone ID: 700730632_FLI.pep
TKANVDYEKIVRDTCRNIGFVSNDVGLDADNCKVLVNIEQQSPDIAQGVHGHLTKKPEEIGAGDQGHMFGYATDETPELMPLSHVLATKLGARLTEVRKNGTCPWLRPDGKTQVTVEYYNDNGARVPIRVHTVLISTQHDETVTNDEIAADLKEHVIKPVIPEKYLDEKTIFHLNPSGRFVIGGPHGDAGLTGRKIIIDTYGGWGAHGGGAFSGKDPTKVDRSGAYIVRQAAKSIVASGLARRCIVQVSYAIGVPEPLSVFVDTYGTGKIHDKEILNIVKENFDFRPGMISINLDLKRGGNNRFLKTAAYGHFGREDPDFTWEVVKPLKWEKA

SEQ ID NO: 44406 - protein, 224 aa, Glycine max
  Clone ID: 700730781_FLI.pep
SFSSPRTFTTLALFKSKTKAAPAKTKVTKPKQKVEDGIFGTSGGFGFTKQNELFVGRVAMLGFAASLLGEGITGKGILAQLNLETGIPLYEAEPLLLFFILFTLLGAIGGLGDRGKFVDDEPTTGGVIPPGKGFREALGLGSGPLFGFTKANELFVGRLAQLGFVFSLIGEIITGKGALAQLNIETGVPINEIEPLVLFNVLFFFIAALNPGTGKFVTDEGEDD

SEQ ID NO: 44407 - protein, 334 aa, Glycine max
  Clone ID: 700733071_FLI.pep
AKRMAPKGLIFLAVLCFSALSLSRCLAEDNGLVMNFYKESCPQAEDIIKEQVKLLYKRHKNTAFSWLRNIFHDCAVQSCDASLLLDSTRRSLSEKETDRSFGLRNFRYIETIKEALERECPGVVSCADILVLSARDGIVSLGGPHIPLKTGRRDGRRSRADVVEQFLPDHNESISAVLDKFGAMGIDTPGVVALLGAHSVGRTHCVKLVHRLYPEIDPALNPDHVPHILKKCPDAIPDPKAVQYVRNDRGTPMILDNNYYRNILDNKGLLIVDHQLANDKRTKPYVKKMAKSQDYFFKEFSRAITLLSENNPLTGTKGEIRKQCNAANKHHEEP

SEQ ID NO: 44408 - protein, 324 aa, Glycine max
  Clone ID: 700734851_FLI.pep
GDALRVPAGTTYYVVNPDNDENLRMITLAIPVNKPGRFESFFLSSTQAQQSYLQGFSKNILEASYDTKFEEINKVLFGREEGQQQGEERLQESVIVEISKKQIRELSKHAKSSSRKTISSEDKPFNLRSRDPIYSNKLGKLFEITPEKNPQLRDLDVFLSVVDMNEGALFLPHFNSKAIVVLVINEGEANIELVGIKEQQQRQQQEEQPLEVRKYRAELSEQDIFVIPAGYPVVVNATSDLNFFAFGINAENNQRNFLAGSKDNVISQIPSQVQELAFPGSAKDIENLIKSQSESYFVDAQPQQKEEGNKGRKGPLSSILRAFY

SEQ ID NO: 44409 - protein, 275 aa, Glycine max
  Clone ID: 700736992_FLI.pep
KKKTLANTTIMATSAIQQSAFTGQTALKQLNEFVRKTGGAGKGRTNMRRTVKSAPQSIWYGPDRPKYLGPFSEQIPSYLTGEFPGDYGWDTAGLSADPETFARNRELEVIHSRWAMLGALGCTFPEILEKNGVKFGEAVWFKAGAQIFSEGGLDYLGNPNLIHAQSILAIWAVQVVLMGFVEGYRVGGGPLGEGLDPIYPGGAFDPLGLADDPDAFAELKVKELKNGRLAMFSMFGFFVQAIVTGKGPIQNLYDHVADPVANNAWAYATNFVPGQ

SEQ ID NO: 44410 - protein, 309 aa, Glycine max
  Clone ID: 700740215_FLI.pep
LRPNMTLRNHQELLVALAILYFLATSLPSVSAHGPYAWDGEATYKFTTYHPGQNYKGLSNVKNYFHHLGYIPNAPHFDDNFDDTLVSAIKTYQKNYNLNVTGKFDINTLKQIMTPRCGVPDIIINTNKTTSFGMISDYTFFKDMPRWQAGTTQLTYAFSPEPRLDDTFKSAIARAFSKWTPVVNIAFQETTSYETANIKILFASKNHGDPYPFDGPGGILGHAFAPTDGRCHFDADEYWVASGDVTKSPVTSAFDLESVAVHEIGHLLGLGHSSDLRAIMYPSIPPRTRKVNLAQDDIDGIRKLYGINP

SEQ ID NO: 44411 - protein, 141 aa, Glycine max
  Clone ID: 700740361_FLI.pep
FVKIAAPYAQELLDIRQKRPTGPQLVEEIRKQADDARTNSISMPYRVQRIEEFVKQLEAGDLKLRVRVLESERAARKATILQMATMYSVLGGTLLNLGVTLSSQGNQAFANGSFIGAGILGALFLRSMQRVKKLDKFENMI

SEQ ID NO: 44412 - protein, 103 aa, Glycine max
  Clone ID: 700740644_FLI.pep
EKFSVKYVGAAAMYFVSKKLKKKYNITDERAALYEAAETWVDALDGREFLGGSKPNLADLAVFGVLKPIRYLRSGKDMVEHTRIGEWYARMESAVGEPSRIKA

SEQ ID NO: 44413 - protein, 165 aa, Glycine max
  Clone ID: 700744235_FLI.pep
LSLQILLSFFSSLLTVAMAFRVGGAGGGNASSGMGVAEHSVNTFLELQRKKVHRYVIFKIDEKKKEVIVEKTGGPAESYDDFTASLPENDCRYAVFDFDFVTSENCQKSKIFFIAWSPSVARIRPKMLYATSKDRFRRELQGIHYEIQATDPTEMDLEVLRERAN

SEQ ID NO: 44414 - protein, 556 aa, Glycine max
  Clone ID: 700746254_FLI.pep
EGAIKRTYNGFRKKSTGVVQFDTTQNRFLAAGEDGQVNFWDMDNINLLISSDADGGLQSLPRLRFNKEGNILAVTTVDNGFKILANASGLRSLRTIETPAFEALRSPIESTPIKVSGSSTVNVSPVNCKVERSSPVRPSPILNGVDPMGRSAEKPRTVEDVIDRAKPWQLSEILDPVQCRSVTMPESTDSSSKVVRLLYTNSAVGILALGSNGIQKLWKWARSEQNPTGKATANVVPLHWQPNNGLLMTNDISGVNLEEAVPCIALSKNDSYVMSACGGKVSLFNMMTFKVMTTFMPPPPASTFLAFHPQDNNIIAIGMEDSTIHIYNVRVDEVKSKLKGHQKRITGLAFSTNLNILVSSGADAHLCVWSIDTWEKRKSIPIQLPAGKSPVGDTRVQFHSDQLRLLVVHETQLAIYDASKMERIRQWVPQDVLSAPISYAAYSCNSQLIYATFCDANIGVFDADSLRLRCRIAPSICLSPAALSGSQGVYPLVVAAHPLEPNQFAVGLTDGSVKVIEPNESEGKWGTSPPMDNGILNGRAGSSSTTSNHTADQAQR

SEQ ID NO: 44415 - protein, 448 aa, Glycine max
  Clone ID: 700675665_FLI.pep
QEQSNRRGSRSQKQQLQDSHQKIRHFNEGDVLVIPPGVPYWTYNTGDEPVVAISLLDTSNFNNQLDQTPRVFYLAGNPDIEYPETMQQQQQQKSHGGRKQGQHQQEEEEEGGSVLSGFSKHFLAQSFNTNEDIAEKLQSPDDERKQIVTVEGGLSVISPKWQEQQDEDEDEDEDDEDEQIPSHPPRRPSHGKREQDEDEDEDEDKPRPSRPSQGKREQDQDQDEDEDEDEDQPRKSREWRSKKTQPRRPRQEEPRERGCETRNGVEENICTLKLHENIARPSRADFYNPKAGRISTLNSLTLPALRQFQLSAQYVVLYKNGIYSPHWNLNANSVIYVTRGQGKVRVVNCQGNAVFDGELRRGQLLVVPQNFVVAEQAGEQGFEYIVFKTHHNAVTSYLKDVFRAIPSEVLAHSYNLRQSQVSELKYEGNWGPLVNPESQQGSPRVKVA

SEQ ID NO: 44416 - protein, 179 aa, Glycine max
  Clone ID: 700677771_FLI.pep
PEKNPQLRDLDIFLSIVDMNEGALLLPHFNSKAIVILVINEGDANIELVGLKEQQQEQQQEEQPLEVRKYRAELSEQDIFVIPAGYPVVVNATSNLNFFAIGINAENNQRNFLAGSQDNVISQIPSQVQELAFPGSAQAVEKLLKNQRESYFVDAQPKKKEEGNKGRKGPLSSILRAFY

SEQ ID NO: 44417 - protein, 471 aa, Glycine max
  Clone ID: 700677773_FLI.pep
RLNNSTKRVTVCSSYHLSLSFLVPPCQVLPLSLSLSSSFCWVGCGVLFSVVHVLSFFTLATDLKCSSLDFVLLEVKMAQETFLFTSESVNEGHPDKLCDQISDAVLDACLEQDPDSKVACETCTKTNMVMVFGEITTKANVDYEKIVRDTCRNIGFVSDDVGLDADNCKVLVNIEQQSPDIAQGVHGHLTKRPEEIGAGDQGHMFGYATDETPELMPLSHVLATKLGAKLTEVRKNGTCPWLRPDGKTQVTVEYYNDKGAMVPIRVHTVLISTQHDETVTNDEIAADLKEHVIKPVIPEKYLDEKTIFHLNPSGRFVIGGPHGDAGLTGRKIIIDTYGGWGAHGGGAFSGKDPTKVDRSGAYIVRQAAKSIVANGLARRAIVQVSYAIGVPEPLSVFVDTYGTGKIPDKEILSIVKESFDFRPGMISINLDLKRGGNGRFLKTAAYGHFGRDDPDFTWEVVKPLKGEKVPA

SEQ ID NO: 44418 - protein, 352 aa, Glycine max
  Clone ID: 700678139_FLI.pep
SKVLADKGVSDVENGAGHANGNSAVAAVAVGNGGSKAAEGNAKKLVFFGNAARAFDLEDLLRASAEVLGKGTFGTAYKAVLEAGPVVAVKRLKDVTISEKEFREKIEAVGAMDHESLVPLRAYYFSRDEKLLVYDYMSMGSLSALLHGNKGAGRTPLNWEVRSGIALGAARGIEYLHSRGPNVSHGNIKSSNILLTKSYDARVSDFGLAHLVSPSSTPNRVAGYRAPEVTDPRKVSQKVDVYSFGVLLLELLTGKAPTHALLNEEGVDLPRWVQSVVREEWTSEVFDLELLRYQNVEEEMVQLLQLAVDCAAQYPDMRPSMSEVVRRIQELRRSSLKEEDQDQIQHDNDIQL

SEQ ID NO: 44419 - protein, 351 aa, Glycine max
  Clone ID: 700678284_FLI.pep
SHSPSVQTLSLMASDKKIRIGINGFGRIGRLVARVALQRNDVELVAVNDPFITTDYMTYMFKYDTVHGQWKHFDVKVKDSKTLLFGEKPVTVFGIRNPEEIPWGEVGADYVVESTGVFTDKDKAAAHLKGGAKKVVISAPSKDAPMFVVGVNEKEYKPELDIVSNASCTTNCLAPLAKVINDRFGIVEGLMTTVHAITATQKTVDGPSNKDWRGGRAASFNIIPSSTGAAKAVGKVLPALNGKLTGMSFRVPTVDVSVVDLTVRLEKPATYEQIKSAIKEESEGKLKGILGYTEDDVVSTDFVGDNRSSIFDAKAGISLNDNFVKLVSWYDNEWGYSSRVIDLIVHIASVA

SEQ ID NO: 44420 - protein, 235 aa, Glycine max
  Clone ID: 700730654_FLI.pep
KLQIAKLSMIPVSCFLEVILDNVRYSRDTKLSISLVLLGVAVCTVTDVSVNAKGFIAAAVAVWSTSLQQYYVHFLQRKYSLGSFNLLGHTAPVQAASLLLVGPFLDYWLTNKRVDAYNYGFTSTLFIIISCTIAVGTNLSQFICIGRFTAVSFQVLGHMKTILVLALGFVFFGKEGLNLQVILGMTIAIAGMIWYGNASSKPGGKERLSLPINHTTNKTQEYNVLPVSSETDQEI

SEQ ID NO: 44421 - protein, 186 aa, Glycine max
  Clone ID: 700977319_FLI.pep
KKRKTFVKYSFELTPRDLAKPTQRAQKRVSFRFVSMGSEEENGEFYLRYYVGHKGKFGHEFLEFEFRPDGKLRYANNSNYKNDTIIRKEVYLTPAVLRECRRIISESEIMKEDDNNWPEPDRVGRQELEIVMGNEHISFTTSKIGSLVDVQSSADPEGLRIFYYLVQDLKCFVFSLISLHFKIKPI

SEQ ID NO: 44422 - protein, 173 aa, Glycine max
  Clone ID: 700977714_FLI.pep
LLGIMESLLTTTELANIVPKLKNASLSVFVETFSNEFVSQAWDFFSDATVEINTYITGAQIDGIITDFPKTADRYRRNKCLGLGDNKPTYMEPVQPGSLFGLITKEFLPPAEAPFPPLTESEVAEPPLPPVAKIAPASSPNAGTKSPQGNSQPKVTVCFFLSTLAVFIASLLL

SEQ ID NO: 44423 - protein, 276 aa, Glycine max
  Clone ID: 700978017_FLI.pep
LIARMALRCLVMSLSVLFTLGLARESHARDEDFWHAVWPNTPIPSSLRDLLKPGPASVEIDDHPMQIEETQYPKTFFYKEDLHPGKTMKVQFSKPPFQQPWGVGTWLKEIKDTTKEGYSFEELCIKKEAIEGEEKFCAKSLGTVIGFAISKLGKNIQVLSSSFVNKQDQYTVEGVQNLGDKAVMCHRLNFRTAVFYCHEVRETTAFMVPLVAGDGTKTQALAICHSNTSGMNHQMLHQLMGVDPGTNPVCHFLGSKAILWVPNLSVDTAYQTNIVA

SEQ ID NO: 44424 - protein, 297 aa, Glycine max; identical to SEQ ID NO: 44233
  Clone ID: 700980340_FLI.pep

SEQ ID NO: 44425 - protein, 106 aa, Glycine max
  Clone ID: 700980733_FLI.pep
KRKAQHSHMETTLHEPRNGHCFLACSGTNFTKISDGTPFSSWDLKLNSGGRNRPFGKRVFGSRSSSKKGCVKASKAVHRKLGEYCSSLDTKSSRFWALQQGKRLSA

SEQ ID NO: 44426 - protein, 353 aa, Glycine max
  Clone ID: 700980869_FLI.pep
MARLSLLIFAFCAVAVAVAVAGSSFDDANPIRLASDLESQVLDVIGQSRHALSFARFARRHGKRYRSVDEIRNRFRIFSDNLKLIRSTNRRSLTYTLGVNHFADWTWEEFTRHKLGAPQNCSATLKGNHRLTDAVLPDEKDWRKEGIVSQVKDQGNCGSCWTFSTTGALEAAYAQAFGKNISLSEQQLVDCAGAFNNFGCNGGLPSQAFEYIKYNGGLDTEEAYPYTGKDGVCKFTAKNVAVRVIDSINITLGAEDELKQAVAFVRPVSVAFEVAKDFRFYNNGVYTSTICGSTPMDVNHAVLAVGYGVEDGVPYWIIKNSWGSNWGDNGYFKMELGKNMCGVATCASYPVVA

SEQ ID NO: 44427 - protein, 366 aa, Glycine max; identical to SEQ ID NO: 37097
  Clone ID: 700984164_FLI.pep

SEQ ID NO: 44428 - protein, 206 aa, Glycine max
  Clone ID: 700984336_FLI.pep
HLSLVTLPLLRRCQTHTNSAFKTLFLRHRRKMEAVGSRLSRASSRYGAPTVFSGPVRKWKKKWVHVTPSSLPNNSSHSHTNNSTTTSSASSRLLLRRWTPATVDDAAGAVSDEPPRRKFRYTPVVVLEEQKKMNVVKAEHEPTIETDQLAARKTNVTHEMQGKLNMNEMLEETKDSNIGNLDLGSDFQSNTGGNSQNSDAQLENSM

SEQ ID NO: 44429 - protein, 109 aa, Glycine max
  Clone ID: 700984468_FLI.pep
SLLFFGKKSENSVNKATNKLSAVGVVEELFEEGSAMLTERLGKDFPLNKNSGIFRCAVCQVDQPPGDDGLSVNSGPFFSPASSPFLCTNCQKKKDAMEGKRPSRASITA

SEQ ID NO: 44430 - protein, 75 aa, Glycine max
  Clone ID: 700984519_FLI.pep
RQECSKFGTLVNVVIPRPPSDGEPAAGVGKVFLEYVDIDGATKARAGLNGRKFDGNQVVAVFYPENKFAQGDYEG

SEQ ID NO: 44431 - protein, 70 aa, Glycine max
  Clone ID: 700984605_FLI.pep
LDCGIIPHPKTMQIVLYNSKFVLYNFSITYKLQLSRISHTPCKASVLSFSETLGTELVTLTRNETFSEPN

SEQ ID NO: 44432 - protein, 276 aa, Glycine max; identical to SEQ ID NO: 44423
  Clone ID: 700987791_FLI.pep

SEQ ID NO: 44433 - protein, 402 aa, Glycine max
  Clone ID: 700988163_FLI.pep
CYSTEVKMAQETFLFTSESVNEGHPDKLCDQISDAVLDACLEQDPDSKVACETCTKTNMVMVFGEITTKANVDYEKIVRDTCRNIGFVSDDVGLDADNCKVLVNIEQQSPDIAQGVHGHLTKRPEEIGAGDQGHMFGYATDETPELMPLSHVLATKLGAKLTEVRKNGTCPWLRPDGKTQVTVEYYNDKGAMVPIRVHTVLISTQHDETVTNDEIAADLKEHVIKPVIPEKYLDEKTIFHLNPSGRFVIGGPHGDAGLTGRKIIIDTYGGWGAHGGGAFSGKDPTKVDRSGAYIVRQAAKSIVANGLARRAIVQVSYAIGVPEPLSVFVDTYGTGKIPDKEILSIVKESFDFRPGMISINLDLKRGGNGRFLKTAAYGHFGRDDPDFTWEVVKPLKGEKVPA

SEQ ID NO: 44434 - protein, 282 aa, Glycine max
  Clone ID: 700988181_FLI.pep
KILESPMFSNRPLLPYEEWNIDFTELTVGTRVGIGFFGEVFRGIWNGTDVAIKVFLEQDLTTENMEDFCNEISILSRLRHPNVILFLGACTRPPRLSMVTEYMEMGSLFYLIHVSGQKKKLSWRRRLKMLQDICRGLMHIHRMKIIHRDVKSANCLVDKHWIVKICDFGLSRIVTESPTRDSSSAGTPEWMAPELIRNEPFTEKCDIFSFGVIIWELCTLNRPWEGVPPERVVYTVANEGARLDIPDGPLGRLISECWAEPHERPSCEEILSRLVDIEYSMC

SEQ ID NO: 44435 - protein, 218 aa, Glycine max
  Clone ID: 700992363_FLI.pep
VEMGLVAPYSAGTCLPSLQRLPTLQAQKWNNFSAPLSCHRQVKCAVQVQPQVAPRITPDESLQVKRRTLIGLLAFDAVLAYSSLQAAPAAENPCEFQVAPSGLAFCDKLVGAGPQAVKGQLIKAHYVGRLENGKVFDSSYNRGKPLTFRVGVGEVIKGWDEGIIGGDGVPPMLAGGKRTLKIPPELGYGSRGAGCRGGSCIIPPDSVLLFDVEFVSKA

SEQ ID NO: 44436 - protein, 200 aa, Glycine max
  Clone ID: 700992413_FLI.pep
ANKIALLSVTVGLQNVGRHYETWEAGITGPVLLHGLDQGQKDLTWNKWSYKVGLRGEAMNLVSPNGVSSVDWVQESQATQSRSQLKWYKAYFDAPGGKEPLALDLESMGKGQVWINGQSIGRYWMAYAKGDCNSCTYSGTFRPVKCQLGCGQPTQRWYHVPRSWLKPTKNLIVVFEELGGNPWKISLVKRVAHTPAVHGQ

SEQ ID NO: 44437 - protein, 282 aa, Glycine max
  Clone ID: 700992481_FLI.pep
KKNKSNPCKGAPTAFTIDTSSSIRVKGLTIQNSQQMHFTISRCDSVRITGVKVSAPGDSPNTDGIHISESTNVIIQDSKIGTGDDCISIVNASSNIKMKRIYCGPGHGISIGSLGKDNSTGIVTKVILDTAVLRETTNGLRIKTWQGGSGYVRGVRFQNVRVENVSNPIIIDQFYCDSPTNCENQASAVEISEVMYQNISGTTMSAKAIKFDCSDSVPCSKLVLSNVDLEKQDGSVETYCHSAQGFPYGVVHPSADCLSSSDKTSQIEESTIEEEDIRHTEL

SEQ ID NO: 44438 - protein, 479 aa, Glycine max
  Clone ID: 700992585_FLI.pep
NISMGSSSITTSPATMTMAAIVLLFTVFAVSSALDMSIISYDSAHADKAATLRTEEELMSMYEQWLVKHGKVYNALGEKEKRFQIFKDNLRFIDDHNSAEDRTYKLGLNRFADLTNEEYRAKYLGTKIDPNRRLGKTPSNRYAPRVGDKLPDSVDWRKEGAVPPVKDQGGCGSCWAFSAIGAVEGINKIVTGELISLSEQELVDCDTGYNQGCNGGLMDYAFEFIINNGGIDSDEDYPYRGVDGRCDTYRKNAKVVSIDDYEDVPAYDELALKKAVANQPVSVAIEGGGREFQLYVSGVFTGRCGTALDHGVVAVGYGTAKGHDYWIVRNSWGSSWGEDGYIRLERNLANSRSGKCGIAIEPSYPLKNGPNPPNPGPSPPSPVKPPNVCDNYYSCADSATCCCIFEFGNACFEWGCCPLEGASCCDDHYSCCPADYPICNTYAGTCLRSKNNPFGVKALRRTPAKPHWTFGRKNKVSSA

SEQ ID NO: 44439 - protein, 275 aa, Glycine max
  Clone ID: 700993034_FLI.pep
LNKGFSVCFFTFSRFNRNQNKIMGRKFFVGGNWKCNGTTEEVKKIVTTLNEAKVPGEDVVEVVVSPPFVFLPVVKSLLRPDFHVSAQNCWVRKGGAYTGEVSAEMLVNLGIPWVIIGHSERRQLLNESNEFVGDKVAYALQQGLKVIACIGETLEQREAGTTTAVVSEQTKAIAAKISNWDNVVLAYEPVWAIGTGKVATPAQAQEVHADLRKWVHDNVSAEVAASVRIIYGGSVNGGNCKELAAQPDVDGFLVGGASLKPEFVDIINAATVKKN

SEQ ID NO: 44440 - protein, 96 aa, Glycine max
  Clone ID: 700996391_FLI.pep
AALGGNRDVTGSQNSVEIDALARFAVEEHNKKQNALLEFEKVVTAKQQVVSGTLYTITLEAKDGGQKKVYEAKVWEKSWLNFKEVQEFKLVGDAPA

SEQ ID NO: 44441 - protein, 261 aa, Glycine max
  Clone ID: 700996541_FLI.pep
FTVQVFDGHGGKSAAQFVRDHLPRVIVEDADFPLELEKVVTRSFLEIDAEFARSCSTESSLSSGTTALTAIIFGRSLLVANAGDCRAVLSRGGGAIEMSKDHRPLCIKERKRIESLGGYIDDGYLNGQLGVTRALGDWHLEGMKEMNGKGGPLSAEPELKLMTLTKEDEFLIIGSDGIWDVFRSQNAVDFARRRLQEHNDVKQCCKEIIGEAIKRGATDNLTVVMICFHSEPPPPMVVERPRVRRSISAEGLQNLKCLLEG

SEQ ID NO: 44442 - protein, 150 aa, Glycine max
  Clone ID: 700997186_FLI.pep
FAYALFRVGTNASPPYLFNFNVDVILRIVLLTKDNSLKLSIMLEKLKSYLQNDASEFHTRLPILIRNLCTGKKPSNSEVDQLVNLAEKYTLANHLFWGLWGLISSHVNTIDFDYKEYARQRFQQYWLKKPTLLDSPSIVSQDGIANGVNH

SEQ ID NO: 44443 - protein, 248 aa, Glycine max
  Clone ID: 700997216_FLI.pep
AWSQCSTIGRILDQGHCGSCWAFGAVESLSDRFCIHFDVNISLSVNDLLACCGFLCGSGCDGGYPLYAWRYLAHHGVVTEECDPYFDQIGCSHPGCEPAYRTPKCVKKCVSGNQVWKKSKHYSVSAYRVNSDPHDIMAEVYKNGPVEVAFTVYEDFAYYKSGVYKHITGYELGGHAVKLIGWGTTDDGEDYWLLANQWNREWGDDGYFKIRRGTNECGIEEDVTAGLPSTKNLVREVTDMDADAAVSF

SEQ ID NO: 44444 - protein, 95 aa, Glycine max
  Clone ID: 700997484_FLI.pep
SKFLINFCVRFTHKLVISLFLTFFFSFSVKTLFVTFDFEFRFRFLCLVLLKPMTPRLVSFWLRYGMASSILHPFCSFFFLSFFSLNFPCQYYVIL

SEQ ID NO: 44445 - protein, 366 aa, Glycine max
  Clone ID: 700954121_FLI.pep
SKIEEEMAKSPETELPVEAFGWAASDTSGTLAPFHFSRRENGVDDVTLKILFCGVCHSDLHTLKNDWGFTTYPVVPGHEIVGVVTKVGNNVKNFKVGDKVGVGVIVESCKECESCQQDLESYCPRPVFTYNSPYYDGTRTKGGYSNIMVVHQRYVLRFPENLPLDAGAPLLCAGITVYSPMKYYGMTEPGKHLGVAGLGGLGHVAIKLAKAFGLKVTVISSSPNKQAEAIDRLGADSFLVSSDPAKMKVALGTMDYIIDTISAVHSLIPLLGLLKLNGKLVTVGLPNKPLELPIFPLVAGRKLIGGSNFGGIKETQEMLDFCAKHNITADIELIKMDQINTAMERLSKADVKYRFVIDVANSFASL

SEQ ID NO: 44446 - protein, 366 aa, Glycine max; identical to SEQ ID NO: 37097
  Clone ID: 700954226_FLI.pep

SEQ ID NO: 44447 - protein, 437 aa, Glycine max
  Clone ID: 700958269_FLI.pep
SSRRVLASLDKKPETTDVLSASNESHFYVLITLEAVVDKLGGFLNPYLTNIMELLVLYPEYVSGVDAKVESRAHGVRKLLAEKIPVRLALPPLLKLYPAAIEAGDKSLTIVFDMLGTIIGTMDRSSIVAFHGKVFDLCLVALDLRRQSPPSVQNIDVVEKAVLNTMTVLTLKLTESMFKPLLIKSIEWAESEVDETASSGSIDRVISFYGMVNKLTESHRSLFVPYFKHLLGSCVHHLSEGGDVKVSRVNQKKKARILDDGNIKEIGSVSINAWHLRALVLSSLHKCFLYDTGTLKFLDSSNFQMLLRPIVSQLVVDPPALLDDSINIPSVKEVDDLLVVCIGQMAVTAGSDLLWKPLNHEVLMQTRSEKLRAKILGLRIVKYFVENLKEEYLVFIAETIPFLGELLEDVELSVKSLAQEILQEMESLSGESLRQYL

SEQ ID NO: 44448 - protein, 104 aa, Glycine max
  Clone ID: 700958668_FLI.pep
VVSLTMVLLRMIISWSRDAALVPRKGLLHCANPSLSRLLVLLWRRSSSSLSTPLQSLGMVASRPHRRSRSSLDASKHNFVNWMEMLDFYSVTISYKHIVVFSVL

SEQ ID NO: 44449 - protein, 240 aa, Glycine max
  Clone ID: 700958917_FLI.pep
RRASPCAEGPPMVETEMDAETVANVVPPKETPNSVSISHHSSHPPLNERIISSMTRRSVAAHPWHDLEIGPGAPIIFNCVIEIGKGSKVKYELDKKSGLIKIDRVLYSSVVYPHNYGFIPRTICEDSDPLDVLIIMQEPVLPGCFLRAKAIGLMPMIDQGEKDDKIIAVCADDPEYRHYNDIKELPPHRLAEIRRFFEDYKKNENKEVAVNDFLPASAAFEAVKRSMSLYADYIVESLRR

SEQ ID NO: 44450 - protein, 83 aa, Glycine max
  Clone ID: 700959026_FLI.pep
VSSRDNLRILMNLLRESSKSIQIEAFHVFKLFAANQHKPADIVSIFVANKSKMLRLLEDFKIDKEDEQFEADKAQVMREIEAL

SEQ ID NO: 44451 - protein, 252 aa, Glycine max
  Clone ID: 700963042_FLI.pep
QDTSDLHEKVDFVACLGGDGVILHASNLFRDAVPPIVSFNLGSLGFLTSHDFEDYKQDLRQVIHGNNTRDGVYITLRMRLRCEIFRKGKAMPGKVFDILNEVVVDRGSNPYLSKIECYEHDRLITKVQGDGVIVATPTGSTAYSTAAGGSMVHPNVPCILFTPICPHSLSFRPVILPDSAQLELKIPEDARSNAWVSFDGKRRQQLSRGDSVRISMSQHPLPTVNKFDQTGDWFSSLIRCLNWNERLDQKAL

SEQ ID NO: 44452 - protein, 395 aa, Glycine max; identical to SEQ ID NO: 38715
  Clone ID: 700963126_FLI.pep

SEQ ID NO: 44453 - protein, 533 aa, Glycine max
  Clone ID: 700963269_FLI.pep
SKTSHDSLCCVVFPFAETLARNFYRIPFTMDIEEDIRSLQLDSAEDNNGVVNAEDGRPEEVEKSDKMDEDPKQDVEAEPKAVEAEPKVKDKEVPSVQDEEDEPEMTKRHLNVVFIGHVDAGKSTTGGQILFLSGQVDERTIQKYEKEAKDKSRESWYMAYIMDTNEEERVKGKTVEVGRAHFETETTRFTILDAPGHKSYVPNMISGASQADIGVLVISARKGEFETGYERGGQTREHVQLAKTLGVSKLLVVVNKMDEPTVQWSKERYDEIESKMVPFLKQSGYNVKKDVLFLPISGLMGANMKTRVDKSVCPWWNGPCLFEALDAIEVPLRDPNGPFRMPIIDKFKDMGTVVMGKVESGSVREGDSLLVMPNKDPVKVVAIFIDEDRVKRAGPGENLRIRLSGVEEEDILSGFVLSSVANPIPAVTEFVAQLVILELLDNAIFTAGYKAVLHIHSVVEECEIVELLQQIDTKTKKPMKKKVLFVKNGAVVVCRVQVNNSICIEKFSDFPQLGRFTLRTEGKTVAVGKVTGL

SEQ ID NO: 44454 - protein, 209 aa, Glycine max
  Clone ID: 700941125_FLI.pep
LKVDRNLFYTIGLAKNSCPTCVNGTRLLASLNNVSFVMPQTALLQAHYFNIKGVYRTDFPDKPLTAFNYTGAPLTANLGTSVGTRISKVPFNSTVELVLQDTNLLTVESHPFHLHGYNFFVVGTGIGNFDPAKDPAKYNLVDPIERNTVGVPTGGWTAIRFRADNPGVWFMHCHLELHTGWGLKTAFLVEDGPGQDQSVVPPPKDLPAC

SEQ ID NO: 44455 - protein, 519 aa, Glycine max
  Clone ID: 700941180_FLI.pep
WVLAVFPAVPFLPIGRTAGSLLGAMLMVIFKVLSPDQAYAAIDLPILGLLFGTMAVTIFLERANMFKYLGKLLSWKSRGPKDLLCRICLISAISSAFFTNDTSCIVLTEFVLKIARQHNLPPYPFLLALATSANIGSSATPIGNPQNLVIAIQGKISFGRFLIGILPAMLVGVVVNVVFLIAMYWKVLSCPKDEEDPVSEVVVDEEVVSHQFSPARMSHFTSFNSQECNGSVELANSIQNSSQVHVMRDQSTPSESEVQMVHSGTKDFTTNSNASKEGTNDTKEETNPSKNVAIVVDKPIEALVILSSGEKDYMNKKWKRVLWKSCVYAITLVMLIAMLIGLNMAWTAIAAAITLVVLDFKDAGPSLDKVSYSLLVFFCGMFITVEGFKSTGIPSAMWDLMEPYSRIDHASETAILAIVILVLSNLASNVPTVLLLGARVAASAAAISKGDEERAWLILAWVSTIAGNFSLLGSAANLIVCEQARRAPNLGYTLTFWTHLKVGLPSTLIVTAIGLTLIK

SEQ ID NO: 44456 - protein, 47 aa, Glycine max
  Clone ID: 700941190_FLI.pep
ISCTFLNHSLILKFYTINAPSIFLPTYSMQLLRIHLQSLLRWHCFSF

SEQ ID NO: 44457 - protein, 59 aa, Glycine max
  Clone ID: 700941195_FLI.pep
RFTYPTITNLYTPVKTSPNETIKPRAFGTNMSEHSYFLSLKTTMALYFTYTIIVLSCAC

SEQ ID NO: 44458 - protein, 176 aa, Glycine max
  Clone ID: 700941304_FLI.pep
EIVVIGSCMTPADSIFNECEESLKSILSEIRLNLKTGKSTRKPIISESEQVNLEAGMVNRNKLGRKTKFGYLALAEPWPKVSGFAKVDLFSGEVKKYMYGEERFGGEPLFLPNGVDGDEDDGHILAFVHDEKEWKSELQIVNAKTLKLEASVKLPSRVPYGFHGTFIHSKDLRKQA

SEQ ID NO: 44459 - protein, 181 aa, Glycine max
  Clone ID: 700941353_FLI.pep
IRSSDNGSNNSAFADPFAFGSGHVNPERASDPGLVYDITTKDYLNYLCSLKYTSSQIAILSKGNFKCDKKSALHAGDLNYPSFAVLFGTSARNASVAYKRVVTNVGKPSSSYAVKVEEPKGVSVSVEPRNISFRKIGDKLSYKVTFVSYGRTAIAGSSSFGSLTWVSDKYTVRSPIAVTWQ

SEQ ID NO: 44460 - protein, 397 aa, Glycine max
  Clone ID: 700942962_FLI.pep
VFMYDDIAFNGENPRPGVIINKPDGGDVYKGVPKDYTGEDVTVDNFFAALLGNKSALTGGSGKVVDSGPDDHIFVYYTDHGGPGVLGMPAGPYLYADDLIEVLKKKHASGTYKNLVFYLEACESGSIFEGLLPEDINIYATTASNAEESSWGTYCPGEYPSPPPEYTTCLGDLYSVAWMEDSDRHNLRTETLHQQYKLVKERTISGDSYYGSHVMQYGDVGLSRDVLFHYLGTDPANDNFTFVDENSLWSPSKPVNQRDADLIHFWDKFRKAPEGSLRKNTAQKQVLEAMSHRMHVDNSVKLIGKLLFGIEKGPEVLNAVRPAGSALVDDWHCLKTMVRTFETHCGSLSQYGMKHMRSFANICNVGIKNEQMAEASAQACVSIPSNPWSSLQRGFSA

SEQ ID NO: 44461 - protein, 273 aa, Glycine max
  Clone ID: 700943068_FLI.pep
RMALRCLVMSLSVLFTLGLARESHARDEDFWHAVWPNTPIPSSLRDLLKPGPASVEIDDHPMQIEETQYPKTFFYKEDLHPGKTMKVQFSKPPFQQPWGVGTWLKEIKDTTKEGYSFEELCIKKEAIEGEEKFCAKSLGTVIGFAISKLGKNIQVLSSSFVNKQDQYTVEGVQNLGDKAVMCHRLNFRTAVFYCHEVRETTAFMVPLVAGDGTKTQALAICHSNTSGMNHQMLHQLMGVDPGTNPVCHFLGSKAILWVPNLSVDTAYQTNIVA

SEQ ID NO: 44462 - protein, 79 aa, Glycine max
  Clone ID: 700943115_FLI.pep
DNKFEVERVKEEMGAITSAVIAVVGVLLGWITIEIACKPCLEKGREAIDRSLDPDYDPDDTAIRAPLNPTAASATVKAV

SEQ ID NO: 44463 - protein, 84 aa, Glycine max
  Clone ID: 700943152_FLI.pep
TKMNTAKAKKAATSSAFRYEKMRHTSKGEEGPDLFCPLFSYASDPDLLRNRSESFPPENGEIGGVEPAGETGGDPLWYPGGFTI

SEQ ID NO: 44464 - protein, 345 aa, Glycine max
  Clone ID: 700945481_FLI.pep
NLFVPSIRSISSKMAKDPVRVLVTGAAGQIGYALVPMIARGVMLGPDQPVILHMLDIPPAAESLNGVKMELVDAAFPLLKGVVATTDVVEACTGVNIAVMVGGFPRKEGMERKDVMTKNVSIYKSQASALEKHAAANCKVLVVANPANTNALILKEFAPSIPEKNISCLTRLDHNRALGQISERLTVQVSDVKNVIIWGNHSSTQYPDVNHATVATSAGEKPVRELIADDAWLNGEFITTVQQRGAAIIKARKLSSALSAASAACDHIRDWVLGTPQGTWVSMGVYSDGSYNVPAGLIYSFPVTCANGEWAIVQGLSIDEFSRKKLDLTAEELSEEKALAYSCLN

SEQ ID NO: 44465 - protein, 152 aa, Glycine max
  Clone ID: 700945750_FLI.pep
EMEIYPVLDELASSISTLNLERVRRFKGHLLALTQRVQKVRDEIEHLMDDDGDMAEMCLTEKKRRSDTCTFNDCFQTRASGRLISKSAPASPERTISGVQMLQRAFSSIGNSSKHGSSMGSSDNGERIEPLEMLLEAYFIVIDNTLNTILSV

SEQ ID NO: 44466 - protein, 58 aa, Glycine max
  Clone ID: 700945853_FLI.pep
QIAKRLVKGTTKNELIEGLIKYQVPACWVKLPLKKKGNSNLNTLVSESFMFFLASDDK

SEQ ID NO: 44467 - protein, 188 aa, Glycine max
  Clone ID: 700945957_FLI.pep
QDFKTGYLTLSSAKSMFVSQLIGTAMGCVIAPLTFWMFWTAFDVGSPDGPYKAPYAVIFREMAILGVQGFSELPKYCLEMCGGFFAAALAINLLRDVTPKKFSQYIPIPMAMAVPFYIGAYFAVDMFVGTVILFVWERLNRKDAEDYAGAVASGLICGDGIWTIPSAILSIMRIDPPICMYFGPSTSS

SEQ ID NO: 44468 - protein, 73 aa, Glycine max; identical to SEQ ID NO: 42156
  Clone ID: 700979059_FLI.pep

SEQ ID NO: 44469 - protein, 383 aa, Glycine max
  Clone ID: 700979345_FLI.pep
ISLIVLALSNIMKISILFITIFSCGFLGNVVSNASPLPYEAIFNFGDSISDTGNAAHNHPPMPGNSPYGSTYFKHPSGRMSNGRLIIDFIAEAYGMPMLPAYLNLTKGQDIKKGVNFAYAGSTALDKDFLVQKRINIEEATFSLSAQFDWFKGLKSSLCTSKEECDNYFKNSLFLVGEIGGNDINALIPYKNITELREMVPSIVETIANTTSKLIEEGAVELVVPGNFPIGCNSAVLAIVNSEKKEDYDQFGCLIAYNTFIEYYNEQLKKAIETLRKNNAHVKITYFDYYGATKRLFQAPQQYGFSSGKTETFRACCGKGEPYNLSFQILCGSPAAIVCSDPSKQINWDGPHFTEAAYRLIAKGLVEGPFANPSLKSPPFKIA

SEQ ID NO: 44470 - protein, 215 aa, Glycine max
  Clone ID: 700979419_FLI.pep
EREGEERERVMGRGRVELKRIENKINRQVTFAKRRNGLLKKAYELSVLCDAEVALIIFSNRGKQYEFCSGSSMLKTLERYQKCNYGAPEDNVATKEALELSSQQEYLRLKARYEALQRSQRNLMGEDLGPLSSKELESLERQLDSSLKQIRSIRTQFMLDQLSDLQRKEHFLGESDRDLRQRLEEFQINPLQLNPSAEDMGYGRHPDIILIQYQW

SEQ ID NO: 44471 - protein, 234 aa, Glycine max
  Clone ID: 700981968_FLI.pep
AKNQFKMKIKSHFSFSLMFLIGIAISHTHVSLAECDNVKDYCPTIPPQKQTIFLNGFPCENPNNTIAHDFKSMELSKPGSRDKLGSLVKIVTASKFPGLNALGLAIGRSDIEVDGLVNLHNHPRATEMIYVSQGDVVAAFLDTRNQLFQKILRAGDVFVIPKGLFHFLLNRGAQVATVFSVFNSQNPGSGPLTSIPSDTLESVQKIKRKVVSLSESELDGVSDLTSAVLDIIYS

SEQ ID NO: 44472 - protein, 173 aa, Glycine max
  Clone ID: 700982488_FLI.pep
VPSKVHNPICEQIFFGFDGTHGVSMGIESVVDKNEKKSSGGIRDAGCSACEMAVIWMQNQLRQNQTEDRIIDYANELCEKLPNPMGPSSVDCGKLSSMPIVSFTIGGKVFDLSPEEYILKVGEGPEAQCISGFTALDVPPPRGPLWILGDVFMGRYHTIFDYGKLRVGFAEAA

SEQ ID NO: 44473 - protein, 209 aa, Glycine max
  Clone ID: 700986073_FLI.pep
QRRRILVDVAEGLNYLHHGWDQVVIHRDIKSSNILLDADMRGRLGDFGLAKLYTHGEVPTTTRVVGTLGYLAPELATVAAPTSASDVYSFGVVLLEVACGRRPIETSVAEEEVVLIDWVRELYAKGCAREAADAWIRGEYDEGDVEMVLKLGLACCHPDPQRRPPMKEVVALLLGEEPQEAPGKVLSDLVRGGKDMDETAPLQPSPPPV

SEQ ID NO: 44474 - protein, 147 aa, Glycine max
  Clone ID: 700986123_FLI.pep
MRPPIVHRDLKSPNLLVDDSYTVKVCDFGLSRTKANTFLSSKTAAGTPEWMAPEVIRGELSSEKCDVFSFGVILWELVTLQQPWRQLNPSQVVAAVGFMGKRLEIPGHVNPQVAALIELCWATEHWRRPSFSYVMKCLQQIIADAKG

SEQ ID NO: 44475 - protein, 238 aa, Glycine max
  Clone ID: 700989634_FLI.pep
VLIMKMVEHPNIVNLIEVIDDPESDDFYMVLEYVESKWVCEGTGHPCALGEETARKYLRDIVSGLTYLHAHNIVHGDIKPDNLLITRHGTVKIGDFSVSQAFEDGNDELRRSPGTPVFTAPECCLGLTYHGKASDTWAVGVTLYCMILGEYPFLGDTLQDTYDKIVNDPLVLPEDINPQLKNLIEGLLCKDPELRMTLGDVAEHIWVIGDDGPIPGYLCWCKRKSMVTEDSDGSDILD

SEQ ID NO: 44476 - protein, 231 aa, Glycine max
  Clone ID: 700990943_FLI.pep
CSFSIFYLSSTLVLCLGELIRRPCKTSSMAVKVYIVYYSMYGHVEKLAEEIKKGASSVEGVEAKLWQVPETLLDEVLGKMSAPPKSDVPVITPNELSEADGFVFGFPTRFGMMAAQFKAFLDATGGLWRAQQLAGKPAGLFYSTGSQGGGQETTALTAITQLVHHGMIFVPIGYTFGAGMFEMEKVKGGSPYGAGTYAGDGSRQPSELELQQAFHQGKYIAGITKKLKQAA

SEQ ID NO: 44477 - protein, 196 aa, Glycine max
  Clone ID: 700994583_FLI.pep
FLVESKQQKIKFDCCLLKRGGGRQDTPKSSLMEDLLGLLRIHIKRGVNLAVRDVNTSDPYVVVKMGKQKLKTRVIKKDVNPEWKEDLTLSVTDPIHPFILTVYDYDTFSKDDKMGDAECDISAYIEALKMNLEDLPSGTIITRIQPSRQNCLAEESCITYSNGKVIQDLVLRLRHVESGEVEIQLQWINLPGSKGL

SEQ ID NO: 44478 - protein, 196 aa, Glycine max
  Clone ID: 700994639_FLI.pep
ATSTSPKELRISLRLEKVVINMSKNPKVFFDILIGKMKAGRVVMELFADATPKTAENFRALCTGEKGIGRSGKPLHYKGSVFHRIIPEFMCQGGDFTRGNGTGGESIYGSKFEDENFNLRHTGPGILSMANAGAHTNGSQFFICTTKTPWLDGKHVVFGKVVDGYSVVQEMEKVGSGSGRTSEPVVIEDCGQIVEK

SEQ ID NO: 44479 - protein, 142 aa, Glycine max
  Clone ID: 700994793_FLI.pep
QQGLLAMGRGRGKGKKQSVIAEDPGSGEEDKVPAYRRRGRPVKPLTDEIEEVEVTEIIEKDEENVKGNGSTDDLKTQAITVNKRKRKRSTQVKEKIDPLKEDNGILAKSGPEDSIKTTGFRQNGSRRKNKPHRAAEAGVDCK

SEQ ID NO: 44480 - protein, 284 aa, Glycine max
  Clone ID: 700995516_FLI.pep
STLLPLSGKLDAYNTTSLPKPTTPPFSPLSHSMLKPIPTANAYHSYGYNYYPKLQSCVPFAPVTVPRILLRNTSFKHQIFSAIKELTLTSQLSSLHVTFPSENECHKLTEKGFLPRIGMQYHWKNRNYKNLDDFLMDMKQSKRKNIRQECKKVTNIDMCRFFQQISAQNLIMKRLRGYLIKARHWDSFYTFYRNTTDNKWGTPHLTREFFHELGAKMGDNVLLVVAEEGDELVAGALNLIGGDTLFGRLWGCQPRSYYQAIEAAIELNLKTVEAGAQGEHKIQR

SEQ ID NO: 44481 - protein, 287 aa, Glycine max; identical to SEQ ID NO: 44183
  Clone ID: 700952818_FLI.pep

SEQ ID NO: 44482 - protein, 289 aa, Glycine max
  Clone ID: 700953068_FLI.pep
SSHGDCKYSFDASGLTSYSFCSCDRNHGGFDCSIEIVSHKGHILQSIFLIGSNAAAILPAYWSLRQKAFAEWVLFTSSGIASALYHACDVGTWCALNFNVLQFMDFWLSFMAVVSTFVYLATIDEVYKRAIHTAVAILTALLAATKATRSSNVVLVIVIGALGLLIAWLIEISKKYRSISFSFGLSLSFLQSLQTIKQWFCNLVKTLLRRFRWGFLLVGFITLAMAGLSWTLETSANYWFWHSFWHVTIYTSSFFFLCSKANIVDAEDSSSPSSGNYALTHQDSFPRGN

SEQ ID NO: 44483 - protein, 57 aa, Glycine max
  Clone ID: 700960394_FLI.pep
VSRDSEREGKRRGQTLTPPSGPTLSFYTTKAENKRTKRGKTVTQNLDGRDCAWPLSN

SEQ ID NO: 44484 - protein, 276 aa, Glycine max
  Clone ID: 700961150_FLI.pep
IWGGKGQGKSFQCELVFAKMGINPIMMSAGELESGNAGEPAKLIRQRYREAADMIKKGKMCALFINDLDAGAGRLGGTTQYTVNNQMVNATLMNIADNPTNVQLPGMYNKEENPRVPIIVTGNDFSTLYAPLIRDGRMEKFYWAPTREDRIGVCTGIFRTDGIPEQDIVKLVDTFPGQSIDFFGALRARVYDDEVRKWISGVGVDSVGKKLVNSKDGPPTFEQPKMTLEKLLLYGNMLVQEQENVKRVQLADKYLNEAALGNANEDAIQRGTFFQS

SEQ ID NO: 44485 - protein, 120 aa, Glycine max
  Clone ID: 700942147_FLI.pep
FYIDVYYKNQMLVFWAGLDVGLYLDAISTGAAGSKSLDLYGKRILNRDLEPGFFVNHFVKDLGICLKECQNMGIALPGLALAQQLYVSLRAHGEGNLGTQALILVLERLNNVTLPPSSNT

SEQ ID NO: 44486 - protein, 282 aa, Glycine max
  Clone ID: 700942321_FLI.pep
LIARMELRCLLFSISVLFALGLARESHAQSSIPDEDFWHAVWPNTSIPSALRELLKHGREGVEIDNLPMQIDDTQYPKTFFYEQDLHPGKTMNVQFSKSPFTQPFTILTWLKGLKIKDIDKEGYTFDELCIKTKPNGAEHKFCAKSLETLIGFAISKLGKNIQVLSSSFVNKQELYKVEGVQNLGDKAVMCHRLNFRTVAFYCHEVRGTTAFMVPLVAGDGTKTQALAVCHSDTSGMNRHILHQTMGVDPGTNTVCHFLGSKAILWVPNLAMDTAYQTNIVV

SEQ ID NO: 44487 - protein, 574 aa, Glycine max
  Clone ID: 700942547_FLI.pep
TKKKKLYIDVLVHSFSVSRTRSVTAMELSSSAFVVILLAVAATAVLSNGLDLSFLPSDFLFGIASSSYQYEGAYKSDGKGLSNWDNYTHGPGRSVIMDGSNGDIAIDHYHRYLEDIDLMETLGVNSYRLSLSWARILPKGRFGEPNHAGIEFYNRLIDVLLLKGIQPFVTLSHYDIPQELEDRYGSWLSPQLQEDFAFYADLCFKTFGDRVKYWVTFNEPNFLVSLGYRSGLYPPCRCSGQLAMAKCSEGDSEKEPFVAAHNVILSHAAAVDIYRTKYQTEQKGSIGIVLQHEWFEPMSNSTADKLASERARAFNFNWFLDPIIFGKYPTEMENVLGSLLPKFSSYEKEKLKRGLDFIGVNYYTAFYVQDCMYSACKPGPGISRTEGSYKKSGEKNGVPIGEPTPFSWFNIYPDGMEKTVTYVRDRYNNTPIFLTENGKQHILNFFFFTHILFIDDNAKNFIGYAEEVDPNFTSEEHLNDFKRIKYMVDHIEALLAAIRKGADVRGYFAWTLIDSFEWIYGYTVRYGFHHVDYATLKRTPRLSASWYKQLLVQYKKTFLLGTSMTGHEKLVQHT

SEQ ID NO: 44488 - protein, 401 aa, Glycine max
  Clone ID: 700942615_FLI.pep
MAGICCGVVGEGDTPAPLEPTTRPSRRRSLDILPLKYIADMAVPPSDGSRKRPKLDLRDRDNVVQNCDESTGHKVVKKEAKVEIHDNISETKNVTVADASEVEDSPKFGVTSVCGRRRDMEDSVSVRPSFTQGFHYFGVFDGHGCSHVATMCKERLHEIVNEEIDSARENLEWKLTMENGFARMDDEVNRRSQSNQTFTCRCELQTPHCDAVGSTAVVAIVTPDKLVVSNCGDSRAVLCRKGVAIPLSSDHKPDRPDELLRVQSKGGRVIYWDGPRVLGVLAMSRAIGDNYLKPYVISEPEVTVTERTEEDECLILASDGLWDVVSNETACGVVRMCLKAQKPPSPPGSPGSDVAADGSDRACSDASILLTKLALARHSSDNVSVVVVDLRRDQRQSSNSN

SEQ ID NO: 44489 - protein, 151 aa, Glycine max
  Clone ID: 700943922_FLI.pep
VIVMAPKAEKKPAEKKPAEEKKSTVGDKAPAEKKPKAGKKLPKEGGAGGEGKKKKRNKKSVETYKIYIFKVLKQVHPDIGISSKAMGIMNSFINDIFEKLAQESSRLARYNKKPTITSREIQTAVRLVLPGELAKHAVSEGTKAVTKFTSS

SEQ ID NO: 44490 - protein, 313 aa, Glycine max
  Clone ID: 700944072_FLI.pep
ETWISYRGAMPMVSQEETLVEAALRVLNTADPFEKARLGDSVASRWLNGDIAEPYDPSGSDLTLPDRPARLSSVKLVAPSLMPKLGRAGSLQSRIAIVHSLTHTESWAIDLSWDIIARFGKQESMPREFFTDFVKVAQDEGRHFSLLAARLEELGSYYGALPAHDGLWDSATATSKDLLARLAVEHCVHEARGLDVVPTTILRFRNNGDNTTADLLESVVYPEEITHCAAGVKWFKYLCERSRNPASEQEEESGSGSRTEEHEAIAKFHAIVRAYFRGPLKPPFNEAARKEAGFGPQWYEPLAVKEVNSIPNY

SEQ ID NO: 44491 - protein, 340 aa, Glycine max
  Clone ID: 700944513_FLI.pep
STSSRGGSRPDPVTLIPGDGIGPMVTGAVEQVMEAMHAPVYFEKFEVHGNMKAVPPEVLDSIRKNKVCLKGGLVTPMGGGVSSLNVQLRKELDLYASLVNCFNLPGLPTRHDNVDIVVIRENTEGEYSGLEHEVVPGVVESLKVITKFCSERIAKYAFEYAYLNNRKKVTAVHKANIMKLADGLFLESCREVATKYPGIKYNEIIVDNCCMQLVSKPEQFDVMVTPNLYGNLVANTAAGIAGGTGVMPGGNVGAEHAVFEQGASAGNVGSDKIREQKKANPVALLLSSAMMLRHLQFPAFADRLETAVEKVILEGKCRTKDLGGTSTTQEVVDAVIDALD

SEQ ID NO: 44492 - protein, 122 aa, Glycine max
  Clone ID: 700967417_FLI.pep
KVKYGSKVQIVLQDTSIVTTEEHPMHVHGFHFFVVGSGFGNFNPATDPLKFNLVDPPVRNTIGTPPGGWVAIRFVADNPGIWFVHCHIDSHLNWGLGMALLVENGVGLSQSVLPPPPDLPQC

SEQ ID NO: 44493 - protein, 152 aa, Glycine max
  Clone ID: 700967461_FLI.pep
NGCSGSACGGLVRDSSGCYLGGFTVNLGNTSVTLAELWGVVHGLKLAWDLGCKKVKVDIDSGNALGLVRHGPVANDPAFALVSEINELVRKEWLVEFSHVFRESNRAADKLAHLGHSHSLESGAKRFSDPPSALVAILQDDLAGLAKQRGVN

SEQ ID NO: 44494 - protein, 250 aa, Glycine max
  Clone ID: 700978095_FLI.pep
TFNVPAMYVAIQAVLSLYASGRTTGIVLDSGDGVSHTVPIYEGYALPHAILRLDLAGRDLTEYLVKILTERGYSFSTSAEKEIVRDVKEKLAYVALDFEQEMETTKSSSAVEKSYELPDGQVITIGSERFRCPEVLFQPSLIGMEATGIHETTYNSIMKCDVDIRKDLYGNIVLSGGSTMFPGIADRMSKEIGALAPSSMKIKVVAPPERKYSVWIGGSILASLSTFQQMWISKGEYDESGPAIVHRKCF

SEQ ID NO: 44495 - protein, 160 aa, Glycine max
  Clone ID: 700978126_FLI.pep
KVSDVELDQISLLPNAEYLLTSFLSIWEKADLIKVSDVELEFLTGSDKIDDESALSLWHPNLKLLLVTLGEHGSRYYTENFKGSVDAFHVNTVDTTGAGDSFVGALLSKIVDDQSILEDEPRLREVLKYANACGAITTTQKGAIPALPKEEDALKLIKGA

SEQ ID NO: 44496 - protein, 322 aa, Glycine max
  Clone ID: 700978404_FLI.pep
EPSNLNLCIHCVIDFPSSFLLLLCVRVAENSDRSLLMAYQAIQVPSSGSSSSSGFQLLNSPFGDTTYTKVFVGGLAWETQSETMRRYFDQFGEILEAVVITDENTGRSKGYGFVTFRDPEAARRACADPTPVIDGRRANCNLASLGRPRPPLPYGRIRPASPYVGSLQPARGAYVGGFGYQQQPVSYSYQQGLVYPPYGYTTYGPEYIYPQSLYNPYMGQQYLQIYGVPGAVNTTVYPYGQVGQAIPSGHGYSAIQGYTVPGHQIVPYGGSNVNAITTSPMPAIQASYPSGIAAPVPGQPQFIVPAHSPQFMQGSGPDQTAG

SEQ ID NO: 44497 - protein, 337 aa, Glycine max
  Clone ID: 700978547_FLI.pep
FSPSKQSHFSWSPESGDSLSGENLARLDTRSPDRLVGELHFLDDTITLTPEELSRAPAEVLGRSSHGTSYKATLENGLLLRVKWLREGVAKQRKEFVKETKKFANIRHPNVVGLRGYYWGPTQHEKLILSDYISLGSLASFLYDRPGRKGPPLTWTQRLKIAVDVARGLNYLHFDRAVPHGNLKATNVLLDTTDMNARVADYCLHRLMTQAGTIEQILDAGVLGYCAPELAASKKPMPSFKSDVYAFGVILLELLTGRCAGDVISSEEGGVDLTDWVRLRVAEGRGSECFEATLMPEMSNPVVEKGMKEVLGIAMRCIRSISERPGIKTIYEDLSSI

SEQ ID NO: 44498 - protein, 212 aa, Glycine max
  Clone ID: 700978668_FLI.pep
DSVSNPGHPFSSGVTLAKLAAVTMDEEGNETFDTSGALDRLRKSVHLERLALYHDSNQLPWEIDKRWADINPQEWIEIFEDGINEPTGDHKLVPKWARNRTYLVYPINAVLQYHRLGNQERVNPDIPFEKVTLVLTDISLTLTEAQYHDWIKLLEAVSRYKTYMEVSHLRPVVPISKAPYLWWQYAAQAVLQKQQKWYLEFFILLNKSSTFL

SEQ ID NO: 44499 - protein, 268 aa, Glycine max
  Clone ID: 700981223_FLI.pep
QVTVTLRTQQRESERESQTLIPFPPFSLLQSRKQQGSQLHFVGIGGEKMQGWFSGQSSEEEAKPASSLLADWNSYASAQTSEDSSTFPFDIESAVRSANDTVSGTFSVVSKGVRDLPGNFQSATSNVPSGKALVYFGLFLASGVFFVFIAFTLFLPVMVVMPQKFALCFTLGCGFIIGSFFALKGPKSQLAHMLSKERLPFTLAFLGSMIGTIYVSMVLHSYILSVVFSVVQVLSLGYYSISYFPGGSAGMKFLTSAFTSSIMKCFGR

SEQ ID NO: 44500 - protein, 555 aa, Glycine max
  Clone ID: 700981350_FLI.pep
ETSTLPPIINAIEIYRVKEFPQQDTYQGDVDAITTIKSVYGVTRDWQGDPCSPKDYLWEGLNCTYPVNDSPRIITLNLSSSGLSGKIDPSILNLTMLEKLDLSNNSLNGEVPDFLSQLQYLKILNLENNNLSGSIPSTLVEKSKEGSLSLSVGQNPYLCESGQCNFEKKQKNIVTPIVASICGALILLVAVAILWTLKRRKSKEKSTALMEVNDESEISRLRSTKKDDSLAQVKKQIYSYSDVLKITNNFNTIIGKGGFGTVYLGYIDDSPVAVKVLSPSAVHGFQQFQAEVKLLIRVHHKNLTSLIGYCNEGTNKALIYEYMANGNLQEHLSGKHSKSTFLSWEDRLRIAVDAALGLEYLQNGCKPPIIHRDVKSTNILLNEHFQAKLSDFGLSKAIPTDGESLVSTVLAGTPGYLDPHCHISSRLTQKSDVYSFGVVLLEIITNQPVMERNQEKGHISRRVRSLIEKGDIRAIVDSRLEGDYDINSAWKALEIAMACVSKNPNERPIMSEIAIELKETLAIEIARAKHCDANPRHLVEAVSVNVDTEFMPLAR

SEQ ID NO: 44501 - protein, 399 aa, Glycine max
  Clone ID: 700981542_FLI.pep
AANFFSCHLRSLRTNTSNDTVLGFVGFRSSFFLPQVMATLKSVCFRGSTFPVCPSNFTNTRNTRSSCWRPTQAAVKSNFHLPMRSFELKNRTSPEDIKALRLITAIKTPYLPDGRFDLEAYDDLVNMQIGQGAEGVIVGGTTGEGQLMSWEEHIMLIAHTVNCFGGKIKVIGNTGSNSTREAIHATEQGFAVGMHAALHINPYYGKTSLDGMVAHFQSVLSMGPTIIYNVPARTGQDIPPHVIQTLAESVNLAGVKECVGNDRIKQYTDDGIVVWSGNDDQCHDARWGYGATGVVSVASNLVPGLMRELMFGGVNPTLNSKLLPLIDWLFHMPNPIGLNTALAQLGVIRPVFRLPFVPLPVDKRIEFANLVKEIGREHFVGNKVVEVLDDDDFFLVSRY

SEQ ID NO: 44502 - protein, 75 aa, Glycine max
  Clone ID: 700981811_FLI.pep
PNYVRAWANMGISYANQGMYDESIRYYVRALAMNPKAENAWQYLRISLSCASRNDMLEACDSRNLDLLQKEFPLQ

SEQ ID NO: 44503 - protein, 138 aa, Glycine max
  Clone ID: 700984765_FLI.pep
GGYIVNRPTLARRFIPEEGTKEYDEMVKDPQKAYLRTITPKFETLIDISVIEILSRHASDEVYLGQRDNPNWTTDSKALEAFKKFGNKLAEIEGKITQRNNDPSLKSRHGPVQLPYTLLHRSSEEGMSFKGIPNSISI

SEQ ID NO: 44504 - protein, 368 aa, Glycine max
  Clone ID: 700985657_FLI.pep
NSVRNLNFVIAMADASVAPPPPLKDELDIVIPTIRNLDFLEMWRPFFQPYHLIIVQDGDPTKTIKVPPGFDYELYNRNDINKLLGPRASCISFKDSACRCFGYMVSKKKYIFTIDDDCFVANDPSGKAINALEQHIKNLLCPSTPLFFNTLYDPFREGADFVRGYPFSLREGVPTAISHGLWLNIPDYDAPTQLVKPLERNTRYVDAVLTIPKGTLFPLCGMNLAFDRDLIGPAMYFGLMGDGQPIGRYDDMWAGWCCKVITDHLGLGVKTGLPYIYHSKASNPFVNLRKEYKGIFWQEDIIPFFQNVVLPKECTTVQKCYIELSKQVKEKLSKIDPYFDKLADAMVTWIEAWDELNPEGASQANGKA

SEQ ID NO: 44505 - protein, 264 aa, Glycine max
  Clone ID: 700985662_FLI.pep
PFLLEAEAMETNTLPNQQTPKTKRQIFILSGQSNMAGRGGVIRDANNRKRWDGVVPPESRSDPSILRLSATLQWEPANEPLHVDIDSRKACGVGPGMVFANALLRRRVVVGELGLVPCAVGGTAMKEWARGEELYENMVKRAKESVKERENSSEIKAVLWFQGESDAINEEDAAAYKVNMETLIHNVRQDLNLPSLPIIQVALASGSDYIEKVREAQKAIDLPNVICVDAKGLQLMEDNLHLTTESQIQLGHKLAEAYLTHFHA

SEQ ID NO: 44506 - protein, 272 aa, Glycine max
  Clone ID: 700988809_FLI.pep
DRLNYAAMRMWFLGNPPGKATIQVQNIEDFTWLNASYSPVLKQLGSQSMIDYYFKAHRAASDSNLKFRNPKYLSILNHLRFYLPEIFPKLNKVLFLDDDIVVQKDLTDLWSIDLKGNVNGAVETCGESFHRFDRYLNFSNPLIAKNFDPHACGWAYGMNVFDLAEWKRQNITGVYHNWQNLNHDRQLWKLGTLPPGLITFWKRTFPLNRSWHILGLGYNPNVNQRDIEQSAVVHYNGNMKPWLEISIPKFRSYWTKYVDYDHVYLRECNINP

SEQ ID NO: 44507 - protein, 217 aa, Glycine max
  Clone ID: 700988826_FLI.pep
SSMGNLFVKKPKVTDVDKAILALKTQRRKLAQYQQKLDAVIEAEKQAARDLIREKKKDRALLALKKKKTQEELLKQVDAWLINVEQQLADIELASKQKAVFESLKAGNDAMKAIQSEINIEDVQKLMDDTAEAKAYQDEINEIMGEKLSAEDEEEILAEFEDLEIQLTVQDLPEVPPSVHEEIEEKLDLPDVPTKAPVTSDAEVSTKGKVMEEPLAA

SEQ ID NO: 44508 - protein, 358 aa, Glycine max
  Clone ID: 700989034_FLI.pep
QGLDLRTGLFTLRQIKAATNNFDVANKIGEGGFGPVYKGCFSDGTLIAVKQLSSKSRQGNREFLNEIGMISALQHPHLVKLYGCCVEGDQLLLVYEYMENNSLARALFGAEEHQIKLDWTTRYKICVGIARGLAYLHEESRLKIVHRDIKATNVLLDQDLNPKISDFGLAKLDEEDNTHISTRIAGTFGYMAPEYAMHGYLTDKADVYSFGIVALEIINGRSNTIHRQKEESFSVLEWAHLLREKGDIMDLVDRRLGLEFNKEEALVMIKVALLCTNVTAALRPTMSSVVSMLEGKIVVDEEFSGETTEVLDEKKMEKMRLYYQELSNSKEEPWTASSTSVADLYPVGLDSSYLEKRD

SEQ ID NO: 44509 - protein, 332 aa, Glycine max
  Clone ID: 700989075_FLI.pep
FGYKVKITFSFGSYFPVLYFLIYHTLRTLSLFSSASPFTAERTSQHNKQRSLSVSNVKRANMALIAARILGSNSRPAVALHRWQWLAYSSASAAVAEPETTEVKDYADYRRSLYGQITHKALLVDAVGTLVLPSQPMAQIYRKIGEKYGVEYSEDEILFRYRRAYGQPWGKSRLRYVNDGRPFWQYIVSYSTGCSDPQYFEELYNYYTTDKAWHLNDTGAEEVFRALRKSGVKLAVVSNFDTRLRPLLRALNCDNWFDAVAVSAEVAAEKPNPTIFLKACELLDVKPEDAVHVGDDRRNDIWGARDAGCDAWLWGSDVHSFKEVAQRIGVQV

SEQ ID NO: 44510 - protein, 278 aa, Glycine max
  Clone ID: 700989095_FLI.pep
LGIWGGKGQGKSFQCELVFAKMGINPIMMSAGELESGNAGEPAKLIRQRYREAADLIKKGKMCALFINDLDAGAGRLGGTTQYTVNNQMVNATLMNIADNPTNVQLPGMYNKEENPRVPIIVTGNDFSTLYAPLIRDGRMEKFYWAPTRDDRIGVCTGIFRTDSIPEQDVVKIVDTFPGQSIDFFGALRARVYDDEVRKWISGVGVDGIGKKLVNSKDGPPTFEQPKMTLEKLLTYGNMLVQEQENVKRVQLADKYLNEAALGNANEDAINRGTFFQS

SEQ ID NO: 44511 - protein, 105 aa, Glycine max
  Clone ID: 700994155_FLI.pep
CSKPLFWCYEIACWGLVVLYGGTAFFLRRKAATILDEGNFSGRNLGLEMLEASPLEVTPEVERRVNEGFKAWMGPSLLSSDEEDEPDSYDEAPHSTHTNLNRQRL

SEQ ID NO: 44512 - protein, 525 aa, Glycine max
  Clone ID: 700994269_FLI.pep
MDSSSSSPNNNNHHKLGFQPARSRSRLAMASPANTSEPKIVTGTAGYILEDVPHFTDYIPNLPTYPNPLQDNPAYSVVKQYFVHVDDSVPQKVVVHKDGARGVHFRRAGPRQKVYFEADEVQAAIVTCGGLCPGLNTVIRELVCGLHHMYGVKKVLGINGGYRGFYARNTITLTPKSVNDIHKRGGTVLGTSRGGHDTKKIVDSIQDRGINQVYIIGGDGTQKGASAIFEEVRKRGLKVSVVGIPKTIDNDIPVIDKSFGFDTAVEEAQRAINAAHVEAESVENGIGVVKLMGRNSGFIAMYATLASRDVDCCLIPESPFYLEGPGGLYEYIEKRLKENGHMVIVIAEGAGQELVSESVQSMSKQDASGNKLFQDVGLWISQKIRDHFAAQKTLPITLKYIDPTYMIRAIPSNASDNVYCTLLAQSAVHGAMAGYTGYTSGLVNGRQTYIPFYRITERQNHVVITDRMWARLLSSTNQPSFLDAKGDNEEKEEEEALNQLPDGHCAKDTSLASKEINSSIYPTAC

SEQ ID NO: 44513 - protein, 236 aa, Glycine max
  Clone ID: 700994508_FLI.pep
VLRRSLWRHQCLVKLAFVLYAPLSVKPISVFGTCRCIFCVLKDHPAIYPRILGHEAIGVVESVGEDVTEVTKGDVVVPIFLPDCGECIDCKSSKSNLCSKFPFEVSPWMPRYATSRFTDLKGEIIHHFLSVSSFSEYTVVDIAHLIKIDPAIPPNRACLISCGISAGIGAAWRAAGVEPGSTVAIFGLGSIGLAVWCPFSSVFFPYFVIDYIEMLIASNWYHRLLRELDFVEQLRL

SEQ ID NO: 44514 - protein, 408 aa, Glycine max
  Clone ID: 700909782_FLI.pep
IMTSSRERLVKAVKQFVEVRYKVFGDRYGQNIIDILDFPIKVVLSPFTLAFDIAGSAPRGFGVPELISKLSATSVFAIAALGTYDIAFELGRKVICQRNCNSCNGWRALHCTMCRGSGRVHYQVKNCNLNTGEKATAESVADAIANNRAELVHIPSSLDFQKPLPSKECPTCDGTGVMSCPECKHRLLHVRISADDIMEPPWQAYNVLKKIDYPYEHILHSMKDPSIAAFWLITFPQIMGGFTYDDDVKQKIWWQYKENMRYDQLRDVVAKRKPGWEYLQDALISIDPARARDDPVIVKNVPYYKAKKALETEVMKIDPPPRPPNWGELDLPLNASSWSEEDLKDPDKFYEMTVLLNAQREISDKILDAQWETKWRQDKLNEMLEAKVKPYIQDIDNAVLPEPILLKP

SEQ ID NO: 44515 - protein, 336 aa, Glycine max
  Clone ID: 700910061_FLI.pep
ANPSLLFFSLLLLSATVATTFSAFKTKFGKTYATQEEHDHRFRIFKNNLLRAKSHQKLDPSAVHGVTRFSDLTPAEFRRQFLGLKPLRLPSDAQKAPILPTNDLPTDFDWREHGAVTGVKNQGSCGSCWSFSAVGALEGAHFLSTGELVSLSEQQLVDCDHECDPEERGACDSGCNGGLMTTAFEYTLQAGGLMREKDYPYTGRDRGPCKFDKSKVAASVANFSVVSLDEEQIAANLVQNGPLAVGINAVFMQTYIGGVSCPYICGKHLDHGVLLVGYGSGAYAPIRFKEKPYWIIKNSWGESWGEEGYYKICRGRNVCGVDSMVSTVAAIHVSNN

SEQ ID NO: 44516 - protein, 504 aa, Glycine max
  Clone ID: 700954712_FLI.pep
TQISIFCNFTQTRKLTMAQPASLTRIGLAGLAVMGQNLALNIAEKGFPISVYNRTASKVDETVERAKQEGNLPVYGYHNPKFFVQSIQKPRVIIMLVKAGAPVDQTIKTLSAHLEKGDCIIDGGNEWYENTERREKAMSELGLLYLGMGVSGGEEGARHGPSLMPGGSFEAYKYIEDILLKVAAQVPDSGPCVTYIGKGGSGNFVKMIHNGIEYGDMQLIAEAYDVLKSVGKLSNEELQSAFSEWNKGELLSFLIEITADIFGIKDDKGEGHLVDKVLDKTGMKGTGKWTVQQAAELSIAAPTIEASLDARFLSGLKEERVEASKVFKSSGFDEILSDQHVDKKQLIDDVRKALYAAKICSYAQGMNLIRAKSIEKGWDLKLGELARIWKGGCIIRAIFLDRIKKAYDRNPNLANLLVDPEFAKEIVDRQSAWRRVVCLAINYGTSTPGMAASLAYFDTYRRERVPANLVQAQRDYFGAHTYERIDMEGSFHTEWFKLAKQSRT

SEQ ID NO: 44517 - protein, 366 aa, Glycine max; identical to SEQ ID NO: 37097
  Clone ID: 700955539_FLI.pep

SEQ ID NO: 44518 - protein, 138 aa, Glycine max
  Clone ID: 700955747_FLI.pep
FEYVEGPSVKDVFLEFRSHVVNKEWLDDIASQIGDAIGKLHDGGLIHGDLTTSNMLLKSDTKQLVLIDFGLSFTSTLPEDKAVDLYVLERALISMHSSCGNVMDQILAAYRKSSKQWSSTLNKLAQVRQRGRKRTMVG

SEQ ID NO: 44519 - protein, 175 aa, Glycine max
  Clone ID: 700959130_FLI.pep
LKQFALRALASTLNEGELSDLKDQFDAIDVDKNGSISLEEMRQALAKDQPWKLKESRVLEILQAIDSNTDGLVDFTEFVAATLHVHQLEEHDSDKWQQRSQAAFEKFDLDKDGYITPDELRMHTGLRGSIDPLLEEADIDKDGKISLPEFRRLLRTASMGSRTVMSPSHRHHRKI

SEQ ID NO: 44520 - protein, 154 aa, Glycine max
  Clone ID: 700959264_FLI.pep
ILIPCSNGIEMVTEKGQRELSAKDTALCTSCQMLVVWIQNQLKQKKTKEIVFNYVNQLCESLPSPNGESVVDCNSIYGLPNITFTVGDKPFTLTPEQYILKTGEGIAEVCLSGFIAFDIPPPRGPLWILGDVFMRVYHTVFDYGNLRVGFAKAA

SEQ ID NO: 44521 - protein, 165 aa, Glycine max
  Clone ID: 700963537_FLI.pep
PADAAAPHIVKEAVQAKGLRDDTTCIVVDILPQEKPPVSAPQTKRPVKGMLKSMFRKKSSESSSYIDKEYMEPDVVEELYEEGSAMLSERLDTKYPVCNMFKLFMCAVCQVEIKPGEGISIHEGAPDSRKFRPWDGPFLCSSCQEKKEAMEGKRSSGRISSGSDE

SEQ ID NO: 44522 - protein, 93 aa, Glycine max
  Clone ID: 700963596_FLI.pep
VGPVDSAYKAINLIVKETVKVLEYSLSTVTEGTDAIATTRVVIRRENKQSPTPALNGNVIYPTFSGTGEGVDVVTSSVEAYLTALNKMLDLKE

SEQ ID NO: 44523 - protein, 168 aa, Glycine max
  Clone ID: 700963954_FLI.pep
TKPDPDTMQPLDEGFGAIVQSCRRLRRLSLSGQLTDQVFLYIGMYAEKLEMLSIAFAGESDKGMLYVLNGCKKLRKLEIRDCPFGNVALLTDVGKYETMRSLWMSSCEVTVGACKLLAKKMPRLNVEIFNENEQEDCSLEDGQKVEKMYLYRTLAGKRKDAPEYVWTL

SEQ ID NO: 44524 - protein, 88 aa, Glycine max
  Clone ID: 700964081_FLI.pep
STCEVPTLQPPSLCQGAPTPTTLMGNTSRESFLVSMKGHSFIHPSTALFLVSSPSTEELLLVVLASQWLRHCYRLLMMMKLHWLLLWL

SEQ ID NO: 44525 - protein, 130 aa, Glycine max
  Clone ID: 700941478_FLI.pep
EVKKNGGVGMILANGVFDNDEEKVGADIVKRALSYPLKLIAKNAGVNGSVVSEKVLSSDNPRYGYNAATGKYEDLMSAGIIDPTKVVRCCLEHAASVAKTFLMSDCVVVEIKEPEPVPAGNPMDNSGYGI

SEQ ID NO: 44526 - protein, 82 aa, Glycine max
  Clone ID: 700941686_FLI.pep
SCKKLQMKGRRNKIGGGRREKNTEQGTWKVMDNRHYKGNAKKLPFIPLEGLDHFPCEVRVLSAEVSICSSLQEPVIPTPLEI

SEQ ID NO: 44527 - protein, 276 aa, Glycine max
  Clone ID: 700941703_FLI.pep
MDSIVVLSWFLCVLVVAARGGLGAVSRDIFILAGQSNMAGRGGVFGGKWDGDVPEECRPSPWVFRLSAGLEWEEAREPLHADIDVGKTCGVGPGMAFANEVVKARGAGGLVGLVPCAVGGTKIGQWSRGTRLYDELVQRAMQAIGGGTIRAVLWYQGESDTVRKKDAEGYKDKMERFIMDLRSDLNLPSLLVIQVALASGEGKFIEKVRRAQMGITLPNVKCVDAKGLRLKPDKLHLTTMSQVQLGIRLARAYLDSTTHHHYQFNFNINHTQVLAC

SEQ ID NO: 44528 - protein, 125 aa, Glycine max
  Clone ID: 700941783_FLI.pep
VQEGAGLLSIVIQEAEEVEGDHHNNPFAVLTFRGEKKRTKTMKKTRHPRWNEEFQFMLEEPPLHEKIHIEVMSKRKNFSFLPKESLGHVEINLRDVVHNGRINDKYHLINSRNGVMHVEIRWKVV

SEQ ID NO: 44529 - protein, 293 aa, Glycine max
  Clone ID: 700941791_FLI.pep
LPIIISYIHKRRRHRSSALISIKPPLFLASALIGLLTGLDDYLYACGVARLPVSTFSLIQASHLAFTAVFAFLLVRHRFTPYSVNSVVLLTVAAVVLALRSSGDRPAGESSRQYVIGFVMILAAAALYGFVLPLMELVYKKSRQRITYSLVMEIQLVLCFFATLFCTVGMIINNDFKVIPREARDFKLGETKYYVVLVWSAIMWQFFFLGAIGVIFCASSLLSGIIIAAFLPVTEVLAVIVYKESFHAEKGVALVLSLWGFVSYFYGEIKQDREKNKNRCPETDLPQSLPPNA

SEQ ID NO: 44530 - protein, 186 aa, Glycine max
  Clone ID: 700943187_FLI.pep
LIPLITLAVANFYYFSMASADVEFRCFVGGLAWVTGNDALEKAFSIYGDIVESKVINDRETGRSRGFGFVTFASEQSMKDAIAGMNGQDLDGRNITVNEAQTRASRGGGGGGGFGSGGGYNRGSGGYGGGGGGGGYGGRREGGYNRNGGGGGGGYGGGRDRGYGGDGGSRYSRGGEGGGSDGNWRN

SEQ ID NO: 44531 - protein, 54 aa, Glycine max
  Clone ID: 700943485_FLI.pep
SIIVLFITPKFMLHLQVAGSKSIMRALRSLKFHNDAGDIIGAFPVNCFFSKALC

SEQ ID NO: 44532 - protein, 292 aa, Glycine max
  Clone ID: 700943541_FLI.pep
VGKAVIKNFTVVVTSNALEIRLYWAGKGTTSIPFRSVYGPLISAISVDPNFIPPSESGTSSISIIRVVVVVVVAGAIIILIFGILWWKRFLGWERSVGRELKGLESQTSLFTLRQIKAATNNFDKSLKIGEGGFGPVYKGVLSDGTVVAVKQLSARSRQGSREFVNEIGLISALQHPCLVKLYGCCMEEDQLLLIYEYMENNSLAHALFAKNDDSEKCQLRLDWQTRHRICVGIAKGLAYLHEESKLKIVHRDIKANNVLLDKDLNPKISDFGLAKLNDGDKTHLSTRIAGT

SEQ ID NO: 44533 - protein, 168 aa, Glycine max
  Clone ID: 700946213_FLI.pep
LPHLIGKEKKKKKVSPALFCFNSLTMAMAFKMATTGMWVTDECKNSFMEMKWKKVHRYIVFKIDEKSRLVTVDKVGGPGESYGDLAASLPDDDCRYAVFDFDFVTVDNCRKSKIFFIAWSPTASRIRAKMLYATSKDGLRRALDGISYEVQATDPTEMGFDVIQDRAK

SEQ ID NO: 44534 - protein, 64 aa, Glycine max
  Clone ID: 700946288_FLI.pep
WGRTHVSVSLVLNRIRRQTKRDLFSLPIKLGSSNNWKKHETIKIVYSLILLNSAGFLTGGPLGH

SEQ ID NO: 44535 - protein, 65 aa, Glycine max
  Clone ID: 700946373_FLI.pep
NSNHKQRQNRKEKVYNLKLNLSINNFLSVRRSQNKLGFFPSNSTRSINCIVPTQSLQRQMSRLLP

SEQ ID NO: 44536 - protein, 188 aa, Glycine max
  Clone ID: 700966802_FLI.pep
AVSNVLPLVATAFRPPSGVKLRCPHAIVAARAALARTTFVKNMRPQPLPAKMLVIAALGMAVNVPFGMWKEHTKKFSLSWFVAVHAAVPFIAMLRKSVVMPKSAMALTIAASILGQVIGSRAERIRLKTIAVEMGKVKTETVCSMESYNSPMQLGDIRANHCGAEGMVLKSSLPVKDTGSTSTAGVCY

SEQ ID NO: 44537 - protein, 108 aa, Glycine max
  Clone ID: 700977257_FLI.pep
PNRLLKDYLEVMITNRKERGELLEALVVSDKDIIIPNFSQRIHLLWGENDKIFNLELAQNMKEQLGDGTTFEAIKKAGHMVNMERPRLFNRCLKQFIASFLAPNGPKK

SEQ ID NO: 44538 - protein, 161 aa, Glycine max
  Clone ID: 700979623_FLI.pep
GSSKLDAVDSSMVERDATIQAIRKKLLKAQERMKRYADKKRREVTFNCGEWALVKFRPHRQTSAKGAQRTPGKLSKRFYGPFQILERIGPVAYRLQLPEGMHIHPVFHISSLKQFKGPPDNVEAIELPDNFDGYQPLISPMAILNPRRKDSTSNAPWEVLV

SEQ ID NO: 44539 - protein, 274 aa, Glycine max; identical to SEQ ID NO: 42938
  Clone ID: 700979643_FLI.pep

SEQ ID NO: 44540 - protein, 349 aa, Glycine max
  Clone ID: 700983042_FLI.pep
RRDLFFVSNLFVPSIHSISSKMAKDPVRVLVTGAAGQIGYALVPMIARGVMLGPDQPVILHMLDIPPAAESLNGVKMELVDAAFPLLKGVVATTDVVEACTGVNIAVMVGGFPRKEGMERKDVMTKNVSIYKSQASALEKHAAANCKVLVVANPANTNALILKEFAPSIPEKNISCLTRLDHNRALGQISERLNIQVSDVKNVIIWGNHSSTQYPDVNHATVGEKPVRELIADDAWLNGEFITTVQQRGAAIIKARKLSSALSAASAACDHIRDWVLGTPQGTWVSMGVYSDGSYNVPAGLIYSFPVTCANGEWTIVQGLPIDEFSRKKLDLTAEELSEEKALAYSCLN

SEQ ID NO: 44541 - protein, 374 aa, Glycine max
  Clone ID: 700983863_FLI.pep
LAMFITPLWIAVIVGVVVGWAWKPKWAFHPKDALLKFRSPRPPNPQNDTAFTYSATSSSAREKDASGSPVVTEDDLLHLWKLVEEKDGGRAWIQMMDRSTPTMTYQAWRRDPESGPPQYRSRTVFEDASPELVRDFFWDDEFRLKWDDMLIHASTIQECVLTGTMMVHWVRKFPFFCSDREYIIGRRIWDAGRIYYCVTKGVPCPSMPRHNKPKRVDLFYSSWCIRAVKSRKDDQLTSCEVLLFHHEDMGIPWEIAKLGVRQGMWGAVKKFDPGLRTYEKQRVSGTPLSPCARAAKINTKVTMDYVRSLENTTSDLLETENQDSSDKPGGRNIPKLLIVGGAIALACTLDQGLLTKAVIFGVARRFAKMGGRRL

SEQ ID NO: 44542 - protein, 120 aa, Glycine max
  Clone ID: 700996004_FLI.pep
AMMQLGEGLCKLRKMEFSNGPFQKFEKDISAVLDFIYQTQIELAACSEDMCVAMDRSERSYQLLGEYASGQRVYDLELCSDASVYIVFCPQGSNNGGATEAPRVKLPTLKATTEHLVAYE

SEQ ID NO: 44543 - protein, 491 aa, Glycine max
  Clone ID: 700996181_FLI.pep
AHHTPTQIIETEMNPDQFQKNSMFVETPEDGGKNFDDDGRVKRTGTWITASAHIITAVIGSGVLSLAWAIAQMGWVAGPAVLFAFSFITYFTSTLLADCYRSPDPVHGKRNYTYSDVVRSVLGGRKFQLCGLAQYINLVGVTIGYTITASISMVAVKRSNCFHKHGHHDKCYTSNNPFMILFACIQIVLSQIPNFHKLWWLSIVAAVMSFAYSSIGLGLSVAKVAGGGEPVRTTLTGVQVGVDVTGSEKVWRTFQAIGDIAFAYAYSNVLIEIQDTLKSSPPENKVMKRASLIGILTTTLFYVLCGCLGYAAFGNDAPGNFLTGFGFYEPFWLIDFANICIAVHLVGAYQVFCQPIFGFVENWGKERWPNSHFVNGEHALKFSLFGTFPVNFFRVVWRTTYVIITALIAMMFPFFNDFLGLIGSLSFWPLTVYFPIEMYIKQSKMQKFSFTWTWLKILSWACLIVSIISAAGSIQGLAQDLKKYQPFKAQQ

SEQ ID NO: 44544 - protein, 129 aa, Glycine max
  Clone ID: 700953304_FLI.pep
IKVSDAELEFLTGSDKIDDESALSLWHPNLKLLLVTLGEHGSRYYTKSFKGSVDAFHVNTVDTTGAGDSFVGALLAKIVDDQSILEDEPRLREVLKFANACGAITTTQKGAIPALPKEEAALKLIKGGS

SEQ ID NO: 44545 - protein, 108 aa, Glycine max
  Clone ID: 700953583_FLI.pep
NLKTSFCADQSRSSQANDVRKQIVGSAVPVLKDEKFSLRILVDHSIVESFAQGGRTVVTSRVYPTKAIYGAARLFLFNNATEATVTASLNVWQMNSAFIRPFHPDQKN

SEQ ID NO: 44546 - protein, 290 aa, Glycine max
  Clone ID: 700957617_FLI.pep
DGFGVNTYTLINKAGKALYVKFHWKTTSGEKSLLDDEAIRVGGSNHSHATQDLYDSIAAGNYPEWKLYIQTLDPENEDRLDFDPLDVTKTWPEDVLPLQPVGRMVLNKNIDNFFAENEQLAFCPAIIVPGVYYSDDKLLQTRVFSYADTQRHRLGPNYLQLPANAPKCAHHNNHHDGFMNFMHRDEEVNYFPSRYDPVRHAEKVPVPPRILGGKREKCMIEKENNFKQPGERYRSWPSDRQERFVRRWVDALSDPRVTHEIRSIWISYWSQADRSLGQKIASHLNLKPSI

SEQ ID NO: 44547 - protein, 134 aa, Glycine max
  Clone ID: 700957675_FLI.pep
NMATGIVIQGCNIVPEAELFPTRFQVKSYLGRPWKQFSRTVVMESTVGDFLHPEGWCPWAGEHFEDTLYYAEYNNDGPGANVNGRIKWKGYRGLISREEATQFTPAQFLQAGANGGSDWLKALRVPHALSFMKA

SEQ ID NO: 44548 - protein, 163 aa, Glycine max
  Clone ID: 700961505_FLI.pep
KSKSLLVFIFASDPGMASKRILKELKDLQKDPPTSCSAGPVAEDMFHWQATIMGPADSPYAGGVFLVSIHFPPDYPFKPPKVAFRTKVFHPNINSNGSICLDILKEQWSPALTISKVLLSICSLLTDPNPDDPLVPEIAHMYKTDRAKYEATARSWTQKYAMG

SEQ ID NO: 44549 - protein, 134 aa, Glycine max
  Clone ID: 700965032_FLI.pep
ITSTKIKPTISRVTLKGKEPQNLTKSLRMSLIKQAESHIIITLFFRFFLLFLLSSWSCGSSTTSSSSNWGSCNSNWCTTACRICYQIAKIFLLSKFSKQGWPIRVYWNLCSFQQGADLVSSYTNSIFMKDESCV

SEQ ID NO: 44550 - protein, 289 aa, Glycine max
  Clone ID: 700965290_FLI.pep
APRVFKAAAVARPVQWFIGDPAAATTTRKKAAAKIVREGVEFYSNGDFYEGEFHKGRSNGSGVYHYFVNGRYEGDWVDGRYDGYGIESWARGSRYRGQYRQGLRHGYGVYRFYTGDSYSGEWCNGQSHGVGLQTCSDASCYIGQFKYGVKHGLGCYHFRNGDRYAGEYFGDKIHGFGVYHFTNGHYYEGAWHEGRRQGIGSYTFRNGDRRCGEWDAGTLKQSLPPLSDVVLRAVQAARKTAENAINLKRVDDQVNKAVIAASKAATAARVAAVKAVQNRMDGKFCDTDV

SEQ ID NO: 44551 - protein, 122 aa, Glycine max
  Clone ID: 700941045_FLI.pep
LASVYNNNMRKPEVSGKNNNINNKLRKGLWSPEEDDKLMNYMLNSGQGCWSDVARNAGLQRCGKSCRLRWINYLRPDLKRGAFSPQEEEIIIHLHSLLGNRYNILYTLLFYLHMHVFITIFV

SEQ ID NO: 44552 - protein, 125 aa, Glycine max
  Clone ID: 700941055_FLI.pep
PVQNEEILAKKYRIRLRGIDAPESAMPYGKEAKTELTKIVQGKPLRILVYEEDRYGRSVGDIYCNGIFVQEMMLKKGLAWHYVAYDKRPELETWEKQARAKRVGLWASKNPEKPWEWRKDRREAA

SEQ ID NO: 44553 - protein, 399 aa, Glycine max
  Clone ID: 700941060_FLI.pep
YPFSSTILETPMEDPFSNLPDEILSCIVSFLPLETSLISTRWRDLWNQALVRHGSTQDDVASVVAGFLSRFEELDPLKHPRKLHFHFSDQDTALFASIATNSKLLLDFPAGIKDLKKQYELKFILNKHHITHNTVPPTFLVKTLYLKSVSHLTSELISSIVSNLEHLEKLVIVECTGLQSLFIESESKLHELTILDCPQLKSLHLRTSKLKSFRLDGPLPTIWPESHFNLSHAMLNFRLGPSCADFKAQYFNQTLLTIKNCEALTLCEWTFQELIWPSISPSGNFIFYKIRELWWIHNHRGENSMDTLVSFLKLCPALEQLFVTNDSTSYSAPRSNSYCLTQETEYSTKLEHLKRIKFMGFTNRVDEISVAKKLIELVKGEPPKIETSDESCLNVVIVQ

SEQ ID NO: 44554 - protein, 223 aa, Glycine max
  Clone ID: 700942721_FLI.pep
GSMKVHQFTRGLIWEHEPFLTLGCKRLRPLAPKLPNTKTITTPFDLKSFIRPESGPRKPVSSDDTKKDPPSPQGQIETHPGGTRWNPTQEQIGILEMLYKGGMRTPNAQQIEQITVQLGKYGKIEGKNVFYWFQNHKARERQKQKRSSLASSHSPRTPTIHSVVTLETTRGEVVERDHEEDSPYKKKCRRWVFDCLEEQNMSSPCEQEEHRTLELFPLHPEGR

SEQ ID NO: 44555 - protein, 181 aa, Glycine max
  Clone ID: 700942737_FLI.pep
RMAMSIGIARGVQFLHTGVAPGIYGNNLKIENILLDDSLNAKVSRYNIPLPSKIAHIEQNATNHIGSTNDAEKEDIYQLGIILLEVITGKQITSSSEIEELKEELENGSSEATSVIRSAIDPSLRGTYAYESMKTAVQITINCLSKVSSQRPSIEDVLWNLQYAMQVQESWTSSGNLSTKL

SEQ ID NO: 44556 - protein, 344 aa, Glycine max
  Clone ID: 700944605_FLI.pep
NERKTSTILLIRFVQIKTCLFATLLLTKNVVPSEMSDTVEHTDQRAEAIPQSTATPNWTIHVSDIRTVKVSNISLVTSKKDIEEFFSFSGDIRYIEMQRESGHTQVAYVTFKDTQGADTAVLLTGSKIGDLYVTITPVEKYQLPPEALPSSPTNQSPDAVKKAEDVMSTMLAKGFILGKDAINKAKAFDERHQLTSNASSTVASIDRRIGLSDKLSIGTTIVNGKVREMDERYQLSEMTKSAMAAAEQKANSAGSAIMNNSYVISGASWFSSAFTAIAKAAGDVSTMTKEKVEQAAVERNEIIYSERKGTVDEFAKTHLEEASDIGPAVVPVNSDDDRNLATIL

SEQ ID NO: 44557 - protein, 161 aa, Glycine max
  Clone ID: 700944661_FLI.pep
GEINLDDVEAVFKDSEEHHVTEKKEEQPTAMNAFELISMSKGLNLENLFDTEQGFKRETRFTSKSPADEIINKIEEAAKPLGFDVQKKNYKMRLANVKAGRKGNLNVATEIFQVAPSLHMVEVRKAKGDTLEFHKFYKKLSTSLDDVVWKTEDDMQMRETK

SEQ ID NO: 44558 - protein, 309 aa, Glycine max
  Clone ID: 700944676_FLI.pep
NYKLNGSNSFLSASEQISFFISLTYTTQRQGYAMIGSFITRALVMVFGYAFPAYECYKAVEKNRPEIEQLRFWCQYWILVAVLSVCERIADAFISWVPMYSEAKLAFVIYLWYPKTKGTTYVYDSFFRPYVAKHETEIDRNLLELRTRAGDIAVLYWQKAASYGQTRIFEILQYVAAQSTPSPRPAQQQPAVRVRQPASSNSQPAAATEPQAENPSSPTSSSSSQHQKEVAEKLGSSQVPKAPYTVAGLSSQKSNPIPAEDEPMQIEAAPPSSSSANENENPPLEDTIMEESIRVTRGRLRKNRSAGIR

SEQ ID NO: 44559 - protein, 331 aa, Glycine max; identical to SEQ ID NO: 37362
  Clone ID: 700944751_FLI.pep

SEQ ID NO: 44560 - protein, 164 aa, Glycine max
  Clone ID: 700944807_FLI.pep
MCSISEKAKRKRQSAFRGVRKRSWGRYVSEIRLPGQKTRIWLGSFGSPEMAARAYDSAAFFLKGTSATLNFPDLVHSLPRPLSSSRRDIQSAAAEAALHSPPPKEEQESIFTSTTTSSFHDVMEAPLMSPLRVDSTFGDFSWDQLFDFNDDILIVGSTSATLVP

SEQ ID NO: 44561 - protein, 123 aa, Glycine max
  Clone ID: 700998058_FLI.pep
IRLEDKGTVHVFSLKVNSSIPEQEKSQSSSNSDAAITPSSSSRSFIKLKGVLPKYFNSEWSVAQFHLQEGSHYTVAFGLQKNTVIILGMDGSFYRCQFDPVHGGEMTQLEYHNFLKPEPETAL

SEQ ID NO: 44562 - protein, 210 aa, Glycine max
  Clone ID: 700998509_FLI.pep
EIWQLALQPAFLSYTASAIAVVFFLILYCAPRHGQTNILVYIGICSIIGSLTVMSIKAIGIAIRLTIEGADQFVQFQTWIFTMVAISCIVTQLNYLNMALDTFNTAVVSPIYYALFTSFTILASAIMFKDYYGQSISSIASELCGFVTVLSGTTVLHSTRELDPPVNTDLYSPLSPKVSWYIQGNGEPWKQKEDAPPFNLITVIRQDHFK

SEQ ID NO: 44563 - protein, 97 aa, Glycine max; identical to SEQ ID NO: 43895
  Clone ID: 700998622_FLI.pep

SEQ ID NO: 44564 - protein, 369 aa, Glycine max
  Clone ID: 701001275_FLI.pep
IIRAKKKNQNNERENMGSSSASESVCVTGASGFIGSWLVMRLIERGYTVRATVRDPANMKKVKHLVELPGAKTKLSLWKADLAQEGSFDEAIKGCTGVFHVATPMDFDSKDPENEVIKPTINGLLDIMKACVKAKTVRRLVFTSSAGTVDVTEHPNPVIDENCWSDVDFCTRVKMTGWMYFVSKTLAEQEAWKYAKEHNIDFISVIPPLVVGPFLMPTMPPSLITALSLITGNESHYHIIKQGQFVHLDDLCLGHIFVFENPKAEGRYICCSHEATIHDIAKLLNQKYPEYNVLTKFKNIPDELDIIKFSSKKITDLGFKFKYSLEDMFTGAVETCREKGLLPKPEETTVNNELLPKPAETTVNDTMQK

SEQ ID NO: 44565 - protein, 76 aa, Glycine max
  Clone ID: 701006112_FLI.pep
CALCGSSLLLAMPLHLVHPPPLVLLSAPVRFLEITDFPWSSPTRGHTRSGLEVRTFDSSNDIELMNTKVGSGGGDL

SEQ ID NO: 44566 - protein, 276 aa, Glycine max
  Clone ID: 701007536_FLI.pep
EFGSRWKGPPKFKPQYTKDEAIQHVRDLYRESLKKYGAEGSRGKSAEDGEQNIDELSFTELRDKLIALDPLNKKHIISINKAEAEFWRKSEGYRVGWSDEILGFDCGGQQWVSEACFPAGKLANPSMKDLEYIEELKLLIEKEDIPAPAPIEQRWTASSRSSLSPASSPSGDDIFSWVGIIMYLPTMDGRQRKDITEEFFHYRHLTQAKLWDRYSAYEHWAKIEVPKDKEELAALQARLRKRFPVDAYNKARKELDPNRILSNNMLEKLFPQSDTI

SEQ ID NO: 44567 - protein, 274 aa, Glycine max; identical to SEQ ID NO: 42938
  Clone ID: 701015373_FLI.pep

SEQ ID NO: 44568 - protein, 197 aa, Glycine max
  Clone ID: 701040896_FLI.pep
RALNQLLRMSDVLLLTSEEAEELTGINDPILAGQEFLKRGIRTKWVIVKMGSKGSILITASSVACAPAFKVNVIDTVGCGDSFVAAIVYGFIHNMPLVNTLAIANAVGAATAMGCGAGRNVATLENVVHILRSSNLSEDDEFWIEILEKNVVAQEITYLSNVMNGNKNRLNLVSFDKVASELLPKLELPQTVGNAPT

SEQ ID NO: 44569 - protein, 216 aa, Glycine max
  Clone ID: 701045922_FLI.pep
MEAVCGSGSSVWVTSSLTCSPKITLPLFRASYQHLTAFPSQSLLFSYHPSRYANARTLRARTSSKPIFLPHLIASLEQVDQTYIMVKPDGVQRGLVGEIISRFEKKGFKLTGLKLFQCSKELAEEHYKDLKQKSFFPKLIDYITSGPVVCMAWEGVGVVASARKLIGATDPLQAEPGTIRGDLAVQTGRNVVHGSDSPENGKREIALWFKEGEVCD

SEQ ID NO: 44570 - protein, 279 aa, Glycine max
  Clone ID: 701045948_FLI.pep
VLEAKAKQAAEKEKRKTEKDLEDENGGAGVYSMNLRKNYILADDEWKEDVLPEILDGHNVYDFIDPDILHRVEELEREEGMRQEEAEDDDFEIDGTELTPEQQAALAEIRKKKSLLIQQHRIKKSNAENRPTVPRKFDKDKQFTSERMGRQLSSLGLDPSLAIKRMHSRSVSRGRKRDRSPETRSADGMDTDGDTPSKKQRLSRSLSRSRSVSRPPHEVVPGEGFKDSAQKVKAIKLAKKSVKKRNKDARRGEADRVIPNLKPKHLFSGKRSNGKTERR

SEQ ID NO: 44571 - protein, 367 aa, Glycine max
  Clone ID: 701051427_FLI.pep
KKKMEMYQIWSRRIALGAFAFVLLFLSASADDVVVLSEDNFEKEVGQDRGALVEFYAPWCGHCKKLAPEYEKLGSSFKKAKSVLIGKVDCDEHKSLCSKYGVSGYPTIQWFPKGSLEPKKYEGPRTADSLAEFVNTEGGTNVKIATAPSNVVVLTSENFNEVVLDETKDVLVEFYAPWCGHCKSLAPTYEKVATAFKLEEDVVIANLDADKYKDLAEKYDVSGFPTLKFFPKGNKAGEEYGGGRDLDDFVAFINEKSGTSRDVKGQLTSQAGIVESLDVLVKEFVAASDEEKKFVFTRMEEEVEKLKGSASRHGKIYLKAAKNYLEKGSDYAKNEIQRLQRILDKSISPAKADELTLKKNILSTYAA

SEQ ID NO: 44572 - protein, 611 aa, Glycine max
  Clone ID: 701051573_FLI.pep
FHIKARLEHLQVRKSHFYLSVTETTMDTIKSFKGYGKVDELEQQAYQKKTRKRLIIITVSSIVLIAVIIAAIAGVVIHKRNTSSSPSSDSPPQTELTPAASLKAVCDVTQYPNSCFSAISSLPDSNTTDPELLFKLSLRVAIDELSKLSSFPSKLRANAEHDARLQKAIDVCGNIFGDALDRLNDSISALGSSGGAGKIISPASVSDVETWISAALTDQDTCLDALGELNSTAASGALREIETAMRNSTEFASNSLAIVTKILGLLSQFAAPIHHRRLLGFPEWLGAAERRLLQVNSSETTLDAVVAQDGSGQFRTIGEALKLVKKKSEKRFVVHVKEGRYLENIDLDKNTWNVFIFGDGKDKTVVVGSRNFMDGTPTFETATFAVKGKGFIAKDIGFVNNAGASKHQAVAFRSGSDRSVFFRCSFNGFQDTLYAHSNRQFYRDCDITGTIDFIFGNAAAVFQNCKIMPRQPLPNQFNTITAQGKKDRNQNTGIIIQKSKFTPLENNLTAPTYLGRPWKDFSTTVIMQSDIGSFLKPVGWMSWVPNVEPVSTIFYAEYQNTGPGADVSQRVKWAGYKPTLTDGEAGKFTVQSFIQGPEWLPNAAVQFDSTL

SEQ ID NO: 44573 - protein, 258 aa, Glycine max
  Clone ID: 701056883_FLI.pep
MTGLPLRKCFPRIFSSLLMRMRIVERPLVSFVVIHLKTSTLWFVFPLRKVICRVLMLNSSANSMLLSSVVARFQPKKLANDKCRKLSKRVAFYAVDCRDSCGEIFVDLQDYKYSKKKQDETVKCDLKYPSFEDALSVPWRALHRRMSKLYYAMRVIEKFEEAEGRSAGEVSIADLSGVLKLKKEICTAQSLNESHVPDTLLERLVTNAIEFPPVCAIIGGILGQEVIKAISGKGDPLKNFFFFDAFDGKGIIEDLSPK

SEQ ID NO: 44574 - protein, 273 aa, Glycine max; identical to SEQ ID NO: 44461
  Clone ID: 701058921_FLI.pep

SEQ ID NO: 44575 - protein, 260 aa, Glycine max
  Clone ID: 701061120_FLI.pep
LSSTPTKRKRVPFASSGETSTRTDLVVMPSKQSWWSKKFDEFREKVKGHPVSKRFLKYSDPVKTKGQEIVEDLRERYETSDSPIIHKIQDINDSMFQETDAAISYKEIRQRDPYFSLPEFVGEVQEAIKPVLNAYIKGDVETLKKYCSPELIERCKAEHNAYQSHGIFFDNKILHVSDLEIRETKMMGSSPVIIVMFQTQQIYCVRDRNGAITEGGKDTIHTVFYFWALQQMDQEDRGEDGIYLMWRLREMQQQGIQALI

SEQ ID NO: 44576 - protein, 163 aa, Glycine max
  Clone ID: 701061389_FLI.pep
YLSYTNHSQKKEKQRKKITHKILSKREQSLSRDFYGFNIRLLNLFLGNSNSENPIFHRSLHLLHFSILRQSEPSHELATATLHSMPRVVLIFLLKVPLSAYLKNPIIFNLHLHFLFLQPWNICLEHVCFWGLLPIHPSAHKCRIFSRNRSGKVKILEGIPHVK

SEQ ID NO: 44577 - protein, 95 aa, Glycine max
  Clone ID: 701063210_FLI.pep
MFACTPCTGSTLLSCLNPAGFPLRRPSASRCSSREPSLPFAHCLLPCLMPQDETLVTLILFSQVTEARAEGNARMRIYGSIVKARGTGIFGRTKH

SEQ ID NO: 44578 - protein, 170 aa, Glycine max
  Clone ID: 701063302_FLI.pep
ISLSSLSLQILLSFFSSLLTVAMAFRVGGAGGGNASSGMGVAEHSVNTFLELQRKKVHRYVIFKIDEKKKEVIVEKTGGPAESYDDFTASLPENDCRYAVFDFDFVTSENCQKSKIFFIAWSPSVARIRPKMLYATSKDRFRRELQGIHYEIQATDPTEMDLEVLRERAN

SEQ ID NO: 44579 - protein, 122 aa, Glycine max
  Clone ID: 701000133_FLI.pep
RVENMEGKGFTEEQEALVVKSWNEMKKNSQELGLKFFKKILEIAPAAQQLFSFLKDSTVPLEENPKLKPHAMAVFVMVTKLALLETIKEAVPEMWSPAMKNAWEEAHDQLAEAIKSEMKPSD

SEQ ID NO: 44580 - protein, 172 aa, Glycine max
  Clone ID: 701004429_FLI.pep
RHQALVSPASITTITTTRVTTVSATAITTTTTTTIATAITTVTATVSTTATATTTTISTATTIVSSSSAAAAATAGLSFIDSDVTAVQVLSIHRSDRIFHGLLRGEGHKSKTPGSASLTIVDNLRFNDFAVLREGSLEGMVVSGPSEPTDKATVLNICRSHRKMNKTLENWD

SEQ ID NO: 44581 - protein, 60 aa, Glycine max
  Clone ID: 701004493_FLI.pep
KEQPSFMSMNIISIVTAIITALTRIHNIINTMNMPFYPTLSYLHSTTYIISLLKLKKKQQ

SEQ ID NO: 44582 - protein, 90 aa, Glycine max
  Clone ID: 701038843_FLI.pep
NNMKRTLHYQTKSTASEGNVCLHIKMLRTTELLDGKKFPSHTNLVLKKRNILYQFIINVNNIHYQVHYGSHQQQIMKEGHHRVFFTLLQH

SEQ ID NO: 44583 - protein, 74 aa, Glycine max
  Clone ID: 701039075_FLI.pep
VSLSPEMKKGVHPQKQWISYVTQTGRLMHVMMTKIHPVGKVYHFRAKRQMAESLGQIAKFRRRFGLENPEGNEK

SEQ ID NO: 44584 - protein, 244 aa, Glycine max
  Clone ID: 701043125_FLI.pep
LIGSCKKYRSCIVLTWLDSSHQKKAKKAKMQSMSLTLSKRLSNSKPLFRISSNLVAHASSATTSPPPPSPPVPSPSALNSLLTAPWSATQSRGITLSGSDVRVGNLIGNRGRAHEVLKLYRPLEGTGKATLEVPPQSVAGYATVATTEDGAERKERNSGLSKATKTKREQLLKATAVASLLLIYPNTYSLLFANFFVFWHLYAGIGEILADYVHHEMTREFVMISLRLFLIMALKDVCLNFVFV

SEQ ID NO: 44585 - protein, 165 aa, Glycine max
  Clone ID: 701043688_FLI.pep
LDHSHALLYPLLHRRSLQRSQQHRHPMANAASGMAVHDDCKLRFLELKTKRTHRFIVFKIEEQQKQVIVEKLGEPAQGYEDFTASLPADECRYAVYDFEYLTEGNVPKSRIFFIAWSPDTSRVRSKMIYASSKDRFKRELDGIQVELQATDPTEMGLDVFKSRAN

SEQ ID NO: 44586 - protein, 108 aa, Glycine max
  Clone ID: 701044364_FLI.pep
PTPFSHQNASTKKMAFLWNKTSIASHFRSHSQKTEGLASFPRRRFHVEPGAREKALLAEDATLKPFKSYKKSVKQLRKIGNALTVVVVAGCCYEVYVRAFTREEAQKL

SEQ ID NO: 44587 - protein, 91 aa, Glycine max
  Clone ID: 701048414_FLI.pep
KNMVCNVIEGNFDEACSGLKQLYDLGYSPTDIITTLFRIIKNYDMAEYLKLEFMKETGFAHMRICDGVGSYLQLCGLLAKLSLVRETAKAV

SEQ ID NO: 44588 - protein, 220 aa, Glycine max
  Clone ID: 701049876_FLI.pep
NALAMPQNPVSVLHNRRGIIVSSMENGTRPEFQLASDGVHQAQLAAQSFQKELEANNIPLANVRICYSPFSRTTHTANVVSTLLNLPFDGPHCKVIQDLRERYFGPSFELLSHDKYQVIWDIDEKDPFLGPEGGESVKDVACRLATAMATMESEFQGCAVLVVSHGDPLQILQTILHAANEHKEPTYNDLASILTAVQVAPILSQHRKHALLTGELRAVI

SEQ ID NO: 44589 - protein, 115 aa, Glycine max
  Clone ID: 701060596_FLI.pep
EPPINLFYPGIVLFLVGIIGNFYHHYLLSKLRGKGEKEYKIPKGGFFELVICPHYFFEITVFYGIFFISQTLYSFAFAVGTTMYLVGRSYSTRKWYLSKFEDFPKHVKAVIPFVF

SEQ ID NO: 44590 - protein, 216 aa, Glycine max
  Clone ID: 701062193_FLI.pep
FEYRYITSDCDAVATVYEYQKYAKSQEDAVADVLKAGMDINCGTFMLRHTESAIEQGKVKEEDLDRALLNLFSVQLRLGLFDGDPIRGRFGKLGPKDVCTQEHKTLALDAARQGIVLLKNDKKFLPLDRDIGASLAVIGPLATTTKLGGGYSGMIFILGHCNFSIFIWFVSFNFACSRYLMPVVRLFFYTTLHSNGIDICTQDFHTEMPNTFSILK

SEQ ID NO: 44591 - protein, 73 aa, Glycine max; identical to SEQ ID NO: 42156
  Clone ID: 701063710_FLI.pep

SEQ ID NO: 44592 - protein, 266 aa, Glycine max
  Clone ID: 701063804_FLI.pep
RMALRCLVMSLSVLFTLGLARESHARDEDFWHAVWPNTPIPSSLRDLLKPGPASVEIDDHPMQIEETQYPKTFFYKEDLHPGKTMKVQFSKPPFQQPWGVGTWLKEIKDTTKEGYSFEELCIKKEAIEGEEKFCAKSLGTVIGFAISKLGKNIQVLSSSFVNKQDQYTVEGVQNLGDKAVMCHRLNFRTAVFYCHEVRETTAFMVPLVAGDGTKSSVLFWYFHQMLHQLMGVDPGTNPVCHFLGSKAILWVPNLSVDTAYQTNIVA

SEQ ID NO: 44593 - protein, 254 aa, Glycine max
  Clone ID: 701001988_FLI.pep
SSEIGFAAKCDFFAVYDGHGGAQVAEACKERLHRLVAEEVVGSSESHVEWDWRGVMEGCFRKMDSEVAGNAAVRMVGSTAVVAVVAVEEVIVANCGDSRAVLGRGGEAVDLSSDHKPHRPDELMRIEEAGGRVINWNGQRVLGVLATSRSIGDQYLRPYVISKPEVTVTQRSSKDEFLILASDGLWDVMSSEVACQVVRKCFQGQIRRVCDGVGNHQNRATEAADLLAEIALAKGSRDNTSVIVVELRGTVTTD

SEQ ID NO: 44594 - protein, 152 aa, Glycine max
  Clone ID: 701002786_FLI.pep
RRKGKMGKDLSEEQVSSMKEAFSLFDTDGDGRIAPSELGILMRSLGGNPTQAQLKAIVAEENLTAPFDFPRFLDLMAKHIKPEPFDRQLRDAFKVLDKDSTGFVAVSELRHILTNIGEKLEPSEFDEWIREVDVGSDGKIRYEDFIARMVAK

SEQ ID NO: 44595 - protein, 496 aa, Glycine max
  Clone ID: 701008431_FLI.pep
VSETRIRKTMAAKLDSHAVASDMIDFLNASPTAFHAVDEAKRRLRSAGYHQLSEREPWKLQPGNKYFFTRNHSTIVAFAIGKKYVSGNGFHIIGAHTDSPCLKLKPVTKVVKAGILEVGVQTYGGGLWHTWFDRDLTVAGRVIVQEENAGSVSYSHRLVRIEEPIMRIPTLAIHLDKTVSDGFKFNNETHLIPILATSLKGELNKVSTENGPVESGNQNDGKKANDKTGTSNTKHHLLLLQLLASKLGCEPDDICDFELQACDTQPSTIAGAAKEFIFSGRLDNLCMSFCSLKALIDATSSDSSLEEESGVRMVALFDHEEVGSNSAQGAGSPVMLNAVTRVTNSFSSNPNLLEKAVQLSYLVSADMAHALHPNYMEKHEANHQPKLHGGLVIKTNANQRYATNVVTSFIFREIASKHKLPVQDFVVRNDMGCGSTIGPILASGIGIRTVDVGAPQLSMHSIREICAVDDVKHSYEHFKAFYEEFSHVDGKMVVDI

SEQ ID NO: 44596 - protein, 298 aa, Glycine max
  Clone ID: 701009040_FLI.pep
FEGKGKIGDGLMPILHKSAPQVALFSARGPNIKDFSFQEADLLKPDILAPGSLIWAAWCPNGTDEPNYVGEAFAMISGTSMAAPHIAGIAALIKQKHPHWSPAAIKSALMTTSTTLDRAGDPLLAQQTSESEAMRLVKATPFDYGSGHVDPTAALDPGLIFDAGYEDYIGFLCTTPSIDVHEIRNYTHTPCNTSMGKPSNLNTPSITISHLVRTQVVTRTVTNVAEEETYVITARMEPAVAIEVNPPAMTIKAGASRQFLVSLTVRSVTGRYSFGEVLMKGSRGHKVRIPVLANGYRR

SEQ ID NO: 44597 - protein, 79 aa, Glycine max
  Clone ID: 701013103_FLI.pep
AIFKIGNSRDMPEIPDHLSSEAKNFIQLCLQRDPSARPTAQKLIEHPFIRDQSATKATNVRITRDAFPYMFDGSRTPPV

SEQ ID NO: 44598 - protein, 376 aa, Glycine max
  Clone ID: 701013187_FLI.pep
RNEYERHKLQALNQRQKLVLQRKTEEAAMATKRLKELLEARKTSSRETLVTMNGSGTNGQSNEKSLQRWLDHELEVMVKEHEVRFEYEKQSQVRAALAEELAMLKQVNEFAAKGRGPPRKNGFARASSMSPNARMARIASLENMLSISSNSLVAMASQLSEAEERERAFSNRGRWNQLRSMGEAKNLLQYMFNSVADARCQLWEKDMEIREMKDQIKELVGLLRQSEMKRKEVEKELKVREQAVGTTLATPPSGDSPNPSKQYAEDMKGLLSPVSMPVPKQLKYTPGVANGLVRESAAFVDQGRRMVPIGQLSMKKLAIVGQASGKLWRWKRSHHQWLLQFKWKWQKPWRLSEWIRHSDETIMRTKPRSQALSRIR

SEQ ID NO: 44599 - protein, 174 aa, Glycine max
  Clone ID: 701037910_FLI.pep
LVKPQRGISFLELANSQASGSDADSSNKRLVLALYDALNSGDSDAVVKIVAADLEWWFHGPPSHQFLMRMLTGDSAADNSFRFLPQSIAAFGSTVIVEGCDTARNIAWVHACTVTDGIITQIREYFNTALTVTRIHDSGEIVPASSGAGRLPCVWESSVSGRVGKSVPGLVLAI

SEQ ID NO: 44600 - protein, 404 aa, Glycine max
  Clone ID: 701038069_FLI.pep
SLSHPKMSLILQTPPSTTLSSASPIHRTITRYTTFSFSLRPPTTLHFNPHRSLPLIRASNSSINAASTTELDAVSAFSEIVPDTVVFDDFEKFPPTAATVSSSLLLGICGLPDTIFRNAVEMALADSECYGLENPNARLSCFVNKAFANIGSDMAKLVPGRVSTEVDARLAYDTHAIIRKVHDLLKLYNDSNVPPQRLLFKIPSTWQGIEAARLLESEGIQTHLTFVYSFAQAAAAAQAGASVIQIFVGRIRDWARNHSGDTEIESAQLRGEDPGLALVTKAYNYIHKYGHKSKLMAAAVRNKQDLFSLLGVDYIIAPLKVLQSLKESVASPDEKYSFVRRLSPQSAAKYTFSDEELVRWDEDSLSKAMGPAAVQLLAAGLDGHADQAKRVEELFGKIWPPPNV

SEQ ID NO: 44601 - protein, 39 aa, Glycine max
  Clone ID: 701038142_FLI.pep
LTSRNKQKVGLICFSSQTCFNHATEFTTKTLETQNCPTP

SEQ ID NO: 44602 - protein, 525 aa, Glycine max
  Clone ID: 701038279_FLI.pep
NIFQSPKSNTINDSNSIVCSLCLVASKMAHSSVIVFLCTLLLFFSPSIRASDDDVALHAKKLIRDLNLFPDADVNIVPVANCTLQPRRIVEKRLRFPKLLASDSEPSVEDLGHHAGYYPIQHSHAARMFYFFFESRNRKEDPVVIWLTGGPGCSSELALFYENGPFKIADNLSLVWNEYGWDKASNLLYVDQPTGTGFSYSSDLRDIRHNEEGVSNDLYDFIQAFFVEHPQYAKNDFFITGESYAGHYIPAFATRIHRGNKAKEGIHINLKGLAIGNGLTNPAIQYKAYPDYALEMGIIKKATRNLLNLVLVPACESAIKLCGTNGKTSCMAAYVVCNVIFSDIMLHAGDTNYYDIRKKCEGSLCYDFSNMDKFLNQQSVRDSLGVGKIHFVSCSTEVYAAMLVDWMRNLEVGIPDLLEDGINLLVYAGEYDLICNWLGNSRWVHAMEWSGQKEFATSLEVPFVVDGSEAGLLKSYGPLSFLKVHNAGHMVPMDQPKAALEMLKKWINGTLAEPRDDKEKLVAEM

SEQ ID NO: 44603 - protein, 395 aa, Glycine max; identical to SEQ ID NO: 38715
  Clone ID: 701041509_FLI.pep

SEQ ID NO: 44604 - protein, 75 aa, Glycine max
  Clone ID: 701041622_FLI.pep
QSITSTLASIQAKYISEYIKIQKLDPPPQEKTSKVQKRANAPPTSNTTGFRNRFIQTSHFLLEQDTKSQLNINIR

SEQ ID NO: 44605 - protein, 431 aa, Glycine max
  Clone ID: 701042337_FLI.pep
KVCSTVPLLALAMLPTGAKETQLRENNSQKVHPQPMEEAMNQNPEAMETLISKVFTNISSLKSAYIQLQAAHTPYDPDKIHTADKLVISELKNLSELKHFYRENNPKPVCVSPQDSRLAAEIQEQQSLLKTYEVMVKKFQSEIQNKDSEIHQLQQQIEEARQKRAKLEKNLKLRGLSTKESEDEIGFFPVDLTPDLFTSAVEAAAKAIHDFSKPLINMMKAAGWDLDAAANSIEPDVVYAKRAHKKYAFESYICQRMFSGFEQENFSVKSDNITVTKESFFHQFLALREMDPLDMLGQNPDSIFGKFCRSKYLVVVHPKMEASFFGNLDQRNYVMGGGHPRTPFYQAFLKLTKSIWLLHRLAYSFEPNVKVFQVKGGSEFSDVYMESVVKNLIMDDNDEKPKVGLMVMPGFWIGGSVIQSKVYLSGMKVAE

SEQ ID NO: 44606 - protein, 216 aa, Glycine max
  Clone ID: 701047646_FLI.pep
NPILLRSFISTAISPNLPTRSQGLKRCTTMSDDEREEKELDLSSAEVVTKYKTAAEIVNKALKLVISECKPKAKIVDICEKGDSYIREQTGNVYKNVKRKIERGVAFPTCLSVNNVVCHFSPLASDEAVLEEGDILKIDMACHIDGFIAAVAHTHVLQEGPVTGRAADVIAAANTAAEVALRLVRPGKKNKDVSDAIQKVAAAYDCKIVEGVLATK

SEQ ID NO: 44607 - protein, 55 aa, Glycine max
  Clone ID: 701052527_FLI.pep
EFHCYPLLFGNRLSPLAKILIPFSFAETAKSVPSLLKRMRGLAGRPPSASTVVKS

SEQ ID NO: 44608 - protein, 206 aa, Glycine max
  Clone ID: 701052585_FLI.pep
QVDLYDSIFNLNFLSIWFHHIMETCHPKLDHDLQQPFKSQVFITTNSFQNAPYLSFWKSHLNEFLYLVFNPARRFLGKTFCPVASSVNKCLIVFQILLCHHGILRIIRLWSREKCLHRKKCSLQSECWAPLVLQDIQANSSTLAADIRMPNFGFKLHLGGFKRVPIWQCDINLENAPFIRSSDRARNGAKSDNLVLLIGTIPTGPG

SEQ ID NO: 44609 - protein, 352 aa, Glycine max
  Clone ID: 701052595_FLI.pep
YSVLSFPPLQFNCMQGGYRGFYSCNTIPLTPKVVNDIHKRGGTILGTSQGEGGNDTLKIVDSIQDRGINQVYILGGDGTQRGASVIFEEIRRRGLKVSVVGIPESVDNDIPVIDKSFGFDTAVEEAQRAINAAHVEAESTENGIGVVKLMGRHSGFISMYATLASRDVDCCLIPESPFYLEGPGGLFEFIRKRLAENGHMVIVISEGAGHELISESLSATNKQEASGNKLLQDVGLWLSQKIKDHFTKSQKMDITLKYIDPTYMIRAVPSIASDNVHCTLLAQSAVHGAMAGYTGFAVGTVNGKHAYIPFYRINEIEKKVVITDRMWARLLSSTNQPSFLNPKDITTHQTGN

SEQ ID NO: 44610 - protein, 268 aa, Glycine max
  Clone ID: 701052770_FLI.pep
SISSVLYFVLFYSHLITHTLSRTHHSTTLLSLTLTLCSVIAVPRFSLHLETPSLPQSQPITILMAALALALLLLAFTGTSSATWCVCKDGSDAILQKTLDYACGAGADCNPLHLNGPCFQPNTVRAHCNYAVNSYFQKKGQAQGSCEFAGTATVTASDPSSSGCVYPSSVSAAGTGTTPVTTTPTMGTTPTTGTPSTSTGTGTGTGTTTGTTPYSTTPGVLGGIGSGMGPSGSGMNDESHGGIRFVHSSSFFSIAIALISAFMMLCWG

SEQ ID NO: 44611 - protein, 371 aa, Glycine max
  Clone ID: 701052805_FLI.pep
LTIFIPFFLRTTPSFCAMSSSLVLPSTPFFAHGTRTLPLTRSRLSMTVSAGSQPSLRDALFADYKASTSFLFPGQGAQAVGMGKEAQNVPTAAVLFNKANDVLGFDLLDICINGPKEKLDSTVISQPAIYVTSLAAVELLRARDGGQQIIDSVDVTCGLSLGEYTALAFAGAFSFEDGLKLVKLRGEAMQDAADAAKSAMVSVIGLDSEKVQQLCDAANQEVPEAEKVQIANYLCPGNYAVSGGLKGVEVLESKAKSFKARMTVRLAVAGAFHTSFMKPAVSRLEAALATTEIRTPRIPVISNVNAQPHTDPDSIKKILACQVTSPVQWETTVQTLLTKGLKKSYELGPGKVIAGIIKRTDKGADIENIGA

SEQ ID NO: 44612 - protein, 229 aa, Glycine max
  Clone ID: 701059591_FLI.pep
KLEHVFVPNLIHYIRTKKSTRLPSLYNYFICLYNHNSHSHHIRTKKSTRLQTKKTNNICFCLTRDFYGLNIMILNLFLRNSNSKNPIFHRSLHFIHFCILRQSEPPHELSTATLHAMPRVVLIFILNVPLSADLKHLIIFNLHLHFLLLQPGNIGLEHVRLWGLLPIHTSAHKRRIFPRKLREGSRDGIWERKILEGIEHIAPTATENVWNERHFLLAEFWNFSYRNCY

SEQ ID NO: 44613 - protein, 413 aa, Glycine max
  Clone ID: 701059606_FLI.pep
GFLFPSLAQFTISMAGICCGVVGEGDTPAPLEPTPRPSRRRSLDILPLKYIADMPMPPPEALRKRPKLNLRDCDNAIENCDESTGHKVTKKESKVDYDDDVVSETKNVTVSEVEEESPKFGVTSVCGRRRDMEDSVSVRPCFTQGFHYFGVFDGHGCSHVATMCKERLHEIVNEEIESARENLEWKLTMENGFARMDDEVHRRSQSNQTFTCRCELQTPHCDAVGSTAVVAVVTPDKIVVSNCGDSRAVLCRNGVAIPLSSDHKPDRPDELLRVQSKGGRVIYWDGPRVLGVLAMSRAIGDNYLKPYVISEPEVMVTERTEEDECLILASDGLWDVVSNETACGVVRMCLKAQKPPGSPGSDVAADGSDRACSDASILLTKLALARHSSDNVSVVVVDLRRDQRQSSNYNDVN

SEQ ID NO: 44614 - protein, 512 aa, Glycine max
  Clone ID: 701059813_FLI.pep
KTQSASLLCLFLSLAILLASGTAASATPRSAVPSHHVSTFNRSLFPSTFLFGIGSSAYQAEGAASVDGRGPSIWDTYTRQHTEKIWDHSTGDMGADFYHRYKGDIKIAKEIGLDSFRFSISWSRIFPKGKGAVNPLGVKFYNNVIDEILANGLKPFVTLFHWDFPQALEDEYGGFRSPKVVADFRGYANFCFKTFGDRVKYWVTLNEPLSFSLNGYNGGTFAPGRCSKYVANCSAGDSSTEPYIVGHYLLLAHESAATLYKTKYQARQKGQIGITNPTHYFLPKSQSAADYKAASRALDFFFGWYSDPVFYGDYPESMKSSVGSRLPKFTKAESEGLKNSIDFLGVNYYTTYYAEHAEPVSANRTFYTDILASLSTERNGLHVGTPTDLNWLFIFPKGIHLLMAHIKDKYKNLPIYITENGMAESRNDSIPVNEARKDSIRIRYHDGHLKFLLQAIKEGVNLKGYYAWSFSDSFEWDAGYTVRFGLIYVDYKNNLKRYPKFSAFWLQKFLLK

SEQ ID NO: 44615 - protein, 75 aa, Glycine max; identical to SEQ ID NO: 44604
  Clone ID: 701059852_FLI.pep

SEQ ID NO: 44616 - protein, 316 aa, Glycine max
  Clone ID: 701061473_FLI.pep
PSTSLLLAIEGHGEKERLRRKMMVFHKLHDHDLTLEAAWPQLFVDHKGKYWDVPESLSVDLSSLVSESGLRYHFGIHKNGGNPQAMNATDGNPPLSLLPGLCAKVAVSYEKIKYFWRDKGAAEQENEEALPYDVRLKEPHAAVSGIIGSTFASWIWNGRSLSSVDSREDQEVSTSKRSRHNADLFGSVCYSFQHGKFTKKYGDLTRVDARLDISSASAFAKKILNGSSSSTADVSKQPSASPRLNLIFQQQVAGPVVFRADSRIALESFARKNGVSVEDFICSLSYSLKDLQSGKIVAWYSPKRKEGMVEFRMYEF

SEQ ID NO: 44617 - protein, 100 aa, Glycine max
  Clone ID: 701061686_FLI.pep
KNLKNGGNGLTGSCSAFLIFYLYELIQAWISSKVFPLVSGTNFATNRIVKREHPAYKNNVPGELQLIRKLKVYETTQAPSQATKTTKLPAVPFKCMGNIS

SEQ ID NO: 44618 - protein, 46 aa, Glycine max
  Clone ID: 701061722_FLI.pep
AYNALYYEILVQFISCHADGWLNKPCHRNSMACGTMHWFLTTNSCN

SEQ ID NO: 44619 - protein, 267 aa, Glycine max
  Clone ID: 701061761_FLI.pep
VSNLTFLNAPAYSIHPVYCSHVHIQNVSISTPPESPYTVGIVPDSSDNVCIEDCIVAMGFDAISLKSGWDEYGIAYGRPTENVHIRRVHLHAFSGSALAFGSDMSGGISNVLVEHAHLFNSKSGIEFRTTKGRGGYMKEIVMSDIQMENVHTAIAATGNCGSHPDDKFDPNALPHLDHITLKDVTGTNISIAGNIAGIEESPFTNICLSNITLSTNSVSPITWECSNVSGFSDSVLPEPCPELGNPSYDSSSSCFYLLSVSGKTVVQ

SEQ ID NO: 44620 - protein, 440 aa, Glycine max
  Clone ID: 701063345_FLI.pep
RVAKMGIWRNEISEEAKKQLWLSGPMVFVNVTGFSVLLGMSSALDTFCGQSYGAQQYHMVGIHMQRAIVIIMLATIPMSFIWAYLRPILVVLHQDKTIAAQAQLYATYLIPSLSANALLRCITKFLQTQNIVLPMMLASGFTTLAHALLCWLLVLKFGLGIKGAAIAFCISNWLNTVLLALYIRFSSSCKSTWTGFSRESLQNIPQFLSLAFPSALMVCLEQWTFQIMVLLSGALPNPKLQTSVLSICFNTTGLFWMIPFGVSVAASTRISNELGAGCPKAAYLAVKVTLLMSFVVGALGFILLMVTRNIWGHIFTNIPEVIRYVASMTPILASSVFVDSIQTALSGIVRGCGWQKLGAFVNLGSYYLVGLPFAIVLAFVLHIKGEGLLLGIVIALTMQVVGFLVITLRTNWEKEANKAAKRIRSNGVPTDANALPSDQN

SEQ ID NO: 44621 - protein, 372 aa, Glycine max
  Clone ID: 701063435_FLI.pep
LKGNEMANGNTSHRFKLLLFLLTLHSSFAEIFFEERFEDGWKSRWVLSDWKRSEGKAGTFKHTAGKWSGDPDDKGLQTYNDAKHFAISAKIPELSNKDRTLVLQYSIRFEQDIECGGGYIKLLSGYVNQKKFGGDTPYSLMFGPDICGSQTKKLHLILSYQGQNYPIRKDLQCETDKLTHFYTFILRPDASYSILVDNRERDSGSMYTDWDILPPRKIKDVKAKKPADWDDREYIEDPNDVKPEGYDSIPAEIPDPKAKKPVEWDDEDDGLWKPPKIPNPAYKGPWKRKKIKNPNYKGKWKIPWIDNPEFEDDPDLYVLKPIKYVGIEVWQVKAGSVYDNILICDDPQYAKQIVDEFMANNREAEKEAFEEA

SEQ ID NO: 44622 - protein, 215 aa, Glycine max
  Clone ID: 701045116_FLI.pep
RVIVAVAAAPKKSWIPAVKGGGNFIDPEWLDGSLPGDYGFDPLGLGKDPAFLKWYREAELIHGRWAMAAVVGIFIGQAWSGVPWFEAGADPNAIAPFSFGSLLGTQLLLMGWVESKRWVDFFNPDSQSVEWATPWSRTAENFGNSTGEQGYPGGKFFDPLGFAGTIKDGVYIPDTDKLERLKLTEIKHARIAMLAMLIFYFEAGQGKTPLGALGL

SEQ ID NO: 44623 - protein, 248 aa, Glycine max
  Clone ID: 701045355_FLI.pep
EIKRLRKATMSGPECCSNPPVLNPNAGAGHVEKLAGLNSYLSGSPNSIAILLISDIYGYEAPNLRNIADKVAAAGYYVVVPDFFHGDPYNPENASRSIPVWLKDHGTDKGSEAAKSIIEALKSKGVMAIGAAGFCWGAKVVVELAKSRLIQAAVLLHPSFVSVDDIKGVDTPTAVLGAEIDKMSPPELVKQFEQVLTAKPGVDCFVKIFPKVSHGWTVRFNPKDAETVKAAAEEAHQDMLNWFAKHLK

SEQ ID NO: 44624 - protein, 127 aa, Glycine max
  Clone ID: 701045770_FLI.pep
FGENMVMSELVECCKELDEVHHALAGHKKEAAWRLSRVELQLESEKAGRRREKMEEIEAKIKALREEQTAALDRIEAEYREQLAGLRRDAESKEQKLAEQWAAKHLRLTKFLEQVGCRSRLTEPNGR

SEQ ID NO: 44625 - protein, 245 aa, Glycine max
  Clone ID: 701058096_FLI.pep
DFWHAVWPNTPIPSSLRDLLKPGPASVEIDDHPMQIEETQYPKTFFYKEDLHPGKTMKVQFSKPPFQQPWGVGTWLKEIKDTTKEGYSFEELCIKKEAIEGEEKFCAKSLGTVIGFAISKLGKNIQVLSSSFVNKQDQYTVEGVQNLGDKAVMCHRLNFRTAVFYCHEVRETTAFMVPLVAGDGTKTQALAICHSNTSGMNHQMLHQLMGVDPGTNPVCHFLGSKAILWVPNLSVDTAYQTNIVA

SEQ ID NO: 44626 - protein, 411 aa, Glycine max
  Clone ID: 701058121_FLI.pep
ICQEMEPKHNNLSKEAASNNGDGNRIGNDSNEMGWLEVVSSLVDDYDATTSHRLEECETYLIELETSEAPKVCHVQGDALNYKDSLQSELVAGSSSTGDNTSDVEDDIGAKNAGSQYSHVCRIDLLEEIIDEAKTNKKMLFSSMESLINLMREVELQEKAAEQANMEAATGGSNILARIEEYKTMVVQANEANDMHSGEVYGEKAILTTELKELQSRLLGLSDERDRSLAILDEIRHILEVRLAAAEELRKAAEQLKLEKEESARKALVEQERLVEKVVHESQRLQQEAEENSKLQEFLIDRGRVVDMLQGEISVICQDIKLLKEKFDANLPLSKSFTSSQTSCKLASSGSSHKTLASDAGSEHSESSEIRKTSRTASIESLSSKSGHDEEEKSKADHNALLDDGWYILSD

SEQ ID NO: 44627 - protein, 495 aa, Glycine max
  Clone ID: 701060705_FLI.pep
ILPYLLDSRVSTMALFLLYESASGYSLFEVHGVDEIGQNTEAVRNSVSDLNRFGKVVKLRSFNPFTSALDALKQCNAVSEGILTDELRTVLETNLPKVKEGKKSKFSLGVSDPKIGSQISEVTKIPCQSNEFVSELLRGVRFHFDTFVGDLKSGDLEKAQLGLGHSYSRAKVKFNVNRVDNMVIQAIFLLDTLDKDINSFSMRVREWYSWHFPELVKIVNDNYLYAKVAKFIEDKAKLAEDTIPGLTDIVGDEDKAKEIVEAAKASMGQDLSPVDLINVHQFAQRVMDLSEYRKNLYDYLVAKMNDIAPNLATLIGEVVGARLISHAGSLTNLAKCPSSTLQILGAEKALFRALKTRGNTPKYGLIFHSSFIGRASAKNKGRMARYLANKCSIASRIDCFAERGTTVFGEKLREQVEERLDFYDKGVAPRKNIDVMQAAIESAENKDTEMETEAPAEVSGKKTKKKKQKAAAAEGDDMAVDTNGDAVEDHKSEKK

SEQ ID NO: 44628 - protein, 161 aa, Glycine max
  Clone ID: 701060859_FLI.pep
EGYSFEELCIKKEAIEGEEKFCAKSLGTVIGFAISKLGKNIQVLSSSFVNKQDQYTVEGVQNLGDKAVMCHRLNFRTAVFYCHEVRETTAFMVPLVAGDGTKTQALAICHSNTSGMNHQMLHQLMGVDPGTNPVCHFLGSKAILWVPNLSVDTAYQTNIVA

SEQ ID NO: 44629 - protein, 181 aa, Glycine max
  Clone ID: 701062361_FLI.pep
KFSKAPISLLRVPKFSPRDKMSLIPNFFGGRRNNVFDPFSLDVWDPFKDFPFPNTLSSASFPEFSRENSAFVSTRVDWKETPEAHVFKADIPGLKKEEVKVQIEDDKVLQISGERNVEKEDKNDTWHRVERSSGKFMRRFRLPENAKVEQVKASMENGVLTVTVPKEEVKKPDVKAIEISG

SEQ ID NO: 44630 - protein, 195 aa, Glycine max
  Clone ID: 701062460_FLI.pep
KTAVPSLIGREEHSQPRQDYSLESGSVFFIAADLTTLHAYGSSGCLGPFKKPPLIATADVPPKGLRKQGKAAKKPSTSEDFWITSTHDMDNSAVQSQGSISSASITNQAADPHGGSCNPTEFVNHGLILWNQTRQGWIGNKRSKNQTEQLREPKLSWNATYESLLGSNKPFPQHIPLAEMVDFLVDIWEQEGLYD

SEQ ID NO: 44631 - protein, 117 aa, Glycine max
  Clone ID: 700901886_FLI.pep
KVEPFRRSSPGPNAVLIARNRKAATSLIQRLLYYFPPNSDDLSSYIIGDKSIAKDAGINGIQDVEALPPPPEIKDNIPPQKYKGDVSYFICTRPGRGPVLLSDSSQALLNGETGLPK

SEQ ID NO: 44632 - protein, 167 aa, Glycine max
  Clone ID: 700662225_FLI.pep
EHNLAFSDLNGLDIGLLDIHLGNSDSEHSVLHAGLHLIEFRVLRQAEAAEKAAAGAFEAVPRVVLVLLLLCSLSAYLQHPSLLLDLHLHLFLLQPRQVCLEHVRLRRLLPVDARVGEGRRLGARSGEGGGAGEAMEWVPHVEGEGVEDVGSSPGAEETWNQRHCYVG

SEQ ID NO: 44633 - protein, 483 aa, Glycine max; identical to SEQ ID NO: 43780
  Clone ID: 700905490_FLI.pep

SEQ ID NO: 44634 - protein, 98 aa, Glycine max
  Clone ID: 700848840_FLI.pep
HYKIANRPFTIVQCDKEGTTLLFLGVVSHNKGQAQDQERDQELQNLDHKFWSLIRIVLSLLRWSFRSEAILLITERRVLFRSFVDRDPFSVTALHQNL

SEQ ID NO: 44635 - protein, 65 aa, Glycine max
  Clone ID: 700904785_FLI.pep
CLYDKYLFTKRLIKLFTQTHPYCSGNSFWRRSKLRLSQASNMSFLEAQLNEILKYCHAFSAFGFM

SEQ ID NO: 44636 - protein, 67 aa, Glycine max
  Clone ID: 700904949_FLI.pep
FQSLTVSAKSVTMARALKRKPNVTVAIDGSGDFKSINEALKQVPEKNRKPFVIYIKEGVYQEYVEVT

SEQ ID NO: 44637 - protein, 106 aa, Glycine max
  Clone ID: 700873187_FLI.pep
GIIKGSGYLCGCQSCNYTKVLNAYEFERHAGCKTKHPNNHIYFENGKTIYQIVQELRSTPESLLFDTIQTVFGAPINQKAFRNWKESFQAATRELQRIYGKEELNL

SEQ ID NO: 44638 - protein, 140 aa, Glycine max
  Clone ID: 700847205_FLI.pep
EKTDVFGFGILLLELITGHKALDFGRAANQKGVMLDWVKKLHQDGRLSQMVDKDLKGNFDLIELEEMVQVALLCTQFNPSHRPKMSEVLKMLEGDGLAERWEASQRIETPRFRSCEPQRYSDLIEESSLVVEAMELSGPR

SEQ ID NO: 44639 - protein, 305 aa, Glycine max
  Clone ID: 700895340_FLI.pep
ADNCKVLVNIEQQSPDIAQGVHGHLTKKPEEIGAGDQGHMFGYATDETPELMPLSHVLATKLGARLTEVRKNGTCPWLRPDGKTQVTVEYYNDNGARVPIRVHTVLISTQHDETVTNDEIAADLKEHVIKPVIPEKYLDEKTIFHLNPSGRFVIGGPHGDAGLTGRKIIIDTYGGWGAHGGGAFSGKDPTKVDRSGAYIVRQAAKSIVASGLARRCIVQVSYAIGVPEPLSVFVDTYGTGKIHDKEILNIVKENFDFRPGMISINLDLKRGGNNRFLKTAAYGHFGREDPDFTWEVVKPLKWEKA

SEQ ID NO: 44640 - protein, 95 aa, Glycine max
  Clone ID: 700896136_FLI.pep
DWFHCVLNWQAIGSMAQGHASCGIRETFHLKDFEALFSLVQFYYYWQLFFGTIFLVAIFHFPIIVGINEYKFWESRRSYVLGFLVLQVITTIWMF

SEQ ID NO: 44641 - protein, 96 aa, Glycine max
  Clone ID: 700873879_FLI.pep
QLRSATHNKKVRDMIDDEALGAIANFLGIFIFALVIAYHLVTADPKYEAKWDLDSFPGWFYSMNPTPKPRSSDPTYLQLRSDLWSYAGETEIARTL

SEQ ID NO: 44642 - protein, 69 aa, Glycine max
  Clone ID: 700873909_FLI.pep
ESPEDKSKWECVRKGLCCICCESNIDSLLYRCGHLCTCSKCANELLQSRRKCPMCQAPVVEVIRAYSIQ

SEQ ID NO: 44643 - protein, 99 aa, Glycine max
  Clone ID: 700843552_FLI.pep
ERMAALGGNRDVTGSQNSVEIDALARFAVEEHNKKQNALLEFEKVVTAKQQVVSGTLYTITLEAKDGGQKKVYEAKVWEKSWLNFKEVQEFKLVGDAPA

SEQ ID NO: 44644 - protein, 174 aa, Glycine max
  Clone ID: 700847244_FLI.pep
QNSFFHGENLTSTYHIISHTVSLEVDTSLSCCCCFSLTTIDFSDESPSVESGSFLSSDSNSFAACWKLLTVLPMLRPTSGNFLGPKTRAATPAITTSSGTPRPNMALQLKPLFLPRPFTFTATLTETELNNLGVPKPKLIEGLDFGIELGIDTQLIIIVSISSSASAAKIFVCF

SEQ ID NO: 44645 - protein, 237 aa, Glycine max
  Clone ID: 700847374_FLI.pep
REIVHFVNDAEPVMFAHPIPRFPVVKERVPNPSFLQKGEEPPGEHIPAWLPAFPDPQTYSQSPAVNGRGTEPRAVKFDQERESGKGEWPALNLQQQMVSNMFEKSASIDPADAKAKRVAAEGNPFLAAPLKIEDKEVASVPPPAKLFNDEALDNPVVENLVENEPISALETFAPAIEAMKSTICDSKEDQTKFCANEKPTVRFKIGIKNKLLGKSIGLIPQKEEHEKTLPWFAMEDE

SEQ ID NO: 44646 - protein, 172 aa, Glycine max
  Clone ID: 700893966_FLI.pep
AATPPAAAMVLKTELCRFSGAKIYPGKGIRFVRGDSQVFLFANSKCKRYFHNRLKPSKLTWTAMYRKQHKKDIAQEAVRKRRRAAKKPYSRSIVGATLEVIQKKRAEKPEVRDAAREAALREIKERIKKTKDEKKAKKAEVASKSQKAGGKGNVSKGAMPKGPKLGGGGGKR

SEQ ID NO: 44647 - protein, 174 aa, Glycine max
  Clone ID: 700896232_FLI.pep
RFQVPSNWLWDLHLEMKDRQRWRAEEDALLRAYVKQYGPREWNLVSQRMNTPLNRDAKSCLERWKNYLKPGIKKGSLTEEEQRLVINLQATHGNKWKKIAAQVPGRTAKRLGKWWEVFKEKQQRETKGNNCTIDPINDSKYEHILESFAEKLVKARSKSWLNNGLQNTCDLLSF

SEQ ID NO: 44648 - protein, 197 aa, Glycine max
  Clone ID: 700901873_FLI.pep
EFNQFDTRTLMAKEGLGLEITELRLGLPDAEHVTVVNKNEKKRAFSQIDDENSSSGGDRKIKTNKSQVVGWPPVCSYRKKNSMNEGSKMYVKVSMDGAPFLRKIDLGLHKGYSDLALALDKLFGSYGMVEALKNADNSEHVPIYEDKDGDWMLVGDVPWEMFMESCKRLRIMKRSDAKGFGLQPKGSLKGFIESAAK

SEQ ID NO: 44649 - protein, 223 aa, Glycine max
  Clone ID: 700866804_FLI.pep
KNYGSTAKLLSDVELLNQMHFDDAHGAYFDFGNHTEKIQLKWKEVEIGHNHTARQLVRVVLEKPVLRLVPHIGYVSLFPFMGKIIPSGSWILEKQLELISNHSLFWTGYGLRSLATTSSLYMKFNSELEGPYWRGQIWINMNYRILSALHHYSKENGPYQDRAKAIYKELRSNLIRNIVRNYQQTGFLWEQYDQNNGKGKGSHPFTGWTSLVVLIMGEEYDII

SEQ ID NO: 44650 - protein, 263 aa, Glycine max
  Clone ID: 700872615_FLI.pep
REMAAATSGAVLNGLGSSFLSGGNRSQTLLATAIGGKVGAAAVTVSPRRLIVVAAAAPKKSWLPGVRGGGNLVDPEWLDGSLPGDYGFDPLGLGKDPAFLKWYREAELIHGRWAMAAVLGIFVGQAWSGVPWFEAGADPNAIAPFSFGTLLGTQLILMGWVESKRWVDFFNPDSQSVEWATPWSRTSENFANATGEQGYPGGKFFDPLSLAGTIKDGVYIPDTEKLERLKLAEIKHARIAMLAMLIFYFEAGQGKTPLGALGL

SEQ ID NO: 44651 - protein, 179 aa, Glycine max
  Clone ID: 700877186_FLI.pep
MLPIKQDLWLHNWDHGIDRTFEVAQKVWAEVFFYLAENNVLFEGILLKPSMVTPGAESKDKASPQTVADYTLKLLHRRIPPAVPGIMFLSGGQSEVEATLNLNAMNQSPNPWHVSFSYARALQNTALKTWGGRPENVKAAQDALAFRAKSNSLAQLGKYTGEGESEEAKKELFVKSYSY

SEQ ID NO: 44652 - protein, 255 aa, Glycine max
  Clone ID: 700903387_FLI.pep
VDVYIAKGAGITVQFVKNIIIHGIKVFDIVIREGGMIRDSETHYGFRTKSDGDGISIFGSSNVWIDHVSMRNCSDGLIDAIMGSTAITISNSHFTDHNEVMLFGASDSYSDDKIMQITLAFNHFGKRLVQRMPRVRYGFVHSVNNDYTHWEMYAIGGSKNPTIISEGNRFIAPDNQFAKQITKREYAPENVWANWQWRSINDVYMNGAFFVQSGPELASRPFSREDMITAKVGNYVGRLTRYSGNLLKCRVGRPC

SEQ ID NO: 44653 - protein, 405 aa, Glycine max
  Clone ID: 700786265_FLI.pep
LGGDKIKDSTMASASATLLKSSPVLDKCEWVKGQTLRQPLVRCNPSSASALTIKAASYADELVKTAKTVASPGRGILAMDESNATCGKRLASIGLENTEANRQAYRTLLVTVPGLGEYISGAILFEETLYQSTVDGRKIVDVLVDQNIVPGIKVDKGLVPLAGSNDESWCQGLDGLASRSAAYYQQGARFAKWRTVVSIPNGPSALAVKEAAWGLARYAAISQENGLVPIVEPEILLDGEHGIDRTFEVAQKVWSEVFFYLAENNVLLEGILLKPSMVTPGAESKDKATPLQVADYTLKLLHRRIPPAVPGIMFLSGGQSEVEATLNLNAMNQSPNPWHVSFSYARALQNTCLKTWGGLPENVKAAQDALLFRAKSNSLAQLGKYTAEGESEEATRGMFVKGYSY

SEQ ID NO: 44654 - protein, 499 aa, Glycine max
  Clone ID: UC-GMFLMINSOY035H06_FLI.pep
LTKIIAHVVRRLKDADSAVRDACRDTVGALAAQYLKGDGGGGGGGVGTVVGLFVKPLFEAMGEQNKGVQAGAAVCMAKMVECAGGSGGEAVPVAAFQKLCPRIYKLLNSPNFMAKAAILPVVASLSQVGAIAPQSLEHLLPSIHECLSSTDWATRKAAAEALSSLALHSSSLVTDRAAPTLAVLEACRFDKIKPVRDSINEALQLWKKIAGKGDGSPDDSKPSSDGGNESAISSEASDPKKVNLDERKTDSPVKGSSTSSSNMDSTKAKAASISEKAVVILKKKPPVLSDKELNPEFFQKLERRGSDDLPVEVVVPRRGLNSSNSNNEEESEANAKDSKERINSVGNIPNDDHGSSSNKYRIFERGNDGNSKQRNYDDFGHDRFSERRVNTKELRTKAYDTDGRTENDQRDGSANAAGFSKTDGQSEVPFSNNRANWLAIQRQLLQLERQQVHLMNMLQDFMGGSHDSMVTLENRVRGLERIVEDMSRDLSISSGRRNF

SEQ ID NO: 44655 - protein, 137 aa, Zea mays
  Clone ID: 700205405_FLI.pep
AELIAPSADEVVAVCLPVGCSARTPPLPMLLQLVKQLAPKIVVAIDHGSDRGDLPFSQHFMNCFQSCMFLLDSLDAAGTNADAASKIERFLIQPRVEDAVLGRRKVKRQWLGGQFLHRLGLLQCHSATLQRHKLTAS

SEQ ID NO: 44656 - protein, 156 aa, Zea mays
  Clone ID: 700207882_FLI.pep
PTGCSARAPPLPAILGLVKQLAPKIVIAIDHGADRADLPFSQYFLNCFQSCMFLLDSLDAAGIDADSACKIEKFLIQPRIEDSVLGRGKVDNPIAWRSAFAAARFVPVPPSNWAEEEADCLLKRVQVHGFHVEKCGVGLTLYWQHGELVTVSAWRC

SEQ ID NO: 44657 - protein, 97 aa, Zea mays
  Clone ID: 700241111_FLI.pep
SILITTGSCRDGKAASSMPSRHGWQMMPPLTFSCFFVTHLSTTLGASLVRRVRRHGAPKLRRPNRPPHLRRENYGAPWRLSPRTKQPLGLGMSSRYI

SEQ ID NO: 44658 - protein, 179 aa, Zea mays
  Clone ID: 700381301_FLI.pep
GRRAQSRAAAAAAEERLQSAIPITQRQQARTPPLPMLLQLVKQLAPKIVVAIDHGSDRGDLPFSQHFMNCFQSCMFLLDSLDAAGTNADAASKIERFLIQPRVEDAVLGRRKAEKAMAWRAVFTSAGFAPVPLSNLAEAQADCLLKRVQVRGFHVEKCGMGLALYWQRGELVSVSAWRC

SEQ ID NO: 44659 - protein, 97 aa, Zea mays; identical to SEQ ID NO: 44657
  Clone ID: 700422432_FLI.pep

SEQ ID NO: 44660 - protein, 172 aa, Zea mays
  Clone ID: 700474107_FLI.pep
LYRFRNLIDETVAVDSPRNRVLNTIRQVNPAIFIHGIVNGSYSVPFFITRFREALFHFSALFDMLETTVPRDDAQRALIEREMFGREALNVIACEGSDRVERPETYKQWQVRNLRAGFVQSPLNQEIVMKAKDKVKDIYHKDFVIDEDSGWLLQGWKGRIIYAISTWKPKNN

SEQ ID NO: 44661 - protein, 147 aa, Zea mays; identical to SEQ ID NO: 42314
  Clone ID: 700549462_FLI.pep

SEQ ID NO: 44662 - protein, 168 aa, Zea mays
  Clone ID: 700576109_FLI.pep
FKLHLTHLNTSIQTRPEVAGYSVCRPLRELPISTLAGYAAPKPYTREPFSFQDEQRRRELAIHTCTCARSNARIDASTPASPMGCGPAVHVVHSPSLHLRVDELMDLYHGLHALAHTRGCSFHARKMPAPAAESSKPVSRIDQPSRYRRSNDRTSSATSSLNATGEKP

SEQ ID NO: 44663 - protein, 84 aa, Zea mays
  Clone ID: LIB143-018-C6_FLI.pep
RFLIQPRVEDAVLGRRKAEKAMAWRAVFTSAGFAPVPLSNLAEAQADCLLKRVQVRGFHVEKCGMGLALYWQRGELVSVSAWRC

SEQ ID NO: 44664 - protein, 227 aa, Zea mays
  Clone ID: LIB148-023-G3_FLI.pep
DDPESVHRAVGGLNVVGQRLEKLAEDCEVRFEFRAVAANIEDLTAGMLGRRPGEALIVNFAFLLHHLPDESVSIMNQRDRLLRMVKGLRPKLVTLVEQDANTNTTPFPSRFREVYDYYSALFDSLDATLPRESPDRMNVERQCLAREIVNILACEGPDRVERYEVAGKWRARMAMAGFVPSPFNSGAVDGIRSLLKSYCDKYRFEKVQDGLHFGWGDKTLVFSSAWQ

SEQ ID NO: 44665 - protein, 127 aa, Zea mays
  Clone ID: LIB148-030-E4_FLI.pep
GGRDGGAVLPAEEEAAPVLGEPVAVAGAVEAQQDLALGNGGRAERHRLKSTAFHDAPPPIQPLVPRHPLGALARHHVADLRRQEALLHLHPLRRVRRERRVQRVEDRRVVVQGLQKPSWNTSIQPRE

SEQ ID NO: 44666 - protein, 134 aa, Zea mays
  Clone ID: LIB3136-056-F8_FLI.pep
PKIAVAIDHGSDRGDLPFSQHFMNCFQSCMFLLDSLDAAGTNADAASKIERFLIQPRVEDAVLGRRKAENAMAWRAVFTSAGFAPVPLSNLAEAQADCLLKRVQVRGFHVEKCGMGLALYWQSGELVSVSAWRC

SEQ ID NO: 44667 - protein, 100 aa, Zea mays
  Clone ID: LIB3245-602-E8_FLI.pep
SLDAAGTNADAASKIERFLIQPRVEDAVLGRRKAENAMAWRAVFTSAGFAPVPLSNLAEAQADCLLKRVQVRGFHVEKCGMGLALYWQSGELVSVSAWRC

SEQ ID NO: 44668 - protein, 388 aa, Zea mays
  Clone ID: LIB3354-001-F9_FLI.pep
GNEFVDLHTMLIHCAQAMATGDRRSATEMLKQIKQHSSLRGDATQRLAYCFAEGLEARLAGTGSQVYQLLMAKHTSVVEFLKAYKLFLAAISLNKVHIIFSNRNIVHAVAGRSKLHIVAYGVQYGLQWPGLLHFLAGREGGPPEVRFTGIDLPQPGFRPAYQIEETGRRLSNCAREFGVPFKFHAIAAKWEMVSAEDLNIDPDEVLVVNSECHLSNLMDESVDADTPSPRDLVLNNIRKMRPDIFIQIVNSGTYGAPFFLTRFREALFYYSALFDMLDATIPRDNDERLLIERDIVGRSALNVIACEGADRLDRPETYKQWQVRNHRAGLKQLPLNPEVVKLVRDKVKKYYHKDFLIDEDRQWLLQGWKGRVLFAMSTWVAEDNNSTF

SEQ ID NO: 44669 - protein, 385 aa, Zea mays
  Clone ID: LIB3354-109-F3_FLI.pep
RSGPGAEEEPVDLTTLLIHCAQAAAIDDHRNSSELLKQIRKHSSATGDAGQRLAHYFADGLEARLAGSGSSIYRSLAAKRTSTGDILKAFSLYVKACPFRILSHYVANTTILNATKSATRLHIIDYGIMYGFQWPVLMQRLSKRPGGPPYLRITGIDFPLSGFRPAERVEATGRRLHEYARMFNVPFEYQAIAAKWDTIQVKDLNMKSDEFVVVNCLYRMRNMMDETVTDDSPRTRVLNTIRKLNPHLFVHGIVNGTYNAPFFVTRFKEAMFFFSSIFDMLEANALRMDEHRLLIEREFFGREAVNVIACEGTERIERPETYKQWQMRNLRAGFRQLALDREIMKRARYKVSKSYQGDFLVDEDNKWMLQGWKGRIIYALSAWTS

SEQ ID NO: 44670 - protein, 331 aa, Zea mays
  Clone ID: LIB3607-003-B11_FLI.pep
LPLLGKPFLRSASYLKEALLLALAEGHHGGCHLTSPLDVALKLAAYKTFSDHSPVLQFTNFTATQALIDEIARSTSSCIHVIDFDLGVGGQWASFLQELAHRRGAGGAALPSVKLTAFVSAASHHPLELRLTRDNIAQFAADLGIPFEFSAISADTINPAELVSATADEVVAVVLPVGCSARAPPLPAILRLVKQLAPKIVIAIDHGADRADLPFSQHFLNCFQSCMFLLDSLDAAGIDADSTCKIEKFLIQPRIEDAVLGRGKVDKPIAWRSAFAAAGFAPVPPSKLAEAQADCLLKRVQVRGFHVEKCGVGLTLYWQCGELVTVSAWRC

SEQ ID NO: 44671 - protein, 360 aa, Zea mays
  Clone ID: LIB3957-018-B1_FLI.pep
LDELAAAAKAAEAGNSIGAREILARLNHQLPLLGKPFLRSASYLKEALLLALAEGHHGGCHLTSPLDVALKLAAYKTFSDHSPVLQFTNFTATQALIDEIARSTSSCIHVIDFDLGVGGQWASFLQELAHRRGAGGAALPSVKLTAFVSAASHHPLELRLTRDNIAQFAADLGIPFQFSAISADTINPAELVSATADEVVAVVLPVGCSARAPPLPAILRLVKQLAPKIVIAIDHGADRADLPFSQHFLNCFQSCMFLLDSLDAAGIDADSTCKIEKFLIQPRIEDAVLGRGKVDKPIAWRSAFAAAGFAPVPPSNLAEAQADCLLKRVQVRGFHVEKCGVGLTLYWQCGELVTVSAWRC

SEQ ID NO: 44672 - protein, 258 aa, Zea mays
  Clone ID: LIB3136-020-A2_FLI.pep
DEDPCIRLLSYCKKHRQPSAAERPSLESDPPEPIQVVQTDMASSSGCARTEPYNLHRRRGQKQPQVVATASLKRLYVENRPHIVSGYCQNRVGNTCGESIQPFGLSDAVQQEAIGNVSSMVEKYTIVKATFRKRLTFGKSKIHGYGVFAKVAHKAGDMMVEYIGEIVRPPISDTRERRIYNSLVGAGTYMFRIDDERVIDATRVGSIARLINHSCEPNCYSRAITILGDEHIIIFAKRDIDPWEELTYDYRYIILVGI

SEQ ID NO: 44673 - protein, 246 aa, Zea mays
  Clone ID: LIB3592-054-H11_FLI.pep
VFSTKFFLQNGEKQTAARLVRKENHQEKVLPPIISDCLVAKCLTYEMSKYKKQPGEAIAHRIMGPRHHSQDFIDGLNACMDRKDDQSFSTFKERLRYLQKTENLRVSCGRSGIHGWGLFAARNIQEGQMVIEYRGEQVRRCVADLREAQYHREKKDCYLFKISEDVVIDATDKGNIARLINHSCMPNCYARIMTVSDDRSEIILIAKRDVSAGEELTYDYLFDPDESEDCRVPCLCKAPNCRGYMN

SEQ ID NO: 44674 - protein, 556 aa, Glycine max
  Clone ID: 700680093_FLI.pep
LTRLCPKQFEAIKWEEKCMLRYSNRAIFHTMDASFSYPMSNINNATDAEEFNKVLGELLRNLSDKAASGDSRRKYAADTAVFANLQTIYGLVQCTPDLSRQDCGDCLHWSLADFGNVFKNKVGAVVLRPSCNVRYEIYPFYDEPTPSASVPLSLKEKGNSLRTTIAIVVPTVLVVVALLIFISIYFRRRKLARKNLLADEDDDEIELAESLQFNLDTIKVATNNFSDSNKLGEGGFGAVYQGRLSNGQVIAVKRLSSDPGQGGVEFKNEVLLLAKLQHRNLVRLLGFSLEGKEKLLVYEFVPNKSLDYFIFDPTKKARLDWDRRYKIIRGIARGLLYLHEDSRLRIIHRDLKASNVLLDEEMIPKISDFGMARLIVAGQTQENTSRVVGTYGYMAPEYIMHGQFSIKSDVFSFGVLVLEIVSGQKNHGIRHGENVEDLLNFAWRSWQEGTVTNIIDPILNNSSQNEMIRCTHIGLLCVQENLANRPTMANVALMLNSCSITLPVPTKPAFFMDSATTSLPNMSWEVNSGTTRSNQSTTKSAHDSVSEASISELYPR

SEQ ID NO: 44675 - protein, 68 aa, Glycine max
  Clone ID: 700680701_FLI.pep
HKAKSKNGLLLVMVIIKSEKGALLYSYTLHSSSAGFVSQNSSNGSPLPALAAPGHLLATRCAKSTTLW

SEQ ID NO: 44676 - protein, 489 aa, Glycine max; identical to SEQ ID NO: 43983
  Clone ID: 700732312_FLI.pep

SEQ ID NO: 44677 - protein, 392 aa, Glycine max
  Clone ID: 700731909_FLI.pep
YKPLGMGLAKETTMGGRGRVAKVEVQGKKPLSRVPNTKPPFTVGQLKKAIPPHCFQRSLLTSFSYVVYDLSFAFIFYIATTYFHLLPQPFSLIAWPIYWVLQGCLLTGVWVIAHECGHHAFSKYQWVDDVVGLTLHSTLLVPYFSWKISHRRHHSNTGSLDRDEVFVPKPKSKVAWFSKYLNNPLGRAVSLLVTLTIGWPMYLAFNVSGRPYDSFASHYHPYAPIYSNRERLLIYVSDVALFSVTYSLYRVATLKGLVWLLCVYGVPLLIVNGFLVTITYLQHTHFALPHYDSSEWDWLKGALATMDRDYGILNKVFHHITDTHVAHHLFSTMPHYHAMEATNAIKPILGEYYQFDDTPFYKALWREARECLYVEPDEGTSEKGVYWYRNKY

SEQ ID NO: 44678 - protein, 84 aa, Glycine max
  Clone ID: 700734539_FLI.pep
VSPTRSQYRSFKLVHTLYINRLLVNQKKSHLNIKSSTLSATKTESRHATSIHLAKNKPTVKETWVRIYQHGSSSKAACSTTSLV

SEQ ID NO: 44679 - protein, 157 aa, Glycine max
  Clone ID: 700739380_FLI.pep
HLDQHNLQEQKYLLAKFALPPIQDWKKVPLLIASSLAFPSAASFKYLSANWTLLTFSCSWTSMLPYVKSFSRVILGCSKVGGPSFEFTSFFPMPSTPTPEIHFLTSSSYTLALSAPKKSMDWPGKVSTILTTSCSGIESVRKIPVQTPMRSSLVGAQ

SEQ ID NO: 44680 - protein, 257 aa, Glycine max
  Clone ID: 700735604_FLI.pep
STKGAVDGHKNIVPSSWDWRKKGVITQVKYQGGCGSGWAFSATGAIEAAHAIATGDLVSLSEQELVDCVEESEGCYNGWHYQSFEWVLEHGGIATDDDYPYRAKEGRCKANKIQDKVTIDGYETLIMSDESTESETEQAFLSAILEQPISVSIDAKDFHLYTGGIYDGENCTSPYGINHFVLLVGYGSADGVDYWIAKNSWGEDWGEDGYIWIQRNTGNLLGVCGMNYFASYPTKEESETLVSARVKGHRRVDHSPL

SEQ ID NO: 44681 - protein, 140 aa, Glycine max
  Clone ID: 700729029_FLI.pep
YLVAEHAAANNKIFMMNLSAPFICEFFKGALDKVLPYMDYVFGNETEARTFSKAQGWETDNVEEIALKISQLPKASEKHKRITVITQGADPVCVTEDGKVKLYPVILLPKEKLIDTMEQEMLLWEDFFRNWLSRSPLKNV

SEQ ID NO: 44682 - protein, 207 aa, Glycine max
  Clone ID: 700733889_FLI.pep
TSPSTMTTVPPHSVQVHTTTHRYEAGVVPPARFEAPRYEAGILLLLAGLTLAGTLTGLVVATPLFIIFSPVLIPATVAIGLAVAGFLTSGVFGLTALSSFSWILNYIRETQPASENLAAAAKHHLAEAAEYVGQKTKEVGQKTKEVGQDSEQGTRYKGSSCKRCKRCKGSSCKRCKGCKGGGERCKENNSDSNNRNRMNVMSINVLL

SEQ ID NO: 44683 - protein, 55 aa, Glycine max
  Clone ID: 700736123_FLI.pep
RHLQRERFTCLQHVEMIDNCLSVQHFSSFFFCFFWRRMLHEMYLKHLSFYLYIET

SEQ ID NO: 44684 - protein, 79 aa, Glycine max
  Clone ID: 700743483_FLI.pep
VNMHVMVGEMKVAVAVEQREEDGFVSGEEVEKRVREVMESEEIRERSLKLKEMALAAVGEFGSSKTALANLVQSWTTHV

SEQ ID NO: 44685 - protein, 264 aa, Glycine max
  Clone ID: 700837912_FLI.pep
AAEYQAEKMSQEQPRRPKGQNPIKYGDVFVVSGDLAQKPVAPEDAAMMQSAETRVLGQTQPGGAASVMQSAATRNEQAGLVGHRDVTDVTGDRGVTVTETKVPGRRIITEAVGGQVVEQYVEATPVEAGRSSAIKENAITIGEALEATAQTVGQKAVDQSDASAIQAAEVRATGSNVITPGGLAAMAQSAAAYNADCKLDQDKVKLADILAGATAKLPADKAATLQDAEGVACAEVRNNPDATATPGGVAASVAAAARLNENVK

SEQ ID NO: 44686 - protein, 182 aa, Glycine max
  Clone ID: 700941245_FLI.pep
QTGTDGSLISEEGSTHKAADPFDIGGGHVDPNKAMDPGLIYDITTEDYVQFLCSMGHSSASISKVTKTTTSCKKGKHQTLNLNLPSILVPNLKRVATVMRTVTNVGNITAVYKALLKVPYGIKVRVEPQTLSFNSDARILNFSVSFLSTQKFHGDYKFGSLTWTDGKYFVRTPIAVRTIQFE

SEQ ID NO: 44687 - protein, 433 aa, Glycine max
  Clone ID: 700670224_FLI.pep
DHTEIMQSVANKSSSQFFHLPPVLNKSSEKSRDKHSQNGGIHTDKILLDKFGRSSEDPALILYTSGTTGKPKGVVHTHRSIISQVQTLTKAWEYSSADQFLHCLPLHHVHGLFNGLMAPLYAGSTVEFLPKFSVRGVWQRWRESYPTDGSKAEEAITVFTGVPTIYARLIQGYHAMDPELQAASVSAAKNLRLMMCGSSALPLPVMQEWEAITGHRLLERYGMTEFVMALSNPLKGERKPGTVGKPFPGIQVKIIADEESVNGNTGMGELCIKSPSLFKEYWKLPEVTKESFTDDGFFKTGDAVTTDEDGYFIILGRTNADIIKAGGYKLSALEIESVIIEHPAVSECCVLGLPDKDYGEIVSAIVVPEADVKRKQDQESKPVLSLEELSNWAKDKIAPYKIPTQLIVWDKLPRNAMGKVNKKELKKLLVSEQ

SEQ ID NO: 44688 - protein, 283 aa, Glycine max
  Clone ID: 700672004_FLI.pep
RPTMDWPTRLRIALGSAKGLAYLHEDCHPKIIHRDIKAANILLDFKFEAKVADFGLAKFSSDVNTHVSTRVMGTFGYLAPEYASSGKLTDKSDVFSYGVMLLELITGRRPVDKNQTFMEDSLVDWARPLLTRALEEDDFDSIIDPRLQNDYDPNEMARMVASAAACIRHSAKRRPRMSQVVRALEGDVSLADLNEGIRPGHSTMYSSHESSDYDTAQYKEDMKKFRKMALGTQEYGASSEYSAATSEYGLNPSGSSSEAQSRQTTREMEMRKMKNSQGFSGSS

SEQ ID NO: 44689 - protein, 296 aa, Glycine max
  Clone ID: 700670423_FLI.pep
EFMPFGSLEDHLHDLPPDKEPLDWNTRMKIAAGAAKGLEYLHDKANPPVIYRDFKSSNILLDEGYHPKLSDFGLAKLGPVGDKSHVSTRVMGTYGYCAPEYAMTGQLTVKSDVYSFGVVFLELITGRKAIDSTRPHGEQNLVTWARPLFSDRRKFPKLADPQLQGRYPMRGLYQALAVASMCIQEQAAARPLIGDVVTALSFLANQAYDHRGAGDDKKNRDDKGGRILKNDVGGGSGRRWDLEGSEKDDSPRETARMLNNRDLDRERAVAEAKIWGENWREKRRQSAQGSFDGSNA

SEQ ID NO: 44690 - protein, 245 aa, Glycine max
  Clone ID: 700836744_FLI.pep
RESMFFVIPAFGGIVSWEGEGAPFGESDQSISHQIVDREAQGHRFLSREYVQPQWVYDCVNARIILPTENYLVGRTPPPHLSPFINYDEEGAYIPDYAKTIKHLQAAARKEILPLPGVGKEDLEDPQNLLVEGIIDRAEANDAAQRKQKMMILEQQYRDDLKKELQGVTYTSAGSKETSTGVVQTGESTASVQENVDDDMSKVMMSRKKRKLAEAMKISKKLKEAQTDRIKQRKKKIDEAQRQRS

SEQ ID NO: 44691 - protein, 187 aa, Glycine max
  Clone ID: 700755539_FLI.pep
SLSLSLFFTPIHKSPKAPLLLRERIQKDNIKINHTKMLLGKRPRPPMKRTTSMSEMTLDLNTAAAADAAANQQRSGVGPGAAADQTTRMLATPKILRRHSSDFGDTPPFLRACSLCKRCLVPGHDIYMYRGDNAFCSLECRQQQMNQDERKEKFVMASKKKVVATPPSGSQVAVATATKGETTVVAL

SEQ ID NO: 44692 - protein, 129 aa, Glycine max
  Clone ID: 700868230_FLI.pep
ERAFGMFKTDRTVSYDVGLTKSSQQTPSTSPTTPAPKTAGWCIPKAGVSDAQLQANIDYACSQGIDCGPIQPGGACFEPNTVASHAAYSMNLYYQTSGKNQWNCDFSQSATLSSQNPSYNACIYTGGST

SEQ ID NO: 44693 - protein, 738 aa, Glycine max
  Clone ID: 701205910_FLI.pep
SATLLSGALNVPMLFTGHSLGRDKLEQLLKQGRLSKDEINTTYKIMRRIEAEELALDGSEIVITSTKQEIEEQWRLYDGFDPVLERKLRARIRRNVSCYGRFMPRMATIPPGMEFHHIVPHDGDIEGEPEGNLDHPAPQDPPIWSEIMRFFTNPRKPMILALARPDPKKNITTLVKAFGECRPLRELANLTLIMGNRDGIDEMSSTNASVLLSVLKLIDKYDLYGQVAYPKHHKQYDVPDIYRLAAKTKGVFINPAFIEPFGLTLIEAAAHGLPIVATKNGGPVDIHRVLDNGLLIDPHDQQSIADALLKLVSNKQLWAKCRQNGLKNIHLFSWPEHCKTYLSKIATCKPRHPQWQRSEDGGESSESDSPGDSLRDLQDLSLNLKFSLDGEKSEGSGNDNSLNSDGNAADRGAKLENAVLSWSKGISKDIRKGGAIEKTDQNPNAGKFPPLRRRKHLFVIAVDCDTTSGLLETIKAIFESAGKDKAEGTVGFILSTSLTISEIQSFLISGGLSPIDFDAYICNSGSDLYYPSLNPGERPFVVDLYYHSHIEYRWGGEGLRKTLVRWADSTTDKKGDNDEQIVSPAEQLSTDYCYAFKVRKPGMAPPVKELRKLLRIQALRCHPIYCQNGTRLNVIPVLASRSQALRYLYVRWGFELSKMVVFVGECGDTDYEGLLGGLHRSVILKGVGSSAISQLHNNRSYPLSDVMPLDSPNIIEATEGTRGADIQALIEKVGYLTG

SEQ ID NO: 44694 - protein, 194 aa, Glycine max
  Clone ID: 700795654_FLI.pep
LHKYLKDKGALSPSTAINFGLDIARGMAYLHNEPNVIIHRDLKPRNVLLVNSSADHLKVGDFGLSKLIKVQSAHDVYKMTGETGSYRYMAPEVLKHRRYDKKVDVFSFAMILYEMLEGEPPFSNYEPYDGAKYVAEGHRPSFRGKGYIPELRELTEQCWDADMKQRPSFIEIIKHLEKIKENLPSDHHWHLFTS

SEQ ID NO: 44695 - protein, 270 aa, Glycine max
  Clone ID: 700796759_FLI.pep
VPLASAAALARRLEGKVALITGGASGIGECTARLFSKHGAKVVIADIQDELGHSICKDLDSSSATYIHCDVTKEENIEHAVNTTVSKYGKLDIMHSSAGIVGAWNPSILHNKKSHFEQVISVNLVGTFLGIKHAARVMIPSGRGSIVAMASICGRIGGVASHAYTSSKHGIVGLVRNTAVELGTLGIRVNSVSPYAVPTPMSKTFLNTDDEGIAALYSNLKGTVLKPQDVAEAVLYLGSDESKYVSGHDLVVDGGFTVVNPGLCVFGQSV

SEQ ID NO: 44696 - protein, 165 aa, Zea mays
  Clone ID: 700799777_FLI.pep
TARSWTAATSPSTRPSPAAAVEAAAAATVVAVEAAATAVAGAVMAAAATAVAAAATVAAVATVVVVAATAVATVAAATATPTGTGGTERWGPRGQVILFATVMFTLVQRVYLRSSRLLLPICVFDCKVALCQLLVLCSSSAPADPCINQHGLWIDGCCYSCQDLF

SEQ ID NO: 44697 - protein, 267 aa, Glycine max
  Clone ID: 700874028_FLI.pep
IIRTDKTSAQVILDLITVGKIIKKTPVVVGNCTGFAVNKTFFPYSQGAHLLVNLGVDVFRIDTLIRNFGFPIGPFQLQDLAGYGVAVATSKVFADAFSDRIFKSPLLDLLIKSGRNGKNNGKGYYIYEKAGKPKPDPSILPIIEESRRLCNIMPNGKPISVTDQEIVEMILFPVVNEACRVLEDGVVIRASDLDIASVLGMSFPNYRGGIVFWADLVGANHIYTSLKKWAQLYGNFYKPSRYLEERALKGIPLSAPASSTPKSMARL

SEQ ID NO: 44698 - protein, 190 aa, Zea mays
  Clone ID: 700336546_FLI.pep
RALAIAAALNPLTAVNFALDIARGMAYLHNEPNVVIHRDLKPRNILLVNSAANHLKVGDFGLSKIIKAQHANDVYKMTGETGSYRYMAPEVFKHRKYDKKVDIFSFAMILYEMLEGDSPFSNYEPYEAAKYVADGHRPVFRKNHTTELKDLVELCWSGDISLRPSFLEILKRLEKLKEHYSHENHWHLFQ

SEQ ID NO: 44699 - protein, 123 aa, Glycine max
  Clone ID: 700743613_FLI.pep
KNLLFSFSQVSRDFIMAPKKDKAPPPSSKPAKSGGGKQKKKKWSKGKQKEKVNNMVLFDQGTYDKLLSEAPKFKLITPSILSDRLRINGSLARKAIRELMARGSIRMVSAHASQQIYTRATNT

SEQ ID NO: 44700 - protein, 83 aa, Glycine max
  Clone ID: 700834391_FLI.pep
VRELGSSIEYSYLHYYYYYYYYYYYAWILHGITQYNISPPGPFDQPWLLHCLQEAELASYFEETSFLSSIESKRLPLYAHVSN

SEQ ID NO: 44701 - protein, 400 aa, Glycine max
  Clone ID: 700845021_FLI.pep
QQITMALSRLSHRSIGSTLTKPFSAAAASAASSRSISTSDTPLTIETSVPFTAHNCDPPSRAVATSSSELLTFFRDMALMRRMEIAADSLYKAKLIRGFCHLYDGQEAVAVGMEAAITKKDSIITAYRDHCIFVGRGGTLLEVFAELMGRKEGCSKGKGGSMHFYKKESGFYGGHGIVGAQVPLGCGLAFAQKYSKDESVTFAMYGDGAANQGQLFEALNIAALWDLPAILVCENNHYGMGTAEWRAAKSPAYYKRGDYVPGLKVDGMDVLAVKQACKFAKEHALKNGPLILEMDTYRYHGHSMSDPGSTYRTRDEISGVRQERDPIERVRKLVLSHDIAAEKELKDIEKEVRKEVDEAIAKAKESPMPDPSDLFTNVYVKGYGVETFGADRKEVRATLP

SEQ ID NO: 44702 - protein, 98 aa, Glycine max
  Clone ID: 700851527_FLI.pep
QLNSEVMVKVSSMEKEGEKQKLGEGPQISRMEPVTHGAYGGGMYGTEKGQPEKQTKPPASESQSADGPVDKDAIKPKHNPPPSTGDRDLDITGQSYIQ

SEQ ID NO: 44703 - protein, 187 aa, Glycine max
  Clone ID: 700852535_FLI.pep
PSRGDSNEVGPSVENAKAYNGNLIAHLRSLVGTPLMPGKSVDTYIFALYDEDLKPGPGSERAFGMFKTDRTVLYDVGLTKSSQQTPTTPVTPAPNTAGWCVAKAGVSDAQLQANIDYACSQGIDCGPIQPGGSCFEPNTIASHAAFAMNLYYQTSGKNQWNCDFSQSATLTSQNPSYNACIYTGGST

SEQ ID NO: 44704 - protein, 292 aa, Glycine max
  Clone ID: 700853279_FLI.pep
ERKKAMQACSSSDAPLSKRLDGKVALITGGASGIGEATAKLFLRHGAKVVIADIQDNLGHSLCQSLNSSDKNNNDDISYVHCDVTNDKDVETAVNAAVSRHGKLDILFSNAGITGRSDCSNSITAIDSGDLKRVFEVNVFGAFYAAKHAAKVMIPRKKGSIVFTASIASVSNAGWAHPYAASKNAVVGLMKNLCVELGKHGIRVNCVSPYAVGTPMLTRAMRMEKEKAEEIYLEAANLKGVVLKEKDVAEATLFLASDESKYVSGVNLVVDGGYTTTNSSSKQAFTKFSFNV

SEQ ID NO: 44705 - protein, 314 aa, Glycine max
  Clone ID: 700862838_FLI.pep
SYENLIGKGGHAEVYKGYLPDGQVIAVKRLMKNEKDAADRAGDFLTELGIIAHINHPNATRLVGFGVDCGLYFVLQLAPHGSLSSLLFGSECLDWKIRFKVAIGVAEGLHYLHKECPRRIIHRDIKASNILLNENFEAEISDFGLAKWLPSKWTNHVVFPIEGTFGYLAPEYFMHGVVDEKTDVFAFGVLLLELITGHRAVDSNSRQSLVIWAKPLLDTNNVKDLADPRLGEEYDLTEMKRTMLTASMCVHHASSKRPYMNQVVLLLKGEETIIEPKKNLVAQKSLMLEACDLEDYTCSSYLKDLNRHRQLIME

SEQ ID NO: 44706 - protein, 215 aa, Glycine max
  Clone ID: 700863593_FLI.pep
KLQNILVFQNGDVKIADFGLAKEKGEKQGKLECRGTPLFMSPESVNDNEYESPADIWALGCAVVEMLTGKPAWDVRGSNIWSLLIRIGAGEELPKIPEELSEEGKDFLLKCFVKDPMKRWSAEMLLNHPFVNGETVSFQKVNEPLPLPSPSPRTHFDLTHWASTVTALLPSSPDSDEWRMWESGSSCSPENRLRRLVTVQTPANWSESDGWTSVR

SEQ ID NO: 44707 - protein, 456 aa, Glycine max
  Clone ID: 700847226_FLI.pep
QLLITLYLCVYLKMKNMNMKLNTIALIIAIAFSVWSSSCTAARVSHWRKLKAAASATSFNVLDYGAKGDGHADDTKAFEDAWAAACKVEGSTMVVPSGSVFLVKPISFSGPNCEPNIVFQLDGKIIAPTSSEAWGSGTLQWLEFSKLNTITIRGKGVIDGQGSVWWNNDSPTYNPTEVMLESNGRLPSTKPTALRFYGSDGVTVTGITIQNSQQTHLKFDSCTNVQVSGISVSSPGDSPNTDGIHLQNSQNVVIYSSTLACGDDCVSIQTGCSDIYVHNVNCGPGHGISIGSLGRENTKACVRNVTVRDVTIQNTLTGVRIKTWQGGSGSVQNIMFSNVQVSGVQTPISIDQYYCDGGRCRNESSAVAVSGIHYVNVKGTYTKEPIYFACSDNLPCSGITLDTIQLESAQETKNSNVPFCWEAYGELKTTTVPPVECLQRGNPSKEGGINSNIDSC

SEQ ID NO: 44708 - protein, 66 aa, Glycine max
  Clone ID: 700864430_FLI.pep
ICLRWLYEQGLTFVVKSYDKERMKQNLGIFDWSLTEDDYKKISEIHQERLIKGPTKPLLDDLWDEE

SEQ ID NO: 44709 - protein, 208 aa, Glycine max
  Clone ID: 700849930_FLI.pep
HPARYRTQPCKDGTSCRRRVCFFAHTPDQLRVLPQQSPRSADSYDGSPLRHAIESSCAKSHPFVASPGSASSPVESPPMSPMTVSVNEMVASLRNLQLGKVKSLPSSWNVMGSSGFGSPRGPMIRPGFFSLPTTPTQAPTRGGVNYFDQWDQSCCEEEPVMERVESGRSIRARMFEKLSKENHLDGSGSESGQIGVPDVGWVSELVSR

SEQ ID NO: 44710 - protein, 105 aa, Glycine max
  Clone ID: 700853650_FLI.pep
EEMRSLCNNIFNLMSNYANVQADGGSAGVAARCFGEDAVEEMNPKLFGVVIGTKRAREENDTVLSLHQPFHADVKSEALDFARRGENKKTPWLNQCHRANQRVCN

SEQ ID NO: 44711 - protein, 167 aa, Glycine max
  Clone ID: 700853784_FLI.pep
YLDAHFNELHGLPIAIGRLTNLEVLNLSSNFSDLKELPETFGDLANLRELDLSNNQIHALPDTFGRLDNLIKLNLEQNPLELPPMEIVNQGLEAIKTFMAKRWLDILLEEERKSNQEMQEPEQGGWLTRSTFWLKNVSGNVIGYIGTTVGSPMSPKSPRDAYLDQQL

SEQ ID NO: 44712 - protein, 442 aa, Glycine max
  Clone ID: 700853926_FLI.pep
FKPCSILHSTHTRRIMASILHYFLALSLSCSFLFFLSDSVTPTKPINLVVLPVQNDGSTGLHWANLQKRTPLMQVPVLVDLNGNHLWVNCEQQYSSKTYQAPFCHSTQCSRANTHQCLSCPAASRPGCHKNTCGLMSTNPITQQTGLGELGEDVLAIHATQGSTQQLGPLVTVPQFLFSCAPSFLVQKGLPRNTQGVAGLGHAPISLPNQLASHFGLQRQFTTCLSRYPTSKGAIIFGDAPNNMRQFQNQDIFHDLAFTPLTITLQGEYNVRVNSIRINQHSVFPLNKISSTIVGSTSGGTMISTSTPHMVLQQSVYQAFTQVFAQQLPKQAQVKSVAPFGLCFNSNKINAYPSVDLVMDKPNGPVWRISGEDLMVQAQPGVTCLGVMNGGMQPRAEITLGARQLEENLVVFDLARSRVGFSTSSLHSHGVKCADLFNFANA

SEQ ID NO: 44713 - protein, 142 aa, Glycine max
  Clone ID: 700877040_FLI.pep
MATNAFTGTSLSMRSVIPQTQAFASISGPTSASISSFGRKNVSFSLQPRLIRLKISCAAAKPETVEKVCKIVKKQLAMPETDVVTGESKFATLGADSLDTVEIVMALEEAFGIAIEEDSAQSIATVQDAADLIEEIVQKKSS

SEQ ID NO: 44714 - protein, 191 aa, Glycine max
  Clone ID: 700866218_FLI.pep
YRKTAEAVMCGLLPDSPTATKSRTDDGLIWVSQWNSLQHPVASAFLAAVYSDYMLTSQTPKLKCGSDSFTPSDLRDFAKSQADYVLGKNPMHMSFLVGYGDKYPQFVHHRGASIPADAKTGCKDGFQWLESSDPNPNVATGALVGGPFLNETFIDSRNNSMQTEPSTYNSAVIVGLLSSLVTTSSAVQSFT

SEQ ID NO: 44715 - protein, 141 aa, Glycine max
  Clone ID: 700836776_FLI.pep
RVFGTNIFSQFFLVKHALKHMKEGSCIINSTSVNAYNGNPEALDYTATKGAIVAFTRGLSQQLASRGIRVNGVAPGPVWTPIQPASKPAEMIQNLGCEVPMNRVAQPCEIAPCYLFLATCQDSSYFTGQVLHPNGGMVVNA

SEQ ID NO: 44716 - protein, 390 aa, Glycine max
  Clone ID: 700836315_FLI.pep
IFFFLVAATTLLMSSSESTNARTRTASWFSTPFFVIVLPVAVAALLYRLEPFKPVLLPVQLGRSTVAVPARNGHMQDGSERVGEGHLEGPEDLAYDAAARVVYTGCEDGWIKRVTVNDSVVDSAVEDWVNTGGRPLGLVLKPNGELIVADAEKGLLRVSSEKEIELLVDEFEGLKFKLTDGVDIADDGTIYFTDASHKYPVKDAVFDVLEGKPNGRFFSYNPATKKTTLLAQDLYFANGVAVSADQQFVVFCESVLMRCNKYFVLGPKTGTIEKFCDLPGMPDNIHYDGQGHYLIAMFTALSPELELAYRYPFIRKAFAMFTKYVGSLSISKNGGVLVVDLEGKPTAHYYDPKLALTSAIKIGNHIYAGSIFYPFVTRFDVEKYPALPTV

SEQ ID NO: 44717 - protein, 212 aa, Glycine max
  Clone ID: 700751810_FLI.pep
FSASSFHSSSESLIVRSIHLPLPMTTPTDNNNNPAQENPNKTLDPTEPDPIPATEDDAAADTKDSDAKNSPPPDSGNDAPLSDIQKKMRRAERFGISVQLSEKEKRNSRAERFGTGSASQGSEPSKSEELKRKARAERFGMPSPTTTSDEEAKKKARLARFAPASKVDPQEEDKRKARALRFANPSSTSIANVNGEGKIEPAAIAGNAGGGT

SEQ ID NO: 44718 - protein, 91 aa, Zea mays; identical to SEQ ID NO: 39130
  Clone ID: 700619965_FLI.pep

SEQ ID NO: 44719 - protein, 129 aa, Glycine max
  Clone ID: 700791540_FLI.pep
MDNITLFSIITVMSFFLLAPVAIFMEGVKFTPAYLQSAGVNVRQLYIRSLLAALCFHAYQQVSYMILQRVSPVTHSVGNCVKRVVVIVSSVIFFQTPVSPVNAFGTAIALAGVFLYSRVKRIKAKPKTA

SEQ ID NO: 44720 - protein, 181 aa, Glycine max
  Clone ID: 700797953_FLI.pep
NSISMASTCSSSFSVTKKYDVFISFRGEDTRADFTSHLHAALRRNNIDTYIDYRIHKGDEIWVEIMKAIKESTLFLVIFSENYASSSWCLNELIQLMEYKKHEDVDVIPVFYKIDPSEVRKQSGSYHMAFAKHEKDRKVTEDKMQKWKNALYEAANLSGFLSDAYRCMLCPYIIVFQLLFI

SEQ ID NO: 44721 - protein, 129 aa, Zea mays; identical to SEQ ID NO: 36901
  Clone ID: 700804610_FLI.pep

SEQ ID NO: 44722 - protein, 195 aa, Glycine max
  Clone ID: 700807612_FLI.pep
IIHRDLKASNILLDENMNPKISDFGLARIFGGNQNEANTNRVVGTYGYMAPEYAMEGLFSVKSDVYSFGVLLLEILSGRRNTSFRHSDDSSLIGYAWHLWNEHRAMELLDPCIRDSSPRNKALRCIHIGMLCVQDSAAHRPNMSAVVLMLESEATTLPMPTQPLITSMRRTEDRQFYMDGLDVSNDLTVTMVVGR

SEQ ID NO: 44723 - protein, 350 aa, Glycine max
  Clone ID: 700807649_FLI.pep
NNLDPANKIGEGGFGPVYKGVLSDGHVIAVKQLSSKSKQGNREFVNEIGMISALQHPNLVKLYGCCIEGNQLLLIYEYMENNSLAHALFGEQEQKLHLDWPTRMKICVGIARGLAYLHEESRLKIVHRDIKATNVLLDKDLNAKISDFGLAKLDEEENTHISTRIAGTIGYMAPEYAMRGYLTDKADVYSFGVVALEIVSGKSNTKYRPKEEFVYLLDWAYVLQEQGNLLELVDPNLGSKYSPEEAMRMLSLALLCTNPSPTLRPTMSSVVSMLEGKIPIQAPIIKRSESNQDVRFKAFELLSQDSQTLVSSAYSQESMKQRHISEDGPWVDSSISLPSGDDYSSTSKLV

SEQ ID NO: 44724 - protein, 212 aa, Glycine max
  Clone ID: 700829628_FLI.pep
NSAMASTRSLILCLFIQLCFYLLPLSFAQSPATGSAEGYTIYGRVKIPSVGTKDYILPGKISNVKVILNGGQRVTFLRPDGYFAFHNVPAGTHLIEVAAIGYFFSPVRVDVSARHHGKIQAALTENRRGLSEFVLEPLKDEQYYEVREPFSIMSIVKSPMGLMMGFMLIVVFLMPKLMENMDPEEMRRAQEEMRNQGVPSLASLLPGAARSN

SEQ ID NO: 44725 - protein, 178 aa, Glycine max
  Clone ID: 700866613_FLI.pep
EIRLPNSRQRIWLGSYDSAEKAARAFDAAMFCLRGSGANFNFPSDRPNIAGGRNMTPSQIQIAAARFANSEPRKECSGKPVESLTSIEETTSFPVNSDTDTSSPLSVVTIQNDTEVATGSFPGIFSGFGSGNFVPEFSDFPSFDDFGHDFFVHELPGFDYGEENLDGLIIQDSFLWNF

SEQ ID NO: 44726 - protein, 87 aa, Zea mays
  Clone ID: LIB3078-038-F5_FLI.pep
YVQKHSTRKLQGPMVNRQQATMELDGSLATIFQLANSTFAQVLLRLHRRTVPSSSCTRAPLKVLVHLLDQRLPQTNPRVYEPIRNRS

SEQ ID NO: 44727 - protein, 144 aa, Zea mays
  Clone ID: LIB3076-028-C8_FLI.pep
AGEFFKNGFFKNFSCDLSGAQPLLTMTISETLKYEYSLTCPICLDTLFNPYALSCGHLFCKACACGAASVYIFQGVKSAPPEAKCPVCRAVGVFDRAVRMTELELLLKRRDKDYFLQRLREERSVMVKQAKEYWDSQAMLSMGI

SEQ ID NO: 44728 - protein, 94 aa, Zea mays
  Clone ID: LIB3076-017-D12_FLI.pep
IIPIMQKRPDFGFVSFLDSESVKQILSERGPHFICGNEVHVKAYREKHELEYMMLTEKDIHCNCGVRDVSDVGDLQFCHHWQWTSLICYRTHKS

SEQ ID NO: 44729 - protein, 123 aa, Zea mays
  Clone ID: LIB3078-046-E6_FLI.pep
RKHIVDMEARVTTPVEDGQQQKSPIEVVSEVLWGSSLFLQNVGLQDNSKKSSTTTVFAKVQELHNQLESERLEKDGLQEEVETLKAQAQASKETMDNMKRSMEENNSLLRQLLSFNRSQTSPS

SEQ ID NO: 44730 - protein, 55 aa, Zea mays
  Clone ID: LIB3076-011-F7_FLI.pep
YILEVKETGLQMFLGDLVVRFRSGIAQIVRCFSAVGWFKIKPSKEEVACSYCETS

SEQ ID NO: 44731 - protein, 201 aa, Zea mays
  Clone ID: LIB3075-001-D12_FLI.pep
ISSEALAGTRARGKTRADDFQIGQDLLLSSKEDIEFTIVRDSIKNKLEMICDEVVVHPSKALRKLPRVQHLSAQLAARIRNEDDEFEILNTLHPSPAVCGLPTEEARQFIRDCEIFDRGMYAGPVGWFGGAECEFAVGIRSALLGKGHSTLVYAGAGIVEGTNPSFEWDELDLKASQFAKLLRYQERPIRYQEAENLGTVI

SEQ ID NO: 44732 - protein, 292 aa, Zea mays
  Clone ID: LIB3076-024-B10_FLI.pep
VAQFKDLANRVTSEMRNARTRSPLTASMSLKPEVSQESSVDTCTSEIRSSSSGKQRRFRSPLSVRELDDKSPVISRELYLSARKYKTPSPPVRSSLSVERGSFAKIVENTGSIDCTPISKVEVPPKVWSSSSNSKTTPSSVLTAQNLRKFRDSEENRTKIPPVRQSMVKNRSESTPKTHNEEKPANRHSGTKARSEARNTRDSSEIENEFAGDEPTFHFNRTAKKLPTKVMTRQSQNIDVSVRASVRGEMEPLTEGRQRRNWSKPPHAERTNMPLPDIRRSVSLPRGKNPLV

SEQ ID NO: 44733 - protein, 407 aa, Zea mays
  Clone ID: LIB3075-034-A10_FLI.pep
IHRREPSGKLYNYAAASKGAKVLDFNKEAKGASNILDKDKDKYLRNACSAEGKFVIIELSEETLVDTIAIANFEHYSSNPKEFELLSSLTYPTENWETLGRFTAANARLAQNFTFLEPKWARYLKLNLVSHYGSEFYCTLSMLEVYGMDAVEKMLENLIPVEHKKTEPGGKLKEPIEQIPLKESAGGKESSQEPLDEDEFELEDGKPNGHGDPSKNGASDPVSETRTLQAGRIPGDTVLKVLMQKVQSLDVSFSVLERYLVELNNRYGQIFKDFDSDIDSKDALLEKIKTELKNLESSKDSIMNEIEGIISWKVVASSQLNQLVLDNALLRSEFETFRQKQADMENRSLAVIFLSFVFACLALAKLSIGIMSRFCRFYDFEKFHNVRSGWLVLLLSSCIISTILIIQ

SEQ ID NO: 44734 - protein, 66 aa, Glycine max
  Clone ID: 701006002_FLI.pep
YGGYCWWWGMCIVHTCRFSQVICFCYSCLMVYKLNPLIFVVRPHLSVSINYLASVIYGMLGMNYFF

SEQ ID NO: 44735 - protein, 395 aa, Glycine max; identical to SEQ ID NO: 38715
  Clone ID: 701014866_FLI.pep

SEQ ID NO: 44736 - protein, 316 aa, Glycine max
  Clone ID: 700998019_FLI.pep
FADNQTINIRPYLKEGGSSKKWAIIGGVVGGVVLLLVLFACRLFTKQKRVPKADILGATELRGPVNYKYTDLKAATKNFSVENKLGEGGFGAVYKGTLKNGKVVAVKKLVLGKSSKMEDDFEGEVKLISNVHHRNLVRLLGCCSKGQERILVYEYMANSSLDKFLFGDKKGSLNWKQRYDIILGTARGLAYLHEEFHVSIIHRDIKTGNILLDDDLQPKIADFGLARLLPRDRSHLSTKFAGTLGYTAPEYAMQGQLSEKADTYSYGIVVLEIISGQKSTNVKIDDEGREYLLQRVSMETVRERHAIGACGQGHRP

SEQ ID NO: 44737 - protein, 245 aa, Glycine max
  Clone ID: 701051337_FLI.pep
LPVLENVVFDEHDREVDYSDKSVTENTRAAYPIEYIPNAKLPCVGPHPKNVILLACDAFGVLPPVSKLNLAQTMYHFISGYTALVAGTEEGIKEPQATFSACFGAAFIMLHPTKYAAMLAEKMQKHGATGWLVNTGWSAGSYGNGSRIKLQYTRKIIDAIHSGSLLNAEYKKTEIFGLEIPTEVEGVPSEILDPMNTWSNKKAYKETLLKLAGLFKNNFETFTNYKIGKGNNNLTEEILAAGPIF

SEQ ID NO: 44738 - protein, 97 aa, Glycine max; identical to SEQ ID NO: 43895
  Clone ID: 701000943_FLI.pep

SEQ ID NO: 44739 - protein, 586 aa, Glycine max
  Clone ID: 701005244_FLI.pep
YHFLARHCFPPPPPSASAPMADASSPPTDQLAAITLDEVPKANFSDRVLIRSIISRTDGGSGLAGRKARVGGWVKTGRKADKDAFAFLEINDGSCAGNLQVIVEAALGELGQLVPTGTCVVVDGHLKLPPAGTRQKIELRADKVLHVGPVDPAKYPLPKMRLTLEFLRDFVHLRSRTNTISAVARIRNALAYATHTFFNKEGFLYVHTPIVTTSDCEGAGEMFQVTTLLSEAERLEKELLQNPPPSEADVEAARVVVQEKGEVVSQLKAAKASKQEIGAAVDQLKKAKESLAKVEEWSKLKPGIPKKDDGKVDYGKDFFARQAFLTVSGQLQVESYACALSSVYTFGPTFRAENSHTSRHLAEFWMVEPEIAFAELKDDMNCAEAYVKFMCQWLLDNCLEDMEFMADKFDKGCIDRLKLVASTPFIRVTYTEAVEILEDAVKNGKKFENEVKWGIDLASEHERYLTEVKFQKPVIVYNYPKDIKAFYMRLNDDLKTVAAMDVLVPKVGELIGGSQREERYDVIQTRIKEMGLPVEPYEWYLDLRRYGTVKHAGFGLGFERMILFATGLENIRDVIPFPRYPGRADL

SEQ ID NO: 44740 - protein, 128 aa, Glycine max
  Clone ID: 701010766_FLI.pep
RSNRIRHATCQVQGSLPQRGFGCGTSSCGHCFCHQDLDCEMITPLQGILLLFLANFLDGAKEVSLYLFISTLDANFNQKHLSGWVTCFSHILYYCFFFFCYICLIIVASSHLLSFVKILYEAFGEPKN

SEQ ID NO: 44741 - protein, 274 aa, Glycine max; identical to SEQ ID NO: 42938
  Clone ID: 701014546_FLI.pep

SEQ ID NO: 44742 - protein, 200 aa, Glycine max
  Clone ID: 701014732_FLI.pep
PPSDLYPSLSLSLSSIFKFYIMGTEVLRPQDCFTQRIGVPPPGFSRRRTYGTHHNNKNNNVNNYFRGNRKPTTRPEQRKRVVDKRPSLDDSRFSSLEMEKVTILRRGESLDSKLKTEALKKEGDNLVVVGTQRLGPDPDMVPKQIRIVDFRSGREIYAGSAFAVSPSPSALPLPSFSKRQPAVAVADSATRDLRRLLRLE

SEQ ID NO: 44743 - protein, 222 aa, Glycine max
  Clone ID: 701014974_FLI.pep
RNMASLSSLVLLLAALILSPQVLANYENPPVYKPPTEKPPVYKPPVEKPPVYKPPVENPPIYKPPVEKPPVYKPPVEKPPVYKPPVEKPPVYKPPVEKPPVYKPPVEKPPVYKPPVEKPPVYKPPVEKPPVYKPPVEKPPVYKPPVEKPPVYKPPVEKPPVYKPPVEKPPVYKPPVEKPPVYKPPVEKPPIYKPPVEKPPVYKPPYGKPPYPKYPPTDDTHF

SEQ ID NO: 44744 - protein, 486 aa, Glycine max
  Clone ID: 701015156_FLI.pep
EMLVWEETIPTSARVKSFQTDEDPSFVELLFQYGRYLLISCSRPGTQVANLQGIWNKDVEPAWDGAPHLNINLQMNYWPSLACNLHECQEPLFDFISSLSVIGKKTAKVNYEANGWVAHQVSDIWGKTSPDRGEAVWALWPMGGAWLCTHLWEHYIYTMDKDFLKNKAYPLLEGCTTFLLDWLIEGRGGLLETNPSTSPEHMFTAPDGKTASVSYSSTMDISIIKEVFSMIISAAEVLGRHNDTIIKRVTKYQSKLPPTKVARDGSIMEWAEDFVDPDVHHRHVSHLFGLFPGHTISVEKTPDLCKAVEVSLIKRGDDGPGWSTTWKASLWAHLHNSEHAYRMIKHLIVLVEPDHERDFEGGLYSNLFTAHPPFQIDANFGFSGAIAEMLVQSTTKDLYLLPALPRDKWANGCVKGLKARGGVTVNICWKEGDLLEFGLWTENQNSQLRLHYRGNVVLTSLSPGRVYSYNNLLKCVKAYSLNEVNP

SEQ ID NO: 44745 - protein, 219 aa, Glycine max
  Clone ID: 701039134_FLI.pep
FSHKGGRMASFISLSLLLLFLNYPFLSLSTNPEGNALHALRSRISDPNNVLQSWDPTLVNPCTWFHVTCDSNNHVIRLDLGNSNVSGTLGPELGQLQHLQYLELYRNELTGKIPKELGNLKSLISMDLYDNKLEGKIPKSFGKLKSLKFLRLNNNKLTGSIPRELTRLTNLKIFDVSNNDLCGTIPVEGNFESFPMESFENNRFSGPELKGLVPYDFGC

SEQ ID NO: 44746 - protein, 420 aa, Glycine max
  Clone ID: 701039157_FLI.pep
HKAGYCLFKLPSLSLFLSASLPEVKMAQETFLFTSESVNEGHPDKLCDQISDAVLDACLEQDPDSKVACETCTKTNMVMVFGEITTKANVDYEKIVRDTCRNIGFVSDDVGLDADNCKVLVNIEQQSPDIAQGVHGHLTKRPEEIGAGDQGHMFGYATDETPELMPLSHVLATKLGAKLTEVRKNGTCPWLRPDGKTQVTVEYYNDKGAMVPIRVHTVLISTQHDETVTNDEIAADLKEHVIKPVIPEKYLDEKTIFHLNPSGRFVIGGPHGDAGLTGRKIIIDTYGGWGAHGGGAFSGKDPTKVDRSGAYIVRQAAKSIVANGLARRAIVQVSYAIGVPEPLSVFVDTYGTGKIPDKEILSIVKESFDFRPGMISINLDLKRGGNGRFLKTAAYGHFGRDDPDFTWEVVKPLKGEKVPA

SEQ ID NO: 44747 - protein, 272 aa, Glycine max
  Clone ID: 701039269_FLI.pep
TLLNNQIFHCMNIQKTMAMLNIISILSLLLTQSHAKIPGVYSGGPWQSAHATFYGGSDASGTMGGACGYGNLYSQGYGVNTAALSTALFNNGFSCGACFEIKCTDDPKWCNPGNPSILVTATNFCPPNYALPTDNGGWCNPPRPHFDLAMPMFLKIAQYRAGIVPVSYRRVACRKQGGMRFTINGLRYFNLVLITNVAGAGDIMRASVKGSKTEWMSMSRNWGQNWQSNAVLVGQSLSFRVTGSDRRTSTSWNIVPRNWQFGQTFAGKNFRI

SEQ ID NO: 44748 - protein, 336 aa, Glycine max
  Clone ID: 701039608_FLI.pep
VPNRDCPSNAQFLDTYVHAADGTPLLIKNAICVFEQYGSIMWRHTETGIPNESFEETRTEVNLVVRTVVTVGNYDNIIDWEFKTSGSIKPSIALSGILEIKGVDIKHKSEIKSDQHGILVSANSIGVYHDHFYIYHLDLDIDGVANSFEKTSLKTVRVTDGSSKRKSYWTTEVETAKTENDAKIILGLSPGELSVVNPNKKTSVGNDVGYRLIPAIPAHPLLTDDDYPQIRGAFTNFNVWVTPYNRTEKWAGGLYVDHSHGDDTLAVWTKKNRDINNKDIVLWHVVGIHHVPAQEDFPIMPLLSTAFELRPTNFFERNPVLKTLSPPDVQWPGCPK

SEQ ID NO: 44749 - protein, 111 aa, Glycine max
  Clone ID: 701050612_FLI.pep
TKLKQTEVDCEYLKNCCENLTEENRRLQKEVQELRALKLSPQLYMNMNPPTTLTMCPSCERVAVSSTSFSSSATMPSAPPPANLNPAGPTIQRPVPVNPWAAMLNQHRGRP

SEQ ID NO: 44750 - protein, 230 aa, Glycine max
  Clone ID: 701001042_FLI.pep
PTLVIRGTGLYELWKTGRYRNYPPEQLVDIIARILAMVPPWTRVYRVQRDIPMPLVTSGVEKGNLRELALARMDDLGLKCRDVRTREAGIQDIHHQIKPEEVELVRRDYMANEGWETFLSYEDTRQDILVGLLRLRKCGRNTTCPELMGKCSIVRELHVYGTAVPVHGRDADKLQHQGYGTLLMEEAERIACREHRSTKIAVISGVGTRHYYRKLGYELEGPYMVKYLVK

SEQ ID NO: 44751 - protein, 112 aa, Glycine max
  Clone ID: 701005509_FLI.pep
FLSHSHYKHKTLPILIKVKMKASPIAWFTLVVVFLVAEVQVSMAVTCSPVQLSACVSAITSSTPPSNLCCSKIKEQKPCLCQYLKNPNLKKFVDSPNARRVASTCGTPFPRC

SEQ ID NO: 44752 - protein, 209 aa, Glycine max
  Clone ID: 700998455_FLI.pep
GGRDSVCRVWDIRSKMQIHALSGHDNTVCSVFTRPTDPQVVTGSHDTTIKMWDLRYGKTMSTLTNHKKSVRAMAQHPKEQAFASASADNIKKFTLPKGEFCHNMLSQQKTIINAMAVNEEGVMVTGGDNGSMWFWDWKSGHNFQQSQTIVQPGSLDSEAGIYACTYDLTGSRLITCEADKTIKMWKEDESATPETHPLNFRPPKDIRRF

SEQ ID NO: 44753 - protein, 369 aa, Glycine max
  Clone ID: 701051351_FLI.pep
TRVVAPMGGKRKKSDDDDDVEAEAEASGWKKKTRTTTEREKEKKEPLRPSMIKNKEKRSELHAKLKHQKKLEKRAKAKARDAALKKALELGEEPPEKKVPRTIENTRELDETVCKPDDEELFAGNDADEFGPILNQQQTPKILITTCRFHSTRGPAFISELLSVIPNAHYFKRGTYDLKKIVEYAKKKDFTSIIVVHTNRREPDALLIIGVPDGPTAHFKLSKLVLRKDIKNHGNPTGHKPELVLNNFTTRLGHRVGRLIQSLFPQDPEFKGRRVVTFHNQRDFIFFRHHRYIFETKEVKKAESKGKKDKDGESENVPEQKTIARLQECGPRFTLKLISLQHGTFDTKGGEYEWVHKPEMDTSRRRFFL

SEQ ID NO: 44754 - protein, 186 aa, Glycine max
  Clone ID: 701005317_FLI.pep
DLFISCSLRISMFRSSFRRAFSARASKHCENHEFLSRNSFLGSWEAPRDPKEAEAKLARLRREYAKQVKEVRKEYIREMEAMKIEKERKDEAHREALRVANEERKKLKAQAAQLRAQERDIERQQFRETLLKERAEKLENWRMKVKMLEGKKAEKKEFLRRQSSAWIEEGNLEKKVVEAMAEIMHL

SEQ ID NO: 44755 - protein, 57 aa, Glycine max
  Clone ID: 701060761_FLI.pep
EQKNLQIRKNITSPASTREGNKRLFNFVLQVVQATLTSIVLGFLGSGGGNFCTMTLS

SEQ ID NO: 44756 - protein, 164 aa, Glycine max
  Clone ID: 701062352_FLI.pep
KAIPINGHMSQSKRLGALNKFKSGECNILLCTDVASRGLDIPTVDMVINYDIPTNSKDYIHRVGRTARAGRSGVAISLVNQYELEWYIQIEKLIGKKLPEYPAQEEEVLLLEERVGEAKRLAVMKMKETGGKKKRRGEEDYDGEDIDKYLGLKEGKSSKKFRRR

SEQ ID NO: 44757 - protein, 413 aa, Zea mays
  Clone ID: UC-ZMFLB73372G01_FLI.pep
SATVRVLTNNGRDIIFAPYGEHWRQLRKVAITELLSARRVLSFRAIREEEVAATLRACAAAAAESPPRPVEMRARLSALVADATVRAVMGDRCRDRDVFLRELDRSIGLSAGFNPADLWPSSRLVGLLSGAVRRAEECRDTVFGILDGIIKEHLQRMDSAGAGAGAGEAAGEDLLDVLLKIHKDGSLQIPLDMDVLKAVIFDIFGAGSETSATTLEWAMAELIRNPKAMQRATAEVREAFGARGAVAEHELGELRYLHLVIRETFRLHPPLPLLLPRQSQEPRRVLGYDVPAGTTVLVNVWALGRDGRYWPGDPEEFRPERFEAEASEVEFKGADFELLPFGAGRRMCPGMAFGLANVELALASLLFHFDWEAPGVSDPAEFDMAEAFGITARRKADLLLRPILRVRLPVPGV

SEQ ID NO: 44758 - protein, 90 aa, Glycine max
  Clone ID: 701065521_FLI.pep
AGFMTPTALYTKTLKPGDIMVFPQGQLHFQVNSGNGKATAFLAFSSANPGAQLLDLLLFGNTLPSDLVAQTTFLDVAQVKKVKARFGGRG

SEQ ID NO: 44759 - protein, 388 aa, Glycine max
  Clone ID: 701121257_FLI.pep
RAAANDDDLRNRVCLVSHLIHEEKEKKGSKIRRKLRFFEMGLSKENLKGLILALVSSGFIGASFIIKKQGLRRAAAVSGVRAGVGGYYYLLEPLWWVGMITMIVGEVANFVAYAFAPAVLVTPLGALSIIVSAVLADIILKEKLHNLGILGCIMCIAGSIIIVIHAPKEQPITSVLEIWNMATQPAFLAYVGSVIVLVFILVFHFAPRCGHTNVLVFTGICSLMGSLSVMSVKALGTSLKLTFEGKNQLIYPETWFFMLVVAICVIMQMNYLNKALDTFNTAIVSPIYYVMFTTLTILASVIMFKDWDGQSGGTIVSEICGFIIVLSGTIMLHATKDFERSSSFRGSDPLSPTLSARLFTGNGDSLLKQDEENGSPESNMRSRRQELY

SEQ ID NO: 44760 - protein, 59 aa, Glycine max; identical to SEQ ID NO: 44171
  Clone ID: 701068125_FLI.pep

SEQ ID NO: 44761 - protein, 425 aa, Glycine max
  Clone ID: 701068676_FLI.pep
DNHLDEIETANNINKRLKPSPAESADSAASEPTRHVVLVDHQEAGVRLVHTLLACAEAVQQENLKLADALVKHVGILAASQAGAMRKVASYFAQALARRIYGIFPEETLDSSFSDVLHMHFYESCPYLKFAHFTANQAILEAFATAGKVHVIDFGLKQGMQWPALMQALALRPGGPPTFRLTGIGPPQPDNTDALQQVGLKLAQLAQIIGVQFEFRGFVCNSLADLDPNMLEIRPGEAVAVNSVFELHRMLARSGSVDKVLDTVKKINPQIVTIVEQEANHNGPGFLDRFTEALHYYSSLFDSLEGSSSSSTGLGSPSQDLLMSELYLGRQICNVVAYEGPDRVERHETLTQWRGRLDSAGFDPVHLGSNAFKQASMLLALFAGGDGYRVEENNGCLMLGWHTRPLIATSAWKLPSSSESSGLTQ

SEQ ID NO: 44762 - protein, 58 aa, Glycine max
  Clone ID: 701105046_FLI.pep
IKQLMVQTQNSRSISQLFAQRTCYFQISYTSCICRMEMIAFVIPNVYLDVCPRALNQK

SEQ ID NO: 44763 - protein, 127 aa, Glycine max
  Clone ID: 701105162_FLI.pep
WAPQPQVLGHPSTGGFLTHCGWNSILESVVNGVPFIAWPLFAEQRTNAFMLTHDVKVALRPNVAESGLVERQEIASLVKCLMEGEQGKKLRYRIKDIKEAAAKALAQHGSSTTNISNLALKWTHKFN

SEQ ID NO: 44764 - protein, 80 aa, Glycine max
  Clone ID: 701105417_FLI.pep
ISGHKKCRLGKDFPSNPNPGIFRCAVCQADQPSVDSVSMNTGSFFPPVSKPWEGLFLCTNCQKKKDAMEGKRSTRPSETA

SEQ ID NO: 44765 - protein, 280 aa, Glycine max
  Clone ID: 701105426_FLI.pep
RNNVSPQKASLKFLIYGGAGWIGGLIGNICEKQGIPFEYGMARLDDRSQILFDFRTIKPTHVFNASGVIGALNVKWFEAHKPETIRAVVVGVLTLADVCRDHGLLMMNYAFGGNLEDKANSTDAFYFRTQAKVEELLKEYENVCTLRIQLPVSSDLSNPHNLITMITRSDKVANIPNSITVLDELVPISIEMAKRNCRGIWNFTNPGTVTCNEILEMYKDYVDPTFKWVNFTLEQQAHVPSPSTNEMDSSKLKKEFPELLPVKDSLIKYVFEPEKKSLGF

SEQ ID NO: 44766 - protein, 297 aa, Glycine max
  Clone ID: 701107156_FLI.pep
GGGTGLNLFQKRFPERCFDVGIAEQHAVTFAAGLAAEGLKPFCAIYSSFLQRGYDQVAHDVDLQKLPVRFALDRAGLVGADGPTHCGAFDTTFMACLPNMVVMAPSDETELMHMIATAAAIDDRPSCFRYPRGNGIGTILPPNNKGTPLEVGKGRVLKEGSRVALVGYGTMVQSCMEAAKVLEAHGISTTVVDARFCKPLDGDLMRRLAREHEILITVEEGSIGGFGSHVSHFLGLNGLLDGNLKWRALTLPDRYINHGSQTDQIQMAGLSSNHIAVTALSLTNVHWDSRLLLSLQI

SEQ ID NO: 44767 - protein, 174 aa, Glycine max
  Clone ID: 701107363_FLI.pep
LILPFPLRTLDHSHALLYPLLHRRSLQRSQQHRHPMANAASGMAVHDDCKLRFLELKTKRTHRFIVFKIEEQQKQVIVEKLGEPAQGYEDFTASLPADECRYAVYDFEYLTEGNVPKSRIFFIAWSPDTSRVRSKMIYASSKDRFKRELDGIQVELQATDPTEMGLDVFKSRAN

SEQ ID NO: 44768 - protein, 290 aa, Glycine max
  Clone ID: 701107616_FLI.pep
KYCLFGNMAENGSIELNKFVLFCLLLLIQVAVSEIIFEERFDDGWRSRWVKSDWKSSEGKAGSFKHTAGKWAGDPDDKGIQTSSDAKHFAISAKIPEFTNKNRTLVLQYSVKFEQEIECGGGYIKLLSGFVNQKKFGGDTPYILMFGPDLCGTDTKKLHVILSYHGQNYPIKKDLQCETDRLTHFYTFILRPDATYSVLVDNRERDSGSMYTDWDILPPRKIKDVKAKKPADWEEREYIEDPDDVKPEGYDSIPREIPDPNAKEPENWDEEEDGKWKPPKIPNPAYKGPW

SEQ ID NO: 44769 - protein, 59 aa, Glycine max; identical to SEQ ID NO: 44171
  Clone ID: 701117492_FLI.pep

SEQ ID NO: 44770 - protein, 95 aa, Glycine max
  Clone ID: 701118146_FLI.pep
LEQLNSLQDKNGEDVSNINVQAEKSLVKDYLVDHNARSQKRIIPVPSPASIEDMRATIIENSLKLIQTESKITRLAASPNRTPFADVNSVNDDCS

SEQ ID NO: 44771 - protein, 203 aa, Glycine max
  Clone ID: 701120712_FLI.pep
WCTGCASDREYIIGRRIWDAGRIYYCVTKGVPCPSMPRHNKPKRVDLFYSSWCIRAVKSRKDDQLTSCEVLLFHHEDMGIPWEIAKLGVRQGMWGAVKKFDPGLRTYEKQRVSGTPLSPCARAAKINTKVTMDYVRSLENTTSDLLETENQDSSDKPGGRNIPKLLIVGGAIALACTLDQGLLTKAVIFGVARRFAKMGGRRL

SEQ ID NO: 44772 - protein, 94 aa, Glycine max
  Clone ID: 701123638_FLI.pep
FLSLWLYNLVKTLLRRYHWAFALAGFLALAMAAISWTLETSETYWFWHSIWHITIYTSSFFFLCSKANIEDTENQLPTNGNYELTHQDSLPRTG

SEQ ID NO: 44773 - protein, 334 aa, Glycine max
  Clone ID: 701129191_FLI.pep
TAIAFLFILLITYTGTTDAQSGVCYGRLGNNLPTPQEVVALYNQANIRRMRIYGPSPEVLEALRGSNIELLLDIPNDNLRNLASSQDNANKWVQDNIKNYANNVRFRYVSVGNEVKPEHSFAQFLVPALENIQRAISNAGLGNQVKVSTAIDTGALAESFPPSKGSFKSDYRGAYLDGVIRFLVNNNAPLMVNVYSYFAYTANPKDISLDYALFRSPSVVVQDGSLGYRNLFDASVDAVYAALEKAGGGSLNIVVSESGWPSSGGTATSLDNARTYNTNLVRNVKQGTPKRPGAPLETYVFAMFDENQKQPEFEKFWGLFSPITKQPKYSINFN

SEQ ID NO: 44774 - protein, 199 aa, Glycine max
  Clone ID: 701129275_FLI.pep
ACGPLIDSVALKVLYPPKRTRANLLKNGNLEEGPYIFPNSSWGALIPPHIEDSHGPLPGWIVESLKAVKYIDSDHFAVPEGKRAIELVAGKESALAQVVITTIGKTYDLTFAVGDANNECEASMMVEAFAGANTVQVPYQSKGKGGFVRGKLRFKAVSTRTRLRFLSTFYTMKSDNSGSLCGPVIDDVKLLGVRYPTHA

SEQ ID NO: 44775 - protein, 286 aa, Glycine max
  Clone ID: 701133385_FLI.pep
IEVKKEMAATSSLCSSTLQSQINGFFLHKTSLSHTPSLTFSRRKISTTVKATSRVDKFSKSDIIVSPSILSANFSKLGEQVKAVELAGCDWIHVDVMDGRFVPNITIGPLVVDALRPVTDLPLDVHLMIVEPEQRVPDFIKAGADIVSVHCEQSSTIHLHRTVNQVKSLGAKAGVVLNPGTPLSAIEYILDVVDLVLIMSVNPGFGGQSFIESQVKKISDLRRLCAEKGVNPWIEVDGGVGPANAYKVIEAGANALVAGSAVFGAKDYAEAIRGIKTSKRPEVVAV

SEQ ID NO: 44776 - protein, 174 aa, Glycine max
  Clone ID: 701097366_FLI.pep
HLLFSIYLIHPLTSFRNGCHQLEGTLGMVAFHMVACRLEASQPVASLLVAYKLEVSQLGACILVVFQLGVCKLEGSQLVACTLVVFQLGACKLGVSLQEACTLVASLLGAYKWGVSQLEVYKQEVSQLGACKVVASQWEACTPGASHSQQELEGIELELQGAALRSLRKSCYSC

SEQ ID NO: 44777 - protein, 199 aa, Glycine max
  Clone ID: 701102005_FLI.pep
ISCTWNKMESTVTFETDLNLKATELRLGLPGTEEIVEKPLPASARITNKRPLSETSEECASKGSSAPHVETEAAPPAKAKIVGWPPIRSYRKNSLQENDGAGIYVKVSMDGAPYLRKIDLKVYGGYTQLLKALENMFKLTIGEYSEKEGYKGSDYAPTYEDKDGDWMLVGDVPWDMFVTSCKRLRIMKGSEARGLGCAV

SEQ ID NO: 44778 - protein, 151 aa, Glycine max
  Clone ID: 701102430_FLI.pep
PSVETVSLQKMATAPAQIPTSFGHELRACLRCRLVKTYDQVLVPYYPLFFIIVFCLQFLFLFHSSESQAVRTAHSLRWKKITSVLLIALLPILMGSFQLWIQIGVGLPVGCALESLFLVFILLLSQRLFLKRCRLYVKTSVCSISLPNVCE

SEQ ID NO: 44779 - protein, 72 aa, Glycine max
  Clone ID: 701066172_FLI.pep
HSEEKGRGEGAKGVESQGATEGKLWRFWAQEKWKEIRALYHDCMHSILSPVITVATMITSLIIVAYFIANVY

SEQ ID NO: 44780 - protein, 147 aa, Glycine max
  Clone ID: 701070289_FLI.pep
GITSGLTTSVAIVLFFIIGIIVLLRLLGPVSKFKSGCILFQRCICIAEMNFWVLHFVLITNLNKSSNSLDKLNILYWRLTCGFCTPSHPLHEPSCKHLARIMVIPETEREQLRQRDQEETDLSIDNNPAILFVVVISHLLKSQRFGI

SEQ ID NO: 44781 - protein, 275 aa, Glycine max
  Clone ID: 701070435_FLI.pep
RGSFSGKDYQDPPPAPLIDAEELTKWSFYRALIAEFIATLLFLYITVLTVIGYKHQTDHADACGGVGILGIAWAFGGMIFILVYCTAGISGGHINPAVTFGLFLARKVSLIRAIMYMVAQCLGAICGVGLVKAFQKSYFNKYGGGANSLADGYSTGTGLGAEIIGTFVLVYTVFSATDPKRNARDSHVPVLAPLPIGFAVFMVHLATIPVTGTGINPARSLGAAVIYNQDKPWDDHWIFWVGPFIGAAIAAFYHQFILRAGAAKALGSFRSNPHN

SEQ ID NO: 44782 - protein, 269 aa, Glycine max
  Clone ID: 701103953_FLI.pep
ADLLRYHSTKSGDEMTSLKDYVTRMKEGQKDIYYITGESKKAVENSPFLERLKKKGYEVLFMVDAIDEYAVGQLKEYDGKKLVSATKEGLKLDDETEEEKKKKEEKKKSFDELCKVIKDILGDKVEKVVVSDRIVDSPCCLVTGEYGWSANMERIMKAQALRDSSMSGYMSSKKTMEINPDNGIMEELRKRAEADKNDKSVKDLVLLLFETALLTSGFSLDDPNTFASRIHRMLKLGLSIDEDDNGGDDVDMPPLEEDGAEESKMEEVD

SEQ ID NO: 44783 - protein, 200 aa, Glycine max
  Clone ID: 701106441_FLI.pep
VSSSLLAKLCITFFRCYRKRVSAVTEQFDNCMKKQVEAIARVLHLFQSYKEDNIPCKIDEGLYLGSIATAANKPALKDCNITHVLTVAGRIPPAHPHDFVYKIIDVVDKDDEDLKQYFNECFDFIDEAKRHDGGVLVHCFAGRSRSVTIVVAYLMKTRGMSFFEALQHVRSIRPAAGPNQGFICQLQDFEKSLQGANKLH

SEQ ID NO: 44784 - protein, 36 aa, Glycine max
  Clone ID: 701106589_FLI.pep
QVSRNKWLHILWQHRFILLVHEILRTEYTGRIISES

SEQ ID NO: 44785 - protein, 111 aa, Glycine max
  Clone ID: 701108631_FLI.pep
AVSRVDDYWHHWQDVFAGALIGMIIASFCYLQFFPPPYDVDGWGPHAYFQMLAESRNGAQPSTVNNEIHHVQSAELQAVSLYIPPQHDADTRGNSWDSSPMLGASQNVRTH

SEQ ID NO: 44786 - protein, 139 aa, Glycine max
  Clone ID: 701108654_FLI.pep
MNLIRAKSIEKGWDLKLGELARIWKGGCIIRAIFLDRIKKAYDRNPNLANLLVDPEFAKEIVDRQSAWRRVVCLAINYGTSTPGMAASLAYFDTYRRERVPANLVQAQRDYFGAHTYERIDMEGSFHTEWFKLAKQSRT

SEQ ID NO: 44787 - protein, 192 aa, Glycine max
  Clone ID: 701108934_FLI.pep
AIICGYIYQCPPFRLSYQGLGEPLCFAAFGPFATCAFYLLHASARVKNHFPLSGTVLSASILVGFTTSLILFCSHFHQVEGDKEVGKMSPLVRLGNKKGAEVVKGAVFMLYALLVAFGLIKALPLTCISLCTLTLPLGNLVVRFVEDNYKDKNKIFMAKYFCVRLHAMFGVALALGLVLARNTKFTSWPILS

SEQ ID NO: 44788 - protein, 116 aa, Glycine max
  Clone ID: 701119132_FLI.pep
AALLVGEDPTQSYALICGNCYMHNGLARKEDFPVITYYCPHCHALNKPKQSDEHISGLTSPNTGGTPNTDDGVTDAVKNARASAAESVITSSSPGSASSSEIEEVSERASVDEKID

SEQ ID NO: 44789 - protein, 170 aa, Glycine max
  Clone ID: 701119822_FLI.pep
CARMGNSLRCCLACVLPCGALDLIRIVHLNGYVEEITRPITAGEVLKANPNHVLSKPSSQGVVRRILILSPETELKRGSIYFLIPESSLPEKKRLAGKGRNVGGDNDIKKKPSTLKGNKGSSDDDYSSLSQGCLNKATHKGSKEKKSSCRDRRKGRIGIWRPHLESILED

SEQ ID NO: 44790 - protein, 124 aa, Glycine max
  Clone ID: 701121395_FLI.pep
LLGACSIHGDSEMGKYAANQLFLATPDSPAPYVLMANIYSSEGKWKERARSIKKMKEMGVAKEVGISWVEIEKKVNSFVVGDKMHPQADAIFWLLSRLLKHLKDEGYVPDKRCILYYLDQDKKD

SEQ ID NO: 44791 - protein, 165 aa, Glycine max
  Clone ID: 701121563_FLI.pep
VIFRHGGTLILYRGRNYNPKKRPVIPVMLWKPHEPVYPRLIKTTIDGLSIKETKEMRKRGLSVPALTKLAKNGYYAFLVPMVRDAFLSCELVRIDCEGLERKDYKKIGCKLRDMVPCILVTFENEQIVVWRGKDYKHPKDGYFLKDRESFDDDDDFCVGKEQQAM

SEQ ID NO: 44792 - protein, 208 aa, Glycine max
  Clone ID: 701122290_FLI.pep
KMKDLKKYREMWEHQNVGFYDGFREHKKKEDFKANVTRLELASVWDEIMEKLRSYQLPDEFEGNKEWVDLGSRFRQLMEPLDIANYYRHARHYEDGSSSYMLRGRPKRYRYTQKWLEHAERRPQEPSSTSCFWAEVEDLRYKTSYSNSSSFEDVKERVEQLEAQLQAWSEKGELANDVFLEGSTLVKWWKTLPLQHKQQSCIRNLINE

SEQ ID NO: 44793 - protein, 44 aa, Glycine max
  Clone ID: 701124318_FLI.pep
LKPFATQSLVLCIRDLEEPQAVVVHQAKKTRTILTMSSRLVGVC

SEQ ID NO: 44794 - protein, 218 aa, Glycine max
  Clone ID: 701124682_FLI.pep
ALVSLALFGAYVSRAGIKTVNVMTPKVFIGLIVGAMLPYWFSAMTMKSVGSAALKMVEEVRRQFNTIPGLLEGRAKPDYANCVKISTDASLKEMIPPGALVLLTPLIAGTFFGVETLAGVLAGSLISGVQVAISASNTGGAWDNAKKYIEAGTTPHAVSLGPKGSDAHKAAVIGDTVGDPLKDTSGPSLNILIKLMAVESLVFAPFFAAHGGLIFKLL

SEQ ID NO: 44795 - protein, 127 aa, Glycine max
  Clone ID: 701124917_FLI.pep
GGVSYKSDVYSYGMMILEMVGGRQSISIEASHSSETYFPDWIYKHVELGSNLAWDEGMTTDENEICKKMIIVGLWCIQTIPSDRPAMSKVVEMLEGSIDQLQIPPKPFIFSPTKTQVDICTTTSSSD

SEQ ID NO: 44796 - protein, 164 aa, Glycine max
  Clone ID: 701124978_FLI.pep
DHSHALLYPLLHRRSLQRSQQHRHPMANAASGMAVHDDCKLRFLELKTKRTHRFIVFKIEEQQKQVIVEKLGEPAQGYEDFTASLPADECRYAVYDFEYLTEGNVPKSRIFFIAWSPDTSRVRSKMIYASSKDRFKRELDGIQVELQATDPTEMGLDVFKSRAN

SEQ ID NO: 44797 - protein, 92 aa, Glycine max
  Clone ID: 701127327_FLI.pep
TQICCACLYNTNNNQRKLEMELHGQSFFSSTFFSSTLVSLTSLTFAFPCFGFMKQKQEQQGHWNKNFIIALLVARSQIPGQEGQCVQLLGPL

SEQ ID NO: 44798 - protein, 318 aa, Glycine max
  Clone ID: 701128973_FLI.pep
FFLIHTLPTLIHCCASGFLPEMEYMNQRPKYDCLLFDLDDTLYPLSTGLAKACGQNIKDYMAEKLGIEKSKIDDLSNLLYKNYGTTMAGLRAIGYDFDYDEYHSFVHGRLPYENLKPDPVLRNLLLSLPYRRLIFTNSDKVHAVKALSRLGLEDCFEGIICFETLNPIHKSTVSDDEDDIEFVGGSGTTNPTTKKDASSFQIFDIIGHFAQPNPHTVLPKTPIICKPSENAIELALKIANLNPQRTLFFEDSVRNTQAGKRVGLHTVLVGKSQRIKGADYALESIHNLREAVPELWEDDIKSEVAYPGKLAVETSVTA

SEQ ID NO: 44799 - protein, 255 aa, Glycine max
  Clone ID: 701129012_FLI.pep
KMEVLVGPAFTIDVPSSPPQHAGSDDRIFLNVSPEEGDGSNFRISGPPKFFAGGESESSSSIGTPDDSDNEEEEEVQSQLKIRTGLGSLDALEESLPIKRGLSSHFDGKSKSFSDLSQMSNLSNLKELQKQESPFNKRRRVLIASKWSRRSSFYSWSNPQSMPLLPVDEDQDYDYEEEEEEEDDEEKARKVPSASSSSSSSLAEEKKQEDQVQLRLNRVPESYAAHMRLRLGSFKARSFSLADLQEHDDEEEDDD

SEQ ID NO: 44800 - protein, 321 aa, Glycine max
  Clone ID: 701130349_FLI.pep
GTVYKGVLPESGDIVAVKRCNHSGQGKNEFLSELSIIGSLRHRNLVHLQGWCHEKGEILLVYDLMPNGSLDKALYESRMALSWPHRLKILLGVSSVLAYLHHECENQVIHRDIKTSNIMLDEGFNARLGDFGLARQTEHDKSPDATVAAGTMGYLAPEYVLTGRATEKTDVFSYGAVVLEVASGRRPIEKDDDAAAGNGKVGISSNLVEWVWSLHQDGKLLTAADPRLEGEFEEGEMRKVLLIGLACSHPDSMARPTMRCVVQMLLGEAEVPIVPRAKPSTSYSTSQLLMNLQDSDTDCKNGMITISTSSSENSSNGKDIV

SEQ ID NO: 44801 - protein, 215 aa, Glycine max
  Clone ID: 700869342_FLI.pep
QTELKQKDAHRQAVETGSDDAISLITSLCSWDPCKRPTASEALQHPFFQSCFYIPPSLRNRAVARTPPPAGTRGALDQQGVKRYSGALPTSKLSNNFSSMKLHPPLASGVQRKLDMVNQDGIKNEKPMRTTKPKYRQPGKDSPTSMNKGRSVRGVSETAEKLGNLSVSSRRQSMGQPRPPPPMKAGGNWISESGNFILGPAQQIPTGRTFARKVA

SEQ ID NO: 44802 - protein, 123 aa, Glycine max
  Clone ID: 700893437_FLI.pep
CALGFMDDHYPIRSAFSLLNQVIDEYQKNFGESWRNAQEDSTQPWPYLNEALAKFQDPAEADKLMKIQRELDETKIILHKTIDSVLARGEKLDSLVEKSSDLSAASQMFYKQAKKTNQCCTIL

SEQ ID NO: 44803 - protein, 213 aa, Glycine max
  Clone ID: 700890865_FLI.pep
YGDKMKFLIQPVEQWSLLRSFSAPALPSKIKRVFYMSSEGKNLLHEVFPSANAAVLEQLNNVDCIVYGMGSLFTSICPSLVLLGIGEIISSKSCLKVLVLNGTRDRETNGFSASCFVTAITDALNRTYGEPNNRLQNPPSHYINTLLVPRNGEIPVDVDCLAAQGIFDVIVVDSLRDPKVGIIYDPRSLIRSLVDLIDRYMKSQVNGLIDTRR

SEQ ID NO: 44804 - protein, 78 aa, Zea mays
  Clone ID: 701180970_FLI.pep
SKDLYANQHLPYLSPYKLRSDTQLVKKNATHIILFDSAHLTDSYDPPISILKLYHHTLQLLRAKILEIQQHVASDLHA

SEQ ID NO: 44805 - protein, 152 aa, Zea mays
  Clone ID: 701173336_FLI.pep
MRDRSFIDSIDYYKSTVYLFIYRGGGLNHLQTNFQANPANLANNCSTKLGTLICSALAQTVQPTGADCPDRAGPSALLNLVLNTFFFICQFKNATTTEEFVGRGSAHPNTVRDVMYTVQRGHELCSTTETSVLTISIKTFTLTDRPSGIVVT

SEQ ID NO: 44806 - protein, 257 aa, Glycine max
  Clone ID: 700944027_FLI.pep
FPRRCRSRHEGASCGVRSCDYTDPNRVRFQGYIMTKKKKQNGVVVGEGDGVGGVVDLESVIHNHALFFDKLIELIPAKFYLPTDDKEKPWFQGLNKAAKAKAKKETKENIKKSRRDRLDPDKPSATTLDLLKESFGKEKVDHSDVEQGAVAVAKPLVSGMMKRDDGSVTYEELQQRLRRRLEEFRAGRNTGNSDRKREERNARRGYKDNKRKRDGETEEGNPVRGELAAAEEKVKKDAAEASKDLVFGHVKLQNDEG

SEQ ID NO: 44807 - protein, 334 aa, Glycine max
  Clone ID: 701150068_FLI.pep
EIEEKINKIKWCQTANGALFLLSTNDKTIKFWKVTSHETSLMARCRRVYAHAHDYHINSISNNSDGETFISADDLRINLWNLEISNQSFNIVDVKPANMEDLTEVITSAEFHPTHCNTLAYSSSKGSIRLVDLRQSALCDSHAKLFEEQEAPGSRSFFTEIIASISDIKFGKDGRYILSRDYMTLKLWDINMDSGPVATFQVHEYLRPKLCDLYENDSIFDKFECCLSGDGLRVSTGSYSNLFRVFGCVPGSTEATTLEASKNPMRRQVPTPSRPSRSLGNSITRVVRRGAESAGVDANGNSFDFTTKLLHLAWHPTENSIACAAANSLYMYYA

SEQ ID NO: 44808 - protein, 337 aa, Glycine max
  Clone ID: 701150149_FLI.pep
THAVVEPFVIATNRHLSVVHPIYELLFPHYRDTMNINSLARKSLVNADGIIEKTFLWGRYSLEMSAVIYKDWVFTDQALPNDLVKRGVAVKDPSAPHGVRLLIEDYPYASDGLEIWDAIKSWVHEYVSFYHKSDAAIQQDPELQAWWKELVQVGHGDLKDKPWWQKMQTREELIEASATLVWIASALHAAVNFGQYPYGGLILNRPTISRRFMPEKGSAEYAALAKNPEKEFLKTITGKKETLIDLTIIEILSRHTSDEFYLGERDGGDYWTSDAGPLEAFKRFGKKLQEIEQKLIQKNKDETLRNRSGPAKMPYTLLYPSSEEGLTFRGIPNSISI

SEQ ID NO: 44809 - protein, 181 aa, Glycine max; identical to SEQ ID NO: 44160
  Clone ID: 701154244_FLI.pep

SEQ ID NO: 44810 - protein, 101 aa, Glycine max
  Clone ID: 701154606_FLI.pep
IAIIDYLHMRQWCVVVPAFYKSTSCSYILWSFSLLCIVCSCQIFTSCSELQSGTRQYVSRYFRTAVEVLSGDQVSCSYLGGCTIPAECIKLSHYRGWNRDS

SEQ ID NO: 44811 - protein, 239 aa, Glycine max
  Clone ID: 701154685_FLI.pep
GEWKRRHKKEQVEKFISPSLSHIPAMSLFGIGRNQRTFRPKKSTPSGSKGAQLRKHIDATLGSGNLREAVKLPPGEDLNEWLAVNTVDFFNQVNLLYGTLTEFCTPENCRTMSAGPKYEYRWADGVQIKKPIEVSAPKYVEYLMDWIEAQLDDESIFPQKLGSPFPPNFKEVVKTIFKRLFRVYAHIYHSHFQKIVSLKEEAHLNTCFKHFILFTCEFGLIDKKELAPLQELIETIIPY

SEQ ID NO: 44812 - protein, 134 aa, Glycine max
  Clone ID: 701155250_FLI.pep
EKADLIKVSDAELEFLTGSDKIDDESALSLWHPNLKLLLVTLGEHGSRYYTKSFKGSVDAFHVNTVDTTGAGDSFVGALLAKIVDDQSILEDEPRLREVLKFANACGAITTTQKGAIPALPKEEAALKLIKGGS

SEQ ID NO: 44813 - protein, 239 aa, Glycine max
  Clone ID: 701202720_FLI.pep
WKQQNHRTGIVLSLRMEKTAVKVRCQRIGCDAMFSEDDNPDGCCRYHDSGPIFHDGTKEWSCCKKRSHDFSLFLEIPGCKTGKHTTVKQVITPVKKNTMPSPTAVCSTNASSKDSCPRCQQGFFCSDHGSQSKPANIIGDKAANLAGDASVDNNSSVHAPKPKKIVDINEPQVCKNKGCGQTFKEKDNHDTACSYHPGPAVFHDRMRGWKCCDIHVKEFDEFMSIPPCAKGWHNADPES

SEQ ID NO: 44814 - protein, 100 aa, Glycine max
  Clone ID: 701206689_FLI.pep
IRLGSFMVFFSSTMSALQYLLLGMDHIETALILALICFVASLIGLLVVQRAIQSYGRPSLIVFSVSIVMTLSIVLMTSFGVIRTWKDYTSGRYMGFKLPC

SEQ ID NO: 44815 - protein, 184 aa, Glycine max
  Clone ID: 701206994_FLI.pep
KTLERYQKCSYGAVEVSKPGKELESSYREYLKLKARFESLQRTQRNLLGEDLGPLNTKDLEQLERQLDSSLKQVRSTKTQFMLDQLADLQNKEHMLVEANRSLTMKLEEINSRNQYRQTWEAGEQSMSYGTQNAHSQGFFQPLECNPTLQIGSDYRYNPEASEQQLAATTQAQQVNGFIPGWML

SEQ ID NO: 44816 - protein, 223 aa, Glycine max
  Clone ID: 701211541_FLI.pep
QFRRETQYNTKSPPHKANHLFFPFKMFAEENGLKGDPRLQAISQAIRVVPHFPKHGIMFQDITTLLLDHKAFKDTVDIFVDRYRDMHISVVAGIEARGFMFGPSIALGIGAKFVPLRKPRKLPGEVISEKYALEYGTDCLELHVGAAQPGERAIIIDDLVATGGTLSAGVKLLERVGAEVVECACVIGVPDVKGQCRSIGKPLYVLVEPRKADKCQAQADKCY

SEQ ID NO: 44817 - protein, 116 aa, Glycine max
  Clone ID: 701214047_FLI.pep
GRDNKDADVAVNGQETPMAKRPTYPTLPEEPKVERNLLCRVGVRLPDGRRVQRNFLRTDPIQLLWSFISAQLGEDETNSFRLTHAIPGASKILDYEINSTFQESGLANSMISVTWD

SEQ ID NO: 44818 - protein, 168 aa, Glycine max; identical to SEQ ID NO: 44533
  Clone ID: 701214368_FLI.pep

SEQ ID NO: 44819 - protein, 273 aa, Glycine max; identical to SEQ ID NO: 44461
  Clone ID: 701139414_FLI.pep

SEQ ID NO: 44820 - protein, 170 aa, Glycine max
  Clone ID: 701143201_FLI.pep
GRLGNNLPTPQEVVALYNQANIRRMRIYGPAPLFDPEELTQWSFYRALIAEFIATPVDGVPSPDDIAGPEPFKFQFDRLGVRVPTIIISPWIEAGKVLHEPSGPFPTSQYEHSSIPATVKKIFNLPQFLTKRDAWAGTLEDLLSLSTPRTDCPGHISIFSFVFPFYLLNR

SEQ ID NO: 44821 - protein, 87 aa, Glycine max
  Clone ID: 701147943_FLI.pep
TRWLELVKILVSLPIFILHGEADTVTDPSVSKALYENASCSDKKLQLYKDAYHALLEGEPDEIITQVFGDIISWLDEHSLTHNQSSS

SEQ ID NO: 44822 - protein, 387 aa, Glycine max
  Clone ID: 701152205_FLI.pep
NSDTFAFYFFLISYVSWILTQRNTTQHRKIMSSKGVGEDCPGWAARDASGVLSPYKFSRRTPGNEDVLIKITHCGVCFADVVWTRNKHGDSKYPVVPGHEIAGIVTKVGSNVHRFKVGDHVGVGTYVNSCRDCEHCNDREEVHCTKGSVFTFNGVDFDGTITKGGYSSYIVVHERYCFTIPKSYALASAAPLLCAGITVYSPMVRHKMNQPGESLGVIGLGGLGHMAVKFGKAFGLSVTVFSTSISKKEEALSLLGADKFVVSSNQEEMTALAKSLDFIIDTASGDHPFDPYMSLLKTYGVFVLVGFPSQVKFNPASLNIGSKTVAGSVTGGTKDIQEMIDFCAANEIHPNIEVIPIEYANEALERLINRDVKYRFVIDIENSLKEK

SEQ ID NO: 44823 - protein, 147 aa, Glycine max
  Clone ID: 701152429_FLI.pep
HVMIKYYISQRHSLMLNLAKTRGGAKSKFSLVFLLHLLLPPSLLVIQQHLGHLLHQLGSVCALLSGYPITFVSFPPGLHLLPFRIIRPIFPSKEDFLANSSAMPSTDAQRLPCPQLPVSPHTLSKLILIFRQLLTPRILIFCYCLSH

SEQ ID NO: 44824 - protein, 143 aa, Glycine max
  Clone ID: 701208328_FLI.pep
LQFHKMKKVFVTFLAVLVVFVLTAKASEARLPVKTNSASNDYNCSQVYNLLVSCVDYMIGGDDGAPSGVCCQSVNAVKASAPTQIQRMAACKCFFDVATRLPSLLENKANSLPKLCGVDLGFIMSKQNTNCNNVPVSSRQGRD

SEQ ID NO: 44825 - protein, 241 aa, Glycine max
  Clone ID: 701209467_FLI.pep
LVSDRYLEMGRGKIEIKLIENPTNRQVTYSKRRNGIFKKAHELSVLCDAKVSLIMFSKNNKMHEYISPGLTTKRIIDQYQKTLGDIDLWRSHYEKMLENLKKLIDINNKLRRQIRHRIGEGLDMDDMSFQQLRTLEEDLVSSIGKIRERKFHVIKTRTDTCRKKVKSLEQMNRDLLFELEKCAIHPQFILHDEGDEESAVALANGASTLYAFCHQHHSHLNLPSHHSHGEEPFKTDDLRLA

SEQ ID NO: 44826 - protein, 123 aa, Glycine max
  Clone ID: 701209511_FLI.pep
KAMDLGTYEVPEGVDILGRYDAEFAKILTKDALKFVAELQREFRSDIKHALEKLPGHKKTEEATATTPPPPPPVASLEHGEGAHHEGEAKEKKGILEKIKEKLPGYHSKTEEEKEKEKESGAH

SEQ ID NO: 44827 - protein, 251 aa, Glycine max
  Clone ID: 701212768_FLI.pep
EREGEERERVMGRGRVELKRIENKINRQVTFAKRRNGLLKKAYELSVLCDAEVALIIFSNRGKQYEFCSGSSMLKTLERYQKCNYGAPEDNVATKEALELSSQQEYLRLKARYEALQRSQRNLMGEDLGPLSSKELESLERQLDSSLKQIRSIRTQFMLDQLSDLQRKEHFLGESNRDLRQRLEEFQINPLQLNPSAEDMGYGRHPGQPQGHALFQPLECEPTLQIGYHPDPVSVVTEGPSMNNYMAGWLP

SEQ ID NO: 44828 - protein, 244 aa, Glycine max
  Clone ID: 701136258_FLI.pep
GGFPRKEGMERKDVMTKNVSIYKSQASALEKHAAANCKVLVVANPANTNALILKEFAPSIPEKNISCLTRLDHNRALGQISERLTVQVSDVKNVIIWGNHSSTQYPDVNHATVATSAGEKPVRELIADDAWLNGEFITTVQQRGAAIIKARKLSSALSAASAACDHIRDWVLGTPQGTWVSMGVYSDGSYNVPAGLIYSFPVTCANGEWAIVQGLSIDEFSRKKLDLTAEELSEEKALAYSCLN

SEQ ID NO: 44829 - protein, 159 aa, Glycine max
  Clone ID: 701141515_FLI.pep
TYSYIYYILYTICTKDKQKWTQHHQQRPEENKLYICIFSHPYMEEIVVGLICHTSKGEEELGLFWPVFSYASDVDLLRKRKDSLAPEKGDTGGVEPAGEAGADPLGLWLPPGGFTIMILRVTLTASSGKSSPYDFTLPLSDSESTKTTQRKRLHLRINI

SEQ ID NO: 44830 - protein, 109 aa, Glycine max
  Clone ID: 701142029_FLI.pep
PLFSNTKWLINNTSRKMIDLSSSIKALLINFLKLTMFGAEASATEATAVSSSETFGSANRATVGVTQTWPLETVALRLTSSCFCHHCWPHHLCSSHKPTQVINNLTLPS

SEQ ID NO: 44831 - protein, 264 aa, Glycine max
  Clone ID: 701142119_FLI.pep
SLSVLFTLGLARESHARDEDFWHAVWPNTPIPSSLRDLLKPGPASVEIDDHPMQIEETQYPKTFFYKEDLHPGKTMKVQFSKPPFQQPWGVGTWLKEIKDTTKEGYSFEELCIKKEAIEGEEKFCAKSLGTVIGFAISKLGKNIQVLSSSFVNKQDQYTVEGVQNLGDKAVMCHRLNFRTAVFYCHEVRETTAFMVPLVAGDGTKTQALAICHSNTSGMNHQMLHQLMGVDPGTNPVCHFLGSKAILWVPNLSVDTAYQTNIVA

SEQ ID NO: 44832 - protein, 87 aa, Glycine max
  Clone ID: 701142523_FLI.pep
SCQFCGSCASRSFHIQEGGSEGRDTRHLCWAHTSGPRIEKVCPNLKLLLFTLIFPYNLVLNIIGFIHAGGIRVTHGRVILLLQLLGL

SEQ ID NO: 44833 - protein, 395 aa, Glycine max; identical to SEQ ID NO: 44212
  Clone ID: 701150545_FLI.pep

SEQ ID NO: 44834 - protein, 179 aa, Glycine max
  Clone ID: 701151347_FLI.pep
VFRVYTEQRHLPPAVAMVLKTELCRFSGAKIYPGKGIRFVRGDSQVFLFANSKCKRYFHNRLKPSKLTWTAMYRKQHKKDIAQEAVKKRRRAAKKPYSRSIVGATLEVIQKKRAEKPEVRDAAREAALREIKERIKKTKDEKKAKKAEVTAKSQKAGGKGISKGAMPKGPKLGGGGGKR

SEQ ID NO: 44835 - protein, 171 aa, Glycine max
  Clone ID: 701212220_FLI.pep
LISSITPPRTRSSLPLVATMSTPARKRLMRDFKRLQQDPPAGISGAPQDNNIMLWNAVIFGPDDTPWDGGTFKLTLQFTEDYPNKPPTVRFVSRMFHPNIYADGSICLDILQNQWSPIYDVAAILTSIQSLLCDPNPNSPANSEAARMFSENKREYNRRVREIVEQSWTAD

SEQ ID NO: 44836 - protein, 257 aa, Glycine max
  Clone ID: 701140726_FLI.pep
LGLARESHARDEDFWHAVWPNTPIPSSLRDLLKPGPASVEIDDHPMQIEETQYPKTFFYKEDLHPGKTMKVQFSKPPFQQPWGVGTWLKEIKDTTKEGYSFEELCIKKEAIEGEEKFCAKSLGTVIGFAISKLGKNIQVLSSSFVNKQDQYTVEGVQNLGDKAVMCHRLNFRTAVFYCHEVRETTAFMVPLVAGDGTKTQALAICHSNTSGMNHQMLHQLMGVDPGTNPVCHFLGSKAILWVPNLSVDTAYQTNIVA

SEQ ID NO: 44837 - protein, 372 aa, Glycine max; identical to SEQ ID NO: 43852
  Clone ID: 701141076_FLI.pep

SEQ ID NO: 44838 - protein, 65 aa, Glycine max
  Clone ID: 701144595_FLI.pep
ISHFIFLFFLSIIFIVSLPPLCALVLQALQYVQENPDEVCPAGWKPGEKSMKPDPKLSKDYFAAV

SEQ ID NO: 44839 - protein, 287 aa, Glycine max
  Clone ID: 701145388_FLI.pep
TKGKEEMQEPSLGLMGEVSGDHHRQLKAEITTHPLYEQLLAAHVACLRVATPIDQLPLIDAQLSQSHHLLRSYVSHNTHSLSPHHRQELDNFLAQYLIVLCTFKEQLQQHVRVHAVEAVMACRDIENALQALTGVSLGEGTGATMSDDEDDLQMDISLDQSSAEGHDMMGFGPLLPTESERSLMERVRQELKIELRQGFKSRIEDVREEILRKRRAGKLPGDTTSVLKNWWQQHAKWPYPTEDDKAKLVEETGLQLKQINNWFINQRKRNWHSNSQSVTSLKSKRKR

SEQ ID NO: 44840 - protein, 259 aa, Glycine max
  Clone ID: 701145683_FLI.pep
GAAGSAQDCKMKFNIANPTTGCQKKLEIDDDLKLRAFWDKRISQEVLGDALGEEFKGYVFKITGGCDKQGFPMKQGVLTPGRVRLLLHRGTPCFRGYGRRNGERRRKSVRGCIVSPDLSVLNLVIVKKGESDLPGLTDVEKPRMRGPKRASKIRKLFNLSKEDDVRKYVNTYRRTFTTKAGKKVSKAPKIQRLVTPLTLQRKRARIADKKKRIAKAKSEAAEYQKLLASRLKEQRDRRSESLAKRRSKLSSAAKPTVTA

SEQ ID NO: 44841 - protein, 79 aa, Glycine max
  Clone ID: 701153390_FLI.pep
LVPAPCFSCKKWQAHQNLQKLKRMQNFPVHLCSSFWKFFEITGATCVGSFCHWAYNLDCRSYQYQNSPSESPLPCFLPD

SEQ ID NO: 44842 - protein, 274 aa, Glycine max
  Clone ID: 701153467_FLI.pep
KLEKLEVVKKMKVIVFFVAIIILGAEWQCNGSEHEHEHGHSYQIFPLRMKTGPGGHYIPEVSCKSWRLGVEAHNVIDWRTIPQDCEGYIGNYMLGHQYRSDSKTVCREAYFYAKTINITAKTTWVFDVDETTLSNLPYFADHGFGVELYNATAFNEWVDLGEAPALPESLKLYNKLLSLGIKIVFITGRPLYQQAVTATNLKLAGYYKWEKLITKDTDKYNGKTAVTYKSTERQKLEENGYNIIGNIGDQWSDILGTNTGLRTFKLPDPMYYIS

SEQ ID NO: 44843 - protein, 120 aa, Glycine max
  Clone ID: 701153540_FLI.pep
PSYVLDRHRKRINSNSDGLEFLNLLDVQPWFLQHPSFINLFRHTIICLQSDIVQGARNHLFLCTNHPHKLQNCILFFVVFINSKASEIFDIDAVLCSGDVGKATQCCHLFLFFLLIFFLI

SEQ ID NO: 44844 - protein, 476 aa, Zea mays
  Clone ID: 700612792_FLI.pep
DCSCIPLHDNTALGVLVTEHGLHIPIAGRVASAARVGVVVVVVRVVVASVRADLRGGVVHHLRLLMLLGLLVHHHHVAVQTPQIAHHRCRRRRVVMMVPLHARHEVVALLLLLLMLEMLLLETSSVAGSSVGGRVVEACSVALEPRRSSTGGGSQAMAQAQHAAHGTSVPLGAVSHLGVCRRRRGHVDRSSVLLVVLDSSSAAAAHLGICCCHVDHVYVLLVLVVVVVVVLVMIVGSTTSVTLLAISVAVVTVDSSVVPVLVLVVAVEPELAHLVPEEAELLLVVVVKLLLVVVVIQVIVVRAELRELVLVAVLVLERLEALHEAPSPSSSSLLPLVLLAAVAVLVVPILAEIGTLLLLLLVVLVLVLRLLLFLLLAIIALVALVAAALGLRPQLRVLAAPGELPDQGLRVHIARHRDLVVVHINGHRVHAFDLLKKLLDLVLAPVAVYVHLQRMVLDLDQLELLVFGHSVRGALL

SEQ ID NO: 44845 - protein, 181 aa, Zea mays
  Clone ID: 700612942_FLI.pep
QNRYTKGYYYTRMPSSPIRRHRFRREEILHSRQHRVVRWIIWMVLGWDLQNSRDWLVVAIHQKSYHVGNILTDEHNSNILPCSKFFERVLDLFNCRLVVDEEVIGFLAQINIANAGHQEASDGVLVGDDCDEGGVVSGDVSPPRHGLWLWMLLPCLLVFAVLHLQRIESDGAQRKRRSDRF

SEQ ID NO: 44846 - protein, 119 aa, Zea mays
  Clone ID: 700612989_FLI.pep
FSLLGIARETCGHPHSNFEEHWSLRFQLLLKTRPLRERPPTVHCFKKRISTQGRDKGLKAGPSRNMTLHDEALFCATTGLNPGCLLVASPLGIPLLSVCCQFLISWSLHLSTSSFGVLN

SEQ ID NO: 44847 - protein, 103 aa, Zea mays
  Clone ID: 700613363_FLI.pep
HHLSSIFSKTPGPKGGTELKTEETKPCFPSYSSASASPLFLLPFLEYLRFLRNLGSIPLVEVWRWRLGFLMPFLCALNDWLCAVWFFDLAISSGCLPTKCESE

SEQ ID NO: 44848 - protein, 113 aa, Zea mays
  Clone ID: 700613548_FLI.pep
IPNYLYGVTNVNKLKNPTRNFTATRRQKKKKKVTPLQASLVGASRPRAACHPVGDADLAGPLPVPPCAGRLARGAVVAGAGRRRVQPVLAGRFAHVAPARVLGEEAPRGGGRR

SEQ ID NO: 44849 - protein, 233 aa, Zea mays
  Clone ID: 700613563_FLI.pep
LAQKMMIYKCNIAGKPVVTATQMLESMIKSPRPTRAEATDVANAVLDGTDCVMLSGESAAGAYPEVAVKIMARICIEAESSLDHEAVFKAMIRSAPLPMSPLESLASSAVRTANKAKAALIVVLTRGGTTAKLVAKYRPRVPILSVVVPVLTTDSFDWTISSEGPARHSLIYRGLIPLLAEGSAKATDSESTEVILEAALKSAVQKQLCKPGDAIVALHRIGVASVIKICIVK

SEQ ID NO: 44850 - protein, 147 aa, Zea mays
  Clone ID: 700613570_FLI.pep
CCRSWGSLKSRSSGTSVGKHHNQDSASKVASQERRNPQGNDASESSRPANLLDKVWTLFRKRSTLDEPRGINSCRSPPLSSSSPTYVSCSRAASGASSSSAQQYLLASRRRCGRTCGPCAWYASPRGEDRSSSPRRRGAPPCGGGRA

SEQ ID NO: 44851 - protein, 217 aa, Zea mays
  Clone ID: 700614050_FLI.pep
GGPRPPPEMSYAYLFKYIIIGDTGVGKSCLLLQFTDKRFQPVHDLTIGVEFGARMINIDNKPIKLQIWDTAGQESFRSITRSYYRGAAGALLVYDITRRETFNHLASWLEDARQHANANMTIMLVGNKCDLSHRRAVSYEEGEQFAKEHGLIFMEASAKTAQNVEEAFVKTAGAIYKKIQDGVFDVSNESYGIKVGYVVPGQSGGAGSSSQGGGCCS

SEQ ID NO: 44852 - protein, 252 aa, Zea mays
  Clone ID: 700614469_FLI.pep
IGDLISSESFIVLHNQQGRPLAGNMKKIFGAKKNKDPPPTIQDATDRITKRGDTVDEKIKKLDAELARYKEQIKKTRPGPAQEAVKARAMRVLKQRRMYEGQRDMLYNQTYNLDQVAFAAEGLKDAQQTMTAMKAANKELKGMMKTVKLEDIDSMQDEMMDLMDVSTEIQETLGRSYNVPDDIDEEELMGELDALEADMDFESESVPSYLQPDQEPELSLPAAPTGHAAVPANQQQEDELGLPTVPQASIRT

SEQ ID NO: 44853 - protein, 384 aa, Zea mays
  Clone ID: 700614530_FLI.pep
PTSSSVEMADGEDIQPLVCDNGTGMVKAGFAGDDAPRAVFPSIVGRPRHTGVMVGMGQKDAYVGDEAQSKRGILTLKYPIEHGIVSNWDDMEKIWHHTFYNELRVAPEEHPVLLTEAPLNPKANREKMTQIMFETFNVPAMYVAIQAVLSLYASGRTTGIVLDSGDGVSHTVPIYEGYALPHAILRLDLAGRDLTDSLMKILTERGYSFTTSAEREIVRDIKEKLAYIALDYEQELETAKNSSSVEKSYELPDGQVITIGAERFRCPEVLFQPSMIGMEAAGIHETTYNSIMKCDVDIRKDLYGNIVLSGGSTMFPGIADRMSKEITSLAPSSMKIKVVAPPERKYSVWIGGSILASLSTFQQMWISKEEYDESGPAIVHRKCF

SEQ ID NO: 44854 - protein, 240 aa, Zea mays
  Clone ID: 700614656_FLI.pep
HPTAPMGDSQYSFSLTTFSPSGKLVQIEHALTAVGSGQTSLGIKAANGVVIATEKKLPSILVDETSVQKIQALTPNIGVVYSGMGPDFRVLVRKSRKQAQQYYRLYKEHIPVTQLVRETAAVMQEFTQSGGVRPFGVSLLIAGYDDNGPQLYQVDPSGSYFSWKASAMGKNVSNAKTFLEKRYTEDMELDDAIHTAILTLKEGYEGQISSNNIEIGIIRADREFKVLSPAEIKDFLEEVE

SEQ ID NO: 44855 - protein, 59 aa, Zea mays
  Clone ID: 700615014_FLI.pep
LLQLRYGEGRICRPLCEVHPGFGADRSSALLSGHEELHPEAAGRQEEGPQGEDELGLLR

SEQ ID NO: 44856 - protein, 186 aa, Zea mays
  Clone ID: 700615075_FLI.pep
RARRKMGLAFGKLFSRLFAKKEMRILMVGLDAAGKTTILYKLKLGEIVTTIPTIGFNVETVEYKNISFTVWDVGGQDKIRPLWRHYFQNTQGLIFVVDSNDRDRVVEARDELHRMLNEDELRDAVLLVFANKQDLPNAMNAAEITDKLGLHSLRQRHWYIQSTCATTGEGLYEGLDWLSSNIASKA

SEQ ID NO: 44857 - protein, 256 aa, Zea mays
  Clone ID: 700615347_FLI.pep
TRSCGGQDQSTMATRIQFENNCEIGVFSKLTNAYCLVAIGGSENFYSAFEAELADAIPVVKTSIGGTRIIGRLCVGNKNGLLLPHTTTDQELQHLRNCLPDQVVVQRIDERLSALGNCIACNDHVALTHPDLDKETEEFIADVLGVEVFRQTIAGNILVGSYCAFSNRGGLVHPHTSVEDLDELSTLLQVPLVAGTVNRGSEVIAAGMTVNDWTAFCGSDTTATELSVIESVFKLREGQPTAIVEDMRKSLIDSYV

SEQ ID NO: 44858 - protein, 92 aa, Zea mays
  Clone ID: 700615370_FLI.pep
NQAMGLQEEFEEHAEKAKTLPENTSNENKLILYGLYKQATVGDVNTDRPGIFYQKDRAKWDAWKAVEGKSKDEAMNDYITKVKQLQEEAAAS

SEQ ID NO: 44859 - protein, 329 aa, Zea mays
  Clone ID: 700615986_FLI.pep
RNLLLEKAKATVCEKLHELNITPSSRAADRRGSEGKLYPCDNNIKVNGVLSDKPGKGVKLCNSRSMEIQVPATDDKNPEQRRVPVSIDVPDPDFHDFDKDRTEKAFDTDQVWATYDCEDGMPRLYVMVQKVLSTRPFRIRMSFLNSKSNIELAPINWVASGFQKTCGDFRVGRYQVSETVNIFSHRVRWTKGPRGIIRIVPQKGDTWALYRNWSPDWNELTPDDVIYKYEIVEVADDFTEERGLTVIPLLKVAGFKAVFHRHVDPEEVRRIPKEELFRFSHRVPSRLLTGEEGSNAPKGCHELDPAATPVDLLKVITEHKEDAVAQSPK

SEQ ID NO: 44860 - protein, 363 aa, Zea mays; identical to SEQ ID NO: 42242
  Clone ID: 700616601_FLI.pep

SEQ ID NO: 44861 - protein, 158 aa, Zea mays
  Clone ID: 700616676_FLI.pep
QGHSGEPLGYHVWPRQGREGSGQGRRQAPPQGAARQHPGHHQAGDSQVGEEGRRQAHLRAHLRGDPRRAQDLPRERHPRRRHLHRARPPQDCHRHGRCLRAQASGPHPLRFRRLGRPLSRWRITWWRWRSCCVLGLVLSVLSLSVLFSVVVVLHRSSF

SEQ ID NO: 44862 - protein, 146 aa, Zea mays
  Clone ID: 700616705_FLI.pep
PSYVAVQKHESEVQQGSLIAFTSVFMLRLYQLKNKDSLRLGNWLQCLDHDNTVSPDNHHSNICLVISIDLHNVVDHQIHELVESPKCANNNTVCIQLNLKLLVHVLLEIRRLPRAAHGGGYLASNAREAKGSRSADQLLKTLARWK

SEQ ID NO: 44863 - protein, 70 aa, Zea mays
  Clone ID: 700617289_FLI.pep
PKRGSQRALRLQRWRPRRRGPVAMSPLSCCALVRLHNLCSGSRKKHLTTGRTRPNRSRTQLKATAGPRPQ

SEQ ID NO: 44864 - protein, 314 aa, Zea mays
  Clone ID: 700617492_FLI.pep
YADTLHQRQATATMVKLATARECRAYSLGAGAGSGTGLRNRWEYINAGVYIFAAVLLVGGFLAQLLPWGGPSSPGLVVAAIGLAGLLAVNTHDLLAHAAGVDYRLGMVVGLDAQMGLVELGVPAVQIVGTALMLVAVVFFVIQMERGYRHSLAMHGLNLLIAGPALWCLGSVQNICQFYERASGHVQLLQKSVQIPLLLGSTLFLIAGIVNRHDRRSRHSGFVLLGRNWAWFCLFGSLLFLAGGLLNLLKVFKTQQMGGRGLEKLRGGSQERLALEREGKVPLILEHGHGGRRGPAIPPPPPGSYKDALVSSAS

SEQ ID NO: 44865 - protein, 291 aa, Zea mays
  Clone ID: 700617521_FLI.pep
PRRSTHEAGGAMAMKLDMSALETNFANLTASAGDDTYFSAEAPDVPSMVLPICDDFDGFQAATKDMVKNKKGTTTLAFIFDKGVIVAADSRASMGGYISSQTVRKIIEINPYMLGTMAGGAADCQFWHRNLGTKCRLHELSNKRRISIAGASKLLANILYSYRGMGLSIGTMIAGWDEKGPGLYYVDSEGARLVGNRFSVGSGSLYAYGILDDGYRFSMSVEEAAELARRAIYGATFRDAASGGCVSVYHVGPDGWTKLSGDDVGELHYHYYPVQKTPVEQEMADAPTASA

SEQ ID NO: 44866 - protein, 120 aa, Zea mays
  Clone ID: 700617546_FLI.pep
LLGKAFQSGRQKKHGEENVGQHWHEKTMQVHYFFLPVTPATTSFRRGGGTCSAVCHESRIGRTTAGRKRPNPAMRQEAATTGSLTTKILSFSITAMAAASASTTPLRLRVTLARCRRWRD

SEQ ID NO: 44867 - protein, 107 aa, Zea mays
  Clone ID: 700617885_FLI.pep
HPAAALAPATSRICPVALAVVPPTVTMQNEEGKTVDLYVPRKCSATNRIITAKDHASVQINIGHLDANGLYDGHFTTFALSGFVRAQGDADSSLDRLWQKKKADIKQ

SEQ ID NO: 44868 - protein, 369 aa, Zea mays
  Clone ID: 700617991_FLI.pep
STGNFLTLEDAIKKYSSDATRFALADAGDGMDDANFVTETANSAVMRLTKEISWMEEVTAAEPKLRTGLPTTYADRVFSNEMNIAIKETEKSYNAFMFRDALKSGFYDLQLARDEYRLSCGAAGMNRDLLWRFMDVQTRLITPICPHYAEHVWQKIMKKEGFAIKAGWPVADTPDPTLRIANKYLQDSIVLMRKLLQKQESGSKKPKKGAAPAPPSEEKKMSIGLIYVNEHYSGWKEQCLRVLQSKFDSQSRSFSPDQEIAEALKECPIGQEMNLKQVQKLCMPFIKLKKDEAKEVGPQALDLKLPFGEMDVLRENLELIKRQLGLEQVEVLSASDEAARAKAGEHASLLEKNPPSPGDPIAIFLSKQS

SEQ ID NO: 44869 - protein, 101 aa, Zea mays
  Clone ID: 700618088_FLI.pep
YCETVVLSEHDMLAHLTCLGLLQCVVVEQLLNEVNMGHEHSPAAVAEQFQSIQSIPFRVVGLEEVEVEVPLVPNHLAAGEAAHRYDHLRRRRRRWNPDRLV

SEQ ID NO: 44870 - protein, 216 aa, Zea mays
  Clone ID: 700618154_FLI.pep
SYRGDRDSTAAYVAAATAFKGHMPPRRQWFKEVARAVRSSVVLLSRPLRLVDAVLCCILDVAGLGRQPRLGVVQLVGARRVLARQVLVHPGEHGQRSDAEAAGGDEPGRHERQRDGGRHQHRAEDHQHGGGHRERDHGAGQDQPGQHQHRPAEGRGRRGLERRHHGALLLLLLRLAVHAAPALEVAVAPATSRRTPVVISHGRLAERARYPTCARC

SEQ ID NO: 44871 - protein, 138 aa, Zea mays
  Clone ID: 700618155_FLI.pep
GGTSPLRSTKGLGSAAMAARLAQLRAQAVQAAEFASKHGGSYYKELMEKNKQYVVQPPTIEKCQELSKQLFYTRLASLPGRYESFWKELDGVKQVWKNRKDLKVEDLGIATLFGVELYAWFCVGEIVGRGFTLTGYKV

SEQ ID NO: 44872 - protein, 183 aa, Zea mays
  Clone ID: 700618222_FLI.pep
RKMGLAFGKLFSRLFAKKEMRILMVGLDAAGKTTILYKLKLGEIVTTIPTIGFNVETVEYKNISFTVWDVGGQDKIRPLWRHYFQNTQGLIFVVDSNDRDRVVEARDELHRMLNEDELRDAVLLVFANKQDLPNAMNAAEITDKLGLHSLRQRHWYIQSTCATTGEGLYEGLDWLSSNIASKA

SEQ ID NO: 44873 - protein, 153 aa, Zea mays
  Clone ID: 700618619_FLI.pep
TMVKAVAVLGSSDGVKGTIFFTQEGDGPTTVTGSVSGLKPGLHGFHVHALGDTTNGCMSTGPHYNPASKEHGAPEDENRHAGDLGNVTAGADGVANINVTDSQIPLTGPNSIIGRAVVVHADPDDLGKGGHELSKSTGNAGGRVACGIIGLQG

SEQ ID NO: 44874 - protein, 241 aa, Zea mays
  Clone ID: 700578759_FLI.pep
AAASNFRCARAKHPELAREEEEEAMAGGGDKVDYVFKVVLIGDSAVGKSQILARFARNEFSLDSKATIGVEFQTRTLVIEHKSVKAQIWDTAGQERYRAVTSAYYRGALGALLVYDITKRQSFDHIPRWLEELRGHADKNIVIMLVGNKSDLEDERAVSTEDAKEFAEKENLFFLETSALQATNVENAFQTVLTEIFKIHSKKNMAADPRANGAAPSLAGKKVIVPGPAQEIPKSKCCSSM

SEQ ID NO: 44875 - protein, 118 aa, Zea mays
  Clone ID: 700578906_FLI.pep
FQISEFQSLHPQQRGSKSLFHDSSSKTRWQAYPQKSMCGGVNLSLAVLHQGPKQDDTQSWQNLSSSSSSGSRRHRGQGHQVESCLPRVPSSHRRRSKCGSSCRPAQPSRQQQQSRRRR

SEQ ID NO: 44876 - protein, 171 aa, Zea mays
  Clone ID: 700578908_FLI.pep
AGLASSSSSRAGGSPEITETMVKAVAVLAGTDVKGTIFFSQEGDGPTTVTGSISGLKPGLHGFHVHALGDTTNGCMSTGPHFNPVGKEHGAPEDEDRHAGDLGNVTAGEDGVVNVNITDSQIPLAGPHSIIGRAVVVHADPDDLGKGGHELSKSTGNAGGRVACGIIGLQG

SEQ ID NO: 44877 - protein, 210 aa, Zea mays
  Clone ID: 700579015_FLI.pep
ITLHHDCQVSISTRQQEPLGRRYTHLSISSPRHTTRSWLVLVTRAYIAASHVVLRRPARGVVDRGGVHAVAAAVPGDPGAADGDAAAGRLVVLHVRRLHRGGVAAAELGAAGRAHRARPPHPLDLLRRLLRGLPGLLPDGEPLEGPLRAGPRRGQLALGRRLARPPPPRARQLPLHHPRHVGPVNGCSDCSPAPVRFHARTYALVLLVAA

SEQ ID NO: 44878 - protein, 173 aa, Zea mays
  Clone ID: 700579377_FLI.pep
SVMEHKEAGCQQPEGPILCINNCGFFGSAATMNMCSKCHKEMITKQEQAQLAASSIDSIVNGGDGGKGPVIAASVNAAVPQVEQKTIVVQPMLVAETSEAAAVIPKAKEGPDRCAACRKRVGLTGFSCRCGNMYCSVHRYSDKHDCQFDYRTAARDAIAKANPVVRAEKLDKI

SEQ ID NO: 44879 - protein, 89 aa, Zea mays
  Clone ID: 700579513_FLI.pep
SCHIDWRRTKLQIRCPKDHITNSQTLSDSSSRSPLSTTTRAQPSNPRSCTHTDAAKVTSATLIPSGSPCMSLRTSSLSTASSSAGVAAS

SEQ ID NO: 44880 - protein, 250 aa, Zea mays
  Clone ID: 700580934_FLI.pep
CGPGDVEKVRLTVHRRHSGVLRGDRGLHRNAFGVEHVLRLLGLLPQLRQRFPDVVDALQRVVRAFHPLRFAHQHRVEANLLPGLDVAYAVVEEDRLVRVDVGDPERLLHGVHVGLAQHGGLGQLVGGAGAGEVVGDVEDLGLLVSLRRAGRVQGLEADDPLEAVLQAQPLEGSHGVDHVTVGEYEFADAQVLENVLENGVRLDVVVRQPSMDEGVVLIVIEAVADGPESSHRGAVVLVQQIAQVLDLGLV

SEQ ID NO: 44881 - protein, 153 aa, Zea mays
  Clone ID: 700580977_FLI.pep
TMVKAVAVLGSSDGVKGTIFFTQEGDGPTAVTGSVSGLKPGLHGFHVHALGDTTNGCMSTGPHYNPASKEHGAPEDENRHAGDLGNVTAGADGVANINVTDSQIPLTGPNSIIGRAVVVHADPDDLGKGGHELSKSTGNAGGRVACGIIGLQG

SEQ ID NO: 44882 - protein, 130 aa, Zea mays
  Clone ID: 700581034_FLI.pep
QVKEVEGELERRGRCWRRRIRCCGTRWPPSPGLPLWGSAPTARTCSAPRTPCTKRFGTRRPCTILSTPRRCSGRPSPSAPTFSEGSSLLESCSSLERATPWLILKTGSFLHRHHWGALRLLLLGPASSSD

SEQ ID NO: 44883 - protein, 179 aa, Zea mays
  Clone ID: 700582092_FLI.pep
QHSSSQSHPLSSLRFASSAPIPPPPPPPSSVPFRRTSSPEMANARSGVAVNDECMLKFGELQSKRLHRFITFKMDDKFKEIVVDQVGDRATSYDDFTNSLPENDCRYAIYDFDFVTAEDVQKSRIFYILWSPSSAKVKSKMLYASSNQKFKSGLNGIQVELQATDASEISLDEIKDRAR

SEQ ID NO: 44884 - protein, 117 aa, Zea mays
  Clone ID: 700582449_FLI.pep
LIQVCIPMPDRHSSNTFFSLFQTRIAQAFLNRFVPQPWLFRFTIKIHDPKYVDHKLCGSEVGHTSLKHSFSPLNLLNQPTLPPCTFHCLAALITQFLLVTDHYPFTKVILHGYLYLF

SEQ ID NO: 44885 - protein, 107 aa, Zea mays
  Clone ID: 700583066_FLI.pep
KTLKEITNDLCPVLSIQQLYRISTMYWDDKYGTHTVSSDVISSMRVMMTEDSNNAVSSSFLLDDDSSIPFSVDDISKSMTEIEVTDVDMPPLIRENSGFTFLHQRKD

SEQ ID NO: 44886 - protein, 110 aa, Zea mays
  Clone ID: 700583813_FLI.pep
KRLWPKLLLRVRPSAYRSTTPTHGMACCSDLVSRQGQRSGVGIRRGPSWKPGEGEGARRDAKVREQHAREAEQGACATASGEQRPWARAEADKGRAQAWRACGEEEADGH

SEQ ID NO: 44887 - protein, 182 aa, Zea mays
  Clone ID: 700583872_FLI.pep
ELPFSISSHGGVDRAHQGVRLRRAGAGGLCLPQPLDGLPGRQGPQKLQGVLPHHVRHRVGEQGRQALQLRAEGAPELSRVDARFLRHTAAGRSAAPDHRRRSGRHLHRREVLLLQGIRHRRSGQPSQDWGAQLLGVAWADHLHSIFRHQPAHQGDALNFGFICELQAGLTAQVTHGLSIKTL

SEQ ID NO: 44888 - protein, 354 aa, Zea mays
  Clone ID: 700569596_FLI.pep
GHRDFIKNMITGTSQADCAVLIIDSTTGGFEAGISKDGQTREHALLAFTLGVKQMICCCNKMDATTPKYSKARYDEIVKEVSSYLKKVGYNPDKIHFVPISGFEGDNMIERSTNLDWYKGPTLLEALDLINEPKRPSDKPLRLPLQDVYKIGGIGTVPVGRVETGIIKPGMVVTFGPSGLTTEVKSVEMHHEALQEALPGDNVGFNVKNVAVKDLKRGYVASNSKDDPAKEAASFTSQVIIMNHPGQIGNGYAPVLDCHTSHIAVKFAELITKIDRRSGKELEKEPKFLKNGDAGMVKMVPTKPMVVETFSEYPPLGRFAVRDMRQTVAVGVIKSVEKKDPTGAKVTKAAAKKK

SEQ ID NO: 44889 - protein, 239 aa, Zea mays; identical to SEQ ID NO: 41895
  Clone ID: 700569726_FLI.pep

SEQ ID NO: 44890 - protein, 237 aa, Zea mays
  Clone ID: 700570181_FLI.pep
ARADKEQAEEELCQATMGISRDSMHKRRATGGKQKAWRKKRKYELGRQPANTKLSSNKTVRRVRVRGGNVKWRALRLDTGNYSWGSEAVTRKTRILDVVYNASNNELVRTQTLVKSAIVQVDAAPFKQWYLTHYGVDIGRKKKTPAAKKDNAEGQEVEAAAEETKKSNHVTRKLEKRKEGRTLDPHIEEQFGSGRLLACISSRPGQCGRADGYILEGKELEFYMKKLQRKKGKSAVA

SEQ ID NO: 44891 - protein, 174 aa, Zea mays
  Clone ID: 700570251_FLI.pep
WHPQRVCSVQATKKRCPAAQRKKRAEEDGSYEADRPQVHGRQGPPQAARHQGGEEVGADDRRREEAPQVQARNRGAARDPQVPEEHGAADPQAALPAPGARDRAGLQDRPPVPEPRRAGAPGGRRGLPRRPLRGHQPLRHPRQARHHHAQGHPARPPHPWRARVAIISEDLMNV

SEQ ID NO: 44892 - protein, 169 aa, Zea mays
  Clone ID: 700570785_FLI.pep
KSSIIHQTDHARIHRFLTDNPNSRVETQHQRKESTNNHLVNIQPETSGPPLVHEQHVPLLHAQLRQSGDRRRNAPGAQELEVQLLLREKRRAGDEHTAGSRRLHHGHGRGRHGPQEVGAHGADSDDGRGSSDGVPGGHVFRLFLEATELRAEGLTDFGFSGGGGHFCSW

SEQ ID NO: 44893 - protein, 147 aa, Zea mays
  Clone ID: 700570994_FLI.pep
GPGAASRLRSIRSHPQRSSVCKVGRSVMAKTSSFKLEHPLEKRQSEANRIREKYPDRIPVIVEKAERSDIPDIDKKKYLVPADLTVGQFVYVVRKRIKLSAEKAIFIFVKNTLPPTAALMSSIYEENKDEDGFLYMTYSGENTFGLL

SEQ ID NO: 44894 - protein, 155 aa, Zea mays
  Clone ID: 700571124_FLI.pep
RQPPALPPSLSNPLLHLPHIGYSPRAYRSAPHRIGWSGPSRGCAGQRQSMAELVGPRVYSCCTCRNHVCLHDDIISKAFQGRNGRAFLFSHAMNVVVGAKEDRHLMTGLHTVADIYCNDCREVLGWKYVRAYEETQKYKEGKFIFEKSKIVKENW

SEQ ID NO: 44895 - protein, 196 aa, Zea mays
  Clone ID: 700571491_FLI.pep
YTSTWFGLYWYKGGHGHGLYIYIYRVCPCMRAGLVLFLDLCSWRRHACVFIIIQHKHDASHVWLHVEPGGNLHPQRRVALGEEVYPDGPELLADLWVSERVGESPHESVLSVGVPGAVPLPWLLEVVGLAYGCLLPPPRDRPGRQWRGRRRLPQRRVPGRVVVHLLVAVHEVHGAVVVVVVVRAARRVDGQHQVVW

SEQ ID NO: 44896 - protein, 161 aa, Zea mays
  Clone ID: 700572374_FLI.pep
RKEKMQASRARLFKEYKEVQREKSADPDIQLICDGSNIFKWTALIKGPSETPYEGGVFQLAFAIPEQYPLLPPQVRFLTKIFHPNVHFKTGEICLDILKNAWSPAWTLQSVCRAIIALMAHPEPDSPLNCDSGNLLRSGDIRGYQSMARMYTRLAAMPKKG

SEQ ID NO: 44897 - protein, 99 aa, Zea mays
  Clone ID: 700572379_FLI.pep
SCALRVMIMPTPLLPTKPSAIKPRLTPNISQSKGDGSYLRVVGLAEATYATPICRWAVGEPRPAAAVPYRAHGTPSGAASGSPSPPWQNPTRLHSDRTR

SEQ ID NO: 44898 - protein, 160 aa, Zea mays
  Clone ID: 700572891_FLI.pep
ISYTSLLPTCSRDTHEHCSSVFTMECTSSRRRRSRLSRCLLLVCAVASLLCHSPGPAAAAAAPRRLLQTCPGQDFDVPHAHLRARDNVKPLKYTEELSARAAQWAQQYRSDCEAAAPAPGINVFLGAAGATWLPSDAVAAWAEEEQHYDYGSNSCSTGKA

SEQ ID NO: 44899 - protein, 182 aa, Zea mays
  Clone ID: 700573003_FLI.pep
EGEDMGAEEDAAARRERLRALRAAKDLLSTPDGAPTPSTDGEHQNGNHEMAEEPELPGHQDAPGEAAKEDGSPTEEAEEVEDDGELPAMKFRNYLPHDEQLRGGKLAPVSLPKFEDPISAETAEPKEVENLFGNIAPKNPNWDLKRDVQKRIDKLERRTQKALAEIALEQQREKEALEESQD

SEQ ID NO: 44900 - protein, 184 aa, Zea mays
  Clone ID: 700573213_FLI.pep
LYALRQRLSDPNGVLQSWDPTLVTPCTWFHISCDQVGRVVRLDLGNSNVSGSIGPELGRLVNLKYLELYRNNLDGEIPKELGNLKNLISLDLYANKLTGGIPKSLSKLDSLRFMRLNNNKLTGSIPREFAKLSNLKVIDLSNNDLCGTIPVDGPFSTFPLRSFENNSRLNGPELQGLVPYDFGC

SEQ ID NO: 44901 - protein, 278 aa, Zea mays
  Clone ID: 700573379_FLI.pep
PHSLSSPSSPVRNATLPTAEMAPKRGGRAPVPAKKKTDKVTNPLFEKRPKQFGIGGALPPKKDLHRFVKWPKVVRIQRQRRILKQRLKVPPALNQFTRTLDKNLATNLFKMLLKYRPEDKAAKKERLLKRAQAENEGKTVESKKPIVVKYGLNHVTYLIEQNKAQLVVIAHDVDPIELVVWLPALCRKMEVPYCIVKGKARLGSIVHKKTASVLCLTTVKNEDKLEFSKILEAIKANFNDKFDEVRKKWGGGIMGSKSQAKTKAREKLLAKEAAQRMT

SEQ ID NO: 44902 - protein, 213 aa, Zea mays
  Clone ID: 700573585_FLI.pep
VFVVPFTGGCQRPLPGLRCHLRRRLSRPLRQLFVCPFPGTGTEDKMAALPLATAEACDANAALIMNGDLRSLQPIFRIYGGRQIFAGPVVTLKIFEDNVLLREFLEEKGHGRVLVVDAGGSMRCAVLGGNLAQLMQNNGWAGIVVNGCIRDVDEINGCDVGVRALNSHPMKSNKKGVGEKHVPVTFAGTRICDGEWLYADSDGILISRSELSV

SEQ ID NO: 44903 - protein, 245 aa, Zea mays
  Clone ID: 700573631_FLI.pep
GFAALRPRAPKAAASGAPPSRVTEMALPNQGTVDYPSFKLVIVGDGGTGKTTFVKRHLTGEFEKKYEPTIGVEVHPLDFTTNCGKIRFYCWDTAGQEKFGGLRDGYYIHGQCAIIMFDVTSRLTYKNVPTWHRDLCRVCENIPIVLCGNKVDVKNRQVKAKQVTFHRKKNLQYYEISAKSNYNFEKPFLYLARKLAGDPNLHFVEAVALKPPEVTIDMAMQQQHEAELAAAAAQPLPDDDDDLIE

SEQ ID NO: 44904 - protein, 205 aa, Zea mays
  Clone ID: 700573702_FLI.pep
PPPPTQHQTLQQSSTRSSRARRPTMIIPKKNRNEICKYLFKEGVLYAKKDYNLAKHPQIDVPNLQVIKLMQSFKSKEYVRETFSWQYYYWYLTNDGIEHLRNYLNLPSEIVPATLKKSARPLGRPFGSGPPGDRPRGPGRFEDRPRFGDRDEYRGGPRGAPGDFGGDKSGAPAEFQPSFRSSGARPGFGRGGGSGFGAGPTSSME

SEQ ID NO: 44905 - protein, 234 aa, Zea mays
  Clone ID: 700573896_FLI.pep
DKEQAEEELCQATMGISRDSMHKRRATGGKQKAWRKKRKYELGRQPANTKLSSNKTVRRVRVRGGNVKWRALRLDTGNYSWGSEAVTRKTRILDVVYNASNNELVRTQTLVKSAIVQVDAAPFKQWYLTHYGVDIGRKKKTPAAKKDNAEGQEVEAAAEETKKSNHVTRKLEKRKEGRTLDPHIEEQFGSGRLLACISSRPGQCGRADGYILEGKELEFYMKKLQRKKGKSAVA

SEQ ID NO: 44906 - protein, 162 aa, Zea mays
  Clone ID: 700574756_FLI.pep
RSSRHTIGEEEAGERMILAVLFANSDGNILVERFHGVPAEERLHWRSFLVKLGSENLKGSKNEELHVASHKSVSIVYTTVGDVCLYIVGKDEYDELALAEVIFAITSAVKDVCAKPPTERLFLDKYGRICLCLDEIVWKGLLENTEKDRVRRLIRLKPPVEP

SEQ ID NO: 44907 - protein, 203 aa, Zea mays
  Clone ID: 700575113_FLI.pep
NLVLLFGLFSTCFHLPFHFVCPGNKNGLLLPHTTTDQELQHLRNCLPDQVVVQRIDERLSALGNCIACNDHVALTHPDLDKETEEFIADVLGVEVFRQTIAGNILVGSYCAFSNRGGLVHPHTSVEDLDELSTLLQVPLVAGTVNRGSEVIAAGMTVNDWTAFCGSDTTATELSVIESVFKLREGQPTAIVEDMRKSLIDSYV

SEQ ID NO: 44908 - protein, 172 aa, Zea mays
  Clone ID: 700575367_FLI.pep
KRLEDSHRPTRLPAMAENLAPEKRHSFVHNGQKVFEWDQTLEEVNMYIELPKGVPTKLFHCNIQASHVEVGIRGNPPYLNHDLTHPVKTDSSFWTIEDGEMHITLQKREKGKTWSSPIQGQGILDPYAADQEQKRLMLQRFQEENPGFDFSQAQFSGTCPDPRTFMGGIRSE

SEQ ID NO: 44909 - protein, 277 aa, Zea mays; identical to SEQ ID NO: 43397
  Clone ID: 700576329_FLI.pep

SEQ ID NO: 44910 - protein, 282 aa, Zea mays
  Clone ID: 700453767_FLI.pep
EIQSRSTPLPLSLFAVRSSAPQSNRHLTEMGRKFFVGGNWKCNGTTDQVEKIVKTLNEGQVPPSDVVEVVVSPPYVFLPVVKSQLRQEFHVAAQNCWVKKGGAFTGEVSAEMLVNLGVPWVILGHSERRALLGESNEFVGDKVAYALSQGLKVIACVGETLEQREAGSTMDVVAAQTKAIAEKIKDWSNVVVAYEPVWAIGTGKVATPAQAQEVHASLRDWLKTNASPEVAESTRIIYGGSVTAANCKELAAQPDVDGFLVGGASLKPEFIDIINAATVKSA

SEQ ID NO: 44911 - protein, 185 aa, Zea mays; identical to SEQ ID NO: 41307
  Clone ID: 700454188_FLI.pep

SEQ ID NO: 44912 - protein, 188 aa, Zea mays
  Clone ID: 700454676_FLI.pep
RARDPGRKKREKTSLSSRRPRSPTSRLLPACLPACKKEFVMASKRILKELKDLQKDPPTSCSAGPAGEDMFHWQATIMGPPDSPYAGGVFLVNIHFPPDYPFKPPKVSFKTKVFHPNINSNGSICLDILKEQWSPALTISKVLLSICSLLTDPNPDDPLVPEIAHMYKTDRPKYESTARSWTQKYAMG

SEQ ID NO: 44913 - protein, 148 aa, Zea mays
  Clone ID: 700454848_FLI.pep
AKQEAAARRVHPTLHLPTPAQPTAQIAAPATSQPQQPSFPSAATSSSAFSTFSTPASAPSSSSLFATPTTPAPSGNLFGAPGSAQLTTPFGTPSTPTLASTPAPGFGTSATSLGGTSLFSTPFGGGATASGSSFGGASKGRSKPRGRR

SEQ ID NO: 44914 - protein, 218 aa, Zea mays
  Clone ID: 700454956_FLI.pep
GARRSPRTRNKEKSRSTSTPPMSASRFIKCVTVGDGAVGKTCMLISYTSNTFPTDYVPTVFDNFSANVVVDGSTVNLGLWDTAGQEDYNRLRPLSYRGADVFLLAFSLISKASYENVSKKWVPELRHYAPGVPIILVGTKLDLRDDKQFFVDHPGAVPISTAQGEELRKLIGAAAYIECSSKIQQNIKAVFDAAIKVVLQPPKQKKRKKKVQKGCTIL

SEQ ID NO: 44915 - protein, 225 aa, Zea mays
  Clone ID: 700455624_FLI.pep
VIRYFPTQALNFAFKDHFKRMFNFKKDKDGYWKWFAGNLASGGAAGACSLFFVYSLDYARTRLANDAKAAKKGGERQFNGLVDVYRKTLASDGIRGLYRGFNISCVGIIVYRGLYFGMYDSLKPVLLVGTLQDNFLASFLLGWGITIGAGLASYPIDTVRRRMMMTSGEAVKYNSSLDAFKQIVAKEGTKSLFKGAGANILRAVAGAGVLAGYDKLQVVVFGKKY

SEQ ID NO: 44916 - protein, 174 aa, Zea mays
  Clone ID: 700456813_FLI.pep
GPSSSSTNKSETNACHLHREREEQGDEQRRGHGQSGPEAGGGRATAQLLVVIVRRARRGDVLGVAEVERGGAVGGPRGGGRRRVGDRRPEVRRQALAVGHVDGEALAALALLAVVVAREEVGAALVEERHGDGDGVLAELRRRGGPLDGVVGPRVVVVAALVQRHVPCLHHRVV

SEQ ID NO: 44917 - protein, 135 aa, Zea mays
  Clone ID: 700456868_FLI.pep
LAESSSAPLVSGRTGRATSLQSAPHGVRSCGGPCRSDCGAEGCHPLPWLQEEGPEGAQGHRRRAGRDGGRLAAQGDCDGHRGRRHAHQEAVQVRQEGSALAVSPARQEQRARAGGPAGSAACRRQQQVVGGRRRR

SEQ ID NO: 44918 - protein, 238 aa, Zea mays
  Clone ID: 700456894_FLI.pep
QQNTSGAPKSCLYSTKKLQLCFHTSLLCFLWHPSRWSWGCDRCCWFSWALGQPLLPPSNLPLTACLALCTLGLKLIRKCLLSGLLSLGLVDTLHKHPLVLKHITLDLHVHVMIHVLVDLLGLTVLAEQAPQNTHPPHPQNLGGEPSLPGTPALAVSRVPSLLLGLMCPSCTGPRVNLLRLPDDKPILNQLPDVLAGVSHGDLADFIGVKPDFAFPTLEDASGEPLLQLQRHHLHRRRR

SEQ ID NO: 44919 - protein, 194 aa, Zea mays
  Clone ID: 700457686_FLI.pep
GKMYTARKKIQKDKGLEPSEFEDSVAQAFFDLENGNQELKSDLKDLYINGAIQLDVAGSRKAVVIHVPYRLRKAFRKIHVRIVRELEKKFSGKDVVIVATRRIVRPPKKGSAVQRPRTRTLTAVHDGILEDVVFPAEIVGKRVRYRLDGAKIIKIFLDPKERNNTEYKLDTYTTVYRRLCGKDVVFEYPMAENA

SEQ ID NO: 44920 - protein, 168 aa, Zea mays
  Clone ID: 700457890_FLI.pep
PYRAGESQEEEGDDGVRLGHQREQGPLLRLLAGVQRVHEPLPPALRLRPPPRGLPRVPPPLQGGDLSTPACPSASSVSFDSSPPTPNPSVSSSAGTGSTRRSNVRSELLLARPRRKLRVPLLLQHTISLSVYFLCCCFLLTHLWFSYDAKGKAIISSCWTTQIFSPMT

SEQ ID NO: 44921 - protein, 190 aa, Zea mays
  Clone ID: 700458009_FLI.pep
RHHMLGRLSSIIAKELLNGQKVVVVRCEEICMSGGLVRQKMKYLRFLRKRMNTKPSHGPIHFRAPAKILWCTIRGMIPHKTKRGEAALARLKTYEGVPPPYDKTKRMVIPDALKVLRLQPGHKYCLLGELSKEVGWNYHDTIRELEEKRKEKAKVAYERKKQLAKLRVKAEKAAEEKLGSQLEILAPIKY

SEQ ID NO: 44922 - protein, 204 aa, Zea mays; identical to SEQ ID NO: 37223
  Clone ID: 700458018_FLI.pep

SEQ ID NO: 44923 - protein, 167 aa, Zea mays; identical to SEQ ID NO: 37637
  Clone ID: 700458045_FLI.pep

SEQ ID NO: 44924 - protein, 209 aa, Zea mays
  Clone ID: 700458453_FLI.pep
FGAPYSTHPPVSENDHQSVGHADRLGHERLLTRRHDDNDARASAFFRGGAGDLAVDDAEENPGEVLEAGEVVGEAVVREDGVDEEGVGVAQDAQLAPEGVGGFDGRDDVRGQRRPSEAASDVLGRLALRVQLAHHCIDGVVPWEVAQELVEAAGRAEGVDDPVVAVAVDDGLVEVEHHQGGAVARRRHSHSYLVTCRQMPLTRELALSL

SEQ ID NO: 44925 - protein, 202 aa, Zea mays
  Clone ID: 700448587_FLI.pep
TAPPIVVASHFSLTNQPNRATWLVPYVVPAATRRGARPVGARTVRHETTETMSTTTMKASDPGSAWFGSGARTRSAAGISHNARLVTTAVAAFVSVLGLALFLHLYVCHVRRRNRRRAAAVLPTTTAAAAGTELIGSVRAGGEGGAGRRQGGGRQLHAGEGDRCLRVADEDAQQGEAGAAEATRRRRGLGRLGTAAAFCCRQ

SEQ ID NO: 44926 - protein, 139 aa, Zea mays
  Clone ID: 700448756_FLI.pep
RKIIIDTYGGWGAHGGGAFSGKDPTKVDRSGAYVARQAAKSIVASGLARRCLVQVSYAIGVPEPLSVFVDSYGTGTIPDKEILKIVKENFDFRPGMVTINLDLKKGGNRFIKTAAYGHFGRDDADFTWEVVKPLKKASA

SEQ ID NO: 44927 - protein, 478 aa, Zea mays
  Clone ID: 700449094_FLI.pep
PSRSCIAAEMGASTTPLASAAALLLLLLAPLAAAADSMSIVSYGERSEEEARRMYAEWMAAHGRTYNAVGEEERRFEVFRDNLRYVDAHNAAADAGVHSFRLGLNRFADLTNDEYRATYLGVRSRPQRERRLGDRYLAGDNEDLPESVDWRAKGAVAEIKDQGSCGSCWAFSTIAAVEGINQIVTGDMISLSEQELVDCDTSYNQGCNGGLMDYAFEFIINNGGIDTEEDYPYKGTDGRCDVNRKNAKVVAIDSYEDVPANSEKSLQKAVANQPVSVAIEAGGRAFQLYNSGIFTGTCGTALDHGVTAVGYGTENGKDYWIVKNSWGSSWGESGYVRMERNIKASSGKCGIAVEPSYPLKKGANPPNPGPTPPSPTPPPTVCDNYYSCPDSTTCCCIYEYGKYCFAWGCCPLEGATCCDDHYSCCPHDYPVCNVKQGTCLMGKDSPLSLSVKATKRTLAKPHWAFPGNTAADGMKSSA

SEQ ID NO: 44928 - protein, 164 aa, Zea mays
  Clone ID: 700449681_FLI.pep
CAAHATDPTGDELADTSTLCSSSSSLSCLRLPIHVSMKKIWSSGAPPKLRLPFTFPSLSCLDWPPAAHGGGVLVHEDLPAPALLAAERPVAFVHVDVHALGKLFVAQAAALQEGARSRRRDRDLPLLLVVVGAVGRRHEGGLADDLRRRRLPGVALAVVLQENA

SEQ ID NO: 44929 - protein, 201 aa, Zea mays
  Clone ID: 700449843_FLI.pep
LIPNSVCYSISRVLCYMCYQHRFATYPGASNCCKLGKHMMSEMLKSKQHAGKLICSSMGARMDSEPKSWRILADVLYDLGTALEVVSPLCPQLFLEVAGLGNFAKGMAVVAARATRLPIYSSFAKEGNLSDLFAKGEAISTLFNVMGIGAGIGLASTVCSTTQGKLIAGPLLSAVHIWGHPRDESNSCKHTQPTKNSNDRG

SEQ ID NO: 44930 - protein, 287 aa, Zea mays
  Clone ID: 700450343_FLI.pep
ELLPRNSAKVSVFDSVVQGGDAVWEGLRIYDGKVFKLDEHLDRLFDSAKAMAFSNVPTRDWIKDAIFKTLIANGMFNNAHIRLTLTRGKKVTSGMSPAFNLYGCALIVLAEWKPPVYDNSHGIKLVTATTRRNSPNSIDSKIHHNNLINNILAKIEGNLAQAEDAIMLDKDGFVSETNATNIFMVKKGIVLTPHADYCLPGITRATVMDLVVKENFVLHERRISLSEFHAADEVWTTGTMGEITPVVMIDGREIGDGKIGPVTRQIQKAYKILTAGQGVPIPGVAEV

SEQ ID NO: 44931 - protein, 185 aa, Zea mays
  Clone ID: 700450378_FLI.pep
TEYVVTRWYRAPELLLNSTDYSAAIDVWSVGCIFMELINRQPLFPGRDHMHQMRLITEVIGTPTDDELGFIRNEDARKYMRHLPQFPRRPFVSLFPRMQPVALDLIERMLTFNPLQRITGQSARAYYSLACSFSSLASSLHVQLATGWLLNPELRRTCSLVGVGSHCGTSMWGHALAMQCIVRSM

SEQ ID NO: 44932 - protein, 196 aa, Zea mays
  Clone ID: 700450425_FLI.pep
KISPKTSPLEEGSPSERAAMADSSAPTRVMMAVNESSLKGYPHPSISCRTAFDWTLSKLVRSNPGGFHFLFVHVHVPDEDGFDDMDSIYASPEDFHQMKQRDKIRGLHLLEYFVNQCHQLGIKCEAWIRHGDPKEVICSEVKRVQPDLLVVGSRGLGPFQRVFVGTVSEFCVKHAECPVITIKRNATEAPQDPVDD

SEQ ID NO: 44933 - protein, 262 aa, Zea mays
  Clone ID: 700450526_FLI.pep
GVRVPRHGLALQPRVQRGHEEPLGDHHQEAAGLLHGLRGRVDAGGRGRRRGRHAARHHVPPPAHLRGQLRPAARHLRGAAVPRRAPRGRGHVRVRARRRRHPHEVDPPRLERRALRHAAQELLRRAAGKWQGHRRRVRAAGQHGGHPQGAGRLPRRHDHARAQPRRQGAVRARVPRARKGRRLLRVQGHLHLRQRLGHRVHQVNHRRRDEMAWLPHALLAWSSYRTSPSSSSSGYCAATSLLSRMHVLLLNFLSSYHALWLA

SEQ ID NO: 44934 - protein, 329 aa, Zea mays
  Clone ID: 700450772_FLI.pep
AEEFSLQVCASAMGSGNLIVKKVVKHSSFDLDIQLDKSWMEDVTCPICLDYPHNAVLLRCTSYEKGCRPFVCDTDQTRSNCLERFKSAYELPSNVKVSSLAVPPLDSIIHIVPSNANNRPSCPLCRGDVIGWVVIGEARLHLNQKKRCCEEDCCSFVGNFNELQKHTQQKHPDSRPSEIDPARQVDWENFQQSSDIVDVLSTIHAQVPNGIVLGDYVIEYGDDDTGEDYEVFRRVRTNWWSCIFCRAFSRSSRSRRRSRARERIGSGRRNGNQVNLENFNLVVPTQPVELREIRFDEIDDEYIVTGAIPSIAAPGRMASFHYRDTRYGR

SEQ ID NO: 44935 - protein, 429 aa, Zea mays
  Clone ID: 700450793_FLI.pep
SLEHGGFTFTPPPFITSFTELLSGAAADMVGAAGADHQERSPRGLFHRGATRGGGVGVPKFKSAQPPSLPISPPPMSPSSYFSIPPGLSPAELLDSPVLLHSSSNFFASPTTGAIPAQRFDWKQAADLIASQSQQDDSRAAVGSAFNDFSFHAPTMPAQTTSFPSFKEQQQQQVEAATKSAVPSSNKVSGGSGGSTKLEDGYNWRKYGQKQVKGSENPRSYYKCTYHSCSMKKKVERSLADGRVTQIVYKGAHNHPKPLSTRRNSSGGVAAAEEQAANNSSLSGCGGPEHSGGATAENSSVTFGDDEAENGSQRSGGDEPDAKRWKAEDGENEGSSGAGGGKPVREPRLVVQTLSDIDILDDGFRWRKYGQKVVKGNPNPRSYYKCTTAGCPVRKHVERACHDARAVITTYEGKHNHDVPVGRGAASRA

SEQ ID NO: 44936 - protein, 249 aa, Zea mays
  Clone ID: 700450844_FLI.pep
VETVDDYDEYCHYVAGLVGYGLSRLFYAAGTEDLAPDSLSNSMGLFLQKTNIIRDYLEDINEIPKSRMFWPREIWSKYADKLEDFKYEENTEKAVQCLNDIVTNALIHAEECLQYMSALKNHAIFRFCAIPQIMAIGTCALCYNNVHVFRGVVKMRRGLTARIIDETNSMSDVYTAFYEFSSLIESKIDDNDPNAALTRRHVNSIKQTCKSSGLVKRRGYHLDTSPYRPMLIMIVLLLVAILFGALYTK

SEQ ID NO: 44937 - protein, 287 aa, Zea mays
  Clone ID: 700450916_FLI.pep
IYCMPPRPCFKGSAPINLSDRLNQVLRWALGSVEILLSRHCPIWYGYNGRLKLLERLAYINTIVYPITSIPLIAYCVLPAICLLTNKFIIPEISNYAGMFFILLFASIFATGILELRWSGVGIEDWWRNEQFWVIGGTSAHLFAVFQGLLKVLAGIDTNFTVTSKASDEDGDFAELYVFKWTSLLIPPTTVLVINLVGMVAGISYAINSGYQSWGPLFGKLFFSIWVILHLYPFLKGLMGRQNRTPTIVIVWSILLASIFSLLWVKIDPFISPTQKAAALGQCGVNC

SEQ ID NO: 44938 - protein, 123 aa, Zea mays
  Clone ID: 700451357_FLI.pep
SLRFSSRVSRMKVIAAYLLAVLGGNTSPTADDVKSILESVGAEADEEKLEFLLTELKDKDITEVIAAGRERLSSVPSGGGAIDMGAPAAVAGGGAAPAEEAKKEEKVEEKEESDEDMGFSLFD

SEQ ID NO: 44939 - protein, 208 aa, Zea mays
  Clone ID: 700451438_FLI.pep
GSCFSPSSPHPTPHQTDSIRQDKHPCRRHAGARAPTATTRRTSASGSGCCPTGSRRGGRARGSSSGWRSWWRRWPACRRRTRRRRPAPRRWSATWAGWTATTRCCAPATPSWPAACSRWAASSRCSRWPAPPSTSRRWSPTTPCSAPGSRPSPRCSPSGSENLSLSRRERANFCRRAAVYLVLVSIHKSSLSWFALLVSVINLLLVSV

SEQ ID NO: 44940 - protein, 217 aa, Zea mays
  Clone ID: 700451467_FLI.pep
LFPQAWYSIWIDGKMELIVDPLLILERYLWRGKYAFAVAVHKHHRSIYEEGDAIKRRKRYARPLVDLQMKMYYYEGMEPWSPKKKMPSGRRRPPRCSRPRSPPHRCTHAPGCSSSRGSRRSSHPRRRMSASLRRHHQLRRGHRTGGGGVQRLLHRRQAAAVVDVRGPEGGDDLGTAEESLDRTRLYRARHGAAGRHAAVLALLGVLLAALACPSTAD

SEQ ID NO: 44941 - protein, 76 aa, Zea mays
  Clone ID: 700451685_FLI.pep
VPFVSVRRQGAFSGRRSTRLPGRTSRWLNQLATNFLAEPRQLTGRPSMNRPAAILGCSVCAAKRGPAGSPAGVRVP

SEQ ID NO: 44942 - protein, 176 aa, Zea mays
  Clone ID: 700452394_FLI.pep
SDLARRNKASSCRVHACMAPAYLFIRSSCGLRVYIRTRSRTGRARGVRRGLRLGFAVARLGLRHRLRLWLWFRLGLRRGLRFGGFRCWVGLRCGLRVSWLWLRLRLVGLWRRFRLVRLRRRFRLVRPWWLRLWSDHRPRLRRIIIAGGGDRGHDDQRQPYHQCAPHRSSVAHSRER

SEQ ID NO: 44943 - protein, 80 aa, Zea mays
  Clone ID: 700452744_FLI.pep
VHISIMQEVMSSSGRFRWCSHGNSTSDTWSLLIVMLSCIIAPAGAFRICCKLIFSGGFGSFVRVISRVRCIALLCYASAG

SEQ ID NO: 44944 - protein, 311 aa, Zea mays
  Clone ID: 700453451_FLI.pep
SESKQNLLGANGVLEDKKHMMEGPSSFSAVKAKLKPATMRPIPHSQKQQMHPFMCLPETSFHETSIVKPSLTVAPTVKHNSVSYAPTTHRKSTSGPSHTPSVIQLNPLPMKKHGCDRLSIQVCSEEDFLKDVMQFLIQRGHNRLVPHGGLAEFPDAVLNAKRLDLYNLYKEVVSRGGFYVGNGINWKGQVFSKMRNHTATNRMTGVGNTLKRHYETYLLEYELAHDDVDGECCLLCHSSAPGDWVNCGLCGEWAHFGCDRRQGLGTFKDYAKTDGLEYICPHCSLANYKKPPLPPKVANGFSNTAYVPRSV

SEQ ID NO: 44945 - protein, 105 aa, Zea mays
  Clone ID: 700453504_FLI.pep
ELGHHRQCEGEDPGQGGHPPGPAASDLRRQTAGGWPHPSRLQHPKGEHPPPCAPSPWWSVSHGSFKLPMCLRRLVPSPYGGCRSICCSCQCWFNNGPVVLCVRTT

SEQ ID NO: 44946 - protein, 270 aa, Zea mays
  Clone ID: 700453529_FLI.pep
SLHNIANMQIILELTRCRGRNSRGGLHKCAPCTAMPNNKIVAANMEEKGAGGKAAVPHDELPRFTIFLIPNRREPPLDLVELVCLHHRISLGNGVPGSSPVVELAVVLVGVAVECAVQVPTPAVESRKSNPLPAGAAPVRPYLPPFGDRRHPLAGSGNISGLLHVHCLQLNLGNSYYRVAASNNRLHDGVAAVHDAVDRGGSQLGLILLRYHLLVALGAHVHGRRAAEEATVIDAEDGSLGGLAPSLLVLHGFLNSDETALFAIPLRRSP

SEQ ID NO: 44947 - protein, 207 aa, Zea mays
  Clone ID: 700443948_FLI.pep
YGGHGRPLTAFQLTVLGDGAVFVGFVANHAVVDGTSFWHFFNTWAGLCRGAPVREPDFRRNFFGDSTAVLRFPGGASPAVTFDADAPLRERILHFSAAAISELKATANRSKRAGQEAEANGKLAHDDSRLEGRSGEISSFQSLCAHIWRAVTRARRLLAADKTTTFRMAVNCRHRLRPAISPLYFGNAIQSVATTATVAELASNDLG

SEQ ID NO: 44948 - protein, 160 aa, Zea mays
  Clone ID: 700443993_FLI.pep
RTTRHQVEELERAPIMAGVNSSVVGLKPAAAVPQAAAASSPAKRVQLAAPEGRRAALLGLAAVFAVTATTGSAKATIFDEYLEKSKANKELNDKKRLATSGANFARAYTVEFGSCQFPYNFTGCQDLAKQKKVPFISDDLEIECEGKEKFKCGSNVFWKW

SEQ ID NO: 44949 - protein, 378 aa, Zea mays; identical to SEQ ID NO: 38079
  Clone ID: 700444283_FLI.pep

SEQ ID NO: 44950 - protein, 83 aa, Zea mays
  Clone ID: 700444750_FLI.pep
LWCSLGEDPETQRSSTPQLPRQRRSSNGRPSTGSRRCAEICGTGRARTRTGTLGHATTANEPPIHASHPAVGASSSLIAYMLP

SEQ ID NO: 44951 - protein, 151 aa, Zea mays
  Clone ID: 700445118_FLI.pep
TRSTRSRSACSAASATPGGCAGSWSCSSGSWRCSCQTSQTSSRSSAAASASCSASCCPPCSTSRSSAPRSGGPASSPTWPSSSSGLRWRCPGHGRHSYRSSVLPTCKHRQSDMCNGSVQIGSNRLRPNSATGITLHAFVDVRSRRRWFNSN

SEQ ID NO: 44952 - protein, 343 aa, Zea mays
  Clone ID: 700445127_FLI.pep
PGIALKIFLIVLPTILMFMSKFEGLISQSSLERRSASKYYIFLFFNVFLGSVIAGSALEQLKTYLHTSANDIPRIIGDSIPMKATFFITYVMVDGWTGIAGEILRLKPLIFFHLKNFFLVKTEKDREEAMDPGSICFDSTEPRIQLYFLLGLVYAAVTPFLLPFILVFFGFAYVVFRHQIINVYNQQYESAAQFWPSVHGRIITALIVSQLLLLGLMSTNDFEQTTPVLLVLPVLTFGFYKYCKNRFEPAFVRNPLQEAMKKDTLERAREPNLDLKAYLANSYLHPVFKGDEGDDRYSVMDDDGWMEEEVIVPTKRHSRRTTPAQSKHEGSDSLSVLESSLQR

SEQ ID NO: 44953 - protein, 177 aa, Zea mays
  Clone ID: 700446019_FLI.pep
QQPAPSILFPLLASLPRRIPPPSTVPVPVPFRRASSPEMANARSGVAVNDECMLKFGELQSKRLHRFLTFKMDDKFKEIVVDQVGDRATSYEDFTNSLPENDCRYAIYDFDFVTAEDVQKSRIFYILWSPSSAKVKSKMLYASSNQKFKSGLNGIQVELQATDASEISLDEIKDRAR

SEQ ID NO: 44954 - protein, 121 aa, Zea mays
  Clone ID: 700446401_FLI.pep
SSSSTLELDLSKRLAASSQLMAKPSQVLVSALAAWAVVLLLLCAAAPRGADAATACDAAQLTPCAGAIIGSSPPTAACCSRLREQQPCLCTYARDPKLQRYVSSPNGKNAMAACKVPVPSC

SEQ ID NO: 44955 - protein, 110 aa, Zea mays
  Clone ID: 700446685_FLI.pep
RRPQGRRRRAQDQLLRSQRVRVRRTFWPAGPWARDQKRCVGVCVLLVCFNFTKFVSRWIAWSRSVCFKDPPALAVSVAACVGFGTYGLYLLLDVVYYLGLLNYYEQLRIV

SEQ ID NO: 44956 - protein, 246 aa, Zea mays
  Clone ID: 700446989_FLI.pep
WLPRAPLLPLPQLSNALVLCRGSDFQPQLSAASCSDLGPAPHGCRRQAWTRPQPRPSMAFFPAQVAQLSARACTPLLPPCSTALSSPQLVLFLPSSWISRPCASPAACALHFFPPRLEPRHARAPARPLAAPVALSSSVACSNFPPQLCAPSLLAMATTPKLLASSSPAQRLSLLAEPSCPLASLPVLPWCFSTAICSSRSARRRGFQLDGMALCSAIAAVPSFSSCSSRFLASCRRCPCFPWRFP

SEQ ID NO: 44957 - protein, 164 aa, Zea mays
  Clone ID: 700447166_FLI.pep
HGIPAAVVEGMLRVAREFFHLPESERLKCYSDDPNKAIRLSTSFNVRTEKVSNWRDFLRLHCYPLQSFVDQWPSNPPSFRQVVGTYATEARALALRLLEAISESLGLERSHMVAAMGRHAQHMAVNYYPPCPQPELTYGLPGHKDPNAITLLLQDGVSGLQVQR

SEQ ID NO: 44958 - protein, 188 aa, Zea mays
  Clone ID: 700447337_FLI.pep
YGAARSSVTMIISKKNRREICKYLFHEGVLYAKKDYNLAKHPKLDVPNLEVIKLMQSFKSKEYVRETFSWQYYYWYLTNDGIEHLRSFLNLPSEVVPNTLKKSSKPPSRPFGSGPPGDRPRGPPRYEGDRPRFGDRDGYRGGPRGAPGDFGGDKGGAPADFQPSFRGSRPGFGRGGGGAFGAGGSSME

SEQ ID NO: 44959 - protein, 183 aa, Zea mays
  Clone ID: 700447549_FLI.pep
SNRSLPLVTSLPLPAPLRPPRHRPFARQETGPETMADQLTDDQIAEFKEAFSLFDKDGDGCITTKELGTVMRSLGQNPTEAELQDMINEVDADGNGTIDFPEFLNLMARKMKDTDSEEELKEAFRVFDKDQNGFISAAELRHVMTNLGEKLTDEEVDEMIREADVDGDGQINYEEFVKVMMAK

SEQ ID NO: 44960 - protein, 419 aa, Zea mays
  Clone ID: 700448276_FLI.pep
IALVGLLRYAKCVLFSAATPRPVDSKVDLDDAEPPSPPPDFRCPISLELMGDPVVASSGQTYDRDSITRWFGSGKSTCPKTGQVLLNLELVPNKALKNLISRWCRENGIPMESSESGKAEPAAVVGANKAALKAARMTASFLVKKLSASFSPEATKRVVQEIRQLAKSGSDNRAFIGEAGAAGLLVPLLLSEDSALQLNAVTALLNLSILEANKKRIMHAEGAVDALCHVMGSGATWRAKENAAATVLSLAAVHAYRRRLGRNPRVVESVVRLARTGPSSTKKDALAALLCLSAERENVPRIVEAGAAEAALAAVGEAEAEAAAAVLASLAKRGGAEAIVALDGAVARLVNEMRRGTEWSRECAAAALVLLCRRAGAAAASQVVAVQGVEWAIWELLGTGTERARRKAASLGRACRRWA

SEQ ID NO: 44961 - protein, 165 aa, Zea mays; identical to SEQ ID NO: 38751
  Clone ID: 700448317_FLI.pep

SEQ ID NO: 44962 - protein, 213 aa, Zea mays
  Clone ID: 700438252_FLI.pep
GGGGANAGEGEGVREGAPAMVHVNFYRNYGKTFKKPRRPYEKERLDAELKLVGEYGLRCKRELWRVQYALSRIRNAARHLLTLDEKNPRRIFEGEALLRRMNRYGLLAEGQNKLDYVLALTAENFLARRLQTLVFKAGMAKSIHHARVLIKQRHIRVGRQIVNVPSFMVRVESEKHIDFSLSSPFGGGPAGRVKRKNQKKASGGGDAGDEDEE

SEQ ID NO: 44963 - protein, 136 aa, Zea mays
  Clone ID: 700439202_FLI.pep
QIQAKYIHIFLLGTSRSSNLSGGGAGRCGGFTCHGLSLPERSLLASLGNSLQDGVRCHIALHGDLLFHDVYVVGLDAFHLAQDPLDSSNTALTGHANLEHNSLGHSARGKEGRGGPAVVVEISCRRGEGEGGRGKD

SEQ ID NO: 44964 - protein, 104 aa, Zea mays
  Clone ID: 700439719_FLI.pep
IIIISMVVDRCDQQLQGSHLQLPPQLQPWAASPDSAAASTNSGAAFFSGATPRTTVACAAVLVSSRSGYFLPHLQLEPQPQLDPQLQDILDLVVQKKLDLFKNQ

SEQ ID NO: 44965 - protein, 203 aa, Zea mays
  Clone ID: 700439751_FLI.pep
TLESLELSVPDPLDLDILGRLGPEVGVGRLHALEDADDLAGLRVALGDAQRDVAGGGGGVLDVLLLELLLVTSAPGGERDGVVVAGGAAAALGVEEGGAAVAGHEEGPAEALGLAGGDELLDGEEERHALAPRELHGDGGVVDAVLLLELERAVGADLERALDLVQRVREAGHELGLLELGRGVLGDALRLDGEGRRLQAQLL

SEQ ID NO: 44966 - protein, 138 aa, Zea mays
  Clone ID: 700441402_FLI.pep
IDGVVIEQHTRDDVCSYLLTRTHVYGARGRIYIEFCMHISIDGMISRFSRSSRSSRARARAAPCAPAACSRSGPPSARGARGTRSRRRPAPPPLPRRPRSCASARSPGPSSHGAPRTEQRRRPRGRPPRRGAPCAYAP

SEQ ID NO: 44967 - protein, 119 aa, Zea mays
  Clone ID: 700441420_FLI.pep
IFREKSSPNPKEHKEEKDEQGHGEEGKADRKQHSQRGLSEYIQGSWWCALMRGGVQHGPMKLASIPKWEGFLTAGSTPYKSQAGRGRQAASTGARAGALYFFCASSASARGTNSAGGQG

SEQ ID NO: 44968 - protein, 114 aa, Zea mays
  Clone ID: 700441537_FLI.pep
MARAGISRIDDVEAAKSAESTRLEDHEQSREDASQKPYSPSPGAGSRRRRVLETCSSDRRCTSAVGTKGTKRRLSYEERRKRNWDDLEAGCRAPFIGPSPRPPILSAHKNLTIS

SEQ ID NO: 44969 - protein, 152 aa, Zea mays
  Clone ID: 700441748_FLI.pep
PPYLSPRTSGNTTLLYLAAKIDSLRKYASSTGTGCLLYTKHTNARRGDDATRSFLLLEDAADGAIAVNMPNCLPHKIRHRKHSQLREAFVFRQQDGVCHNNFLKDASRKPFNRGRAEKSTMLIHKSSEGISMSEYKGSNLFKPNKASCYFLK

SEQ ID NO: 44970 - protein, 173 aa, Zea mays
  Clone ID: 700441996_FLI.pep
DDDHTRRRSSSFDRDRDAGSYKLAKTGIIMAASTVASLSVPVTTTTFAAAAAAGGADVLIVVPRRAGAGRVWFPAAARRGGGSGRLVAVRSSGPATPPEISDKVSESIKQAEETCADDQKGDAECAAAWDEVEELSATASHARDSLKETNANDPLEKYCKDNPDSEECRIYDN

SEQ ID NO: 44971 - protein, 172 aa, Zea mays
  Clone ID: 700442373_FLI.pep
TRARARAHIPSLPRCVPSPQTSAMADQLTDEQIAEFKEAFSLFDKDGDGCITTKELGTVMRSLGQNPTEAELQDMINEVDADGNGTIDFPEFLNLMARKMKDTDSEEELKEAFRVFDKDQNGFISAAELRHVMTNLGEKLTDEEVDEMIREADVDGDGQINYEEFVKVMMAK

SEQ ID NO: 44972 - protein, 300 aa, Zea mays
  Clone ID: 700442783_FLI.pep
AALHAHPERLLPGRLRGGAAVQPAPRLPPRQVPAGARGAHAQGRGRPRLPLRVPGGGRAADQGPVHQPRPAGGGRPRAQDQHHHAGAPGAALLRAAALLRGRAVPPPVPVQGLHAGAADHPRGRLGRRALHPGLQARVRALLHARGQPRRAGAPAEQPGPAQRRPGGLPRRAAPLRQHLKQQHLVRAGVPGGQGPRPPRRPRLAARLRVGLQVQQRGVARRPPRAPPRAQPLAGLRRPVPGAHGRLARTCNAVAAIYLSLASLPLPVQCCTSPMDDGSDMIWYRTRSVDLHACTSVSIPF

SEQ ID NO: 44973 - protein, 115 aa, Zea mays
  Clone ID: 700442788_FLI.pep
YNCRFFWISSGQLLCYHTLLCWKTLFSASNMLWLYGWLITCITSTTVTANLCKNGQLDVQEFWLLNAVILFSFNFFFCKSSHMKCNVEPFKFRLTYVLYKIFYLVYFLVGTPKHE

SEQ ID NO: 44974 - protein, 490 aa, Zea mays
  Clone ID: 700321625_FLI.pep
EPQRQASSYSPISATQSFPQFPPFSHFSPPPPLPPFNNTMRECISIHIGQAGIQVGNACWELYCLEHGIQADGQMPGDKTIGGGDDAFNTFFSETGAGKHVPRAVFVDLEPTVIDEVRTGTYRQLFHPEQLISGKEDAANNFARGHYTIGKEIVDLCLDRIRKLADNCTGLQGFLVFNAVGGGTGSGLGSLLLERLSVDYGKKSKLGFTVYPSPQVSTSVVEPYNSVLSTHSLLEHTDVAVLLDNEAIYDICRRSLDIERPTYTNLNRLVSQVISSLTASLRFDGALNVDVNEFQTNLVPYPRIHFMLSSYAPVISAEKAYHEQLSVAEITNSAFEPSSMMAKCDPRHGKYMACCLMYRGDVVPKDVNAAVATIKTKRTIQFVDWCPTGFKCGINYQPPSVVPGGDLAKVQRAVCMISNSTSVVEVFSRIDHKFDLMYAKRAFVHWYVGEGMEEGEFSEAREDLAALEKDYEEVGAEFDEGEDGDEGDEY

SEQ ID NO: 44975 - protein, 78 aa, Zea mays
  Clone ID: 700321767_FLI.pep
KGQQVRQKHQLNRSNMQAADNIKRKQDKRTTFIFHRHHRALCCLLSGYHPSSSQTSRRRTCWKKHKMACEPQQTAVAS

SEQ ID NO: 44976 - protein, 449 aa, Zea mays
  Clone ID: 700465042_FLI.pep
KFKIALCHSALCEHREALHEMEGIPSKVRTLKMNMMLGKLYRISRNSRTAVVCYKECLRQCPYVFEAITALAEMGLSAKEFSLLFSQAPNRGGKLSGDFVDTQRWWSRYVEAQCCIASHDYKGGLDIYLELMQRFPNNVHILLEIAKVEAIIGRNDEAIMNFEKVRLIDPNIMTYMDEYAILLKSKSDYIRLNKLVHDMLHIDPARPETCVALAAMWERKDERKALTYAEKSLRVDDRHITGYIMKGNLHLSLNRPDLAVTDFRGAQELRADLRSYQGLVRAYLALSKCKDALFTAREAMKVMHQSAKALKLVGDVHAISSSGREKARKFYESAIRLEPGFLGAALALADLHVAEGRNKEAVMLLERYIQQWSDDSLHIKVAQVHAATNMLSDALSHYQSALRINPQNEAAKNGLERLEKQMKGVDPDAPEDDEENEEEDVDVDRDDFI

SEQ ID NO: 44977 - protein, 195 aa, Zea mays
  Clone ID: 700465222_FLI.pep
ARATKNGRNWQEHGGAAPGAQPHHVHHRHRLRELEPEPLHQRADQLPRRGRQRRDVLLPGVRHPGRRGGRGVQAGGRAPRARLAPRQPGHQRRVVAHRLGHHGARLRAGLQGDPHRRTPRLAPARAGGLRHHPRLHAAPLRAHAPHGPLRRQRWLPGPRLRRRRRGRRAQGGHQGLRILIDAARTCVIISGAAGV

SEQ ID NO: 44978 - protein, 492 aa, Zea mays
  Clone ID: 700208968_FLI.pep
SLHQGILRLIRSEDSAGAAMNEKASVSKELNAKHKKILEGLLRLPENRECADCKSKGPRWASVNLGIFICMTCSGIHRSLGVHISKVRSATLDTWLPEQVAFIQSMGNEKANSHWEAELPPNYDRVGIENFIRAKYEDKRWVPRNGTLRPSSGVRDEKSQESPASANRSGHHRSSFEQNRASPALPSKVAHVASRIPSQASPQAPKVEPPVPKVVSPPQPQKSLAKVEATPPKVEKPSVAPPPKVDYATDLFNMLSMDGTTEKESESSPNDDNAWDGFQSAQPVPSSEEKDSAKPAESMTQSTSGIEDLFKDSPVVSLSSAPAVSQVNAKNDIMSLFEKSNMASPFAVQQQQLAFMSQQQALLMAALKAGNSPQIVPGNANQLNTNVSNPPLGTLPFQNWTNLGYQNPGLTLAAAQNGATKVSNNNQDLSSGTFGLGTPGMHNITPAVPANGATAAGASNNDTASTASSTLPSQSGKDYDFSSLTQGFFTKR

SEQ ID NO: 44979 - protein, 350 aa, Zea mays
  Clone ID: 700209436_FLI.pep
SSRGARTSKSKSTRQPAASPEEYSRANKEFRKLESTMELIKDLRSKQEEIEGLKSLVANDHEEKDMREMAEEELLVAVEEEKRLQHELFRSLLPKDEADEKDCILEVRAGTGGEEASLFAMDIFRMYEKYAQKNGWKFDVIDIMESAVKGYKEASGTISGPGAFGKLKFESGIHRVQRVPATEKSGRMHTSAVSVAVLPQADEVDVQLRNEDLRIDTYRSGGSGGQSVNTTDSAVRITHIPTGTVVAIQDERSQHMNKAKALKVLRARLYELERRRLHMDRSKLRSEQIGSGDRSERIRTYNFPQGRVTDHRVGVTHHSIADVMEGESLDMFVDALLLQEEMDAIASFGA

SEQ ID NO: 44980 - protein, 190 aa, Zea mays
  Clone ID: 700209964_FLI.pep
HKRARDPGRKKREKTSLSSRRPRSPTSRLLPACLPACKKEFVMASKRILKELKDLQKDPPTSCSAGPAGEDMFHWQATIMGPPDSPYAGGVFLVNIHFPPDYPFKPPKVSFKTKVFHPNINSNGSICLDILKEQWSPALTISKVLLSICSLLTDPNPDDPLVPEIAHMYKTDRPKYESTARSWTQKYAMG

SEQ ID NO: 44981 - protein, 178 aa, Zea mays
  Clone ID: 700210242_FLI.pep
TPPPPAAPPQRIARRDLIDHLQLSIMADVDVEPEVAAGAPKKRTFRKYSYRGVDLDALLDMSTDDLVQLFPARARRRFQRGLKRKPMALIKKLRKAKKDAPAGEKPEPVKTHLRNMIIVPEMIGSIVGVYNGKTFNQVEIKPEMIGHYLAEFSISYKPVKHGRPGIGATHSSRFIPLK

SEQ ID NO: 44982 - protein, 244 aa, Zea mays
  Clone ID: 700210635_FLI.pep
LLLSDPELRRPQHQARPPSRVTEMALPNQGTVDYPSFKLVIVGDGGTGKTTFVKRHLTGEFEKKYEPTIGVEVHPLDFTTNCGKIRFYCWDTAGQEKFGGLRDGYYIHGQCAIIMFDVTSRLTYKNVPTWHRDLCRVCENIPIVLCGNKVDVKNRQVKAKQVTFHRKKNLQYYEISAKSNYNFEKPFLYLARKLAGDPNLHFVEAVALKPPEVTIDMAMQQQHEAELAAAAAQPLPDDDDDLIE

SEQ ID NO: 44983 - protein, 189 aa, Zea mays
  Clone ID: 700210837_FLI.pep
DRFVAVEFDTFDDSWDPHLTYDHMGINVNSVVSVANISLPSFSLNGQMSARVDYNSSTSVMGVDLRFDRSPKFGSATPIFNVSAKVDLSSALPEQVAIGFSAATGASIELHQLLSWSFSSVAPGTGSPTDPGALASSNPRTGLKVALGITSSISILLCAAVVALLRALRRKHLALAEIQLESDARGRLC

SEQ ID NO: 44984 - protein, 249 aa, Zea mays
  Clone ID: 700211211_FLI.pep
AKAKRLDSHSNCRLDLSNGLEESLPRSTLLKSSMVTEQLCVDTIRNNSTLTLVLQVVGTAELGEAPLSALNNLLAARELELGASQSFTGMCSIVVLASNRKEYLTNVHPSTGALRLAKGTPHSSLEPISPSTRKHLVDTKDMEGVNPDPKVEGILSCRLGHVLVAGNTGSLKSLTGDILLLPRDKVHTVGELINTLSLHANIVDPNLGVRDTTAVPGLGVWLVLDLAIASRRPSPHGDGSREEAAAANP

SEQ ID NO: 44985 - protein, 231 aa, Zea mays; identical to SEQ ID NO: 43391
  Clone ID: 700211310_FLI.pep

SEQ ID NO: 44986 - protein, 83 aa, Zea mays
  Clone ID: 700211358_FLI.pep
VSHEPNRSLVTEPNKPLVKQVFSHRTKQALSFTLVIVVLWMYDLCICIIFWSLGNKFGILCIACYLIQYCISVVYFQICALPV

SEQ ID NO: 44987 - protein, 331 aa, Zea mays
  Clone ID: 700211781_FLI.pep
EKSKLIRRWGISKPTYLVLIFLDVYISSNAFECNQRKFEGSAILIKGLAFFKYLGIKPWFSIVCWLWKKVNSSEDGGFQSFLDNVQYKATGILRYERIFGDGYVSTGGAETTKEFVEKLNLKPGQKVLDVGCGIGGGDFYMAEKYGTHVVGIDLSINMIMFALERSIGCKCLVEFEVADCTTKTYPDHMFDVIYSRDTILHIQDKPSLFKSFFKWLKPGGKVLISDYCKSPGKPSEEFATYIKQRGYDLHDVEAYGQMLKNAGFSHVIAEDRTDQFLSVLQKELDKFEKNKDDFLSEFAQEDYDDIVNGWKAKLQRSSAGEQRWGLFVATK

SEQ ID NO: 44988 - protein, 225 aa, Zea mays
  Clone ID: 700211981_FLI.pep
VAACTSGGAPERYRGVRLRKWGKWAAEIRNPFTGKRQWLGTFDTAGAASAAYLSASRSFADEKRRRRGLPVAASSADTPASGSTPTASSSSSASTAPFAHPSPSSVLEPSKEARNTQSPEATPARPSTDSAQLPEDPEFYQDLLRGLQLPDIDPLDFRAGLDALDLSDADFGLDDEHDLLLGDFGDEEMEIDLDLDDINDVFPEMPGCDLGRGMDDFLQTVDFCV

SEQ ID NO: 44989 - protein, 252 aa, Zea mays
  Clone ID: 700212153_FLI.pep
FLRYERQKLHQILIGKDREHTLLLFVIIFLHLSTAGAVLLSEEEDLELVIARKHTSTSNGTKNVSTSTLEQGLGPFLLKNLLERVQGALVLDSLTRCHHHPSADGIDGVRCKTSTISDQPTQSETGKEIVLEVASKDNWLDGIIEPKVQTTINNDSNTGDVKSTVKPSNTIRLECLAVDIDKPIELPFTSSLGSLRVISQPCSRVVQGVHKKQRGSTSSTTRGQVASKPLPIAIPILLEVEQPLEVVLKCKV

SEQ ID NO: 44990 - protein, 346 aa, Zea mays
  Clone ID: 700212431_FLI.pep
LYVAQVLKESFKIYCAINDGIINLVDKFFEMPRHDALKALEIYRRAGQQAGNLSDFYENCRGLELARNFQFPTLREPPQTFLATMEDYVKEAPRMVPVREPLELPERLLLTYKPEESEEILEPAPVEEEKAPVEEPVLVPPVTEVVSPPPKAEVPDTGDLLGLDDTNPAVSAIEESNALALAIVPTDGASTTGNTAFQEKGFDPTGWELALVTAPSNTTSSTSVSQLGGGLDKLILESLYDDGAYRQRQQQQLYGSAAPNPFMANDPFAMSNQVAPPPSVQMAAMSQQHQQIPTMMQPNPFGPPMHPQVSMAPATNNPFLDAGFGAFPAANNGHQQHNPFGSAQLL

SEQ ID NO: 44991 - protein, 224 aa, Zea mays
  Clone ID: 700213038_FLI.pep
YVVANTQKIKRRARTRDTSSLGRLRLRLRLAVGFDLGGDPSGLVLGCLEQEAPALVVHGDLERLGAEPVGDGEHDAAHLVVELGAVDGAAVVGVELLEDGVVERGDLGGERRRLGGPEAAAVEEAEGLERAPELGAGQHAVAVGVQRGEPRVQAAREGRLVRHEAAHRGAVQDHHAHGGPFVPWTRLRLARAGDSRAADERREWMETRERFWFGDCSPSASPGS

SEQ ID NO: 44992 - protein, 242 aa, Zea mays
  Clone ID: 700213041_FLI.pep
WLVLRMFVFLRRRKSTCAAAFSVLAVASASAAAAQVRVMSIFEYNGSAVVAMVGKNCFAIASDRRLGVQLQTIATDFRRVFKVHDKLYIGLSGLATDAQTLYQRLVFRHKLYQLREERDMKPEAFASLVSALLYEKRFGPYFCQPVIAGLGDNDEPFICTMDCIGAKELAKDFVVSGTASESLYGACESMYKPNMEPEELFETISQALQASVDRDCLSGWGGYVLVVTPTEVQERVLKGRMD

SEQ ID NO: 44993 - protein, 196 aa, Zea mays
  Clone ID: 700213061_FLI.pep
LMELTPMTLLSGFAPASMYKHVHSHTTMTPKLVFLQRKDNATYVRAATRLRRRRRYILPGLRLRLGLGLGLGPAACLAAARAPAQDGAEDAAGHPRRGRVHVGGHVLGPEHPLLLPAARLLHLLRLLIAVVAVSTTEQHADAPDAPGVPELRLGVLGGGGATAGLRLRLGLGLGQEPLVPDQARGPGPSERGRRPL

SEQ ID NO: 44994 - protein, 195 aa, Zea mays
  Clone ID: 700213144_FLI.pep
RSCAPPRSPRSCGNMGLTFTKLFSRLFSKKEMRILMVGLDAAGKTTILYKLKLGEIVTTIPTIGFNVETVEYKNISFTVWDVGGQDKIRPLWRHYFQNTQGLIFVVDSNDRDRVVEAKDELHRMLNEDELRDAVLLVFANKQDLPNAMNAAEITDKLGLHSLRQRHWYIQSTCATTGEGLYEGLDWLSNNIANKA

SEQ ID NO: 44995 - protein, 299 aa, Zea mays
  Clone ID: 700213152_FLI.pep
AKRRERRASGSKEMERAAPVRSSHTSTADLLAWPQPQGPAPATPSPPRRPGQPSEAIRKVVFGGQVTEEEADSLTKRKPCSAPKWKEMTGSGIFAAGSNGDAGEAAAAAKPARTSSRQASSTVSHISFAEDGTDPPKKPTSVAEVAKQRELSGTLQSEADSKTKKQISNAKSKELSGHDIFADTLDSRSNRARNPSNGSTASHAPAKNTNASTFSFGDANTDSTPKTARKITGKKVNDLTGNDIFKGDAPAASAEKHLSTAKLKEITGSNIFADGKEPIRERVGGNRKPPGGESSIALI

SEQ ID NO: 44996 - protein, 221 aa, Zea mays
  Clone ID: 700213225_FLI.pep
PGASPSRSPPPVAFVPSISGCVAGEPDTANRIRRQGEREEMGLTFTKLFSRLFAKKEMRILMVGLDAAGKTTILYKLKLGEIVTTIPTIGFNVETVEYKNISFTVWDVGGQDKIRPLWRHYFQNTQGLIFVVDSNDRDRVVEARDELHRMLNEDELRDAVLLVFANKQDLPNAMNAAEITDKLGLHSLRQRHWYIQSTCATTGEGLYEGLDWLSSNIATKS

SEQ ID NO: 44997 - protein, 211 aa, Zea mays
  Clone ID: 700213291_FLI.pep
IQGRGHDAGKEIWAPVAGVAAAHAADHEHDGVRGTARAGRRRGGGGGRGAAASAGARRGRRGGGRAGGPLRVGHRRRRGGRARGLAGGVPRPRGSGTGGATPELGRLLGCRDRRVPPRLRALQPPPRTRPRHLHVQGRHGVLQPRVPAAAHHDRGVEGEVRARHAADGAGVRPGGAAAAQRRGLRQTRHARRRILISHEGGGPRRSMIRLS

SEQ ID NO: 44998 - protein, 452 aa, Zea mays
  Clone ID: 700213463_FLI.pep
ASSSAMGKEKSHINIVVIGHVDSGKSTTTGHLIYKLGGIDKRVIERFEKEAAEMNKRSFKYAWVLDKLKAERERGITIDIALWKFETTKYYCTVIDAPGHRDFIKNMITGTSQADCAVLIIDSTTGGFEAGISKDGQTREHALLAFTLGVKQMICCCNKMDATTPKYSKARYDEIVKEVSSYLKKVGYNPDKIAFVPISGFEGDNMIERSTNLDWYKGPTLLEALDQITEPKRPSDKPLRLPLQDVYKIGGIGTVPVGRVETGVIKPGMVVTFGPTGLTTEVKSVEMHHEALQEALPGDNVGFNVKNVAVKDLKRGFVASNSKDDPAKEAASFTSQVIIMNHPGQIGNGYAPVLDCHTSHIAVKFAELITKIDRRSGKELEKEPKFLKNGDAGMVKMIPTKPMVVETFSQYPPLGRFAVRDMRQTVAVGVIKSVEKKDPTGAKVTKAAAKKK

SEQ ID NO: 44999 - protein, 417 aa, Zea mays
  Clone ID: 700213563_FLI.pep
AMAMSASSSSRALLRRIGGALLRRSFSSSSAASAGYHVAGGPSYMRGAVFWEPGRPLTLEEFRMPRPKAGELLIKTKACGVCHSDLHVLKGELPFSTPCVVGHEITGEVVDHGTHTPVEIINRFPVGSHVVGAFIMPCGNCFYCVKGQEDLCESFFAYNRAKGTLYDGETRLFLRGNGKPVYMYSMGGLAEYCVVPANALAVLPDSLPYTESAILGCAVFTAYGALRHAAEMRPGDSVAVIGVGGVGSSCLQIAKAFGASQVIAVDVLDEKLQNATTLGATHTVNAAKDDAVERIKEITDGRGVDVAIEALGKALTFSQCAKSVRDGGKAVMIGLAATNVMGEVDITRLVRRQVKIIGSYGARARQDLPQIVKLAESGAFNLQNTISRKCKFEEANGAYEDLNQGKIVGRAVVEIME

SEQ ID NO: 45000 - protein, 249 aa, Zea mays
  Clone ID: 700213874_FLI.pep
ILCRIMSETGHTVQVTNLSSRVSESDLHEFFSFSGPIEHIELIRSEGYGATAYVTFKERFALETAVLLSGATIVDQPVCITYWGQPEGTFNFWDRPTWEVEEEIEYRNYQTCQYNTTPQEAFTVAQDIMKTMLEKGYVLSKDALAKARAFDESYGLTAAAAARAAELSKRIGLTDRVNAGVGAMRSVDETYRVRETTKTVATATGRTAAKVVNGIVTSSYFSAGAMILSDALTRAAKAAADLAAHGRQN

SEQ ID NO: 45001 - protein, 67 aa, Zea mays
  Clone ID: 700214053_FLI.pep
IKRGGARRRSKLRGRRWVRSARGKRGNALSRARKERFASRGLTGGWGWLAAVSASYYALRATSSSIA

SEQ ID NO: 45002 - protein, 178 aa, Zea mays
  Clone ID: 700214077_FLI.pep
LLCQSPSQRSSAMIQAVMVISTQAKPRLLKFYSFQPPEKHQDLVRCVFQLLSARPESASNFVKVDSIFGPGTKMVYKHLATLYFVFVFDSSENELAMLDLVQVFVETLDRCFKNVCELDIVFNFNKLHTILDEMISGGQVIETSSEQIMKSVEEIERLEKQSSTTSFIPKSITERFTR

SEQ ID NO: 45003 - protein, 350 aa, Zea mays
  Clone ID: 700214342_FLI.pep
TNVPLARVISLPVHDTGQYVWATRPGYSNHLDRSSQRACMNAASTSGRRGCTVGRQIDIDSLCYYLTNLRLRRNDGDHVGLDHQLLRRPRPADTAVDHTGRSGVGDRLHVYVDDHGLQVVDLRDVDGVHLGAAAAGLALGHLLLGLLRYYHQRRRGLPVRHVQRHLREAEDEAQHVGERHEHVLLQRAVREPDHRAEHQEEGERDRHELHALGPDHLPHYAERRGEDAERDADADPAEHVHAEAGVGEKHGDERNEAEDGDVEPQQHLGRQHPGGLGRVHQVHGQVHGLDDAAHAVDGDQQLGAGLEQGVQDPQHAAEEGHHVRRRLEPLRRLVAVHAVERRQRRKKHHQ

SEQ ID NO: 45004 - protein, 197 aa, Zea mays
  Clone ID: 700214572_FLI.pep
RDPALGAVAGESGMGLWDSLLNWLRSLFFKQEMELSLVGLQNAGKTSLVNAVATGGYSEDMIPTVGFNMRKVTKGNVTIKLWDLGGQRRFRTMWERYCRGVSAILYVVDAADRDSVPIAKSELHDLLTKQSLAGIPLLVLGNKIDKSEALSKQALVDQLGLELIKDREVCCYMISCKDSVNIDVVIDWLIKHSRTAK

SEQ ID NO: 45005 - protein, 231 aa, Zea mays
  Clone ID: 700214818_FLI.pep
RTESSATRRRRDRPTRSYRSRMSYAYLFKYIIIGDTGVGKSCLLLQFTDKRFQPVHDLTIGVEFGARMITIENKPIKLQIWDTAGQESFRSITRSYYRGAAGALLVYDITRRETFNHLASWLEDARQHANANMTVMLIGNKCDLSHRRAVSYEEGEQFAKEHGLVFMEASAKTAQNVEEAFIKTAGTIYKKIQDGIFDVSNESNGIKVGYAVPNSSGGGAGSSSQAGGCCS

SEQ ID NO: 45006 - protein, 161 aa, Zea mays
  Clone ID: 700215132_FLI.pep
LVPLAVSRSHSLHFSSDGGAASSTMADSKATSAVTLRTRKFMTNRLLARKQFVLEVIHPGRANVSKAELKERLAKMYEVKDPNTIFVFKFRTHFGGGKSTGFGLIYDNLESAKKFEPKYRLIRNGLATKVEKSRKQMKERKNRAKKIRGVKKTKAGDAKKK

SEQ ID NO: 45007 - protein, 337 aa, Zea mays
  Clone ID: 700215279_FLI.pep
NESLELRVPDSLDLDILGRLSPEVGVRRLHALEYANDLAGVRVALGDAQRDVARGRGGVLDVLLLELLLVASASGGERDGVVVSGGAAAALGVEEGGAAVAGHEEGPAEAVRLAGGDELLDGEEEGHALAARELHGDGGVVDAVLLLELEGAVGGDLERALDLVQRVGEAGHELGLLELGRRVLGDALRLDGEGRRLQAQLLHLVLAGLERERVHAAVDGRALVRRARALHLQVRLALDLVVGQPLGRALRARARDEESRGGEREAGELGGVDALAGDVPDVGLEGARDPGGAGVDAERPGELRRRAGRRQRGGRRPAADLGRLHQGGRGLDLERGC

SEQ ID NO: 45008 - protein, 468 aa, Zea mays
  Clone ID: 700215291_FLI.pep
GLAVAAVVVLACLLATRVCVSVLVRENHGDAAVHGGAGGLPPPAPGAAGARAQHHGHPRRVQGVQAIQPVPVGDEGVRRDQLAAVDVDVRPGAVQRRHDDAGLRRRRLAPRHQERAAPPLGARLLRPQEGEEVRRRERRHAVPGHGRRRQHHGERQGGGPGGQELRLLGRHAGRQDLHRHQGGGDAPFQVRHPRGHGAHRVRRPLRHPLHRQPHPPPGARRLQGLRVAGRLHGRAQDVRGRHGQGPHPVRRQRRRLPGQGRARRQGHVQGQPHQAPPVPRPAFLQHQDLAQVRQGPAPHAGRQGRRHGGRQGRRRLARHRQEQVPRRVHRRRQRPVLPAHHGHPPGAAGALRRRPGGGTGAGASGRATGVPARGGRPVGGRGPRRPQVQEAVGVVRRRVATGRRARRGGRVLRRAGLPLVMHCCLTAPPTSASSDPSRYPFLCDLSPPLCSGPCFIESVGALPFPHVI

SEQ ID NO: 45009 - protein, 98 aa, Zea mays
  Clone ID: 700216252_FLI.pep
FFFFLPYLLALLDIATERVNNLHTTISPMIYSRRRQKRRNKRIATRERGFHPTSSAQRRGLHGRLQQLGPDQRGVGAVALHYLHNGHGVREPKHAHFC

SEQ ID NO: 45010 - protein, 186 aa, Zea mays
  Clone ID: 700216694_FLI.pep
SAVLELRKGERERRGGMDQVLNKVGSYWFSKRASKEIDSIGDDISSISSSIGGSAKWMVNKIKGKMQKALPDLLKEYDMPAGLFPRDTTNYEFNEETKKLTVYIPSACDVGYKDSSVLRFFTCVTGYLEKGKFSDIEGMKTKVLVWTKVTAIKTEGPKVHFTAGVKKTRSRDAYEVVRDGITIDKF

SEQ ID NO: 45011 - protein, 185 aa, Zea mays
  Clone ID: 700216860_FLI.pep
PSHLALLSCLLVLLLSFDKFLFHYLKRRWFSGGSGATVLRPPAKSRRNMASAKWSETAMLVIDMQKDFVDPAMRSPMLVAGGEAVVPAVAGAVAVARERGIFVIWVVREHDPSGRDVELFRRHHYSGGKGPTVKGLKGAELADGLVIKEGEYKLVKTRFSAFFATHLDSVLKTAGIKNLVIVGKH

SEQ ID NO: 45012 - protein, 152 aa, Zea mays
  Clone ID: 700217019_FLI.pep
RFAHSLQPLHRAATATARMPFKRFVEIGRVALVNYGEDYGRLVVIVDVVDQNRALVDAPDMVRCQVNFKRLSLTDIKIDIKRVPKKTALIKAMEEADVKTKWENSSWGKKLIVQKRRASLNDFDRFKVMLAKIKRGGAIRQELAKLKKASTA

SEQ ID NO: 45013 - protein, 153 aa, Zea mays
  Clone ID: 700217294_FLI.pep
QRRRRDLADDLVEGAGVLEPEHDADAEDVADGAAGQRVGEGEPGGVTRLQAGVARLQLQPRRRLAVRGRRQPEPPREQHQRRRRHHDQVGGGADVVAADALRRRPLPAHPHGRQRCHRGPGRGVAPEAVEPGHGGGELGCHVWRLRRRRRTSH

SEQ ID NO: 45014 - protein, 126 aa, Zea mays
  Clone ID: 700217620_FLI.pep
QIQAKYIHIFLLGTSRSSNLSGGGAGRCGGFTCHGLSLPERSLLASLGNSLQDGVRCHIALHGDLLFHDVYVVGLDAFHLAQDPLDSSNTALTGHANLEHNSLGHSARGKEGRGGPAVVVEISCRP

SEQ ID NO: 45015 - protein, 431 aa, Zea mays
  Clone ID: 700218331_FLI.pep
PFAAPARSVPMGYVLSAVARVLEQPTAWGAAREMALLAGPLWAAVLLGLLLGWAWRPRWAAGLVAAPAPAAAAQPPFATLDFWKAQLPARLRAPLGSAAAVRHGEEEEDEVSVRGGRSSEAASEELAVGKRDLANLWRLVEGRDGGPAWIKMMDRSLPTMTYQAWRRDAQTGPPQYQSSSIFEDATPEEVRDFFGDDEFRVSNKWDDMLVYHKTLEECQTTGTMKVHWVRKFPFFCSDREYIIARRIWKLGGAYYCVTKGIPCSSIPRRNKPRRVDLYYSSWCIRAVESRRGNGGGSTACEVLLFHHEDMGIPYEIAKLGIRQGMWGCVKRIEPGLRAYQQARAAGEPVSRSALMAQINTKVGDSFVRSLESDSDGSETVEAEEKPARNRVARFLVLGGAVALACTLDQGLLTKALIFGVARKFVGQRKAL

SEQ ID NO: 45016 - protein, 223 aa, Zea mays
  Clone ID: 700193220_FLI.pep
VTATCTSVASVLWLWHQSNRQEATSTTAIRSPYSDPHEVKNLYEERKEPGREELEEMASAEGERWVGLATDFSQGSREALQWAATNLLRAGDHLLLLHVIKEPDYEQSEAILWESTGSPLIPLSEFSDPIIAKKYGAKPDMETLDLLNTTATQKEIMVVVKVLWGDPREKLCQVIHDTPLSCLVIGSRGLGKLKRVLLGSVSDYVVNNATCPVTVVKSSSTEG

SEQ ID NO: 45017 - protein, 205 aa, Zea mays
  Clone ID: 700195731_FLI.pep
KLSIPKILRTSTMVPRCLCHQKGNQEKHKSYKQVRSNNDAACGERSSPRSGPLAPDAARELDVLGHDGDALGVDGAEVSVLKEPHKVGLGGLLQRRDGGGLEAEIGLEVLRDLTDEALEGQLADEQLRALLVLADLPERDGAGAEAVGLLHAAGGRRRLARRLGRQLLAGRLAARRLASRLLRAGHRSFDAWRGGRRVGGSVELR

SEQ ID NO: 45018 - protein, 92 aa, Zea mays
  Clone ID: 700197473_FLI.pep
SCTSSMTDEWFAYSLSAASLTSVPPYSGRRTVSPSFRATGIRLPALSRSPGPTATTLAAFSCNKSNIVKQRIDSTPTIIRFSSRTHQNTVLN

SEQ ID NO: 45019 - protein, 349 aa, Zea mays
  Clone ID: 700162821_FLI.pep
HVLLRLLARSAPASRPQPPPSPPPSVRLVVVMGKASKDKRDIYYRKAKEEGWRARSAFKLLQIDQEFNIFHGVKHVVDLCAAPGSWSQVLSRNLYVPAKQSSDCKEGDLPLIVAIDLQPMAPIEGVIQVQGDITNARTADVVIRHFDGCKADLVVCDGAPDVTGLHDMDEFVQSQLILAALAIVTHVLKVGGKFVAKIFRGKDTSLLYCQLKLFFSQVTFAKPKSSRNSSIEAFAVCENYSPPEGFKEEDLYHLLEKVGTPSGAGDLDCRSGWLEGPNKVYIPFLACGDLSGYDSDRSYPLPSSTDGGSYRSLDPVQPPIAPPYKTALQMKKASSHGAGADAVKPSADS

SEQ ID NO: 45020 - protein, 412 aa, Zea mays
  Clone ID: 700162926_FLI.pep
ESSEPPARPPPSPPPVPKANSFQVAMADQANQPTVLHKLGGQFHLRSIISEGVRARNICPSVSSYERRFATRNYMTQSLWGPSMSVSGGINVPVMQTPLCANAPAEKGGKNFMIDFMMGGVSAAVSKTAAAPIERVKLLIQNQDEMIKSGRLSEPYKGIVDCFKRTIKDEGFSSLWRGNTANVIRYFPTQALNFAFKDYFKRLFNFKKDRDGYWKWFAGNLASGGAAGASSLFFVYSLDYARTRLANDAKAAKGGGERQFNGLVDVYRKTLKSDGIAGLYRGFNISCVGIIVYRGLYFGLYDSIKPVVLTGNLQDNFFASFALGWLITNGAGLASYPIDTVRRRMMMTSGEAVKYKSSLDAFQQILKKEGPKSLFKGAGANILRAIAGAGVLSGYDQLQILFFGKKYGSGGA

SEQ ID NO: 45021 - protein, 139 aa, Zea mays
  Clone ID: 700163627_FLI.pep
SFQCPPSCARYPSPSRPLPAKSAQSPTRMKFVAAYLLAVLAGNSSPSAEDLTAILESVGCEVDNEKMELLLSQLSGKDITELIAAGREKFASVPCGGGGVAVAAAAPAAGGAPAAEAKKEEKVEEKEESDDDMGFSLFD

SEQ ID NO: 45022 - protein, 513 aa, Zea mays
  Clone ID: 700164010_FLI.pep
QARLAPETRESIPNPDRPAAREAMPDKAVDDVMEAAVGAHFSGLRLEALRLSTSAPSSPSSSPAAAAHTHSNGAVYANGTTELPSPAAARQPFVIGVSGGTASGKTTVCDMIIQQLHDHRVVLVNQDSFYRGLTAEESAHAQDYNFDHPDAFDTEQLLECMGQLKCAQPVNVPIYDFKKHRRCSESFRKVNASDVIILEGILVFHDQRVRNLMDMKIFVDTDADIRLARRIRRDTVERGRDISSVLDQYGRFVKPAFDDFVLPSKKYADVIIPRGGDNHVAVDLIVQHIRTKLGQHDLCKIYPNVHVVQSTFQIRGMHTLIRDRDITTPDFVFYSDRLIRLVVEHGLGHLPFTEKQVITPTGSVYMGVDFCKKLCGVSIVRSGESMENALRACCKGIKIGKILIHRVGDNGQQLVYHKLPMDIAERHVLLLDPVLGTGNSVAQAIDLLIRKGVPEDRIIFLNLISAPEGIQCICKRFPSLKIVTSEIDYGLNEEFRVIPGLGEYGDRYFGTDN

SEQ ID NO: 45023 - protein, 349 aa, Zea mays
  Clone ID: 700164643_FLI.pep
FWRIWSRAEGSESESEKMMGGFLSRVLLLAFGYAYPAYECYKTVELNKPEIAQLIFWCQYWILVALLTVLERFGDFTISWLPFYSEAKLMFFVYLWYPKTKGTTYVYGTFFKPYISQHENEIDRNLLELRARATDTVVLYFQKAASAGQSTFFDVLKYVAAQSPSQKSRQRLHRESQQPPQQQQPQVQVQQAQPQKQAAPVMRRASSIAARQAAMAQQSQETKPISSSPKIKRQTSARSGSVASTKPPVAASALKPGGSPKKGEVKPAADPVQTPTTGADSPKPEPSAPSLPGAEGVDKMAIDEASGDALEGAEELDPALEEETPMEETIRVTRAKLRRRTATEDPAGN

SEQ ID NO: 45024 - protein, 483 aa, Zea mays
  Clone ID: 700164733_FLI.pep
AAAGTGASPAMARPPQEAIDTFVSITGADEVTAVRVLEEHGHDLNEAVNAYFNEGDRTTTRINQNPVPATASYDDMMELDEPLDPMFNRPLFPRTLGNPFALLDPGFADITAGDIFGRGPRVTQPRDVRQIPIEVKDSNTQTGSSGQGPIIEDVTGRESFYGPEVHGTVIVDEDDEDLPLTLSAQDPKIPSSALHPNHFMPSAPPVVDVSDHNNDIEEEMIKAAIEASKREADGMKNVLSSGQSENMSRGRGDHELARAVSLSLETAERERALRQEGMYVADHSPDLSDKEGGQGGSGISERRGLTTGEVGTSEQTVDEENFQEDNEDGEEQPLVRTRSRRLRGRTIEPAETVQRADSPPSSPQPHVQIGHQRNVGFPSVEWGGISSEERDEALMLEAAMFGGIPEGAPYPFSFPAHGRSTHYPLVARPPSPSLTAQRLLREQQDDEYLAALQADREKELKAVQEAELRRVEEAAAREAALER

SEQ ID NO: 45025 - protein, 195 aa, Zea mays; identical to SEQ ID NO: 44994
  Clone ID: 700165115_FLI.pep

SEQ ID NO: 45026 - protein, 167 aa, Zea mays
  Clone ID: 700165179_FLI.pep
ASTAVFSRPADVLCAARYGATVVQRLHSRQVCRRSPAPPPPSSLLPPPTAPSAHSRRQCPVLLLLSADSELICLLTVLSADSAQSIATASAHSRRRQCPVLLTVNLLNQSLFGDSEFEWQQIARHCLPVKFYNKSEKTFQRSFKHLNVEKLVHNVLTFYRFNNHGSE

SEQ ID NO: 45027 - protein, 241 aa, Zea mays
  Clone ID: 700165723_FLI.pep
SRAILGFLSPSAPPQIWPPPPLTQVVLMAPAVEAVKETGTFQKVPALNERILSSMSRRSVAAHPWHDLEIGPGAPTIFNCVIEIPRGSKVKYELDKKTGLIKVDRVLYSSVVYPHNYGFIPRTLCEDSDPLDVLVIMQEPVIPGCFLRAKAIGLMPMIDQGEADDKIIAVCADDPEYRHYNDIKELPPHRLAEIRRFFEDYKKNENKEVAVNDFLPASAAYEAIQHSMDLYATYIVEGLRR

SEQ ID NO: 45028 - protein, 43 aa, Zea mays
  Clone ID: 700166031_FLI.pep
PRCQLVLATTTLHFHRYMIYDCFFLFLSSGCLCGVMKYHSFSF

SEQ ID NO: 45029 - protein, 204 aa, Zea mays
  Clone ID: 700166135_FLI.pep
ACQCSISSDSSHLSMPRLFPCGRSSPTPIVPPLRWPCIPSTHTSCSPRHGMDDRCICSCVMFKQSLVGGLCTMSGSPSFWCAVADAVAQLAQILAIIPVTPCVGMLTRRCRPSLSSSSPRPRVVLGRAQLLVVDVPLSCRSSLMFTSVCWVAWVVMSRRAVRWWFEDVLEPEMFQVDTGRPYTVDTSKIHSILWCQGEKFLGTG

SEQ ID NO: 45030 - protein, 378 aa, Zea mays
  Clone ID: 700166205_FLI.pep
TPGGAHLTFPSSSCEHLPRLALMASSEPIECQVVALRVSIHCQGCKKKVKKVLQNISGVYRCEIDARSNKVVATVSTELDPYMLVAKLRKSGKQAELWPEQPVQQQEQPAPPAESQRQEEPKNNQPAEPGRPSEPAEERGAAADTAEAAAAEPSNPQPSPPEPKPSAGGEAPNPAAQDSKENASADDVGGGDETAAAPAPAPAQQGPSEAKGKAKAKQHTAEMEERQPVDARVTVEYDHRGVGGGYVSRMPPPAVMSYNQVRPSVSASYYAPAPAPAPAPMPMGRPGPSQGYIDEHYTPSYSSSSNNYYSSNRSPAYEPYYYSAPQPAPYSYQYQYQPASSSEDYYYSAPPQRSAFSPPREGYGDMFNDENANSCTVM

SEQ ID NO: 45031 - protein, 220 aa, Zea mays
  Clone ID: 700166274_FLI.pep
SDLLGKIMEACLFFHSGRAHEVACAEQEEDIGSPSDSESPSTSTSRESAGSSSELDDDASSSGSDRFEMSALMTQLPLKRGLSRFFDGKSQSFASVAAVGSLEDLAKPARKRLKPSRSCGGALDAHRGRLLSPRRHWTKPAAASGARKTAARSGGLSVLTAVAPRMPPPVRGLRTWPPRFSSLIEPRISLPELDIDARLHVTGCAVAGTATHQRIHPCLN

SEQ ID NO: 45032 - protein, 111 aa, Zea mays
  Clone ID: 700166530_FLI.pep
GMDANRRQSGIQQLLAAEQEAQQIVNAARAAKSARLRQAKEEAEREIAEYRAQMEAEFQRKVAESSGDSGANVKRLEEETAAKIEQLTQQAASISPDVIQMLLRHVTTVKN

SEQ ID NO: 45033 - protein, 260 aa, Zea mays
  Clone ID: 700166887_FLI.pep
QTGLYYWLIANGRKHGSRSAARSGPRSQQVHLLPGGEVIDELVAAPQALLHGGVVDVGVGPLAERWELLAADEDHPGGLLDDPDPVRQRTGGDVDEADGLAAEEPLPPELRLEQSQVLLGLLRHSLPALLVVRPERHPERPRELLVDEVGPEPRVRPRVGFRGEERRPVEGLVDVLEDDERLGDGPVAVEEHGHEFVHGVVCQQQLALVAQVLQDELVGHPFEAQGHLGAVDERAGEGAHQPHRRRLGGRHLLWSFYLRL

SEQ ID NO: 45034 - protein, 200 aa, Zea mays
  Clone ID: 700168141_FLI.pep
AGRRGSDVPLRFYSASVLPTAWCLIMEEAGRGCGLLKVVVTHGRNLAVRDFTSSDPYVIVHVADKTTKTKVINSCLNPVWNEEMTFSMKEPVGIIKFEVFDWDRFKYDDKMGQAFLDLQPVAAATKLRRALRLTAGETNLRKVNPDADNCLLSDSFVTYANGEVAIDARLRLREVESGELFVTIKWIEPDSANTGKQADH

SEQ ID NO: 45035 - protein, 166 aa, Zea mays
  Clone ID: 700168280_FLI.pep
FQSPVFWHSELQPPSGTIQHSAPHGALHCKPNLMHHYTAQDRIHGDTSSLQSRSRSRNTTQQRQFRRTPKGPGRVPPPYMAYLWVQVLAVFSYLFRSVLYMCAISGTRGSSGFGSVSREQMDSSTLEMVSAGLHWSFRMSRQMLPLLLMFGWNTLVRNATFGGLKG

SEQ ID NO: 45036 - protein, 59 aa, Glycine max; identical to SEQ ID NO: 44171
  Clone ID: 701157781_FLI.pep

SEQ ID NO: 45037 - protein, 233 aa, Glycine max
  Clone ID: 700940966_FLI.pep
PNIADPQQKKLSWSQRYKIIEGTARGILYLHEHSRLKVIHRDLKPSNILLDENMNPKISDFGMARIIELNQDLGKTQRIVGTFGYMSPEYAIFGQFSEKSDVFSFGVMIIEIITGRKNINSHQLPDIVDSLMSYVWRQWKDQAPLSILDPNLEENYSQFEVIKCIHIGLLCVQENKNIRPTMTKVIFYLDGHTLDELPSPQEPPFFFRDIKDKKIPMQHFSVNKMSTSIFYPR

SEQ ID NO: 45038 - protein, 206 aa, Glycine max
  Clone ID: 700955792_FLI.pep
LPSSASDSRLAESPQLGTIPPNADSHRNSVCSDPMGSIVEDADTDTVYVAVGKNAEKTQQLLHWTVKNFSGKEICLLHIHQPHSLNSFSDRNLSGYEPKDHAIKAFQEHGNQKVHELLDQYILTLVPAGVRAYKLLIEMDDIEKGITKAIAQHNIRWLVMGAAAADGYNLGKLAKQESEKAIFVREQALLSCNTWFICKGNVICNR

SEQ ID NO: 45039 - protein, 121 aa, Glycine max
  Clone ID: 701206209_FLI.pep
FKIRWVSSVGAWRVLWVRWFVNRRFLNRGLVHRWFVHWWFVHWWLVHWWLLYRRLVNRWFFNWRFIHWRLVNGWLINWRLINRWFFNWRLVNWRFVHWWFFNWGLINWRCVNRWLVNWGFS

SEQ ID NO: 45040 - protein, 170 aa, Glycine max; identical to SEQ ID NO: 44578
  Clone ID: 701206301_FLI.pep

SEQ ID NO: 45041 - protein, 129 aa, Glycine max
  Clone ID: 701206459_FLI.pep
LVAANPVNYGRPCQLSCVEALSAALTICGEEKTANLLLDKFKWGHAFMSLNGELLRAYSKCQNSAEIISVQNAWLSQESQIPRAPTDSEVTTPESEDKIQNSSDSEDGLPPLEKNMNHLSIVNSDEESE

SEQ ID NO: 45042 - protein, 213 aa, Glycine max
  Clone ID: 701209756_FLI.pep
GCRILRKGCGEDCAIRPCLEWINTPQAQANATLFLAKFYGRAGLVNLIDSAPQHNGPAVFKSLLYEACGRIANPTFGSVGLFWTGEWAQCQAAVDAVLAGSQIKVVGASDSQGIATHGDEHVAQILGIRHVSKDAEMDHVKGRAKKIKRSRTVIKPKPQVSSIDSAAMLKLTWSREPGRSEGDSEETVEAMLVSQNKPSRNGGVEMDLDLTLG

SEQ ID NO: 45043 - protein, 26 aa, Glycine max
  Clone ID: 701213491_FLI.pep
KVNIIYSNLKKHNNTSSQTHVTLPIK

SEQ ID NO: 45044 - protein, 271 aa, Glycine max
  Clone ID: 701142885_FLI.pep
ALRCLVMSLSVLFTLGLARESHARDEDFWHAVWPNTPIPSSLRDLLKPGPASVEIDDHPMQIEETQYPKTFFYKEDLHPGKTMKVQFSKPPFQQPWGVGTWLKEIKDTTKEGYSFEELCIKKEAIEGEEKFCAKSLGTVIGFAISKLGKNIQVLSSSFVNKQDQYTVEGVQNLGDKAVMCHRLNFRTAVFYCHEVRETTAFMVPLVAGDGTKTQALAICHSNTSGMNHQMLHQLMGVDPGTNPVCHFLGSKAILWVPNLSVDTAYQTNIVA

SEQ ID NO: 45045 - protein, 215 aa, Glycine max
  Clone ID: 701143116_FLI.pep
VKMSVVVVVIGVGVCTVTDVKVNLKGFMCACIAVLSTSLQQISIGSLQKKYSIGSFELLSKTAPIQALFLLILGPFVDYYLSGKLITNYKMSSGAILFILLSCSLAVFCNVSQYLCIGRFSAVSFQVLGHMKTVCVLTLGWLLFDSELTFKNIMGMVIAVVGMVIYSWAVELEKQSNAKTLPHAKNSMTEEEIRLLRDGVEKSPLKDVELGEAQG

SEQ ID NO: 45046 - protein, 381 aa, Glycine max
  Clone ID: 701143195_FLI.pep
VFVSTWNVGGIAPDEDLNIDDLLETCNNSCDIYILGFQEIVPLKASNVLGSENNEISMKWNSIIREALNKKITHQRDKDAKKQELKNNFPNKKENPAKCCDAPHDFQCIISKQMVGLFISVWIRRDLCPFIRHPSVSCVGCGIMGCLGNKGSISVRFQLHETSFCFVCSHLASGGREGDEKHRNSNVAEIFSRTSFPRGPLLDLPRTILDHDHVILLGDLNYRISLPEETTRLLVEKRDWDSLLANDQLIMELMSGNMLRGWHEGAIKFAPTYKYCPNSDIYYGCCYHGKKAEKRRAPAWCDRIVWCGEGLKQLQYTTIESKLSDHRPVKAMFIAEVRVLPELMKNLQSLFLSERYEQIKTPFEVSTTEDFVNRKRSSFRL

SEQ ID NO: 45047 - protein, 521 aa, Zea mays
  Clone ID: LIB143-003-C12_FLI.pep
TEPSLFFFRIYLEPSPNHSSSSESSSNPGFGHNLQATAPSCGPWILELLFSNSFAHGCSRGDATLHSLEHPVVEIGARPLLMLQRLHAVDPLLPLDPLHVGQHAAACEVPRERVGDERVGVEPGERDELPDVAEARDARDEGGHLGVRHPRRVPVEGRREVVGEHRLGARRLDALGEGGALGHVGAGRLHPQHVGVRREGAAPDHGRRHGPPEAVEPFPGPRQVPVPEHGRDAEAGGDVARLVVGHAPVVAAGGAVPLLEPALLLLARDAEARDGVPDALGEGLEPRRGQPLVLDGLELPAALARRHAGRQHGREALAPEARVGGADYELVVARVDVGLDERGGDGVGARDEDGLDAHDVELEPRGDEAVHVLGDGDEHLARHVAALLGDGGLVLEVDPGRPALHEELAELDGGRGAAEARVAVGDDGLEEVDVRRPRALGAGQRHARLERAPQLLGHLPRRVALPERAPEEDHVAGGVGALGEPEPLRAPPRLHLRHLRLEPPFLLHDQRRHGERRRHGW

SEQ ID NO: 45048 - protein, 583 aa, Glycine max
  Clone ID: 700996404_FLI.pep
SNMGNTCVGPSISKNGFVQSVSAAIWRSQLPEGSVSNRESVKEEATSVPESPLPVQNKPPEQITMPKQEAKQEGKSEIEPEKEQDKKKQKKRGSVKRVSSAGLRVDSVLQRETDNFKEFFTLGRKLGQGQFGTTFLCVEKATGLECACKSIAKRKLVTDDDVEDVRREIQIMHHLAGHPNVISIKGAYEDAVAVHVVMELCAGGELFDRIIQRGHYTERQAAKLTKTIVGVVEACHSLGVMHRDLKPENFLFVNQHEDSLLKTIDFGLSVFFKPGDIFNDVVGSPYYVAPDVLRKRYGPEADVWSAGVILYILLSGVPPFWAENEQGIFEQVLRGDLDFSSDPWPSISESAKDLVRKMLVRDPRRRLTAHQVLCHPWIQVDGVAPDKPLDSAVLSRLKQFSAMNKLKKMALIIIAESLSEEEIAGLKEMFKMIDADNSGQITFEELKAGLKRVGANLKESEIYDLMQAADVDNSGTIDYGEFLAATLHRNKIEREDNLFAAFSYFDKDGSGYITQEELQQACDEFGIKDVRLEEIIKEIDEDNDGRIDYNEFVAMMQKGNLPAVGKKGLENSFSVKFREALKL

SEQ ID NO: 45049 - protein, 380 aa, Glycine max
  Clone ID: 700837152_FLI.pep
TPRPSRRRSLDILPLKYIADMPMPPPEALRKRPKLNLRDCDNAIENCDESTGHKVTKKESKVDYDDDVVSETKNVTVSEVEEESPKFGVTSVCGRRRDMEDSVSVRPCFTQGFHYFGVFDGHGCSHVATMCKERLHEIVNEEIESARENLEWKLTMENGFARMDDEVHRRSQSNQTFTCRCELQTPHCDAVGSTAVVAVVTPDKIVVSNCGDSRAVLCRNGVAIPLSSDHKPDRPDELLRVQSKGGRVIYWDGPRVLGVLAMSRAIGDNYLKPYVISEPEVMVTERTEEDECLILASDGLWDVVSNETACGVVRMCLKAQKPPGSPGSDVAADGSDRACSDASILLTKLALARHSSDNVSVVVVDLRRDQRQSSNYNDVN

SEQ ID NO: 45050 - protein, 527 aa, Zea mays
  Clone ID: LIB3150-075-C4_FLI.pep
PLPSSVLWLCISSLRLFILATGPLSLTCCPQVQMMKSLLFSAHPTSLLLPAPRLRRLLRLRAASSASASAPPRADRRSPGTPSRRPSSSLYARPSLLDMERDRATRRADVDAFLTSLGVDPGELAGLELPVTVDVMRERAEFLGSLGLTQEDLAAYPLALGCSVRKNMVPVLDYLGKLGVRRDALPDLLRRYPQVLHASVVVDLAPVVKYLQGMDVRPTDVPRVLERYPELLGFKLEGTMSTSVAYLVGIGVGRRQVGSVITRFPEVLGMRVGKIIKPFVEHLEGIGLQRLAIARIIEKKPYVLGFGLQEKVKPNIEALVDIGVRKEALASIVMQYPDVLGLELRDKLVAQQSLFESSILVSREDFGRVLERMPQAISLGRAAVLKHVNFLTACGFMLSQVSKMVVACPQLLALNIDIMRMNFEYFKNEMERDLEELVEFPAFFTYGIESTVRPRHEMVSRKGLTCSLAWLLNCSDAKFDERMKYDTIGVDEMEREDSSDMNASVDEVESEEYEDSDYGDSDDEFVR

SEQ ID NO: 45051 - protein, 242 aa, Glycine max
  Clone ID: 700889690_FLI.pep
IALDVARGMEYLHTLAHQSFIHRDLKPSNILLADDFKAKVSDFGLVKLAPEGEKASVVTRLAGTFGYLAPEYAVTGKITTKADVFSFGVVLMELLTGLMALDEDRPEESQYLAAWFWHIKSDKKKLMAAIDPALDVKEETFESVSIIAELAGHCTAREPSQRPDMGHAVNVLAPLVEKWKPFDDDTEEYSGIDYSLPLNQMVKGWQEAEGKDLSYMDLEDSKSSIPARPTGFADSFTSADGR

SEQ ID NO: 45052 - protein, 472 aa, Zea mays
  Clone ID: LIB3150-023-A11_FLI.pep
QERAAKETSQAMEKAVDRQRVLLRHLNPAAAGSPAPPAISASACAAGDSAAYHRRPAFADDVVIVAAYRTAICKAKRGGFKDTFAEDLLVPVFKALVDKTKLDPSEVGDIVVGTVLAPGSQRAIECRMAALYAGFPDTVPLKTVNRQCSSGLQAVADVATAIKAGLYDIGIAAGLESMTVNKVSLDGQANPKVELFSQARDCLLPMGLTSENVAHRFGITRLDQDQAAVESHRKAAAAAAAGKFKEEIVPVHTKIVDPKTGEEKKIVVSADDGIRVDTSLAVLSKLKPAFSKDGSTTAGNASQVSDGAGAVLLMRRDVAMKKGLPVLGVFRTFAAVGVDPAVMGIGPAVAIPAAVKAAGLQMDDIDLFEINEAFASQYVYCCKKLELDPAKVNVNGGAMALGHPLGATGARCVSTLLNEMKRRGKDCRFGVISMCIGSGMGAAAVFERGDGVDELTNARGISTHNWLSKDAM

SEQ ID NO: 45053 - protein, 249 aa, Zea mays
  Clone ID: LIB3150-052-A2_FLI.pep
VPPALEINDAEEFLLPSGDSGTDLVEEVDNKTLELCHVTAGGEVPGREGDEDGATGPVDAAHAQLVLRQLPPHLLLRHGAAGRRLPPPLEELEEHGGGLVHVVVARAQEPTQRQVVHRLDNTGSGSPSRAALSHRRAAPSQLPLAAAPSRVAVASSRCRTMGRSGRLAMSSCRVASRFDRAFSWCTVRLWRSLMRTSCAVVIPRAPAEMTSLLRPPNRTARYTRDGPCTGGMDEGGGGVEDGAPEPLSR

SEQ ID NO: 45054 - protein, 84 aa, Zea mays
  Clone ID: LIB3066-017-B9_FLI.pep
DAAAAAAAAAAANAAVPVSQANLTTACTSNTFLSQPKPSDTPSLPPKGGPPSEEDGLELTVAPPSQQNMTNMSSQNAVGVIQVI

SEQ ID NO: 45055 - protein, 75 aa, Glycine max
  Clone ID: 700747284_FLI.pep
HNYISQGKELVNNITNQAHYINKRKPNPTTPHQNSVWTLPSFQLRLWFSPYRSNLSSDHFRPSILNYYMTCRRLQ

SEQ ID NO: 45056 - protein, 240 aa, Glycine max
  Clone ID: 700876832_FLI.pep
HASWPLSITVYQLYTLNLSTKDAFFFFGLEERRMERKVLILCSVVAFLGLLSAATSFGAEATRIKVSQVHFVTPNQCTYPRSPALPLGLIAAVALVLSQIIINVGTGCVCCRKNLQIPDSNWKVALACFVLSWFTFVIGFLLLLTGAALNDQRGEESVYFGYYYCYVVKPGVFAGGAILSVASAAFGILYYISLTEKNNGIQYPYPNQGVIAMAQPQIPSQTSQEPVFVHEDTYIRRQFT

SEQ ID NO: 45057 - protein, 248 aa, Glycine max
  Clone ID: 700835718_FLI.pep
SYFKNYVKTILTRKNTITGIEYRNDPTIFGWELINEPRCLTDPSGDTLQDWIEEMSAFVKLIDKRHLVTVGLEGFYGPNDPKRLTVNPEDWASRLGSDFIRNSKISNIDFTSVHIYPDHWFHHQVFEDYMKFVSKWMLSHIEDGDKILNKPVLFSEYGLSDINFTMPERKTMYKTILDISYKSAKRNRSGAGALVWQFLVGGMQEFTDDFGIIPWEKTPIPSLFVEQSCRLTKVKGWPHKDTSFKQFC

SEQ ID NO: 45058 - protein, 426 aa, Glycine max
  Clone ID: 700807611_FLI.pep
GVLAFFFVASLFIACFFYLDYKGFRSRGTTIIDLDFSSSSSSSSSVSVSVSSAPVQFLSQDGDKCDIFDGNWVWDETYPLYHSVNCSFLDQGFRCSENGRPDTFYTKWRWQPKDCNLPRFDARNMLEKLRDKRLVFVGDSIGRNQWESLLCMLSSAIANKARVYEVNGNPITKHTGFLAFKFEDFNCTIEYYRSPYLVVQGRPPSGAPDGVRMTLRVDHMDWISHKWRDADVLILNAGHWWNYEKTVKTGCYFQIGEEVKMNMTTEDAFRKSIETVVDWITNEVNINKTYVVFRTYAPVHFRGGDWNTGGGCHLETLPDLGSLPAVSDIHFRTVVDVLSERTNKSKVLNLDLLNVTQMSIRRRDGHASIYYIGPDSTASMQRQDCSHWCLPGVPDSWNEILYALLLKREDIFERRQNTTKISQVPP

SEQ ID NO: 45059 - protein, 159 aa, Zea mays
  Clone ID: LIB3150-038-E8_FLI.pep
SMAHRHIRSFAGLLQLSFLSVDLLKRCPELRIFVVLDEQRGSCFHQGLLRVPRRHTDDRHPCRDASPDTGRRILEDEAVLCGHLELLEGPEIRVRRGLWLLALASDDDGLEEVREAQERDHQLRVDPGGVGHRRALVPVVFHPLDHLREAFHRHQALFC

SEQ ID NO: 45060 - protein, 319 aa, Zea mays
  Clone ID: 700048043_FLI.pep
EKGHFAFILWPLRRSPSSRFGGNPIRWDSLWKGAALVPVSPQLPTLYISISCSSTVSCFDANQINLWPLFPSELLRFVFFSAEDMAAANGAAGAVLFSEEDLREVSGVRWGEDFVEVTCGCTSHRYGDAVGRLRVFASGDLEINCECTPGCREDKMTPAAFEKHSGKETAGKWRNTVWVMVQGEKVPLSKTALLKYYYLAHKSGNGSHKGRNGRPSHRDEFICCAGCGKERRFRLRSKEECRVYHDALAKASWTCADLTTDRVTCDDEEERASRKVLRGCSRAPSCTGCMKCVCFGCETCRFKDCDCQTCVDFYRNSKE

SEQ ID NO: 45061 - protein, 475 aa, Zea mays
  Clone ID: LIB143-053-H11_FLI.pep
LLNYCFMDPESRKYMPDPANCKVEAEECDAYEEGNEPVAMIEESPPDIEADGEDGKSSDSYCSMECTQVLRVKSMYISSAILAAKSPFFYKLFSNGMKESDQRHATLRITASEENALMELLSFMYSGKLTTNQPTVLLDILMIADKFEVGSCMRHCSQLLRNLPMTTESALLYLDLPSSISMAAAVQPLTDTAKEFLANKYKDLTKFQDEAMNIPLAGIEAILWSNDLQVASEDAIYDFMIKWARAQYPKLEERREILGTRLLPLVRFCHMTCRKLRKVIACSDLDHEQATKCVTEALLYKADAPHRQRALAADVMTCRKYAERAYKYRPLKVVEFDRPYRQCIAYLDLKREECSRLFPSGRIYSQAFHLAGQGFFLSAHCNVDQQSAFYCFGLFLGMQEKGSTSVTVDYEFAARTRPSGEFVSKYKGYYTFTGGKAVGYRNLFAIPWPLFMADDSLFFIDGVLHLRAELTIKQP

SEQ ID NO: 45062 - protein, 592 aa, Zea mays
  Clone ID: LIB148-006-G4_FLI.pep
PLRAESFERLEKIGQGTYSSVFRARELATGRLVALKKVRFDSVEPESVRFMAREILILRRLRGHPNVVGLEGIITSRSSPSIYLVFEYLEHDLAGLSSSPDITFTEPQIKCYMRQLLEGLAHCHARGVMHRDIKCANLLVNNSGELKVADFGLANLFAPAPAAPLTSRVVTLWYRPPELLLGATAYEPSVDLWSAGCVFAEMHARRPVLQGRTEVEQIHRIFKLCGSPPEDFWRRLGLSHGAVFRPQQPYPSRLRDTFAASMPDHTFRLLATLLSLDPAGRGTAAAALDAEYFTTAPYACEPESLPKYAPNKEMDAKLREESRRRSNLPSQGGEADKGLSRGHKSMRLQDTNQSHVHAEESLPVVAENGVTMAGNDGDSRLFVDLEPVPAISKRHGGSVGGDHAAPCARARTMSTSFKEPPCVAEHLPLSGPVQLAASTGFSWAKKPRPDATTAAVTVTMRSGSMGPGTNRNNNSGGGDGARTTSGSGATATATAAAAPYEAEKQEVIKQWAQVADAFSASEAYNSRLRQTLDAKQLKTGMMHKGKVNRVDFSGPLLSQPRRIDELLHIHEQQIRQAGRRPWFMKGTEEEEH

SEQ ID NO: 45063 - protein, 584 aa, Zea mays
  Clone ID: LIB3060-029-E5_FLI.pep
SGSARFGQEDVIKEVVGSQRRADGSGEPGDSMEVDEQKAKEVGIELPHATDVLHKNGSDGLEMNDVSGLRTVGILNTSSAKESDVHSLSNKMKHPNISREQQTRTSNSNAAHHATNSITDQTTALPDATIRIIKNQLTTAKMYLGLFASRGNHGFTRELRARMRDIQRALGDARSDRQLPHNVHSKTRAMEQTLVKVRKIHDGCSSAVNRLHTVLHSTEQQLESNKRQANYLAQVAAKSLPKGLHCLTLRLTNEYYFTNSKNKDFPYVEKLEDPKLYHYALFSDNVLAAAVVVNSTLVHAKKPEKHVFHIVTDSLNYAAMKMWFLANPFGKAAIQVQNIEEFTWLNSSYSPVLKQLETRFMIDYYFRTGHARHDENPKFRNPKYLSILNHLRFYLPEIFPRLNKVLFLDDDTVVQRDLSALWLVDLKGKVNGAVETCRQDFHRFDKYLNFSNPLIAKNFDPHACGWAYGMNMFDLSDWRKQNITEVYHTWQKLNENRLLWKLGTLPAGLVTFWNRTFPLDRSWHQLGLGYNPNVNVKDIRRAAVIHYNGNLKPWLEIGLPKYRKYWSAHVNYDQVFLRECNINP

SEQ ID NO: 45064 - protein, 83 aa, Glycine max
  Clone ID: 700567131_FLI.pep
ENEKNLILSAQAVKPPLYTLDIPVCMLFVKITPLGFSWTKKKGKVDLPLFGYPIAIWSVSLSLSVETNFESYEAILSIFRKLL

SEQ ID NO: 45065 - protein, 215 aa, Zea mays
  Clone ID: LIB3153-013-D5_FLI.pep
LIGGAQNLTLTTMFSLFYGLWKHVFSKAEFHVLILGVHKAGKTTLLEKLKSIYLKGEGLPHDRIVPTVGLNIGRIEDANVKLVFWDLGGQPGLRTIWEKYYEEAHAVIYVIDSASASSFEDAKSALEKVLRHEDLHGAPILIFANKQDSPAAVTEEELARHLHLKELDERPCMFQAGSAFNGTGIKHGVDWLVEEMERSKRTEALRARTEAAGKI

SEQ ID NO: 45066 - protein, 402 aa, Zea mays
  Clone ID: LIB3150-016-D7_FLI.pep
STVTAASPSVQPVRRAANPADTMQAHGIAIRARGPVAATQAPARRRQCRVSAAAVGAPAARARVTHSMPPEKAEVFRSLEGWAARSLLPLLKPVEECWQPADFLPDSSSEMFEHEVRELRARAAGLPDEYFVVLVGDMVTEEALPTYQTMINTLDGVRDETGASNCPWAVWTRAWTAEENRHGDILGKYMYLSGRVDMRMVEKTVQYLIGSGMDPGTENNPYLGFVYTSFQERATAVSHGNTARLARAHGDDVLARACGTIAADEKRHETAYGRIVEQLLQLDPDGAVLAVADMMRKRITMPAHLMHDGRDMDLFEHFAAVAQRLGVYTARDYADIVEFLVKRWKLETLESGLSGEGRRARDFVCGLAPRMRRAAERAEDRAKKDEPRTVKFSWIFDREAVV

SEQ ID NO: 45067 - protein, 179 aa, Zea mays
  Clone ID: LIB143-014-F2_FLI.pep
FPFPSPPPPPLPPPESRLFLLLSSRAVAPSHCAPSSSQSRPRGTCSASPSPSPLPLPSPPPSKERLGSAVDGGVVRRELLGGRKEGRGTAAGGGLPCRLWELPRGSWRSPSSASTSPCPSHSPTSSPPTPRPSRSSWASALTWFTRLKAHALHRQKNCAKGHGRLPGRGSRAECMLWVL

SEQ ID NO: 45068 - protein, 469 aa, Glycine max
  Clone ID: 700787846_FLI.pep
NLKMTIGSLAPKAEKKKSRKNKTVVVNENAPLLPKSHVQESDAGFDDFNGASFSGAVFNLSTTIIGAGIMALPATLKQLGMIPGLLAIIIMALLTEKSIELLIRFTRAGKSASYAGLMGDSFGNYGKALVQICVIINNIGVLIVYMIIIGDVLSGTSSSGDHHYGILEGWFGVQWWTGRTFVVLFTTLAIFVPLASFKRIDSLRFTSALSVALAVVFLVIAVGIAVVKIFSGGIVMPRLFPVTTDVASFFRLFTVVPVFVTAYICHYNVHSIDNELEDSSQMQGVVQTALVLCSSVYVMISFFGFLLFGEGTLDDVLANFDTDLGIPFGSVLNDAVRISYAAHLMLVFPVVFFPLRLNIDGLLFSKSRPLVLDNVRFASLTVALIGVIFLGANFIPSIWDAFQFTGATAAVCIGFIFPAAITLKDRYNIATKSDKILSVIMIVLAVFSNVVAIYSDAYALIKQNKTSRE

SEQ ID NO: 45069 - protein, 366 aa, Glycine max; identical to SEQ ID NO: 37097
  Clone ID: 700895587_FLI.pep

SEQ ID NO: 45070 - protein, 315 aa, Glycine max
  Clone ID: 700958949_FLI.pep
SFSRNLHYIHRLDTLSLSLWKAFAFTLNMAETTQSNAELLEWPKKDKRRFLHVVYRVGDLDRTIKFYTECFGMKLLRKRDIPEEKYANAFLGFGPEQSHFVVELTYNYGVTSYDIGTGFGHFAIATPDVYKLVEDIRAKGGNVTREPGPVKGGKSVIAFVKDPDGYAFELIQRPSTPEPLCQVMLRVGDLERSIKFYEKALGLRVVKKTDRPEYKYTIAMLGYAEEHETTVLELTYNYGVTEYTKGNAYAQVAIGTDDVYKSAEVVNIVTQELGGKITRQPGPIPGLNTKITAFLDPDGWKTVLVDNQDFLKELE

SEQ ID NO: 45071 - protein, 69 aa, Glycine max
  Clone ID: 700568375_FLI.pep
KGNLMTECRGNFLHRSLVSYLYEKASSKDKTLKIYEGSYHGILEGEPDDRIFAVHNDIISWLDFRCSLK

SEQ ID NO: 45072 - protein, 557 aa, Zea mays
  Clone ID: LIB148-034-D5_FLI.pep
MASSPQSSPSSSKKSPPPQEASALAPKSSSKSPSPPKGESNSSPSPPSKSSLSPPPRPKKSASTSSSKDGKTKKSSSSSSSSDNTAAVITGVVLGVVGFALLLSIVACVCCAKKKKKRPPPMNMPFYTDEKGNVYYPNAGLPPMWQQYGSNGSIPPPGWHHHGGGNPLSPSLGSMAAPLSGEMYSSGPHGPPLPPPSPNVALGFSKSSFSYEELAAATSGFSSANLLGQGGFGYVYKGVLAGSGKEVAVKQLKSGSGQGEREFQAEVEIISRVHHRHLVSLVGYCIAGNQRMLVYEFVANNTLEHHLYAKDGPVMDWSTRMKIALGSAKGLAYLHEDCHPRIIHRDIKAANILLDNNFEAMVADFGLAKLTTDTNTHVSTRVMGTFGYLAPEYASSGKLTDRSDVFSFGVMLLELLTGRRPIDTTNYMEDSLVDWARPLLSAALAGETGFAELVDPRLGGEYSVVEVERLAACAAASTRHSAKRRPKMSQIVRALEGDASLEDLHQDGGKPGQSVLFSGGGSDNISRLRQLAFDSGDYSDYSTDSSTGGGGRPPRRP

SEQ ID NO: 45073 - protein, 216 aa, Zea mays
  Clone ID: LIB148-027-D10_FLI.pep
CRPEPPFAVRQLLQDRPPRACRTCQGRRRAADGVHVVLLPRLRQPRPRGGGLRRRRQRAGPPAAPLHRRREGGGRQEPHHHNGEARAVHVLRPRHGGGGAQRLPGRVHPLPQGALRRHLHVQRGHAILQRRLQEGADRHGPHKAPEEEAAGPHSAAAAAAAGGGSGGDGAEGPTYPAAASATALDGAHGSFIYTGSGLVPSPNVPSRDGGWILARS

SEQ ID NO: 45074 - protein, 271 aa, Zea mays
  Clone ID: LIB3059-052-D9_FLI.pep
TNIIVRTYLRFHGNPGIVNWAKLQGQLRSKNLPSPPAPAPSTTPAASASSTASSCPPSTAILLVATRLLAIADLKVLREGQYVVHTFAEAEVIHRSISPAHKEAVTFPHRVVAYLKCFDSCPNLLSRFSMTFPQQILQHHLFILIELKLRRPGVEQSVEVVEHIDGRGEFFRPQLHRLALRLRCLLLICLLCHRLSLRFNCLLLICLLCHRLVLRLHCLLLICLLCLPLRRLLYPPLLRLLGLLQLRLLRRRPFHLRLLAAAFSSRIASFL

SEQ ID NO: 45075 - protein, 259 aa, Zea mays
  Clone ID: 701159841_FLI.pep
LSGDFGTMIVHTEDGDEVTESPIFPRTEFIPGLGSINSFTHDPKRAELISSFWAENIGDSDANKDRDTDYGPDMQESKVISPLTGTVKKNIGAEGTIRCHDNQINLSPGLANTTTKLNNSPSRKAFSVQDKLWSIYAAGNTVPIPFLKAIDISPLALVSENESGNGLAGSSTNDALEAVRELFSGDGQAKKGRKGQNEVPLPPGVHHRLTTSPTLMNLAQALAYHKTCYEDMPLQDSQATQEQQTIQNLCDTLRTILRL

SEQ ID NO: 45076 - protein, 503 aa, Glycine max
  Clone ID: 700906435_FLI.pep
LDLFAAHSRHQDSVISVNGQVLPEFLQVEAFTKLSTAIGRVIEAQVDMPIVGAIALHVSLLTFTLRVHPDRLDYVDQVLGSCVKKLYGKPKLDDNRATKQVVALLSAPLDKYNDIVTALTLSNYPRVMDHLDHETNKVMAMVIIQSIMKNNTCICTADKVEVLFELIKGLIMDLDGTTVDEVDEEDFNEEQNSVARLIHMFHNDESEEMFKIICTVTKHIMSGGPRRLPFTVPSLIFSALRLIRQLQGQDGDIVGEEVPTTPKKIFQLLNEVIEALSSVSSPELALKLYLQCAEAANDCDLEPVAYEFFTQAFVLYEEEIADSKAQVTAIHLIIGSLQRMNIFGVENRDTLTHKATGYSAKLLKKPDQCRAVYACSHLFWVDDQDGIKDGERVLLCLKRALRIANAAQQMANAARGSSGPVTLFVEILNKYIYYFEKGNPQITSSTIQGLIELIMTEMQSDSASALPASDAFFTGTLRYIQFQKQKGGMLGEKYDPIKVSIPA

SEQ ID NO: 45077 - protein, 562 aa, Glycine max
  Clone ID: 700677219_FLI.pep
GKPFTLSLSSLCLLLLSSACFAISSSKLNECQLNNLNALEPDHRVESEGGLIQTWNSQHPELKCAGVTVSKLTLNRNGLHLPSYSPYPRMIIIAQGKGALGVAIPGCPETFEEPQEQSNRRGSRSQKQQLQDSHQKIRHFNEGDVLVIPPGVPYWTYNTGDEPVVAISLLDTSNFNNQLDQTPRVFYLAGNPDIEYPETMQQQQQQKSHGGRKQGQHQQEEEEEGGSVLSGFSKHFLAQSFNTNEDIAEKLQSPDDERKQIVTVEGGLSVISPKWQEQQDEDEDEDEDDEDEQIPSHPPRRPSHGKREQDEDEDEDEDKPRPSRPSQGKREQDQDQDEDEDEDEDQPRKSREWRSKKTQPRRPRQEEPRERGCETRNGVEENICTLKLHENIARPSRADFYNPKAGRISTLNSLTLPALRQFQLSAQYVVLYKNGIYSPHWNLNANSVIYVTRGQGKVRVVNCQGNAVFDGELRRGQLLVVPQNFVVAEQAGEQGFEYIVFKTHHNAVTSYLKDVFRAIPSEVLAHSYNLRQSQVSELKYEGNWGPLVNPESQQGSPRVKVA

SEQ ID NO: 45078 - protein, 232 aa, Zea mays
  Clone ID: 700451803_FLI.pep
ATRAPDRGRARRRGGGRMSLFGLGRNQKTFRPKKSAPSGSKGAQLRKHIDATLGSGNLREAVRLPPGEDINEWLAVNTVDFFNQVNMLYGTLTEFCTPESCPTMTAGPKYEYRWADGVQIKKPIEVSAPKYMEYLMDWIEGQLDDESIFPQKLGTPFPPNFKEVVKTIFKRLFRVYAHIYHSHFQKIVSLKEEAHLNTCFKHFILFTNEFGLIDKKELAPLQELIESIIVPY

SEQ ID NO: 45079 - protein, 337 aa, Glycine max
  Clone ID: 701013063_FLI.pep
SSFTCKKQQMAQLNLILIWLFLLSLCLYSCPTSAQLSRHHYAKTCPNVENIVREAVKKKFHQTFVTVPATIRLFFHDCFVQGCDASVLVASTKNNKAEKDHPDNVSLAGDGFDTVIKAKEAVDAVPLCRNKVSCADILALATRDVIELAGGPFYEVELGRFDGLRSKDSDVNGRLPHPEFNLNQLNSLFAANGLTQTEMIALSGAHTVGFSHCNKFTNRVYNFKSKSRVDPTLNEKYATQLKSMCPRNVDPRIAIDMDPSTPRSFDNVYFKNLQQGKGLFSSDQVLFTDSRSKATVNAFASSSKIFHANFAAAMTKLGRVGIKNAQNGNIRTDCSVI

SEQ ID NO: 45080 - protein, 315 aa, Glycine max
  Clone ID: 701212931_FLI.pep
KFLGSNLNSRDPSVTPFLHELQARIIRHHNQADADPNPNPNDAIKILPFEFVSLEACLEAACSVLENEAKTLEQEAHPALDKLTSKISTLNLERVRQIKSRLVAITGRVQKVRDELEHLLDDDEDMAEMYLSEKLAEQQVLDGDVVVVDDDDDDDDTSSADNGDLLQPHRTAPELSFDNVLGRDSASFSAVTKQLDVEELEMLLEAYFVQIDGTLNKLSTLREYVDDTEDYINIMLDDKQNHLLQMGVMLTTATLVVSAFVVVAGIFGMNIHIELFDDQKAGMTQFLWTVGGSTAGTIFLYVVAIAWCKHKRLLE

SEQ ID NO: 45081 - protein, 191 aa, Glycine max; identical to SEQ ID NO: 40831
  Clone ID: 701146770_FLI.pep

SEQ ID NO: 45082 - protein, 191 aa, Glycine max
  Clone ID: 701147057_FLI.pep
KIWPHSFEFRLRVALGSGGDLMMTSRIRNTNIDGKPFSFTFANHTYFSVSDISEVRVEGLETLDYLDNLQKRERFTEQGDALTFESEFDRIYLSTPTKIAILDHEKKRTIVLRKDGLPDAVVWNPWDKKAKAMSDFGDDEYKYMLCVEAAAIEKPITLKPGEEWKGRLELSTVPSSYCSGQLDPKKVIQGS

SEQ ID NO: 45083 - protein, 190 aa, Glycine max
  Clone ID: 701204309_FLI.pep
LLNFVMAFHDHLQHEIAFQRFTEEQELNENRDMQQRLPPPTWLNNVNVNARQQNFLDSEKSVDRNRSESNCESEDLREYKADILGHPLYDQLLSAHVSCLRIATPVDQLPRIDAQLQQSQRVVEKYSALAHNGVVDEKELDQFMTHYVLLLCAFKEQLQQHVRVHAMEAVMACWDLEQSLQSLTGKFPAL

SEQ ID NO: 45084 - protein, 212 aa, Glycine max
  Clone ID: 701204348_FLI.pep
FKRILYYQVALVYVLTRLVLNVSQAYLAFFVINDLQMAQSAKALVPALIYICSFVVSIALQEIAWTGRMLKAYYSAGCILWIFCGAVILLLTTNMSYVMYIVSVFIGIANALMMVTGVSMQNFLIGENLNGCAFVVGSLSFLDKISCGLALYVLQSNQNLSPQLQATTQFPFSVTRIGLGLVPAFCALVGVVVTCTMDFHNPSKSLTAPLLA

SEQ ID NO: 45085 - protein, 203 aa, Glycine max
  Clone ID: 701214455_FLI.pep
EQLMQYRSDVQKVEDWLKPNAVLGAFEARAAKKVVACAQNLSKFTNPEEGFQELSVDLVEAAVAHCQLIVVSKFIEKLQQDIPGKGVKQQLELLCSIYALFLLHKHLGDFLATGCITPKQGSLANELLRSLYSQVRPNAIALVDAFNYTDHYLGSVLGRYDGDVYPKLYEEAWKDPLNDSVVPDGFQEYIRPMLKQQLRNARL

SEQ ID NO: 45086 - protein, 147 aa, Glycine max
  Clone ID: 701140765_FLI.pep
ITQASAMRTHTIISLILLSLFLRTQSEVITLSSDTFNDKIKEKDTAWFVKFCVPWCKHCKNLGSLWDDLGKAMEGEDEIEVGEVDCGMDKAVCSKVDIHSYPTFKVFYDGEEVARYQGTRDVESMKTFVLEEAEKAAAKALESDKEL

SEQ ID NO: 45087 - protein, 221 aa, Glycine max
  Clone ID: 701144526_FLI.pep
EERENEEAQALLQEAEKRIKKKGKKPIIEGDKITKQTLMKLTLTEQLRERQEMEKKLQKLAKTMDHLERAKREEAAPLIEAAYQQRLVEERLLHDREQQQEVELSKQRHEGDLKEKERLVRMMGNKEIYQARVVSHRQAEFNRLRREREERISRILQSRRQEREKMRKLKYYLKLEEERQQKLHEEEEARKREDAERKKKEEEERLRKLEEIAEKQRQRER

SEQ ID NO: 45088 - protein, 222 aa, Glycine max
  Clone ID: 701149544_FLI.pep
REDDRKGKPAGAPIPTLSRRSLRACIFSVVKMYTSRKKIHKDKDAEPTEFEESVGQALFDLENTNQELKSDLKDLYINSAVQVDVSGNRKAVVIHVPYRLRKGFRKIHVRLVRELEKKFSGKDVILVATRRILRPPKKGSAAQRPRSRTLTAVHEAMLEDVVLPAEIVGKRVRFRIDGSKIMKVYLDPKERNNTEYKLETFAAVYRKLSGKDVVFEYPVSEA

SEQ ID NO: 45089 - protein, 95 aa, Glycine max
  Clone ID: 701063105_FLI.pep
VTLGEHGSRYYTKSFKGSVDAFHVNTVDTTGAGDSFVGALLAKIVDDQSILEDEPRLREVLKFANACGAITTTQKGAIPALPKEEAALKLIKGGS

SEQ ID NO: 45090 - protein, 270 aa, Glycine max; identical to SEQ ID NO: 44080
  Clone ID: 700841843_FLI.pep

SEQ ID NO: 45091 - protein, 545 aa, Glycine max
  Clone ID: 701001420_FLI.pep
LPSSMAVSGLRSGGLPLFHHHHHHHHLRFLQSPPSFAKLSFLGSKSSKKGFTVFSRYAQARDLFSSRRFQDSMEKLPNLVEDIVQTSLNTGPRGVLRLAQGVQAFLGVGQEWLTDVSKSANSFAGLPTELQLGLLSPFYLRRLFERMGATYIKLGQFIASAPTLFPPEYVQEFQNCFDRAPPVPFEEIESILRKELGKPLESVYEYIDPTPIASASIAQVHGARLKGSREDVVIKVLKPGIEDILVADLNFVYVVARILEFLSPEISRTSLVGIVKDIRESMLEEVDFYKEAANIEAFRRYLETMGLTGNATAPKVYRYCSTMKVLTMQRLYGVPLTDLDSISSLVSNPETSLITALNVWFGSLLACESFHADVHAGNLWLLRDGRIGFLDFGIVGRISPKTWAAMEVFLGSIAIEDYDSMASSLIEMGATNQDVDAKAFARDLEKVFSSIKELDTEIVVATTTGTATNATAVAANIVVDERQMNALFLDVVRVSESYGLKFPREFALLLKQLLYFDRYTRLLAPNLNMLQDQRISIASNSRSRV

SEQ ID NO: 45092 - protein, 196 aa, Zea mays
  Clone ID: 700049169_FLI.pep
IRASSRVVTREMRRATVPCNRAQYPARRQHARARVSVSLAGGIGGGGGWLVAVLLLVLILLLLLLLRLLVLVSEGGGGERAADPDVGLEVDLVALLSVEAHLDDGHPEHDLLAAHPGHALHPAVLHVRGDLGVVAHPRARAAEVVLVGGLLPHPHEPGLAHPAALLQPPQRHHAAREAQRLEHLLGVREAGLRARD

SEQ ID NO: 45093 - protein, 274 aa, Zea mays
  Clone ID: 700049247_FLI.pep
ENVTVTPHLGASTVEAQEGVAIEIAEAVVGALRGELAATAVNAPMVPAEILSELAPYVSLAEKLGRLAVQLVAGESGIKGVKVVYTTARGPDDLDTRLLRAMVTKGLVEPVSSTFVNLVNADYTAKQRGLRLTEERVAHDSPAAEAPLESVQVRLSHVQSKFAGAISDGGDDIVLEGRVKYGVPHLTLVGPYEVDVSLEGNLILCRQIDQPGMIGKVGNILGDTNVNINFMSVGRTFRGKQAIMAIGVDEEPDKDTLEKIGAIPAIEEFVFLEL

SEQ ID NO: 45094 - protein, 100 aa, Zea mays
  Clone ID: 700049431_FLI.pep
TSGALGPLLDKTAVDPDDLAVNPSRGVAGQERHHRCHVRRLGDAAHGLLLHPPQERFVLPGQEQLGAHGPRRDHVRGHPLRRHLLGQDLRHRLHGGVGRR

SEQ ID NO: 45095 - protein, 252 aa, Zea mays
  Clone ID: 700041516_FLI.pep
LRNAEYRLSFERNLELPEEGVECLKSDVTEDNHHNINLGRPVTIFRLSEEDMPQDPGKTDEASSYENMGEELGDLTPQAEEYIIQMQSHLNAMKKELHDLRRKNSALQMQQFVGEEKNDLLDYLRSLTPEKVAELSESTSPGVQETIHSVVHGLLATLSPKVHSKAPPPLDNISGGVLNLGGEDDDRAELVENASLPFQPLISVPRDYLARLLFWCMLLGHYIRGLEYRLELARLLRISSVGSFSGGDDHVV

SEQ ID NO: 45096 - protein, 196 aa, Zea mays
  Clone ID: 700042624_FLI.pep
YVLSLLCPFQDPRTENNPYLGFIYTSFQERATFISHGNTARHAKDFGDLKLAQICGIIASDEKRHETAYTKIVEKLFEIDPDGTVVALADMMRKKISMPAHLMFDGQDDKLFEHFSMVAQRLGVYTARDYADILEFLVDRWKVASLTGLSGEGNKAQDYLCTLASRIRRLEERAQSRAKKAGTLPFSWVYGRDVQL

SEQ ID NO: 45097 - protein, 90 aa, Zea mays
  Clone ID: 700042791_FLI.pep
SVASIRVQLTIGEKKSYALTTSTWRNFHYVRLAYITCTCRPVLQIYSPCSCAGHHFIFLLQDRTQQLVDLSKDSIHCGISLHFDNNVLIC

SEQ ID NO: 45098 - protein, 234 aa, Zea mays
  Clone ID: 700071935_FLI.pep
RSRRERKTPEVEMAAAVRRAEELVEREMGGRDASHDAAHALRVRDLALSLAAEEGLSAPDRLLTVELAALLHDVGDYKYTKNNVEDISVVEMFLQEVGLDEGQKDEIVAIIKGMGFKNEVSNKSIVEPTLEFAIVQDADRLDAIGAIGIARCFTYGGSKNSALHDPRILPRDSLSKEKYMSKEEKQTSINHFHEKLFKLKDMMKTEAGKRRAEKRHRFMEEFVAEFYEEWSGRA

SEQ ID NO: 45099 - protein, 124 aa, Zea mays
  Clone ID: 700150248_FLI.pep
GKMDYSPLCNKNAKLGFSWTKGTKSSSATSMTGSVFVISSSEKGILESSSSNIEKLVAIFDSSRTADFKLDVNSAEIVFVPFTSSQYILTIRSSCCMLRAGHTSVCISLNVLIGLREITRKSTA

SEQ ID NO: 45100 - protein, 88 aa, Zea mays
  Clone ID: 700097360_FLI.pep
LMRAKKPRKVRLVTDSNLGRAHIVRAHCFRCSMLSKLKLCRAIIVADFLFPHFFFYISRLVVFELVPHCFVLPLVGIKSVWTGIIHWI

SEQ ID NO: 45101 - protein, 132 aa, Zea mays
  Clone ID: 700102086_FLI.pep
QFSTKSDVFSFGILVIEIITGRRNIGHYFFDEQNEDIISLVWRHWTEGTIVEMIDDSLGRNYSESEVLKCVNIGLLCLQHSPMDRPTMSDVMVMLNGDDTSSIPSAARPTFFLDRSTPYSYNSCTITHMSPR

SEQ ID NO: 45102 - protein, 301 aa, Zea mays
  Clone ID: 700102428_FLI.pep
NEGRSWHGINHHHPATFDTLAMDPVLKQSVVDDLDRFLKRRDYYRRIGKAWKRGYLLYGPPGTGKSSLVAAMANYLRFNLYDLDLSEVRLNSALQKLLIHMPNKSVLVIEDIDCCFDNAAASRNGLDMDPNYSSGSGSGSDSSDENWAQPRVAPPKARGITLSGLLNFIDGLWSTCGEERIIVFTTNYKDRLDSALLRPGRMDMHVYMGYCGWEAFKTLARNYFLVDDHKMFPEIQELLSAVEVTPAEVSEMLLRSENGDVALGILAEFLREKRRRGRKETKEEKDATEDKDEEEVAEKAA

SEQ ID NO: 45103 - protein, 67 aa, Zea mays
  Clone ID: 700106340_FLI.pep
GDHQGHPVQEQVLSCRGCAETCGECIVCPRLVSLLNLPSLFPCNKHDGRKKNIHTARYRSTRSSGFR

SEQ ID NO: 45104 - protein, 267 aa, Zea mays
  Clone ID: 700088359_FLI.pep
AFLSAAASSTSGRAPNAVPPMATAAATADLSAADDKQRDSALPELTTEFMVDMKCEGCVTAVKNKLQTLEGIKNIEVDLSNQVVRVLGSLPVKTMLDALHQTGRDARLIGQGNPNDFLVSAAVAEFKGPVVFGVVRLAQVNMELARVEATFSGLSPGKHGWSINQFGDLTRGAESTGNVYNPPDHLSDKPLGDLGTLEAGENGEAHFSGPKEKLRVVDLIGRSIALYATEDRSDPGIAAAVIARSAGVGENYKKLCTCDGVTIWESS

SEQ ID NO: 45105 - protein, 67 aa, Zea mays
  Clone ID: 700163594_FLI.pep
IYGMKATYVHVVIGLQYHDAPVVSSPTLCLFRISHPYLVIWQTVWFCLLQVMHSKPVNGVISLYFLV

SEQ ID NO: 45106 - protein, 309 aa, Zea mays
  Clone ID: 700086442_FLI.pep
GARRGGHRLRDHRAVREREPGRRRQAREAAGRRAGLHRVVRRPELPVLGRRAQPGQQQHLLRVPRRRALRGPLLLLPRRPPGPAQRHQLPHLRPAGARGRRRGVQQLLLRRSADAAAARPPDEPVLRRGGRRRARGRGGARHPRGRVGRRPGRRRDPRLRDQPHRPRHPGVQGRGRRPQRAPRRPAQGLHGPVRVLLQLDRRRAGDPRAGGALRRVRAPAAAGQELRRRRGARGEVHRRAGGRVARSVGHRQHPAAGPPLGVRPQGPVAPVQAHALRPMMIAHGRRASFLYALIKFVTSLEGVGFFFPE

SEQ ID NO: 45107 - protein, 183 aa, Zea mays
  Clone ID: 700159794_FLI.pep
PVGSKRRLRMALDVARGMNYLHNCTPVIVHRDLKSPNLLVDKNWVVKVCDFGLSRLKHSTFLSSRSAAGTAEWMAPEILRNEPSDEKCDVFSYGVILWELCTLLQPWEGMNPMQVVGAVGFQQRRLDIPGGVDPAVAEIIRRCWQTDPRMRPSFSEIMATLRPLLKNMPANQPTRKRAQQTDD

SEQ ID NO: 45108 - protein, 106 aa, Zea mays
  Clone ID: 700161008_FLI.pep
SRRSRVRRVLCYSFHVVVVGEHGNISGGALLVSASAKACDGAVGGEEVGGEVVRRASHDGHVGCDVEAVDVVRAVGLAQHAVHVVGEVVELEAEVEVREGVAVVLP

SEQ ID NO: 45109 - protein, 473 aa, Zea mays
  Clone ID: 700165829_FLI.pep
SQIPLAVSPAVTSDQSIFRAENAAVSAGSWKGASSVGPRREAAMAFAASEGNLSPALPLATLIGRELRGDGTERPHVRYGHSGFAKRGEDYFLVKPDCLRVPGDPSSSFSVFAVFDGHNGVSAAVFSKEKLLEHVMSAVPEGISREDWLQALPRALVAGFVKTDIDFQRKGETSGTTATLVVVDGFTVTVASVGDSRCILDTQGGEVSLLTVDHRLEENAEERERVTASGGEVSRLNLCGGQEVGPLRCWPGGLCLSRSIGDTDVGEFIVPIPHVKQVKLPNTGGRLIIASDGIWDALSSESAAQACRGLRAELAAKLVVKQALKTSGLKDDTTCVVVDIIPSDHCSTPPALSPKKNQNKLKHLIFGKRSHSSVGKLSKSASLGSVEEIFEEGSAMLEERLGSNFPPKANLPPFRCAICQVDQEPFEGLMTDNVGGCCSTPSTPWGGPYLCSGCRKKKDAMEGKRSNRSTTCR

SEQ ID NO: 45110 - protein, 101 aa, Zea mays
  Clone ID: 700166038_FLI.pep
RIISNKEIESAPKRNIATKTQEESIKDGSDPVSPDHSPDWNRAKDHTPTVPNPSPSHHSIVTGPRVHSLMRSGGAGTRVAPWRHGSEDSFHSGAGPAPTAA

SEQ ID NO: 45111 - protein, 55 aa, Zea mays
  Clone ID: 700050539_FLI.pep
GGAHNMGPQDGMVGARRQPPAPEAAPAAVRLTQMLIRLFLHLYPAGRFKLKGIVN

SEQ ID NO: 45112 - protein, 102 aa, Zea mays
  Clone ID: 700043388_FLI.pep
SPRAARARHGHTHTYTRTPLPCIFSPTEDDGDLPKMYSCPTWPIERLQAARAPRALSSTGHAPPSELAPDVVFTVVAAAAGEAEGGALGYMAAASGQCWGPG

SEQ ID NO: 45113 - protein, 200 aa, Zea mays
  Clone ID: 700043901_FLI.pep
AGFCTPAATAAAHAALTPLTSSRKHIAMCLSPRPSGGGGIGGGQRARLASTGAAPQVRALAPTTAAEEAAGPSPAPLNVEYLAAEFAGHGVSFEPVGVSCAVKMSLRNGSVAHVLLPSGLVTSYKPAMWHGTVTEVLHTNVAEVPGGRAVIRGGVFVDLRCDGCDGVWSPSASGAWSLRDVRGSPATSIEVELASAAPGN

SEQ ID NO: 45114 - protein, 101 aa, Zea mays
  Clone ID: 700085717_FLI.pep
LIPRCPSYPKSSISWNLPVRLKDIFDQRILDGHQLRELGLQFRRIHLIVASRCDYDLGLLFECEVGPLKIRIDVFLVHLQNLIVADNARVGEVPYAPAERV

SEQ ID NO: 45115 - protein, 292 aa, Zea mays
  Clone ID: 700085919_FLI.pep
PPAQMATAATASATAATRFTLLAGAGLRSRISRLPTAVRFQRQRGLTTTALLKTADLQPKEQGKPETLDYRVFLVDGGGRKVSPWHDVPLRAGDGVFHFVVEIPKESSAKMEVATDEAFTPIKQDTKKGNLRYYPYNINWNYGLLPQTWEDPTSANSEVEGAFGDNDPVDVVEIGERRANVGDVLKVKPLAALAMIDEGELDWKIVAISLDDPKASLVNDVDDVEKHFPGTLTAIRDWFRDYKIPDGKPANKFGLGNKPASKEYALKVIQETNESWEKLVKRNIPAGELSLA

SEQ ID NO: 45116 - protein, 96 aa, Zea mays
  Clone ID: 700156710_FLI.pep
IEAADAASMHVCSELSREIQSSVVLDHAGVVGEFVVVAVPDHEAAVVVRLLRGRRDVVVDVLGVHPAVRHLRRREADVEPGGRVRRRPLVPREVPP

SEQ ID NO: 45117 - protein, 110 aa, Zea mays
  Clone ID: 700157051_FLI.pep
QQSQRKVVLMSTVTLPTLSRCLVELEGLHHLPGEVGVVTAEVAVGGGLDEPVAALLQVEVDADHPGPEVEVLLHDLEDLLVGDRAGAVRVDEHGQGLRHADGVRHLHEAA

SEQ ID NO: 45118 - protein, 51 aa, Zea mays
  Clone ID: 700157393_FLI.pep
TLLSHNKMQCARWETGRIGIIVVYYDCLLHPDCVVPCLVLLLLLAALQCRR

SEQ ID NO: 45119 - protein, 210 aa, Zea mays
  Clone ID: 700157465_FLI.pep
PHAPLIHVMKVKPNKVNLIIGSGGKTIKSIIEETGVDAIDTGDDGTVKITARDLTSLEKSKIIIANLTMVPKVGEIYRDCEIKSIAPYGAFVEIAPGREGLCHISELSSGWLAKAEDAFKVGDRIDVKLIEINDKGQLRLSSRALLPDVDSESNIGSTKEKVPQKDDVIKMTTKRPRRKKQSEPSGAENATTKALAKSAAAPAGSKGSEA

SEQ ID NO: 45120 - protein, 69 aa, Zea mays
  Clone ID: 700157968_FLI.pep
ESTGKYKTLLVSNSISMTTGAVTRLASVLLPSMEALMPWTGGLTEETLSEERQGCGRRMQQSCPLAKHC

SEQ ID NO: 45121 - protein, 58 aa, Zea mays
  Clone ID: 700164686_FLI.pep
IQLGDYKHHVELQFSPYVEYLMNDTSRLRFHSTKLPGISLLTSTPYTLPSAHRPPTVR

SEQ ID NO: 45122 - protein, 182 aa, Zea mays
  Clone ID: 700047520_FLI.pep
VIADHLSAEEVEDIKDMFKVMDTDNDGIVSYEELKSGIAKFGSHLAESEVQMLIEAVDTNGRGALDYGEFLAVSLHLQRMANDEHLRRAFLFFDKDGNGFIEPEELQEALMEDGGADTMDVVNDILQEVDTDKDGKISYEEFVAMMKTGTDWRKASRHYSRGRFNSLSIKLIKDGSVKLGSE

SEQ ID NO: 45123 - protein, 170 aa, Zea mays
  Clone ID: 700048064_FLI.pep
VRKFHERELNMEPATPPAPAAGVTATVDLSSVAADLGGAHLLPCGIRQNGGAPVSDYFKPRDTGVEVEGVKMEEAFFRGRKLQGTTLALPDGYRGYVLEKSRGQNSDAEVSNFTSRAEFQSITYWNHDTAPSAEDSLPRCFHWLTVANAMHRAVTAEDLTNMAAMQNQDK

SEQ ID NO: 45124 - protein, 337 aa, Zea mays
  Clone ID: 700049071_FLI.pep
VDLCLDRIRKLADNCTGLQGFLVFNAVGGGTGSGLGSLLLERLSVDYGKKSKLGFTVYPSPQVSTSVVEPYNSVLSTHSLLEHTDVAVLLDNEAIYDICRRSLDIERPTYTNLNRLVSQVISSLTASLRFDGALNVDVNEFQTNLVPYPRIHFMLSSYAPVISAEKAYHEQLSVAEITNSAFEPSSMMAKCDPRHGKYMACCLMYRGDVVPKDVNAAVATIKTKRTIQFVDWCPTGFKCGINYQPPSVVPGGDLAKVQRAVCMISNSTSVVEVFSRIDHKFDLMYAKRAFVHWYVGEGMEEGEFSEAREDLAALEKDYEEVGAEFDEGEDGDEGDEY

SEQ ID NO: 45125 - protein, 222 aa, Zea mays
  Clone ID: 700051377_FLI.pep
IEAADAASMHVCSELSREIQSSVVLDHAGVVGEFVVVAVPDHEAAVVVRLLRGRRDVVVDVLGVHPAVRHLRRREADVEPGGRVRRRPLVPREVPPGLAVGVVVDPDVDALEDARVERAAQVAGGREPAARRGRQVQRLAGPAADVVLGELERQHVVAVGGRAALQEQVDAVEPRVAEGAAHARLRPAEEGVPEVVEQVQRRLRRRERVAGAEAADGERHRH

SEQ ID NO: 45126 - protein, 80 aa, Zea mays
  Clone ID: 700051501_FLI.pep
KQVANNKKHELGDELDAEVPEPLGQLHVLGVRAWLVQVTVAEVLPGHALHMRVECQIACSCRTLLSIFQHQFTQRPMENI

SEQ ID NO: 45127 - protein, 216 aa, Zea mays
  Clone ID: 700052230_FLI.pep
RILSCIFQQRLQQSNMRTLPWMAVNTHLEPIIATVIHDITYYTWHGNSRYYIKSTDFMKIREGACSGMFRSSSLFCNLVLRFRQQIAQGDDRSLGASTLFNRLEFLQLLEVLPWLLPDLSFIELIDFAILHFNSEIVHRASNHLCLGLHKLLEPQKSIGLLVVLIDGEARELLELEVVLVRRHVLDAACQHPGVVSRGLLLCAARGGNGGEGKQHE

SEQ ID NO: 45128 - protein, 106 aa, Zea mays
  Clone ID: 700045162_FLI.pep
KEGISYTLVLCSALVCAIYIYNMRAVHSNPIQGLRTRKQEQRKTILTRSRSYITYVRSPFLGPGEEPAEAEPAVAALFSGFLGRRGGGGLALAPHLVQDGVRLQQL

SEQ ID NO: 45129 - protein, 123 aa, Zea mays
  Clone ID: 700045658_FLI.pep
YFPLFQTFQCMPRAWNLLTRARLVAFLLCQSSVLSFLCSSLSSTSSLPSRMLAIFLMLGRAAGSDRVHAMPSRASRTSSLRSNLPSSRRSARASTGRSCCSRSWTFLTRRTSGSLPSTAIVPV

SEQ ID NO: 45130 - protein, 240 aa, Zea mays
  Clone ID: 700077019_FLI.pep
QANNTQQPTRRQEFQNNGIAKRSNSVLVVLDVKALGVGGSITLVGAEGSLGVGLAPGEEGRSSLLHVLHLASPGLEGARLEGTAEGEGQGPWLLGAELVHGIEIQGGLLLALSTGEEDNSRHSSRDGPLEGTDGVLGDHLRCHLLRVGARSHHVGLQEGTLQEDMVLVESLVAGSKDCLSDVSAAIDVLKEGGVLPGIKVDKGTIEVVGTDKETTTQGHDDLGKRCAKYYEAGARFAKWR

SEQ ID NO: 45131 - protein, 315 aa, Zea mays
  Clone ID: 700101744_FLI.pep
VNLEQIRCVITADEVLLLNSLDSYVLQYAAELQRRLLQRAEGDQLPFEFRALELALEAACSFLDAQAAELEIEAYPLLDELTSKISTLNLERVRRLKSRLVALTRRVQKVRDEIEQLMDDDGDMAEMYLTEKKMRMESSVFGDQSLLGYNSAGAAGASVSAPVSPVSSPTESRKLEKAFSLCRSRHDSTKSSDNTTTDHIQELEMLLEAYFVVIDSTLNKLTSLKEYIDDTEDFINIQLDNVRNQLIQFELLLTTATFVVAIFGVVAGIFGMNFETSVFKIENAFQWVLVITSVVGVFIFCSFIWFFKYKRLMPL

SEQ ID NO: 45132 - protein, 339 aa, Zea mays
  Clone ID: 700104758_FLI.pep
SYTNTSSDLLQLGDKITADDAYKFLLNWFKRFPQYKSHDFYIAGESYAGHYVPQLSEKIFDGNRAGAKESHVNLKGLMVGNALMDDETDQTGMIDYAWDHAVISDRVYGDVKARCDFGMANVTDACDAALQEYFAVYRLIDMYSLYTPVCTDPASSSAPYARKVAVHGAAPGIFSRYRGWIMKPAGYDPCTAEYSEVYFNRPDVQAALHANVTKIGYNWTRCSDAIYTWNDAAFSTLPVIRKLVAGGLRLWVFSGDTDGRIPVTSTRLTLHKLGLKTVQEWTPWYDHLQVGGWTIVYEGLTFVTIRGAGHEVPLHAPRQALTLFSNFLAGTKMPPTAFP

SEQ ID NO: 45133 - protein, 275 aa, Zea mays
  Clone ID: 700105416_FLI.pep
GEPPPHVRPLGGVLHPDAQHVLLRVPADGLRGGVRRRREPAGGPRPRGGRARVRAGDHHVRGAEPVPRRRRAPGDRLPQLRAAVPVRAAQERAAVHRVRQDGRGRAAARRGARVRAAPPARRRRGGVHQPGLHQEHPGPLRHLLGAPGQGPRGRRRGGRGDAGEVLPGDGGGAEHGVQAEPRGGRVHRAAGDPGGPAGHLRGAHGLRHLPRRVHQPVQGAPVRDVPAHHRAPGLTSRVQPLQPRAAALDPRPALRLRLDTRAGERRGVSGRVRRA

SEQ ID NO: 45134 - protein, 251 aa, Zea mays
  Clone ID: 700083705_FLI.pep
EVGRLNVVGGAEIGPLRCWPGGLCLSRSIGDQDVGEFIIPVPYVKQIKLSNAGGRLIISSDGVWDALTAEMAFKCARGLPPEAAAEQIVKEAVEAKGLRDDTTCIVIDIISPEKPKRTIQSQRSPRKGLVLLKNFFLRKTASDSLSLPDKDNYPEPDLEEVFEDGCPSLSRRLNSEYPVRDMFKLFACAICQIDLESGQGISIHEGLSRPGKLRPWDGPFLCHSCQEKKEAMEGKRHSRDSSSRNSGSSES

SEQ ID NO: 45135 - protein, 417 aa, Glycine max
  Clone ID: 700729493_FLI.pep
FGHMPNMGFVMQHPSSPLPSPVLSGYPEGSPGLPGVRNEINLSPASGRNGGIISGWQVQRSFDSAHDPKIVNFLEDLKSGKSRRFELSDIIGHIVEFSSDQHGSRFIQQKLESCSVEEKTLVFKEVLPHASKLMTDVFGNYVIQKFFEYGSPEQRRELADRLVGQILPLSLQMYGCRVIQKALEVIELEQKAQLVHELDGNVMRCVRDQNGNHVIQKCIESIPTKKISFILSAFRGQVATLSMHPYGCRVMQRVLEHCTDESQCQFIVDEILESVCALAQDQYGNYVTQHVLERGKPQERSQIINKLSGHIVQLSQHKFASNVVEKCLEYGDTTERELLVAEIFGHDEKCDNLLTMMKDQFANYVVQKVIDICSENQRAMLLSHVRIHAHALKKYTYGKHIVARLEHQFGENQTPSS

SEQ ID NO: 45136 - protein, 115 aa, Zea mays
  Clone ID: 700203296_FLI.pep
PNTNTMEQGVTPKLFKTNWLIPRYQTMELSNDSFRAGKLGADELGGRDHVGQGGLDLRVLACLETTVRVHPEDVGVEHGEHLLDAVCDLLGGGNPRRVDVVDTRANASSVLHTLT

SEQ ID NO: 45137 - protein, 267 aa, Zea mays
  Clone ID: 700219767_FLI.pep
GSETRRVTISSQLRNEQVTISSQLRLTEVRKNGTCPWLRPDGKTQVTVEYRNEGGAMVPIRVHTVLISTQHDETVTNDEIAADLKEHVIKPVIPEQYLDEKTIFHLNPSGRFVIGGPHGDAGLTGRKIIIDTYGGWGAHGGGAFSGKDPTKVDRSGAYVARQAAKSIVASGLARRAIVQVSYAIGVPEPLSVFVDTYGTGAIPDKEILKIVKENFDFRPGMIIINLDLKKGGNGRYLKTAAYGHFGRDDPDFTWEVVKPLKSEKPSA

SEQ ID NO: 45138 - protein, 63 aa, Zea mays
  Clone ID: 700222584_FLI.pep
RKAPPTFPFLIEMRERHYWVTHRTERSVDMLLHGKKPLVEVRKRDSEFQVVIERWATYDGDGL

SEQ ID NO: 45139 - protein, 113 aa, Zea mays
  Clone ID: 700166756_FLI.pep
HPQSSSSRSPPQAFHDVRAIQVHRVLDCFDGIFGWEEIIHCNFFVFILFIIFKKAADLLKAMRGEVRDVLVVTEFRVISTDSYDLIIFLTLIDHRHEPNSTSSQKTPRDNLFL

SEQ ID NO: 45140 - protein, 134 aa, Zea mays
  Clone ID: 700166824_FLI.pep
INVLGDITEETFPGCSNLPDYNKISFNKVEKPTGLEACLPNRSPTEVSIIKQLVCYDTAKRTSAVDLLNDRYFTEEPLPAPIEGLHVPASKDEDDDSSTEEWGNYRDGVSRIDFDEFGSMDATKTEKGFSIQFS

SEQ ID NO: 45141 - protein, 128 aa, Zea mays
  Clone ID: 700171264_FLI.pep
FSTLLSAQLDSYMECSIGNCIFILKLFCDSVLVHINCFFLLSAQLCGVSCSLLVCSVLSYVLGNMFGTLDKYVAVSMCGCACFCVLCVMDLELFWNIGARKGASRMEHPSVWLCVMNLEHYSMRQQLC

SEQ ID NO: 45142 - protein, 97 aa, Zea mays
  Clone ID: 700171386_FLI.pep
LHPSCGLHPYRHFVHCMHIMLWERSCYGPCHDMFQLCSSSTFGTKFCHPPNISGCSPINTSISQEVKELSSKNITLFHSAIRMGEFRGSMKQSPYPS

SEQ ID NO: 45143 - protein, 106 aa, Zea mays
  Clone ID: 700194549_FLI.pep
PAAILQHIVSSVGDTAGSSVGAWSRLLQAAHRRQLLRYLRRQQPRDLAALRLLLQDGLEDQAEDRLVPVLRLHLPELLATLLPQRLALRRAVGRRRRAALMPQELD

SEQ ID NO: 45144 - protein, 115 aa, Zea mays
  Clone ID: 700194701_FLI.pep
PAAILQHIVSSVGDTAGSSVGAWSRLLQAAHRRQLLRYLRRQQPRDLAALRLLLQDGLEDQAEDRLVPVLRLHLPELLATLLPQRLALRRAVGRRRRAALMPQKLDALAQDRGAA

SEQ ID NO: 45145 - protein, 272 aa, Zea mays
  Clone ID: 700195921_FLI.pep
KVRVWDVSERRVVDWADAKDIITAVGYQPDGQGLIVGIAAGRCRFYNHAGENVELEKVLKVTKKKSAGRQITSLQFSCGDPARILIASAGSKIRVSDGGAKINRKFEGRRGSKVLVPPSLTSDGQYLVSAGADSNVYIWDLDRPARGKSRTRGPRRVRSCEHFFSEGVTSVATWPGLAHQQEDLQSPEKGAAPTLCRDREFCSFGTWFSADGARGAATWPEEKLLPSLRYVNCAGMDDCRAKVSAAWNKVVVTGGSDGVIRCFHNYGLPVKL

SEQ ID NO: 45146 - protein, 113 aa, Zea mays
  Clone ID: 700205424_FLI.pep
LPSPSEYHLAATWLYLGDEMVFTGLLALCRQRVAICSFLLPFAWPSFYQIITVHKLLLWNEYQILYVFSDVSDLQYVRKTKDYLVHSLSFCCTVHGDLDAAVLRHRRTTAEMA

SEQ ID NO: 45147 - protein, 156 aa, Zea mays
  Clone ID: 700205903_FLI.pep
RRVLLHQRDRRAEQELLRPEQHAVAVPGGEGVLRPRPAADLLELQLRARGAEHRLRRAGRPRRGGAQRRARVPLRALVLDEQRARGHRLRPGLRRHHPGHQRRARVRRQEPQLRQQPRRLLQAVLPGFRRRPGQQPHLLNDLSLIGLLSCTYTCVG

SEQ ID NO: 45148 - protein, 253 aa, Zea mays
  Clone ID: 700243968_FLI.pep
SVTSVLPPSSSSADCPHPLHSQVPTTPNPVSPLRRRLRFGSARLEQKKMQRAVQTVRSHGNVLKYAVLQHISAPKPAMLPAAFSRFMSVSSARLEDRGFETATVADVLKSKGKSADGSWLWCTTEDSVYDAVKSMTQHNVGALVVVKPGQNKSIAGIVTERDYLRKIIVQGRSSKSTKVGDIMTEENKLITVNPDTKVLQAMQLMTENRVRHIPVIDGTGMLGMVSIGDVVRAVVAEHREELNRLNDYIQGGY

SEQ ID NO: 45149 - protein, 84 aa, Zea mays
  Clone ID: 700168882_FLI.pep
IAKLRFLTRFIVLQITIVDPYLLPYSTNLLQTFFLEYAEEELRTNLLQTYCMKVVHKAYIYRMQCFSDLIYLAHQAFGSFCIYY

SEQ ID NO: 45150 - protein, 57 aa, Zea mays
  Clone ID: 700169616_FLI.pep
SGKCTNLTEANGSGIHGYKQFSLTATTAGPRKQTMRAAPAQRRPETVDDACTCTRET

SEQ ID NO: 45151 - protein, 500 aa, Glycine max
  Clone ID: 700875185_FLI.pep
CLSLSTIAMDPYKLRPSSAFNSPFWTTNSGAPVWNNNSSLTVGARGPILLEDYHLVEKLANFDRERIPERVVHARGASAKGFFEVTHDISHLTCADFLRAPGVQTPVIVRFSTVIHERGSPETLRDPRGFAVKFYTREGNFDLVGNNLPVFFVRDGMKFPDMVHALKPNPKNHIQENWRILDFFSHFPESLHMFTFLFDDLGVPQDYRHMDGFGVNTYTLINKAGKAVYVKFHWKTTSGIKCLLEEEAIKVGGANHSHATQDLHDSIAAGNYPEWKLFVQTIDPEHEDKFDFDPLDVTKTWPEDIIPLQPVGRLVLNKNIDNFFAENEQLAFCPAIVVPGVYYSDDKMLQTRIFSYADSQRHRLGPNYLQLPANAPKCAHHNNHHEGFMNFIHRDEEVNYFPSRYDPVRHAETFPIPPAICSGRREKCGIEKENNFKQPGERYRSWAPDRQDRFNRRWVDALSDPRVTHEIRSVWISYWSQADRSLGQKIASRLSMRPNI

SEQ ID NO: 45152 - protein, 192 aa, Zea mays
  Clone ID: 700332793_FLI.pep
RNLPPLSAGQRLNIAIDIARCLDYLHNERVIPHGNIKSSNVLIQNSTPSALVTDYSLHRLMTPIGMAEQVLNAGALGYSPPEFSSTSKPCPSLKSDVYAFGVILLELLTGKIAGEIICMNDGVVDLTDWVRMLDLEERVAECYDRHITGVESSEGAPQALDGILRIALRCIRSASERPEVRTVFEDLLSLSS

SEQ ID NO: 45153 - protein, 145 aa, Zea mays
  Clone ID: 700204274_FLI.pep
SLSGHTAPTDDDNSRQRLGQPATAARSRLTTNRLVHLLDLGARAAAASGGVLVHAASAAHVFTRALVHLGDDGVAEALQLLHLVLELVRLGELVGVQPADGRVDGVLDLLLVIGRQLGRNLLVLDRVAQGGGQELAGELLLQHAQ

SEQ ID NO: 45154 - protein, 52 aa, Zea mays
  Clone ID: 700220728_FLI.pep
GGPRYPAISKFPYAVQDLSYAMSVAFCYYKYSSFEFLRCGYDNVMKNPKPSY

SEQ ID NO: 45155 - protein, 92 aa, Zea mays
  Clone ID: 700172328_FLI.pep
CTVVYWDRGTATAQWRVESCSGSVEIMYVSVNDEDEATDHTCTSCIILGTWHPVLYGKGRTLQSGRAVSRHVTTTVCVYNLWRSELHFPFPL

SEQ ID NO: 45156 - protein, 108 aa, Zea mays
  Clone ID: 700196910_FLI.pep
PAAILQHIVSSVGDTAGSSVGAWSRLLQAAHRRQLLRYLRRQQPRDLAALRLLLQDGLEDQAEDRLVPVLRLHLPELLATLLPQRLALRRAVGRRRRAALMPQKLDAL

SEQ ID NO: 45157 - protein, 141 aa, Zea mays
  Clone ID: 700207524_FLI.pep
SESRRQHSSFLSSGDGEESQRCRSGGGDARRGRGTGSACRDGEGALLRPRAGPNGRGGFRGGGAAGEHRGGVPRAGPSPVPQAGGDPGLRRARAQRGVRGRLGRGRRRRRARCHTAHQWRLTLLTTADLCGGDKRYEDIDR

SEQ ID NO: 45158 - protein, 41 aa, Zea mays
  Clone ID: 700210418_FLI.pep
NNKIPDLNLQDGPMVLSPPRKLRRVTAHEGMEGCSSTLSVL

SEQ ID NO: 45159 - protein, 198 aa, Zea mays
  Clone ID: 700212773_FLI.pep
GLLHRRPPPPTRHRPPRTGPGCYAAELQDPLHLGAPPRRLHGSRGCFGCCAKPTPIIAVDEPSKRLRIQGRSVRKASLSEDFWSTSAHEMENSGIQSQRSMSSISTLAQSSDQHASGSCSNPNEFMNQGLMLWNQTRQQWVGSKKRHSRSQQPREPKLSWNTTYESLLGSNKPFSQPIPLGEMVDLLVDAWEQEGLYD

SEQ ID NO: 45160 - protein, 161 aa, Zea mays
  Clone ID: 700281787_FLI.pep
FSPNNTSIKRQTVYSSLFTRSRKPKSETTLQACMTGSQDPVPVIPIRTFTCTSLNDSIVYLPSRPSFSYSLSKDKDHPMVLMGLSSSHLHCPSLNLRMALGPLGRLHSEMEADLLLVENYFPTCERCRLQVKGYLKSPKWADREVIAGCLSSSKSKQNINW

SEQ ID NO: 45161 - protein, 132 aa, Zea mays
  Clone ID: 700282325_FLI.pep
APVPTAASPPQPPKPVILSSQRELVLSTTSCAMGLRNSLLPMDRGLQLGGCPGWRLLPWMTSRRLAMEREHPDRAEARLVTIDDRWPPLATTGPEALLARGTWTSDSSERQCSDRLSANHNVGGGGSAALSS

SEQ ID NO: 45162 - protein, 102 aa, Zea mays
  Clone ID: 700201727_FLI.pep
PARRHRRRRVRSAREAQGQEGPGERARPPGQGGGGRRRRRGLRRVRLPRASREEGRQEARPQLIRRRLPQPKQQHIVAVAVSSVLPASSSSTVCRAGLDLRL

SEQ ID NO: 45163 - protein, 92 aa, Zea mays
  Clone ID: 700380126_FLI.pep
SVPMRKILDSPFHPMSCSDRAKCPRQTTFCQHIVCTELILPKCCCIERKEWWFMQHFVFSQEQDQANCHFVICRSILSFLKCTFRIMVVFMV

SEQ ID NO: 45164 - protein, 82 aa, Zea mays
  Clone ID: 700351238_FLI.pep
PLWAYAGNSAPDGHRHDDHDKRTTARRKRMASALHQSRVQRIQDPEGIWTSCCLRSLSVRYIFTYICMHMGCGLWHDHVINK

SEQ ID NO: 45165 - protein, 87 aa, Zea mays
  Clone ID: 700355742_FLI.pep
QLGAGLSAAAGPIGRTSEKGSGICYTYSCSKGAFVGVSLEGNVVTTRMETNLRFYGDAYQTATHILFGRVERPRAAQPLFASRFRAS

SEQ ID NO: 45166 - protein, 109 aa, Zea mays
  Clone ID: 700444921_FLI.pep
INIHQMFALVVPPSPGFLVFIYVGLLQEQTIQEGKIVQVKKKLLCMTNLSTMLYMIPMLNTIYSGMLGTGASLNSSIIPYASNRLYQSNITTRQFNIRDVEVDTSRAAR

SEQ ID NO: 45167 - protein, 106 aa, Zea mays
  Clone ID: 700452272_FLI.pep
MFYSSSAKRYYREEMMPHRYCWRLSPLRVSISFKISCDRVLTGSSTSSSNSPRNGMVSGTRTTYSSFRCWTMYLITFRPSILGRTSSLLVCISTSWLRGFQRTSVR

SEQ ID NO: 45168 - protein, 58 aa, Zea mays
  Clone ID: 700452325_FLI.pep
YRVTVRFCHRVSVRSTFGLGVGTPFVRFGCSRYETRREKNEQGFCSHLLLSNDIDILF

SEQ ID NO: 45169 - protein, 172 aa, Zea mays
  Clone ID: 700452876_FLI.pep
SAGAKMLVYQDLLSGDELLSDSFTYKELENGVLWEVEGKWVTQGPVDVDIGANPSAEGGEDESVDDTAVKVVDIVDTFRLQEQPPFDKKSFVSYIKKYIKNLTAVLEPEKADEFKKGVEGATKFLLSKLKDLQFFVGESMKDDASVVFAYYKDGATNPTFLYFSHGLKEIKC

SEQ ID NO: 45170 - protein, 121 aa, Zea mays
  Clone ID: 700425275_FLI.pep
RRLRRARRAPPGGGGDQLRHHRPQAPPGRRRARRRRGGARARARRRAQPALPLLRDGGPGSPEDGGGGHGAAAVLGTRWIAPAGSPCNRIASISSIYLRVYTTCVIIICRLTWLLAGILSP

SEQ ID NO: 45171 - protein, 94 aa, Zea mays
  Clone ID: 700426114_FLI.pep
MGLEKIMKKFDLRGIQTHPIPLNPHGLKANRTSPKQILLTTDLYIGSFANKRIPAMSEAFFINVYFSWISYHIEDCHSPNLRKSSSQLLPVGPK

SEQ ID NO: 45172 - protein, 67 aa, Zea mays
  Clone ID: 700431538_FLI.pep
GRRGGGGRGQQHRRQRQRGGERLHGGRERHAAAVAGGGGAGHGEARARLRGEGGRGGGGEGGHLWSL

SEQ ID NO: 45173 - protein, 60 aa, Zea mays
  Clone ID: 700432127_FLI.pep
PKVSHFGVNPKALWRVRSYKVLLQCNASLPLVGADVSEVDDPLRVAPLVVVPGDDLDHVV

SEQ ID NO: 45174 - protein, 72 aa, Zea mays
  Clone ID: 700442982_FLI.pep
RLAYILSADVGRLGDDVDEDADTVRAIIRGHHGADGQHHDVGVRLVLEDHLLGVLHAQPDHLRPRCRRPACP

SEQ ID NO: 45175 - protein, 102 aa, Zea mays
  Clone ID: 700449470_FLI.pep
EHIYPPIMMKGGSKKEVAGAAAVVAILLVLQLMAAPPTAMAARSPRGAVPDGSLATTPKVTMLSATLCYTGETCKYITCLTPACSCNYDDRRCYIIFTPAAA

SEQ ID NO: 45176 - protein, 72 aa, Zea mays
  Clone ID: 700449885_FLI.pep
KKQERERIFFSLTSPNKLTLNGKTLKRLGGSTMVSSNHFSLHRLYPQAAGHRRTETSHDQKLHLSFLFIQVS

SEQ ID NO: 45177 - protein, 72 aa, Zea mays
  Clone ID: 700455412_FLI.pep
VGACRIPNVAGVASTWNNQNYFSIFSIFLALHVRQALGFVVRFEGLSMCAVLLFTFVHPCLVYPQDCFLLVL

SEQ ID NO: 45178 - protein, 306 aa, Zea mays
  Clone ID: 700455612_FLI.pep
RHSSRNIISWNCIILAHLLHGSPSEALDRFCEMKQEGVLPDHTTLTAVIKAYGLQGKVSEAKRIFHNMTHDHNITPDLDHYTAIVDLLGRSGSLQEAYEFIDNMPLIPNLAVWEALLTAATIHGNARLANLAARELSSLDPSDPRIQRLVFNYWGLTGKSVDVPLMTVYNGGRELEDVDSCSVEIKNNVYLFSTGDNLALESTVAELKLIMIQIRMSLLKICNETNAEEEKEELSGIHCEKLAIAFAISNSPPFRSIRIIKTLRMCSHCHIFAKLVSEKYERQILIKDSNCLHKFKDGKCSCEGYW

SEQ ID NO: 45179 - protein, 84 aa, Zea mays
  Clone ID: 700428285_FLI.pep
AEAAGARPSLAVSEVLDQRGVGELVKLATERGRKARPNLKVGICGEHGGEPSSVAFFAKAGLDYVSCSPFRVPIARLAAAQVLV

SEQ ID NO: 45180 - protein, 148 aa, Zea mays
  Clone ID: 700428651_FLI.pep
SQIHKEEQESYTRRKKKNTQQNKELTGGRISVAGALGGESLREPPPILAVVVAHEVALRPPDGAPLGAVKLPVHPPAAAGGPARAAADAGAGVVAAVGDDEGRVGPVDADPALLGGPVAAVPQRGVQRHGPGARVRQVGVALEGADEE

SEQ ID NO: 45181 - protein, 79 aa, Zea mays
  Clone ID: 700343255_FLI.pep
HPSFSLLLCSGSLAYLSPASIVSMKRASMALLSPRDQISGRSLMKRTSHGHLTKTYASHNLLFLGLVRSFSLMPSTCEM

SEQ ID NO: 45182 - protein, 180 aa, Zea mays
  Clone ID: 700348267_FLI.pep
VLEDLGPHCLQLGLQRVHLLLENGDGAHASVHRIPQPEVRFVHQAARCVRPLPLHHLQEHLGDVASAEDLVDGGEFVGLMRREVRGEGAFLRAAAAEELARGARRQGVEGTAVAEAAWDVVVGRHGGGGCGSDSEGGCIRLSLDLPDLIESLPLRGHPGMLALLSGAWEMETEMTKERDR

SEQ ID NO: 45183 - protein, 147 aa, Zea mays
  Clone ID: 700382963_FLI.pep
PEMGLHGGVVVLRAAVLAAVLGFVAAAGFISNDALLERGHDTTGRSLLQAKKDCPVSFEGANYTVITSRCKGPLYQPTLCCGALKDFACPYSTYINDVSTNCAATMFSYINLYGKYPPGLFANTCHEGDKGLTCPEDTPQIEPGQKA

SEQ ID NO: 45184 - protein, 135 aa, Zea mays
  Clone ID: 700445158_FLI.pep
GNKAGEDYDGDRDLVDFVKFINEKSGTSRDTKGQLTSEAGRIASLDVLAKEFLGASGDKRKEVLSSMEEEADKLSGSAARHGKVYVTIAKKILEKGNEYTEKETKRLDRILEKSISPSKADEFIIKKNVLSTFSS

SEQ ID NO: 45185 - protein, 146 aa, Zea mays
  Clone ID: 700453302_FLI.pep
CCRRLCRLRRDAEWETCVPVIDCSWKQIAEPVMKTYTETTDGSTIEEKETAIVWCYEDADPDFGSCQAKELHDHLESVLANEPVSVKAGPNLVEVKPQGVSKGLVAKRILSTTQEQRGDDDDDLPDFVLCVGDDRSDEDMFEVIAA

SEQ ID NO: 45186 - protein, 70 aa, Zea mays
  Clone ID: 700421820_FLI.pep
MAALAASSTAAFAAKPRLPRARLTVACSATGGDGNGSSSSVSLASSVKTFSAALALSSVLLSSAATSPPP

SEQ ID NO: 45187 - protein, 97 aa, Zea mays
  Clone ID: 700334923_FLI.pep
RYQNNKPTTPMRSPASNEAQESLTIGIADEHIGAVVGRAGRNITEIIQASGARIKISDRGDYISGTSDRKVTITGTPEAIRTAESMIMQRVSASSER

SEQ ID NO: 45188 - protein, 140 aa, Zea mays
  Clone ID: 700340315_FLI.pep
SRSLSFLSFSSRSLSRSSSFSFSSRSLLSFSFSRSPGPFPFPPPSSSRRFLSSSAFSASSSAHDTHGSIVDSRCADSSLSTAVGSRCPSASASTFFPMACSTEPFPARNCGWFCPMWVLNPTNTNESSLNDICAIGWNRG

SEQ ID NO: 45189 - protein, 70 aa, Zea mays
  Clone ID: 700340742_FLI.pep
AMAGEVIRKVELGYTQLRCSNLLGEQVVVFLFLLLDALFAILFASSHNRYKSKKGRTKSSTRATVSLVIH

SEQ ID NO: 45190 - protein, 98 aa, Zea mays
  Clone ID: 700341194_FLI.pep
CFISLQLLFKSPQLHHSSCSRADQSQNHQSYTNASSSSKAFRQPLQLLVSSCFKVQAFFVQNTLAACPEEVKQMMTNALTLIAARTSRNGVSLAGAVH

SEQ ID NO: 45191 - protein, 25 aa, Zea mays
  Clone ID: 700346081_FLI.pep
GTSKLCCPSQGLLRHFYPLKCNHLL

SEQ ID NO: 45192 - protein, 109 aa, Zea mays
  Clone ID: 700349765_FLI.pep
VVVEKHGMVAAGSLVRQNTRIPCGEVWGGNPAKFLRKLTDDEIAFITESASNYSNLSKVHAAENAKPLEKIEFEKVLRKKFAHQDEEYDSSIGITRGAPPELTSPNPAQ

SEQ ID NO: 45193 - protein, 106 aa, Zea mays
  Clone ID: 700353926_FLI.pep
YLQHIINLLYSSPHVHQRADATPPYTNPNPNPRLAPGFSSYPSSSECILHRTGTYHCRRKWGPQVLQFVHGYLVATDCLQCYLQINSQRPDRPCVLNQSWLLLFWS

SEQ ID NO: 45194 - protein, 236 aa, Zea mays
  Clone ID: 700445890_FLI.pep
AQGAFKYGLYEFFKKTYADMAGPEHAARYKTLIYLAGSATAEVFADVALCPMEAVKVRVQTQPGFARGLSDGFPKIVRAEGYAGLFRGLVPLWGRQIPYTMMKFATYENIVEMTYKHLIPTPKDQCSKPLQLGVSFGSGYVAGVFCAAVSHPADNLVSFLNNAKGATVGDAVKNLGLLGLFTRGLPLRILMVGTLTGAQWVIYDSFKVMIGLPTTGGAPAPATVPMEGLGELKASA

SEQ ID NO: 45195 - protein, 215 aa, Zea mays
  Clone ID: 700446705_FLI.pep
VHPLVLLFDRYRRRAQHYIAKIWATVTISMFYNLEVEGMENLPPNSCPGVYVANHQSFLDIYTLLTLGRCFKFISKTSIFMFPIIGWAMYLLGVIPLRRMDSRSQLDCLKRCVDLVGKGASVFFFPEGTRSRDGKLGVFKRGAFSVAAKTGAPVIAITLIGTGKLMPSGMEGILNSGSVKVIIHRPIQGNDAETLCSEARNVIADTLLLHGYGAH

SEQ ID NO: 45196 - protein, 230 aa, Zea mays
  Clone ID: 700450066_FLI.pep
VQVTRLHINNTYNRPVAIRHKNKHTLLHTYSTVVSSVMKHCIPYTYTCIVCNCACIVCKCNCACMKKQSIVCNCACMHAGRLFIYTKLMRPACLYEHDSTTRSRTGRARGVRRGLRLGFAGARLGLRHRLRLWLWFRVGLRRGLRFGGFRCWVGLRCGLRVSWLWLRLRLVGLWRRFRLVRLRRRFRSDHRPRLRRITIAGGGGRGHDDQRQPYHQCAPHRSSVAHSRER

SEQ ID NO: 45197 - protein, 232 aa, Zea mays
  Clone ID: 700450602_FLI.pep
LSYFNFESPLPLSLSHARSSPTQQNPNPSCGRRRRLRAQPMSDSEASPPPTPAAATPAALVETSPSSARKEELLPVEEKISELSESQSELLGRLRGLKEDLLSWRSNLDSQVTKYKVELSDIKSALNNEIEQLRSDFQELRTTLKKQQEDVSLSLKNLGLQDATENDGNKGNGDGTNEVLSANLGNLKLDGSSENYDESRESKEDKVENTDTAGDGIVDKATKETSSTDEQF

SEQ ID NO: 45198 - protein, 118 aa, Zea mays
  Clone ID: 700424345_FLI.pep
PRTYLASDAAASIGVGGEHPHGGGWRRRRREGILQDHPHLRPQAPFQSVQRARGGALHRGAQVRRGGVQGPAPDQCHHHQRWNWHQPPAKSGNVFLKHGSELRLIPRDRVGAVVMSSG

SEQ ID NO: 45199 - protein, 138 aa, Zea mays
  Clone ID: 700424471_FLI.pep
TPAIGEAIGLGAAIDYLSCIGMEQIHEYEKELGTYLYESLLSVPNVQIYGPAPSQTVHRAPLCSFNIENVHPTDIAEILDLQHSVAIRSGHHCAQILHRTLGINASARASLHFYNTKDEVDTFVDALKATVDFLTDRY

SEQ ID NO: 45200 - protein, 208 aa, Zea mays
  Clone ID: 700424714_FLI.pep
RLSTAASSSSSSAPPTMIATHLSPGLKQYRFPSPLHSTSHNHHLPVHLPLPRRHRNFAKPAAAVPDLLASVESVASAASVLAAIVLVHESGHFLAAASRGIHVSQFSIGFGPALARFRLGPVEYALRAIPLGGYVGFPDDDPESGFAPDDPDLLRNRPVPDRLLVVSAGVAANLAFAFLIVYAQALTVGVPVQAQLPGVLVPEVLPGS

SEQ ID NO: 45201 - protein, 144 aa, Zea mays
  Clone ID: 700424725_FLI.pep
QRQHTQLSSKRDREAGVMATVSAAVVTTIVARAAIARPNALGLPALRARSERVRCSYAKDAAPVSTKGAGASLLAAAGAVTASAGPALALVDERMSTEGTGLSLGLSNNLLGWILLGVFGLIWSLYTIYTSDLDEDEESGGLSL

SEQ ID NO: 45202 - protein, 180 aa, Zea mays
  Clone ID: 700429881_FLI.pep
HLITIKVADFGLSKEEVYDGRKSGLKGTYGYMDPDYMSTNKLTKKSDVYSFGIILFELITAINPQQGLMEYINLAAIGGEGRVDWDEILDKDLLVGNIPEEVRMLADVAYRCVNKNPRKRPWISEVTQAISRLRQHQLIKHDAITLPRSETRTVLRRIDYQHVELSDLTSIKELTPIRAS

SEQ ID NO: 45203 - protein, 121 aa, Zea mays
  Clone ID: 700430366_FLI.pep
FVEKEKLESFYLPMYSPSVGEVEAILKQVGLFNMNHVKVFQTNWDPYDDLESDVVHNSIRSGENVAKCLRAVMQPLVASQFGEPILDKLFKDYARRVAKHLENEKTKHAIIVLSIEKAIHL

SEQ ID NO: 45204 - protein, 181 aa, Zea mays
  Clone ID: 700430394_FLI.pep
PPTPPRTAFPLAPRGELPPLALASYPPWPSRRPPRRRRSPPRQRSPRPCTCTSRPRRPAASRCSPSRAPPSRRRCASALRAPASPRARPSRARSCHHPPPPPTPQPPTSAAAAPASAAMTTTATTTTAARVAATTAAMATTPATAMTRPAAATPAGRRCSCWRSWAASSTACRPISPPPST

SEQ ID NO: 45205 - protein, 115 aa, Zea mays
  Clone ID: LIB3152-014-F9_FLI.pep
NFERLPEMLLSGLHSNEFTLILAYREEQKGSLSNRLNGQIRDTSHQSIFLFQNRPGFYLHLFFSGVVTGPSILRTVQSPYLVLEPKQHQYYPNDNGDRSILPNQRLPSHAFYCAP

SEQ ID NO: 45206 - protein, 291 aa, Glycine max
  Clone ID: 701051901_FLI.pep
RNEEYKRAVLKAKEHIRAGDIFQIVLSQRFEQRTFADPFEIYRALRIVNPSPYMTYLQARGSILVASSPEILTRVKKRKITNRPLAGTVRRGKTPKEDIMLEKQLLNDEKQCAEHVMLVDLGRNDVGKVSKPGSVQVEKLMNIERYSHVMHISSTVTGELLDHLTSWDALRAALPVGTVSGAPKVKAMQLIDELEVARRGPYSGGFGGISFNGDMDIALALRTIVFPTNARYDTMYSYKDKNKRREWVAHLQAGAGIVADSDPADEQRECENKAAALARAIDLAESSFVDK

SEQ ID NO: 45207 - protein, 363 aa, Glycine max
  Clone ID: 700988637_FLI.pep
QDPTEEWYYKTFFDAGEFAFGKSMVSLVPLEDCPPHAQFLDAYFAATDGSPQHLENAICVFEQYGGISWRHTETGLDEIFTEVRTDVSLIVRSIVTVGNYDNIVDWEFKTSGSIKPSISLSGILEVKPVDITHTDQIKEDQHGTLVSANSIGVYHDHFYIFHLDFDIDGVENSFVKTSLKTLQVTDNSSKRKSYWTTSNEVVKTESDAKTKLGFSPAEIVIVNPNKKTSTGNEVGYRLVSNAAVHPLLTDDDYPQTRGAFTSYNVWVTPYNKTEKWAGGLYVDQSRGDDTLAVWTKQNRGIENKDIVMWYVVGIHHVPCQEDFPIMPLLSTGFELRPTNFFERNPVLKTLSPGIVKFPGCEKP

SEQ ID NO: 45208 - protein, 266 aa, Glycine max
  Clone ID: 701139847_FLI.pep
GHPSLPTRPTVLLPQPSKWLQQHSHSFYIPCFLLSSSLCFWGSDLNTEGFVFCLNIDIYWEWSSIEIERKRKAMFLFDWFYGILASLGLWQKEAKILFLGLDNAGKTTLLHMLKDERLVQHQPTQYPTSEELSIGRIKFKAFDLGGHQIARRVWKDYYAKVDAVVYLVDAYDKERFAESKKELDALLSDESLTTVPFLILGNKIDIPYAASEEELRYHLGLTNFTTGKGNVNLSDSKVRPMEVFMCSIVKKMGYGDGFKWLSQYIK

SEQ ID NO: 45209 - protein, 315 aa, Glycine max
  Clone ID: 700954721_FLI.pep
IRLLRTTKRRRRVKKMTGMTKNQPSQWWWLDSHTTSNRSPWLQSTLSELNEKTRAMLKLIEEDADSFAKRAEMYYKKRPELVSMVEDFYRTHRSLAERYDQVKPDTTGIGHLITGGSPFASAKHQLEKLMTFSDNGYDTYSEHCDVYESEESEVDDPEQEEDEEGTKFLHNSIKNEQVSFVAASDVEVMKLRGEVKRLNEENKAHRDQIKQKDTICDEIMMLREEIGRLRDENEAQKEQLKQKDEEKIEVIRQLSLAIDVLKQENVKMRNFIAKESTKKWKNPFEINKLVGAFSVKLFSGGTPKNQPGVELSRCG

SEQ ID NO: 45210 - protein, 272 aa, Glycine max
  Clone ID: 701156606_FLI.pep
EKLEVVKKMKVIVFFVAIIILGAEWQCNGSEHEHEHGHSYQIFPLRMKTGPGGHYIPEVSCKSWRLGVEAHNVIDWRTIPQDCEGYVGNYMLGHQYRSDSKTVCREAYFYAKTINITAKTTWVFDVDETTLSNLPYFADHGFGVELYNATAFNEWVDLGEAPALPESLKLYNKLLSLGIKIVFITGRPLYQQAVTATNLKLAGYYKWEKLITKDTDKYNGKTAVTYKSTERQKLEENGYNIIGNIGDQWSDILGTNTGLRTFKLPDPMYYIS

SEQ ID NO: 45211 - protein, 441 aa, Glycine max
  Clone ID: 700757208_FLI.pep
THTHTLRIMASILHYFLALSLSFSFLFFLSDSVPIPQHHTNPTKPINLLVLPVQNDASTGLHWANLQKRTPLMQVPVLVDLNGNHLWVNCEQHYSSKTYQAPFCHSTQCSRANTHQCLSCPAASRPGCHKNTCGLMSTNPITQQTGLGELGQDVLAIHATQGSTQQLGPLVTVPQFLFSCAPSFLLQKGLPRNIQGVAGLGHAPISLPNQLASHFGLQHQFTTCLSRYPTSKGALIFGDAPNNMQQFHNQDIFHDLAFTPLTVTPQGEYNVRVSSIRINQHSVFPPNKISSTIVGSSGGTMISTSTPHMVLQQSLYQAFTQVFAQQLEKQAQVKSVAPFGLCFNSNKINAYPSVDLVMDKPNGPVWRISGEDLMVQAQPGVTCLGVMNGGMQPRAEVTLGTRQLEEKLMVFDLARSRVGFSTSSLHSHGVKCGDLFNFANA

SEQ ID NO: 45212 - protein, 580 aa, Glycine max
  Clone ID: 701038508_FLI.pep
FKKQSLEITVDLSKRSIVSTNVYIGHGFPMLTFDEQDFVAELPFKYKPFIESVNKRGLNISEVVCSTASVGWYGEIKSKRTLKLQCFHTQGSTNLFAMPLEGITVVADLDERKLVAYFDSKIVPVPKAEGTEYVASKQKPPFGPTFIGAAFVQPNGPGFKINGHSISWANWEFHLGYDIRAGPVISLASIYDIQQQRYRRVLYRGYISEFFVPYMDPTSSWYFKTFLDSGEFGFGQSMVSLEPFADCPSNAAFLDAYFAGEDGVPVKIANAFCVFEKYAGDIMWRHTESEIHDEEIREVRPDVSLVVRTVSTVGNYDYIVDWEFKPSGSIKMGVGLTGILGIKATAYTHVDQIKEDAFGTLLTDNTIGVHHDHYLTYHLDLDIDGEANSFVKTNLETVRVTDHSSPRKSYWTVVRETAKTEADARIKLGLKPSELAVVNPNKETKPGNKMGYRLFPFTVANPLLAPDDYPQLRGSFTNYNVFVTPYNKSEKWAGGLYADQSRGEDTLAVWSLRNRSIENKDIVLWHTVGIHHVPCQEDYPIMPTLSGGFELKPTNFFESNPVLKAKAPKPVHLPKCNSKP

SEQ ID NO: 45213 - protein, 37 aa, Zea mays
  Clone ID: 700150621_FLI.pep
HRSKPSTLFRFIETWEIDSAVHLPPPGTLRIISISYT

SEQ ID NO: 45214 - protein, 62 aa, Zea mays
  Clone ID: 700802718_FLI.pep
SPYHHSIVSGSEIKGKPESCLDFNLILCWKVLQRLLIVSVFGNSAVDCYDGWDLLVNQSFSI

SEQ ID NO: 45215 - protein, 116 aa, Zea mays
  Clone ID: 701159590_FLI.pep
DGMTYDEIKKSKPEEYESRRKDKLRYRYPRGESYLDVIQRLEPVIIELERQRAPVVVIAHQAVLRALYAYFADKPLEEVPNIEIPLHTIIEIQMGVAGVQEKRYKLMDAIHPTAGL

SEQ ID NO: 45216 - protein, 64 aa, Zea mays
  Clone ID: 701160329_FLI.pep
VRSGFGSGFGDLERGVRRCSLPALKQFSTSSHRFPQDSSMRVPAEQFLTLRPLGAPPIIVPLAA

SEQ ID NO: 45217 - protein, 113 aa, Zea mays
  Clone ID: 700551155_FLI.pep
KASSKADESEFRLAQLQHQLPTNEPGALMNLVEESTADDADDDDTKDCKGLFKNLKFYLSREVPRESLLFIIPAFGGTVSWEGEGAPFKEIDEDITHQVDSICNNLLHQSLTI

SEQ ID NO: 45218 - protein, 91 aa, Zea mays
  Clone ID: 700471170_FLI.pep
GPFFRRLANKKKVLLIQYEEVCCVCIWTHHTAVVSSLVVMVLWTPGYNFLCSSSYHNVQPRFCQVLMSCRCFVFCSTATLPQIPFLSSAPT

SEQ ID NO: 45219 - protein, 125 aa, Zea mays
  Clone ID: 700477184_FLI.pep
LTASYPHVHTTEPHLLHCLPLTYIVLTRREVYTYTSNVSTQAHATYARRSRAILSLLPARFGERVGPSHPGGHHPHERLRHLLAAPAAVASFAFLLLFLPLLTSVAFPLPMAAVAFFAFLLLLLL

SEQ ID NO: 45220 - protein, 128 aa, Zea mays
  Clone ID: 700569943_FLI.pep
TEQGRHRRCGEIVGLLWCLVFMVQVKAKTEPRAGFAERCLFCRRHGVVEPIIAQRCCSSSLPVNLSICSAHSHAVYDRHLSTVSVNNITNFPTPTWSIKAEHPIGMVPGDDGVGGGGAPGGGPHDGVR

SEQ ID NO: 45221 - protein, 118 aa, Zea mays
  Clone ID: 700582151_FLI.pep
LIWVTCLRGRRNAASSDEIQLRIDPVHGDLDEEIDGLHSRVRMLKGVAQEINSEAKFQNDFLHELQMTLAKAQAGVKNNMRRLNKSIIQQGSNHVLYVVLFALFCFFIVYLLSKFSRR

SEQ ID NO: 45222 - protein, 150 aa, Zea mays
  Clone ID: 700582179_FLI.pep
RPAFGRIKPHIVQPNHLCPLPKVFFSQIHHHRTNHGEVCRPQKSPQAVPVTGSGRPGDQPSLASSSSSSSLACFAPTEKNSVMTSRGMPFVSGTLMNTNARARTHTTAYTPKTPASPTTFSITGRVYVTMMLDTTRTSSATIRTGIVARR

SEQ ID NO: 45223 - protein, 92 aa, Zea mays
  Clone ID: 700582463_FLI.pep
TILLQITDEGGGIPRSGLSRIFTYLYSTAENPPDLDVHNEGVTMAGYGYGIPISRLYARYFGGDLQIISMEGYGTDAYLHLSRLGDSEEPLT

SEQ ID NO: 45224 - protein, 120 aa, Zea mays
  Clone ID: 700582674_FLI.pep
PLQTKYFSGGVPPICRGYVEISKDKQVNISRCEVMWPLQGVLWAKCSLQGISVSKWGRKDRQGRGSSLGLVRLHRIVPGIIPANQSLYKLEKQSGSESFRPTNPTQTNKALCDTVVLFIC

SEQ ID NO: 45225 - protein, 63 aa, Zea mays
  Clone ID: 700583268_FLI.pep
QTRTLRPLHFSTRHIATVFREQNTIEDPITNYVSQKRMNITIPITYNIYRQSGQKIIFRQPCY

SEQ ID NO: 45226 - protein, 190 aa, Zea mays
  Clone ID: 700618063_FLI.pep
APVWIALDEIMDPQNLGAIIRSAYYFGAQGVVLCAKNSAPLSGVVSKASAGSLELIELLSCRNMMQFLSSSAENGWRVLGGTIANKAVPLSQVELGVPTILVMGSEGTGLRPLVERSCTHLVRIPGNVDVSVEGADADAGEEGDSSSNRDLRSFLAVESLNVSVAAGVLLYHLAAKDACPISDKPSVILM

SEQ ID NO: 45227 - protein, 157 aa, Zea mays
  Clone ID: 700622463_FLI.pep
RRASPSRSSRFTAPPLASPTAARMPFKRFVEIGRVALVNYGKDYGRLVVIVDVVDQNRALVDAPDMVRCQINFKRLSLTDIKIDIKRVPKKSTLIKAMEEADVKTKWENSSWGKKLIVQKRRAALSDFDRFKVMLARIKRGGAIRQELAKLKKASTA

SEQ ID NO: 45228 - protein, 59 aa, Zea mays
  Clone ID: 700622923_FLI.pep
AVRPHSRPQQAPAVQERQGPRLHRKVQHHRTRWPRARPLQALATWLRFRFVLSFALVSN

SEQ ID NO: 45229 - protein, 143 aa, Zea mays
  Clone ID: 700622957_FLI.pep
RYTRGHQTTQIPRYSSSLNEPWLTDHHGGGAPGGECSPSGCCSLLGCGHPPAACQRRSDAAGLGGCPLCPGSLPSRCRWCRSSQPPGLWSCQSRSSQRSAYHLASGAPGGGCSPSGCCSRRGYGHPPAACQQRSGAAGPVECP

SEQ ID NO: 45230 - protein, 101 aa, Zea mays
  Clone ID: 701160381_FLI.pep
EVLSDLQLSLKCPWAEVTHQGVNRLSRICLLYPSFWSRCTVDNVIALVCQQLITAQLYTKLPERRVPMIFQSGSPLLGTQEQISITPLPPALIAPITMSIF

SEQ ID NO: 45231 - protein, 162 aa, Zea mays
  Clone ID: 701160405_FLI.pep
LVCAQAANANPLYGYYKSGWTEFQPQVARPTFASAIQIGDPVSVDRAVVALKATDGIVEEATEEELMNAMSLADRTGMFACPHTGVALAALFKLREQRVIGTNDRTVVVSTAHGLKFSQSKIDYHDSKIEDMACKYSNPPVSVKADFGAVMDVLKKRLKGKL

SEQ ID NO: 45232 - protein, 32 aa, Zea mays
  Clone ID: 701164519_FLI.pep
PIYTSLLQIISPQNYTSPHNHITFLFLARMPW

SEQ ID NO: 45233 - protein, 184 aa, Zea mays
  Clone ID: 701173282_FLI.pep
QIEVINPLFLLTAKPVVYLVNLSEKDYIRKKNKYLPKVAEWIKEHAEGDPIIPISVSFEERLTRYETEEEAKEEQKNVGAESALPKLIVQMRKALQLGSFFTTGTDEVRQWTIRNGIKAPQAAGVIHTDFEKTFIQAIVYNFSVIKELGDEAEVKAKGKVMTKGKEYVVEDGDIMLIKAGAAKS

SEQ ID NO: 45234 - protein, 90 aa, Zea mays
  Clone ID: 700549749_FLI.pep
GHPLLQPQLSNLMFITQQCLKQQRLSIACFSFLPIMFLVPSIKQWRHACASYLAASCLGFHWAVLFNFYGLKRLSFVNIRHCDQFLWWFM

SEQ ID NO: 45235 - protein, 117 aa, Zea mays
  Clone ID: 700549978_FLI.pep
IAFSCQQDAAKGGDDEDDDLEVSIAPSYSSWAITFHICSLNDLINKLYMYRSQDEEDDEKADEDKADSDAEDSKDSDDEKQHVRNSFLRPDQAICHVSLCLCPHTPVVMKCHLQDEL

SEQ ID NO: 45236 - protein, 208 aa, Zea mays
  Clone ID: 700611275_FLI.pep
GVHYSFLLFLVETKHYRWRLDKHISIQLLWSLNNNRVISDAGCNTAQRNQFVPFDCSSSYKRLQRQYPGRSVAGARAGRLGPDSVLLLEPGDLVLLLLDIRLLGHLGGLVVEHDKVAVGDVEAGEVVDGVLGVVDVLVDNVSGPARVLGVAQTDLPDRAVLAEDVVHLLARDVERQVPHVEHPVHLRREARIPLPQARRRHRCRAEIT

SEQ ID NO: 45237 - protein, 62 aa, Zea mays
  Clone ID: 700572494_FLI.pep
ILPGNNMNEGKLVDPVSGADVVTTYEDKDGDWMLVGDVPWEMFVESCRRLRIMKSSEAIGLG

SEQ ID NO: 45238 - protein, 27 aa, Zea mays
  Clone ID: 700572908_FLI.pep
SLETKHPLSDKKKVLVSIFYNFGTKIE

SEQ ID NO: 45239 - protein, 162 aa, Zea mays
  Clone ID: 700578922_FLI.pep
LLPACLPACKKEFVMASKRILKELKDLQKDPPTSCSAGPAGEDMFHWQATIMGPPDSPYAGGVFLVNIHFPPDYPFKPPKVSFKTKVFHPNINSNGSICLDILKEQWSPALTISKVLLSICSLLTDPNPDDPLVPEIAHMYKTDRPKYESTARSWTQKYAMG

SEQ ID NO: 45240 - protein, 134 aa, Zea mays
  Clone ID: 700579266_FLI.pep
GCWHSISALQLGYLHWKLWNSAGPWCHGRRLRHRERQGLLDREELMAPTRRTLAPARRPRPRRPPCATTTTRALTAPPAAASTSTASTASPGAAARSRAPPAATITTAAAPMTTPSATSGREPASWARTAHCFQ

SEQ ID NO: 45241 - protein, 50 aa, Zea mays
  Clone ID: 700613605_FLI.pep
EQCNTFFISNFWHQGEAIITLGFATQFYEFKTNTHTILTRSVNLKATRRG

SEQ ID NO: 45242 - protein, 114 aa, Zea mays
  Clone ID: 700614154_FLI.pep
KDPEHPYSLEQLSVLSEESVSVDETLGRIQITFTPTVQHCSMATVIGLCLRLKLMQNFPPHFKVDIKVAPGSLANEESVNKQLNDKERVAAALENPNLRQLVDECLCFNDPYSR

SEQ ID NO: 45243 - protein, 179 aa, Zea mays
  Clone ID: 700618989_FLI.pep
IRHETDRIDGGGIAVVKPRGRSDEPQDQETQARSERPWIMAGAVDRILFTGRRYYIYTPRRRPPPLDSRAPSPGRASSVAAAAGAAAAGAALAGVAVAAAALGGRLEAAGAGLGGRRGEDRGLDAAGGGGLHVRVHTAAVASAAAGAAGAAPALAAAARRHDHRRREEVWFLLVLLPCC

SEQ ID NO: 45244 - protein, 375 aa, Zea mays
  Clone ID: 700619353_FLI.pep
AKQVQESLKVGQSIIQKFWARVLGVGPALRAVASMSRADWAAKLKHWKDEFVCTLQHYWLGTKLLWADVRISSRLLVKLAGGKSLSRRERQQLTRTTADIFRLVPFAVFIIVPFMEFLLPVFLKLFPNMLPSTFQDKMKEEEALKRKLKARMEYAKFLQDTAKEMAKEVQTSRSGETKQTAEDLDEFLNKVRRGGRVSNDEILNFAKLFNDELTLDNMNRPRLVNMCKYMGIRPFGTDHYMRFMLRKKLQDIKNDDKLIQAEGVESLSEEELRQACRERGHLGLLSTEEMCQQLRDWLDLSLNHAVPSSLLILSRAFTVSGRMKPEEAVVATLSSLPDEVVDTIGTVLPSEDSVSERRRKLEFLEMQEELIKEEE

SEQ ID NO: 45245 - protein, 135 aa, Zea mays
  Clone ID: 700619889_FLI.pep
GTVHIFSLRVRVAGVDSSNEQRTLEGPRMDHQNSSSSIDPLIQANTGSNASSSLSFMRGILPKYFSSEWSFAQFHLPEVTRYIVAFGAQNTVMMVGLDGSFYRCSFDQANGGQMLQREHFRFLKSDSPPFRTAAA

SEQ ID NO: 45246 - protein, 206 aa, Zea mays
  Clone ID: 700704045_FLI.pep
AISSSTPDWRTRHHEGADRCPCSPGARCERRLQYKRRLWLPDTTVSSTASVLYAASVLSAAAAAAAAMAIPHSTTAAKPVPAVRILRRRQRRQPVPGPVRRVPEAPVQPGGDALRLATVPGAAAAVLPPDQAGGAAAPVPGDIRCGPAVLPAAAAAGRARGADGGPGSAAADGDVRPAAAAARSLPLQRSCRRCLLLRKLCTVVIM

SEQ ID NO: 45247 - protein, 291 aa, Zea mays
  Clone ID: 700799476_FLI.pep
GMATGSEASKAAEAVVDWHKHDSKRMLHAVYRVGDLDRTIKYYTECFGMKLLRKRDVPDEKYTNAFLGFGPENTNFAVELTYNYGVDKYDIGTGFGHFAIANDDVYKLAENIKSKGGKITREPGPVKGGSTVIAFAQDPDGYMFELIQRADTPEPLCQVMLRVGDLERSIKFYEKALGMKLLRKKDVPDYKYTIAMLGYADEDKTTVLELTYNYGVTEYSKGNAYAQVAIGTNDVYKSAEAVDLATKELGGKILRQPGPLPGINTKIASFVDPDGWKVVLVDNTDFLKELH

SEQ ID NO: 45248 - protein, 102 aa, Zea mays
  Clone ID: 700801174_FLI.pep
PAAILQHIVSSVGDTAGSSVGAWSRLLQAAHRRQLLRYLRRQQPRDLAALRLLLQDGLEDQAEDRLVPVLRLHLPELLATLLPQRLALRRAVGRRRRAALMP

SEQ ID NO: 45249 - protein, 130 aa, Zea mays
  Clone ID: 701158577_FLI.pep
SSVPHSHRASRHVYLPQPNPAQPSPKPSGRGAGEPTAGRGDGPRGGGAADGPDDDHAARAQRAEPPPGVPRRLHHPPLPHRPRLQVRRRRGQQGRPRQAHRPRRRDQRPGRGAKEAGCTVQRGLREGARQ

SEQ ID NO: 45250 - protein, 168 aa, Zea mays
  Clone ID: 701158611_FLI.pep
LNTAEIRFGASGGKGRHSIVDHAARSPPGAPGRRHRDGAAPAGRHSRGGGGVRRHSHVRVRRRRLRLRPLEAVQGHGNAGRPARGGHRAHAGAGGRGGGSEQRVGWARQPCGHVRPARGPSHLFRPCRGILARADARRRGRVVAANARLRRHGRSRSWRKKYWYCYVS

SEQ ID NO: 45251 - protein, 133 aa, Zea mays
  Clone ID: 701158805_FLI.pep
RWHNLAARRDDVAWQWHERFGHLNFEALKRLSAKEMVRGLPCLDHVEQFCDVCMLTKQRRLPFPQQSSFRAKERLELVHGNLCGPVTPATPGGRRYFLLLVDDLSRYMWVMILGSKGEAANAIRRVQVAAEAE

SEQ ID NO: 45252 - protein, 320 aa, Zea mays
  Clone ID: 701158817_FLI.pep
IAAKKAVVNYSTENLDAPILSIEEAVKRCSYFETPPFLLPLKIGDFSKGMAEADQKIYSEVKLNSQYYFYMETQAALAIPDEDNCMVVYSSSQCPETAQNVIAKCLGLPCHNVRVITRRVGGGFGGKAVRSLPVATACALAAFKLHRPVRMYLDRKTDMIVTGGRHPMKICYSVGFKPDGKITALHIGLFINAGMTKDISLIIPHNFIEALKKYNWGAFSYEAKVCRTNLATKSAMRGPGEVQGSYVAEAIIEHVASTLSADANLVRRKNLHTVESLALFHSECTEDAMGYTLHSICDQVTASENYQHRLEIIQSFNKNN

SEQ ID NO: 45253 - protein, 285 aa, Zea mays
  Clone ID: 701158857_FLI.pep
GAAGHGGGGAVGGELHRGGGGGGVRVLGGGPDRAVGRPDQPVHVPGRLRGAVGIGGRPRPSLHPGPHVPRGPPRVQLPGDAAASPAAPAAAPGQRGTGAGGVRARAARVPVVGVGGGPEAAAAAAGGPGAGPVVAKDGSGNFTTVGEAVAAAPNNSETRFVIYIKAGGYFENVEVGSEKTNLMFVGDGMWRTVIKASRNVVDNSTTFRSATLAVVGTGFLARDLTVENAAGPSKHQAVALRVNADLSAFYRCAFAGYQDTLYAHSLRQFYRDCDVYGTVDFVFGD

SEQ ID NO: 45254 - protein, 282 aa, Zea mays
  Clone ID: 701158929_FLI.pep
LGCCLEVEVPILVYEFVPNGTLFDLIHGDHGQRVSLDTRLRIAYESAEALAYLHSCASPPILHGDVKSTNILLDGDYAAKVSDFGASILAPNDKSQFVTVVQGTCGYLDPEYMQTYELTDKSDVYSFGVVLLELLTGKKAFDLQGSEQDRSLSMRFLYAMKENRLEDILDDQIKNSESIEYLEEIAELARQCLEMSGVNRPTMKEVADKLGRLRKIMKHPWAHEDPEELDRLLGEPSTTTNSTATTGNFIIAIGEPSTANSTANTGNFSITKRAAMGLESGR

SEQ ID NO: 45255 - protein, 130 aa, Zea mays
  Clone ID: 701158987_FLI.pep
KTLPAQTRLLQLLLRRRIKRTLLRRRIKRTLLRRRPRQDGSPERHRPSQPAGRAREAQAQEEAPRPVPQLILHGCQVPGMLQHNHGFQPLPDCCCVPRLPNCSLPAHGRKGEAHGGLLFPPEGRLERVCY

SEQ ID NO: 45256 - protein, 58 aa, Zea mays
  Clone ID: 701161562_FLI.pep
LVLNNMNTIFAFAVFHFSSDLQFKSELSEEIQLNELNLIVKANTLINVPKLNMYVYIL

SEQ ID NO: 45257 - protein, 220 aa, Zea mays
  Clone ID: 701161736_FLI.pep
EICIRNHLLATSGYHTLYEWYRSMESEHFPDPTGLRARLEQWTLGLYPACIKYLMAAFDVPEVMAVTRINICKNGMMSLSRSVLIMYYTSVFIYFWIFSTPVVSLIFGSYLYICINWFHIHFDEAFSSLRIANYKSFTRFHVKKDGDLEIFTLAVDKVPKDWKLDPRWESEGRGPHQLSHDRKHPSKWRSASSTDPVRSVRVVDHFTIERTRTPDMEPSS

SEQ ID NO: 45258 - protein, 235 aa, Zea mays
  Clone ID: 701162956_FLI.pep
PNAPLVLKGITCTFAAGNKIGVVGRTGSGKSTLISSLFRLVDPAGGRILIDKLDICSIGLKDLRTKLSIIPQEPTLFRGTVRNNLDPLGQHSDEEIWEALEKCQLKTAISTTSALLDTVVSDDGDNWSAGQRQLFCLGRVLLRRNKILVLDEATASIDSATDAILQKVIRQQFSSCTVITIAHRVPTVTDSDKVMVLSYGKLLEYETPAKLLEDKQSAFAKLVAEYWANTKRNST

SEQ ID NO: 45259 - protein, 235 aa, Zea mays
  Clone ID: 701165603_FLI.pep
LNNVRQLAMYHKERLQELLEPVVPLIVKSVKNPRSAVCKTALMTCADIFKAYGDLMVHSIDPLLVQLFLKASQDKRFVCEAAEAALISMTSWISPLLLLPRMLPYLKNKNPRIRAKASVCFSKSVPRLDVVGIKEYGMDKLIQIAATQLSDQLPESREAARNLALELQAFYEKSQASTSDEHEVEASASPDAESWEAFCQSKLSALSAQAILRVTSTTTKECVTSAPKEGLAVGC

SEQ ID NO: 45260 - protein, 112 aa, Zea mays
  Clone ID: 701165648_FLI.pep
HDRTKTMDDSSMLSEAMVSGKKKRRGAHTPRLQIAVLIILAPCLVYPQKNDAIHGNAKNKHCLMKLFQTARGASGDGGVHVLALINFGRRHRAGAGICLAYITSSDTHPKSG

SEQ ID NO: 45261 - protein, 111 aa, Zea mays
  Clone ID: 701165681_FLI.pep
ALIGSTARLLAPLDGTPSLTLLRRALATTLQHFQFSQTLLLLARHDERVVALDVVGVPLRHLVADHFLPQELRRRAPPRRVQRVAEDGRPHLRGSRRCRRRQQPPQPARRR

SEQ ID NO: 45262 - protein, 311 aa, Zea mays
  Clone ID: 701165760_FLI.pep
FYCRTPDLQEGLVRSANYTARNGHHGDRGGAGAGAAGQRQRRAEDAALRGRPQEPAQERRPLPVHPGHERVPAGAGEHEGAPRDHRQAPMEPDDDLRRRGAVPEHAHQAHRRQEDHGDRRLHRLLPPRHGARPPGGRHDLGHGHQPRELRAGPALHREGRRRPQDRLPRGSRAPRPRRPHRGGEEPRVVRLRLRGRRQGQLPQLPRAAAEAGEAGRPHRLRQHAVERLRRAPRRRAHAQVHPLLPRLRARPQQGARRRRPRRDLPAPRRRRRHPLPPRQVKTWPGLACPTTATDGAAGRILIPIIIDDPQH

SEQ ID NO: 45263 - protein, 134 aa, Zea mays
  Clone ID: 701166145_FLI.pep
HGRGAARCRLAAHRRQAWREGGHARQLEARGVRRHRARRLRRGGQEDVPAGVRDRRPALQEGLPPFHQGLASRRTARTSSSSVSPRRPGCADLLCLLVVSLTSTSIYIGSMYVRTMPCRVVSCSGGNRFVALPR

SEQ ID NO: 45264 - protein, 245 aa, Zea mays
  Clone ID: 701181349_FLI.pep
TTARSRSATSGWRRSWTRRTWRTPSWARRSSWRRSCTRRRTRSRWTSTRTACACWRWSRGRCPTPSAAASCRSSTTSPGASRPRRSSGSRTPSCGASSSAASASPGTGPRPLTSCRTPSSTASVAGTTTTTPRRSPTPPASSPPRPCRAPGATSTTSPGSGWTDLTVPPSVLPFISTGIPARVRRVLLEVDSWPASDCLQVCIDYCLFLRLPGDWLVFTVPVPIIVVGFAPDEALYLTLRADSFK

SEQ ID NO: 45265 - protein, 138 aa, Zea mays
  Clone ID: 700196505_FLI.pep
AERSRSQAAASPLEIENLAEIIEDFKMVLVVRNDLKMGKGKIAAQCSHATLGLFKKLQQRAPKSLRRWERCGQVKVVVKIESEEDMLVLQGRAKSLNLPTHITIDAGRTQIAPNSRTVMAILGPADMVDDVTGGLKLL

SEQ ID NO: 45266 - protein, 90 aa, Zea mays
  Clone ID: 700379054_FLI.pep
GEPWKQPLPKDDDTVVVEISHLGQVTMLANEPCRSKSVNDQSSLSPAHDSHGDYNDIAEEDEDEWEDGRRKFGAADTFKIPDEIDIAHFS

SEQ ID NO: 45267 - protein, 119 aa, Zea mays
  Clone ID: 700355934_FLI.pep
GSGQRRRQASPQGSPRQHPGHHEAGDPEAGEEGRREAHLGAHLRGDPRRAQDLPRERHPRRRNLHGARPPQDRHRHGRRLRPQAPGSHPLRIRRLRGATAAGGRGKSLGSRSRNREYSG

SEQ ID NO: 45268 - protein, 124 aa, Zea mays
  Clone ID: 700356209_FLI.pep
VTQCSTNHYDTITPIIGFRQSDKKNLFSEALPGKKHNSLCMLSSLFACFHQFVHLLGAVHVADQVDHSGAVSPLVVVPGHKLHKVAVQGNASLRIKDARPAVTLEIGGNKVLLDITQNALEATL

SEQ ID NO: 45269 - protein, 75 aa, Zea mays
  Clone ID: 700447212_FLI.pep
RQRLPVFVELYDWWKRLRNRCCKESKKIFDGLLISFWWNIWLERNNRIFHRLQRSAIQVMQLVKDQIVSFSVCNW

SEQ ID NO: 45270 - protein, 144 aa, Zea mays; identical to SEQ ID NO: 45201
  Clone ID: 700425251_FLI.pep

SEQ ID NO: 45271 - protein, 64 aa, Zea mays
  Clone ID: 700431372_FLI.pep
AEGRWRPRTAAPTTAPARRRTSSRRTRATRCCCRRWRRSRPRRGARAASRRRRPWRRRRGRPSL

SEQ ID NO: 45272 - protein, 107 aa, Zea mays
  Clone ID: 700339079_FLI.pep
RSWRASATPSSPRCTRARVKTWAALAAWTRTPLPAAAALAPRSRRWTKRFVVSLECAAVAGWPSCCRELSSVGAVCPLKLYLWLVGTFVVVIFLDLVIVGRFNVIAA

SEQ ID NO: 45273 - protein, 193 aa, Zea mays
  Clone ID: 700381803_FLI.pep
RRRRRRRALSVGLVRGSVMAKNPKVFFDILIGKSKAGRVVMELFADKVPKTAENFRCLCTGEKGLGSAGKPLHYKGSAFHRVIPGFMCQGGDFTRGNGTGGESIYGARFADENFKLRHTGPGVLSMANAGPDTNGSQFFICTAQTPWLDGKHVVFGKVVDGYAVVDKMEAVGSQSGATAESVRIEDCGQLADD

SEQ ID NO: 45274 - protein, 322 aa, Zea mays
  Clone ID: 700446811_FLI.pep
DGHYEIIAAHGKGVFSKVVRAKDLKASKDDPEEVAIKIIRNKETMYKAGKQEVSILEKLASVDREDKRHCVRFISSFMYRNHLCLVFESLNMNLREVLKKFGRNIGLKLTAVRAYSKQLFIALKHLKNCKVLHCDIKPDNMLVNEAKNVLKLCDFGNAMLAGMNEVTPYLVSRFYRAPEIILGLAYDHPLDMWSVGCCLYELYTGKVLFPGPSNNAMLRLHMELKGPFPKKMLRKGAFTMQHFDQDLNFHATEEDPVTKTAVRRLILNIKPKDVGFLILNSPGEDPKMLSSFKDLLDKMFILDPEKRITVSQALSHPFITGK

SEQ ID NO: 45275 - protein, 139 aa, Zea mays
  Clone ID: 700446943_FLI.pep
KSGPLRLRSSDVYTMDLSEEEPCWRCLTGSGMPGAGNPAGAGPPPRLDHVGVSLPGGRILIFGGSVAGLHSASQLYLLDPTEEKPTWRILSVPGHPPRFAWGHSTCVVGGTKAIVLGGQTGEEWMLTEIHELSLANNSV

SEQ ID NO: 45276 - protein, 274 aa, Zea mays
  Clone ID: 700447087_FLI.pep
HLAGVALGDSWISPLDFVLSWGPLLYQVSRVDEKGLQQCNSVAAKIKEQLEKGQFADAEASWSELEGVVLASSNSVNFYNFLKDEASGDATATATAAVSTLASFRRRGGYSGYLSSMAASSSSSAGGFDGLMNTVIKKKLGIIPKDLKWGEQSDDVFDALAGDFMKPRIQEVDQLLKLGVNVTIYSGQLDLICATKGTMDWVQKLKWDDLNSFLSSPRTPIYCDKEGQSGTQAFVKSYKNLNFYWILEAGHMVPLDNPCPALKMLADITRSPAE

SEQ ID NO: 45277 - protein, 142 aa, Zea mays
  Clone ID: 700452443_FLI.pep
LFLTFRNRTVAVWNFRGDLVTSFEDHLLWHHDCSTNNIYITSDQDLIISYCKSEAVAEDGTVVPVGSINMSEIMTGKCIAKITANDPALSAPPRRNGRSKRRSSVWSTVPEALEDVTALFYDEDRNEIYTGNSHGLVHVWSN

SEQ ID NO: 45278 - protein, 152 aa, Zea mays
  Clone ID: 700425808_FLI.pep
RKITTDAGYMVVLELLVAINVLSANEQTKPQAHDWCFFQRYPLQEHLPPSKRWNLLESLRMISLLHIFDMNLAASWQWLQTFEFFVTRIGRPSGKFSTPNATASFELCPHSASSCTASSAPIRAYFFLGSWPSCRILLATSSRNSAILFQSG

SEQ ID NO: 45279 - protein, 232 aa, Zea mays
  Clone ID: 700422540_FLI.pep
LICILLQGFAIGSAALVSLALFGAFVSRAGVKVVDVLSPKVFIGLIVGAMLPYWFSAMTMKSVGSAALKMVEEVRRQFNTIPGLMEGTAKPDYATCVKISTDASIKEMIPPGALVMLTPLIVGTLFGVETLSGVLAGALVSGVQIAISASNTGGAWDNAKKYIEAGASEHARTLGPKGSDCHKAAVIGDTIGDPLKDTSGPSLNILIKLMAVESLVFAPFFATHGGLLFKYL

SEQ ID NO: 45280 - protein, 94 aa, Zea mays
  Clone ID: 700433934_FLI.pep
MSLSSVGRGERVREPRRPRRDAGLSVIQARNKRRGRTVKVAAVLERLPSLQSLRQGHVKVDTVAVIRVRIGWFPNFRKGREHIDSMAHVRPLVR

SEQ ID NO: 45281 - protein, 277 aa, Zea mays
  Clone ID: 700348129_FLI.pep
QAWHKGNCHSQSDLAEKDIPALADIVGDEDKAKEIVEAAKASMGQDLSPVDLINVQQFAQRVMNLSEYRKNLYEYLVTKMNDIAPNLTSLIGEVVGARLISHAGSLSNLAKCAASTLQILGAEKALFRALKTRGNTPKYGLIFHSSFIGRASTKNKGRMARYLANKCSIASRIDCYSEASTSVFGQKLREQVEERLEFYDKGVAPRKNLDVMKAAIDSMVNDTLMDDDGKADNEKADTSAKKSKKKKTKTETDGDAMDVDKPSNVADGEAELGTEKK

SEQ ID NO: 45282 - protein, 186 aa, Zea mays
  Clone ID: 700448307_FLI.pep
VRSLHAFYFQAAAVTVPGPHITNQPTYNWSGVADRSIEHASEGTVGARHGGRVPAAVVEHEGHVERQVDGDAEHVEPDGGAQAGGQVEVDEAAQQRAAPLARRHVDLELEQDQHVGAHLEVRHRVRGTGCPAAAAARGRRRRRPGRRAAAAAGPRRAARRCFWWPLYLHVRLVYRRSSSCYSSCFE

SEQ ID NO: 45283 - protein, 174 aa, Zea mays
  Clone ID: 700448644_FLI.pep
QQNTSGAPKSCLYSTKKLQLCFHTSLLCFLWHPSRWSWGCDRCCWFSWALGQPLLPPSNLPLTACLALCTLGLKLIRKCLLSGLLSLGLVDTLHKHPLVLKHITLDLHVHVMIHVLVDLLGPRYLRSRRLRTRILLIHRILVGSLASLVPLRLPYPECLPFCLASCALLARDLE

SEQ ID NO: 45284 - protein, 148 aa, Zea mays
  Clone ID: 700421531_FLI.pep
ANLTLGVMSSEQLRKSTLQRDDVVAEWKETAGEMTLQVHCFVSGANLLQELAAGFRYYVFSKELPLVLKAVVHGDAALFADRPELMEAKVWVHFHSSSRKYNRLECWGPLWEAATTTRRNHHLLELDQLQSAITKKKTIFNALLALLL

SEQ ID NO: 45285 - protein, 192 aa, Zea mays
  Clone ID: 700421682_FLI.pep
RHGMHARAIVRVGSEYSTHDGLDEGEDGDGEVPSEEGVGEEPTEEAEEEGGAHEVGDHVGSCGAGQVHGGREVRDQVDGDAHGGEALAQLDPQGERRRHPAARAGLVSPAAPVVDGVLHQVAAAVAGSPCRPLLHLLPVLVNQRQQSADYSALHAYIYICRYCLYIYICPDCHYQIMYISSFFGAAKLYMNE

SEQ ID NO: 45286 - protein, 113 aa, Zea mays
  Clone ID: 700432573_FLI.pep
GAQKKSNSKITSFRQSCASTTKQETNGTSGSATPMHSIAIVLLLIYSNNVTRIQTQNLCGLHIFVHAAFTEVHLNTARRAAAAFCYKCSVVSSHVLDYFVDHLNIFRTMAAIC

SEQ ID NO: 45287 - protein, 198 aa, Zea mays
  Clone ID: 700346549_FLI.pep
SDHGGIDCSGLRIGASGTFGFGVQRTGAETRTIKNKNKSPYHLLLTDGSTKLLQQNRGQSFFLRKEVPQDGVGASQEESPPARIHIRLVNPLVLPAPRVEGPMLQGEQLEGEARPTFLKPTNHLLLLRSAFASRCLFLRSNLLFFCLEDVPVMAEKYVVSLVVEGHNTAPAEIGILREERLDHPSNTMTKACSEIVQY

SEQ ID NO: 45288 - protein, 245 aa, Zea mays; identical to SEQ ID NO: 38748
  Clone ID: 700350884_FLI.pep

SEQ ID NO: 45289 - protein, 215 aa, Zea mays
  Clone ID: 700196226_FLI.pep
EILTIIAMIQTGNIFYRPREKQAQADQKRAKFFQPEGDHLTLLAVYEAWKAKNFSGPWCFENFVQSRSLRRAQDVRKQLLTIMDRYKLDVVSAGKNFTKIRKAITAGFFFHAARKDPQEGYRTLVENQPVYIHPSSALFQRQPDWVIYHELVMTTKEYMREVTVIDPKWLVELAPRFYKGADPTKMSKRKRQERIEPLYDRYHEPNSWRLSKRRA

SEQ ID NO: 45290 - protein, 91 aa, Zea mays
  Clone ID: 700193418_FLI.pep
KTPTDRGVIVYITSMGYTDMPPQSKTRRRSPLSLTPSLSLSPSGPAKTRRWRHVSARFSSHAYAATAVHTLDAHSSSLTGSAAAAFSDAGG

SEQ ID NO: 45291 - protein, 173 aa, Glycine max
  Clone ID: 701012346_FLI.pep
SPHGSNSSGSKRTSHNKYYVRNLLIQAMYQVSVLLVLNFRGISILGLSHDRKDHAIKVKNTLIFNAFVLCQIFNEFNARKPDEFNIFKGVTRNYLFMGIIGLTVVLQIVIILFLGKFTTTVRLNWKQWLISVVIGLIGWPLAVIGKLIPVPTTPINNVFSKFRISRKDHEESQ

SEQ ID NO: 45292 - protein, 194 aa, Glycine max
  Clone ID: 701053435_FLI.pep
TITFNASVMEEVNVVETKDGTVSVAAAFAGHQEAVQDRDHKFLSKAVEEAYKGVDCKDGGPFGAVIVHNDEIVASCHNMVLCNTDPTAHAEVTAIREACKKLKQIELADCEIYASCEPCPMCFGAIHLSRIKRLVYGAKAEAAIAIGFDDFIADALRGTGFYQKATLEIKRADGNEAIIAEEVFEKTKEKFQMY

SEQ ID NO: 45293 - protein, 602 aa, Glycine max
  Clone ID: 701045506_FLI.pep
KEGGLGQKLLAVIMSSASLKEMRNGGEDYSNGHGGGGVRDLYGEDCATEDQLITPWTFSVASGCSLLRDPRYNKGLAFTEGERDAHYLRGLLPPAIFNQELQEKRLMHNLRQYEVPLHRYMAMMDLQERNERLFYKLLINNVEELLPVVYTPTVGEACQKYGSIFRRPQGLYISLKEKGKILEVLKNWPEKSIQVIVVTDGERILGLGDLGCQGMGIPVGKLSLYTALGGVRPSSCLPITIDVGTNNEKLLNDEFYIGLKQKRATGQEYAELLEEFMHAVKQNYGEKVLIQFEDFANHNAFDLLEKYSSSHLVFNDDIQGTASVVLAGLLASLKLVGGTLVDHTFLFLGAGEAGTGIAELIALEISKQTKAPVEETRKKIWLVDSKGLIVSSRLESLQQFKKPWAHEHEPVKSLLDAVKAIKPTVLIGSSGAGKTFTKEVVETMASLNEKPLILALSNPTSQSECTAEEAYTWSKGKAIFASGSPFDPVEYEGKLFVPGQANNAYIFPGFGLGLIISGAIRVRDEMLLAASEALAAQVSQENYDKGLIYPPFSNIRKISAHIAAKVAAKAYDLGLASHLPRPKDLVKYAESCMYSPGYRSYR

SEQ ID NO: 45294 - protein, 454 aa, Glycine max
  Clone ID: 701006018_FLI.pep
FDGDFHNPTFPAGTRVPRQPWHDLHCRIDGPAAYDVLINFEQRWRKATKWKEFAILFKKTSQWHDDALIRIERISWILSPSGAATLKDKSDYYTVPEDDPLVWVSSEDDPENWHVQIFRSIDSGSLKGFPKRVDIALSQNLICAKNLVIDKSIQTAYIQAIRSAQHFIYIENQYFIGSSYAWPAYKDAGADNLIPMELALKIASKIRAKERFAVYIILPMWPEGDPKTGAMQEILFWQGQTMQMMYDVVARELKSMQLTDVHPQEYLNFYCLGNREHFNEDSSSTNGAQVSTAYKYRRFMIYVHAKGMIVDDEYVIIGSANINQRSMAGTKDTEIAMGAYQPHYTWSAKKRHPHGQIYGYRMSLWGEHLGMLDETFEEPGRLECVEKVNEIAENNWKLFASEDFSLLQGHLLKYPVQVDSDGKIRSLPDCENFPDAGGKILGAHSTTIPDILTT

SEQ ID NO: 45295 - protein, 58 aa, Glycine max
  Clone ID: 701061985_FLI.pep
DPSYPSNNITSCPASARKGKQSFIKLRSTSCSSNLNLNSPRFLRLRWRQFLHGYTKHP

SEQ ID NO: 45296 - protein, 60 aa, Zea mays
  Clone ID: 700805935_FLI.pep
HIKIWKCNFLFLVGHIHHPKNFIIELQLISNLKEGTTNDVLLVGGRSVCQSKLDKGQQLL

SEQ ID NO: 45297 - protein, 307 aa, Zea mays
  Clone ID: 700106240_FLI.pep
LIYSLLALVRIRDNYHGRRPHATAEYGERIPLDFSATCARPKEQQRCGGREAKQSPTYIRAPPSRRVGAARSPVSENRQDDSKSKEDTAAGGRIRSGEEHEEPWPACTTTAARITTAPPTGRSTTTSTSPRWWLSMNRCPGASSPSSSPGSSALTPRGGFLESNEGDPELLIFIPFTSDVKIKSISVVGGADGTSPSRMRAFINREGIDFSDAQNMQPVQEWELAENLQGALEYQTRYSRFQGVANLTLHFSDNFGGDTTKIYYIGLRGEATQNKRDVVATIVYEVMPNPSDHKTKSETGGGFSHVE

SEQ ID NO: 45298 - protein, 824 aa, Glycine max
  Clone ID: 700746430_FLI.pep
VKQVEIPFKPARVLLQDFTGVPAVVDLACMRDAMNKLGSDSNKINPLVPVDLVIDHSVQVDVARSENAVQANMELEFQRNKERFAFLKWGSNAFRNMLVVPPGSGIVHQVNLEYLGRVVFNTEGLLYPDSVVGTDSHTTMIDGLGVAGWGVGGIEAEAAMLGQPMSMVLPGVVGFKLSGKLRNGVTATDLVLTVTQMLRKHGVVGKFVEFYGDGMGELSLADRATIANMSPEYGATMGFFPVDHVTLQYLKLTGRSDETVTMIEAYLRANKLFIDYNEPQPDRVYSSYLELNLDEVEPCISGPKRPHDRVPLKEMKADWHACLDNNVGFKGFAIPKDVQGKVAKFDFHGQPAELKHGSVVIAAITSCTNTSNPSVMLGAGLVAKKAHDLGLQVKPWVKTSLAPGSGVVTKYLLKSGLQKYLNEQGFNIVGFGCTTCIGNSGELDQSVASAISENDIVAAAVLSGNRNFEGRVHPLTRANYLASPPLVVAYALAGTVDIDFQKEPIGTGKDGKNVYLRDIWPSTQEIAEAVQSSVLPDMFRSTYEAITKGNTMWNQLQVPAETLYSWDPKSTYIHEPPYFKGMTMDPPGAHGVKDAYCLLNFGDSITTDHISPAGNINKDSPAAKYLLERGVEQKDFNSYGSRRGNDEVMARGTFANIRLVNKLLNGEVGPKTVHIPTGEKLYVFDAAQRYKAEGQDTIVLAGAEYGSGSSRDWAAKGPMLLGVKAVIAKSFERIHRSNLVGMGIVPLCFKSGEDADTLGLTGHERYTIDLPSNISEIRPGQDVTVTTTTGKSFTCTVRFDTEVELAYFNHGGILPYVIRNLIKQ

SEQ ID NO: 45299 - protein, 365 aa, Glycine max
  Clone ID: 700566983_FLI.pep
ILFSLISLTTMETPSSTARRITRSQIASNNNIPVSRKKNEDCSEKSVSKTRQRSSVQQQERCALVDISNDSPIAGLANGKDIIETPLSSMAKKKRVKKTMKTPGSGEALLRGQVKTLLQRVEEEAVISKLSMEIVAPFLKLANSSPMSLLAPTPANTPQVPNLSEVALVSPPSSVVEEQLISRVVNEIFEGKKNENAECEKSVITRSLLLDFSDKSEVSECSSEVTYQEVTQGSVGSRGSTEDDGASIWSIQVNASTHDEDEDDEEMGEEEEEEEEDYCEDAEECYDYVGGLSLEELCAGMNNISVNENKGCGKHTRFVYDSEDEIVEKVIECCAESDVMRLKGLPTPKGKHLRFPQEEENSSDL

SEQ ID NO: 45300 - protein, 758 aa, Glycine max
  Clone ID: 700670315_FLI.pep
FGEDRISASLSSLLWVVTEPNPIGFGTMENEHTLAVAEREMWLNSDQDEFLGVNDASMFYADFPPLPDFPCMSSSSSSSSALPFPVKTMTCSTRTTTTTTTSSSSSSSSWAVLKSDAEEDAEKNHCNRYMHDQLDATLSSTASMEVSQQKNLDPGLGGPVGECMDDVMDTFGYMELLEANDFFDPASIFQNEDNENPLVDFGTLEQHVPLHDEQHEMLHHQQGRTEEVDHQVPVCEEIQGDEEGGDGVGVDDEMSNVFLEWLKSNKDSVSANDLRNVKLKKATIESAARRLGGGKEAMKQLLKLILEWVQTSHLQNKRRKENNGSSISSALQAQFPDPSVQNNQNTQSGSFSPESNACFNNQTPWLSPQTFATDQAPLMVPPQQFQQPMVGYVGDPYTSGAASNNITTSHNHNSNNPYQPGAEQYHMLESAHSWPHSQFNVACHYSQSFGDNNVIFPQGGFGGGYGNNQYPYQFFHGPGDTLMRLGPSATKEARKKRMARQRRFLSHHRHHNGNHQNSGSDPHARLGGGDNCTTGLAAPHHANPTANWMYWQAMTGGAAGPLAPPAEPPAVDRSALQTQNCHQSRVASDRRQGWKPEKNLRFLLQKVLKQSDVGSLGRIVLPKKEAETHLPELEARDGISITMEDIGTSRVWNMRYRYWPNNKSRMYLLENTGDFVRANGLQEGDFIVIYSDVKCGKYMIRGVKVRQQGVKPETKKVGKSQKNQHGTGTNASTTACTAANNGTPSSPKTKAEKSSKLI

SEQ ID NO: 45301 - protein, 275 aa, Glycine max
  Clone ID: LIB3039-021-F8_FLI.pep
LEMPEFCVTGGTGFIASYLVKALLEKGHTVRTTVRNPGDVEKVGFLTELSGAKERLKILKADLLVEGSFDEAVRGVDGVFHMASPVLIPYDENVQQNLIDPCIKGTLNVLNSCVKATVKHFVLTSSCSSIRYRDDVQEVCPLNESHWTDLEYCKRYKLWYAYAKTIAEREAWRIAKENGMDLVVVNPSFVVGPLLAPQPTSTLLLILSIVKGMKGEYPNTTVGFVHINDVVAAHLLAMEDPKASGRLICSSTVAHWSQIIEMLRAKYPSYPYENE

SEQ ID NO: 45302 - protein, 145 aa, Glycine max
  Clone ID: LIB3049-039-B7_FLI.pep
VMPCGFLERTKEKGMVFPSWAPQIQILSHSSVGGFLTHCGWNSILESVLKGVPFITWPLFAEQKMNAILLCECLKVGVRPRVGENGLVERAEIVTVIKCLMEEEEGKKMRERMNELKEAATNGLKQDGASTKNFSRVAFKWKNLA

SEQ ID NO: 45303 - protein, 255 aa, Glycine max
  Clone ID: 700671225_FLI.pep
DSESNNQSLEKKKVLREEKTNMLGVATLTLGSSTTMVAQNHAQQHATTLASANGNRRHSVSNRTHSLPMSLVSPTNQSFTFLSSFKEPTHARPFTTAVASVDSDQLDSSDPPTKNEATKYYFLVANAKFMLDEEEHFQEQLFERLRLFGERNQEQDFWLVIEPKFLDKFSNITKRLKRPAVALVSTNGPWITFMKLRLDRVLSDCFEAESLEEALAFNPTDLKFEKPEKWVAPYPKYESGWWKPFLPPVQTEVKP

SEQ ID NO: 45304 - protein, 324 aa, Glycine max
  Clone ID: LIB3039-026-D7_FLI.pep
QCRRMEKVVCVTGGSGCIGSWLVHLLLDRGYTVHATVQNLNDEAETKHLQSLDGASTRLRLFQMDLLRHDTVLAAVRGCAGVFHLASPCIVDQVHDPQKELLDPAIKGTMNVLTAAKEAGVRRVVLTSSISAVTPSPNWPGDVAKTEECWTDVEYCKQKGLWYPLSKTLAEKAAWDFAKENDLDVVVVNPGTVMGPVIPPRLNASMVMLVRLLQGCAETYEDFFMGSVHFKDVALAHILVYENKSAAGRHLCVEAISHYGDFVAKVAELYPEYNVPKMQRDTQPGLLRTKDGAKKLMDLGLQFIPMEKIIKDAVEDLKSKGFLS

SEQ ID NO: 45305 - protein, 128 aa, Glycine max
  Clone ID: LIB3050-023-C4_FLI.pep
TGDNITLFSIITVMSFLLSVPVTLLMEGVKFTPAYLQSAGLNVNEVYIRSLLAALCFHAYQQVSYMILQKVSPVTHSVGNCVKRVVIIVSSVIFFQTPVSPINALGTAIALAGVFLYFRVKRLKPKTT

SEQ ID NO: 45306 - protein, 101 aa, Zea mays
  Clone ID: UC-ZMFLB73227A02_FLI.pep
HQEQIPPLSRAVACSREEGRGPISPIAVGRSQRRFEPTIGRPRRYTPPIRPPALLKSAWYSYAFGGSGTSWYSLPCVGSGWMLVEFRGSCRIGAPGWGSRC

SEQ ID NO: 45307 - protein, 438 aa, Zea mays
  Clone ID: LIB3075-011-E6_FLI.pep
LIAAFGACIVCRRKKAANKESRKPDDGHWTPLTDYSKSRSNTSAKTATTGSRTSTLPSNLCRHFSFGEIQAATKNFDQASLLGKGGFGNVYLGEIDSGTMVAIKRGNPTSEQGVHEFQTEIEMLSKLRHRHLVSLIGYCDDMNELILVYDYMANGTLREHLYNTKRAALSWKKRLEICIGAARGLHYLHTGAKHTIIHRDVKTTNILLDDKLVAKVSDFGLSKTGPNNVDNTHVSTVVKGSFGYLDPEYFRRQQLTEKSDVYSFGVVLLEVLCARPALSPSLPKEQVSLADWALHCQRKGVLGQIIDPHLQGQVSPQCFLKFAETAEKCVADRSVDRPSMADVLWNLEFALQLQGSAEDSGSVVVVTDGTTSSSSNRSSPLIVSGLHSDEPPTDSTTTTTTTSSTTTLSMMGRSLASVESDELTPSSVFSQLMHPGGR

SEQ ID NO: 45308 - protein, 520 aa, Zea mays
  Clone ID: LIB3070-009-A4_FLI.pep
LVQDCHSKNKQLPNSGSEKQTIMESESLDHVGKRVIEMLDQVTPVVKEMFSSMESSSSAQAAAAAAAWPEDLPERRTLPPVLCRTTSHHPSDGDEVAMHTGRCKVEAPAPGHETDEGVCTREEDGQTSSREPPSAPIPTAEFLPLQPTLSSVSPHLLSAPPPSPMPVVGLSMLLQSWEATQDGHATAVAVVPPAGVAQPAEAAPTAHKDTTPVGTSMEVEGSTSSVLLEAGQPEPCVDSPNGSTQAPAQGGNAAVPNVPPPPPPVPAHRGRSQEGPSMDEPGPAVTDTPPRPPCEMQGGPPALPPAAAKVSPSPSPPPLPAHRGRFQEGASMDEPGQAVTDTPPRPPCEVQGGPPAPPPAAAKVSPAPPPPPGSISATVRGKKAASKLKRSTQMGSLYRRLRDRVEGSGSTHGDRMRQNRKRPRTVGASKSDAGGQGMAEALAEMAKRSTYFRQIEEDAEKYAAVILELKDAIGSFQSKDMSELVRFRQHVERQLVCLTDETQVLARFEGFPSKKLEALR

SEQ ID NO: 45309 - protein, 574 aa, Zea mays
  Clone ID: LIB3078-046-C10_FLI.pep
HFALPPPARVTATAFHPSPTARGWRRLVGVQGTSAAEMEPDFSTVGGPSFEFAFNEANFSDRELRIEVVAGDYDAPGSTGGGSGGGGLADWARHRKRRREELFKEKESTTYMSDQTNFNEVEAEECDAYEENQEEPVAMMEGSPPDVDQDGDDEQGIDPSWAAVVTPVLRVKTIYISSAILAAKSPFFFKLFSNGMKESDQRHATLRITDSEEIALMELLSFMYSGKLTTTEPTLLLDILMAADKFEVVSCMRYCSQLLTSLQMTTESALLYLDLPCSVSMAAAVQPLTDAAKDFLAVKYKDLIKFQDEVMNIPRAGIEAILSSNDLQVASEDTIYDFLLRWARAQYPKSEERREVLSSRLLPLVRFSHMTCRKLRKVLACTDIDHEQATKCVTEALLFKADAPHRQRALAADAITCRKFAERAYKYRPLKVVEFDRPYPQCIAYLDLKRDECSRLFPAGRIYSQAFHLAGQGFFLSAHCNMEQQSAFYCFGLFLGMQEKGSTSVTVDYEFAARTRPSGEFVSKYKGNYTFTGGKAVGYRNLFAIPWQKFLADDSLFFVDGMLHLRAELTIKQP

SEQ ID NO: 45310 - protein, 94 aa, Zea mays
  Clone ID: LIB3076-035-A3_FLI.pep
ELSSQLRLLAIQEMHLSPQTQSPSSYSSDSASPLFLLPFLEYLKFLRNFGSIPLVEVWRWRLGFLMPFLCALNDWLCAVWFFDLAIQNPSRYCS

SEQ ID NO: 45311 - protein, 85 aa, Zea mays
  Clone ID: UC-ZMFLMO17050G01_FLI.pep
QEQFPNFCQIPAGKGVQCEVIAASPAHYYCFFLLWSDDTIVQTFDSKESDTNPLVLLAEWTWILLCGLVHTVLKLRYIAHLKQRL

SEQ ID NO: 45312 - protein, 448 aa, Glycine max
  Clone ID: 700752057_FLI.pep
KTSERTLIFPSHPPFLQDHPFPLSHLDTDPNLHLTFRYLRAYTSTTTTTSLDPFHVISSSLSHALPHFYPLTATLRRQQTSPHRLQLWCVAGQGIPLIRATADFTLESVNFLDNPASSFLEQLVPDPGPEEGMEHPCMLQVTVFACGGFTLGAAMHHALCDGMGGTLFFNAVAELARGATRITLDPVWDRARLLGPRDPPLVDSPLIGEFLRLEKGVLPYQQSVGGVARECFHVKDECLDNFKRTLLEQSGLNFTVFEALGAYIWRAKVRASGIQADEKVKFAYSINIRRLVKPPLPGGYWGNGCVPMYVQLSAKDLIEKPVCETAELIKKSKSNVTDEYVKSYIDYQELHFADGITAGKEVSGFTDWRHLGHSTVDFGWGGPVTVLPLGRNLLGSVEPCFFLPYSTATSEKKEGFKVLVTLREAALPAFREDMKVFCNSQEQWLSHI

SEQ ID NO: 45313 - protein, 326 aa, Glycine max
  Clone ID: 700762032_FLI.pep
GRKKMVGGGNRREEGSLVLNNTNVFAALDTLKKKKKSDKEKSKGSSTKSQAQSAKAEAQVFWAPAPLNAKSWADVDDEDDDDYYATTAPPQSVWGVSEPHHSKEDKHGNFEDSESEEDILDEGDDEVEEEHDHEPEESLKPEPEVKKDAEVPLPPPKETERQLSKKERKKKELAELEALLADFGVAPKQSKDGQDESQGAQDKTGVETDGDGEKKENVPAESKTSKKKKKKDKASKEVKESQDQPNSSDTNNGPDLATGTENVEEDTSTVDVKERLKKVASTKKKKSSKEMDAAARAAAQEAAARSARLAAAKKKEKNHYNQQPIR

SEQ ID NO: 45314 - protein, 97 aa, Zea mays
  Clone ID: LIB3069-038-E7_FLI.pep
TSDDTSLLAISQRPTPQPPARAGASVTASRESGGGRGRSRAATPSDLFINNETKHKATRTTTQHSRQARSLALGRERVVPAEVVAVVVDHVALLRPA

SEQ ID NO: 45315 - protein, 89 aa, Zea mays
  Clone ID: LIB3067-048-A2_FLI.pep
WMRILPVQLVEQERNEHATLVLQQSPMLKIMRGMWGTLQSNSATAKMVLQGKLRTESIKNAMNLVKKCGAPEGSVEHYMATKLFMKAEN

SEQ ID NO: 45316 - protein, 439 aa, Zea mays
  Clone ID: LIB3069-003-C3_FLI.pep
ILLASSLPCLAFAFPPREEKSQRTDGAQESRTDGRSRTREMEMAGAAEADTPSQEPVRTGRSNTILLPIGGILLAYLLYRFLRPRLRGLRLDLPAWLRCRRAPTGGGAVLPYFAPIADRLGAVALPYLGAFAGPQAALLRFPGGEALSVAAILEAPGEVVAKSAHSTLYRAAVRSGEAAVLLRFVRPACADEAFAAAARRIGAVRHPNLVPLRAVYVGPRGEKLLVYPFYAAGSLQRFLQEGIAESQRWSIVCKLSVGIARGLDHLHTGLDKPMVHGNLKTSNVLLDGSYDECRVSDYGLHLLLSPAAAQEALEAAAAQGYGAPELAKARDATRESDVYSLGVVLLELLATAPAGGDGVGDGILLLPASSSSSFKNLVLERKISDAFGSSGLARQCRSGAGKERSLGAFFELATACCSPSPSLRPSARQVLQRLQEIAR

SEQ ID NO: 45317 - protein, 44 aa, Zea mays
  Clone ID: 700574530_FLI.pep
VDLLLSFFLFISLRSRGCRLVSSQARLLVRRMSSINMCSYVATC

SEQ ID NO: 45318 - protein, 527 aa, Zea mays
  Clone ID: LIB3069-029-A7_FLI.pep
EHELVVQDPSGSAPKDLIVKDYVDEPHVSTTTMRSSGEVPQDHSATEENPKTIDSIVERRPSLSSQISITLRSSGEVLQDHSATEENPKTSESIVERRPSLSSQISITLRSSGEVLQDHSATEENSKTSESIVERRPSLSSQISMNEAYRLAIGNKGSLTSPTLTDVILGKDSTSSINEELRLLLSQISASRGLEAPWADPGPSPRAYGRGDELVVQNITNRLSLERNASGLESLDGSIVSEMEGESTIDRLRRQIDLDRKSIHLLCRELEEERNASAIAASQALAMITKLQDEKAAMQMEASHYQRMMEEQAEYDSEAVAKANELLTEREQLIEELEVELENYRRQYGGGSTQRRGNRVAFKQENRDTTMLDGGGLEDPLINTQQGINSLVGLEEERAYIATGLRKLEQKLQFYSNNSVSVELPSPDVKDDLSDKVYVTEDFSLHCQESSMESKEAGSSTTSGEVDLVAVQEEIAKLNRRLKTLEGDRSFLEHSINSLRNGDEGLMFIQEIACNLRELRAIAIGKK

SEQ ID NO: 45319 - protein, 248 aa, Zea mays
  Clone ID: LIB3068-044-E8_FLI.pep
AAAYVRGRRAIGMGDGEAAVPSRFRTVCVFCGSNAGRRKVYADAALELGHELVRRGINLVYGGGSIGLMGVIARTVRHGGCHVLGVIPKALMPIEISGESVGEVRVVDDMHQRKAEMARQSQAFIALPGGYGTMEELLEMITWCQLGIHDKPVGLLNVDGYYDPLLALFEKGAAEGFISTDCSQIFVSAPTASELLTKMEQYTRVHQEVAPATSWEISELGYGRGGDAGAATPPAAAAGGAEEGKGGS

SEQ ID NO: 45320 - protein, 243 aa, Glycine max
  Clone ID: LIB3049-042-D5_FLI.pep
MSSLRYLGSGGAPLRKEVAEDFRAQFPNVEIGQGYGLTESGGGAARVLGPDESKRHGSVGRLSENMEAKIVDPVTGEALSPGQKGELWLRGPTIMKGYVGDEKATAETLDSEGWLKTGDLCYFDSDGFLYIVDRLKELIKYKAYQVPPAELEHILHTNPEIADAAVVPYPDEEAGQIPIAFVVRKSGSNITADQVMEFVAKQVSPYKKIRRVSFIKSIPKSPAGKILRRELVDYALSCGSSKL

SEQ ID NO: 45321 - protein, 325 aa, Zea mays
  Clone ID: UC-ZMFLB73108H05_FLI.pep
FVSFTSAFILCIYIFSSHLVRLHYPAACNLISSINIVCICVSTKIICRLSDILACSVAYIMFSMCSTAGCPFGASCHFLHNFPGGYQAVSKMTNLGGPPVPAPPGRMPMGPGGPDGPPSPAVKTRMCNKYNTAEGCKWGSKCHFAHGERELGKPLQMDNPMGPPPMGPGPNGHFMPPPMPFPDMVPPSTFGASATAKISVDASLAGAIIGKGGTNTKHISRVTGAKLAIRDNEADPNHKNIELEGTFDQIKHASAMVTELIVRISGKPPPQAKNNPGRGPGSHAGGPGSNFKTKLCENFNKGSCTFGDRCHFAHGEGELRKPAAA

SEQ ID NO: 45322 - protein, 702 aa, Glycine max
  Clone ID: 700874414_FLI.pep
SLLNMTGLLQLSVGDNPFDLTPFPKEVVSLKNLNWFYLSNCTLGWKLPVGLGNLTELTELEFSDNFLTGDFPAEIVNLRKLWQLEFFNNSFTGKIPTGLRNLTKLELLDGSMNKLEGDLSELKYLTNLVSLQFFENDLSGEIPVEIGEFKRLEALSLYRNRLIGPIPQKVGSWAKFDYIDVSENFLTGTIPPDMCKKGTMSALLVLQNKLSGEIPATYGDCLSLKRFRVSNNSLSGAVPLSIWGLPNVEIIDIEMNQLSGSISSDIKTAKALGSIFARQNRLSGEIPEEISMATSLVIVDLSENQIFGNIPEGIGELKQLGSLHLQSNKLSGSIPESLGSCNSLNDVDLSRNSFSGEIPSSLGSFPALNSLNLSENKLSGEIPKSLAFLRLSLFDLSYNRLTGPIPQALTLEAYNGSLSGNPGLCSVDAINSFPRCPASSGMSKDMRALIICFAVASILLLSCLGVYLQLKRRKEDAEKYGERSLKEETWDVKSFHVLSFSEGEILDSIKQENLIGKGGSGNVYRVTLSNGKELAVKHIWNTDVPARRKNSWSSTPMLGNKHGGGGKSKEFDAEVQALSSIRHVNVVKLFCSITSEDSSLLVYEYLPNGSLWDRLHTSRKMELDWETRYEIAVGAAKGLEYLHHGCEKPVIHRDVKSSNILLDEFLKPRIADFGLAKVIQANVVKDSSTHVIAGTHGYIAPG

SEQ ID NO: 45323 - protein, 435 aa, Zea mays
  Clone ID: UC-ZMFLMO17201A01_FLI.pep
RQRRRSSPGMGDDAELEEGEACGCGDDTAFVDPDVALSYIDEKLQDILGHFQKDFEGGVSADNLGSKFGAYGSFLPTYQRSPLPQTRSPPKAGNITSKSPFHQSNEDLSQKPPAVAVSSTPQSNGPVVPFSGDSTKKEIRPSTKSERGSVSHDSYGPSKCSDQNRLKVRIKVGSDNVLARNNAAIYSGLGLDISSPSSNEDSPDGRGSLSPEVNNVPHESPQTILQIMTCFSVPGGFLLSPLPANILQLTKKVVSSSKKWESNVDVENVQESYEGHVAKKVKSDGNKKRLIDAKNSKNKNDISAVMKKEIDMELVAGQKIVSEALKISLLSDPRAMDAKGENRLEEEPAENNLVGIRDARLKERCTKTDSMTVKVEPAKAEAMECLENSSFGSSEMDLSAVKGKSKPKTEKGEATLEDRNTTNDKDLISDRKQKK

SEQ ID NO: 45324 - protein, 651 aa, Glycine max
  Clone ID: 700556808_FLI.pep
LMCSVIINMRMLPVCSATPRYSTSSQIPLFGGLHPIRKDLESRCVAEEGVHLASQYGTHSLRNSFAVQATKTVLGSFSSTSEPGYLTSTWDYLPVTTDGHHSLSDGEVRHMEYYHLSTVPDEFADFAEQVTEGSNTLVTPAQPETLSTADIMPENFAPSPSSINVDNESLVSTKASVGDLVAGINESFSASINKGENALRSSLDTATSFVDSIVKTATKSVDNAFSKAFSSVDQTGELTNKKLTSFSSELTGVTNKAPAVAIDVLRRTIIVVESSLTSGASYVVYLYGSAKELLPAGIRDTVNVYEDKATEILRPVGSATQRLYMAVYSLEKSLGLDPNDPIIPFVVLLGSSATLWAFYWLWTYGGYSGDLSPKSAFELLAEDANAALIDVRSEEMREKYGIPDLRRAARFRYASITPLEVDGSIRKLLKSGRELDDSLIAAIIRNLKMVKDSSRVIVLDADGTRSKGIARSLRKIGLKNPYLVQGGFQSWMQQGLRIKELKPETALSILNEEAEAILEDVSPSPGQLLGYGTVLIAGLYALLEWEKTLQLIGAFGLGLTIYLRVSSYEKSEDLKQDVRLLLSPVRLGAQAFSWAAGKLESNGLGLPTSPSSSDVQNRVLQAAAKHESQPSDSEGNQDPVPEPTVPLNQNV

SEQ ID NO: 45325 - protein, 508 aa, Glycine max
  Clone ID: 700678595_FLI.pep
FSPLVLKHSSVITMAKLVFSLCFLLFSGCCFAFSSREQPQQNECQIQKLNALKPDNRIESEGGLIETWNPNNKPFQCAGVALSRCTLNRNALRRPSYTNGPQEIYIQQGKGIFGMIYPGCPSTFEEPQQPQQRGQSSRPQDRHQKIYNFREGDLIAVPTGVAWWMYNNEDTPVVAVSIIDTNSLENQLDQMPRRFYLAGNQEQEFLKYQQEQGGHQSQKGKHQQEEENEGGSILSGFTLEFLEHAFSVDKQIAKNLQGENEGEDKGAIVTVKGGLSVIKPPTDEQQQRPQEEEEEEEDEKPQCKGKDKHCQRPRGSQSKSRRNGIDETICTMRLRHNIGQTSSPDIYNPQAGSVTTATSLDFPALSWLRLSAEFGSLRKNAMFVPHYNLNANSIIYALNGRALIQVVNCNGERVFDGELQEGRVLIVPQNFVVAARSQSDNFEYVSFKTNDTPMIGTLAGANSLLNALPEEVIQHTFNLKSQQARQIKNNNPFKFLVPPQESQKRAVA

SEQ ID NO: 45326 - protein, 578 aa, Glycine max
  Clone ID: 700729877_FLI.pep
LRGLIHVLWGSYSHMFFLTRNRRIVQKGVDFKQIDKEWDWDNFLILQALVASMACYMFPFLQHLPLWNVKGLIVALVLHVGVSEPLYYWVHRKFHGDYLFTHYHSLHHSSPVPESFTAGNATLLEHLIMTVIIGIPILGASLMGYGSASMIYGYVLIFDFLRCLGHSNVEIVPHQLFEKLPFLRYVIYTPTYHHLHHSDKDTNFCLFMPLFDSLGNTLNKNSWQSHKLLSSGSGNGDMVPHFVFLAHIVDVSSSMHAQFVYRSFASLPYTTRFFLLPGLPITFLVLLAMWAWSKTFLVSFYYLRGRLHQTWVVPRCGFQYFLPFATEGINNQIEQAILRADKIGVKVISLAALNKNESLNGGGKLFVDKHPNLRVRVVHGNTLTAAVILNEIPQDVKEVFLTGATSKLGRAIALYLCQKKVKVLMLTLSTDRFQRIQKEAPPENQSYLVQVTKYQAAQNCKTWIVGKWITPREQYWAPRGTHFHQFVVPPILSFRKDCTYGDLAAMRLPEDVEGLGCCEYTMDRGVVHACHAGGVVHSLEGWSHHEVGAIDVNRIDLVWEAALKHGLRPVSSFTQKEN

SEQ ID NO: 45327 - protein, 619 aa, Glycine max
  Clone ID: 700901262_FLI.pep
NMYSRDSWGGPLEINATDSATEDERSRNLQDVDRAALSRPLDETQQSWLLGPGEQKKKKYVDLGCIIVSRKIFKWTLGTILFAAFLAGLIALIVNTVPRHRHKHPPPDNYTLALHKALMFFNAQRSGKLPKHNNVSWRGNSGMQDGKSSDHSAAIKDLVGGYYDAGDAIKFNFPASFSITMLSWSVIEYSAKYEAAGELEHVKEIIKWGTDYFLKSFNSTADTITTLAAQVGLGDTSGGDSPNDHYCWMRPEDMDYDRPVTECHSCSDLAAEMAAALASASIVFKDNKAYSKKLVHGATTLFKFSREQRGRYSAGSSEASIFYNSTSYWDEYVWGGAWMYFATGNSSYLKLATAPGLAKHAGAFWGGPDYGVLSWDNKLAGAQVLLSRLRLFLSPGYPYEEILRTFHNQTSIIMCSYLPVFTSFNRTKGGLIQLNHGRPQPLQYVVNAAFLAALYSDYLDAADTPGWYCGPNFFSTDVLRSFAKSQIDYILGNNPRKMSYVVGFGNHYPKHVHHRGASVPKNKIKYSCKGGWKWRDTSKPNPNTIVGAMVAGPDKHDGFHDVRTNYNYTEPTLAGNAGLVAALVALSGDKGTSIDKNTIFSAVPPMFPTPPPPPAPWKP

SEQ ID NO: 45328 - protein, 66 aa, Zea mays
  Clone ID: LIB3068-019-A6_FLI.pep
LVPSTGLASVDHPTVLPDLTLTPRQHLDVPHVDHGPGEAPEELLLAGGEPSDDRRRGRAGRRQQLL

SEQ ID NO: 45329 - protein, 546 aa, Zea mays
  Clone ID: LIB3069-003-G9_FLI.pep
STTCRSSRLRQDPNPSHAARPNPRHLIPMRRALGRETLLRRHRGSALLWVAVTALVTGTICLWSSFSVGLLSTYRVQDVVANELWRTVDSNGWRASSAPHICWPPPPAESESNGYLRVWCNGGLTQQRSAICNAVVVARIMNATLVLPELDTNSFWHDESGFVDIYDVPHFINTLKYDVRIVMSIPKITAQGKTKKLKAYKILPPRDAPVTWYRTTALERLRKYGAIYLTPFSHRLAEKIDDPEFQRLRCRVNYHALRFKPSIMKTSSDIANKLHSEGHFMSIHLRFELDMLAYAGCFDIFTPEEQEILLRHRNKYFPFLLRYWGKYFPGNTPDYRERRLIGKCPLTPEEVGLILRATGFDNSTWIYLAPGKLFGGKRFMKPFKAMFPRLKNHSMIRSGKLEENIRGLAGSAVDYMVCLLSDIFIYDGPSNFADNLMGHRLYYGFRTTITPNKKALARIFMDREEGHTSAFEERVRQVMLTHFGAPHKRIHPESFYTNPWPECFCQTKARNHADRCPHNSVNDVLESWFHNKDVEVEATNQTDSTS

SEQ ID NO: 45330 - protein, 119 aa, Zea mays
  Clone ID: LIB3068-060-E8_FLI.pep
CFAGIHIISCYPLKYTILKPLVDSVLVKINSFEEKTTSGILLPTTSQSRPQGGEVVVVGKGMIIGDNKVDVNIQKYVKEKFRTTTEKINSRTGRFNKSLSMRMACSITCPSIELGGYNA

SEQ ID NO: 45331 - protein, 93 aa, Zea mays
  Clone ID: LIB3067-021-C12_FLI.pep
IMELVARVHLRLRAGILSPTKGALEARAVAAGGGLVDDPVPPDPLACGLTRCSLNPRYMMDGRSAPAIALYLYIPIAVQRCAVVESQRSHFVL

SEQ ID NO: 45332 - protein, 476 aa, Zea mays
  Clone ID: LIB3069-006-A4_FLI.pep
QKLGLQPTSYTYDGFIKTVIAGKGIAYASIVINAMERRGIEPYSDTLAALSEGHSNSLQLDLAEEFLERISEIKPKHIGSFNALLSGCAIMNEPERAVRILAKMKHVNMKPTLRTYELLFSLFGNVNVPYEQGDVLSHVDVSKRISIIEMDMFNNGIQHSFVSMKNLIRAFGAEGMIEEMLRYLNIAENTLWNINPYQKSYLYSTALHALVDVKETHRAVKMFKIMRSCSLPTNISIYNTMIECCKWLPCFKSASALLSLMLRDGFNPTVVTFTSLLKVVLENDNFEGALDLLDICKIEGLQPGIQTFNTVLLRAYARGQIHVLEYILECIHRSKIQPDPSTLWYTFCAYEEHELYNTAIESLLVLSMRMISEDAGIPSEKRIVFEDLILSEEPDAEFRIIRAFQAGEEFLATALLNLRWCATMGATVSWSPEESLWAMRLAASYDANKRPHINPSDVPKSRGRNPLNRPYWEANR

SEQ ID NO: 45333 - protein, 263 aa, Zea mays
  Clone ID: 700571730_FLI.pep
NYVAPEVLEDQGYDGAMADLWSCGVILFVLLAGYLPFEDSNLMTLYKKISNAEFTFPPWTSFPAKRLLTRILDPNPMTRITIPEILEDEWFKKGYKRPEFDEQYDTTLDDVDAVFNDSEEHHVTEKKEEEPVALNAFELISMSAGLNLGNLFDSEQEFKRETRFTSKCPPKEIVRKIEEAAKPLGFDVQKKNYKLRLEKVKAGRKGNLNVATEILQVAPSLHMVEVRKAKGDTLEFHKFYKNLSKTLKDVVWKSDDLQTQHAS

SEQ ID NO: 45334 - protein, 147 aa, Zea mays
  Clone ID: LIB148-028-E1_FLI.pep
SSSSWAFISPRRSRGEEGETCSPSGSDREQGSKRLLEIELINQSSRTSSASRDRMARAASSYVSRRGLSAAMTVAEDSVKKVEDKAVKLGTVAKDIASAMATTTEEKTAFWEPDPETGYYRPVTGTKEVDAADLRAEMLKRRILQDD

SEQ ID NO: 45335 - protein, 143 aa, Zea mays
  Clone ID: LIB148-029-A10_FLI.pep
HTLRPALSPTHRGWGRQQVQPFLFLIKREKDGSVSGSCPILVSPPRRSRGGNHRCQNGSSHAHACLDNGESETAGDGEEGGEKHGEGRESMLIAESPVRGLLLQQRQMRRGVHEGELSRWRVQAGRGHAQVLLQEALLVHRSC

SEQ ID NO: 45336 - protein, 968 aa, Zea mays
  Clone ID: LIB143-004-D2_FLI.pep
ALASVNPGRAASSARLALSLPCGAWVGRSGLVRRAAAFSGTRPRFAGARAQIGAAVPAVEQFQRRMATQATVHAFKDILTSLPKPGGGEYGKFYSLPALNDPRIDKLPYSIRILLESAIRNCDNFQVTKNDVEKIIDWENTSPKLAEIPFKPARVLLQDFTGVPAVVDLAAMRDAMAKLGSDANKINPLVPVDLVIDHSVQVDVARSQNAVQANMELEFSRNKERFGFLKWGSSAFQNMLVVPPGSGIVHQVNLEYLGRVVFNTDGILYPDSVVGTDSHTTMIDGLGVAGWGVGGIEAEATMLGQPMSMVLPGVVGFKLTGKLRSGVTATDLVLTVTQMLRKHGVVGKFVEFYGEGMGKLSLADRATIANMSPEYGATMGFFPVDHVTLDYLKLTGRSDETVSMIEAYLRANKMFVDYNEPPTERIYSSYLELNLDEVEPSMSGPKRPHDRVPLKEMKSDWHACLDNKVGFKGFAVPKEQQDKVVKFDFHGQPAEIKHGSVVIAAITSCTNTSNPSVMLGAGLVAKKACELGLEVKPWVKTSLAPGSGVVTKYLLQSGLQEYLNQQGFHIVGYGCTTCIGNSGDLDESVSTAITENDVVAAAVLSGNRNFEGRVHPLTRANYLASPPLVVAYALAGTVDIDFEKEPIGFGKDGKEVYFRDIWPSTEEIAQVVQSSVLPDMFKGTYEAITKGNPMWNQLTVPEASLYSWDSKSTYIHEPPYFKDMTMSPPGPSTVKDAYCLLNFGDSITTDHISPAGSIHKDSPAAKYLMERGVDRKDFNSYGSRRGNDEVMARGTFANIRIVNKFLNGEVGPKTIHVPTGEKLSVFDAAMRYKSEGHATIILAGAEYGSGSSRDWAAKGPMLLGVKAVIAKSFERIHRSNLVGMGIIPLCFKAGEDADSLGLTGHERYSIDLPTNLSEIRPGQDVTVTTDNGKSFTCIVRFDTEVELAYFNHGGILPYVIRNLAAAHN

SEQ ID NO: 45337 - protein, 358 aa, Zea mays
  Clone ID: LIB143-021-F11_FLI.pep
PPLREDDRDGHYVFAVGDNLTSRYKINAKMGEGTFGQVLECWDKERKEMVAIKIIRGIKKYRDAAMIEIGMLEQLGKYDESRSSCVQIRNWFDYRNHICIVFERLGPSLYDFLRENSYRSFPIALVREIAKQLLECIAFMHELCLIHTDLKPENILLVSPEYIKVPDYKVSSRSPKEGSYYKRVPKSSAIKVIDFGSTTYDQQDQSYIVSTRHYRAPEVILGLGWSYPCDIWSVGCILVELCTGEAIFQTHENLEHLAMMERVLGPLPYHMFKRADRHSDKYIRKGRLNWPEGCTSRESMKAVMKLSRLQNLVMQNVDQAAGDFIDLLQGLLKYDPSSRLTAREALRHPFFTQGFWRR

SEQ ID NO: 45338 - protein, 177 aa, Zea mays
  Clone ID: LIB143-030-A6_FLI.pep
HFGRSPISSQRFALPRSPCRCSRARRLAAPALLGCYRGGEPPDFPTPMATRAPPQSSSTGSVTVTIDPSPSSSSSSAPPASAPAPAPAPESVVLRLKRRAKKKVSWKEGTVDNEGLGRKSSKKCCIFHKEVPFDEDCSDDEAPGGGGGGGHRCPRPHGDAGEGTSGCSSSSHDHGHH

SEQ ID NO: 45339 - protein, 289 aa, Zea mays
  Clone ID: LIB143-031-C1_FLI.pep
GLKVLHQSLGGAVGSCQRLQYAYDEVSTRASHLEILKRSQMEQIDQLEQKNTETVEKHRLLEEEKLSANKENIKLQKHVQDLEVQLQLAKQKLKVTEAESKCKEERYEASVEALRAEICHLEQLVQQFSGRVSLLEGTLMQVKGHAESVVCKWADKLDELETICSQNFVLFIDRSSACSDELKILRKKVHDHLNEQKELANANNELAIRFKEKEMVVSEMVKSAAEAQTKMLQLQKTVDEKEDELAARVQEKREAIKQLSDTIVYHKNYSDDLVRYIRSQSRPRLPFCL

SEQ ID NO: 45340 - protein, 375 aa, Zea mays
  Clone ID: LIB143-044-E11_FLI.pep
LPPSLSLSCPNQPMEALAGAASSSVLPARHPPSRVAAQSLALRPSRCGPLRAVGAGGVSGKDDAHAANGSPVLKLNSDSSLNGVLPIAADKSQKASSTNVSTDSSGSRAGLFRTPISGGVQSATFAHGLPPPALAVRNLMEQARFAHLCSVMSGMHHRRTGYPFGSLVDFANDSMGHPIFSLSPLAIHTRNLLADPRCTLVVQVPGWSGLSNARVTIFGDVYPLPAEQQEWAHKQYVAKHQQWASQQWGNFYYYRMHNISDIYFIGGFGTVAWIDVKEYETIQPDKIAVDGGDLQSLKELNAIFSKPLREVLSSEGEVDDAALISVDSKGIDIRVRQGAQFNIQRLAFDVPHKVETLEEAKKALHKIIKDKQQIK

SEQ ID NO: 45341 - protein, 557 aa, Zea mays
  Clone ID: LIB143-062-A10_FLI.pep
LSCHLELDLTMAYHLISSPLFLLAQLLAVAVPLLLLLLHQRSSIRRRRRSSSSRSAKQGGQLLPPSPPALPIIGHLHLVSDLPHVSLRDLAAKHGGDDGLMLLRLGAVPTLVVSSPRAAEAITRTHDHVFASRPTSTLSDEILYGSSDIAFSPYGEHWRQARKLVTAHLFTVKRVHSYRRARKEEVRLVVAKVREAAVAGTATDMSLAMNTFANDIISRAVSGKFFRAEGRNKLFRELVEANSALFGGFNLEDYFPGLARALGFLSRRLLFLRNRRRVQETHRRWDELLETILSDHEGRRGSVSVDGGGDFTDVLLSVQTEYGMTRDHLKAILVDMFGAGTDTSSLVLELAMAELMRNPQQMAKLQAQVRRHTPEGQETVEEENLSDMPYLRAVVKETLRLHPPAPLLVPHLSLADCVVDGYHVPSGTRVIVNAWALGRDPGSWEKPEEFLPERFMDGGSAAGVDIKGNHFHFLPFGAGRRICPGLNFGMATVEIMLANLVYCFDWQLPMGMEEKDVDMTEVFGLTVHPKEKLMLVPKLPATAAPTATARQLHPPSC

SEQ ID NO: 45342 - protein, 120 aa, Zea mays
  Clone ID: LIB189-010-A5_FLI.pep
RGTDETTEMKDGTSSGGGAFAAGSDPRQPSTAKPYAPPKLSPQDLPIDYAGFLAVAFGVLGVMLRYKVCSWIAIIFCAQSLANMKNFENDLKQLSMAFMFAVMGLVTNYFGPARPGSTKR

SEQ ID NO: 45343 - protein, 230 aa, Zea mays
  Clone ID: LIB3059-010-A2_FLI.pep
RGANQEDALARIEKLSEVNPMLGFRGCRLGISYPELTEMQARAIFEAAIAMTNQGVQVFPEIMVPLVGTPQELGHQVTLIRQVAEKVFANVGKTIGYKVGTMIEIPRAALVADEIAEQAEFFSFGTNDLTQMTFGYSRDDVGKFIPVYLAQGILQHDPFEVLDQRGVGELVKLATERGRKARPNLKVGICGEHGGEPSSVAFFAKAGLDYVSCSPFRVPIARLAAAQVLV

SEQ ID NO: 45344 - protein, 1034 aa, Zea mays
  Clone ID: LIB3060-014-C1_FLI.pep
LWRIDLDLKMGLFRAASGLARLALRRNLLRAAASPFAAGGGAVPGAAPARYFHSTCPRRFAAPTPRAVPLSRLTDSFLDGTSSVYLEELQRAWEADPSSVDESWDNFFRNFVGQAATTSPGLSGQTIQESMRLLLLVRAYQVSGHLKAKLDPLGLEERPVPDVLDPAFYGFSEADLDREFFLGVWMMAGFLSENRPVQTLRSVLERLEQAYCGTIGYEYMHIPDREKCNWLRDRIETVNPMDYTYDRRQVMLDRLIWSTQFESFLATKWTTAKRFGLEGAETLIPGMKEMFDRAAHLGVESIVIGMPHRGRLNVLGNVVRKPLRQIFSEFSGGTKPVNEGEGLYTGTGDVKYHLGTSYDRPTRGGKHIHLSLVANPSHLEAVDPVVAGKTRAKQYYSNDRDRTKNLGVLLHGDGSFSGQGVVYETLHLSALENYTTGGTIHIVVNNQVAFTTDPRSGRSSQYCTDVAKALDAPIFHVNGDDLEAVVHVCELAAEWRQTFHSDVVVDIVCYRRFGHNEIDEPSFTQPKMYKVIRNHPSALEIYQRKLLESGKISKEDIDRLNKKVSTILNEEFQNSKDYVPNKRDWLSAYWTGFKSPEQISRIRNTGVKPEILKRVGEAMTTLPENFKPHRAVKKIFDLRRQMIETGEGIDWAVGEALAFATLIIEGNHVRLSGQDVERGTFSHRHSVIHDQETGEQYCPLDHLVMNQDAELFTVSNSSLSEFAVLGFELGYSMENPNSLVLWEAQFGDFSNGAQVIFDQFLSSGESKWLRQTGLVVCLPHGYDGQGPEHSSARLERFLQMSDDNPYVIPEMDPTLRKQIQQCNWQVVNVTTPANYFHVLRRQIHRDFRKPLIVMSPKNLLRHKDCKSNLSEFDDLAGHPGFDKQGTRFKRLIKDQNNHKDLEEGINRLVLCSGKVYYELDEERRKSERTDVAICRVEQLCPFPYDLIQRELKRYPNAEIVWCQEEPMNMGAYSYINPRLLTAMKVLGRGGIEDIKYVGRAPSAATATGFYSVHVQEQTELVQKALQRDPLNYPF

SEQ ID NO: 45345 - protein, 356 aa, Zea mays
  Clone ID: LIB3060-034-G3_FLI.pep
LFVLMQLAHLFSFDSATTSVATFVVLVVTALYLSLKKRYNEAIHLKVEMFLKTYGTSKPTRYTFSEVKKIARRFKEKVGQGGFGTVYKGQLPNGVPVAVKMLENSTGEGEDFINEVATIGQIHHANIVRLLGFCSEGTRRALIYEFMPNESLGRYIFLPQELLVPEKMLDIAIGIARGMEYLHQGCNQRILHFDIKPHNILLDYSFNPKISDFGLAKLCARDQSIVTLTAARGTMGYIAPEIYSPNFGGVSYKSDVYSFGMLVLEMVSGRRNSDPGIENQNGVYLPEWVYERVVTGQDLTLSKKIADQEKETVRQLAIVALWCIQWNPKNRPSMTKVVNMLTGRLQNLPIPPKPYA

SEQ ID NO: 45346 - protein, 481 aa, Zea mays
  Clone ID: LIB3060-042-E6_FLI.pep
AASVTVENLNPKVLKCEYAVRGEIVIHAQRLQQQLQTQPGSLPFDEILYCNIGNPQSLGQQPVTFFREVLALCDYPCLLEKEETKSLFSADAISRAKQILATIPGRATGAYSHSQGIKGLRDAIAAGIMSRDGFPANADDIFITDGASPGVHMMMQLLIRNEKDGILCPIPQYPLYSASIALHGGALVPYYLNEKTGWGLEISDLKMQLENARSKGIDVRALVVINPGNPTGQVLAEDNQYDIVKFCKNEGLVLLADEVYQENIYVDNKKFNSFKKIVRSMGYGEDDLPLVSLQSVSKGYYGECGKRGGYMEITGFSTPVREQIYKIASVNLCSNITGQILASLVMNPPKVGDESYASYKAEKDGILESLARRAKALEDAFNKLEGFSCNKAEGAMYLFPQIHLPQKAIEAAKAAKKAPDAFYALRLLESTGIVVVPGSGFRQVPGTWHIRCTILPQEDKIPAVISRFRAFHEAFLAEYRD

SEQ ID NO: 45347 - protein, 89 aa, Zea mays
  Clone ID: LIB3079-012-B1_FLI.pep
ALRRKHPRSPCLHCRSASCGLSLHFTWAGCRLILPGFRLLLLRPTPEQEAAASVFGDVLPECLNRHGEKWLSSIVSYLVYTSCRNFRFY

SEQ ID NO: 45348 - protein, 275 aa, Zea mays
  Clone ID: LIB3079-024-E7_FLI.pep
RGPSKHTTAPGEAARPPHRPPATGPAVAAALPLHRRRRRAPLGVFESVASVVAMSMFNRIFGKPKEQANSNALATLDKLNETLDMLEKKEKVLEKKANAELERAKEFSKAKNKRAAIQSLKRKKLYEQQIEQLGNFQLRIHDQMIMLEAAKATTETVDALRTGAAAMKAMQKATNIDDVDKTMDEINEQTENMKQIQDALSAPLGAFADFDEDELEAELEELEGAELESQLLEPVAAPPVHPVHVPANKQPARPAPQKVTAEDDELAALQAEMAL

SEQ ID NO: 45349 - protein, 94 aa, Zea mays
  Clone ID: LIB3079-045-A11_FLI.pep
HPVPRAFPHLLSRLSPASLGFRSRRAYPPPPAMSKQGGKAKPLKAPKADKKEYDETDLAYLQKKKDEEKALKELKAKAQKGAIGGSGLKKSGKK

SEQ ID NO: 45350 - protein, 179 aa, Zea mays
  Clone ID: LIB3079-048-C9_FLI.pep
QALSDDEKGSPRSTLVVVGHTDAAESPRATTEKAKGRRPPPARGHGGSAAPHFMSSTVCSRQRRCAGGYHSVGNGKPRLTAVSVNRYPPPAAELSGSQNAAARASRSASVALSSGVHKLRCLRVNKSDQVNVISNSSVDSTAASAPPPRRRESCFGSRPVLQRAAAPLHLHRRRMSSLT

SEQ ID NO: 45351 - protein, 93 aa, Zea mays
  Clone ID: LIB3088-029-B12_FLI.pep
TKLAFHLQKKTVKEKLTSILNYADKYAGSIRSSNQSAIWQLMAIVYKYARQLFGANQATVAHRRLTVTLHAIVPDRAEQQPLQPHQIALTCRP

SEQ ID NO: 45352 - protein, 166 aa, Zea mays
  Clone ID: LIB3115-031-G5_FLI.pep
KSYPEVSSYLYGHCCQHVRVLILTHTFGEHSGAFFCARTMYRAFVSSVTTAGLTTMLQTCSLGSGQHDTKVLEALKDSSSSRPAIFAMSNPTKNAECTPGEAFSILGEKVIFASGSPFHDVDLGDGKIGHSNQGNNMYLFPGIGLGTLLSGARVISDGMLQAAAER

SEQ ID NO: 45353 - protein, 179 aa, Zea mays
  Clone ID: LIB3115-032-B4_FLI.pep
GSRSVLPFRNSMACHLAIAGATAAAARAPRISVLAAASASSAGEPARRIIRRRAPPGQQGSATAAPAPPAQPSVAEVRRAIGVSDDAASAAASMEKKNTAFMDLISTTPIGQPESEPERRLREAAEWVVDTTETRACEGQKSFLVLCMMTFPAWFLLLFLALGLFKLPFDIPVLDNLLM

SEQ ID NO: 45354 - protein, 217 aa, Zea mays
  Clone ID: LIB3116-030-E12_FLI.pep
GDADHHHVGHLRPPLGRQLRAVPLRRLLPQPADHHPEEHAGGGGRAGRGDGEVPQAAGDDAAGHAAHADAGHQGHDDAGHPLVALARRGVHGGVRGAVVAGGAHGEGGVREVRRQDEGDRGVHRRVQQQPGPQEPLRRRDRAVRAAQALLQAGSHREGHPQQHLHLIHPQHALVQLIKSGVVLLLHAEAACRIKRTICTIVLYMCVNATRGTFETLS

SEQ ID NO: 45355 - protein, 161 aa, Zea mays
  Clone ID: LIB3079-021-H9_FLI.pep
VHATTATQKTVDGPSMKDWRGGRGAAQNIIPSSTGAAKAVGKVLPELNGKLTGMAFRVPTPNVSVVDLTCRIEKSASYDDVKAAIKTASEGALKGILGYTDEDVVSNDFVGDSRSSIFDAKAGIGLSSSFMKLVSWYDNEWGYSNRVLDLIAHMALVSAKH

SEQ ID NO: 45356 - protein, 216 aa, Zea mays
  Clone ID: LIB3079-023-A6_FLI.pep
TSLTMMLPHSWSSPRRGMRGIAFCSRLLSDILATALLLHEGLGLTPFFFRYVDAVMTIPKGTLFPMCGMNLAFDRDLIGPAMYFGLMGDGQPIGRYDDMWAGWCVKVICDHLSLGVKTGLPYIWHSKASNPFVNLKKEYKGIFWQEDIIPFFQNVTIPKDCDTVQKCYIYLSGQVKEKLGTIDPYFVKLGDAMVTWIEAWDELNPSTPAAANGKAK

SEQ ID NO: 45357 - protein, 104 aa, Zea mays
  Clone ID: LIB3079-043-G8_FLI.pep
QVRFTQMSIWVLEDYDTEAWILKHNVSSSQFFELLSHPIKDFHIVAIHPDHNSFILVQHWNQKLVSYNMDTQELHGLCTLGKGYVIITPYVPCFLESSVLATKH

SEQ ID NO: 45358 - protein, 264 aa, Zea mays
  Clone ID: LIB3079-055-B1_FLI.pep
DCEADSCKEAESDSCTSDMALCPGSSTDLFDIARSPFVDFHHQERCRQVKMAKGPCSLLDFVLISKAVDNSSKPTPDFELLSHHTCHCSALSQNPIWWLMEGPRTISHDFSKSYCEANLQLVIHNSEAHKILVRVVTFDVIPEKTVHPHDSTSAQGGWYDVSLESDVKAISSSKSTHQEKRSSKSIPPYVWCSLSCAQIELQPDSCARVPLKVCIFAPGTYNFSNYELQWKVHLSEGPHVGENENRLSGGGLGYPFYVTVLQGV

SEQ ID NO: 45359 - protein, 90 aa, Zea mays
  Clone ID: LIB3088-042-C9_FLI.pep
VRAFFDVHDQEGSHPGGIHLEMTGQNVTECIGGSRTVTFDDLSDRYHTHCDPRLNASQSLELAFIIAERLRKRRMRSGLNNSLPLPPLAF

SEQ ID NO: 45360 - protein, 239 aa, Zea mays
  Clone ID: LIB3117-009-G6_FLI.pep
HLKYVASTENSFRDTWNSKLRRSSFHCLGGSLDQKTLCRLSQEVGELLERGLGILGLGPELRSEEAVGLHQTIKGCLDEVTECLGGATGRGKDILNAGELEDLLGHAGSDNPGPPGRRHHAHGDGPALAGDLAGHSVRLADLVSPVAPPDGHDRELGQDDGATDGGGDLLGALDAEPDVAVPVADDDEGLEARALPGAGLLLDGRDLHHLVLEPRDEGLHDLVLLDRQRVQVDLLNLVD

SEQ ID NO: 45361 - protein, 367 aa, Zea mays
  Clone ID: LIB3116-016-A7_FLI.pep
CKYVTRKTIRIRNNDLHHLYRATTSLLNMYVRRQRRAGSRAEHRARVHGSAPKRRDGGSSVPALPPAAVGVVSAVVPEGAAADGVDDDDEDEEDDADDGDALPVPLERGHHAGLARLAVVAERRGVVAPGLAVRVRRVGGHRRPVRAADVGVAAAGGGLAAARLDGGEAGTHELGDGLVLVLQALADLGVLEAAPDPVPVPGVLDALLQPVGVVPEAVLLVSAAGDGLAGAPVGDDEGEDGEAEEDEDEDEHGEEVGPEQPGDAAAGADEARQGDGEEEGPQRDDGRREVALALGAVGAVAQPDARAQDRDGEQEGDEVEDPDQVVAQPERHGRWPPPRASWSRGWVGSWGAAGRVRAVLLGSVVSW

SEQ ID NO: 45362 - protein, 92 aa, Zea mays
  Clone ID: LIB3079-013-E1_FLI.pep
KMLYEEFVQRLEFNKKKVAGEVKCHKYSRRKPDNGWSYMVEKLGPQGKRGGGGGWKFISLPDGSSRPLNDMEKMYVKRETPKRRRRIIAPYK

SEQ ID NO: 45363 - protein, 205 aa, Zea mays
  Clone ID: LIB3079-016-E6_FLI.pep
RLLIHTKIAKKFNERMVAWAKNIKVSDPLEEGCRLGPVVSEGQYEKIKKFISNAKSQGATILTGGVRPAHLEKGFFIEPTIITDITTSMEIWREEVFGPVLCVKEFSTEDEAIELANDTQYGLAGAVISGDRERCQRLSEEIDAGCIWVNCSQPCFCQAPWGGNKRSGFGRELGEGGIDNYLSVKQVTEYISDEPWGWYQSPSKL

SEQ ID NO: 45364 - protein, 93 aa, Zea mays
  Clone ID: LIB3079-036-H3_FLI.pep
RFSSCGNSALPTQKSLVPQTKPLADPQQLAASRPNQSQGTKTDRASAQASAIKNEGSRSRCNKATIPHSRNKGSKKTQQQPNGRVHAIKFPVE

SEQ ID NO: 45365 - protein, 63 aa, Zea mays
  Clone ID: LIB3088-047-G5_FLI.pep
LHMNFKIWALPALMRLFKNTSQPLRSLCSFDCHIGSNSVKIKCSLRSRTSETSYTCDSVSNEQ

SEQ ID NO: 45366 - protein, 358 aa, Zea mays
  Clone ID: LIB3137-012-G11_FLI.pep
RGPVRRPSSWREKMDEASTSASGAATRRGFVPARSGVFYRFTQQNLPAWKPAMTPGCIIAMFLIIGIIFIPFGLLCLQTSNHIAEIIYRYDVDCVPDAYRGNRQAYIKDSSISKNCTLEAKVLEYMRAPIYVYYELENFYQNHRRYVKSRSDKQLRFGAKYTADSCSPVEWDNNGSPIVPCGLIAWSLFNDTYGFTRGSKEIKVNRKNISWKSDREHKFGKHVFPSNFQNGTLIGGGKLDPTVPLSEQEDLIVWMRTSALPKFRKLYGVIEDDLHADETIAIFVGNNYNTYTFGGKKSIVLSTASWLGGKNDFLGHAYIVTGSLSIIISILFALIHVKYPRPQGDPNCLSWNRKNSNS

SEQ ID NO: 45367 - protein, 158 aa, Zea mays
  Clone ID: LIB3150-046-E6_FLI.pep
VHAITATQKTVDGPSSKDWRGGRAASFNIIPSSTGAAKAVGKVLPVLNGKLTGMSFRVPTVDVSVVDLTVRLEKSATYDEIKAAVKAEAEGSLKGILGYVEEDLVSTDFQGDSRSSIFDAKAGIALNGNFVKLVSWYDNEWGYSTRVVDLIRHMNSTN

SEQ ID NO: 45368 - protein, 624 aa, Zea mays
  Clone ID: LIB3150-060-C6_FLI.pep
TICANAIMHAGTTVDTFLRENLEWLSRATNWAKFSATAGLGVIHRGHLQQGRALMAPYLPQSGAVGGGSPYSEGGALYALGLIHANHGEGIKQFLRESLRNSSAEVIQHGACLGLGLAALGTADEEIYEDIKNVLYTDSAVAGEAAGIGMGLLMVGTASEKASEMLAYAHDTQHEKIIRGLSLGIALTVYGREEEADTLIEQMTRDQDPILRYGGMYALALAYRGTANNKAIHQLLHFAVSDVSDDVRRTAVMALGFVLYNEPEQTPRIVSLLSESYNPHVRYGAALAVGISCAGSGLSDAISLLEPLTSDVVDFVRQGALIAMAMVMIQTNESFDSRVGAFRRQLEKIILDKHEDTMSKMGAILASGILDAGGRNVTIKLLSRNKHDKLTAVIGLAVFSQFWYWYPLLYFISLAFSPTAFIGLNSDLKVPKFEFLSHAKPSLFEYPKPTTQQTTTSTVKLPAAILSTYAKAKSRAKKDAESKANQEKATEEASGSTSSKTAKAQEKDADAMQVDNASEKKAPEPEATYQLLTNPARVIPAQEKFIKLLENSRYVPVKPAPSGFILLRDLQPTEAEDLALTDAPTTVAGSTGNTAPAAGQQGSGSSAMAVDDEPQPPQPFEYTS

SEQ ID NO: 45369 - protein, 411 aa, Zea mays
  Clone ID: LIB3136-036-E8_FLI.pep
LKVVLVQTPRMEQATGVSGPEHIIDIPREIGPPASVSRSAGRENHEESNPVDRPSTRALVPALQAPSAIGAVPITGHTSGTRRNDNYVRRHRSPLNSGLWISIEVIVNFSQIVAAIVVLCVSRKEHPQAPLLEWVIGYTVGCFATLPHLYWRYIHRNIVNGEHESSHTPQGSAHNNSNEATHAASASERRRNAARNAVLANPRINALFDHFKMALDCFFAVWFVVGNVWIFGGRSSAADAPNLYRLCIVFLTFSCIGYAMPFILCAMICCCLPCIISVMGFREDTNNTRGASSESINALPTYKFKIKKRRHGSGSETEGQEGGILAAGTDKERSLSAEDAVCCICLAKYAHNDELRELPCAHCFHKDCVDKWLKINALCPLCKSEIVSSSGTSDARQSDQNTVPVQEIEMH

SEQ ID NO: 45370 - protein, 83 aa, Zea mays
  Clone ID: LIB3157-006-A5_FLI.pep
PINPPSYVNSRSPAYTPNYPPTILPALFHQAFQREYAMKCAVSSNHWLLSLCFKVLIICIKNCFSPRYISSNAMLKHMMPIAM

SEQ ID NO: 45371 - protein, 611 aa, Zea mays; identical to SEQ ID NO: 41819
  Clone ID: LIB3180-016-A3_FLI.pep

SEQ ID NO: 45372 - protein, 419 aa, Zea mays
  Clone ID: LIB3159-013-H12_FLI.pep
EEKDEDEVVVGGVAPTADMGWRRGGGADGVARRWVLLLCVGSFCLGLLFTDRMWSLPEADEVAVLPNLRREEEAERKTGDCNVGKVQGKHDYNDMLRVSDAHHNSQTLDKAIANLETELSAARTLQDSFLNGSPVQEDYKASESTGRRKYLMVIGINTAFSSRKRRDSIRNTWMPTGEIRKKLEEERGIIVRFVIGHSAISGGIVDRAIQAEDKKHGDFMRLDHVEGYLELSGKTRTYFATAVALWDANFYVKVDDDVHVNIATLGNILSKHISKPRVYIGCMKSGPVLSDKDVRYYEPEHWKFGEVGNKYFRHATGQLYAISKDLAAYISLNKHVLHKYINEDVSLGAWLIGLDVEHIDDRRLCCGTPPDCEWKAQAGNTCAASFDWKCSGICNSVQNIWGVHKKCSEDEKALLTVSF

SEQ ID NO: 45373 - protein, 521 aa, Zea mays
  Clone ID: LIB3180-042-E5_FLI.pep
VARSRRSGAPPCRHLLQGGTQGPHGAMVDTGGGRLYQRRGAVAFVAANKALLAAAWVVGFALVFLWQSASMSFGSAGGGGYLRLLSAPPPPPRPAPRLRPTAYNITDFGAVGDGRAVNTAAFERAVEAIAALAERGGGQLNVPPGRWLTAPFNLTSHMTLFLADGAEILGITDEKYWPLLPALPSYGYGRERKGPRFGSLIHGQNLKDVVITGHNGSINGQGEVWWMKHRRRILNNTRPPLVQLMWSKDITVANITLRNSPFWHLHPYDCTNVTVSNVTILSPVSGAPNTDGIDPDSCQDVLIENCYISVGDDAIAIKSGWDQYGIAYGRPSSNISIRNVTARSLVSAGISIGSEMSGGVANVTVENVRIWESRRGVRIKTATGRGGYIRNISYRNITFDNVRAGIVIKVDYNEHADDGYDRTAFPDITSISFKGIHGQGVRVPVRAHGSDVIPIKDISFQDMSVGISYKKKHIFQCSYLEGRVVRPVFPKPCENLDVYDEQGQLVKRAVALNSTELDYDI

SEQ ID NO: 45374 - protein, 648 aa, Zea mays
  Clone ID: LIB3150-097-D8_FLI.pep
PSVRLNPPSHSATPAPRPLLSEATPRALLPCPVSGPPAPSARQPAVTEARSGPREKSLLYLMAMIDEPLYPIAVLIDELKNEDIQLRLNSIRRLSTIARALGEERTRKELIPFLSENNDDEDEVLLAMAEELGVFIPYVGGVEHAHVLLPPLETLCTVEETCVRDKAVESLCRIGAQMKETDIVDWFIPVVKRLAAGEWFTARVSSCGLFHIAYPSASDQLKTELRTIYGQLCQDDMPMVRRAAASNLGKFAATVEQNHLKTEIMSIFDDLTQDDQDSVRLLAVEGCAALGKLLEPQDCVAHILPVIVNFSQDKSWRVRYMVANQLYELCEAVGPEPTRADLVPAYVRLLRDNEAEVRIAAAGKVTKFCRILNPQLSVQHILPCVKELSSDSSQHVRSALASVIMGMAPVLGKDATIEQLVPIFLSLLKDEFPDVRLNIISKLDQVNQVIGIDLLSQSLLPAIVELAEDRHWRVRLAIIEYIPLLASQLGVGFFDDKLGALCMQWLEDKVFSIRDAAANNLKRLAEEFGPEWAMQHIIPQVLEKINNPHYLYRMTILQAISLLAPVMGAEITCQKLLPVVINSSKDRVPNIKFNVAKVLQSLVPILDQSVVEKTVKPCLVELSEDPDVDVRYYANQALQACDQMMVSS

SEQ ID NO: 45375 - protein, 202 aa, Zea mays
  Clone ID: LIB143-012-F6_FLI.pep
ELKKLVEEGKVKYIGLSEASASTIRRAHAVHPITAVQLEWSLWSRDAEEDIIPTCRELGIGIVAYSPLGRGFFCSGAKLVDSLSEQDFRKHMPRLQPENIVKNAKIFEHVNAMAAKKGCTPSQLALAWVHHQGNDVCPIPGTTKIENFNQNVGALSVKLTPDEMAELESCAAAGEILGDRYPQMANTWKDSETPPLSSWKSE

SEQ ID NO: 45376 - protein, 476 aa, Zea mays
  Clone ID: LIB143-044-F5_FLI.pep
TIVGSGMWNVLELSLATGATRVRVQVVDALHQHIHVVVHVVVHVSSVPLLAIASALPVLLLQAEVEQLRPEALRVLAAAAAAPSLPPSLVVVRLRHAVDADRKSGNVVAHRRLRGSAASLAVAREVLDGAAALSGERVLELPAAAAKALPVDQHPDEARVLHGTREEHRHLLLLLLRRGDALLHGLHLRARRLLLLPQLHHLREQDPPVALQPVHLAVEPELPHLQAGRRRLPLLRRRARRRAPALDRPEELPLATLEPLVRELPPVRVNLPEPVGVELADEAGEVAVLEVAWEDHQGEGVGVPDDEAGSGEPPRDDGVGVGVVHDVVCLGQERSGSHLAESFHRPGHLRQGDGPRGRRRRRRRRAGEVEVQVELLLHNAVEGIHGRSASNPTNRQTRSSNGRRTEARLTEQGGGEGKSKGINQSINPNERTNESRAGPKERDLWLKKKMTAELAQSENGLCECHKSTRIQLSRDG

SEQ ID NO: 45377 - protein, 177 aa, Zea mays
  Clone ID: LIB148-044-C2_FLI.pep
LAPLPSVTPPHPASPTKMSRATAAVLFYILAVAALSAAEAPAESPKAGSPAKAPAESPKAGSPAAPAKAPESAATRTAPAKAPQAASTPAVAAAPSSSSSRKSGPAAAPTTAASTPSSSTDEELSPSPSASTAEVASPAADGPAEGPAAADASGAATLGSGAAIAGVAAAVATMIFY

SEQ ID NO: 45378 - protein, 390 aa, Zea mays
  Clone ID: LIB189-010-B9_FLI.pep
LIGLMHAEDGSDGDAAGDAPPGDSRLGEGLEQLVRHDPGAAAVLEVQVVVALVDEPLDLLHPAAELLERRLHHGLRQPRRLRELPHVLLVGRVRREDVQRRHDLDGLHLRGQHVQQRRLRLLEELLHLLARPALLHRHVLPDGGRPVGEVAGEVVLPEVDGRVVAGGDPHDGGQRLHQAVAGVQHGPPRLVLLVAVPHVAHLVPERPQLGVGGHGLVGLVVDVDVLGRPLLDGVPDQEPVVGVGVVLDGELQLPVLPAHGQPALDEVVGQRLRVELPRRAVRHGAKLDGVLARPEGLLDDAVGVDERLPGQRVDLHGVAEVRVQQAVHRVQPAQLPVGGDDVGLHAAVRAQPVAHQLVVPRVVGQHVRLGQLPQPGVGGVGPVRERPLPL

SEQ ID NO: 45379 - protein, 143 aa, Zea mays
  Clone ID: LIB3115-026-G6_FLI.pep
RKVIKLSIQNGVPSEYTDMIFLQTNLDKVEGTQKVKQKLKGHKGRDEQQIYGLKLGFGNKDATRENLITGFGDMNPAEKSVMLQKGSGCCSRVADCLCCMCCIKACNRMNDQCAVLMAQICAALACLGCYECCAEVCCGGSES

SEQ ID NO: 45380 - protein, 645 aa, Zea mays
  Clone ID: LIB3066-018-A12_FLI.pep
MAMGMPPMSRTRRLSMPSHDRHRGDGRHGRALQRQDRHPHPQQAHRRQDPHRGVRQGRRQGHGAPLRRQGLPRREPGRHRHLHRRHARRPQGGPRRHQGGPLPPLQPGGEAHGHHLHRRQRRLAQGQQGRPRADHRAVPDEQGCREEDPRPHRRLRRPRPPLPGRVVPAGPREEQGERRRAVAVHRSPPAVRPAAARQRGDHPPRAPPGREREDDHRRPAGHRQGDGAAPGHGQQHVPVHHPAGRQQDRRDGRPEHRRADREGRRVRGGVPGAQVRDREAAAGPEAHLRHDRGRRERRAGAEEGGHRHRGGRRDGRGPERVGHRADGARAERDRERRAHQPRHLPAHEELHHLRRVHHHPHRAGLPARRAGLEVRLRALHGAHHCHPQRRHHHDHLQGPREAVADARLVEAQGDLRHGHRARDLHGARHGALLLPGARHRLLHQRLRRAVHQGERQGADGGAVPASEHHQPGAHLRDPVPELVLRGAARRAAGDRLPGGAAGGDVHRRVRQLGVLQDAGHRLGLGWRHLGVQRRHLLPAGRAQVRHPLRALRQGLEQHQQQDGLHQPHRLRQGRARGAVGHGTEDAARPQPGHRHLRPLRRQPGLPRAVGARRAGGQARRGGQAQGAAHAQGTRRVRRQAQGPRH

SEQ ID NO: 45381 - protein, 97 aa, Zea mays
  Clone ID: LIB3079-036-H11_FLI.pep
KCWQFAFGQIHPDTTGCSEAHEHKSNTGCNASKGRNSSRGRAWRGRVCRGHQRRELGVGRRRDHRLRREARWKECRIEPTNRERRRRPHAPWPGGHS

SEQ ID NO: 45382 - protein, 60 aa, Zea mays
  Clone ID: LIB3150-100-A1_FLI.pep
VLMLSPAPPISITYLTHISNSTEYMHMHNLLKIEYNDGQYGLKFEAPIKAVFSCMCIRED

SEQ ID NO: 45383 - protein, 395 aa, Zea mays
  Clone ID: LIB3137-027-D3_FLI.pep
SIQLCLDRRPVAMSPTEEAAGGGGDDYDRLSELKAFDDSKAGVKGLVDAGVTTIPAIFRGHLLQEGPKVSSSSSSSSTSLSIIPVIDLSAADAVAREEVVAQLKAAAETVGFFQLVNHGVPSELLCEMLASVRRFNEEPHEVKRPYYTRDARRKVRFNSNFDLFQSPAANWRDTLFCEAAPEPPRAEELPVAVRHVMLEYGGAVREVAARVLGLLSEALGLSPGHLAGMGCAEGLSLVCNYYPPCPEPDLTLGCSRHSDPSFLTVLLQDSHAQGGLQALLASRWLDVPPVAGALLVNVGDLLQLVSNGRFKSVEHRVVANRSRDTARVSVACFCNADIARSTRLYGPIAELIAADDSDGAGRALYRNVTVPEFLAHYDKKGLDGRPALHRFQLLQ

SEQ ID NO: 45384 - protein, 80 aa, Zea mays
  Clone ID: 700047407_FLI.pep
QSSIKKLKMGYTYIRRPSPPALSTIHNRTKFQPGINTKSVLLDDTRLASTSHSSTIRSFSFGFIHQSHLEIIPVVVLHIT

SEQ ID NO: 45385 - protein, 405 aa, Zea mays
  Clone ID: 700072757_FLI.pep
TSGGGNGIGNWNMGSSVGCLGGGSKSRQDQNGQVVAGSSPRSGHELSRPGNNVHVFSLNELKTATRNFHMLNCIGRGGFGAVYKGNLKNGTPIAIKKLAAESKQGISEFLTEINVISNVRHPNLIKLIGCCVEGSNRLLVYEYAENNSLANALLGPKNKCIPLDWQKRVAICIGTASGLAFLHEEAQPRIVHRDIKASNILLDKKLLPKIGDFGLAKLFPDTVTHISTRVAGTMGYLAPEYALLGQLTKKADIYSFGVLLLEMISGESSSKSTWGPNMHVLVEWTWKLREEGRLLEIVDPELEKYPEEQMLRFIKVALLCTQATSQQRPSMKQVVNMLSNQTEIDLQNVAPPGVLKEPRQRTGGFGGLIADTSSSQSTKGNPAESYSTQTNMNSSQFSTTDVSPR

SEQ ID NO: 45386 - protein, 128 aa, Zea mays
  Clone ID: LIB3088-050-G8_FLI.pep
KRESGTKEAVERKNLSYQFLWRHSTIAAVLLSARFAFAATGAAACRSASPSRRPRGPARSGRTEAGSTAAARRSRRHSPGPTRRPRRAPTRRSRSSCGSPPRRPGRGGSRRARRRRCRRSRTRRCCCG

SEQ ID NO: 45387 - protein, 47 aa, Zea mays
  Clone ID: LIB3088-002-E12_FLI.pep
MSIFVFTDEPCAIIVSSNILLAQISQYMRINYYTSMWFLQAGLSIAL

SEQ ID NO: 45388 - protein, 68 aa, Zea mays
  Clone ID: LIB3088-010-B1_FLI.pep
SHMMWSMISRVDTRLFGPSTCSTQFYICVTLVRATLLTLSSSMNLLCVPVERFPILGANLSFSERVIP

SEQ ID NO: 45389 - protein, 80 aa, Zea mays
  Clone ID: LIB3116-001-B12_FLI.pep
IKNWNYTGLVEAFHNGEGACYTAKVRTEEELTEALEAALGPKKDCLCFIEVIVHKDDTSKELLEWGSRVSAANSRPPNPQ

SEQ ID NO: 45390 - protein, 340 aa, Zea mays
  Clone ID: 700050281_FLI.pep
CSRTAKPTPTSSSKAQKPCTSSEGCSAGDTAPMGLTRQSSTIPPATGMSLCGVVRGCTLPQGTIHTSRSPQPQEWRRHAGAYWFGSPNYGVFTWDDKLPGAQVLLSRLRLFLSPGYPYEEILRTFHNQTDNVMCSYLPLFNSFNFTKGGLIQLNHGRPQPLQYAVNAAFLASLYSDYLEAADTPGWYCGPNFYTTEVLRKFARSQLDYILGKNPLKMSYVVGFGNKYPKRPHHRGASIPHNGVKYGCKGGYKWRDTKKANPNILVGAMVAGPDRRDGYKDVRTNYNYTEPTLAANAGLVAALISISDIKTGRFGIDKNTIFSAIPPMFPTPPPPPSAWKP

SEQ ID NO: 45391 - protein, 152 aa, Zea mays
  Clone ID: 700052124_FLI.pep
STPLVELAATVGTSELAIGAEFGFDSTSAAVTKYNSGVGYNKSDFSASLLLADKGETLKASYVHLFNPTNGATVAAEVTHKLKTKENYFTLGSSHALDPSTLLKTRFSNSGKVGLLCQHEWRPKSLVTLSAEYDPKVVSAPSRIGVAISLKP

SEQ ID NO: 45392 - protein, 307 aa, Zea mays
  Clone ID: 700083041_FLI.pep
ETVAGLSPDDDSEPWTILVHKKPQASWIPYNPRTMRPPPLSKDTRALKIMSWNVNGLKALLKSRGFSVQQLAQREDFDVLCLQETKMQEKDIEVIKDTLLDGYTNSFWTCSVSKLGYSGTAIISRVKPLSIKYGLGISDHDTEGRVVTVEFDDFYLLTAYVPNSGDGLKRLTYRVTEWDPSLGNYMKELEKSKPVILTGDLNCAHQEIDIHDPAGNRRSAGFTNEERESFGTNFLSKGFVDTFRKQHPNVVAYSYWGYRHNARKTNKGWRLDYFLVSESITEKVHDSYILPDISASDHSPLGLVLKL

SEQ ID NO: 45393 - protein, 644 aa, Zea mays
  Clone ID: 700087238_FLI.pep
TLHFAAATTTRRGPTMAPVAAPIRDLLTSFSPGADFLALSSGDGRIKVWDAVRSRLQTEFADIPAVEAVAVAESKRGHLALDYTCMKWVQLSSKKKRKAGSSLIVLGTGSGDVLALDVAAGHWKWKVSDCHPGGVTAVEYSKHGRNVYTAGADGMVCRIDASNGAVVGKFKSSSKAISALAVSSDGNMLATAAGQLRTFDTSSNKKIKKFSGHPVAVRSMVFSNDSQYVLSSGVGERYIAIWKLGSGKTQSSNCILSMEHPAMSVDCKCSDKGEIYILAISEIGVCYFWSANVVDDLRNKKPTKIILSESSVSTAHQALSIFAAKLQGVDGPNSAHVLLAYGSVVKPSFDKLLVCYGTDISLGISQDGVLLPNTQTTMAKKGQSVKKHETVFALDRANAEDAILPLPKLHTQEKKRKHGVTKPSGDVEPEIHSDLTTTRSIHKRVPVQRIEDDSTCIEDMMRECGIIETRVDESMKGHAGIPFNILSGLFGDGSIKFDANLPSKKIRGHLRSLKPGDACKLLDKLVSAWKTRSGSTELVLRWIYCLLVIHGRFICSEESINNLEKMCAERYTVTEDLLKLSGRLRLITAQVDKAASNMSEPTSGEMQDAAFQSDEEEEDEDVDETVFGQDSDSSQNSGTGDDAK

SEQ ID NO: 45394 - protein, 347 aa, Zea mays
  Clone ID: 700083239_FLI.pep
LTKVKMPLSDLVSAALALDQSTLDVDQVENLIKFCPTKEEMELLKNYTGDKQNLGKCEQFFLELMKVPRMESKLRVFSFKIQFGSQVADLRRSLNIIDSSCNEIRTSLKLKEIMKKILLLGNTLNQGTARGAAVGFRLDSLLKLTDTRATNNKMTLMHYLCKVLAARSPQLLNFYVDLVSLDAASKIQLKMLAEEMQAVSKGLEKVHLEYDASERDGPVSEIFREKLKEFTDNAGADVQSLSSLFSEVGKKADALIKYFGEDPVRCPFEQVISTLLTFVTTFRKAHEENLKQAELEKKKAEKEAEAEKAKNAQLTGKNDSKPSNPRRQAKQTLERTRSASRRGRDVG

SEQ ID NO: 45395 - protein, 456 aa, Zea mays
  Clone ID: 700087532_FLI.pep
CLSEKNEMELKLLNSSALPNQHAPTEEQKLIKLLQEELRNYEKEVHEAKRLKSSHMNVELLKEKLLEEQGRRERAELELSKLQEIGARAHKLELELASCTALLSNIPDVSSYADIPQKIADLQKQALTYLNEVGEVTSRLKELEVALEYADLSKQQAEGEAALAKERAASATREVKRLELMLTAISEERDKLRKEHATESDQSGMEKTIRELESIIHELKELISHKDTELNIMNERLNLETRKVKSLEREGDQLRSQVALLESKLGHGDYSASSTKVLRMMNTLGVDNEAKQTIEVLQAELKKTKERLQAVEELKGQTDPGTVVDANIAEKLAQLKNQIATLEKREERYKAVFAERISVFRKACCSLFGYKIVMNDQQQSNGIPVTRFILQSVYAQSDDEKLEFDYESGSTNIVVNDYTSQQEIARQVDIYIRRTNSIPAFTANLTMESFNKRSIC

SEQ ID NO: 45396 - protein, 161 aa, Zea mays
  Clone ID: 700086042_FLI.pep
NFQVMSVMSLPPTVAPTMAIANSKGMLGRKYSCSHGSAIQLGGRPYMIQLLRRHALLKEENTTSWRSDMDFMRSCPYTLDAWMPLFLESLCSVNDGAHRAAEHLIGQGILAVLSTSKRRNDCLETTSGRTTRGNALRPELRRGGTDGAARRRRSAMTRGNR

SEQ ID NO: 45397 - protein, 347 aa, Glycine max
  Clone ID: 700764856_FLI.pep
HVISIEIDASLINLTLLKNVTEVYNFSQDDLMTEDIFVLDCHSEIFVWVGQQVDSKSRMQALSIGEKFLEHDFLLEKLSRVAPIYVVMEGSEPPFFTRFFKWDSAKAAMLGNSFQRKLTIVKSGGAPVLDKPKRRTSASYGGRSSSVPDKSSQRSSRSMSVSPDRVRVRGRSPAFNALAANFENPNSRNLSTPPPVIRKLYPKSVTTDSAILAPKSSAIAALSSSFEQPPSARETMIPRSLKVSPVMPKSNPEKNDKENSVSTRVESLTIQEDVKEDEVEDEEGLVIYPYERLKIMSTDPVPNIDVTKRETYLSSAEFKEKFGMSKDAFYKLPKWKQNKLKMAVQLF

SEQ ID NO: 45398 - protein, 434 aa, Zea mays
  Clone ID: 700101540_FLI.pep
PAERRGRRRTQPNPQSSGCSQLVPSTLPRGSLLRSLLDMALQAATSFLPSALSARKEGSVKDSASFLGVRLAADGLKLDTTALGLRTVRVSRSADIRAQTAAVSSPSVTPASPSGKKTLRKGTAVITGASSGLGLATAKALAETGKWHVIMACRDFLKASRAAKAAGMDKDSFTVVHLDLASLDSVRQFVRNVRQLEMPIDVVVCNAAVYQPTAKEPSYTADGFEMSVGVNHLGHFLLARELLSDLQSSDYPSKRLIIVGSITGNTNTLAGNVPPKANLGDLRGLAGGLNGVGSSVMIDGGEFDGAKAYKDSKVCNMLTMQEFHRRYHEETGVTFASLYPGCIATTGLFREHIPLFRLLFPPFQKYITKGYVSEEEAGKRLAQVVSDPSLTKSGVYWSWNKNSASFENQLSEEASDADKAKKLWEISEKLVGLA

SEQ ID NO: 45399 - protein, 344 aa, Zea mays
  Clone ID: 700158261_FLI.pep
PSREVVEAAGGLGPGPAATTMYVARESTKLWRRVCAETTAELQLLFEKWQLLLAGLVFQYIHGLAARGVHYLHRPGPLLQDLGFMALPELGQEKGYLSESLFTFIFISFFLWSFHPFVYHSKRFYTVLLWRRVLAFLVASQFLRIMTFYSTQLPGPNYHCREGSKLATLPPPNNALEVLLINFPRGVLFGCGDLIFSSHMIFTLVFVRTYHKYGSNRLIKLLSWLMAIIQSLLIIASRKHYTVDVVVAWYTVNLVVFFVDKKLPEMPDRTNGLSLLPVSTKDKDGRMKEELHKLEKDGRMMDEFHKLLNGNTVDATDWRQRVQMNGKHGEDTNHTVSDATPTGT

SEQ ID NO: 45400 - protein, 150 aa, Zea mays
  Clone ID: 700099575_FLI.pep
RASECEGRCPDKVSNDDMTTRSKGAVVAMTDGEGHCGAGRHGLHGDREGVADPNDMWRTSSRSCCCSLGEHHGGPSTTSRAAARWCLGAQPIQERSWEAWPTWVSPVGKARSTLMPSRERCGHEEVRRAEAGGEASYIGLGAATMRRHVR

SEQ ID NO: 45401 - protein, 715 aa, Zea mays
  Clone ID: 700152625_FLI.pep
GVPKFLRRIDTALKNIGINERLPYNAPLIQFSSWMGGDRDGNPRVTPEVTRDVCLLARMMAANLYFSQIEDLMFELSMWRCSDELRIRADELHRSSRKAAKHYIEFWKQVPPNEPYRVILGDVRDKLYYTRERSRHLLTSGISEILEEATFTNVEQFLEPLELCYRSLCACGDKPIADGSLLDFLRQVSTFGLALVKLDIRQESDRHTDVLDSITTHLGIGSYAEWSEEKRQDWLLSELRGKRPLFGSDLPQTEETADVLGTFHVLAELPADCFGAYIISMATAPSDVLAVELLQRECHVKHPLRVVPLFEKLADLEAAPAAVARLFSIDWYMDRINGKQEVMIGYSDSGKDAGRLSAAWQMYKAQEELIKVAKHYGVKLTMFHGRGGTVGRGGGPTHLAILSQPPDTIHGSLRVTVQGEVIEHSFGEELLCFRTLQRYTAATLEHGMHPPISPKPEWRALMDEMAVVATKEYRSIVFQEPRFVEYFRSATPETEYGRMNIGSRPSKRKPSGGIESLRAIPWIFAWTQTRFHLPVWLGFGAAIKHIMQKDIRNIHILREMYNEWPFFRVTLDLLEMVFAKGDPGIAAVYDKLLVADDLQSFGEQLRKNYEETKELLLQVAGHKDVLEGDPYLKQRLRLRESYITTLNVCQAYTLKRIRDPSFQVSPQPPLSKEFTDESQPAELVQLNQQSEYAPGLEDTLILTMKGIAAGMQNTG

SEQ ID NO: 45402 - protein, 295 aa, Zea mays
  Clone ID: 700155615_FLI.pep
QAWVVWSMCNLENKIISVERILQYISIPAEPPLSIPEDRLALAQNWPSEGEIQLLDLHVKYAPQLPFVLKGLTVTFPGGLKTGIVGRTGSGKSTLIQALFRIVDPSIGQILIDGVDICTIGLHDLRSRLSIIPQEPTMFEGTVRSNLDPLGEYTDSQIWEALDCCQLGEEVRRKEHKLDSPVIENGENWSVGQRQLVCLGRVILKRSKILVLDEATASVDTATDNLIQKTLRQQFAEATVITIAHRITSVLDSDMVLLLDNGVAVERDAPARLLEDKSSLFSKLVAEYTMRSTHT

SEQ ID NO: 45403 - protein, 807 aa, Zea mays; identical to SEQ ID NO: 43305
  Clone ID: 700096646_FLI.pep

SEQ ID NO: 45404 - protein, 216 aa, Zea mays
  Clone ID: 700101128_FLI.pep
SDLCSHRSIFLIFFSRTAILLPGPSSSSASGAALPAASPSLVLLQSRPPTPQPISLRAILPPVLPARVVNSLPWTRAELLARVSGAQPTSSSPFSLMARPSTAPAPCRVPAQTTLLLRPVPARWSSCARRIPARGASSCSAHRSRPALPAIFLFPTTGSTARSPSSAMATAPWSPAHRGASFLPLPWRLPWIPPLLGRLPGVQVRTPLQPSPFSLL

SEQ ID NO: 45405 - protein, 395 aa, Zea mays
  Clone ID: 700101244_FLI.pep
ILSVQKSPVIHLFSESIAGAATIRGFGQEKRFMKRNLYLLDCFARPLFSSLAAIEWLCLRMELLSTFVFAFCMAILVSFPPGTIEPSMAGLAVTYGLNLNARMSRWILSFCKLENRIISVERIYQYCRLPSEAPLIIENCRPPSSWPQNGNIELIDLKVRYKDDLPLVLHGVSCMFPGGKKIGIVGRTGSGKSTLIQALFRLIEPTGGKIIIDNIDISAIGLHDLRSRLSIIPQDPTLFEGTIRMNLDPLEECTDQEIWEALEKCQLGEVIRSKEEKLDSPVLENGDNWSVGQRQLIALGRALLKQAKILVLDEATASVDTATDNLIQKIIRSEFKDCTVCTIAHRIPTVIDSDLVLVLSDGKIAEFDTPQRLLEDKSSMFIQLVSEYSTRSSCI

SEQ ID NO: 45406 - protein, 560 aa, Zea mays
  Clone ID: 700106178_FLI.pep
ELEDTGSKASSNSNIQQKASALQEVEDENEANKMQENSVVSNSDVAEQALNGEDNSNNDSSAGVEEAGTKHLPVSSGEKVSDGRLEHSGVLNDKVEDDSTLHEKSEDDTMSEEVSVMESNLPNDARNLLNYCSFARVPTRPRTVLANRNVGPGQREITVSEQLNLVTSEEISNMAMDGEANTNSITSIEEGSKVELVGQDQEHAEQSAICNQVAESVAFHEKETRGETEEKEEQKNIPQHYEVEDNKETNELCPTFASSQNNQSAICNQVAESVASYEKETQGETEEMEEQKNIPQHYEVEDNNETNELSPTFASQNNFNLQVEKGIQIYNLDTPPQDELLIDPPDKGKTVDSELLPNIKAEDAVTVEEEKIGQSSSFKIRDLNLVGSPEVVDMRGDPRLGQSSTAGCPVDLQDNQQVEFETALGNNPNNTDTCAPFLLGNKSVQVIDIEDDIPIEAGACDTSKSKGEMVYSSMESMMNPPPVNTDALHGIQDGYSLAISDYLGADMSCYQSIQAELQDGMDLNGSEGITVMDDPIYSSLSDIGFMEVWDQQPQDYEKFF

SEQ ID NO: 45407 - protein, 369 aa, Zea mays
  Clone ID: 700162971_FLI.pep
GSRLGLNGSYGYRFAFSVLQEATNNFDENWVIGVGGFGKVYKGVMRDESKVAVKRGNPKSQQGLNEFRTEIELLSRLRHRHLVSLIGYCDERNEMILVYEYMEKGTLKSHLYGSDNPSLNWKQRLEVCIGAARGLHYLHTGSAKAIIHRDVKSANILLDENLLAKVADFGLSKTGPELDQTHVSTAVKGSFGYLDPEYFRRQQLTEKSDVYSFGVVLLEVLCARPVIDPTLPREMVNLAEWGMKWQKRGELHQIIDQRISGTIRPDSLRKFGETVEKCLADYGVERPSMGDVLWNLEYVLQLQDADSTVSDVNSMNRIVELPSQVQNVGALESISVTMAEAGASNEPDHDLSDVSMSRVFSQLIKAEGR

SEQ ID NO: 45408 - protein, 153 aa, Zea mays
  Clone ID: 700166589_FLI.pep
LTARMEKLVSLNAQEVGGQPTTCGVAGPSIHNDKDNGPGIGKPHSLMERNATARTSQWEESLGLDGSEPPSPPRPHLPSPRRLPPSPLSPPGNKNNNRRKARRWSLFEEETLRKGVEEYGVGNWRDILDNNAEAFTGRTPVDLKDKWRNMLFR

SEQ ID NO: 45409 - protein, 1134 aa, Zea mays
  Clone ID: 700152164_FLI.pep
ELDLTNSSSAPTVPLAVSTENADSTAVTTADVPGTDTSSRRPSSEGTGEPGVESFTVSAVECDESKRTHKVVKDPSKDNISSDATKHELPKECAVDSTEQASAVTSNTDDSYAAPLVTNQEQLLKGSASEKQAVMNNSSKNSDTSAHFFDGNDVGVTTSGTSEPTAQTSNDEGDSDISPETDLAVYNVPLGSSELQLKSESRANDQQPAAPTVSVRPVSREKPSTKSTAGKKKKKKEMLAKADAAGSSDLYNAYKGPEEKSEVVGTVEGADNSSTVDTTHVLSDELEKDPSTSADDCKKKVELDDWEDAADMSTPKQPSDSGNQASITQVLDSDVTEANSRKKYSRDFLLTLQHHYTGLPFGFQMNEAVNAIMNNLAGKSYVADREPHPSPGRGLDRPTSRDRRGAAMADDRWTRAGVPLSPGRDVHMDLPNGPSVINYRGGPGGNHGVLRNPRSQSSNQYGGGLLAGPMQSVGPQVPRSGSDADRWQQKGLMPSPGTPVQAMHKAERKYVIGKVSDEEEAKQRQLKAILNKLTPQNFEKLFEQVKEVNIDSVATLTGVISQIFDKALMEPTFCEMYANFCFHLAGALPDFSEDNEKITFKRLLLNKCQEEFERGEREEAEADKTEEEGEIKQTKEEREEKRIRARRRMLGNIRLIGELYKKRMLTERIMHECIKKLFGNHDDPDEENIEALCKLMSTIGDMIDHVKAKEHMDAYFSMMQIMSTNQKLSSRVRFMLRDSIDLRRNKWQQRRKVEGPKKIEEVHRDAAQERHAQSSRLGRGPAVSSVPRRAHPMDYGPRGPSASASSSSQQGSIRGMPPHSRGSQDIRHDERHQFDNRTVLPQRVVKDEAITLGPQGGLARGMSIRGQPPVSNTEIPSVIDHRRIVSSSNGYNSAADWTSSSGREDSNSRLPDRTSGRIPASSQSAVTSQRPASQEGRSRSKSYSEDELREKSVLTIREYYSAKDEKEVVLCIEELNAPNFYPFLVSLWVNDSFERKDMERELLAKLLVSLCSGRHNLLSKQQLSDGLSNVLASLEDNLSDAPRATEYLGRLLARFVEESILLLQEVGKLIQESGEEPGYLIQGGIAADILGAVLDSIKSDKGNSFLDEIKTTSSLKLVDFRPQHLKRSKLDAFM

SEQ ID NO: 45410 - protein, 697 aa, Zea mays
  Clone ID: 700097286_FLI.pep
QVEKAFREGTAQQNAHSIFVSLALKLLEQRVHVACKEIITLEKQNKLLEEEEKEKREEQERRLKRRTREREKKNRRKERLKEKENNKGKKLVESKSRNDIPSSAPSNSTTSINDYSTNTLDSRDSVKEDEDSAEVVNLCSPDSLVTFVHQINPSLRDGVQGQGRIFLKISPWYDDCGDESGRIGELQWKSRERTRSINRSRNAASTSNNRTRERQSYNSCSCGHLEDYGVMDSCFLPTARSGKETKIARKSGVEKPRVQYHRCYTLDSFIVSKGNRAGSTQKNAIPKQIWEPMDARRKTKLHNTVHDSGSVNDVDSLKHVVFDNSGSQNFGVGCESQPQASESSRDECNSDQPCANGGRNQTISCASSTLMVNQQNCCAGNDEGSRHDEELMMNSAGSDSSSSCMSEGDRESSSSSTTSSSAQNPESSSESEESPERINSTVGTQSSRAASRSLLEACAGNGFREYQPKATGLAHNDMFGYNVSPVQDQLLHYQSMYPPQHRPITMGFHDGSWAAPTNGNFQYARPSHLYSSPLVFGIPGNHFIDYPYMAPAFSHIPPEPIHKAASSFRAMPLSLPFQNGHRQAASLTQRDMNLERRPAKLTKPTGKDPPENKNKSGLKDLPEDKSKSWDADASFSLFQFNLPIASPVTPSSKDKSGELAARTPLTQVQAQLCSREQADVKEYSLFSSKDNGIFSFM

SEQ ID NO: 45411 - protein, 374 aa, Zea mays
  Clone ID: 700097370_FLI.pep
IVAAEDSLGSAATFVVYSYGSAKESLPPNVRDLLSSSEEKASLVLRPIGNALQQVYVVVEGVEKNVGLDPSDPIVQLAVVLGGSVTIGTTYWLFTYSGYSGDLSPESAFDLLKNDDKAVLIDVRPEDLREKDGVPDLRLRARSKYASVASPEIKDPVKSMLKDEREFDDALLAVVIRNLKLVKGDSKVIVMDSNGARSKAIARLLKKLGVQRPYLVKGGFQAWSKNLRVKELKPETALTSINEDVEEILEQIKPTPTLVFGSLLGLSALSYALLEWEMTLQYIAVLSVGLTIYLRFSTYEDSEDLEKDLKLLLSPVRVGADALSWAAKKIEPNKVGLPTSPSTTAVKDRVLQAAAKHESQPSDADESSVQTAEA

SEQ ID NO: 45412 - protein, 387 aa, Zea mays; identical to SEQ ID NO: 39524
  Clone ID: 700099285_FLI.pep

SEQ ID NO: 45413 - protein, 406 aa, Zea mays
  Clone ID: 700099532_FLI.pep
ADGPAVAPVVVFVNSRSGGRHGPELKVRLHELITEEQVFDLSVVKPSDFVHHGLSCLERLADQGDNRAKAVREKMRIVVAGGDGTVGWVLGCLSDLYKMKREPVPPTGIIPLGTGNDLARSFGWGGSFPFGWRSAVKRYLSKASRSPICRLDSWQTVIQMPEGEIEELPYALKKVEPVDRLEISQENGTELSEKASFYKGVFYNYLSIGMDAQVAYGFHHLRDEKPYLAQGPVANKLIYAGYSCTQGWFCTPCTASPQLRGLKNILRLSIKKANCSEWEQVKMPSSVRSLVVLNLYNYGSGRHPWGDLRPEYLEKKGFVEAHSDDGLLEIFGLKEGWHASFVMAELIKAKHIAQAAAIKFEMRGGEWNRAYVQMDGEPWKQPLLQEHSTIVEINKVPYHSLMINGE

SEQ ID NO: 45414 - protein, 137 aa, Zea mays
  Clone ID: 700103415_FLI.pep
ESAMASENKVFRFEEVAKHNVTKDCWIIIAGKVYDVTPFMDEHPGGDEVLLAVTGKDATADFEDIGHSDSARDMMEKYHIGQIDASTIPAKRTYVHPQQAPSHSDKNNDLLIKILQFLVPIMILGLAFGIRQYTKSE

SEQ ID NO: 45415 - protein, 398 aa, Zea mays
  Clone ID: 700106694_FLI.pep
GGPRWSVLRRNFAAEVVSPARFRQMAASRELALADLIRKLKLQEGVVVCRDAFQHAMSSLFIAMCFGKVLDDSSVDSIGVALRDFVLHGGASGMGMALFLFLPALTTRLFRGLLRSKEAKRQKLENVYCLPLIHERRERRKTKQLTQEHPHCYVDTLLDLRLDEEQDGGRLLTDHEIASLCIEILIVGSELPATALEWIMAELVKNPGVQDKLYEEMMVKAKATTDASAGVLPFSEDDLPKIPYLRAVVLEGLRRHPPGHQMPPRRVREDVEVGDYVVPKGSAINFMLYDLGMDDATWDRPAVFMPERFLPGGEAEALDITGTKEMKMIPFGAGRRICPGLRIALLLLEYFVANLVATFHWKEVEEGDVDVTTEDAQLTVLMGKPLRARLLPRLHSSA

SEQ ID NO: 45416 - protein, 276 aa, Zea mays
  Clone ID: 700106859_FLI.pep
ASRLHIQDRSRCSPTNMATEYLSGWPLSSWISPGAAFFLFVNVLIGAIVVTSRGHQAGGGRAAASTRRLCRSASSMVLDRLRSFSLFSVHPDPTETEERCSTSSPLELEAEEEEQPQPQPAVAEPARSLVAAVAAPADGASSEIAKEEAAEAGKDLPTSSNEAHGLVLQLQQGHGGRQQPPSSVNVVTAADATAAVEIKEEEKKKKAEQEATMQRAPACRRGTTEEAAEEKAALNARAESFIRKFREDLKLERLNSIINYTRTLRRGVGAPQPTAQ

SEQ ID NO: 45417 - protein, 247 aa, Zea mays
  Clone ID: 700106968_FLI.pep
TRREGQLASFLPRRAGEISRSISSQPASHVVGVVVADQLPALLLLPVIRRPPPRRRLLLQQPPDERQHPALPRGHLRRAQGHGPEQQAAVAADGGAEGAHVLLGLRARGEARGDEAARGGLRGGGRGDGEGDGDGVRGPPPGAQGGPARGEEGGVLAQPGPADALHLRQGLLPRRGVVPPHLQLLPPRLQRRQARTAPRAPPRRRPRQQHVQRRRRQRLLRHVISVALSSSTGGVCVCVCARQLVRV

SEQ ID NO: 45418 - protein, 542 aa, Zea mays
  Clone ID: LIB143-023-E9_FLI.pep
LTKINRQVPAGNLITDWSSQHRACHPLSSSSVVGDVARNLEPLGVERARHVDPLVGVSPEVVPLGLHQVGRQPVPAVGVEVGQASGHSRGADAVVDGEAHHPAPRRLPVHDLLRELGVYEQAGEARVPVVGLLDAVQEDGADDAPALPDPGQLAEVEPPAFLRALGLDDVHALRVAADLGRVQGLPHVLHQLRLVHRRAGGVVVTLEDLGGLHPLVLQPAQEPRVQGRLDRRSGHRQLGGLLHRPLPCPFHPGLVKDLVHQVAIAMLVLDAKDVGRDLDQEAQELALVPLGEHLVQLTVGELTDRLENVVCLGNQLHIAILDSVVNHLDKVARSTFANVRDTRATVRDLSSHLEDNVFDVLVSLERASGHQGRAVAGTLLSSRDTHAKIQEAALLHGLLPPLRVLVPLVPPIDDAVALLQVSCERRDGLVNWRAGLDEHDHHPWLLNGLHKGRGVMEAVDGKVSFCLGTLHGLVHLGGCPVVHRDGEPFLCNVEGKVLPHDRKASKTDSCERHLLLWSWRAAECRFRCGVELAMPPPSGHLP

SEQ ID NO: 45419 - protein, 206 aa, Zea mays
  Clone ID: LIB3088-030-A1_FLI.pep
KLEEQRVECIAQLEENNMLRSKLKDIADQYNITQQKYAHQLKEKMMELELADLRLQQHQEKAAHEHTQMQLYAEQVSQLMTTEKNLRLQLASDGERFQHFQDALSKSNEVFETYKQEMEKMILVIKNLKKDNEFLKGKCENSDIALVKLIEERELTKKQIEKLKNQKETLESLCRSLQAERKQGRSASIPDAPSSQEDMPATSQES

SEQ ID NO: 45420 - protein, 464 aa, Zea mays
  Clone ID: 700201316_FLI.pep
LPNTLCIRSTRSSSMCIEAPLALLADLDAYFFILGRKKDDPLSSLLSCPKLFLADEDLVLVGLVLAAVLLAAPSHPFGNGCHRIEEVGALPDYGVARGTKDTVHLKEHVLHLAPVRLCCEQAIKMQQVIGAWICRERLTPVVVDADEPSVVDDAEGVWAVGGDDVHDPDGVLDEAACESSVHGVHVHDVPDLVAPQRRQQRLVVLDPELPPGVVLLEGGGAAARDDADALRGDAEPLGPLGRGVEPQLPVLGAGSRDAGAHGHVPGGVGVDAVVALGGRGDRGELVVAGVGGLLPHGDVPLHAVELEAHAGQHLLEPVQVGLLRLRGGVPAVPAVLVVDGRAGEHPEAARAEDAVDLQEVEAAELGPGDEAARAVRHVEGGGRERQALRGDDAEDGRDAALQRELHLGLVVVPGRQRHGEDAPPQQVAAPAGDAAAGVERGADGAVAHARDQALHQVHVRADAV

SEQ ID NO: 45421 - protein, 303 aa, Zea mays
  Clone ID: 700220824_FLI.pep
SLTSDEQTLTDLKSISQRHFLPLYPSFAEDEDPIPIFAQKLLVMLMEHGCIKVSDILHKATVSQCFDFLLGDLSNANVSNVKLCFALASAPEMNTHILSQLQVVRRIGNLLEFVAAKDMDDFLEPTLEFCRAFIIRGTGSNRSVALSENPALLVDSAFSMSIAVDQQTCVTDICDFGGNMGTFLELAGNSDPQISNLASDCVVLLSKAAPREATVGLLTNLPKLSTAMDLLKHESSLRLIRLLYGLAFSCRQYLAQGMILSISVSALMRVEALVSVFKGSNDSLLADAASYLSAELQRLPRCG

SEQ ID NO: 45422 - protein, 706 aa, Zea mays
  Clone ID: 700219345_FLI.pep
KGLPLKGKEVGRKKGISVTKERSHEAIVYILLSDSVAKGHVMLPYSIRHFISADVHSWVYIKTYSANIKEDEPLVTISPLKFKMHVKDAHDSSKLVSQEVDTSRITRIPSENGDFFQKARYSENKNIRGADIESISESVSRQKFFIKHWLIGHLKEMGLHASHTEMNSIVLPTNILLHLEATDKEGTKGVEFLYFLKLTSENSNFNDSQLNIETTWSVPTSNADDLELHFGKFELGEPVSFDSLVDSGSSDGFKLTRSSLGWMENAMSDVTKRLSVLLSATSLRLFNRIKFPFPGHVIVYGPRGSGKTALTRASAKYFEDHKDILAHIIYIDCSKLALGKAKETRQEIEDSMSEALLHSPSIIIFDDLDSVVSVSSDPQVSQSSSSSDSLVQYLADIMDEYKDKIQNTCGYGPIAFMASVQSLQSLPQDLTSSGRFDFHIELSALAVPERKALLQHQVEEHDLLCSEEVLSEIASKCEGYDAYDLEILVDRAVHTAAYRFLLPSNACHNSLKRTLLMEDFFKAMHGFLPVAMRDLRKYAPDDKDGGWEDVGGLDEAVTIIKETLELPSKYPNIFTRAPVRLRSNILLYGPPGCGKTHIVRAAAAACSLRFISVKGPELLNKYIGSSEQSVRDFFAKAVAAAPCLLFFDEFDSIAPQRGTHSAGVSDRVVNQFLTELDGVETLTGVFVFAATRFHWQVMPVSKMLLL

SEQ ID NO: 45423 - protein, 171 aa, Zea mays
  Clone ID: 700171107_FLI.pep
SMLVQILGARRCIEVGVFTGYSSLAVALALPESGHLVACERDDRCLEVAKKYYQRAGVAHKIDVKHALAADSLRSLLDCGEASSYDFAFVDADKRMYEEYYELLLKLVRVGGLIVMDNVLWYGRVADLLVDDQKTISIRNFNKKVLEDKRVDISMVPIGDGMTICRKLVDT

SEQ ID NO: 45424 - protein, 135 aa, Zea mays
  Clone ID: 700194320_FLI.pep
HYCVIILDIVFILVAKISRSGRSGTGMNLTAHPIGHDTAAMATQTPQWAKPSLWVPANLVSSSTISTCMAIVTAMMPRNILFRSTPAKTFLRSISRALNSLNTWQSTKALKIMVPLAFSLMPKISRPRYCSARRT

SEQ ID NO: 45425 - protein, 119 aa, Zea mays
  Clone ID: 700206071_FLI.pep
PRHHRAHRHRLHRRRQHPRRGALQRRLHEPRPLLRPRRRRGRLRRQLGLLGRPAHRRRTRWPRLRRRLHRRLLPAGRRPGLRLSSAPFVWIQLIQRRRPFRSASSFALLFISSRYVTCQ

SEQ ID NO: 45426 - protein, 236 aa, Zea mays
  Clone ID: 700201662_FLI.pep
QCVVHGDIKPSNIMLDESFNAKLGDFGLARLIDHGMSLQTMTAVAGTPGYLDPECVITGKASPESDVYSFGIVLLEVACGRRPMAPPASTGEGKDGQVFRLVEWAWDMRGRGAALDAADERLGGAFDPWEMERVVSVGLWCAHPDPKMRPRIRQAAEALRSRSFRMPLLPPKMPVAVYLQPFGPSTLHFSDTTTSVGSSVTVPYTSTTSRATTATGTGMSNSSSPPAVTQHLSPRA

SEQ ID NO: 45427 - protein, 313 aa, Zea mays
  Clone ID: 700204742_FLI.pep
TAPYIAAVSRRERRRGHAPHRSIQLERPITCSTAQHSGARSAKRDDGVRVTVRGVQVPAPQVRARLRLRALLLPRAGRGALRRHPQGVRRQQRVQAARAPAARRPRRGRRHHLLRGAGEATRPHLWLRRPHLRATAAGDDPAGAAGVAQGAGGAGAAGRARGRQGLRGQRRRGAARLRLPLVQRQWRRRSSSRRRGRARRAAGRVRQWRARVPDRAAGVVGLHAAVAVPRVRAGRRGRRRRPAGVRLRGSGGVLVARGGGERVEVVVGVPRLRGPAERGLRLPEPSLVRTENYYYYKRERERDRYIDISVLNS

SEQ ID NO: 45428 - protein, 344 aa, Zea mays
  Clone ID: 700204848_FLI.pep
GFNSTLTEPVESSGRRGGDQIKEMELKLHPDLKGPLRALCEDERTTVIVLSGSDRSVLDENFGEFKMWLAAEHGMFLRPTYGEWMTTMPEHLNMDWVDSVKHVFEYFTERTPRSHFEHRETSFVWNYKYADVEFGRLQARDMLQHLWTGPISNAAVDVVQGSRSVEVRSVGVTKGAAIDRILGEIVHSENMITPIDYVLCIGHFLGKDEDIYVFFDPEYPSESKVKPEGGSASLDRRPNGRPPSNGRSNSRNPQSRTQKAQQAASERSSSSSHSSTSSNHDWREGSSVLDLKGENYFSCAVGRKRSNARYLLSSSEEVVSFLKELATATAGFQATCADYMHVLG

SEQ ID NO: 45429 - protein, 261 aa, Zea mays
  Clone ID: 700210711_FLI.pep
LYAIAVLSKIDPCWGRKYMPQAYSMVADFMTLSRNKAGASFTRLRMFDLWKLHSWAGGLTEFADGRNQESTSEAVNAYYSAALVGLSYGDAHLVSVGSTLTALEMLAAQTWWHVREGEGIYEDDFSGNNRVVGVLWANKRDSGLWFAPPEWKECRLGIQLLPVLPISEALFPDVAFVKDLVAWTLPALARDGVGEGWKGFVYALEGIYDREAALTKTRALKGHDDGNSLTNLLWWLHSRGSVVCDGDAGFGRCCWYRQYCH

SEQ ID NO: 45430 - protein, 665 aa, Zea mays
  Clone ID: 700212771_FLI.pep
EGEITGPLLASGAGAPAPEAVPPWREQVTARGLAVSAVLGVLFCLITHKLNLTVGIIPSLNVAAGLLGYFLVRTWTAALERFGVVSKPFTKQENTVIQTCVVACYGLAFSGGFGSYMLAMDQRTYELIGPDYPGNRAVDVKTPSLGWMIGFMFVVSFLGLFSLVALRKVMVIDYKLTYPSGTATAMLINSFHTTTGAELADKQVRCLGKYLSISFIWNCFKWFFSGVGDSCGFDNFPSLGLAAFKNTFYFDFSPTYIGCGLICPHIVNCSTLLGAIISWGILWPYISTKAGDWYPADLGSNDFKGLYGYKVFISVSVILGDGLYNLIKIIYATIKEIMNARAKQGRLPLAQVQDGDEGSNLSAEEKHLNETFIKDSIPPWLAGSGYIGLAAISIATVPMIFPQIKWYLVLSAYVVAPLLAFCNSYGTGLTDWNLASTYGKIGLFIFASWVGQNGGVIAGLAACGVMMSIVSTAADLMQDFKTGYLTLSSPRSMFVSQLIGTALGCVIAPLTFWLYWSAFDIGNPDGAFKAPYAVIFREMSILGVEGFSALPQHCLAICSFFFIASLVINLLRDVTPKNVSRFIPIPMAMAIPFYIGAYFAIDMFVGTVILFVWERVNRKECDDFAGAVASGLICGDGIWTVPSAILSILRIDPPICMYFKPSLSS

SEQ ID NO: 45431 - protein, 466 aa, Zea mays
  Clone ID: 700102563_FLI.pep
QEQQRERRTPAISSVLPGISQLKEEERETTWLFFLSGAARRVLQEQVSSTRSRLGMFVIEDKGGAIALMLASLLFLGTWPAVLTLLERRGRLPQHTYLDYSITNLLAAVLIALTFGQLGDSRRGMPNFFTQLGQDNWPSVLFAMAGGVVLSVGNLSTQYAWAYVGLSVTEVISSSMVVVIGTTLNYFLDNRINRAEILFPGVACFLVAVILGSAVHSSNAADNEQKLGASTNAYKLGTSGTVEPSKQAVDRDAPKDLEESGASGIRQPDKAEAGTAEYLIELEERRSIKVFGSNTFIGLGIVFFAGVCFSLFSPAFNLATNDQWHTLRDGVPHLVVYTAFFYFSISCFVVGVGLNVLFLYRPMAGVPRSSFGAYLRDWDGRQWALLAGLLCGFGNGFQFMGGQAAGYAAADAVQALPLVSTFWGVLLFGEYRKSSRKTYVLLGFMLFMFVAAVAVLMASSGHRSTE

SEQ ID NO: 45432 - protein, 456 aa, Zea mays
  Clone ID: 700101206_FLI.pep
RVYANILLAHRTFLMEQAEVCYLISSISPLRENVVSKGGLCFVKLYQVDNLMRVLCFPTAGGKSVKKPRFSLRGYDFVPLDVKTDNLCIGEQDVSSAVPSTKASQTMVAERLENVEEQTEDLAPEFALPPKANTSVSELLDNLQRRGGSFVRTPSLLHQHAPSISIREQEVSSGVPPTKASQALMDEPFENVNGQTEELPSELPCSIKRPKFSVAELLEDLQGRSGSYVETASLSHQHTRAKHWKSKFLSSEKKTIAILGDRSIDSEDPLEHVIDGTSSEEEDATQNHLSLVNKDENQQTMADLFQEVFNPTNMDGAMKSMTSTGAGNYGRMQQIMQMEKYWHVEFLRQYSREHSYSGDLKGTTVQIMSRSLEGKLTVCSCMFQEKGNDATISNASADGTMDESRTRRTIIFSPKICNNVDLLVGNIIHIFPPWKEVKIQEEHVIICTYFSHHHRT

SEQ ID NO: 45433 - protein, 82 aa, Zea mays
  Clone ID: 700237118_FLI.pep
DFDFSQSRASHTDAKTSTKRSVRRYPLVENRWNATLGGSVGLSGSCIYKPRSPPESVLVVADSDSCMRVNLIFIIGYLIMSG

SEQ ID NO: 45434 - protein, 339 aa, Zea mays
  Clone ID: 700237247_FLI.pep
PTRKPVPHPDQISATYQSFVQLTALHCTARNGHHGDRGGQGCTGAGAAGQRQRQRRAEDAPLRGRPQEPAQERRPVPVHPGHERVPAGAGEHEGAARDHRQAPMEPDDHLRRRGPVPQHAHQAHRRQEDHGDRRLHRLLAPRHRARTPGGRHDLGHGHQPRELRARPSLHQQGRRGPQDRLPRGPRAPRPGRPRGGQGAARVVRLRLRGRRQGQLPQLPRAAPEAGEARRPHRLRQHAVERLRRAPRRRAHAQVHPLLPRLRPRPQQRARRRRPRRDLPAPRRRRRHALPPRQVKKRRRRKKNIIPCVPAAPAVWPPLLPPTAAPNPRSNHHIVDDAQH

SEQ ID NO: 45435 - protein, 148 aa, Zea mays
  Clone ID: 700237259_FLI.pep
LQTLGQSFIRHTSLVTLLVLVVHLGLGLVGITRRRGVSRLLVVVSVDLLGVLSLELLCLRHVGSLLGIRQGLPLVTTSLANQGDLLHIGVLLLVVLPELLHEDEERARRPLGLVWVLLSLGLPHREPGVAGGGPCPRLHLESLGPDRD

SEQ ID NO: 45436 - protein, 102 aa, Zea mays
  Clone ID: 700236232_FLI.pep
IIAISINKTSASKNLQDILSQKQLFPRQQHPSRHGAWLSILHLLSDEIYGACVVCRRHVMIIYKERLVDRRGVHAHENDDAISRTYGHSWTGPMQVVMESTD

SEQ ID NO: 45437 - protein, 479 aa, Zea mays
  Clone ID: 700244568_FLI.pep
PRRPPAPRQAKAKRANPAMEKAIDRQRVLLAHLLPSPSAASSQPQLAASACAAWDSAAYQRSSSFGDDVVVVAAYRTPICKAKRGGFKDTYPEDLLTVVLKAVLDNTRINPADIGDIVVGTVLGPGSQRANECRMAALFAGFPETVPVRTVNRQCSSGLQAVADVAAAIKAGYYDIGIGAGLESMSINSIAWEGQVNPKISAFQKAQDCLLPMGITSENVAHRYGVTRQEQDQAAAESHRRAAAATASGKFKDEIVPVPTKIVDPKTGEEKEVVISVDDGIRPGTTASGLAKLKPVFKKDGTTTAGNSSQVSDGAGAVLLMKRSVALKKGLPILGIFRSFAAVGVDPAVMGVGPAVAIPAAVKSAGLEIGDIDLFELNEAFASQFVYCCNKLGLDRSKVNVNGGAIALGHPLGATGARCVATLLNEMKRRGRDCRFGVVTMCIGSGMGAAAVFERGDAVDGLSNVRDMQAHNFLSKDAK

SEQ ID NO: 45438 - protein, 522 aa, Zea mays
  Clone ID: 700223691_FLI.pep
MKENSLKEEDEEEYQEKIEQQLAMQEEDDPEKIKEEARRRKEAIMAKYRQQQSQKEDMESKPSGNDEEVRAMDGNEAIHQKDDIDSSFMGNVEAENKHDSSEVFDGKTGFNVGRSPAHNYASTSTGAFTDERTIGVSGLGEGSPKSERSADMFCDDIFGESPTGIRKLGKDDGLHIERNALHDNWDDADGYYTYRFGELLDGRYEIIAAHGKGVFSTVVRAKDLKASKDDPEEVAIKIIRNNETMYKAGKQEVSILEKLASADREDKRHCVRFISSFMYRNHLCLVFESLNMNLREVLKKFGRNIGLKLTAVRAYSKQLFIALKHLKNCKVLHCDIKPDNMLVNEAKNVLKVCDFGNAMLAGMNEVTPYLVSRFYRAPEIVLGLAYDHPLDMWSVGCCLYELYTGKVLFPGPSNNAMLRLHMELKGPFPKKMLRKGAFTMQHFDQDLNFHATEEDPVTKTAVRRLILNIKPKDVGSLFPNFPGEDPKMLSSFKDLLDKIFTLDPEKRITVSQALSHPFITGK

SEQ ID NO: 45439 - protein, 265 aa, Zea mays
  Clone ID: 700223761_FLI.pep
MMGPDCYKVHFDDPDLGVDTVKDTDCMPVNWLHNRPDNMRRNYLSNDVYNILEMDHIPDLTPSENGNHAINGTTVFEELKSLRLTSDRQPKAESIIHSERPPYRSTSDGPTSSSGFSCPDNNAGHNGELESYVAAFFENSLSQARQMVDEAIQANSGGSDDEKVCMLNQVTGCLGSDSRGVQLPSDMISNCIATVISIKRLSDSRHPFGNVAGVLEHALSMLRPSCPQNLGVYTEIKRDLCTIANQIFALVPTASGNCSPPVSPM

SEQ ID NO: 45440 - protein, 603 aa, Zea mays
  Clone ID: 700223779_FLI.pep
RRREKRAGRAMSEQQQPLPQPRSSMREALEKEDKEKAAAAAAAKEKAAVPKNGNGNGGKNGGGAGSGNGGAPPQSGEETAREIQVVREAYRRETAAPAYVIPEEPPAVVELVGWYIYGFCSYFITHLLLPVLFPAIITQVAFPNSDFTPDPKYTLKGVTCSVHEMSMYQRLTKHSIVIDGSRMSPLGWSGLSWAIGILIVAPLLTQTAHHLDRGQYQSLILIAATSFGSFFCLLTGFFKTVWVFLFYILFIAGSIIVAEAVHTRNLGLMIRGLAAHDSGKHLVLRRRAAASQLSLYCTAIGGIGAALMAAFMYHMLRRTDQLTGLWVVSIFCGLIWFIGICHGLFTNRPSSSSPTTAFEPNFFTKLSYSMTLLRYPQAIGSLVAVFLSSFATMCIFTSGTLYAIGGVCIKPVLVLALWILYFLFPLISLPLLHPIQIIIRADAVRMQLLGFIICLFVSGAGFYFKSHRWRAAHIIVIALVQSTANGILYAFGRILLLDASPPGKEGAFSVWYAFVRVTGAMIGFAASSAGPGRAGGSFAAAFLGSFLGIIVLIFGNVSNIGALKAAGHLKGMDDEKRMGGLGMEKGEGMGSAVADSGESRGRV

SEQ ID NO: 45441 - protein, 347 aa, Zea mays
  Clone ID: 700223877_FLI.pep
AEGKCFLLVLDDLWVTRENQEERAILLNVLDAGQSGSRVLVTAQKKDVAAAIGAEEQIPIPDMEEKQYFSMFMHYALEGKRVGDGRFIAIGRKIAKKLGRSPIAAVTVAARLRSNSSIDFWETTANLDMLDETMGALWWSYQQIGVDVRRCFAYCSTFPRGYRLVRGELVHIWIVQGFINTRVNATEQPEDIGLHYINELRTFSFLQIERTVFGTETEAFTIHDLLHELAERVSGSECFRVVSNSSPKHIPQEVRHLFVGTGTDSRAAIAKKILGLVNLRTLIIVEEYSENKRKTFAAEDDEERSGRTLVNEEVLGRMFRSLRKLRALVVTTKQYHEPALLVPASID

SEQ ID NO: 45442 - protein, 488 aa, Zea mays
  Clone ID: 700257062_FLI.pep
ADFLVKPIRKNELRNLWQHVWRKQLANGGPNVQHIQREENLAERIQQKTGVTKADNLDRDVPCKNRECSEQESDAQSSCTRSELEAESKQTDNILEYKQSTQRHLSIPSHKNVELNGQTKIQRAKGNNLIPASEDDLSPKKRTCLNENNSERASRDMELVHIMENQQKYNTQWEVDTMRTTSRGNDEKGSIPAHQLELSLRRTDYGKLENHEKNDRRTLNHSTSSAFSLYNCRAVPTLGNAGDGQLCSTSETLVDVENKNGDSADPSQDMTETNRPPIRVVPVPVQGLTFDGQPFWNGTPVASLFYSQSTPPIWNSKTSMWQESTPQATSLPQKSPQNEPNEMGAKPVINAGEQFAMGPPSASGKQLHVEILNDDPRHISPMTGESGISTVLDSTRNTLSSSGCDSISNQITAPTESSNVYKDVPETPSAEGSRHLSQREAALNKFRLKRKDRCFEKKVRYQSRKLLAEQRPRVKGQFVRQDHSIQGS

SEQ ID NO: 45443 - protein, 417 aa, Zea mays
  Clone ID: 700257449_FLI.pep
VAARWFSSEMASAGVAPSGYKNSSSTSIGAEKLQDQMNELKIRDDKEVEATIINGKGTETGHIIVTTTGGKNGQPKQTVSYMAERIVGQGSFGIVFQAKCLETGETVAIKKVLQDKRYKNRELQTMRLLDHPNVVALKHCFFSTTEKDELYLNLVLEYVPETVHRVVKHHNKMNQRMPLIYVKLYMYQICRALAYIHGTIGVCHRDIKPQNLLVNPHTHQLKLCDFGSAKVLVKGEPNISYICSRYYRAPELIFGATEYTTAIDIWSAGCVLAELMLGQPLFPGESGVDQLVEIIKVLGTPTREEIKCMNPNYTEFKFPQIKAHPWHKVFHKRMPPEAVDLVSRLLQYSPNLRCTAVEALVHPFFDELRDPNTRLPNGRFLPPLFNFKPHELKGVPSDIVAKLIPEHAKKQCSYVGL

SEQ ID NO: 45444 - protein, 388 aa, Zea mays
  Clone ID: 700263930_FLI.pep
ASEKAIAPTTAKSETKPASSLPPVRPPAAGAPAPRVESKTELEKKDNPPPSAKVPEGTADNEFEKRIRPEVIPANEIGVSFDDIGALDDIKESLHELVMLPLRRPDLFKGGLLKPCRGILLFGPPGTGKTMLAKAIANEAQASFINVSMSTITSKWFGEDEKNVRALFTLAAKVSPTIIFVDEVDSMLGQRNRAGEHEAMRKIKNEFMTHWDGLLSRSDQRILVLAATNRPFDLDEAIIRRFERRIMVGLPSMESRELIMRRLLSKEKVDERLNFKELATMTEGYSGSDLKNLCTTAAYRPVRELIQKERKKELEKLKREKGETPSDLPKKEETITLRPLSMADLKEAKNQVAASFASEGVCMSELRQWNELYGEGGSRKKEQLTYFL

SEQ ID NO: 45445 - protein, 641 aa, Zea mays
  Clone ID: 700263953_FLI.pep
QLVCSEDGDQLAMRLISALMEYYIGPEGRGTVEEISTKLREGCPSYFNESDYKYYLAVECLERASMTNNADERDILARDAFNLLTKIPDSADLSAICKRFENLRFYEAVVRLPLQKAQALDSNADIINGQIDPRHHDTIMLQREQCYRIVMDALCTLKGVGHSRMQSADKSSALATAADPASRSKYIKQIIQLSVQWPDTVFHEHLYRTLIELGLENELLEYGGSDLVSFLQSAGRKHQEEVRAVSSVTPGAAKMHDLGAPISTSQTKYLELLARYYVRKGEHIAAARMLLILAERQCSNSEEAPALDKRYEYLRDAVLQAKSAGIAADLSKNPVDSSTVDLLEGKLVVLRFQIQIKEELELMVARLENIPSSSELPNVPFPRDNILANAETAKAAKDKAKELSLNLKSITQLYNDYAVPFDLWEVCLEMLSFANYSGDADSKIVREVWARLLDQALTKGGVAEACSVVKRVGSKLDPADGACLPLDIICLHLEKAAVDRLSSGEELVGDDDVARALLGACKGLPGPVLSVYDHLLSNGAIIPSLNLKLRLLRSVLAILREWGISVIAHRLGTTSAGASFFLDGTFSLNQTGTANQGARDKIISLANRYMTEVRRLNLPQNQTENVYRGFRELEEKLLSSY

SEQ ID NO: 45446 - protein, 564 aa, Zea mays
  Clone ID: 700263992_FLI.pep
TAVGAHQNPTLPLLSAANAMGSTAAASVLPVSAGSGENLVLILDYGSQYTHLITRRVRQLGVLSLCVSGTAPLASLEGLRPRAVILSGGPHSVHAPGAPAFPEGFLGFAAAAGAHVLGVCYGMQLLVQSLGGAVVSGERQEYGKMDVEVTAASSALYGQAETGKRQTVWMSHGDEVVRLPEGFEVVARSVQGAVAAIENRENRFYGLQYHPEVTHPAQGMETLRRFLFDVCGIKADWKMQDVLDEEIKTIQSTVGPDEHVICALSGGVDSTVAATLVHKAIGDRLHCVFVDNGLLRYKEGERVMTTFESDLHLPVTCVDASEQFLSKLKGVEDPEKKRKIIGREFIAVFDDFAHKLEQKIGKRPEYLVQGTLYPDVIESCPPPGSGRTHSHTIKSHHNVGGLPKDMKLKLIEPLKLLFKDEVRKLGGILNVPDSFLKRHPFPGPGLAVRVLGDVTQGNALEVLRQVDEIFVQSIKDAGLYDKIWQAFAVFLPVQTVGVQGDQRTHSNAVVLRAITSEDGMTADWYYFEHAFLVDVVNKICNNVRGINRVCQDITSKPPATVEWE

SEQ ID NO: 45447 - protein, 427 aa, Zea mays
  Clone ID: 700265676_FLI.pep
RTMKKYSDNLLHALEGVSSRLSQMEGRTHQLENSVDELKLTIGNYNGSTDGKLRNLENMLREVQAGVQILRDKQEIVETQLHLAKLQTNKTDGQSSENSGSGQAGLQQQPVVPPQAAIQPQQVLTPSQPPALPALPAPNAPPPPPTLQNQSSLQFPSHLQHSQVPSVPSVALAPTVPALPRDAYYAPSAQPTETMHQQYQAPPVPQPQAPPAPPQQYQSQTQFPQYAQPPQPANVNPSTPHVPHAPQQPEETMPYAPAQSYPPNATPPPYMQPPSGPAPPYYGQQNPSMYEPPAGRANPGPPSSYGSAGYGPQGGGSFSESYGYTGSPSHRGNAGMKQSSPFAQSSGGSGSYGNGKLPTAQMLPQAVPISSSSTSGSSGNRVPLDDVVEKVATMGFSREQVRATVRRLTENGQNVDLNVVLDKLMNG

SEQ ID NO: 45448 - protein, 732 aa, Zea mays
  Clone ID: 700237832_FLI.pep
TALDVELASSGIFNALSDGLRDKHDKLRRFCMATLGELLFYISTQSDQDTKEINTQEYPLKDNRSATSWQVPSAVIALVSSILRKGEDDLAQLYALRTVDNICSQGTEWTSRFASQDAIGHLCYIYKATGKQESTRLIAGSCLARLSRFSPSCIHLILEKISFKDIACTLIKGNTREQQISLNILNSALVNSHTVTSMNRHILSLSDDKQLVPGLISLIEQGTDVLRGKTLLFVALLCKNSRRWLPHFFCNAKLISAVDRLGKEKEGFIHHCTEAFVQLVASLVPGILDTVSSDIQQVMVGKRHGPVTALAGRAHPKSTIHLFPVILHLLGSASFKHRVVTGHVLLQLANLIKILEAPFQARDDFQMTLLRVLEAATEEPSVILNEHSVFMSRIIPSLSVLYKGNKDGDARFLCLKILADVMIVIFSDSSLTSDEQTITDLKSISQRHFLPLYPSFAEDEDPIPIYAQKLLVMLMEHGCVEVSDILHKATVSQCFEFLLGDLSNANVSNVKLCFALASAPEMDTYILSQLQVVRRIGNLLEFVAAKDMDDFLEPTLELCRAFIIRGTGSNRSVALSKNPALLLDSAFSMSIAVDQQTCVMDICDFGGNMGIFLELVGNSDPQISDLASDCVVLLLKAAPREATVGLLTSLPKLSSVMDLLKHDSHLRLIRLLYGLAFSCRQYLAQGMILSISVPALMRVEALVSVFKGSNDSLLADAASYLSAELQRLPRCG

SEQ ID NO: 45449 - protein, 218 aa, Zea mays
  Clone ID: 700242618_FLI.pep
RLELRRAVSISCPALMAVAEVAIEILPQQQQQQPPPPPREPAVVPPNLSVPRVLQYLYLLSAWVACAGVAAGTVARRALGDSSPLVYGFLKVSIGALVFPALLILVFALRVLRAMLAVGFRRSLRTHAREIQIQATKIFRALTWKVLQDPIVLAWLASLLFILLLAASVLVFVGLLPMEESRRERIGYALSDVGVLGAMAMYCLIIIPSFALKIWRSK

SEQ ID NO: 45450 - protein, 672 aa, Zea mays
  Clone ID: 700242766_FLI.pep
LDLSWNQLKGSIPTNRLSSNITTIDLSHNFLQGTVPSNFSGLPNIQYLSVNGNLLNGSVPPTIWSNITFTGNRALVLDFQNNSLDTIPPVFEPPQNVTVLLYGNPVCTASNAARAANLCQPTSVTDAPSGEGKQVSTTCFPCPTNFEYNPSSPIPCFCAAPLGVGFRLKSPGISDFRPYKEAFENDLTSLLELRVYQLYIERYIWEAGPRLNTHLKLFPNNTNLFDMAEVVRLREVLAGWQITLLDVFGPYELLNFTLGFYADEFRTAASPGLKGGALAGILVGTIVAAIAVSVFSTVFIMKRRRKQRTISRRSLLSRFSVKVDGVKCFTFDEMAVATRDFDISAQVGQGGYGKVYRGNLADGTTVAIKRAHEDSLQGSKEFCTEIELLSRLHHRNLVSLVGYCDEEDEQMLVYEFMPNGTLRDHLSAKTERPLSFGQRVHIALGAAKGLLYLHTEANPPIFHRDVKASNILLDSKFVAKVADFGLSRLAPVPDIEGTLPAHISTVVKGTPGYLDPEYFLTHKLTERSDVYSLGVVFLELLTGMKPIQHGKNIVREVNIAYQSGDVSGIIDSRMSSYPPECVKRFLSLAIRCCRDDTEERPYMADIVRELETIRSMLPEGEDVLSSTSGSGLLAKSMSSSSTTTTGALYVSSHISGSGQADSGIPSGMVAPR

SEQ ID NO: 45451 - protein, 202 aa, Zea mays
  Clone ID: 700244149_FLI.pep
FWIWFSHLSLWENDQNVFMGSSKDNFHGMSKTGEQFLAGVYHHLPSILAFTAPHPNSYDRIQPDTWSGAYLCWGKENREAPLRTACPPGVPLDLVSNFEIKSFDGCANPHLGLAAIVAAGIDGLRRHLKLPEPIESNPSDHSSKLKRLPQNLQESVESLSADKVLHELIGDKLVTTAIAIRKAEINHFAKNPGALKDLIDRY

SEQ ID NO: 45452 - protein, 392 aa, Zea mays
  Clone ID: 700222806_FLI.pep
DERKKVLVKNSRHDSESDTDSGYGKKKMEHAKNERDERRKVPVKSSRYDSESDTDSGYGKKKIEQTKNVRDERRKVPLKSSHHDSESDADIDYRKKKIEHTEGIRDERKKIPARSSRHDSDSGADNNGKNKRPVQSSCHDLEDEKPRLRNYNYGSRASEHEKHSKYKESFRHDSDSDGYSRGKERQLNVAVLKKDVQEKRKVATSSDSSDYSSSLSSSDNDTSADSYEEQKRSQAGGRRNELNTQRQKEEERKELEKQQKREVEKKELDKQKQREEERMEMEKEKKRQREREEERQREREQYERKGGNDVERDNKRKLIDDRYDPNSSRDREEGYRDSQNRDDNRRQEEHGQHNRYMDSHDSKRSRHDSHYHSRRDYEQRYSRDEHRDRRRH

SEQ ID NO: 45453 - protein, 436 aa, Zea mays
  Clone ID: 700267251_FLI.pep
ARRCFSSPHEAPHKMPRLTPAHATLILDHVLGDPSIPTAVTIALIAGIPSPSDPTPRLRRGVLLRRLATDPVSESSLETLHLLASLPACASPIAAAHIAVAAFLAASAPDFDAVARALFARPDGRARQAVHGGSSPALASDDAIATVDQFEAAVGMSSSQTILRVLWGNRAAVEERVQELLAAEWAAIGPSRLEALAMRIVGDGAVDTWGAADEAMRANLRILAGEAKTREILDKLEKTTCNTNPISTPAVEKVMDALKASCADLHSIVEDPLPAAKAVADELLTARMEKLVSLNAQEVGGQPTTCGVAGPSIHNDKDNGPGIGKPHSLMERNATARTSQWEESLGLDGSEPPSPPRPHLPSPRRLPPSPLSPPGNKNNNRRKARRWSLFEEETLRKGVEEYGVGNWRDILDNNAEAFTGRTPVDLKDKWRNMLFR

SEQ ID NO: 45454 - protein, 137 aa, Zea mays
  Clone ID: 700244507_FLI.pep
TANSWGEMREKKTSSFRLFFCFVSWPPPSWKLARKRPVCAQSWRVPNDWSPTLLLRGPATLALVGGRWKRTVVPSLIRASTINGPGIPSGPGSADRPLPTSSPPGDLRLEYAAQVACRPPRRHGSPRAPASRILWRS

SEQ ID NO: 45455 - protein, 434 aa, Zea mays
  Clone ID: 700224574_FLI.pep
KGNQLFTSAPCKCSSLHDLHLLRSTYICCTCTHEAIKSNNLTPPGPCIIVSGEAPEHDLRAVLRLQHAVCKRRVRVGRRELEREALQDHGEPHLGLEQREALADAGARAPAEGEEGRRVPGRPGDALGEPLRPELARVGTPHVLVVVDAQQRQHQHHAGRVPDAAELHRLVRLALERRQRRVQAQHLVEHHRHDSEAAEAVVVRRRPVTEDVEHLLPGPVLPLRVHGEHDHGPREQHRRGLHPGEVEQLALPDDVVGGDAGGLGLAAVTPAVLHVGLQEQAKEVVARRAAAGSQRVLSLGDDALEELLDLRRDPLHPSVGFRGQVQVSRDVKLVHGLDDELDLLPLELEDPPAFEVAAAERGARDDVPRQVLHLRPHVHLARLLPIRDQAFPPLHQVRAARGEGRQHPLWKQKTERIKTTVNPGSWHMHVHGLC

SEQ ID NO: 45456 - protein, 1106 aa, Zea mays
  Clone ID: 700224830_FLI.pep
LIPSMESLPNGSVNNAEHNQENKKSMDASVPEEVQDVFIYREDVVSLKSKEDVRGLVLEVAGEYDSEGSITDDDIDTEEHEDKTVRGAENGAADGDNASNGAEVESQSSLPDNKVRVLWLDDSEKTEDIDEVVVVDRSFLHGDLVASASDPTGQMGLVLDVNLVVDLQGVNGDMIKGVSSKDLRRIREFNVGDYVVSGLWLGRVDEVLDSVNVLFDDGSVCKVNRADPMCLKPVFGPMHPDTDCPFYPGQRVKAVSSSVFKTSRWLNGLWRASRLEGTVTKVESVSVIVYWIASAHFASDQQPVPPEKQNPKDLTLLSCFSYANWQLTDWCLPHRYTLCTNDTVINSDKHTGQICTCPESSVPLSDIPESQADVQTEQDQMTDTDAGHRQIDVDSTADGLSMSDGDNSCIAKESETSVSSILKEPQDNATSRKKLRKVSLKKHKRTKKRDDSFERALLIANTCTKVDVIWQDGTKECGVAATSLIPIHNPNDHEFFPEQYVVDKVTNDVDDSSEPRRVGLVRSVSAKDRTVTVSWFKPSLHPEETKNIVCNEIVSAYELDGHPDYDYCYGDIVVRLPPVSPVIESTNNKDQMELDRTVDASEGFAASNDAPSNTSASEQLLQKESCSQFTSLSWAGNIVGFQDGEIEVIWGDGSISKVGPHEIYVVGREDDDASLDDGTASDGASWETVDDNEMDVLDDSAKDDSQSIPENSIEREDGSFSSQNGSSVATGPLSVAFGFVTRLASDLFARGRRHLDRSSNSDAMDEVESHQSNEVSETSDDIDKINENNVESPEDAAVIENDSSVEKSVDVVMADNLVDLECFKHFDILQCPPDHHYLENIAQGTGGRKWVKKVQQEWSILEKNLPDYIYVRVFEDRMDLLRAVIVGASGTPYQDGLFFFDFYLPPEYPQVPPSAYYHSGGLRVNPNLYVDGKVCLSLLNTWTGRGNEVWDPSSSSILQVLVSLQGLVLNEKPYFNEAGYEKQVGTVEGEKNAVPYNENTYLLSVKSMLYILRRPPLHFEDFVKSHFRKRGHYILKACEAYLQGNVVGTLTDDACTTNRSTEHSSSVGFKLALAKILPRLITALKEHGADCDQYEHLGKTDPVRES

SEQ ID NO: 45457 - protein, 53 aa, Zea mays
  Clone ID: 700256837_FLI.pep
VNRLPILITKEYLVRSPQEALSSTYSSPNYQLILVSRLLPVIAKIFPDPLMGA

SEQ ID NO: 45458 - protein, 340 aa, Zea mays
  Clone ID: 700259555_FLI.pep
VDEINLLDDGISNLLLNVLTEGVNIVEREGISFRHPCKPLLIATYNPEEGSVREHLLDRIAINLSADLPMSFDDRVEAVDIATRFQESSKEVFKLVEEKTETAKTQIIFAREYLKDVTISTEQLKYLVMEAIRGGCQGHRAELYAARVAKCLAAMEGREKVFVDDLKKAVELVILPRSILSDNPQDQQQEQPPPPPPPPPPENQDSSEDQDEEDEDQEDDEEENEQQDQQIPEEFIFDAEGGLVDDKLLFFAQQAQRRRGKAGRAKNVIFSEDRGRYIKPMLPKGPVRRLAVDATLRAAAPYQKLRREKERDKTRKVFVEKTDMRAKRMARKAGHICCGR

SEQ ID NO: 45459 - protein, 530 aa, Zea mays
  Clone ID: 700263306_FLI.pep
CGDLSGTRCASAMQFSSVLPLEGKACMSPVRRGSGGYGSERMRINCCSIRRNKALRRMCFSARGAVSSTQCVLTSDAGPDTLVVRTSFRRNYADPNEVAAVILGGGTGTQLFPLTSTRATPAVPIGGCYRLIDIPMSNCFNSGINKIFVMTQFNSASLNRHIHRTYLGGGINFTDGSVEVLAATQMPGEAAGWFQGTADAVRKFIWVLEDYYKHKAIEHILILSGDQLYRMDYMELVQKHVDDNADITLSCAPVGESRASDYGLVKFDSSGRVIQFSEKPKGAALEEMKVDTSFLNFAIDSPAEYPYIASMGVYVFKRDVLLDLLKSRYAELHDFGSEILPKALHEHNVQAYVFTDYWEDIGTIRSFFDANMALCEQPPKFEFYDPKTPFFTSPRYLPPTKSDKCRIKDAIISHGCFLRECAIEHSIVGVRSRLNSGCELKNTMMMGADLYETEDEISRLLAEGKVPIGVGENTKISNCIIDMNARVGRNVSITNKEGVQEADRPDEGYYIRSGIVVVLKNATIKDGTVI

SEQ ID NO: 45460 - protein, 577 aa, Zea mays
  Clone ID: 700263310_FLI.pep
YVGILSIMRGYEYETNGYQQEVEDEYGDEYYDQDEYEEEGSGAGDGYAEEEEPTEGQKEILELRERLKEQIRRKAKAAAACTAGRSSSSQIPQARDKFGSFFGPSKPVISRRVIEERKSLKELHNTVAREPRPSGVHKDIPSSSKVQSRVNGHQHKQKIVNQVKKKAEALKDNRDYSFLLSDDADLSSSPKEKPAARSSLTRRADRELTQSTVKRKASTSQPARLSNGYGPKNTMSTQRHAEGKVNSMRREDFSNTERVVSRDNERMYERVVSRDNERMHSIARNGSNQASTSKTTIQKHPSRGPIANKQPSKDSNDATLRKSSVASKHHPLEIDRPKSSQSQRMQSAGQRPQHSSHGQTPHQSMQHRTQQSLQSRRPQQMTQGQKPQQSLQSQRTQQSLQNRRPQQSSHIQKSQSSQAHRPQSLSNRSQALQGQRPLSSQGQYSEQRRVHASDRVKQAERQIRPPSKSMPSRPVSSNGIRDDHAKRKQVAKRRFDEDEDDEDPLAMIRNMFGYDPSRYAGRDEDVSDMEADFATIEMEEKRSARIARQEDEEQLRLIEEEERREQERKRRKMARGR

SEQ ID NO: 45461 - protein, 200 aa, Zea mays
  Clone ID: 700265460_FLI.pep
WRVARRYRQVSLLSDPTLIGFVDWTWIDDFSGSNVSGCGTIRTSRSLHTNWIRPVLILIADLACVLFGVSRPDFRSRRKGPALVTEILVEGLRFSYGSFIVFRLMSSYWCEDRNRTYYKLVCTSLEMLLAGSAGATEFWKLIEVLTGPVYQEKIVGIYIPKLLLYWFVFSFCALQFFVSYIGAGGFLQQDYMDGWGWRRV

SEQ ID NO: 45462 - protein, 176 aa, Zea mays
  Clone ID: 700267388_FLI.pep
KRRRKGGQKRFDGYSATLTNSYSTRDKLLSSFTVKLAGSVASIRPHLSTASLIDPLNMSILALRKITVASGFSKSTWSLRAVNTMTPVSSPTRHSAMRGARDEAAAGAPGRARPGTGVALTTLTVRVCPLVPGLSWSTLVKTGFRSAGLSLPPCAAAVAIAGSGVGWRTRGAVRKP

SEQ ID NO: 45463 - protein, 522 aa, Zea mays
  Clone ID: 700267479_FLI.pep
KIENFKVGDWIRVKVTVPSPKYGWEDVTRNSIGIIHSLQDDGDVGVAFCFRSKLFLCSVADIEKAQPFEVGEKVHVSPSISEPRLGWLNETAATIGAISRIDMDGTLNIKVSGRKSLWKVAPGDAERLSAFEVGDWVRPKPSIGSRPTYDWNSVGRINIAVVHSIQDSGYLELAGCFRHGKWLTHNTDIEKVQTVKIGQHVRFRAGISEPRWGWRDANPDSRGIIAGVHADGEVRVAFFGVPGLWRGDPADLEIENIFEVGEWVRLRNDVEQWRSLKPGSIGVVHGVGYQGDAWDGTIHVAFCGEQERWIGPSSQLEGVSKFVVGQRVRIRGCIRQPRFGWSNHSHSSIGTISSIDADGKLRIHTPAGARAWLTDPAEVEKVEDEEEVCIGDWVKVKDSVGTPVYQWGDVNHSSIGVVHRADDGELWIAFCFCERLWLCKAWEVEKVRPFRQGDKVRIRSGLVSPRWGWGMETYASKGEVVGVDANGKLRIKFRWRDRLWIGDPADVVLDDAHLLTEASNGF

SEQ ID NO: 45464 - protein, 470 aa, Zea mays
  Clone ID: 700235221_FLI.pep
VWLTLRSKKRVRRRASANIPITQIPAISKEIKEVRVEQVPASDFVAHDGVLLTFQDKTSDRDSDKVMAHLGVSKSKRGDESHSGSFRYMDKDAGFQSAEEGGSGTFRQASANAIVAPSPLVGLPEFSYLGWGHWFTLRDLELATNRFSKDNIIGEGGYGVVYRGQLINGSPVAVKKLLNNLGQAEKEFRVEVEAIGHVRHKNLVRLLGYCVEGTQRMLVYEYVNNGNLEQWLHGAMSQHGSLTWEARIKILLGTAKALAYLHEAIEPKVVHRDIKSSNILIDDEFESKVSDFGLAKLLGAGKSHVTTRVMGTFGYVAPEYANTGLLNEKSDIYSFGVVLLEAITGRNPVDYGRPPNEVNLVDWLKMMVASRRSEEVVDPTIETRPSTRALKRALLTALRCVDPDSEKRPKMGQVVRMLESDDPIPRGDRRSKHHRGGSTEMDSQKDNNSDTEKSDNADSKPSRTRASSSK

SEQ ID NO: 45465 - protein, 579 aa, Zea mays
  Clone ID: 700237018_FLI.pep
RYFKELVNRSMIQPIENINDWFVEEFRIHDIVFDLICKLSKDEDFISLSGQHSSQDSLRREKKTGVPRSDCKLRRLVVRNQRVQRFPEETMDMPEVLRSLSIIGCTIAVMAPIDSFRVCRVLSIENNYVPISLKHKHLGKLLHLKFLEIFNTPIDELPKEIGHLRFLQTLILVRTGLDELPLAVCSLTRLMCLIAYGFERLPAEMMGNLTSLEELRLNSVVGRSATQALVAAELGKLRRLRVVSITFLEQLEESLQEAFVQSLSNLRGLQELMLSCKMPERGSDMWGDWEPPRQLRCLIIGAIIFSRQPRWINRSCLPRLCSLCLMVHALEAHDLDNLARLPELQYLTLYGISWPPRYTVGPDDFRNLRFCDVGTTFEFRKGAMPRLEVLRFGVYAGYCSWEQYGVPFEQFPTKDVIEDLDLDLDNVLLLQQVRVKVDCSGATAAQVEEVEAVVMRAVENHANRPTIKMNRVCEKNILSDEEREALLRRHIEKDCCVRTMKDKSDAFFISQLRRYRHLQKAIIFIDCSGASKCEVQKVEAAYRHAAEDHPNHPSIELIRTNTDGMASSSSDHPNTEPRN

SEQ ID NO: 45466 - protein, 888 aa, Zea mays
  Clone ID: 700238706_FLI.pep
ELGKMITSLDPGDSIVIAKSFSHMLNLANLAEEVQIAYRRRIKLKKGDFADENSAITESDIEETLKRLVVDLKKSPAEVFDALKSQTVDLVLTAHPTQSVRRSLLQKHSRIRNCLVQLYSKDITPDDKQELDEALQREIQAAFRTDEIRRTQPTPQDEMRAGMSYFHETIWKGVPKFLRRVDTALKNIGINERVPYNAPLIQFSSWMGGDRDGNPRVTPEVTRDVCLLARMMASNLYCSQIEDLMFELSMWRCSDELRMRADVLHLSTKKDAKHYIEFWKKVPPNEPYRVILSDVRDKLYNTRERSRELLSSGHSDIPEEATLTNVEQLLEPLELCYRSLCACGDSVIADGTLLDFLRQVSTFGLSLVRLDIRQESDRHTDVLDAITTYLGIGSYREWTEERRQEWLLSELNGKRPLFGSDLPKTEEISDVLDTFHVIAELPSDNFGAYIISMATAPSDVLAVELLQRECHVKTPLRVVPLFEKLADLEAAPAALARLFSIDWYRQRINGKQEVMIGYSDSGKDAGRLSAAWQLYKAQEELIKVAKDFGVKLTMFHGRGGTVGRGGGPTHLAILSQPPDTIHGSLRVTVQGEVIEQSFGEEHLCFRTLQRFTAATLEHGMHPPNAPKPEWRALLDEMAVVATEEYRSIVFKEPRFVEYFRLATPETEYGRMNIGSRPSKRKPSGGIDSLRAIPWIFAWTQTRFHLPVWLGFGAAFKNVLQKDIRNLHMLQEMYNEWPFFRVTIDLVEMVFAKGNPGIAALYDKLLVSEELHPLGEKLRANYEETQKLLLQVAGHRDLLEGDLYLKQRLRLRDAYITTLNVCQAYTLKRIRDPDYHVALRPHLSKEIMDSTKAAAELVKLNPGSEYAPGLEDTLILTMKGIAAGLQNTG

SEQ ID NO: 45467 - protein, 370 aa, Zea mays
  Clone ID: 700238717_FLI.pep
LRGRGRERPLRRDPLRERGRVPPLGARRGQAGSVMARHLAGGPALGHLPGPGPRRRGAQVAGAEPEPGPVRVPRALRGALLPELRAPGGHQRLDGGDAPRRVPDPLPPRARHPERRGRGAVRAGPPARARVPGGGRGAQGRRPRAGRVGPAGQGQGPPAAVRGLLQAGAAPPERVPPHRREGALGEPVHGPGPQRQGARRRAAGEAEGVLQRAGRVRGPDAAAPGAGPDADGGDAVREAGGGDAVPEHQGQHRGGRGVRVHVRAQRGVAAGEPGGRGGGGRPARRAARARVPGVRQVHVRGHQDGARVREALPLRQERHLLRVPSRVRLSSSCMHVRFANNYTSAVRCFFRRVFTLNYQAYRYLTWSPFL

SEQ ID NO: 45468 - protein, 203 aa, Zea mays
  Clone ID: 700240437_FLI.pep
PSSCSASPSPTTTGPRRATTSASSSCTPSPSSSPTSGPTAPPSSCPPRSSRRACAPPATASPPPRGRPGPSSARSASCTRRRTRTRARRTPATPRASACATRSSSSPPATCSASSSRSSCRSPRANRSRRCPVRLKTQRRSPSAPVRCGRRRPRWCRESIDRRVFLPALHMVGYHVLNCFFSTLSQTWLCFDVHKSFAYVVRV

SEQ ID NO: 45469 - protein, 521 aa, Zea mays
  Clone ID: 700240826_FLI.pep
STMDTSNAFAVVTLLLLPLLLALAQLVRRGSPQYPPGPMALPVIGHLHLHLFERPLHRTLACLAARHGTVFQLWFGSRRVIVVSSADAAKECLATLDVAFANRPRLPSGRILSYDWTTMGTSNYGPYWRRVRRITVTHILSVHWVQQFADVHERETRAMVRGLYRPTARNGVRRARVELKSRLFELLMNAMMGMVCAKRYYGCDGKENETEAEVSEEARWFREMVEETMELSGASTVWDFLPAWARWLDVGGVGRRLWRLRESRTKFLQGLIEEQRKEMENGPQPQARKTMIGVLLTLQNEDPDACPDNLIRTMCISSLEAGTSTSADAVEWAMSLLLNNPGALAKAQEEIDACVGQPARLIEAADLPKLQYLWCIIMETLRLYPPTPLLLPHESANDCTVSGFHVPMGTMLLVNTFAIHRDPEIWDRPGSFMPERFLGENSEGKMFNPFGMGRRRCPGENLGTQMVGLALGTMIQCFNWERVGDDLVDMTEGAGLTIPKKVPLEAFYEPRASMANLLSKI

SEQ ID NO: 45470 - protein, 85 aa, Zea mays
  Clone ID: 700242195_FLI.pep
NANSFAYCLMVVTATTGPKKKTKNCSYIYIFFHMFDTKLASFPCLFPWYHQIKSKTRNEQILHQTCKGWITYLEYTGFRTERIGS

SEQ ID NO: 45471 - protein, 128 aa, Zea mays
  Clone ID: 700243723_FLI.pep
ASPRRLPPCYAPNRRAEVRPGRARSFSRQTHPRPTELHASAQGHCPSYAPRSCPVPWPLRWFCSVMVFLVSGSTTSTSTKGRIYHKTYGCQMNISDMEIVLSIMKNEVIRVCHLYMTFGCKWIMIIVE

SEQ ID NO: 45472 - protein, 689 aa, Zea mays
  Clone ID: 700222492_FLI.pep
EATNSDMTKFSAIQKQIGLLLKEVHRREDQLQEEEHRIVEAQTEIFILQRCLGDMAEANADVLAQLQKQQVVCKDQEEKVDFLSQNNQQLTEGIGSVVEVLNLDEKYESLDLMKIDVVVQLLLHEIKCLLNTISDAQDVKQNQILEKSLVVTLLEHFGREVADLRSERSVLKQEWQAKSEELQQLQSEKHDLLKISCELRKEMEARNRKVDELKSEAKFLVRQLSELQESRQSLQAEIVKLIAENSSLSSKVYRSREKETSFDEDFSTLVDEAIRTDILGVIFRSLYEERTSQLQRLHEDFGSLHAAGNELYQEIKLMNKKLGDLQLENNYLEKELSRTLSICDGSGTEISSGRRRAMRRDTKLLKSGRKSQEGGQNMEQRKEVDNAGLEKSNEMLRVELQKLKNELQVLKSKEQPVIDVKSCDAEITKLLASMQLATANASLFKEKVLELIVTCESFEISDMVQKEVLKEEITRRNSYVDELKDKLNAIEIENRRLKVDLNGDFTLLGALQTEVDALEKQTLSLAKDCLPPSMLKKEENPLSPQLSKIAVRPSEDQNTTKVVKDMELQKLHGTIKALQKVVSDTGVVLEQERLDFNSNLQDARKQIEMLKLKEILDSDASDVNYERMMKDIQLDLVHTPSRRAAASSHGRHRKKNSVAATAQSDDNKMLALWSVDRVSSGSRRHDMDL

SEQ ID NO: 45473 - protein, 210 aa, Zea mays
  Clone ID: 700222803_FLI.pep
EGQKLLEDLPVQAMLETLTKRYEKELIHPIQNLFSGELARAMLIQIQKLKLDLESGLLEMDQILRANAINFAVLAALPAFGLSLLLLVLLRAWVQRDHGAEGRGNIARCQRRLLLVDVERRLMEFQHYRDNGMEEEARCKFGLVLYTLDRLCKAVESHAKETGEWLSLRQDIFDLSKLDMGMPDKMIVVSRLKWMYNCLLPFSSSRLPRL

SEQ ID NO: 45474 - protein, 321 aa, Zea mays
  Clone ID: 700257696_FLI.pep
QIEAVALAEERPWPLRSWPEAAGLFPWGEGMDPSLKEEVMKAVEEARSAAAPRCRVVRIIVHDEDATDSSSSDDEGEEAGERAAAHPAAAPAGSVKRSRVLLQSAGCGAEEDGEGARFTGVRRRPWGRWAAEIRDPLLRRRVWLGTFDTAEEAAAAYVAARLRIRGPSNSLPPPEHRPALPPRPPPPPQQREKKLPLPPPPPPLLPLPPKKQQYPPPPLLPPKKQLYPPPLPLLPPKKQQQHHHHPSPPLPTLPPKKRLPSPPLLRESKKQCVASSPAEPRFMPLPVWALMSGSGKRKKRSGCGGRVPALHTPAAEETGRA

SEQ ID NO: 45475 - protein, 314 aa, Zea mays
  Clone ID: 700261834_FLI.pep
NQSPLLSLSLSLQCFPPIAPEAAQLLQIFSRLKFWCPCSAMGSRRYDIDTRRCGIHSRPTKSMYLDAQQIVSCQTRVGDHDVGSCAVKHHFPSPIVSWIEDLSSFGNASFNPVSEYVDEQARASVGQSSASSNLHDMQISVRLTAEFMELAKENTSNNLETCGILGASFRDGTYFVTMLIIPKQEGTAHSCQAVSEEEIHAVLSEQSLYPAGWIHTHPSQTCFLSSIDLHTQYSYQVMLPEAVAIVVAPTDPTRSYGIFRLTEPGGMDVLRECDESGFHTHRETTNGSPIYETCSKVHFNPNLRFEIVDLRSAQ

SEQ ID NO: 45476 - protein, 391 aa, Zea mays
  Clone ID: 700264585_FLI.pep
FDSPPDRFARLERDTPSPDGRVSPERFARLERDTPPPDEGISRPGESSHVHSETMEMEPEYRANDDTPPPDGRMSPPVESSHVHSKKMEAQYRAKDVGELARFESPQVRHRSRSSEKHDPSRKRTSSGELSPHARQNSPVERKRRRESRHGDGSPRQKSASPRRRSTPPRRRSISPRRSSHKRRESPRRGDSPRRRHSPRRRESPRKRDSPRRRDSPRRRDSPKRRRDSPRRRDRSKSRSPSRKHDTSRHKKEHDRSRSRSPHSRDHHRRSPRRHSPRRRSPPASHRHHSPRRHWSPPANRKTGLGKPGKNLFIAGFSYATTERDLEKKFCKFGRVTSARVVRDKRTGDSRGFGFLSLDKDEDADAAIRACDETEWNGRIILVEKSKAPAW

SEQ ID NO: 45477 - protein, 115 aa, Zea mays
  Clone ID: LIB3115-005-A2_FLI.pep
SATRRRNKKKVTVVSFLDREFYQQQSPPPPQAAADRYNYKVKLTTHLAITCEVCVHVLLEVSREEVADLLHDLVVVVRVGQQVETHGGLLTVHDLHMVAVLLEALGVRQLPIAGE

SEQ ID NO: 45478 - protein, 271 aa, Zea mays
  Clone ID: LIB3115-002-C7_FLI.pep
KMSTNLGGASCFGFGLTQLQPAAVRLRLPPARAADTSSSQSPARLTAVLEQVDQLLSQGNDMAALSLVRSTQGGDGGLRAFGAARQVYFGGGVRNLVLDTIGHYLSQKYHNRVIQHEAGHFLIAYLLGVLPKGYTITSLDTLMNQGSLNVQAGAAFVDYEFLEEINTGKLSATMVNKFSCIALAGVAAEYLLYGRAEGGLADINKLDGLLKGLGFTQKKADSQVRWAVLNTVLILRRHEKARSQLAEAMSTGKSVGSCIQVIEECISTDDI

SEQ ID NO: 45479 - protein, 63 aa, Zea mays
  Clone ID: LIB3088-030-H4_FLI.pep
TNCRDCQIQHPSYVSHLSTVCAQEGFKCKNHMSLEQISLQSDKTKTCRWSKSVYRVIKPRQAS

SEQ ID NO: 45480 - protein, 617 aa, Zea mays
  Clone ID: 700342623_FLI.pep
PRPPLRLHILGSGFTSPVLDWLVARGDGRRAVVVSIGDPRLRPCAMASTSVPELTADKKCDKAIADTAAPLTSQGHSEEPTGKVSTLVPALPVVIAAGDGAASSGVIENRNGMDNSADGSLKRDDSEGAEKSSLRGSVKDSSVSAKCSDRASSLSKASGSAKISGQPADMIESGKSSLYRASGGSDLSDESTCSSICSSVSKPHKSNDSKWEAIQVVRTKEGSVGLGHFRLLKRLGCGDIGSVYLSELSGTKCYFAMKIMDKASLATRKKLLRAQTEREILQCLDHPFLPTLYTHFETDKFSCLVMEFCPGGDLHTLRQKQPGKYFPEQAAKFYVAEVLLALEYLHMLGIIYRDLKPENVLVREDGHIMLSDFDLSLRCAVSPTLLRSSNPSGDNQKGNPAYCVQPVCIEPACMQPSCVTTTTCFSPRFFSSKSKEKKDKKAKADLANQVRPLPELVAEPTDARSMSFVGTHEYLAPEIIKGEGHGSAVDWWTFGIFLYELLFGKTPFKGSGNRATLFNVVGQPLRFPESPVVSFAARDLIRGLLIKEPQHRLAYKRGATEIKQHPFFEGVNWALIRCATPPDIPKPVEIPRSVASSSQKATSAAEKGSDYLELEFF

SEQ ID NO: 45481 - protein, 543 aa, Zea mays
  Clone ID: 700349505_FLI.pep
TRASEPTPVGTRMDGNAETIQFSWGKRRGKGGAKMDTQFFGSFTLDNVKYSLFDCVYLFKHGDPEPYIGKIVKIWEKDNDKKVKILWFFHPDEVQNYLSGPVMGKEIFLACGEGAGLADINPLEAVAGKCTVICTSKDKRNRQPSPQELQIADYIFYRVFDVKSLTLSDQLPDKIAAFTVDLLLNPKDELVIPANVLVNPNVDEGMVATVPTPPSAVKLEDRSQAAALPLTQTGQVDENLPATVPLPQSEVKEEQKPVIAIPISQTVVKKEDKKSLSDIPLSHSAVKEDETPVASIGPPQSAVMENIPKHTQLQDAHAGERPPKKLKLSQETTEQDIDPTNTEQRPLELQPKNIDRSKWFNIEWNDRLKMADDKGTLVYIQNLDIRFGPADIEELVRKALQLNCTAKPINHPTYDDPNNGKAYAIFRTKDAADAAISKINSGLVVGGRPLYCSKGLLEVPKPSANLVGHLSSYVKIGQKQRDEQKKAVATSHCSQPNTIEYDLALDWMLLREKQDQSFRVLHKKHREARKGFASLVGKGSKAE

SEQ ID NO: 45482 - protein, 568 aa, Zea mays
  Clone ID: 700351468_FLI.pep
LSSTKKPFFSIKFRFSPLSLRRRRTHPPRRPPSSSSPTHLAGTLAPTACRAHRRRSHCCAPMATRASKNCLCAGSSSFDDPDVVEVSPATAAAAGWASGHHKRKRSQVVPQEVIEIDDDDPDGVILIGDKAQVEKNKQTAVCPMDCSKHAKSGWVQDIPGPSTYASKYTSSWVDLKVFQDEAVYNYSDGYPFDGFEEDYAYDEDEFEDDGYDTPLIESEYQFGLSAKFDNFNVLHGLEASLPWKQKTAIEIANKTKPSKAVDDKIEEKYKAFKRFDTVDDHSDHYYSKPESRKVQAVKKPSKDWVKRIQHEWKVLEKDLPDTIFVRAYEDRMDLLRAVIMGPAGTPYHDGLFFFDIYFPPQYPNVPPMVNYRAGGLRLNPNLYACGKVCLSLLNTWTGSGCEKWNPANSTMLQVLVSIQALVLNAKPYFNEPGYAMHANTAHGEKKSLTYNEDTFLHSCRTMLYSLRNPPKNFEDFVAGHFRKYGRNILVACRAYLEGAQVGCLSGDGVQDVDEGDKSCSVRFKQSLKRLHEELLAEFTAKGADCGKFLSEKARSGASTSAADTTLRL

SEQ ID NO: 45483 - protein, 918 aa, Zea mays
  Clone ID: 700321631_FLI.pep
GHFVPSKKESKENLTSALEKNMAATEAATDTGSSRRSQDDTTTLVPHSGNLGEPIQKGVKTTRFKDDDEVVEITIVQRDSVAIEDVRVVDDGGSGHSNGFDGLSLVSPSSSRSGKLSSKIRQVKNGLKMKNSSTKAPQTQLGKNMRKRLDRSKSGAAVALKGLQFVTAKVGHDGWAVVEKRFNELQVDGVLLRSRFGKCIGMDGSDEFAVQLFDSLARKRGITKQVLTKDELKDFWEQLSDQGFDNRLQIFFDMVDKNADGRITEEEVKEIITLSASANKLSKLKERADEYTALIMEELDRDSLGYIELEDLKALLLQSPSQVVARSTTHSSKLSKALSMKLASNKDTGPFYHYWQEFMYFLEENWKRIWVMTLWLSICIGLFIWKFIQYRNRAVFHIMGYCVTTAKGAAETLKFNMALVLFPVCRNTITWIRSKTKIGAVVPFNDNINFHKVIAAGVAVGVVLHAGAHLTCDFPLLLHASDAAYEPMKPFFGDKRPPNYWWFVKGTEGWTGVVMVVLMTIAFVLAQPWFRRNKLKDSNPLKKMTGFNAFWFTHHLFVIVYALLIVHGTCLYLSRKWYKKTTWMYLAVPVLLYVSERILRLFRSHDAVRIQKVAVYPGNVLALYMSKPPGFRYRSGQYIFIKCSDVSPYEWHPFSITSAPGDDYLSVHIRTRGDWTSRLRTVFSEACRPPSDGESGLLRADPSKGITETNARFPKLLIDGPYGAPAQDYQEYDVLLLIGLGIGATPLISIVKDVLNHIQLGGSVAGTEPEGSGKAKKRPFMTKRAYFYWVTREEGSFEWFRGVMNEVAEKDKDGVIELHNHCSSVHQEGDVRSALIVMLQELQHAKKGVDILSGTSVKTHFARPNWRSVFKHVAVNHENQRIGVFYCGEPVLVPQLRQLSADFTHKTNTKFEFHKENF

SEQ ID NO: 45484 - protein, 212 aa, Zea mays
  Clone ID: 700423532_FLI.pep
KSKSSQASEVYKPLQDPLISRCVDIIGMNEDKASVSEKLTFAAKGVLSKVFPKPRRAWLPTGCLKLMDTLHQALPSMSLIASDFSYLPDVSIPGDRAPLVSSKKDGKTSDHRNYFDAQGDADIFFPTDFRLLEQIDHNCAGFSKEQKNPGAFKPVKKRRTIILDTAAFMEEFGMPLKTRTKDGYNPLLDDFKNTKFYLSVPTHNVPTHSRRN

SEQ ID NO: 45485 - protein, 298 aa, Zea mays
  Clone ID: 700343632_FLI.pep
KPQPAHSRTKNPTHGFSQAAPPARHLVPELRPPGGRRLRPNDPDRGEQLPLPGVAGHPGQLRARRPGGRRLLPPAALPQVLPGAGPPLVRPHLGAHGLRGRRRAAPLRHGRLRRAAPVRRARRRGARDAGAGEPPPRQRPDLVRRERGGRLQRGPVRDPARGPRQLPRPRLPQEPHRDLPRRAAAALPGRQRPRVQERLRGLPHRRAVLPQHVQQPAHLPRLQVLGVLQARVPAGLHLRARQPLAHPRVRRAARAQGHLLPLELGGLGWAGRAAPARAPPPPTSVASRGSRICGACVV

SEQ ID NO: 45486 - protein, 691 aa, Zea mays
  Clone ID: 700346396_FLI.pep
PPREPGKMFDSLLNSKFYNKCKHAIKCTRTRLDLLRRKKQAMVKFLKKDVADLLTSGLESHAFARMEGLIIEMNQASCYDTIEEYCEYIVKQLNHMQKESECPQEALEAVSTLIFAAARFPDLPELCDLRHIFTERYGSSVEPFVNSEFVQNLQNKSFTDEEKLRVMKRVAEEFSVPFDSRALQWKITCGSQNKHGLPKKSSLKQEMERDGHKVDRHAVHERKSKAMPEGYEQKQEMNVKPKDIHVVPDGIGQLGEKNRKNYSDKPSERRHMDNPLPPLDMKEKNGQKDMKKSGKKDSDRRRELMDAEVLDINGLKKQDVGTMKPSGGPDRSWGHADLGLKTLGIEKQEIDPISTLNGKAVNKPPPYSKPYRAPMGEKVAEDRQPVPEKATNMRPPYVKPNFEKHANQGANGHKQSGTEETIHQKREPIYDPVSVRSRIPRPPAHADEYAGMEEKMANQAPDGRRRHSSKRNGAHDNHDQRGAHVPPLEGMEVDDDINNARPFHRVPSEQRKHRSRQNGSTSGSDYNWASEGHESDGDDVNTSIDFGNLLPRAPSSHRKHRSRSADPRKAGGRGDDEERMMDKLLMHYSKKGLDREERKERANKSRTPFPQDDQRGDGAGELSSKGGGASAPRPERAASLPSESASPKAKAKAKPPARSMSMQPEMSRGNVHPSMPDFDELAARISALRNA

SEQ ID NO: 45487 - protein, 595 aa, Zea mays
  Clone ID: 700346466_FLI.pep
LIGLSSAHPESVTFMGSACSRKRGQLVQEDDLYSARFSKSGSFKWLLHTLPRSNFADVQRRAQGPAPNRCPSLVELCVAKVCKDINMYSDLSLLPRDLSQQIFNELVECGCLTEASLGAFRDCDLQDICLGDYPGVTDAWMEVVASQGQSLLSVDLSCSDVTDSGFNLLKDCSSMQSLACDYCDQISEHGLKTLSGFSNLTSLSIKKCAAVTAEGAKAFANLVNLVNLDLERCPKINGGLIHLKGLKKLEKLNLRYCNGITDSDMKYLSDLTNLRELQLSSCKISAFGVSYLRGLHKLGHLNLEGCAVTAVCLEVISELASLVLLNLSRCGICDEGCENLKGLTKLKALSLGFNQITDACLIHLKDLVNLECLNLDSCKIGDEGLFHLKGLIQLKNLELSDTEVGSNGLRHLSGLRNLQSINLSFTLVTDIGLKKISGLSSLKSLNLDNRQITDTGLASLTGLTGLTHLDLFGARITDSGMSCFRFFKNIQSLEVCGGLITDAGVKNIKDLKALTLLNLSQNGKLTDKTLELISGLTALVSLNVSNSRVSNSGLHHLKPLQNLRSLSLESCRVTASEMDKLRLVALPNLISVRPE

SEQ ID NO: 45488 - protein, 691 aa, Zea mays
  Clone ID: 700350414_FLI.pep
KNLPRRASLAVLRNLPFYPHSLRRRCSATPPSVHPQSAMQLLLLLILASFLLRPPAAAASAADSSSGCWPKTCGDLNVTYPFWVEEPGRPPCGPPTFQLKCDSSGAFLIRSVYQASQVLGIFPENNSFHVVDHNLPLATGCPAPTVNLSLLFPGTFVLSRANKELLFLGKCTGFPPAESAGFRSLPCDNSSFVRLGDGRNFSSQSIQGGVPQGCLFTVLPTLGAPDGNGDDYVASMRNGFLVDWKAVPGDCPKCMARGGECTYGGPDAEFACDCSGGKCGTKGNGRKIPLIVSISVAASLLLPCIYVLVWHRKKLEFFLCRKTSSAIEENIEALILAHGSLAPKRYRYSEVTKITSSFNIKLGEGGYGMVFKGRLDDGRLVAVKFLHDSKGDGEEFVNEVMSIGRTSHINIVSLFGFCLEGSKRALIYEYMSNGSLDKYIYTENPKAVLGWDKLYTIAIGIARGLEYLHHSCNTRIVHFDIKPHNILLDQNFHPKIADFGLAKLCHMKESKLSMTGARGTPGFIAPEVHSRTFGVVSTKADVYSYGMMLLEMVGGRKNVNSAAQESSEKYFPHWIYDHFGQEDGLQACEVTRENEGIAKKLSVIGLSCIQILPMHRPTIGKVMEMFERGSDELDMPPRQNFSQIFQDPVHSLNAETMSMISGTKAKASSEVLKMKGISVVNSKTIQRLPTL

SEQ ID NO: 45489 - protein, 418 aa, Zea mays
  Clone ID: 700352106_FLI.pep
LKKDSDVLLTNLKFLEENTRKIQKSFEDERTALRKLTEEHRAANEIRQKAYIEWTELRSEPSKKNEYFFRYRDDRNAAEIFRANGDINGLKSHCNSQIEGVMEMWNKNEEFRKQYVESNKVSTLKRLGTHDGRKLGPDEDPPVISSRRPSSIYPLSASSPGVATLASIPAPVVAAPAAVSAKEDSFPVLEAPQTSKRTKSKASDICAQTENNSVIVSEAEALEQTLKEKARLLEEQLELARKAEELARKEEELSKERAAAEKERLRMEQKAKAKEAEERKRRKAEKDKEKAEFKARKEAEEREKKKAKKDKRRGTAPADSSLTGDGHAAALATADTDSNASDNPREAEAPQPAAAPKRLSRPAAAIKQLNRVQPMPAPLRNRGRRRLRQYILIAAAVLSGLALFVAGNYIPRLKSVHS

SEQ ID NO: 45490 - protein, 125 aa, Zea mays
  Clone ID: 700382219_FLI.pep
RHCLGMFYSHNVVIMNLYIEILTGLERPGGGDEFNKYYILSALSYPWIGELVWMFALVLLSINPKPIAVPFSHVMFNFPKNCVLHFIYMYQIWTLKLKQAFLFNSCCFFISFISKGMSRSISTKI

SEQ ID NO: 45491 - protein, 443 aa, Zea mays
  Clone ID: 700377865_FLI.pep
EDEGGIQRAERSGRHPRAHTYAQAHTPTTPTPSREGGREPHNRTRPDAPRRGRGRGRAVSRPGRGPGGIPSAASASAAMGAASPAMWAGLVLVVLLAASGPASAGLPRFAEAPEYRNGDGCPAPVTGAGVCDPGLVHIAMTLDAHYLRGSMAAIYSLLKHASCPESIFFHFLAAEGGGAPAVAELRAAVAASFPSLRFEIYPFRADAVAGLISASVRAALEAPLNYARNHLADLLPRCVPRAIYLDSDVLAVDDVRRLWETRLPAAAVVAAPEYCHANFSRYFTEAFWDDPVLGARVFAGRRRAPCYFNTGVMVIDLRRWRVGNYRQRIERWMEMQKEKRIYELGSLPPFLLVFAGEIEAVDHRWNQHGLGGDNVFGSCRPLHNGPVSLMHWSGKGKPWDRLDAGKPCPLDHTWKSYDLYIGENDSSPASGPSRSALSSLVAW

SEQ ID NO: 45492 - protein, 863 aa, Zea mays
  Clone ID: 700347478_FLI.pep
REHKIMSYIRGQRNLSGFNPNTRHCLYGLDADLIMLALATHEVHFSILREVVYTPGQQDKCFLCGQVGHLAANCEGKVKRKAGEFDEKGGAIVPKKPYQFLNIWTLREYLEYEFRMPNPPFKIDFERIVDDFIFMCFFVGNDFLPHMPTLEIREGAINLLMAVYKKEFPSMGGYLTDSCTPDLSRVEHFIQAVGSYEDKIFQKRARLHQRQAERIKREKAQAKRGDDLDPHVRDDLIVPIQRFQGSRLASGAVPVPYEQNGSHKDNKERNSRARKAARVSTSGSSIASALVEAENDLEAQECENKEELKSMLKDALREKSDIFNSDNPEEDKVKLGEPGWRERYYEEKFGARTPEQIEEIRRDVVLKYTEGLCWVMHYYYEGVCSWQWFYPYHYAPFASDLSGLGQLNIKFELGTPFKPFDQLMGVFPAASAHALPLQYRRLMTDPNSPIIDFYPTDFEVDMNGKRYSWQGIAKLPFIDEDRLLAEIKKVEHTLTPEEARRNSIMCDMLFVNGSHPLSPYIYSLNSKFGHLPDKRRNEIKEKLDPSASGGMNGYITLCSGDPCPPIFRSPVDGLEDIMDNQVICSIYNLPDHHKHIAQPPVGVIMPKKIVEAGDLKPPPVLWHEDSGRRPHDNSNRQNPSGAISGRQLGEAAHRLVINSLNAQGRGQHSGTSMPYRTIMNGLHHLDVASPVSNQGMRPQVGQSAGPPGWYVPRGSVSNGQPPAYASSGSGHYQYESSGHSQYEQGNHGRQQSHPYARDGFHDTRGRVPPAYGYQQSNMYPSGPGLYGQPPSAYPGVHGGGYQPPPYGGGQQWQQQSYSSYAVRGPYGGRPPPTRADSGSQQPQNRYGALDRSNNRRPSSGYRR

SEQ ID NO: 45493 - protein, 725 aa, Zea mays
  Clone ID: 700350391_FLI.pep
DAEEVLYTGRPNSSMGQSLRDLENDHADFQLTPHDPHSVVGEANLPQHNVPRDSDLSPLGLLWSELEGHPKQPLSSNVLGVNERRNSKPTTPKDILPVNMRQGPLSRMNEVSSVRDEWPANFGRLDNMNGPNISGRIPQVEAEHHLNFDGHLLLQQIRREQQQHQQRQEQLMARSNLEFSGAFPGQVFDSLHQHRQPMNQQLPDVEHLLRVQFELEQQQQHQLQQEQHQRQLQQQRQAQLLQRQQQQQQQQMILEQLLQQQLQGSNFGPTNMVDQVLLREHVFNELHQQPHHLQRQHDAAIEQLIQAKFGHGLHREHHNDMLDVLSRSNQRQMLPLEQQILLGLQHEHEQQLQSQQLANALRQHSGREEERHLSGVWPMDDAAQFIRSGTSPNQRHGRFDLLENLQRSSSFDHHDHLDRSLSLQERLHMGGLGIHSLERSDSLPGGGPGPNTDVINALSRHHGLGQLETHGDVLYPLGQMPMLPSGVHPQQHRHQEQLPGSHIGRLERHWSDSNGQLQNSLMQSSHINQLQMEVEKQRRNVEMNLSVDNPHAWAALMNKERNAEQDLSDMIHKKLALQSQQSLGFPDVSVAASFGHKDHFVQPVAENPLRSVDMLSFEESLSERSLYAKSGQLAQEGSANLGTLPNSIENTGNFNLRPGSGSMFEQKHFLGIDDVQSDFSETTGGRTSANQLVGSVNELTRGKRQGSSASLAGDDTNFSEEAVSK

SEQ ID NO: 45494 - protein, 629 aa, Zea mays
  Clone ID: 700351868_FLI.pep
RSCLALQANHPQALTNLGNIYMEWNMISAATSFYKAAISVTSGLSSPLNNLAVIYKQQGNYADAITCYTEVLRIDPTAADALVNRGNTFKEIGRVNEAIQDYVQAATIRPNMPEAHANLASAYKDSGHVETAIISYKQALRLRPDFPEATCNLLHTLQCVCDWENRDGMFRDVEEIIRRQIKMSVLPSVQPFHAIAYPIDPLLALEISRKYAAHCSLIASRFGLPPFVHPPPVPVKAEGKHCRLKVGYVSSDFGNHPLSHLMGSVFGMHDRANIEVFCYALSQNDGTEWRQRIQSEAEHFVDVSAMTSDNIAKLINQDKIQILINLNGYTKGARNEIFAMQPAPIQVSYMGFPGTTGAAYIDYLVTDEFVSPSSYAHIYSEKLVHLPHCYFVNDYKQKNRDCLTPVCPHKRSDYGLPEDKFIFACFNQLYKMDPEIFDTWCNILKRVPNSALWLLRFPAAGETRVRAYAAARGVRSDQIVFTDVAMKNEHIRRSALADLFLDTPLCNAHTTGTDILWAGLPMITLPLEKMATRVAGSLCVATGLGEEMIVSSMKKYEDRAVELALNPVKLQALTNKLKEVRMTCPLFDTARWVRNLERAYYKMWNLYCSSRHPEPFKVVEDDNESPFDR

SEQ ID NO: 45495 - protein, 179 aa, Zea mays
  Clone ID: 700356141_FLI.pep
CVISPVVFWIFYKAYDIGMEEGYPAPYAKIYRGIALLGVNGWNQLPKYCLRFCLAFFLLAVAICALKEVAKARRWWVQDYIPSALGMAVPFFLGSFFTIDMCVGSIVLYLWSKSDRVRAHMFAPAVASGLICGDGIWSLPSSILSLINVNPPMCLRVFSADTNYQVEEFLWTLRNPAAT

SEQ ID NO: 45496 - protein, 477 aa, Zea mays
  Clone ID: 700219285_FLI.pep
AMVSINHVDQVQTIEESAIDQAHKSQSGSVDEIHGNLESTFSQLQLSQADTANGMQAMQENTTIHSQPSQLDTLNPTHRSQENSGNQLQSVLTDSSIPKRTTQECTIDEPSQPGINHIHTDQEFTGNQFRSNLPDDTVISLRDIEECTAHSKPSNTDSTGQIQANEENTANQVQSSLTDTVIPVPVIQEYATGYSQLSKANTSNKKQANQEYIADQVQSSLTDTVIPVQVIKEYTTGYPHINKADISNQMQANQENTDDHLYLSQVGCVTQMQIIEENLPKQPQLSQSGTGGRIQIDLESTTNHLLPNYDENSMLQCGLSWAPEQNSGALSTDFWKNVETQASSVSMPINGAPVASFPANVRFHNAAAAAEPALPPQVAPAEAGSDQSGLAFQSVFGNIWSDPCIEFAFKTLTGDIPVLDDTTAVTDYFPEQQDLNKGPAPNRAGSVDNSRNHTQVDVNLPPPALDDFYNGNWFPPQ

SEQ ID NO: 45497 - protein, 110 aa, Zea mays
  Clone ID: 700470805_FLI.pep
DGAGNQTYGYSIGVECVWFSSQTSFPCSDINQDRTSVCFLGEFALGLVLARFLLAGGGEQDWLAHAGKAHLAGRDKVSKASEVTNRTLVFHCNSITSKIKLAYSFHQTFY

SEQ ID NO: 45498 - protein, 533 aa, Zea mays
  Clone ID: 700453152_FLI.pep
IPRSQPEPPSRAALMAYTTSPSTSTSTAAAVAWAFAAATCVKLLLVPTYRSTDFDVHRYWLALTHALPVRQWYTDTSSQWTLDYPPFFAYFSRLLSLPAPLVDATLVSIPVRDATPFAHLIYLRLTVAFSDLLLLGSVLLLARDAQRKQRPFLALALVVWSPALLAVDHVHFQYNGFLIGLLLLSLHFLEQGWDLIGGVVFACLLCSKHLFLVAAPVYFMYLFRHYCCGRGVVKGLGRLVLMGSGVAAVFAAAFVPFVYYGQMQQLISRLFPFGRGLCHAYWAPNFWVFYIILDKILAFLLRRLGFNIAIPEASFTGGLVGDSSPFAVLPKVTPIATFLLVILAMAPCLIKAFSNPQPKHIIRWVSYACTCGFMFGWHVHEKASLHFTIPLALIAMDSLNDARHYFLLSIVSCYSLFPLLFENQEYLIKVLLLLTYAALMWVGFTVHFAAKSDLEGKKISRSGSTVKKNGIIGWIGLSYLLGIAGIELWSQVFHHHVFGDRLPFLPLIMVSFYCGLGMMYSWVWQLVHIVRHT

SEQ ID NO: 45499 - protein, 192 aa, Zea mays
  Clone ID: 700471664_FLI.pep
LDMEALVVFPEQHSHHHHRHPGTRSKSSGPYFSSPPNSRGFRGMNCRSFHSGRCVGAIPFPAPPARTYSSPEPKTPKQQPRHGGKRSRPISISLSTSPPSHSELWAGPAFSNSPPPSSLPIPKFSLRQKRSISLELPPVERPDDVVVRLHSKSAPSSPVEGYGYDFFNDDAIASAIATENLRRILQLDIADH

SEQ ID NO: 45500 - protein, 212 aa, Zea mays
  Clone ID: 700471693_FLI.pep
SSINIRVKPNKWKNFFIISYQNDDKKFQGELFGICNLFRDLSDKLFTSEIIEMHGEHGKSSATEATGIREIVDTDLFGSQENRKSSTATTHTDDQKLVDFGIVYAHRNEDVVNMRTDGREKGGADETVQSSLEELLSKNETKHTAMEKSYSSEEKREVARSYSLEQKKKEFSCIASFMGMDDLEFSKWLLSASPHQRSEVLQDYRRKKKNQK

SEQ ID NO: 45501 - protein, 380 aa, Zea mays
  Clone ID: 700445714_FLI.pep
AVCVGDTNTDTFITAMHATDADETSTTSAFVLFLQYQASILSRFGFGWMRRRRVLSSGVVVVSGVHCVGRLRLRSDGGWWHNANGIHFAVVLGDDEAVSAFLPAVEDVHLPRGLVPEAVEVVVHVLQLLQRLLHRERRHLEHLGAHHLGEHRLLVLSAHGRLQVVGLGHRGGQQVGRRDLVPDAVSVSAAAHLRLLLLDLAELALDDGGGEVDAGVGGLGVLLGAQDAMALGEEGDLAARRLGAPAELAAARGEAHVYLPDQVAVLGHRPTHLVLDVLLELLAQLRVPALHDEAHRRERTVPGHPHRHGDAAAPGGVHGHWHRGQHDAPQEARAAEGQGSSSTGTTSMDVASYCGRGGGGHSGCRHGCFLSSLISTEDED

SEQ ID NO: 45502 - protein, 635 aa, Zea mays
  Clone ID: 700451542_FLI.pep
PAPRPLLSEATPRALLPCPVSGPPAPSARQPAVTEARSGPREKSLLYLMAMIDEPLYPIAVLIDELKNEDIQLRLNSIRRLSTIARALGEERTRKELIPFLSENNDDEDEVLLAMAEELGVFIPYVGGVEHAHVLLPPLETLCTVEETCVRDKAVESLCRIGAQMKETDIVDWFIPVVKRLAAGEWFTARVSSCGLFHIAYPSASDQLKTELRTIYGQLCQDDMPMVRRAAASNLGKFAATVEQNHLKTEIMSIFDDLTQDDQDSVRLLAVEGCAALGKLLEPQDCVAHILPVIVNFSQDKSWRVRYMVANQLYELCEAVGPEPTRADLVPAYVRLLRDNEAEVRIAAAGKVTKFCRILNPQLSVQHILPCVKELSSDSSQHVRSALASVIMGMAPVLGKDATIEQLVPIFLSLLKDEFPDVRLNIISKLDQVNQVIGIDLLSQSLLPAIVELAEDRHWRVRLAIIEYIPLLASQLGVGFFDDKLGALCMQWLEDKVFSIRDAAANNLKRLAEEFGPEWAMQHIIPQVLEKINNPHYLYRMTILQAISLLAPVMGAEITCQKLLPVVINSSKDRVPNIKFNVAKVLQSLVPILDQSVVEKTVKPCLVELSEDPDVDVRYYANQALQACDQMMVSS

SEQ ID NO: 45503 - protein, 410 aa, Zea mays
  Clone ID: 700451923_FLI.pep
TCYRSSVSTVVKHRWIVDLHEPRDLVPVVPVLAALARSGSGSGGDALVVVLMERDGHRRRVQELRLLLDCWRGGEAAQPLLVEVELLAAVHALPVPEETAAAAASGTDDASSVQHAADLMSGGRGRGRHRQAAVHVLVPAAAAVGLEAPRVGAGLLLLPPRRQLRLPLVGDVPLEDPADGPHLSFLHARRRWRGRGGGRREAELVHHPVGLGALAGAAAVVHEGLLEPDGHGLDGVRGGRVDMPVDAGGLPEAGAGDPVGPDAVPVLPSSQAEEVPLLFATSSRARLREVPWIMLVDVHLLDDLHAERLPGHLPAEVERDELLVGRVEPEPREHRVIFLFISGSGSGGHERFSTPLHLVHAHYYFSSELLDYHDLPIFLPRNCGCGRIVYNIIFPATARSRSSIDMSGCS

SEQ ID NO: 45504 - protein, 438 aa, Zea mays
  Clone ID: 700452269_FLI.pep
KTQVWKPWGWSSLLSDAIPNKTAKRKLEVTSIEEGEVVDDTVDAKRPTKTPPHSVDRSFEGIRSINKYLTEKALAELVLPCIDRSSADIRGILSVDLTKQMGAISEHIKAIALNGAKQAGSVSSGNEVPSTKSSGRRGIRGGSPNIGRRAPVGNDPSPPSTSALRAALWLRLQFIIRLLPVIMADRSMRHTLASAILGLLATRMIYEDADLPLPPTNATALRRDVDSLLEPPLDVLLDRPGESLFEKLLCVLHALLGSYKPSWLKSRSASRSSIKSQRDFSAFDNEAAEGLQSALDHMELPETIRRRIQAAMPLLPPSRRPCMQCQPPQLSLAALSPLQSSTSGVGPQQKSSCVSWVPTNVSVRSKAALPSHDPETEVDPWSLLEDGTNCPPSTASGSNGSSGVTGDHANLKASSWLKGAVRVRRTELTYIGSVDDDS

SEQ ID NO: 45505 - protein, 316 aa, Zea mays
  Clone ID: 700454585_FLI.pep
AVSGKFSMEEGRNRLFRELTDINAGLLGGFHIQDYFPSLGRIELVRKVACAKTRRVRKRWDDLLDKLIDDHAARMATHQDEDDDKDFIYVLLSLQKEYGLTRDHIKAILIDMFEAGTDTSYMTLEFAMTELIRKPHLMKKLQEEVRRNVPAGQEMVTEDNLPGMTYLKAVIKETLRLHPPVPLLLPHYSLDACEVAGYTIPANTRVVVNAWALGRHSGYWERENEFVPERFLSGDVAGGVDLKPNEFQFLAFGSGRRMCPGVHSASATIEAMLSNLMYRFDWQLPAGMKAEDVDMTEVFGITVSRKEKLLLVPQAA

SEQ ID NO: 45506 - protein, 571 aa, Zea mays
  Clone ID: 700455880_FLI.pep
SPEAVPMARRSSSSSSGTWRYLNPAYYLKRPKRLALLFFLFVAATFAFWDRQSLVSEYESEISRLEDDINRLHDQLRKAGVNLDENPVVSNKNSRKDLVVEIDPVNNERREKVKEAMLHAWNSYVKYAWGMDELQPQSKNGINSFGGLGATLVDSLDTLYIMGLKDEFQKARDWVAESLDFDKDYDASVFETTIRVVGGLLSSYDLSGDKVFLDKAKDITDRLLPAWDTTSGIPYNRINLAHGRAHNPGWTNGDSILADSGTEQLEFIALSQRTGDPKYQQKAENVIKQLQKIYPSDGLLPIYINPHSGTASYSTITFGAMGDSFYEYLLKVWIQGNKTEHVKHYRQMWETSMEGLLSLTKKTTPSNYYYICEKNGGSLSDKMDELACFAPGMLALGASGYGPEKSEQIMNLAKELARTCYNFYQTTPTKLAGENYFFHTGQDMGVGTSWNILRPETVESLMYLWRLTGNKTYQDWGWDIFQAFEKNSRIESGYVGLRDVNTGEKDNMMQSFFLAETLKYLYLLFSPPSVISFDEWVFNTEAHPLRIVPVNDNKGIGTPVRQFGRKQGKPE

SEQ ID NO: 45507 - protein, 266 aa, Zea mays
  Clone ID: 700430320_FLI.pep
GEQIQFARTAQISSPAHVGKSQNPVMDLSTTFTSVLQNKSSLFSKNNALTDSSGLIRSSHSERKVPSALQTRAPPHGSPISNMRSTVGGKFPTVGQNVDSPFLRGAKGISSRKGETGFKEGIKYADHDPLPMYLNLSSGDTPTKDYRTSLLKAEANKTTYFQGQDSVGKGEFHFGSRAVKPFNLNGTGAGQNGLAKISGYAGFREDYKVPTKENILSFSKKSSVGGAEASKGVSRWRSDESSEEERTNRESGAPLVTRRRPRFSRR

SEQ ID NO: 45508 - protein, 101 aa, Zea mays
  Clone ID: 700433549_FLI.pep
NELPSKKSFAEPTEMGAMKELSSKECFGELRVLDTNGHTFPQPASTCHVKTSAVTGTGLQELLALIERKLTEQQTVVQRSYGPFDRKWRPTSMDCEKAAEP

SEQ ID NO: 45509 - protein, 428 aa, Zea mays
  Clone ID: 700467163_FLI.pep
RLLWWLKLLKEKEKAEKKKEKRSDRKDPKQCETSKHSKHSHKKRKLEDVIKAEQGPKRVPKESVEQLEKSGLSEEHGAPSFVHTIRDSPESSQDSGKRRKVVLSSPSQPKNGNILRFKIKSSQDPQSAVLEKPRVLEQPLVQQMGSGSSLSGKQNSSHHKMNVRSTSGQRRVNGDSQAVQKCLITESPAKTMHRLVPQPAAKDTHPVDPQSAVKVPVGRSGLPLKFSGSVDPSPARVMRRFDPPPVKMMSQRVHHPASMVSQKVDPPLPKVLHKETGSVVRLPEAARPTVLQKPKDLPSIKQQEIRTSSSKEEPCFSGRNAEAVQVQDTKLSRSDMKKIRKAEKKDKKFRDLFVTWNPVLIENEGSDLGDEDWLFSSKRNSDAIMVQSRATDSSVPIHPMVQQKPSLQPRATFLPDLNMYQLPYVVPF

SEQ ID NO: 45510 - protein, 534 aa, Zea mays
  Clone ID: 700442802_FLI.pep
RPLERGSLELGRAEHAQCDCVCVSDMASLWLARASSQLARRAAARRPPPRPARHGSDQPTSSWFLGSVPPPALGSAAADTCRRGFCSVRRFAGESSAAAAAAAVVDEEPESGFAAGDQQAVDFPGGKVSFVAEMNFLPESTRERINCYRVLDDDGRTISGSRFQEVSRELALKMYSEMVTLQIMDTIFYEAQRQGRISFYLTSNGEEAINIASAAALSMDDIVLPQYREPGVLLWRGFTLQEFANQCFGNKLDYGKGRQMPIHYGSNRLNYFTVSSPIATQLPHAVGAAYSLKMDKKDACAITYFGDGGTSEGDFHAALNFAAVMEAPVIFFCRNNGWAISTPTTEQFRSDGVVIRGQAYGIRGIRVDGNDALAVYSAIHAAREMAVTEGRPILVEALTYRVGHHSTSDDSTKYRPVDEIEHWRTARDPISRYRKWVQGNDWWSDAEESELRSRVRKELLQAIQVAERMPKPPVTELFTDVYDKIPSNLHEQEQLLRDTIMRHPADYPTDVPVGVVLRYAEGLTRRSSFGQSRF

SEQ ID NO: 45511 - protein, 618 aa, Zea mays; identical to SEQ ID NO: 43260
  Clone ID: 700449694_FLI.pep

SEQ ID NO: 45512 - protein, 280 aa, Zea mays
  Clone ID: 700444534_FLI.pep
PIRTKTLRFTLHNTPHKYVYVPAAGRHMHSTQLTARARASPSEETRVEVAVRPPAPELEQAAVGTVGDAHEQRLAVGAERGAGDLPEHVHLLRGAGVPGRGVVHVHEVGGLGRGQEPAVGGEAEAPDGADPGPEHGERLRQAARVPQPARRVLVPRRQDAAVGVPRRREGVVQVPAQRRQRLARLRVGDHALRAVAQDRQQLAVGAHRRAVDGPREGELREKAVSLGVERPDDAVVVRRHHSRGAAGCLVDVDGVRDGTAATGQAGAECHPGSINVLTNE

SEQ ID NO: 45513 - protein, 422 aa, Zea mays
  Clone ID: 700451402_FLI.pep
AGKLMGIHRRRHHRRQSSSSCGGLLLPFHGDVLRNLHSVGGNAGEASPGEANRVEPGLPLPAVWERHPWVPFLREEITSLEPLRDVAVVAGGEYDRVRSDAAAVDELGAATEEPLDARHDLYVAGADPGEGADVQHGGPAPGVLELERAPGGAPDAELLQVAEEEAREQDEDGVHQPERQEAEQEDGDGEGGDAEHLPGQDVHRVPDDHGREGIVVAEVEADLHAGVSAADDEHALAAVRLAALVLGDVGDGAGEVLGAVELGHDALGVLARGDDEPAADVLGGGGAGDVVVGESVGGAHAPEPRGPVVARGRDGLVEARLDARALGVGLEVVDELALGGVLRVVVGEGHPGELAELARQVQAEAVVGAALPERRDAVGAVEHHARNTARPQARRHRQAPRPRAHHDGPVHPHHPAFRRRRR

SEQ ID NO: 45514 - protein, 402 aa, Zea mays
  Clone ID: 700454105_FLI.pep
TSAEKHTTVMGHDHMSRIKMHMAEGSFGDRIRCQQPGCNEVVDRRVVYCKIHSGELSCQQFSYLQSGLESSGLSVRPVNDSQFKGSVSIAAVPCTEQELHVKHEGGDRGKLKDSSGYTLGQAAQFIFSGASMLCKNDNCSKQAHENSIHCKLHSGGVNKGCMARGCTRGAHGGTPLCIGHGGGRRCVVPGCPNAACGQGRSDRCVRHGGGKRCKFEGCAKGAQGNTDHCIRHGGGRRCRFQGCTKSAQGRTDFCIKHGGGSRCRFQGCGASAKWGTDLCSVHRKSLLGGDNAIPEALAAPSEKRRRAKTPQREAKPSEVFQENVTTAATAGNSTQHTGFLLVAAPVANRDILTNGMAVTGQAAIAPQRIVAPMFMRSPTPSGSVAASAQRWEAGASRGMLGL

SEQ ID NO: 45515 - protein, 129 aa, Zea mays
  Clone ID: 700432807_FLI.pep
DAVDLFVERYRGMGIDAVAGIEARGFVFGPAIALAIGAKFIPLRKPRKLPGEVISEKYVLEYGTDCLEMRVGAIERSGERVLVIDDLVATGGTLCAAIRLLERAGADVVECACVIGLPKFKVPRCWIHN

SEQ ID NO: 45516 - protein, 358 aa, Zea mays
  Clone ID: 700265558_FLI.pep
RQAHKRFPLRVLPGLSTTHHRLRRHRPLAGPSDSAMASDESKNSKPEKPSSAAGAGLPNPFDFSSMSNLLNDPSIREMAEQIASDPVFNQMAEQLQKSAQGAGEQGIPALDPQQYMETMQQVMQNPQFVSMAERLGNALMQDPAMSSMLENLTSPAHKEQLEERMARIKEDPSLKPILDEIENGGPSAMVKYWNDPEVLQKIGQAMGVNLPGDSSVSTVLSGPEETEEEGGDDDESIVHHTASVGDEEGLKKALEGGADKDEEDAEGRRALHFACGYGELKCAEILLEAGAAVDALDKNKNTPLHYAAGYGRKECVDLLLKYGAAVTLQNLDGKTPIEVAKLNSQDEVLKLLEKDAFL

SEQ ID NO: 45517 - protein, 422 aa, Zea mays
  Clone ID: 700243456_FLI.pep
SPDFTRLSRRARFLLSISTNPIACHKVCTDASHCFNQRSIQTLHPRKLVRSRGDMKRLQCFKKSSGGGNGGGPGKRLERRLSLGEYKKAVSWSKYLVAPPGARIRSGGEELWSADLSKLEIRGKFASGRHSRVYSGRYTGREVAIKMVSQPEEDAALAAELERQFASEVALLLRLHHPNIISFVAACKKPPVFCIITEFMAGGSLRKYLHQQEPHSVPLNLVLKLALDIARGMSYLHSQGILHRDLKSENILLGEDMSVKVADFGISCLESQCGSGKGFTGTYRWMAPEMIKEEHHTRKVDVYSFGIVMWEILTALVPFSDMTPEQAAVAVALKNARPPLPASCPVAISHLIMQCWATNPDKRPQFDDIVAILESYKEALDEDPSFFLSYIPPPPDHGHHHHHQSLLRCFPRSMRRSASLKV

SEQ ID NO: 45518 - protein, 334 aa, Zea mays
  Clone ID: 700264277_FLI.pep
TESKLRLTSLSLHGLLDYTAKDIEESVFELSLFAESFSEMLQHRMGCVILSFLEKLHRRYVVKRNQRKRQREEDLKKEEKSSEKRSKTTHETTKTESVDNPGGSFKMTKEGEEKMSTDQSANVHAELSKEGQIKLGTDHPIANHGEPAKGGDENMEEDPEYEEDPEEVEVYEDDEDMDDAHAEEQIAEQNENTNDREIKPKEVATTDGGNNKSTRQPEVENVTNIHERAASMEEKQSVPEIGDLVGGGEKVVSKEIKPAKDEVIDKDLLQAFRYFDINGAGYLKVDDLKCILHNMGKFLSSRDVKDLVQIALVESNSARDNRIIYPKLVKIVDL

SEQ ID NO: 45519 - protein, 570 aa, Zea mays
  Clone ID: 700208627_FLI.pep
EGMGSTTMSPPSFPVVLLLLLLATIAAAAGSNMDEEVVDDLQYLIDNSDDIPTNDPDGWPEGDYDDDDLLFQDQDQDLTGHQPEIDETHVVVLAAANFSSFLASSHHVMVEFYAPWCGHCQELAPDYAAAAAHLAAHHHQAHLALAKVDATEETDLAQKYDVQGFPTILFFIDGVPRGYNGARTKEAIVDWINKKLGPAVQNVTSVDEAQSILTGDDKAVLAFLDTLSGAHSDELAAASRLEDSINFYQTSTPDVAKLFHIDAAAKRPSVVLLKKEEEKLTFYDGEFKASAIAGFVSANKLPLVTTLTQETSPSIFGNPIKKQILLFAVASESTKFLPIFKEAAKPFKGKLLFVFVERDSEEVGEPVADYFGITGQETTVLAYTGNEDARKFFLDGEVSLEAIKDFAEGFLEDKLTPFYKSEPVPESNDGDVKIVVGKNLDLIVLDETKDVLLEIYAPWCGHCQSLEPTYNNLAKHLRSVDSLVVAKMDGTTNEHPRAKSDGYPTILFYPAGKKSFEPITFEGERTVVDLYKFIKKHASIPFKLKRQESRTESTRAEGVKSSGTNSKDEL

SEQ ID NO: 45520 - protein, 909 aa, Zea mays
  Clone ID: 700152157_FLI.pep
RRRRRLISSPSPTPGGSSMAAPAIWQPQEQGLHEICTLLEAHISPNSDQARIWQQLQHYSQFPDFNNYLTFILARGEGKSIEVRQAAGLLLKNNLRTTFISMQPSSQHYVKSELLPCIGATNRAIRSTVGTVISVLFQIVRVAGWIELFQALHKCLESNDLDHMEGAMDAIYKICEDVPEELDVDVPGLSERPINVFMPKILQFFQSPHASLRKLSLGCINQYIVVMPSALYMSMDQYIQGLFNLAKDPSADVRKLVCSAWVQLIEVRPSILESHLKNVTELILQANKDPDDEVALEACEFWSAYCDVSMPPEGLREFLPRLIPTLLSNMVYADDDESLDDAEEDESFPDRDQDLKPRFHASRLHGSQTGDDDDDDDAVNVWNLRKCSAAGLDVLSNVFGDSILPTLMPLIEQNLARTDDNSWKERETAVLCLGAIAEGCIGGLYPHLPQIVAFLIPLLDDKFPLIRSITCWTLSRYSKFIVQSLDHPNGREQFDKILMGLLRRILDTNKRVQEAACSAFATLEEEASEELVPHLEVILQHLMCAYGKYQRRNLRILYDALGTLADAVGAELNQAKYLDIFMPPLITKWQQLSNSDKDLFPLLECFTSIAQALGPGFAQFAEPVFQRCINLIQSQQLAKIDPTAAGAVYDREFIVCSLDLLSGLAEGLGAGIESLVAQSSLRDLLLQCCMDEAADVRQSALALLGDLSRVCPIHLHPRLQEFLTVAAKQLNPQSVKDAVSVANNACWAIGELAIKIGKEIAPVVITVVSCLITILKSPEGLNKSLVENSAITLGRLSWVCPDIVAPHMEHFMQAWCSALCTIRDDFEKEDAFHGLCAMVAANPTGAAGSLAYICQACASWTEIKSEGLHNEVCQILNGYKQLLGNNGGWEQCMAALKPDVVQKLARYGV

SEQ ID NO: 45521 - protein, 94 aa, Zea mays
  Clone ID: 700159184_FLI.pep
SWCTFFQVNQIGTVTESIQAALDSKAAGWGVMVSHRSGETEDNFIADLAVGLASGQIKTGAPCRSERLAKYNQLLRIEEELGNVRYAGEAFRSP

SEQ ID NO: 45522 - protein, 309 aa, Zea mays
  Clone ID: 700441926_FLI.pep
VMPGQWEFQVGPSVGISSGDQVWVARYILERITEIATAERLIREAHKKGAKIVLVQELFEGHYFCQAQRLDFFRRAKPYKGNPTIIRMQQLAKELEVVIPVSFFEEANNAHYNSVAIIDADGADLGLYRKSHIPDGPGYQEKFYFNPGDTGFKAFKTKYATIGVGICWDQWFPECARAMALLGAEILFYPTAIGSEPQDCNLDSREHWKRVMQGHAGANLVPLVASNRIGRETVDTEHGKSSITFYGNSFIAGPTGEIVKLANDKDEEVLVAEFDLDEIKSIRHGWGIFRDRRPELYKVLLTLDGEKQS

SEQ ID NO: 45523 - protein, 257 aa, Zea mays
  Clone ID: 700450973_FLI.pep
HNPVAQNPRALACSPPPPERAPHLHPSTMATQISKKKKFVSDGVFYAELNEMLTRELAEDGYSGVEVRVTPMRTEIIIRATRTQNVLGEKGRRIRELTSVVQKRFNFPENGVELYAEKVVNRGLCAIAQAESLRYKLLGGLAVRRACYGVLRYVMESGAKGCEVIVSGKLRAQRAKSMKFKDGYMISSGQPVNEYIDSAVRHVLLRQGVLGIKVKIMLDWDPKGKVGPITPLPDLVTIHTPKDEDEPRPPVLAPPEV

SEQ ID NO: 45524 - protein, 325 aa, Zea mays
  Clone ID: 700446985_FLI.pep
PAPPRVKKSGSEVRKSQVSRAAPRIVQAVTEDDDSVEEAGGGGFRRRPSPPQQEYHYRQEYVTPPPPAPAPLQRTSSVLDRLRSLGLYGFLAPDEPAAAASVPASDGFATPADEKRHAHTHYDIGRSEPAREQQDKKEKTQGGNSTRAKSSSGARKTPAQRQAEAGAECVDARAEAFIDSFRQQQQVHHYQEEEYVPPPAPAPPLSRTSSVLDRLRSFGLYRFRSGDLGPDLPSATAATETDKEKQQAAHYGRSRSEPAREQGKKQDTRMNKSSSSGVVAEADAHQCVNARADDFINKFRQQLQLQRLNSLLNYKEMLNRGGDKQ

SEQ ID NO: 45525 - protein, 960 aa, Zea mays
  Clone ID: 700351912_FLI.pep
EQPRCGFPEKNLSVNLENLTGGQRQWWEFKSQHMDKVLFFKMGKFYELFEMDAHVGAKDLDLQYMKGEQPHCGFPEKNLSVNLEKLAEKGYRVLVVEQTETPDQLELRRKEMGIKDKVVRREICAVVTKGTLIEGEHLLANPDPSYLLSVTESYQRSPNKSQDTCTIGVSIVDVSTSKFIVGQFQDDPERHGLCSILSEMRPVEIIKPSKMLSPETEKALNNNTRKPLINELVPSTEFWDAEKTIDEIKQYYSSANKQKKADDIQDCVDCLPNLLRELIGAGDKTYALSALGGSLFYLRQTLLDEKILPCAEFEPLACSGFINNIRKHMILDTAALENLELLENTRTGGLSGTLYAQLNHCVTGFGKRLLKRWIAKPLYDRREILRRQSAVATFKGVGQDCAAQFRKDLSRLPDMERLLARLFSSCDENKRSSSVVLYEDASKKLLQQFTSALCGCQQMFHACSSISTLICSEGSQLIDLLSPGKGLSNISSILDRFRDAFDWSEADRNGRIIPSEGCDPEYDATCNAIEEIKSSLKEYLKEQRKLLRPASVNYVNVGKDMYLIEVPESLGGSVPRNYELQSTKKGFYRYWTPELKELILELSKAESEKESKLKAILQNLIQLFVEHHTEWRQLVSVVAELDVLTSLAIASGYFEGPSCCPTIKESNGTDDTPTFHARNLGHPILRSDSLGKGSFVPNDVKIGGPGNASFIVLTGPNMGGKSTLLRQVCLTIILAQIGADVPAEKLELSLVDRIFVRMGARDHIMAGQSTFLVELEETASVLSSATKNSLVVLDELGRGTSTSDGQAIAASVLEYLVHQVQCLGLFSTHYHRLAMEHNDTKVSLCHMACEVVEGVGGLEEVTFLYRLTPGACPKSYGVNVARLAGIPTKLLQRANEKSSEFEANYGKRHKMTNDKHVSAQSDDKFSAIRDLFRIVKTWPRPEDQEASISMLRKLQKRAKV

SEQ ID NO: 45526 - protein, 552 aa, Zea mays
  Clone ID: 700343663_FLI.pep
REGSPSQSQSRRVITPYDTEDTEPEAKPVRSARVAASRRPSSNCMAALPASAPAPAPAPSEAAELVPTLSSLEPVYGAGAQLDEARLRFARLGDRFHAVYGARPALFARSPGRVNLIGEHIDYEGYSVLPMAIRQDMIVAIRRANGAQVRVANVDDKYPLCVYPADPDKEIDVKNHKWGHYFMCGYKGVYEYCRSKGIDLGKPVALDVVVDGTVPQGSGLSSSAAFVCSATIAIMGILDKNFPKKEVAQFTCLSERHIGTQSGGMDQAISIMAKPGFAELIDFNPIHATDVQLPSGGTFVIAHCLAESKKAETAATNYNNRVVECRLAAIVLAIKLGMDRKKAISSVTTLSDVEGLCVSFAGREGSSDPAVAVKKLLHEDPYTAGEIEKITGEGLTSVFQGSQTSLDVIKAAKHYKLFQRATHVYSEARRVYAFRDTVSSKLSEEGKLKKLGDLMNESHYSCSVLYECSCPELEELVKVCRDNGALGARLTGAGWGGCAVALVKEPIVPQFILKLKEMYYKSRIDRGVIKQGDVGLYVFASKPSSGAAILRL

SEQ ID NO: 45527 - protein, 693 aa, Zea mays
  Clone ID: 700201371_FLI.pep
STAAAKNGPLDYLRLRVSSPRAHSRFLFIRCHNLCGALTHRRRRLEPRAVTVTATPETEMDTAEEAGQEVVSAVGEDSIPEAAACSREERKEEEEEEVEVSFDELGLDEQLKRALRKKGILKATPIQREAIPLILEGKDVVAKAKTGSGKTFAYLLPLLHELLKLSSEGRIRKPAPNAFILVPTRDLCHQVYNEALSLLELCTCKLRVVQVTASMSDKDITVALSGPPNILVSTPACVATCISKGIIRGPAVKESLSMMILDEADLLLSYRCEVDLKALIPHIPRSCQSILMSATSSSDVDKLTKLLLHNPFVLTLSEVGQAKDDVIPKNVQQFWISCDAKDKILHILALLKFELIQKKVLIFVNSIDMAFRLRLILEKFGIRSAVLNAELPQNSRLHIIEAFNARLFDYLIATDDTKTKEKQTNEENKKEATLSRKRKKQTNKENQKEQKVSRKHLQQTLDAEFGVVRGIDFKNVFTVVNFDMPLDATGYVHRIGRTGRANKTGASISLVSPKEDSTFKEIEHMLQDVEKKDMDCISPFPLLTKDAVESLRYRAQDVARSVTTRDVQEARRQDIKNEILNSEKLKSHFEENPTDLDLLKHDKLLCNKEIPAYLRDVPDYLIDPKTKEASNAVKLSRAAMHIDKPQRRKRQGFKGGSGKSRDPLKTFSAEGKRGRRRKEREGEPDRRKKSKKA

SEQ ID NO: 45528 - protein, 314 aa, Zea mays
  Clone ID: 700548672_FLI.pep
EYFMFLLSTRAGGLGLNLQTADTVIIFDSDWNPQMDQQAEDRAHRIGQKNEVRVFVLVSVGSIEEEILDRAKQKMGIDAKVIQAGLFNTTSTAQDRRALLQEILRRGTSSLGTDIPSEREINRLAARTDEEFWLFEKMDEERRLRENYKSRLMDGNEVPDWVFANNDLPKRTVADEFQNIMVGAKRRRKEVVYSDSFGDQWMKSDEGFEDIPKATQRSKKTAYSSDIQVEFSERRKRPRSVENSADGVSNPTWTPDKGRAGVSSYSKDETEDDGEDEVITSGLQKGNSFTWNTLGRRRSSHFSSSSDSRGRPTF

SEQ ID NO: 45529 - protein, 435 aa, Zea mays
  Clone ID: 700552739_FLI.pep
GISDSNIKEIPQSAGAQVSNITGFGRSLDNSLPEASCREDLTVNDTVVGRGDHQLCSGEQKDFNMEVRLPLPDQHCFGRINTESGSVRHESKNIEVRQGSGTAQRLGMLFKKEKSHLRILNRDIQNHVNQVVNFPLKGGKQKVCPTSVKSESLKMKAKLVRFNVETGVQHGSVKQVTSSTLDTSPMRKDGSMITFALKEARDLKHKANDLKNKGQELESTGLYFEAALKFLHVAFLLETPSFDISRQGGGGRSMKMYSETAKLCNFCAYEYERCKKMASAALAYKCVEVAYLKAAYYKHRTATKDQQELQAAVQITRGEPPSPSALDIDNLNSHGSSNASSLKGDNSPHVPGNHLPLAIHNQAQLLRLLAYTNDMNLAFDATRKAESVIASATGCPERGVVGDGLASVKAVLDLNFNNVNELLRLVRVSMESISS

SEQ ID NO: 45530 - protein, 414 aa, Zea mays
  Clone ID: 700552831_FLI.pep
SGHQWGASYAQQAAYPAYGTYDYSHQMPQPAPQTAAYGAYPPTYSVQAYTGRKVAIVGSGPSGLAAADQLNKMGHFVTVFERADRIGGLMMYGVPNMKTDKIGVVQRRVNLMAEEGVTFVVNANVGSDPLYSIERLRSENDAVILACGATKPRDLTIPGRELSGVHFAMEFLHANTKSLLDSNLEDGKYISARGKKVVVIGGGDTGTDCIGTSIRHGCTSLVNLELLSKPPSTRAADNPWPQWPRIFRVDYGHQEAATKFGKDPRTYEVLTKRFIGDGNGKVKALEVVRVKWEKVDGRFQLKEMEGSEEIIEADLVLLAMGFLGPEATIAEKLGLEKDNRSNFKAQFGDFATSVDGVFAAGDCRRGQSLVVWAITEGRQAAAAVDKYLSRYDQNAAATGDSTPSGTGLVQPVAA

SEQ ID NO: 45531 - protein, 629 aa, Zea mays
  Clone ID: 700474048_FLI.pep
MSLMDKRQLVYEVARWPQGAVEILKCWTRRELLELICVELGKERKYTNVPKAKMIAYLLKLVSRKSGKNGQLKDDNANVMLLEQDNKDETQMKESEEQEQSRPLKTANSDSSIRREAHACCSVVCSNVACQATRNAGDNYCKRCSCCICNKYDDNKDPSLWLVCSSDNPYSGCSCGVSCHLNCALKNKKAGIVNNGCNKLDCSFYCVSCGKINWLMRSLQKQLAIAREARRVDVLCERLSLSHKMVKGSERYKEITSIISSAAKTLEKEVGGALDQVSAITGRGIVNRLTCGAEVQKLCSSALEIVDSTVDSILEFESNNSPKLLGPQPQILFDEITPFSVVIVLNYQDSIGKEQVDGSKVWHRSAKVCNYSSEPTCHILRPNTRSLVSGLSPSTEYFFKVLPFSSVQGFTEWEAKCSTRSLDHGSSQCSTQNSESMCLKVDPMQHQKKDLNVQNHQRTIQYDSPKGSTNSSENNLLCDRYSKRAKVARLDGASDNDESQLPPTSEVLPFASSNYSPSEAPSKPDLLIGTPDSASKNYVEQQYEYCVKVVRWLEHEGHMDNDFRVKFLTWFSLKATAQDRRIVGALVDVLIGDPASLVAQLVDAFKDIIYTKEKPFQTQQKDARCKIWH

SEQ ID NO: 45532 - protein, 196 aa, Zea mays
  Clone ID: 700476666_FLI.pep
NSLCRARSLLQSLLGVLRAHLPRLLSARIPARGVFPLAKIVLARCRRLVRVPLLLQLWRFIAAVPYPMRAPLFVRVCSSSLFQSSAQFSLLPCRGRRVPARSSRLASPCCGLSSSLRTLTSFFPCLPSARILSALHSVSSSRTIIASIASSLATVILTASARQTCNSIYSTLPYRRQARRTSFFSARFRRTPNPGY

SEQ ID NO: 45533 - protein, 575 aa, Zea mays
  Clone ID: 700551803_FLI.pep
SKHQTHSGHTIESSEATSRRRSNREWKGIGRKGNEKFPLRNVLTDILHGEDKRSQKSNEVRPPPSKQQNDRKRERDDETHQTKKDSSSRSMLGDGASRRLLQFAVRDAVKAVQPTSTSAEPASKRLCSVVATTSTEHMRDRRSGRSQDYLNDRRSERSQDNLSDRRSERTRPMLQVHGAALALRAAAEAAADSAKVRSTGSVFKRLGQGNVVKQPSRSREEKRDYEDFEPVTIADEHDSDQYVNNEESEEESGELTMADRVAGSGMYVDSSSEDDMDRDEGITRYQTSLSHDDTFSPFAEKKTVSAPCSVELETDAIRPSSVNDEEQPVPSTPTASKAVAISVDVNMVEPPSYATPKDVHVVEKPYVAPMNSNAASIATNAKELGHAEVQKDSQRSAPSVPVSYSTAHPMEDADSRTLYVNNVHFAATKDSLSRHFNKFGAVLKVVIVTNAATGQPTGSAYVEFLHKESAERALSLNGTSFMTRILKVVRRSSHEAAHFYGWPGSGRSSIYGRHGRMAYPRAVIPGGSFRGRAPMKAGARSLQWKREPSGTDSSAGAKTDMSVAFSSEQVLPRAT

SEQ ID NO: 45534 - protein, 680 aa, Zea mays
  Clone ID: 700551895_FLI.pep
IAGPSLGSAMSAGSTASLLAAVICLALAVLAPVVPGDGATLESVPDLVKAMYLNVESFPCVRLLNLSGEIGCSNPGSEKVIAPIVRLRKGSDQLVQPSTILLSLDQMSDFFLRVSNDPELHQKVAGVLVESNGVNNDLQELSPDRKFPQDDFAPYSNHSHDWNPAGSGIMWNKYNFPVFLLSEESTNTLQKISEKNEKTGNGYKANVAEFDLVMQTTKAQTHDSASCLKEQSCLPLGGHSVWTSLPPLNNGSTEHPKPLILAIASQDSASFFRDRSLGSDSPISGLIALLTAVDALSHIHGLSKLKKQLVFAVFNGEAWGYLGSRKFLQELDEGAASVNGISSLKIDQVLEIGSVGKAILEEYPSFYVHAEGNPSASKEILDALQSASKSLGSDNVKVKQAASSNPGVPPSSLMSFIRKNMSTSGVVLEDFDSHFSNRFYHSYLDNSVNINSSSIAAAAALVARSMYILASDDSVVDLITLNTIKVNVSLVEELIGCLLTCNPGLSCGLVKRFISPSNPCPSHYVGVFLDDPSGTQLPSYADDTSRFVWNFLADRTNSAGNKSSCTGKCGDEGEVCVGAEVEGGGRCVVSTTRYVPAYSTRVKFEDNAWHVLPANSSDPMGAADPVWTESFWNTIGLRVYAVQDPAYDWLILLAGLGITAASYCAVHFGRAYISKVAKLD

SEQ ID NO: 45535 - protein, 600 aa, Zea mays
  Clone ID: 700611645_FLI.pep
PAIQNPEELPGGEKQIRLPRAPTGDRYRLVAEAMASAALICGTEQWKALQAHVGAIQKTHLRDLMADADRCKAMTAEYEGIFLDYSRQQATGETMEKLLKLADAAKLKEKIEKMFKGEKINSTENRSVLHVALRAPRDAVINSDGVNVVPEVWSVKDKIKQFSETFRSGSWVGATGKPLTNVVSVGIGGSFLGPLFVHTALQTDPEAAECAKGRQLRFLANVDPVDVARSIKDLDPETTLVVVVSKTFTTAETMLNARTLKEWIVSSLGPQAVAKHMIAVSTNLKLVKEFGIDPNNAFAFWDWVGGRYSVCSAVGVLPLSLQYGFPIVQKFLEGASSIDNHFYSSSFEKNIPVLLGLLSVWNVSFLGYPARAILPYSQALEKLAPHIQQLSMESNGKGVSIDGAQLSFETGEIDFGEPGTNGQHSFYQLIHQGRVIPCDFIGVVKSQQPVYLKGETVSNHDELMSNFFAQPDALAYGKTPEQLHSEKVPENLIPHKTFKGNRPSLSLLLPTLSAYEVGQLLSIYEHRIAVQGFIWGINSFDQWGVELGKSLASQVRKQLHGTRMEGKPVEGFNHSTSSLLARYLAVKPSTPYDTTVLPKV

SEQ ID NO: 45536 - protein, 356 aa, Zea mays
  Clone ID: 700475904_FLI.pep
PFSVSEHPTIAGIADEAEILNSLQKPKKVVFLGSDGVERPFLCKPKDDLRKDSRMMEFNAMINRLLSKVPESRRRKLYIRTFAVVPLTEDCGMVEWVPNTRGLRHILQDIYITLGKFDRVKTNSQIKKIYDTCHGKMPDDVMLKTKILPMFPPVFHKWFLMRFSEPAAWFRARVAYAHTTAVWSMVGHIVGLGDRHGENILFDSTTGDCVHVDFSCLFDRGLLLDKPEVVPFRLTQNMIDGLGITGYEGVFLKVCEITLSVLRTHKETLMTVLETFIHDPLVEWTKVNKSSGGEVQNPHAQRAITNINARLQGVVVGVKASPSLPLSVEGQARRLIAEAVSLNNLGKMYIWWMPWF

SEQ ID NO: 45537 - protein, 647 aa, Zea mays
  Clone ID: 700623889_FLI.pep
SACWAMARSWLDVQVDLELSQYQTSRPEKQLDDDMNGAQSSVGPESWPYHVLDQQPHDLTALLQKLHSSDLVHETVSRACREQHRQIQMNLMSGNISHLLDLLWSWLSPAEENHNNTARPLDDPEMIRFGAHIVLVLRHLFSDGMDDELDEKLVTVGDLIINMYVRYLFSEDQEELVGIYASQLQHDLCITLFVEMMELRLNSSLHTMYKLFLSAVEYLPFSSDNVSKACFEEIIERVLSRSRQTKPTKYDGDFSDVAHQHHLQSLQKAMVIQWLCFTPPSSIPDFQMISWKLLIRALTHSNTLFREFSLISMRRVPELPAGPHKLLAILAEPLKQKENLISREDPEVSDNLPEFEDWHEYYSLDATYRSWLKIEMMNAAVSPEMLSAEEKGQAVAAAKETLNLACSLLRRDGRPWLYAVESSPFESPDVIFLELHASAMLCLPSGECMLPDATSCTALTSALYSTVSEDDVLHRLLKVDVQVSSRDPCCIEVALRCLAAEGDGYGLHEANDGGLLAAVMAAGFKGELSRFQPGVSMAISRLDAWYSDRSGSVESTAAYIIRGLCRRCCLPETILRSMQACIALSAAGDDLDYSLDKCDELVELVGSAESGMMHLFSQQQLQEFLIFEREYLICTMEFEEDRLPCDG

SEQ ID NO: 45538 - protein, 381 aa, Zea mays
  Clone ID: 700799210_FLI.pep
KTLPAMMGVKDYKMIHGQTRLVLMKVKNKKLILGPARCLLLCVLMTRKVAGTLQQRAFHLRKRLMIHGIVRGVMMTARKLTPGVLASQVGIRNFLGANLISLWGTRNLLGTTQGSVTMTMRIIEVDLDVEIEAEGEEGILGMVVGHHGMEAIETMNQVAEGLESHGTEGTLMVAEEEAEVVLGEVTVTRATTSGQEMVAAGALAGEMVAAVVTGTGTITMSDPSVKVVAGPSPSLPIGMPTKEMAKEIKLSRKASPAGKHKTPLVEMVRQERVMQTTPGVRTDHLHLALGALPVEELAAEVLGERATRMAGTQREDQPKRSLHGVVGQKRLPRKRTKVVRGTGAKEEVVSVPGIKGQMMHGTATRVVILGVVDGKISAKII

SEQ ID NO: 45539 - protein, 857 aa, Zea mays
  Clone ID: 700803483_FLI.pep
KKASVSPEQQPVIASPQLKMDMPSFTPAIKHTAGFALSGSKLVPKTGEIASEPNYQVTGGMDSEQRIIFSEKIRCAVEQSTAQAKGASLDSMEAVKHKEGVWSNLSTISRNKLSPEVEEKLTSVAAAAEAAVSVAKAAAEAAKMASEAALQAKIMAEETLSSFTSVMSMHHEVGQSDVISSPLILSSSTPASSLKIKDKSHAPGSIISVAREAARKRVEEASAAAKRAENLDAILKAAELAAEAVFRAGTIIGMGEPLPFTLRELLEAGPNGYWKSASVRNKSGSGNDNLVTETLEVDAPANPSKSGRKRGRKPKYDQALPNSEPFSNCKELQPYGIHSGHGVVGNVPVTVPMDGTNVTSPISIVWNGIEKGSAVEVLSDKVGFGVAWFSAKVIDINENNAFVSYDNHNGTGPREEWVPLRQEGDKPPQIRLAHPATLSKFKTRKRRRETAGSCLWVIGDHVDAWVNNCCWREGVISQNYETDETKYVVHFSVGGGGESLVVDAWSLRPSRVWKDVQWIEWSRARERKSKSNKGDSPLEKRQKTDLLQAGGNLSVVDETGGSSKDKNTNNAKKSDELKTLSLSQGEIVFNIGKSVVENKSDALAFKRPGLQKEGSKVVYGVPKHGKKKFMEVSKHYYAGQFDKISEGNASNRFVKHLVTQLPRERENDSKVDPIRGRRVGETRSRLPKPTKSQSVRASSAPGNDSFPMHVQNTCVSQRSFGFAGSSTSTSNNEKSTSEKNNPALGVGFRTEVPSVSELQTASTVPTNRAKKKYIPTVSNINRSILNTSEKANSDSGEPRRTTSDSTEPRRSNRRIQPTSRLLEGLQSSLIISKVPGEKVPRSNYKSASSRGRAQSHG

SEQ ID NO: 45540 - protein, 535 aa, Zea mays
  Clone ID: 700804353_FLI.pep
VGHIMSSEDKAMANRVTSHSPKAMVSEPDPNRMMMFRSNMEYSQTNGQTNAVLGPVAIFWDIENCPVPCDVRPEDVAGNVRMALRMHPVVRGAVTMLSAYGDFNAFPRRLREGCQRTGVKLVDVPNGRKDAADKAILVDMFLFALDNHPPSSIMLISGDVDFAPALHILGQRGYTIVIAIPSSVTVSSALSSAGSFVWDWPSLARGEGVVIPRSLVRRLADYPCYVNSGNMGQFPDNQNEEEAIVYTGTSRNEYGGRPPVNQMYCYNTSQTTREPSKALYTVEDVNCGTSSRPHNLSCRQSESPETDQGLTDEQSWWVRPGDLQGLKGQLIRLFELSGGCVPLVRIPSEYLKLFGRHLYVSEYGAVKLVHLFEKLADSFVVVGKGHKKMICLCNSGDRNLKNYPSTPIILTKKNRGNSALEESTIGACQQLGSSSDELSEDEPIINPDINVACVFNEHLDSFRREIQELLVCYSCPVPLGNFESLYEQRYKKIIDYESLGVTGLEELVEKVKDVVDLHEDQTSKSKFLIANYTTG

SEQ ID NO: 45541 - protein, 301 aa, Zea mays
  Clone ID: 700550309_FLI.pep
KKTHPECARFSPDGQYLVSCSVDGIIEVWDYLSGKLKKDLQYQADESFMMHEEPVLCVDFSRDSEMLASGSQDGKIKVWRIRTGQCLRRLERAHSKGVTSVTFSRDGTQILSTSFDTTARVHGLKSGKMLKEFRGHSSYVNYAIFTTDGSRVITASSDCTVKVWDTKTTDCLHTFKPPPPLRGGDASVNSVHLFPKNTDHIVVCNKTSSIFIMTLQGQVVKSFSSGKREGGDFVAASVSPKGEWIYCVGEDMNMYCFSYQSGKLEHLMKVHEKDVIGITHHPHRNLVATIAEDCMMKIWKP

SEQ ID NO: 45542 - protein, 229 aa, Zea mays
  Clone ID: 700550662_FLI.pep
EKEKLYFQHSVCILRPESIAFLFLGHRGNIPEKEKLYFLVEEYIPNVESLEKFINVSRLDWSSCFKIIQGIAKGLHCLHKHHILYMDLNPANILVRSDMNPVVINFGSSIVLDRDDDKVTGDAVAGTLGYVAPEKLMEAYASMMSDVFSFGIIIIEIITGRRASPFVDLPEWGSVDEMITSAKGLFDPALANESQLMKINRCREVGLKCIERDPKRRPTMGNVLEMLSS

SEQ ID NO: 45543 - protein, 135 aa, Zea mays; identical to SEQ ID NO: 39457
  Clone ID: 700800059_FLI.pep

SEQ ID NO: 45544 - protein, 573 aa, Zea mays
  Clone ID: 700800359_FLI.pep
SLRAPKLGNARTDVKPDHFAREAKEFLRMRLIGKQVAVEMEYSRRISTVDGQSVAPTANIADTRVLDYGSVFLGSPSQTDGDDISSAPSSASQPGVNVAELLLSRGFAKTSKHRDYEERSHYYDALLAAESRAEKAKKGVHSQKESPVMHITDLTTVSAKKAKDFLPFLQRNRRHSAVVEYVFSGHRFKLTIPKETCSIAFSLSGVRCPGKGEPYSDEAIALMRRRILQRDVEIEVEAVDRTGTFIGSLWESKTNMGSVLLEAGLAKLSSFGLDRMSDAHVLTRAEQFAKQQKIKIWENYVEGENASNGSAPESKQKEILKVVATEVLGGGKFYVQTVGDQRVASIQQQLASLKLKDAPVIGAFNPVKGEIVLSQFSLDNSWNRAMIVNGPRSVESLNDKFEVFYIDYGNQEVVPYSRLRPVDPSVSSSPALAQLCSLAFIKVPSLEDDFGQEAAEYLSECLLSSSKQYRAMIEERDASGGKSKGQGTGNVLIVTLVDAETESSINATMLEEGLARLERSKRWDTRERKTALQNLEQFQEKAKKERLRIWQYGDVESDEDEQAPAARKPGGRR

SEQ ID NO: 45545 - protein, 457 aa, Zea mays
  Clone ID: 700805728_FLI.pep
LIQDLRLLGCPYKVTRSALKAPGTPHSWPVLLSVLHWLTLLCHSQGDDLDAPSGPSDDLLLYITQSYSHFLSGDDAAVETVDEEYASKARMTGEAYVATARALEKEAEELETQVNKLISGPSRREALESEKEAFNADIHKFDAVVNAWKTKFNEREQSLGDLEKELEAKVSDTQRAAAEIQDLLKQVDAQPVNVKDVDRMRREMQAIEDDIANAEKGKTALEDKVWELEAKLVTKLEELERHAEQCNQALKKLKPTVAFQYMIDSKGSSPAEMLGTGYKTVLKPALLAHAEENKRICLSNLENLNDLQKQLQGNAKVLEEERNNISSLQEKNDEIVARLNLLDREIINDDSRFTSEAAQMKDELEKKKNSLISAEKQADDFLKKSEKRLQDVTLKVEEETQAAAKELLELLDSMAEHKEFMETTIAQRRKDLYETADYIASVASKTVITQVPNPPES

SEQ ID NO: 45546 - protein, 229 aa, Zea mays
  Clone ID: 700553326_FLI.pep
TELARKLGLQPRQVAVWFQNRRARWKTKQLERDFDRLKASFDALRADHDALLQDNNRLRSQVVSLTEKLQEKEDATEGGATADTAAPAVDVEASLADDVEEPAEPAATFEVLQEVKSEDRLSTGSGGSAVVDADALLYGRFAAAVDSSVESYFPGGEDHYHDCGTMGPVNHGAGGGIQSDDDGAGSDEGCSYYADEAAAAAAAFFAGHATHHHADEDEDAGQISWWMWN

SEQ ID NO: 45547 - protein, 499 aa, Zea mays
  Clone ID: 700475141_FLI.pep
ESADSPLTLARSSGYSNYPSALLVSNTNSRFCPLPESNVTSPCLLWPAYLRDDGILHVLGNASSSTIVQQRSSLVQPSTSDTANLQLEQFATPMDVCPGEPTSFNNISDAVTVPTSNAIEMHGAGGQSNPRLQGSSSISNLERFSARDALQVSSLSSIEPIPSTAGSSGSNSRRAMPLNMLLTGGLDVQMFQRNVGSGQQDHFLFGDSSNWEVPFVQGFLMTQNHTGLHPALVNNNVLEDLSGAGTAGINNSTRESSHMHNFGRPGASSSIPLTSGSSRRPNRHYASRSVPGVGSLLLVGPQIDEAEAHAASLGAGSEITASMLAPGTELPCTVKLRIWRHDINEPCVPLAPEACRLTISHAVLCSEMGAHFSPCGRFLVACVACLLPQTEGGRGSQLPVPYEEAGSSPTRHPLPSHRVIYELRVYSLEEETFGDILASRAIRAAHCLTSIQFSPTSEHILLAYGRRHSSLLRSIVVEGENGIPVYTILEVDMTIISNF

SEQ ID NO: 45548 - protein, 501 aa, Zea mays
  Clone ID: 700475473_FLI.pep
DAQPDSGSGDASHKSPGSSSPAKSIAGDGEVEGSKRNVSVVPTVNQTGSPASVGQKDVGSPRNNNTVGASPPVKNPEQTWSQVAPGGSSGTVNNPKGNAAAQGSAGSSENHSAQVNSSKSGNNSKGSRSSITQDGGSGGNKKGDWYKEMASCDMFSGNWVRDDSYPLYPEGSCPHIDEPFDCYLNGRRDLAYQKLRWQPSGCSIPRLNPTDMLERLRGKRLVFVGDSLNRNMWESLVCILRNSVKDKRKVFEASGRREFKTEGSYSFLFTDYNCSVEFFRSPFLVQEWEMQVSSGKKKETLRLDLVEQSSLKYKDADFIIFNTGHWWTHEKTALGKDYYQEGNHVYNELNVMDAFHKALLTWSKWIDANVNPRKTLVLFRGYSASHFSGGQWNSGGGCDKESKPITNDQYLSTYPPKMSILEDVIHKMKTPVVYLNITRMADYRKDAHPSIYRKQNLTDEERRSPERFQDCSHWCLPGVPDSWNELVYAQLLIKQHQMRQQ

SEQ ID NO: 45549 - protein, 138 aa, Zea mays
  Clone ID: 700622846_FLI.pep
KAEPDPDDHVGDSNINELQRVEEPVRALCSRLQKSIKMLRLQATPVEAESAIQTLFKIIKNVIEHPNDIKYKRLRKSNPHFQRSVANYKAAMEVLELIGFCEDVISDEVGRAETYLVLKRNDPGLLWLAKSSLEVSLA

SEQ ID NO: 45550 - protein, 276 aa, Zea mays
  Clone ID: 700623346_FLI.pep
FGSTIPHCHLVQFQSEQQQAAAAMGSGSNSKEGEERVLSHGDVVLIRSDLAILRGPCFINDRIIAFYFAHLSASLQDDDLLLLPPSIPYLLSNLPDSAAVAAVAEPLRLASRRLVLLPVNDNPDASIAEGGSHWTLLILDNITSPSVPRFVHHDSIAGAPNLPIAARLADALRPLLSGSNSKRDTVPLIEGPTPRQTNGYDCGVYVMAIARALCAWWKSGQDQRGGDWFQAVRSGVDAHSVEAMRTDLLQLISTLIQEKANANSTPMGDTDPGSLE

SEQ ID NO: 45551 - protein, 485 aa, Zea mays
  Clone ID: 700623780_FLI.pep
PSASVSLDNHDARRQAKAKRANPAMEKAIDRQRVLLAHLLPSPSAASSQPQLAASACAAGDSAAYQRSSSFGDDVVVVAAYRTPICKAKRGGFKDTYPEDLLTVVLKAVLDNTRINPADIGDIVVGTVLGPGSQRANECRMAALFAGFPETVPVRTVNRQCSSGLQAVADVAAAIKAGYYDIGIGAGLESMCINSIAWEGQVNPKISAFQKAQDCLLPMGITSENVAHRYGVTRQEQDQAAAESHRRAAAATASGKFKDEIVPVPTKIVDPKTGEEKEVVISVDDGIRPGTTASGLAKLKPVFKKDGTTTAGNSSQVSDGAGAVLLMKRSVALKKGLPILGVFRSFAAVGVDPAVMGVGPAVAIPAAVKSAGLEIGDIDLFELNEAFASQFVYCCNKLGLDRSKVNVNGGAIALGHPLGATGARCVATLLNEMKRRGRDCRFGVVTMCIGSGMGAAAVFERGDAVDGLSNVRDMQAHNFLSKDAK

SEQ ID NO: 45552 - protein, 358 aa, Zea mays
  Clone ID: 700802214_FLI.pep
GPSTGRTVEEQITGCLNQEAKSIPMAREGELPKEKPFRCSCQENISRESHQSVVARPTLNFTGKQVPQLHIGSRASSSFSMYQRTSAKPNPCLDSHDHLSAAKVAAESAVSLSSYSTDCISPSLQTQLPSPSNPILRLMGKDLMVMNNEESVHPQAPSSDYILRGNYEAPVGFMPPSYQHLGNSGFISMPPTAASHQIPLPSVQASGLVGPPLHSVSMMQPDHHSQQKSYRNIMPAMHHPTYMMKEVIVIKDSPERSRTEPQASMLFPPAPPPTLSIPNNTPPRPFYCLPPQIPILPRERAAGSMPVYANFGALAGVSPSSQESQTGVANPYMPNPFFVQSRTGYMNHPPVYYSQNLG

SEQ ID NO: 45553 - protein, 319 aa, Zea mays
  Clone ID: 700570451_FLI.pep
DTRCWKGCSVPASDALHVECPLFTLFTGWLLSSLPPLSAAVFSSGAASGSAPGAASVAAASALVPGAGSAAAASDLISGAGSAAAAGSASDLVSGAGAATASAADSATGLVSGTGAAAGSASDLVSGAGAATASAADSATSLVSGTGAAAAGSATDLVSGAGAAAGSATDLVSGTGAAAAAGSASGLFSGAGAGTAAGLASGLVSGAGARTAAGSATDSVSGTGAGTAAGSAGAGAEFSVGLLTGAGATASGSSGLASSFFSSDCARGATTASAGFSVSFSSSSIGAGAGVSSALSAAFSASSVSVGASFASSAGFIST

SEQ ID NO: 45554 - protein, 385 aa, Zea mays
  Clone ID: 700803361_FLI.pep
ENLIRTENEADVAAAQDAGYEKFLVDRLTLKPGKISALAKSIRTLARMEDPINQILKRTEIAENLILEKTSCPLGVLLVIFESRPDALVQIASLAIRSGNGLLLKGGKEAMRSNKVLHKVITGAIPSNVGEKLIGLVTSRDEIADLLKLHDVIDLVIPRGSNKLVSQIKTSTKIPVLGHADGICHVYIDKSANMNMAKQIVMDAKIDYPAACNAMETLLVHKDLIKAPGLDDLLLSLKTKGVAIFGGPVAHEVLCIPEANSFHHEYSSMACTIEFVDDVQSAIDHIHCYGSAHTDCIVTTDDKVAETFLRQVDSAAVFHNASTRFSDGARFGLGAEVGISTGRIHARGPVGVEGLLTTRWIMRGSGQVVNGDNDIAYTHKNLPLP

SEQ ID NO: 45555 - protein, 128 aa, Glycine max
  Clone ID: 700553740_FLI.pep
LLILAFSLRGESSKNGSMARICKVGKEVVNRTGGSVDVLEPCTHDSKHGQSAILDLLSSQVLDLLRRTGSPTKGVKPKATRVTHIGSGELVVGKDGVSVDTAWLDYVSPSSTLGPANEKELNYEEGSS

SEQ ID NO: 45556 - protein, 249 aa, Glycine max
  Clone ID: 700553813_FLI.pep
HSFKNTDSLSEVKNENHRTGVTRKPTNHNSNICSNHNAYSKPKITTINIKGMILLQQNLPPFFHPLKNLILIPPASSIRSTASSRVAGPAVTTISTVSPTATITSTATMTSTTTITSTTTISTTSTVAVIATSTTFTAASSSISSSTAAVTAAAITTTTSVSTATTASSTGLCFVHCDTTTVEVLTVHSFDCVFHRLLRGEGHKSKPSRSSSFTIDDNHNERRLSREHRCRWPKQAHRQSIGTLLLQKP

SEQ ID NO: 45557 - protein, 463 aa, Glycine max
  Clone ID: 700554080_FLI.pep
QLKLKALAFPTTPNTKTSSSMAASVSTVGAVNRALLNLNGSGAGASAPSSAFFGTSLKKVIASRVPNSKVSGGSFKIVAVEEKKEIEETQQTDKDRWKGLAYDISDDQQDITRGKGLVDSLFQAPQDAGTHYAVMSSYEYLSTGLRQYLDNKMDGFYIAPAFMDKLVVHISKNFMTLPNIKVPLILGIWGGKGQGKSFQCELVFAKMGINPIMMSAGELESGNAGEPAKLIRQRYREAADMIKKGKMCALFINDLDAGAGRLGGTTQYTVNNQMVNATLMNIADNPTNVQLPGMYNKEENPRVPIIVTGNDFSTLYAPLIRDGRMEKFYWAPTREDRIGVCTGIFRTDGIPEQDIVKLVDTFPGQSIDFFGALRARVYDDEVRKWISGVGVDSVGKKLVNSKDGPPTFEQPKMTLEKLLLYGNMLVQEQENVKRVQLADKYLNEAALGNANEDAIQRGTFFQS

SEQ ID NO: 45558 - protein, 260 aa, Glycine max
  Clone ID: 700556226_FLI.pep
KDRDQDRDRDRYRDDGMKERDREFRERDKSTAIANKDVLGSKMSLYPSKEKYLSKPINELDLSNCDQCTPSYRLLPKNYPIPVASQKTELGAEVLNDYWVSVTSGSEDYSFKHMRKNQYEESLFRCEDDRFELDMLLESVNVTTKRVEELLDKINSNIIKGDSPIRIEEHLTAINLRCIERLYGDHGLDVMEVLRKNAPLALPVILTRLKQKQEEWARCRADFSKVWGEIYAKNYHKSLDHRSFYFKQQDTKSLSTKGNK

SEQ ID NO: 45559 - protein, 455 aa, Glycine max
  Clone ID: 700559193_FLI.pep
PFLPFLFTIININLFQIPMDPTKKRKLDENGFINNDSSEPLKLSPSDARKLIERFTTDQLLDILQDTVARHPDVLAAVRAVSDPDVSQRKLFIRGLGWDTTTDGLRSLFSTYGDLEEAVVILDKATGKSKGYGFVTFRHVDGALLALREPSKRIDGRVTVTQLAAAGNSALNANAVDVALRKIYVANVPPDLPADKLLAHFSVYGEIEEGPLGFDKQTGKSKGFALFVYKSPEGAKAALIDPMKTVEGRQLSCKLAITDGKQGKRSGPDSGQAHHGNVQHGHGDGVGAGMGIPPNSGSGSGPGQYGGPGHYGPTVGMGSYGGFGGQPPMGNNNHPLNSSNPVPGSMAGAGGYGGGMGGPYGGYGGGPGSTGFAGAGGMGAGGGGVGGGGLGGAGGGSMYRLPGSGGMPAGGGGYPDSGHYGLSASSGYQNQHHPPSGASPVPRVPPMYPNVPPYY

SEQ ID NO: 45560 - protein, 349 aa, Glycine max
  Clone ID: 700559336_FLI.pep
LLQPHFCSAIIMGKVKIGINGFGRIGRLVARVALQRDDVELVAVNDPFITTDYMTYMFKYDSVHGHWKHHDVTVKDEKTLLFGDKPVTIFGHRNPEEIPWGSTGADIIVESTGVFTDKDKAAAHLKGGAKKVIISAPSKDAPMFVVGVNEHEYKPELDIISNASCTTNCLAPLAKVINDRFGIVEGLMTTVHSITATQKTVDGPSAKDWRGGRAASFNIIPSSTGAAKAVGKVLPALNGKLTGMAFRVPTVDVSVVDLTVRLEKEASYDEIKNAIKEESEGKLKGILGYTEDDVVSTDFIGDSRSSIFDAKAGIALNKNFVKLVSWYDNEWGYSSRVIDLLVFVAKKSL

SEQ ID NO: 45561 - protein, 289 aa, Glycine max
  Clone ID: 700566412_FLI.pep
TIEAEAAHGTVTRHFRVHQKGGETSTNSIASIFAWTRGLAHRAKLDDNAKLLDFTEKLEAACIGVVEAGKMTKDLALILHEFLCVQIMLPSRAESARAARGELELENLVIQPGEALVVNFPFVLHHMPDESVSTENHRDRLLRLVKSLSPKVVTLVEQESNTNTSPFFQRFVETLSYYTAMFESIDVALPRDDKQRINAEQHCVARDIVNMVACEGDERLERHELLGKWRSRFSMAGFAPCPLSSSVTAAVRNMLNEFNENYRLQHRDGALYLGWKSRAMCTSSAWRCY

SEQ ID NO: 45562 - protein, 587 aa, Glycine max
  Clone ID: 700651428_FLI.pep
SKICNSLSLSLSLSHDFSLGVAMTEPTEPSTSSSLARDPTTVVHPRREPFEHGLLPIPRLIFSDPAQTLIPLKQKLLELSSNQRVDLAAISESLQISIEHARLVLDTLASILHSDSEPLVVANLVEIDSVGVDVHDLVLFLYIQSYKRLLPRTHKDSAAVTDVWPSTSAFDGYLSALSPLQLVRSNSRRFMPSQADEEAHQLSYLQKHLANIVSLLAEPVEGEGDESLVLTMDRFEHLGFLIQFGDKGSEGNSFSQCSPFFANSDPDMPAVPVPAAQVHDWLLQNVAAALEYISERTSSKENGPASASDQDVAMTDASTVSVKVSTGTRGASFIEGISKSSYAKHASDIKGSSVKVLNCHESAIYILAPLRYATVYGCSDATIVLGAVGKAVRVEHCERVHVIVAAKRICIANCRECVFFLGVNQQPLIVGDNHKLQVAPYNTFYAQLEEHMSEVGIVPTVNRWNEPLALGMVDPHDSLSHPAGVSDVQAESATLVDPDQFTNFVIPSWLVEESTGSTKDNPFTLPDAYMASQHKNHKNLEEIRQLLREASLEESRKRELSSALHVYFKDWLYASGNIRQLYCLQGD

SEQ ID NO: 45563 - protein, 331 aa, Glycine max
  Clone ID: 700668085_FLI.pep
SMLSVLRVHLPSDIPIVGCELTPYVLLRRPDKTVTTDDFPETAPLDGHFLRYKWYRVQSDKKVAVCSVHPSEQAALQCLGCVKAKIPVAKSYHCSPKCFSDAWQHHRVLHDRAASAANENGNEEEELYGRFNNSGSGSGSMNTSLSSSASSASLTNGSAPVYPAAVTQRSGGETWFEVGQFKTYTPTADDIGHVLKFECAVVDSETKLAVGHVNTLLTSRVIPAPSPSPRRLIPVDGMGHLDADGRITSSGTFTVLSYNILSDAYASNDLYNYCPSWALSWPYRRQNLLREIVGYRADIICLQEVQSDHYEEFFSPELDKHGYYGLYKENK

SEQ ID NO: 45564 - protein, 212 aa, Glycine max
  Clone ID: 700671992_FLI.pep
TELIGKTPLVYLNRIVDGCVAKVAAKLEMMEPCSSVKDRIGYSMIVDAEEKGLITPGESVLIEPTSGNTGIGLAFMAAAKGYKLIITMPSSMSLERRTILRAFGAELVLTDPAKGMKGAVQKAEEIRDKTPNSYILQQFENPANPKIHYETTGPEIWKGSSGKVDALVSGIGTGGTITGAGKYLKDQNPDIKLYGIEPVESPILSGGKPGEY

SEQ ID NO: 45565 - protein, 428 aa, Glycine max
  Clone ID: 700555564_FLI.pep
PQVIAEYLQKIDPKSDGAKRDWVAIYDECASVLYQEIDYTKEAANAELFASNFKNMDYVKVPTIYWDYTTPQILTMEYVPGIKINKIQALDQLGVDRKRLGRYAVESYLEQILSHGFFHADPHPGNIAVDDVNGGRLIFYDFGMMGSISPNIREGLLETFYGVYEKDPDKVLQAMIQMGVLVPTGDMTAVRRTAQFFLNSFEERLAAQRQEREEATTELGFKKPLSKEEKIKKKKQRLAAIGEDLLSIAADQPFRFPATFTFVVRAFSVLDGIGKGLDPRFDITEIAKPYALELLRFREAGVEVVLKDFRKRWDRQSQAFYNLFRQADRVDKLADIIQRLEQGDLKLRVRTLESERAFQRVAAVQKTIGSAVAAGSLINLATVLYLNSIRVPAIAAYIFCALFGFQVLLGIVKVKKLDERERLITGTA

SEQ ID NO: 45566 - protein, 410 aa, Glycine max
  Clone ID: 700563111_FLI.pep
EEQTTLTSPRATAKPLCSLSQASSRRRIKYHYFDFELYCLCHQPAAMYRNAASRLRAIKARSCSSSSRVPASARFASSVATQQSSSSGLGGLFGWLTGDRTSSLPSLGFPLPGVTLPPPLPDYVAPGKTIITTLPNGLKVASETSPSPTASIGLYVDCGSIYESPISFGATHLLERMAFKTTRNRSHFRVVREVEAIGGNVQASASREQMGYTFDALKTYVPEMVELLVDCVRNPVFLDWEVNEQLLKVKAEIGEASKNPQDLLLEAIHSAGFSGALANPLLASESAVNRLNSTILEEFVAENYTAPRIVLAASGVEHEELLSIAEPLLSDLPSVPRPEEPKSVYTGGDYRCQKESGRTHFALAFELPGGWHKLKDAMVLTVLQMLLGGGGSFSAGGPGKGMYSRLYQNF

SEQ ID NO: 45567 - protein, 512 aa, Glycine max
  Clone ID: 700648409_FLI.pep
LIKMKETAEAFLGKKINDAVVAVPAYFNDAQRQATKDAGVIAGLNVARIINEPTAAAIAYGLDKKGGEKNILVFDLGGGTFDVSILTIDNGVFEVLATNGDTHLGGEDFDQRIMEYFIKLIKKKHGKDISKDNRALGKLRREAERAKRALSSQHQVRVEIESLFDGVDFSEPLTRARFEELNNDLFRKTMGPVKKAMEDAGLQKSQIDEIVLVGGSTRIPKVQQLLKDYFDGKEPNKGVNPDEAVAYGAAVQGSILSGEGGEETKDILLLDVAPLTLGIETVGGVMTKLIPRNTVIPTKKSQVFTTYQDQQTTVSIQVFEGERSLTKDCRLLGKFDLSGIPPAPRGTPQIEVTFEVDANGILNVKAEDKGTGKSEKITITNEKGRLSQEEIDRMVREAEEFAEEDKKVKERIDARNSLETYVYNMKNQVSDKDKLADKLESDEKEKIETAVKEALEWLDDNQSVEKEDYEEKLKEVEAVCNPIISAVYQRSGGAPGGAGGEGEDEDDSHDEL

SEQ ID NO: 45568 - protein, 422 aa, Glycine max; identical to SEQ ID NO: 43848
  Clone ID: 700648555_FLI.pep

SEQ ID NO: 45569 - protein, 396 aa, Glycine max
  Clone ID: 700648707_FLI.pep
LELMKDPVIVSTGQTYERTCIEKWLQAGHGTCPKTQQTLTSTVLTPNYVLRSLIAQWCEANGIEPPKRPSDLQPSKSASAYSPAEQSKIESLLQKLTSVSPEDQRSAAGEIRLLAKRNADNRVAIAEAGAIPLLVGLLSVPDSRTQEHAVTALLNLSIYENNKGSIVSSGAVPGIVHVLKKGSMEARENAAATLFSLSVIDENKVTIGSLGAIPPLVTLLSEGNQRGKKDAATALFNLCIYQGNKGKAVRAGVIPTLMRLLTEPSGGMVDEALAILAILASHPEGKATIRASEAVPVLVEFIGNGSPRNKENAAAVLVHLCSGDQQYLAQAQELGVMGPLLELAQNGTDRGKRKAGQLLERMSRLVEQQQEVPIQTETQAQNEDTQPPLITNPDDS

SEQ ID NO: 45570 - protein, 533 aa, Glycine max
  Clone ID: 700653063_FLI.pep
ANNMVVLAASIVSKSGKVLVSRQFVDMTRIRIEGLLAAFPKLVGTGKQHTYVETENVRYVYQPIEALYLLLVTNKNSNILEDLETLRLLSKLVPEYSYSLDEEGICKHAFELIFAFDEVISLGHKENVTVAQVKQYCEMESHEEKLHKLVLQSKINETKDVMKRKASEIDKSKIEKNRGDKGGFGPLQSMGSGRIENSFSDLSISSSGTGFGSGSGFGLTSDVDSFATKSKGRPTSSATAPPKGLGMKLGKSQRTNQFLESLKAEGEVILEDVQPKLSQSRVSAPPPTDPITLTVEEKLNVTLKRDGGVSNFDVQGTLSLQILNQEDGHIQVQVQTGDNQAVSFKTHPNMNKELFANDYILGLKDPNRPFPTGQASDAAGVGLLKWRMQSTDESMVPLTINCWPSSSGNETYVSIEYEASSMFDLQNVVISVPLPALREAPSVRQIDGEWRYDSRNSILEWSVLLIDNSNRSGSMEFVVPLADSSVFFPISVRFMATDTFSDLKVTNIIPLKGGNPPKFAQRTQLITDSYQVV

SEQ ID NO: 45571 - protein, 796 aa, Glycine max
  Clone ID: 700653127_FLI.pep
TLPMATKKVKAIGIDLGTTYSCVAVWQHNRVEVISNDQGNRTTPSYVAFSDTQRLLGDSAMNQRSMNPKNTVFDAKRLIGRRFSDQTVQQDMKMWPFKVVPGNKDKPMIAVTYKGEEKLLAPEEISSMVLYKMKEVAEGYLGHFIKDAVITVPAYFSNAQRQATKDAGKIAGMNVLRIINEPTAAAIAYGLDKKGLRVGEQNVLVFDLGGGTFDVSLVTIYEGMFKVKASVGDTHLGGVDFDNRLVNHLVNVFREKHKKDISGNAKALARLRSECEKAKRILSSTSQTTIELDCLYEGLDLYAPVTRALFNELNKDLFMKCMDTVEKCLLEARIDKIQVHEIILVGGSTRIPKVQQLLKDMFSVNGNTKELCKGINPDEAVAYGAAVQAAILSGEGDKKVEELLLLDVMPLSLGFEGAGGVMSVLIPKNTMIPTKKERICSTFYDNQKSFNVKVFEGERVKTKDNFFLGKFVLKGFDPLPKGVPQINVIFDVDADGIVEVTAEDKATGIEKKITINNKHGRLNPEEIRRMVRDSKKYKAEDELAKKKVKAKNALENYAYEMRERAKKIEEAVEETIEWLECNQLAEIGEFDYKKQELGRYLRDDPNYSNTSNSGVKVPIWCTWRCPPNGWVCLNTDGSVFENHRNGCSGSACGGLVRDSSGCYLGGFTVNLGNTSVTLAELWGVVHGLKLAWDLGCKKVKVDIDSGNALGLVRHGPVANDPAFALVSEINELVRKEWLVEFSHVFRESNRAADKLAHLGHSHSLESGAKRFSDPPSALVAILQDDLAGLAKQRGVN

SEQ ID NO: 45572 - protein, 399 aa, Glycine max
  Clone ID: 700646213_FLI.pep
FSVVLLCITAAQGKEQLHSNSEWPKSFSVIRDTDGICKVAETQGYTCEEHKATTEDGYILSLQRLPAGQSGKKAHKPPVLLQHGLFCDAIVWVVNPPDESLGFILADNGYDVWLANVRGTKYSRGHISLHPNDMAYWDWSWDELARYDLPAFVQYVYNQTGQRMHYAGHSLGTLMVLADLSRGKLLDMLRSAALLCPIAHLNHVTSPVARTAAQSFIADPLYWLGLREFIPNGDAASKLVGGICHILNLINCSNNLLTLITGPNCCLNSSAFNAYLDHGLPPTATKNLIHLCQMIRTAKIAKYDYGDQRQNMQHYGQRVPPLYDMTKISNEFPLFLTYGRQDALSNVKDVQLLLNDLRDHDGNKLVVLFTEDYSHYDFIMGVNVNQIIYDPMIVFFEVN

SEQ ID NO: 45573 - protein, 226 aa, Glycine max
  Clone ID: 700646326_FLI.pep
DITNYFYIFIKMRRGRTAAAAAAVVDPTPDQAKETTRFRGVRKRPWGRFAAEIRDPWKKQRVWLGTFDSAEDAARAYDKAARSFRGPKAKTNFPPFPGPAEADHHSQIPLYQAHGLSTKFEPVVQVNRPTSSGMSSTVESFSGPRVPSSSSRAKPLVVVVNPIIPLNDDEDDCHSDCDSSSSVVDDGQDCVLISSFRQPLPFDLNLPPSDADDDNDDDLPATALCL

SEQ ID NO: 45574 - protein, 522 aa, Glycine max
  Clone ID: 700646368_FLI.pep
DEMKLQRSKLEKEKQEADENKKHLERQRMEMQEDIDVLVDLNRKLKNQREQFIVERRRFIEFVEKLRSCQNCGEMISEFVLSDLQSSVDIENLEVPSLPKLAADIVQGVSNENLASSRQNTGLSPATDPKSPVSGGTVSWLRKCTSKIFKISPIRKIESEDSGTLRDVVTLSVEQTNVEDSPGRIPDAENEAELSFAVVNDSFDARRVQSGNDIIEVEADHDPSVENLNNVDSKAPEDLQAPDSKVGQQKSRKGGGRPRVKRTHTVKAVIKEARDILGESAEALPGESVDDHETEFPNGNAEDSANVNSESQKPYNRRIPANVRKRNRVQTSSQISVSGHDGDANEGHSDSLIPGQRKRRRQKAAAPPAQTAGESRYNLRRLKTGATTSSARAMSGGGKESQGEVDRVKDTEEGIIDSKTSHSHSVGITNENGESIHLEQSLKGVETRAGYGGDTTETFANNMALSEEVNGTADDVEENDAEYRSESRGEDAGGVDNEDDEEDYLQPGEASIGKKLWNFFTT

SEQ ID NO: 45575 - protein, 248 aa, Glycine max; identical to SEQ ID NO: 43868
  Clone ID: 700673168_FLI.pep

SEQ ID NO: 45576 - protein, 433 aa, Glycine max
  Clone ID: 700673240_FLI.pep
GRKPLFGSVERSLAGETPEAVQSAIEQRRKATKMKVFVKTLKGTHFEIEVNPSDTLSEVKKNIETVQGADVYPAAQQMLIHQGKVLKDGTTLEENKVAESSFIVIMLSKTKSSSGEGSTTSTAPSAKPSATPTSTSVSTAPQAPASTGASATPVTAPTAAPAPAPAPAAPAPAPAPIFSGSSVPESDIYGQAASNLVAGSNLEGTIQQILDMGGGSWDRDTVVRTLRAAYNNPERAVEYLYSGIPEQAEAPPVTGVPASAQPSNPPADTPQAAQPASVPSSGPNANPLDLFPQGLPNVGSGAAGAGSLDFLRNSQQFQALRAMVQANPQILQPMLQELGKQNPHLMRLIQEHQVDFLRLINEPVEGGEGNILGQLAGAMPQAVTVTPEERQAIERLEAMGFDRATVLEVYFACNKNEELAANYLLDHMHEFDE

SEQ ID NO: 45577 - protein, 264 aa, Glycine max
  Clone ID: 700555713_FLI.pep
QEAAKRQESNGSGAEVEYKPLPSGPNGANEKDTKEQEVTIIENVYWKEFGLLVFVWVSFLALQIAKENYTTTCSTFYWVLNLLQVPVSVGVTAYEAAALFSGRRVIASTGEQGKDFTVLQLIIYCVFGVLAGVVGGMLGLGGGFVMGPLFLELGVPPQVSSATATFAMTFSSSMSVIEYYLLKRFPIPYALYFVLVATIAAFVGQHIVRKLIILFGRASLIIFILASTIFVSAVSLGGVGIVNMVHKIDNHEYMGFEDLCKYGS

SEQ ID NO: 45578 - protein, 565 aa, Glycine max
  Clone ID: 700558535_FLI.pep
YDDHAVSSKKRKCPPSSKSGKKGLDSAMLEAVARPLAKVAWFRVVLDEAQSIKNHRTQVARACWGLRAKRRWCLSGTPIQNAIDDLYSYFRFLRYDPYAVYTSFCSTIKIPISRSPSKGYRKLQAVLKTIMLRRTKATLLDGEPIISLPPKSVELKKVEFSPEERDFYSRLEADSRAQFQEYADAGTVKQNYVNILLMLLRLRQACDHPLLVKRYNSNSLWKSSVEMAKKLPQEKRLCLLKCLEASLALCGICNDPPEDAVVSVCGHVFCNQCICEYLTGDDNQCPAPNCKTRLSTPSVFSKVTLNSSFSDQPCDNLPDYSGCEVEESEFCSQAQPYDSSKIKAALEVLQSLSKPQCFASQNNSVQSTSGESTDGLGSSSSADRMKSLNEIPESQNVLEERSSNNSVGVGEKAIVFSQWTRMLDILEACLKNSSIQYRRLDGTMSVTARDKAVKDFNTLPEVSVMIMSLKAASLGLNMVAACHVLMLDLWWNPTTEDQAIDRAHRIGQTRPVTVLRLTVRDTVEDRILALQQKKRKMVASAFGEDGTGGCQSRLTVDDLKYLFMM

SEQ ID NO: 45579 - protein, 537 aa, Glycine max
  Clone ID: 700560961_FLI.pep
YNTLIAGLMRCSRIEDSRQLFYDMQEKDSISWTAMIAGFTQNGLDREAIDLFREMRLENLEMDQYTFGSVLTACGGVMALQEGKQVHAYIIRTDYQDNIFVGSALVDMYCKCKSIKSAETVFRKMNCKNVVSWTAMLVGYGQNGYSEEAVKIFCDMQNNGIEPDDFTLGSVISSCANLASLEEGAQFHCRALVSGLISFITVSNALVTLYGKCGSIEDSHRLFSEMSYVDEVSWTALVSGYAQFGKANETLRLFESMLAHGFKPDKVTFIGVLSACSRAGLVQKGNQIFESMIKEHRIIPIEDHYTCMIDLFSRAGRLEEARKFINKMPFSPDAIGWASLLSSCRFHRNMEIGKWAAESLLKLEPHNTASYILLSSIYAAKGKWEEVANLRKGMRDKGLRKEPGCSWIKYKNQVHIFSADDQSNPFSDQIYSELEKLNYKMVQEGYVPDMNSVLHDVDDSEKIKMLNHHSEKLAIAFGLIFIPPGLPIRVVKNLRVCGDCHNATKYISKITQREILVRDAARFHLFKDGRCSCGDFW

SEQ ID NO: 45580 - protein, 490 aa, Glycine max
  Clone ID: 700564493_FLI.pep
HLQEVFSFTMPPKPLDYGSINENVKKSQYAVRGELYLRASELQKEGKKIIFTNVGNPHALGQKPLSFPRQVVALCQAPFLLDDPNVGLLFPADAIARAKHYLSLTSGGLGAYSDSRGLPGVRKEVAEFILRRDGYPTDPELIYLTDGASKGVMQILNTIIRGQDDGILVPVPQYPLYSATIALLGGTLVPYYLEETANWGLDVNELRQSVEQARFKGITVKAMVIINPGNPTGQCLSEANLREVLQFCYQENLALLGDEVYQTNIYQDERPFISSRKVLMDLGPPISKEVQLISFHSVSKGYYGECGQRGGYFEMTNIPPETVDEIYKVASISLSPNVPAQIFMGVMLHPPQPGDISYDKFVRESTGILESLRRRARLMTDGFNSCRNVVCNFTEGAMYSFPQIRLPPRALEAAKQAAKVPDVFYCLKLLEATGISTVPGSGFGQREGVFHLRTTILPDEEDMPAIMDSFKKFNDEFMEQYEDNRGYSRL

SEQ ID NO: 45581 - protein, 216 aa, Glycine max
  Clone ID: 700564889_FLI.pep
WLLWQTWCRKQCLYFGGQDKAQNWHVYSASADSVTQCDNVYTLEMCMTGLDREKAQVFYKEQSASAAMMTVNSGIRKILPDSEICDFDFEPCGYSMNSVEGAAVSTIHVTPEDGFSYASFETVGYDFKAVNLNEMVQRVLACFLPTEFSVAVHVDGASKSFEQTCFLDVKGYCREERSHEGLGMGGSVVYQKFGKTSDCGSPRSTLKCWNEEDEEE

SEQ ID NO: 45582 - protein, 605 aa, Glycine max
  Clone ID: 700565009_FLI.pep
FGIGRMWKVVRFAAARSRRFSTAIPGPCKVHKRGTDILHDPWFNKDTGFPLTERDRLGLRGLLPPRVISFEHQYDRFMNSYRSLEKNTQGQSDRFVSLSKWRILNRLHDRNETLYYRVLIDNIKEFAPIIYTPTVGLVCENYSGLFRRPRGMYFSAKDKGEMMSMIYNWPSDQVDMIVLTDGSRILGLGDLGVQGIGIPIGKLDMYVAAAGINPQKILPVMLDVGTNNQKLLEDPLYLGVRQPRLEGEEYLLIVDEFMEAVHARWPKAIVQFEDFQMKWAFETLKRYRERFCMFNDDIQGTAGVALAGLLGTVRSQGQPLSDFLKQKIVVVGAGSAGLGVLSMAVQAVSRMSGGSGTDANSQFFLIDKDGLVTTERSNLDPAAVPFAKNPRDLEGLSEGASIIEVVKKVKPHVLLGLSGVGGVFNTEVLKAMRESVSTKPAIFAMSNPTMNAECTAIEAFSHAGENIVFASGSPFENVDLGNGEVGHVNQANNMYLFPGIGLGTLLSGARHITDGMLRAAAECLASYMTEDDVRKGILYPSIDCIRDVTAEVGAAVVCAAVAEKQAEGHGDVGFKELENMSKEETVEYVRGNMWYPEYCPLVHEK

SEQ ID NO: 45583 - protein, 585 aa, Glycine max
  Clone ID: 700649823_FLI.pep
HIITMCGILAVLGCSDDSRAKRVRVLELSRRLKHRGPDWSGLHQHGDCFLAHQRLAIVDPASGDQPLFNEDKSVIVTVNGEIYNHEELRKQLPNHNFRTGSDCDVIAHLYEEHGEDFVDMLDGIFSFVLLDTRDNSFIVARDAIGVTSLYIGWGLDGSVWISSEMKGLNDDCEHFECFPPGHLYSSKERGFRRWYNPPWFSEAIPSAPYDPLVLRHAFEQAVIKRLMTDVPFGVLLSGGLDSSLVASITSRYLANTKAAEQWGSKLHSFCVGLEGSPDLKAAKEVADYLGTVHHEFTFTVQDGIDAIEDVIYHIETYDVTTIRASTPMFLMSRKIKSLGVKWVISGEGSDEIFGGYLYFHKAPNKEEFHRETCRKIKALHQYDCLRANKSTFAWGLEARVPFLDKAFINAAMSIDPEWKMIKRDEGRIEKWILRRAFDDEEHPYLPKHILYRQKEQFSDGVGYSWIDGLKAHAAKHVTEKMMLNAGNIYPHNTPKTKEAYYYRMIFERFFPQNSARLTVPGGASVACSTAKAVEWDAAWSNNLDPSGRAALGVHISAYENQNNKGVEIEKIIPMDAAPLGVAIQG

SEQ ID NO: 45584 - protein, 237 aa, Glycine max
  Clone ID: 700650127_FLI.pep
KKIISNNIIMAAATLSVRPDRLSPGSVFPRPPVQPPLRKPIAAPEPWRAAAPRIRIRTVAPVQASSRADDSAPFEMSVENALKLLGVSEGASFDDILRAKNAIVANCKDDQDAIAQVEAAYDMLLMQSLTQRRAGKVVNSSVRYADVKRVKSPAGGSMPQWLKNSPVSIESPSTSDLGLQAGVYGALMGLTYLNGASAPAAGYAGADVPGLLLAGSFGASLYFMTKKNVKLDPDSQY

SEQ ID NO: 45585 - protein, 240 aa, Glycine max
  Clone ID: 700661503_FLI.pep
AGNPVDQVTSLQKHLSLAALSAKQTAKSCPSVDVEWPPRASSGVTPQFGDTERQTIAAGTSSTSNLESDDPFADWPPHPNGSVSGGSGISNNGTLGMPLNKVGFNSMTSTSSNMAPQTSNSWPVNSQSSAESISLNSRSASSTTGSLNTGGLGQQKSLGFLKQSQAFPASNVSYNNVQSTATDLGSIFSSNKNEQIAPKLAPPPSTTVGRGRGRGRGAASTTRSSHTKSHAEQPPLLDLL

SEQ ID NO: 45586 - protein, 151 aa, Glycine max
  Clone ID: 700666881_FLI.pep
QVADPCVDKLRHLNFFFFSIPQAYSTVGTPDYIAPEVLLKKGYGMECDWWSLGAIMYEMLVGYPPFYSDEPMLTCRKIVNWRNYLKFPEVVKISAEAKDLISRLLCNVDQRLGTKGADEIKVLWRTHGLKVLNGTNCTKLKLLLFLRLMMN

SEQ ID NO: 45587 - protein, 686 aa, Glycine max
  Clone ID: 700666962_FLI.pep
CPTKEILINKKDETISEGYRECDKHIEAFNKGKLELLAGCDAAQTLETRITGVLNGLRDTAGKVCMQTLHWRNSPLIMSQCGSKGSSINISQMVACVGQQSVGGRRTPNGFIDRSLPHFPRKSKTPAAKGFVANSFYSGLSATEFFFHTMGGREGLVDTAVKTADTGYMSRQLMKSLEDLFLHYDYTVRNAGGSIVQFCYGDDGMDPAGMEGKNGKPLNFERLFLKSKAICPNDEDDEILSSSDVSKVVHEKLSEFDMSRLAEKGVFEVGFSADFVESLQSFIKDNAKLTEEGFTDEHSQNLKKFGQRISGITRKQLDVFLNICLSRYHSKKMEAGAPVGATGAHSIGEPGTQMTLKTFHFAGVASMNVTLGVPRVKEIMNGNKKISTPIITAILERDDNANTARIVKGRIEKTNLGQVAKSIKVVMTSRSASVVITLDMKRIQDAHLNIDANIVKESILRTKKTKLKPEHIKILDIKKLEVVPQDVDRSKIHFQLHYLKNLLPTVVVKGIKTVDRVVISKDTKAEKFRLLVEGTGFREVMGVEGIDGRKTVSNHIHEVRDTLGIEAARESIVKEIKYTMVDTHGMNIDIRHMMLLADMMTATGHILGINRFGISKMGKSVLMLASFERTADILFQASVRGRDDSIGGVSESIIMGIPIQIGTGMIKVKQRLDPPELPHGTSPILS

SEQ ID NO: 45588 - protein, 675 aa, Glycine max
  Clone ID: 700667525_FLI.pep
GDKDNSSIPPTPMSPSNSPVAAETLFSGTVFLILLHLSLFLTPTLSLDFLFNSFAGVTNLTLIKDARVDASVIRMNNDSNQYSYGRAFYPIKIPMTKTNSSISSFSTSFVFSILPQISTSPGFGLAFVLCNTTNPPGALASQYFGLFTNATSPSVFPLVAVEFDTGRNPEFNDIDDNHIGIDLNNIESINATTAGYFNSSGAFVPVRMRTGQNIHAWIDFNGENLEFNVTVAPVGVSRPTKPSLSYQNPAIADYVSADMYVGFSASKTNWIEAQRVLAWSFSDSGPAKELNTTNLPVFQLESSSSSISGGAIAGIVVGCFVFVLICASGFYLWWRMNKAKEEEDEIEDWELEYWPHRFSYEELSSATGEFRKEMLLGSGGFGRVYRGTLPNHTQIAVKCVNHDSKQGLREFMAEISSMGRLQHKNLVQMRGWCRKGNELMLVYDYMPNGSLNKWVFDKSEKLLGWEQRRRILVDVAEGLNYLHHGWDQVVIHRDIKSSNILLDADMRGRLGDFGLAKLYTHGEVPNTTRVVGTLGYLAPELATVAAPTSASDVYSFGVVLLEVACGRRPIETSVAEEEVVLIDWVRELYAKGCAREAADAWIRGEYDEGDVEMVLKLGLACCHPDPQRRPTMKEVVALLLGEEPQEAPGKVLSDLVRGGKDMDETAPLQPSPPPV

SEQ ID NO: 45589 - protein, 248 aa, Glycine max; identical to SEQ ID NO: 43868
  Clone ID: 700667788_FLI.pep

SEQ ID NO: 45590 - protein, 440 aa, Glycine max
  Clone ID: 700670457_FLI.pep
PCSILHSTHTRRIMASILHYFLALSLSCSFLFFLSDSVTPTKPINLVVLPVQNDGSTGLHWANLQKRTPLMQVPVLVDLNGNHLWVNCEQQYSSKTYQAPFCHSTQCSRANTHQCLSCPAASRPGCHKNTCGLMSTNPITQQTGLGELGEDVLAIHATQGSTQQLGPLVTVPQFLFSCAPSFLVQKGLPRNTQGVAGLGHAPISLPNQLASHFGLQRQFTTCLSRYPTSKGAIIFGDAPNNMRQFQNQDIFHDLAFTPLTITLQGEYNVRVNSIRINQHSVFPLNKISSTIVGSTSGGTMISTSTPHMVLQQSVYQAFTQVFAQQLPKQAQVKSVAPFGLCFNSNKINAYPSVDLVMDKPNGPVWRISGEDLMVQAQPGVTCLGVMNGGMQPRAEITLGARQLEENLVVFDLARSRVGFSTSSLHSHGVKCADLFNFANA

SEQ ID NO: 45591 - protein, 687 aa, Glycine max
  Clone ID: 700670947_FLI.pep
RDSFTKDELVLAFARSRVQQIIGATNNLHRRSGNVLPPPVDDPKHMSSATKLVSKSPLDKCENQIKGFASGIGAANSTVLPAMSSWVRCVSGNLPQDTISSCSGNLANRKVEASNDPQALVSGVACTERSISTRSGEAENSSDVCSNGAFVPSETNNHNIGGNSKTSFMGNDQDTAAPSVNTGFLELSRQHDFNIDTAVGINSNGDVHGLCLGLSSISINDHLEDSYFTPDSDRLPFTLNSINSSLGQHLQQDNEYSTEQSSTPAFWEDIIVDDILNIDSEQQKFSKDINCLSSSGLHSTCLPQNVNQSSHQPFKQDQICSQNHFRKPSTESFNELLETGHVKHVESKDNGTGVDNMVASDMGENNIISDILSLELDAWEGSLVNLLGERDELYRPFKAATLRKVQDKNQSRFSFARQDDFMNEASNLQQPFAVTGHGPEGNFSSGGLIGNKDTVTGKYPHVFPSGNSVSSDKFVGSQSFVPSNFSMSKAHSSGPPGFSLSSRIPPGFSCGRVEQDSNTSVKHLQQQYVSSTGNIGSMGDEFNNLAVLNFGKGMLAERLNNASFDMRQTSLPQFIPGEDDPRLKLLMQQSTPTQNLRFPDHVGNRFLPQNDSYRISSRFLDQFPPNSPSIYEQLHSQQFSSNTLPSNNQWGGWNDAKNFSDLSISEVLNNERVGFSNFMPNYENIKF

SEQ ID NO: 45592 - protein, 375 aa, Glycine max
  Clone ID: 700673606_FLI.pep
PTSFSSLSTTSPSSSSIMSHFKGKYHDELIANAAYIGTPGKGILAADESTGTIGKRLASISVENIESNRRALRELLFTAPGVLQYLSGVILFEETLYQSTAAGKPFVNVLKEAGVLPGIKVDKGTVELAGTNGETTTQGLDGLGQRCAKYYEAGARFAKWRAVLKIGPNEPSELSIHENAYGLARYAVICQENGLVPIVEPEILVDGPHDIHKCAAVTERVLAACYKALNDHHVLLEGTLLKPNMVTPGSQSAKVSPQVVAEHTVRALQRTVPAAVPAVVFLSGGQSEEEASVNLNAINQVNGKKPWSLSFSFGRALQQSTLKAWGGKEENVKKAQEALLVRAKANSEATLGTYKGNSQLADGASESLHVSNYSY

SEQ ID NO: 45593 - protein, 134 aa, Glycine max
  Clone ID: 700673883_FLI.pep
DTLNQLKLIINILGSQREEDIEFIDNPKAKKYIKSLPYSPGTPLSQLYPNAHPLAIDLLAKMLVFDPTKRISVTQALQHPYMAPLYDPNCDPPAVIPIDLDIDEDLGEEMIRDMMWKEMLHYHPESAMESAGLC

SEQ ID NO: 45594 - protein, 385 aa, Glycine max; identical to SEQ ID NO: 44000
  Clone ID: 700673904_FLI.pep

SEQ ID NO: 45595 - protein, 455 aa, Glycine max
  Clone ID: 700554475_FLI.pep
FPTTPNTKTSSSMAASVSTVGAVNRALLNLNGSGAGASAPSSAFFGTSLKKVIASRVPNSKVSGGSFKIVAVEEKKEIEETQQTDKDRWKGLAYDISDDQQDITRGKGLVDSLFQAPQDAGTHYAVMSSYEYLSTGLRQYLDNKMDGFYIAPAFMDKLVVHISKNFMTLPNIKVPLILGIWGGKGQGKSFQCELVFAKMGINPIMMSAGELESGNAGEPAKLIRQRYREAADMIKKGKMCALFINDLDAGAGRLGGTTQYTVNNQMVNATLMNIADNPTNVQLPGMYNKEENPRVPIIVTGNDFSTLYAPLIRDGRMEKFYWAPTREDRIGVCTGIFRTDGIPEQDIVKLVDTFPGQSIDFFGALRARVYDDEVRKWISGVGVDSVGKKLVNSKDGPPTFEQPKMTLEKLLLYGNMLVQEQENVKRVQLADKYLNEAALGNANEDAIQRGTFFQS

SEQ ID NO: 45596 - protein, 257 aa, Glycine max
  Clone ID: 700554626_FLI.pep
LIKMLAIFHKAFAHPPEELNSPASYKGSKKPKVPEETLKDFLSHHPHNTCSMSFGEAAVLAYVRPDQSFSRHQRLFCGIDNIYCLFLGSLNNLSLLNKQYGLSKSTDEAMFVIEAYKTLRDRGPYPADQVVKELDGSFAFVVYDSKVGSVFAALGSDGGVKLYWGIAADGSVVISDDLEVIKEGCAKSFAPFPTGCMFHSEGGLMSFEHPMNKLKAMPRVDSEGAMCGANFKVDKFARVNSIPRVGSQSNWMEWDQH

SEQ ID NO: 45597 - protein, 428 aa, Glycine max
  Clone ID: 700554985_FLI.pep
NPFSSPKPSTFFSLTETRFAALLLHSLTSLTHCAIFTHCVKFPHKTGIDSPSDQNRVLRGSSVTGNEKSSVASIPHSKLHCDMEAQIHLLEQEAYSAVLRAFKAQSDALTWEKEGLITELRKELRVSDDEHRELLTRVNSDEIIHRIREWRQTGCYQPARRSTSQPGHDILPSPTVSASRKKQKTSHSGQSLPALSSVKSVQYTSAGPTGGRHFANRSSSALASNVPAEAAAFDPLIGKKVWTRWPEDNHFYEAVVTDYNPADGRHALVYDINKVNETWEWVDLKEISPEDIRWEGEDPGVLHRGGHGGQGRGGRKFFGHGGDSLGAGRGRGHPRFQARQEFLPPQNGIGRRVLDDIELLNTDSLVKEVERIFASSPPDSMELEKAKQMLKEHEQALVDAIARIADASDGESDGEQPFLQHGQLMERG

SEQ ID NO: 45598 - protein, 754 aa, Glycine max
  Clone ID: 700557078_FLI.pep
RLQTVNRKLTAMNKLLMEENDRLQKQVSQLVCENGFMRQQLHTPSATTTDASCDSVVTTPQHTLRDASNPAGLLSIAEETLTEFLSKATGTAVDWVQMPGMKPGPDSVGIFAISQSCSGVAARACGLVSLEPTKIAEILKDRPSWFRDCRSLEVFTMFPAGNGGTIELVYTQTYAPTTLAPARDFWTLRYTTSLENGSLVVCERSLSGSGTGPNPAAAAQFVRAETLPSGYLIRPCEGGGSIIHIVDHLNLEAWSVPEVLRPLYESSKVVAQKMTIAALRYIRQIAQETSGEVVYGLGRQPAVLRTFSQRLSRGFNDAVNGFNDDGWTVLNCDGAEDVIIAVNSTKNLSGTSNPASSLTFLGGILCAKASMLLQNVPPAVLVRFLREHRSEWADFNVDAYSAASLKAGTYAYPGMRPTRFTGSQIIMPLGHTIEHEEMLEVIRLEGHSLAQEDAFVSRDIHLLQICSGIDENAVGACSELVFAPIDEIFPDDAPLVPSGFRIIPLDSKPGDKKDAVATNRTLDLTSGFEVGPATTAGADASSSQNTRSVLTIAFQFPFDSSLQDNVAVMARQYVRSVISSVQRVAMAISPSGINPSIGAKLSPGSPEAVTLAHWICQSYSYYLGSDLLRSDSLVGDMMLKQLWHHQDAILCCSLKSLPVFIFANQAGLDMLETTLVALQDITLDKIFDEAGRKALCTDFAKLMEQGFAYLPAGICMSTMGRHVSYDQAIAWKVLTGEDNTVHCLAFSFINWSFV

SEQ ID NO: 45599 - protein, 458 aa, Glycine max
  Clone ID: 700557377_FLI.pep
ALAFPTTPNTKTSSSMAASVSTVGAVNRALLNLNGSGAGASAPSSAFFGTSLKKVIASRVPNSKVSGGSFKIVAVEEKKEIEETQQTDKDRWKGLAYDISDDQQDITRGKGLVDSLFQAPQDAGTHYAVMSSYEYLSTGLRQYLDNKMDGFYIAPAFMDKLVVHISKNFMTLPNIKVPLILGIWGGKGQGKSFQCELVFAKMGINPIMMSAGELESGNAGEPAKLIRQRYREAADMIKKGKMCALFINDLDAGAGRLGGTTQYTVNNQMVNATLMNIADNPTNVQLPGMYNKEENPRVPIIVTGNDFSTLYAPLIRDGRMEKFYWAPTREDRIGVCTGIFRTDGIPEQDIVKLVDTFPGQSIDFFGALRARVYDDEVRKWISGVGVDSVGKKLVNSKDGPPTFEQPKMTLEKLLLYGNMLVQEQENVKRVQLADKYLNEAALGNANEDAIQRGTFFQS

SEQ ID NO: 45600 - protein, 285 aa, Glycine max
  Clone ID: 700559523_FLI.pep
NIKVPLILGIWGGKGQGKSFQCELVFAKMGINPIMMSAGELESGNAGEPAKLIRQRYREAADMIKKGKMCALFINDLDAGAGRLGGTTQYTVNNQMVNATLMNIADNPTNVQLPGMYNKEENPRVPIIVTGNDFSTLYAPLIRDGRMEKFYWAPTREDRIGVCTGIFRTDGIPEQDIVKLVDTFPGQSIDFFGALRARVYDDEVRKWISGVGVDSVGKKLVNSKDGPPTFEQPKMTLEKLLLYGNMLVQEQENVKRVQLADKYLNEAALGNANEDAIQRGTFFQS

SEQ ID NO: 45601 - protein, 151 aa, Glycine max
  Clone ID: 700562358_FLI.pep
VFAMASKRILKELKDLQKDPPTSCSAGPVAEDMFHWQATIMGPPDSPYAGGVFLVTIHFPPDYPFKPPKVAFRTKVFHPNINSNGSICLDILKEQWSPALTISKVLLSICSLLTDPNPDDPLVPEIAHMYKTDRNKYESTARSWTQKYAMG

SEQ ID NO: 45602 - protein, 361 aa, Glycine max
  Clone ID: 700562437_FLI.pep
EGSGSATNGVLAPPRKVALITGITGQDGSYLTEFLLDKGYEVHGLIRRSSNFNTQRIDHIYVDPHNAHKARMKLHYADLSDASSLRRWLDTILPDEVYNLAAQSHVAVSFEIPDYTADVVATGALRLLEAVRSHISASGRSHIRYYQAGSSEMFGATPPPQSETTPFHPRSPYAASKCAAHWYTVNYREAYSLFACNGILFNHESPRRGENFVTRKITRAVGRIKVGLQSKLFLGNLQASRDWGFAGDYVEAMWLMLQQDKPDDYVVATEESHTVEEFLEVAFGYVGLNWRDHVVIDKRYFRPAEVDNLKGDASKAKKVLGWKPKVGFEQLVKMMVDQDIEMAKKEKVLVDAGYIDAQQQP

SEQ ID NO: 45603 - protein, 491 aa, Glycine max
  Clone ID: 700651974_FLI.pep
FMKESSPNIWVRPISGLTMVVDLELMKIVQYHDGGIIPVPTADNTEYRFSHQNPPFGPRQHSLATHQPQGPGFQINGHSISWANWKFHIGFDPRAGIVISLASIYDLEKHKSRRVLYKGYISELFVPYQDPTDDFYYKTFFDAGEFGFGLSTVSLVPNRDCPSNAQFLDTYVHAADGTPLLIKNAICVFEQYGSIMWRHTETGIPNESFEETRTEVNLVVRTVVTVGNYDNIIDWEFKTSGSIKPSIALSGILEIKGVDIKHKSEIKSDQHGILVSANSIGVYHDHFYIYHLDLDIDGVANSFEKTSLKTVRVTDGSSKRKSYWTTEVETAKTENDAKIILGLSPGELSVVNPNKKTSVGNDVGYRLIPAIPAHPLLTDDDYPQIRGAFTNFNVWVTPYNRTEKWAGGLYVDHSHGDDTLAVWTKKNRDINNKDIVLWHVVGIHHVPAQEDFPIMPLLSTAFELRPTNFFERNPVLKTLSPPDVQWPGCPK

SEQ ID NO: 45604 - protein, 488 aa, Glycine max
  Clone ID: 700652611_FLI.pep
PDCSGSGVQQLLSNLMGSEQNRFPLHERRKRWGGCWGAFSCFNSQKGGKRIVPASRIPDSSGPASQPNGPQVIGLTNQATGLAPSLLAPPSSPASFTHSALPSTAQSPSCFLSLSANSPGGPSSTMYATGPYAHEMQLVSPPVFSNFTTEPSTAPLTPPPELAHLTTPSSPDVPFAHFLSSSVDLKNSDKGNYITANDLQATYSLYPGSPASSLISPISRNSGDCLSSSFPEREFRPQWDSSLSPENGKYQRTGSGRVSGHDTNGVTMASQDTNFFCPATYAQFYLDQNPPFPHNGGRLSVSKDSDVQSNGGNGHQSRHARSPKQDVEEIEAYRASFGFSADEIISTSQYVEISDVMEDSFTMMPFASDKSTMEESIEPSLMKGFKAQETQVALQSLRSLRSDPGPVGKEAHNQAPICPGCEDHTSQGHCSNNSGLSTPEKRTLVDDEDIFSKMESSRICRKYQMGLSCSDAEVDYRRGRSLREGKGM

SEQ ID NO: 45605 - protein, 408 aa, Glycine max
  Clone ID: 700652978_FLI.pep
GRTQSFSSYSEDGNAGGQTFQSYGKNSAGAANDFAAYGTDSNVASSDFTNYGKGGAGPNDTFTNYGVNMNNPTETFQSYADGTVGGTQSFSNYRDQANVGADSFQSYAKNTLGSEADFKNYGNSFNPGSDTFKGYAKGAEDNKVGFTTYSANTNATFKDYAKHGVSFASYNVSSESKTVSSSVVKRWVEPGKFFRETMLKEGTVMPMPDIRDKMPKRSFLPRAILTKLPFSSAKVDELKRVFKVSENSSMDKMIMDSLGECERAPSVGETKRCVASVEDMIDFSTSVLGRNVAVWTTENVKGSNKNVMVGRVKGMNGGKVTKSVSCHQSLFPYLLYYCHSVPKVRVYEADLLDPESKAKINHGVAICHLDTTAWSPTHGAFLALGSGPGRIEVCHWIFENDLTWTIAD

SEQ ID NO: 45606 - protein, 476 aa, Glycine max
  Clone ID: 700664514_FLI.pep
NLKQNQLPHLPFGGNNRSMEFTESYKQTGPCCFSPDARFIAVAVDYRLVIRETVSFKVVQLFSCLDKISYIEWALDSEYILCGLYKKPMIQAWSLTQPEWTCKIDEGPAGIAYARWSPDSRHILTTSDFQLRLIVWSLLNTACVHLQWPKHASKGVSFTRDGKFAAICSRRDCKDYINLLSCHTWEIMGNFAVDTLDLADIEWSPDDSAIVIWDSPLDYKVLIYSPDGRCLFKYQAYESGLGIKSVSWSPCGQFLAVGSYDQMLRVLNHLTWKTFAELMHPSTVRGPCYAAVFKEVDEPLQLDMSELCLSDDFSQGHDDSPEEPFRVRYEVMEVPINLPFQKPPAEKPNPKQGIGILSWSTDSQYICTRNDSMPTVLWIWDIRHLELAAILVHKDPIRVAAWDPTCTRLVLCTGSTHLYMWTPSGAYCVHVPLSQFTITDLKWNSDGSCLLLKDKESFCCAAVPLLPESSEYSSDD

SEQ ID NO: 45607 - protein, 253 aa, Glycine max
  Clone ID: 700646046_FLI.pep
NCVTQVIALTEELLATAKQNEISAPPNNAAASPTLSIHNENQLLDSSSDHQEKLPVGTKVQAVWSEDGEWYDATIEAYTPNGYYVSYDNWGNKEEVDPANVRSIQEGSVDALLEAERVAEATKQAIKRKIAQAASIDLQSRSLPTKLRIEADDPEDVKASKRKKIHAFKSKMRMEQLEVTQNKRQNAWQQFQSTKGKAKKIGFFSGRKRESIFKSPDDPQGKVGVTGSGKGLTEFQKREKHFHLKDGTVENDD

SEQ ID NO: 45608 - protein, 415 aa, Glycine max
  Clone ID: 700668902_FLI.pep
EIPPKPVCVVVCEEMATKRSVGTLKEGDLKGKRVFVRVDLNVPLDDNLNITDDTRVRAAVPTIKYLTGHGAKVILSSHLGRPKGVTPKYSLKPLVPRLSQLLGIEVTMANDSIGEEVEKLVAQLPEGGVLLLENVRFYKEEEKNDPEFAKKLASLADLYVNDAFGTAHRAHASTEGVAKYLKPSVAGFLMQKELDYLVGAVSNPKRPFAAIVGGSKVSSKIGVIESLLEKVNVLLLGGGMIFTFYKAQGYSVGSSLVEEDKLSLATTLLEKAKAKGVSLLLPTDVVIADKFAADANSKTVPASSIPDGWMGLDIGPDSIKTFGEALDKTQTVIWNGPMGVFEFDKFATGTEAIAKKLAELSGKGVTTIIGGGDSVAAVEKVGLADKMSHISTGGGASLELLEGKQLPGVLALDDA

SEQ ID NO: 45609 - protein, 441 aa, Glycine max
  Clone ID: 700684930_FLI.pep
ASVSTVGAVNRALLNLNGSGAGASAPSSAFFGTSLKKVIASRVPNSKVSGGSFKIVAVEEKKEIEETQQTDKDRWKGLAYDISDDQQDITRGKGLVDSLFQAPQDAGTHYAVMSSYEYLSTGLRQYLDNKMDGFYIAPAFMDKLVVHISKNFMTLPNIKVPLILGIWGGKGQGKSFQCELVFAKMGINPIMMSAGELESGNAGEPAKLIRQRYREAADMIKKGKMCALFINDLDAGAGRLGGTTQYTVNNQMVNATLMNIADNPTNVQLPGMYNKEENPRVPIIVTGNDFSTLYAPLIRDGRMEKFYWAPTREDRIGVCTGIFRTDGIPEQDIVKLVDTFPGQSIDFFGALRARVYDDEVRKWISGVGVDSVGKKLVNSKDGPPTFEQPKMTLEKLLLYGNMLVQEQENVKRVQLADKYLNEAALGNANEDAIQRGTFFQS

SEQ ID NO: 45610 - protein, 430 aa, Glycine max
  Clone ID: 700725374_FLI.pep
DHRAYSWDRDSGNMVKLLFSSQYFQRMFTWYNPCFSWLEKAYAGSQTLQSIILLSTGTNKGGGYFAPKWLFLCMYIGLTVIWAALNTFALEVIALIDIVSIWWQVIGGIVIVIMLPLVALTTKSASFVFTHLELAPESTGVSSKPYAVILSFLVSQYSLYGYDAAAHLTEETKGADKNGPIAILGSIGIITVFGWAYILALTFSIQDFGYLYDPNNETAGAFVPAQILYDAFHGRYHNSAGAIILLFVIWGSFFFGGLSITTSAARVVYALSRDKGVPFSHLWRQLHPKYKVPSNAVWLCAAICILLGLPILKVNVVFTAITSICTIGWVGGYAVPIFARLVMSEKNFKPGPFYLGKARRPVCLVAFLWICYTCSVFLLPTLYPITWDTFNYAPVALGVGLGLIMLWWLLDARKWFTGPVRNIDIQNGKV

SEQ ID NO: 45611 - protein, 544 aa, Glycine max
  Clone ID: 700726177_FLI.pep
GDLPQTMSSLSRITTMYLQNNQFTGTIDVLANLPLDNLNVENNNFTGWIPEQLKNINLQTGGNAWSSGPAPPPPPGTPPAPKSNQHHKSGGGSTTPSDTATGSSSIDEGKKSGTGGGAIAGIVISVIVVGAIVAFFLVKRKSKKSSSDLEKQDNQSFAPLPSNEVHEEKSMQTSSVTDLKTFDTSASINLKPPPIDRHKSFDDEEFSKRPTIVKKTVTAPANVKSYSIAELQIATGSFSVDHLVGEGSFGRVYRAQFDDGQVLAVKKIDSSILPNDLTDDFIQIISNISNLHHPNVTELVGYCSEYGQHLLVYEFHKNGSLHDFLHLSDEYSKPLIWNSRVKIALGTARALEYLHEVSSPSVVHKNIKSANILLDTELNPHLSDSGLASYIPNADQILNHNVGSGYDAPEVALSGQYTLKSDVYSFGVVMLELLSGRNPFDSSRPRSEQSLVRWATPQLHDIDALAKMVDPAMKGLYPVKSLSRFADVIALCVQPEPEFRPPMSEVVQALVRLVQRANMSKRTFSSSDHGGSQRGSDEPVLRDI

SEQ ID NO: 45612 - protein, 489 aa, Glycine max; identical to SEQ ID NO: 43983
  Clone ID: 700734320_FLI.pep

SEQ ID NO: 45613 - protein, 505 aa, Glycine max
  Clone ID: 700736421_FLI.pep
TLITMAKLVLSLCFLLFSGCFALREQAQQNECQIQKLNALKPDNRIESEGGFIETWNPNNKPFQCAGVALSRCTLNRNALRRPSYTNGPQEIYIQQGNGIFGMIFPGCPSTYQEPQESQQRGRSQRPQDRHQKVHRFREGDLIAVPTGVAWWMYNNEDTPVVAVSIIDTNSLENQLDQMPRRFYLAGNQEQEFLKYQQQQQGGSQSQKGKQQEEENEGSNILSGFAPEFLKEAFGVNMQIVRNLQGENEEEDSGAIVTVKGGLRVTAPAMRKPQQEEDDDDEEEQPQCVETDKGCQRQSKRSRNGIDETICTMRLRQNIGQNSSPDIYNPQAGSITTATSLDFPALWLLKLSAQYGSLRKNAMFVPHYTLNANSIIYALNGRALVQVVNCNGERVFDGELQEGGVLIVPQNFAVAAKSQSDNFEYVSFKTNDRPSIGNLAGANSLLNALPEEVIQHTFNLKSQQARQVKNNNPFSFLVPPQESQRRAVVREPFLHVLPHFCPFGL

SEQ ID NO: 45614 - protein, 519 aa, Glycine max; identical to SEQ ID NO: 43902
  Clone ID: 700736503_FLI.pep

SEQ ID NO: 45615 - protein, 333 aa, Glycine max
  Clone ID: 700681321_FLI.pep
LCPLSAHRFLSWFREVKMESEDSFSDLIKMAKKLESDILAKINFSSAHVIDLDRLLCDTFIRQCPTPLDYDNRRDLVHIFNTMTKEIYGNGDGSPVVEEYGSFVMDMFDGKSDIDLSLNFNNSIEVSRQKKISALYRFNKKLQSIQSKGHVTGLQLIFSARVPIIKVTDSGTGIECDLSVDNRDGINKSHIIRAISDIDERFRKLCFLMKSWAKVHDINSPKDSTLSSFSIVSFVAFHLQTRNPPILPPFSILLKEGDNPAYVAKVVETYFNYGKQNKESLAMLFITLLVKLASVENLWQKGFCASLYEGSWILKSWKCSYSMSVIKFISTNP

SEQ ID NO: 45616 - protein, 704 aa, Glycine max
  Clone ID: 700681579_FLI.pep
ASSPLNDAVEGNPLLQNFDFPPFDVVEPKHVRPGIRALLGKLESELEELERNVEPSWPKLVEPLEKIVDRLSVVWGMINHLKSVKDSSELRSAIEDVQAEKVKFQLRLGQSKPIYNAFKAIQESPDWQTLSDARKRIVESQIKEAVLNGVSLEDDKRESFNKIEQELEKLSQKFGENVLDATKKFEKLITDKKEIEGLPATALGLAAQSAVSKGHENATAENGPWIITLDAPSFIAVMQHARNRSLREEIYRAYVTRASSGDLDNTGIIDQILKLRLEKAKLLNYNNYAEVSMATKMATVDKAEELLEKLRRASWDPAVQDIEDLKEFSKSQGALEAGDLTHWDITFWSERLRESKYDINEEELRPFFSLPKVMDGLFNLAKSLFGIEIEPADGLAPVWNNDVRFFCVKDSSGSPIAYFYFDPYSRPAEKRQGAWMDEVFARSRVLSRDGTSARLPVAHMVCNQTPPVGNKPSLMTFREVETVFHEFGHALQHMLTKQDEGLVAGIRGIEWDAVELPSQFMENWCYHRETLMGIAKHFETGESLPEEVYLKLVAARTFRAGSLSLRQLKFASVDLELHTKYVPGGPESIYDVDRRVSEKTQVIPPLPEDRFLCSFSHIFAGGYAAGYYSYKWAEVLSADAFSAFEDAGLDNDKAVKETGRKFRETILALGGGKPPLDVFVQFRGREPTPDALLRHNGLLQVAAS

SEQ ID NO: 45617 - protein, 222 aa, Glycine max
  Clone ID: 700683721_FLI.pep
KIGVETDKIGRILSNPSPAVNGVLPADTRTPFTAGLGLDKIGVETDKIGRILVNERFATNVSGVYAIGDVIPGPMLAHKAEEDGVACVEYIAGKVGHVDYDKVPGVVYTMPEVASVGKTEEQVKELGVEYRVGKFPFMANSRAKAIDNAEGLVKILAEKETDKILGVHIMAPNAGELIHEAAIALQYDASSEDIARVCHAHPTMSEAVKEAAMATYDKPIHI

SEQ ID NO: 45618 - protein, 180 aa, Glycine max
  Clone ID: 700683792_FLI.pep
VAGSQTKYVAQIKFLLYFVAEKILYIWQMISYVDGLKMMKHSSRAINGEWILLPHGDGTGLSKPISLSRNEMKPFIIGSAPMQDNSGSSVTISSPQVSPTHARINYKDGAFFLIDLRSEHGTWIIDNEGKQYRVPPNYPARIRPSDVIQFGSEKVSFRVKVTSSVPRVSENESTLALQGV

SEQ ID NO: 45619 - protein, 498 aa, Glycine max
  Clone ID: 700731443_FLI.pep
LYTRALLLELPIHRKLHSSLSLSIFPFRLPMPLLDRGDVWKSKARSLQLQLRDRFRVAVDRHWRRRHNHHTFIPSADGYFSSTIQRWLSRFRDFRRDSLPSSTSFYRKRVIKDFSSEEDSTLVRMMQAVAVPVLGNVCHVFMNGLNSVQVYGLEKLHSALLQRPKGKPLLTVSNHVASMDDPLVIASLLPPSVLLDARNLRWTLCATDRCFKNPVTSAFFRSVKVLPVSRGDGIYQEGMDLAISKLNHGGWVHIFPEGSRSRDGGKTMGSSKRGVGRLVLDGDSMPLVVPFVHTGMQEIMPVGANFPRIGKMVTVLIGDPINFDDIIEFDKDKGSNVPRRRLYDAVASRIGDRLHEMKVQVDTIAIDQEMQLQDKSSHSTERTSKILQQVDWELFGMDSFMSVEDDSKQRQETVALSNVSVSQHHQQSHSDQSWRAGFSYRMRGYIDQMELVSFAARGIFLNNDTKNSARPSREMGPLKAWKQFLEANLLRQWNYVHY

SEQ ID NO: 45620 - protein, 1057 aa, Glycine max
  Clone ID: 700731511_FLI.pep
GNDWLNSYLEAILDVGPGLDDAKSSLLLRERGRFSPTRYFVQEVIGFDETDLYRSWVRASSTRSPQERNTRLENMCWRIWNLARQKKQLESETALRVNKRRLERERGRREATADMSEDLSEGEKGDPLSDLSAHGGVGDFNRSRLPRISSADAMETWANSQKGKKLYIVLISIHGLIRGENMELGRDSDTGGQVKYVVELARALGSMPGVYRVDLLTRQVSAPDVDWSYGEPTEMLSPRDTDDFGDDTGESSGSYIVRIPFGPRDKYIPKELLWPYIPEFVDGALNHIIQMSKSLGEQIGSGHAVWPVAIHGHYADAGDSAALLSGALNVPMLFTGHSLGRDKLEQLLKQGRLSKDEINTTYKIMRRIEAEELALDGSEIVITSTRQEIEEQWRLYDGFDPVLERKLRARIRRNVSCYGRFMPRMATIPPGMEFHHIVPHDGDIEGEPEGNLDHPAPQDPPIWSEIMRFFTNPRKPMILALARPDPKKNITTLVKAFGECRPLQELANLTLIMGNRDGIDEMSSTNASVLLSVLKLIDKYDLYGQVAYPKHHKQYDVPDIYRLAAKTKGVFINPAFIEPFGLTLIEAAAHGLPIVATKNGGPVDIHRVLDNGLLVDPHDQQSIADALLKLVSNKQLWAKCRQNGLKNIHLFSWPEHCKTYLSKIATCKPRHPQWQRSEDGGESSESDSPGDSLRDLQDLSLNLKFSLDGEKSEGSGNDNSLNSDGNAADRGAKLENAVLSWSKGISKDTRRGGATEKSDQNPNAGKFPPLRRRKHLFVIAVDCDTTSSLLETIKAIFESAGKDRAESTVGFILSTSLTISEIQSFLISGGLSPIDFDAYICNSGSDLYYPSLNPGDRPFVVDLYYHSHIEYRWGGEGLRKTLVRWADSITDKKGDNDEQIVSPAEQLSTDYCYAFKVRKPGMAPPVKELRKLLRIQALRCHPIYCQNGTRLNVIPVLASRSQALRYLYVRWGFELSKMVVFVGECGDTDYEGLLGGLHKSAILKGVGSSAISQLHNNRSYPLSDVTPLDSPNIVEATEGSSGADIQALIEKVGYLNG

SEQ ID NO: 45621 - protein, 422 aa, Glycine max; identical to SEQ ID NO: 43848
  Clone ID: 700741421_FLI.pep

SEQ ID NO: 45622 - protein, 378 aa, Glycine max
  Clone ID: 700676019_FLI.pep
PSSRQRFRCSPFSRFFSEPSEVKAKNKEREREKMMKPSMLRSLHSAATRGASHLFRRGYASEPVPERKVAVLGAAGGIGQPLSLLMKLNPLVSSLSLYDIAGTPGVAADISHINTRSEVVGYQGDEELGKALEGADVVIIPAGVPRKPGMTRDDLFNINAGIVKTLCTAIAKYCPHALVNMISNPVNSTVPIAAEVFKKAGTYDEKRLFGVTTLDVVRAKTFYAGKANVPVAGVNVPVVGGHAGITILPLFSQATPKANLDDDVIKALTKRTQDGGTEVVEAKAGKGSATLSMAYAGALFADACLKGLNGVPDVVECSFVQSTVTELPFFASKVRLGTVGVEEVLGLGHLSDFEQQGLESLKPELKSSIEKGIKFANQ

SEQ ID NO: 45623 - protein, 443 aa, Glycine max
  Clone ID: 700676331_FLI.pep
SRKVGSLRPGTLTTSHSSVPVLPSLAAPLTAMPFVDLPTPTVPREIYIQQGNGIFGMIFPGCPSTYQEPQESQQRGRSQRPQDRHQKVHRFREGDLIAVPTGVAWWMYNNEDTPVVAVSIIDTNSLENQLDQMPRRFYLAGNQEQEFLKYQQQQQGGSQSQKGKQQEEENEGSNILSGFAPEFLKEAFGVNMQIVRNLQGENEEEDSGAIVTVKGGLRVTAPAMRKPQQEEDDDDEEEQPQCVETDKGCQRQSKRSRNGIDETICTMRLRQNIGQNSSPDIYNPQAGSITTATSLDFPALWLLKLSAQYGSLRKNAMFVPHYTLNANSIIYALNGRALVQVVNCNGERVFDGELQEGGVLIVPQNFAVAAKSQSDNFEYVSFKTNDRPSIGNLAGANSLLNALPEEVIQHTFNLKSQQARQVKNNNPFSFLVPPQESQRRAVA

SEQ ID NO: 45624 - protein, 506 aa, Glycine max
  Clone ID: 700676443_FLI.pep
PLVLKHSSVITMAKLVFSLCFLLFSGCCFAFSSREQPQQNECQIQKLNALKPDNRIESEGGLIETWNPNNKPFQCAGVALSRCTLNRNALRRPSYTNGPQEIYIQQGKGIFGMIYPGCPSTFEEPQQPQQRGQSSRPQDRHQKIYNFREGDLIAVPTGVAWWMYNNEDTPVVAVSIIDTNSLENQLDQMPRRFYLAGNQEQEFLKYQQEQGGHQSQKGKHQQEEENEGGSILSGFTLEFLEHAFSVDKQIAKNLQGENEGEDKGAIVTVKGGLSVIKPPTDEQQQRPQEEEEEEEDEKPQCKGKDKHCQRPRGSQSKSRRNGIDETICTMRLRHNIGQTSSPDIYNPQAGSVTTATSLDFPALSWLRLSAEFGSLRKNAMFVPHYNLNANSIIYALNGRALIQVVNCNGERVFDGELQEGRVLIVPQNFVVAARSQSDNFEYVSFKTNDTPMIGTLAGANSLLNALPEEVIQHTFNLKSQQARQIKNNNPFKFLVPPQESQKRAVA

SEQ ID NO: 45625 - protein, 580 aa, Glycine max
  Clone ID: 700678608_FLI.pep
SVSFLNQLVSSLSLSNWEDQSVCLCPLGVVSSSSSSVLHKAVGFGSNKRVAKWVVIMAAVKPEEISHPPMDQLQGLEYCIDSNPSWAETIALGFQHYILALGTAVMIPSFLVPVMGGSDDDKVRVVQTLLFVEGINTLLQTLFGTRLPTVVGGSYAFMVPVISIIRDPSFATIEDPHLRFLSTMRAVQGALIVASSIQIILGFSQIWAICSRFFSPLGMVPVIALVGFGLFDRGFLVVGTCVEIGIPMLILFIAFSQYLKNFQIRQVPILERFALLISTTVIWAYAHLLTASGAYKHRPDLTQHSCRTDRANLISSAPWIKIPYPLEWGAPTFDAGHAFGMMAAVLVSLVESTGAYKAASRLASATPPPAHVLSRGIGWQGIGILLNGLFGTLTGSTVSVENVGLLGSNRIGSRRVIQVSAGFMIFFSMLGKFGALFASIPFPMFAAVYCVLFGIVASVGLSFLQFTNMNSMRNLFICGVSLFLGLSIPEYFREYTIRAFHGPAHTNAGWFNDFLNTIFFSSPTVALIVAVFLDNTLDYKDSAKDRGMPWWAKFRTFKGDSRNEEFYTLPFNLNRFFPPS

SEQ ID NO: 45626 - protein, 495 aa, Glycine max
  Clone ID: 700678738_FLI.pep
MAKLVFSLCFLLFSGCCFAFSSREQPQQNECQIQKLNALKPDNRIESEGGLIETWNPNNKPFQCAGVALSRCTLNRNALRRPSYTNGPQEIYIQQGKGIFGMIYPGCPSTFEEPQQPQQRGQSSRPQDRHQKIYNFREGDLIAVPTGVAWWMYNNEDTPVVAVSIIDTNSLENQLDQMPRRFYLAGNQEQEFLKYQQEQGGHQSQKGKHQQEEENEGGSILSGFTLEFLEHAFSVDKQIAKNLQGENEGEDKGAIVTVKGGLSVIKPPTDEQQQRPQEEEEEEEDEKPQCKGKDKHCQRPRGSQSKSRRNGIDETICTMRLRHNIGQTSSPDIYNPQAGSVTTATSLDFPALSWLRLSAEFGSLRKNAMFVPHYNLNANSIIYALNGRALIQVVNCNGERVFDGELQEGRVLIVPQNFVVAARSQSDNFEYVSFKTNDTPMIGTLAGANSLLNALPEEVIQHTFNLKSQQARQIKNNNPFKFLVPPQESQKRAVA

SEQ ID NO: 45627 - protein, 540 aa, Glycine max
  Clone ID: 700681920_FLI.pep
HYCFLPSSLSGEFLAPPPASAVALSYERFSLTMGQKHLVTVFCLWALTCSLLPSFSFGILRIGLKKRPLDLDSINAARKAREGLRSVRPMMGAHDQFIGKSKGEDIVPLKNYLDAQYFGEIGIGTPPQPFTVVFDTGSSNLWVPSSKCYFTLACYTHNWYTAKKSKTHVKNGTSCKINYGTGSISGFFSQDNVKVGSAVVKHQDFIEATHEGSLTFLSAKFDGILGLGFQEISVENAVPVWFKMVEQKLISEKVFSFWLNGDPNAKKGGELVFGGVDPKHFKGNHTYVPITEKGYWQIEMGDFFVGGVSTGVCEGGCAAIVDSGTSLLAGPTPVVAEINHAIGAEGVLSVECKEVVSQYGELIWDLLVSGVKPDDICSQVGLCSSKRHQSKSAGIEMVTEKEQEELAARDTPLCSSCQMLVLWIQNQLKQKATKDRVFNYVNQLCESLPSPSGESVISCNSLSKMPNITFTIGNKPFVLTPEQYILRTGEGITEVCLSGFIAFDVPPPKGPLWILGDVFMRAYHTVFDYGNLQVGFAEAV

SEQ ID NO: 45628 - protein, 250 aa, Glycine max
  Clone ID: 700682106_FLI.pep
LFLFTLSLPPSSTNMAIENQDTAVREIKPKNRRIMGAGGPDDEDNRWPPWLKPLLKESFFVQCKLHADSHKSECNMYCLDCMNGPLCSLCLAHHKDHRAIQIRRSSYHDVIRVSEIQKVLDITGVQTYIINSARVVFLNERPQPRPGKGVTNTCEVCERSLLDSFRFCSLGCKIVGTSKNFQKRKKQSMAMSSDSEDSYSSNSVHGLKKNCKVQSFTPSTPPPTSVNYRTAKRRKGIPHRAPMVGLIIEY

SEQ ID NO: 45629 - protein, 112 aa, Glycine max
  Clone ID: 700686371_FLI.pep
ASVASKRERARERERMAALGGNRDVAGSQNSLEIDGLARFAVEEHNKKQNALLEFEKVVSAKQQVVSGTLYTITLEAKDGGQKKVYEAKVWEKAWLNFKEVQEFKLVGDAPA

SEQ ID NO: 45630 - protein, 276 aa, Glycine max
  Clone ID: 700686452_FLI.pep
PSPGTDGRKIVDVLLEQNIVPGIKVDKGLVPLAGSNDESWCQGLDGLASRSAAYYQQGARFAKWRTVVSIPNGPSALAVKEAAWGLARYAAIAQDNGLVPIVEPEILLDGEHGIDRTFEVAKKVWAEVFFYLAENNVLFEGILLKPSMVTPGAESKDKASPQTVADYTLKLLHRRIPPAVPGIMFLSGGQSEVEATLNLNAMNQSPNPWHVSFSYARALQNTALKTWGGRPENVKAAQDALLFRAKSNSLAQLGKYTGEGESEEAKKELFVKGYSY

SEQ ID NO: 45631 - protein, 832 aa, Glycine max
  Clone ID: 700733503_FLI.pep
CWWVAKMLGGLLHRGHKIKGTVVLMRKNVLDVNSVTSVGGIIGQANGKGKLGKATFLEGIITSLPTLGAGQSAFKINFEWDDGSGIPGAFYIKNFMQTEFFLVSLTLEDIPNHGSIHFVCNSWIYNAKLFKSDRIFFANQTYLPSETPAPLVKYREEELHNLRGDGTGERKEWERIYDYDVYNDLGDPDKGENHARPVLGGNDTFPYPRRGRTGRKPTRKDPNSESRSNDVYLPRDEAFGHLKSSDFLTYGLKSVSQNVLPLLQSAFDLNFTPREFDSFDEVHGLYSGGIKLPTDIISKISPLPVLKEIFRTDGEQALKFPPPKVIQVSKSAWMTDEEFAREMLAGVNPNLIRCLKEFPPRSKLDSQVYGDHTSQITKEHLEPNLEGLTVDEAIQNKRLFLLDHHDPIMPYLRRINATSTKAYATRTILFLKNDGTLRPLAIELSLPHPQGDQSGAFSQVFLPADEGVESSIWLLAKAYVVVNDSCYHQLVSHWLNTHAVVEPFIIATNRHLSVVHPIYKLLHPHYRDTMNINGLARLSLVNDGGVIEQTFLWGRYSVEMSAVVYKDWVFTDQALPADLIKRGMAIEDPSCPHGIRLVIEDYPYAVDGLEIWDAIKTWVHEYVFLYYKSDDTLREDPELQACWKELVEVGHGDKKNEPWWPKMQTREELVEACAIIIWTASALHAAVNFGQYPYGGLILNRPTLSRRFMPEKGSAEYEELRKNPQKAYLKTITPKFQTLIDLSVIEILSRHASDEVYLGERDNPNWTSDTRALEAFKRFGNKLAQIENKLSERNNDEKLRNRCGPVQMPYTLLLPSSKEGLTFRGIPNSISI

SEQ ID NO: 45632 - protein, 441 aa, Glycine max
  Clone ID: 700733554_FLI.pep
KPCSILHSTHTRRIMASILHYFLALSLSCSFLFFLSDSVTPTKPINLVVLPVQNDGSTGLHWANLQKRTPLMQVPVLVDLNGNHLWVNCEQQYSSKTYQAPFCHSTQCSRANTHQCLSCPAASRPGCHKNTCGLMSTNPITQQTGLGELGEDVLAIHATQGSTQQLGPLVTVPQFLFSCAPSFLVQKGLPRNTQGVAGLGHAPISLPNQLASHFGLQRQFTTCLSRYPTSKGAIIFGDAPNNMRQFQNQDIFHDLAFTPLTITLQGEYNVRVNSIRINQHSVFPLNKISSTIVGSTSGGTMISTSTPHMVLQQSVYQAFTQVFAQQLPKQAQVKSVAPFGLCFNSNKINAYPSVDLVMDKPNGPVWRISGEDLMVQAQPGVTCLGVMNGGMQPRAEITLGARQLEENLVVFDLARSRVGFSTSSLHSHGVKCADLFNFANA

SEQ ID NO: 45633 - protein, 438 aa, Glycine max
  Clone ID: 700734243_FLI.pep
SQKQQLQDSHQKIRHFNEGDVLVIPPGVPYWTYNTGDEPVVAISLLDTSNFNNQLDQTPRVFYLAGNPDIEYPETMQQQQQQRSHGGRKQGQHQQEEEEEGGSVLSGFSKHFLAQSFNTNEDIAEKLQSPDDERKQIVTVEGGLSVISPKWQEQQDEDEDEDEDDEDEQIPSHPPRRPSHGKREQDEDEDEDEDKPRPSRPSQGKREQDQDQDEDEDEDEDQPRKSREWRSKKTQPRRPRQEEPRERGCETRNGVEENICTLKLHENIARPSRADFYNPKAGRISTLNSLTLPALRQFQLSAQYVVLYKNGIYSPHWNLNANSVIYVTRGQGKVRVVNCQGNAVFDGELRRGQLLVVPQNFVVAEQAGEQGFEYIVFKTHHNAVTSYLKDVFRAIPSEVLAHSYNLRQSQVSELKYEGNWGPLVNPESQQGSPRVKVA

SEQ ID NO: 45634 - protein, 565 aa, Glycine max; identical to SEQ ID NO: 43888
  Clone ID: 700735848_FLI.pep

SEQ ID NO: 45635 - protein, 484 aa, Glycine max
  Clone ID: 700735901_FLI.pep
QIRSPMAAASRRLRDLQSSAGNKICVDCSQKNPQWASVSYGVFMCLECSGKHRGLGVHISFVRSVTMDSWSDIQIKKMEAGGNDKLNAFLAQYSIPKETDIVTKYNTNAASVYRNRIQAIAEGRPWRDPPVVKENLSAGKGKPPLTQTRRNNDSGWDDWGNEGSPRSKSMSTGDFRTLNGAGGAPARSRSTEDIYTRSQLEASAANKEGFFARKMAENESRPEGLPPSQGGKYVGFGSSPTPPPQRRNDAQNDYFSVVSQGIGKLSFVAASAANVVQVGTKEFTSKVKEGGYDHKVNETVNVVTQKTSEIGQRTWGIMKGVMAMASQKIEEYTKDDPNWKNDNWQRNENDTNGYYQDFNREKKGWNSSTGREQSSSGEYKTESSSSWDDWDHKDSRKEEPAKGSTHSSGGQFSTYNSSSWDDWEHKDSRKEEPAKGSAPHNNDDWAGWDNAKDDGFDNIYEGANKKGVGHKGKSDGTWTEEGFL

SEQ ID NO: 45636 - protein, 565 aa, Glycine max
  Clone ID: 700736290_FLI.pep
FNMGKPFTLSLSSLCLLLLSSACFAISSSKLNECQLNNLNALEPDHRVESEGGLIQTWNSQHPELKYAGVTVSKLTLNRNGLHLPSYSPYPRMIIIAQGKGALGVAIPGCPETFEEPQEQSNRRGSRSQKQQLQDSHQKIRHFNEGDVLVIPPGVPYWTYNTGDEPVVAISLLDTSNFNNQLDQTPRVFYLAGNPDIEYPETMQQQQQQKSHGGRKQGQHQQEEEEEGGSVLSGFSKHFLAQSFNTNEDIAEKLQSPDDERKQIVTVEGGLSVISPKWQEQQDEDEDEDEDDEDEQIPSHPPRRPSHGKREQDEDEDEDEDKPRPSRPSQGKREQDQDQDEDEDEDEDQPRKSREWRSKKTQPRRPRQEEPRERGCETRNGVEENICTLKLHENIARPSRADFYNPKAGRISTLNSLTLPALRQFQLSAQYVVLYKNGIYSPHWNLNANSVIYVTRGQGKVRVVNCQGNAVFDGELRRGQLLVVPQNFVVAEQAGEQGFEYIVFKTHHNAVTSYLKDVFRAIPSEVLAHSYNLRQSQVSELKYEGNWGPLVNPESQQGSPRVKVA

SEQ ID NO: 45637 - protein, 383 aa, Glycine max
  Clone ID: 700742307_FLI.pep
SIMAMMKRAASSSVRSLLSSSSTFTRNLHASGEKKKIVGVFYKGNEYAKLNPNFVGCVEGALGIREWLESQGHQYIVTDDKEGPDSELEKHIPDAHVIISTPFHPAYVTAERIKKAQKLELLLTAGIGSDHVDLKAAAAAGLTVAEVTGSNVVSVAEDELMRILILMRNFLPGYHQAVKGEWNVAGIAHRAYDLEGKTVGTVGAGRIGKLLLQRLKPFNCNLLYFDRLRIDPELEKEIGAKFEEDLDAMLPKCDVIVINTPLTEQTRGLFDKNRIAKCKKGVLIVNNARGAIADTQAIADACSSGHVAGYSGDVWFPQPAPKDHPWRYMPNHAMTPHISGTTIDAQLRYAAGVKDMLDRHFKGEDFPEQNYIVKEGQLASQYR

SEQ ID NO: 45638 - protein, 88 aa, Glycine max
  Clone ID: 700743237_FLI.pep
RSQRKACLFSTKQSSKHWPQSTDPKLKNSNFRSSLKGSIISVPNYEFQFFFTVAAFMMSTNSGFREAPPTKNPSTSGCAANSLQLLHL

SEQ ID NO: 45639 - protein, 489 aa, Glycine max
  Clone ID: 700674461_FLI.pep
LSLNIILSMAKLVLSLCFLLFSGCCFAFSFREQPQQNECQIQRLNALKPDNRIESEGGFIETWNPNNKPFQCAGVALSRCTLNRNALRRPSYTNAPQEIYIQQGSGIFGMIFPGCPSTFEEPQQKGQSSRPQDRHQKIYHFREGDLIAVPTGFAYWMYNNEDTPVVAVSLIDTNSFQNQLDQMPRRFYLAGNQEQEFLQYQPQKQQGGTQSQKGKRQQEEENEGGSILSGFAPEFLEHAFVVDRQIVRKLQGENEEEEKGAIVTVKGGLSVISPPTEEQQQRPEEEEKPDCDEKDKHCQSQSRNGIDETICTMRLRHNIGQTSSPDIFNPQAGSITTATSLDFPALSWLKLSAQFGSLRKNAMFVPHYNLNANSIIYALNGRALVQVVNCNGERVFDGELQEGQVLIVPQNFAVAARSQSDNFEYVSFKTNDRPSIGNLAGANSLLNALPEEVIQQTFNLRRQQARQVKNNNPFSFLVPPKGSQRRVVA

SEQ ID NO: 45640 - protein, 385 aa, Glycine max; identical to SEQ ID NO: 44000
  Clone ID: 700679842_FLI.pep

SEQ ID NO: 45641 - protein, 459 aa, Glycine max
  Clone ID: 700681043_FLI.pep
KALAFPTTPNTKTSSSMAASVSTVGAVNRALLNLNGSGAGASAPSSAFFGTSLKKVIASRVPNSKVSGGSFKIVAVEEKKEIEETQQTDKDRWKGLAYDISDDQQDITRGKGLVDSLFQAPQDAGTHYAVMSSYEYLSTGLRQYLDNKMDGFYIAPAFMDKLVVHISKNFMTLPNIKVPLILGIWGGKGQGKSFQCELVFAKMGINPIMMSAGELESGNAGEPAKLIRQRYREAADMIKKGKMCALFINDLDAGAGRLGGTTQYTVNNQMVNATLMNIADNPTNVQLPGMHNKEENPRVPIIVTGNDFSTLYAPLIRDGRMEKFYWAPTREDRIGVCTGIFRTDGIPEQDIVKLVDTFPGQSIDFFGALRARVYDDEVRKWISGVGVDSVGKKLVNSKDGPPTFEQPKMTLEKLLLYGNMLVQEQENVKRVQLADKYLNEAALGNANEDAIQRGTFFQS

SEQ ID NO: 45642 - protein, 793 aa, Glycine max
  Clone ID: 700683029_FLI.pep
MAPVPSRTVATASLASLLPSSPFARASLLRSAFLPPQIGRDRKCFSPAAGLRWTQRRQGRRDGLAVRCEAAVAEKDEATGEKFEYQAEVSRLLDLIVHSLYSHKEVFLRELVSNASDALDKLRFLSVTEPSLLGDAGDLEIHIKSDPDNGTITITDTGIGMTKEELIDCLGTIAQSGTSKFLKALKENKDLGADNGLIGQFGVGFYSAFLVAGRVVVSTKSPRSDKQYMWEAEADSSSYVIKEETDPEKFLRRGTQITLYLREDDKYEFSEPSRIQGLVKNYSQFVSFPIYTWQEKSRTVEVEEEEEPKEGEEPKEEGEKKKVKKTKTEKYWDWELANETKPIWMRNPKEVEKEEYNEFYKKTFSEFLEPLAHTHFTTEGEVEFRSILYVPGMGPLNNEEVVNPKTKNIRLYVKRVFISDDFDGELFPRYLSFVRGVVDSDDLPLNVSREILQESRIVRIMRKRLVRKAFDMIQDLAESENKEDYKKFWENFGRFIKLGCIEDTANHKRITPLLRFYTSKSEEELKSLDDYVENMGENQKAIFYLATDSLKSAKTAPFLEKLVQKDIEVLYLVEPIDEVAIQNLQTYKENKFVDISKEDLELGDEDEVKERENKQEYNLLCDWIKQQLGDKVAKVQISKRLSSSPCVLVSGKFGWSANMERLMKAQALGDTASLEFMRGRRILEINTDHPIIKDLSAACKNAPDSSEAKRAVDLLYDTALISSGFSPDSPAELGNKIYEMMALALGGRWGRSEEEEGDAPVEAADSSTSEESSEPEVYEPSEVIAESDPWTTD

SEQ ID NO: 45643 - protein, 357 aa, Glycine max
  Clone ID: 700683248_FLI.pep
PMEARAGANQRIARISAHLQPPNFQEGSDVLLKSAECRAKGGAPGFKVAILGAAGGIGQPLSLLMKMNPLVSVLHLYDVVNTPGVTADVSHMDTGAVVRGFLGQQQLESALTGMDLVIIPAGVPRKPGMTRDDLFKINAGIVRTLCEGIAKSCPNAIVNLISNPVNSTVAIAAEVFKKAGTYDPKRLLGVTTLDVVRANTFVAEVLGVDPREVDVPVVGGHAGVTILPLLSQVKPRSSFTAEETEYLTNRIQNGGTEVVEAKAGTGSATLSMAYAAAKFAGACLRGLKGEAGVVECAFVDSQVTELPFFATKVRLGRAGAEEVYQLGPLNEYERIGLEKAKRELAGSIQKGVEFIRK

SEQ ID NO: 45644 - protein, 565 aa, Glycine max; identical to SEQ ID NO: 43888
  Clone ID: 700734647_FLI.pep

SEQ ID NO: 45645 - protein, 488 aa, Glycine max
  Clone ID: 700737005_FLI.pep
LITMAKLVLSLCFLLFSGCFALREQAQQNECQIQKLNALKPDNRIESEGGFIETWNPNNKPFQCAGVALSRCTLNRNALRRPSYTNGPQEIYIQQGNGIFGMIFPGCPSTYQEPQESQQRGRSQRPQDRHQKVHRFREGDLIAVPTGVAWWMYNNEDTPVVAVSIIDTNSLENQLDQMPRRFYLAGNQEQEFLKYQQQQQGGSQSQKGKQQEEENEGSNILSGFAPEFLKEAFGVNMQIVRNLQGENEEEDSGAIVTVKGGLRVTAPAMRKPQQEEDDDDEEEQPQCVETDKGCQRQSKRSRNGIDETICTMRLRQNIGQNSSPDIYNPQAGSITTATSLDFPALWLLKLSAQYGSLRKNAMFVPHYTLNANSIIYALNGRALVQVVNCNGERVFDGELQEGGVLIVPQNFAVAAKSQSDNFEYVSFKTNDRPSIGNLAGANSLLNALPEEVIQHTFNLKSQQARQVKNNNPFSFLVPPQESQRRAVA

SEQ ID NO: 45646 - protein, 461 aa, Glycine max; identical to SEQ ID NO: 43947
  Clone ID: 700740758_FLI.pep

SEQ ID NO: 45647 - protein, 349 aa, Zea mays
  Clone ID: 700351006_FLI.pep
LLIKQLVLCDLAEETIQYCLATCVFAREAWTILLFIKLRWPTLSPHPNDRILHWWSQSVKANDSEIPLLHEYNGSVKEAGSTLEEERRLLYVAMTRARKKLYILHVTIDSNRQLLQPSRFLREIPDHLLEVQGEEPLRKMPERPSGDVPFDDSEVDTSIGKPIMGPNEASSYPEQAQACLANDFLRRFDIDDRSVVSHIFHHWGKKQAFQNPKRLLEKISFVIDERLRGKGYKRKDVLRKLKSFLSGDEALGYAQYVIKWEQIPIEKRNHLIRERNISKSRGLRTLWVRQNPQPSRYRTFEAWGAPSLRLLAYTHHILSKSTNRSNLVEESTNHNILLFFMYMPSILQM

SEQ ID NO: 45648 - protein, 328 aa, Zea mays
  Clone ID: 700282006_FLI.pep
YIIFENTNYDTIALYFLLFSAQGYSFTFDKVFDHSASQEHVFIEISQLVQSALDGYKVCIFAYGQTGSGKTYTMMGNPELEDQKGMIPRSLEQIFQASQTLNSQGWRYKMQASMLEIYNETIRDLLATNRMAAQDVGASKYSIKHDTNGNTNVSDLTIIDVTSINEVSSLLRRAAQSRSVGRTQMNEESSRSHCVFTLRIFGVNEGTDQQVQGVLNLIDLAGSERLNKSGATGDRLKETVAINKSLSCLSDVIFSIAKKEEHVPFRNSKLTYLLQPCLGGDSKTLMFVNLSPEASSTGESLCSLRFAARVNSCEIGIPRRQTQMRSSQ

SEQ ID NO: 45649 - protein, 160 aa, Zea mays
  Clone ID: 700804539_FLI.pep
KSLDTDGIRIISSVLGQSIALDHYIRQVDDMVEEFTEINRVMEKTGNFTMQRKKLFQLVGKANSNLADVIIRLGLFDRSEIAWKNANYAQILEYLREEYELNQRFGSLDFKLKFVEHNIHFLQEVLQNRRSDLLEWGVIILLIIEIAISLYEIAKDSMID

SEQ ID NO: 45650 - protein, 403 aa, Glycine max
  Clone ID: 700755079_FLI.pep
KGLAYDVSDDQQDITRGKGLVDSLFQAPQDTGTHYAIMSSYEYLSTGLKQYNLDNNMDGFYIAPAFMDKLVVHISKNFMTLPNIKVPLILGIWGGKGQGKSFQCELVFAKMGINPIMMSAGELESGNAGEPAKLIRQRYREAADMIKKGKMCALFINDLDAGAGRLGGTTQYTVNNQMVNATLMNIADNPTNVQLPGMYNKEENPRVPIIVTGNDFSTLYAPLIRDGRMEKFYWAPTRDDRVGVCNGIFRTDNVPKDDIVKLVDTFPGQSIDFFGALRARVYDDEVRKWISVVGVDFIGKKLVNSKEGPPTFDQPKMTLSKLLEYGNMLVQEQENVKRVQLADKYLKEAALGDANQDSINRGTFYGKAAQQVNIPVPEGCTDPNASNFDPTARSDDGTCLYTP

SEQ ID NO: 45651 - protein, 575 aa, Glycine max
  Clone ID: 700756513_FLI.pep
IAEIGKMALSMTQQIGTLAGATVPDSSAGESTAAVSAAAVWKSPTASLKCKVMRTDGCAEGLSPPLSPCRSPVLRADLSAACQAFTAEVAEEEYVAGGKEEKGKGKEGVPVFVMMPLDSVTAGNAVNRKKAMNAAMAALKSAGVEGVMMDVWWGLVEREKPGEYNWGGYVELMEMAKKHGLKVQAVMSFHQCGGNVGDSCTIPLPKWVVEEIDNDHDLAYTDQWGRRNYEYISLGCDTLPVLKGRSPVQCYADFMRAFRDTFKHLLGDTIVEIQVGMGPAGELRYPSYPEQNGTWKFPGIGAFQCYDKYMLSSLKAAAEAHGKPEWGSTGPTDAGHYNNWPEDTQFFRKEGGGWDGPYGEFFLTWYSQMLLEHGDRILSSATSIFDNTGVKISVKVAGIHWHYGTRSHAPELTAGYYNTRFRDGYLPIAQMLARHGAIFNFTCIEMRDHEQPQEALCAPEKLVKQVALATQKAQVPLAGENALPRYDEYAHEQIIRASQLDVDGESGDREMCAFTYLRMNPHLFEPNNWRKFVGFVKKMKEGKSAHKCWEEVEREAEHFVHVTQPLVQEAAVLMH

SEQ ID NO: 45652 - protein, 332 aa, Glycine max
  Clone ID: 700758447_FLI.pep
DTPVVAVSIIDTNSLENQLDQMPRRFYLAGNQEQEFLKYQQQQQGGSQSQKGKQQEEENEGSNILSGFAPEFLKEAFGVNMQIVRNLQGENEEEDSGAIVTVKGGLRVTAPAMRKPQQEEDDDDEEEQPQCVETDKGCQRQSKRSRNGIDETICTMRLRQNIGQNSSPDIYNPQAGSITTATSLDFPALWLLKLSAQYGSLRKNAMFVPHYTLNANSIIYALNGRALVQVVNCNGERVFDGELQEGGVLIVPQNFAVAAKSQSDNFEYVSFKTNDRPSIGNLAGANSLLNALPEEVIQHTFNLKSQQARQVKNNNPFSFLVPPQESQRRAVA

SEQ ID NO: 45653 - protein, 184 aa, Glycine max
  Clone ID: 700793534_FLI.pep
FEGVFTGRCGTALDHGVVAVGYGTANGHDYWIVRNSWGPSWGEDGYIRLERNLANSRSGKCGIAIEPSYPLKNGPNPPNPGPSPPSPVKPPNVCDNYYSCADSATCCCIFEFGNACFEWGCCPLEGATCCDDHYSCCPNDYPICNTYAGTCLKSKNNPFGVKALRRTPAKPHWTFGRKNKVSSA

SEQ ID NO: 45654 - protein, 257 aa, Glycine max
  Clone ID: 700793870_FLI.pep
YGIKPLIAAMGSCCLVGVVWKGTLYIANLGDSRAVIGSVGRSNKIIAEQLTKEHNASKEEVRRELRSLHPEDSQIVVMKQGTWRIKGIIQVSRSIGDAYLKRPEFSFDPSFPRFHLPEPIRRPVLTAEPSICSRVLKPNDKFIIFASDGLWEHLTNQEAAEIVHNNPRIGIARRLLKAALNEAARKREMRYKDLQKIGKGIRRFFHDDITVVVVFIDHEFAARMLQFLICPSKGLLTQLDHQILEICGDWNDHKVHL

SEQ ID NO: 45655 - protein, 90 aa, Glycine max
  Clone ID: 700794025_FLI.pep
CGTKHAITNLQPTHIPILFGVQLSLSSDQFIQSLLHPSIRAYYFCLIHSHPSSFSCVHFWPVIQFLLNKQREHVSLMHYGLAFALVIPFS

SEQ ID NO: 45656 - protein, 1053 aa, Glycine max
  Clone ID: 700830084_FLI.pep
CLAMASNSMAGLITGSNSHFSRDSDEHQTPPTRQASSKTTCRVCGDEIGYKENGELFVACHVCGFPVCRPCYEYERSEGNQSCPQCNTRYKRHKGCPRVAGDEEDNFDADDFDDEFPVKNHREDLDRNHDVNHVENGDYNPEKLHPNGQAFSSAGSVAGKDFEGDKEFYSNAEWQERVEKWKVRQEKRGLLNKEDGKEDQGEEDDYLLAEARQPLWRKVPISSSLINPYRIVIVMRLVILCFFFRFRILTPANDAYPLWLISVICEIWFALSWILDQFPKWFPITRETYLDRLSLRFEREGETNELAPVDFFVSTVDPLKEPPIITANTVLSILSVDYPVDKVSCYVSDDGASMLLFDSLAETAEFARRWVPFCKKYNIEPRAPEFYFSQKIDYLKDKVQPTFVKERRAMKREYEEFKVKINSLVAKAQKKPEEGWVMQDGTPWPGNNTRDHPGMIQVYLGSAGALDVEGKELPKLVYISREKRPGYPHHKKAGAMNALVRVSAVLTNAPFMLNLDCDHYVNNSKAVREAMCFLMDPNLGKKLCYVQFPQRFDGIDRHDRYANRNTVFFDINMKGLDGIQGPVYVGTGTVFNRQALYGYDPPVSEKRPKMTCDCWPSWCCCCCGGSRKSKSKKKSGKGLFSVFSKNKNKKKMMGKDYVRKGSGSMFDLEEIEEGLEGYEDLEKSSLMSQKSFEKRFGQSPVFIASTLMENGGLPEGTNSQSLVKEAIHVISCGYEEKTEWGKEIGWIYGSVTEDILTGFKMHCRGWKSVYCMPKRPAFKGSAPINLSDRLHQVLRWALGSVEIFLSRHCPLWYGYGGKLKYLQRMAYTNTIVYPWTSIPLLAYCTIPAVCLLTGKFIIPTLNNLASIWFMALFISIILTSVLELRWSGVTIEALWRNEQFWVIGGVSAHLFAVFQGLLKVLGGVDTNFTVTAKAAEDTEFGELYLFKWTTLLIPPTTLIILNIVGVVAGVSDAINNGYGSWGPLFGKLFFAFWVIVHLYPFLKGLMGKQNRTPTIVVLWSILLASIFSLIWVRIDPFLPKQTGPVLKQCGVEC

SEQ ID NO: 45657 - protein, 248 aa, Glycine max
  Clone ID: 700834192_FLI.pep
SNANEGLMMDRTVPSRLMDDIAATRIQNAFRSFMARRTLHHLRGAEKFEALIQDHLAREQTATALSYIHSWSRTQEQIRARRICMITEARIKQKKLETQLKIEAKIQELEVEWCNGSETMEEIISRLHQREEAAIKRERAMAYAFSHQWRPNCSQYFGQASYSLGKESWGWSWTERWVAARPWEVRVRGQTTKTTKLNGHGQVQKTKLDKMNQNESKVALAKPTLSNGKERKTVLQGCQRTMYPNSPF

SEQ ID NO: 45658 - protein, 477 aa, Glycine max
  Clone ID: 700838745_FLI.pep
SKGVLRRNHTREILGGSWQFKFGPKIVRKKTIVYIVFMSLLTVAHQRGSGEFMRFTESHGGGGGGDGDGEYGYGHDDGRGGGGGGSLGLNFNQVMQQGEVTTQGGTLVSGYNRGDPDLREMVSALTHVVVSSGSGQRSTEWIQQSGFPMMSASSLSCLSSFSSPSSSGASWVGHKRGREEEESSSSHNMIQQQQQSAPRLFRNIGDFMVPSQGDSSSATEEAPTSTTTSVTAVATTVTETPPPPGGGERRRKYRGVRQRPWGKWAAEIRDPHKAARVWLGTFDTEEAAARAYDEAALRFRGNRAKLNFPENVRAVPPIQPFQATTRLTVSDSTTSQFRPLVTETPPFIQQPQIQGSSDLIRDYLQYSQLLQSDFQQQQIQQQSPSSLLQQLYYNAQLASLQSPSVLSSSPSFSSSVSPTPFPLFSTSAQFSSASFPMFSSQQMGYFQLPESCPPAGGVPEFPPSTWSGTSGQPPPSG

SEQ ID NO: 45659 - protein, 408 aa, Glycine max
  Clone ID: 700746537_FLI.pep
KGVRNREGEEEERVGFGPKTHTPTAREREMGEGENTEIETETESEATSTWSLGKHTQIIELSETLTNGNLSAKIEAAREIRKMVRKSSSSSSKTRAKLAAAGVIEPLVLMLSSSNVDARQSSLLALLNLAVRNERNKVKIVTDGAMPPLVELLKMQNSSIRELATAAILTLSAAASNKPIIAASGAAPLLVQILKSGSVQGKVDAVTALHNLSTSIANSIELLDASAVFPLLNLLKECKKYSKFAEKATALLEILSNSEEGRTAISIADGGILTLVETVEDGSLVSTEHAVGTLLSLCRSCRDKYRELILKEGAIPGLLRLTVEGTAEAQDRARVLLDLLRDSPPEKRLTSSVLEKIVYDIAERVDGADKAAETAKRLLQDMVQRSMEHSMKCIQHRAASCTPSIPST

SEQ ID NO: 45660 - protein, 565 aa, Glycine max; identical to SEQ ID NO: 43888
  Clone ID: 700757148_FLI.pep

SEQ ID NO: 45661 - protein, 624 aa, Glycine max
  Clone ID: 700757258_FLI.pep
VSFPLPFINTHTAPSSSSSLSLFFVAGLAFQDPNLFPMRNLSFFFFFFFTFFAAVRSDPSDHRYKEGDPVPLYANKVGPFHNPSETYRYFDLPFCEPGDLKEKKEALGEVLNGDRLVSAPYKLEFQRDKELVSVCDRKLSKQDVARFRSAVRKDYYFQMYYDDLPIWGFIGKVDKEGKDPSDYRYFLYKHIHFDVFYNKDRVIEINVRTDPNALVDLTEDAEVQAEFLYTVKWKETNTPFEKRMDKYSQSSSLPHHLEIHWFSIINSCVTVLLLTGFLATILMRVLKNDFVKYAHDEESAEDQEETGWKYIHGDVFRFPKFKSLFAAALGSGTQLFTLTVFIFILALVGVFYPYNRGALFTALVVIYALTSGIAGYTATSFYCQLEGTNWVRNLLLTGCLFCGPLFLTFCFLNTVAIAYKATAALPFGTIVVIVLIWSLVTSPLLVLGGIAGKNSKAEFQAPVRTTKYPREIPPLPWYRGTIPQMAMAGFLPFSAIYIELYYIFASVWGHRIYTIYSILFIVFIILLIVTAFITVALTYFQLAAEDHEWWWRSFLCGGSTGLFIYTYCLYYYYARSDMSGFMQTSFFFGYMACICYGFFLMLGTVGFRAALLFVRHIYRSIKCE

SEQ ID NO: 45662 - protein, 519 aa, Glycine max; identical to SEQ ID NO: 43902
  Clone ID: 700759584_FLI.pep

SEQ ID NO: 45663 - protein, 318 aa, Glycine max
  Clone ID: 700797590_FLI.pep
AMTGSETEKALLSTTPKLTKAMTGSETEKVPFGFFARNGKYVECLLSVSKKLDVEGLVTGVFCFLQLASPELQQALHIQRLSEQTASKRLNALSYMKRQIRNPLCGIVFSRKMLEGTDLGTEQKQLLRTSAQCQQQLSKILDDSDLDTIIDGYLDLEMAEFTLHEVLVTSLSQVMTKSNGKSIRIVNDVAGHIMMETLYGDSLRLQQVLADFLLISINFTPNGGQVVVAGSLTKEQLGKSVHLVKLELSITHGGSGVPEVLLNQMFGNNGLESEEGISLLISRKLLKLMNGDVRYLREAGKSAFILSAELAAAHNLKA

SEQ ID NO: 45664 - protein, 896 aa, Glycine max
  Clone ID: 700797735_FLI.pep
GDSERGKSKGKSDSGDVGREERVEKPRHHRAAAGYDVAETWDRSLNAEEDGHVRVRDKSTRESGNSNRSRTPEKSGKRHQDLENSEVDYERSSSFKRKEHEGDGYKDDRSKGKDDTWNDRRKDRESSKESWKRRQPSNTDKDSKNEESAFDDNRDWELPRHGYERMDNERPHGRFGGRKDVSRGEAVKTSTKFGISNDNYDVIEIQTKFYDYGKSESMSNHTKRTETHQQYIAKSGANDEEWAYHQDERGRKSDLSGSGTPGEDLKERYADDDYDFYGGRGRGQKGGVSARGTGGQSSSTGGSQPQYGNPESGSFNRAGAQGIKGNRVGRGGRIRPTGRDNQQVGIPLPMMGSPYGPLGMPPPGAMQPLSHGISPAPGPPISPGVFMSPFTPGVWPGARGVDMNIIGVPPAVSPVPPGPRFNAANIGNPPNPVMYYNQSGPGRVMPPSICTPGFNPTGSIGRGAPPDKAPGGWAPPKSSGTLGKAPSRGEQNDYSQNFVDTGLRPQNFIRELELTNVVEDYPKLRELIQKKDEIVEKSASAPMYYKCDLKEFELSPEFFGTKFDVILVDPPWEEYVHRAPGVADHMEYWTFEEIMNLKIEAIADTPSFIFLWVGDGVGLEQGRQCLKKWGFRRCEDICWVKTNKSNATPGLRHDSHTLFQHSKEHCLMGIKGTVRRSTDGHIIHANIDTDVIIAEEPPYGSTQKPEDMYRIIEHFALGRRRLELFGEDHNIRAGWLTVGKELSSSNFNKEAYVKSFADKDGKVWQGGGGRNPPPEAPHLVVTTPDIEALRPKSPMKNQQQLQQQNSVSISLTSASASNRRPAGNSPQNTTALGVNQDASSSNPSTPAPWGSPLEGFKGREGSVLPSDDKVMDMYGFHGPASANYLDFESYRQMNLL

SEQ ID NO: 45665 - protein, 479 aa, Glycine max
  Clone ID: 700763704_FLI.pep
AFFTGVNHHGQPVLFGCAFLINESEASFVWLFKTWLMAMSGCPPVSITTDHDSAIRSAIIQVFPETRHRFCKWHIFKKCQEKLSHIFLQYPNFEAEFHKCVNLTESTEEFKSCWSTLVDKYDLRVHEWLQAIYSSCRQWVPVYLRDTFFAEMSITQRSDSMNSYFDGYINASTNLSQFFKLYEKALESRNEKEVRADYDTMNTLPVLRTPSPMEKQASELYTRKIFMRFQEELVGTLALMASKADDDGEVITYHVAKFGEDHKGYCVKFNVLEMKATCSCQMFEFSGLLCRHVLAVFRVTNVLTLPSHYILKRWTRNAKSNVILEEHACDVYTYYLESHTVRYNTLRHEALKFVDEGARSAETYDVAIDALQEAAKRVSQGIQNEGKIPISNGKVRSHVLNDESHANYTSGCQEASLSQHMSKDDLDNIRKLMNELECANRKCEIYRSNLLSVLKAVEDHKLELSVKVENIKISMKDGI

SEQ ID NO: 45666 - protein, 273 aa, Glycine max; identical to SEQ ID NO: 44461
  Clone ID: 700831452_FLI.pep

SEQ ID NO: 45667 - protein, 271 aa, Glycine max
  Clone ID: 700831734_FLI.pep
KKKTKREKKMDDRGSSFITVRRIPHGETCHSNSAEVVVGSAAWLGRGLSCVCVQRRDSDASNTFDLTLAQEECLQRIQRRIDVPYDSSIIEHQDALRALWNAAFPEEELHGLISEQWKEMGWQGKDPSTDFRGGGFISLENFLFFARNFPKSFQDLLRKQEGDRSVWEYPFAVAGVNITYMLIQMLDLEAVKPRNLVGATFLKFLAENESAFDLLYCITFKLMDHQWLSMHASYMDFNAVMKETRRQLEKELLVEDIAQLEDLPSYKLLSR

SEQ ID NO: 45668 - protein, 415 aa, Glycine max
  Clone ID: 700832050_FLI.pep
RETVELKMKITVMTADEQIITLDVDPHESVENVKALLEVETSVPLQQQQLLFNGKEVRNSEKLSALGVKDDDLLMMVSGAGATASSGSTNDLSLNADGSAVNPGSFQQHIRHDSNLMSQLFQSDPELAQAILGNDLNKLQEVLRLRHHQRDELKRQKEEELALLYADPFDVEAQKKIEAAIRQKGIDENWAAALEHNPEAFARVVMLYVDMEVNGVPLKAFVDSGAQSTIISKSCAERLGLLRLLDQRYRGIAHGVGQSEILGRIHVAPIKIGSIFYPCSFLVLDSPNMEFLFGLDMLRKHQCIIDLKENVLRVGGGEVSVPFLQEKDIPSRFLDEEKYAKEASGSGGQVASGSNNPSTGGHSSGGASGDRTKDSEFEAKVAKLVELGFERNAVIQALQLFNGNEEQAAGFLFGG

SEQ ID NO: 45669 - protein, 728 aa, Glycine max
  Clone ID: 700837309_FLI.pep
IEVTFSLFSAVVVIYFPMASASGAANSSVPPPQIHTSRTKLSHHSSNNNNNIDSMSKAIAQYTEDARLHAVFEQSGESGRSFNYSESIRIASESVPEQQITAYLVKIQRGGFIQPFGSMIAVDEPSFRILGYSDNARDMLGITPQSVPSLDDKNDAAFALGTDVRALFTHSSALLLEKAFSAREISLMNPIWIHSRTSGKPFYGILHRIDVGIVIDLEPARTEDPALSIAGAVQSQKLAVRAISQLQSLPGGDVKLLCDTVVESVRELTGYDRVMVYKFHEDEHGEVVSESKRPDLEPYIGLHYPATDIPQASRFLFKQNRVRMIVDCHASAVRVVQDEALVQPLCLVGSTLRAPHGCHAQYMANMGSIASLVMAVIINGNDEEGVGGRSSMRLWGLVVCHHTSARCIPFPLRYACEFLMQAFGLQLNMELQLAAQSLEKRVLRTQTLLCDMLLRDSPTGIVTQSPSIMDLVKCDGAALYFQGNYYPLGVTPTEAQIRDIIEWLLAFHGDSTGLSTDSLGDAGYPGAASLGDAVCGMAVAYITEKDFLFWFRSHTAKEIKWGGAKHHPEDKDDGQRMHPRSSFKAFLEVVKSRSLPWENAEMDAIHSLQLILRDSFKDAEHRNSKAVVDPHVSEQELQGVDELSSVAREMVRLIETATAPIFAVDVDGHVNGWNAKVSELTGLPVEEAMGKSLVHDLVFKESEETMNKLLSRALKGILSNTLAFWSIH

SEQ ID NO: 45670 - protein, 385 aa, Glycine max
  Clone ID: 700837525_FLI.pep
QASTEMEAKRGHALMCLARVSLFLCALTLSAAHGSTTVQDIARKLKLGDNELLRTEKKFKVFMENYGRSYSTEEEYLRRLGIFAQNMVRAAEHQALDPTAVHGVTQFSDLTEDEFEKLYTGVNGGFPSSNNAAGGIAPPLEVDGLPENFDWRKKGAVTEVKLQGRCGSCWAFSTTGSIEGANFLATGKLVSLSEQQLLDCDNKCDITEKTSCDNGCNGGLMTNAYNYLLESGGLEEESSYPYTGERGECKFDPEKIAVKITNFTNIPADENQIAAYLVKNGPLAMGVNAIFMQTYIGGVSCPLICSKKRLNHGVLLVGYGAKGFSILRLGNKPYWIIKNSWGEKWGEDGYYKLCRGHGMCGINTMVSAAMVPQPQTTPTKNYASY

SEQ ID NO: 45671 - protein, 219 aa, Glycine max
  Clone ID: 700837669_FLI.pep
KQRIYPRLDPVVIMLVIDRENDRALLSKQSRFVPRMWSCLAGFIEPGESLEEAVRRETWEETGIEVGEVVYHSSQPWPVGPNSMPCQLMVGFFAYAKSLEINVDKEELEDAQWHSREYVRKALTFAEYKKAQQTAVAKVEQMCKGVEKAHSLSTDFNVESGELAPMFVPGPFAIAHHLISSWAFPDQNVNGSECHSKQASGFYVKFVGVQIIFLKAPLI

SEQ ID NO: 45672 - protein, 253 aa, Glycine max
  Clone ID: 700841324_FLI.pep
DFVFMMFFNSDKPGNHNFDLLKKLVLPDGSVLRAQLPGRPTRDSLFVDPARDRTSLLKIWNLNKCSGVVGVFNCQGAGWCKIEKKTRIHDTSPGTLTASVCASDVDLITQVAGAEWLGDTIVYAYRSGEVIRLPKGVSIPVTLKVLEFELFHFCPIQEIAPSISFAAIGLLDMFNTGGAVEQVEIHNRAATKTIALSVRGRGRFGVYSSQRPLKCVVGGAETDFNYDSETGLTTFSIPVSPEEMYRWSIEIQV

SEQ ID NO: 45673 - protein, 366 aa, Glycine max; identical to SEQ ID NO: 37097
  Clone ID: 700808477_FLI.pep

SEQ ID NO: 45674 - protein, 317 aa, Glycine max
  Clone ID: 700786224_FLI.pep
DSGFLYWKWKPSECHLPRFDPNTFLQFISNKHVAFVGDSISRNHLESLLCMLATVTKPNRVRHQGSRRWHFPSHNAILSFYWSPFLVQGIPRKNPGPHYNTVFLDRVNLRWARDMDQMDMIVLSFGHWFNVPSVFYEGDDKVLGCHNHPVTNCTTEIGFYGPIRRALRIALNSIIERKVSKGNGVDVIVRTYSPSHFEGDWDTGGTCAKTNPYGVGQRQLEGENAVIRRIQLEEVENAKVKAKQFRGFRLEVLDVTKLALLRPDGHPGAYMNPFPFANGVNPKKPVQNDCVHWCLPGPIDTWSGIFLEMMKNMARAA

SEQ ID NO: 45675 - protein, 599 aa, Glycine max
  Clone ID: 700747567_FLI.pep
NLNLPDFVLLCSGSQPVMVLFNVSRVETTPFDGQKPGTSGLRKKVKVFVQPHYLHNFVQSTFNALTVEKVRGATLVVSGDGRYFSKEAIQIITKMSAANGVRRVWIGQNGLLSTPAVSAVIRERVGADGSRATGAFILTASHNPGGPHEDFGIKYNMENGGPAPEGITDKIYENTTTINEYLIASDLPDVDITTTGVTSFTGPEGPFDVEVFDSASDYIKLMKSIFDFESIRKLLSSPKFTFCYDALHGVGGAYAKSIFVDELGAQESSLLNCTPKEDFGGGHPDPNLTYAKELVARMGLGKSEPQDDPPEFGAASDGDADRNMILGKRFFVTPSDSVAIIAANAVEAIPYFSAGLKGVARSMPTSAALDVVAKHLNLKFFEVPTGWKFFGNLMDAGLCSVCGEESFGTGSDHIREKDGIWAVLAWLSILAYKNKDKLEDKLVTVEDIVRQHWATYGRHYYTRYDYENVDAGAAKELMAYLVKLQSSLSEVNQIIKGIRSDVSNVVHGDEFEYNDPVDGSISSHQGIRYLFEDGSRLIFRLSGTGSEGATIRLYIEQYEKDPSKIGRLSNEALAPLVEVALKLSKMEEFTGRSAPTVIT

SEQ ID NO: 45676 - protein, 421 aa, Glycine max
  Clone ID: 700747645_FLI.pep
GSRGYHWMWDSRLFNYGSWEVLRYLLSNSRWWLDEYKFDGFRFDGVTSMMYTHHGLEVAFTGNYNEYFGFATDVDAVIYLMLTNDVIHGLFPEAVTIGEDVSGMPTFCLPTQDGGVGFDYRLHMAIADKWIEILKKNDEDWKMGDIVHTLTNRRWLEKCVAYAESHDQALVGDKTIAFWLMDKDMYDFMALDRPSTPIIDRGIALHKMIRLITMGLGGEGYLNFMGNEFGHPEWIDFPRGDQHLPTGVIVPGNNNSFDKCRRRFDLGDADYLRYRGMQEFDQAMQHLEEKFGFMTAEHQYISRKNEGDKIIVFERGNLIFVFNFHWNNSYSDYRVGCSTPGKYKIVLDSDDALFGGFSRLNHTAEYFTSEGWYDDRPRSFLIYAPSRTAVVYALADDVEPTLADEAEPALADEAEPEPVDP

SEQ ID NO: 45677 - protein, 355 aa, Glycine max
  Clone ID: 700747718_FLI.pep
FKGKYHDELIANAAYIGTPGKGILAADESTGTIGKRLASISVENIESNRRALRELLFTAPGVLQYLSGVILFEETLYQSTAAGKPFVNVLKEAGVLPGIKVDKGTVELAGTNGETTTQGLDGLGQRCAKYYEAGARFAKWRAVLKIGPNEPSELSIHENAYGLARYAVICQENGLVPIVEPEILVDGPHDIHKCAAVTERVLAACYKALNDHHVLLEGTLLKPNMVTPGSQSAKVSPQVVAEHTVRALQRTVPAAVPAVVFLSGGQSEEEASVNLNAINQVNGKKPWSLSFSFGRALQQSTLKAWGGKEENVKKAQEALLVRAKANSEATLGTYKGNSQLADGASESLHVSNYSY

SEQ ID NO: 45678 - protein, 565 aa, Glycine max; identical to SEQ ID NO: 43888
  Clone ID: 700757796_FLI.pep

SEQ ID NO: 45679 - protein, 565 aa, Glycine max; identical to SEQ ID NO: 43888
  Clone ID: 700758126_FLI.pep

SEQ ID NO: 45680 - protein, 506 aa, Glycine max; identical to SEQ ID NO: 45624
  Clone ID: 700759978_FLI.pep

SEQ ID NO: 45681 - protein, 487 aa, Glycine max
  Clone ID: 700832944_FLI.pep
GMSFLQGIIDSFNSIFTHDNNNNYHNTNSPSSSSSTNRMEASPPPSVSNERVAYKLKGYFDLATQEIAKGVRAEEWGLIDDALLHYRNAHSILLEANSTPVPSYITTSEQQKVQSYREKISKWQSQVSERLQTLARRAGSSSANQSTSKLGQTAAAPIKTLSTRKNVLQKPPQRGGQVNKVGSPKSSQASGVNYDDKLVEMINTAIVDRSPSVRWEDVAGLEKAKQALMEMVILPTKRRDLFTGLRRPARGLLLFGPPGNGKTMLAKAVASESQATFFNVTAASLTSKWVGEAEKLVRTLFMVAISRQPSVIFIDEIDSIMSTRLANENDASRRLKSEFLIQFDGVTSNPDDIVIVIGATNKPQELDDAVLRRLVKRIYVPLPDENVRKLLLKHKLKGQAFSLPSRDLERLVKETERYSGSDLQALCEEAAMMPIRELGVDILTVKANQVRGLRYEDFKKAMTIIRPSLNKSKWEELERWNEEFGSN

SEQ ID NO: 45682 - protein, 331 aa, Glycine max
  Clone ID: 700838011_FLI.pep
RHLIPRVLDQHGLSSEFLQIPEAMVKLVIQRYTREAGVRNLERNLAALARAAAVRVLEQEQVVPLNKGMQGLATPLVENRLADGTEVEMEVIPMGVNSRDISNTFRIASPFVVDETMLEKVLGPPRFDGREAAERVATPGVTVGLVWTAFGGEVQFVEATAMVGKGELHLTGQLGDVIKESAQIALTWVRARTTDLRLGATEGFNILEGRDVHIHFPAGAVPKDGPSAGVTLVTALVSLFSQQRVRSDTAMTGEMTLRGLVLPVGGVKDKILAAHRYGIKRVILPERNLKDLVEVPSSVLSNLEILLAKRVEDVLEHAFDGGCPWRQHSKL

SEQ ID NO: 45683 - protein, 275 aa, Glycine max
  Clone ID: 700841748_FLI.pep
ADIFAEWNRGELESFLIEITADIFKVKDEDGEGFLVDKILDKTGMKGTGKWTVQQAAELSIAAPTIAASLDCRYLSGLKEERESAAAVLKEAGLSDELGRVSVSGVDKKRLIDDVRQALYASKICSYAQGMNLLRAKSNEKGWNLNLGELARIWKGGCIIRAVFLDRIKKAYQRNPNLASLIVDPEFAREMVQRQAAWRRVVGLAVSAGISTPGMCASLAYFDTYRRARLPANLVQAQRDLFGAHTYERVDRPGAFHTEWTKLARKSGTGVGALN

SEQ ID NO: 45684 - protein, 377 aa, Glycine max
  Clone ID: 700841855_FLI.pep
ANKDALEKTKYPDSDLYWKKFEDKYHFSCQFTADLIAMNNADFIITSTYQEIAGTKNTVGQYESHAGFTLPGLYRVVHGIDVFDPKFNIVSPGADMSIYFPYSEKQNRLTALHGSIEQLLFAPEQTDEYIGLLKDKSKPIIFSMARLDRVKNITGLVESFGKNSKLRELVNLVIVAGYIDVKKSSDREEIAEIEKMHELMKKYNLVGDFRWIAAQTNRARNGELYRYIADTQGAFVQPAFYEAFGLTVVEAMNCGLPTFATCHGGPAEIIEHGISGFHIDPYHPDQASQLLVEFFQKSKEDPSHWKKISDGGLQRIYERYTWKIYSERLMTLAGVYSFWKYVSKLERRETRRYLEMFYILKFRDLANSVPLAKDDAS

SEQ ID NO: 45685 - protein, 422 aa, Glycine max
  Clone ID: 700786769_FLI.pep
AEREQGLLQILTEMDGFKVSTAQVLVIGATNRLDILDPALLRKGRFDKIIRVGLPSEDGRFAILKVHARNKFFRSEEEKETLLKEIAELTEDFTGAELQNILNEAGILTARKDLDYIGRDELLEALKRQKGTFETGQEDSTEIPEELKLRLAYREAAVAVLACYFPEPHRPFLETDINSIRSQPNMRYAEISGQVFARKLDYINSIVRACAPRVIEEEMFGIDNLCWISAKATLEASKRAEFLILQTGMTAFGKAYYKNYSDLVPSLAMKLEALRDEYMRYATEKCSSVLKEYHLAVETITDILLEKGQIKAEEIWDIYRGAPRVAQPAVSPVDEFGALIYAGRWGIHGISLPGRVTFAPGNVGFATFGAPRPTETQIVSDETWKLVDDIWDKKVQNIKDEASKVIEEEKEKPQLLMASHFL

SEQ ID NO: 45686 - protein, 560 aa, Glycine max
  Clone ID: 700787309_FLI.pep
QTLQRGRRNLWHLTASRVSVLLSSAAVCTASIHQFLKNYEDLGVFILTGEAFCGIEAVEFRQKLKVVCENYFIAFHRQNVHALKMVLEKETWLKLPPETVHMISFAGLIGDGAPLISLSSGKSTNVSAVHSIKSVNMVHTGARKNGFSHWIKSGNPFQQKLPTSNEGRGYSQPNGSVCGEFDGSSTNNFHDDKTPRKNDINQMNGANSVSEDENEDLLADFIDEDSQLPSRSSKPHHSRALSSHVNDEENTTQTGSSLCLLKSMDKYARLMQKLEVVNVEFFKGVCQLFGFFFYFIYETFGQQNASSTGKGTSSSLNYRLRTALSRVNQDCEEWIKSQSSSPTSLSSPFVHAELTPTHPPNTNYGHSSGTSLGLKVDAVPDLTEHVHRTTVRLLLHINGYVERVANCKWEVKELGMEHNGYVDLMLGEFKHYKTRLAHGGIRKEVQDLLLDYGLEIVAETLVEGLSRVKRCSDEGRALMSLDLQVLINGLHHFVSLNVKPKLQMVETFIKAYYLPETEYVHWARAHPEYSKSQVVGLVNLVATMKGWKRKTRLDILEKIE

SEQ ID NO: 45687 - protein, 510 aa, Glycine max
  Clone ID: 700791212_FLI.pep
QSASLLCLFLSLAILLASGTAASATPRSAVPSHHVSTFNRSLFPSTFLFGIGSSAYQAEGAASVDGRGPSIWDTYTRQHTEKIWDHSTGDMGADFYHRYKGDIKIAKEIGLDSFRFSISWSRIFPKGKGAVNPLGVKFYNNVIDEILANGLKPFVTLFHWDFPQALEDEYGGFRSPKVVADFRGYANFCFKTFGDRVKYWVTLNEPLSFSLNGYNGGTFAPGRCSKYVANCSAGDSSTEPYIVGHYLLLAHESAATLYKTKYQARQKGQIGITNPTHYFLPKSQSAADYKAASRALDFFFGWYSDPVFYGDYPESMKSSVGSRLPKFTKAESEGLKNSIDFLGVNYYTTYYAEHAEPVSANRTFYTDILASLSTERNGLHVGTPTDLNWLFIFPKGIHLLMAHIKDKYKNLPIYITENGMAESRNDSIPVNEARKDSIRIRYHDGHLKFLLQAIKEGVNLKGYYAWSFSDSFEWDAGYTVRFGLIYVDYKNNLKRYPKFSAFWLQKFLLK

SEQ ID NO: 45688 - protein, 334 aa, Glycine max
  Clone ID: 700750004_FLI.pep
RRMESTESSYVSSPEGPRKHAASPPPKSPSLDSEEKPTYIRFLVSNSAAGSVIGKGGSTITDFQSQSGARIQLSRNHEFFPGTTDRIIMVSGAINEIQRAVELILSKLLSELHSEDDNDAEPKTKVRLVVPNGSCGGIIGKGGATIRSFIEDSQAGIKISPQDNNYYGQNDRLVTLTGSFDEQMRAIELIVSKLSEDPHYAQSMNSPFSYPGYQGVPYTYVLPSVAPPAYNAVNYRPNGAAGGKLQNSKEERSNSLTMGVADEHIGLVVGRGGRNIMEISQASGARIKISDRGDYVSGTTDRKVTITGSQRAIRTAESMILQKVAYATERGVME

SEQ ID NO: 45689 - protein, 366 aa, Glycine max; identical to SEQ ID NO: 37097
  Clone ID: 700751809_FLI.pep

SEQ ID NO: 45690 - protein, 403 aa, Glycine max
  Clone ID: 700752753_FLI.pep
PNPILFLFPQIITHFLSFPSLFRSFSRDLHIPKLRTPPARKLKAEKGKRFDLSNEEFLGCPRMRLNGEISSGEEEEEEKQTGTTTFSSQKVVVGYALTSKKKKSFLQPSFTGLARNRGINFVAIDLNKPLPEQGPFDIILHKLSGEVWREIIEDYREKHPEVTVLDPPDAIQHLHNRQSMLQDVLDLNLSDCHGKVGVPRQLVITKEKDPSSIPYEVTKAGMKLPLVAKPLVVDGTAKSHELFLAYDEFSLSAVEPPLVLQEFVNHGGLLFKIYIVGETIKVVRRFSLPNISKRELSKVAGVFRFPRVSCAAASADDADLDPNIAEHPPRPLLERLARELRHRLGLHLFNIDMIREYGTKDVFYVIDINYFPGYGKMPGYEHVFTDFLLSLVESKCSNKKLAA

SEQ ID NO: 45691 - protein, 393 aa, Glycine max
  Clone ID: 700757037_FLI.pep
YYKPLGMGLAKETIMGGGGRVAKVEIQQKKPLSRVPNTKPPFTVGQLKKAIPPHCFQRSLLTSLSYVVYDLSLAFIFYIATTYFHLLPHPFSLIAWPIYWVLQGCILTGVWVIAHECGHHAFSKYPWVDDVMGLTVHSALLVPYFSWKISHRRHHSNTGSLDRDEVFVPKPKSKVAWYTKYLNNPLGRAASLLITLTIGWPLYLAFNVSGRPYDGFASHYHPYAPIYSNRERLLIYVSDVALFSVTYLLYRVATMKGLVWLLCVYGVPLLIVNGFLVTITYLQHTHYALPHYDSSEWDWLRGALATMDRDYGILNKVFHHITDTHVAHHLFSTMPHYHATEATNAMKPILGEYYRFDDTPFYKALWREARECLYVEPDEGTSEKGVYWYRNKY

SEQ ID NO: 45692 - protein, 507 aa, Glycine max
  Clone ID: 700762591_FLI.pep
SPLVLKHSSVITMAKLVFSLCFLLFSGCCFAFSSREQPQQNECQIQKLNALKPDNRIESEGGLIETWNPNNKPFQCAGVALSRCTLNRNALRRSSYTNGPQEIYIQQGKGIFGMIYPGCPSTFEEPQQPQQRGQSSRPQDRHQKIYNFREGDLIAVPTGVAWWMYNNEDTPVVAVSIIDTNSLENQLDQMPRRFYLAGNQEQEFLKYQQEQGGHQSQKGKHQQEEENEGGSILSGFTLEFLEHAFSVDKQIAKNLQGENEGEDKGAIVTVKGGLSVIKPPTDEQQQRPQEEEEEEEDEKPQCKGKDKHCQRPRGSQSKSRRNGIDETICTMRLRHNIGQTSSPDIYNPQAGSVTTATSLDFPALSWLRLSAEFGSLRKNAMFVPHYNLNANSIIYALNGRALIQVVNCNGERVFDGELQEGRVLIVPQNFVVAARSQSDNFEYVSFKTNDTPMIGTLAGANSLLNALPEEVIQHTFNLKSQQARQIKNNNPFKFLVPPQESQKRAVA

SEQ ID NO: 45693 - protein, 621 aa, Glycine max
  Clone ID: 700830793_FLI.pep
AKNMYSRDSWGGPLEINATDSATEDERSRNLQDVDRAALSRPLDETQQSWLLGPGEQKKKKYVDLGCIIVSRKIFKWTLGTILFAAFLAGLIALIVNTVPRHRHKHPPPDNYTLALHKALMFFNAQRSGKLPKHNNVSWRGNSGMQDGKSSDHSAAIKDLVGGYYDAGDAIKFNFPASFSITMLSWSVIEYSAKYEAAGELEHVKEIIKWGTDYFLKSFNSTADTITTLAAQVGLGDTSGGDSPNDHYCWMRPEDMDYDRPVTECHSCSDLAAEMAAALASASIVFKDNKAYSKKLVHGATTLFKFSREQRGRYSAGSSEASIFYNSTSYWDEYVWGGAWMYFATGNSSYLKLATAPGLAKHAGAFWGGPDYGVLSWDNKLAGAQVLLSRLRLFLSPGYPYEEILRTFHNQTSIIMCSYLPVFTSFNRTKGGLIQLNHGRPQPLQYVVNAAFLAALYSDYLDAADTPGWYCGPNFFSTDVLRSFAKSQIDYILGNNPRKMSYVVGFGNHYPKHVHHRGASVPKNKIKYSCKGGWKWRDTSKPNPNTIVGAMVAGPDKHDGFHDVRTNYNYTEPTLAGNAGLVAALVALSGDKGTSIDKNTIFSAVPPMFPTPPPPPAPWKP

SEQ ID NO: 45694 - protein, 479 aa, Glycine max
  Clone ID: 700831054_FLI.pep
IPHPLLTNKITATFLKQSMAPLTFSFFFILISYISSSSEAGSIGINYGRIANDLPTPAKVVELLKSQGLNRVKLYDTDATVLTAFANSGMKVVVAMPNELLANAAAEQSFTDAWVQANISSYYPATQIEAIAVGNEVFVDPNNTTKFLVPAMKNVHASLVKYSLDKNIKISSPIALSALQNSFPASSGSFKTELLEPVIKPMLDFLRQTGSYLMVNAYPFFAYAANSDKISLDYALFKENPGVVDSGNGLKYTNLFDAQIDAVFAAMSAVKYDDVKIAVSETGWPSAGDSNEIGASPDNAASYNGNLVKRVLSGSGTPLKPNESLDVFLFALFNENQKTGPTSERNYGLFYPSQKKVYDIQLTAEAPPSGVGKSQVPVSGDVTTSSKGQTWCVANGGSSEKKLQNALNYACGEGGADCTPIQPGATCYDPNTLEAHASYAFNSYYQKMARASGTCYFGGTAYVVTQPPKYGNCEFPTGY

SEQ ID NO: 45695 - protein, 170 aa, Glycine max
  Clone ID: 700831422_FLI.pep
GSLNNLSLLNKQYGLSKSTDEAMFVIEAYKTLRDRGPYPADQVVKELDGSFAFVVYDSKVGSVFAALGSDGGVKLYWGIAADGSVVISDDLEVIKEGCAKSFAPFPTGCMFHSEGGLMSFEHPMNKLKAMPRVDSEGAMCGANFKVDKFARVNSIPRVGSQSNWMEWDQH

SEQ ID NO: 45696 - protein, 367 aa, Glycine max
  Clone ID: 700834445_FLI.pep
LTPVSLRIAALETLESLITVAGALKSEPWRSKVDSLLLVTAMDSFKEGSVSEERSVFQQKEPAATTTELQLAALRALLVSLLSFARVRPPYLAQGLELFRRGRQQTGTKLAEFCAHALLTLEVLIHPRALPMVDYAYANNSSFGEAHSNLQHGYFGWSHNTPYGLPQVPPDYDDDLCARWLENDNEVGESLDKNTKYTQEPSEACRASDPEVLFVHVSSDTNIQERIEMVSETATCADVEMKTVEDETNFKSDQPGESVVQFQETVSCTTNIPVVETRGDVADDKVSEKIVSDNSIPHNEASHMESRHGSSVNKDFKFSSPSSSLWHRTSGSNIFEEFAFQLEHDKALADEDDFPDIVDGDPDSDTE

SEQ ID NO: 45697 - protein, 103 aa, Glycine max
  Clone ID: 700834737_FLI.pep
LFPYKEWWVVPAKVAFDQTAWSALWNSIYYTVVALLRLDPPMSILNELKATFFPMLTAGWKLWPFAHLITYGVIPVEQRLLWVDTIELIWVTILSTYVYLDLF

SEQ ID NO: 45698 - protein, 522 aa, Glycine max
  Clone ID: 700839723_FLI.pep
AAGYSGIMARVLAQSINVPGLLAEHRHGQQKESGKLKRSTKMMSALRTNGLRMSGFSGLRTFNPLDTMLRPGIDFHSKVSIATSSRRARATRCVPKAMFERFTEKAIKVIMLAQEEARRLGHNFVGTEQILLGLIGEGTGIAAKVLKSMGINLKDARVEVEKIIGRGSGFVAVEIPFTPRAKRVLELSLEEARQLGHNYIGSEHLLLGLLREGEGVAARVLENLGADPTNIRTQVIRMVGESADSVTATVGSGSSGNKMPTLEEYGTNLTKLAEEGKLDPVVGRQPQIERVTQILGRRTKNNPCLIGEPGVGKTAIAEGLAQRIANGDVPETIEGKKVITLDMGLLVAGTKYRGEFEERLKKLMEEIKQSDEIILFIDEVHTLIGAGAAEGAIDAANILKPALARGELQCIGATTLDEYRKHIEKDPALERRFQPVKVPEPTVDETIQILKGLRERYEIHHKLRYTDEALVAAAQLSYQYISDRFLPDKAIDLIDEAGSRVRLQHAQLPEEARELDKEVRQI

SEQ ID NO: 45699 - protein, 282 aa, Glycine max
  Clone ID: 700839890_FLI.pep
EKYKAEDEEHLLNLLLRKPSFVVGNCNLDLLLLDVTPLSLGLETAGGVMTVLIPRNTTIPTKKEQVFSTYSDNQPGVLIQVYEGERTRTRDNNLLGKFELSGIPPAPRGVPQITVCFDIDANGILNVSAEDKTTGQKNKITITNDKGRLSKEEIEKMVQEAEKYKAEDEEHKKKVEAKNTLENYAYNMRNTIKDDKIASKLSADDKKKIEDAIEQAIQWLDGNQLAEADEFEDKMKELESICNPIIAKMYQGAGGDAGGAMDEDGPAAGSGSGAGPKIEEVD

SEQ ID NO: 45700 - protein, 674 aa, Glycine max
  Clone ID: 700789268_FLI.pep
IPHATAMSHSKTPAAGETLFSGTAFLILLHLFLFLTPALSLDFLFNSFAGVTNLTLIKDARVDASVIRMNNDSNQYSYGRAFYPVKIPMLKTNTSNNSSSISSFSTSFVFSILPQISTSPGFGLAFVLSNTTDPPGAIASQYFGLFTNATSPSVFPLVAVEFDTGRNPEFNDIDDNHIGIDLNNIESINATTAGYFNSSGAFVPVRMRTGQNIHAWIDFDGENLEFNVTVAPIGVSRPTKPTLRYQNPAIADYVSSNMYVGFSASKTNWIEAQRVLAWSFSDSGPARELNTTNLPVFELESSSSSLSNGAIAGIVIGSFIFVLICASGFYLWWRMNKANEEEDEIEDWELEYWPHRFSYEELSYATGEFRKEMLLGSGGFGRVYKGTLPNNTEIAVKCVNHDSKQGLREFMAEISSMGRLQHKNLVQMRGWCRKGNELLLVYDYMPNGSLNKWVFDKSDKVLGWEQRRRILVDVAEGLNYLHHGWDQVVIHRDIKSSNILLDADMRGRLGDFGLAKLYTHGEVPNTTRVVGTLGYLAPELATVAAPTSATDVYSFGVVLLEVACGRRPIETSVAEEEVVLIDWVRELYAKGCAREAADLRIRGEYDEGDVEMVLKLGLACCHPDPQRRPTMKEVVALLLGEDPPEAPGKVLSDLVRGGEDSDEAAPLQPSPPPV

SEQ ID NO: 45701 - protein, 310 aa, Glycine max
  Clone ID: 700789371_FLI.pep
NAGVELRMEGGKRGTILVTNDDGIDAPGLRALVHSLVNANLFNVLVCAPDSEKSAVSHSITWLHPVAVKQVQIEGTTAFAVSGTPADCASLGISKALFPTVPDLVVSGINKGSNCGYHIVYSGTVAGAREAFFNDILSISISYDWVKGKSKLQDFTLAAQVCLPIISALLVETKNQSYPRKCFLNIDVPNNVPNHKGYKLTKQGKSIIKTGWRQVTSETEGPKMSSDMTNTDTETSKNFDSSSASPEHLLFAREVIGSVLDEDDTDYKCLREGYITVTPLAALTHVEVDCQAYFKNWLQSVPELPSSSSL

SEQ ID NO: 45702 - protein, 329 aa, Glycine max
  Clone ID: 700747208_FLI.pep
PKDASSMNLVCGKNVLIDMSIHTAYVKAIRAAQHYIYIENQYFIGSSYNWSQHKDLGANNLIPMEIALKIAAKIRANERFAVYIVIPMWPEGVPTGAATQRILFWQHKTMQTMYETIYKALVEVGLETAFSPQDYLNFFCLGNREAIDMYENITVSGTPPPANSPQAFSRNNRRFMIYVHSKGMIVDDEYVILGSANINQRSMEGTRDTEIAMGAYQPHHTWARSQYHPRGQIHGYRMSLWAEHTGTIEDCFLQPESLECVSRIRTMGELNWKQFASNDVTEMTGHLLKYPVEVDRKGKVRSLPGHEEFPDVGGKIVGSFIAIQENLTI

SEQ ID NO: 45703 - protein, 541 aa, Glycine max
  Clone ID: 700875202_FLI.pep
ISVCFLRERENHVYMSLNLQLKNVETIGFQFLHNNAFSFTYPFHHQYHTHASLSFPSPPQTRFRPPTTVFSALTAEQIAAPPVRMVAVVGNGAASPLKSASWEQVMLHTAKRLKWVDEGYELLVFTDECIISNGPMTMKLQRELLNADILVIVAVTNKESVEWINNNRKTIENVICLDSSPDLKNKLGGYDVPSEVRGSMFGNFFGNSQSEKAKESYEVVQTVSEAWDRHNSDDIRFCLLVLINAYIRPVPVLKNLRAKGFSTLNCMLKNCGRQVLNCLLDPNCRKALQCLNKCSPVDQVCNYRCIASYESANLEAFSLCVLQKNNCLELEAEIPDKPYVPPMIKFRGKNLSYEMTEDLFVGWLGSLEWSWRVVAGQNPAYDQFPCQYQLFYRGKAKGSFWYEPVFQVKTLEGQLVWRRRKYRVRRGKVPGTFYFSVLDNGVVSNEFWTIVDVADNLSWGLFHYRGAARVAGQSYTGAVLVSPDGAFPNDRERTKIVAALDKCEIKEWELYTVDNCSCIDPPLGIPEGSSLHTIVQIEVPK

SEQ ID NO: 45704 - protein, 438 aa, Glycine max
  Clone ID: 700875403_FLI.pep
VVESCDNDGAEECGVVSSSEEESDVESSEIVDLEDIAGKAPSRRKVVANGEESNGKLNGSREMVTPVIRANLEKQGYKIIGSHSGVKLCRWTKAQLRGRGGCYKHSFYGIESHRCMEATPSLACANKCVFCWRHHTNPVGKSWQWQMDDPIEIVNSAIDLHTNMIKQMKGVPGVTLERLSEGLSPRHCALSLVGEPIMYPEINALVDELHKRRISTFLVTNAQFPEKIKSLKPITQLYVSVDAATKDSLKAIDRPLFGDFWERFIDSLTALKEKHQRTVYRLTLVKGWNTEEVDAYSKLFSLGEPDFVEIKGVTYCGSSTTSKLTMDNVPWHADVKAFSEALALKSQGEYEVACEHAHSCCVLLAKTNKFKIDGQWYTWIDYEKFHDLVASGRTFDSRDYMAATPSWSVYGSEEGGFDPGQLRYRKERHHKSTRNQAG

SEQ ID NO: 45705 - protein, 457 aa, Glycine max
  Clone ID: 700876071_FLI.pep
LAFPTTPNTKTSSSMAASVSTVGAVNRALLNLNGSGAGASAPSSAFFGTSLKKVIASRVPNSKVSGGSFKIVAVEEKKEIEETQQTDKDRWKGLAYDISDDQQDITRGKGLVDSLFQAPQDAGTHYAVMSSYEYLSTGLRQYLDNKMDGFYIAPAFMDKLVVHISKNFMTLPNIKVPLILGIWGGKGQGKSFQCELVFAKMGINPIMMSAGELESGNAGEPAKLIRQRYREAADMIKKGKMCALFINDLDAGAGRLGGTTQYTVNNQMVNATLMNIADNPTNVQLPGMYNKEENPRVPIIVTGNDFSTLYAPLIRDGRMEKFYWAPTREDRIGVCTGIFRTDGIPEQDIVKLVDTFPGQSIDFFGALRARVYDDEVRKWISGVGVDSVGKKLVNSKDGPPTFEQPKMTLEKLLLYGNMLVQEQENVKRVQLADKYLNEAALGNANEDAIQRGTFFQS

SEQ ID NO: 45706 - protein, 598 aa, Glycine max
  Clone ID: 700844449_FLI.pep
ACLSSFYLIPLTYIITMCGILAVLGCSDDSRAKRVRVLELSRRLKHRGPDWSGLHQHGDCFLAHQRLAIVDPASGDQPLFNEDKSVIVTVNGEIYNHEELRKQLPNHKFRTGCDCDVIAHLYEEHGEDFVDMLDGIFSFVLLDTRDNSFIVARDAIGVTSLYIGWGLDGSVWISSEMKGLNDDCEHFECFPPGHLYSSKERGFRRWYNPPWFSEATPSTPYDPLVLRHTFEQAVIKRLMTDVPFGVLLSGGLDSSLVASVTSRYLANTKAAEQWGSKLHSFCVGLEGSPDLKAAKEVADYLGTVHHEFTFTVQDGIDAIEDVIYHVETYDVTTIRASTPMFLMSRKIKSLGVKWVISGEGSDEIFGGYLYFHKAPNKEEFHRETCRKIKALHQYDCLRANKSTFAWGLEARVPFLDKAFINTAMSIDPESKMIKRDEGRIEKWILRRAFDDEEHPYLPKHILYRQKEQFSDGVGYSWIDGLKAHAAKHVTDKMMLNAGNIYPHNTPTTKEAYYYRMIFERFFPQNSARLTVPGGASVACSTAKAVEWDAAWSNNLDPSGRAALGVHISAYENQNNNKGVEIEKIIPMDAAPLGVAIQG

SEQ ID NO: 45707 - protein, 310 aa, Glycine max
  Clone ID: 700847848_FLI.pep
PRPCSYWRQGNPRGPKSYSSIEGCLCSWVPEERILTTNLWSAELSKLAANAFLAQRISSVNAMSALCEATGANVQQVSYSVGTDSRIGPKFLNASVGFGGSCFQKDILNLVYICECNGLPEVAEYWKQVIKINDYQKSRFVNRVVASMFNTVSNKKIAILGFAFKKDTGDTRETPAIDVCQGLLGDKANLSIYDPQVTEDQIQRDLSMNKFDWDHPIHLQPTSPTTVKKVSVVWDAYEATKDAHGLCILTEWDEFKTLDYQRIFDNMQKPAFVFDGRNIVDADKLREIGFIVYSIGKPLDPWLKDMPALA

SEQ ID NO: 45708 - protein, 550 aa, Glycine max
  Clone ID: 700905047_FLI.pep
DNSASNKSSGSVASSKKNNECSERLSEAQSTCTSPIFEAESTYVENMQDVPQYVHCQVMQTLVQSTCTSPIFEAKSTYVENMQDVPPLKSSKLNKIDMVKHEKFAQFERESAEHNDETEDKSVTIVSDAARCDKTSELTELRPEQDCGVAEPETENEDEILKSELDGDNSHVSMMQGCSAERVKPSKGAIDLIATVGNLPKHLDENCSLNGGNTTKFDCETQLELSLRSDFPGSSGNQASEATEESQRLNHSNTSAFSWYSNSKLLQPHFSTPSITFPEVNNLSWDSHESHKLSGITSGNCQYGGSNQNLENMIGTVICQYGQVTPKLSNSQCGLLPVSGVISNLKSEGHGNVFTSLFYAQSGIHPMSSPKPVCQNESSPFPTSTSTQSYPESHNSDQLHDCSNDATCLNQNVKDNTDSDHARHDSPVADQSAGNSLCHDAANHVNSSAYGSMDSGNDGNATSAIVSKNAPDGFSDSGCHNYDGFRVTDPHRSSQREAVLVKFRLKRKERCFEKKVRYQSRKRLAEQRPRVKGQFVRQHDHPVAEAGGDS

SEQ ID NO: 45709 - protein, 401 aa, Glycine max
  Clone ID: 700851896_FLI.pep
GIVNSRLVNELADVKLLAKRYMQDYEKERKARELIEEICDELAKEIGEDKAEIEALKRESMKLREEVEEERRMLQMAEVWREERVHMKLIDAKVALDEKYSQMNKLVADLETFLKSINVNPNAKEMKEARSLQQAAAAVDIQDIKGFSYEPANPDDIFAIFEDLNFGESNEREIEPCVAHSPVSHASKIHTVSPEAKLISKDNFQRCSDVFMDDNGDIEEDESGWETVSHVEDQGSSCSPEGSALLVNKNRRESDVSGRSVLEWEENAGLETPITEISEVCSVPAKQSKKVSSMARLWRSGPNSGDNYKIISVEGMNGRLSNGRVSSGGIMSPDWELGNGGLSPQDHLYQLSSPESANLQNRGMKGCIPRTVQKSSLKARLLEARMESQKVQLRHVLKQKI

SEQ ID NO: 45710 - protein, 464 aa, Glycine max
  Clone ID: 700853507_FLI.pep
AFHINIMASRVVSVLVIAMMLFAMNCNCTSVGHMPSTKEEGHDFQEAKAKTTQTANKAMETGKDGKEAAESWTEWAKEKLTEGLGFKHDQESTTKKVSDYAGDAAQKSKDYAGDTAQKTKDYAGDTAQKTKDYAGDTAQTSKDYAGDAAQKSKGYVGDAAQKTKEYVGDAAQKTMDYATDAAQKTKDYATQKTKDYASDATDAAKKTKDYAAQKTKDYASDATDAAKKTKDYAAQKTKDYASGGAQKTKDYASGAAQKTKDYASDAAQRTKDHASDGAQKSKEYAGDVAQNAKDYAQKSKDYAGDAVQNIKDYANDAAHKSKDYAGDASHKSKEASDYASETAQKTKDYVGDAAQKSKEASEYASDAAQRTKEYAGDATKRSKEASDHANDMARKTKDYASDTAQRTKEKLQDIASEAGQYSTEKAREMKDAAAEKASDIAKAAKQKSQELKDKLGGQHRDAEL

SEQ ID NO: 45711 - protein, 208 aa, Glycine max
  Clone ID: 700891669_FLI.pep
SHAHVGSASVLVGDIDDALDSEKRYLKRGVNDRGRVANDVETEQIVLDEESGSCKGKMSSVVQMRGSIPLFWSQEASRFSPKPDIILQRYDPTYQATKLHFEDLAKRYGNPIIVLNLIKTVEKRPREMMLRREFANDVGYLNQILPVENHLRFIHWDFHKFAKSKSANVLEVLGAVASEALDLTGFYYSGKPSIIKRANKSNQTSTGR

SEQ ID NO: 45712 - protein, 423 aa, Glycine max; identical to SEQ ID NO: 43754
  Clone ID: 700891875_FLI.pep

SEQ ID NO: 45713 - protein, 416 aa, Glycine max
  Clone ID: 700894196_FLI.pep
HHTSPRSRYPFLLFFYLSSFKSIKMAETFLFTSESVNEGHPDKLCDQISDAVLDACLEQDPDSKVACETCTKTNLVMVFGEITTKANVDYEKIVRDTCRNIGFVSNDVGLDADNCKVLVNIEQQSPDIAQGVHGHLTKKPEEIGAGDQGHMFGYATDETPELMPLSHVLATKLGARLTEVRKNGTCPWLRPDGKTQVTVEYYNDNGARVPIRVHTVLISTQHDETVTNDEIAADLKEHVIKPVIPEKYLDEKTIFHLNPSGRFVIGGPHGDAGLTGRKIIIDTYGGWGAHGGGAFSGKDPTKVDRSGAYIVRQAAKSIVASGLARRCIVQVSYAIGVPEPLSVFVDTYGTGKIHDKEILNIVKENFDFRPGMISINLDLKRGGNNRFLKTAAYGHFGREDPDFTWEVVKPLKWEKA

SEQ ID NO: 45714 - protein, 290 aa, Glycine max
  Clone ID: 700898664_FLI.pep
RYPEYKERDFYIAGESYAGHYVPQFAHTILYHNKKANKKIINLKGILIGNAVINEETDSDGLYDYLASHAIISDKAAYLNKACDSSSSKIQESVCDAAGDELGEDIEYIDLYNIYAPLCKNANLTALPKRNTIVTDPCSENYVYAYLNRKDVQEALHANVTNLKHDWEPCSDVITKWVDQASTVLPLLHEFLNNSLRVWIFSGDTDGRVPITSTKYSVKKMNLPIKSVWHPWFSYGEVGGYVEVYKGGLTLATVREAGHQVPSYQPARALTLIKYFLDGTPLPGPPKRKD

SEQ ID NO: 45715 - protein, 415 aa, Glycine max; identical to SEQ ID NO: 45608
  Clone ID: 700868226_FLI.pep

SEQ ID NO: 45716 - protein, 389 aa, Glycine max
  Clone ID: 700873018_FLI.pep
KGAHLGLGGATIGVDSSAWPSNDLTGGGVLGMLGYTGIGASGLGWEIQQDFEDFVDPLATLENISTRALSSHPMRPFFLVGSSNTHIYLWEFNKDKATATYGVLPAANVPPPYALASISALQFDHFGHRFASAALDGTVCTWQLEVGGRSNVRPTESSLCFNGHASDVTYFSSSGSIIAVAGYSSNGVNVVIWDTLAPPTTSRASILCHEGGAHTVSVFDNHVGSGSVSPLIVTGGKGGDVGLHDFRYIATGKAKRHKRADNIGQSSVSSLTRDKDQNVDGMLWYIPKAHSGSVTKVVTIPNTSLFLTGSTDGDVKLWDAQSTKLIHHWSKIHEKHTFLQPSSRGFGGVVRAAVTDIQVVPHGFLSCGGDGIVKLVRLDNHLRAHGIEL

SEQ ID NO: 45717 - protein, 613 aa, Glycine max
  Clone ID: 700849602_FLI.pep
EGEPEGNLDHPAPQDPPIWSEIMRFFTNPRKPMILALARPDPKKNITTLVKAFGECRPLQELANLTLIMGNRDGIDEMSSTNASVLLSVLKLIDKYDLYGQVAYPKHHKQYDVPDIYRLAAKTKGVFINPAFIEPFGLTLIEAAAHGLPIVATKNGGPVDIHRVLDNGLLVDPHDQQSIADALLKLVSNKQLWAKCRQNGLKNIHLFSWPEHCKTYLSKIATCKPRHPQWQRSEDGGESSESDSPGDSLRDLQDLSLNLKFSLDGEKSEGSGNDNSLNSDGNAADRGAKLENAVLSWSKGISKDTRRGGATEKSDQNPNAGKFPPLRRRKHLFVIAVDCDTTSSLLETIKAIFESAGKDRAESTVGFILSTSLTISEIQSFLISGGLSPIDFDAYICNSGSDLYYPSLNPGDRPFVVDLYYHSHIEYRWGGEGLRKTLVRWADSITDKKGDNDEQIVSPAEQLSTDYCYAFKVRKPGMAPPVKELRKLLRIQALRCHPIYCQNGTRLNVIPVLASRSQALRYLYVRWGFELSKMVVFVGECGDTDYEGLLGGLHKSVILKGVGSSAISQLHNNRSYPLSDVTPLDSPNIVEATEGSSGADIQALIEKVGYLNG

SEQ ID NO: 45718 - protein, 442 aa, Glycine max
  Clone ID: 700908340_FLI.pep
RMSQPKIKRRVGKYEVGRTIGEGTFAKVKFARNSETGEPVALKILDKEKVLKHKMAEQIRREVATMKLIKHPNVVRLYEVMGSKTKIYIVLEFVTGGELFDKIVNHGRMSENEARRYFQQLINAVDYCHSRGVYHRDLKPENLLLDTYGNLKVSDFGLSALSQQVRDDGLLHTTCGTPNYVAPEVLNDRGYDGATADLWSCGVILFVLVAGYLPFDDPNLMNLYKKISAAEFTCPPWLSFTARKLITRILDPDPTTRITIPEILDDEWFKKEYKPPIFEENGEINLDDVEAVFKDSEEHHVTEKKEEQPTAMNAFELISMSKGLNLENLFDTEQGFKRETRFTSKSPADEIINKIEEAAKPLGFDVQKKNYKMRLANVKAGRKGNLNVATEIFQVAPSLHMVEVRKAKGDTLEFHKFYKKLSTSLDDVVWKTEDDMQMRETK

SEQ ID NO: 45719 - protein, 486 aa, Glycine max
  Clone ID: 700888213_FLI.pep
TGRSPRDKRVVKDDLTKNDLWWGKGSPNIEMDEHSFMVNRERAVDYLNSLDKVFVNDQFLNWDTENRIKVRIVSARAYHSLFMHNMCIRPTPEELENFGTPDFTIYNAGQFPCNRYTHYMTSSTSIDLNLARREMVILGTQYAGEMKKGLFSVMHYLMPKRQILSLHSGCNMGKDGDVALFFGLSGTGKTTLSTDHNRYLIGDDEHCWGDNGVSNIEGGCYAKCIDLSREKEPDIWNAIRFGTVLENVVFDEHDREVDYSDKSVTENTRAAYPIEYIPNAKLPCVGPHPKNVILLACDAFGVLPPVSKLNLAQTMYHFISGYTALVAGTEEGIKEPQATFSACFGAAFIMLHPTKYAAMLAEKMQKHGATGWLVNTGWSAGSYGNGSRIKLQYTRKIIDAIHSGSLLNAEYKKTEIFGLEIPTEVEGVPSEILDPMNTWSNKKAYKETLLKLAGLFKNNFETFTNYKIGKGNNNLTEEILAAGPIF

SEQ ID NO: 45720 - protein, 624 aa, Glycine max
  Clone ID: 700890951_FLI.pep
RRGLKMSMYGRDPWGGPLEIHATDSATDDERSRNLQELDRGALDETQQSWLLGAGEQKKKKKRYVDLGCIIVSRKLFIWTLGTLAVCAFLAGFITLIVKTVPRHHHKPPPPDNYTIALHKALLFFNAQKSGKLPRHNNVSWRGNSGLQDGKGDGVPPVIKDLVGGYYDAGDAIKFNFPMSFSMTMLSWSVIEYSGKYQAAGELGHVKDIIKWGTDYLLKNFNSTADTITQLGMQVGSGDTSQGSTTPNDHYCWMRPEDIDYDRPTQTCTTCSDLAAEMAAALAAASIVFKDNRAYSQKLVHGATTLFKFSRDSRGRYSPNGREASVFYNSTSYWDEFVWGGAWMYFATGNSSYLKLATTPRLAKHAGAFWGGPDYGVLSWDNKLTGAQVLLSRLRLFLSPGYPYEEILSTFHNQTGIVMCSYLPMFTSFNRTRGGLIQLNHGRPQPLQYVVNAAFLAALYSDYLDAADTPGWYCGPNFFSTDVLRDFAKTQIDYILGKNPRKMSYIVGFGNHYPKHVHHRGASIPKNKVKYNCKGGWKWRDSSKPNPHTIVGAMVAGPDKHDHFHDVRTNYNYTEPTLAGNAGLVAALVALSGDKTTGIDKNTLFSAVPPMFPTPPPPPAPWKP

SEQ ID NO: 45721 - protein, 506 aa, Glycine max
  Clone ID: 700893164_FLI.pep
WAITLFSLSTLPNTLVMGIPLLKGMYGDFSGSLMVQIVVLQCIIWYTLMLFLFEFRGARMLISEQFPDTAASIVSIHVDSDVMSLDGRQPLETEAEIKEDGKLHVTVRKSNASRSDIFSRRSQGLSSTTPRPSNLTNAEIYSLQSSRNPTPRGSSFNHTDFYSMMAAGGRNSNFGASDVYGLSASRGPTPRPSNYDEDGGKPKFHYHAAGGTGHYPAPNPGMFSPSNGSKSVAANANAKRPNGQAQLKPEDGNRDLHMFVWSSSASPVSDVFGAHEYGGGHDQKEVKLNVSPGKVENNHRDTQEDYLEKDEFSFGNREMDREMNQLEGEKVGDGKPKTMPPASVMTRLILIMVWRKLIRNPNTYSSLIGLTWSLVSFKWNVEMPAIIAKSISILSDAGLGMAMFSLGLFMALQPRVIACGNSTAAFAMAVRFLTGPAVMAAASIAVGLKGVLLHVAIVQAALPQGIVPFVFAKEYNVHPDILSTAVIFGMLIALPITLVYYILLGL

SEQ ID NO: 45722 - protein, 281 aa, Glycine max
  Clone ID: 700893490_FLI.pep
GFCSSMESQKQNSKKRKQVFPYGNYKSYYGYRIGQGVDEDPRLKVLRKEWFEGKDCLDIGCNNGIITIQIAQKFCCQRILGVDIDSDRVEDAYWNLRKTVRLKSTGNKPVKASKLQDKDHADDSENSVTTLLNVKTEEISKEHSSSEQIDLLKIVSFKRENFVQTQHPPGKQYDTILCLSVSKWIHLNWGDDGLITLFAEVWKLLRPGGIFVLEPQPWKSYESNRNVSETTAANYRNIMIRPEQFQEILLDKIGFRTVEDITSGLTDSKTGFNRPILVFCK

SEQ ID NO: 45723 - protein, 423 aa, Glycine max
  Clone ID: 700896016_FLI.pep
GRQAPLNHHTSPRSRYPFLLFFYLSSFKSIKMAETFLFTSESVNEGHPDKLCDQISDAVLDACLEQDPDSKVACETCTKTNLVMVFGEITTKANVDYEKIVRDTCRNIGFVSNDVGLDADNCKVLVNIEQQSPDIAQGVHGHLTKKPEEIGAGDQGHMFGYATDETPELMPLSHVLATKLGARLTEVRKNGTCPWLRPDGKTQVTVEYYNDNGARVPIRVHTVLISTQHDETVTNDEIAADLKEHVIKPVIPEKYLDEKTIFHLNPSGRFVIGGPHGDAGLTGRKIIIDTYGGWGAHGGGAFSGKDPTKVDRSGAYIVRQAAKSIVASGLARRCIVQVSYAIGVPEPLSVFVDTYGTGKIHDKEILNIVKENFDFRPGMISINLDLKRGGNNRFLKTAAYGHFGREDPDFTWEVVKPLKWEKA

SEQ ID NO: 45724 - protein, 394 aa, Glycine max
  Clone ID: 700869920_FLI.pep
RHRFRYAVGNRLSFITVFISIHKTNNLSVIFLHFSLSEQNGGSVIVLVKYWLMWVGHSSMYKRTPSRDNSNMEDMEENSDLLDIGLDKGTSNPSLMLSLPHVLVATISSFLFGYHLGVVNEPLESISVDLGFRGNTLAEGLVVSICLGGALIGCLLSGWIADGVGRRRAFQLCALPMIIGASMSAATNNLFGMLVGRLFVGTGLGLGPPVASLYVTEVSPAFVRGTFGAFIQIATCLGLMGALFIGIPVKEISGWWRVCFWVSTIPAAILAAAMVFCAESPHWLYKQGRTAEAEAEFERLLGVSEAKFAMSELSKVDRGDDTDTVKLSELLHGRHSKGIHFSWFVSRIVECICCCCYLLSLISLGFQKLFFIHEFVLQLFLLDQPYLLYNSYLV

SEQ ID NO: 45725 - protein, 193 aa, Glycine max
  Clone ID: 700870015_FLI.pep
SVRTGLTFPHGNMLAIPRKKTGILDDFRSSGWLDAMKSSSPTHTKVSKDVSHGIGSPDSAYSTWLLKFPSALASFDQITNCAKGKRIALFLDYDGTLSPIVDNPDSAFMSDNMRAAVKIVAEYFPTAIISGRSRDKVYEFVGVSDLCYAGSHGMDIIGPSRQSFLIITLIALVLLTSRVFKLIYSNLLLNSCP

SEQ ID NO: 45726 - protein, 496 aa, Glycine max
  Clone ID: 700874881_FLI.pep
ASDPHFLSHKNTLTMDHRKPLLPTSSDAAPNPHTRKDLLLVICGLLLLSSLVAFGGYRASNAPHADVASATSNDEQRSPTSVPSPKWYPVSRGVSSGVSEKSSSMLFAVKDGASKAFPWDNSMLSWQRTAFHFQPEKNWMNDPNGPMYYKGWYHFFYQYNPNGAVWGDIVWGHAVSRDMIHWLHLPLAMVADQWYDMQGVWTGSATILPNGEIIMLYTGSTNESVQVQNLAYPANPSDPLLVDWIKYPGNPVLVPPPGIGAKDFRDPTTAWLTSEGKWRITIGSKLNKTGIALVYDTEDFKNYELKEGLLRAVAGTGMWECVDFFPVSKENENGLDTSINGAEVKHVMKVSLDDDRHDYYSIGTYDEKNVLFTPDDAKNDVGVGLRYDYGIFYASKTFYDQNKERRVLWGWIGESDSEYADVAKGWASVQSIPRTVELDRKTGSNLLQWPVAEIESLRLRSDEFKNLKAKPGSVVSVDIETATQVCVHDIIKFLKL

SEQ ID NO: 45727 - protein, 385 aa, Glycine max; identical to SEQ ID NO: 44000
  Clone ID: 700842936_FLI.pep

SEQ ID NO: 45728 - protein, 861 aa, Glycine max
  Clone ID: 700903859_FLI.pep
AKMTGGMFGRKGQKIKGTVVLMPKNVLDFNAITSVGKGSAKDTATDFLGKGLDALGHAVDALTAFAGHSISLQLISATQTDGSGKGKVGNEAYLEKHLPTLPTLGARQEAFDINFEWDASFGIPGAFYIKNFMTDEFFLVSVKLEDIPNHGTINFVCNSWVYNFKSYKKNRIFFVNDTYLPSATPGPLVKYRQEELEVLRGDGTGKRRDFDRIYDYDIYNDLGNPDGGDPRPIIGGSSNYPYPRRVRTGREKTRKDPNSEKPGEIYVPRDENFGHLKSSDFLTYGIKSLSQNVIPLFKSIIFDLRVTSSEFDSFDEVRGLFEGGIKLPTNILSQISPLPVLKEIFRTDGENTLQFPPPHVIRVSKSGWMTDDEFAREMIAGVNPNVIRRLQEFPPKSTLDPATYGDQTSTITKQQLEINLGGVTVEEAISAHRLFILDYHDAFFPYLTKINSLPIAKAYATRTILFLKDDGSLKPLAIELSKPATVSKVVLPATEGVESTIWLLAKAHVIVNDSGYHQLISHWLNTHAVMEPFAIATNRHLSVLHPIYKLLYPHYKDTININGLARQSLINAGGIIEQTFLPGKYSIEMSSVVYKNWVFTDQALPADLVKRGLAVEDPSAPHGLRLVIEDYPYAVDGLEIWDAIKTWVHEYVSVYYPTNAAIQQDTELQAWWKEVVEKGHGDLKDKPWWPKLQTVEDLIQSCSIIIWTASALHAAVNFGQYPYGGYIVNRPTLARRFIPEEGTKEYDEMVKDPQKAYLRTITPKFETLIDISVIEILSRHASDEVYLGQRDNPNWTTDSKALEAFKKFGNKLAEIEGKITQRNNDPSLKSRHGPVQLPYTLLHRSSEEGMSFKGIPNSISI

SEQ ID NO: 45729 - protein, 553 aa, Glycine max
  Clone ID: 700904655_FLI.pep
DVRGLFEGGIHLPTDALSKISPLPVLKEIFRTDGEQVLKFPPPHVIKVSKSAWMTDEEFGREMLAGVNPCLIECLQVFPPKSKLDPTVYGDQTSTITKEHLEINLGGLSVEQALSGNRLFILDHHDAFIAYLRKINDLPTAKSYATRTILFLKDDGTLKPLAIELSLPHPRGDEFGAVSRVVLPADQGAESTIWLIAKAYVVVNDSCYHQLMSHWLNTHAVIEPFVIATNRHLSVLHPIYKLLLPHYRDTMNINGLARQSLINAGGIIEQSFLPGPFAVEMSSAVYKGWVFTDQALPADLIKRGMAVEDPSSPYGLRLVIDDYPYAVDGLEIWSAIQTWVKDYVSLYYATDDAVKKDSELQAWWKEAVEKGHGDLKDKPWWPKLNTLQDLIHICCIIIWTASALHAAVNFGQYPYGGFILNRPTLTRRLLPEPGTKEYGELTSNHQKAYLRTITGKTEALVDLTVIEILSRHASDEVYLGQRDNPNWTDDTKAIQAFKKFGNKLKEIEDKISGRNKNSSLRNRNGPAQMPYTVLLPTSGEGLTFRGIPNSISI

SEQ ID NO: 45730 - protein, 305 aa, Glycine max
  Clone ID: 700850465_FLI.pep
HSILRYRDYHHRPAHLAHVSPPEYFVRLENTTYKDDLYLRKRTRMRRWLCCTCQVEESYPSNENEHLKSPRNYGDGNQKGSKVSAPVKPETQKAPPPIEAPALSLDELKEKTDNFGSKALIGEGSYGRVYYATLNNGKAVAVKKLDVSSEPESNNEFLTQVSMVSRLKDDNFVELHGYCVEGNLRVLAYEFATMGSLHDILHGRKGVQGAQPGPTLDWIQRVRIAVDAARGLEYLHEKVQPPIIHRDIRSSNVLIFEDYKAKIADFNLSNQAPDMAARLHSTRVLGTFGYHAPEYAMTGQLTQKK

SEQ ID NO: 45731 - protein, 355 aa, Glycine max
  Clone ID: 700852907_FLI.pep
VNCEQQYSSKTYQAPFCHSTQCSRANTHQCLSCPAASRPGCHKNTCGLMSTNPITQQTGLGELGEDVLAIHATQGSTQQLGPLVTVPQFLFSCAPSFLVQKGLPRNTQGVAGLGHAPISLPNQLASHFGLQRQFTTCLSRYPTSKGAIIFGDAPNNMRQFQNQDIFHDLAFTPLTITLQGEYNVRVNSIRINQHSVFPLNKISSTIVGSTSGGTMISTSTPHMVLQQSVYQAFTQVFAQQLPKQAQVKSVAPFGLCFNSNKINAYPSVDLVMDKPNGPVWRISGEDLMVQAQPGVTCLGVMNGGMQPRAEITLGARQLEENLVVFDLARSRVGFSTSSLHSHGVKCADLFNFANA

SEQ ID NO: 45732 - protein, 504 aa, Glycine max
  Clone ID: 700889263_FLI.pep
ETWHVCTLDHTEKPNKYGKYWCWCFWSLEVEVLDLLGAKEIAVRAWDEGLNTQPEHLIWNVMGMMNNCWFRVKTNVCKPHKGEIGIVFEHPTQPGNQPGGWMAKEKHLEKSQKPKPTLKKSVSTPFMNTSSKMFSISEVKKHSNPDSAWIIVHGHVYDCTRFLKDHPGGTDSILINAGTDCTEEFDAIHSDKAKKLLEDYRIGELITTGYTSDSSPNNSVHGNSEFTHLAPIKETTTPPSRSVALNPREKIPCKLVSKTSISHDARLFRFALPSEDQLLGLSVGKHIFLCATIDGKLCMRAYTPTSSVDEVGFFDLLIKVYFKGVHPKFPNGGLMSQHLDSLPIGSMLDVKGPLGHIEYTGRGNFMVHGKPRFAKRLAMLAGGTGITPIYQVAQAILKDPEDHTEMHVVYANRTEDDILLREELDEWAKIHNDRFKLWYVVEIAKEGWKYSVGFITESITREHLPKASRDSLALTCGPPPMIQFAVQPNLEKMGYDIKNDLLVF

SEQ ID NO: 45733 - protein, 547 aa, Glycine max
  Clone ID: 700866001_FLI.pep
SRSIQDIMDENGSSSNAPKNKRNLPVSVFFKDARHVFKMDSIAKEILGIAFPSALAVAADPIASLIDTAFIGHLGPVELAAAGVSIALFNQASRITIFPLVSITTSFVAEENTIEKINTEKKLSDKAKSKEQVMLDDHSLQDIEKVASKENNETENVEMNDCNTSICKSTSDTSSSSSNKSVPKDGRKKRHVASASTALLFGTILGLLQATTLIFAAKPLLAAMGLKPDSPMLNPAIKYLRLRSLGAPAVLLSLAMQGIFRGFKDTTTPLYVILSGYALNVILDPVLIFYCKLGIKGAAISHVLSQYLMALALMVILTRKVDLVPPSIKDLQIFRFLKNGGLLLARVIAVTFCQTLAASLAARFGPIPMAAFQTCLQVWLTSSLLADGLAVAVQAILACSFAEKDYEKVLVAATRTLQMSFVLGVGLSFAVGFGLYFGAGIFSKSVLVVHLIRIGLPFVAATQPINSLAFVFDGVNYGASDFAYSAYSLVTVSLASVASLFLLSKSKGFVGIWIALTIYMSLRMFAGVWRMGTGTGPWRFLRGRSMS

SEQ ID NO: 45734 - protein, 564 aa, Glycine max
  Clone ID: 700867581_FLI.pep
RGYSESKMYSHWVRLMLLIACILPALVECRERHYKFHVVSKQTNRLCSSKSIVTINGKFPGPTLYAREDDTVLVKVINQVNHNVTIHWHGVRQLRTGWADGPAYVTQCPIQPGQTYVYNFTLTGQRGTLLYHAHVNWLRSTLYGALVILPKRGVPYPFPKPDDELVVVLGEWWKSDTEAVINEALKSGLAPNVSDAHTINGLPGTVTNCSTQDVYNLPVESGKTYLLRIVNAALNEELFFKIAGHKLTVVEVDATYVKPFKIETIVIAPGQTTNVLLNANQKSGKYLVAASPFMDAPVAVDNLTATATLHYTGTLAATPTILTTPPPKNATQIANNFISSLRGLNSKKYPVNVPLTVDHSLIFTVGLGINPCPSCKAANGSRVVAAINNVTFIMPTIALLQAHYFNIKGVFTTDFPANPPHVFNYSGPGPANLNTETGTKVYRLPFNATVQVVLQDTGIIAPENHPVHLHGFNFFVVGRGVGNFNPKIDPKNFNLVDPVERNTIGVPAGGWTAFRFRADNPGVWFMHCHLEVHTTWGLKMAFLVDNGKGPKQSVIPPPKDLPKC

SEQ ID NO: 45735 - protein, 314 aa, Glycine max
  Clone ID: 700849359_FLI.pep
LATFMIPTFAQLTPNYYDKVCPKALPIIKSIVKQAIIREKRIGASLLRLHFHDCFVNGCDGSVLLDDTPSFLGEKTALPNLNSIRGFEVVDEIKVAVDKACNRPVVSCADILAVAARDSVAILGGAQYWYQVLLGRRDAIYASKDAANANLPPPFFNFPQLLASFQSHGLDLKDLVVLSGGHTIGLAKCITFRDRIFNDTHIDPNFAATLRDSCPRRSGDGDTNLTPLDASSPSQFDNTYYKALLHKKGLLHSDQELFKGGDDGGESDRLVQLYSYDPYAFARDFGVSMIKMGNLKPLTGYEGEIRYNCRKVNY

SEQ ID NO: 45736 - protein, 440 aa, Glycine max; identical to SEQ ID NO: 45590
  Clone ID: 700852191_FLI.pep

SEQ ID NO: 45737 - protein, 276 aa, Glycine max
  Clone ID: 700855257_FLI.pep
KTKASERKKMSGVSLAVSGPPAATVAEAAGTKPKRRTEQAPMGGMMGSLRVIELQLVAFILVFSASGLVPLLDLVFPAFASAYILALSQFAFPSASSSGTEIFKGSRLFRMYVVFGTTVGLFLPLAYVLGGFARGDEHAVRSATPHLFLLSFQILTENIIGGLSLFSPPVRALVPIIYTIRRIFVDIDWIHDVWLNKTLPVNAKFQDLAWYWFGKGLAVANLAYFSINLFGFLIPRFLPRAFERYFQEKGEIYTKSAEDKRSVVVNRTQLSEKKTD

SEQ ID NO: 45738 - protein, 369 aa, Glycine max
  Clone ID: 700855530_FLI.pep
FPLRSTRTGTCIRGVNCEQQYSSKTYQAPFCHSTQCSRANTHQCLSCPAASRPGCHKNTCGLMSTNPITQQTGLGELGEDVLAIHATQGSTQQLGPLVTVPQFLFSCAPSFLVQKGLPRNTQGVAGLGHAPISLPNQLASHFGLQRQFTTCLSRYPTSKGAIIFGDAPNNMRQFQNQDIFHDLAFTPLTITLQGEYNVRVNSIRINQHSVFPLNKISSTIVGSTSGGTMISTSTPHMVLQQSVYQAFTQVFAQQLPKQAQVKSVAPFGLCFNSNKINAYPSVDLVMDKPNGPVWRISGEDLMVQAQPGVTCLGVMNGGMQPRAEITLGARQLEENLVVFDLARSRVGFSTSSLHSHGVKCADLFNFANA

SEQ ID NO: 45739 - protein, 383 aa, Glycine max; identical to SEQ ID NO: 40107
  Clone ID: 700889943_FLI.pep

SEQ ID NO: 45740 - protein, 634 aa, Zea mays
  Clone ID: 700160959_FLI.pep
AAPSIGFRPTDRAACQMISPAMCRSAPRRAAQVRRLLSSAAPPAHAGAAVPGPCIVHKRGNDILHDPWYNKDTAFPMTERDRLGLRGLLPPRVMSFEQQYERFINSFRSLEHNTRGEPDSIVALAKWRILNRLHDRNETLYYRVLIDNIKDFAPIIYTPTVGLVCENYSGLFRRPRGMYFSAKDKGEMMSMIYNWPAEKVDMIVVTDGSRILGLGDLGVQGIGIPIGKLDVYVAAAGINPQKVLPIMLDVGTNNEKLLEDKLYLGLRQPRLEGEEYLAVVDEFMEAVHARWPKAVVQFEDFQMKWAFETLQRYRNRFCMFNDDVQGTAGVALAGLLGAVRAQGRPLQDFTNQKIVVVGAGSAGIGVLSMAKQAMLRMPGIHRTGEGHNQFWVLDKDGLITKARKDLDSAVARFARGFGPDEVPDLYEGASLVEVVKKVKPHVLLGLSGVGGIFNEEVLKAMKESDSPRPAVFAMSNPTTKAECTPDDVFKHVGDKAIFASGSPFSNVSLGNGKSGYANQANNMYLFPGIGLGALLSGARHVSDGMLQAAAECLASYITDDEIRKGILFPSVSSIRHITARVGAAVVRAAVAEDLAEGCCDVGPRELGSMSESEAVDYVARKMWYPIYSPLVSDK

SEQ ID NO: 45741 - protein, 428 aa, Zea mays
  Clone ID: 700221810_FLI.pep
HLSGMAESRGFVMAAVMVVAVVSVAPRGAEAKTTIEPCSGSDSCPALLGYTLYADMKVSEVAALFAVDPAALLAANALDFGAPGAAHRILPMGLFVRVPTRCSCADGVRKSVSVRYAARPADTLATVSDVVFAGLASSDQIRNENGLTSADPDAPLDAGQKLAIPLPCVCFNSSDNNLPAVYLSYVVQVGDTVPAIAASYETTVTDVMNVNAMGSPVAAPGDILAIPLPACASTFPKSASDHGLIVANGTYALTASNCVQCSCGPGSLNLYCTPTSLSGTCPSMQCPNSDVMLGNVSTHPTGAGCNVSACSYGGFVNGTITASLTAGLQARCPGPRQFPALTEPPTTVSHDSTYLPPLSAPGPAEAGGVMPEPGSPGPGSSVQAGPFTLPKVSKANGPAGSVSAAPLVGKPLQILPVLVSCLAFYLQL

SEQ ID NO: 45742 - protein, 102 aa, Zea mays
  Clone ID: 700196414_FLI.pep
RRFPKYHESVVGRNGSGDATGVGAVAGQLVLVLVESTHGRHVLRHHHGHGVETLGCQQLLLLLHQSWLVQAAAGGSGTLKLHHHLQLLRDGLHVHHPHLLLA

SEQ ID NO: 45743 - protein, 242 aa, Zea mays
  Clone ID: 700803844_FLI.pep
PCVMDWIKFCSDFTASDGKQHALLDNLNQELSQKSVLLGDGFKLSAADNDVFATVHPFVIRVSDSELQKYPHVLRWMDYIQNTVGAGTTLQKINVTKSDFDPPSHPRKADKKDAESSSKKAISVQKTADKSNGSADSKKSTREPPENKENPTAAGNSKTSGEKKKVQEKSAGKTTEKAPEKIADKESECDISILNIQVGLIRKAWKHPSADRCCIFTLLQHLEFLCIFTLLQHLEFLSVLML

SEQ ID NO: 45744 - protein, 360 aa, Zea mays
  Clone ID: 700222088_FLI.pep
AAGSAEDYGFPRAIAFAASAIRSSAVVAVTCDKEIITGGHVDGSLKLISLDGAKTIETASGHIAPVTCLALSPDSNYLVTGSRDTTVILWRIHQTGSSHKKNAQEPPPTTPTTPRSPLSGSTSTMSSLSETKRRRVEGPMHVMRGHLGEVTCCSVSPDLGLVASSSNATGILLHSLRTGRLIRRLDVDEAHAICLSSQGIILVWNGTKKTLSTFTVNGLPIANSVLLPFSGQVSCIEISTDGHFALFGTSLFNNYKCDNSTETGDHELGPNGTDDVSKNSEQSVHAPSICFVDLHTLKVFHTLKLAKGQDITAIALNKENTNLLVSTADKQLIVFTDPALSLKVVDQMLRLGWEGDGLLQ

SEQ ID NO: 45745 - protein, 121 aa, Zea mays
  Clone ID: 701168807_FLI.pep
EHGRPLYGDVFGVLQQDEPNYDNLFSSTLQDEPVDRSKHWGDLEEEEEEEEEEEEEEEPMEDEEMEDGIQSVDTISSTPTGVETPDVIDLRKLQRKETDKQAERPLYQVLEKKKKSGSSRT

SEQ ID NO: 45746 - protein, 71 aa, Zea mays
  Clone ID: 701183366_FLI.pep
PGPPIIDVRINNIVMTHQIPYRYMPLRRRMILGILHGRRKHHVRPSLPLHFDHTYNLCNTRLDTGGASSDT

SEQ ID NO: 45747 - protein, 331 aa, Zea mays
  Clone ID: 701183642_FLI.pep
APAWGFNPTQPPPMASISEPAAREKPIVVRVKRKPSQNRPDAFWLEINERPAKKAAIDFSRLSISEPSSSSASVKASEEPRVKKILVQHIETVHHSEAVEDVLQSLLLVDSNSKETKSKTKEWNDRIKQDKKPEQLRSAARQRHEDMGRNARFAQIWKSRKGEKADAGDSLREICHLYDAVQVDPDDEKHPAEPRITSFEEGAVLCNFLPLIREYLPSTAEEIEADIISLAQSEDSEVYDIYTVKEVDDTMEATSAASYPRLQVDDGEDECYEDCPYDTDDSNAEDNPLFDYPDESSEDEDDGRNDEDPFGDKEGSDSDYEKEEVEVEEDE

SEQ ID NO: 45748 - protein, 429 aa, Zea mays
  Clone ID: 700930219_FLI.pep
RPDTRRRRRRAAMAMSWIRSVVRRALIAPKPRGSRQFTVTAAGGGATQTERVAAEMVRYALGGAVHRSSPEEAMRILEQGASNLQGGGEGSAEAVGLLMLAMSTLLYRSGRRQDAVEKLKATQQVAPSAVFRVAAWEALMGLHMEAGQEMSYLISPNDSVDLSIKYDSKWSDQDHLKFRVNAVRGLVTLLNGETESAAQLFDGWCRDFSRGENQTENAAVSYGEYLHCVGDFQMAAQVYEKILEAFCMDDMSGNLLAAGNMVPEEASLGATCSYGQLLSHSGKFAEAEDYLTRALQKAEEQFGANHPKVGIILTCVARMYKLKAKSEGSTSIMVQEGLYRKALEVLKAPAINSEGTSKQVDWRDIISLARGEYAELLLIQSNRKAEGERMKQWAEDAWRNRRLTLAQALEFSEPSKPTVVVDTRIGRVV

SEQ ID NO: 45749 - protein, 252 aa, Zea mays
  Clone ID: 701167652_FLI.pep
VHCMTMTSEDGDILALLSEPSLKEEQLEASESDAMFSAIMKAIESNKNVVEVSPEEAAWADSCFVQTSELSYDDWGAMRSMLLDALEKPTESPSDTSESAHNAISEAKPHSLPAENISEHGDIHMEQINNTDDDKDGTEAFEIADVIRRVDDNGKQIDSYVADAGDELVLEQTQSTGSIFKVWDLELPFSDDDDDGELELVKDLKKLLKKNSLPEDIYPTLPPDDAAKPLSQISINEIVAGLSDLSIQQAHE

SEQ ID NO: 45750 - protein, 567 aa, Zea mays
  Clone ID: 701182994_FLI.pep
LKRISDIDRLTHSLRKKSANLQPVVKLYQSCSRIPYIKGILQQYNGQFSTLIRSKFLEPLEEWMAKNRFGRFSSLVETAIDLAQLENGEYRISPLYSSDLGVLKDELSVVENHINNLHVDTASDLDLSVDKQLKLEKGSLGHVFRMSKKEEQKVRKKLTGSYLIIETRKDGVKFTNSKLKNLSDQYQALFGEYTSCQKKVVGDVVRVSGTFSEVFENFAAVLSELDVLQSFADLATSCPVPYVRPDITASDEGDIVLLGSRHPCLEAQDGVNFIPNDCTLVRGKSWFQIITGPNMGGKSTFIRQVGVNVLMAQVGSFVPCDQASISVRDCIFARVGAGDCQLHGVSTFMQEMLETASILKGASDKSLIIIDELGRGTSTYDGFGLAWAICEHLMEVTRAPTLFATHFHELTALAHRNDDEHQHISDIGVANYHVGAHIDPLSRKLTMLYKVEPGACDQSFGIHVAEFANFPEAVVALAKSKAAELEDFSTTPTFSDDLKDEVGSKRKRVFSPDDITRGAARARLFLEEFAALPMDEMDGSKILEMATKMKADLQKDAADNPWLQQFF

SEQ ID NO: 45751 - protein, 107 aa, Zea mays
  Clone ID: 701158990_FLI.pep
MTKFIVDYFPFWCFVDPITLLYSLAHRFIGFLLILCLLHPCSVMLINLYFFPAILTCILMFVPCSGVSKNQMKIFLFHHLLKVQLYGVCSSLYHLTHATRSSMAWSG

SEQ ID NO: 45752 - protein, 316 aa, Zea mays
  Clone ID: 701174519_FLI.pep
LIDQRVSSSTITMADKKKVEVKETKVEVKTAVYKVYVHCGQCARDIQTQFTEFQGVEEVKVDAGAGKVTVKGFGFDVEKLRKKVEKGCRKKVELIPPAPPKDDMVVDVKTKKEELKVITVKLPLHCPDCAVRVKEVLLENKSIYEAKTDLGKNTCTIEGVIEEDKLVKYIYERMRKKGVVDKVEKKVIIKEEKVLVKKADKEKEKKEKEKEKEKEKAKEKVKEAVDKVKEVIAPYFIPCTHPNFVDYSHPWHRGGGGYCSSYGDGYGYGGGCGGYPPYGFSYTHSELKGYHDTSFLHCTHPNEFISEENPYACAVM

SEQ ID NO: 45753 - protein, 94 aa, Zea mays
  Clone ID: 701179594_FLI.pep
GRPPLGLQRRTPGQRLQPLVPRRRAGHVEPDPLRVSPPGIGPGREKTHTVYQLAQAIGISYLKIGDSIVSFFSSWKNQCYVISAYKKQQQTSLQ

SEQ ID NO: 45754 - protein, 159 aa, Zea mays
  Clone ID: 701183772_FLI.pep
PRTGRDLLNLFFVCVKDRERRSTNRAVSLPCVFPLSCGLRWPQLRRAVMEFTSKKTASLALLCLKLSCLLLLLLLPRSSSAAPLSRSLSLTRNRLQPADDPAPEVPAPAQQGADAGAGAGAVGVRDPGGEVAARMDIEVNDYPGSGANNRHEPRSPGRP

SEQ ID NO: 45755 - protein, 636 aa, Glycine max
  Clone ID: 700834446_FLI.pep
MAEKMKTHYFPLFSFFFFFFLISINAKLDLYPSDYKALLTLQKDLRVNGQLAAATEACETEGVLCERRRLSGKETYALRITRLVFKSNNLNGVLSPSIGRLTELKELSLSDNQLVDRVPPQIVDCRKLEILDLANNIFSGEVPSELSSLTRLRVLDLSTNRLSGNLNFLKYFPNLETLSVADNLFTGRVPPSVRSFRNLRHFNFSGNRFLDPSLQSSSPDTILSRRFLSEDGDGDVPAPAPAPNNSQKKKSNASTHAAAAAPGPAPNHTNKHKHSKRKLLGWILGFVAGALGGTLSGFVFSLMFKLALALIKGRGRKAGPDIYSPLIKKAEDLAFLEKEEGIASLEIIGRGGCGEVYKAELPGSNGKMIAIKKIVQPPKDGAELAEEDSKVLNKKMRQIRSEINTVGQIRHRNLLPLLAHVSRPECHYLVYEFMKNGSLQDTLSKVERGESELDWLSRHKISLGVAAGLEYLHMNHNPRIIHRDLKPANILLDDDMEARIADFGLAKAMPDYKTHITTSNVAGTVGYIAPEYHQILKFTDKCDIYSYGVILGVLVIGKLPSDDFFQHTEEMSLVKWMRKTLSSENPKEAINSKLLGNGYEEQMLLVLKIACFCTMDDPKERPNSKDVRCMLSQIKH

SEQ ID NO: 45756 - protein, 414 aa, Glycine max
  Clone ID: 700562276_FLI.pep
ASLESIKKQIREGISQIKSAKESSNTNKGSSSGFGLIIDGKSLDYSLNKNLERSFFELAINCASVICCRSSPKQKARVTKLVKLGTGKTTLSIGDGANDVGMLQEADIGVGISGAEGMQAVMASDFAIAQFRFLERLLLVHGHWCYRRISMMICYFFYKNIAFGFTLFWFEAYASFSGQAAYNDWYMSFYNVFFTSLPVIALGVFDQDVSAKLCLKYPYLYLEGVEDILFSWPRILGWMLNGVLSSLVIFFLTTNSVLNQAFRRDGKVVDFEILGVTMYTCVVWTVNCQMALSINYFTWIQHFFIWGSIAFWYVFVLVYGYLSPAISTTAYRVFVEACAPSGLYWLVTLLVVVCVLLPYFSYRSFQSRFLPMYHDIIQRKQVEGHEVGLSDDELPKQVQGKLLHLRERLKQREL

SEQ ID NO: 45757 - protein, 95 aa, Glycine max
  Clone ID: 700677663_FLI.pep
PTRHVCDNMFNYWLANLIPFSIDDLSSGLRLSRPCCSKSERCPKPRTSSTPTVPSLTLEAKKGSSVTVDCTKEHSTTSGTPLRPLRQASAKRAPA

SEQ ID NO: 45758 - protein, 331 aa, Glycine max
  Clone ID: 700681206_FLI.pep
KPNLFLSPPPTMASPSSPTDSNPPSAVPLPLPAPPATSSRRLPPPCWTPEETAALIDAYRDKWYSLGRTNLKATHWQEVADAVTAQCPNASPTAKTAVQCRHKMEKLRKRYRTEIQRLRNLPFPRLNNANTNSPSSWVHFKSMDSMEKGPNHKPHSDINNNLNFHDDDDDDYLYEEFKTAPGSNTNTRSLNKLYKNNNGFNSGGSGSGSGFRIRIPAGVPQQQHTASSNKIFNSHLPPGIVPRGGGVKRERERDAVAEMVEAIKVLRDGFVRMEQMKMEMAREIESMRMEMEMKRTEMILDSQQRIVEAFAMAVSQKRSKGKSTPSPSSQP

SEQ ID NO: 45759 - protein, 303 aa, Glycine max
  Clone ID: 700685058_FLI.pep
FLLSSMEGGEEVLPSATATSAATGNPTASPPPLADLVGAPDLAAASDDVVTQPEIHALISDEEHDHEHEHDDDLEHEHDQHEHDHHHEDRDDHAAVAAVSLEDLKLKIIKQAEYYFSDENLPTDKYLLGFVKRNKEGFVPVSVIASFRKIKKLTRDHAFIVAALKESSLLVVSGDGRRVKRLNPLRFNESRDHKLYTVLVENLPEDHSKKNIQQIFHEAGNIKRITIHDPHSTSESAKQHNKQEMLISNKLHALVEYETMEAAEKAVAMLNNEQDWRNGMRVKLLKGMGKYGHKKTSLERTSF

SEQ ID NO: 45760 - protein, 428 aa, Glycine max
  Clone ID: 700685107_FLI.pep
ASLMALGTFIDQGEAPDFYFQKYPEDHPVFGFFTWRWVLTLGFDHMFTSPIFLGVLALLGASLMACTYTTQLPLIKVSRRWSFLHSAEAIRKQEFSESLPRASIQDVGTILMGAGYEVFLKGPSLYAFQGLAGRLAPVGVHIALLLIMAGGTLSATGSFRGSVTVPQGLNFVVGDVLAPFGFLSSPTDAFNTEIHVNKFSMDYYESGEVSQFHTDLSLRNMDGKEVMRKTISVNDPLRYGGITIYQTDWSISALQILKDNEGPYNLAMAPLQINGDKKLFGTFLPVGDINSPDVKGISMLARDLQSIVLYDKEGKFAGVRRPNSKLPINIDGSEIVIVDAIGSSGLELKTDPGVPVVYAGFGALMITTCISYLSHSQIWALQDGTTVFVGGKTNRAKMEFPEEMSRLLDKVPEIVESNLPKHADSISG

SEQ ID NO: 45761 - protein, 352 aa, Glycine max
  Clone ID: 700726925_FLI.pep
VNDSCYHQLVSHWLNTHAVVEPFVIATNRHLSVVHPIYKLLFPHYRDTMNINSLARKSLVNADGIIEKTFLWGRYSLEMSAVIYKDWVFTDQALPNDLVKRGVAVKDPSAPHGVRLLIEDYPYASDGLEIWDAIKSWVHEYVSFYYKSDAAIQQDPELQAWWKELVQVGHGDLKDKPWWQKMQTREELIEASATLVWIASALHAAVNFGQYPYGGLILNRPTISRRFMPEKGSAEYAALAKNPEKEFLKTITGKKETLIDLTIIEILSRHTSDEFYLGERDGGDYWTSDAGPLEAFKRFGKKLQEIEQKLIQKNKDETLRNRSGPAKMPYTLLYPSSEEGLTFRGIPNSISI

SEQ ID NO: 45762 - protein, 573 aa, Glycine max
  Clone ID: 700727849_FLI.pep
FQISLPARQREKLERERERTHRSFLLRRRRRFAVAFSGEVSLFCLTEMEDPYVLGWILCSVLSLLALYSLAFGGAGRRRASPEKRNELSETVTTSAGECRSEKRNGDADVIIVGAGVAGAALAHTLGKDGRRVHVIERDLSEPDRIVGELLQPGGYLKLIELGLEDCVDKIDAQQVFGYALFKDGKHTRLSYPLEKFHSDVSGRSFHNGRFIQRMREKAASIPNVRLEQGTVTSLIEEKGTIKGVQYKTKDGQELATYAPLTIVCDGCFSNLRRSLCNPKVDIPSCFVGLVLENCELPCANHGHVILGDPSPILFYPISSTEIRCLVDVPGQKVPSISNGEMGKYLKTTVAPQIPPQLYDAFIAAVDKGNIRTMPNRSMPADPHPTPGALLMGDAFNMRHPLTGGGMTVALSDIVVLRNLLRPLSDLNDAPTLCKYLESFYTLRKPVASTINTLAGALYKVFCASPDQARKEMRQACFDYLSLGGLFSEGPVSLLSGLNPRPLSLVLHFFAVAIYGVGRLLLPFPSPKRVWIGARLISGASAIILPIIKAEGIRQMFFPATVPAYYRTPPVAQ

SEQ ID NO: 45763 - protein, 518 aa, Glycine max
  Clone ID: 700734987_FLI.pep
NMGKPFFTLSLSSLCLLLLSSACLAITSSKFNECQLNNLNALEPDHRVESEGGLIETWNSQHPELQCAGVTVSKRTLNRNGLHLPSYSPYPQMIIVVQGKGAIGFAFPGCPETFEKPQQQSSRRGSRSQQQLQDSHQKIRHFNEGDVLVIPPGVPYWTYNTGDEPVVAISLLDTSNFNNQLDQNPRVFYLAGNPDIEHPETMQQQQQQKSHGGRKQGQHQQQEEEGGSVLSGFSKHFLAQSFNTNEDTAEKLRSPDDERKQIVTVEGGLSVISPKWQEQEDEDEDEDEEYEQTPSYPPRRPSHGKHEDDEDEDEEEDQPRPDHPPQRPSRPEQQEPRGRGCQTRNGVEENICTMKLHENIARPSRADFYNPKAGRISTLNSLTLPALRQFGLSAQYVVLYRNGIYSPHWNLNANSVIYVTRGKGRVRVVNCQGNAVFDGELRRGQLLVVPQNFVVAEQGGEQGLEYVVFKTHHNAVSSYIKDVFRAIPSEVLSNSYNLGQSQVRQLKYQGNSGPLVNP

SEQ ID NO: 45764 - protein, 461 aa, Glycine max
  Clone ID: 700736615_FLI.pep
SISHSLNSEHRKSAMDFRIYGVTILLFLFPTLTFSISQGQINSNSILVALLDSHYTELAELVEKAMLLQTLENTVMNNSNNITIFAPRNEALERDLDPDFKRFLLEPRNLHSLQTLLLSHIVPKRITKPEFKTGSTRHRTLASHHHLTLQALNLTHWNVESSRVINPNSVTRPDGVIHGIDTLLIPRSVQDEFNRRRNLISIAAVKPEPSPEVDPRTHRLKKPAPAAPAGAPPALPIYDAMAPGPSLAPAPAPGPGGSHKHFNGEKQVKDFIETLLHYGGYNEMADILVNLTSLATEMGRLVSEGYVLTVLAPNDEAMAKLATEQLSEPGSPEQIMYYHLIPEYQTEESMYNAVRRFGKVRYDTLRLPHKVTAQEADGSVKFGHGDTSAYLFDPDIYTDGRISVQGIDGVLFPPQEEEAAGPVTRAQPAKVVVKQRRGKLLETACWMLGSFGQNSRFISCQ

SEQ ID NO: 45765 - protein, 507 aa, Glycine max; identical to SEQ ID NO: 43929
  Clone ID: 700737038_FLI.pep

SEQ ID NO: 45766 - protein, 207 aa, Glycine max
  Clone ID: 700739674_FLI.pep
QRELFCAWNPYGRTKLIIEEICRDVHRAEPDWKIILLRYFNPVGAHPSGCIGEDPRGIPNNLMPFVQQVAVGRRPALTVFGNDYNTTDGTGVRDYIHVVDLADGHIAALLKLDDPNIGCEVYNLGTGKGTSVLEMVRAFEMASGKKIPLVMAGRRPGDAEIVYASTKKAERELKWKAKYGIDEMCRDQWNWASKNPYGYGDQEDSTV

SEQ ID NO: 45767 - protein, 449 aa, Glycine max
  Clone ID: 700698384_FLI.pep
VGEACQKYGSIFMHPQGLYISLKEKGKIREVLRNWPEKNIQVIVVTDGERILGLGDLGCQGMGIPVGKLSLYTALGGVRPSACLPITIDVGTNNEKLLNDELYIGLKQRRATGQEYAELMHEFMTAVKQTYGEKVLIQFEDFANHNAFNLLEKYRSTHLVFNDDIQGTASVVLAGLVASLKLVGGNLADHRFLFLGAGEAGTGIAELIALETSKQTNAPLEEVRKNIWLVDSKGLIVSSRKDSLQHFKKPWAHEHEPVKNLLDAVNKIKPTVLIGTSGQGRTFTKEVIEAMASINKRPIILSLSNPTSQSECTAEEAYKWSQGRAIFASGSPFPPVEYEGKVFVPGQANNAYIFPGFGLGLIMSGTIRVHDDLLLAASEALAAQVSQENFDKGLIYPPFTNIRKISAHIAANVAAKAYELGLATRLPQPKDLVKFAESCMYTPAYRSYR

SEQ ID NO: 45768 - protein, 357 aa, Glycine max
  Clone ID: 700745025_FLI.pep
NFRFGMEKYELVKDIGSGNFGVARLMRHKDTKELVAMKYIERGHKIDENVAREIINHRSLRHPNIIRFKEVVLTPTHLGIVMEYAAGGELFERICSAGRFSEDEARYFFQQLISGVSYCHSMQICHRDLKLENTLLDGSPAPRLKICDFGYSKSSLLHSRPKSTVGTPAYIAPEVLSRREYDGKLADVWSCGVTLYVMLVGAYPFEDQEDPKNFRKTINRIMAVQYKIPDYVHISQDCRHLLSRIFVANPARRITIKEIKSHPWFVKNLPRELTEVAQAAYYRKENPTFSLQSIEDIMNIVEEAKAPPPASRSIGGFGWGGEEEEEDETKEAVAETEEDEYEKRVKEAQASGEFHVS

SEQ ID NO: 45769 - protein, 860 aa, Glycine max
  Clone ID: 700675903_FLI.pep
VAKMLGGLLHRGHKIKGTVVLMRKNVLDVNSVTSVGGIIGQGLDLVGSTLDTLTAFLGRSVSLQLISATKADANGKGKLGKATFLEGIITSLPTLGAGQSAFKINFEWDDGSGIPGAFYIKNFMQTEFFLVSLTLEDIPNHGSIHFVCNSWIYNAKLFKSDRIFFANQTYLPSETPAPLVKYREEELHNLRGDGTGERKEWERIYDYDVYNDLGDPDKGENHARPVLGGNDTFPYPRRGRTGRKPTRKDPNSESRSNDVYLPRDEAFGHLKSSDFLTYGLKSVSQNVLPLLQSAFDLNFTPREFDSFDEVHGLYSGGIKLPTDIISKISPLPVLKEIFRTDGEQALKFPPPKVIQVSKSAWMTDEEFAREMLAGVNPNLIRCLKDFPPRSKLDSQVYGDHTSQITKEHLEPNLEGLTVDEAIQNKRLFLLDHHDPIMPYLRRINATSTKAYATRTILFLKNDGTLRPLAIELSLPHPQGDQSGAFSQVFLPADEGVESSIWLLAKAYVVVNDSCYHQLVSHWLNTHAVVEPFIIATNRHLSVVHPIYKLLHPHYRDTMNINGLARLSLVNDGGVIEQTFLWGRYSVEMSAVVYKDWVFTDQALPADLIKRGMAIEDPSCPHGIRLVIEDYPYAVDGLEIWDAIKTWVHEYVFLYYKSDDTLREDPELQACWKELVEVGHGDKKNEPWWPKMQTREELVEACAIIIWTASALHAAVNFGQYPYGGLILNRPTLSRRFMPEKGSAEYEELRKNPQKAYLKTITPKFQTLIDLSVIEILSRHASDEVYLGERDNPNWTSDTRALEAFKRFGNKLAQIENKLSERNNDEKLRNRCGPVQMPYTLLLPSSKEGLTFRGIPNSISI

SEQ ID NO: 45770 - protein, 565 aa, Glycine max; identical to SEQ ID NO: 43888
  Clone ID: 700678176_FLI.pep

SEQ ID NO: 45771 - protein, 311 aa, Glycine max
  Clone ID: 700977282_FLI.pep
FGIVFKACLNDGSVVAVKRLKDYNAAGGEIQFQTEVETISLAVHRNLLRLSGFCSTQHERLLVYPYMSNGSVASRLKDHIHGRPALDWTRRKRIALGTARGLVYLHEQCDPKIIHRDVKAANILLDEDFEAVVGDFGLAKLLDHRDSHVTTAVRGTVGHIAPEYLSTGQSSEKTDVFGFGILLLELITGHKALDFGRAANQKGVMLDWVKKLHQDGRLSQMVDKDLKGNFDLIELEEMVQVALLCTQFNPSHRPKMSEVLKMLEGDGLAERWEASQRIETPRFRSCEPQRYSDLIEESSLVVEAMELSGPR

SEQ ID NO: 45772 - protein, 340 aa, Glycine max
  Clone ID: 700977656_FLI.pep
VSLGNNMRRTGLLHLLCLVIALVSVQAEDAYKYYTWTVTYGTISPLGSPQQVILINGQFPGPRLDLVTNENVILNLINKLDEPFLLTWNGIKQRKNSWQDGVLGTNCPIPPNSNYTYKFQAKDQIGTYTYFPSTQLHKAAGGFGALNVYHRSVIPIPYPNPDGDFTLLVGDWYKTNHKTLRQTLESGKPLAFPDGLLINGQAHSTFTGNPGKTYMFRISNVGFSTSINFRIQGHTLKLVEVEGSHTVQNLYDSLDVHVGQSVAVLVTLNQPPKDYYIVASTRFTETPLTTTAVLHYANSFSSALGPVPAPPVDKYDFDWSMKQARTYRWNLTANAARPNP

SEQ ID NO: 45773 - protein, 359 aa, Glycine max
  Clone ID: 700980834_FLI.pep
DRQTRIEGAEINKSLLALKECIRALDNDQIHIPFRGSKLTEVLRDSFVGNSKTVMISCISPNAGSCEHTLNTLRYADRVKSLSKSGNPRKDQAPNPIPPPAIKEVSSTSSLPGSVGAEDFNNGQRQEVKTMDMSRKVVEKESSLYSSAADVDKQSSFSSSCQFNGREEKSSASAPMDREKFEVKNSYGGDSTSQKMNSYSLNVTDEKVQRVSPPRRKGTKEEKSERSVNWVKRDVDGYDHSTTSSKQQSTGNYNITTGSGQSETESSSNVNISAILEEEEALIAAHRKEIEDTMEIVREEMKLLAEVDQPGSLIDNYVTQLSFVLSRKAASLVSLQARLARFQHRLKEQEILSRKRVPR

SEQ ID NO: 45774 - protein, 283 aa, Glycine max
  Clone ID: 700980868_FLI.pep
DYKREELFLIGSTKFKMTPVNLAGQFGDTTYTKVFVGGLAWETQKETMKKYFEQFGEILEAVVITDKATGRSKGYGFVTFREPEAAMRACVDPAPVIDGRRANCNLASLGVQRSKPSTPKHGGAGRNFRVMGSFQTGFGGGVGSAFPSAATFPHYAIQQGIPYNVYGYSPYSPDYTYPTSYYGVYGGATAQYPVYGSGPAAAAGGMMSGGAAFYPYLQYGGEGSGGGGTSGQGYGVNYPPQAHLFQYSPIASTAGYAQHYGTPTMSLAPSPALQSVCFAVPQA

SEQ ID NO: 45775 - protein, 596 aa, Glycine max
  Clone ID: 700984170_FLI.pep
AFGHLKSSDFLAYGIKSVAQDVLPVLTDAFDGNLLSLEFDNFAEVRKLYEGGVTLPTNFLSNITPIPIIKELFRTDGEQFLKYPPPKVMQVDKSAWMTDEEFARETIAGLNPNVIKIIEEFPLSSKLDTQAYGDHTCIITKEHLEPNLGGLTVEQAIQNKKLFILDHHDYLIPYLRKINANTTKTYATRTIFFLKNDGTLTPLAIELSKPHPQGEEYGPVSEVYVPSSEGVEAYIWLLAKAYVVVNDACYHQIISHWLNTHAVVEPFVIATNRHLSVVHPIYKLLFPHYRDTMNINSLARKSLVNADGIIEKTFLWGRYSLEMSAVIYKDWVFTDQALPNDLVKRGVAVKDPSAPHGVRLLIEDYPYASDGLEIWDAIKSWVEEYVSFYYKSDEELQKDPELQAWWKELVEVGHGDLKDKPWWQKMQTREELVEASATLIWIASALHAAVNFGQYPYGGLILNRPTISRRFMPEKGSPEYDALAKNPEKEFLKTITGKKETLIDLTIIEILSRHASDEFYLGQRDGGDYWTSDAGPLEAFKRFGKNLEEIEKKLIEKNNDETLRNRYGPAKMPYTLLYPSSEEGLTFRGIPNSISI

SEQ ID NO: 45776 - protein, 356 aa, Glycine max
  Clone ID: 700987283_FLI.pep
KGTMEANSGASDRISRIAGHLRPQREDDVCLKRSDCRAKGGVSGFKVAILGAAGGIGQPLAMLMKMNPLVSLLHLYDVVNTPGVTSDISHMDTGAVVRGFLGQQQLEDALIGMDLVIIPAGVPRKPGMTRDDLFNINAGIVKTLCEAIAKCCPKAIVNVISNPVNSTVPIAAEVFKRAGTYDPKRLLGVTMLDVVRANTFVAEVLGVDPRDVDVPVVGGHAGITILPLLSQIKPPCSFTPKEIEYLTGRIQNGGTEVVEAKAGAGSATLSMAYAAVKFADACLHALRGDAGIIECAYVASQVTELPFFASKVRLGRVGVEEILPLGPLNDYERESLEKAKKELAASIEKGISFIRK

SEQ ID NO: 45777 - protein, 290 aa, Glycine max
  Clone ID: 700987455_FLI.pep
RKSNPCAPAMAAPFFSTPFQPYVYQSPQDAIIPFQILGGEAQVVQIMLKPQEKIIAKPGSMCFMSGSVEMENAYLPENEVGIWQWLFGKTITSIVLRNSGPSDGFVGIAAPYFARILPIDLAMFNGEILCQPDAFLCSVNDVKVSNIVDQRGRNAVASAEGFLRQKLSGQGLAFILAGGSVVQKNLEIGEVLAVDVSSIVAVTSAVNIQIKYNGPARRTMFGGDNAVTAVLTGPGIVFIQSLPFHRFSQRIARAVTSPNMRENPKFFIQIAVFFFLAYVVIVSSLILTDV

SEQ ID NO: 45778 - protein, 515 aa, Glycine max
  Clone ID: 700988605_FLI.pep
NSLRSHIPPQLVHFDKLQVFDVSSNDFFGNIPSFIISLPSLQYLNLASNHLSGNLSVNMACSSSLTFVDISHNLLVGKLPSCFGSMSSKAKVLYSGNCLSTKNRLNDQQHPFSFCKREGALAVKPPAKNLKKESNLGTKLGLMLGIIVGIVVIGGLLVLLVVCIIRKSKAERSPHKMDKSVANKYSTSVSPRPIGTRHIPQAMKQAAVGLPPYRIFTSEEIEDATNNFDPSNLIEEGSQGQLYKGWLRDGSVVLVNCVKIKQKGLPHSIMQQVEVLHNLRHRHMVSVLGHCVITEQEHPQTTSTVFIVFEYISNVSLRDQLSDGRKREMLKWPQRMAMSIGIARGVQFLHTGVAPGIYGNNLKIENILLDDSLNAKVSRYNIPLPSKSAHNEQNATNHISSTNNTEKEDIYQLGVILLEVITGKQITSSSEIEELKEELENGSPEATSVIRSAIDPTLRGTYAYESMKTAVQITINCLSKVSSQRPSIEDVLWNLQYAMQVQESWTSSGNLSTKL

SEQ ID NO: 45779 - protein, 306 aa, Glycine max
  Clone ID: 700992271_FLI.pep
YECCDQLVSYIFSKNGRVISSTTNAIWGVFADENCCSDWPQIQLAQVEVLIFNLRTKQYSFPDFMEEMNKLKVLIVTNYSFYPSEINNFELLGSLSNLKRIRLERISVPSFVAMKNLKKLSLYLCNIKQAFENNDMLISYIFPNLEELNIDYSKDMVGLPKGLCDIISLKKLSITNCHKLSALPREFGKLENLELLRLNSCTDLEGLPDSIGRLSNLRLLDISNCISLPNLPEDFGNLFNLQNLYMTSCARCELPPSIANLENLKEVVCDEETAASWEDFKPMLPNLKIDVPQVDVNLNWLHTISS

SEQ ID NO: 45780 - protein, 434 aa, Glycine max
  Clone ID: 700996583_FLI.pep
PKGGVNGQPNLVTISATSNISESQNNTARSSIHQSFPPCPTFTQDDYHSFLQVSSTFSSLIVSTLLQNPAAHAAASFAATFWPYANAETSADSPMCTPDFPSRQIGSPPSVTAIAAATVAAATAWWAAHGLLPLCAPLHTAFACPPASAIAVPLMNIDESPQKTEQEEIKPQNSSLQDQILDPEHSEAQHSAPKSPAVFSSKSEERGDANLNTSPKATNHETNQVISENPDSNKMKGRKPVDRSSCGSNTTSSSEETELLLKDEKEKEEPKTPDANILDTELSNRRSRSINNLTDSWKEVSEEGRLAFQALFSREVLPQSFSPTHDLINEDNQIDSIKDNDQNTDYKDEDLESKKCSSNCDGVQKNLLFVKDNNEEEGLLIIGLGPGKLKTRPTGFKPYKRCSVEANENRIGTACNQGEEKGPKRIRLNGEAST

SEQ ID NO: 45781 - protein, 467 aa, Glycine max
  Clone ID: 700997024_FLI.pep
DGHSGSAFQGNEAQTDNFIEMYLRPPSASEEARINDWIKVRQSGIRYYLSLGDQRIVDKNFIIRPKAEFEVGRMTLGGLLALGYIVVVSYKRASTTVNNGKVSMSFETIDVLGETFMVMRGTNRKTVGTEALRMGINGPWITKSYLEMILERKGVPRLSTPPLVSNTTVPGSQETVIAAPKPIRVTPNLVTGLDDLPQPWTRSPTKSKMEPVVAEWHFISSDSSLPDNSVLDPSSFRDSVRLAPMPDSFDLDRGLLLAVQAIQALLENKGVPVIVGIGGPSGSGKTSLAHKMANIIGCEVVSLESYYKQVKDFKYDDFSALDLSLLSKNIDDIRNGQRTKVPIFDLESGARSGFKELEVSEDCGVIIFEGIYALHPDIRISLDLWIAVVGGVHSHLISRVQRDKSRVGCFISQNEIMMTVFPMFQQLIEPHLVHAHLKIRNDFDPVLSPESSLFVLKSNKKFGAEIY

SEQ ID NO: 45782 - protein, 359 aa, Glycine max
  Clone ID: 700954326_FLI.pep
KPLWTPFAHCSLKNPHKLRVGQRERERERERERMGGWAIAVHGGAGVDPNLPLERQEEAKQLLTRCLNLGISALNSNLPAIDVVELVVRELETDPLFNSGRGSALTEKGTVEMEASIMDGPKRRCGAVSGLTTVKNPISLARLVMDKSPHSYLAFSGAEEFARQQGVEVVDNEYFITPDNVGMLKLAKEANTILFDYRIPTSGYETCGSGVESPLQMNGLPISVYAPETVGCVVVDREGRCAAATSTGGLMNKMTGRIGDSPLIGAGTYACDVCGVSCTGEGEAIIRGTLAREVAAVMEYKGLKLQEAVDFVIKHRLDEGMAGLIAVSNAGEVAYGFNCNGMFRGCATENGFMEVGIWE

SEQ ID NO: 45783 - protein, 578 aa, Glycine max
  Clone ID: 700954473_FLI.pep
SMTSLNLSSNNLQGAIPIELSRIGNLDTLDISNNNLVGSIPSSLGDLEHLLKLNLSRNNLTGIIPAEFGNLRSVMEIDLSNNQLSGLIPDELSQLQNMISLRLENNKLTGDVASLSNCISLSLLNVSYNKLFGVIPTSNNFTRFPPDSFIGNPGLCGNWLNLPCHGARPSERVTLSKAAILGITLGALVILLMVLLAACRPHSPSPFPDGSFDKPVNFSPPKLVILHMNMALHVYEDIMRMTENLSEKYIIGYGASSTVYKCVLKNCKPVAIKRIYSHYPQCIKEFETELETVGSIKHRNLVSLQGYSLSPYGHLLFYDYMENGSLWDLLHGPTKKKKLDWELRLKIALGAAQGLAYLHHDCCPRIIHRDVKSSNILLDADFEPHLTDFGIAKSLCPSKSHTSTYIMGTIGYIDPEYARTSRLTEKSDVYSYGIVLLELLTGRKAVDNESNLHHLILSKAATNAVMETVDPDITATCKDLGAVKKVYQLALLCTKRQPADRPTMHEVTRVLGSLVLSNTPPKQLAALPPASNPSAKVPCYVDEYANLKTPHLVNCPSMSTSDAQLFLKFGEVISQNSE

SEQ ID NO: 45784 - protein, 737 aa, Glycine max
  Clone ID: 700957932_FLI.pep
YLSMEAKNLWRFLVLSIGVVLVLLVTWLPNKEALDCNLYSGWCTSKNRFYSSAHPNNPIKKPSFSTYHHHKNQHHESEIPQHPLDPLTIQEFNKVRTILLNYPLFKSSSSYTLNSVVLEEPDKKLVLKWKKGDLPLPRKASVVAYVKGDSHVLTVDLETGQVVSQEAITWSVSGYPTMTLEDMVGVLEVPLKSTEFNRSITKRGVNLADLACLPISSGWYGTQVEENTRLIKVQCYSKEGTVNFYMKPIEGVTALVDMNKKEVLSISDNGQNIPVANGINTDYRYSIQKLNGGELRMLNPISLEQPKGPSFTINGHLVKWANWEFHLRPDPRAGIIISQAKVRDPDTSKLRSVMYKGFTSELFVPYMDPTQDWYFKTYMDAGEYGFGLQAMPLDPLNDCPKNAYYMDGVFASSDGTPYLQPNMICIFESYAGDIAWRHAECPITDLKVTEVRPKVTLVVRMAAAVANYDYIVDWEFQTDGLIRAKVGLSGILMVKGTTYENMDQVPNQEYLYGTLLSENIIGVIHDHFITYYLDMDVDGSDNSFVEVNIKKQETSPGESPRKSYLKAVKKVAKTEKDAQIRLQLYDPSEFHVVNPLKKTRIGNPVGYKLVPGATAASLLDPEDPPQKRAAFTNNQIWVTPYNKSEQWAGGLFAYQSKGDDTLQVWSNRDRPIENKDIVLWYTIGFHHIPCQEDYPVMPTVSSSFDLKPANFFERNPILGVPPNFEDDLPVCKARDSA

SEQ ID NO: 45785 - protein, 180 aa, Glycine max
  Clone ID: 700962505_FLI.pep
LFFFNHAMEGLPQGYRPNVGVCLINSDDQIFVASRLNVPGAWQMPQGGIEDGEEPKSAAIRELREETGIVSAEIIAEVQKWLTYDFPPAVKAKVNRLWGGEWHGQAQKWFLMRLTKDDSEVNLTNGEAEPEFAEWKWADPEEVIEQAVDYKRPTYEEVIRTFKPYFQGSGISAKCKSTKW

SEQ ID NO: 45786 - protein, 736 aa, Glycine max
  Clone ID: 700962872_FLI.pep
LHILFAFRVGRIFAIKYFFTQKKMVLDPRLVLVLFIGTCILAINGDTDPNDVASLKVLFQSMNSPSQLNWNGDDPCGQSWQGITCSGNRVTEIKLPGRSLSGSLGYQLEPMSSVTNLDLSNNNLGGTIPYQLPPNLQYLNLANNNFNGAIPYSLSEKTSLIVLNLGHNQLQQALNVDFQKLSSLSTLDLSFNSLTGDLPQTMSSLSSIRTMYLQNNQFTGTIDVLANLPLDTLNVGNNHFTGWIPEQLKNIIQKDGNAWSSGPAPPPPPGTPPAVARNRNHKSGGHSPSDGGSSDGGGKKSGIGGGGIAGIVISILVVGAIVVFFLVKRRPKKSFNDVEKLDNQPLAQNEVHEMNSMQTSSVIDLKTFDTSATPISLKPPPFDRHKSFDEDEFSNKPVIVNKPTKVKKTVTAPTNVKSYSIADLQIATGSFSVEQLLGEGSFGRVYRAQFDEGKVLAVKKIDSSVLPNDMSDDFVELVSNISQLHHPNVTELVGYCSEHGQHLLVYEFHKNGSLHDFLHLPDEYSKPLIWNSRVKIALGIARALEYLHEVCSPSVVHKNIKSANILLDTDFNPHLSDSGLASYIPNANQVLNNNAGSGYEAPEVGLSGHYTLKSDVYSFGVVMLELLSGRKPFDSSRPRSEQALVRWATPQLHDIDALAKMVDPTLEGLYPVKSLSRFADVIALCVQPEPEFRPPMSEVVQALVRLVQRTNMSKRTFGTDQGGSNRGGDDQDTQDM

SEQ ID NO: 45787 - protein, 277 aa, Glycine max
  Clone ID: 700962929_FLI.pep
VCAVGKIGSIDRKMQSLSLSMSLRSSSLVNFLLLGSETRVRSRRSVIVACASEGDSGSSSTSSFLSRTQTYALLKQQLQVAAKSEDYKEAARIRDSLKLFEDEEPVLRLRRLLKEAVAEERFQDAASYRDELNKIAPHSLLKCCSDATTLGIRVQVRSVYIEGRSQPSKGLYFFAYRIRITNNSEHPVQLLRRHWIITDANGRTENVWGIGVVGEQPLILPGNSFEYSSACPLNTPNGRMEGDYEMIHVERVGSQSFNVAIAPFSLCLLGDDEGCII

SEQ ID NO: 45788 - protein, 442 aa, Glycine max
  Clone ID: 700962978_FLI.pep
KIHLFYQPLAISIFIQMTEKLSNNPSLNVPLLSEWNHHDEEKAIASHPSTKNTVSFFRTCLNGLNAISGVGILSVPYALASGGWLSLVLLFAIAAAAFYTGTLIKRCMDKNSNIKTYPDIGELAFGKIGRLIISVSMYTELYLVSIGFLILEGDNLNNLCPIEEVQIAGFVIGGKQLFVILVALIILPTVWLDNLSMLSYVSASGVFASAVIILSISWTGTFDGVGFHQKGTLVNWRGIPTAVSLYAFCYCAHPVFPTLYNSMTNKHQFSNVLLVCFLLTTVGYASMAIIGYLMFGADVESQVTLNLPLNKVSSKLAIYTTLVNPISKFALMATPITNALKDLLPRAYKNRATNILVSTVLVISATIVALSVPFFGDLMSLVGAFLSVTASILLPCLCYLKISGTYNEFGCETIAIVTIIVAAIAMGISGTYTSVMEIVHHL

SEQ ID NO: 45789 - protein, 299 aa, Glycine max
  Clone ID: 700942893_FLI.pep
LLDHFKHSGPNGQHVCMVFEYLGDNLLTLIKYSDYRGLPIAMVKEICFHILAGLDYLHQQLSIIHTDLKPENILLLSTIDPSKDPRKSGAPLILPNSKDKMAMESAGMKDTKMLNGDLVKNHKKKIKRKAKQAAHGCVEKEASEGVEGNAETSGAVESSPNASSAREQTSSSAGTSQLSDADGTKLKEQGNKRGSRSMRQKLLASVDLKCKLVDFGNACWTYKQFTNDIQTRQYRCPEVILGSKYSTSADLWSFACICFELATGDVLFDPHSGDNFDRDEMFKVLFKFRDSCWFSCAAT

SEQ ID NO: 45790 - protein, 131 aa, Glycine max
  Clone ID: 700946009_FLI.pep
AMVKAVAVLGSSEGVTGTIFFTQEGNGPTTVTGSLAGLKPGLHGFHVHALGDTTNGCLSTGAHFNPNNNEHGAPEDENRHAGDLGNVNVGDDGTSDLLFFLLFHLFDLLMSVMMVRLIYYFFFCFIYLISD

SEQ ID NO: 45791 - protein, 277 aa, Glycine max
  Clone ID: 700946095_FLI.pep
HFFGFVESASFYFNLGLTHMTSMYSGGYTALVTNLSPRATEDDVRNFFTYCGLIEHIEILRSGENAPTAYVTYRDAYALETALLLNGSMILDQCIFISRYEAYVNDYDNWSNHASNPEYSITTSQDVHMDKFVASPGEALTMAQVVVKTMVAKGYVLGKDAFVMAKAFDESHSVSSTAATKVAELSNKIGLTDTINSGIETFKSVDEKYHVTDFTKSAATVTGTTAIVVASVTGKAAVAAGTAIANSSYFAKGALWVSDVLTRAAKAAADLGQNEKK

SEQ ID NO: 45792 - protein, 93 aa, Glycine max
  Clone ID: 700946119_FLI.pep
VEGFWVCYCHLARPASLPSPTDLHLFKEGIRPLWEDSANCNGGKWIIRFKKVVSGRFWEDLVMQIFSSVTFFIFLDKMYGYGMIMENVNTLIY

SEQ ID NO: 45793 - protein, 290 aa, Glycine max
  Clone ID: 700981983_FLI.pep
SPNRSHKQMNAIAAEQVLEPWHKLDDKVVLVTGASSGLGRDFCIDLAKAGCCVVAAARRLDRLTSLCHEINHRWPSNVGIHRAVAVELDVAADGPAIDRAVQKAWDAFGRVDSLINNAGVRGSVKSPLKLSEEEWDHVFKTNLTGCWLVSKYVCKRMCDIQLKGSIINISSVSGLNRGQLPGAAAYASSKAGVNMLTKVMAMELGMHKIRVNSISPGIFKSEITENLLQKDWLNDVVRKIMPLRRLGTSDPALTSLARYLIHDSSEYVTGNNFIVDYGGTLPGVPIYSSL

SEQ ID NO: 45794 - protein, 155 aa, Glycine max
  Clone ID: 700981986_FLI.pep
LLHRRSLQRSQQHRHPMANAASGMAVHDDCKLRFLELKTKRTHRFIVFKIEEQQKQVIVEKLGEPAQGYEDFTASLPADECRYAVYDFEYLTEGNVPKSRIFFIAWSPDTSRVRSKMIYASSKDRFKRELDGIQVELQATDPTEMGLDVFKSRAN

SEQ ID NO: 45795 - protein, 288 aa, Glycine max
  Clone ID: 700982320_FLI.pep
LSLSLLKVRQRREEEKERGLSLEKRGGKYMENEGVNTVVVEQQPVASTSKFPLSFWETTVASTVALVFAVGLLGVYLTMPDSDYSFLKLPRTLQDLQLLRDNLESYTSDYTAQVLVGYCVVYIFMQTFMIPGTVFMSLLAGALFGVFKGVALVVFTATAGASSCYFLSKLIGRPILSSLWPEKLKFFQTQVAKRRKGLLNYMLFLRLTPTLPNTFINFASPIVDVPYHIFFLATVIGLIPAAYVTVKAGLALGELQSVGDLYDFNSIATLFLIGVVSVTPTLMSKNES

SEQ ID NO: 45796 - protein, 265 aa, Glycine max
  Clone ID: 700985723_FLI.pep
LLKYVNKHDPSDKYHLLRLYDYFYYREHLLIVCELLKANLYEFHKFNRESGGEVYFTMPRLQSITIQCLEALQFLHSLGLIHCDLKPENILVKSYSRCEVKVIDLGSSCFETDHLCSYVQSRSYRAPEVILGLPYDKKIDIWSLGCILAELCTGNVLFQNDSPATLLARVIGIIGPIDQGLLAKGRDTYKYFTKNHMLYERNQESNRLEYLIPKKTSLRHRLPMGDQGFIDFVAHLLEVNSKKRPSASEALKHPWLSYPYEPISS

SEQ ID NO: 45797 - protein, 312 aa, Glycine max
  Clone ID: 700985896_FLI.pep
LPGLHHVILIGDEKQLPAVVKSQVSQEAEYGRSLFERLVSLGHKKHLLNVQYRMHPSISLFPNKEFYEKQLSDSPFVREVSYNRHFLEGKMYDSYSFINIAKGKEKMPRGGHGWKNMVEAAAVCKIIESLENEFFSTGKKVSIGIISPYNAQVYEIQERITRQNLVSDPNFSVSVRSVDGFQGGEEDIIIISTVRSNKNGKIGFLDNRQRANVALTRARYCLWILGNENTLSSDYSLWRNLVNDAKERGCFHNADDDKKLAKAIEEESLLIELLDEYESPFKKLSLGSTSRTRTTATTFRGSFRGRPRTPRW

SEQ ID NO: 45798 - protein, 392 aa, Glycine max
  Clone ID: 700986168_FLI.pep
AVSFLATVPLGELFFFHMILIRKGITTYEYVVAMRTLSEPPGPSVDGGEQQSLPSSPTSSAVTAMSGRSSVGMSIQYKGAWCTPPRIFMDHPDEIIPHLEPGRLPSTVDPDAVQPPDKGRKMNQRPVRISAWKLAKLDSNEATKAAAKARASSSVLRPISSRPHAYDVDHVSSSNVSGRSSPISNQGFHIKNDTVGTSRLSPSKSSYPPSQASKDDIDASCQHSMSNFSSPRVSNLTPSPMQRPGLNRDHFNPMYQQPSGNQSPSSAKGSEGNINPVHDNVPRVPMRSNTLAVSDNRRSSVFWDQAAGRFVSSSSRGPGTELLYTGRSIFFGSPVVNEQPSTGTRSSSSVVAGIPDRDSSTLRDFQQGRSHRGGQLPVFVPGCGYAQQNKFP

SEQ ID NO: 45799 - protein, 238 aa, Glycine max
  Clone ID: 700989812_FLI.pep
EAMNGVRHLLVRKSIPNGLVFVGELPYGSNSGFSPKMDHLVCFLPGTLAIGATKGLTKKQAMENNMLNFEDLENLKLAEDLTKTCFEMYAVTSTGLAPEIAYFHTEEFSEEGHDGGNKSSEFVNDIIIKPADRHNLLRPETVESLFVLYRITEDPKYREWGWQIFEAFENHTKVDTGGYCSLDDVTSVPPHRRDKMETFFLGETLKYFYLLFADSSLIPLDKFVFNTEAHPIPINLKK

SEQ ID NO: 45800 - protein, 555 aa, Glycine max
  Clone ID: 700989873_FLI.pep
QLSSLFSFIFFRFTGGMGNCNACVRVDDVADSNRGKKNKKTKPNPYAEEEIRSGVPIRVLKDVTSRSLIGDKYVIGRELGRGEFGITYLCTDRETKQELACKSISKRKLRTAIDVEDVRREVAIMSTLPEHANVVKLKATYEDEENVHLVMELCAGGELFDRIVARGHYSERAAANVARTIAEVVRMCHANGVMHRDLKPENFLFANKKENSVLKAIDFGLSVFFKPGERFSEIVGSPYYMAPEVLKRNYGPEVDVWSAGVILYILLCGVPPFWAEDERGVALAILRGVIDFKREPWPQISDSAKSLVRQMLEHDPKKRLTAEQVLEHSWLQNAKKASNVPLGDIVRTRLRQFSLMNRLKKRALRVIAEHLSVEEVEIIKDMFTLMDTNKDGKVTYEELKVGLRKVGSQLAEPEIKMLMEVADVDGNGVLDYGEFVAVTIHLQRMENDEHFRKAFMYFDKDGSGYIELGELEKALTDESGDTDTAVLNDIMREVDTDRDGRISYEEFVAMMKTGTDWRKASRQYSRERFKSLSINLMKDGSLQLHDDISGQAVVV

SEQ ID NO: 45801 - protein, 395 aa, Glycine max
  Clone ID: 700990392_FLI.pep
HHPKAHASPPEYFVLQGNTTYKDDLYLRKRTGMRRWLCCTCQVEESYPSNENEHLKSPRNYGDGNQKGSKVSAPVKPETQKAPPPIEAPALSLDELKEKTDNFGSKALIGEGSYGRVYYATLNNGKAVAVKKLDVSSEPESNNEFLTQVSMVSRLKNGNFVELHGYCVEGNLRVLAYEFATMGSLHDILHGRKGVQGAQPGPTLDWIQRVRIAVDAARGLEYLHEKVQPPIIHRDIRSSNVLIFEDYKAKIADFNLSNQAPDMAARLHSTRVLGTFGYHAPEYAMTGQLTQKSDVYSFGVVLLELLTGRKPVDHTMPRGQQSLVTWATPRLSEDKVKQCVDPKLKGEYPPKGVAKLAAVAALCVQYEAEFRPNMSIVVKALQPLLKSPAPAAPES

SEQ ID NO: 45802 - protein, 399 aa, Glycine max; identical to SEQ ID NO: 43897
  Clone ID: 700995361_FLI.pep

SEQ ID NO: 45803 - protein, 513 aa, Glycine max
  Clone ID: 700995510_FLI.pep
ENHLTSDLKIREREQRRSCCVLRKREMAAEIPCCGTKFSLYVLVIIGLVCFAGLMAGLTLGLMSLGLVDLEVLIKSGRPQDRIHASKIYPVVKNQHLLLCTLLIGNSLAMEALPIFLDSLVHPAAAILISVTLILMFGEILPQAICTRYGLTVGATLAPLVRVLLIVFFPLSYPISKVLDWMLGKGHAALLKRAELKTFVNFHGNEAGKGGDLTHDETTIITGALELTEKTAKDAMTPISKAFSLDLDATLNLETLNSIMTIGHSRVPVYAGEKTNIIGLVLVKNLFMVDSKAAVPLRKMLIRKIPRVSENMPLYDILNEFQKGHSHIAVVYRDLNDKNEAPKKVKDGELLDLKDKRKNKGEKTSLDKGEKLESHYSLTTDGAQQAKKSPPATPAFKKRHRGCSYCILDLDNSPLPVFPPNEVVVGVITMEDVIEELLQEEILDETDEYVNIHNKIKVNMNASKEKAPDANMLLPSQAVQGHTPTNSISTATSATGSPTTIDLISESESLRNR

SEQ ID NO: 45804 - protein, 510 aa, Glycine max
  Clone ID: 700952901_FLI.pep
FGSISPDLGKLENLRVLALHNNNFYGSIPPELGNCTELEGIFLQGNYLSGAIPSEIGNLSQLQNLDISSNSLSGNIPASLGKLYNLKNFNVSTNFLVGPIPSDGVLANFTGSSFVGNRGLCGVKINSTCRDDGLPDTNGQSTNSDQNQIGKKKYSGRLLISASATVGALLLVALMCFWGCFLYKKFGKNDRISLAMDVGAGASIVMFHGDLPYSSKDIIKKLETLNEEHIIGIGGFGTVYKLAMDDGNVFALKRIVKLNEGFDRFFERELEILGSIKHRYLVNLRGYCNSPTSKLLIYDYLPGGSLDEALHERAEQLDWDSRLNIIMGAAKGLAYLHHDCSPRIIHRDIKSSNILLDGNLDARVSDFGLAKLLEDEESHITTIVAGTFGYLAPEYMQSGRATEKSDVYSFGVLTLEVLSGKRPTDAAFIEKGLNIVGWLNFLITENRPREIVDPLCEGVQMESLDALLSVAIQCVSSSPEDRPTMHRVVQLLESEVVTPCPSDFYDSNSD

SEQ ID NO: 45805 - protein, 293 aa, Glycine max
  Clone ID: 700953009_FLI.pep
GRWRVDREEKKMSQQQRSTPAPFLTKTYLLVDDPATDDVVSWSEGGNTFVVWKHADFAKDLLPKYFKHNNFSSFVRQLNTYGFRKTVPDKWEFANEYFKRGQTDLLAEIRRRKVVSPVTGKSTGGGVNISASHSGGDDMGSTSTGSMEAATAAGADISGENEKLKKDNEKLSGELALAKKQCEELVAFLRDSLNVSPDVIERIIRQGTCVSSNNDAVRFDAIINNDLDDDENAVGECEPQQPPPKGDNGESLKLFGVWLKGQNGKENSIGKCRKRGRQDYPIAATAKELKTLV

SEQ ID NO: 45806 - protein, 414 aa, Glycine max
  Clone ID: 700953214_FLI.pep
EYLISLSMCFLGTDVCIVGVARTPIGGLLGTLSSLSATELGSIAIKTALKRANVDPSLVQEVFFGNVLSANLGQAPARQAALGAGIPTSVICTTINKVCASGMKATMLAALTIQFGLNDVVVAGGMESMSNAPKYIAEARKGSRYGHDTIIDGMVKDGLWDVYNNFGMGVCAELCADQHVITRDEQDSYAIRSFERGISAQNAGHFAWEIVPVEVSTGRGRASKIVDKDEGLGKFDAAKLRKLRPSFKEVGGSVTAGNASSISDGAAALVLVSEEKARELGLHVIAKIKGYGDAAKAPELFTTAPSLAIPKAISNAGLDASQIDYYEINEAFSVVALANQKLLGLDPEKVNAHGGAVSLGHPLGCSGARILVTLLGVLRQKRGKYGVAAICNGGGGASALVLELMPVAVGRSLL

SEQ ID NO: 45807 - protein, 344 aa, Glycine max; identical to SEQ ID NO: 40010
  Clone ID: 700956316_FLI.pep

SEQ ID NO: 45808 - protein, 370 aa, Glycine max
  Clone ID: 700957069_FLI.pep
FLSPLSAVPLVSLVGFGLYELGFPGVAKCVEIGLPELILLVFISQFVPHVLHAGKHVFDRFAVLFTIAIVWLYAYLLTVGGAYNHAAPKTQSTCRTDRSGLIESAPWIRVPYPFQWGAPTFDAGEAFAMMMASFVALVESSGAFIAVYRYASATPLPPSILSRGIGWQGVGILLSGLFGTGNGSSVSVENAGLLALTRVGSRRVVQIAAGFMIFFSILGKFGAVFASIPPPIVAALYCLFFAYVGAGGLSFLQFCNLNSFRTIFVLGYSIFIGLSVSQYFNEYTAINGYGPVHTKARWFNDIINVPFQSKAFVAGCVAYFLDNTLHKKEAAIRKDRGKHWWDKYRSFKTDTRSEEFYSLPFNLNKYFPSV

SEQ ID NO: 45809 - protein, 218 aa, Glycine max
  Clone ID: 700960745_FLI.pep
QELVSPPPVFPLPGKLPGTVRRRLSFIKAEVKYVNAEKAKELVEADGYTVLDVRDKTQFERAHIKSCSHVPLFVENKDNDPGTIIKRQLHNNFSGLFFGLPFTKPNPEFVQSVKSQFPPESKLLVVCQEGLRSAAAASKLEEAGFENIACITSGLQTVKPGTFDSVGSTELENAGKAGLVTIQGKISTVLGTILVCAYIFVTFFPDQAEKLFQLAPTG

SEQ ID NO: 45810 - protein, 423 aa, Glycine max
  Clone ID: 700960810_FLI.pep
SLCVPSSLGHSSIKTPKRPTERNMACPAMANGNGSLKNLKLNDTKGKTITCKAAVVYGPGEPFVVENILVHPPQKMEVRIKILYTSICHTDLSAWRGVNEAQRAYPRIFGHEASGIVESVGEGVSEVEEGDIVVPIFNGECGECSMCKCEKTNLCERFGVDATKKVMEGDGTTRFSTVNGKPIFHFLNTSTFSEYTVVDSACVVKFLDSDHSLSHKNLTLLSCGVSTGVGGAWNTANVHSGSTVAIFGLGVVGLAVAEGARARGASKIIGVDINPDKFIKAQTMGVTDFINPDDEEKPVYERIREITDGGVHYSFECTGNVDVLRDAFLSSHEGWGLTVILGVHASPKLLPIHPMELLDGRNIVGCVFGGFKGRSQLPHFAKECGQGVVKLDNFITHELPFEEIDKAFDLLITGKSLRCLLHF

SEQ ID NO: 45811 - protein, 220 aa, Glycine max
  Clone ID: 700964194_FLI.pep
NLLSIWFHHIMETRLPKLDHDLQQPFKGHVFITTNSFQNAPYSSFWKSHLNEFLYLIFNPTRRSLGKTFCPVASSVNKCLIVFQILLCHHGILRIIRLRSREKCLHRKKCSLQSECWAPLVLQDIQANSSTLAADIRVPNFGFKLHLGGFKRVPIRQCDINLENAPFIWSSDGARNGADQENKVVVFGADFDARSLRVLAAFHKLLLHARKVYHLQSVTN

SEQ ID NO: 45812 - protein, 270 aa, Glycine max
  Clone ID: 700964422_FLI.pep
HHKNLVKLLGCSITGPESLLVYEYVPNQSLHDHFSVRRTSQPLTWEMRQKIILGIAEGMAYLHEESHVRIIHRDIKLSNILLEEDFTPKIADFGLARLFPEDKSHISTAIAGTLGYMAPEYIVRGKLTEKADVYSFGVLVIEIVSGKKISSYIMNSSSLLQTVWSLYGSNRLYEVVDPTLEGAFPAEEACQLLQIGLLCAQASAELRPSMSVVVKMVNNNHEIPQPAQPPFINSSSSEFSKSGLPGYNFQPGSNTQSSGNTISESQIEPR

SEQ ID NO: 45813 - protein, 257 aa, Glycine max
  Clone ID: 700964909_FLI.pep
FHYSPIMMSAGELESGNAGEPAKLIRQRYREAADMIKKGKMCALFINDLDAGAGRLGGTTQYTVNNQMVNATLMNIADNPTNVQLPGMYNKEENPRVPIIVTGNDFSTLYAPLIRDGRMEKFYWAPTREDRIGVCTGIFRTDGIPEQDIVKLVDTFPGQSIDFFGALRARVYDDEVRKWISGVGVDSVGKKLVNSKDGPPTFEQPKMTLEKLLLYGNMLVQEQENVKRVQLADKYLNEAALGNANEDAIQRGTFFQS

SEQ ID NO: 45814 - protein, 531 aa, Glycine max
  Clone ID: 700964957_FLI.pep
CYCYILFHISCESLSLMGDIRLTRVEQGQTKIRNVPIAVTPEGFWCCPTPVGFQKSLKPQNPLNKLKPSSPPPKPSSQKKAVSESQRKTVPSPSRLAVSDAQQCNDDPERPPTSTSVPAQRAPKKVAIEFGEPGTFDMKLLLLGKQGFCVKLSVHRDVLIEKSSFFADKLSEQSSLSCLQVDDCEDVEIYVETVGLMYCKEMKQQLMKQSVSRILRILKVAEFLGFSSCIQSCLEYLEAVPWNGKEEEEKVIATVLRLQGEGIGVNPVLKRVSPDISNAPKDTLSHIVELVLKSNEERGRREMKSIVLKLLRENNSLPSSSGSADLCNDMINKSCRRCMDSLLCLFNQVAEPGFSDNKEPVVKHIALEADNLSWLLEILVDKQAAEDFALMWANQQELAALHGKLPIVFRYHVSCISGRLYVGIGRGEVLPSKNTRQFLLQTWLQPLINDYNWLQHGCGSFDRKLVEEGIGRTILTLPLEDQQSILLSWVGSFLKTGDGCPNLQRAFEVWWRRTFIRPYVEGQTINVMPDT

SEQ ID NO: 45815 - protein, 384 aa, Glycine max
  Clone ID: 700942145_FLI.pep
GKERETKRLPMATLRLTFSDSTTLFRPSLPSTRTFSRNRSLIVKASSSEDDFSRSSRRRFIAETAALSVSLPQLTARSEDALSEWERVYLPIDPGVVLLDIAFVPDDPNHGFLLGTRQTILETKDGGNTWAPRSIPSAEDEDFNYRFNSISFKGKEGWIVGKPSILLYTSDAGDSWERIPLSAELPGDMVYIKATGEKSAEMVTDEGAIYVTANRGYNWRAAVQETVSATLNRTVSSGISGASYYTGTFNTVNRSPDGRYVAVSSRGNFYLTWEPGQPFWQPHNRAVARRIQNMGWRADGGLWLLVRGGGLYLSKGKGLTEEFEEVPVQSRGFGILDVGYRSTDEAWAAGGSGILLRTTNGGKSWIRDKAADNIAANLYSVKSV

SEQ ID NO: 45816 - protein, 147 aa, Glycine max
  Clone ID: 700942358_FLI.pep
LVNFSTLDILTTGDINKQYQKMEVCKTPLPEVTSKNEVAGGELQKFPARLFAVPPRIAQGAIPGVTAESYQEDNKLWKKHVNAYKRMNKLIGTTRYRNVMDMNAGLGGFAAALESKKSWVMNVVPSIAENTLGVVYERGLIGIYHDW

SEQ ID NO: 45817 - protein, 299 aa, Glycine max
  Clone ID: 700944067_FLI.pep
FQILIFKLFGVKMGQVLGCVQVKQSTVAVKECFGKYDDVLQPGCHFVPWCLGCGVAGVLSTRVMQLSLRCETKTKDNVFVNVVASIQYRALAEKASDAYYKLTNTKAQIQSYVFDVIRATVPKMELDAVFEQKNTIAKAVDEELGKAMSAYGYEIVQTLIVDIVPDEHVKKAMNEINAAARLRVATNDKAEAEKIMQIKRAEGDAESKYLAGLGVSRQRQAIVDGLRDSVLAFSGNVPGTSSKDIMDMVLMTQYFDTMKEIGASSKSNAVFIPHGPGAVSDVASQVRNGLLQGNATTES

SEQ ID NO: 45818 - protein, 263 aa, Glycine max
  Clone ID: 700944294_FLI.pep
PSSSLESSTAMTTATEKLSALKSAVAGLNEISESEKNGFISLVSRYLSGEAQHVEWSKIQTPTDEVVVPYDTLAPTPDGSSDVKNLLDKLVVLKLNGGLGTTMGCTGPKSVIEVRDGLTFLDLIVIQIENLNSKYGSNVPLLLMNSFNTHDDTQKIVEKYQNSNIEIHTFNQSQYPRLVAEDFLPLPSKGHTDKDGWYPPGHGDVFPSLLNSGKLDALLSQGKEYVFVANSDNLGAIVDLKILNHLIQNKNEYCMEVTPKNIG

SEQ ID NO: 45819 - protein, 685 aa, Glycine max
  Clone ID: 700967833_FLI.pep
TPQFLGLPTGVWPTGGGFDRAGEDIVIGLVDTGIYPQHPSFATHNSEPYGPVPKYRGKCEADPETKRSYCNGKIVGAQHFAHAAIAAGSFNPSIDFASPLDGDGHGSHTASIAAGNNGIPVRMNGHEFGRASGMAPRARIAVYKAIYRLFGGFVADVVAAIDQAVYDGVDILNLSVGPDSPPAATKTTFLNPFDATLLGAVKAGVFVAQAAGNHGPLPKTLVSYSPWIASVAAAIDDRRYKNHLILGNGKTLAGIGLSPSTHLNETYTLVAANDVLLDSSLMKYSPTDCQRPELLNKNLIKGNILLCGYSFNFVVGTASIKKVSETAKALGAVGFVLCVENISLGTKFNPVPVGLPGILIIDVSNSKELIDYYNITTPRDWTGRVKSFEGKGKIGDGLMPILHKSAPQVALFSARGPNIKDFSFQEADLLKPDILAPGSLIWAAWCPNGTDEPNYVGEAFAMISGTSMAAPHIAGIAALIKQKHPHWSPAAIKSALMTTSTTLDRAGDPLLAQQTSESEAMRLVKATPFDYGSGHVDPTAALDPGLIFDAGYEDYIGFLCTTPSIDVHEIRNYTHTPCNTSMGKPSNLNTPSITISHLVRTQVVTRTVTNVAEEETYVITARMEPAVAIEVNPPAMTIKAGASRQFLVSLTVRSVTGRYSFGEVLMKGSRGHKVRIPVLANGYRR

SEQ ID NO: 45820 - protein, 179 aa, Glycine max
  Clone ID: 700968009_FLI.pep
ERKKERKMLEEQPVVLFRKSPSRRRLRSAFATDDRGWTSLHVFARKGDLKLVKKLLNEGMDVNVSAWGPKSKGVTPLHLAAEGGHIGVMDVLLECGADIDARTKGACGWTPLHIAAKERRRDAVKFLIENGAFMPPDISDSRFNPPLHYCPGLEWAYEEMKRLRQEDLSAGETCYSSES

SEQ ID NO: 45821 - protein, 652 aa, Glycine max
  Clone ID: 700981436_FLI.pep
YLPPHSPFNFFTSVPRILVQLSSVQMGAISTPLVLVLLFCCLVSVSQAEYLKYKDPKRPLNVRIKDLLKRMTLEEKIGQMVQIERSVATPQVMKKYFIGSVLSGGGSVPETNASAETWIQMVNGIQNGSLSTRLGIPMIYGIDAVHGHNNVYKATIFPHNVGLGVTRDPMLIKKIGDATALEVRATGIQYVFAPCIAVCRDPRWGRCYESYSEDPKIVQAMTEIIPGLQGDISDNSRKGVPFVAGKNKVAACAKHYVGDGGTTKGINENNTVVSYNGLLRIHMPAYHDSIVKGVSTVMVSYSSWNGQKMHANHFLVTDYLKNKLKFRGFVISDWLGIDRITSPSHSNYSYSIQVGVGAGIDMIMVPFNFTEFIDVLTYQVKNNIIPVSRIDDAVRRILRVKFVMGLFENPHADISLVNQLGSEEHRQLAREAVRKSLVLLKNGKSAEKPLLPLPKKAAKILVAGSHADNLGYQCGGWTITWQGGGGNNLTVGTTILDAVKQAIDPATKVVYNENPDSNFVKSNNFSYAIVIVGEHPYAETFGDSLNLTIPEPGPSTITNVCGSIQCVVVLITGRPVVIQPYLSKIDALVAAWLPGTEGQGVTDLLFGDYGFTGKLARTWFKTVDQLPMNVGDKYYDPLFPFGFGLSTNPTRY

SEQ ID NO: 45822 - protein, 479 aa, Glycine max
  Clone ID: 700984982_FLI.pep
PFPESKHGLLRFWSPITMILFSFTSIVLIAFGATLFQTGHAKKLWRRIEDWFHVYQFFKVPELNDTTQHNHLYRKVSLYLHSLPSIEDSDFANLITGKKQNDIVLCLGPNQTIEDHFLGATLFWFNQTGTFLLKIRKVDKRRILRPYLQHIHAVADEIDQRGKRDLLLFMNIADDFRRWRSVPFTHPSTFDTVAMEPDLKSKVKSDLESFLRAKQYYHRLGRVWKRSFLLYGPSGTGKSSFVAAMANFLSYDVYDIDLCKISSDSDLKSLLLQTTPKSVVVIEDLDRFLAEKTARISASGILNFMDALLTSCCAEERVMVFTMNTKEHVDPNLLRPGRVDVHIHFPLCDFSAFKTLASSYLGVKEHKLFPQVQEIFQNGASLSPAEIGELMIANRNSPSRAIKSVITALQTDGDGRGCGLIGRQTEDDEMDEPDGVVCGETFHTVKDLRKLYGFFSFRVTRRSSSSNASLPPASPLEKE

SEQ ID NO: 45823 - protein, 546 aa, Glycine max
  Clone ID: 700985611_FLI.pep
FTLFFFQFPSLLNFFLGGKGGAMEMHTQPHKKHHFGVQHCCLISLFIFTFFTTTTTQAFDYADALSKSLLYFEAQRSGRIPYNQRVTWRDHSGLTDGLEEGVDLVGGYYDAGDHVKFGLPMAFTITMLSWSAIEYRQQIEDAGELEHTMEAIKWGTDYFIKAHTSPNVLWAEVGDGDTDHYCWQRPEDMTTSRRAFKIDENNPGSDLAGETAAAMAAASILFRKTNPHYSHLLLHHALQLFEFGDKYRGNYDASVGVVKSYYASVSGYMDELLWAATWLYKATDNKMYLQYVISNAHTFGGTGWSISEFIWDVKYAGLQLMVSKLLSEEKHKKHRDILEQYKSKAEYYICSCLNKNNDSNNVERTPAGLIYVRQWNNMQYVSTAAFLLSIYSDFLQSTNQKLNCHGGTVDHEEILNFAKSQADYILGSNPMNMSYLVGYGPNYPKRVHHRGASIVSYKKNKGFIGCTQGYDNWYGSQAPNPNVLVGALVGGPDGKDNFEDRRNNFMQTEACTYNTAPLVGVFAKFLHIENQKLVHDCNSHLVASFK

SEQ ID NO: 45824 - protein, 300 aa, Glycine max
  Clone ID: 700989491_FLI.pep
FIRGEEKRKIKMEGKEQDVSLGANKFPERQPIGTAAQSQDDGKDYQEPAPAPLVDPTEFTSWSFYRAGIAEFVATFLFLYITVLTVMGVAGAKSKCSTVGIQGIAWAFGGMIFALVYCTAGISGGHINPAVTFGLFLARKLSLPRAIFYIVMQCLGAICGAGVVKGFEGKTKYGTLNGGANFVAPGYTKGDGLGAEIVGTFVLVYTVFSATDAKRNARDSHVPILAPLPIGFAVFLVHLATIPITGTGINPARSLGAAIIFNKDLGWDDHWIFWVGPFIGAALAALYHQVVIRAIPFKSK

SEQ ID NO: 45825 - protein, 329 aa, Glycine max
  Clone ID: 700993427_FLI.pep
PQNAVEPTMTSRDSLPLKHNCPGHRDTQTRLLIPSKPTREFSLDMEDLDISWTDLVLKGRIGSGSFGTVHHAEWNGSEVAVKILMEQDFKGERFKEFLREVAIMKGLRHPNIVLLMGAVTKPPNLSIVTEYLSRGSLYRLLHKPGATEMLDERRRLSMAYDVAKGMNYLHKRNPPIVHRDLKSPNLLVDKKYTVKVGDFGLSRLKANTFLSSKSAAGTPEWMAPEVLRDEPSNEKSDVYSFGVILWEIATLQQPWSNLNPPQVVAAVGFKGKRLEIPRDLNPQLASIIESCWANEPWKRPSFSSIMDSLKVLLKPPMPQPGRPSMSLLT

SEQ ID NO: 45826 - protein, 532 aa, Glycine max
  Clone ID: 700994349_FLI.pep
SETRSVVLVGEGRRLTERERKEREKTKLTLDLRLSSLSDSFFVGLLKASSTMNSKANVSKELNAKHKKILEGLLKLPENRECADCKAKGPRWASVNLGIFICMQCSGIHRSLGVHISKVRSATLDTWLPEQVAFIQSMGNEKANCFWEAELPPNYDRVGIENFIRAKYDEKRWVPRDGNSKTPSGFREEKSPSHWQRPVERSGYAAVSENKFEERKKIQPSTAIPAARINVPAPPRAPEQVTPITKPQHVEKVESVAPQPQAPQPLAETSKQATDTVKNNPPKVDYATDLFNMLSMDGPNENGSEAAGTTTDDNHWAGFQSAAEVSTAEKTSPLKAADSTPGSASGIEDLFKDLHPVTPSLTPEKPQKDVKNDIMSLFEKGNMVSPFSMHQQQLAMLAQQQSLLMASAAKSSGGDPRYPASIQQPRPNVPIQSWPATGYSIPGVMPMGGQGELQKLVQGQTRNMTPAHFAGSSVQYPPSSFYGMGQVPPPVNGMTMGVSKPQSGAPAVSSTTSQSAKDYDFSSLTQGMFMKQ

SEQ ID NO: 45827 - protein, 154 aa, Glycine max
  Clone ID: 700994567_FLI.pep
NSTSNSNQAINFKSKNGELHNLLCLLPRVYDLVRPRGAILILHPRPGHLFPPSQIRLPRIRRRVQPPRRRRRHRVSDGVGEQPAHSSRKELHKLRCAEKEHCPLLPTWRLLLQLPPWRSGQPLQPWMQCYHPMQALKKLFFSFNFIFFYIYIFL

SEQ ID NO: 45828 - protein, 343 aa, Glycine max
  Clone ID: 700909620_FLI.pep
RFCCSLKKGVCLILEMSLLSDLINLNLSDTTEKVIAEYIWIGGSGMDLRSKARTLPGPVSDPSKLPKWNYDGSSTGQAPGEDSEVIIYPQAIFRDPFRRGNNILVICDTYTPAGEPIPTNKRHDAAKVFSHPDVVAEETWYGIEQEYTLLQKDIQWPLGWPVGGFPGPQGPYYCGVGADKAFGRDIVDAHYKACLYAGINISGINGEVMPGQWEFQVGPSVGISAGDEVWAARYILERITEIAGVVVSFDPKPIQGDWNGAGAHTNYSTKSMRNDGGYEVIKTAIEKLGKRHKEHIAAYGEGNERRLTGRHETADINTFLWGVANRGASVRVGRDRESREGIF

SEQ ID NO: 45829 - protein, 685 aa, Glycine max
  Clone ID: 700910011_FLI.pep
FHNTSTITMKLFHYLFSLLTLLFLFQAKEGVSISPLQLITHPLDPLTKQEITLVQATVLKKYPTPPNHVFFHYVGLDDPDKTHVLKWASSGTKTPPQRSAFVVAIVNNSQIHELIINIKSSNVVSYKIHLDTGFPTLTLEEQSLAISLPLKYGPFVESINKRGLNLSEVVCSCFTVGWYGEAKSTRALRLECFSKNGTANIYVRPISGINILADLDTMKIVEYHDNVVEPVPKAENTEYRASHLKPPFSPRLHSFASHQPEGPGFTIKGHSISWANWKFHIGYDVRAGVIISTASIYDPEVHKSRQVLYRGYISELFVPYQDPGEEWYYKTFFDAGEFGFGQSMVSLEPLHDCPPQAQFLDVYFAASDGSPQHLENAICVFEQYGGISWRHTESGIPNEQIREVRSDVSLIVRSVVTVGNYDNVIDWEFKPSGSIKPSISLSGILEIKAVDITHTDQIKDDQHGTLVSEHSIGVYHDHYYIYHLDFDIDGVDNSFVKTNFKTVQVTDYNSSKRKSYWTTSSEVAKTESDAKTKLGFSPSEIVIVNPNKKTSTGNEVGYRLVPNAASHPLLREDDYPQRRGAFTNYNVWVTPYNKTEKWAGGLFVDQSHGDDTLAVWTKQNRGIENKDIVLWYVVGIHHVPCQEDFPIMPLLSTGFELRPTNFFERNPVLKTLSPDIVKWPGCGKP

SEQ ID NO: 45830 - protein, 213 aa, Glycine max
  Clone ID: 700952272_FLI.pep
HNKANGEGGKDGSNDNFSWNCGFEGETDDASIRALRSRQMKNFHLALMISQGTPMMLMGDEYGHTRYGNNNSYGHDTAINNFLWDQLDARKSDHFRFFSKVIKYRHAHEVFSRENFLNTNDITWHEDNWENPDSKFLAFTLHDRSGGDIYVAFNSHDYFVKVLLPTPPKKRNWFRVADTNLKSPDDFVLDGVPSVGNTYNIAPYSSILLEAKF

SEQ ID NO: 45831 - protein, 377 aa, Glycine max
  Clone ID: 700952325_FLI.pep
SIDDARLCKPGTLDPTKVKGKILVCLRGNKLTSASEGEQGKLAGAVAVLVQNDDPSDNLLLAENHVLPAASISGTGSHNIKNGTGNNGNNKEILAYLSAAETYIGVKPAPIIAGFSSRGPSSVQPLILKPDITAPGVNVIAAFTQGAGPSNLPSDRRRSLFNVQQGTSMSCPHVAGIAGLLKTYHPTWSPAAIKSAIMTTATTLDNTNQPIRNAFHKVATPFEYGAGHIQPNLAIDPGLVYDLRTTDYLNFLCASGYNQALLNLFAKLKFPYTCPKSYRIEDFNYPSITVRHPGSKTISVTRTVTNVGPPSTYVVNTHGPKGIKVLVQPSSLTFKRTGEKKKFQVILQPIGARRGLFGNLSWTDGKHRVTSPITILP

SEQ ID NO: 45832 - protein, 238 aa, Glycine max
  Clone ID: 700954523_FLI.pep
IFTMELNASYDVEHSHSTQRIQHELWPLDPIDPKKAKFPCCLVWNPLPVVSWLAPFIGHVGICREDGVVLDFSGSYLVNVDDFAFGPVARYLQLDRRQCCFPPNLSAHTCKHGYLHAEYGTAIAWDDALQTSLRYFENKTHNLFTCNCHSFVANCLNRLCYGGSMNWNMVNVGALVIFKGHWVDFRSIVRSFLPFVVVVCLGVFMVGWPFLLGLLSFSLLLIGWFLLGTCLFRNLLEC

SEQ ID NO: 45833 - protein, 401 aa, Glycine max
  Clone ID: 700954640_FLI.pep
LGDVKPRISEESNDKSKIWKLTEINEQSQCRSLKLPENVRVTKISRLIYTNSGNAILALASNAIHLLWKWQRNERNSSGKATATLQPQLWQPSSGILMTNDIADSNPEDAVPCFALSKNDSYVMSASGGKISLFNMMTFKTMTTFMPPPPAATFLAFHPQDNNIIAIGMDDSSIQIYNVRVDEVKSKLKGHNKRITGLAFSHVLNVLVSSGADAQICVWNTDGWEKQKSRFLQLPSGRTPPAQSDTRVQFHQDQIQFLVVHETQLAIYEATKLEGLKQWFPRDSSAPISYATFSCDSQLVYASFLDATICVFSASNLRLRCRINPSSYLPASVSSNTQPLVIAAHPQEPNQFAVGLSDGGVHVFEPLESEGKWGVPPPIENGSASNVAAASVGPSPDQAQR

SEQ ID NO: 45834 - protein, 274 aa, Glycine max
  Clone ID: 700959087_FLI.pep
DSSLSLLSLSLELRPPSASFFLSCSAIAASSSNKSSLLVNPNTAATRGVRLKLRSAMAAATRTSLRFLLSVSVTLTLAHLAASNSEGDALYTLKRSLSDPDNVLQSWDPTLVSPCTWFHVTCNQDNRVTRVDLGNSNLSGHLVPELGKLEHLQYLELYKNNIQGTIPPELGNLKSLVSLDLYNNNISGTIPPSLGKLKNLVFLRLNDNRLTGPIPKELAAVSSLKVVDVSNNDLCGTIPTSGPFEHIPLNNFENNPRLEGPELLGLVSYDTNCS

SEQ ID NO: 45835 - protein, 371 aa, Glycine max; identical to SEQ ID NO: 44221
  Clone ID: 700959345_FLI.pep

SEQ ID NO: 45836 - protein, 97 aa, Glycine max
  Clone ID: 700959943_FLI.pep
VILSSDLCHDRCACMAGQKMLIKKVLLVWGEIARGLPGVSSSCVVWCLLCSPFRYAFYYYLSVAPLRITTLDQRIHQRIRSNPYRVRYYLSIYIRKG

SEQ ID NO: 45837 - protein, 592 aa, Glycine max
  Clone ID: 700963303_FLI.pep
SNMTEERNVRKTRVVDVVLDCVIPYIDDPKDRDAVSQVCRRWYELDSLTRKHVTIALCYTTTPARLRRRFPHLESLKLKGKPRAAMFNLIPEDWGGHVTPWVKEISQYFDCLKSLHFRRMIVKDSDLQNLARDRGHVLHALKLDKCSGFTTDGLFHIGRFCKSLRVLFLEESSILEKDGEWLHELALNNTVLETLNFYLTDIAVVKIEDLELLAKNCPNLVSVKLTDCEILDLVNFFKHASALEEFCGGTYNEEPERYSAISLPAKLCRLGLTYIGKNELPIVFMFAAVLKKLDLLYAMLDTEDHCMLIQRCPNLEVLETRNVIGDRGLEVLGRCCKRLKRLRIERGDDDQGMEDEEGTVSHRGLIALSQGCSELEYMAVYVSDITNASLEHIGTHLKNLCDFRLVLLDHEEKITDLPLDNGVRALLRGCDKLRRFALYLRRGGLTDVGLGYIGQYSPNVRWMLLGYVGESDAGLLEFAKGCPSLQKLEMRGCLFFSERALAVAATQLTSLRYLWVQGYGVSPSGRDLLVMARPFWNIELIPSRKVATNTNPDETVVVEHPAHILAYYSLAGQRSDFPDTVVPLDTATCVDT

SEQ ID NO: 45838 - protein, 621 aa, Glycine max; identical to SEQ ID NO: 45693
  Clone ID: 700964002_FLI.pep

SEQ ID NO: 45839 - protein, 341 aa, Glycine max
  Clone ID: 700941569_FLI.pep
GFEAYFRKKNSRFSELVVLVFVLLKCKAMDPDQGSSKARKLKFKPRNLKPVRTPKTEADDKQKEDSAVPRALSRRQENPTKREPKVETKSSVEVAFSLGSSSHSLRTYGISKSVDSGSPSKYFANEQIRSRHSSVATEDQNYACMIEVTDDDDDTTDASARKIKREYKEPWDYENSYYPTTLPLRKPNSGDPEILDEKEFGEAASSAEYDENTVNSAAELGLLKKSQQQRMLFFKFPTLPLVKQTNKGKEKIGKSTVSQEATKSKSALEELPRGYMGKMLVYKSGAIKLKLGETMFDVSPGSNSVSVQDIVAVNTAQKQCCNLGELRKRVVVVPDLDSIEL

SEQ ID NO: 45840 - protein, 416 aa, Glycine max
  Clone ID: 700943173_FLI.pep
QTLWLVDMDSNSKAILDYALFQLTPTRTRCELLVFRGGVHQKIASGLFEPFVSHLKFLKDEISKGGYSIKLLPPNHGGFWFTRATFERFVRFVSTPAILERFVSLENEILQIRSSFQANAFSMSVATPDEGSVPQANGITRRLSDSTKLNDVLEGVDNKEENSKVSLHRLLESRIALLRKEQAMAYTRGLVAGFEIDSIDDLIYFANAFGAARLSEACMNFKELWKKKHADDLWIKEVAAMQSSLPPALSLSGSSGIILANDITTHNSSRDSIASGDENVSLETLNSALNKKEDVNLPTADHKLSHTANVNMPMPWPYNVPPYMYNLQNPQMPSYQGYPMTNMQSVPPYLVPNMQWSPDLGVNQKPSETKRDKSHKKRAEEYQDQQTESSDPDSGSESDSDKQNHSSHSSKDDLKR

SEQ ID NO: 45841 - protein, 355 aa, Glycine max
  Clone ID: 700943251_FLI.pep
SSRNVTGDVQLFRSIDGGAAFGFPETPEDAARAGLISGKDNIIDRSIQDAYINAIRRAKNFIYIENQYFLGSSFAWSADDIKPADIGALHLIPKELSLKIVSKIEAGERFAVYVVVPMWPEGVPESASVQAILDWQKRTMEMMYRDIIQALRAKGIEEDPRNYLTFFCLGNREVKKPGEYEPSEQPDPDSDYQRAQEARRFMIYVHTKMMIVDDEYIIVGSANINQRSMDGARDSEIAMGAYQPYHLATRQPARGQIHGFRMSLWYEHLGMLHDSFLQPESEECINKVNQVADKYWDLYSSESLEHDLPGHLLRYPIGIASEGDVTELPGFEFFPDTKARILGGKADYLPPILTT

SEQ ID NO: 45842 - protein, 365 aa, Glycine max
  Clone ID: 700966775_FLI.pep
ENLRKVDGDDNTCIIVGKVVVTKNPCLHPGDIRVLDAIYSEELEEKGLRDCLVFPQKGHRPHPNECSGGDLDGDLFFISWDKDLIPCQTEAPMDYTGRRPRIMDHKVTLEEIQQFFVDYMINDTLGAISTAHLVHADREQDKAKSRKCLELAELHSMAVDFAKTGAPAAMPRVLKPREFPDFMERVDKPMYISKGVLGKLYRAIIESQMQIRYSFVWSEKHAEEAYDRSLEVNGFEAFLETASTHKEMYAEKMSSLMDFYGAETEDEMLLGNLQNRASYLQRDNRRYGDMKDRILLSVKNLQREAKEWFETSCEPHEYKPMASAWYHVTYHPSYYCRESPCFLSFPWIVGEILLQIRSVSKGVHK

SEQ ID NO: 45843 - protein, 370 aa, Glycine max
  Clone ID: 700967375_FLI.pep
GGLINSLVMAESRANHTVSVFGWAAHDSSGKITPYSFKRRQNGVNDVTIKILYCGICHTDLHCAKNEWGITMYPVVPGHEIIGEVTKVGTNVKGFMEGDRVGVGCLAASCLECHHCKTDQENYCQDLQFVYNGIFWDGTITYGGYSQIFVADYRYVVHIPASLPMDAAAPLLCAGITVFSPLKEHDLVATAGKRIGVVGLGGLGHIAVKFGKAFGHHVTVISTSPSKEPEAKQRLGADHFILSSNPKQLQAARRSMDFILDTVSAEHSLLPILELLKVNGTLFLVGAPDKPLQLPAFPLIFGKRSVKGGIIGGIKETQEMLEVCAKYNITSDIELITPDKINEAMERLAKNDVRYRFVIDIANAVTSNNN

SEQ ID NO: 45844 - protein, 273 aa, Glycine max
  Clone ID: 700975691_FLI.pep
NTINQPLHSLSLSLAMAAIVFIHIASLVSLFVATSARIPGVYTGGPWQSAHATFYGGSDASGTMGGACGYGNLYSQGYGVNTAALSTALFNNGLSCGACFEIKCDQDPRWCNPGNPSILITATNFCPPNFALPNDNGGWCNPPRPHFDLAMPMFLKIAQYRAGIVPVAYRRVPCRKAGGIRFTINGFRYFNLVLITNVAGAGDIVRVSVKGSKTAWMSMSRNWGQNWQSNAVLVGQALSFRVTGSDRRTSTSWNVAPPNWQFGQTFTGKNFRV

SEQ ID NO: 45845 - protein, 276 aa, Glycine max
  Clone ID: 700976529_FLI.pep
SKLASDYRPFEAKRKLCDSYDLFFAEKSIVPLLPRLLGKSFFKKRKIPVPVDLKKGSWKEQVERACSSAMLFMRTGTCSVVRVAKVRMERDEIVENVVAAIEGIVEVVPKKWGNVRSLHLKLLESVALPVYQTVPDVKLKIEGFKVEEKKNEKERDGEVSDSIEGGTEKKKKKKGRIHEVRYMDENVVEAGMEDELASDDDDSEDEMVSKKRKKGVSSELSGVEQLKKLVFNELSANGKKKSKKGCLSVGKGVKGGLIEGSGSELVVKDEESGVKK

SEQ ID NO: 45846 - protein, 425 aa, Glycine max
  Clone ID: 700979537_FLI.pep
FEARQAPLNHHTSPRSRYPFLLFFYLSSFKSIKMAETFLFTSESVNEGHPDKLCDQISDAVLDACLEQDPDSKVACETCTKTNLVMVFGEITTKANVDYEKIVRDTCRNIGFVSNDVGLDADNCKVLVNIEQQSPDIAQGVHGHLTKKPEEIGAGDQGHMFGYATDETPELMPLSHVLATKLGARLTEVRKNGTCPWLRPDGKTQVTVEYYNDNGARVPIRVHTVLISTQHDETVTNDEIAADLKEHVIKPVIPEKYLDEKTIFHLNPSGRFVIGGPHGDAGLTGRKIIIDTYGGWGAHGGGAFSGKDPTKVDRSGAYIVRQAAKSIVASGLARRCIVQVSYAIGVPEPLSVFVDTYGTGKIHDKEILNIVKENFDFRPGMISINLDLKRGGNNRFLKTAAYGHFGREDPDFTWEVVKPLKWEKA

SEQ ID NO: 45847 - protein, 361 aa, Glycine max
  Clone ID: 700980082_FLI.pep
LQYPFYTEGSKALLDARIYIAKYSLTRAALRIQRAQRRRDDPDEDMDAEMNWALKQAGNLSLEFSEIGDDRPLSGCSFSRDGKWLATCSLTGASKLWSMPKIKKHSSFKGHTERATDVAYSPVHDHLATASADRTAKYWNQGSLLKTFEGHLDRLARIAFHPSGKYLGTASFDKTWRLWDIETGDELLLQEGHSRSVYGLAFHNDGSLAASCGLDSLARVWDLRTGRSILALEGHVKPVLGISFSPNGYHLATGGEDNTCRIWDLRKKKSFYTIPAHSNLISQVKFEPQEGYFLVTASYDMTAKVWSGRDFKPVKTLSGHEAKVTSVDVLGDGGYIVTVSHDRTIKLWSSNTTDEQAMDVD

SEQ ID NO: 45848 - protein, 463 aa, Glycine max
  Clone ID: 700983044_FLI.pep
SNKVSTMREILHVQGGQCGNQIGSKFWEVICDEHGIDPTGKYTGDEASDLQLERINVYYNEASGGRYVPRAVLMDLEPGTMDSIRSGPYGKIFRPDNFVFGQSGAGNNWAKGHYTEGAELIDSVLDVVRKEAENCDCLQGFQVCHSLGGGTGSGMGTLLISKIREEYPDRMMLTFSVFPSPKVSDTVVEPYNATLSVHQLVENADECMVLDNEALYDICFRTLKLTTPSFGDLNHLISATMSGVTCCLRFPGQLNSDLRKLAVNLIPFPRLHFFMVGFAPLTSRGSQQYVSLTVPELTQQMWDAKNMMCAADPRHGRYLTASAMFRGKMSTKEVDEQMINVQNKNSSYFVEWIPNNVKSSVCDIPPKNLKMSCTFIGNSTSIQEMFRRVSEQFTAMYRRKAFLHWYTGEGMDEMEFTEAESNMNDLVAEYQQYQDATADEDEYDDEDEYDDEDEDGEHAFEDQ

SEQ ID NO: 45849 - protein, 270 aa, Glycine max
  Clone ID: 700983262_FLI.pep
HCWIYLKYQQQHHKNYSEESTLIVDSSDVKNDLMPAIMVKGKDEFSNHFTSSFDGNASLLIDKAQQEKANSHMQPIGGPKLSSSSKKRTRVGNNQKSRPRDRQLIMDRMKELRELVPEGGRCSIDNLLERTIKHMLYLRKITSQAEKLKRIANRAVPECKRQKVNASHPGRSCAFDFESEVSWPIVIEDLECSGHMLIEMICNEHGLFLEIAQVIRKLDVIILKGILENCSSNSWACFIVEVPRGFHRMDVLCPLLHLLQLRRNPVSCKS

SEQ ID NO: 45850 - protein, 256 aa, Glycine max
  Clone ID: 700983655_FLI.pep
VDEGITGYRDDSLETVHRNQIQYGLPLKVVSYKDLYGWTMDEIVRVIGLKNNCTFCGVFRRQALDRGASLLKVDKVVTGHNADDIAETVLLNLLRGDVARLSRCTSITTGEDGPIPRCKPFKYTYEKEIVMYAYFKKLDYFSTECIYSPNAYRGFAREFIKDLERIRPRAILDIIKSGENFRISTSTKMPEQGTCERCGYISSQKWCKACVLLDGLNRGLPKLGIGRSRGSVASDNGNESKVEKSIQGKQCTTLDF

SEQ ID NO: 45851 - protein, 515 aa, Glycine max
  Clone ID: 700986559_FLI.pep
LYYFLLQLSSTTSTSTINMASSLATILVALPQTPQCRSTFRSDPPKLSLTLKPKATVTCKATLSTTLETSIQQQQQQDDQKQKPVAEVWRKIHGEDNWAGLLDPMDPVMRGELTRYGEMAQACYDAFDFDPYSKYCGSCRFPLPEFFDSLGMTNVGYTMTRYLYATANINLPNFFRKSRWPHKMWSKHANWAGFIAVSDDETSKRLGRRDIVISWRGTVTHVEWVADLLNFLKPISPDIPCSDRKVKVEAGFLDLYTDREPGCGYCKYSAREQVLGEVKRLMEKYADEEVSVTIAGHSLGSAMAILSAFDIVETGVNVGKDGRKAHVSVFSFSGPRVGNVRFKERLEGELGIKVLRVHNAHDMVPQSPGLIFNEDSPQWLLKLVEGWFPWCYLHVGEELQLDHKKSPFLNPDGDASCAHNLEAHLHLLDGYHGKNRGFERTSERDLALVNKDCDFLKDEHSVPPRWRQDLNKNMVRTEDGRWVLADRPLAQDPHEDIDHHLGELGLASSHTHTHN

SEQ ID NO: 45852 - protein, 417 aa, Glycine max
  Clone ID: 700986621_FLI.pep
AIEAYTDVIKRDMADESSIAVAVNNLVSLKGPKDVSDSLRKLDRLKDKENQSFRLAPGLDLKLSAKEKEAIYANRVLLLLHANKNEQARELVSALPDMFPESVIPIFLQAALLVRENKAGRAEEILAQFASKFPDKSKVVHLARAQVAAAAGHPHIAADSLTKISDIQHMPATVATLVSLKERAGDIDGAAAVLDNATKWWSNAMTEDNKLNTITQEAALFKLRHGKEEEAAQLYEQLVKSQGSIEALVGLVTTVARMDVAKAELYEKQLNALPGLKGIDVDSLERTSGVKQVDAPRVGVAETYEEGKNKTKSKKKRKRKPRYPKGFDPANPGPPPDPERWLPKRERSTYRPKRKDKRAAQVRGSQGAVVRDKHDTGASSNSSNLNQTREPPKELRRMQFPSKPSLHPSQERNRGIK

SEQ ID NO: 45853 - protein, 423 aa, Glycine max
  Clone ID: 700986653_FLI.pep
LMILVDDAGEQWPMIGHAPWNGCNLADFVMPFFLFIVGMAIPLALKRIPNRLLAVKKVIVRTLKLLFWGLLLQGGFSHAPDNLTYGVDMKHIRWCGILQRIALAYLVVALVEIFSRSTQARDPEPTHLSIFNLYYWHWLVGACILVVYLALLYGIHVPDWGFTVHNPDSIYNGTTLTVTCGVRGKLDPPCNAVGYIDREVLGINHMYKRPAWRRSEACTENSPYEGPFKKNAPSWCYAPFEPEGILSSISAILSTIIGLHFGHVLIHLQDHPSRLKHWLLLGLALLTSGLILHFTHAIPLNKQLYTLSYVCVTSGAAALLFSAFYITVDIWGLTFLFLPLKWIGMNAMLVYVMAAEGIFAGFINGWYYGDPHNTLIYWIQKHVFIKVWHSTRVGILLYVILAEILFWAVVAGILHRLGIYWKL

SEQ ID NO: 45854 - protein, 305 aa, Glycine max
  Clone ID: 700986706_FLI.pep
PNHMEPSKNNAQSKEDDTVALRRKRARRVSFADNEITSVHVFRRDDDDDSTSSPSEPPSSSDPSILGFFRDLASDSDDDEQPKLEDEAEAAANSFLRPVGSPSPGGSITADYDDDDDFGGPVSAHFVRPDRLSDSGVLEDITMDSTAFSLHYQSLAGSDSGDIKTRQFVRLGTPSSQGSYMELTEATKRPAEVVLDANSAGKDSNDMSIEVDHQMSFGYDIPSPAFDAAAAILAEGAPKESPHHSLEGSVISPVTHLHQIQPSDSSIKENKEFNVVKSRRKWVTSFLIVKGLCPCGGNPWGGSGL

SEQ ID NO: 45855 - protein, 513 aa, Glycine max
  Clone ID: 700987224_FLI.pep
MKTQSASLLCLFLSLAILLASGTAASATPRSAVPSHHVSTFNRSLFPSTFLFGIGSSAYQAEGAASVDGRGPSIWDTYTRQHTEKIWDHSTGDMGADFYHRYKGDIKIAKEIGLDSFRFSISWSRIFPKGKGAVNPLGVKFYNNVIDEILANGLKPFVTLFHWDFPQALEDEYGGFRSPKVVADFRGYANFCFKTFGDRVKYWVTLNEPLSFSLNGYNGGTFAPGRCSKYVANCSAGDSSTEPYIVGHYLLLAHESAATLYKTKYQARQKGQIGITNPTHYFLPKSQSAADYKAASRALDFFFGWYSDPVFYGDYPESMKSSVGSRLPKFTKAESEGLKNSIDFLGVNYYTTYYAEHAEPVSANRTFYTDILASLSTERNGLHVGTPTDLNWLFIFPKGIHLLMAHIKDKYKNLPIYITENGMAESRNDSIPVNEARKDSIRIRYHDGHLKFLLQAIKEGVNLKGYYAWSFSDSFEWDAGYTVRFGLIYVDYKNNLKRYPKFSAFWLQKFLLK

SEQ ID NO: 45856 - protein, 210 aa, Glycine max
  Clone ID: 700991095_FLI.pep
MAMATQASLLTPPLSGLKASDRASVPWKQNSSLSFSSPKPLKFSRTIRAAAADETTEAPAKVEAAPVGFTPPELDPNTPSPIFGGSTGGLLRKAQVEEFYVITWDSPKEQIFEMPTGGAAIMREGPNLLKLARKEQCLALGTRLRSKYKIKYQFYRVFPNGEVQYLHPKDGVYPEKVNAGRQGVGQNFRSIGKNVSPIEVKFTGKQPYDL

SEQ ID NO: 45857 - protein, 94 aa, Glycine max
  Clone ID: 700991287_FLI.pep
RTGRSIYHYFGSWFHLVKRIPLRQMPSMTQLRQIRSLISLLRVTMQGYITLITPGYGAIVVSLICTGIGEAINKVEMLAKIWGLNYPLKPWSLH

SEQ ID NO: 45858 - protein, 267 aa, Glycine max
  Clone ID: 700991695_FLI.pep
VEARGNPIEKGFISFSLQLFSFPVFVVQFRCCVVCCNTIGGLRNLVCVGFVMARRAEEEYDYLFKVVLIGDSGVGKSNLLSRFTRNEFCLESKSTIGVEFATRTLQVEGRTVKAQIWDTAGQERYRAITSAYYRGALGALLVYDVTKPTTFENVSRWLKELRDHADANIVIMLIGNKTDLKHLRAVATEDAQGYSEKEGLSFIETSALEATNVEKAFQTILAEIYRIISKKSLSSNEPASANIKEGMTITVGGPQSNTSKPSCCTSS

SEQ ID NO: 45859 - protein, 136 aa, Glycine max
  Clone ID: 700992220_FLI.pep
RKAVDNESNLHHLILSKAATNAVMETVDPDITATCKDLGAVKKVYQLALLCTKRQPADRPTMHEVTRVLGSLVPSSIPPKQLADLPPASNPSAKVPCYVDEYANLKTPHLVNCPSMSTSDAQLFLKFGEVISQNSE

SEQ ID NO: 45860 - protein, 342 aa, Glycine max
  Clone ID: 700995752_FLI.pep
ENPKALGRLRSACEKAKRILSSSSQTTIELDSLCGGVDLHANFSRALFEELNKDLFMKCMETVEKCLKEARIAKSQVHEFVLVGGSTRIPKVQQLLKDMFSVNGNKELCKSINPDEAVAYGAAVQAAILSGEGDKKVEDLLLLDVMPLSLGIETDGGEMSVLIPKNTMIPTKRESVFSTFSDNQTSVLIKVFEGERAKTEDNFLLGKFELSGFTPSPRGVPQINVGFDVDVDGIVEVTARDRSTGLKKKITISNKHGRLSPEEMRRMVRDAVRYKAEDEEVRNKVRIKNLLENYAFEMRDRVKNLEKVVEETIEWLDRNQLAETDEFEYKRQELEEKVLKFM

SEQ ID NO: 45861 - protein, 434 aa, Glycine max
  Clone ID: 700996295_FLI.pep
NNRRQFTSPSNFHADGVNDLFSSQAVIENTRANEILKQAPFLIPFTSRVKIFSSQLAAVRQRHGPQAVFSRNRFRIQRDHILEDAYNQMSQLTEDSLRGSIRVTFVNEFGVEEAGIDGGGIFKDFMENITRAAFDVQYGLFKETADHLLYPNPGSGMIHEQHFQFFHFLGTLLAKAMFEGILVDIPFATFFLSKLKQKHNYLNDLPSLDPELYRHLIFLKHYKGDISELELYFVIVNNEYGEQTEEELLPGGRNLRVTNENVITFIHLVANHRLNFQIRQQSSHFLRGFQQLMQKDWIDMFNEHELQLLISGSLDSLDIDDLRLHTNYAGGYHNEHFVMEMFWEVLKGFSLENRKKFLKFVTGCSRGPLLGFRYLEPMFCIQRASGNAVEESLDRLPTSATCMNLLKLPPYTSKEQLETKLLYAINADAGFDLS

SEQ ID NO: 45862 - protein, 373 aa, Glycine max
  Clone ID: 700953566_FLI.pep
LLIEGNHVRLSGQDVERGTFSHRHAVVHDQTTGEKYCPLDNVIMNQDEEMFTVSNSSLSEFGVLGFEFGYSMENPNSLIIWEAQFGDFANGAHVIFDNFLASGEAKWLRQTGLVVLLPHGYDGQGPEHSSARLERFLQMADDNPHVIPEMDPTLRKQIQECNLQIVNVTTPANFFHVLRRQVHREFRKPLIVMSPKNLLRSKACRSNLSEFDDVQGHPGFDKQGTRFKRLIKDQNEHKDVEEGIRRLVLCSGKVYYELDEHRTKVDAKDVAICRVEQLCPFPYDLVQRELKRYPNAEVVWCQEEPMNMGGYTYILPRLISSMKAVNRGGYDDVKYVGRAPSAATATGFLKVHQKEQTEIAEKALQQEPIDFPF

SEQ ID NO: 45863 - protein, 287 aa, Glycine max; identical to SEQ ID NO: 44183
  Clone ID: 700953611_FLI.pep

SEQ ID NO: 45864 - protein, 266 aa, Glycine max
  Clone ID: 700957594_FLI.pep
VVKKMKVLVFFVAIVLAAWHCHGSDHDHDHGHTYQIFPLRMKTGHGGHYIPEVSCQSWRLGVEAHNVIDWKTVPQDCEGYIGNYMLGEQYRSDSKIVNQQAYFYAKTLNITAKTAWVFDIDETTLSNLPYYADHGFGVELYNETSFNKWVDLGEAPALPESLKLYKKLLSLGIKIVFITGRPLDQKAVTATNLKLAGYHTWEKLITKNTSEYHGKTAVTYKSTERKKLEEKGYKIIGNIGDQWSDLLGTNTGDRTFKLPDPMYYIS

SEQ ID NO: 45865 - protein, 278 aa, Glycine max
  Clone ID: 700957611_FLI.pep
RRSKIGSYGEVYHADWNGTEVAVKKFLDQDFSGAALSEFKREVRIMRRLRHPNIVLFMGAVTRPPNLSIISEYLPRGSLYRILHRPNCQIDEKRRIKMALDVARGMNCLHTSTPTIVHRDLKSPNLLVDKNWNVKVCDFGLSRLKHNTFLSSKSTAGTPEWMAPEVLRNEPSNEKCDVYSFGVILWELATLRLPWSGMNPMQVVGAVGFQNRRLDIPKEVDPIVARIIWECWQQDPNLRPSFAQLTVALKPLQRLVIPSYQDQLAPPMPQEISVNSTP

SEQ ID NO: 45866 - protein, 166 aa, Glycine max
  Clone ID: 700957709_FLI.pep
RVDTLIDKALEKIGTPVALNLRGKAAVAQAALAYQLYQRKFSGPRWEALVKKGAKKQRLLWASTSVKNPAYSDTLYVAPLIGPDTVSTMPDQALQAFIDHGTVSRTIDSNASEAEGIYNALQKLGIDWSFVGSQLELEGVDSFKKSFDSLLDSLQEKANSLKLVSH

SEQ ID NO: 45867 - protein, 355 aa, Glycine max
  Clone ID: 700961244_FLI.pep
SERRLCDRVFFGFASAADFSFMEVCRGSAIQLLNFADAVAIGSRSPERLFRILDVFETLRDLFPEFEALFSDQFSVSLRNEAITIWKRLGEAIRGIFMELENLIRRDPAKIAVPGGGLHPITRYVMNYLRAACRSRQSLEQVFEDYGLKEYPKLDDRVPSSSSLSVQMDWIMELLESNLEAKSKIYKDPALCYIFLMNNGRYIVQKTKDSELGTLLGEDWIRKHAAKVRQFHVHYQRSSWNKLLGILKLDSNGSMPHINLAKSMKEKLKSFNTVFEEICKEQSSWFVFDEQLREEIRISLEKILLPAYVNFVARFQSVPELGKHADKYIKYGTEEIQARLNGLFQGSSGSTGSRK

SEQ ID NO: 45868 - protein, 298 aa, Glycine max
  Clone ID: 700962035_FLI.pep
ISKGLLDKYGPERVLDTPITEAGFTGIGVGAAYYGLRPVVEFMTFNFSMQAIDHIINSAAKSNYMSAGQISVPIVFRGPNGAAAGVGAQHSQCYASWYGSCPGLKVLSPYSSEDARGLLKAAIRDPDPVVFLENELLYGESFPVSAEVLDSSFCLPIGKAKIEREGKDVTITAYSKMVGFALKAAETLAKEGISAEVINLRSIRPLDRSTINTSVRKTNRLVTVEEGFPQHGVGAEICTSVIEESFGYLDAPVERIAGADVPMPYAANLERMAVPQVEDIVRAAKRACYRSVPLAASA

SEQ ID NO: 45869 - protein, 236 aa, Glycine max
  Clone ID: 700942655_FLI.pep
VASQRARDFFVGWIMEPLQYGDYPISMKTNAGERIPAFTNHESKQVKGSFDFIGVIHYTNLNVSDNSDALKNQLRDFTADMAANIFGEDLFSNEEYLITPWGLRQELNKFKLLYGNPPIFIHENGQRTASNSSLQDVTRVKYLHGYIGSVLDALRDGSNIKGYFAWSFLDLFELLDGYKSSFGLYYVDRDDPELKRYPKLSAKWYNRFLKGRRTSIVGTIELEKDPSLVFVSQLFE

SEQ ID NO: 45870 - protein, 519 aa, Glycine max
  Clone ID: 700942707_FLI.pep
LEWSGCNNNSTNFQLEIDVLCKLQPHFNIESLRIKGYKGTRFPDWMGNSSYCNMMSLKLRDCDNCSMLPSLGQLPSLKVLKIARLNRLKTIDAGFYKNEDCRSGTPFPSLESLFIYEMPCWEVWSSFDSEAFPVLKSLKIRDCPKLEGSLPNHLPALTELVIRNCELLVSSLPTAPAIQSLEISKSNKVALHAFPLLLETIEVEGSPMVESMIEAITNIQPTCLRSLTLRDCSSAVSFPGGRLPESLKTLHIEDLKKLEFPTQHKHELLETLSIQSSCDSLTSVPFVTFPNLRALAIRNCENMEYLLVSGAESFKSLCSLEIYECPNFVSFWREGLPAPEVRGSDKLKSLPEEMSTLLPKLECLSISHCPEIESFPEGGMPPNLRTVWIFNCEKLLSGLAWPSMGMLTHLSVGVRCDGIKSFPKEGLLPPSLTSLKLYKFSNLEMLDCTGLLHLTSLQQLTIERCPLLENMVGERLPDSLIKLTIWECPLLEKRCRMKHPQIWPKICHIPGIKVDDRWI

SEQ ID NO: 45871 - protein, 516 aa, Glycine max
  Clone ID: 700944627_FLI.pep
KVVLGSIAFAIFWVLAVFPAVPFLPIGRTAGSLLGAMLMVIFKVLSPDQAYAAIDLPILGLLFGTMAVTTFLERANMFKYLGKLLSWKSKGPKDLLCRICLISAISSAFFTNDTSCIVLTEFVLKIARQHNLPPYPFLLALATSANIGSSATPIGNPQNLVIAIQGKISFGRFLMGILPAMLVGVVVNVVFLIAMYWKVLSCPKDEEDPISEIVVEEEVVSHQFSPARMSHFTSFNSQECNGSVDQSTPSESEVQMIHRSTKDSTKNSNASKEGTNDTKEEINNPSKNVAIVVDKPIEAHVILSSEEKDYMNNKWKRVLWKSCVYAITLVMLIAMLIGLNMAWTAIAAAITLVVLDFKDAGPSLEKVSYALLVFFCGMFITVDGFKSTGIPSAMWDLMEPYSRIDHASGTAILAVVILVLSNLASNVPTVLLLGARVAASAAAISKGDEEKAWLILAWVSTIAGNLSLLGSAANLIVCEQARRAPNLGYTLTFWTHLKIGLPSTLIVTAIGLTLIK

SEQ ID NO: 45872 - protein, 379 aa, Glycine max
  Clone ID: 700944981_FLI.pep
IPFPYRPLHSPQEATVMTSLPLIQPESMEAEPSIPSDSLRAQISKFSTMLTEAHKRKPIHYWILLVLSILAMLVAFPASSILSRVYYDNGGQSKWIISWVAVAGWPLTALILFPVYFISKTFPTPLNLKLSLSYIVLGFLSAADNLMYAYAYAYLPASTASLVASSSLVFSALFGYFLVKNKVNASIVNSVFVITAALTIIALDSSSDRYPSISDSEYIMGFVWDVLGSAFHGLIFALSELVFVKLLGRRSFIVVLEQQVMVSLFAFLFTTVGMIVSGDFQGMAHEATTFEGGRSAYYLVIIWGAITFQLGVLGGTAIIFLGSTVLAGVLNAVRTPITSIAAVILLKDPMSGFKILSLVITFWGFGSYIYGSSMGEKSS

SEQ ID NO: 45873 - protein, 399 aa, Glycine max; identical to SEQ ID NO: 43897
  Clone ID: 700998652_FLI.pep

SEQ ID NO: 45874 - protein, 421 aa, Glycine max
  Clone ID: 701001311_FLI.pep
QAPLNHHTSPRSRYPFLLFFYLSSFKSIKMAETFLFTSESVNEGHPDKLCDQISDAVLDACLEQDPDSKVACETCTKTNLVMVFGEITTKANVDYEKIVRDTCRNIGFVSNDVGLDADNCKVLVNIEQQSPDIAQGVHGHLTKKPEEIGAGDQGHMFGYATDETPELMPLSHVLATKLGARLTEVRKNGTCPWLRPDGKTQVTVEYYNDNGARVPIRVHTVLISTQHDETVTNDEIAADLKEHVIKPVIPEKYLDEKTIFHLNPSGRFVIGGPHGDAGLTGRKIIIDTYGGWGAHGGGAFSGKDPTKVDRSGAYIVRQAAKSIVASGLARRCIVQVSYAIGVPEPLSVFVDTYGTGKIHDKEILNIVKENFDFRPGMISINLDLKRGGNNRFLKTAAYGHFGREDPDFTWEVVKPLKWEKA

SEQ ID NO: 45875 - protein, 467 aa, Glycine max
  Clone ID: 701006212_FLI.pep
WSATMSKDYLIILSLLLSTVLATASSSSSSSSLYLGKGFSHRKLSPSYHIHKTIDESYAVIFDAGSTGSRVHVYRFNQQLDLLRIGQDLELFVKTMPGLSAYAENPQDAAESLIPLLEEAEAAVPQEFHPRTPVKLGATAGLRQLEGDASDRILQAVSDMLKNRSTLNVGADAVSVLSGNQEGAYQWVTINYLLGNLGKHYSETVAVVDLGGGSVQMAYAVSETDAAKAPRAPDGVESYITEMFLRGKKYYLYVHSYLRYGMLAARAEALKVRDSENPCILAGFDGYYVYGGVQYKAKAPPSGSSFSQCQNVVVEALHVNATCSYKDCTFGGIWNGGGGAGENNFFIASFFFEVADEAGFVDPNAPNAKVRPVDFENAAKVACNTELKDLKSIFPRVKDGDVPYICLDLVYEYTLLVDGFGIDPQQEITLVRQVEYQDSLVEAAWPLGSAIEAISSLPKFEKLMYFI

SEQ ID NO: 45876 - protein, 303 aa, Glycine max
  Clone ID: 701006473_FLI.pep
DEHVLMPLVFGMSQIGTVEEGKFVYYKFSVDNVTWEKLSSGNSCVELKLESETDGGDTDLFISRHPLIFPTRHQHEWSSHDIGSKTLILSSKDKNMGAGTYSIGVYGFKGITRYKISVVVQDNFNQNVGQQASSSVSSMELDTEQCRNCKHYIPSRTIALHEAYCSRHNVVCQHAGCGVVLRIEESKNHIHCDRCDQAFQQVELEKHMKVFHEPLHCPCGIILEKEQMVEHQASVCPLRLITCRFCGDMVQAGSSAMDVRDRLRGLSEHESICGSRTAPCDSCGRSVMLKDMDIHQVAVHQKG

SEQ ID NO: 45877 - protein, 238 aa, Glycine max
  Clone ID: 701011848_FLI.pep
LSKAKDEAARLVARDFRLKSSEYRSQAARIREILENLGLAQESLPSNVVTSAQVLANVANLLNIRDTEMSSFLVAMGDISLRKTEVEEKRAEVNKESKLLLDYTRKAIARLTYLKRTLAQLEDEVAPCEAQKESWETNLQVMAAKERQYNQQCDNYKRMLDRSGYNPEVSHGILVEMAEHRKELEKKTKPILDTLRSYQDLPPDKALAALAIEDKKRQYADAEKYLEDVLQSALASSE

SEQ ID NO: 45878 - protein, 420 aa, Glycine max
  Clone ID: 701040251_FLI.pep
APLNHHTSPRSRYPFLLFFYLSSFKSIKMAETFLFTSESVNEGHPDKLCDQISDAVLDACLEQDPDSKVACETCTKTNLVMVFGEITTKANVDYEKIVRDTCRNIGFVSNDVGLDADNCKVLVNIEQQSPDIAQGVHGHLTKKPEEIGAGDQGHMFGYATDETPELMPLSHVLATKLGARLTEVRKNGTCPWLRPDGKTQVTVEYYNDNGARVPIRVHTVLISTQHDETVTNDEIAADLKEHVIKPVIPEKYLDEKTIFHLNPSGRFVIGGPHGDAGLTGRKIIIDTYGGWGAHGGGAFSGKDPTKVDRSGAYIVRQAAKSIVASGLARRCIVQVSYAIGVPEPLSVFVDTYGTGKIHDKEILNIVKENFDFRPGMISINLDLKRGGNNRFLKTAAYGHFGREDPDFTWEVVKPLKWEKA

SEQ ID NO: 45879 - protein, 332 aa, Glycine max
  Clone ID: 701040651_FLI.pep
PFLWDMVKSTFEGLKKGNHPVRSSEGTGGTYFMQDSTGQEHVSVFKPMDEEPMAVNNPKGLPNSSNGEGLKRGTKVGEGAFREVAAYLLDHPKSGPRLASGEAVGFSGVPPTVMVQCLHQEFNHPNGFASSSKHVKIGSLQKFISNDGNCEDYGPSAFPVEEVHKIAVLDIRLANADRHAGNILIKKEADGQIKLIPIDHGYCLPDKFEDCTFDWLYWPQVRQPYSPETVNYINSLDAEKDLELLKCYGWDIPLECARTLRISTMLLKKGVERGLTPYAIGSIMCRENLNKESVIEEIIGEAQDSLLPGMEESAFLEAISQIMDYHLDKLAN

SEQ ID NO: 45880 - protein, 215 aa, Glycine max; identical to SEQ ID NO: 40772
  Clone ID: 701040858_FLI.pep

SEQ ID NO: 45881 - protein, 489 aa, Glycine max
  Clone ID: 701046292_FLI.pep
IRTYTKQLLLGLEYLHKNGIMHRDIKGANILVDNKGCIKLADFGASKQVVELATISGAKSMKGTPYWMAPEVILQTGHSFSADIWSVGCTVIEMATGKPPWSQQYQQEVAALFHIGTTKSHPPIPDHLSAAAKDLLLKCLQKEPILRSSASELLQHPFVTGEHMNSLPLSSNVTENFEASSPSCAPNDDESFLFRSTVNPLDSGNKQSWGMSNDDDMCVIDDKEDFSQSDSKYKSFMSTNNIESFNPMSDPSDDWGYKFDASPELENRGVSFGTDVSYMPPDQSGDDDKGQKDFSFPGVPSLSEEDDELTESKIKAFLDEKALELKKLQTPLYEEFYNSLNTSCSPNVIESTSEDTACRKYLKLPPKSRSPSWVPISTPSKAVDNSESPGSNGRSSSTVGHVNNHSPQDIPASPLNEWKGLTVDSQQQPSSPSLSFSERQRKWKEELDQELERKREMMRQAGMGGKTSSPKDRALNRQRERTRFASPSK

SEQ ID NO: 45882 - protein, 240 aa, Glycine max
  Clone ID: 701051166_FLI.pep
KLRPKPFFCSSSIPHQKVTVSVSEGNTTQKAPSPQSKSPFFLSVIQKMFAEENGLKGDPRLQAISQAIRVVPHFPIHGIMFQDITTLLLDHKAFKDTVDIFVDRYRDTHISVVAGIEARGFMFGPSIALGIGAKFVPLRKPRKLPGEVISEKYALEYGTDCLELHVGAVQPGERAIIIDDLVATGGTMSAGVKLLERVGAEVVECACVIGVPDVKGQCRRIGKPLYVLVEPRKADKCYPD

SEQ ID NO: 45883 - protein, 179 aa, Glycine max
  Clone ID: 701057063_FLI.pep
VVSNYRAVLAWLSIIAHRNKDKNPGEKLISVSDVVMEHWATYGRNFFSRYDYEECESEGANKMIEYLRDILSKSKPGDQYGSYVLQFADDFTYTDPVDGSVVSKQGVRFVFTDGSRIIYRLSGTGSAGATVRVYIEQFEPDVSKHDVDAQIALKPLIDLAISVSKLKDFTGREKPTVIT

SEQ ID NO: 45884 - protein, 213 aa, Glycine max
  Clone ID: 701058906_FLI.pep
EVHQKYSMGSFETELMNLKATELRLGLPGCDETNEKSSSSSGSVVRSNKRSSPEPSVEESRCNSNGSSDSTTTSDHDQDSAQPEKVQVVGWPPIRSFRKNSLQQQKKVEQLQGDGGGMYVKVSMAGAPYLRKIDLKVYNSYPELLAALQSLFTCTFGEYSEREGYNGSEYAPTYEDKDGDWMLVGDVPWNMFVSSCKRLKIIKGSEAKGLGCL

SEQ ID NO: 45885 - protein, 289 aa, Glycine max
  Clone ID: 701059432_FLI.pep
HIVFLLARYMIKSSSMASIAKMLEGKVAIITGGASGIGAATAKLFVQHGAKVIIADVQDELGQFHCKTLGTTNIHYVHCDVTSDSDVKNVVEFAVSKYGKLDIMYNNAGISGDSNRSITTSDNEGFKNVFGVNVYGAFLGAKHAARVMIPAKRGVILFTSSVASLLGGETTHAYAVSKHAVVGLMKNLCVELGEHGIRVNCVCPGGIPTPMLNNALKMNKKETQEVLCKVAVLKGTVLEAEDIAKAAVYLCSDEAKFVSGVNFVLDGGYSITNNSFTSALNALINNNHA

SEQ ID NO: 45886 - protein, 443 aa, Glycine max
  Clone ID: 701061102_FLI.pep
SFLCCAAMAVTQFNPTCSKTHLHSSQLPFLSRTLPRHRHCTIAPLHRTQQARICCSVAPNEVQVPAVKTSDPKSKPECYGVFCLTYDLRAEEETRSWKKLINIAVSGAAGMIANHLLFKLASGEVFGPDQPIALKLLGSERSIQALEGVAMELEDSLFPLLREVSIGIDPYEVFQDAEWALLIGAKPRGPGMERADLLDINGQIYAAQGRALNAVASRNVKVIVVGNPCNTNALICLKNAPNIPAKNFHALTRLDENRAKCQLALKAGVFYDKVSNVTIWGNHSTTQVPDFLNARIDGLPVKEVVKDQKWLEEEFTEKVQKRGGALIQKWGRSSAASTSVSIVDAIRSLVTPTPEGDWFSSGVYSDGNPYGIAEGIVFSMPCRSKGDGDYELVKDVIFDDYLQQRIAKTEAELLAEKRCVAHLTGEGIAVCDLPGDTMLPGEM

SEQ ID NO: 45887 - protein, 321 aa, Glycine max
  Clone ID: 701062991_FLI.pep
LRSVHIFVVWMDPSSGQHQQMSSQSLENMLACSKAHQERKPTPQPEQALKCPRCDSTNTKFCYYNNYSLSQPRYFCKSCRRYWTKGGTLRNVPVGGGCRKNKRSSSSSSTSKRVQDQAFTPNVNPLTGLPSLMSYDSNDLTLALARLQKQSCGQLGYDDHDLSMLGNHHTNTPCGDNILGMHHHSSSSSTNPGFLDALRSGFLGTQSNNNMHQNMYYGYGNGDMGEVDNGGGVGVSSSGEMMMMMMMPYNNDQEMSIASTQAVTVTTMKQETCNGREQKVLWGFPWQLNGDTNMGELDSGRASNWNGINSSWHGLLNSPLM

SEQ ID NO: 45888 - protein, 369 aa, Glycine max
  Clone ID: 701009719_FLI.pep
LNSLHPLPLKEMGSLEAERTTVGLAARDPSGILSPYTYNLRNTGPDDVYIKVHYCGICHSDLHQIKNDLGMSNYPMVPGHEVVGEVLEVGSNVSRFRVGELVGVGLLVGCCKNCQPCQQDIENYCSKKIWSYNDVYVDGKPTQGGFAETMIVEQKFVVKIPEGLAPEQVAPLLCAGVTVYSPLVHFGLKESGLRGGILGLGGVGHMGVKIAKALGHHVTVISSSDKKKQEALEHLGADQYLVSSDATAMQEAADSLDYIIDTVPVGHPLEPYLSLLKLDGKLILMGVINTPLQFVSPMVMLGRKSITGSFIGSMKETEEMLEFWKEKGLSSMIEMVNMDYINKAFERLEKNDVRYRFVVDVKGSKLVDQ

SEQ ID NO: 45889 - protein, 274 aa, Glycine max; identical to SEQ ID NO: 42938
  Clone ID: 701009761_FLI.pep

SEQ ID NO: 45890 - protein, 294 aa, Glycine max
  Clone ID: 701009821_FLI.pep
EFDFLLDDLETIKVIGKGSGGVVQLVRHKWVGRLFALKVIQMNIQEDIRKQIVQELKINQASQCPHVVVCYHSFYHNGVISLVLEYMDRGSLADVIKQVKTILEPYLAVVCKQVLQGLVYLHNERHVIHRDIKPSNLLVNHKGEVKITDFGVSAMLASSMGQRDTFVGTYNYMSPERISGSTYDYSSDIWSLGMVVLECAIGRFPYIQSEDQQSWPSFYELLAAIVESPPPSAPPDQFSPEFCTFVSSCIQKDPRDRLTSLELLDHPFIKKFEDKDLDLGILVGGLEPPVNFPR

SEQ ID NO: 45891 - protein, 402 aa, Glycine max
  Clone ID: 701009829_FLI.pep
GHPDKLCDQISDAVLDACLEQDPDSKVACETCTKTNMVMVFGEITTKANVDYEKIVRDTCRNIGFVSDDVGLDADNCKVLVNIEQQSPDIAQGVHGHLTKRPEEIGAGDQGHMFGYATDETPELMPLSHVLATKLGAKLTEVRKNGTCPWLRPDGKTQVTVEYYNDKGAMVPIRVHTVLISTQHDETVTNDEIAADLKEHVIKPVIPEKYLDEKTIFHLNPSGRFVIGGPHGDAGLTGRKIIIDTYGGWGAHGGGAFSGKDPTKVDRSGAYIVRQAAKSIVANGLARRAIVQVSYAIGVPEPLSVFVDTYGTGKIPDKEILSIVKESFDFRPGMISINLDLKRGGNGRFLKTAAYGHFGRDDPDFTWGSGEATQGGEGTCLTKRGSNTLGKGLLHYYWLLII

SEQ ID NO: 45892 - protein, 170 aa, Glycine max; identical to SEQ ID NO: 44128
  Clone ID: 701013845_FLI.pep

SEQ ID NO: 45893 - protein, 273 aa, Glycine max
  Clone ID: 701013978_FLI.pep
FLFLFLCLLLHFLSFQSKKIMGRKFFVGGNWKCNGTTEEVKKIVTTLNEAKVPGEDVVEVVVSPPFVFLPFVKSLLRPDFHVSAQNCWVRKGGAYTGEVSAEMLVNLGIPWVIIGHSERRQLLNESNEFVGDKVAYALQQGLKVIACIGETLEQREAGTTTAVVAEQTKAIAAKISNWDNVVLAYEPVWAIGTGKVATPAQAQEVHADLRKWVHDNVSAEVAASVRIIYGGSVNGGNCKELAAQPDVDGFLVGGASLKAEFVDIINAATVKKN

SEQ ID NO: 45894 - protein, 325 aa, Glycine max
  Clone ID: 701014384_FLI.pep
NSALGSILYSFIHCSACWVCRVRVRCSIGEDPFPSRRSLEMASRHRVHREPLNARRGYPPEGPYARVPPMPRPPPPIPPHPAVLEEELEFQHAEMRRLVADNRRLIDDRMALQRDLGAAKEELHRMNLAIGDIRAEHEAHSRELVEKGMKMEADLRANEPLKNEVMQLRSEVKKLNNLKQELTGKVQTLTQDVARLQADNQQIPMMRAEIDGLHQELMRARTMVDYEKKANMEFMEQRQSMEKNLVSMAREVEKLRAELASADSRHWGGGMSGGPYGTKFGSPEGFPAPYADGYGVHLGAADKGPMYGVGAASRKGHEKPRMNRR

SEQ ID NO: 45895 - protein, 118 aa, Glycine max
  Clone ID: 701038652_FLI.pep
GVSFVACRLYTGIHAKPKPKFKSGAISESTTALNVDQTNTSVISADIKTTPASAALPAATTTRGNNQEQAAAAVNGSNAAATVISAAASAPQKKEGGQAKAQVDKKKIDARKKSLKRL

SEQ ID NO: 45896 - protein, 232 aa, Glycine max
  Clone ID: 701039007_FLI.pep
FIWFPHFPHFLCLHINPSPCDPFPTPKPLSSFQFWHHTMPTLNHVLTFTFFLLLSCHCHLLNGQEDTSFGRAIDRKLLGLKRKEKLSHFKFYWHDIVSGRNPTSVAVVPPPPKVNTTTAFGLVNMIDNPLTLGPELSSKLVGKSQGFYASASQTEIDLLMAMNFAFIEGKYNGSTITILGRNCVFHKVREMPVIGGSGLFRFARGYAEARTHWLDLKGGDAIVEYNVYVMHY

SEQ ID NO: 45897 - protein, 371 aa, Glycine max
  Clone ID: 701054233_FLI.pep
LSKRSRKEGSKMLGVIRHKSIRHAFSAIRHLSSAAKEITVREALNSALDEEMSADPKVFLMGEEVGEYQGAYKISKGLLEKFGPERVLDTPITEAGFAGIGVGAAYYGLRPVVEFMTFNFSMQAIDHIINSAAKSNYMSAGQISVPIVFRGPNGAAAGVGAQHSQCYASWYGSCPGLKVLSPYSSEDARGLLKAAIRDPDPVVFLENELLYGESFPVSAEVLDSSFCLPIGKAKIEREGKDVTITAYSKMVGYALKAAETLAKEGISAEVINLRSIRPLDRSTINTSVRKTNRLVTVEEGFPQHGVGAEICTSVIEESFGYLDAPVERIAGADVPMPYAANLERMAVPQVEDIVRAAKRTCYRSVPLAASA

SEQ ID NO: 45898 - protein, 347 aa, Glycine max
  Clone ID: 701060550_FLI.pep
EVGVVAFWRVDMEERYEPLKELGAGNFGVARLAKDKKTGELVAVKYIERGKKIDENVQREIINHRSLRHPNIIRFKEVLLTPTHLAIVLEYASGGELFERICTAGRFSEDEARYFFQQLISGVSYCHSMEICHRDLKLENTLLDGNPSPRLKICDFGYSKSALLHSQPKSTVGTPAYIAPEVLSRKEYDGKISDVWSCGVTLYVMLVGAYPFEDPEDPRNFRKTIGRIIGIQYSIPDYVRVSSDCRNLLSRIFVADPAKRITIPEIKQYPWFLKNMPKEIIEAERKGFEETTKDQPNQKVEEIMRIIQAARIPGQGSKAGEGGQAGTGSLDIEDDEEIDVSGDYEQV

SEQ ID NO: 45899 - protein, 411 aa, Glycine max
  Clone ID: 701060595_FLI.pep
SFTAILHSSIHGTTMLLLLYLSLLCSLPHIALSSHCTVETATKTFKKCMNLPTQQASIAWTFHPHNSTLELVFFGSFISPSGWVGWGINPTSPEMTGTRALIAFPDPNSGQIVLLPYILDPTVKLQKSPLLSRPLDIHLLSSTATMYGGKMATVHNGAAIQILGTVKLQTNKTKIHLVWNRGLYVQGYSPTIHPTTSTDLSSIVTFDVLSGSSAPQHTDLTTLRVIHGTVNAISWGILLPMGAITARYLRHIQALGPAWFYAHAGMQVFGFVLGTVGFVIGIRLGQLSPGVEYRLHRKLGMAVFCLGGLQTLALLFRPNTRNKFRKYWKSYHHFVGYSCVVLGFVNVFQGFEVMGASRSYAKLTYCLGLSTLIGLCIALEVNSWVVFCRKSKEDKMRREGLIGTSHKPIHN

SEQ ID NO: 45900 - protein, 317 aa, Glycine max
  Clone ID: 701060646_FLI.pep
LSLRLLHFMTDSSPLIPPSPVTVTEIDLEEGPSEQIQCRICLETDGRNFIVPCKCKGTSKYVHRECLDHWRAVKEGFAFAHCTTCKAPYHLRVHGAYRQWRTFKFRFFVTRDILLIFLAVQLVIASLAYLVYQIDGYEKYWLRLVWGFGSELSFYYICGALVFFVLLGLSGCFITCSDPRIRSDLGQPCREICLCCCQPGVCADRHLHGTPYMYGTPYMSTDCNACCENCGTECCGCTCMRGSEDEAGLPLLFIMVLFFLVLFAVLGIFYSVLVATMIGQRIWQRHYHILAKRMLTKVPMPYFIVFCTFGTVQLTFN

SEQ ID NO: 45901 - protein, 373 aa, Glycine max
  Clone ID: 701060682_FLI.pep
ADWLRKNYSDKYVILAVNKCESPRKRIMQASEFWSLGFEPLPISAISGTGTGELLDLVCSGLQKIEESNNLVEEDYVPAISIVGRPNVGKSSILNALVGEDRTIVSPISGTTRDAIDTEFTGPDGQKFQLIDTAGIRKRTAIASAGSTTEALSVNRAFRAIRRSDVVALVIEAMACITEQDYKIAERIEKEGKGCVIVVNKWDTIPNKNQQTASYYEQDVREKLRSLVWAPIVYSTAVAGHSVDKIIVAAIEVEKERSRRLGTSILNQVVQEAVGFKPPPRTRGGKRGRVYYCTQAAIRPPTFVFFVNDAKLFPETYRRYMEKQLRTDAGFSGTPIRLLWRSRRKMGKDEGKPVTKTRENLTSNDRKLVSTTP

SEQ ID NO: 45902 - protein, 859 aa, Glycine max
  Clone ID: 701061862_FLI.pep
VVKMFGIIGGNKGHKIKGNLVIMRKNVLDINSITSVKGVIGTGINIIGGVVDTVTALASHISIQLISATKADGHGKGKVGKATNLRGQVSLPTLGAGEDAYDVNFEWDSDFGIPGAFYIKNFMQVEFYLKSLTLEDIPNHGTIHFVCNSWVYNSKNYKTDRIFFANNTYLPSETPAPLLKYREEELKNVRGDGTGERKEWDRIYDYDVYNDLGNPDSGDKYARPVLGGSALPYPRRGRTGRGKTRKDPNSEKPSDFVYLPRDEAFGHLKSSDFLAFGIKSVSQDVLPVLTDAFDGNILSLEFDNFAEVRKLYEGGVTLPTNFLSKIAPIPVIKEIFRTDGEQFLKYPPPKVMQVDKSAWMTDEEFARETIAGVNPNVIKILEEFPPRSKLDTQAYGDHTCIITKQHLEPNLGGLTVEQAIQSKKLFILDHHDYLIPYLRKINATTTKTYATRTIFFLKSDGTLTPLAIELSKPHPQGEEYGPVSEVYVPSSEGVEAYIWLLAKAYVVVNDSCYHQLVSHWLNTHAVVEPFVIATNRHLSVVHPIYKLLFPHYRDTMNINSLARKSLVNADGIIEKTFLWGRYALEMSAVVYKDWVFTDQALPNDLVKRGVAVKDPSAPHGVRLLIEDYPYASDGLEIWDAIKSWVQEYVSFYYKSDAAIQQDPELQAWWKELVQVGHGDLKDKPWWQKMQTCEELIEASATLIWIASALHAAVNFGQYPYGGLILNRPTISRRFMPEKGSAEYAALAKNPEKEFLKTITGKKETLIDLTIIEILSRHASDEFYLGERDGGDFWTSDAGPLEAFKRFGKKLQEIEHKLIQKNKDETLRNRTGPAKMPYTLLYPSSEEGLTFRGIPNSISI

SEQ ID NO: 45903 - protein, 331 aa, Glycine max
  Clone ID: 701063970_FLI.pep
NSYIVAMARFSLDEISDTGAFVRSASTFRNWISRDLNSQFPPESGRYHLYVSYACPWASRCLAYLNIKGLNKAISFSAVKPIFERTNESDDYKGWVFPESETEVPGAEPDMLNGAKTIRELYEIASANYTGKYTVPVLWDKKLKTIVNNESSEIIRMFNTEFNSIAENPTLDLYPTDLKPQIDDTNEWIYTSINNGVYKCGFAKKQEPYNEAARQLYGALDKCEDILSKQRYICGNTLTEADIRLFVTLIRFDEVYAVHFKCNKKLLREYPNLFNYTKDIFQIPGISSTVNMEHIKLHYYGSHPSINPFGIVPVGPNIDYSAPHDRERFSA

SEQ ID NO: 45904 - protein, 301 aa, Glycine max
  Clone ID: 701064249_FLI.pep
SQHTRLIKSLYINPFRHSTMTGKEIFHKMKEKVLGSSDPDSGKGKSKMKKHITHGFHLVKGRSGHAMEDYLVAQFKQVDNKELGLFAIFDGHSGHSVPDYLKSHLFDNILKEPNFWTEPAEAVKRAYSITDSTILDKSGELGRGGSTAVTAILINCYKLLVANIGDSRAVLCKNGVAKQLSVDHEPSIESEDIKNRGGFVSNFPGDVPRVDGQLAVSRAFGDKSLKIHLSSEPYVTVEMIEDDAEFLILASDGLWKVMSNQEAVSAIRDVKDARSAAKVLTEEAKNRKSSDDISCVVVKFQ

SEQ ID NO: 45905 - protein, 138 aa, Glycine max
  Clone ID: 701015564_FLI.pep
FFSSSSQSLSSFALAMARIKVYELRNKTKAELLNQLKDLKAELALLRVAKVTGGAPNKLSKIKVVRLSIAQVLTVISQKQKAALREAYKKKKYLPLDLRPKKTRAIRRRLTKHQASLKTEREKKKELYFPLRKYAIKV

SEQ ID NO: 45906 - protein, 308 aa, Glycine max
  Clone ID: 700999713_FLI.pep
FYIAPAFMDKLVVHISKNFMTLPNIKVPLILGIWGGKGQGKSFQCELVFAKMGINPIMMSAGELESGNAGEPAKLIRQRYREAADMIKKGKMCALFINDLDAGAGRLGGTTQYTVNNQMVNATLMNIADNPTNVQLPGMYNKEENPRVPIIVTGNDFSTLYAPLIRDGRMEKFYWAPTREDRIGVCTGIFRTDGIPEQDIVKLVDTFPGQSIDFFGALRARVYDDEVRKWISGVGVDSVGKKLVNSKDGPPTFEQPKMTLEKLLLYGNMLVQEQENVKRVQLADKYLNEAALGNANEDAIQRGTFFQS

SEQ ID NO: 45907 - protein, 176 aa, Glycine max
  Clone ID: 700999734_FLI.pep
SMQATSFWVAKFPFGVRAQQHPTVKRDSMAECTVPKWAQKTVSLPPLRRGCHLVTSKIVKEIEQDLSGFKCGLAHLFLQHTSASLTINENYDSDVREDTETFLNRIVPEGSSAPWKHTLEGPDDMPAHIKSSMFGCTLTIPITNGKLNMGTWQGIWLCEHRDHPTSRRVVVTLNGI

SEQ ID NO: 45908 - protein, 532 aa, Glycine max
  Clone ID: 701002555_FLI.pep
TNSTMDVWSWICELPNSVEWTESDSPPMKFELASEKKENSTRSIHLKAERTSGSDSEAAVTFTVCLQGFHPHNAHKPLWVSEKCHLSSEKPFLPLLLQLLQEIISHSPTAHDSTCPRSQLQKLNPEPIAWIMDSHTPESLSTFFNLVFTMRLFWLCACHAPPEAGSLYFHYLLAPSLQTASSKLASSVLRTFFITVGVDTELCFMRTLGYIITKLHMIKELSVGLGLKTIFPSPRFSYANETHGLWILKGYAPVMTMKLARSNNVKKSQFSGIDAKESILRYSLAHHQLEAHVQLEYTVGFFDAFIQVRARVDNIRLHVARLGFTQNDDVDDFVEEKHFPSRVRVWVGPEIGATYCAGLSLGRSTENKESEVETKRVVEGNLEKSQGSNVKALAKSSRRTRSRSWRMDQDAEGNAAIFDVVLHDNTTGQEMGSWRPISETGGDPGHGLRGRYARANRAFNKSGSVVIAGDEYGEEVGWRLCKEMEGSVMKWRIGGEFWVSYLPNQAKGSSFETRYMEWCDEVDLPLIHGKTT

SEQ ID NO: 45909 - protein, 490 aa, Glycine max
  Clone ID: 701008639_FLI.pep
STNWVLSEIQHKMESDLGKLFIGGISWDTDDERLKEYFGKYGEVIEAVIMRDRTTGRARGFGFVVFADPSAAERVIMDKHIIDGRTVEAKKAVPRDDQQTINRQSGSIHGSPSPGRTKKIFVGGLPSTITESDFKKYFDQFGTIADVVVMYDHNTQRPRGFGFITYDSEEAVDRVLYKTFHELNGKMVEVKRAVPKELSPGPTRSPLIGYNYGLNRTSGFLNSYAQGFNMNPIGGYGVRMDGRFSPLTSARSGFSPFGSSGYGMGVNLDLGLNPSYGGTSSYGGSLGYARMSPFNNGNSNRYTTPIGNSGGNGRSDSLMNSASRSVWGNGGQNNAANSPVSPGAYLGSGNGAFGVSIGNGGTNWGPSVPTQGGGAATGYSTWGNSYDGGDNNISLGGGGYGRNSSPSVPQSSTFTAPTGDYEGSYGNLYRNGSVYSDSTWRSAASEIDASGSFGYGGLGGIASDDPVKSSDGFIGNYNVISRQTNRGIAA

SEQ ID NO: 45910 - protein, 223 aa, Glycine max
  Clone ID: 701009133_FLI.pep
KKRKGGMARRAEEEYDYLFKVVLIGDSGVGKSNLLSRFTRNEFCLESKSTIGVEFATRTLQVEGRTVKAQIWDTAGQERYRAITSAYYRGALGALLVYDVTKPTTFENVSRWLKELRDHADANIVIMLIGNKTDLKHLRAVATEDAQGYAEKEGLSFIETSALEATNVENAFQTILAEIYRIISKKSLSSNDPAANIIKEGKTITVGGAPEPNTNKPSCCTSS

SEQ ID NO: 45911 - protein, 212 aa, Glycine max
  Clone ID: 701012770_FLI.pep
SIEPVVAEKLVTMVSSDKDPREDVLQAWYMDDSDEDQRLPHHKEPKEFVSLDQLAELGVLSWKLDADNHENDPELKKIREERGYTYMDVCEVCPEKLPNYEQKIKSFFEEHLHTDEEIRFCAAGSGYFDVRDRNEAWIRVWVKKGGMIILPAGIYHRFTLDESNYIKALRFFVGEPVWTPYNRPNDHLPARQQYVKDFVEKDVSNHAVDAAA

SEQ ID NO: 45912 - protein, 378 aa, Glycine max
  Clone ID: 701012802_FLI.pep
KIEEEISCCVLRYHNIDGLHHPNLTMSSTLLPVTATPIFTLTKTLPLPKPYLLSYKFKFNTLVRRCSLSDHEEQRWLREEQRWLRDEHRWLREEQRWARERDQLLREIADLKLQIQALERRLLTRDLSSPASISDAVANVTLLLQVLKDKNLVLESGSSLRNTEEVKQLEEVVEHVKEVVVVEESARVEKRISLRIGSEGEEVRQMQEALLKLGFYSGEEDMEYSSFSSGTERAVKTWQAALGAPEDGIMTAELLERLYLEIRNKDTGSATQDKQSTTVLPKEVENGAAVASVAENSEGQQKDVKSDKGTEVSHRGVFLLGENRWEEPSRLFTRNGVDRSKNKDVTTKCLQCRGEGRLLCTVFWNGWTRVQNAHIVKA

SEQ ID NO: 45913 - protein, 560 aa, Glycine max
  Clone ID: 701038124_FLI.pep
WQCLRIMPALVDKIMGNEGVFNIDYFIKESGQSIMFNLGGAVQEFFKFDPPKTFSREKSHFLLDDEFGRQVLAAFPLGIERLKVFPPASKLDPSKYGSVESALKEEHIIGHIEGMSIQQALEENKLFMLDYHDVYLPFLDRINALEERKAYATTTILFLTKMGTLKPIAIQLALPTGNPNTSSKQVLTPPKDATSKWLWQLGKAHVCSNDAGVHTLVHHWLRIHACMEPLIIATHRQLSVMHPIFKLLHPHMRYTLKTNAIARQTLINAEGTIETDHTPGRYCMQFSSAAYKDWWRFDMEGFPADLIRRGLAVPDATQPHGIRLLIEDYPYAADGLLIWSSIKKLVRTYVNHYYKNSNAVSSDNELQSWYREFINLGHPDHKNASWWPKLDIPEDLTSMLTTVIWLVSAQHAVLNFGQYPYGGYVPIRPPLMRKLIPKEEDPEYSDFVMDPQRYFLSSLPSLFQASRFMAVINIGSAHSPDEEYIGQTKDLSSWSGEPEIIDAFNQFSMEMKSIEMEIKRRNADPKLRNRCGVNVLPYELLIPSSERGATGRGVPNSVTA

SEQ ID NO: 45914 - protein, 388 aa, Glycine max
  Clone ID: 701038272_FLI.pep
EEKRTCIFCQFPSMVATSTNQSELETSKKDSTYDRIAEVKAFDETKLGVKGLFDSGITKIPRMFHHAKVEDHTETMPNDSNFSVPIIDLQDIDTNSSLRVKALDKIRSACKEWGFFQVVNHGIAVDLLDEMICGIRRFHEQDAEVRKRFYSRDMNKKVRYFSNGTLYRDPAANWRDTIAFFRTPDPPNPEEIPSVCRDIVIGYSEKVRALGFTIFELFSEALGLHSSYLKELDSVDGQFLLCHYYPPCPEPELTMGTSKHTDISFMTILLQDQMGGLQVLHQNQWVDVPPVHGSLVVNIGDFLQLISNDMFVSVYHRVLSSHTGPRISVASFFANSFQQSSLKVVGPIKELLSEDNPPIYRDTTVKDVKAHYFEKGLDGNNSLHPFRL

SEQ ID NO: 45915 - protein, 269 aa, Glycine max
  Clone ID: 701041406_FLI.pep
RSFFLESKETVRNPSCSICGTTLALPDPSFYQSAEGVSGDEGRENSLAMVPVQPTVAAKTELKPGWPLLDGRILSDRQSAGRSLFHLQISVVQWAMRLPSRNLSYAVDRDEKSKICDQGQDQPAALDSESGALVLVDAELGTASSPENNSGNIPKELEGLHEKYSSTCRLFEYQELVSATSNFLHENLIGKGGSSQVYRGCLPDGKELAVKILNPSDDVLSEFLLEIEIITTLHHKNIISLLGFCFENGKLLLVYDFLSRGSLEENLHE

SEQ ID NO: 45916 - protein, 483 aa, Glycine max
  Clone ID: 701047614_FLI.pep
KSKMVKICCIGAGYVGGPTMAVIALKCPSIEVAVVDISKSRIAAWNSDQLPIYEPGLDGVVKQCRGKNLFFSTDVEKHVFEADIVFVSVNTPTKTQGLGAGKAADLTYWESAARMIADVSKSDKIVVEKSTVPVKTAEAIEKILTHNSKGIKFQILSNPEFLAEGTAIKDLFNPDRVLIGGRETPEGQKAIQTLKDVYAQWVPEERILTTNLWSAELSKLAANAFLAQRISSVNAMSALCEATGANVQQVSYSVGTDSRIGPKFLNASVGFGGSCFQKDILNLVYICECNGLPEVAEYWKQVIKINDYQKSRFVNRVVASMFNTVSNKKIAILGFAFKKDTGDTRETPAIDVCQGLLGDKANLSIYDPQVTEDQIQRDLSMNKFDWDHPIHLQPTSPTTVKKVSVVWDAYEATKDAHGLCILTEWDEFKTLDYQKIFDNMQKPAFVFDGRNIVDADKLREIGFIVYSIGKPLDPWLKDMPAVA

SEQ ID NO: 45917 - protein, 428 aa, Glycine max
  Clone ID: 701047779_FLI.pep
CFSHPSSLSLSSSSSLLPLLRYRSDRISITDFGGVGDGRTLNTKAFRAAVYRIQHLRRRGGTVLYVPPGVYLTESFNLTSHMTLYLAAGAVIKATQELGNWPLIAPLPSYGRGRELPGGRYMSFIHGDGLSDVVITGENGTIDGQGDVWWNMWRQRTLQFTRPNLVEFVNSQDIIISNVIFKNSPFWNIHPVYCSNVVVRYVTILAPRDSPNTDGIDPDSSSNVCIEDSYISTGDDLVAVKSGWDEYGIAYGRPSYGITIRRVTGSSPFAGIAIGSETSGGVENVLAEHINLFNMGVGIHIKTNSGRGGLIKNITVAHVYVENARQGIKIAGDVGGHPDEKFNPNALPVVKGITIKNVWGVKVNQAGLIHGLRNSPFTDVCLSDINFHGMEGPRSPSWKCSDVFGFAHQVSPWPCSQLSSQEPGSCAI

SEQ ID NO: 45918 - protein, 294 aa, Glycine max; identical to SEQ ID NO: 40048
  Clone ID: 701052353_FLI.pep

SEQ ID NO: 45919 - protein, 494 aa, Glycine max
  Clone ID: 701059742_FLI.pep
TAPIPMAASRRLRDLQSQPANKICVDCSQKNPQWASVSYGVFMCLECSGKHRGLGVHISFVRSVTMDSWSEIQIKKMEAGGNDKLNAFLLQYGIPKETDIVAKYNSNAASVYRDRIQALADGRPWRDPPVVKEAVRSSSAAFKGKPPLSASSNNNGGWDNWDADDGFGSARGGSDLRRNQSTGDVRGFGGGGNVARSKSTQDIYTRAELEASAANKEEFFARKRAENESRPEGLPPSQGGKYVGFGSGPAPPQRGNQQNDYFSVVSQGLGKLSLAAASAANVVQAGTKELSAKVKEGGYDYKVNETVNVVSQKTTEIGQRTWGMMKGVMALASQKVEEFARDNPNWTSDNWQRNESDRNGFYQEFNRENNGRNSSTREGQHSSGGQTNTFHSSSWDDWGHNDFRKEEPAKGSAPQSSGGKFDNYNSSSWDDWDQEDTRKKEPAKGSSARSSDGWAGWDNAKDDGFDDIYGSASNSKGVTHNDKSGAAWTGGGFL

SEQ ID NO: 45920 - protein, 455 aa, Glycine max
  Clone ID: 701004846_FLI.pep
YLSPINSTLLPIKQQKINLGNKNKMPSLEEELFPSTPGKFKIERSHHMNRQLYRCFASTSTMFLWALFLIALTASYLSFQGFVDSGSRYLTASWGGIQWEKQVRTSAQIHRQGGMSVLVTGAAGFVGSHVSLALKRRGDGVVGLDNFNDYYDPSLKKARKSLLATHDVFIVEGDVNDAKLLAKLFDVVAFTHVMHLAAQAGVRYAMENPHSYVHSNIAGLVTLLEACKTANPQPAIVWASSSSVYGLNEKVPFSESDQTDQPASLYAATKKAGEEITHTYNHIYGLSITGLRFFTVYGPWGRPDMAYFSFTRNILQGKPITVYRGKNHVDLARDFTYIDDIVKGCVGSLDTSAKSTGSGGKKRGPAPYRIFNLGNTSPVTVPTLVSILERHLKVKAKRNIVDMPGNGDVPFTHANISSARRELGYKPTTDLQTGLKKFVKWYLSYYGYNHGKPVN

SEQ ID NO: 45921 - protein, 399 aa, Glycine max
  Clone ID: 701006048_FLI.pep
LTFSLLSSNLNSILENQNQRQLKIQNKHLTQHQHFRSTFPLSQQRKRKEKPILQRQQGTKERSISRSALKMARAPFTSFPFVLIILLSIVHLSHCKTLKRDVKALNEIKASLGWRVVYAWVGDDPCGDGDLPPWSGVTCSTVGDYRVVTELEVYAVSIVGPFPTAVTSLLDLTRLDLHNNKLTGPIPPQIGRLKRLKILNLRWNKLQDAIPPEIGELKSLTHLYLSFNNFKGEIPKELANLPDLRYLYLHENRLAGRIPPELGTLQNLRHLDAGNNHLVGTIRELIRIEGCFPALRNLYLNNNYFTGGIPAQLANLTSLEILYLSYNKMSGVIPSTVAHIPKLTYLYLDHNQFSGRIPEPFYKHPFLKEMYIEGNAFRPGVNPIGFHKVLEVSDGDFLV

SEQ ID NO: 45922 - protein, 677 aa, Glycine max
  Clone ID: 701011172_FLI.pep
SYIMATSMVKLMLFSALILLSLQAVVSVTPLHFQHPLDPLTKQEISLVQTIVQNKYPSSSNRLSFHYIGLDEPEKDAILKWESIKPTVITVPRKALAIVIINSQTHEILIDLKARRIVSDNIHSGNGFPTLSVDEQVVAIELPLKYGPFIESVNKRGLNLSEVVCSTFTMGWFGETKDRRTVRVECFMKESSPNIWVRPISGLTMVVDLELMKIVQYHDGGIIPVPTADNTEYRFSHQNPPFGPRQHSLATHQPQGPGFQINGHSISWANWKFHIGFDPRAGIVISLASIYDLEKHKSRRVLYKGYISELFVPYQDPTDDFYYKTFFDAGEFGFGLSTVSLVPNRDCPSNAQFLDTYVHAADGTPLLIKNAICVFEQYGSIMWRHTETGIPNESFEETRTEVNLVVRTVVTVGNYDNIIDWEFKTSGSIKPSIALSGILEIKGVDIKHKSEIKSDQHGILVSANSIGVYHDHFYIYHLDLDIDGVANSFEKTSLKTVRVTDGSSKRKSYWTTEVETAKTENDAKIILGLSPGELSVVNPNKKTSVGNDVGYRLIPAIPAHPLLTDDDYPQIRGAFTNFNVWVTPYNRTEKWAGGLYVDHSHGDDTLAVWTKKNRDINNKDIVLWHVVGIHHVPAQEDFPIMPLLSTAFELRPTNFFERNPVLKTLSPPDVQWPGCPK

SEQ ID NO: 45923 - protein, 202 aa, Glycine max
  Clone ID: 701045760_FLI.pep
IESHSQENGTRPEFQLASDGVHQAQLAAQSFQKELEANNIPLANVRICYSPFSRTTHTANVVSTLLNLPFDGPHCKVIQDLRERYFGPSFELLSHDKYQVIWDIDEKDPFLGPEGGESVKDVACRLATAMATMESEFQGCAVLVVSHGDPLQILQTILHAANEHKEPTYNDLASILTAVQVAPILSQHRKHALLTGELRAVI

SEQ ID NO: 45924 - protein, 373 aa, Glycine max
  Clone ID: 701050070_FLI.pep
GSNGADDSFISIMGLVTVTWTNYLKKRIPLRIRFLHTLKGNQIGQILMSPPLASLDLPDIWSPISSCRSIPAIHKSFNEQTTVVLDGKLISMEIRSKIAAKVRQMKKGLGKVPGLAVILVGQRRDSQTYVRNKIMACEEVGIKSLVTELPTDCAVTDVQNAIMRFNKDPSIHGILVQLPLPQHLDEEKVLDAVCLEKDVDGFHPLNMGNLAIRGREPLFTPCTPKGCIELLIRSGVEIMGKKAVVIGTSNIVGLPASLLLQRHHATVTVIHAFTQNPEQITSEADIVVSAAGVPNLVRGNWIKPGAAVIDVGTTPVEDPGCEDGYRLAGDVCYEEAVKVASIITPVPGGVGPMTVAMLLCNTLDSAKRMLNFS

SEQ ID NO: 45925 - protein, 227 aa, Glycine max
  Clone ID: 701050088_FLI.pep
NFQMEGPTRVMNQLRALWHILELLDKEMFAHLSKIGAESLHFAFRMLLVLFRRELSFNEALSMWEMMWAADFDESMAYDLEENCLEALELQLPRDSSNDMREEIADSDGGSVKSGSRSNHNENDNTKASPQSNHERADHSVYDSKLKSLSSHTFCGLARNIWPRNHQVQMSSISLTRKGNNELAIFCVAAILVLNRQKIIRETHSFDDMIKAGNQENELCCRERGLR

SEQ ID NO: 45926 - protein, 338 aa, Glycine max
  Clone ID: 701055639_FLI.pep
VKCYMHQLFSGLEHCHNRHVLHRDIKGSNLLIDNDGILKIGDFGLASFFDPNHKHPMTSRVVTLWYRPPELLLGATEYSVGVDLWSAGCILAELLAGKPIMPGRTEVEQLHKIFKLCGSPSDEYWKKSKLPHATIFKPQQSYKRCIAETYKDFPPSSLPLMDTLLAINPDERLTATAALHSEFFTTKPYACEPSSLPKYPPSKEMDAKLRDEEARRLRAAGKANADGVKKSRPRERVGRGIAVPEANAELQANIDRRRLITHSNAKSKSEKFPPPHQDGALGYPLGSSHHMDPVFDPPDVPFSSTNFSQPKANIQTWSGPLVDPSGVGVPRRKKKHGK

SEQ ID NO: 45927 - protein, 438 aa, Glycine max
  Clone ID: 701055675_FLI.pep
VESVTEIMWRCINGRIARRFLSTSSASARGWWDHVRPAPKDPIVRVNEAFLADPFPHKINLGIGTYKGDDGKAFIPQSVREAETKIQRCKLEESNASAVRSKFVQECVRLAYGNDSNVVREGLFAGVPTLSGTGACRLFAEFQRHFYPDSQMYLPDPTWSNHHNIWRQAEIPVKTFHYYHPDTKGLDFAALLNDVKNAPDCSFFLLHPCAHNPTGVDPTEEQWREISYQFQVKNHFPFFDMAYQGFSSGDLDKDAIALRIFLEDGHLIGCAQSFAKNMGLSEHKAGCLSVLCQSIKQVAALKSQLQLMSHAMYSSIPFQGISLVTMILSEPDTEALWRKEIKVMAKRIQTMRTTLRHCLENLHSSFNWEHITDQVGMFCFSGLTPDQVQQMEKLFHIYMTPDGRMSMSGVTSSNVDYLANAIHQVTRIDEEALRSCYV

SEQ ID NO: 45928 - protein, 464 aa, Glycine max
  Clone ID: 701057895_FLI.pep
PSMPWDKTELWVGYISENGEIYKRVCIAGNDPSRVESPTEPKWSLDGELFFVTDKENGFWNIHKWIEFENKVVSVYSLEAEFTRPLWTYGMNSYEFVESSKQKNLIACSYRQHGKSYLGIIDVQGSKLTVIDFPCTDINNITSGNDCLYVEGASEVLPSSVAKVTFDDDKSKAVDFNIIWSSSPDSLKYSSYISKPEFIEFPTEVPGQNAYAYFYPPSNPDFQASKEEKPPLLLKSHGGPTQETRGILNLSVQYWTSRGWAVVDVNYGYGRVYRERLLRQWGIVDVNDCCSCATYLVDSGKVDKERLCIMGGSAGGYTTLAVLAFRDTFQAGASLYGIADLNLLRAETHKFESHYVENLVGDDKDMYERSPINHVDNFSCPIIIFQGLEDKVVPPDQARKIYQAVKEKGVPVALVEYEGEQHGFRKAENIKFTLEQEMVFFARLIGHFDVADDITPIKIDNFDD

SEQ ID NO: 45929 - protein, 724 aa, Glycine max
  Clone ID: 701058512_FLI.pep
ASVMSLSAFSFPLHLRQTTPPSDPKTSSTPLPLSSHSHWGADLLTQSQRKLNQVKRRPHGVCASLSEMGEYYSQKPPTPLLDTINYPIHMKNLATKKLKQLADELRSDVIFHVSRTGGHLGSSLGVVELTIALHYVFNAPKDKILWDVGHQSYPHKILTGRRDKMHTMRQTDGLAGFTKRSESDYDCFGTGHSSTTISAGLGMAVGRDLKGDKNNVVAVIGDGAMTAGQAYEAMNNAGYLDSDMIVILNDNKQVSLPTANLDGPIPPVGALSSALSKLQSNRPLRELREVAKGVTKQIGGPMHELAAKVDEYARGMISGSGSTLFEELGLYYIGPVDGHNIDDLVSILNEVKSTKTTGPVLLHVVTEKGHGYPYAERAADKYHGVTKFDPATGKQFKSNAATQSYTTYFAEALIAEAEADKDIVGIHAAMGGGTGMNLFLRRFPTRCFDVGIAEQHAVTFAAGLACEGLKPFCAIYSSFMQRAYDQVVHDVDLQKLPVRFAMDRAGLVGADGPTHCGAFDVTFMACLPNMVVMAPSDEAELFHMVATAAAIDDRPSCFRYPRGNGIGVELPLGNKGIPLEIGKGRILIEGERVALLGYGSAVQSCLAAASLLEHHGLRATVADARFCKPLDRSLIRSLAQSHEVLITVEEGSIGGFGSHVVQFMALDGLLDGKLKWRPIVLPDCYIDHGSPVDQLSAAGLTPSHIAATVFNLLGQTREALEVMT

SEQ ID NO: 45930 - protein, 264 aa, Glycine max
  Clone ID: 701062525_FLI.pep
FYRNNFNISNLHHPNVTELVGYCSEYGQHLLVYEFHKNGSLHDFLHLPDEYSKPLIWNSRVKIALGTARALEYLHEVSSPSVVHKNIKSANILLDTELNPHLSDSGLASYIPNADQILNHNVGSGYDAPEVALSGQYTLKSDVYSFGVVMLELLSGRKPFDSSRPRSEQSLVRWATPQLHDIDALAKMVDPAMKGLYPVKSLSRFADVIALCVQPEPEFRPPMSEVVQALVRLVQRANMSKRTFSSSDHGGSQRGSDEPVLRDI

SEQ ID NO: 45931 - protein, 531 aa, Glycine max
  Clone ID: 700790454_FLI.pep
HRPFTSSSNAVNNFLGISQASSVLGGFLADAYLGRYWTIAIFTTIYLAGLTGITLCATISKFVPNQEECDQFSLLLGNCEAAKPWQMTYLYTALYITAFGAAGIRPCVSSFGADQFDERSKNYKAHLDRFFNIFYLSVTIGAIVAFTVVVYVQMKFGWGSAFGSLAIAMGISNMVFFIGTPLYRHRLPGGSPLTRVAQVLVAAFRKRNASFGSSEFIGLYEVPGRQSAIKGSRKISHTDDFRFLDKAALQLKEDGANPSPWRLCTVTQVEEVKILMKLIPIPACTIMLNVVLTEFLTLSVQQAYTLNTHLGRLKLPVTCMPVFPGLSVFLILSLYYSIFVPVFRRITGHPHGASQLQRVGIGLAVSILSVAWAAIFERYRRNYAIKHGYLASFLTAMPNLSAYWLLIQYCLIGVAEVFCIVGLLEFLYEEAPDAMKSIGSAYAALAGGLGCFVATIINNIIKSATGNLDKGQPSWLSQNINTGRFDYFYWLLTALSIINFAIFVYSAHRYKYREHQVHEMEKHEMTYVGSS

SEQ ID NO: 45932 - protein, 519 aa, Glycine max; identical to SEQ ID NO: 43902
  Clone ID: 700760540_FLI.pep

SEQ ID NO: 45933 - protein, 518 aa, Glycine max
  Clone ID: JC-GMLE01810067B04_FLI.pep
GINIRYLGRIAKRTLATPVVMDLCVREMVARAAKYIFAGHLRSTETFHISNSIAHFLNCFIGSSANGGAAAIQAPQPLRPKLKKNGKSKVKEPVPSAAPFTLTRTALWNEIVALVKEKFAYDLAFDYEVSRPTVFLRSFCLKVGIQVAARDYDFTKVDPFVPADILDLFPVVKHINPRSMDGQDLQEAGRSLTLQGRLHMAQELLSEALAIVQQVHGPLHPDSATCESNLAMVLYNSNDLQMAISHQARAVVINERVLGLDHQDTAHAYGNLGLFCHQANKTKEALAFMSRAMYLANLVAGETHAEHGATYTNIGLMLSELNKPDLAIGYLQAALKSNEAIFGDSPVTAGTLHHLAMANSKSLNFKEAMQQQKRNYAMLSATVGENDTRTKESRLWLNRFTASAVAKQKELNQINAMLPKTAPRRPEPAPAATTTRLLPTQATPSSMGNLPLSEVLRYINSDSRREKRGIVKLSTSAGKKDKKREEAIDQEEPTVASTSAAPKDKSGKKKKKKSKKVA

SEQ ID NO: 45934 - protein, 824 aa, Glycine max
  Clone ID: LIB3051-038-E10_FLI.pep
EELNRHINIVIVMSTQPKLGRIPSIRDRVEDTLSAHRNELISLLSRYVAQGRGILQPHNLIDELDNIPGDDQAIVDLKNGPFGEIVKSAKEAIVLPPFVAIAVRPRPGVWEYVRVNVSELSVEQLSVSEYLSFKEELVDGKINDNFVLELDFEPFNATFPRPTRSASIGNGVQFLNRHLSSIMFRNKDSLQPLLDFLRAHKYKGHALMLNDRIQTISKLQSALAKAEDYLSKLAHDTLYSEFEYVLQGMGFERGWGDTAERVLEMMHLLLDILQAPDPSTLETFLGRVPMVFNVAILSPHGYFGQANVLGLPDTGGQVVYILDQVRALENEMLLRIKKQGLDFTPRILIVTRLIPDAKGTTCNQRLERVSGTDHTHILRVPFRSESGTLRKWISRFDVWPYLETYAEDVASEIAAELQGYPDFIIGNYSDGNLVASLLAYKMGVTQCTIAHALEKTKYPDSDLYWKKFEDKYHFSCQFTADLIAMNNADFIITSTYQEIAGTKNTVGQYESHAGFTLPGLYRVVHGIDVFDPKFNIVSPGADMSIYFPYSEKQNRLTALHGSIEQLLFAPEQTDEYIGLLKDKSKPIIFSMARLDRVKNITGLVESFGKNSKLRELVNLVIVAGYIDVKKSSDREEIAEIEKMHELMKKYNLVGDFRWIAAQTNRARNGELYRYIADTQGAFVQPAFYEAFGLTVVEAMNCGLPTFATCHGGPAEIIEHGISGFHIDPYHPDQASQLLVEFFQKSKEDPSHWKKISDGGLQRIYERYTWKIYSERLMTLAGVYSFWKYVSKLERRETRRYLEMFYILKFRDLANSVPLAKDDAS

SEQ ID NO: 45935 - protein, 465 aa, Glycine max
  Clone ID: 700871938_FLI.pep
VLQLKLKSCPSLFNSKHKTSSSMAASVSTVGAVNRALLNLNGSGPGVSAPSSSFFGSSLKKVIGSRVPNTKISSGSFKIVAVEEKKEIEETQQTDKDRWKGLAYDISDDQQDITRGKGLVDSLFQAPQDAGTHYAVMSSYEYLSTGLRQYLDNNMDGFYIAPAFMDKLVVHITKNFMTLPNIKVPLILGIWGGKGQGKSFQCELVFAKMGINPIMMSAGELESGNAGEPAKLIRQRYREAADLIKKGKMCALFINDLDAGAGRLGGTTQYTVNNQMVNATLMNIADNPTNVQLPGMYNKEENPRVPIIVTGNDFSTLYAPLIRDGRMEKFYWAPTRDDRIGVCTGIFRTDSIPEQDVVKIVDTFPGQSIDFFGALRARVYDDEVRKWISGVGVDGIGKKLVNSKDGPPTFEQPKMTLEKLLTYGNMLVQEQENVKRVQLADKYLNEAALGNANEDAINRGTFFQS

SEQ ID NO: 45936 - protein, 366 aa, Glycine max; identical to SEQ ID NO: 37097
  Clone ID: 700894101_FLI.pep

SEQ ID NO: 45937 - protein, 290 aa, Glycine max
  Clone ID: 700894116_FLI.pep
RQRLLSDISRLEAKVERLEGQLQVKDREIATITRTEAKNTAALKAQIEKLQQERDEFQRMVIGNQQVKTQQMHEMKKKEKEYIKLQERLNQVLMEKKKESRSGMEIMNLLQKEGRQRGTWNGKKADNDFYKKIVDAYESKNQELMAENADLRALLRSMQVDMRDFLNAPNGLPKQSFTGNERVESDPSQSPLVGKMDVFDLPFHMARDQIEESLRNKMASIKERMVQLQDAQKEAEVTSEATERELELEAQLVEARSIIQEQASIMSKHLAKSDRPRESIIPAPAEAVCN

SEQ ID NO: 45938 - protein, 309 aa, Glycine max
  Clone ID: 700852624_FLI.pep
KAPQTSTVPASTPPVSVAPQAPAPAATGALPASVTAPVSSPSPAPAPAPAPISSGTAVEGSDIYGQAASNLVAGSNLEGTIQQILDMGGGSWDRDTVVRALRAAYNNPERAVEYLYTGIPEQAEAPLVARAPVSAQPTNPPADAPQTAQPAAVTSAGPNANPLDLFPQGLPNVGSGAAGAGSLDFLRNSQQFQALRAMVQANPQILQPMLQELGKQNPHLMRLIRDHQADFLRLINEPAEGGEGNILGQMASGMPQAVTVTPEERQAIERLEAMGFDRAIVLEVYFACNKNEELAANYLLDHMHEFEEQ

SEQ ID NO: 45939 - protein, 177 aa, Glycine max
  Clone ID: 700848190_FLI.pep
FCKNIVLAGVGSLTLVDDRAATEEMLSSNFLIPPDENVYSGKTLAELCCNSLKDFNPMVHVSVEKGDLSSFDVEFLSKFDVVVVSCCTLSAKKLANGKCRKLSKRVAFYAVDCRDSCGEIFVDLQDYKYSKKKQDETVECDLKYPSFEDALSVPWRALHRRMSKLYYAMRGLVNSKL

SEQ ID NO: 45940 - protein, 575 aa, Glycine max
  Clone ID: 700852965_FLI.pep
SLPPAERERGGTSKLAEAMERSIPVVREAWLIDSIEKQEPQPLEAYDLVSDLSVDGKGIPWDKQDPGEEAIESLSAELKLYGKRGVYKDTKLQEQGGKIFERDGILYNCAFSVCDQGRGLNDYCVMQLIVVPENRLHLYFKKGRVGDDPNAEERLEEWDNVDGALKEFVRLFEEITGNEFEPWEREKKFQKKPLKFYPIDMDDGIEVRHGALGLRQLGIAATHCKLEPLVANFMKVLCSQEIYKYALMEMGYDCPDLPIGMVTNLHLKKCEDVLLEFIDKVKSLKETGPKAEAVWTDFSQRWFTLMHSTRPFNFRDYQEIADHAAAALEGVRDITQASHLIGDMTGSTIDDPLSETYKKLGCSISALDKSSDDYEMIVKYLEKTYEPVKVGDIEYGVSVENIFAVQTGGCPSYEDIIKLPNKVLLWCGSRSSNLLRHLQKGFLPAICSLPIPGYMFGKAIVCSDAAAEAARYGFTAVDRPEGFLVLAIASLGNEITELKTPPEDASSLEEKKVGVKGPGKKKTDESEHFVWKDDIKVPCGKLVASDHQDSPLEYNEYAVYDKKRARISYLVGVKY

SEQ ID NO: 45941 - protein, 157 aa, Zea mays
  Clone ID: 700082365_FLI.pep
KFRMSLRQRQKRLRSATPSAGARYWCGSISSFPQSGSLSSAPLPTSRRPSSSRSPTATEAPLTYPPLSTSPSSSVHTSPSPTSRLCSSSPISRPPRRSSMRSPQQLHLVSTLLISTLVLAASGLPSCRILHTAVELGTPPANVEAHSLRLKCFPQSP

SEQ ID NO: 45942 - protein, 197 aa, Zea mays
  Clone ID: 700221461_FLI.pep
NIAQFAADLGIPFQFSAISADTINPAELVSATADEVVAVVLPVGCSARAPPLPAILRLVKQLAPKIVIAIDHGADRADLPFSQHFLNCFQSCMFLLDSLDAAGIDADSTCKIEKFLIQPRIEDAVLGRGKVDKPIAWRSAFAAAGFAPVPPSNLAEAQADCLLKRVQVRGFHVEKCGVGLTLYWQCGELVTVSAWRC

SEQ ID NO: 45943 - protein, 342 aa, Zea mays
  Clone ID: 700345973_FLI.pep
MVSVSGEPLERLGAYMVEGLVARLAASGSSIYKALRCKEPRSSDLLSYMHFLYEACPYFKFGYMSANGAIAEAVKGEDRIHIIDFHIAQGAQWVSLLQALAARPGGPPFVRVTGIDDPVSAYARGGGLELVGKRLSHIAGLYKVPFQFDAVAISGSEVEEGHLGVVPGEAVAVNFTLELHHIPDETVSTANHRDRVLRLVKGLSPRVLTLVEQESNTNTAPFAQRFAETLDYYAAIFESIDLALPRGDRERINIEQHCLAREIVNLVACEGEERVERHEVFGKWKARLMMAGFKPSPLSALVNATIKTLLQSYSPDYKLAEREGVLYLGWKNRPLIVSSAWH

SEQ ID NO: 45944 - protein, 103 aa, Zea mays
  Clone ID: LIB189-012-G12_FLI.pep
ELSDLGWATCHQYHTIESNDQISTGPHAHHAQREHLHEVGGHAVHQRGPRGGGHLAQPHEVVVGDVVVAGCDGVGAGGERDDELHGLHRRLLEPSRHSRFPDE

SEQ ID NO: 45945 - protein, 347 aa, Zea mays
  Clone ID: LIB3062-055-E6_FLI.pep
LAALKRAANQHGDAEQRLIAMMVAALSSRIAPAASAPSQLLADLCSVEQRAGSQLLQDLSPCFRVALHAASAAIVEAVGDHRAIHLVDFDVSFPQHAALIQYLADRRVQGRSLKVTAVTDPSSPFTQSLTASLPAIEERLKKLAERAGVEYRFTVVSCRAAELDASRLCCEPGEAVAVNLAFALSHVPDESVSPANPRDELLRRVRALGPQVVTLVEQELNTNTAPLAARFTDACAHYGAILESLDATLAREIAEKARAEAALSKKAANAVGRDGPDRLERCEVFGKWRARFGMAGFRPVSLGSSIAEELVGARVGHVPPGFTVKAENGVLRFCWMGRAVTVASAWR

SEQ ID NO: 45946 - protein, 97 aa, Zea mays; identical to SEQ ID NO: 44657
  Clone ID: LIB3245-499-H7_FLI.pep

SEQ ID NO: 45947 - protein, 468 aa, Zea mays
  Clone ID: LIB3245-573-D6_FLI.pep
RKNSWMDGMPGTQCPIAPNTNFTYKWQPKDQIGSFFYFPSIGMQRAAGGYGAISVVSRLLIPVPFDQPPPESDHAVLIGDWYTKDHEVLARQLDAGKSVGRPAGVLINGKGGKDLEAAAPMLTFEAGKTYRLRVCNTGIKASLNFRIQGHDMKLVELEGSHTLQDVYDSLDVHVGHCLSVLVDADQAPGDYYMVASTRFIHDAKSASAVIRYAGSSGAPPAPNMTEPPAGWAWSINQARSFRWNLTASAARPNPQGSYHYGQINITRTIKVMVSRGHIDGKLRYGFNGISHRDTETPLKLAEYFNVTDGVFSYNQMGDVPPAVNGPLHVIPNVITAEFRTFIEIVFENPEKSIDSLHLDGYAFFGVGMGPGTWSPEMRKTYNLLDTVSRHTIQVYPRSWTAIMLTFDNAGMWSVRSNVWERYYLGEQFYISVISPARSLRDEYNMPDNALRCGKVVGLPLPPSYAPAR

SEQ ID NO: 45948 - protein, 101 aa, Zea mays
  Clone ID: LIB3279-197-C6_FLI.pep
DSLDAAGTNADAASKIERFLIQPRVEDAVLGRRKAEKAMAWRAVFTSAGFAPVPLSNLAEAQADCLLKRVQVRGFHVEKCGMGLALYWQRGELVSVSAWRC

SEQ ID NO: 45949 - protein, 504 aa, Zea mays
  Clone ID: LIB3594-024-A4_FLI.pep
LNWYTSPEEADDSAATFASDVYRLGVLLFELFCTFETMEDKMRAMANLRHRVLPPQLLLKWPKEASFCQLLMHPVPETRPKMSEVLQSEFLNQSRNSLEEREAALRLREEIEEQELLLDFLQQLQKRKQDMADSLQDTVAFLSSDINEVLHQQSALGHCVNFSPDLDKEVCSGTVEDQSDCGSRKRFRPELQGVDMEENNRSVEECSRTVPSSELIQENVLSKSSRLMKNLKKLETAYFLTRSKLAKQVGNQINSCNRVVKRTTGSAVGTEASSIDDFSLERQYGRRQRGWVNSFLEGLCKYLSFSKLKVRAELKHCDSLNSSNLVCSVGFDRDREFFATAGVNKKIKVFEYNMIVNEHRDIHYPVVEMSNRSKLSCISWNSYMKSHIASSDFEGIVQVWDVTRSQVFVEMREHERRVWSVDFSIVDPTKLVSGSDDGSVKLWDMNQAILFLHLLLGVLALLKQGQMCVLCNFNLILLAPLPSALQTTKFTAMIYVTYELLIVH

SEQ ID NO: 45950 - protein, 199 aa, Zea mays
  Clone ID: LIB3595-020-D3_FLI.pep
QGIASKWESIRVEDLKVGKDEVVIVNCLYRFRNLIDETVAVDSPRNRVLNTIRQVNPAIFIHGIVNGSYSVPFFITRFREALFHFSALFDMLETTVPRDDAQRALIEREMFGREALNVIACEGSDRVERPETYKQWQVRNLRAGFVQSPLNQEIVMKAMDKVKDIYHKDFVIDEDNGWLLQGWKGRILYAISTWKPKNN

SEQ ID NO: 45951 - protein, 150 aa, Zea mays
  Clone ID: LIB3607-026-A2_FLI.pep
STRCKNLVLYSLTGGRRSGNSVVRRLPRRRGEQGEVLPAQLKARVLLHQRVPLPRIHAEEQPGLRGRAPGQGHWPEPGLPQLVAPPLHAHLPGPLGPPYGHDVAYLRAQELSLNRVPLGRLLLGRAGAVSQRVEQRRVVVQRLHEPAQEI

SEQ ID NO: 45952 - protein, 419 aa, Zea mays
  Clone ID: LIB3608-012-C9_FLI.pep
KHMQDLRIAMDSESEKSVRRVSGKGARGKQHGNEFVDLHTMLIHCAQAMATGDRRSATEMLKQIKQHSSLRGDATQRLAYCFAEGLEVRLAGTGSQVYQSLMAKRTSVVEFLKAYKLFLAAISLNKVHIIFSNGNIVDAVAGRSKLHIVAYGVQYGLQWPGLLHFLAGREGGPPEVRFTGIDLPQPGFRPAYQIEETGRRLSNCAREFGVPFKFHAIAAKWEMVSAEDLNIDPDEVLVVNSDCHLSNLMDEGVDADTPSPRDLVLNNIRKMRPNIFIQIVNSGTYGAPFFLTRFREALFYYSALFDMLDATIPRDNDERLLIERDIVGRSALNVIACEGADRLDRPETYKQWQVRNHRAGLKQLPLNPEVVKLARDKVKKYYHKDFLIDEDRQWLLQGWKGRVLFAMSTWVAEDNNSTF

SEQ ID NO: 45953 - protein, 196 aa, Zea mays
  Clone ID: LIB3608-061-B4_FLI.pep
LTQFAVDLGIPFEFTDINLDAFDPAEFIAPSPNEVVAVCIPVGCSARTPPLPMLLQLVKQLAPKIAVAIDHGSDRGDLPFSQHFMNCFQSCMFLLDSLDAAGTNADAASKIERFLIQPRVEDAVLGRRKAENAMAWRAVFTSAGFAPVPLSNLAEAQADCLLKRVQVRGFHVEKCGMGLALYWQSGELVSVSAWRC

SEQ ID NO: 45954 - protein, 403 aa, Zea mays
  Clone ID: LIB3633-002-E9_FLI.pep
SHGVHGKGSGHGKGRGKKQPKKEVVDLETLLVHCAQSVATDDRRGATELLKQIRQHASPNGDGDQRLAHCFANGLEARLAGNGSQIYKSLIMTRFPCTDVLKAYQLYLAACPFKKISHFFANQTIMNAVEKAKKVHIVDYGIYYGFQWPCLIQRLSTRPGGPPRLRITAIDTPHPGFRPAERIEETGRYLKDYAETFNVPFEFRAIPSRFEAVQIEDLHIAKDELLIVNSMFKFKTLMDESVVAESPRNMVLSTIRKMNPHLFIHGIINGSYNAPFFASRFREALYHYSAIFDMLETNIPRDNEQRLLIESALFGREAINVISCEGLERMERPETYKQWQVRYQRAGFRQLPINQDIMKRAREKVRCYHKDFLIDEDNRWLLQGWKGRIVLALSTWKPDHRSS

SEQ ID NO: 45955 - protein, 388 aa, Zea mays
  Clone ID: LIB3689-204-A2_FLI.pep
KERKEEQRRKQRDEEGLHLLTLLLQCAEAVNADNLDDAHQTLLEIAELATPFGTSTQRVAAYFAEAMSARLVSSCLGLYAPLPPGSPAAARLHGRVAAAFQVFNGISPFVKFSHFTANQAIQEAFEREERVHIIDLDIMQGLQWPGLFHILASRPGGPPRVRLTGLGASMEALEATGKRLSDFADTLGLPFEFCAVAEKAGNVDPEKLGVTRREAVAVHWLHHSLYDVTGSDSNTLWLIQRLAPKVVTMVEQDLSHSGSFLARFVEAIHYYSALFDSLDASYGEDSPERHVVEQQLLSREIRNVLAVGGPARTGDVKFGSWREKLAQSGFRAASLAGSAAAQASLLLGMFPSDGYTLVEENGALKLGWKDLCLLTASAWRPIQVPPCR

SEQ ID NO: 45956 - protein, 67 aa, Zea mays
  Clone ID: LIB3958-002-H3_FLI.pep
HQCILLLDRFAHDMVILPATPWVHYGFPFFYYHLYPYRCCQPWNWQHFLLSHTKLLPHITGDYATLV

SEQ ID NO: 45957 - protein, 308 aa, Zea mays
  Clone ID: LIB3957-018-F7_FLI.pep
LLSPVVSTSGRFEEFFPIGGESPESFLSVFSDDVIQASFNTRREEWEKVFEKQSKGEITTASEEQIRELSRSCSRGGRGSRGEGGDSGSSSSSKWEIKPSSLTDKKPTHSNSHGRHYEITGDECPHLRLLDMDVGLANIARGSMMAPSYNTRANKIAIVLKGQGYFEMACPHVSGGRSSPRRERGHGREEEEEREEEQGGGGGQKARSYRQVKSRIREGSVIVIPAGHPTALVAGEDKNLAVLCFEVNASFDDKVFLAGTNSALQKMDRPAKLLAFGADEEQQVDRVIGAQKDAVFLRGPQSHRVSSV

SEQ ID NO: 45958 - protein, 378 aa, Zea mays
  Clone ID: 700105389_FLI.pep
AHFLALAHPFTALTVAKLYLSDIYKLHGLPSSIVSDRDPIFTSKLWQELFRLAGTKLCMSSAYHPQSDGQTERVNQCLEAYLRCFVHSCPKQWYSWLSLAEFWYNTCYHTALGKSPFEVLYGHAPSQLGLDTVDQCSVPDLQTWLLGHQQMLQQVKFHLQRAQDRMKKQADKGRVERTYTVGDQVFLKLQPFCQRSVADRPVSKLAFRFFGPFEVIEQINPVAYELALPSGSAIHPVFHVSQLKSANGVRVPSTDSLPDIFTGLQVPEEVLESRLLRKGGKVISQLLIKWSNWPVSLSTWEDEEAIKQKFPQAPAWGQAVVKEGGNVSRADHMDHAEERTQAVQQKAQTEGVKEDNQSPRSRRVPKPNTKYIGAEWRV

SEQ ID NO: 45959 - protein, 277 aa, Zea mays
  Clone ID: LIB3060-073-D7_FLI.pep
HTSVASNQGGARYGESSSPQDNSSEAMKTDSTCKMKSNSDAAPIKQGSNGSSNNDVGSSTKNVAARPSGDRERVASPLAIKSTQHASAFHTIQNQTSPANLIGEDKADEGISNTVKMSHPTEVPQGCVQHHHHVHYYLHVMTQKQPSTDRGSSDVHCGSSNVFDPPVEGHAANYSVNGGVSVGHNGCNGQNGSSAVPNIARPNIESINGTMSQNIAGGGIVSGSGSGNDMYQNRFLQREAALNKFRLKRKDRNFGKKVACFQLHACCSYDLKSVIVI

SEQ ID NO: 45960 - protein, 277 aa, Zea mays
  Clone ID: LIB3245-047-H2_FLI.pep
ADCSGNCLSSLVPCGCARVTGGEFPYTPEGLLKTEFLDECTSVNHFPQEHHRFYCTVCPLERSKNKASPGPCKGHLMRKFIKECWSKCGCGMQCGNRVIQRGITCKLQVFFTREGKGWGVRTVEDLPKGSFVCEYVGEVLTSSELHERAIENARNGKHKHQVLLDAGWGSGVLRDEDALSLDGSFYGNVGRFINHRCYDANLVQIPVEVETPDHHYYHLAFFTNKKVEAFEELTWDYGIGFDDTEGPSKPFRCMCGSRYCRDPNNLRRMARAAAKRK

SEQ ID NO: 45961 - protein, 167 aa, Zea mays
  Clone ID: LIB3354-124-F7_FLI.pep
ITQSSNERRDNSGSLHGLLLGKNILVVDDNKVNLRVAAGTLKKFGAKVECVESGKDALASLQVPHKFHLCLMDIQMPEMDGFEATKQIRAMEAKANEQAVACDDSETDGATRAARWHLPVLAMTADVIQATHEECTKYGMDGYVTKPFEEKQLFQALQKFLDPGMSS

SEQ ID NO: 45962 - protein, 209 aa, Zea mays
  Clone ID: LIB3356-011-F10_FLI.pep
YIEDYGISCHCKPSPGSSVVCGRDCYCSMLFSCCSSQCECDIACTNKSFQHRPLTKTKLIKTEKCGHGLVAEDEIKKGEFVIEYVGEVIDDRTCENRLWTMKRLDDTDFYLCEVSSNMVIDATNKGNLSRFINHSCEPNTAMQKWTVDGETRVGIFALRDIKIGEELTYDYKFVQFGAAQVCHCGSSKCRKMLGTTKYSGSSQNHRTKK

SEQ ID NO: 45963 - protein, 249 aa, Zea mays
  Clone ID: LIB3605-002-D7_FLI.pep
KKKKGRNISSETSQKVKPVISCPESDGCARASINGWEWRNWARNATPSERARVRGYHVRTILSASNDNVWKNSQAKVSSARTNRVKLRNLLAAAEGSELLKITQMKARKKRLRFQRSKIHDWGLVALESIEAEDFVIEYVGQLIHRRVSDIRESQYEKSGIGSSYLFRLDDDFVVDATKRGGLARFINHSCEPNCYTKVITVDGQKKIFIYAKRRIYAGEEITYNYKFPLEEKKIPCHCGSRRCRGSMN

SEQ ID NO: 45964 - protein, 67 aa, Zea mays
  Clone ID: LIB3607-048-H5_FLI.pep
QGVPETARAEGLRHLSQREAALNKFRLKRKDRCFEKKVRYQSRKLLAEQRPRVKGQFVRQDHSIQGS

SEQ ID NO: 45965 - protein, 319 aa, Zea mays
  Clone ID: LIB3608-056-B4_FLI.pep
QLTSMALVQVRFTRAEAPTTISELPGLVCDDISGGQENIPIPATNLVDDPPVPPSGFKYLKSLQIPKDIKIPSSIIGCDCEGGCASNKKCLCAQRNGSDLPYVSYKNIGRLVEPKAVVFECGANCSCNHDCVNRTSQQGLQYRLEVFKTASKGWGVRTWDTILPGAPICEYTGVLRRTEDLDGSQNNYCFDIDCLQTMKGLDGREKRAGSEMHLPNLHPENDSDAQPAPEYCIDAHSIGNFARFINHSCQPNLFVQCVLSSHNDVKLAKVMLFAADTILPLQELSYDYGYRLDSVVGPDGKIVKLACHCGAPDCRKRLY

SEQ ID NO: 45966 - protein, 278 aa, Glycine max
  Clone ID: 700764039_FLI.pep
IAMQVTETRTVQVKQLSDLAGVREIHEFFSFSGEIEHVEILSEDGKSKTAYVTFKDPKALEIALLLSGATIVDQVVKITPAENYVPNREMEEVRVVENAINVAPSENSENVSLSIEEGKASPTNRRIYLSKAQDAVTSMLAKGSAIRQDAVNKAKAFDEKHQLTANASAKVISLDKRVGLTEKLTVGIAAVNQKVKSVDQRLQVSDKTMAAIIAAERKINNTGSAVKTSRYVTAGTAWFNGAFSKVAKAGHVASTKTREKFHLAVSNLTAKEPSVAAA

SEQ ID NO: 45967 - protein, 64 aa, Glycine max
  Clone ID: 700838895_FLI.pep
LSSVRIQMLMLGFSPHKHYNLVIKSRCLARSVCMWSLVFFFFLIRFTFSSVIDMTPTCPILCIT

SEQ ID NO: 45968 - protein, 216 aa, Zea mays
  Clone ID: 700621162_FLI.pep
SHKGAGSLGAVAGFAIAVVFAWKFLRPSRRAPKRPPPTPAAAPAATVPDAAEPIGDSGKVVTREIVVKRLKGCRKVTCQLLGVVFEEKIPEELQKHATVRPSVVELLLEISRYCDLYLMETVIDDKSEENALMALETSGLFRTGGLMKEKVLFCSSEVGRTSFVRQLESDFHIDTSLDIVSQLSRFIRCQLFISTVEGEQLAGNVFNSPSLEQFFS

SEQ ID NO: 45969 - protein, 366 aa, Glycine max; identical to SEQ ID NO: 37097
  Clone ID: 700682577_FLI.pep

SEQ ID NO: 45970 - protein, 289 aa, Glycine max
  Clone ID: 700731595_FLI.pep
IPAERIMSCFGCCEEDDYQKTAESGGQHVVKNSTGNDGNSRASETAKQGTQAVKIQPIEVPELQVDELKEITDGFGESSLIGEGSYGRVYYGVLKSGQAAAIKKLDASKQPDDEFLAQVSMVSRLKHDNFVQLLGYCIDGNSRVLAYEFASNGSLHDILHGRKGVKGAQPGPVLTWTQRVKIAVGAAKGLEYLHERADPHIIHRDIKSSNVLIFDDDVAKIADFDLSNQAPDMAARLHSTRVLGTFGYHAPEYAMTGQLNAKSDVYSFGVVLLELLTGRKPVDHTLPRG

SEQ ID NO: 45971 - protein, 177 aa, Glycine max
  Clone ID: 700733382_FLI.pep
GGVLIVPQNFAVAAKSQSDNFEYVSFTSLDFPALWLLKLSAQYGSLRKNAMFVPHYTLNANSIIYALNGRALVQVVNCNGERVFDGELQEGGVLIVPQNFAVAAKSQSDNFEYVSFKTNDRPSIGNLAGANSLLNALPEEVIQHTFNLKSQQARQVKNNNPFSFLVPPQESQRRAVA

SEQ ID NO: 45972 - protein, 443 aa, Glycine max
  Clone ID: 700738195_FLI.pep
DQAVLLDMRSIPFFEPIVHHAPPPQPATQVTTTTGKEKSNPSRTIIAIVVPVVAVVVLLVAFTYNYLGARRRRQKPFQSEGGEGELDNDIKIDELLQFDFATIKFATNNFSDANKLGQGGFGIVYKGTLSDGQEIAIKRLSINSNQGETEFKNEILLTGKLQHRNLVRLLGFCFSRRERLLIYEFVPNKSLDYFIFDPNNRVNLNWERRYNIIRGIARGLLYLHEDSRLQVVHRDLKTSNILLDEELNPKISDFGMARLFEINQTQASTNTIVGTFGYMAPEYIKYGQFSVKSDVFSFGVMILEIVCGQRNSEIRGSEENAQDLLSFAWKNWRGGTVSNIVDDTLKDYSWNEIRRCIHIGLLCVQEDIADRPTMNTVLLMLNSDSFPLAKPSEPAFLMRDKSSLPTAMLSGGQHSEVTRSGYSGSQSAQESSIMAPITEPYPR

SEQ ID NO: 45973 - protein, 355 aa, Glycine max
  Clone ID: 700740015_FLI.pep
HPLTVEEQYLQWDDAERWICSPVSGYSNNKTNSYAQLQQRRPKSKSGPIMPPGTGYYSNYSPTIPLRQGLVVKNFMMGGSPFSTGVLAPDAISLHHYYSHEAVFGHRYDFDNSMQCSSPLLNENSVALPSVSSAPMWSELLCDPSSPNSQDEKRKETKNADDVTSLSKCDKGTQMSPPETENDAPKSSPNSTMDQQNYLSAKLEVRDVEIDREATTVRWSKSHVPKLSLLPGIHSRKSSRTEAKASGLDIADSTLDSSKIQREEAKIVAWESLQKAKAEAEIRKLEMKLEKKKSSSMDKILNKLRRAQMKAEKMRNQITVQEGQQVSNTRKVFSFHKYAQIWSPRSCFGTHALHD

SEQ ID NO: 45974 - protein, 303 aa, Glycine max
  Clone ID: 700888856_FLI.pep
FYNTTNCPIPMVVFSCVKTMVVLVLAFLISVPSMVASAVSLYQDVDVTWGDGRGKILNNGQLLTLSLDRASGSGFQSKNQYLYGKIDMQIKLVPGNSAGTVTAFYLRSEGSSWDEIDFEFLGNLSGDPYIVHTNVYTQGKGNREQQFYLWFDPTADFHTYSFLWNPAHVVFYVDGRPIREFKNLEGAGIEYPKKQPMRLYSSLWNADDWATRGGLVKTDWSEAPFTASFRNFRANGCVWSNGVSSCNSSTSSEKAWLYSQQLDSTNQKKLKWVQKNYMIYDYCTDLKRFPQGLPLECTVRTKS

SEQ ID NO: 45975 - protein, 268 aa, Glycine max
  Clone ID: 700894779_FLI.pep
VILGDPSPVLFYPISSTEIRCLVDVPGQKLPSLGGGEMACYLKTVVAPQVPPELYDSFIAAIDKGNIRTMPNRSMPASPYPTPGALLMGDAFNMRHPLTGGGMTVALSDIVVLRDLLKPLHDLHDASALCRYLESFYTLRKPVASTINTLAGALYKVFCASPDPARKEMRQACFDYLSLGGVFSDGPIALLSGLNPRPLSLVLHFFAVAIYGVGRLLIPFPSPKRMWIGARLISGASGIIFPIIKAEGVRQMFFPATVPAYYRTPPVH

SEQ ID NO: 45976 - protein, 189 aa, Glycine max
  Clone ID: 700894015_FLI.pep
FRWRFPTANDFGSEVIPASAREFYMKAYLFNDYWEDIGTIRSFFEANLALTEHPPRFSFYDAAKPMYTSRRNLPPSKIDNSKIVDSIISHGSFLNNSFIEHSVVGIRSRINSNVHLKDTVMLGADYYETDAEVVALLAEGRVPIGIGENTKIKDCIIDKNARIGKNVVIANSEGIQEADRSSEGFYIRS

SEQ ID NO: 45977 - protein, 343 aa, Glycine max
  Clone ID: 700752657_FLI.pep
ERKTSTILLIRFVQIKTCLFATLLLTKNVVPSEMSDTVEHTDQRAEAIPQSTATPNWTIHVSDIRTVKVSNISLVTSKKDIEEFFSFSGDIRYIEMQRESGHTQVAYVTFKDTQGADTAVLLTGSKIGDLYVTITPVEKYQLPPEALPSSPTNQSPDAVKKAEDVMSTMLAKGFILGKDAINKAKAFDERHQLTSNASSTVASIDRRIGLSDKLSIGTTIVNGKVREMDERYQLSEMTKSAMAAAEQKANSAGSAIMNNSYVISGASWFSSAFTAIAKAAGDVSTMTKEKVEQAAVERNEIIYSERKGTVDEFAKTHLEEASDIGPAVVPVNSDDDRNLATIL

SEQ ID NO: 45978 - protein, 119 aa, Glycine max
  Clone ID: 700764321_FLI.pep
IPLTIQSQMGSISISEPIKLCCGNNSSEKAAQNSIPSEPIPIGGNTQLSTTSTKTNSGVESTLLSSMLGSSTISLSSEDSGVSESEDCVTGSNLTMEAAAVAAVWMSRGEHVTGLGSRS

SEQ ID NO: 45979 - protein, 44 aa, Glycine max
  Clone ID: 700748435_FLI.pep
ITKMAWKDTQNFQHYGSRIFSKLKSNFMKIPCNNTSYYLRFLKL

SEQ ID NO: 45980 - protein, 300 aa, Glycine max
  Clone ID: 700752938_FLI.pep
QNKGVVPLDNALFKPLTPNKEMVDPNTLLHYTNVLDAMVDAAYFSMKNLNITDVVVLVTETGWPAKGDSKEPYATKDNADTYNSNLIRHVFDRSGTPLHPETTSSVFIYELFNEDLRSPPLSEANWGLFYGNTTPAYLLHVSGIGTFLANDTTNQTYCIAMDGFDSKTLQAALDWACGPGRANCSEIQPGESCFQPNNVKNHASYAFDSYYQKEGKAQGSCDFKGVAMITTTDPSHGSCIFPGSKKVSNKTKEVVNSTISSNAGEKLRFKTFNSIKISAIGNILHILLAAYLPTLLLVLL

SEQ ID NO: 45981 - protein, 101 aa, Glycine max
  Clone ID: 700794437_FLI.pep
PLILYIKIVLASPRFQIAIMVVTTYRDVVVVEIESKLNHLTHAQSETFDSLISSGAFLVPSFVEWRLVPPRHHVQDEVVCVYAGSYQGVGCVVVLEGMEDA

SEQ ID NO: 45982 - protein, 224 aa, Zea mays
  Clone ID: LIB3067-052-A4_FLI.pep
TIFYAPASRSAQAPYPRESCNCLPRCDVGREGQNFGWQVCAHGQTTSQRPKVTSSETRSRSPGIQGLPCFRRRRRAETLTRARGRRDRDPRGGSCGSRDGEQGQRRHADPRGTPPTPHPLRSPRVTRSPRPRSMPRPVLLAAHTSRKTNSVANEARKQRGTEGDVLTREEVGDGEDAERPPDGAQFCLLDQIVDALHPLPHLGLRARHGAARPVGGGEGSGGTD

SEQ ID NO: 45983 - protein, 224 aa, Glycine max
  Clone ID: 700894080_FLI.pep
RAIDGLNVYNILEPCYHFPDAATAKENGTLPRSFKQLGVTERPLPVRKRMFGRAWPFRAPVKPGLVPLWPQLAQTRHVACVSDEVASSWLNNVAVRKAIHAESEKVAGPWELCSSRIEYHHNAGSMIPYHKNLTRLGYRALIFSGDHDMCVPFTGSEAWTRSLGYKIVDEWRPWNSNNQVAGYLQAYENNLTFLTIKGAGHTVPEYKPREALDFYSRWLEGKLI

SEQ ID NO: 45984 - protein, 76 aa, Zea mays
  Clone ID: LIB3069-036-F1_FLI.pep
QVHHIVCMYLCIRVCKYILEGKNQKYVLCCAIIFLSSQIDYLVLTEQSPCACCGTVTVGRRTEKLLKKTHQSHLEK

SEQ ID NO: 45985 - protein, 324 aa, Zea mays
  Clone ID: LIB3069-037-E10_FLI.pep
LQTAMAMGLPGLRCHRLLARGSLPPLGPALYRRPLERTSALRYSSLQAQAGDSIGEEALRMFLEERQLHGDFVTKVSDMVWRRNGANVGAAEATTGQGSAVDVAQPEDVREDAVDEGMLRLAAISDWVSGDSSPPLSKRLSAEERQNESNKRKELNLLKYEALKDELLLLTTGTGAACSLYCLLVFSLETAVSYALGVGFSCLYLQLLYQHADNLSKEDIPEVFLKKKVKKIGITSEDLKNTIEKTLGGAGLALSSPRLMIPAVIYGLSALSHHFQNSFFSFEVLPGMMGFLAYKAAALVQVYRDNEDLRLILPDEEADDSDST

SEQ ID NO: 45986 - protein, 162 aa, Zea mays
  Clone ID: LIB3069-037-H1_FLI.pep
YAEVRGYGMSGDAHHITQPQSGGRGAILAMKRALDQSGLHVNEIGYVNAHATSTPLGDAVEANAIKSVFGDHAASGDLAISSTKGAIGHLLGAAGSVEAIFTVLAIHHGLAPPTLNLERPDPLFEGAFTPLAAPKKMSIRAAISNSFGFGGTNTSLLFSCPP

SEQ ID NO: 45987 - protein, 415 aa, Glycine max
  Clone ID: 700842952_FLI.pep
IILSCVRSNEHQGIGFLNDPRRLNVALTRARYGIVILGNPKVLSKQPLWNSLLTHYKEHECLVEGPLNNLKQSMVQFQKPKKIYNERRLFYGGGPGIASNDNFGNVGSGAGTSSDRRSSRGRGSYIPPGPPNGTHKPGVHPAGYPPVPRVPLPHFHGGPQSQPYAIPSRGAVHGPVGAVPHVPSPGSRGFGAGRGNSGAPPIGNHLPHQQGTQQPIGSTFNFPALENPNSQPSVGGPLSQPGFANNMHVQGAGQSFRDQFSMPGMSQDFLGDDFKSQGSHVPYNVTDFSTQASQSGYAVDYATQGAQGGFPGNFLNQNSQAGYSRFGSGNDFMSQDYMGHGSQGLFTQVGFSDPLQDDATQSHFSVANANPLQSQMNSLYSQPFAHYNTQPLNMQATQQQPQAQNSQNQKIHYNV

SEQ ID NO: 45988 - protein, 336 aa, Zea mays
  Clone ID: LIB3069-009-E7_FLI.pep
LNSPEPPLPAGDRAVGSHRTKRAATAMSREAARTRSRVLVVGATGRLGGNIAQASLAAGHPTFALVRPHHFARPDSPVLEPLVAAGATLLQGSLEDYSSLLEAVRQVDVVICAVSTKQVLEQKPLIRAIKEAGRVKRFIPAEFGADPTKVQICDMDYGFYEKKIEIRHSIESEGIPHTYICCNFFMRYLLPSLVQPGLDAPPRDEIKIFGEGNTKGVFVKENDVAKFTICTIEDPRTLNKTLYLRPPGNVFSMNELADLWESKLKKSLKRLYATEEQLLKEIHDAPFPLKMDLIFIYSAFVKGDHTYFEIDLSMEGTQLYPHVNYTTVNEYLDTLV

SEQ ID NO: 45989 - protein, 101 aa, Zea mays
  Clone ID: 700619018_FLI.pep
FCLNFSIFYVIHSTTAVTFNVAGNLKVAVAVLVSWSIFRNPISAMNAIGCGITLVGCTFYGYVRHLISQRQAAAPGSLGTAQARNQTEMLPLVVDEKQEKV

SEQ ID NO: 45990 - protein, 47 aa, Zea mays
  Clone ID: LIB3069-051-D4_FLI.pep
EIMSQLMRHELFHDLAAVSVKRRRCYIWSSPLVCPFARYHDYHIYRL

SEQ ID NO: 45991 - protein, 537 aa, Glycine max
  Clone ID: 700843593_FLI.pep
GTTTTFPPSAVSTTSKWLGFVAAVWIQCISGNNYTFSNYSDALKSLMHLTQLQLNNLSVAKDVGKAFGLLAGLASDRFPTWAILLIGSVEGLIGYGTQWLVVSQRIQPLPYWQMCVFLCMGGNSTTWMNTAVLVTSIRNFRSNRGPVSGILKGFVGLSTAIFTTLCSALFADDPGSFLIMLSVIPFAVCLTGVFFLREILPVASADADAEEVKYFGVFNVVAVAMALFLLAYGFIPSPSMLVSRVFVAVLVVMLVSPLGIPVYSYLKGSFGEGNDVEGQRVKEPLLQIPEKENEAVAAEIVKRVPVVGEEHTIMEALRSVDFWILFVSFLCGVGTGLAVMNNMGQIGLALGYPDVSLFVSLTSIFGFFGRIISGTVSEFTIKKAGTPRPLWNAASQLLMAVGYILLAMAMPGSLYIGSILVGMCYGVRLAITVPTASELFGLKYYGLIYNILILNLPLGSFLFSGLLAGILYDMEATTTEGGGNTCVGGHCYRLVFVVMTGACIVGFFLDILLSIRTKNIYTKISMSKKSLATSNRQ

SEQ ID NO: 45992 - protein, 284 aa, Zea mays
  Clone ID: LIB3067-031-H4_FLI.pep
ENGVTSPPSRPRAPDRLLRSAAVTAGAAPANAERATGQLAAPGASSRKPAAGAPGAAGRQPATCAHRHSTSGPDHSAPGPDHTSPGSHNAAPGADNSTSDPHHAASVPTGVATARSHHSATVSPGKPAARSRHPATVSTHGATSRHAPSTRHPAATGRAHAGPERGPDSPARGDTGCVPQEPEDAEPRRRDVPGALALAHGHADERGLGCKRARGRLRHGGGVGGRGPRRPALKTRLRLFLLSSRRCCHPLPVPRRCCSLHFSFIFFFFPLVLLFNFTGPTIDS

SEQ ID NO: 45993 - protein, 176 aa, Zea mays
  Clone ID: LIB3067-032-D9_FLI.pep
NSGYSSIYIQRSGDKRDGCGIFYKPKSAELVQKEVILYNDLVEKYVPSDNVNSALENNSSAEEDKNAKPDNSKRGDPNDPRVRLKRDCVGLLAAFKLSDPCDQILIVANTHIYWDPQWIDVKLAQAKYLLSRVSQFEQLISNKYNCKPSVIIAGDFNSTPGDKVCLAFISLLPEAY

SEQ ID NO: 45994 - protein, 546 aa, Zea mays
  Clone ID: LIB3067-052-F2_FLI.pep
VLVAQAPSRWKMMEVAGAQARAVPLLLRNTASLRTSVSVSCTGSRRSWVAAATAEGDETRGFDKVPMDTPGAYRLVDRDTGRSVIVWGGTDDSDEASMPSPAVLSRTTDRRHSQGVGGGTGIGNFGRFKAQKIKSLVTRSAHRKRESSNRSSTAWSDESSFNGSDDEEESYFERRKHVSDSERHPKMSSGSRDGRTRSAHSLSSVLSQYRGDDDTDFPGSEATSGSKRWGNVADVTYGRQNQKQREPLNFPQRKGPLDGGFFSRRSFKEIGCNDEMLGALRNFDFPRPSHIQAIAYGPILEGRSCVVADQSGSGKTLAYLCPIIQNLRNEEVQGLHKSSPRNPRVIVLTPTAELASQVLNNCRLISKSGVPFRSMVATGGFRQKTQLESLDQELDVIIATPGRFLYLLQEGFVQLANLRCVVLDEVDILFGEEGFEQVLHQLITEAPVTTQYLFVTATLPLDIYNKVVETFPDCEVIMGPGVHRTSSRLEEILVDCSGDDNEEKNPETAFSNKKTALLKIIEESPVRKTIVFCNKVSPFPNTPCAH

SEQ ID NO: 45995 - protein, 108 aa, Zea mays
  Clone ID: LIB3068-013-D12_FLI.pep
RSSARRRGPAPPTRPCPWTPSRPPPSTPTTTPTWSPGAACSPPTRRCSPTRPPPRRCSPTPTAPPPSRPTSSPPSSRWVPYRCSQAQPAPSGPTAGWLASSSMIYVYL

SEQ ID NO: 45996 - protein, 204 aa, Zea mays
  Clone ID: LIB3069-019-H1_FLI.pep
CHAVRRARGHHKSHTFRSEINNRQAKDYIHYCAYAVHISIVFLQILKLLPLVGTSQHAPGDEAAAASDGGGGLVGQPKPTVVGEAVLRGLPRRVLQHRSHLKAHNVGGPTCVEDPLDGSLGVDVLVVGDEVGLGPDVAVESAGVAAAEVDGPGAEPVRAEDADPDGGGAAGAERRRVEEGGAVVPLVVVVGRVGGELVADDVQV

SEQ ID NO: 45997 - protein, 337 aa, Zea mays
  Clone ID: LIB3069-028-E9_FLI.pep
ELQETVAHLRQEISNLSKAAKSEDSFASVQSSEPSTASTDTRDQTNEISNRANMSSRTTDLNESGFISQVLKQASEIESLKQENLRLVEEKDGLEIHSQKLAEESSYAKELASAAAIELKNLAEEVTRLSYENAKLNADLAAARELNASMSRSNIHPDPKRRDHESGILVEELQKELVASCQREAVLEDTLSQKDRRESELLKIIDDAKCREHELKNELASMGALLSKIKKENSQQDVFEFKAKQNGFHSSKTDSGRLVSEMQASDNGCWDGLSTFEEARAAYNFERMRCKELESIVSKLKGEDLRGLDVKVLEELQNFHVEALSRICQEKMASQAL

SEQ ID NO: 45998 - protein, 362 aa, Zea mays
  Clone ID: LIB3069-028-G1_FLI.pep
LFLLASNAATTAPAPCCSCTPPVLRGSSAMPSYAHHHSSPLVRNGAGRVVRRRLRGTERDSLDVFLCFLYLYREINKKKNPETKKLFFLNRPASPLVLGICDFDIRPVWVFFRPVKDDTRMDALKCNNNCAPPEETAEDADAAGALVEKDGFSVEDLLDLEEFGEPDKDGAEHEDDDAPPVPAAAEERSKDDSQPLSVVTYDLPSPPPEMVDLPSHDVEELEWVSRIMDDSLSELPPQAQPPPAVVASLAGRPPLAQQRRPFAHDGAYRAVAPPPGPLRTPTICALSTEAMIPVKAKRSKRSRGPAWWRSGAPFLSDSASSSSTTTTSSCSSSGSFSPFLRLDSPPFGGLELGEGYYGHLLP

SEQ ID NO: 45999 - protein, 135 aa, Zea mays
  Clone ID: LIB3069-050-C3_FLI.pep
RTKSSHRMKKEPKRRRRKILWLSRTCMRNCFLLLCLLRQCPAWVALHLRWAEWACLRWAGWACRRWALVRCQHSGCHQWEATEMRCFFVVVAESLDDDLICSCVSRGGNLIGVVDGYILELIFFMVPGNFWRVND

SEQ ID NO: 46000 - protein, 279 aa, Zea mays
  Clone ID: LIB3069-050-D12_FLI.pep
DDAKEVVHYQTISPKSLAKSVLEEGGWSNFMCSREDTQNNVDVAIVFIGSKLQSSDISKDKQVDPTLADTLKLSFTRSEFSMAFPYVSTTVDERLEDSLLSSFAENCNNGFGRNRITYTDTCTGQDLKKYHNMDAINDLVVSGVASRRANHPSGQTDVIVFCSGGFENPGTAKSEGELLSQLVDSLDLSGAKYTVLYASQPSGLLESPSGLPLGRHLAEKKTNGTKTVQGEKCDGECLVKSSLLEGTFVGIVLLIILISGLMCMMGIDTPSRFEAPQES

SEQ ID NO: 46001 - protein, 238 aa, Zea mays
  Clone ID: LIB3068-027-E1_FLI.pep
SWTSSMCPTTSCVARRRTAAASWATLGFAWMMRSIFMFAAAILVAGVAWFYRRYRSFSKSKLRADRSKWTLTSFHKLSFSEYEILDCLDEDNVIGSGASGKVYKAVLSNGEVVAVKKLWSTAVKKEEGSASASAADNSFEAEVRTLGKIRHKNIVKLWCCCSCRDCKLLVYEYMANGSLGDVLHSSKAGLLDWATRYKVALDATEGLSYLHHDCVPAIVHRGEFCNQTTTEGRRPGRE

SEQ ID NO: 46002 - protein, 303 aa, Zea mays
  Clone ID: LIB3069-044-D12_FLI.pep
QTGPEGKIVSKVYLCEKLSLTNEMYFAITLDRKTAGPLIIACSKGGTSIEDLAEKYPDMIIKVPVDVFKGITDEDAAKVVDGLALKSADRQSSIEQIKKLYELFCKSDCTLLEINPLAETADNKLVAADAKLNFDDNAAFRQKEIFALRDTTQEDPREVAAAKADLNYIGLDGEIGCMVNGAGLAMATMDIIKLHGGTPANFLDVGGSASEGQVVEAFKILTSDDRVKAILVNIFGGIMKCDVIASGIVNAAKQVDLKVPVVVRLEGTNVDQGKRILKESGMTLITAEDLDDAAEKAVKASVK

SEQ ID NO: 46003 - protein, 331 aa, Glycine max
  Clone ID: 700829824_FLI.pep
IGSMSNNNAGKVVCVTGASGFIASWIVKFLLQRGYTVRATVRYPSNLKKVDHLVKLEGAKERLQLFKADLLEEGSFDSVVEGCHGVFHTASPVRFVVNDPQAELLDPAVKGTLNVLKSCAKSPSVKRVVLTSSISAVAFNRRPKTPQVVVDETWFSDPDVCRELELWYTLSKTLAEDAAWKFVNENSIDMISINPTMVAGPLLQPEINESVEPILNLINGKPFPNKSFGWVDVKDVANAHILAYEIASASGRYCLVERVIHYSELATILRGLYPTLQIPDKCEVDEPYIPTYQISTEKAKKDLGIEFTPLEVSLRETVESFREKKIVNFNP

SEQ ID NO: 46004 - protein, 226 aa, Glycine max
  Clone ID: 700873216_FLI.pep
AAELAYFGAQVLHPQSMRPARESDIPVRVKNSYNPKAPGTLIAKTRDMSKALLTSIVLKRNVTMLDIVSTRMLGQFGFLAKVFSIFEELGISVDVVATSEVSISLTLDPSKLWSRELIQQELDYVVEELEKIAVVNLLKTRSIISLIGNVQRSSLILEKAFHVLRTLGVTVQMISQGASKVNISLVVNDSEAEQCVRALHKAFFESELFELENECIPGNGSVPALS

SEQ ID NO: 46005 - protein, 183 aa, Glycine max
  Clone ID: 700874271_FLI.pep
EKMGLSFTKLFSRLFAKKEMRILMVGLDAAGKTTILYKLKLGEIVTTIPTIGFNVETVEYKNISFTVWDVGGQDKIRPLWRHYFQNTQGLIFVVDSNDRDRVVEARDELHRMLNEDELRDAVLLVFANKQDLPNAMNAAEITDKLGLHSLRQRHWYIQSTCATSGEGLYEGLDWLSNNIASKA

SEQ ID NO: 46006 - protein, 230 aa, Glycine max
  Clone ID: 700848828_FLI.pep
GNSTEKRLRLFGFELNPSSKEGCAKESGEGDESVNSSNSASSGGDKTVQEKTSANDPDERKFECQYCYKEFANSQALGGHQNAHKKERMKKKRLQLQSINRYLQHPFQSNHGFAYPSDTPWFYDPSTYNNNSEFTLCEEPQISFNSNSVLDSNFSNDQKTSWYSLASHPSNIQQDTCMFTFSSNASNNNNSPFIFKPCHFPASNQNHNKTLDLQLGLNLESNTRSSLRRM

SEQ ID NO: 46007 - protein, 338 aa, Glycine max
  Clone ID: 700789640_FLI.pep
VDLPVSTGFTYATTEFATQRSDWIQVHQVHQFLRKWLIEHPNFLSTDVYIGGDSYSGITIPAIVQEISLGNEKGLQPWINLQGYLLGNPATTRRHENYRISFAHGMGLISDELYRSLQKNCKGEYINVDTKNVLCSRNIETFNEVTSGLSMVNILDPSCDWLDTETSWRRSLLKKYPRKNFLNTHLKLPSLNCRSYAYFLCGYWANDDSVRSALHIRKGTIGKWRRCTFNIPNKEDISSSYEYHVNLSRKGYRSLIYSGDHDMKIPFLETQAWISSLNYSIVDDWRQWHTDGQVAGYTRTYSNRMTFATVKGGGHTAPEYKPEECLAMFRRWISNKAL

SEQ ID NO: 46008 - protein, 407 aa, Glycine max
  Clone ID: 700790031_FLI.pep
IGAPIHGIRAFLSTNQLNTYDKARNAVALALSPVVKALVDPDGALRDIRNLDSISFSDWFLSKGGTRMSITKMWDPVAYALGFIDCDNISARCMLTIFALFATKTEASLLRMLKGSPDVYLSGPIRKYITDRGGRFHLRWGCREVLHDKSADGSIYVTGLSMSKATAKKIVKADAYVAACDVPGIKRLLPSKWREQEFFNNIYELVGVPVVTVQLRYNGWVTELQDLEKSRRLGKAVGLDNLLYTPDADFSCFADLALSSPEDYYIEGQGSLLQCVLTPGDPYMPLPNDEIIARVAKQVLALFPSSQGLEVTWSSVVKIGQSLYREGPGKDPYRPDQKTPVKNFFLAGSYTKQDYIDSMEGATLSGRQASAYICDAGEGLVALRKKLDDEFKDDLTISNTKDELSLV

SEQ ID NO: 46009 - protein, 225 aa, Glycine max; identical to SEQ ID NO: 40648
  Clone ID: 700790657_FLI.pep

SEQ ID NO: 46010 - protein, 203 aa, Glycine max
  Clone ID: 700873842_FLI.pep
IFCPTLHFSRVILFTTMPSSLSSFLHMVPILSLLVLSCVICSSSAQGPPSPGYYPSSKISPVSFYQGFRNLWGPQHQRLDQGSLTIWLDSNSGSGFKSLHSYRSGYFGAAIKLQPGYTAGVITSLYLSNNQDHPGNHDEIDIEFLGTTPDKPYVLQTNVYIRGSGDGNIIGREMKFHLWFDPTQDFHNYGILWKPSEIIFFCG

SEQ ID NO: 46011 - protein, 194 aa, Glycine max
  Clone ID: 700876595_FLI.pep
YGRPSKNIVIRNLVVRSNVSAGISIGSEMSGGVSNVLVENILVWESRRAMRIKTAPGRGGYVRQITYKNLMLKNVRVGIVIKTDYNEHPGAGYDPRALPILRDISFMNIRGQGVRVPVRIQGSEQIPVRNVTFQDMKVGITYKKKHIFQCAFVQGQAIGTIFPSPCDSFDRYNEQGQLVKHAASQNVTDIDYEI

SEQ ID NO: 46012 - protein, 401 aa, Glycine max
  Clone ID: 700877271_FLI.pep
VFEYMDHDLTGLADRPGMRFTVPQIKCYMRQLLTGLHYCHVNQVLHRDIKGSNLLIDNEGNLKLADFGLARSFSNDQNANLTNRVITLWYRPPELLLGTTKYGPAVDMWSVGCIFAELLQGKPIFPGKDEPEQLNKIYELCGAPNEVNWPGVSKIPYYNKFMPTRPMKRRLREVFRHFDHHALELLEKMLTLDPAQRITAKDALDAEYFWTDPLPCDPKSLPKYESSHEFQTKKKRQQQRQNEEMAKRQKIQHPQPHTRLPPIQQPGQHGQMRSGPNQPVHGSQPQVAAGPTHHYGKPRGPSGGPGRYPPNGNPGGGYNHPNRGGQGGGGYGSGPYPPQGRGAPYGSNSMPGGGPRGGGASGYVGAPNYPQQGGPYGGSAAGRGSNMMGGNRNQQQYGWQQ

SEQ ID NO: 46013 - protein, 172 aa, Glycine max
  Clone ID: 700888709_FLI.pep
LSMNGLIESLGLEGNGPDYDLVVECCKCSTNERSHPEDPVIIPTKVLVEDDSSTKTTSRVDTSAGDRDGCQVNQEHREPNRQRCQNGDVRVSGVTFGIGGGENGVNKDESANNLSTKTITLGVTRGNKVGTTIQRTVFCFPLETLHHASATNSTQALHYNVENRPGQRQLPR

SEQ ID NO: 46014 - protein, 79 aa, Glycine max
  Clone ID: 700831855_FLI.pep
EKLHMQPLLRRQKSKRTIYRKSIKKIQKGRFKSCNLVCTLQHLDPTCFLFKFEGTLLCQKSHEYFDWSLPSEKESYNKK

SEQ ID NO: 46015 - protein, 328 aa, Glycine max
  Clone ID: 700831916_FLI.pep
NREKESTNFLREKTRRRVMASTFDAFTVDDDHFAAPSAADTFSGYGDFSTFPSDDVPVDHAATAASPEIFGFSDPDPGYSPSPFEQVHENGNGNGTVNGYGDGVFVSDGPVLPPPEEVEPEEGHALREWRRQNAIQLEEKEKREKEMRLKIIEEAEEYKVAFYEKRKLNVETNKVQNREREKLYLANQEKFHKVADKNYWKAIGEIIPREVPNIEKKRSKKDQENKPSITVVQGPKPGKPTDLSRLRQILLKLKHTPPAHMIPPPPAPAKDAKDGKDGKDGKETASKANGSAPDAAPGSQPKDATTNNGTADLPQKEAPPPPEEQSST

SEQ ID NO: 46016 - protein, 170 aa, Glycine max
  Clone ID: 700868652_FLI.pep
NERWEGVPFILKAGKALNSRKAEIRVQFKDVPGDIFKCKKQGRNECVIRLQPSEAIYMKLTVKQPGLEMSTVQSELDLSYGQRYQGVTIPEAYERLILDTIRGDQQHFVRRDELKASWQIFTPLLHRIDEGEFKPLPYKPGSRGPAEADQLLEKAGYVQTHGYIWIPPTL

SEQ ID NO: 46017 - protein, 325 aa, Glycine max
  Clone ID: 700873444_FLI.pep
RLLSSVSHPNLVRLLGCCIEGGEQILVYEYMPNGTLSQHLQRERGGVLPWTIRLTIATETANAIAYLHSANDHPIYHRDIKSSNILLDYNFQSKVADFGLSRLGMSETSHISTAPQGTPGYVDPQYHQNFHLSDKSDVYSFGVVLVEIITAMKVVDFARPQSEINLAALAVDRIKKGCIDDIIDPFLEPHRDAWTLYSINKVAELAFRCLAFHSDMRPTMIEVAEELDLIRRSGWATMEETICMASSVGSVCSSPRNGSVNSLRGVSFERAAGLGSETLIVPHKTDVFLQSIEEVKDSSPVSVHDSWLSGTSSPSTNSLLGHVVQ

SEQ ID NO: 46018 - protein, 450 aa, Glycine max
  Clone ID: 700747437_FLI.pep
FPYKTHNRSFVRSFPTCFSFFFSLFANLKESSVFIQIKVFSFFISGFRFGMAGICCGVVGEAAETSSPIEPTSRPSARRSLDLLPLKYIAADVSVPPLENSRKRQRLDRRASPARECDNAVHSSKSKVVEVVPNYSSKSPTLDSTSPTVVEEYPRYGVTSVCGRRRDMEDAVSVHPSFCQETLSHDKKLGFHFFAVFDGHGCSHVATMCKERLHEIVKEEVHQAKENLEWESTMKKCFARMDEEVLRWSQNNETPSCRCELQTPHCDAVGSTAVVAVVTPEKIIVANCGDSRAVLCRNNVAVPLSDDHKPDRPDELLRIQVAGGRVIYWDGPRVLGVLAMSRAIGDNYLKPYVISEPEVTVTERSEEDECLILGSDGLWDTVQNDIACKVVRMCLNAQKPPSPPSSPRREMAVDCSDKACSNASILLTKLALVRQSSDNVSVVVVDLRRT

SEQ ID NO: 46019 - protein, 303 aa, Glycine max
  Clone ID: 700834292_FLI.pep
QNQHHCRDNSMGSSNEGSSSSTLTSGRSWSNHVFLSFRGDDTRKGFTGHLFASLERRGIKTFKDDHDLQRGKLISVELMKAIEGSMLALIILSPNYASSTWCLDELKKILECKKEVFPIFHGVDPSDVRHQRGSFAKAFSEHEEKFREDKKKLERWRHALREVASYSGWDSKEQHEATLIETIVGHIQKKIIPRLPCCTDNLVGIDSRMKEVYSLMGISLNDVRFIGLWGMGGIGKTTIARFVYEAIKGDFNVSCFLENIREVSKTNGLVHIQKELLFHLNVRSSDFYNLHDGKNIIANSLSN

SEQ ID NO: 46020 - protein, 172 aa, Glycine max
  Clone ID: 700830907_FLI.pep
GLEKNYIKEAFSGTNGPAMGTKVAKYPQCPHPELVRGLREHTDAGGIILLLQDDQVPGLEFFKDGKWVEIPPSKNNAIFVNTGDQVEVLSNGFYKSVVHRVMPDKNGSRLSIASFYNPVGEAIISPANKLLYPSNYRYGDYLELYGNTKFGEKGPRFESIKNMTNGHCNLKP

SEQ ID NO: 46021 - protein, 341 aa, Glycine max
  Clone ID: 700874601_FLI.pep
FEVLSARLGRKPEDIVKLDANENPYGPPPEVMEALGSMQFPYVYPDPESRRLRAALAHDSGLEAEYILAGCGADELIDLIMRCVLDPGDKIVDCPPTFTMYEFDAAVNGALVIKVPRRPDFSLNVEQIAEVVKQEKPKCIFLTSPNNPDGSIIDDEVLLKILELPILVILDEAYIEFSAIESRMSWVKKHDNLIVLRTFSKRAGLAGLRVGYGAFPLSIIEYLWRAKQPYNVSVAAEISACAALQNPTYLENVKNALLKERGRLYDLLKEVPFLRPFPSHSNFILCEVTSGKDAKKLKEDLAQMGVMIRHYDKKELKGYVRVTVGKPEQTDTLMKCLKRLS

SEQ ID NO: 46022 - protein, 346 aa, Zea mays
  Clone ID: 700168653_FLI.pep
TIHSLRCAASGPRSRRRISEEGEAAVRLHLGGHRRDEHGAVEIGGVPRHLQVVEVDAREPVVAAEVAEVLHLLLGQDDAGRGWGCAWAHVVERRQRAQLRERVVVDLRLRRPRVGVGVRERERRLRLHRLLLLLLLLLHLLPLVLLVVQAAQHPVIQPERAGAGLLRVAGEAVLVHDPLRLDPARRLAVVEHERLLDPRRPAPVLHGLVRARGLPVARPGGAVGAGAVGVLAVPRREEVPLAAAEEGALRQVPGVEAVQVDLGDDGHRRAAPRGARAEVVRHQLLVRRVEPEARGQVELRLRVAALLLLLLLHGRHRYHWTLYSLAVACGLVGWFGCWLAASCCGR

SEQ ID NO: 46023 - protein, 147 aa, Zea mays
  Clone ID: 700169246_FLI.pep
RYTRGHQTTQIPRYSSSLNEPWLTDHHGGGAPGGECSPSGCCSLLGCGHPPAACQRRSDAAGLGGCPLCPGSLPSRCRWCRSSQPPGLWSCQSRSSQRSAYHLASGAPGGGCSPSGCCSRRGYGHPPAACQQRSGAAGPVECPPCPG

SEQ ID NO: 46024 - protein, 306 aa, Zea mays
  Clone ID: 700170122_FLI.pep
GDSCGGDRLRRLDEAAAAARVGGGTMSAVVCGKRSSSIFADELLPPSPTSPHSSHQPAPKRSRRSPSHRGSSDGHRREALVHHLLLLFPDMDPQLLEKALEASGDDLDSAIKSLNLLRLESAEAILSSTGFNENGQHTAIQPPVEGIPNGGVDTTTEHHPTVDNYQTSKNGSEWVELFVREMTNASDIDDARARASRALEALEKSIVERAGAEATQNLHKENMMLKEQLTVVLRENAVLKRAVAIQHERQKEFDERSHEVQSLKQLVLQYQEQVRTLEINNYALTMHLKQAQQSSSIPGRFNPDVF

SEQ ID NO: 46025 - protein, 351 aa, Zea mays
  Clone ID: 700170954_FLI.pep
LVAPRSIWVSPASGEMSFFFRAASRQRLLPQEIARSLKDSLVALDTKTGAKALEDAEKNILTLRHTLAGDGEVEPNQEQVLQIALEICKEGVLSLFVQNLPSLGWEARKDLVHCWCILLRQKVDESYCCVQYIENHFDLLDFLVVCYKNLEVALNCGNMLRECIKYPTLAKYILESSSFELFFQYVELSNFDIASDALNTFKDLLTKHEDAVSEFLSSHYEQFFGLYTKLLSSTNYVTRRQSVKFLSEFLLEAPNAQIMKRYILEVHYLNIMMGLLKDSSKNIRICAFHIFKVFVANPNKPREIIQFLVENHREVLKLLHNLPTSKGEDEQLDEERDLIIKEIEKLVRLSV

SEQ ID NO: 46026 - protein, 174 aa, Zea mays
  Clone ID: 700171119_FLI.pep
AGLKSQLLSRGNERSLESAMESTALMTARLPLLTSGSRSKPLPFASFTTAACRLASAPCSGSGSVVLLSRRSRDYAGVGSLVSAAAAPGDTADAGSESILLSVQGMMCDGCAASVKRILESQPEVTSATVDFKEASAVVWTTDEAKGTQGWQKQYGEKLAKHLGTCGFESRLQE

SEQ ID NO: 46027 - protein, 142 aa, Zea mays
  Clone ID: 700171162_FLI.pep
EAETSSDQANQLEHRVTRNTRGSIVSQPHIVKRNTDTKQLPYRSPRCFRDGWVGGPGSFLSTFLETRASNCALLCLGLQLLQCLFLIFLLLQISKITLVVLLLVDLGRLQRLGLPSLLRHGRRGDGSAGEGRNPRLNSTGAP

SEQ ID NO: 46028 - protein, 145 aa, Zea mays
  Clone ID: 700171246_FLI.pep
FGAQSLAISRLRARKMADPELEAIRKRRMEELMAKHGGGGANQQNASQQKAQEDAKQEAEERRQMMLAQILSSEARERISRIALVKPDKARGVEDVLLRAAQTGGISEKVSEERLISLLEQINTHTSKQTKVTIQRRRSVLDDDD

SEQ ID NO: 46029 - protein, 139 aa, Zea mays
  Clone ID: 700171321_FLI.pep
VTPGPPPPPPPRKTLAGFAAITPRGATMVATKKTKKSTDNINNKLQLVMKSGKYTLGYKTVLRTLRNSKSKLVIIANNCPPLRKSEIEYYAMLAKVTVHHFHGNNVDLGTACGKYFRVCCLSIIDPGDSDIIKTTPGEQ

SEQ ID NO: 46030 - protein, 334 aa, Zea mays
  Clone ID: 700171513_FLI.pep
LGFVPSPNRSDWQVTAVAAAMKRYGLQLRTKPPSSSSSRAPPPPARPLAAFADDDDDDVEAEILRQAAKKRSLQKVEEQQKKAMEEDPSVYAYDELYDEMKEKEARPKMQDKVVRESKYIAQLKEKAELRKREQDIIYERKLQKERSKEDHLFGDKDKFVTSAYRKKLEEQQKWLEEERVRQLREEKEDVTKKKDLSDFYFGLVKNVAFGAQTHDNTKSGHPLKADNKPEDTNTSSLDAEASEPSPKRRRESSIESERTKSMDMEEPSASRMRDSTAAASTEKNAADVSSNAKEIPQNIQPAKVTDDHYKRSDGALAAARARALARKKAKDQQL

SEQ ID NO: 46031 - protein, 70 aa, Zea mays
  Clone ID: 700172479_FLI.pep
RRRTYVPDVLGEAVFDELLVLVLVGAHVDGVVAGVRTRLEVEHHRRRRSAADSSMLFFNRAGPASSTTSS

SEQ ID NO: 46032 - protein, 144 aa, Zea mays
  Clone ID: 700157846_FLI.pep
VYNEQNSVIIYSTRAVMLMQQHEKWLVLAILALVCARSSYRMYCILEDLEQIRAPSSQMEHWSVMRSDQMRGRNAMPFGSIQLGIGLFLAGGWLPCTPSSQSQISVRLRGPAGPGSPQICVGYRRQFGLAGSGCPARPCSCLSG

SEQ ID NO: 46033 - protein, 404 aa, Zea mays
  Clone ID: 700158577_FLI.pep
SRGAYANFIRTAQNYRASSFVSHHFIHSFHYYLSYCMQCKKICWQSRRSGDDTDKYKWSRKGKCSLGSGGVSLHLWVVEVDADHGLPEPRADVGQDGGVAVVGDRLDDGAGAARGVAALEDAGADEDAVAAELHHERGVGGRGHAPRRELHDGEPPQLLGLHDQVVGRGDALGVGEHLVVVHAAERADGARDGAHVAHRLHDVARAGLPLGADHGGALADPAQRLAEVAAAAHEGHAEVVLVDVVGVVGRGQHLALVHVVHAHGLQDLRLHEVPDAGLGHDGDGHGALDVADQARVRHARHATLRADVGGDTLQRHHGAGAGLLGEAGLLRGHHVHDHTAAEHLRQAHLHGESRRLGLLRRLQQRRAVVAVHRHHATAVGRHCLVGGFDRLPYLSIYLSILSAR

SEQ ID NO: 46034 - protein, 129 aa, Zea mays
  Clone ID: 700159177_FLI.pep
KTLVASTIPHNLARAASPTRRLLALASGDARHFLPDEMTKRTKKAGIVGKYGTRYGASLRKQIKKMEVSQHSKYFCEFCGKFAVKRKAVGIWGCKDCGKVKAGGAYTMNTASAVTVRSTIRRLREQTEA

SEQ ID NO: 46035 - protein, 158 aa, Zea mays
  Clone ID: 700159426_FLI.pep
KDIIMVDHMRKMKNNAIVCNIGHFDNEIDMLGLETYPGVKRITIKPQTDRWVFPETNTGIIVLAEGRLMNLGCATGHPSFVMSCSFTNQVIAQLELWKEKSSGKYEKKVYVLPKHLDEKVAALHLGKLGAKLTKLTKSQADYISVAIEGPYKPAHYRY

SEQ ID NO: 46036 - protein, 181 aa, Zea mays
  Clone ID: 700159514_FLI.pep
ADPSEKEADDGVSGKDMMRKHRRQVLFSGIITAVGISLHNLPEGMAVFLGSVKGLHVGLNLAVAIALHNIPEGVAVALPIYFATKSKKKAFYTAAFSGLAEPLGVVAVALLFPSSLNPDILEGLLGSVGGVMAFLTLHEMLPLAFDYCGQKQAVKAVFVGMACMSASLYFLEVSLPKEISL

SEQ ID NO: 46037 - protein, 135 aa, Zea mays; identical to SEQ ID NO: 36896
  Clone ID: 700160768_FLI.pep

SEQ ID NO: 46038 - protein, 157 aa, Zea mays
  Clone ID: 700161288_FLI.pep
RELDWRVQGTIIPIILIFFPDQQGHAIKQAAAGGGGGVSALCFVGVPPLAHCPPLSHSILFTSPEVLVLLLSPPGLTAYDSSSGTGRISRLGGRAGVRFKHESAVAASEPIPLFVWFRCTSDLSPGRAPARCNIRSSRRSSNLFLCTATSLLWAVCR

SEQ ID NO: 46039 - protein, 161 aa, Zea mays
  Clone ID: 700161606_FLI.pep
EMMDESFLDRMVSQLRSTCKYYTGYPKDLGRSRIIPFTSERQFVQLLHEGRPVVVAFTIKCTYTQHLDKVLEEAAAKFYPHIKFVRVECPKYPGFCLTRQRNEYPFVEVFYNPEQAASPGKSVDPNITKYSVKVLPFNYDQSVYGFREYFKKHGFKYSETN

SEQ ID NO: 46040 - protein, 186 aa, Zea mays
  Clone ID: 700161882_FLI.pep
HDHNYDIAARPPRAQNSNTNVNERLLLLGVTSFGLLDTTDLLGPVLPLLHLLAGLLNLSSKTIPDEAVFRLELLGSLEVVVDEAETSGLSSSEVGAELEDKDGVGVLHLVRLGKPLLQLRLGDVGAAGVDHLKHELLAGQEAVGHELAGAEGDRRGGLGVRHGSTDRADAGGDVEVEVVAARQERG

SEQ ID NO: 46041 - protein, 228 aa, Zea mays
  Clone ID: 700082103_FLI.pep
AVSFANLNSEAGLKKLDEYLLTRSYITGYQASKDDLAVYTSFSAAPSSKYINVARWFNHIDALVRLSGITAEGQGVKVESSAVPSAPTPDVAEAQAPVAEEDDDDDVDLFGEETEDEKKAAEERAAAAKASGKKKESGKSSVLLDVKPWDDETDMAKLEEAVRSVQMEGLLWGASKLVPVGYGIKKLQIMMTIVDDLVSVDTLIEDYLCAEPVNEYVQSCDIVAFNKI

SEQ ID NO: 46042 - protein, 54 aa, Zea mays
  Clone ID: 700084036_FLI.pep
AQLNSSSTADLFIFQYCYLVVQDQISRPGADCCIVFSNDNRPQTRNARTNVALL

SEQ ID NO: 46043 - protein, 141 aa, Zea mays
  Clone ID: 700084203_FLI.pep
SRPFLCNLFGSRSSISTRQRVARCQSPLMSTPRSTAWSLRYQRGLLQIQALVLSEEAQVSRRFKSNGQILAIDEIFECNPTTIKSCGIWLCYQCRTGYHDLHKEYRNTTLNGAMEQMYNETASCHRVVTLHTDHQDGNNQL

SEQ ID NO: 46044 - protein, 242 aa, Zea mays
  Clone ID: 700084635_FLI.pep
ARRAAARADKEQAEEELCQATMGISRDSMHKRRATGGKQKAWRKKRKYELGRQPANTKLSINKTVRRVRVRGGNVKWRALRLDTGNYSWGSEAVTRKTRILDVVYNASNNELVRTQTLVKSAIVQVDAAPFKQWYLTHYGVDIGRKKKTPAAKKDNAEGQEVEAAAEETKKSNHVTRKLEKRKEGRTLDPHIEEQFGSGRLLACISSRPGQCGRADGYILEGKELEFYMKKLQRKKGKSAVA

SEQ ID NO: 46045 - protein, 311 aa, Zea mays
  Clone ID: 700085008_FLI.pep
HHDSESDADIDYRKKKIEHTEGIRDERKKIPARSSRHDSDSGADNNGKNKRPVQSSCHDLEDEKPRLRNYNYGSRASEHEKHSKYKESFRHDSDSDGYSRGKERQLNVAVLKKDVQEKRKVATSSDSSDYSSSLSSSDNDTSADSYEEQKRSQAGGRRNELNTQRQKEEERKELEKQQKREVEKKELDKQKQREEERMEMEKEKKRQREREEERQREREQYERKGGNDVERDNKRKLIDDRYDPNSSRDREEGYRDSQNRDDNRRQEEHGQHNRYMDSHDSKRSRHDSHYHSRRDYEQRYSRDEHRDRRRH

SEQ ID NO: 46046 - protein, 271 aa, Zea mays
  Clone ID: 700085256_FLI.pep
DPLHSLHPVHHSLVQEVTHQTGKGKHHQRRRERTPSLSSRTARSYPVSPFSGLGESEMASSASRFIKCVTVGDGAVGKTCMLICYTSNKFPTDYIPTVFDNFSANVVVDGTTVNLGLWDTAGQEDYNRLRPLSYRGADVFVLAFSLVSRASYENIMKKWIPELQHYARGVPVVLVGTKFDLREDKHYLMDHPGLVPVTTAQGEELRRQIGAMYYIECSSKTQQNVKAVFDAAIKVVIQPPTKLREKKKKKSRKGCSMVNILSGRKMLCFKS

SEQ ID NO: 46047 - protein, 323 aa, Zea mays
  Clone ID: 700085710_FLI.pep
ASKLHWFNLELPTMAARRGGMASGAGAAAAHIASSMVLSLLLVGVGVSRAQLQVGFYSDYCPDAEDTVTAAVQDAAGNDPTILPALLRLQFHDCFVKGCDASVLIRSASNDAEVDNGKNQGLRGQNVVDAAKAQLEDQCPGVVSCADIIALAARDAVAMTGGPSFDVPTGRRDGLTSNIRDADVLPDAGDSISVLRSRFAASGLDDRDLVLLTAAHTVGTTACFFVKDRLYSYPLPSGGRGPDPSIPASFLAELEDRCPPGNFNTRLALDRGSESDFDDSILRNIRSGLAVIASDAALANSNATRALVDAYLGPWAGSFEQDF

SEQ ID NO: 46048 - protein, 155 aa, Zea mays
  Clone ID: 700085873_FLI.pep
ANHRSSGACASGAMADDDYNEIDMGYEDEPPEPEIEEGAEEEPENNEDAPDDVIGGEGEDKEQEKTKRERKTTKYMTKYERARILGTRALQISMNAPVMVELEGETDPLEIAMKELRARKIPFTIRRYLPDGSYEDWGVDELIVEDSWKRQVGGD

SEQ ID NO: 46049 - protein, 284 aa, Zea mays
  Clone ID: 700087503_FLI.pep
RRAHSRLLPPPHPTPPHPTSDLLPPPFQSTCERKSSGRIESRPVRARPASERRPAGWALVRARSIDQKMAHRVNNEYDYLFKIVLIGDSGVGKSNILSRFTRNEFCLESKSTIGVEFATRNLQIDGKTVKAQIWDTAGQERYRAITSAYYRGAVGALLVYDITKKQSFDSVQRWLRELRGHADANIVVMMVGNKSDLNHLRSVPEEDGRAFSEKEGLSFLETSALEAINVEKAFHTILSEIHQTVSKKALAAQASASTNGRSMQGTTINVAESSTVTKGSCCSS

SEQ ID NO: 46050 - protein, 194 aa, Zea mays
  Clone ID: 700088077_FLI.pep
ADGISTSPSSISCCRSLGSLPSTVHPTLTQVPRISLTVPANSLAMDLCLMVLAISMTSSRLMLPLCLMFLTFLRSLSGSLSALMTSAAAEGTTETLACRFWTVSLTVTRRPFQSLAVSLAMSSPIFLGERPSGPILGASEDAAPTSPPVTRTNTSTTCDGSSLGGMAAGVGVAAAVAGARVQGAMLLSSGLWVL

SEQ ID NO: 46051 - protein, 121 aa, Zea mays
  Clone ID: 700088138_FLI.pep
DQRRRRHACAAAPTMDEDEFRRMLDLFPVVRSRDYCCSDPGTSSRGTRQRSRVQEATTGDNKDSSCAQDMFMQKLKMAAENKIGATKAEFFCKTFEEVHEKLVHRELNLDAAKKFLSAYES

SEQ ID NO: 46052 - protein, 234 aa, Zea mays
  Clone ID: 700089148_FLI.pep
SRILRSSLALHGCWRCDARVTLWCWCLFQAQLGPAASAMQGHLRTYMNAGIPKRFKEDEEKEQLAKDLAKDWNAVFERSINTLFLTEMVRGLMLTLKYFFDRNVTINYPFEKGPLSPRFRGEHALRRYESGEERCIACKLCEAICPAQAITIEAEEREDGSRRTTRYDIDMTKCIYCGFCQEACPVDAIVEGPNFEFATETHEELLYDKEKLLENGDRWETEIAENLRSESLYR

SEQ ID NO: 46053 - protein, 247 aa, Zea mays
  Clone ID: 700089247_FLI.pep
LLPLSGSCPARARRPPAARLPLAPPMPPPMALLPLSSASASAALPPFRSCPPAAMLLRLPSPAPSHFARPRAVSTGYAASFYGGSAMSAAGGADEEEEVGYESGFGPGLGLGGGGLGMSAAEAALALEEREMPPCPPGLRQYETMVVLRPDMSEEERLAFIQRYEELLVAGGAMYVEVFNRGVIPLAYSIRKRNSRTGLPSTYYDGIYLLITYFTKPESMDALQLKLNADDDVIRSTSFKVRQRKAV

SEQ ID NO: 46054 - protein, 155 aa, Zea mays
  Clone ID: 700089310_FLI.pep
IPARVAMADQLTDEQIAEFKEAFSLFDKDGDGCITTKELGTVMRSLGQNPTEAELQDMINEVDADGNGTIDFPEFLNLMARKMKDTDSEEELKEAFRVFDKDQNGFISAAELRHVMTNLGEKLTDEEVDEMIREADVDGDGQINYDEFVKVMMAK

SEQ ID NO: 46055 - protein, 221 aa, Zea mays
  Clone ID: 700089476_FLI.pep
DNGSRRYEEHDVEAYHDAKFVEDEDCAENHINHHCDDGEQHHQNSPVGAAPTVQRHQNSPVGAAPIVQRHQNNHVRAAPTIQRHQNSPIGAVPPKQPRRCITTSLAHPVPPGNEAPSRIQHDELVGKDVILYAIIGPEQPVAKGTIVSTNPNTLLGGVPLGKEYCEVIVNTVLKRDAILPCPYGYVETMADAHQMSVAWLYKRMKISKASGSPQGIGGGWH

SEQ ID NO: 46056 - protein, 135 aa, Zea mays
  Clone ID: 700218603_FLI.pep
YRKTDQKLSSLLNTLVSFWDGLRLPPRLIWSDSIDFWISMVMALSTLPADRRLCAFCRCSLSELVLRPTFLLQIGHTFISGRLCCQSIDTLPCSLLSRARRAFAKPSFGCARRCTFFSKFQAFARVKPLKSTALS

SEQ ID NO: 46057 - protein, 344 aa, Zea mays
  Clone ID: 700219263_FLI.pep
LQFVVHTYLFPRSAIEASVEIIISSLRLRATSCIAARRRHVIIGGIAALCLSSAKSGPERPGQRNPKPPLGHPGGGDRGSGGRGSRGRRITVLLMGVIVVRVVGGQLEAADRAGAVEVEPWDDAVLVEDVLAGELLGGGAEVEVVHADGTLSAAVGLHHVGRDSDVRERGDGGLGGGRGAVAVGVVLGELLDELLEAGGADEVVGKVEAWGRGPTLEDDLDGGAAGEEAAEVVVKEVGGIEEAWGERLGGGGAEESGEVAGVADVEGGRGKEGGGRRRGARVGRKLLDESAAAAGAEDVGVRGCGRGEGDGAVALVAVEAQRRGGGRHGRRIRVCLVGFVVGCG

SEQ ID NO: 46058 - protein, 376 aa, Zea mays
  Clone ID: 700219282_FLI.pep
PNTAPSRRRTPPAALSFLLPSCKSRIARCLFRFGLCQYSKMGDPSERNGHGALTRVLFCGPYWPASTNYTREYLQDYPFIQVDEVGLEQVPDVIHSYHICVVKNKRIDSDIIAKATQMKIIMQYGVGLEGVDVNAATEHKIKVARIPGSTTGNAVSCAEMAIYLTLGILRKQKEMDTAVNRKDLGVPVGDTLFGKTILILGFGAIGIEVAKRLRPFGVKILATKRNWSSDTLPSYVDELVDKKGGPEDMYEFAGEANIVIACMTLTSETIGIVDHKFVSSMKKGSYLVNIARGRLLDYKAVFDHLESGHLAGLGIDVAWMEPFDPEDPVLKFPNVILTPHVAGVTEYSYRTMAKSVGDTALQLHLGEAFTEVEFVN

SEQ ID NO: 46059 - protein, 202 aa, Zea mays
  Clone ID: 700219730_FLI.pep
LGVTYVASTLASSPSPVGRLAGAGGPYCGPAAASSCCSVASASMMQSTWCTAAAMSSAVARPHPSSTCSSTATASTPWLKRLQAAAARTRRVNGAHARWPMGHGRSPDGCCMHQEQGGVGICGYLKRRDHQPLPVAVVINYGTAHSVVLPWPKITQGEDGSNTYAVSLPPPRRPAFFRPFLDANSSSSRNEHQFSQKIRPEG

SEQ ID NO: 46060 - protein, 231 aa, Zea mays; identical to SEQ ID NO: 43391
  Clone ID: 700219852_FLI.pep

SEQ ID NO: 46061 - protein, 305 aa, Zea mays
  Clone ID: 700221087_FLI.pep
LSYWHNSKFLSSAPPPLAFSFRTAANPPPLLSMEVDDGSRATPPLDAVAAAFKSQVMELQDLVLARSMFPATALPDLANVDALVTAMESQVETISRRLQEELDAIPKAKKLVQRSLKEEEKLQHMLANLPSGMRKNDFANQHEQSSSRMLPHFNSSFTEANECELKIKDEPVAAPRKGRAPAPRWYISTEELDSLSSYMRGRLTLEKVNIAINEVASYADANAHLVTCPKKKLSEDTWEKALELRDIAASGAVKGNHFFLEADIKGPGLKLDNTGKAILTVLRHLGRFHEVRIGHHRVFILSKQA

SEQ ID NO: 46062 - protein, 335 aa, Zea mays
  Clone ID: 700221167_FLI.pep
AQKLLPKSRSPASTPRLRRLGRLPPPPFAQLPRSSSGALPLKSAHHTRLATRGLLHLGRMSKGPVPFANIGKRAKDLLYKDYNFDQKFFLSTCSNSGLNLTATGVKINEDFIGDIRTQHKSSRTTVDVIIDSDSKVSTTVTVDEALTGLKTSFAFKVPDHKSGKLDLQYAHNRFSMNSTIGLTSTPLVELAATVGTSELAIGAEFGFDSTSAAVTKYNSGVGYNKSDFSASLLLADKGETLKASYVHLFNPTNGATVAAEVTHKLKTKENYFTLGSSHALDPSTLLKTRFSNSGKVGLLCQHEWRPKSLVTLSAEYDPKVVSAPSRIGVAISLKP

SEQ ID NO: 46063 - protein, 306 aa, Zea mays
  Clone ID: 700221317_FLI.pep
ADPERHQRARPAMAIPNAFDSSLAVRSAVGAALAAVIAVRAVRRRSLDASGGVAGFVVMAVHIACGYRYGALLLAFFFSSSKVTKIGEDHKRRIEENFKEGGQRNWIQVLANSTIATVLVVIFALMTGGQDQCMDSNGSKLITGIIGGIIGHYCCCNGDTWSSEIGVLSNEQPRLITSLKPVRKGTNGGVTLQGLLAATGGGLIIGLTFVVVGLLTAECSSDMAIRQLLVLPISAAAGLLGSLIDSLLGATLEFSGYCSVRKKVVSKRGPTVTRISGMTILDNDAVNAVSILLTTVLTAYVCIYIF

SEQ ID NO: 46064 - protein, 162 aa, Zea mays
  Clone ID: 700221618_FLI.pep
QLASAASLASSRLAPSIRSELTSRVLGPAPPSPMADDANRAAFMELQSRMIDTTAKIKQLQTQMRSKEGEKKRAYLTLEELRQLPDDTNTYKTVGKVFILEPKSVLFNEQEQKLNDSESAIASMQTSKDYLEKQQGEVENNIRELLQQDPGLARQILSMTVQ

SEQ ID NO: 46065 - protein, 242 aa, Zea mays
  Clone ID: 700221869_FLI.pep
ANQNPFVGEAMGSAQDPFYIVREEIQESIDKLQSTFHRWEQTASNTGEYVHLTKELLISCESIEWQVDELEKTISVASRDPAYYGLDEVELSRRRNWTGSSHKQVGTVKRAIEKGKSNAATSKYQDTSRTNHYSAEDNDDFLSSESDRQLLLMRQQDEELDELSESVQRIGGVGLTIHEELSGQERILNDLSLEMETTSNRLDFVQKRVAMVIKKAGIKGQIMLIVFLVVLFIILFVLVFLT

SEQ ID NO: 46066 - protein, 193 aa, Zea mays
  Clone ID: 700222178_FLI.pep
LRNPRLTSPLPPRPAMSSSSSALAKGKSAIGSAAGSAKFEAKGKFSSSSSPAAAATKRGTTTTSSRGRGRGKADKKVYSLPGQKFDPPEEREPLRIFYESLSKQIPSSEMAEFWLMEHGMLSPERARKAYERKQKRQQQVRMGTPIKSCAVRKDNKPESSKKPGIMDSKAKRRVDYSEDDDDDFIVKMKRSRG

SEQ ID NO: 46067 - protein, 288 aa, Zea mays
  Clone ID: 700222275_FLI.pep
VVREVTECWQRQSRPCRSADLQGVSREELLHQSTTPPSTPSTRGKSASLESLIRADNATSSFRILEEEEEEEEDIVVPSTCPKLKPANVLVQLISCGSLSVKGHEDAAGPVRAYKPRLPSMKLPSPFVSRAMAMGELDYLSENSSRLVGVRLEEKEYFSGSLVETKTHRDGPAERYSALKRSSSYNAERARDALDCTRREEGDTDDRSSSRARCLPRTPMILASFLHPRGDPLKSPVSDCRRSSSARQQDCDAASGDGDSRRFAADASVVASAVATVKEERLVRVEES

SEQ ID NO: 46068 - protein, 200 aa, Zea mays
  Clone ID: 700222504_FLI.pep
SCPLGRMRGYYDIDDILMEDEPISVVFQVTANGVGLLDPGAENNCVEKGAKVDLPFWLAHGLLSLEQAVSINPPPCFTQKTRKEIQADASCVDLRARCPYFYELGCKIVPLVSDKSIGLFLRYAFTSRYKEVLSKSHSSSMMTVPKFVPRLTKEETRVFESARESMAVFKKWRVGGVRLQKASILGRKRKTKLPDGPPTS

SEQ ID NO: 46069 - protein, 200 aa, Zea mays
  Clone ID: 700222581_FLI.pep
SLVAKTKEMRKRRYDNHQMTVKSLVDLLERGAGGGATSGGCSDVVGSKLALSLVGGAAPGLAVEESLTVLVELQLGDDHFGGVDAHVHGGAVHLLAGDPLDVDDPAAAVHLHHLPLTALVGAAHDLHLVVLADRDGAHVVLVAELRRQPGGHENAADGGRGREVRLAALPARARDAGIALHGGGGVDALAYLGGRFGGGG

SEQ ID NO: 46070 - protein, 205 aa, Zea mays
  Clone ID: 700222782_FLI.pep
SVRESVRAPGPAADSSFKGATSARSMETVEEDVEEYSWREVVLPHLVPVVPGAQPELERETGERRRGRDLLVAVDFGPNSKHAFDWALGHIARMADTVHLVHAVSSVQNEIVYDKSRELMEDLAVEAFKTLLVRTKARIVEGDAGKVICREADRLKPAAVILGTRGRGLIQSVLQGSVSEYCFHNCKAAPIIIVPGKEAGEQSVL

SEQ ID NO: 46071 - protein, 188 aa, Zea mays
  Clone ID: 700223038_FLI.pep
MRNRKQEIVGGAGQGTVWDGRRPRERIGDNKQTNESVAGALGGEALREAPAVVAVVVVHVVLPGPGDGAPLGGVELAAHPAVGAGGAGERAAVAVGHAGVGGVAAVGDGEGRGGPVHLHLPLLRGPVAAVPQRGVHRHGLPARVRQVRVPLEAPHEEVVHLEDDVLVVPDDGVGVEVGGRVEPQVELV

SEQ ID NO: 46072 - protein, 341 aa, Zea mays
  Clone ID: 700223182_FLI.pep
SQRIEYDLTHLRPSFLAPKMSGHGDTATSAKMAKLKELLQKSENHICADCGASDPKWASANIGVFICVKCSGVHRSLGTHISKVLSVTLDKWSDSEVDSMIEVGGNSQANAIYEAFIPEGYQKPHSDSTQEEREKFIRSKYELQEFLKPSLRIVSHQPSDSGKHAGNASHSDGSKSQVGMIEFIGILNVKVIGGTNLAIRDMSSSDPYVVLTLGQQKAQTSVINGNLNPVWNEELKLSVPQQYGPLKLQVFDHDMVSKDDLMGEAEIDLQTMINAAAAFGDPELLGDIQIGRWLKSEDNALVRDSAVVVSGGKVKQGMALKLQHTESGELELEMEWMPLNV

SEQ ID NO: 46073 - protein, 207 aa, Zea mays
  Clone ID: 701180715_FLI.pep
QNRCIEGYCYARMPSSPIRRHRFCREQIFHSREHRVVRWIIWMVLGWDLQNSRDGLVVAIHQKPYHVGNILTDEHNSNILPRSKFFERILDLFNCRLVVDEEVVGFLAQINIANAGHQEASDGVLVGDDCDEGGVVSGDVGPPRHGLWLWMLLPCLLVIEVLRPCCEPGGDQASARAEIGSISSSDRNSGFGSACGLTPLTMAGGPC

SEQ ID NO: 46074 - protein, 179 aa, Zea mays
  Clone ID: 701181182_FLI.pep
SFSAHLSLSRTPLSLSLSLSVFLPEAAISSSDRGEAWSGRRLLVLGTAEMSEVSVINQAEVEDAGAGQLMDLPPGFRFHPTDEEIISHYLTHKALDHRFVSGVIGEVDLNRIEPWDLPGRAKMGEKEWYFFCHKDRKYPTGTRTNRATETGYWKATGKDKEIFRGRGVLVGMKKTLVFY

SEQ ID NO: 46075 - protein, 88 aa, Zea mays
  Clone ID: 701181365_FLI.pep
GSIPTRRVTNPDRAPPPNLLRRPCSPPARVEREREERRKHDDNPSVLLRRPPPLRLRQPGPPHRDVQHVVLHDVPGALARLLPRRRQP

SEQ ID NO: 46076 - protein, 186 aa, Zea mays
  Clone ID: 701181575_FLI.pep
TDPQHVQPRSAYTDWYGTQIKLGSMPVCHHTIVWLFSLLVEVDAGLARDSIETVLLDGLERLGGEAQLDEALASLPPQLLVLQVHELLLLRLVVGEGHLVRPVRLLARERAHPPRDNGLELLPLWEEGDGGWSCGARGEGEAGELRRGEAQGGGGRGGRPTGCGGNGKGGAQQRGGRHGRRNGIGS

SEQ ID NO: 46077 - protein, 61 aa, Zea mays
  Clone ID: 701181622_FLI.pep
ATKNDSHLDCHFISYYYYILQQHTLCRFDEQMIESLFAYNFQGQTKNEDPKSKILATSKHV

SEQ ID NO: 46078 - protein, 95 aa, Zea mays
  Clone ID: 701181721_FLI.pep
WSPPTSSGTAPRPSPGSSASPNPDTTSASTDPHSKSTPAETEDDGRCVQTSSSIHTNTTTSINADHVSSITRTSMENPARARDAPPLVYGLCTFT

SEQ ID NO: 46079 - protein, 229 aa, Zea mays
  Clone ID: 701181952_FLI.pep
HAKSARSSSSPEDQACAPEMSYAYLFKYIIIGDTGVGKSCLLLQFTDKRFQPVHDLTIGVEFGARMITIDNKPIKLQIWDTAGQESFRSITRSYYRGAAGALLVYDITRRETFNHLASWLEDARQHANANMTIMLVGNKCDLSHRRAVSYEEGEQFAKEHGLIFMEASAKTAQNVEEAFVKTAGAIYKKIQDGVFDVSNESYGIKVGYAIPGQSGGAGSSSSQGGGCCS

SEQ ID NO: 46080 - protein, 411 aa, Zea mays
  Clone ID: 701182515_FLI.pep
RLRSRDREPLPVCSGISPARNFPDPSTTPAPSPPSLPSPNCRHLSASRRRRLRSPGQRDGCYRGSMGVDYYKVLQVGRGASDDELKKAYRKLAMKWHPDKNPSNKKEAEAKFKQISEAYEVLSDSQKRAIYDQAGEEGLKAQVPPTGAGGPSGSSFYGGNASTFQFNPRSADDIFAEFFGFSSPFSTMGGMGGGAERGMRGSRFGMFGDDIFGSHPQFPGEASMHVPQRSQKVPPIENRLPCNLADLYKGTTKKMKISREVLDASGRTLVVEEILTIDIKPGWKKGTKITFPEKGNEAPHIIPADIVFIIDEKPHDVFTRDGNDLVMTQKITLAEALTECTVNITTLDGRNLTVQINNIIYPGYEEVVPREGMPIQKDSSKKGNLRIKFSIKFPSRLTSEQKAEIKRLLGS

SEQ ID NO: 46081 - protein, 55 aa, Zea mays
  Clone ID: 701182837_FLI.pep
EEARDRAASSHRSPASQIISEEGSDGGGGAVGDAEAGDRCVHGPVSGGLLHGCGG

SEQ ID NO: 46082 - protein, 264 aa, Zea mays
  Clone ID: 701182842_FLI.pep
LFTVLLGRPQIPKSKGAVRLRVSRRLLALSAMDAQRALLDELMGTARNLTEEEKKGHKELKWDDPDVCGPYMVRFCPHDLFVNTKSNIGPCSRIHDPKLKESFEKSPRHDTYMQRFEAELAQQCEKLVMDLDRKIRRGRERLAHDSAVPMPIPGKLAELLSVRKEQVKKLLEQIEELGEAGKVDEAEALMRRVDILNAEKTALANEADNKVAMLEKKMELCETCGSFLVADDALERTQSHVTGKQHIGYGMVRDFLAEYKAAKE

SEQ ID NO: 46083 - protein, 317 aa, Zea mays
  Clone ID: 701184039_FLI.pep
SMATGDEAETAVRASEELRDWSDMTPVCLAEAFSRLALEDLWRGAMPCCRSWRDAARSRPGLFAVLDLEPGFAESTPGAEAAAWWTPSFQRRVDAMVRSAATFAVGELCEIHVRHCSDDALAFAAERSPRLSILSVKTSPAVTDRSMLIVGACCPMLTELDISNCYEISYKSLEVIGQNCQNLRVLKRNVFNWIDPSEHAGVVPEDYLRECPEDGNREAITISRFMPKLRHLELRFSKLTAVALGSIPEGCKDLEVLDLFGCANLTSRGIDQAAASLKNLVTLVKPNFYIPRSSFHMGRYGHWQLYDERFQTNVFQI

SEQ ID NO: 46084 - protein, 185 aa, Zea mays; identical to SEQ ID NO: 41307
  Clone ID: 701185185_FLI.pep

SEQ ID NO: 46085 - protein, 132 aa, Zea mays
  Clone ID: 701185360_FLI.pep
RTTTTTAHPPAPMTARSPPRPPPCATSSASPTASTARSCSSAPSARSSTAARSPSSSASSPPPVQFSSVQLSCGSDRSPLHSTGSGTVISAVLAVWNACFSVVSTCTICNVSLLLVPVGRTVHRFTPRDQAQ

SEQ ID NO: 46086 - protein, 146 aa, Zea mays
  Clone ID: 701185465_FLI.pep
IRHWCRGWAAQNIKHPTTLIGLSMTRQSTWAFCQTPYVCGWRGATRGCPTARVATERCAAMERRSRGALVSMAGAGASAREDMAGEQRVWEMRGRQGDGAGALEQGRRPRRRSGQRCSLGRRSTTPWMHGEEEDARGRGSGAGNRK

SEQ ID NO: 46087 - protein, 147 aa, Zea mays
  Clone ID: 701185909_FLI.pep
RRSEVVAGAGGRASSKMSWQAYVDDHLLCDIEGQHLSAAAIVGHDGSVWAQSENFPELKPEEVAGMIKDFDEPGTLAPTGLFVGGTKYMVIQGEPGVVIRGKKGTGGITIKKTGMSLIIGIYDEPMTPGQCNMVVERLGDYLIEQGF

SEQ ID NO: 46088 - protein, 181 aa, Zea mays
  Clone ID: 701186276_FLI.pep
KIAAWSVHPGRLDFPLQPQNPANPLISTARHSDPATMEGSADSFGSLTAPLAWHDFLERMRQPSAAEFVKSIKSFIVTFSNRAPDPEKDSTAIQEFLENMEGAFRAHTPWAGSSEEELESAGEGLEKYVMTKLFNRVFASVPEDVKSDEELFEKMSLLQQFVRPENLDIKPEYQNETSWLV

SEQ ID NO: 46089 - protein, 222 aa, Zea mays
  Clone ID: 701186296_FLI.pep
LDCSALASTPSTGVREPACSDGGQAPQPLRRGAAPPPPPLRLQRHRRRVLQKGVGLPSEGEQRGGRPRSRRQGTAGHLQDFRLHRHWMLERKLADADVSEEEQNNILKDLEKKEAEYMRLRRHKMGVDDFELLTIIGRGAFGEVRLCREKTTSNVYAMKKLKKSKMLRTGQVFHDVYSCQETMYPSKKKVVTVLLFCFHVLFSFQRCMYIYISRTATRALKC

SEQ ID NO: 46090 - protein, 99 aa, Zea mays
  Clone ID: 701167458_FLI.pep
HLPEAAATDRAKRRSPRRRQNPSFSYSMATVSLTPQAVFSTESGGALASATILRFPPNFVRQLSTKARRNCSNIGVAQIVAAAWSDCPAARPHLGGGGA

SEQ ID NO: 46091 - protein, 334 aa, Zea mays
  Clone ID: 701168564_FLI.pep
LNRSIHLLSQQRRRTLAPPTLNKRIQPREGEGGKKNEIGPLKITATNRRPYLFRLFCDAEPIEVLAASSESEPDQTRGSGGEMPCDDDLLSVSHRCPGLQGDALLARDGEHGCVVQEVLELDDGLQHPPEVVGAHEPGGAEPAHGVDVDGEAALAELEARHLAAREAADEPPVDVPERDDGGPQAVHGRLHGLGLEHEERRLGLVGAQAQRQRVPRLVRQDGEARGHVGGGGRERQALALAQVRRRDAQQPQQLQGRRPPHRERLHDELAPEPDALHVAARLEVRRLLRAAARLLLLLLLLVLVLVPLLLLCHGVLVLSAGVSCAAGVVVVVPG

SEQ ID NO: 46092 - protein, 66 aa, Zea mays
  Clone ID: 701169520_FLI.pep
IPKASIVYSRTATYWEKERKTKRQNKTEKIHTSITFSLTLTRPSSLIRREEIRMGLGSCSCCGHVT

SEQ ID NO: 46093 - protein, 110 aa, Zea mays
  Clone ID: 701170759_FLI.pep
CQYKQRRDGYGDRQRHERLPAVPVRQVPDDGGDDERPHPGDCVLEAAEVDGDGALVAAGAGGLHGDVGDRRDHHEGGEVEQEGHHEQVPQPRQVLHLSLVVDSAEQRARA

SEQ ID NO: 46094 - protein, 154 aa, Zea mays
  Clone ID: 701170816_FLI.pep
MMFLLDLLSHSIHVKYRDLPLNSRKQGAYYNMLQHDRYQQQQRNPLSSRERRRVDDDMSKRVRHVTAASVLNELRGGEEAAMADAHYPHVLALLVPVQEAVDPPGVRPLYLGRHHRHVLHHELPDVAGTARPRRQGPKRPQASLRLRLLCRSAV

SEQ ID NO: 46095 - protein, 191 aa, Zea mays
  Clone ID: 701172659_FLI.pep
YCDNTMSASANNNANKTAKRNPIVFFDVKIGSQDIGRIKIELFANVVPKTTENFRQFCTGEHKVNNKPVGYKESQFHRVIKGFMIQGGDFIKGDGTGSLTIYGKESFEDESFTLSHNRAGLVSMANSGPNTNGSQFFVTTDACEWLDGKHVVFGQVVEGMKIVRAIENTPVHPNSNKPKIPVTIAQCGQFC

SEQ ID NO: 46096 - protein, 292 aa, Zea mays
  Clone ID: 701172848_FLI.pep
THPPTGHSPPPSPGLSPAAAGAVLRPSPCAPGKTMRRYSPPYRSPPRRGYGGRGRSPPPPRRGYGGRKEGSGSLLVRNIPLSVRAEDLRVPFERFGPVRDVYIPKDYYSGEPRGFAFVEFVDPYDASEAQYHMNRQVFFGREIAVVLAAESRKRPEEMRSRTRVRGYSGHEGRRSSYYGRSRSRSPRYRGRPRSRSYSPAPRRGNDYSASPRRQEAHRSSPPRRPPKEHDEDKKRRSYSPASRDDADNVYEKRSPPADSDGSPLHRRSPKEYSGSPPGSRSRSADESPVASD

SEQ ID NO: 46097 - protein, 78 aa, Zea mays
  Clone ID: 701173383_FLI.pep
MPQKFHNKHQGSVVASSRRSRRLRRPRHRSQLRHPRAPGSCHSSPSPSLILVGARRRRDAQRSLAAAAPVVVAKGEER

SEQ ID NO: 46098 - protein, 150 aa, Zea mays
  Clone ID: 701174056_FLI.pep
LGRGSAVPSVHHPLEDAGPRLPERVGHRGVVHPGPQAERPPCRLPRVDRCGPSLSLSLSLSPSSSSSAPQVRNHLDRRIHGRWRFLAPISRGGRGGASGPGDGDSCGWFETERAEGCRGSRGYAADEGSGEQQRRCQPRRHGYLAADAGL

SEQ ID NO: 46099 - protein, 136 aa, Zea mays
  Clone ID: 701175253_FLI.pep
CAPRFFLMALGLFPALPAIPLLAQPFLPASFGSLRVCSSSAMAVAAKSLSPSRFFCARSSFGCALHFSSSSRRSAAHLPWWLVAAAQLPGAATLAVISSTAPNCAAPLTPADCSILCVASRGHTQQCLLPAPRPSP

SEQ ID NO: 46100 - protein, 322 aa, Zea mays
  Clone ID: 701175365_FLI.pep
GQLDEVDVDDDAVVAGVARPPAPAQVRVPVVLDLVVSSARQMTGDQGPPGKKKETWHSENGQSSNSKKLAKLMSISKNRKIMFKTQSNKLSFFFAILFYSVSVQFTRHLWLARPPRHLPSFMRALTYFCSRTPSRRSEGPRARCHRRRSDGRWRGRAQSAATATASRETSWPGAPLHRLWRLHAPPRRLPQSHCKPPSGQAQGRGRARLPGRRRGTRTGPAPPRQVRRVLRWLPRHCGPAFVILLALGTQRQERREHKGHRLVEPLELGLGASEHHEGTEADQLLVQQEHHGRANNHVNATMHARFASWVDRRAFIRATPRD

SEQ ID NO: 46101 - protein, 117 aa, Zea mays
  Clone ID: 701176024_FLI.pep
RNRRGARQWRTAYAVDGWMTGGRLWMANPWIGGLKGTSSPSFTALGLRRPGRWTGGRDEDGLKEQMTWRGQAAARTRAASVRKQLPGRWTSLLGMWAKFYVVKTPWCKKNFGLRPGP

SEQ ID NO: 46102 - protein, 411 aa, Zea mays
  Clone ID: 701176051_FLI.pep
IPPRLLSSCLTSLAAFRHFWGGCVPALQAAEMVGGSKPLGESVFAVHAVAGAAAISASAVAVYPLDTVKTLLQLGATGQKQKMGLRQVVDRLMAASGPAGFYNGIGWSILGKLPGLGARFGTYELLTAFYKDGREDNYVYYSEAMKAGIAAGAVEAVFCTPFELFKLRNQVSSVIPSKAMGPANVAQESFPLLSKLLPGYVPDIRVWNNTMSLLSDLSPKHPDMLGALKQHPWMLTGSGKPPLPSDVHLPSRVILLEGWGALWRGLRSGIARDCVFGGMFFSTWQFLHTVMLTWKAVNMSPKPRNLEAAGPVPPFASSVAAGFAGAIAAAASHTFDTAKSRSECTVVPKYIAMERKFLKWKAPGTWIERKTGISPADRNVLFRGIGLRTARSGIASFVLVGSYYLAVNHLS

SEQ ID NO: 46103 - protein, 92 aa, Zea mays
  Clone ID: 701176550_FLI.pep
QSHYTLTLHENKHKHIHNYCLVITNGFLVGVVPSTFAPGPPAFCLLANCQSAESNPFLCCFIKLGFGRRPNFWKYSACSGVKVERSMEGAAG

SEQ ID NO: 46104 - protein, 187 aa, Zea mays
  Clone ID: 701176801_FLI.pep
QGGENRDTHAKIQEAALLHGLLPPLRVLVPLVPPIDDAVALLQVSCERRDGLVNWRAGLDEHDHHPWLLNGLHKGRGVMEAVDGKVSFCLGTLHGLVHLGGCPVVHRDGEPFLCNVEGKVLPHDRKASKTDSCERHLLLHYGAGALPSADSDAELNWRCHHRPATYLSFTDHRPSLPHHLNRQSGRE

SEQ ID NO: 46105 - protein, 502 aa, Zea mays
  Clone ID: 701176819_FLI.pep
DYIVASSWVRPSSSSSSANFHYSVPISNRTQEQVWVRATVGVSTGLGRGWCLRRGRSTYTMESPQQQAPPPSQGASSGSCDAPLQLAARYGATVPRTSSPPASVTRPEVNNRMELKSSNSETLCDSLTLNTVSVMLTVSFFREDGDGGTDVFLGFSCVLGFIIRKYLWVLRSESARFTGLDIYTNTVVLVVTAYAMLLANSLQYIILAPFPISVAAFIAYLYKERLEHHGSSGADQQDNKDGCKPGDGNGKKAGELEMVVAPYSMLLISAIVMPYEDSPVLLSHFLLFSCCALGTLALLYSRLAEASPALRPALECIQMAYMVTLFITVHTVAAEWLGDVMALVTMPELIAGLVWFCNLLHGDTACNTAAVAHILRSDEGSSSSSDATHHQVPTNSETRQGFVFDGSMFTPLGAVLAGLVTSTFAHDEELLASWNTKATVACSIAGCLPYLSIWMVSRWPGRIPSSDKATRLLKFAANVCLTGAFLMLFALLDEKALAYRLF

SEQ ID NO: 46106 - protein, 239 aa, Zea mays
  Clone ID: 701176975_FLI.pep
TLEALTSHFQTLASLYLNAIKLSVISHHGTAASTGLSSIVPMELPPWASFLGIVLATVMLLKALTGRRSRRMYNLPPGPKPWPIIGNLDLVGALPHRSIHELSRKYGPLMQLRFGSFPVVVGSSVDMAKFFLKTHDVVFTDRPKTAAGKYTTYNYRDITWSPYGAYWRQARKMCLTELFSAKRLESYEYIRADEVRALLRDLHAASSSGRAVMLKDYLSTVSLNVITRMVLGKKYLDKE

SEQ ID NO: 46107 - protein, 200 aa, Zea mays
  Clone ID: 701177051_FLI.pep
ILGLLDLILERAVDQVRNGIVILSLRGGTVLLGLLVGLLEALVALGQLAQGGQGVGAQLVQDAGDELSELLVLAVAVDGKGVGGDRGVNLGRSKVDDVAVALEHVDLLDLGDGLDVELLQGSLELLVVGGRPGRGALDLSPRGTLATDARHSAKLLQTLLDIGHVCSCEDGGIGQLGATMGNLEVKEGVIEYQLTVVVGF

SEQ ID NO: 46108 - protein, 158 aa, Zea mays
  Clone ID: 701177211_FLI.pep
NCINTLKMSAKAICVLKGDATGVLNFVQQGDAVHITGEVSNLSPGQHGFHVHEFGDTSNGCISTGAHFNPAGKTHGAPTAEERHAGDLGNVIAGADGIAKVDITDKQIALTGPNSVVGRALVVHADPDDLGLGGHELSKTTGNAGARVGCGVIGLTAN

SEQ ID NO: 46109 - protein, 105 aa, Zea mays
  Clone ID: 701177587_FLI.pep
LILKNADANHRMSKATRSIYELRMFRRETLLWTNILNRCPAPLSRSPMLHSNACNWSSSQTTAFLLENAFETSDCFSTSICLDKCSKFIISIAVQSLIHNIHCMS

SEQ ID NO: 46110 - protein, 71 aa, Zea mays
  Clone ID: 701177724_FLI.pep
YAGAADADDDRHSMLKHFFMATGEDPTCSCTPNSLTPPPPAPCPLQVLELWPLFPQLEHFLAMGVRLRTAS

SEQ ID NO: 46111 - protein, 265 aa, Zea mays
  Clone ID: 701178419_FLI.pep
HKILCHRCHQLSFITFFLYSHLRTYNQLDKMVADALVYHPSVAHYLRFVATTLGRDKALRTIQYFARFYSWYLFRTNNPTSAIAPWDAVKKQFGLTRKILRFGKFVEHIKAAAVAFDNKAPADAVLRNLTVGRQLGYAGYLSLDAITLFDALGFKKFDSAKKLQEYAYRAWLSGLVCSAVAGVYTLYRLQEREKAVNRKEGEGVVEAKKIERERVAARIQLVSDLCDLTVPLSALGYAKLDDGLVGIAGTISSLIGVWSAWKKTA

SEQ ID NO: 46112 - protein, 157 aa, Zea mays
  Clone ID: 701178511_FLI.pep
MPPMDQRCPSCLLAALAAWASVGQVVHGGLPVERGRHPVVVRLVLLELVHELLRGGREHDDAAGAGVDEALLHGLVDEGQQRVVVAVHVQQPDLRAREEGMQRGRVRSSKCRCSAATRGWLCVCYRLVVDAQLRPRDDLQQLLQRAIPSSGVMSVLG

SEQ ID NO: 46113 - protein, 70 aa, Zea mays
  Clone ID: 701178752_FLI.pep
EIELVLIRLFYYKSAVGLSFYRGGGWTLYTTGFRANSADIANKHSTKLETLIYSARARTVRPTGADHSDR

SEQ ID NO: 46114 - protein, 321 aa, Zea mays
  Clone ID: 701179356_FLI.pep
NLNPRAAGPVALGASDTNLKSPGENSLAKAELMARVFVGNLDPRVTAREIEDEFRTFGVLKSVWVARKPPGFAFIDFDDRRDAQDAIRDLDGKNGWRVELSTKDGGGRGRDRNGSDMKCYECGEVGHFARECRLRIGSGGLGSGRRRSRSPRYRSRSRSRSRSPRHRRSPSYGRRSYSPRDRSPRRRSYSRSPPRSRARSLSRSPPLPPPPPRNNSMSPRGAREMSRSSPPPPKNNSSSPREAREMSRSPPPPAKNNSSSPREAREMSRSPPPPPPRNNSRSPPGARDVSRSPPPPPDARRSYSRSPEQQPQHESPYANDA

SEQ ID NO: 46115 - protein, 81 aa, Zea mays
  Clone ID: 701179711_FLI.pep
NFQRKSYEPASAKLLTAKTAMAAGGELQLLSSWYSPYVIRAKVALGLKGLIYEFIEEDLFSKSDLLLKLNPVHKKVPVLVH

SEQ ID NO: 46116 - protein, 125 aa, Zea mays
  Clone ID: 701179796_FLI.pep
SLSLSIPRKDPTMVKFSREYEASIIPEWKAAFVDYKGLKKLVKRIKIARRDRDARSTSNDHDDATTTSYGFSVLDPVRALASHFNNATPPASPEGGSDDDALRTLESDSGELVRATDKHVCSARP

SEQ ID NO: 46117 - protein, 107 aa, Zea mays
  Clone ID: 701180004_FLI.pep
GFGTIRLRASPPSKVEGPRHLPSGAMAATGQEGDDVDHYEVLCLPSGEEGAALTIEHIEKAYRTQSRLRHPDKRPDDPNATADFQLLSSSYKLLRDESLRRQFDARL

SEQ ID NO: 46118 - protein, 161 aa, Zea mays
  Clone ID: 701180251_FLI.pep
VGCLVYLYIFAAPRPLATSTASFPRTSLLLIDIDGDRYVEVEVANANLEAVVVVAANNRFRTSSGVGTSLAAVAVAAATVWATGRAGVYLGVRTRATTVAAAFAHLVAVLVAGRELRKRDVSHTRHTAFNGSRLNLGPLDRRRHDAVEGDESIKDDRGIHD

SEQ ID NO: 46119 - protein, 261 aa, Zea mays
  Clone ID: 700968667_FLI.pep
IRTQSNRHPAEMGRKFFVGGNWKCNGTTDQVEKIVKTLNEGNVPSSDVVEVVVSPPYVFLPVVKSQLRQEFQVAAQNCWVKKGGAFTGEISAEMLVNLGVPWVILGHSERRALLGESNEFVGDKVAFALSQGLKVIACVGETLEEREAGSTMDVVAAQTKAIAEKIKDWSNVVLAYEPVWAIGTGKVATPAQAQEVHASLRDWVKINVSPEVSESTRIIYGGSVTAANCKELAAQPDVDGFLVGGASLKPEFIDIINAAAV

SEQ ID NO: 46120 - protein, 165 aa, Zea mays
  Clone ID: 701158331_FLI.pep
PGTTGHSLGCPTAPVAVGQAPSNLCVTASAFSFASSRGAAWGIRFVVEERESLLPREQGWSRSWGSWCQTRCRSRWWLRWTASSTIRCTTAMSSAPLSSWHTTRLTPATLATGSVVGWGLGSRRAAALGRCRDPGWVARREKIPGDSGFIWEARINWLGWTLLGP

SEQ ID NO: 46121 - protein, 188 aa, Zea mays
  Clone ID: 701158507_FLI.pep
DLTATRAFLFQTTCAHVHVRTAYPLQLTSRYRYCRRTARIDLLGRYVHKNASATTTLASLIRRSHLDVLARRRVRVAGGRVRGVDGRASAVVAVRAGEGHARAVVASGGVRSVVGLLLVLVGVGLVLLGAGRLLGHLLLAVRGRRRLARLALHLCRPLLHLLLRRAHHVLRLHLRCLHPVLVWLPSLS

SEQ ID NO: 46122 - protein, 252 aa, Zea mays
  Clone ID: 701158519_FLI.pep
RPSRPLDPWRGCYRRPRQRPSWPPSWWRACRAPGRRLPRRRRTTRRRTGTTPLAAAMGGSSTPTPTPRPGTTPTGPPARPSTSVTTSFSRRTTTRRWCRPPTPRHSGSATPATTWRRRRPSTAAAAAGAAASSRTAPSRWRSPPRAPTTSSPRPTGARSASRGCGSRSRSSTAGACRRRSCTSRRRPRAASSRRRRRARRSRAPAGSSPATAPGTTAALAGAARAGRRRRPAPGYWGWWLLLLRLWPFWFFE

SEQ ID NO: 46123 - protein, 268 aa, Zea mays
  Clone ID: 701158527_FLI.pep
EKPTKTTGRRRDGGKNTAQAQAGRDVKPPLRARRRHLAAGARLAAGSLRAPFRRRTGRSPDGSGSDDLRGLAGMAGKKRKAEAARLEETDRALYGAFRGAANSLSQLYTLGMGAQKASFHAGERHAMEKLYEWILRQHENGLRLTVADVASHIQHEIQYGGDNASASPRSQYPSQSTAPTMHIPNTSNQQPSPSLFASGNPGLTQSKNSMVFSSALSSPIRRSLQPYHLEQDGDAGYFANGASRDVNPTASNDSSMDMHSDSPAHDSY

SEQ ID NO: 46124 - protein, 87 aa, Zea mays
  Clone ID: 701158536_FLI.pep
HFHFPQKTVYIGNVASNRSTIFSVFPCLHSSARFILDNPAGPLLVEDAVATFTALDDISGLQGVLSSAISAEVTDRLRLLRIHGRAL

SEQ ID NO: 46125 - protein, 76 aa, Zea mays
  Clone ID: 701158572_FLI.pep
FSSVHPCSCLRGRERLREDVVLRRQLRVRLRLQVRQRLRRVQQDVPGHGRAGDHHHHPGSHHGCRTIQGARRGRVR

SEQ ID NO: 46126 - protein, 123 aa, Zea mays
  Clone ID: 701158657_FLI.pep
PIPPRPLPRTLVSTNRPTKAGVASQIPRASETGREGTEIRPSVRVDGVNGGADKLVGAVLGEGPRARSHRRRVGCGGGRFGGVQPEEGAAAGHGPAPHPRQDARAGAHARRPRRRRPLPLLRR

SEQ ID NO: 46127 - protein, 268 aa, Zea mays
  Clone ID: 701158843_FLI.pep
EMARAAAPPLHRLPGLALLCLAVAVCFSGGENAAAAAWTRKIVGVHELRVGDFSVKVTNWGATLMSVILPDSKGNLGDVVLGYDTVAEYVNGTAYFGGLIGRVANRVAGARFTLDGKAYRLYRNDGNNSLHGGHRGFSKVVWTVKEHVGGGDSPYITLYYHSFDGEQGFPGDLDVYVTYRLSRPYVLSVRMNATARSRATPVNLAHHAYWNLGGHGSGPVLGETVQLFASRYTPVDAALVPTGALAPVAGTPYDFRAPAPVGARLADL

SEQ ID NO: 46128 - protein, 199 aa, Zea mays
  Clone ID: 701158994_FLI.pep
VVWLALQGRRQPLFWGQLTPLRYCRPLMRLVTMSRMPILQQLHLEEQLLRRTSDNWCIINDGTAPATIVMGVSGRVSELVNIQLVLRDKVPIVRRFSGGGTVIVDQGTVFVTFICNKNVVAGLQPFPRDIMSWSGQLYGKVFDRFGEFHLRENGKKPHRFLVPHEGVHTFAISFHRWGHCCPGRTLLSSAHGSTSNSFR

SEQ ID NO: 46129 - protein, 456 aa, Zea mays
  Clone ID: 701160304_FLI.pep
LLRCAVLHLRRRIRDSDLGFTAAHRAPPTPVPIRALLYDASVMAGMAPEGSQFDAKHYDSKMQELLSTGETEEFFTSYDEVFESFDDMGLQENLLRGIYAYGFEKPSAIQQRGIVPFCKGLDVIQQAQSGTGKTATFCSGILQQLDYGLVECQALVLAPTRELAQQIEKVMRALGDYLGVKVHACVGGTSVREDQRILASGVHVVVGTPGRVFDMLRRQSLRPDNIKMFVLDEADEMLSRGFKDQIYDIFQLLPSKIQVGVFSATMPPEALEITRKFMNKPVRILVKRDELTLEGIKQFYVNVDKEDWKLDTLCDLYETLAITQSVIFVNTRRKVDWLTDKMRSRDHTVSATHGDMDQNTRDIIMREFRSGSSRVLITTDLLARGIDVQQVSLVINYDLPTQPENYLHRIGRSGRFGRKGVAINFVTRDDERMLFDIQKFYNVLIEELPANVADLL

SEQ ID NO: 46130 - protein, 128 aa, Zea mays
  Clone ID: 701160320_FLI.pep
PNLTTVSLYLSNQAQRPSPSSPPRSTRFGVLAAFIDRSFSPRHFSPRPPCDFATSIQSLCTENRLMAEEGYKVTLNVYDLSNGLARQLSTSFLGKPIEAIWHTGVVVYGNEYYFGGGIQSSPAGTTPY

SEQ ID NO: 46131 - protein, 110 aa, Zea mays
  Clone ID: 701160335_FLI.pep
YFVFCCLMTFTDDSAYIYISSSPHAHLLHMTIAHNPHNISNRTRTTPVALIRRDQPHGTEEFPNREIAICLGWGAPRPASSATAGRRVRAPNGKPLVMDPLPQKINLISK

SEQ ID NO: 46132 - protein, 70 aa, Zea mays
  Clone ID: 701160431_FLI.pep
MINTLQMLHVFICFLLLNWEVMRNKEMEESQIVMNKKKRRKTENGKAIFSWMATSSRDGLSFQVLILLGW

SEQ ID NO: 46133 - protein, 199 aa, Zea mays
  Clone ID: 701160504_FLI.pep
GREMERAAPVRSSHTSTAGLLAWPHPDGAGSLPARRPNQPTEEFRNVVFGGQLTEGADGLNKTKRKTGSSPKGKETTGTGISKAESAVATASRDRQASQITFSQDGTVPTRKATSVAGVARQRELSHTVESEGDSKMKRQVSSTKSKELSGHDIFADHEDPKPNRSRRSDYGSSAAQSPVKNANVSSFSFGEADIDSTV

SEQ ID NO: 46134 - protein, 139 aa, Zea mays
  Clone ID: 701160511_FLI.pep
QLLIIVMPFPDTGQDQLTGDHIWRGRQRKIDKPVTANTVKTSLSIQEFGHSYFLLQQIGLKGKAKSLKQPYNSFKHAPAPEGVLIRAQWWSFVSNKPSGPHGNSLLRMCRYGYAGGSSKWGWPLDRLYAARRVQVTIPA

SEQ ID NO: 46135 - protein, 157 aa, Zea mays
  Clone ID: 701160513_FLI.pep
QTRTNNILIICKERSWLEHALHIASSSGHTAACLARAISRAEGDLVVAVAAAGMGLGVVAGKQVGVWAAGPAAVEGHAGAAREEHGQVVAVDHRDVVEVLAAAAADGELGQRHGRLPRERAGECAAAVARLAAPAAAVEGAPRAPPHPAGLGPRRHV

SEQ ID NO: 46136 - protein, 178 aa, Zea mays
  Clone ID: 701160522_FLI.pep
GHTQIRANHRRSEIIQPERPFLFSFTQRDRERSQAAKATHRFYRSALPPPLALSASAPSKSTASKQAGAMGLPMRRERDAEAELNLPPGFRFHPTDDELVEHYLCRKAAGQRLPVPIIAEVDLYRFDPWDLPERALFGAREWYFFTPRDRKYPNGSRPNRAAGNGYWKATGADKPVAP

SEQ ID NO: 46137 - protein, 281 aa, Zea mays
  Clone ID: 701160683_FLI.pep
QVMENPAPSIVVPPIAAPVSANFSRLAFRNLYIRRTGPDSREMVTVEGRRGSSDQTGDMRLKGSTLLTEGVVTDGSDEWAIYGGTGEFAMARGVVKRRYLADRDGAGNTDELSMQVFCPVFGSSQQPNKQDSTISVTKIGLWGGEGGSAQDITTTEPPQRLHSLTVRASAAVDSIEFTYTDRGGQRRAAGRWGGLGGNLRTIDLGDAEDVREVSGTYGTFEGATTLTSFRILTSSRTWGPWGVENGTRFCITAPVGSSIVGFYGRATSRLVAALGVYLRRL

SEQ ID NO: 46138 - protein, 158 aa, Zea mays
  Clone ID: 701160724_FLI.pep
AEFTSAREKPADSCNCKPPRAELRLCRSIRIQENNANQSSPEEGRWPPLGSPPAPPPPAPPSPWQTTPRRRTRWTWCAGSASSYAAPRPSASTPSPRSPTVASTLPPTSTPWAGAGAGARPPPPPHCRRVPEDLNRQRRDLFLLAIGVVGDLFLNAKS

SEQ ID NO: 46139 - protein, 152 aa, Zea mays
  Clone ID: 701160925_FLI.pep
YIENKYLGLENGILDPSAILLSRYGYLTFMDCKTASPSYVCFSELNKSQQPQGQLPFKILLAFSGLQHNLPKKRGYNTRVSECKEAARALLHASGCEDTPNILCNVDPVVYETQKCVLEENLSRRAEHYFFEMKRVTKGMHGLMGTYKNLDS

SEQ ID NO: 46140 - protein, 153 aa, Zea mays
  Clone ID: 701160939_FLI.pep
HLKNPSYLSRKLKSVTTCCTCHYSTFSAERNYPSSTPTESYSRCFKTTQICAKSSRGSDRRHRCLPQSRQQTTSGPGSSSALLSRWSQPACSRHFETQCCGLLNTLLAKKWPSDRRTAACSTYITCAVDRTGLLLLFVPSQLNHSIVCVYILE

SEQ ID NO: 46141 - protein, 189 aa, Zea mays
  Clone ID: 701160978_FLI.pep
APHNSSINELGDWKQATRMELTWRSRRRHGRRTWRASPSRGAAMSGARSEAWSLCRPTRRRRASSWHISRRGRHPDQGSTSTCSSRIHSNPRHPDQGPQIAPEFAMKRREPSPRASRWRRQAARFGARESKNSGGAPREAAAWEPGSEARSSSRADVGTRPPTADRLGGNSTNLPLEREREGESAVGGG

SEQ ID NO: 46142 - protein, 276 aa, Zea mays
  Clone ID: 701161090_FLI.pep
NQTVCFIRHVLREPAQRRAGKDGGCDLQPCGVLDGCDDGLCLEVVAEGVDALLPPDAAHLVAAERDGGVEHVVAVHPHGARPQRPRQGVGRVQAPREHPRRQPVGRRVRAPDHLLHAAELENGLHRPEYLLPSDLHFVLGVGKHRRLYVEAPVAYPVAAGDEGGTAVDAGLNVPQDLVELLAVDLRPLFDPVPEGVADDALQGARLGLLHELVVHALVHERPRPGAAALALVEEDRLVRELDGLVDVGVVHDDERGLATELQRHRLKVAPRRQLEH

SEQ ID NO: 46143 - protein, 177 aa, Zea mays
  Clone ID: 701161116_FLI.pep
KEQLFDMTCMTLGGRAAEEVLIGKISTGAQNDLEKVTKMTYAQVAVYGFSEKVGLLSFPQKDGGFEMSKPYSNQTASIIDDEVREWVGKAYKKTVELITEHKEQVAQIAELLLEKEVLHQDDLTRVLGERPFKALEPTNYDLFKKGFEDGGDNSQAPAENAELPDDSSPPVGDVVPT

SEQ ID NO: 46144 - protein, 220 aa, Zea mays
  Clone ID: 701161118_FLI.pep
DRAGLLQVCAGQQRCQLGDVGRRWRGAAGREDDVADAVLVGQRRAGAAPRRRRRSSLHDGHRARRLLLLGASDRGQRPPHQRGDQLKRAHNLAPMVTLDRAELESLQLLLGDVEGEGHHVMGGRDHPVIADGGRGGLDRRRDRHAGRWGRRRHREWVSQGWRRGLVAAEDLRPLSEAGNGGGDVADEVRPREAEGHPPTLEASDLHVEQRREEELRPDHL

SEQ ID NO: 46145 - protein, 61 aa, Zea mays
  Clone ID: 701161183_FLI.pep
WGERAWSLSSRQSRLKQKLSPLLPLSAPITATYWPEVIELVKGKEGVSWASHPSGLNPWLA

SEQ ID NO: 46146 - protein, 273 aa, Zea mays
  Clone ID: 701161229_FLI.pep
TAPMASPPPPPPPPARHPTSAATAAAAGNGHDTSAATAAAAGNGHDTSASPVDALFLQNLMTRVQLRPPFLDTNSFLTQDLDDFLLNEFAALSAAAGASDDDEDVEDEDGGLAGGEGSGEARRRRMLAREEAKLEKEIVRMVLAGEAEDKLKPNSGQSVAVGDHHLCVGFHDDASGEYRIWEWHGHVMLFDDEEGYSAEYIYGNHFEPLAAATARAKKKEKEMREKELSMGLRDLVVDTDDGGNANRSKENGSSGGPRVVRRNVVNGPTTPAR

SEQ ID NO: 46147 - protein, 138 aa, Zea mays
  Clone ID: 701161261_FLI.pep
TSAPKVTAGFTCPPETLTATATATARPSACASATATSPPAVLIVLWSWYIFPSERTDPSAAKTKMAVAMNSEMAARMVSGCVASSLRPTVNRRPGRTPVAVLMSSARNQAKPPASGLFLLACSSGVRTSSFVSNRRAG

SEQ ID NO: 46148 - protein, 393 aa, Zea mays
  Clone ID: 701161374_FLI.pep
GVCTAVRIGICYSFITCIQAYTTTCRQYHAPSRTSVSGVHWIRSQRRCHGDGGDHAVDAAYVASAAQAVVPLLTPLLSPRVLDDPVGAVAQPQRREAARAVADEEHAVVDPRARADERARHPAHVRLHERRVEPHREGPAADERRADLGLVAGRHGGEVGHADGDLGRVEAAGPRRARVRVRALLHQAAGLHQVRVRVRHQPAGAAVVALVLRHRAARVVAVDQLLLAEVDELPRGEEVGALHRARRAERPARPARALRLDARDGALVAPVEAGRQTGHLLLRGRRGGRHATHEPLDVPAGAQAREARLELLPREVGEGRDPVARRRVQRLVRRRAGQVGREHAQPTRILLGPGVPPPVPPHERCELRLREQTRARAGAGTLRRHLPDEFVVG

SEQ ID NO: 46149 - protein, 113 aa, Zea mays
  Clone ID: 701161385_FLI.pep
LGECSCVSRPSFSSTSSRTARGCHPLSYNSITYIYIYKLSNYYMILLQPTGTELVNKKSQIRLVGEKISNWIGWGAPGSASSATAERRSRGPVRATLKGPSGKPRWWTLPHKK

SEQ ID NO: 46150 - protein, 237 aa, Zea mays
  Clone ID: 701161793_FLI.pep
GTAGPLHGSSSSDTAPDHPAPARSRPKTSPRSQPLLGGEGKGREAMAANGGGYRAEDDYDYLFKVVLIGDSGVGKSNLLSRFTKNEFSLESKSTIGVEFATRSLQVDGKVIKAQIWDTAGQERYRAITSAYYRGAVGALLVYDVTRRATFDNVGRWLRELRDHTDQSIVVMLVGNKSDLRHLVAVSTDDAKEFAEAESMYFMETSALDATNVDSSFSEVLTQIYQIVSKKTVEASEE

SEQ ID NO: 46151 - protein, 172 aa, Zea mays
  Clone ID: 701161830_FLI.pep
ASKNHSESKQQLVAALENELGEEGIDKRSKVISLFSITLVLFYTCGFWCLRAFARGRLFSLVFECNCVPWISCAPCCFVVLGRALIPCCFSPHSFVRVPLLFQINLQPATHSRASSPFNSISFCAFLLVLSEKKEPAFLTSSCACLLARMTSSSSDSLLVLAWIVWVCSCLA

SEQ ID NO: 46152 - protein, 232 aa, Zea mays
  Clone ID: 701162777_FLI.pep
AKPPQVHRRQAQKPPRIFHTRSGTAMRLLCCLAALVVLALQHQCHGLLLPLTNTMLSSLRGANGTATPVHHLLRASSLRSAARHGRHRARRSPSSPPSPGSHRQLSLPLSPGSDYTLSLSVGPASAAAPVSLFLDTGSDLVWFPCAPFTCMLCEGKPTPGRSGPLPPPPDSRRILCASPLCSAAHASAPPSDLCAAARCPLEDIETGSCGASHACPPLYYAYGDGSLVAHLR

SEQ ID NO: 46153 - protein, 122 aa, Zea mays
  Clone ID: 701162891_FLI.pep
GAATVAKSAGQVSSGKEPPAAGDIVAVGGGMGWLNRVGGEGPGSGCRRRRRRAAVRGTGGKVARSRALDLDRTAMGGSGRGGASGEAMARIAVGLARQLAPGSRSQPRACDSGDRTYEPALL

SEQ ID NO: 46154 - protein, 106 aa, Zea mays
  Clone ID: 701163067_FLI.pep
ERSICNFQYSSVLLFVVVLVTRVCLVSHVISWSQGIPDCNVLHHALFCALWFLRYYIVYIHMMLRFVVKFGLTAMVSAEGWWFLVACSVSLKHLSSLLSVVVILWE

SEQ ID NO: 46155 - protein, 278 aa, Zea mays
  Clone ID: 701163177_FLI.pep
VSNYEKELEEMKSMTRQEFIASLRRKSSGFSRGASIYRGVTRHHQHGRWQARIGRVAGNKDLYLGTFSTQEEAAEAYDIAAIKFRGLNAVTNFDMSRYDVESILSSDLPVGGGATGRAAKFPLDSLQPGSAAAMMLAGAAAASQATMPPSEKDYWSLLALHYQQQQEQERQFPASAYEAYGSGGVNVDFTMGTSSGSNNNTGSGVMWGATSGAVVGQQDSSSKQGNGYASNIPYAAAMVSGSAGYEGSTGDNGTWVTTTTSSNTGTAPHYYNYLFGME

SEQ ID NO: 46156 - protein, 62 aa, Zea mays
  Clone ID: 701163440_FLI.pep
VPKNSTREPVRKIQLRTSCHDATFLKTPQQQKLSQFLPSWTRTKDTSKRDSGAASDFCCLRS

SEQ ID NO: 46157 - protein, 51 aa, Zea mays
  Clone ID: 701163481_FLI.pep
LYLPTSASKMKLVRFLMKLNNETVTIELKNGTVVHGTITGMTSCELYHCGN

SEQ ID NO: 46158 - protein, 196 aa, Zea mays
  Clone ID: 701163606_FLI.pep
VPILHTKPRIALPCSATSSDPDHPTPTPDNRLMEAKMGRFFESVSNFFTGGDHIPWCDRDLIAGCEGELVNAANEEQRNESLMRLSWALVHSRQTDDVNRGISMLQASLDNSASPLQTREKLYLLAVGFYRIGDYSKSRQLADRCLEIQADWRQAISLKKAIEDKIAKDGLIGIGIATTAVGLLVGGIAAAVARKK

SEQ ID NO: 46159 - protein, 146 aa, Zea mays
  Clone ID: 701163635_FLI.pep
DELEALHLREMGGVAQHVDEHELGHVPVPELRLILADGRAYRRTFPPHHRALLRRRLARAYRAYHLPEARPGGEGAHGDVRGEVLDDLLDRVHDEISARARRREWRWSRGIWMPWWLEAGSSGRRGEARRARCEQGRGSKALELDR

SEQ ID NO: 46160 - protein, 127 aa, Zea mays
  Clone ID: 701163687_FLI.pep
KLEEMLSKLSAWFVNPRRNPLARLHRNAVASRLRKYGLRYDDLYDPYHDLDIKEALARLPREVVDARNQRLKRAMDLSMKHQYLPDDVQAIQTPFRSYLFDMLALVKKESAEREALGALPLYQRTIP

SEQ ID NO: 46161 - protein, 68 aa, Zea mays
  Clone ID: 701164165_FLI.pep
PLMLTAIYKYRSNVQIAEIHYMEDYYHWMPPDDDSIYQRSRASNVQLHRTETVAYLCRSAIPRAGVTA

SEQ ID NO: 46162 - protein, 104 aa, Zea mays
  Clone ID: 701164287_FLI.pep
RRARGVELVEREAAVVVGEDLEDVLRHCVAAPQRLHDMLHRREQLLLAILRHGSWVGVQDGYFRGRNSITRRAGSDLDDGSTRLRVMFVVGGDEARGRLLASRS

SEQ ID NO: 46163 - protein, 222 aa, Zea mays
  Clone ID: 701164563_FLI.pep
AGEGHDPRQGADGVPGADGGDAVPSGRAAPGAVGPGAGGLHGGAGPGHARVPALQPRARPRRAAHRHGRRGVPHVGRAGARRPVLAHVPRQHGAAGVPAHPGLRRGGAPQDGGGRGARGPQDRAGRARHPEQGAGGRCWHWRRRRQDFLVNKQIIHGCVRVNVSRVVVECSSLYVGNRLLVVFPECVINILVFVVCGAALGWGLGSAVYRYLFIAAPSRSEM

SEQ ID NO: 46164 - protein, 43 aa, Zea mays
  Clone ID: 701164625_FLI.pep
YIIVSVVQSVHFRIVHVGLHSLHGYPNMNNSEVYRLYNSVCCT

SEQ ID NO: 46165 - protein, 91 aa, Zea mays
  Clone ID: 701164657_FLI.pep
TWQDRVPKLFGFKRLAGLGKLLQLFINLCFRQAIQVHASLHTHIVARPELGRDTGALADKEGEGGVAGLDVTIVLLHELTGSGAGRGGLTE

SEQ ID NO: 46166 - protein, 150 aa, Zea mays
  Clone ID: 701164701_FLI.pep
QNKVPNHTTKQRLRMSLSNGTRSQSITSSLKRLFPFCLVLRRTESKTRLLGGARNAASGLVKHGVDLVAVLHLQLIRGLLAAKPAAIKQERNGIHVHRLAVTISVHQLLQLGGPLYAKEHLIAILSLDLKVDVGAALRGLLVLLAGSRHR

SEQ ID NO: 46167 - protein, 184 aa, Zea mays
  Clone ID: 701164705_FLI.pep
GFALGISLPAAAAAGQCTDDTTSSFLRSGLFNPRIPYKMLPLSLLKTAQGHPMLVELKNGETYNGHLVNCDTWMNIHLREVICTSKDGDKFWRMPECYIRGNTIKYLRVPDEVIDKVQEETSKSRSDRKPPGVGRGRGRGDVGAKPGGRGIGRGQDDGGRGSGGRGRGGVGAKGGNKGGGRGRG

SEQ ID NO: 46168 - protein, 155 aa, Zea mays
  Clone ID: 701165192_FLI.pep
ATLIPATAHGRLKPSAPVSGAGFGIRAMSWSAPDDILLSTSLAGFLDKKLIVLLRDGRKLLGTLCSFDQFANVVLQGACERVIVGGQYCDVPLGLYVIRGENVVLIGELDHEKDELPAHMTCVLEAEIRKAEKAEREARDLKGTMRKRMEFLDFD

SEQ ID NO: 46169 - protein, 57 aa, Zea mays
  Clone ID: 701165271_FLI.pep
GFQRSRRRWNEVAIVGWLGWLLVAFPASQGPGAPCPTCESIDRSPWKQPRPSRSLAS

SEQ ID NO: 46170 - protein, 263 aa, Zea mays
  Clone ID: 701165466_FLI.pep
AQIPPGGLHRAQHRPGEGPDRLHRVPQRGQEVGRVQAGEVELVQRRQGPPRVEPRLQGALGAELGGEGAPGALGLDVPGPEVRLQLARRDLVRLEEVALLLGVRRERGVARRRRAPGRGGGVPQVPPLGVGEPRELGDHGGVRALDRLRVVGELRELQLRVRRLHRRDPREEVGQQRIRRGLQRHLPRTRSLPDRSPSRRRRLLLGGVAEEGVEGVGGGEVPRQLELAEGRDGGRRLRPLLLQRVSWSHRSGRLGRAALRRGL

SEQ ID NO: 46171 - protein, 165 aa, Zea mays
  Clone ID: 701165781_FLI.pep
NLGGEHDGAACCLDLLLGDLGDELGLDDNGLWRQHPLPEHLEVAELRDVDLRGLVAAGLRRLVGGHHRPEALDVDRGAVELVAELMEVTHANLAEVARMVLVEEDTVVVHATGVTATSRVLPVLADAAVPGGHVAALLAVLLEARCHRRRRLTWAAPGRGEWRRV

SEQ ID NO: 46172 - protein, 128 aa, Zea mays
  Clone ID: 701165842_FLI.pep
ARRTTGAASGMAGTWTLESPEEAPDDLGLGAVVVHGLHEPRQPLREVVHLPVQALDVGARLLQKLRRRRLQRYITWPACISRASKKRRKLWIIHVVVDRQALIRCTDAHSAGEIRTVRILGKSRDRPK

SEQ ID NO: 46173 - protein, 133 aa, Zea mays
  Clone ID: 701165845_FLI.pep
NIDIDRGSIIVWLDFCSSRIPQTLRHPVNFVGCGLDMTLTPICFIHLAIAATETPHHYQPLKTTKRWRSGSPARHPPWVPHRCHESWAYGSGSTGTRPYWSGGSRQASTVTLVIVAAVAVVVVRWGGRQPGCV

SEQ ID NO: 46174 - protein, 68 aa, Zea mays
  Clone ID: 701165889_FLI.pep
HDENPRPIQPPPPPSPSPSPSPRLVFPPIQRPMECIAEMPRAPLDSRLRKRQRLGWDVGPAEMYKAVR

SEQ ID NO: 46175 - protein, 131 aa, Zea mays
  Clone ID: 701165896_FLI.pep
DQANQLEHRVTRNTRGSIVSQPHIVKRNTDTKQLPYRSPRCFRDGWVGGPGSFLSTFLETRASNCALLCLGLQLLQCLFLIFLLLQISKITLVVLLLVDLGRLQRLGLPSLLRHGRRGDGSAGEGRNPRLN

SEQ ID NO: 46176 - protein, 49 aa, Zea mays
  Clone ID: 701165907_FLI.pep
ILNTKLVNPAVHHSSHLSPDGEKKKGGFQCSAPTPTPKFPDPRRQSRRS

SEQ ID NO: 46177 - protein, 127 aa, Zea mays
  Clone ID: 701166010_FLI.pep
LPTGPNETCNGGLQKAKFQSGYRNSRETGASPSSLEWATSGDGYWARGRLVGRLLGVGEILGVVDDGEEEGARGAARNLLPEAEVVERDLEEVAAGARVRVRLQLRVPLHVLDLHLVVRRHLAATKP

SEQ ID NO: 46178 - protein, 231 aa, Zea mays
  Clone ID: 701166061_FLI.pep
GERRHVAAQEVRRELQPLHLQLLLQLLELLRRRLRHHHLRILGPTTPATGTTGTLVTAATRTALLGLATAGILGMALATAGVLRLALAAAMAVLRDAGLGAPQLGRLAGLVELPDDGVRIQQAGHRHLPLFRVDAALVDTVDLVEGLLDLLLAPVTVYVHSQHQSLHLEHILLAHPGTGTGTAPPLNATPAERHTTTEQEGFRSGARALKSIRGGDEEGREGRTGGCNNIW

SEQ ID NO: 46179 - protein, 260 aa, Zea mays
  Clone ID: 701166706_FLI.pep
LAFPHQGVHPSSHGDGVQDGDGGDEREGGVPALVHGDEVEEGAPLRGVQDRRAVARRAGGQGGRPRGRVRGARGRAARRRLPLRRLRLRLRHRRQLPEEQDLLHRLVTGGVEDQGQDPVRDIEARPAAAAGRGPLRGAGHRPLRDGLRRHQRPRAMRPPLRSAPIYVLTCAWACSPTTHCSVVSSHLRSCVCVCDRPDANWRWCAPVAIDAANLTRLRVCLLCYFRFSGEMVQAWCVDVDGWSRSSGEWQRTNETSTSAT

SEQ ID NO: 46180 - protein, 86 aa, Zea mays
  Clone ID: 701166916_FLI.pep
NSQSRRSSGSSAHTDRSRRGREPTNFIADQTRKKDPGHGDAVAGADADLGQGPQGREPDVQDGGLRRGVALRRPPVAAAGPGRPHR

SEQ ID NO: 46181 - protein, 63 aa, Zea mays
  Clone ID: 701166935_FLI.pep
TTHSPYVVFLRQRNEACFVALPLIYVCNTHFVRKSKRRDYIPLHVCVLSLFIISCGHLTYTNK

SEQ ID NO: 46182 - protein, 81 aa, Zea mays
  Clone ID: 701166946_FLI.pep
GNLVLTFWRLASSQSLRTSGVFLLLTPSNRRRYTVSTSTRRQTLPVILNFTSQAPTMAVTASSINSAIRMVPHPDTGYFLR

SEQ ID NO: 46183 - protein, 224 aa, Zea mays
  Clone ID: 700421774_FLI.pep
LGFLSVPLQYPQLYQEGVQNILFSWRRILGWMFNGVMNAVLIFFFCITAFEDQAFRRDGQVAGLDALGVVMYTCIVWVVNCQMALSVNYFTIIQHIFIWGSIAVWYLFLLVYGAINPRFSTTAYMVFIEQLAPALSFWLVTLFVVVATLVPYFSYAAIQIRFFPMFHNKIQWKRYLGKAEDPEVARQLSSKHRTSLQHRMVGISARRDGKAVQITKETELQVQE

SEQ ID NO: 46184 - protein, 113 aa, Zea mays
  Clone ID: 700421790_FLI.pep
SSRPHLTHPPASPPSTAPQRPRHLRLSAHLHFFRSSSPSPSLTRAHPSPSDFPVASSRSVVNSTLFKRVSPNHGAREGSFYFDPPEDSRPMGWSPERAMYQLIDRRKVESMSF

SEQ ID NO: 46185 - protein, 147 aa, Zea mays
  Clone ID: 700422348_FLI.pep
ATPVAFSPQILQFLVFSAKCSSVCRVFVLVVSRFGSWLGDFTASLGIFCREVDREVLVDMEQIQYSEKYYDDTYEYRHVVLPPEVAKLLPRNILLSEKQWRLVGVQQSRGWVHYAIHRPEPHIMLFRRPINYQQQEEEAAAAHVLPK

SEQ ID NO: 46186 - protein, 79 aa, Zea mays
  Clone ID: 700423857_FLI.pep
QPRSNRPPPTTTRSKQQPRARLGLPTTSSAQLASILSARVAAAHSSLYPSLCLFNLCSFVSRRPAHMAAQSMLMSTSVN

SEQ ID NO: 46187 - protein, 185 aa, Zea mays
  Clone ID: 700423892_FLI.pep
RTDFSKIFLSVLSLAGSDSPSLAMVLAGLRRHVGQFLTSSNELMAASLSAVSCADEVQKAEGAGCRDDAAALRLKKVAMAAILVAGVLGVVLPLAGRKRRALRTDSAAFLAAKAFAAGVILATGFVHMLHDAEHALSSPCLPAAPWRRFPVPGFVAMAAALATLVLDFLATRFYEAKHRDEAARV

SEQ ID NO: 46188 - protein, 67 aa, Zea mays
  Clone ID: 700423896_FLI.pep
ETHTVHTYHYQQEPRRGIRYTHKKKQMSYFSIQAPIGIAHCSMTSTSQVCMRLLTPQHSGWFAQFSR

SEQ ID NO: 46189 - protein, 145 aa, Zea mays
  Clone ID: 700423960_FLI.pep
FLFIDREQIWFVIPSTREGHGFPIDVLESSTQAFVVPMESKRVSDQDALIDLESGNGTTVSNYTNGGDASFTVGQARTAPNGAWNGCVCANGCPRDDRNQHMDCSPPASDAVARSGDDRKSEGEEKLMDSSGGEKTKKKRSKKPP

SEQ ID NO: 46190 - protein, 150 aa, Zea mays
  Clone ID: 700424030_FLI.pep
CKYIRLWWILMRLIPATLACGNTCIGWLLTSQHQQMIASAESSYHMRAQAPPWASTVLCWCSTSNWGGARCLRRKFVRTSTCVISHAVSTSASLWPRRTSTVSGKQAQVGEGSLVFLIMSFKVKAGKLEPTTTSNVRVCLYGRIGVHYVA

SEQ ID NO: 46191 - protein, 165 aa, Zea mays
  Clone ID: 700424380_FLI.pep
LFFCSFLSFISVCKPACVNNPPITLSRSRSPSGSPRGGRRERDERRSRSLSYSRSASPRRSVSPAKEKERSRTPNGSRSPRSPSPRAEVSPPLKDNGARNGSDHEGNPGGGENSKRSRSPSDGYRSPVANGRSPSPRDDRSPSPKGNNEDDERRGSPRGSQSPLN

SEQ ID NO: 46192 - protein, 162 aa, Zea mays
  Clone ID: 700424946_FLI.pep
MTKAATIYGSKTQSDALRPGPLRPENIFRNKFPTYKNGSNGIVIKLADGPEIPPLKEIVAKETAYLLDRRQRLSVRELAMKFEKGLSTATLLSNEVKWRQVVLMERDILLKNLKSVLESLRGQVTGKTKDEIEESISMVEILTVQLSKREAELVQQKEEVTN

SEQ ID NO: 46193 - protein, 127 aa, Zea mays
  Clone ID: 700425481_FLI.pep
IARTGYWPPVHHGRLLVVIGSLHQNGSPYDREVHLLQPEQGRVHGRAGEACQRQACRHFHGVEGAREREQGVLRDVQQGPRGAEGGGGDDGADREDALRGGGLQELRRRRLASYSTRSVSLASSLEL

SEQ ID NO: 46194 - protein, 196 aa, Zea mays
  Clone ID: 700426385_FLI.pep
NISGGHNDDLARSLFPGMDHQKAMRFMDDKEAMFRKLAPGQLKPVDGLQELCGWMEGRDLKRAAVTNAPRANAELMLSLLGLTDFFPVLVIGSECDRAKPFPDPYLKALQLIGASPQHTFIFEDSASGVRAGVAAGVPVVGLTKEPREGAERRRGQLAGQGFSGPGADVRASTGGGRTRSGECARLMRRSLRTTKK

SEQ ID NO: 46195 - protein, 176 aa, Zea mays; identical to SEQ ID NO: 37650
  Clone ID: 700427201_FLI.pep

SEQ ID NO: 46196 - protein, 116 aa, Zea mays
  Clone ID: 700427257_FLI.pep
ARGDVAPVPTMDEKEFWRMLDLFPVVRSRGYCADPGTSIRGTRQRSRVQEAAKGNDKDSSDAQDLFMQKLKMAAEKKIGTTKAEFFCKAFEETHEKLVYKELNLDAAKKFLSAYES

SEQ ID NO: 46197 - protein, 197 aa, Zea mays
  Clone ID: 700427445_FLI.pep
YHVVSGLFAAPPPPPPRPREEPEAEPLPPPVQMGEVSEEELSQYDGSDPKKPLLMAIKGQIYDVTQSRMFYGPGGPYALFAGKDASRALAKMSFEPQDLTGDITGLGPFELDALQDWEYKFMSKYVKVGTVTKNVTVEDRSSAASTAPGTSEAATEAEKAPTTTTTEEKPREVPAEAVKEKEAAAAAAAAGEGAQEN

SEQ ID NO: 46198 - protein, 289 aa, Glycine max
  Clone ID: 700996317_FLI.pep
TKRRKQGKMCSKPLILNYAMVQYMLSSLKAAAEAHGKPEWGSTGPTDAGHYNNWPEDTQFFRKEGGGWDGPYGEFFLTWYSQMLLEHGDRILSSATSIFDNTGVKISVKVAGIHWHYGTRSHAPELTAGYYNTRFRDGYLPIAQMLARHGAIFNFTCIEMRDHEQPQEALCAPEKLVKQVALATQKAQVPLAGENALPRYDEYAHEQIIRASQLDVDGESGDREMCAFTYLRMNPHLFEPNNWRKFVGFVKKMKEGKSAHKCWEEVEREAEHFVHVTQPLVQEAAVLMH

SEQ ID NO: 46199 - protein, 316 aa, Glycine max
  Clone ID: 701060990_FLI.pep
FLKLIIPNLDMQIFVKTLTGKTITLEVESSDTIDNVKAKIQDKEGIPPDQQRLIFAGKQLEDGRTLADYNIQKESTLHLVLRLRGGMQIFVKTLTGKTITLEVESSDTIDNVKAKIQDKEGIPPDQQRLIFAGKQLEDGRTLADYNIQKESTLHLVLRLRGGMQIFVKTLTGKTITLELESSDTIDNVKAKIQDKEGIPPDQQRLIFAGKQLEDGRTLADYNIQKESTLHLVLRLRGGMQIFVKTLTGKTITLEVESSDTIDNVKAKIQDKEGIPPDQQRLIFAGKQLEDGRTLADYNIQKESTLHLVLRLRGGDF

SEQ ID NO: 46200 - protein, 566 aa, Zea mays
  Clone ID: LIB3591-083-B3_FLI.pep
LGMLQMLMDTDLDTTQQDYVRTAQASGKTLVSLINEVLDQAKIESGKLELEVVPFDLRTVCDDILSLFCGKAQEKGLELAVFVSDQVPQTLIGDPGRIRQIITNLVGNSIKFTEKGHIYLTVHVVEEIMHCLEVETGTQYTNTLSGYPVANRKRSWENFRLFSRELNSSEMPFAPIASDSISLMISVEDTGAGIPFDAQSRVFTPFMQVGPSIARIHGGTGIGLSISKCLVGLMKGEIGFASKPQVGSTFTFTAVLTRVHSSRNENKSSEFKEINALVVDHRPVRAKVTKYHLQRLGVQTELTTDLDQYISKNNCGSQIAKLVLIDKETWLKESHSMPLLVTKLRNKDQPDSTKLFLLENPKSSVKSNSHIFREYNLNVIMKPLRASMLQVSLQRALGGIDKLHCRNGVVGNSTLGSLLHKKRIIVVDDNIVNLKVAAGALKKYGAEVTCADSGKEAITLLKPPHNFDACFMDIQMPEMDGFEATKRIRVMERDLNEQIECGEAPPECVGVRQWRTPILAMTADVIQATHEQCLKSEMDGYVSKPFEGEQLYREVARFFLNQDQVQ

SEQ ID NO: 46201 - protein, 422 aa, Glycine max; identical to SEQ ID NO: 43848
  Clone ID: 701014631_FLI.pep

SEQ ID NO: 46202 - protein, 122 aa, Zea mays
  Clone ID: LIB3151-050-B12_FLI.pep
VYLRGEIFDIVCGEGSARTERHELFGHWRERLTYAGLTQVWFDPDEVDTLKDQLIHVTSLSGSGFNILVCDGSLALAWHNRPLYVATAWCVTGGNAASSMVGNICKGTNDSRRKENRNGPME

SEQ ID NO: 46203 - protein, 398 aa, Zea mays
  Clone ID: LIB3076-048-E1_FLI.pep
PLTGRYVPPEVAAVRVPLLHLSNFQINDWPELSAKSFAIMVLMLPSDSARKWHVHELELVEVVADQVAVALSHAAILEESMRARDLLMEQNVALDLARREAEMAIRARNDFLAVMNHEMRTPMNAIIALSSLLLETELTPEQRLMVETVLKSSNLLATLINDVLDLSKLEDGSLELEIKAFNLHAVFKEVMGFIKPIASIKRLSVSVMLAPDLPLCAIGDEKRLMQTILNISGNAVKFTKEGHITLVASIVKADSLREFRTPEFHPTASDDHFYLKVQVKDTGCGIGPQDLPHVFTKFAHPQSGGNRGFNGSGLGLAICKRFVSLMGGHIWIDSEGTGRGCTATFVVKLGVCDNTNTYQQQLIPLVWPSSADSDLRAPKPLPDGRGSTPLKSRYQRSV

SEQ ID NO: 46204 - protein, 390 aa, Glycine max
  Clone ID: 701065080_FLI.pep
KSTFLSMSGEPPRPLEIHLRVNSKRGGTTMVHPVATAVPVQYPREEEGVKHYRKWFAWLIPLFVVANVAMFAITMYVNNCPRNSVSCIASFLGRFSFQPFKENPLLGPSSLTLQKMGALDVSRVVHKHQGWRLVTCMWLHAGVFHLLANMLGILVIGIRLEQEFGFVLIGLLFFISGFGGSLLSALFIQSNISVGASGALFGLLGGMLSELITNWSIYDNKLAALLTLVIIIVINLAVGILPHVDNFAHIGGFLTGFLLGFVFLIRPQFGWVNQRYAPLNYSPGRSKPKFKKYQCILWVLSLIILVVGLSVGLVALLRGVDANDHCSWCHYLSCVPTSKWSCHTEAAYCESNQLGNQLNVTCSSTGKFSTYFMENPTSSQIQQLCSQLCS

SEQ ID NO: 46205 - protein, 222 aa, Glycine max
  Clone ID: 701121259_FLI.pep
KTHSTSRQTQRNKLQVEKINMENSDISSAPLSHSPTNSSSSSPTPPSPPTVVMSPCAACKILRRRCAEKCVLAPYFPPTEPAKFTIAHRVFGASNIIKFLQELPESQRADAVTSMVYEASARIRDPVYGCAGAICQLQKQINELQAQLAKAQAELVNMQIQQANLVALICMKMAQSPQESPQQLVDDFISTPPHSGGAYQSGMNFFEDNTSLNSLWEQPLWT

SEQ ID NO: 46206 - protein, 466 aa, Glycine max
  Clone ID: 701128906_FLI.pep
ILQLSLNSSEAGDSVPSSAFFGTSLKKVTASRVPNVKISSGSFKIVAAEKEIDEQQQTNKDRWKGLAYDISDDQQDITRGKGMVDSLFQAPQETGTHYAVMSSFEYLSTGLKQYNLDNNMDGFYIAPAFMDKLVVHITKNFMTLPNIKVPLILGIWGGKGQGKSFQCELVFAKMGINPIMMSAGELESGNAGEPAKLIRQRYREAADIISKGKMCCLFINDLDAGAGRLGGTTQYTVNNQMVNATLMNIADNPTNVQLPGMYNKQENPRVPIIVTGNDFSTLYAPLIRDGRMEKFYWAPTRDDRVGVCKGIFRTDNVPEDEIVKLVDTFPGQSIDFFGALRARVYDDEVRKWISGVGVDLIGKKLVNSKEGPPTFDQPKMTLSKLLEYGNMLVQEQENVKRVQLADKYLNEAALGDANQDAIKRGTFYGKAAQQVKIPVPEGCTDPNASNFDPTARSDDGTCLYTP

SEQ ID NO: 46207 - protein, 349 aa, Glycine max
  Clone ID: 701128942_FLI.pep
FAFVLLFLSASADDVVVLSEDNFEKEVGQDRGALVEFYAPWCGHCKKLAPEYEKLGSSFKKAKSVLIGKVDCDEHKSLCSKYGVSGYPTIQWFPKGSLEPKKYEGPRTADSLAEFVNTEGGTNVKIATAPSNVVVLTSENFNEVVLDETKDVLVEFYAPWCGHCKSLAPTYEKVATAFKLEEDVVIANLDADKYKDLAEKYDVSGFPTLKFFPKGNKAGEEYGGGRDLDDFVAFINEKSGTSRDVKGQLTSQAGIVESLDVLVKEFVAASDEEKKFVFTRMEEEVEKLKGSASRHGKIYLKAAKNYLEKGSDYAKNEIQRLQRILDKSISPAKADELTLKKNILSTYAA

SEQ ID NO: 46208 - protein, 297 aa, Glycine max
  Clone ID: 701129503_FLI.pep
RDSISFSLFLCPLFLSLEFSDLRGEMMQQPGPGMAPPTMGQQPPQQYQQPPPQQQQPYVMMPPQAQAPQAMWAPSAQPPPQQQPASADEVRTLWIGDLQYWMDENYLYTCFAHTGEVTSVKVIRNKQTSQSEGYGFIEFNSRAGAERILQTYNGAIMPNGGQSFRLNWATFSAGERSRHDDSPDYTIFVGDLAADVTDYLLQETFRARYNSVKGAKVVIDRLTGRTKGYGFVRFSDESEQVRAMTEMQGVLCSTRPMRIGPASNKTPTTQSQPKVTHLKIRSQTHFFLQFPLKIWAK

SEQ ID NO: 46209 - protein, 293 aa, Glycine max
  Clone ID: 701118589_FLI.pep
IMTIFNMQNVGPHFETWNAGVLGPISLSGLNEGRRDLSWQKWSYKVGLKGEILSLHSLSGSSSVEWIQGSLVSQRQPLTWYKTTFDAPAGTAPLALDMDSMGKGQVWLNGQNLGRYWPAYKASGTCDYCDYAGTYNENKCRSNCGEASQRWYHVPQSWLKPTGNLLVVFEELGGDPNGIFLVRRDIDSVCADIYEWQPNLISYQMQTSGKAPVRPKVHLSCSPGQKISSIKFASFGTPAGSCGNFHEGSCHAHKSYDAFERVLPFVLLECFLFCYQITHLLLWSYLITWFINQ

SEQ ID NO: 46210 - protein, 224 aa, Glycine max
  Clone ID: 701100154_FLI.pep
MRSAGWDIDASVKAIMEQNVVYWKEDHKCFAIESFVCREMFDSFNFPNFSLPNESLPDRNRRQLFFGRFNELKPEKAKDFLAGKPRSPFAKFCRIKYLRLVHPKMEASFFGNLNQRSLLNAGEFPNTNFFTSFAEMAKRVWLLHCLAFSFEPPQASIFQVGKWCRFSDVYMESVNENDEEMPVESETQIAFTVVPGFRIGKTVIQCQVYLSQRQVKNFTSTKQR

SEQ ID NO: 46211 - protein, 82 aa, Glycine max
  Clone ID: 701064704_FLI.pep
CWQKRCVLHNFVRSVYFYLIILNYPSHQGVTFLPLVIFIIASLLFCSCGLDTLAFSLFILCKYSGLLVVTIDILSVFFVIQI

SEQ ID NO: 46212 - protein, 145 aa, Glycine max
  Clone ID: 701107253_FLI.pep
EEQLYFYIHNKKEKREHKPMATSLSATGCVGSSFYGSWGTSIVGEDYTMLAKSVPSQVRMGKGKPTRLQPMMKNVNEGKGIFAPLVVITRNIVGKKRFNQLRGKAIALHSQVITEFCKSIGADGKQRQGLIRLAKKNGEWLGFLA

SEQ ID NO: 46213 - protein, 366 aa, Glycine max
  Clone ID: 701107907_FLI.pep
RKKGLCLILEMSLLSDLINLNLSDTTEKVIAEYIWIGGSGMDLRSKARTLPGPVSDPSELPKWNYDGSSTGQAPGEDSEVILYPQAIFRDPFRRGNNILVICDAYTPAGEPIPTNKRHAAAKVFSHPDVVAEVPWYCIEQEYTLLQKDIQWPLGWPVGGFPGPQGPYYCGVGADKAFGRDIVDAHYKACIYAGINISGINGEVMPGQWEFQVGPSVGISAGDEIWAARYILERITEIAGVVVSFDPKPIKGDWNGAGAHTNYSTKSMREDGGYEVIKAAIDKLGKKHKEHIAAYGEGNERRLTGRHETADINTFLWGVANRGASVRVGRDTEKAGKGYFEDRRPASNMDPYVVTSMIADTTILWKP

SEQ ID NO: 46214 - protein, 271 aa, Glycine max
  Clone ID: 701123406_FLI.pep
RGSNIELLLDIPNDNLRNLASSQDNANKWVQDNIKNYANNVRFRYVSVGNEVKPEHSFAQFLVPALENIQRAISNAGLGNQVKVSTAIDTGALAESFPPSKGSFKSDYRGAYLDGVIRFLVNNNAPLMVNVYSYFAYTANPKDISLDYALFRSPSVVVQDGSLGYRNLFDASVDAVYAALEKAGGGSLNIVVSESGWPSSGGTATSLDNARTYNTNLVRNVKQGTPKRPGAPLETYVFAMFDENQKQPEFEKFWGLFSPITKQPKYSINFN

SEQ ID NO: 46215 - protein, 411 aa, Glycine max
  Clone ID: 701123765_FLI.pep
PAGINAIVAIACYSGYNQEDSVIMNQSSIDRGFFRSLFFRSYRDEEKKMGTLVKEDFGRPDRANTMGMRHGSYDKLDDDGLAPPGTRVSGEDVIIGKTTPISQEEAQGQALRYTRRDHSISLRHSETGIVDQVLLTTNADGLRFVKVRVRSVRIPQIGDKFSSRHGQKGTVGMTYTQEDMPWTVEGITPDIIVNPHAIPSRMTIGQLIECIMGKVAAHMGKEGDATPFTDVTVDNISKALHKCGYQMRGFETMYNGHTGRRLSAMIFLGPTYYQRLKHMVDDKIHSRGRGPVQILTRQPAEGRSRDGGLRFGEMERDCMIAHGAAHFLKERLFDQSDAYRVHVCERCGLIAIANLKKNSFECRGCKNKTDIVQVYIPYACKLLFQELMAMAIAPRMLTKEVKTTNQKKKGA

SEQ ID NO: 46216 - protein, 395 aa, Glycine max; identical to SEQ ID NO: 38715
  Clone ID: 701125869_FLI.pep

SEQ ID NO: 46217 - protein, 377 aa, Glycine max
  Clone ID: 701125938_FLI.pep
PSSRQRHSCSLFSLVFSQKVARVKAKTKVREKMMKPSMLRSLHSAATRGASHLSRRGYASEPVPERKVAVLGAAGGIGQPLSLLMKLNPLVSSLSLYDIAGTPGVAADVSHINTGSEVVGYQGDEELGKALEGADVVIIPAGVPRKPGMTRDDLFNINAGIVKTLCTAIAKYCPHALVNMISNPVNSTVPIAAEVFKKAGTYDEKRLFGVTTLDVVRAKTFYAGKANVPVAGVNVPVVGGHAGITILPLFSQATPKANLDDDVIKALTKRTQDGGTEVVEAKAGKGSATLSMAYAGALFADACLKGLNGVPDVVECSFVQSTVTELPYFASKVRLGKNGVEEVLGLGPLSDFEQQGLESLKPELKSSIEKGIKFANQ

SEQ ID NO: 46218 - protein, 400 aa, Glycine max
  Clone ID: 701127904_FLI.pep
RCKYKILIIRILYKGKVENKMGEDGYSWIRRTKFSHTVCHRLDPARLGSIPISVQSEQKSRPAASKAQRHPITNKQRSLSPLPETYLSEAFREARHEQKRFSTPNPRREKRIMGKLLNKDSRETKESSSKSPSHSPNRQVKSKNRKDSAWTKLLDNGGGKITAVETAEEWNVDMSQLFFGLKFAHGAHSRLYHGVYKEEAVAVKIIMVPEDDENGALASRLEKQFIREVTLLSRLHHQNVIKFSAACRKPPVYCIITEYLAEGSLRAYLHKLEHQTVSLQKLIAFALDIARGMEYIHSQGVIHRDLKPENVLINEDNHLKIADFGIACEEASCDLLADDPGTYRWMAPEMIKRKSYGKKVDVYSFGLMIWEMLTGTIPYEDMNPIQAAFAVVNKVCSVVI

SEQ ID NO: 46219 - protein, 420 aa, Glycine max; identical to SEQ ID NO: 44746
  Clone ID: 701127954_FLI.pep

SEQ ID NO: 46220 - protein, 178 aa, Glycine max
  Clone ID: 701129155_FLI.pep
ENSKSKAQELDIKLVGSQKVIDELTTKVKLLEDSLQDRTSQPDIVQERSIYEAPSLPAESEIIEVEEGSSLSKKAISPVPSAAHVRNMRKGSTDHLALDISGESDNLINRVDKDDDKGHVFKSLSTTGFVPKQGKLIADRIDGLWVSGGRVLMSHPRARLGLIGYLFVLHIWLLGTIL

SEQ ID NO: 46221 - protein, 286 aa, Glycine max
  Clone ID: 701129227_FLI.pep
TINPIHKTDFVFPSLSVDNLNYLVPVMSRLVWTLNRHTDVISLGRAKLGELSSKFAKVKCSHLLIKVLGQNVNFLLVLAGTLLLPQLKLSNDLVGEGAGHHKTRVSCGASQVHQTTLGQDNDADIGLGEDPSVGLGLDGDALHAGVVLQPQHVDLIVKVTNVANNGIVLHFLHVVNHDDVLVTRGGDKDISLRNNILQGQNLKAFHESLKGTNGVNLSHDDTSTSLLQCSSTTLANITISSHNSHLSSNHHISSPHQTIRERVTAPVQVVKLALGNRVIDINSREE

SEQ ID NO: 46222 - protein, 262 aa, Glycine max
  Clone ID: 701134327_FLI.pep
RFNRNQNKNMGRKFFVGGNWKCNGTTEEVKKIVTTLNEAKVPGEDVVEVVVSPPFVFLPVVKSLLRPDFHVSAQNCWVRKGGAYTGEVSAEMLVNLGIPWVIIGHSERRQLLNESNEFVGDKVAYALQQGLKVIACIGETLEQREAGTTTAVVSEQTKAIAAKISNWDNVVLAYEPVWAIGTGKVATPAQAQEVHADLRKWVHDNVSAEVAASVRIIYGGSVNGGNCKELAAQPDVDGFLVGGASLKPEFVDIINAATVKKN

SEQ ID NO: 46223 - protein, 183 aa, Glycine max
  Clone ID: 701097383_FLI.pep
GFGSCGMATSSSSSSWREGMSSDNIKGLCLALSSSFFIGASFIVKKKGLKKAGASGIRAGIVHSSPPSITFLFLLCIQFIFRVCFNFSRDLDVFSFTSLGHEFFNCLKSLKFTLDALLCQPFFSLLYLLVAFHKTNSCRISILGLGMRRKGTFLCSQFSSLRFSPNCFFGNFNYPFLVLLGME

SEQ ID NO: 46224 - protein, 50 aa, Glycine max
  Clone ID: 701066075_FLI.pep
KCASNSCYLSFFHQEMNFIYHRCNNLLLSLTSCRCGELKSKIKASFNISP

SEQ ID NO: 46225 - protein, 339 aa, Glycine max
  Clone ID: 701103740_FLI.pep
CLASLFCFVRCLVSSLLCCHVLLCAIFRTCLELAEICKEVGLPPGVLNILTGLGPEAGAPLAAHPDVDKIAFTGSSATGSKIMTAAAQLIKPVSLELGGKSPIIVFEDVDLDKAAEWTIFGCFWTNGQICSATSRLIVHESIATEFLNRIVKWVKNIKISDPLEEGCRLGPIVSEGQYEKILKFISNAKSEGATILTGGSRPEHLKKGFFVEPTVITDVTTSMQIWREEVFGPVLCVKTFSTEEEAIDLANDTVYGLGSAVISNDLERCERITKAFKAGIVWINCSQPCFTQAPWGGIKRSGFGRELGEWGLDNYLSVKQVTQYISDEPWGWYQSPSRL

SEQ ID NO: 46226 - protein, 298 aa, Glycine max
  Clone ID: 701106671_FLI.pep
LFVSFGGARTDNAIKNHWNCSMKKKLDASPLGCDIKVAPSGFCASGIRPEHVVAKVEGQSFNGMVSPKQSHWLNRSVDNILTKLILQNDSGEESCSASSRGTPTPRASRQFLDNSLDCLPLSSTVTDEAYESLKRQKVYFSDTELKVGDESDSPLLNLSYSKSANREKKGQAGNGGNYNSNNTMPHSVDEFSECLSPKTHMALACAYNNGCTPPTSILKNDTGDINPETLLRNLAMTYENVPSIIRKRTPKKASCCDRDQAPSRMIVNSPEAECVIGLDNLKLNRGFIPFLRRPNTQP

SEQ ID NO: 46227 - protein, 265 aa, Glycine max
  Clone ID: 701109085_FLI.pep
AKMNYSVRRVLPMSRVVLRSYATVTAKPNDIPFQPKLANSVNLIGHVQSPIQFHVSPNDGYVWASTVITRQDSSDLSFSIPVIFEGDLAHTAKFHLNLNDCIHIAGKLTTDSPQLEHLHPQSNIQVMVQTLNFVQRYPQPNTTTSIDLKPQPQPQPEHSIPSAKKNPDSSSPSPWRDLLDNPMQWRDFRESKRNGLVKPKHPDFKRKDGYSLWLGKDEKWVLPKLEELQFDVPTAISKKVHMSQVMVVSPGMIWCKTMLTGGIID

SEQ ID NO: 46228 - protein, 391 aa, Glycine max
  Clone ID: 701119872_FLI.pep
VGNRDGWENRWVKSDWKKDENVAGEWNHTSGQWNGDANDKGIQTSEDYRFYAISAEYPEFSNKGKTLVFQFSVKHEQKLDCGGGYMKLLSGDVDQKKFGGDTPYSIMFGPDICGYSTKKVHAILTYNNTNHLIKKDVPCETDQLTHVYTFILRPDATYSILIDNVEKQTGSLYSDWDLLPPKTIKDPEAKKPEDWDDKEYIPDPEDKKPEGYDDIPKELPDPEAKKPEDWDDEEDGEWTPPTIANPEYKGPWKAEKIKNPNYKGKWKAPLIDNPDFKDDPDLYVFPNLKYVAIELWQVKSGTLFDNVLITDDPEYAKQLVEETWGKHKDAEKAAFEEAEKKREEEESKDDPVDSDADEEEEDADEAGNDSDAESKTEAGEDTKEEGVHDEL

SEQ ID NO: 46229 - protein, 211 aa, Glycine max
  Clone ID: 701121746_FLI.pep
SAPSSAHDEQPPVKLEFFHKESVSTRDDATEESSGRTLKLFGTTLLVTDTCKPSSPTTEPCKPTPAAAMYLMQLQNVCSDVTEGHASIVPWWTLPHNTPFMPLHKEPKGKHLYSNLGEFEHKEVQKEGSWTGSNTSSIDDGDNTEKSDDQAKSHVHGFSKSETLTISELRVRPKTCGKGFVPYKRCMAERENQCSSVYYEEREEQRIKLSL

SEQ ID NO: 46230 - protein, 356 aa, Glycine max
  Clone ID: 701124380_FLI.pep
LLNCLGFCGSMNITHTSSSQRKYPTVIEELCHQFSLADLRKSTNNFDQNRVIGRGLFSEVYKGSVQHKGASDYTVAVKRFNERGLEAFKKEIELLCQLFHPNCVSIIGFCNHIKEKIIVYEYMSNGSLADYLQGGDAEALSWKKRLEICIGVARGLHYLHTGAKRSVFHCILSPSTILLDDHLKPKLAGFGVNVQGSRFMTKKKQIKLDLITGTFGYMATEYAINGTVTDKCDVFSFGMVLLEVVCGRQYLIHPRETEFLEKPVEEKIDANIKGEIAPECWQVFIDIAHRCVKHEPDERPIIGEVEVELEHALLLQEQADITNTNGEYSLLSKTVIDLKLVREYFEQALFHQEDIT

SEQ ID NO: 46231 - protein, 232 aa, Glycine max
  Clone ID: 701128976_FLI.pep
LQQLTQQIKDQLKDSITEKVTRRLMLSLSHMQSQGLALPPEPGVGPSTARVSTKESCADPSGNDPDTGDSYKCGLYIEEYPPRLVALGRVYEGSTSIHNIPLLHDQVKVGVEEIRDANAPIPVPTKEVKVMGQALNTFLAWPTHLVKRLSEQGVVGPAKPVDRPDDEVDDPLYLMTLTIPQLFLKPLQVMWDATLFGLFYENFPLYIKHEDLSEIAHGGQYLSISVIQLWIL

SEQ ID NO: 46232 - protein, 104 aa, Glycine max
  Clone ID: 701130375_FLI.pep
DSGSTTPNPSSSRDQNGVDFKKVDAHVHQLKGSSSSIGAQRVKNACIAFRNFCEEQNTDACVRCLQQVKQEYCLVKNKLETMFRLEQQIVAAGGSIPTELSFSG

SEQ ID NO: 46233 - protein, 149 aa, Glycine max
  Clone ID: 701130512_FLI.pep
MPRGTLEVVLISAKGIDDNDFLSSIDPYVILTYRAQEKKSTVQEDAGSKPQWNESFLFTVSDSASELNLKIMDKDNFSQDDCLGEATIHLDPVFEAGSIPETAYKVVKDEEYCGEIKVALTFTAERNEEQGYDAPEESYGGWKESSGEY

SEQ ID NO: 46234 - protein, 193 aa, Glycine max
  Clone ID: 700846085_FLI.pep
MNDSIKQLAAEASDLDSTATSRFKMPRIEANHSLLEEIREVNQRLIDTVVDISNEEVDPTAAAAAAEGTEGTIVKCSYNAVALSPSLKSQYASAQMSPIQPLRLLVPTNYPNCSPILLDKFPVESSKENEDLSVKAKSRFSISLRSLSQPMSLGEIARTWDVCARTVISEHAQQSGGGSFSSKYGTWENCLTT

SEQ ID NO: 46235 - protein, 244 aa, Glycine max
  Clone ID: 700852435_FLI.pep
VLHLSSVFMDKDKSLGLPPPSGRYSGYSSTGSVFNVKSEPSPSSSTTLYPPLAPGTTSSESSHFGHGLSTDSSGFSHDISRMPDNPPRNRGHRRAHSEILTLPDDISFDSDLGVVGGGDGPSFSDDAEEDLLSMYLDMDKFNSSSATSTFQMVEPSNAVGASASTPASGAPTSSTENVVIGTNERPRVRHQHSQSMDGSTTIKPEMLVSGSEDMSAADSKKAMSAAKLAELALIDPKRAKRFAL

SEQ ID NO: 46236 - protein, 270 aa, Glycine max; identical to SEQ ID NO: 44145
  Clone ID: 700855863_FLI.pep

SEQ ID NO: 46237 - protein, 465 aa, Glycine max
  Clone ID: 701146067_FLI.pep
RESSIRKTKKGSFFPAKIQSAKCERKKMPKSQFRTPFLVSFSLLLFIFNLTPSYALYGASTPVLQLTPSNFKSKVLNSNGVVLVESFAPWCGHCQALTPIWEKAATVLKGVVTVAAIDADAHPSLAQEYGIRGFPTIKVFAPGKPPVDYQGARDVKPIAEFALQQVKALLKDRLSGKATGGSSEKTETSSSVELNSGNFDELVIKSKELWIVEFFAPWCGHCKKLAPEWKKASNNLKGKVKLGHVDCDAEKSLMSRFKVQGFPTILVFGADKDSPIPYEGARTASAIESFALEQLETNIAPPEVTELYSPDVLEEKCGSAAICFVAFLPDILDSKAEGRNRYLQQLLSVAEKFKRSPYSYVWVAAGKQPDLEKNVGVGGYGYPALVALNLKKAVYAPLKSAFELDQIIEFVKEAGRGGKGNLPIEGTPTIVKTEPWDGKDGEIIEEDEFSLEELMGEDASSKDEL

SEQ ID NO: 46238 - protein, 278 aa, Glycine max
  Clone ID: 701146415_FLI.pep
HSLIARMALRCLVMSLSVLFTLGLARESHARDEDFWHAVWPNTPIPSSLRDLLKPGPASVEIDDHPMQIEETQYPKTFFYKEDLHPGKTMKVQFSKPPFQQPWGVGTWLKEIKDTTKEGYSFEELCIKKEAIEGEEKFCAKSLGTVIGFAISKLGKNIQVLSSSFVNKQDQYTVEGVQNLGDKAVMCHRLNFRTAVFYCHEVRETTAFMVPLVAGDGTKTQALAICHSNTSGMNHQMLHQLTGVDPGTNPVCHFLGSKAILWVPNLSVDTAYQTNIVA

SEQ ID NO: 46239 - protein, 365 aa, Glycine max
  Clone ID: 701146422_FLI.pep
GHITMKALILVGGFGTRLRPLTLSFPKPLVDFANKPMILHQIEALKAIGVTEVVLAINYQPEVMLNFLKDFESKLGIKITCSQETEPLGTAGPLALARDKLIDDSGEPFFVLNSDVISEYPLKEMIEFHKSHGGEASIMVTKVDEPSKYGVVVMEESTGQVDKFVEKPKLFVGNKINAGIYLLNPSVLDRIELRPTSIEKEVFPKIAAEKKLFAMVLPGFWMDIGQPRDYISGLRLYLDSLKKKSSSKLASGSQFVGNVIVDETAKIGEGCLIGPDVAIGPGCIIEQGVRLKSCTIMRGVRVKKHACVSSSIVGWHSTVGQWARVDNMTILGEDVHVCDEIYSNGGVVLPHKEIKSNILKPEIVM

SEQ ID NO: 46240 - protein, 422 aa, Glycine max
  Clone ID: 701150045_FLI.pep
AEAVKRERDSAKMTSVGVAPTSGLREASGHGAAGVDRLPEEMNDMKIRDDREMEATVVDGNGTETGHIIVTTIGGRNGQPKQTISYMAERVVGHGSFGVVFQAKCLETGETVAIKKVLQDKRYKNRELQTMRLLDHPNVVALKHCFFSTTEKDELYLNLVLEYVPETVNRVIKHYNKLNQRMPLIYVKLYTYQIFRALSYIHRCIGVCHRDIKPQNLLVNPHTHQVKLCDFGSAKVLVKGEPNISYICSRYYRAPELIFGATEYTTAIDVRSVGCVLAELLLGQPLFPGESGVDQLVEIIKVLGTPTREEIKCMNPNYTEFKFPQIKAHPWHKIFHKRMPPEAVDLVSRLLQYSPNLRCTALDALTHPFFDELRDPNSRLPNGRFLPPLFNFKSHELKGVPAEILVKLVPEHARKQCPFLGL

SEQ ID NO: 46241 - protein, 381 aa, Glycine max
  Clone ID: 701150123_FLI.pep
PTAPPFSFALRSTMSKTSEIITCKGKPVTVEEIQVDPPKATEVRVKMLCASICSTDISSTKGFPHTNFPIALGHEGVGIIESVGDQVTNLKEGDVVIPTYIGECQECENCVSEKTNLCMTYPVRWTGLMPDNTSRMSIRGERIYHIFSCATWSEYMVSDANYVLKVDPTIDRAHASFISCGFSTGFGAAWKEAKVESGSTVAVFGLGAVGLGAVIGSKMQGASRIIGIDTNENKRAKGEAFGITDFINPGDSNKSASELVKELSGGMGADYSFECTGVSTLLSESLEATKIGTGKAIVIGVGIEITLPLGLFAILLGRTLKGSVFGGLRAISDLSILADKGHKKEFPLQELFTHEVTLADINKAFELLKQPNCVKVVINMP

SEQ ID NO: 46242 - protein, 424 aa, Glycine max
  Clone ID: 701203380_FLI.pep
GAAVMFGRGGPRRSDNSKYYDILGISKNASEDEIKKAYRKAAMKNHPDKGGDPEKFKELGQAYEVLSDPEKKELYDQYGEDALKEGMGGGGSFHNPFDIFESFFGGASFGGGGSSRGRRQKHGEDVVHSLKVSLEDVYNGTTKKLSLSRNILCPKCKGKGSKSGTAGRCFGCKGTGMKITRRQIGLGMIQQMQHVCPDCRGSGEVINERDKCPLCKGNKVSQEKKVLEVHVEKGMQQGQKIVFEGQADEAPDTITGDIVFVLQVKDHPKFRREQDDLYIDHNLSLTEALCGFQFAVKHLDGRQLLIKSNPGEVIKPGQYKAINDEGMPQHNRPFMKGRLYIQFNVDFPDSGFLSPDQCQLLEKVLPQKSSKHVSDMELDDCEETTLHDVNFKEEMRRKQQQQYREAYDEDDDEPSGQRVQCAQQ

SEQ ID NO: 46243 - protein, 394 aa, Glycine max
  Clone ID: 701203808_FLI.pep
EKDTMQEATKVIIIGAGTSGIATAGCLTKQSIPYIMLEREDCFASLWQKYTYDRLHLHLRKQVCELPHLPFPKSYPHYVPRKQFIDYLGNYVNHFEIKPLYQRAVELVEYDGWKGIWRVKAQNRRSGELEEYAGKYLVVASGETAEPRLPQIQGLESFNGKVIHSTAYKNGNEFKNKHVLVVGSGNSGMEIALDLSNFGAKPSIIVRSPVHFLSRDMMYYASLMLNYLSLSTVEKVLVMVSKVVYGDLSEYGIPYPSEGPFTMKMKYAKFPIIDVGTVKKIKSREIQVLPAEIKSIRGNEVLFQDGKSYTFDSIVFCTGFKRSTQKWLKGGDDLLNEDGFPKNSFPNHWKGRNGLYCVGLSRRGFFGANMDAQLVANDIASLIPQEEREGICVM

SEQ ID NO: 46244 - protein, 586 aa, Glycine max
  Clone ID: 701203849_FLI.pep
TMTQQESTMSLIFLQLLLLLSCLTLNNSIAESTTIINVWPKPRNLTWSPPYQTTLLSSTFTITTTTNHHNKHLSIAIRRYQNLIKSEHHHPLVPQAVNISNKYLPPLQTLKVTVVDTAAELVHAVDESYTLSILPSSCATLTAKTVWGAMRGLETFSQLAWGHPTQVPVGVHVCDSPLYAHRGVMVDTARNYYPVKDLMRTVKALSMNKLNVLHLHLTDAESFPLVLPSEPALAEKGAYAPHMVYSPKDVKKLVEFGLDHGVRIIPEIDTPGHTASWALAHPDIVTCANMFWWPAGRDWPHRFASQPGTGHLNPLNPKTYQVLKNVIHDITTLFPEPFFHSGTDEIVPGCWKTDPAIQKYLSNGGTLNQLLEKYINNTLPFIVSLNHTVVFWEDVLLDNIVHVPSAILPKEHVILQTWHNGHNHTKKIVSAGYRTIVSSAEFYYLDCGHGSYVGNNSAYDNQDGDMGNGGSWCAPFKTWQTIYNYDIAYGLSEGEAKLVLGGEVALWSEQSDPTVLDARIWPRASALAESMWSGNRDEKGVKRYAEATDRLNEWRSRMVSRGIGAEPIQPFYCVKNPGMCNTVHPV

SEQ ID NO: 46245 - protein, 195 aa, Glycine max
  Clone ID: 701206950_FLI.pep
LFISLMYIISRSTIEAFASVVAPLAENLMQILAQKLNIKFNYFQENCSANTSFLRLNRYPPCPIFYSRVFGLLSHTDSSFLTIVNQDQIGGLQIMKDGNWVGVKPNPQALVVNIGDLFQALSNDIYISAKHRVVAAEKVERFSVAYFYNPSKDALIESHIMPPMYRKFTFGEYRGQIEKDVKETGDKVGLSRFLL

SEQ ID NO: 46246 - protein, 362 aa, Glycine max
  Clone ID: 701210962_FLI.pep
KYQIWSRRIALAAFAFALLFQSASADDVVVLSEDNFEKEVGQDRGALVEFYAPWCGHCKKLAPEYEKLGSSFKKAKSVLIGKVDCDEHKSLCSKYGVSGYPTIQWFPKGSLEAKKYEGPRTAESLVEFVNTEGGTNVKIATVPSNVVVLTPENFNEVVLDEAKDVLVEFYAPWCGHCKSLAPTYEKVATAFKLEEDVVIANLDADKYRDLAEKYDVSGFPTLKFFPKGNKAGEDYGGGRDLDDFVAFINEKSGASRDGKGQLTSQAGIVESLDVLVKEFVAASDEEKKSVFTRLEEEVVKLKGSASRYGKIYLKAAKNYREKGSDYAKNEIQRLQRILDKSISPAKADELTLKKNILSTYAA

SEQ ID NO: 46247 - protein, 552 aa, Glycine max
  Clone ID: 701147408_FLI.pep
VTLPAEPRSVDNMGSTGLLHLICLVIALVSVSLVQAEDAYKYFTWTVTYGTLYPLASPQQVILINGQFPGPRLDLVTNENVILNLINKLDEPFLLTWNGIKQRKNSWQDGVLGTNCPIPPNSNYTYKFQAKDQIGTYTYFPSTQLHKAAGGFGALNVYHRSVIPIPYPNPDGDFTLLVGDWYKTNHKTLRQTLDSGKSLAFPDGLLINGQAHSTFTGNQGKTYMFRISNVGLSTSINFRIQGHTLKLVEVEGSHTVQNLYDSLDVHVGQSVAVLVTLNQPPKDCYIVASTRFTETPLTTTAVLHYANSFSSALGPVPAPPVDKYDFDWSMKQARTYRWNLTANAARPNPQGSFHYGKITPTKVIKLANSAPLINGKLRYAVNSVSYVNPDTPLKLADYFNIPGVFSVNLLQNSPSNGPGYIGTSVLQTSLHDFIEVIFQNNENTMQSWHLDGYDFWVIGHGFGQWTDASRKTYNLVDALTRHTAQVYPKSWTTILVSLDNQGMWNLRSAIWERQYLGQQFYLRVWNAQKSLANEYDIPNNVLLCGKAVGHHP

SEQ ID NO: 46248 - protein, 261 aa, Glycine max
  Clone ID: 701148021_FLI.pep
ISVLGKQRRRSIAKIDLEMGRGKIEIKLIENPTNRQVTYSKRRNGIFKKAHELSVLCDAKVSLIMFSKNNKMHEYISPGLTTKKIIDQYQKTLGDIDLWHSHYEKMLENLKKLKDINNKLGRQIRHRIGEGLDMDDMSFQQLRTLEEDMVSSIGKIRERKFHVIKTRTDTCRKKVKSLKQMNGNLLLELKEKCVIHPQFLLHDEGDEESAAAAAAAAVALANGASTLYAFCHQHHSHLNLFSHHSNGEEQPFKTDHDLRLA

SEQ ID NO: 46249 - protein, 451 aa, Glycine max
  Clone ID: 701148135_FLI.pep
GFVLLSTDLTQDERIEEAWGLNRIESKRFIDRSMALVGVELKHAAEGVPEANCSAKPTKQGEGLRHYYSLNIHEHQLLLRQKTHNLNRLEAQRNDLNSRVRMLREELQLLQEPGSYVGEVVKVMGKNKVLVKVHPEGKYVVDIDKNIDITKITPSTRVALRNDSYVLHLVLPSKVDPLVNLMKVEKVPDSTYDMIGGLDQQIKEIKEVIELPIKHPELFESLGIAQPKGVLLYGPPGTGKTLLARAVAHHTDCTFIRVSGSELVQKYIGEGSRMVRELFVMAREHAPSIIFMDEIDSIGSARMESGSGNGDSEVQRTMLELLNQLDGFEASNKIKVLMATNRIDILDQALLRPGRIDRKIEFPNPNEESRLDILKIHSRRMNLMRGIDLKKIAEKMNGASGAELKAVCTEAGMFALRERRVHVTQEDFEMAVAKVMKKETEKNMSLRKLWK

SEQ ID NO: 46250 - protein, 443 aa, Glycine max; identical to SEQ ID NO: 45886
  Clone ID: 701148747_FLI.pep

SEQ ID NO: 46251 - protein, 400 aa, Glycine max
  Clone ID: 701152566_FLI.pep
EKQQERDENKQESRERGVTTLVYEQSPRETEISRPSNQTLLFSHQSINPVPSRIGMGIYLSTPKTEKFSEDGENDCLRYGLSSMQGWRATMEDAHAAYTDLDESTSFFGVYDGHGGKVVAKFCAKFLHQQLFKSETYLTGDIGASLQKAFLRMDEMMRGQRGWRELSILGDKINKFTGMIEGLIWSPRSSDGNCHVDDWAFEEGPHSDFAGPTSGGTACVAVIRNNQLVVANAGDSRCVISRKGQAYNLSRDHKPDLEIEKERILKAGGFIHVGRVNGSLNLARAIGDMEFKQNKFLSAEKQIVTANPDINTVELCDEDEFVVLACDGIWDCMSSQQLVDFVHEQLHSETKLSAVCERVLDRCLAPSTASGEGCDNMTMIVVQFKRPAQSSVPAEESSSN

SEQ ID NO: 46252 - protein, 388 aa, Glycine max
  Clone ID: 701152744_FLI.pep
RIIIPFKMKPYLRPIFLLFLILLDQSTSASASNSRFIEFFSKLKNSFNPKSEELKSEDIKKLPSVEFLKKKHDGVKDFSQEAILKLPIIHWPFPIPKIPKNFWKPKSQKPKHPPPPPDYRVQLKSDPPAPNAPPKQINIKGLSVVKNYLSDYGYIESSGPFNDSFDQEIISAIKTYQNFSNLNVTGDLNKQLIQQMLSIRCGVPDVNFDYNFTDDNISYPKAGHRWFPNRNLTYGFLPENQIPDNMTKVFRDSFARWAQASGTLSLTETTYDNADIQVGFYNFTNSRIEVYGGSLIFLQPDSSKKGVVLLNGNMGWLLPSENATLSKDDGVLDLETAAMHQIGHLLGLDHSHKEDSVMYPYILSSQQRKVQLSNSDKANIHHQFAKHA

SEQ ID NO: 46253 - protein, 598 aa, Glycine max
  Clone ID: 701156582_FLI.pep
RRRQKGAETTSFVVGKKMSSQQMQMQMQNSGGSSSISSNIPVSEVFWTLVDKADKKFSKIRDLPFYQRSRHDTYFYKVFKVYTQLWKFQQENRQKLIEAGLRRWEIGEIASRIGQLYFGQYMRTSDANYLSESYIFYEAILTREYFKGGLFQDVNIANKQLRFLARFIMVCLVLNRREMVQQLVNQLKVLVDECKRTFQESDFKEWKLVVQEIVRFLKADTAFINIRPLRYSLVLDSHPDTLPHVAAAITKRHLKLQDAVLSSFHPNEVKYSELTIDTFRMLQCLEWEPSGSFFQSSSSKLSQNGATGTSRISYIQDIADPTLPANPRKAVLYRPSLTHFIAVLATICEELPSDGILLVYLSASGYCGSAQNESGCIHFGPRGDRGSNCIYPSDFLPFTRRPLLLVIDNDNSKAFKDIAEAEKGESVAMLLSPSCSPALSDCSHNSNGSLFTMFLTAPLQAFCMLLGLSGTDIDLDPFNKAEMLLSSSLNNWGLALATSDTLNPVWGQIFGDPFIRRLLLRFIFCQAVLTLYAPVYNDNKFLPTCVPSLPTPVLSPSYSYQSVILNLASMFGATKHFIFSEDVLPENIQTNIMNQLTL

SEQ ID NO: 46254 - protein, 391 aa, Glycine max
  Clone ID: 701156625_FLI.pep
GGEMGKREKQKQRHEKGHRGRGSFNYLQEDRDFDDTPRPSPSEEECADDSNEEKEEEEEEEGHENQSHDMPSKFLLYQQSVQSPKGDISYLQKFFLMYVGGRMPLHLQEDFCGTALLSTEWLRSDSRRTVVGLDLDLEALNWCMESNIPKVGADGFSRMSLFHGNVLQPLQSKLVKIDPQQLVSDISLSQNEENLQTDVPESDAPTGSVAQDDKYTKRNIILPGRDIVCAFNYSCCCLHKRAELVLYFKHAREALSTKGGIFVMDLYGGTSSEHKLRLQRRFPNFTYVWEQAEFDIIQRKTRISLHFHMKKEQRKLRHAFSYSWRLWTLPEIRDCLEEAGFRSVHFWVREMPDTTEIMRTEGFGAGKNVKYEEATSFQQQDSWNAYIVGVA

SEQ ID NO: 46255 - protein, 356 aa, Glycine max
  Clone ID: 701156669_FLI.pep
SMAMAVSAIGFEGFEKRLEISFFQPGLFADPEGMGLRALAKSQLDEILTPAACTIVSSLRNDHVDSYVLSESSLFVYAYKIIIKTCGTTKLLLAIPPILKFAEMLSLNVRSVNYTRGSFIFPGAQPYPHRNFSEEVAILDGYFGKLSAGSNAYILGGQDKSQNWHVYSASADSVTPCDNVYTLEMCMTGLDREKAQVFYKEQSASAAIMTVNSGIRKILPDSEICDFDFEPCGYSMNSVEGAAVSTIHVTPEDGFSYASFETVGYDFKVVNLNEMVKRVLACFLPTEFSVAVHVDGASKLFDQTCFLDVKGYCREERSHEGLGMGGSLVYQKFAKTCDCGSPRSTLKCWKEEDEEE

SEQ ID NO: 46256 - protein, 398 aa, Glycine max
  Clone ID: 701156670_FLI.pep
DYILYRHTEIERERKSLTRIFFSLFHNLVRLCVRVCEVNPIIMKKGNLGLGLKLSVPVSDQSNFARFLTESGTFKDGDLLVNRDGVRIVSQNDVEAPPPIKPTDNQLTLADIDVIKVVGKGNGGVVQLVQHKWTSQFFALKVIQMNIEESMRKQIAQELKINQQAQCPYVVVCYQSFYENGVISIILEYMDGGSLADLLKKVKTIPEDYLAAICKQVLKGLVYLHHEKHIIHRDLKPSNLLINHIGEVKITDFGVSAIMESTSGQANTFIGTYNYMSPERINGSQRGYNYKSDIWSLGLILLECALGRFPYAPPDQSETWESIFELIETIVDKPPPIPPSEQFSTEFCSFISACLQKDPKDRLSAQELMAHPFVNMYDDLEVDLSAYFSNAGSPLATL

SEQ ID NO: 46257 - protein, 373 aa, Glycine max
  Clone ID: 701157142_FLI.pep
SVLSEAIAGVRMGKKAKGSRKGKKAWRANISTEEIEDFFEKSTKDALSGGSLQAVSSDSLFYEDKSKDLAVKKKIEEHRERVLRCDSLLQKNQFVKPVPSSILKKCSKNRNVASKSNMKEVNQDGDKDDSVVFGLWGDKGEDNKKVKKVSKPALIPAVEVDPPGCSFNPSHESHQDTLASAVAEEMQKIYKNELGPEPVPLTVPGEAIAEEDMYFLDVDNGSDNDESTLENEGENEDGTLEKKPIKTKRVTRVELNKRARRKEQQRKEGEAKKMKELSKEIDSIPEIIQGIEEEDEEKKKRHLRRQVAKQEMLKTRPPRLGKHKFEPAPVQVLLSEEITGSIRKLKGCCTLIKDRYKSIEKRGLIAPAKRRRN

SEQ ID NO: 46258 - protein, 146 aa, Glycine max
  Clone ID: 701157302_FLI.pep
SQPHLQNKSHSLLLLFAFCFAIVTKQFLLSSHKQALSTMKKIVLKVDLHDDRIKRKAMKTASGLSGVQSVSVDINDKKMTLLGDVDPVSAVSKLRKWCHTEIVSVGPAKEEKEKEKVEPAKEPVPLKLYDAYPFYYHMTPPLYLYS

SEQ ID NO: 46259 - protein, 332 aa, Glycine max
  Clone ID: 701204858_FLI.pep
FCLVLGFENQHCVTMSNHHRSSSKNGLPPQELLDDLCSRFVLNVPKEDLQSFERILFLVENAHWFYEDNSVENNPSLKSLNLKEFTSLLFNSCDVFQPYVAHIDDIFKDFTSYKVRVPVTGAIILDETYERCLLVKGWKGTSWSFPRGKKSKDEEDHACSIREVMEETGFDVSKLLNKDEYLEVIFGQQRVRLYIIAGVKDDTAFAPLTKKEISEIAWHRLDDLQPASDEVISRSITGLKLYMVAPFLASLKSWISIHHPAMAPRPDLPLKGICVWKAKPGSIGSSSTVMDIQPTKPEPDSHTLDMGPGKSFRNFRFDTALILQAMEASFSS

SEQ ID NO: 46260 - protein, 336 aa, Glycine max
  Clone ID: 701205124_FLI.pep
VVLLLKCLNMETSGGVSGGVTLVGSDAPSDYHVAPRTDNPAPASGSTTQIPATAGSVPPSPHPPHTAAMEAYPAKMPAKKKRGRPRKYAPDGSVTMALSPKPISSSAPLPPVIDFSSEKRGKIKPTSSVSKAKFELENLGEWVACSVGANFTPHIITVNSGEDVTMKVISFSQQGPRAICILSANGVISSVTLRQPDSSGGTLTYEGRFEILSLSGSFMPSESGGTRSRSGGMSVSLASPDGRVVGGGVAGLLVAASPVQVVVGSFLAGNQHEQKPRKQRHEVITSVIPAAVVPISTLDPVPILSAASSIRNDNWSAMPAEAKNKPADINVSLPAG

SEQ ID NO: 46261 - protein, 363 aa, Glycine max
  Clone ID: 701208544_FLI.pep
FQFFFFSIIIICICKHTLSKQMGCSFSGLNALYDSVNGGGDVWINENRFRIVRQLGEGGFAYVYLVKEAPDDSAAAGLAKKLKGSSHLSDDGTYAMKKVLIQNNEQLELVREEIRVSSLFNHPNLLPLLEHAIISVKPTHETSWNHEAYLLFPVHLDGTLLDNAKIMKAKKEFYSTSDVLQIFRQLCAGLKHMHSFDPPYAHNDVKPGNVLITHRKGQPPLAILMDFGSARPARKQISSRSEALQLQEWASEHCSAPFRAPELWDCPSQADIDERTDIWSLGCTLYAIMYGVSPFEYALGESGGSLQLAIVNAQVKWPAGPKPPYPEALHQFVSWMLQPTASMRPRIDDIIIHVDKLVAKFSQ

SEQ ID NO: 46262 - protein, 366 aa, Glycine max
  Clone ID: 701208643_FLI.pep
FSLVFSQKVARVKAKTKVREKMMKPSMLRSLHSAATRGASHLSRRGYASEPVPERKVAVLGAAGGIGQPLSLLMKLNPLVSSLSLYDIAGTPGVAADVSHINTGSEVVGYQGDEELGKALEGADVVIIPAGVPRKPGMTRDDLFNINAGIVKTLCTAIAKYCPHALVNMISNPVNSTVPIAAEVFKKAGTYDEKRLFGVTTLDVVRAKTFYAGKANVPVAGVNVPVVGGHAGITILPLFSQATPKANLDDDVIKALTKRTQDGGTEVVEAKAGKGSATLSMAYAGALFADACLKGLNGVPDVVECSFVQSTVTELPYFASKVRLGKNGVEEVLGLGPLSDFEQQGLESLKPELKSSIEKGIKFANQ

SEQ ID NO: 46263 - protein, 250 aa, Glycine max
  Clone ID: 701141552_FLI.pep
LVLFVATVLVAYECHGSDYQKFPLQMKTGFGGQYSNEVACASWRLGVEANNVVKWQTVPAACGEYIADYVLGDQYRSDSKTVNQQAYFYAKSLKLTNKDVFVLDVDDTTLSNLQYFANHGFGVEPHNTTAFKNWVLDGEAFALPETLKMYNKLLALGIKIVFLSERPLSLGDVTAKNLKEVGFNTWEKLILRDPSEYSGKLSFEYKSAEREKLEKEGYRIIGNVGDQWSDLLGSNKGTRTFKLPNPLYYD

SEQ ID NO: 46264 - protein, 296 aa, Glycine max
  Clone ID: 701146805_FLI.pep
IVEGKKIKMVLAELGGSISRALQLMSNATVIDEKVLNDCLNDITRALLQSDVQFKLVRDMQTNIKNIVNLDDLAAGHNKRRIIQQAVFNELCKILDPGKPSFTPKKGKTSVVMFVGLQGSGKTTTCTKYAYYHQKKGWKPALVCADTFRAGAFDQLKQNATKAKIPFYGSYMESDPVKIAVEGVERFKKENCDLIIVDTSGRHKQEASLFEEMRQVSEATKPDLVIFVMDSSIGQAAFDQAQAFKQSVAVGAVIVTKMDGHAKVLQQQRVLSYSLELENIWTSLKFLMLSHLSVVY

SEQ ID NO: 46265 - protein, 460 aa, Glycine max
  Clone ID: 701146963_FLI.pep
FLPTNYIFLTKKMAGEVVKEEESLNLKVTNKSHVQSEEKIGRKEYQLVTFDLPYLAFYYNQKLLFYKGEDFEGMVQKLKVGLGVVLKEFHQLAGKLGKDEEGVFRVEYDDDMLGVEVVEAVVADDEIGVDDLTVAEISNTNLKELIPYSGILNLEGMHRPLLAVQLTKLKDGLAMGLAFNHAVLDGTATWQFMTSWAEICSGSPSTSAPPFLDRTKARNTRVKLDLSLPEPNGPPTSNSEAKPAPALREKIFKFSESAIDKIKSTVNENPPSDGSKPFSTFQALSSHVWRHVSHARNLKPEDYTVFTVFADCRKRVDPPMPETYFGNLIQAIFTVTAVGLLTAHPPQFGASLVQKAIEAHNAKTIEERNKEWESAPKIFEFKDAGVNCVAVGSSPRFKVYDIDFGWGKPENVGSGTNNKFDGMIYLYPGKSGGRSIDVELTLEPEAMGKLEQDKDFLLEA

SEQ ID NO: 46266 - protein, 389 aa, Glycine max
  Clone ID: 701147372_FLI.pep
EKTTEGGEFVDTAINRFVLIALGAAVSLGVNICIYPIWAGEDLHDLVTKNFMGVATSLEGVVNHYLHCVEYKKVPSKILTYQAADDPIYSGYRSAVESTSKEDSLMGFAVWEPPHGHYKMLKYPWKNYVKLSGALRHCAFMVMAMHGCILSEIQAPAEKRQVFRSELQRVGSEGAKVLRELGNKVKKMEKLGRGDLLYEVHEAAEELQQKIDKKSYLLVNSESWEIGNHSREESDPQQQGLFNMDEERKILEYKSLSEAVLDLRTVQVPNTWEGNVTLGNNPGVPATDASENMFRKKIYWPSHIYYNKSKSEAEEGQESKTYESASALSLTTFTSLLIEFVARLQNLVDSFEELSEVANFVDPLEQQAPVAIASHGFWTRLFNCCKFKD

SEQ ID NO: 46267 - protein, 271 aa, Glycine max
  Clone ID: 701150508_FLI.pep
MQKLVVVKKMKVLVFFVAIVLAAWHCHGSDHDHDHGHTYQIFPLRMKTGHGGHYIPEVSCQSWRLGVEAHNVIDWKTVPQDCEGYIGNYMLGEQYRSDSKIVNQQAYFYAKTLNITAKTAWVFDIDETTLSNLPYYADHGFGVELYNETSFNKWVDLGEAPALPESLKLYKKLLSLGIKIVFITGRPLDQKAVTATNLKLAGYHTWEKLITKNTSEYHGKTAVTYKSTERKKLEEKGYKIIGNIGDQWSDLLGTNTGDRTFKLPDPMYYIS

SEQ ID NO: 46268 - protein, 362 aa, Glycine max
  Clone ID: 701151255_FLI.pep
GNLSSYGNLVGDSFGKFGKALVQICVIINNIGMLIIYMIIIGDVISGTSSSSEFHHSGVLEGWFGVHWWTGRTFVLLFTTFAVFAPLSCFKRIDSLRYTSALSFGLAVAFLVIAVGISIFKISIGGIGMPRLFPIITDVASVFELFTVTPVVVTAYLCHFNVHSIDNELEDSSQINGIVRTSLALCASVYLLTSFFGFLLFGEGTLDDVLANFDIDLGIPFGSVLNDAVRFSYAAHLVLVFPVVFYAVRINLDGLIFPSSRPLVLDNFRFASITMVLIVASFLGANFIPSIWDIFQFTGATAAACLSFIFPSAITLRDRYNIATKKDKILSVFMIVLAVLANVVAVYSDAFALIKNSITKRE

SEQ ID NO: 46269 - protein, 312 aa, Glycine max
  Clone ID: 701151270_FLI.pep
SGSEGEEMLLQTRQFGTACPWVRLTPASKRNSSVSLRRSNCGPKCSVSQLELKSESESKTKPYPAEASRTIMELAKVGTLCTLTQEGLPLGTGVRFAVDPEHGTPLFCFNSTDNTNIPSSLHVQFEQFGLRTPQCTIQGTLTKPQDPKRLVSVWRKRFGEEVDRDFIYIIAVDRVLQLEDIQEDGIWVTSSDYKNAQPDPLRDSAHNLVTEINTNNMEDITRFCNVYVDLDFLVSEAKMLWVDRLGFDMRLSSPHKGVFDVRIPFPREVTDEKGAKSTFNCMSQLAWEVERNFQHPDFSKVKELKPVKSPFL

SEQ ID NO: 46270 - protein, 498 aa, Glycine max
  Clone ID: 701203902_FLI.pep
LLSRFPMEQKRPVGPLVVVGVRDGVLWLIDRYMVAHAVSLSHPGIRCRCLAAYGDAVSAVKWASRLGREHHDDLAQFMLGMGYATEALHLPGISKRLEFDLAIKSNDLRRALHCLLTMSNSRDIGHDGTQGLGLNDILNLSDKKPNKVSDKKQDIVEGVQGIVKFAKEFLDLIDAADATAQSEIAREALKRLAAAGSVKGALEGHELRGLALRLANHGELTRLSSLVNNLVTLGLGREAAFAGAVLGDNALMEKAWQDTGMLAEAVLHAHAHGRPTLKNLVQIWNQALQREVEPTPSQKTDAAAAFLASLEEPKLTSLADAGKKPPIEILPPGMPPLNGPISIQKKPASAAQNSQQPPGKPLALEAPPTTTAAQESATTQQPESTPASGNDPPPSESTSDTRPAPATAPPQPESGESTVDNGIPTSTPASDGDPNVNGENVQAASTGNPAPAPTPTPPDFPVSPAAEVSETTAPSPPTVPTPPAVPTPPAVPTSDPLI

SEQ ID NO: 46271 - protein, 540 aa, Glycine max
  Clone ID: 701207771_FLI.pep
PYHSLQIKLRSLSFSLESMAAIGLNGVKVGTTSSQAYLEGKAVKETRALMAELCRHFYTLGWVTGTGGSISMKVHDDSIPRPQQLILMAPSGVQKERMEPEDMYVLSHSGSVLSAPSPKPWPHKPPKCSDCDPLFKKAYEMRDAAAVFHSHGIESCLVTMINPLSKEFRITHMEMIKGIKGHGYYDELVVPIIENTAYEYQLTESFAKAIEDYPKATAVLVRNHGVFVWGDSWISAKTQSECYHYLFDAALKLHQMGLDWSTPNHGPIQSARRGLSIAGESNVSVKARKSNGDSDPLPRCVVLDIEGTTTPISFVSEVLFPYARDNVGRHLSLTYDTPETKADIKLLRSQVQSDLEQGIAGAVPIPPDDAGKQEVIAALVANVDAMIKADRKITALKELQGHIWKTGYENNELEGIVYDDVPEALEKWHALGIKVYIYSSGSRLAQRLIFGKTNHGDLRKYLSGFFDTTVGNKRETRSYVEISESLGVEKPSDILFVTDVYQEATAATAAGLEVIISIRPGNGPLPDNHGFKTIKSFSEI

SEQ ID NO: 46272 - protein, 205 aa, Glycine max
  Clone ID: 701207895_FLI.pep
CKRRNGLLKKAYELSVLCDAEVALVVFSSRGRLYEYANNSVRGTIDRYKKACAASTNPESVSEANTQFYQQEASKLKRQIRDIQNLNRHILGEALSSLSLKELKNLESRLEKGLSRVRSRKHETLFADIEFMQKREIELQNHNNFLRAKIAEHEKAQQRQQDMIPGNVCESTIPPQSYDRNFFPVNLIDSNNQYSNQDQTALQLV

SEQ ID NO: 46273 - protein, 468 aa, Glycine max
  Clone ID: 701214918_FLI.pep
TNNFSHMTMLPHSLTMIATLIIIFLAQTLVGVSSLPEADKITNLPGQPRVEFQQYSGYVTVDDQNQRALFYYFVEAEENPSSKPLVLWLNGGPGCSSIGVGAFAEHGPFRPSDNNVLEINDKSWNKVANVLYLESPAGVGFSYSSNESFYALVTDEITARDNLVFLQRWFTKFPEYSNNDFFISGESYGGHYVPQLAQLIVQTKTNFNLKGIAIGNPLLEFNTDFNSRSEYLWSHGLISDSTYEVLTRVCNFSSIRRQMQNGNLRGVCGKANKLLDSEISNYVDEYDVTLDVCLSSVNQQAYVLNQLQETQKIDVCIGDKTTTYLNTKEVQEALHANLVGVAKWSTCSSVLHYDYQNLEIPTIPILGSLVNSGIRVLVYSGDQDSVLPLLGSRSLVNGLAKEIGLDTTVAYRAWFEGKQVAGWTQVYGNILSYATIRGASHEAPFSQPQRSLGLLKAFLEGKPLPGVK

SEQ ID NO: 46274 - protein, 442 aa, Glycine max
  Clone ID: 701135290_FLI.pep
AVELIKKGHAYVDHQTPDEIKEHREKKLNSPWRDRPISESLKLFEDMKNGSIEEGKATLRMKQDMQSDNYNMYDLIAYRIKFTPHPHAGDKWCIYPSYDYAHCIVDSLENITHSLCTLEFETRRASYYWLLHALSIYQPYVWEYSRLNVSNTVMSKRKLNRLVTEKWVDGWDDPRLMTLAGLRRRGMTPTAINAFVRGIGITRSDGTLISVERLEYHVREELNKTASRAMVVLHPLKVVITNLEANSVIEVDAKKWPDAQADDASAFYKISFSNVVYIEHSDFRMQDSKDYYGLAPGKSVILRYAFPIKCTEVILADDNETILEIRAEYDPSKKTKPKGVLHWVAQPSPGVDPLKVEVRLFERLFLLENPAELDNWLGDLNPNSKVIIPNAYGVSSIQNAKVGDNFQFERLGYFVVDQDSTSEKLVFNRTVTLKDSYSKGGK

SEQ ID NO: 46275 - protein, 240 aa, Glycine max
  Clone ID: 701140979_FLI.pep
DSAKINYCKGTSFFETTLMITCASKIAKMQSLLLGGSLCDLGSGGVFLLNTLDDSNSYGLTHVPHSKTTKGRILRESFNHHGLGWNHLNHTSITILQKFGLLLKLLTRSPVNLGQDFRKLHSNVRSVAVKDWCVSITNLARMVHDNDLGCEVGSFLGRVVLGVGCNKTTLEILDCNILHIKSNIVTWKSLCESLMVHLNRLNLSCQPSGTKSHHHTRLHNPSLYTSHWHSTNTTNLVDIL

SEQ ID NO: 46276 - protein, 134 aa, Glycine max
  Clone ID: 701141080_FLI.pep
KNWLNNRKARLARTARDVKAAAGDDNPVPEKQRGPVPGSYDSPGSPGQNVVLVGVRGDEIGRGKVFQVHGKWYGKSLEELSAHVVDISELKADKGMRLPYPSEATGNTFAEAETKLGVMRVLWGSNRVFALRPE

SEQ ID NO: 46277 - protein, 441 aa, Glycine max
  Clone ID: 701149901_FLI.pep
LISGYFSCGRIEEALHLFDQVPERNVVFWTSVVLGFACNALMDHARRFFYLMPEKNIIAWTAMVKAYLDNGYFSEAYKLFREMPERNVRSWNIMISGCLRVNRMNEAIGLFESMPDRNHVSWTAMVSGLAQKKRLGLLGSIFDLMPCKDMAAWTAMITACVDDGLMDEVCELFNLMPQKNVGSWNTMIDGYARNDDVGEALRLFVLMLRSCFRPNQTTMTSVVTSCDGMVELMHAHAMVIQLGFEHNTWLTNALIKLYSKSGDLCSARLVFELLKSKDVVSWTAMIVAYSNHGHGHHALQVFTRMLVSGIKPDEITFVGLLSACSHVGLVNQGRRLFVSIKGTYNLNPKAEHYSCLVDILGRAGLVDEAMDVVSTIPPSERDEAVLVALLGVCRLHGDVAIANSIGENLLEMEPSSSGGYVLLANTYATEGQWDEFAKGKE

SEQ ID NO: 46278 - protein, 322 aa, Glycine max
  Clone ID: 701153034_FLI.pep
EEKRMNKSGGGEMSKWPFTMSQWQELEHQALIYKYMVAGLPVPPDLVLPIQNSFHSISQTFLHHPSTTMSYCSFYGKKVDPEPGRCRRTDGKKWRCSKEAYPDSKYCERHMHRGRNRSRKPVESQTMTQSSSNVSSLTVTAGSSSSATGNFHNLTTTNAYGNPQGTGSGSDQTHYHMDSIPYGIPSKEYRYFQGPKSEGGEHSFLSKTLGSNKVLHMESQMDNTLMPTSGVASFSTLRSNNNSMLQGDYLQPSFLSSEYASAETVKQEGQFLRPFFDEWPKRRDSWSGLEDEGSNHTQLSISIPMSASNFSTTSSHSPHGEI

SEQ ID NO: 46279 - protein, 265 aa, Glycine max
  Clone ID: 701157767_FLI.pep
SERERETKQHPFGSSLLFFDLRYPFCFLNRERERESFEVRLRVLCGQSPMAAPPARARADYDYLIKLLLIGDSGVGKSCLLLRFSDGSFTTSFITTIGIDFKIRTIELDGKRIKLQIWDTAGQERFRTITTAYYRGAMGILLVYDVTDEASFNNIRNWIRNIEQHASDNVNKILVGNKADMDESKRAVPTSKGQALADEYGIKFFETSAKTNMNVEEVFFSIARDIKQRLADTDSKAEPQTIKINQPDQTATGGLAAQKSACCGS

SEQ ID NO: 46280 - protein, 310 aa, Glycine max
  Clone ID: 701157804_FLI.pep
LQIAMAKHDVEGGSFSAKDYHDPPPAPLIDAEELTQWSFYRALIAEFIATLLFLYITVLTVIGYKSQSDVKAGGDVCGGVGILGIAWAFGGMIFILVYCTAGISGGHINPAVTFGLFLARKVSLIRAIMYMVAQCLGAICGVGLVKAFQKAYYNRYGGGANELSEGYSTGVGLGAEIIGTFVLVYTVFSATDPKRNARDSHVPVLAPLPIGFAVFMVHLATIPVTGTGINPARSLGAAVMYNQQKAWDDHWIFWVGPFIGAAIAAFYHQFILRAGAAKALGSFRSNPTIRVNFLFIITGFKKEIIGSKMT

SEQ ID NO: 46281 - protein, 344 aa, Glycine max
  Clone ID: 701202443_FLI.pep
VTVIPFVRLLFFSFLSSHQNHLSLSLEKMAACIFTVAQDGTADFQTVQEAIDAVPLGNIRRTVIRVSPGIYRQPVYVPKTKNFITLAALSPEDTVLTWNNTATGIDHHQPARVIGTGTFGCGSTIVEGEDFIAENITFENSAPEGSGQAVAIRVTADRCAFYNCRFLGWQDTLYLHYGKQYLKDCYIEGSVDFIFGNSTALLEHCHIHCKSAGFITAQSRKSSQETTGYVFLRCVITGNGGNSYAYLGRPWGPFGRVVFAYTYMDQCIRHVGWDNWGKMENERSACFYEYRCFGPGCCPSKRVTWCRELLDEEAEQFLTHPFIDPELEKPWLAQRMALRIPYSA

SEQ ID NO: 46282 - protein, 178 aa, Glycine max
  Clone ID: 701206149_FLI.pep
VNSTMEDRDHCCSNNSTMITTTKKRTGRRSPTSDKLKNQHREKQSMKPYRGIRMRKWGKWVAEIREPNKRSRIWLGSYTTPVAAARAYDTAVFYLRGPTARLNFPELLFQDDDQEGSDSVQHGAAGNMSADSIRRKATQVGARVDALQTALHHHAPSTNSLNLKPDLNEFPKLEELQD

SEQ ID NO: 46283 - protein, 255 aa, Glycine max
  Clone ID: 701210352_FLI.pep
RNMASLSSSLVLLLAALILSPQVLADYEKPPIYKPPVYTPPVYKPPVEKPPVYKPPVYKPPVEKPPVYKPPVYKPPIYKPPVYKPPVEKPPVYKPPVYKPPVYKPPVYKPPIEKPPVYKPPVYKPPVYKPPVYKPPVYKPPVYKPPVEKPPVYKPPVYKPPVYKPPVYKPPVEKPPVYKPPVYKPPVYKPPVYKPPVEKPPIYKPPVYKPPIEKPPVYKPPVYKPPVYKPPVYKPPVKKPPIYKPPYPKYPPGSN

SEQ ID NO: 46284 - protein, 421 aa, Glycine max; identical to SEQ ID NO: 45874
  Clone ID: 701137731_FLI.pep

SEQ ID NO: 46285 - protein, 537 aa, Glycine max
  Clone ID: 701142617_FLI.pep
QFHICTCILSLSLHNLTSRVRITRDSLSRHNTNMVIIIKYYTYIYIPTIEKSEQNPTKAAMAAMQRPLKRTIAIAKQRACFSSLLPSAAAAAAADTVAPPQLPPFDHQPHPYNGPSADEVFAKRKTFLGPSVFHYYKKPLNIVEGKMQYLYDDSGRRYLDAFAGIVTVSCGHCHPEILNAITEQSKLLQHATTIYLHHTIGDFAEALAAKMPGNLKVVYFVNSGSEANELAMMMARLYTGNLGMISLRNAYHGGSSSTLGLTALNSWKYQIPEGHVHHVMNPDPYHGAFGTDAASYANDVQDHIDYGTSGKVAGFIAESIQGVGGAVELAPGYLKLVYDIIHKAGGVCIADEVQTGFGRTGSHYWGFETQGVIPDIVTMAKGIGNGLPLGAVVTTPEIASVMAQKIQFNTFGGNPVCSAGGLAVLRVLDKEKRQAHCADVGSYLLERLRFLMERHDIIGNVRGRGLMVGLELVTDRTNKTPAKAETAVVFEKLRELGVLVGKGGLHGNVFRIKPPMCFSKDDADFLVDALDYSLSKL

SEQ ID NO: 46286 - protein, 455 aa, Glycine max
  Clone ID: 701143140_FLI.pep
ARLNGQEVVIKVQRPGLKDLFDIDLKNLRVIAEYLQKIDPKSDGAKRDWVAIYDECASVLYQEIDYTKEAANAELFASNFKNMDYVKVPTIYWDYTTPQILTMEYVPGIKINKIQALDQLGVDRKRLGRYAVESYLEQILSHGFFHADPHPGNIAVDDVNGGRLIFYDFGMMGSISPNIREGLLETFYGVYEKDPDKVLQAMIQMGVLVPTGDMTAVRRTAQFFLNSFEERLAAQRQEREEATTELGFKKPLSKEEKIKKKKQRLAAIGEDLLSIAADQPFRFPATFTFVVRAFSVLDGIGKGLDPRFDITEIAKPYALELLRFREAGVEVVLKDFRKRWDRQSQAFYNLFRQADRVDKLADIIQRLEQGDLKLRVRTLESERAFQRVAAVQKTIGSAVAAGSLINLATVLYLNSIRVPAIAAYIFCALFGFQVLLGIVKVKKLDERERLITGTA

SEQ ID NO: 46287 - protein, 144 aa, Zea mays
  Clone ID: LIB3969-003-C10_FLI.pep
PSRPFPFINPKPRRNSSPPRSPPLLLLPQLSLRFSVRAGDPQRGGVRGRGPLRAARDLRRVAAAHAGRRVPERRHRRPGGVAGAHDREDVRAGQLQRAGAGRRRGAHAPVDGPGHVHRVRVDAGQRRGQHGVCVCLHHSIPFSA

SEQ ID NO: 46288 - protein, 297 aa, Glycine max
  Clone ID: 700977821_FLI.pep
NDLHSQMPPEFGLLQNLAVLDLRNSALHGSIPADICDSGNLAVLQLDGNSFEGNIPSEIGNCSSLYLLSLSHNNLTGSIPKSMSKLNKLKILKLEFNELSGEIPMELGMLQSLLAVNISYNRLTGRLPTSSIFQNLDKSSLEGNLGLCSPLLKGPCKMNVPKPLVLDPNAYNNQISPQRQTNESSESGPIHRHRFLSVSAIVAISASFVIVLGVIAVSLLNVSVRRRLTFLDNALESMCSSSSRSGSPATGKLILFDSQSSPDWISNPESLLNKASEIGEGVFGTLYKFHWDHKVEW

SEQ ID NO: 46289 - protein, 186 aa, Zea mays
  Clone ID: LIB3150-072-F11_FLI.pep
NGFPATSIHGDRNQQEREYALRSFKSGQTPILVATDVAARGLDIPHVAHVVNFDLPNDIDDYVHRIGRTGRAGKSGLATAFFNDNNSSLARSLADLMQESNQEVPAWLLRYAARPSYGGGGGGRNRRSGGGSRFGGRDFRNDSSSFGKGGSRGGDYYGGGSSGGYGGGSSYGGGGHGGAGAPSAWD

SEQ ID NO: 46290 - protein, 274 aa, Glycine max; identical to SEQ ID NO: 42938
  Clone ID: 700808420_FLI.pep

SEQ ID NO: 46291 - protein, 465 aa, Zea mays
  Clone ID: LIB3150-074-D10_FLI.pep
KPFGFSSAMPLAAVLLPLLVLGASSVCQGQGAASHNITAILAAYPEFTDFSAALVSTGAAAEIDRRSTVTVLAVDNAVMARLKAQKLQLDDLQRVIYLHVLLDYFDAAKLGSIQGGFAQAASLYQASGKAQGSDGIVNITVFPDGRVAAFTPSGPSNRLPTAFYQRSIKEQPYYIAVLQVRDLIWSPAPADGVQAPPPAPQPDAAPGLTDLLSKNGCGGFASLLAATADAVTKYDSSAAGLTVFCPADEAVEAFNSTFKNLTADAQLALLLYHGVAEHYSAQSLKAINGDVSTLASDGSKNNNGYNLTIRADGDTVKISSASASAATVTKTLLDKAPLAVYLIDAVLLPRQQSNDDQGHTAPAPAPASSPAHAPTPALAPVSPSPAPVPVSPSPSPAHAPTPPLAPAPVTAPAPRRRPAPSPEHTTPAPSPDADGQPPADQKNNAARDTASWTIGAALAIVCLLS

SEQ ID NO: 46292 - protein, 218 aa, Zea mays
  Clone ID: LIB3180-011-H7_FLI.pep
HLGYLASQPAQWNQAVMHLAPARRLKALLHKSMHACSKRYHIQWSRPFRALAHVLLDPKQTSVPWQRGRWMDRRRFDGDCRRAAAPRWFWLLTNVATNGDRARARRGARCTRWRRATARSRRRSGARRRRTPGSRSWGAGSPAPACCTWAGRGAATPGWSTPTATSAASSCPRAGATGATSQEQSEQRSAFFPATVAVAVDVDAITVTELAFSVNPLC

SEQ ID NO: 46293 - protein, 507 aa, Glycine max
  Clone ID: 700889819_FLI.pep
KVCWKGGCFSSDILAAIERAILDNVNVLSLSLGGGMSDYYRDSVAIGAFSAMENGILVSCSAGNAGPSPYSLSNVAPWITTVGAGTLDRDFPAYVALGNGLNFSGVSLYRGNAVPDSPLPFVYAGNVSNGAMNGNLCITGTLSPEKVAGKIVLCDRGLTARVQKGSVVKSAGALGMVLSNTAANGEELVADAHLLPATAVGQKAGDAIKKYLFSDAKPTVKILFEGTKLGIQPSPVVAAFSSRGPNSITPQILKPDLIAPGVNILAGWSKAVGPTGLPVDNRRVDFNIISGTSMSCPHVSGLAALIKSAHPDWSPAAVRSALMTTAYTVYKTGEKLQDSATGKPSTPFDHGSGHVDPVAALNPGLVYDLTVDDYLGFLCALNYSASEINTLAKRKFQCDAGKQYSVTDLNYPSFAVLFESGGVVKHTRTLTNVGPAGTYKASVTSDMASVKISVEPQVLSFKENEKKSFTVTFSSSGSPQQRVNAFGRVEWSDGKHVVGTPISINWG

SEQ ID NO: 46294 - protein, 492 aa, Glycine max; identical to SEQ ID NO: 43836
  Clone ID: 700757865_FLI.pep

SEQ ID NO: 46295 - protein, 786 aa, Glycine max
  Clone ID: 700763388_FLI.pep
NSWSILYQEIPLPSSHSKLILNADWPAPKVNFEWDDGSGIPGAFYIKNFMQTEFFLVSLTLEDIPNHGSIHFVCNSWIYNAKLFKSDRIFFANQTYLPSETPAPLVKYREEELHNLRGDGTGERKEWERIYDYDVYNDLGDPDKGENHARPVLGGNDTFPYPRRGRTGRKPTRKDPNSESRSNDVYLPRDEAFGHLKSSDFLTYGLKSVSQNVLPLLQSAFDLNFTPREFDSFDEVHGLYSGGIKLPTDIISKISPLPVLKEIFRTDGEQALKFPPPKVIQVSKSAWMTDEEFAREMLAGVNPNLIRCLKDFPPRSKLDSQVYGDHTSQITKEHLEPNLEGLTVDEAIQNKRLFLLDHHDPIMPYLRRINATSTKAYATRTILFLKNDGTLRPLAIELSLPHPQGDQSGAFSQVFLPADEGVESSIWLLAKAYVVVNDSCYHQLVSHWLNTHAVVEPFIIATNRHLSVVHPIYKLLHPHYRDTMNINGLARLSLVNDGGVIEQTFLWGRYSVEMSAVVYKDWVFTDQALPADLIKRGMAIEDPSCPHGIRLVIEDYPYAVDGLEIWDAIKTWVHEYVFLYYKSDDTLREDPELQACWKELVEVGHGDKKNEPWWPKMQTREELVEACAIIIWTASALHAAVNFGQYPYGGLILNRPTLSRRFMPEKGSAEYEELRKNPQKAYLKTITPKFQTLIDLSVIEILSRHASDEVYLGERDNPNWTSDTRALEAFKRFGNKLAQIENKLSERNNDEKLRNRCGPVQMPYTLLLPSSKEGLTFRGIPNSISI

SEQ ID NO: 46296 - protein, 305 aa, Zea mays
  Clone ID: LIB3136-013-H5_FLI.pep
FWKRKEKTIPDALQPELGMKLLIAHGSHQELGKGDSMTNLMINMCDVVHMLMHATEVHYQCPKRVRVQSDVSERIANGTSVHVNTHVQNLNLDIEEQSHKHSISHIEEPNTNNSEGSLAGAAVWDVFRRQDLPKLNEYLAVHREECAARCQAVSSVKYPIYDQTVYLNDYHKKMLKDQYEGLKTIEQITMDSASVETNMFKLCKVRFVQFGQKGIPYLNTYDGRAIRYLDPLIKANDTIKIDLETNKIMDFIKFDVDNMVMVTGGRNTERVGVIKNREKHKGSFCCLELFAMSSFLLFVVQENLE

SEQ ID NO: 46297 - protein, 281 aa, Zea mays
  Clone ID: LIB3150-023-E2_FLI.pep
GCKIQSAAWLRGLSGDFFHSFHIMSLYWCSVRPGFSSFSLGSSASSNALKVDLRRRSGCLSAGRDACGSTTDIRAIASSTDLASMRESSLLVFSTRTTRSYSSSSATRAARFLAASASRSRRSRSSSRRRTSSASVTLGGGAATRDALRAAALDGADAEAATAAASASARRRFSALRAAASARFSASSSRRRAARDLGPSASAQYCSSLARSWRSRRSASAAERRSRAASALEFTPIFFGITGPLVRRLAARRRVADVTAGWTEGTAIRTPLCGLGEWRSS

SEQ ID NO: 46298 - protein, 152 aa, Zea mays
  Clone ID: LIB3150-057-A6_FLI.pep
SKRQRRRERGMAGIGPIRQDWEPVVVRKKAPTAAAKKDEKAVNAARRSGAEIETMKKYNAGMNKAASSGTSLNTKRLDDDTENLAHERVPSDLKKNLMQARLDKKLTQAQLAQMINEKPQVIQEYESGKAIPNQQIIGKLERALGTKLRGKK

SEQ ID NO: 46299 - protein, 205 aa, Zea mays
  Clone ID: LIB148-061-B1_FLI.pep
RFSFSARTATTLNRAISKVLNIASCSLHRSTRAARTMGSASASVTTTSLLALALAALAFVSRAAAQGNGCSSVMMTLAPCMDFISSKASEPGISCCSVLAGVVQTDPRCLCMVLDGTATSFGIAINQTRALELPGVCKVKAPPLSQCTGVPAAPAPTPPDEPAAAAEEEADAAADAPSANGASSSTNSKNAASLLLLICALLYAF

SEQ ID NO: 46300 - protein, 327 aa, Glycine max
  Clone ID: 700764472_FLI.pep
YLLCAITLAVLRQIHYLENGSVEIYSRHAERNTGKFPDVVAAVSRLKKPTVSSLILDCEIVAYDRQTQTIHSFQALSTRARKNVEMEDIKVDVCIFAFDLLYLNGQALLQENLRVRREHLYASFEEEPGFLQFATTITSNDVEEIQKFLDQAVGASCEGLIIKTLNEDATYEPLKRSLNWLKLKKDYMDNIGDSLDLVPIAAFHGRGKRTGVYGAFLLACYDSDNEEFQSICKIGTGFSEAVLEERSSSLRSKVIPKPKAYYRFGESINPDVWFEASEGISLRFPRLLRVRPDKSPEQASSSEQVAEMYNAQKQNHTINQNDDEDDD

SEQ ID NO: 46301 - protein, 826 aa, Zea mays
  Clone ID: LIB3066-027-C12_FLI.pep
LMAGLAPKTKVLRDGKWKEEEASILVPGDIISIKLGDIIPADARLLEGDPLKVDQAALTGESLPVNKHPGQGVFSGSTVKQGEIEAVVIATGVHTFFGKAAHLVDSTNNVGHFQLVLTAIGNFCIISIAVGMVIEIIVMYPIQHRAYRDGIDNLLVLLIGGIPIAMPTVLSVTMAIGSHRLSQQGAITKRMTAIEEMAGMDVLCSDKTGTLTLNKLTVDKTLIEVCGKGVDKDMVLLYAARASRVENQDAIDTCIVGMLADPKEARAGIKEVHFLPFNPVEKRTAITYIDGNGDWHRVSKGAPEQIIELCRMSKDAEKKIHALIDGYADRGLRSLGVSYQLVPEKSKESAGEPWQFIGLLPLFDPPRHDSAETIRRALHLGVNVKMITGDQLAIGKETARRLGMGSNMYPSTTLLGDNKTGEMGGLNIDELIEKADGFAGVFPEHKYEIVKRLQDRKHICGMTGDGVNDAPALKKADIGIAVDDATDAARSASDIVLTEPGLSVIVSAVLTSRAIFQRMKNYTIYAVSITIRIVLGFLLVALVWKFDFAPFMVLIIAILNDGTIMTISKDRVKPSPTPDSWKLKEIFATGIVLGTYMALATALFFYLAHDTDFFTNAFGVRSIKENDKELMAALYLQVSIISQALIFVTRSRSWSFVERPGALLVIAFLAAQLVATCIAVYANWEFCKMQGIGWGWGGAIWAFSVVTYFPLDVLKFAIRYALSGKAWNNINNKTAFTNRTDYGKGEREAQWATAQRTLHGLNQATATSDLFGDNQGYRELSELAEQAAKRAEVARLRELHTLKGHVESVVKLKGLDIDTIQQSYTV

SEQ ID NO: 46302 - protein, 201 aa, Zea mays
  Clone ID: LIB189-011-C2_FLI.pep
MIENQKSELIAFGLCFSLVSYLYVLATRKNMRFQVSYGRNSDQQHPTLQMVSDLLNSATLALERVGEEKYMLLNKIRDLNELSRKEVDEIIKVCMKQDCISPNDNIRKRRYIAMIDLCCMAGNRDQLITLLLQITECAVTILLIHFQDDASAKGLSSFSDELLPVLERLEHLKEDKVGRSLKLFHRSITTLKEMTIRTITI

SEQ ID NO: 46303 - protein, 391 aa, Glycine max
  Clone ID: 700764831_FLI.pep
FPNLKRTMEFTKKRKTEENGDTTDYPPQQSTEESPIAAVAPAPLAAEDIRKILQPFSQEQLLDLLQSASLRHPDVLDAVRAVADLDSTLRKLFVRGLAGETTTETLRGVFSAFGELDEAIVIIDKATGRSKGYGFVVFSHVDGAILALKEPSKKIDGRMTVTQLAAAGGPGGGDVSLRKVFVGNVPFEISSERLLDEFLKFGEVEEGPLGFDKSSGKSRGFAFFVYKTEEGARASLVEPLKTIEGHQVICKLAVDNKKTKPFVADQHQQQHHQQHPQQQMQQQGSMMVPQYGGYGGNGYGMQQQQQQHQVPPYNNQIPVAGAGGYGHGYGNSQMGGPVSGDYGARVPPSTGGGYPDGSQYGFPPSSGHPPQPQIPMARPPGGMYQGMPPYY

SEQ ID NO: 46304 - protein, 475 aa, Zea mays
  Clone ID: LIB3150-041-E4_FLI.pep
LASPTTKREELVAGEGLAGMGISRLLALLLALLIAVAGATAEEPVVAADSGAGAVEAAAALRAEEAAEAAALRAELEQLRAKISALESDIAVRSLELKNKDDVIVNLEKAIAEKSKAITSMQGEIASLQAKGSLAAEEQANKANAKAVELEKQIDKLKKDIQAQSSQKAALESRANDAENKVEKLTEKLNTMQKESDEQKRKIKKTERALKVAEEELMRLQLEATAKSKQLTEVHGAWLPPWLATHYARYMEVVSGHWNYHGKPAVQNVLHKASEKSAHAKKWAEPHIETAKMKWIPVKEKLVVLKKNTEPYVQKVSTRSVEFYESSRDAVTPHVVKVKEFAHPYYQEAKKFSKPYIDQIAEITKPHVEKVRTTLKPYTKRAVHAYGSFLASATTYHRQAQATIMDYLHQHGVPKSFATKELVWFLASALLALPVFVIYRLVVETLCTKKNRRPRGGNGNGNHGQKRHKRRYADK

SEQ ID NO: 46305 - protein, 510 aa, Zea mays
  Clone ID: LIB189-008-E5_FLI.pep
WIIMEYCGGGSVADLIGITEEPLDESQIAYICREALKGLAYLHSIFKVHRDIKGGNILLTEQGEVKLGDFGVAAQLTRTMSKRNTFIGTPHWMAPEVIQESRYDGKVDVWALGVSAIEMAEGMPPRSTVHPMRVIFMISSEPAPMLEDKEKWSLLFHDFIAKCLTKDPRLRPAAIEMLKHKFIEKCNSGASKMLAKIKVAKKIRATLAVQNELSDPDNTTQDVPFRINEDYGETVPTSSQQHMKHGTYNDCQAGDFGTMIVHTEDGDEVTESPIFPRTEFIPGLGSINSFTHDPKRAELISSFWAENIGDSDANKDRDTDYGPDMQESKVISPLTGTVKKNIGAEGTIRCHDNQINLSPGLANTTTKLNNSPSRKAFSVQDKLWSIYAAGNTVPIPFLKAIDISPLALVSENESGNGLAGSSTNDALEAVRELFSGDGQAKKGRKGQNEVPLPPGVHHRLTTSPTLMNLAQALAYHKTCYEDMPLQDSQATQEQQTIQNLCDTLRTILRL

SEQ ID NO: 46306 - protein, 487 aa, Glycine max
  Clone ID: 700847055_FLI.pep
FLNAERPSLKHQRKWKSDPNYTKSWYDRGAKIFQADKYRKGACENCGAMTHDSKSCMERPRRVGAKWTNKHIAPDEKIETFELDYDGKRDRWNGYDASTYARVIERYEARDEARKKYLKEQQLKKLEKSNQNGEDAASDGDEEEEEDEDEDDLRVDEAKVDESKQMDFAKVEKRVRTTGGGSTGTVRNLRIREDTAKYLLNLDVNSAHYDPKTRSMREDPLPDADPNEKFYLGDNQYRNSGQALEFKELNIHAWEAFDKGQDVHMQAAPSQAELLYKNFKVMKEKLKYQTKETIIEKYGNAADEDKLPRELLLGQSERQVEYDRAGRIIKGQEAALPRSKYEEDVYINNHTTVWGSWWKDHQWGYKCCKQTIRNSYCTGAAGIEAAEAASDLMKANIARKEAATDDPAPVEEKKLATWGTDVPDDLVLDEKLLAESLKKEEQRKREEKDERKRKYNVRWNDEVTAEDMEAYRMKKVHHDDPMKDFLH

SEQ ID NO: 46307 - protein, 363 aa, Glycine max
  Clone ID: 700685957_FLI.pep
AYDISDDQQDITRGKGLVDSLFQAPQDAGTHYAVMSSYEYLSTGLRQYLDNKMDGFYIAPAFMDKLVVHISKNFMTLPNIKVPLILGIWGGKGQGKSFQCELVFAKMGINPIMMSAGELESGNAGEPAKLIRQRYREAADMIKKGKMCALFINDLDAGAGRLGGTTQYTVNNQMVNATLMNIADNPTNVQLPGMYNKEENPRVPIIVTGNDFSTLYAPLIRDGRMEKFYWAPTREDRIGVCTGIFRTDGIPEQDIVKLVDTFPGQSIDFFGALRARVYDDEVRKWISGVGVDSVGKKLVNSKDGPPTFEQPKMTLEKLLLYGNMLVQEQENVKRVQLADKYLNEAALGNANEDAIQRGTFFQS

SEQ ID NO: 46308 - protein, 681 aa, Glycine max
  Clone ID: 701002370_FLI.pep
PLELGCGGGGYGWEPPRRGQAHARGETLTISQVAAIAAHDQGVKVELAESSRAGVKASSDWVMESMNKGTDSYGVTTGFGATSHRRTKQGGALQKELIRFLNAGIFGNGTESNCTLPHTATRAAMLVRINTLLQGYSGIRFEILEAITKLLNNNITPCLPLRGTITASGDLVPLSYIAGLLTGRPNSKAVGPSGEILNAKEAFELANIGAEFFELQPKEGLALVNGTAVGSGLASIVLFEANIIAVLSEVISAIFAEVMQGKPEFTDHLTHKLKHHPGQIEAAAIMEHILEGSSYVKAAKKLHEIDPLQKPKQDRYALRTSPQWLGPLIEVIRFSTKSIEREINSVNDNPLIDVSRNKALHGGNFQGTPIGVSMDNTRLALASIGKLMFAQFSELVNDYYNNGLPSNLTASRNPSLDYGFKGAEIAMASYCSELQYLANPVTSHVQSAEQHNQDVNSLGLISSRKTHEAIEILKLMSSTFLVALCQAIDLRHLEENLKNTVKNVVSQVAKRTLTTGVNGELHPSRFCEKDLLKVVDREYTFAYIDDPCSGTYPLMQKLRQVLVDYALANGENEKNTNTSIFQKIATFEEELKTLLPKEVEGARVAYENDQCAIPNKIKECRSYPLYKFVREELGTALLTGERVISPGEECDKVFTALCQGKIIDPLLECLGEWNGAPLPIC

SEQ ID NO: 46309 - protein, 395 aa, Glycine max; identical to SEQ ID NO: 38715
  Clone ID: 701013041_FLI.pep

SEQ ID NO: 46310 - protein, 420 aa, Glycine max
  Clone ID: 701156522_FLI.pep
GHPKNMKRNHNFPFHHRPRKWAMVIPTVTICFLLLFLPLLPLTKPSSSSSSFSATWSSSSLNLTEELEVGVPRLAYMLTATKGEGAQLKRVLQAVYHPRNYYLLHLDLEASDAERLELAKYVKSETVLAAFGNVLVVGKPDLVTYKGPTMIASTLHGIALLLKRAPHWDWLINLSASDYPLLSQDDILHIFSFLPRDLNFIEHTSNIGWKEHQRARPIIIDPGLYHSKKSGVYWAKEKRSVPSSFKLFTGSAWVVLTKSFLEFCVWGWDNLPRTLLMYYTNFLSSPGGYFHTVICNHKDYQNTTINHDLRYIRWDNPPKQHPVFLKLEHFDDMVHSGAPFARKFTKDDPVLNKIDKELLRRSDGHFTPGGWCIGNPLLGKDPCAVYGNPIVVKPTLQSKKLEKLIVKLLDSENFRPKQCK

SEQ ID NO: 46311 - protein, 243 aa, Glycine max
  Clone ID: 701205937_FLI.pep
IISRIPSTPSKLEAMETSHPLSIESFSYSWLVNLKPSLESLDGSLRTSLDASDETSSFIEMDPRMTPSKRFFRNSQDFKFDFPISQSPRTLVDADELFSNGYLMPLFVESLKMEAFEASDVIPSLPSSSHVPKSVVPNSHSRCPSLKRCKTLSRRIFLKYLNFLRPLYRRLRGGKSGSKPESVVKRTVSAKNRGYYSETSPRISVAYSADDWRKSCDSESSIYEAVLHCKRSIGMFKFIVYIN

SEQ ID NO: 46312 - protein, 389 aa, Glycine max
  Clone ID: 701213354_FLI.pep
VKFPFPEPQIKLFYSFLSSINSVLSHSGMGIYLSSPKTEKFSEDGENDCLRYGLSSMQGWRATMEDAHAAYTDLDESTSFFGVYDGHGGKVVAKFCAKFLHQQVLKSETYLTGDIGTSLQKAFLRMDEMMRGQKGWRELSILGDKINKFTGMIEGLIWSPRSSDGNCQVDDWGLEEGPHSDFAGPTSGSTACVAVIRNNQLVVANAGDSRCVISRKGQAYNLSRDHKPDLEIEKDRILKAGGFIHAGRVNGSLNLARAIGDMEFKQNKFLPAEKQIVTANPDINTVELCDEDEFVVLACDGIWDCMSSQQLVDFVREQLHLKTKLSAVCESVLDRCLAPSTAGGEGCDNMTMIVVQFKRPAQSSAPAEEQSSSSNGQAEPETKLERSES

SEQ ID NO: 46313 - protein, 330 aa, Glycine max
  Clone ID: 701213070_FLI.pep
QLISTTQKEREREREREREREREMGRSPCCSKEGLNRGAWTAHEDKILREYIRVHGEGRWRNLPKRAGLKRCGKSCRLRWLNYLRPDIKRGNISPDEEELIIRLHKLLGNRWSLIAGRLPGRTDNEIKNYWNTNLGKKVKDGHQTTTGNNTQNPMPNPSPSLSPPKLDSHVVRTKATKCSKLLFLNPPPHPSMQNKFKTEAEEEEEEARLVNGVIRNQMEHTTYDNGFLSFPDEEKELSTDLLIDFNVGDFCLSDFLNSDFSNSYNFSCNINNVNNHEQLSPCSDQPDPMFSDEVLKDWTHSNFADEANASNNLRSFISFLESTEERLGE

SEQ ID NO: 46314 - protein, 291 aa, Glycine max
  Clone ID: 701141706_FLI.pep
TPSHMSQQVLRPLRQWPWFHHHHHRTCVTLSLHHLLTPPPKTSHRFSFATVAASSRPKVRTPKSPVPPPPTADSDLEEKKSRNQLKREARRTVKWGMDLASFSPPQIKRILRVASSDHLLLFEALMLVKRLGPDVREGRRRQFSYIGKLLREVDPELMERLIKATKDSNQKELQALTGLGPDDPEPEDDDDLVESESEEDEEESNWHDNQVARWFDGLISKDIEITNEIYSVQGVEFDRQELRKLVRRVHNTQEMKADNEEEKKKIETATNGAKKALNRFLRGLSKRIPNE

SEQ ID NO: 46315 - protein, 211 aa, Glycine max
  Clone ID: 701147143_FLI.pep
RNQRVSLLLKKRFTTPNWVKHKEPREVHMLVDLFLQELEIIVNEVKQILPQGRRKHHRTDSNGSSASSRSNPLREEKLVRSNTQRARSQLLETHLAKLFKQKVEIFTKVEYTQESVVTTLVKLGLKSFQEFVRLQTFNRSGFQQIQLDIQFVRIPLREIVEDEAAIDFLLDEVIVATAERCLDPIPLEPPILDKLIRAKLAKTEEQNTISS

SEQ ID NO: 46316 - protein, 183 aa, Glycine max
  Clone ID: 701203871_FLI.pep
QIPVLKMTAKWYLIVCVVAIWAVDLGSSSHHARAPAPAPSVECSNLVLTLSDCLTFVSNGSTVTKPQGTCCSSLKTVLNTAPKCLCEAFNSSAQLGLAINVTKAVTLPAACKLSTPSAANCGLSATPAAAPGPSPTSATATIGTPGGAPSSTPGNAASALIPISAGSSIVCLLVALSLISLSE

SEQ ID NO: 46317 - protein, 190 aa, Glycine max
  Clone ID: 701211702_FLI.pep
TMASSSSESAVSERRGIPGAQFVEDVQTYLTQSGLDVGSALAFLQERLQQYKVVEMKLLAQQRDLQAKIPDIEKCLDVVATLKAKKGTGEELIADFEVSEGIYSRARIEETNSVCLWLGANVMLEYSLEEATGLLQKNLDNARASLEVLIADLQFLRDQVTITQVTIARVYNWDVHQRRVQHAVATTAQD

SEQ ID NO: 46318 - protein, 273 aa, Glycine max
  Clone ID: 701138005_FLI.pep
LLDLHVLGLSPPSAMHKLGRGHRDKLQQFITITGASEKLALQALKASDWHLEGAFDFFYSQPQLKTFTDSRHLEELYNRYKDAYVDMILADGITLLCNDIQVDPQDIVMLVLSWHMKAGTMCEFSKKEFIEGLQSLGIDSLEKFREKIPYMRSELKDEQKFREIYNFAFGWAKEKGQKSLALDTAIGMWQLLFAEKQWPLVDHWCQFLQARHNKAISRDTWSQLLEFAKTVGSNLSDYDAEGAWPYLIDEFVEYLNENGIIQNDLINDSSLKR

SEQ ID NO: 46319 - protein, 154 aa, Zea mays
  Clone ID: LIB3591-083-E4_FLI.pep
GHVYRAHVRPRHVIEAVVHPVHHGGLVIPPPLARAEERRGVGDVPDLPLDGSELEREAERGREVGEAAASGLEDVERRAEPGDPERPRLARAGREDVEEPRPLQALHDVQVDHVEAVLAVERLQDGLVGREVRELDERRQRVVRLERHRHAAAL

SEQ ID NO: 46320 - protein, 691 aa, Glycine max
  Clone ID: 701001442_FLI.pep
LLISKLTSVVGGRAMPRSSSAMHHHRQSSDNFMFDAHGRWLHSSAYAQELGTRSSSLRRNDDDRVLTSGLLDLHSFDTELLPEGQSFDGYESILSGNKLVPRSRGLPESHLLKSVSADKERANNVAKIKVVVRKRPLNKKEIAKKEEDIIYIDSNFLTVHERKLKVDLTEYIEKHEFVFDAVLNEDVSNDEVYAETVEPIVPLIFQRTKATCFAYGQTGSGKTYTMQPLPLKASHDILRLMHHTYRNQGFQLFVSFFEIYGGKLFDLLNERKKLCMREDGKQQVCIVGLQEYRVSKVETIKEFIERGNSTRSTGTTGANEESSRSHAILQLCIKRSADGTESKPTRLVGKLSFIDLAGSERGADTTDNDKQTRIEGAEINKSLLALKECIRALDNDQGHIPFRGSKLTEVLRDSFVGDSRTVMISCISPSSGSCEHTLNTLRYADRVKSLSKGNTSRRDPLSSSNLRDSTVLPGSSVLSHDDTLEDETTYVSSDKNRFGWPKQLEREPSPPNNVDRVPSGRMGGNLIPSVYSDPQNGQRGSQKARTANEYDYLGPTYEQDRTRKTSKRVDNNQLSAVGDKRKIESRVKLVDELHFEANHSDPDDNLNALLKEEEDLVTAHRRQVEETIDIVREEMNLLVGADQPGNQLDDYISKLNTILSLKAAGIFQLQTQLAQFQRRLNEYNVVVTSGN

SEQ ID NO: 46321 - protein, 136 aa, Glycine max
  Clone ID: 701007186_FLI.pep
IANCAVGSPVSANKPEGRENHTKGATSGSSEPSDEDDEAGACEQSTNPADMKRLRRYLKDKALNLGCVWVNFSVRRRLTEVHKLVLAERNSINFTFLFFSPDILNYVMVLGRFLIATLPEGQEEENKRNCLTLSCR

SEQ ID NO: 46322 - protein, 341 aa, Glycine max
  Clone ID: 701011677_FLI.pep
MILSNNEDYGEELVADSYLLPAAALGQKSSNELKKYVFSSPNPTAKLGFGGTQLGVQPSPVVAAFSSRGPNVLTPKILKPDLIAPGVNILAGWTGAVGPTGLTEDTRHVEFNIISGTSMSCPHVTGLAALLKGTHPEWSPAAIRSALMTTAYRTYKNGQTIKDVATGLPATPFDYGAGHVDPVAAFDPGLVYDTSVDDYLSFFCALNYSSYQIKLVARRDFTCSKRNNYRVEDLNYPSFAVPFNTAYGVKGGSRKPATVQYTRTLTNVGAPATYKVSVSQSPSVKIMVQPQTLSFGGLNEKKNYTVTFTSSSKPSGTNSFAYLEWSDGKHKVTSPIAFSWT

SEQ ID NO: 46323 - protein, 360 aa, Glycine max; identical to SEQ ID NO: 43048
  Clone ID: 701058910_FLI.pep

SEQ ID NO: 46324 - protein, 366 aa, Glycine max; identical to SEQ ID NO: 37097
  Clone ID: 701063184_FLI.pep

SEQ ID NO: 46325 - protein, 232 aa, Glycine max
  Clone ID: 701045582_FLI.pep
KILGFRGEKGRKGGYCFTQTQQCLLHLAMVSLSTWFRYIAHKLEYSFSLSWKNYKGGQITDREVRDVVWKNFFQGKLTYLHWNKGEEMAPTIDGKAVTLVRKLPVVDPTRVFVGDVVVVKDPEKPDNYLLRRLTAVEGYEMVSTDEKDEAFVLEKDQCWVVAENEKLKAKEAKDSRTFGPVQMTDIVGRVIYCLRSAVDHGRVQNSYFGMRKDTPVLEVELDVDEMAKSHKA

SEQ ID NO: 46326 - protein, 336 aa, Glycine max
  Clone ID: 701056422_FLI.pep
QKPLVRSKTLKPESIRYFCFVAMLEIKTAKTRKGKRELEKRAPKLVESGKKTLILHGTKTSGVLNAVLAQIYHLKKDCAVKYSRRNENVKPFEAGGETSLEFFSLKTDCSIFVYGSHSKKRPDNLVIGRTYDHHIYDLVEVGVENFKPMESFSYDKKLAPKEGSKPFIVFIGEGFEAVEELKHLKEVLLDLLRGEVVENLNLAGVDRAYVCAALSPNRVFFTHCALRLKKSGTVVPRMELEEVGPSMDFVLRRHRPPNESLRKEALKTSREKPKKKEKNVKKDELQGKIGSIYIPDQKVGETPLPYKAKGVKRERRESKRKNESDGSASKRKKEDS

SEQ ID NO: 46327 - protein, 297 aa, Glycine max; identical to SEQ ID NO: 44233
  Clone ID: 700975194_FLI.pep

SEQ ID NO: 46328 - protein, 270 aa, Glycine max; identical to SEQ ID NO: 44080
  Clone ID: 700840868_FLI.pep

SEQ ID NO: 46329 - protein, 361 aa, Glycine max
  Clone ID: 700832032_FLI.pep
SEREGGIMGDQVEGTVQNVLEQETLKWVFVGGKGGVGKTTCSSILSILLATVRSSVLIISTDPAHNLSDAFQQRFTKTPTLVNGFSNLYAMEVDPTVEHEDMGGADGMDTLFSELAGAIPGIDEAMSFAEMLKLVQTMDYSVIVFDTAPTGHTLRLLQFPSVLEKGLAKVMSLKNKFGGLFNQMTRMFGMGDDFGDDQILGRLEGMKDVIEQVNKQFKDPDMTTFVCVCIPEFLSLYETERLVQELTKFEIDTHNIIINQVIFDDEDVESKLLKARMKMQQKYLDQFYMLYDDFNITKLPLLPEEVTGIEALKAFSRHFTSPYQGLCGKGDPVERLERKVSALQRQLHEAEEELERLKRGN

SEQ ID NO: 46330 - protein, 157 aa, Glycine max
  Clone ID: 701060690_FLI.pep
HQKMSLIPSIFGGPRSNVFDPFSLDMWDPFKDFHVPTSSVSAENSAFVNTRVDWKETQEAHVLKADIPGLKKEEVKVQIEDDRVLQISGERNVEKEDKNDTWHRVERSSGKFMRRFRLPENAKVEQVKACMENGVLTVTIPKEEVKKSDVKPIEISG

SEQ ID NO: 46331 - protein, 527 aa, Zea mays
  Clone ID: 700049526_FLI.pep
RRQRASLLSHASRQGRERDRRSPSRRRWCGCPPSSSEICLVTDLSDKMVKICCIGAGYVGGPTMAVIALKCPDIEVVVVDISKPRIEAWNSDTLPIYEPGLDDVVKQCRGRNLFFSTDVEKHVAEADIIFVSVNTPTKTRGLGAGKAADLTYWESAARMIADVSKSDKIVVEKSTVPVKTAEAIEKILTHNSKGINYQILSNPEFLAEGTAIEDLFKPDRVLIGGRETPEGRKAVQALKDVYAHWVPEDRILTTNLWSAELSKLAANAFLAQRISSVNAISALCEATGANVTEVAYAVGKDTRIGPKFLNASVGFGGSCFQKDILNLVYICECNGLPEVANYWKQVIKINDYQKSRFVNRVVSSMFNTVAGKKIAVLGFAFKKDTGDTRETPAIDVCKGLLGDKAQISIYDPQVTEDQIQRDLAMNKFDWDHPMHLQPTSPTAVKQVSCVWDAYEATKGAHGLCILTEWDEFKTLDYQKIFDNMQKPAFVFDGRNIVDSEKLREIGFIVYSIGKPLDAWLKDMPAVA

SEQ ID NO: 46332 - protein, 346 aa, Zea mays
  Clone ID: 700042486_FLI.pep
NESLELRVPDPLDLDILGRLSPEVGVRRLHALEYANDLAGVRVALGDAQRDVARGRGGVLDVLLLELLLVASASGGERDGVVVSGGAAAALGVEEGGAAVAGHEEGPAEAVRLAGGDELLDGEEEGHALAARELHGDGGVVDAVLLLELEGAVGGDLERALDLVQRVGEAGHELGLLELGRRVLGDALRLDGEGRRLQAQLLHLVLAGLERERVHAAVDGRALVRRARALHLQVRLALDLVVGQPLGRALRARARDEERRGGEREAGELGGVDALAGDVPDVGLEGARDPGGAGVDAERPGELRRRAGRRQRGGRRPAADLGRLHQGGRGLDLERGCHRGRRGRCC

SEQ ID NO: 46333 - protein, 369 aa, Zea mays
  Clone ID: 700149718_FLI.pep
QQSQRKVVLMSTVTLPTLSRCLVELEGLHHLPGEVGVVTAEVAVGGGLDEPVAALLQVEVDADHPGPEVEVLLHDLEDLLVGDRAGAVRVDEHGQGLRHADGVRHLHEAAAGEAAGHDALGGLPGHVGAAAVHLGGVLAGEGATAVGSPAAVRVDDDLAAGEAGVTVGPADDEAPGRVEVEDGLLVEVLLRDHGLDDVLLEVGGDLVVGDGLVVLGGDEHGVHADGHHGAALVHVLHRHLGLAVGPQPGAGAVLAHLGEARAQLGGQHVAQRHQLGGLVGGVPEHVALVARADLLGPLREVPVHALRDVGGLLLDVHQHLAAVGVEAHVVGGEPDLAAGVAHDLLVVHGRLGRDLAEHHHHVGLGAGLA

SEQ ID NO: 46334 - protein, 276 aa, Zea mays
  Clone ID: 700150246_FLI.pep
ASLKNAPHRPLDSAPLPEVHFNVHKPAHPMITLISSMLLSVVLVSSGSSPEQGLHLSSDFESFTEDQEMLIMAENSFDYVEGFVIINRTGVLNNWRASFKPQDPVEASHFQSDGRVLYCLELTKNFNSDDTDTMEQVNLEFLDRVHTSELKLRAQGLWEVPHPWLNLLIPRSSIRRFAKEVFGKILVGFLSSAPSLSGYGSIAHSMNLNKQIVEFCEEAGIGMKQYLAPYTTQQQWKAHFGARWETFERRKHRYDPLAILAPGQRIFPKASLPLPL

SEQ ID NO: 46335 - protein, 87 aa, Zea mays
  Clone ID: 700152967_FLI.pep
GLQHTWICELKVRRLTWKKLWQHQFRMDNNQNLLQKLFLMCYRAPVCSYAIWSSYRLQEKLRNDSFCKGSTTLGSTRGRATRKRWTS

SEQ ID NO: 46336 - protein, 352 aa, Zea mays
  Clone ID: 700097461_FLI.pep
QRFSQPRLHHTRSRREAMATTAPLLSPQRACPTHLRRRLSPLHLVFPLDASARRLRLRRAPPPCSAKFGKFDASDAPAEAEEAGGATDGGLAQPVEEDDSCLPSDLEGAIRQSGKASADFVNSGGMRAIAELLIPQLEFLNEEGAQAELWALSKIFLDTLVQETGQKVTAIFPDAGAAALLKHQWKDAQFKCASLGDRKPVGPEDEVAVMIIPDHQMLEAVERITSQLSDDPIRPLVMWNPRLVSGDVGVGFNVRNLRRNFLSTFTTVYSMRPLPTGAVFRCFPGQWKVFYDDPNRPNRYLLARELTSRPDATDIERIFGGADEQSEEAPSLMNNVMGVFSSVSRFMRVISK

SEQ ID NO: 46337 - protein, 279 aa, Zea mays; identical to SEQ ID NO: 39398
  Clone ID: 700097856_FLI.pep

SEQ ID NO: 46338 - protein, 360 aa, Zea mays
  Clone ID: 700102202_FLI.pep
PSFAVQFTLHRRAATMDTQARPVPPRVKLGIQGFEVSKLGFGCMGLTGAYNSPLDDEAGIAVIAHAFSRGVTLFDTSDVYGPLTNEILLGKALKQLPREQVQVATKFGIRHDESGTRTVCGRPEYVRACCEASLRRLGIDCIDLYYQHRIDTTTPIEETIGELKKLVEEGKVKYIGLSEASPDTIRRAHAVHPITAVQMEWSLWSRDIEPEIVPLCRELGIGIVPYSPLGRGFFGGRGVKEQVSAESNLHGIPRFAPENLEKNKQIYLRMEELANKHQCSPAQLALAWVLHQGDDVVPIPGTTKIKNLDSNIDSLKVKLTDEDLKEMGSQIREEDVAGGRQFTSFAHTTWKYADTPKKQS

SEQ ID NO: 46339 - protein, 153 aa, Zea mays
  Clone ID: 700106144_FLI.pep
ATVRRFEEGREVRRGGRLLLGRYVTSTPTETNTPFSSGNPHRAFCFSHPADLVAAASSSLAWHLAGKLSVEVGKTSDVKAVCLSHPYSVTADDMKGAVQCSVLLLFFYAASLASPHVFVRNRNRGEMADRDPGGPERHDHAAERSVPVRACAA

SEQ ID NO: 46340 - protein, 458 aa, Zea mays
  Clone ID: 700084322_FLI.pep
FEALGWHTIWVKNGNTGYDDIRAAIKEAKAVTDKPTLIKVTTTIGFGSPNKANSYSVHGSALGAKEVEATRQNLGWPYDTFFVPEDVKSHWSRHTPEGAALEADWNAKFAEYEKKYADDAATLKSIITGELPTGWVDALPKYTPESPGDATRNLSQQCLNALANVVPGLIGGSADLASSNMTLLKMFGDFQKDTAEERNVRFGVREHGMGAICNGIALHSPGFVPYCATFFVFTDYMRGAMRISALSEAGVIYVMTHDSIGLGEDGPTHQPIEHLVSFRAMPNILMLRPADGNETAGAYKVAVLNRKRPSILALSRQKLPHLPGTSIEGVEKGGYTISDNSTGNKPDIIVMGTGSELEIAAKAADELRKEGKTVRVVSFVSWELFDEQSDEYKESVLPAAVTARISIEAGSTLGWQKYVGAQGKAIGIDKFGASAPAGTIYKEYGITVESIIAAAKSF

SEQ ID NO: 46341 - protein, 386 aa, Zea mays
  Clone ID: 700084694_FLI.pep
SEKDARGELLCAGENFAHSGGELLEFPLDGCSAGGGFPVNDHHVSGQSVSPQKKRRKTDNGDDGEACKRCSCKKSKCLKLYCECFAAGVYCSEPCSCQGCMNKPIHEETVLSTRKQIEFRNPLAFAPKVIRMSDAGLETGEDPNNTPASARHKRGCNCKKSSCLKKYCECYQGGVGCSSNCRCESCKNAFGRRDAETELPEEMKQEESDQTENPQQEKENDQQKANVQGEDHPLLDLVPITPPFDFCSSLLKLPNFSSAKPPRPTKARSVTSRSSASKATAAVQPCRSSKLAASASASGIDEETPDILHEPDSLSNCVKTTTSPNGKRVSPPHNALGSSPNRKGGRKLILKSIPLFPSLTGDTNSGSAMNSTDSAFCASPLTLGPS

SEQ ID NO: 46342 - protein, 377 aa, Zea mays
  Clone ID: 700089457_FLI.pep
QARNPPMAHRVLLLLSLASAAAVAAAVDAEDPLIRQVVPGGDDNDLELNAESHFLSFVQRFGKSYKDADEHAYRLSVFKANLRRARRHQLLDPSAEHGVTKFSDLTPAEFRRTYLGLRKSRRALLRELGESAHEAPVLPTDGLPDDFDWRDHGAVGPVKNQGSCGSCWSFSASGALEGAHYLATGKLEVLSEQQFVDCDHECDSSEPDSCDSGCNGGLMTTAFSYLQKAGGLESEKDYPYTGSDGKCKFDKSKIVASVQNFSVVSVDEAQISANLIKHGPLAIGINAAYMQTYIGGVSCPYICGRHLDHGVLLVGYGASGFAPIRLKDKPYWIIKNSWGENWGENGYYKICRGSNVRNKCGVDSMVSTVSAVHASKE

SEQ ID NO: 46343 - protein, 112 aa, Zea mays
  Clone ID: 700163873_FLI.pep
PLFAFNLHSLASFLSSDAGASSFSAFSSLLGSATVNFCAKSEAAVETSSFSFSSLFPCCSAISSTVSLNFLQFSTDPKRIANISSLSSPSAKSSACHTHDLSLPACSCILVV

SEQ ID NO: 46344 - protein, 235 aa, Zea mays
  Clone ID: 700044891_FLI.pep
ARSMPTSGALDRVAEKLNVPFFEVPTGWKFFGNLMDAGKLSICGEESFGTGSDHIREKDGIWAVLAWLSILAHRNKDKKVGERLVSVEDIAMEHWKTYGRNFFSRYDYEACESNSANQMMDHLRDVIANSKPGEKYGDYTLQFADDFSYTDPVDGSTVSKQGLRFVFTDGSRIIFRLSGTGSAGATIRLYIEQFESDISKHSLDAQTALKPLIDLALSVSKLKDFTGREKPTVIT

SEQ ID NO: 46345 - protein, 122 aa, Zea mays
  Clone ID: 700074211_FLI.pep
NKPNSFTTCEAHATPTAIMHSCPAEESLVGPRGHCPAIPRHLRVKGQRPILPRCSGKTLHQSLPSTAGISTAFSLAAALYASAMSVSGSGMPNSLPISSSVRPRVSGRHVKKKTHPTAAMPE

SEQ ID NO: 46346 - protein, 277 aa, Zea mays
  Clone ID: 700074808_FLI.pep
KLSTLNEDEPMSDDNLRESMDIDSSLSDTANGRRWRSQHEQLQHWQMNRRKLAFSTVGTPDYIAPEVLLKKGYGMECDWWSLGAIMYEMLVGYPPFYADDPITTCRKIVHWRNHLKFPEDAKLSNEARDLISRLLCDVDHRIGSAGADQIKAHPWFRGVAWDKLYEMEAAFKPQVNDELDTQNFMKFEELENPPAKTGSGPSRKTMLNSKDLSFVGYTYKNFDAVKAIKISDLQRNSSLTRPSIGSIFGPPGMDSPMEPNGRGTHMHTVSSGDPMIP

SEQ ID NO: 46347 - protein, 360 aa, Zea mays
  Clone ID: 700151216_FLI.pep
ISHHFLASPSYSTHYSILSGSKQADMAAATAPKTMPSSVFAAALLLLAAAACQASPYYPLELGYYRYTCPQAEAIVKASMEKAIAQNPGNGAAVIRMLFHDCFVEGCDASVLLDPTPFSPTPEKLAAPNNPSLRGFELIDAIKDALEAACPGVVSCADIIAFAARDASCFLSQGKVSFDMPSGRLDGTFSNASESVKFLVPPTSNLSDLASSFAVKGMSLEDLVVLSGAHTVGRSHCSSFVSDRLDVPSDINPALAAFLRTRCPANTTTSDDPTVMQDVVTPNAMDNQYYKNVLSHTVLFTSDAALLTSPETAKLVLDNAKIPGWWEDKFEKAMVKMASLEVKTGHQGQVRKNCRAINHY

SEQ ID NO: 46348 - protein, 303 aa, Zea mays
  Clone ID: 700151333_FLI.pep
EKAAVPSSNRASGGGNGNTKLEDGYNWRKYGQKQVKGSENPRSYYKCTYHSCSMKKKVERALADGRITQIVYKGAHNHPKPLSTRRNSSGGGAAAEELQAGNSSLSAAAAAGCTGPEHSGATAENSSVTFGDDEAENGSQRSDGDEPDAKRWKQEDGENEGSSAGAGGKPVREPRLVVQTLSDIDILDDGFRWRKYGQKVVKGNPNPRSYYKCTTAGCPVRKHVERASHDTRAVITTYEGKHNHDVPVGRGAASRAAAAAAAGSGALMATGGGQLGYQQQQQQQPYTLEMLSSGSYGGGGGGY

SEQ ID NO: 46349 - protein, 569 aa, Zea mays
  Clone ID: 700151354_FLI.pep
AGVVVEDHYGEDSATEELPILPWAFSVASGYTLLRDPHHNKGLAFMEKERDAHHLRGLLPPAVVPQELQIKKIMHNLRQYQVPLQRYMAMMDLQERNERLFYKLLIDNVEELLPVVYTPTVGEACQKYGSIFRQPQGLYVSLRDKGKVLEVLRNWPHRNIQVICVTDGERILGLGDLGSQGMGIPVGKLALYTALGGVRPSACLPITIDVGTNNEKLLNDEFYIGLRQKRATGEEYHELMEEFMAAVKQIYGEKVLIQFEDFANHNAFNLLAKYSKSHLVFNDDIQGTASVVLAGLLAALKVVGRTLAEHTYLFLGAGEAGTGIAELIALEISKQTSAPIEECRKKIWLVDSKGLIVDSRKNSVQSFKKPWAHEHEPLTTLYDAVQSIKPTVLIGTSGVGRTFTKEVVEAMASFNERPIIFSLSNPTSHSECTAEEAYNWTQGRVIFASGSPFGPVEYDGKVFVPGQSNNAYIFPGFGLGLVISGAIRVHEDMLLAASEALAAQATQENFDKGSIFPPFTNIRKISARIAAAVAAKAYELGLATRLPPPRDLVKYAQSCMYTPVYRNYR

SEQ ID NO: 46350 - protein, 221 aa, Zea mays
  Clone ID: 700151520_FLI.pep
ASMATAYEKKWPLYLSTKNTILKKYDGRFKDIFQEVYEAGWKTKFEAAGIWYEHRLIDDMVAYALKSEGGYVWACKNYDGDVQSDFLAQGFGSLGLMTSVLVCPDGKTIEAEAAHGTVTRHYRVHQKGGETSTNSIASIFAWTRGLAHRAKLDDNARLLDFTQKLEAACVGAVESGKMTKDLALLVHGSSNITRSHYLNTEEFIDAVADELRSRLAANSNL

SEQ ID NO: 46351 - protein, 363 aa, Zea mays; identical to SEQ ID NO: 42242
  Clone ID: 700155029_FLI.pep

SEQ ID NO: 46352 - protein, 62 aa, Zea mays
  Clone ID: 700155165_FLI.pep
RIRYRTAADKLNTKRQPCPKPAWIQRPGAPFIFLPPYRGSSPMAFGRRPSLLLVYAENKCER

SEQ ID NO: 46353 - protein, 136 aa, Zea mays
  Clone ID: 700155173_FLI.pep
QRNEWNHNHLALFAFNLYPLASFLWSDAGASSSSASPSLLASVTVNFCTKSAAAMETSSFSFTSVFPCSSAISSTVSLNFLQFSTDPKRIANISSLSSPSAKSSACHTHDLSLPACSCILVVATTRWLAQILSVFA

SEQ ID NO: 46354 - protein, 320 aa, Zea mays
  Clone ID: 700155517_FLI.pep
QTFTSFSYGTGVFAPGRCSPGLDCAYPTGNSLVEPYTAGHNILLAHAEAVDLYNKHYKRDDTRIGLAFDVMGRVPYGTSFLDKQAEERSWDINLGWFLEPVVRGDYPFSMRSLARERLPFFKDEQKEKLAGSYNMLGLNYYTSRFSKNIDISPNYSPVLNTDDAYASQEVNGPDGKPIGPPMGNPWIYMYPEGLKDLLMIMKNKYGNPPIYITENGIGDVDTKETPLPMEDALNDYKRLDYIQRHIATLKESIDLGSNVQGYFAWSLLDNFEWFAGFTERYGIVYVDRNNNCTRYMKESAKWLKQFNAAKKPSKKILTPA

SEQ ID NO: 46355 - protein, 372 aa, Zea mays
  Clone ID: 700155657_FLI.pep
LLKQRAATNARRLAKADSFFRLREGKKRKKWQGKRHDTPSAPSRSSIDQVCGRRRASLAGGLSLHGQRHGARHGAVLERVQHLQVPPGLAPLQVGHVLPEPVHAGEGHQPLRVELPGVLLLDTLEPALGDLAPVARVRLALVEEVHEQGRRLVALVRVDVVARHAVHDDLGRTAVGCGKRGQAAGHGLNHRQPESLVESRLHEGALGVADVAVQLAVADAVHLGGDPADVPVQVVLLDEVKHLLELGLLLLVLGRVAMVAADDHEVHQLLQPLVPAVQLHQPSQVLHTVETSHGEDDWLVPVVQNELVLRVLGLAVQELLNLRVKGGQPLVRLGVREVDGQVRARRHDVELGVEHINAVDNAVQARHCERHV

SEQ ID NO: 46356 - protein, 184 aa, Zea mays
  Clone ID: 700155821_FLI.pep
ERKRRRATNPSPRPSPSPRTMAMAASSSRLLWASRAAAYLRISTFPRAFSTVMKDLKYADSHEWVKVEGDSTTVGISDHAQRALGELVVVELPEVGISVSQGKTFGAVESVKAASDIYSPVSGEVVEVNEKLCDLPGLVNTSPYEKGWIMKVKLSNSGELNSLMDDDTYSKVCEDSKVGEDDNH

SEQ ID NO: 46357 - protein, 240 aa, Zea mays
  Clone ID: 700156236_FLI.pep
VYPTESSICFDSHASDVAYVSASRSVIASAGYSSNGSNVVIWDTLSPPATSQTSIMCHEGGARSISVFDSDRGYGSISPLVVTGGKNGDIALHDCRFLSTGKSKHHRVTTEHGVEASSMHDIKSSTFGGTDSGMVWHIPKAHLGSVTKVTTIPNTSLFLTGSKDGDVKLWDAKNSQLVFHWTKMHERHTFFQPTSRGFGGVVRAAVTDLQVLPNGFVSCGGDGSVKLVQIKDDLAAAYQR

SEQ ID NO: 46358 - protein, 350 aa, Zea mays
  Clone ID: 700098569_FLI.pep
GLNKINTSLLLQAAGWPCMNHDRCNASGSFTTRMHLAFHSKQLAAAAAAAGMLMHHVLVELEAGEHVVVDGVGEVVEQVLERADAGDEPLDEVTEDGEHGEPAVLDLLELELIHLLLGLAEAERVEEGPAGVGRVAGAGEELLEAEEVLLAHGARVVPVLEAAVLGEAHERHVEDEERVGVGPVVVGARGRDDARLEPRQRGLRGDDAHLAEDLRGDGAHRAQHGVAAVDHLAIGQPLGLDEAPGALRVREAQRVEAIVAGQRAIEVGEGLLGREPQLPVGTLLGWRAGAGPDDEGRLPRRRPRDGRLHGAAQQLPAGEESLGRHRSGTGASSNLSFRQRTCLRSRSCRW

SEQ ID NO: 46359 - protein, 572 aa, Zea mays
  Clone ID: 700098889_FLI.pep
SNVPSSVISSQSMHLGVLATAWHAINTKSMFTVYYKPRTSPSEFIIPYDQYMESVKNNYSIGMRFRMRFEGEEAPEQRFTGTIVGCENLDPLWPDSSWRYLKVRWDEPSTIPRPDRVSPWKIEPASSPPVNPLVHSSRAKRPRQNVPPPSLESSVLTKEGATKVEIDSAQTQHQNSVLQGQEQMTLRNNLTESADSDSTVQKPMMWSPSLNGKAHTHFQQRPAMDNWMPLGRRENDFKDTRSAFKDARTASQSFGDTQGFFVQAYDDNHHRLSFKNQGSTHRFADPYFYMPQQSSVTVESSTRTQTANNDLCFWGDQNAMYGNPSDQQQGFNFGQNPSSWLNQPFPQVEQPRVVRPHATVAPFDLEKTREGSGFKIFGFQVDTTSPSPVQLSSPLPAIQEHVLQTRPSAPVNELQPVQIECLPEGSVSTAGTATENIQQAPQSSKDIQSKSQGASTRSCTKVHKQGVALGRSVDLSKFTDYGELQAELDKMFDFEGELVSGSQNWQIVYTDDEGDMMLVGDDPWEEFCSIVRKIYIYTKEEVQKMNSKSAAPRKEESPAAGGGGGCAAATNE

SEQ ID NO: 46360 - protein, 372 aa, Zea mays; identical to SEQ ID NO: 46355
  Clone ID: 700101003_FLI.pep

SEQ ID NO: 46361 - protein, 353 aa, Zea mays
  Clone ID: 700101161_FLI.pep
RLICSSLWKRGYGEEYINRYKMMTRFHHQRVPLVILVCGTACTGKSTIATQLAQRLNLPNVLQTDMVYELLRTSTDAPLTSVPVWARDFNSPEELITEFCRECRVVRKGLAGDLKKAMKDGKPIIIEGIHLDPSIYLMDEEKSDGNSRTEKTVTDSENPGISVERKVEHQFKNGLAENRMDSTEDNKNFVKSKKSTLEKGRTSEGLSYAQNHETKVHDSARSQEKNPKDESDGHKDLDQQKNNATKKDKPAAEPIIVPIVLRMSDFDHKALLEEWIATRAFRDNCIPQDHRKLINNLKLIQDYLCSFESQGLTIVDISANSFPQTLDWLHSYLLQCIERGLLAACLESCNQGQ

SEQ ID NO: 46362 - protein, 159 aa, Zea mays
  Clone ID: 700101356_FLI.pep
EPKKKTLRRLTDHHHRLRSRAATAMAAAAPHAYSSLVPVSAARPLSGSTVSFGASCHKWRKVPAWRLHCVAEDEEEVKDFGVNMALSMLKFYKREISPLLPSSCRYVPTCSEYSMQAYKRYGVVKGSILTAWRLCRCNPLGGYGYDPPKWFGEEDVPLQ

SEQ ID NO: 46363 - protein, 283 aa, Zea mays
  Clone ID: 700101367_FLI.pep
ERALQEDIPQTPDDFEKLVRSSPNSSFIWIKYMATLLDLADVEKARAVAERALKTIIPREEEEKLNVWVAYFNLENEYGSPREDAVKKVFQRALQYCDPKKLHLALLAMYERTEQYELADELLDRMTKRFKTSCKIWLCRIQFALKQGKDVEYIKAIVNRALLSLPHRKRIKFLSQTAILEFKCGVPEEGRSRFELILREYPKRTDLWSVYLDQEIRLGDVEVIRALFERVTCLTLPPKKMQFLFKKYLNFEKSLGKDNERIQLVQQKAIEYVQSSLPSQDNS

SEQ ID NO: 46364 - protein, 362 aa, Zea mays
  Clone ID: 700101622_FLI.pep
KLFFLRSRRQAYMHSDERLFYKLLIDNVVELLPFVYTPTVGEACQKYGSIFGRPQGLYVSLKDKGKVLEVLRNWPHRNIQVICVTDGERILGLGDLGCQGMGIPVGKLALYTALGGVDPSVCLPITIDVGTNNEKLLNDEFYIGLRQKRATGEEYDELIEEFMSAVKQFYGEKVLIQFEDFANHNAFDLLEKYSKSHLVFNDDIQGTASVVLAGLLAALKMVGGTLAEQTYLFLGAGEAGTGIAELIALEISKQTNAPIEECRKKVWLVDSKGLIVDSRKGSLQPFKKPWAHEHEPLKTLYDAVQSIKPTVLIGTSGVGRTFTKEIIEAMSSFNERPIIFSLSNPTSHSECTAEHAYMIYML

SEQ ID NO: 46365 - protein, 182 aa, Zea mays
  Clone ID: 700103093_FLI.pep
VGLRARQERALRREVARHDPDHRHLRLRGAGVRRHRAPVREERRVRLRRGAAGAADGDARARPEPPQPPAQPGGVGAALPLRRRQQAQDPHGPADRRPVPHQGRAPGRKARRQVPHGRPQEPPLHGRRRRRARGHRGPSAAGRRGAPGPAAAAWSAPVCRRTMILHAVPLLMQCSMVVNCLA

SEQ ID NO: 46366 - protein, 241 aa, Zea mays
  Clone ID: 700103104_FLI.pep
FDDRRVPYNIMSGTSMSCPHVAGIVGLLKTKYPAWSPAMIKSAIMTTATTTANDGNPIQDETGAVATPFGYGSGHVDPVKALDPGLVYDTTLLDYTNFLCSLKPTQNPLPSLPVDLLPLLVLGNLSQPLVGLLLPLFDAAGEPCKCSQGPYGRPEDLNYPSIAVPCLSGSATVKRRLKNVGAPGKYRAKVTEPAGIKVTVVPSELYFGVGEEKEFTVKMDVDVNAPAANDDYVFGSVVWSD

SEQ ID NO: 46367 - protein, 182 aa, Zea mays
  Clone ID: 700103584_FLI.pep
LPPQPVWPLRHRRTSRRRWPHWPEDHRPGLLRHRRARAPVGVRGHVRHRRDPRQGDPEDREGELRLQARHDHHQPRPQERRQRALPQDGGLRALWEGRPRLHLGGGEAPQGGEAVFCMRRLLCFGRSFWSGLVWSGVPALYHAFLWLLLVILDLPLAYHLYCTVTVLISGTCAGSYCVCLFT

SEQ ID NO: 46368 - protein, 174 aa, Zea mays
  Clone ID: 700082144_FLI.pep
EALFNDGRVQTASRVMKSMIEKGVTENMDVAHKILEALFTRGHVEEAIGRVNLMVENGCMPDLDKLLVGLCDNGRVMEAQKLADFALDRDFDVSFSTYDRVLEALYAEEKTLPAYSMLCKIKNKGGVVSQKGCDDLMESLKSEGYSKQADILSRILAENAQSTPKRGRRVAMGA

SEQ ID NO: 46369 - protein, 393 aa, Zea mays
  Clone ID: 700083031_FLI.pep
PKKVLILMSDTGGGHRASAEAIKAAFTQEFGDDYQVFVTDLWTDHTPWPFNQLPRSYSFLVKHGPLWKMTYYGTAPRVVHQPHFAATSTFIAREVAKGLMKYQPDVIISVHPLMQHVPLRILRSKGLLDKIPFATVITDLSTCHPTWFHKLVTRCYCPSTEVEKRALKAGLKPAQIKVYGLPVRPSFVKPVRPKDELRRELGMDEDLPAVLLMGGGEGMGPIEATAKALGDSLYDENLGEPTGQILVICGRNKKLVNRLQSINWKVPVQVKGFVTKMEECMGACDCIITKAGPGTIAEAMIRGLPIILNDYIAGQEAGNVPYVVENGCGKFSKSPKQIAKIVADWFGPRSDEFRVMSQNALKLARPDAVFKIVHDLHELVREKCFVPQYACAT

SEQ ID NO: 46370 - protein, 175 aa, Zea mays
  Clone ID: 700083252_FLI.pep
DKIEPKVRSSDTTMQYKAVESRGNAGMEPVGSGTPSGSVNDMENEESGSKGKRPLGRDSTKASRKKAMSSSSQSTNYLSRIHDIQIARLKQSEEKSELKQQNIEFMKEVELKKLEFQSKKIEMQQTKLMMEDRIRKDEELNKMYAMDMDALPEELRAVYIARRKGLIDYFIKNPV

SEQ ID NO: 46371 - protein, 220 aa, Zea mays
  Clone ID: 700085950_FLI.pep
EPAFLCYAAIVVAAALVLIYFVVPHHGQTNIMVYIGVCSLLGSLTVMSVRALGIALKLTLSGTNQLFYPQTWAFALIVATCVSTQINYLNKALDTFNTAVVSPIYYVMFTSLTIIASVIMFKDWDHQNPTQIVTEMCGFMTILSGTFLLHKTKDMTDSPGQSLLTRRPKHASQNAFAIEVMPLKCQDYIDDETLTLSLPKVENGYLKEEYLLRYKDSSIV

SEQ ID NO: 46372 - protein, 106 aa, Zea mays
  Clone ID: 700087344_FLI.pep
APDTSPRSSHQLKLLGSTYHRTVLLWRHKRKKNCHGQSLFAGFMPMVKRPACLQIHLTLSPLLMCTSDNRIGEGSIQGPSPRRNNRLNRQFAEVKYLRNYPQFCSL

SEQ ID NO: 46373 - protein, 242 aa, Zea mays
  Clone ID: 700160414_FLI.pep
SSVINCNNNKKKKEKEIKMLSFCTPLQFYHPRRSPLPVMVARRRRPVRVAFQWHGAGALPPAPDLDQPVQLLELPHGRLLSEHPAARRRCPGGRLVDLHGDRAGSRRLGLVLPLLSGPGAGPARVPPVRRVPRRRGASGRDALELGDHAAERAARGRAVGQHDLAKLGRAEAGAGGVEPLLHLRVQLVVLEPQVVAGQRLEGLEVAERELDVHVQPARAHHRGVHGVLAPAHGEHHDTLLAA

SEQ ID NO: 46374 - protein, 233 aa, Zea mays
  Clone ID: 700166025_FLI.pep
QLRSERNPPPALVLPSLQSNRDPFSFSFFCSFSGEEAWRETATARWRRRRRRWRSWPPCSSSPPRSLRQISACAVRTSRRRCCRRRSTSRAARRAAPTARPSCRAAGATARTPPPRTAPGPPTPTTRTTRPGAPPATSAAQPPSPPPTRVSPGALSLPVPPAPVLGLEPGRRAAAPSAPARAPASTAPGTGWAAALLPAWDPRATPLTPPPPPRRACSPAPRPSASHSPSSPS

SEQ ID NO: 46375 - protein, 301 aa, Zea mays
  Clone ID: 700049541_FLI.pep
LLGYNMPSPIIVAPTGAHKLANPEGEVATARAAAACNTIMVLSFSSSCRIEEVASSCDAIRFYQLYVYKRRDVSATLVRRAESLGFRAIVLTVDTPVLGRREADIRNKMIAPPLSNLEGLMSLDDFDDAEGGSKLERFSRETLDPSLSWKDVEWLKSITSLPILLKGIVTAEDARKAVEAGAAGVIVSNHGARQLDYAPATISALEEVVKAVAGAVPVLVDGGVRRGTDVLKALALGAKAVMVGRPVFFGLAARGEAGARHVIEMLNKELELAMALCGCRSVAEVTRAHVQTEGDRIRALL

SEQ ID NO: 46376 - protein, 72 aa, Zea mays
  Clone ID: 700049964_FLI.pep
KYKCDARANASQREQYRGIVHLFIGMERSPCEITSMPFTFANDYKIIHRGLNSLFPFKSVPFHAVMPKLPRA

SEQ ID NO: 46377 - protein, 323 aa, Zea mays
  Clone ID: 700050453_FLI.pep
HLRRRGKMMTSWLLGRRGPSGFSWSSTADQVTQGISAAGLTAIVTGASSGIGAETARTLALRGAHVIMAVRSLPAAQAVKDAVLAQAPGAKLDVMELDLSSMASVRAFASQFIDRGLPLNILINNAGVMAIPFALSKDGIEMQFATNHVGHFLLTHLLLDTMKRTSHESNLEGRIVNVSSEGHRLAYREGIRFDKINDESVYSSIGAYGQSKLANILHANELARRFEEDNVNITANSLHPGSIITNLLRYHSILDVLHRTLGKLVLKNAEQGAATTCYLALHPHVKGVSGKYFCDCNLYEPSANAKDMELAKRLWDFGVELIT

SEQ ID NO: 46378 - protein, 182 aa, Zea mays
  Clone ID: 700043422_FLI.pep
CTNVLVELEAGEHVVVDGVGEVVEQVLERANAGDEPLDEVTEDGEHGEPAVLDLLELELIHLLLGLAEAERVEEGPAGVGRVAGAGEELLEAEEVLLAHGARVVPVLEAAVLGEAHERHVEDEERVGVGPVVVGARGRDDARLEPRQRGLRGDDAHLAEDLRGDGAHRAQHGVAAVDHLAVG

SEQ ID NO: 46379 - protein, 465 aa, Zea mays
  Clone ID: 700043627_FLI.pep
GEMSCLPCSGSSGKEDKSLAALSPSPRPAAKAAPVRSNSRASSSRKEDSVPVRRGGNAAHGPAQIFSFRELAVATKNFRRDCLLGEGGFGRVYKGHMENGQVIAVKQLDRNGFQGNREFLVEVLMLSLLHHPNLVRLIGYCADGDQRLLVYEYMLLGSLENRLFGPAGKEPLDWNTRMKIAAGAAKGLEYLHDKANPPVIYRDFKSSNILLGEDYYPKLSDFGLAKLGPVGDKTHVSTRVMGTYGYCAPEYAMTGQLTLKSDVYSFGVVFLELITGRKAIDHTQPSGEQNLVAWARPLFRDRRKFCQLADPLLHGGYPKRGLYQALAVAAMCLQEQAASRPLIGDVVTALSYLAAHPYDPNAPSTKDSKTCPSTPRAKTHRRTTSVPDAQHAAESLILNFPDMRKETVRGGEFEKDRTEGSGSSSSSGRNDCLDVPRLLSVPNGKVCGEGNNIQKSTVKVGAREN

SEQ ID NO: 46380 - protein, 180 aa, Zea mays
  Clone ID: 700073871_FLI.pep
DELALEVFCPVFGASQQPISKQQDSISSVTKIGLWGGQGGSAQDITAEQPPRRLHSITVRAGVAVDSIEFTYTDDAGQRRTAGRWGGLGGNVRTIDLGDAEDVREVSGTYGAFEGAITLTSLRLVTSSRTWGPWGIENGTRFSITAPNGSSIAGFYARAGTRLVDAIGVYIRPVVPGRPR

SEQ ID NO: 46381 - protein, 154 aa, Zea mays
  Clone ID: 700154847_FLI.pep
ISIFASSIAGFSGHGRRQRPEVQDGAREERREEQGRQRQPAGGQQEGHEHPGIFLLLLALCSCRDFGGFPRFAWVSGYSVWIRQIQPRRDSRTLIVNHGYASSFRVDLVVDPESPNQTLYCFIYVWATTVLLLHMQHLIHRYNYGLLGFFYKNY

SEQ ID NO: 46382 - protein, 306 aa, Zea mays
  Clone ID: 700098124_FLI.pep
SKNTFRPVDGRGGAMAGLRGPSERVEDGGVERVAQVGGPVVERPLAGGGGLHGEAEEGDHGEPRVLDLRQLQPLLLLRVGRQAERVEVGAAGVQPLLRVELGVALELDVADHEHLDPDERRDGERQRLAQVGGPVHQLHLAGVLPGDAGEPLDGEGAEGGEHGPAAVDELALAEPLEAEHLAVGLQRGGLDFGGLEPGADDAAGLILGQVLVQRVQLELQVLHGLPETERVEPVVADQRAVQVVGRHGAGEPQRPVRGGRCLRHLLRSRLRLAAQPEPEPGHDAPVLWRRVRQAGAQECARRGGHR

SEQ ID NO: 46383 - protein, 385 aa, Zea mays
  Clone ID: 700100796_FLI.pep
LLRRIPAARAPATAFMAARPVSDSTAALTIETSVPFTSHLVDPPSRDVTTTPAELVTFFRDMSLMRRMEIAADSLYKAKLIRGFCHLYDGQEAVAVGMEAAITRSDSIITAYRDHCTYLARGGDLVSAFSELMGREGGCSRGKGGSMHFYKKDANFYGGHGIVGAQVPLGCGLAFAQKYKKEETATFALYGDGAANQGQLFEALNISALWKLPAILVCENNHYGMGTAEWRAAKSPAYYKRGDYVPGLKVDGMDVLAVKQACKFAKDHAVANGPIVLEMDTYRYHGHSMSDPGSTYRTRDEISGVRQERDPIERVRKLLLAHDLATAAELKDMEKEIRKQVDDAIAKAKESSMPDTSELFTNVYKKGFNVESFGPDRKELRATLP

SEQ ID NO: 46384 - protein, 365 aa, Zea mays
  Clone ID: 700100839_FLI.pep
LKVSNVPLVALTHMYNTIVHIVRFIRQAASACNNSTPPDLIGLMHAEDGSDGDAAGDAPPGDSRLGEGLEQLVRHDPGAAAVLEVQVVVALVDEPLDLLHPAAELLERRLHHGLRQPRRLRELPHVLLVGRVRREDVQRRHDLDGLHLRGQHVQQRRLRLLEELLHLLARPALLHRHVLPDGGRPVGEVAGEVVLAEVDGRVVAGGDPHDGGQRLHQAVAGVQHGPPRLVLLVAVPHVAHLVPERPQLGVGGHGLVGLVVDVDVLGRPLPDGVPDQEPVVGVGVVLDGELQLPVLPAHGQPALDEVVGQRLRVELPRRAVRHGAELDGVLARPEGLLDDAVGVDERLPGQRVDLHGVAEVRVQQA

SEQ ID NO: 46385 - protein, 437 aa, Zea mays
  Clone ID: 700100978_FLI.pep
LAITKSCFLLEEGASLHGVLVGFTKSSLVEVLVSKLHTLDVLLLRHQHVSVLQELLDRYLGLLERGRALLGVDELPGDVLDAGLAHPPSDLVVVDPGTQRAEEVDGLAREGVDQLDDVLLVDAVGAEDALADADAVLAGGRPVELLHAAVADERRVQRGEVVAGDDDGHAGVVLLVVHPRELHVGGVVGDVHQGGVDHLVVHRVLGGAAHATRAGVEVVDEEAGHLALLDEVGGLTVALPDELGGLSGVAALQLAGAHHDGGDAHLGEDQLALERFSLAFASPDTQYEGNLDVWQGHEVLGEVDDELVHEALGYVEAIHHVVEVVRLLALADVVVGAEHGDVGAVPHRRLEEVVDEALAPGDVLLVVRDVVGQALPPVLVRLLRLVHLLGSHRLEPAVAAGALAMVGHGRGHLRLVELLPEEAAPGRGGGRSSDGGG

SEQ ID NO: 46386 - protein, 364 aa, Zea mays
  Clone ID: 700102511_FLI.pep
QYSTNDKQGADQESQVGAIKKHDRAQAHQTRPDQTKSFFQNRGGASCRRRLLRLEGLHHLPGEVGVVPPKVPVGRRLEVAPVAAFLEVEVDDDHAGPEVEVLLHDLQDLLVGDRAGAVRVHEHRKGLGHADGVGDLDNGAAGEAGGDDALGSLPRDVGPAAVHLGRVLAGEGAPAVGSPATVGVDDDLPASEASVAVRSADDEAARRVEVEDCLLVEVLLGDDWLDDVLLQVSSNLVVGDCLVVLGRDEDCVHTDGNHGATLVAVLHCHLGLPIGPEPGAGSILANLRETSTKLGGKDMAEGHQLRGLVSRIPKHVPLVTSSNLLGALGEVAVHTLSNIRGLLLNVHKHLAVVSVKPDIVRHET

SEQ ID NO: 46387 - protein, 278 aa, Zea mays
  Clone ID: 700102512_FLI.pep
HESLADMSRAAAARTMDEEAEYLETARADRSVWLMKCPPVVSRAWQAASASSSDAANANPVVAKVVLSLDLLRQEERPEEPTLQFKMELAQTNTGNTPKSYSLNMFKDFVPMCVFSESNQGKLSCEGKVEHKFDMEPHSDNLANYGKLCRERTQKYMVKSRQVQVLDNDHGMSMRPMPGIVGLISSSSKEKKKQAPVKPSDAKRTRRDRTEMENVIFKLFERQPNWALKALVQETDQPEQFLKEILNDLCVYNKRGPNQGTHELKPEYKKSTGDTDTA

SEQ ID NO: 46388 - protein, 207 aa, Zea mays
  Clone ID: 700106826_FLI.pep
ATTTPTREGREHSHSPTRPRRAREKEKRGGSFVREKYWRRREGEGGGSEMNVFRLAGDMTHLLSVVVLLLKIHTIKSCAGISLKTQELYALVFAARYLDLFVHFVSLYNTVMKLVFLASSFSIVWYMKRHKIVRRTYDKDHDTFRHYVLVLPCLLLALLINEKFTFREVMWAFSIYLEAVAIFPQLVLLQRTRNIDNLTGQYVFFLG

SEQ ID NO: 46389 - protein, 164 aa, Zea mays
  Clone ID: 700085160_FLI.pep
SIRCFLPEHTVDAVPAQVRFGAQSLAISRLRARKMADPELEAIRKRRMEELMAKHGGGGANQQNASQQKAQEDAKQEAEERRQMMLAQILSSEARERISRIALVKPDKARGVEDVLLRAAQTGGISEKVSEERLISLLEQINTHTSKQTKVTIQRRRSVLDDDD

SEQ ID NO: 46390 - protein, 170 aa, Zea mays
  Clone ID: 700164138_FLI.pep
QFRAMNKLKKMALKVIASNLNEEEIKGLKQMFMNMDTDNSGTITYEELKAGLAKLGSKLSEAEVKQLMEAADVDGNGSIDYVEFITATMHRHKLERDEHLFKAFQYFDKDNSGFITRDELESALIEHEMGDTSTIKEIISEVDTDNDGRINYEEFCAMMRGGMQQPMRLK

SEQ ID NO: 46391 - protein, 153 aa, Zea mays
  Clone ID: 700164760_FLI.pep
QITRSAMAISSKHLLVGRGCAITCHCNIRLLTATQVALAYVVQVGNLASSTTGSHASRSSNIPGEMHDCNLRFQSQGTVISRSNIRALLLRMFWNQFRNNVCWDSFQFVRLEVEKGWQEAAIWKTSIRISKLVKEWVDKRLHSSASQIWGVLE

SEQ ID NO: 46392 - protein, 171 aa, Zea mays
  Clone ID: 700048725_FLI.pep
LLLKSEAFPHVLAARAVDSLGLNPRGRQPAVAVVEGAVAAVGVTRRPAGVAHGVGRGLGPRAAGHLEHPLDLADHLAHRWPVGAGLLDAAQRQIHVLLQPGQRGRRRAQHRVQQVVQAVQVLGTVQRHLHLPDNVPAALQRLPRRGHLQHQHAEAVHVALVRKLLRHVVLR

SEQ ID NO: 46393 - protein, 97 aa, Zea mays
  Clone ID: 700052243_FLI.pep
IIELPTHRFFVGAQFHPEFKSRPGKPSPLFLGLVAASSGQLDHLLQRGLTSSAGRDICGKGGAQKPKACQNGHVMKPLNGLVHGHYSATRCNGVIPI

SEQ ID NO: 46394 - protein, 341 aa, Zea mays
  Clone ID: 700045308_FLI.pep
RRGGERSLGSHSPASKKPSPFFHPSAADFDFIIVCLRGEPIRFCFGRRERRMQWAGLRSQAPVPTAAWTGPRPRTARCPQGRFPTARRALVASAAASDANSSSNSPGKDEEGEEVVRREKEEKAVASLLMRSQKYAMLKQQLAVAAQFEDYKEAARLRDSLRSFEEKEPVLCLRRLMKKAIEEERFEDAAKYRDELKILAPHSLLKCSSDATTLGIRVQVRSVYIESRSQPLKGQFFFAYRIRITNSSQRPVQLLKRHWIVTDGNGRTENIWGVGVVGEQPVIFPKTGFEYSSACPLSTPNGRMEGDFEMKHIDKAGSSTFNVAIAPFSLSILGDDNDVLL

SEQ ID NO: 46395 - protein, 588 aa, Zea mays
  Clone ID: 700075364_FLI.pep
PSAEHIAMAISSALPCSLLVAALMLLASVVQVQGITRRYDFNVTMANVTRLCASKSIITVNGQFPGPKIVAREGDRLVIRVTNHAQHNISLHWHGIRQLRTGWADGPAYITQCPIQTGQSYVYNYTVVGQRGTLWWHAHISWLRATVYGPLVILPKLGVPYPFPAPYKEVPVIFGEWWLADTEVVIKQALQLGAGPNVSDAHTINGLPGPLYNCSAKDTYKLKVKPGKTYMLRLINAALNDELFFSVANHSLTVVEVDAVYVKPFTVDTLLIAPGQTTNVLLAAKPSYPGANYYMSAAPYSTARPATFDNTTVAGILEYEMYPDAPRPSAGSFNKALPLYRPTLPQLNDTSFVGNFTAKLRSLATPRYPAAVPRTVDRRFFFAVGLGTHPCPANATCQGPTNTTQFAASVNNVSFVLPTKALLHSHFTGLSSGVYSPDFPVAPLAPFNYTGTPPNNTNVASGTKLMVVPYGANVELVMQGTSILGVESHPLHLHGFNFFVVGQGYGNYDPVNDPPKFNLVDPVERNTVGVPAGGWVAIRFLADNPGVWFMHCHLEAHTTWGLRMAWLVLDGSLPHQKLLPPPSDLPKC

SEQ ID NO: 46396 - protein, 73 aa, Zea mays
  Clone ID: 700151703_FLI.pep
SFFIGGGALSTFSPSKQWKTDLVYDCNNMVEQELPGGGLLVYQSFCAAEDAVATSPKSVFHCFDGENVESPSS

SEQ ID NO: 46397 - protein, 166 aa, Zea mays
  Clone ID: 700152129_FLI.pep
TLRFPLRSTCSLPTTEPMADQLTDDQIAEFKEAFSLFDKDGDGCITTKELGTVMRSLGQNPTEAELQDMINEVDADGNGTIDFPEFLNLMARKMKDTDSEEELKEAFRVFDKDQNGFISAAELRHVMTNLGEKLTDEEVDEMIREADVDGDGQINYEEFVKVMMAK

SEQ ID NO: 46398 - protein, 319 aa, Zea mays
  Clone ID: 700097170_FLI.pep
CKYVTRKTIRIRNNDLHHLYRATTSLLNMYVRRQRRAGSRAEHRARVHGSAPKRRDGGSSVPALPPAAVGVVSAVVPEGAAADGVDDDDEDEEDDADDGDALPVPLERGHHAGLARLAVVAERRGVVAPGLAVRVRRVGGHRRPVRAADVGVAAAGGGLAAARLDGGEAGTHELGDGLVLVLQALADLGVLEAAPDPVPVPGVLDALLQPVGVVPEAVLLVSAAGDGLAGAPVGDDEGEDGEAEKDEDEDEHGEEVGPEQPGDAAAGADEARQGDGEEEGPQRDDGRREVALALGAVGAVAQPDARAQDRDGEQEGDEV

SEQ ID NO: 46399 - protein, 711 aa, Zea mays
  Clone ID: 700101803_FLI.pep
LRTPPMALLALRFGPLLPAPPHHRRVLRNRCRVRIVASNAPTPVRDGGAAAVVWFKHDLRIDDHPGLAAAVSEPRRPVVPLYVFDRRILAGYSDKMLELLLFALKDLKMTLKSQDSDLLIGLGNAEDVVLKLVNEVQAGLVFTEEEVEYRVRDVLANVESSLSNGSFSWGSPPKIVAWSAPLYDYKNLGAVPTSHDDFLKKKLPLATPLAAATLPALNLELDTGSLPTLEELKCFLKEITPEDNWAPLKRMPARSILKRTISQRKIKSNATLSTINEENIDDAATMDSVASGKRIINSKFASENSLEVSGGTEITLDALAAYLKYLEGTGNASWQELHDKVRLAETRYGASFYILFGPAIQLGVISRRKAYTETIQYEKDRNAGFLSPFGYSTPTVTSAVDAICSMEWYWLLASKSQVCIEGKYSIRIWRWKGYLVQYTFLGNEGPPVLLVHGFGAFLEHFRDNIDKIAATGHRVWAITLVGFGKSEKPNVNYSELFWSELLRDFIVEIVREPVHLLGNSIGGYLCAIAAGLWPSLAKSLVLLNSAGSVVPNYSFIPLSEERRTSWISRLQAQLLLLFLRSRAEGILKEYYPTRTERVDKPLLDQIVRASYDPGAAKVLESVFNFNLSIPLNFLFDSFGGKILVIQGMKDPLTKSEAFVTMLREHCSKVQIRELNAGHAPHDEVPDEVNTILCKWVEQIEVKPALEKTKAI

SEQ ID NO: 46400 - protein, 177 aa, Zea mays
  Clone ID: 700103839_FLI.pep
KKDICTHTYSRPDLILIQERRGPTNTVPTSMQISVAQIKAWPAHSRRRRGWKNRWNSNRDGSVVGVLLGVLLLVVLVESEAGGAHGGDGGHLLLDPVPVLVLWVLLGLVLLVQGVRAGGDGAELAELLHVLVVLLLLLVVDLAGGALLLWLAVVKQVVVVLLLRHGSSLKCFSRELL

SEQ ID NO: 46401 - protein, 168 aa, Zea mays
  Clone ID: 700083510_FLI.pep
ASVGKAKKPRKSNSQASPSKRPSGVLRKTKKATSDWKNAGTTGGAGDSARASVMKNEWKDQDLGLNQVVFDESTMPAPACSCTGELHQCYKWGSGGWQSSCCTMNMSMHPLPVMPNRRHARMGGRKMSGGAFAKLLSRLAAEGHDLSTPVDLKDHWAKHGTNRYITIR

SEQ ID NO: 46402 - protein, 244 aa, Zea mays
  Clone ID: 700087641_FLI.pep
IKKLKEKKQKLDMSCTQSRSGRIGLAVHRRSLLEVDFVHLHLAVNQLVDVHHHTEPVDVHQHKAWVHVVSDAAVGARGRARVDHHASLVLICLELVRVPGHQDVHVQLPLEHRQGVQVAPWNNLMAMAQPKLKLTNCKCLSLWVSSILIMFTSGNMEIRAKAFQVVMDFLDAEIASADDVLDLAGHEHGLEFGGEVGRPVRDVQIPQRKHKHHPPRLSPSSPSPPLLLSSTPRSASHTSRQLSI

SEQ ID NO: 46403 - protein, 220 aa, Zea mays
  Clone ID: 700163301_FLI.pep
QASALEAHAAPNCKVLVVANPANTNALILKEFAPSIPEKNVTCLTRLDHNRALGQISERLNVQVSDVKNVIIWGNHSSSQYPDVNHATVKTSTGEKPVRELVSDDEWLNGEFITTVQQRGAAIIKARKFSSALSAASSACDHIRDWVLGTPEGTFVSMGVYSDGSYGVPSGLIYSFPVTCSGGEWKIVQGLPIDEFSRKKMDATAQELTEEKTLAYSCLE

SEQ ID NO: 46404 - protein, 181 aa, Zea mays
  Clone ID: LIB3156-012-G6_FLI.pep
DSVSQDEAVLGFSSAMIWLGVMTLMTALLSEFVVSTIEAASESWELSVSFISVILIPIVGNAAEHAGAVIFAFKNNLDITLGVSLGSATQISMFVVPLSVLVAWIMGVPMDLDFNLLETGCLFLAILVTAFTLQDGSSHYLKGLLLVFCYIVISLCFFVLRQHGNGSNDDQLGVASKPWRI

SEQ ID NO: 46405 - protein, 388 aa, Zea mays
  Clone ID: 700203389_FLI.pep
GGSDRIGSFHKFPSGFAGMAIRKGSSYAVAALLALASVAAVAGEVFFQEKFEDGWESRWVKSEWKKDENMAGEWNHTSGKWNGDAEDKGIQTSEDYRFYAISAEYPEFSNKDKTLVLQFSVKHEQKLDCGGGYVKLLGGGDVDQKKFGGDTSYSIMFGPDICGYSTKKVHTILTKDGKNHLIKKDVPCETDQLTHVYTLIIRPDATYSILIDNEDKQTGSIYEHWDILPPKKIKDPEAKKPEDWDDKEYIPDPEDKKPEGYDDIPKEIPDPDAKKPEDWDDEEDGEWTAPTIPNPEYKGPWKQKKIKNPNYQGKWKAPMIDNPDFKDDPYIYAFDSLKYIGIELWQVKSGTLFDNIIITDDPALAKTFAEETWGKHKEAEKAAFDEAE

SEQ ID NO: 46406 - protein, 226 aa, Zea mays
  Clone ID: 700203439_FLI.pep
HFYTHNSKHVSNLLYCYVRWINSVNMWYINGANHLCSDHIREKDGIWAVLAWLSIIAFKNKDNLGGDKLVTVEDIVRQHWATYGRHYYTRYDYENVDAGAAKELMANLVSMQSSLSDVNKLVKEIRSDVSEVVAADEFEYKDPVDGSVSKHQGIRYLFGDGSRLVFRLSGTGSVGATIRVYIEQYERDSSKTGRDSQDALAPLVDVALKLSKMQEYTGRSAPTVIT

SEQ ID NO: 46407 - protein, 378 aa, Zea mays
  Clone ID: 700207068_FLI.pep
VKYMRSQVGPASRLYTSFKELSSKLASIKDVVVVGVFGSESDSLAKEFHKTADRLRENVNFAHIYTKDASDSVEELAKQVGKSFSGESSVVLVRPPQLSNKFEDNVVSYDSESDNLSGFVDENYHGLVGHRTQSNMADFKTPLVVAYYDVDYVKNVKGTNYWRNRVLKVAKEFPEVNFAVSNVHLFAGELEEFGASASKDNSPVVAGRDQQGKKYVLQGKFSVEALHKFVEDFAAGKLEAYLKSEEVPVDNNGPVKVAVGKNFEDLVTNSQKDVFIKFYAPWCGHCKKMAPAYEELGTLLQNEPNVEIVKLDATANDVPEPFVVHGFPTLFFLPADSKTPQKYEGGRDAKDMLSFIAKHSTQELKGFNRDGSARKEEL

SEQ ID NO: 46408 - protein, 377 aa, Zea mays
  Clone ID: 700235646_FLI.pep
DAIGMFGKVCDEHEGYFVHEALSIAIDCLQLDIQMRPEMEHVLFRLRIIVARSKLAAGSNNKPSQHIGRALVNNIDKLHPTLISTISMEELNEATGNFSNDVLIGQGPYAECFLGVLKDGQNLAVKRLRTSEEIQVEVPTILRMCYHDNVVQFLGCFLEGGTRVLAYEYAPRGSLHDILHGKMGIKGARPGPPLSWLQRVKIAVSAAKGIEFLHEKVDPRIIHNNIKSSNILLFDNDVAKIGDIGVSIHDAHRRVHNWAEYYSVREHLAPEFAFRRRYSTKSDVYSFGLVLLELLTGRSVFHVATQCGPRSAVRWAKPMLSQDKVEQCIDPRLGGGYLLNDVRKMASVAALCLQDEPEFRPEMSIVVEALSLLLNSK

SEQ ID NO: 46409 - protein, 228 aa, Zea mays
  Clone ID: 700240889_FLI.pep
AIQVHRVLDCVDGIFRWQELIHCDLFVFILFIIFKKAADLLKAMRWEVRDVRVVTEFRVISTDCYNLIIFLALIDHRHEPNSTSSQETPRDNLFLHQYEDIQGVVILTECAWNEAIVMWVNNRGIKNTVHLDQTRCLVQLVLNLAASRNLNHTIEEFRSPWSYLQIMPWVSSNMFLGHGRKDTLIENSRSSHGRGKREPGGALRHSPERCPGGESEKRRQASAGWRSG

SEQ ID NO: 46410 - protein, 303 aa, Zea mays
  Clone ID: 700241489_FLI.pep
PPVADVKSLTHYGEPYDGNTRFFKSTLFVAAVRACYGESCLLHGVEWMPPKGGITEGQMLKFMGANIHLSPTQAKILLEDETAGFAYLNLQEACPPLYSIIGLREHIKKRPPLATSEKVQQFVRARGRESMVAGFYHEGYEDPLLMLMRRRTVHAGLVVKGEEGALSMTTKERSAHASKGLPVNHCSGFRTPNSINSSKTDGIPRESFRVIVNAQELGFESTETPRTDRSILKNLELGLAALGGEKGAAYDRIVLNAAMADHLLGCIGAEDIDAALDRAREAIDSGEALRRLMSYIKISHRVS

SEQ ID NO: 46411 - protein, 355 aa, Zea mays
  Clone ID: 700241738_FLI.pep
GEDGQAQRRRRRKKKKGDGVVLFNFGDSNSDTGGVAAVMGIRIAPPEGRAYFHHPTGRLSDGRVILDFICESLGMPHLSPFMKPLGSNFSNGVNFAIAGSTAMPGVTTFSLDVQVDQFVFFKERCLDSIERGESAPIVEKAFPDAIYTMDIGHNDINGVLHLPYHTMLENLPPVIAEIKKAIERLHENGARKFWIHGTGALGCMPQKLSMPRDDDSDLDEHGCIASINNVCKKFNSLLSEALDELRLTLKSSTIVFVDMFAIKYDLVANHTKYGIEKPLMTCCGHGGPPYNYDPKESCMTSDKYLCKLGEKFISWDGVHFTDAANGIVASKVLSGEYNIPRVKLASLVPVPKSDD

SEQ ID NO: 46412 - protein, 436 aa, Zea mays
  Clone ID: 700241793_FLI.pep
PSSRLYVADFSYNFLVGKIPSCLKYLPRSSFQGNCFQDEYSVQQRPLQICTSGSTGQQGVIYGSKHPGHKHEKMQQPIWLLVLEIATGVLLVVFVITGIVTASRSCKLKPSIRISSWNRSKSWSDEITVLIDSDMLKSLPKLSRQELEVACEDFSNIIGSTPETVVYKGTMKDGPEVSVISLCAFEGHWTSHHELFYQNKVIDLARLNHENIAKFLGYCRESDPFSRMLVFEYAPNGTLFEHLHYGEGGQFSWLRRMKIAIGIAQGLRYLHTELQPPFAISELNSNSVYVTEDFTPKLVDFECWKMMFSRHSISRDEKTRGHLNSKSSFPGHGDSAADRQADDIQANTFAFGVILLEIISGRLPYCKDKGYLVDWASKYLQQAEEIGKLVDPELGSVRSEDLAVLCSVVSRCIDPDPSKRPSMQIITGVLENGIDL

SEQ ID NO: 46413 - protein, 316 aa, Zea mays
  Clone ID: 700170869_FLI.pep
VCTLEELQEATDNFSSSNLIKTSPLAQDYNGQLQDGSRVLVRCLRLKPKYSSQSLVQYMEIISKLRHRHLVSIIGHCIVSDEENPNNASSVYLVSECVTNGSLRSHLTEWRKREMLKWPQRVCAAIGIARGVQFLHNLTAPGFVQNNLNIEHILLDKTLTSKISNFSLPMISTSKNGKILSETPFAVHEDNDIGSAQNAAQGDKEDIYQIGLILLEVITGKPTESQSQLESLKAQLSEALTEDPDRLKDMADPAIHGTFAVDSLSTVAEIALKCTAGDPSDRPSIDDVLWNLQYSMQVQDGWASSESLGLSVKSQV

SEQ ID NO: 46414 - protein, 78 aa, Zea mays
  Clone ID: 700171537_FLI.pep
SFENITTSNTIFHTIYSWVALHCFVINLLANLQDNIIFSFFRSPGRDCFSFVSNIFCFDFSMFYFTYYLQISCFEASS

SEQ ID NO: 46415 - protein, 140 aa, Zea mays
  Clone ID: 700209388_FLI.pep
DGRAGHGHLRADGRVGVGGAGAGDRDDLRAGVHGVRHGGGPEEGQPGHHRPHCHRLHRGGQHPGGRRLRRRVHEPRRVLRPRPRQLGVGLPVGVLGRAPHRRRPRRRHLRAALHLPHPRAAPLHRLLKAEADRPRGAQRS

SEQ ID NO: 46416 - protein, 140 aa, Zea mays
  Clone ID: 700211988_FLI.pep
AQTDTVTRARNATRRGDAYRAKSTRLRHRRTHASVKRPRLAFRFGSVPRRRGRPRRATALSAFLSIWLLCVDWRPCELAEAARFMAVAERFGTRWPPSRFFVAVLLVLLTGDPCNLLLCVSLLTIPPPPPSPVCVVPYEI

SEQ ID NO: 46417 - protein, 454 aa, Zea mays
  Clone ID: 700217221_FLI.pep
AIPGLNGLEFGVRSRSAFEPWFILFRAGSCCGLLFFGCALAKKIRPIFSPLTGSCRCLTCCSLLGVGGLQGADEAQELALGRCWWCVRLAAAGLDGADGLPELALGVGTGRGDDHVLPDGTRAAGGGAVGVEVVDGGGVLVEPAHLLQAVELPGLHQQAVSDPVLPRDELGRAHGVGAVEPGAVHEAAVPLERGGEALVRLQLGPDPDGPPGDDGPPDAPRHGEVGVADDPDHLDAVGPPRGLLGGVVARGLPVVLGDGAVVGHLVADAHAVALAVHGARHGDGLLHEGLPGQRAVQDDVPPLVQRRHQQRRRRIRRRLVDQLCRLEHVVVVAHGADGAVDDVRLLERVRLHHHGVGLRVGPECLLLELLEHRALAGAHPAAHQQQHRAALRVRHGGHHVRALRRLAAAAARRYDADRLHLLHQRREHPRHLQVTRHALETLLPCCFQDHVPEL

SEQ ID NO: 46418 - protein, 233 aa, Zea mays
  Clone ID: 700217348_FLI.pep
KFGFLGDQKLVLYEYMEKGDLHRWLHELPVGSMDTEDICIDAMEAMTEDSRKPAGDWPTRYRIILGVARGLAFLHQGWAGAGGGRRPIVHGRLVPTNVLLGDDMEPRISDFLPHPGGGGGAETAEGDVYRFGALVFEVVTGQARWGDAATTSWARGVVRNRKGLNLVDERLRDETAGTGAERELLECLQVGFLCTAAAPEKRPTMQQVVGLLKDVRPAATAGGGVPPPPLRSL

SEQ ID NO: 46419 - protein, 526 aa, Zea mays
  Clone ID: 700333695_FLI.pep
LHSPAAMEDLLYYSLTVAICIAVIGLLSILRSFTATGPPPALPPGPSLLSLITPLLFLGRTNFGIERILSAARSRYGPVFTLYLLPSRPAIFIADHVVAHRVLVQGGAAFADRPPASLPFRLFSSGQRNITSGAYGPVWRALRHNLTGNVFHPSRMGRFAAARRRALRGLVAGVARDAGSRAVVVEGLLHRAMFHVLVTMCFGERLATDAVVASVEALQREFLKSVLGFQVFDVCPALTSLLFRRRWKQMLSLRRRQEELFAPLIRACRAQRGSDANAGADTYVDTLLDLRIPEDGGRNLTEGEMVSLCAEFVAVGTDNTATEAQWIMANLVAHPEIQARLRAEIHQVTGGAGVQEQDLPRMPYLRAVVLEGLRRHPPGHFAIPHAATGIQDDDGGGDHATIEGFRVPRRASLNFTLVALGLDEAVWPDPLRFRPERFLPGGEGADVDLTGAKEVKMIPFGAGRRICPGMALALLHLEFFVASLVAEFEWLQVPGEPVEFAEKQELSVVMRRPLRATVVRCTRNAN

SEQ ID NO: 46420 - protein, 168 aa, Zea mays
  Clone ID: 700333731_FLI.pep
SCSLFFRVVEIVRHRNRVEVTVSSGQTFVADAAVVTVPLGVLKAKTIKFEPRLPEWKEEAIRELTVGVENKIVLHFGQVFWPNVEFLGVVSSSTYGCSYFLNLHKATGHPVLVYMPAGRLARDIEKTSDEAAAQFAFSQLKKILPNAAEPVSLSTQYLELRVVKESLM

SEQ ID NO: 46421 - protein, 138 aa, Zea mays
  Clone ID: 700238357_FLI.pep
LWRRQGPLLKAMMIFWPLSQRMTADMRCMILILSPGRMCRKARFSSLPGPRRHPASVPRCFTPPRRTASSMSSTGSTTRSRRPTHPRRTLRFCGSGLTEAGSPSKKKGPVEGCEPFGQMQILLPMMKAPALVFVIKFL

SEQ ID NO: 46422 - protein, 338 aa, Zea mays
  Clone ID: 700244120_FLI.pep
GTEIRCTRGTETLWLDRISAKVTALAGNTNFWAVGCEDGYLQVYTKCGRRAMPAMMMGSAAVFIDCDDCWKLLLVTRRGLMYIWDLHNRTCILQDSLAALVASPDESSANHAGAVKVISAKFSRCGFPLVVLASRHAFLFDMSMKCWLRIADDCFPASNFASSFIFPQAGELGKLQIDVGKFMARKPIWSRVTDDGLQTRAHLETQLAASLALKSPQEYRQCLLSYIRFLAREADESRLREVCESFLGPPMGMLGSESSTDPKSPAWDSDVLGMKKHQLLREDILPSMASNRKVQRLLNEFMDLLSEYEAAKSKVDPMDITPALPQQAPEANANVVTS

SEQ ID NO: 46423 - protein, 329 aa, Zea mays
  Clone ID: 700220832_FLI.pep
EKALAAFMSKDKAAERTLGDIILQKIREKDAEVATGEGRPRVKLDNSIIELYKEVGKFLSRYTSGKIPKAFKRIPSLECWADVVQLTEPENWSPNAVYQATRLFSSNMNTKNAERFYEAILLPRVRNDIRKNKRLHFALYQSLKKALYKPAAFNKGILLPLCRERNCTLREAVIIGSIIQKVSIPFLHASVALVKLAEMEYCGTTSYFIKLFLDKKYALPYRALDAVLAHFMRFVDDERIMPVIWHQSLLAFVERYKNELEKKDKEKLARLLDHQKHYLVTPEIRRELRGSCNRGEKDTNLHTLSPISVITKPIEEDKWDVPQVPMEED

SEQ ID NO: 46424 - protein, 288 aa, Zea mays
  Clone ID: 700220888_FLI.pep
AFSKFLHILPSRLSKMLTSACKWLQEIQKHFVSYMINDTLGAISTAHLIHADRDPLKARSPECVQLAALHSMAVDFAKTGAPAEMPLALRPREFPDFMERWERPMYVSNGVLGKLYRAALRHEEDAEALLPAGPPSCVYDPDLEVAGFDEFLDAAEERYEAYAERLGALMTYYSAEREDEILTGNIRNKLVYLRRDNKRYFEMKDRIIAAVDALHAEVRGWLRACKEDDASRVASAWYHVTYHPDRRGEKRFWSFPWIVCDTLLAIKAARRCRKRVEDAAVPMDCDGS

SEQ ID NO: 46425 - protein, 278 aa, Zea mays
  Clone ID: 700221075_FLI.pep
PFTNSTEDQKAAQRARDFHIGWFLDPLINGQYPTIMQDIVKDRLPSFTPEQAKLVKGSSDYFGINQYTTYYIADQQTPPQGPPSYSSDWGVQYYFQRNGVQIGQMAHSIWLYIVPSGMYGVVNYLKEKYHNPIIIISENGMDQPGNLTREEYVHDAVRIDFYKNYLTELKRGIDGGANVIGYFAWSLLDNFEWLSGYTSKFGIVYVDFATLKRYPKDSAYWFRDMLSGTGSKAATPQTGSGGRPAGSASATSNGPALLVSLLVSLGVLLPSIFMVSSV

SEQ ID NO: 46426 - protein, 330 aa, Zea mays
  Clone ID: 700224002_FLI.pep
SKTGKTVEWTSKDLLNGLEEFVPIYETRPIKNNVYGMGFDHSFGLWFMARWIKPDLMIESGAFKGHSTWVLRKAMPNTRIISLSPRHPEKYLKKGPAYVDGNCTYLAGKDFIDFGSIDWGKLLRNHGISDPDKVLVFFDDHQSELKRLKQALKAGFRHLIFEDNYDTGTGDHYSLRQICDQSYIRGGGHSCFWESDEARLRFERKKFWEKAVEIADLCGKDDAWWGVKGYMRDNFNHSNMAISYKEHFQNSRLVESVLDMYWELPPVAGPSLTHQTRYDPARTVDPIIEDGRYGLFRKTGLARLDASVFNGYTQMAYVQISGSMLSTDDV

SEQ ID NO: 46427 - protein, 407 aa, Zea mays
  Clone ID: 700172385_FLI.pep
RAAAQEVGRASEKKAMAAESFLFTSESVNEGHPDKLCDQVSDAVLDACLAQDPDSKVACETCTKTNMVMVFGEITTKASVDYEKIVRDTCREIGFTSDDVGLDADRCKVLVNIEQQSPDIAQGVHGHFTKRPEEIGAGDQGHMFGYATDETPELMPLSHVLATKLGARLTEVRKDGTCAWLRPDGKTQVTVEYVNEGGAMVPVRVHTVLISTQHDETVTNDEIAADLKEHVIKPVIPERYLDEKTIFHLNPSGRFVIGGPHGDAGLTGRKIIIDTYGGWGAHGGGAFSGKDPTKVDRSGAYVARQAAKSIVASGLARRCLVQVSYAIGVPEPLSVFVDSYGTGTIPDKEILKIVKENFDFRPGMITINLDLKKGGNRFIKTAAYGHFGRDDADFTWEVVKPLKKASA

SEQ ID NO: 46428 - protein, 64 aa, Zea mays
  Clone ID: 700172524_FLI.pep
GLRLFLIHVDWNVLGGIETDLTCYRFKSTQSHSIHMEEVPLHRFVIGIYTRSRGVINVTVQAFG

SEQ ID NO: 46429 - protein, 367 aa, Zea mays
  Clone ID: 700214635_FLI.pep
RIPSAILGCRFLQSHSKPPLPEPSRNSPPPPLLAPMAKEPMRVLVTGAAGQIGYALVPMIARGVMLGADQPVILHMLDIPPAAEALNGVKMELVDAAFPLLKGVVATTDVVEACTGVNVAVMVGGFPRKEGMERKDVMSKNVSIYKTQASALEAHAAPNCKVLVVANPANTNALILKEFAPSIPDRNVTCLTRLDHNRALGQISERLSVQVSDVKNVIIWGNHSSTQYPDVNHATVKTSTGEKPVRELVADDEWLNGEFITTVQQRGAAIIKARKFSSALSAASSACDHIRDWVLGTPEGTFVSMGVYSDGSYGVPSGLIYSFPVTCSGGEWKIVQGLPIDELSRKKMDATAQELSEEKSLAYSCLE

SEQ ID NO: 46430 - protein, 255 aa, Zea mays
  Clone ID: 700356235_FLI.pep
DLVSKSIAVQTEIGGVAIRIGGMAKGSGMIHPNMATMLGVLTTDAQVSSDVWREMIRMSVSRSFNQITVDGDTSTNDCVIAMASGLSGLSGIQSLDSIEAQQFQACLDAVMQSLAKSIAWDGEGATCLIEVTVSGANNEAEAAKIARSVASSSLVKAAIFGRDPNWGRIACSVGYSGIQFDANRLDISLGVIPLMKNGQPLPFDRLAASKYLKDAGDAHGTVNIDISVGSGGGNGKAWGCDLSYKYVEINAEYTT

SEQ ID NO: 46431 - protein, 132 aa, Zea mays
  Clone ID: 700345528_FLI.pep
ATHIIFPVPTCTHCSKHGWTDPVSVKFSVSTFEAWQQSLTCKQTALKTVMLLAARLPIVWWPLLALPGKVWSSSKRLPASLLPPLDGGMFIVMLANYYGASCKSYWLLILPSAQVDMLPESKLFDDSIKCFD

SEQ ID NO: 46432 - protein, 370 aa, Zea mays
  Clone ID: 700332708_FLI.pep
KHKRTLAMASEVVRPSDAELLKAQADIWRLSLSYLTPLSLRCAVELGIPTAIYRHGGAASAAELVTALSLPSTKLPFLRRLLRLLAASGVFTVDKQSTEEERYRISPVSYLLVDGIPHEDHMNHTALVLTCTSTRYIEAGIGLAEWFKRDVVTSPFEELHGATLFHESMGSLDADFHDMASEALDAHDNFGIEIAMREFRDLFEGIQSMTYCCGNFGDDKGARAIVKAFPHIKCTVLAPPKIIATKPADGAKINYVEGDMFSFIPPAQTVVLKLVLHHLTDEECVKLLAQCRKAIPPRKDGGKVIIGDIMIDHSGLMLETHLLMDIGMMTMTKGRQRDEKEWSELFTKAGFSEYKILKEFGARVAFEVYP

SEQ ID NO: 46433 - protein, 532 aa, Zea mays
  Clone ID: 700332711_FLI.pep
ILLSTMDPRARYPSGMGNGRGGNLNYYGRGPPPQQPHQHHNHQQTSGAHHHQQTSGAHHHQQYAQRQHQHQHQHHGHNRHQQQQQHHIYQQQQQQWLRRSQIARETSGAAVTSEPKSLAPSTAADGVDSSSQDWKAQLKLPPPDTRYRTEDVTATKGNEFEDYFLKRELLMGIYEKGFERPSPIQEESIPIALTGSDILARAKNGTGKTAAFCIPALEKIDQEKNAIQVVILVPTRELALQTSQVCKELGKHLKIQVMVTTGGTSLKDDIVRLYQPVHLLVGTPGRILDLTKKGVCILNDCSMLIMDEADKLLSPEFQPSIEQLIRYLPASRQILMFSATFPVTVKEFKDKYLPKPYVINLMDELTLKGITQFYAFVEERQKVHCLNTLFSKLQINQSIIFCNSVNRVELLAKKITELGYSCFYIHAKMLQDHRNRVFHDFRNGACRNLVCTDLFTRGIDIQAVNVVINFDFPKNSETYLHRVGRSGRFGHLGLAVNLITYEDRFNLYRIEQELGTEIKSIPPQIDQAIYCQ

SEQ ID NO: 46434 - protein, 227 aa, Zea mays
  Clone ID: 700332815_FLI.pep
SSLRALRSRSWSSRAKARDIVGASYACALRPADRIGSDGVVEGAPPVGCRRRRCGVPGRRRGRQVRPAGPARHHRRRALQHRQPHRHRQLPRLPERGRGAAVRGQGGGGRDDQHQRHLLHGAGHDQRAGRVHRRLHAGGGHAARQVQRRPHRRRQPRLLPAGPAHAPARRHLPPLPRRLLLPRPTSLTSYLARALYVRTTGQHNQTLNMLLRAIYIYIATTTNVKCF

SEQ ID NO: 46435 - protein, 222 aa, Zea mays
  Clone ID: 700321676_FLI.pep
RGGGSGEMGMRDKKRNQKRVLARRTAAPRPGEGKDFLPLEGGPGKKHLKVQQPEEPENTATIVYIGHIPHGFYEDEMKGFFKQFGDIKRLRIARNRKTGKSKHYGFIEFENPAVAKVVADEMNNYLLFERTLQVALVEPEKVHPKLWKGVRRGFIPVDRVAIERKRHNKDKTVAEHKKMVEGIVKRDGKRRKRIKAAGIDYECPALIGSIQPSAKKIKFDEA

SEQ ID NO: 46436 - protein, 184 aa, Zea mays
  Clone ID: 700204175_FLI.pep
RASTKNKGRMARYLANKCSIASRIDCYSEASTSVFGQKLREQVEERLEFYDKGVAPRKNLDVMKAAIDSMVNGTSMDDDDIEKTDASPKKSKKKKTKTKADGDAMDVDKPSNVAGGEAEPGTEKKKKKKKHKLEEEAQEENGAADTTPKKKKKKSREASEEAEPKTATDGKKKKKKKAKAEDDE

SEQ ID NO: 46437 - protein, 193 aa, Zea mays
  Clone ID: 700243475_FLI.pep
GTFSTTGALEAAYTQATGKPISLSEQQLIDCGFAFNNFGCNGGLPSQAFEYIKYNGGLDTEESYPYQGVNGICKFKNENVGVKVLDSVNITLGAEDELKDAVGLVRPVSVAFEVITGFRLYKSGVYTSDHCGTTPMDVNHAVLAVGYGVEDGVPYWLIKNSWGADWGDEGYFKMEMGKNMCGVATCASYLIVA

SEQ ID NO: 46438 - protein, 150 aa, Zea mays
  Clone ID: 700220505_FLI.pep
GRQRGAVKMGYLKTDEFLKRGESGGTCCVIALLRKGRLVVSNIGDCHVVLSRAGKAEVLTSDHRASQEDEKQRIENLGGFVVNYHGTWRVQGSLAVSRGNWDGHLKQWVVADRETRTLLVDHQCEFLILAFDGLWGKIDNQDAVDQKSRH

SEQ ID NO: 46439 - protein, 407 aa, Zea mays; identical to SEQ ID NO: 40940
  Clone ID: 700167344_FLI.pep

SEQ ID NO: 46440 - protein, 169 aa, Zea mays
  Clone ID: 700167464_FLI.pep
TYEPYLWENEKQSYKRYVVLFGFLVQLNHKYTSTVQKLPTKSNTDSNIMRCSQVPRFKYLPISAPVISSRSHKSSLQSPSSDSTSKNTWKSYSNGDGSSTPDFDDNASLVGAAPLLKSFVTQVGSKFGENTSRWGSMLSDGQVGKLSDILPGPAAGFFSSFTSGARYDS

SEQ ID NO: 46441 - protein, 341 aa, Zea mays
  Clone ID: 700171744_FLI.pep
KLKSKSYASPLPDPPAHPPTAAMPAFKAPAPGFAVRFSPFHENRLLAATSQHFGLVGNGHLIVLDLAGGGPGAAPTPVFSFPTSDALFDCAWSESHDSLCAAASGDGSVRLFDAALPPAQNPVRLLREHAREVHGLDWNPVRRDAFISASWDDTLKLWSPDRPASVRTFRGHEYCVYAAAWSARHPDVFASASGDRTARVWDVRDPAPTLILPAHDHEVLSLDWDKYDPSILATASVDKSIRVWDVRAPRAPIAQLAGHGYAVKRVRFSPHRQGMLMSCSYDMTVCMWDYRAEDALLARYNHHTEFVAGIDMSVLVDGLLASTGWDEMVYIWPFGTDPRAM

SEQ ID NO: 46442 - protein, 264 aa, Zea mays
  Clone ID: 700171826_FLI.pep
LRFYIHASYIFLPFGFRKKHAFVQHWRAQATQLLPPSSSRTIRVCSWIRVPRWRVCSLCLCMDQRSPGLRGRALHYPQLLARRDEHIPGHVSGEHEVAVLVLVGDGVLVVAAALCRRRGEGVGEERVQSLPELPVPLVHPEVHLPEVRRAVHAHLHVQASLLLLLLDLFGRRRLEGVLPVRPHRRPPDHLRLGRRGGVVVEVEVSGGRAGPRGLALGAVVQNALGPDGGRRLLLPVVSAAAAGPRQAEAELGGAQVVGIELHGS

SEQ ID NO: 46443 - protein, 151 aa, Zea mays
  Clone ID: 700171888_FLI.pep
VLVSIQGLVLNDRPYFNEPGSKNSAETTGGERCSLAYNQTAFVRSCKTMLYSLRKPPMHFETLVLWHFHEHERAILDACRAYMSGTVVGSSAGTGSNRRYVHDKCFAEFHKSLTLYTEHLRAEFAANTRRVMELETEDEIVPSIAASVKSC

SEQ ID NO: 46444 - protein, 280 aa, Zea mays
  Clone ID: 700172178_FLI.pep
STTHKMHGRTQGAAVGDMTQRLLLALSLIASATAVPAVIRTVPDDPTAGSSGAADAADALFCDSWRLSVETANAGPWSAVPSRCGAFVRDYMEGPRYASDSAVADADALAFASEALAAAEWGGSASARPAWVFDVDETLLSNAPYYAVNGWGSQEFNETSFDEWVDAAKAPTLPSSLNLYNQLQGLGFHVILLTGRSEFQRNATELNLLFAGYNSWEKLILRQPYDIGKNAVQYKSERRAAMEAEGFKILGNSGDQWSDLIGSPMATRSFKLPNPMYFIS

SEQ ID NO: 46445 - protein, 410 aa, Zea mays
  Clone ID: 700207577_FLI.pep
AKSARETDDEMADAEDAAAARRRAAITDYRKKLLNCRELESRVGTVRESLKNAKRDFTKTEDDLKSLQSVGQIIGEVLRPLDNERFIVKASSGPRYVVGCRSKVDKEKLTSGTRVVLDMTTLTIMRTLPREVDPVVYNMLHEDPGNVSYSAVGGLSDQIRELRESIELPLMNPELFLRVGIKPPKGVLLYGPPGTGKTLLARAIASNIDANFLKIVSSAIIDKYIGESARLIREMFGYARDHQPCIIFMDEIDAIGGRRFSEGTSADREIQRTLMELLNQLDGFDELGKVKMIMATNRPDVLDPALLRPGRLDRKIEIPLPNEQSRMEVLKIHAAGIAKHGEIDYEAVVKLAEGFNGADLRNVCTEAGMAAIRAERDYVVHEDFMKAVRKLNDAKKLESSAHYSADFGKE

SEQ ID NO: 46446 - protein, 198 aa, Zea mays
  Clone ID: 700210581_FLI.pep
SSAVESEAMRASRPAVHPVEAAPPPPAAAAEGPEAQVEGAAHPRGVRMKDPPGAPGTPAGLGLRLAQAFFAAAALAVMASTNDFPSVSAFSYLVAAAILQCLWSLLLAFVDIYALLVKRSLRNARAVCIFTIGDGITGTITLGAACASAGITVLIGNDLNICAENHCASFETATALAFISWFALAPSCILNFWSMASR

SEQ ID NO: 46447 - protein, 572 aa, Zea mays
  Clone ID: 700212558_FLI.pep
KARALHDLGKDKEAAQECRMILDIVEAAVPEGLPAGFGKGCKLNEIICKAVELLPELWKSGGFSLETISSYRRSLLNNWNLDGETIARIQKKFAVFLLYSGCEARPPNLHSQLDGSFVPRNNIEEAILLLMILLRKSNLKRIEQDPSVMHHLTFALSMSGQLIPLAGQFEELLPGVLDKKEWLYSVALCYLAEEDDLSALNLLKIILKSGEDSVQLIELLLASKACIEMSIHTEGAFYARRAIANMQGGCKPMAGLANLLLGVALSNQARSAISDTDRASWQCEALEALGNAEKNIHGKDSRALYSLSLENAVQRKLELAAFYAKRLVKLEAGSELRSWLLLARILSAQKLFADAETVVDAALDQTGKWCQGDLLRTKARIQAAQGQFREAVETYTQLLAIIQLRTKSLTAGVCLPKGNKDDKGLETETWYDLALLYLGMAQWRDAEVCVLKIRSISPYSALAWHATGKIYEAKGLRKEALGAFFRALDLDPKHVPSLISTATVLQQLGDRPLPSIRCFLTDALQLDRTNHVAWFNLGLLYKEEGGRSAAEAAECFQAAAFLKETAPSEPFR

SEQ ID NO: 46448 - protein, 376 aa, Zea mays
  Clone ID: 700213773_FLI.pep
GMLQSADEQVRSLKKQSTFLSQLAAKTIPNGIHCLSMRLTIDYYLLSPEKRKFPNSENLENPDLYHYALFSDNVLAASVVVNSTIMNAKEPEKHVFHLVTDKLNFGAMNMWFLLNPPGDATIHVENVDDFKWLNSSYCPVLKQLESAAMKEYYFKADRPKTLSAGSSNLKYRNPKYLSMLNHLRFYLPQVYPKLNKILFLDDDIVVQRDLTGLWEVDLNGNVNGAVETCGESFHRFDKYLNFSNPNIAQNFDPNACGWAYGMNMFDLEEWKKKDITGIYHKWQNMNENRLLWKLGTLPPGLLTFYKLTHPLDKSWHVLGLGYNPTIERSEIDNAAVIHYNGNMKPWLEIAMIKYRPYWTKYINYQHSYIHGCKISQ

SEQ ID NO: 46449 - protein, 277 aa, Zea mays
  Clone ID: 700213781_FLI.pep
KNLSQKDLQLIASSVLLAALSVAPYDKKYGASHLETENEKERNMRMANLVNFSLDSKRENREMPSRASLLSELASKGVLSCASQEVRDLYNLLEHEFLPLDLASKVQPLLSKISKMGGKLSSASSVPEVKLSQYISALEKLTALRVLQQASCIFQSMKIDMLSRMIPFFDFFVVEKISVDAVRRNFVAIKVNHLSGAVHFGTVDIESDGLSDHLSVVADSLNKAKIHICPPVKKPSKLGESLISLAGIVENEHKRLLARKSIIEKRKEELERQILEK

SEQ ID NO: 46450 - protein, 736 aa, Zea mays
  Clone ID: 700331934_FLI.pep
AAHTDFFCTRYSSAGAAAARRWISPEAPAMERSCYFPLRWESTGDQWWYASPIDWAAADGHYDIVRQLLHLDPNLLIKLTSLRRIRRLEALWDDDARFADAARNRASVARSLLLECECRNHRPAAPGAGENTLLRAGYGGWVLYAAASAGDAAFVRELLERDPLLVFGEGEYGVTDMFYAAARGGSADVFRLLLDHAMSPRCSTSCRNGEASARRSSVFRLEMMSRAVHAAARGGSVEMLRELLEESSVSTYLDIRGSTVLHAAAGRGQLQVVKYLVASFDIINSTDNHGNTALHVAAYRGHQPVVEALVAASPSTLSVVNNAGDTFLHSAVTGFRTPGFRRLDRQLELMRYLIRERTADIQKIINLRNDAGLTALHLAVVGCAHPDLVELLMATPSIDLNAEDANGMTALALLKQQLRSATSDRLIKQIVSAGGVLNSSILRTRSAIASQIKMQGGIASSPGTTFKVSDAEIFLFSGMGAAESLRPSSCSSNGKDDDPTHADADCAENRGSSEKRLSSASRAKDRLKMMLRWPRHKDKTPKKSEDSSPLGSISRLNEHGAETPAPLRQKFTKTTALNGKRTLAVKSSTPSSSSTKKKLNTKLIHGIMEAMPQLAPSTARSASPTDTFLRSSVSSTPQPLAKLKDICLDDEISMVTPPAGRLKDSDDAMEDPSCSNNSSMDDGCGAGTAESAARKHGCGNGRLINICFGAQGLTVEDSASGQQTSKMFKQQCLRVS

SEQ ID NO: 46451 - protein, 354 aa, Zea mays
  Clone ID: 700331948_FLI.pep
MRNRKQEIVGGAGQGTVWDGRRPRERIGDNKQTNESVAGALGGEALREAPAVVAVVVVHVVLPGPGDGAPLGGVELAAHPAVGAGGAGERAAVAVGHAGVGGVAAVGDGEGRGGPVHLHLPLLRGPVAAVPQRGVHRHGLPARVRQVRVPLEAPHEEVVHLEDDVLVVPDDGVGVEVGGRVEPQVELVLLLAVAVGPHVGVQHHGLPAGVAHELHVDLVVPGPVARRQVEGGHGARGVARDQPHLDAELPVQVLLPRAEGAAGLLRQDQRRHLLPLRVVVRAHVALRRELLVQPRVRRRRGGQESQSEEQGHGTPRHAVHAHASALLRLSEMRWDGMRGEEAASCRPVADWLVE

SEQ ID NO: 46452 - protein, 497 aa, Zea mays
  Clone ID: 700332174_FLI.pep
PCRKAQPAQWPQLPPQARRGRVGSSVSSPGFQVKSGQANSVEEGTSKKGRRWAAMEDAMAADGKSVLQGRYELGRVLGHGNFGRVHAARDLRTGRSVAVKVVAKDKLERAGMAEQIKREIAVMKMVSHPNIVELHEVMATRSKIYLALELVRGGELFSRIARAGRVREDVARCYFRQLVAAVDFCHGRGVFHRDLKLENLLLDEVGNLKVADFGLSALAGHARSDGLLHTACGTPSYVAPEVLGGKGYDGAKADLWSCGVILYVLLVGSLPFHEDNLMVMYRKMQRGEFLCPPWVSADARKLIGELLDPDPSTRITVARLVETPWYRKPLPVLPPLNLKEPTPDARRATSDKEEPEVLNAFHLISFSEGFDLSPLFDQGRGGGVGRSSAGGIRFVTREAASSVVSRLESLVTGRGANMRVTKSGSRGVRLEAVSRGRSGARLAVAAEIFSVAPSVLLVDVKKDGGDTMEYRSFCSEELRPALKDIVWASSQDTPGAA

SEQ ID NO: 46453 - protein, 261 aa, Zea mays
  Clone ID: 700334133_FLI.pep
RGAGRGRRGVGARPDGGANDAHAHAGNPRGARAHDGVQQHHGRAGQGRAVQHLHPAAQVHGRGVADRQPGRQRRERGHGVRAHGQRVPVAALGHAQLAVGPGQERAGAVPRGVRRHPHVAVRHRQQPAPHAGRQRLAGGVPTQRHLLRGPAGQRHHGRRHRHRRQLPLLGRQPRRLPGQQGAAPHEALRRRGCARARAARAGQEEGQDAGGRRRLARRGGGVPGRHDHVARAREADAGWPRHGSCARRRVVGAVVTARSVS

SEQ ID NO: 46454 - protein, 278 aa, Zea mays
  Clone ID: 700334458_FLI.pep
VAVGSFLSSMVLVVTKESKKFCPEAIGFLQSLLVTSLKGKVETHLHNQINDQFMELKTLKLWLSIHDHVHEVNPVNILEIVGMDPDAPYFSSDNFKAGVLLSVAECLRGFVIIHEGLSSFPEIFLPISSLLQEILDRSELPGSLQDIFHEVIDLIKKRSDEHYASREPLRMRKKKPEPIKQLNPKFEENYIKGLDYDPDRERAQMKKLRKRVKSEMKGAKRELQKDNYFLSAVKEKERRKRDEERAEMYGKAMAFLQEQESAFKSGQLGKGKGRKRMR

SEQ ID NO: 46455 - protein, 505 aa, Zea mays
  Clone ID: 700282303_FLI.pep
QKHQQHVASVVQRLAREKDKWLSSSPDAMKINMEFLQRCIFPRCVFSMQDAVYCATFVQTLHSLGTPFFNTVNHIDVLVCKTLQPMICCCTEFEAGRLGRFFHDTLKMAYYWKSDESVYERECANKPGFAVYFRYPNSQRVSYSQFVRVHWKWSSRITKALNQCMESKEYMEIRNALIVLTKISSVFPVIRKSGVNLEKRVAKLKGDEREDLKVLATGVAAALAARKSSWLSEEEFGGGHIDLKPATARSVLGNQSADLSMAKDQNARAKSVENRHERSEGAMKPDVQQKKSTVASNGSDILIPSSSVQGKSSVVARAVDEPPKPVSDEGVKVSTKSTSEFETRATQKRAGNAGKVMKHDVAKEDAKAGKPTSWNVNQQVSTVDREVSHAADAAQETSTTISNGNLHPAPHKVSSSSQRNAVTHNGAANPSVESTDMIDSPVRQQKRPPVEEQDRSGKRRKGENEPDLSEHHVDKEKSLDSRGGDKFRSVDHEKSANEEQNLRAG

SEQ ID NO: 46456 - protein, 150 aa, Zea mays
  Clone ID: 700201343_FLI.pep
LVNNIYYTNLQMGNPWIYMYPEGLKDLLMIMKNKYGNPPIYITENGIGDVDTKETPLPMEDALNDYKRLDYIQRHIATLKESIDLGSNVQGYFAWSLLDNFEWFAGFTERYGIVYVDRNNNCTRYMKESAKWLKQFNAAKKPSKKILTPA

SEQ ID NO: 46457 - protein, 402 aa, Zea mays
  Clone ID: 700201552_FLI.pep
QQQQQVAFFILASSVVFLLLDREAGLQEEPAIRAGGGGGDEECSWSRGRWVYDNVSRPLYDGLKCAFIFPEVACDKYGRKDVMYQHWRWQPHGHGCDLPRFDAMKLLEELRNKRLVFVGDSVNRNQWVSLVCMVEASIPDDRLKMRIFNGSLISFKALEYNATIDFYWSPLLVESNSDNPIIHRVEYRIIRADRIEKHASVWRDADVIVFNSYLWWRKQKDDMRMKVMYGSFEDGDAKLDEMEMADGFEIAIKKLTEWLAKNIDKNKTRIFFAGSSPTHSWASNWGGQDKNKCLNETEPISYRPGGGYKAATTDYSLMAMARSYFRRTLEPRGIRVQILNITELSDYRKDGHPTVFRRQFVPLTKEQIADPASYADCTHWCLPGVPDVWNEFLYGYLTQQSK

SEQ ID NO: 46458 - protein, 152 aa, Zea mays
  Clone ID: 700202053_FLI.pep
VLQCNGQQARLHLGFVPTTVSDQLDIYVSSASASSLPHLRAAATRSHGSGRLNRKRRWACEGAAGGEAFSSAWASETRRWPSCYCSQPACPAPSLQSRSRRARGPWISKASSWVRFLRTSSPRMPLPPWTPMTWLHHGLPSLPPLVSLVRCC

SEQ ID NO: 46459 - protein, 202 aa, Zea mays; identical to SEQ ID NO: 41788
  Clone ID: 700205986_FLI.pep

SEQ ID NO: 46460 - protein, 154 aa, Zea mays
  Clone ID: 700170434_FLI.pep
KQLERDYSALRDDYDALLCSYESLKKEKHTLLKQLEKLAEMLHEPRGKYSGNADAAGAGDDVRSGVGGMKDEFADAGAAPYSSEGGGGGKFAHFTDDDVGALFRPSSPQPSAAGFTSSGPPEHQPFQFHSGCWPSSTEQTCSSSQWWEFESLSE

SEQ ID NO: 46461 - protein, 169 aa, Zea mays
  Clone ID: 700193275_FLI.pep
NYRSVLNYTRKQLVHALIRLCHWPPLHYITLAQASSYTYLSISHKRNSIYKKMSQHLCTTREIRGPAGRTLQGAATFSLASGAISSPSTPGSPPATPRLSSTFSQFLAGPFQERSWIMQFLTISSYAGVPTTLMARCNVVATFLTSAGSTTLQSTLRRRAFRIASPAAG

SEQ ID NO: 46462 - protein, 369 aa, Zea mays; identical to SEQ ID NO: 42422
  Clone ID: 700208858_FLI.pep

SEQ ID NO: 46463 - protein, 258 aa, Zea mays
  Clone ID: 700208940_FLI.pep
CRCRCSCYSGKWQLCLRHDDAAGPQVVLHSMFRWRLDGLRLRRPPGDRGSARLLRAEDVRQAGLQQQDGGAVLEHLEVHARVVQAPVLLLADAEVGREGGHLEVSGAAAEVCGQDVEGVDDADGLRGGAPDVGEGLADAGAVETLDVVPSPNAAVKDVEYLVGHVLEGRRRRHYGRLHVVRESPGDGGEVARADEGVVAAYLHQLPGAHQDGAELQQPPPTGPGRRRSRRLHVEEDDLISHRHFVGSASYSSTYYLCR

SEQ ID NO: 46464 - protein, 437 aa, Zea mays
  Clone ID: 700209195_FLI.pep
AVSGRMRELHDEHHMKSLGLQVSSPGYDRQAVADHANNLASKIRINLTNSMKALGVDILTGVGTIVGKQKVRYGKAGFPDKEITARNIIIATGSVPFVPKGIEIDGKTVFTSDHALKLESVPDWIAIVGSGYIGLEFSDVYTALGSEVTFVEALDQLMPGFDPEIAKLAQRVLINPRKIDYHTGVFASKITPAKDGKPVLIELIDAKTKEHKETLEVDAALIATGRAPFTKGLGLENINVVTQRGFVPVDERMRVMDADGNVVPNLYCIGDANGKLMLAHAASAQGISVVEQISGKDHILNHLSIPAACFTHPEISMVGLTEPQAREKADKEGFEINVVKTSFKANTKALAENEGDGIAKLIYRPDTGEILGVHILGLHAADLIHEASNAIALGTRVQDIKFAVHAHPTLSEVLDELFKAAKVNSGVSHSVNEPVAA

SEQ ID NO: 46465 - protein, 259 aa, Zea mays
  Clone ID: 700211306_FLI.pep
SRRPGHQLHAGQVAAELLEQHQQVAAGVEPGARDVVVPLGDVAAAGLALGLAVRPRVAAAAAAAGGGCLVRPVPPDVAAVHPRLALAHAAHVQGHRRVAGRRAEVGLVPCQGLLPCRAAPLDGRAPGDGLHAQRLAVEADLVGPLLVAEVPLPLVEAGQRDRTEHSDVPRLVVGALVREADCCAEDGDLVAPLPHLHVAAVCQLGAVVAAIHGAVGLAVDEHLQGVAGRVDGQLRPLSGLQELLVRVDVHVGGVPQVVR

SEQ ID NO: 46466 - protein, 412 aa, Zea mays
  Clone ID: 700211352_FLI.pep
RSGSSNPGAVMATKRSVGTLGEADLKGKKVFVRADLNVPLDDAQKITDDTRIRASVPTIKFLLEKGAKVILASHLGRPKGVTPKYSLKPLVPRLSELLGVEVVMANDCIGEEVEKLAAALPEGGVLLLENVRFYKEEEKNEPEFAKKLASVADLYVNDAFGTAHRAHASTEGVTKYLKPAVAGFLMQKELDYLVGAVANPKKPFAAIVGGSKVSSKIGVIESLLAKVDILILGGGMIYTFYKAQGYSVGKSLVEEDKLELATSLIEKAKAKGVSLLLPTDIVVADKFAADAESKIVPATAIPDDWMGLDVGPDATKTFNEALDTTKTVIWNGPMGVFEFEKFAAGTEAIAKKLAELTTTKGVTTIIGGGDSVAAVEKAGLADKMSHISTGGGASLELLEGKTLPGVLALDDA

SEQ ID NO: 46467 - protein, 241 aa, Zea mays
  Clone ID: 700211381_FLI.pep
CAGTLYVANLGDSRAVLGRLVKATGEVLATQLSAEHNACYEEVRQELQSSHPDDPRIVVLKHNVWRVKGLIQISRSIGDVYLKKPEYNREPLHSKFRLRETFQKPILSSEPQITEHRIQPNDQFVIFASDGLWEHLSNQEAVDLVQSSPRNGIARRLVKAAMQEAAKKREMRYSDLKKIDRGVRRHFHDDITVVVVFLDSDAMSKASWSKSPSVSLRGGGVTLPAKSLAPFSAPAQLNGTH

SEQ ID NO: 46468 - protein, 185 aa, Zea mays
  Clone ID: 700211635_FLI.pep
IARVHTGSSLCPAPGYGHLSISIPQFGELEVGLFVVIKECLLICSIFLHKRAEDRVAQQGFVTWELKKTLLVATQKFLEVRVVKDQRVRSPGPLKTRPLFVAPSQGVATREGNNVLITQTHLLAKDLPQVVRTLGGIRKTALRWRLRLVLPAGVEGDLRPTGDLDGHNSGKLVEIGIGEGGELLL

SEQ ID NO: 46469 - protein, 436 aa, Zea mays
  Clone ID: 700211827_FLI.pep
QQSQRKVVLMSTVTLPTLSRCLVELEGLHHLPGEVGVVTAEVAVGGGLDEPVAALLQVEVDADHPGPEVEVLLHDLEDLLVGDRAGAVRVDEHGQGLRHADGVRHLHEAAAGEAAGHDALGGLPGHVGAAAVHLGGVLAGEGATAVGSPAAVRVDDDLAAGEAGVTVGPADDEAPGRVEVEDGLLVEVLLRDHGLDDVLLEVGGDLVVGDGLVVLGGDEHGVHADGHHGAALVHVLHRHLGLAVGPQPGAGAVLAHLGEARAQLGGQHVAQRHQLGGLVGGVPEHVALVARADLLGPLREVPVHALRDVGGLLLDVHQHLAAVGVEAHVVGGEPDLAAGVAHDLLVVHGRLGRDLAEHHHHVGLGAGLAGHLAVGVLREACVKHGVRHLVAQLVGVPLVHGLRGEKEALGRHCLLLALPTSCAAALYSGPASKDDF

SEQ ID NO: 46470 - protein, 368 aa, Zea mays
  Clone ID: 700217062_FLI.pep
RIMAFPQISRRALGLLLVIAAAAAIVSPATADEVVALTEADFEKEVGQDRGALVEFYAPWCGHCKKLAPEYEKLGASFKKAKSVLIAKVDCDEHKSVCSKYGVSGYPTIQWFPKGSLEPKKYEGQRSVEALAEFVNSEAGTNVKIAAIPSSVVVLTSETFDSIVLDETKDVLVEFYAPWCGHCKHLAPIYEKLASVFKQDDGVVIANIDADKHTDLAEKYGVSGFPTLKFFPKGNKAGEDYDGGRDLDDFVKFINEKCGTSRDPKGHLNQEAGLVPSLNPLVKEFLNAADDKRKEVLSKIEEDVAKLSGSAAKHGKIYVTAAKKIIDKGSDYTKKETERLHRMLEKSISPSKADEFIVKKNILSIFSS

SEQ ID NO: 46471 - protein, 479 aa, Zea mays
  Clone ID: 700217065_FLI.pep
STCKQETLQPSGRKLKHAAMLRLRACGGTAPASVPALVRSRLSRRSSSTAYAAATVASASSSSSTLEDLAAEHRGLAKVILKKGKTQIFRDGSPMVYSGAVDRIIGRPPPKSGDIVLVADGTEKPIGWGLYNSVSMFCVRLMQLEEEARRDPTCTLNMERLLEARISSAVGLRRSLGLPSTDTNAYRLINSEGDRLSGLIVDIFADVAVIASSAAWVEKYRQEIQFLVSTVNGVSHIKWRPSTDILKEEGLDISEHKEPASPCSTVKVMENGIIYLVSLEGQKTGFYADQRENRYIISLLSKDQRVLDLCCYSGGFALNAAKGGADNVIGIDSSGSALDLANENIVLNELNQGKVSFVKGDATTFMKGAISENELWDLVILDPPKLAPRKKVLQSASGMYRSLNALAMQVVKPGGLLMTCSCSGAMTQSGMFLKTIQGAASMAGRKVTVLRQAGAACDHPIDPAYPEGQYLSNYLLRVA

SEQ ID NO: 46472 - protein, 105 aa, Zea mays
  Clone ID: 700217113_FLI.pep
LKVLLLSHPKKDIRDTSEYEVFRRERKRRSLKDLAAEVLGAKIQQNEHCPIEDARAAMLIYNKHKKAWEKNMKEQFRFKKKLKKRGKKKTTESNGNDPNVPTVLL

SEQ ID NO: 46473 - protein, 382 aa, Zea mays; identical to SEQ ID NO: 41858
  Clone ID: 700217161_FLI.pep

SEQ ID NO: 46474 - protein, 280 aa, Zea mays
  Clone ID: 700336428_FLI.pep
VGRLRLLVVGGGELLVGVGDEEQLVDDAGEAAADEGPDPVHPLVAPLPADEGGAEGHGGVHGRAVEGAAHQDVGPHDEADGNGGDGAQAALLRVHRRGVHRVHQPEGHHDLQHQRLPHRHARQPEGARGLPARREAEQEARHGGPQQLRHPVQEPPEQGDVAAHEGAEGHGRVHVPAGDVRAHRHRHEQRERVRHRRRDQARRGRRAAAGQLAEGHAGALAGEDEDEGGDELSERRLEGARVVHLLVAPQGDPIDRHFHGPLASSRALVTTVIGAGVELS

SEQ ID NO: 46475 - protein, 185 aa, Zea mays
  Clone ID: 700341893_FLI.pep
PCFECPMFREKDAETREFLEAAKACVEICKSSGVPLLINDRVDVALACDADGVHVGQSDMPAWEVRRLLGPGKIIGVSCKTPAQAEQAWKDGADYIGCGGVFPTTTKANNPTLGFEGLRTVCLASKLPVVAIGGINAGNAGSVMELGLPNLKGVAVVSALFDRERVAAETRNLRSILMKNAYSRS

SEQ ID NO: 46476 - protein, 354 aa, Zea mays
  Clone ID: 700346834_FLI.pep
RFFTYEELYQITNCFSSQNLLGEGGFGSVYKGCLADGREVAVKKLKDGGGQGEREFHAEVDIISRVHHRHLVSLVGYCISDDQRLLVYDFVPNDTLHYHLHGRGVPVLEWPARVKIAAGSARGIAYLHEDCQPRIIHRDIKSSNILLDNNFEALVADFGLARLAMDACTHVTTRVMGTFGYLAPEYASSGKLTERSDVFSFGVVLLELITGRKPVDASKPLGDESLVEWARPLLTQALETGNAGELVDARLNKNYNEVEMFRMIEAAAACIRHSASRRPRMSQVVRVLDSLADVDLTNGVQPGKSEMFNVASTAEIRLFQRMAFGSQDFTTDFSQSSWNNSQSRGLDASGSRPL

SEQ ID NO: 46477 - protein, 334 aa, Zea mays
  Clone ID: 700347191_FLI.pep
STRGDSVRPKPEPAEPNGGVLEGDAALLAEMRGRIDEEIRKLDEKIADAEENLGESEVREAHLAKSLYFIRVGEKEKALEQLKVTEGKTVAVGQKMDLVFHTLQIGFFYMDFDLISKSIDKAKNLFEEGGDWERKNRLKVYEGLYCMATRNFKKAASLFLDSISTFTTYEIFPYDTFIFYTVLTSVITLDRVSLKQKVVDAPEILAVIGKVPHLSEFLNSLYNCQYKSFFVAFSGLTEQIKLDRYLQPHFRYYMREVRTVVYSQFLESYKSVTMEAMATAFGVTVDFIDQELSRFIAAGKLHCKIDKVAGVLETNRPDERNAFYQAPSSKGTSC

SEQ ID NO: 46478 - protein, 51 aa, Zea mays
  Clone ID: 700347377_FLI.pep
TLKLVRFSKCAGQRSNSAYKAKDFLPASYLRHSSLLPAVRNVASFVQKQSL

SEQ ID NO: 46479 - protein, 428 aa, Zea mays
  Clone ID: 700380047_FLI.pep
QQSQRKVVLMSTVTLPTLSRCLVELEGLHHLPGEVGVVTAEVAVGGGLDEPVAALLQVEVDADHPGPEVEVLLHDLEDLLVGDRAGAVRVDEHGQGLRHADGVRHLHEAAAGEAAGHDALGGLPGHVGAAAVHLGGVLAGEGATAVGSPAAVRVDDDLAAGEAGVTVGPADDEAPGRVEVEDGLLVEVLLRDHGLDDVLLEVGGDLVVGDGLVVLGGDEHGVHADGHHGAALVHVLHRHLGLAVGPQPGAGAVLAHLGEARAQLGGQHVAQRHQLGGLVGGVPEHVALVARADLLGPLREVPVHALRDVGGLLLDVHQHLAAVGVEAHVVGGEPDLAAGVAHDLLVVHGRLGRDLAEHHHHVGLGAGLAGHLAVGVLREACVKHGVRHLVAQLVGVPLVHGLRGEKEALGRHCLLLALPTSCAAALYS

SEQ ID NO: 46480 - protein, 747 aa, Zea mays
  Clone ID: 700380209_FLI.pep
QIIGSDYVQPSKQTARSISQSGIAGAGVYSELVNFRSSSNNGSTDQAPQMGTNYSYQILSDNHSSNNRAQNQLNFPEGKMAYNPSVNNEFGKGYPRAGYAKPKQSFSGPSVMVSSSPSQIRSQGHPGLPRAKYHSNHFNSDARQDDVQTRNPSGPNVFSGSGNKIQGSTGRIKAHSGGPQSNLRSLKLLRSVEQYYHTLQQMKWGPMTEHVLDNLHCKIDAFQANQVLKLLHDHTVALGFFQWLKRQPGFKHDGHTYTTMIGILGQARQFGVLKELLDEMSRAHCKPTVVTYNRIIHAYGRANYLKEAVKVFEEMQEAGYEPDRVTYCTLIDIHAKAGYLDIAMDLYGRMQEVGLSPDTFTYSVMVNCLGKGGQLAAAYKLFCEMIENGCTPSLVTYNIMIALQAKARNYENVVKLYKDMQVAGFRPDKITYSIVMEVLGHCGHLDEAEAVFIEMRRDWAPDEPVYGLLVDLWGKAGNVDKALGWYQAMLQDGLQPNVPTCNSLLSAFLKMNRFQDAYIVLQNMLAQGLVPSVQTYTLLHSCCTVGQSQMGLCCQLMAITGHPAHMFLLYLPDAEAGGQNVRDHTGYFLDMMHSEDRESKRGLMDAVIDFLHKSGLKEEAGLIWEVAAQKNVYPDSVREKSSSYWLINLHLMSEGTAVTALSRTLAWFHRQVLTLGTGPERIDIVTGWGRRSRVTGSSLVRQSIQKLLNLFESPFFTTRGNTGCFVGCGEPLNKWLHNPYVERMHLL

SEQ ID NO: 46481 - protein, 107 aa, Zea mays
  Clone ID: 700350407_FLI.pep
IRVSSRLRFEKVSRDSTLDPRRKAYLIQNLMTSRWIAAQQKSPQPSVEGHNGCTRRPGCVPSYRDPGKQIFGCEHYKRNCKLVAACCNKLFTCIFCHDKVSDHTMDR

SEQ ID NO: 46482 - protein, 450 aa, Zea mays
  Clone ID: 700350737_FLI.pep
PPPLPSSPVFLHTPLPPQERRGGGKGKGKGKMFGRAPKKSDNTKYYEILGVPKSASQDDLKKAYRKAAIKNHPDKGGDPEKFKELAQAYEVLSDPEKREIYDQYGEDALKEGMGGGGSHADPFDIFSSFFGPSFGGGGGSSRGRRQRRGEDVVHSLKVSLEDLYNGISKKLSLSRNVICSKCKGKGSKSGASMRCPGCQGSGMKVTIRQLGPSMIQQMQQPCNECKGTGESINEKDRCPGCKGEKVVQEKKVLEVHVEKGMQHSQKITFPGEADEAPDTVTGDIVFVLQQKDHSKFKRKGEDLFYEHTLSLTEALCGFQFVLTHLDNRQLLIKSNPGEVVKPDQFKAINDEGMPIYQRPFMKGKLYIHFTVEFPDSLAPEQCKALESVLPPKPSSKLTDMEIDECEETTMHDVNNIEEEMRRKQAHAAQEAYEEDDEMPGGAQRVQCAQQ

SEQ ID NO: 46483 - protein, 128 aa, Zea mays
  Clone ID: 700350912_FLI.pep
DQIERVTQILGRRTKNNPCLIGEPGVGKTAIAEGLAQRIANWDVPETIEGKKSVGSMDEDDDSPASGSGRHKKKLRLIMGLHDGSAKVQTGISLNTLGSLGYEIDHVWRRRIAVCHSKLGDQPKRSHG

SEQ ID NO: 46484 - protein, 336 aa, Zea mays
  Clone ID: 700351364_FLI.pep
DVPAVADPGTERGEGALIQCPYCDSEAMHKLAQILLPGLAAVCVDGTTGDPFRSPSAVAVDLRKEMVDYITQRSDSFIADALIESEANQDAPGAEVPDDPFETVSVFMDDFASTKRNIIGHVSGWLLTDSRDDKIDDFVQEMEATKFWPLERREAVAELLLKNVDLKTRFHCPEKYENEERLEDHKAQCSFRPVACANDGCRAKVSVRCVKDHDAACVYKLLQCEQGCDKRLLRRDMDRHCVTVCPMRPMKCPFGCDSSFPDRDLERHCAEFLQPHLLMVLKAIHKKGRSEQDLKDLAQKLEKFDGDGKLAKALDARPLTNVVKDLEAKMKGGQSS

SEQ ID NO: 46485 - protein, 363 aa, Zea mays
  Clone ID: 700351502_FLI.pep
NMSCFACCGDEDTQVPDTRAQYPGHHPARADAYRPSDQPPKGPQPVKMQPIAVPAIPVDEIREVTKGFGDEALIGEGSFGRVYLGVLRNGRSAAVKKLDSNKQPDQEFLAQVSMVSRLKHENVVELLGYCADGTLRVLAYEFATMGSLHDMLHGRKGVKGAQPGPVLSWSQRVKIAVGAAKGLEYLHEKAQPHIIHRDIKSSNVLLFDDDVAKIADFDLSNQAPDMAARLHSTRVLGTFGYHAPEYAMTGQLSSKSDVYSFGVVLLELLTGRKPVDHTLPRGQQSLVTWATPRLSEDKVRQCVDSRLGGDYPPKAVAKFAAVAALCVQYEADFRPNMSIVVKALQPLLNAHARATNPGEHAGS

SEQ ID NO: 46486 - protein, 410 aa, Zea mays
  Clone ID: 700356834_FLI.pep
MACTNNAMRALFLLVLFCIVHGEKEESKGIDAKASGPGGSFDITKLGASGNGKTDSTKAVQEAWASACGGTGKQTILIPKGDFLVGQLNFTGPCKGDVTIQVDGNLLATTDLSQYKDHGNWIEILRVDNLVITGKGNLDGQGPAVWSKNSCTKKYDCKILPNSLVMDFVNNGEVSGVTLLNSKFFHMNMYRCKDMLIKDVTVTAPGDSPNTDGIHMGDSSGITITNTVIGVGDDCISIGPGTSKVNITGVTCGPGHGISIGSLGRYKDEKDVTDINVKDCTLKKTMFGVRIKAYEDAASVLTVSKIHYENIKMEDSANPIFIDMKYCPNKLCTANGASKVTVKDVTFKNITGTSSTPEAVSLLCTAKVPCTGVTMDDVNVEYSGTNNKTMAICTNAKGSTKGCLKELACF

SEQ ID NO: 46487 - protein, 599 aa, Zea mays
  Clone ID: 700438944_FLI.pep
IEYQSKRGYIELDYFGRTVGIKIMPVGVHMGQLELGLRLPDREWRLSELQRQFQGKTVLLGVDDMDIFKGINLKLLAFENMLRTHPKWQGRAVLVQIANPARGRGKDLEAIQAEIEESCQRINGDFGQSGYSPVVFIGRDVSSVEKIAYYTIAECVVVTAVRDGMNLTPYEYVVCRQGAPGSQSVSEVSGPKKSMLVVSEFIGCSPSLSGAIRVNPWNIEATAEAMNEAISMPEQEKQLRHEKHYRYVRSHDVAYWSKSFIIDLERVCKDHFKRTCWGIGLGFGFRVVALDPHFTKLNMDSIINAYELSESRAILLDYDGTLVPQTSLNKEPSPQVLSIINTLCSDSRNIVFLVSGRDKDTLGKWFSSCPRLGIAAEHGYFLRWSREEEWQTCTQALDFGWMQMAKPVMNLYTEATDGSYIEAKESALVWHHQDADLGFGSSQAKEMLDHLESVLANEPVSVKSGQFIVEVKPQGISKGIVAERILASVKERGKQADFLLCIGDDRSDEDMFENIADIIGRNLVAPRTALFACTVGQKPSKAKFYLDDTFEVVTMLSALADATGPELETDSADESVAYISSLDIGDEQSESSDKPVEGS

SEQ ID NO: 46488 - protein, 104 aa, Zea mays
  Clone ID: 700439379_FLI.pep
LVSAIVLSFCFFVIPCSFFVIIEQAPPNIGYLQSMCICYNANHKGNCKFPEAGAVIMGNTENSGLYIRSFRLRSIDSALHIEDDECSCHVSQKMLIGIHVFISL

SEQ ID NO: 46489 - protein, 123 aa, Zea mays
  Clone ID: 700444748_FLI.pep
LPLRRSPHASGATSTMAPKKEKAPPPSSKPAKSGGGKQKKKKWSKGKQKEKVNNAVLFDQATYDKLLSEVPKYKQITPSILSERLRVNGSLARRAIKDLMAKGLIRMVSVHSSQQIYTRATNT

SEQ ID NO: 46490 - protein, 155 aa, Zea mays
  Clone ID: 700444772_FLI.pep
LVTFPNLWLPISLFFQSLLSFPDMLHLSNLAARPGRVVGPVLPFESASVTDQHIARRVARNPAVPPATNTSSVYCYHLKSDSSDRQEHHLEREKDRRQYRPGQHFMDAKVAPEMGRDIRPSQYYVSRGLPKADLTDRATLHRSALHGVAPFNGIA

SEQ ID NO: 46491 - protein, 293 aa, Zea mays
  Clone ID: 700447102_FLI.pep
ESMAVLRASPPPFLPHPLSRPSQCKRRPTCRVVAATARPSPAPSRPRSGGVHGGRPKRGLLAARRRPAEGRVPCLRATEAGVGAAGVAKEEDEYLAREAGWGVRRMARVGEEMRRVAQVQAEAFHVPVALFNDFFFDFFKAEVLSALIYRVRNSPPDRYACLVAEEAEAADQPSKAPYEKIVGVVDCTVQDEDGILKHLRGADEYLYVSGIAVLPPFRRRKVGTALLKACEALGLQWRHVFMVLRAYEDDDGARGLYSKAGYRVVSRDPDWVSWVGRRRRVVMVKELPVHDDQ

SEQ ID NO: 46492 - protein, 367 aa, Zea mays
  Clone ID: 700447956_FLI.pep
SVYPSVCKMIRSYCMSPSSHTGWTRVIVEKPFGKDLNTAEELSTELGQLFQEEQLYRIDHYLGKELVQNLLVLRFANRLFLPLCTLAMLSRFQRGKNKEDFGTEGRGGYFDQYGIIRDIIQNHLLQVFCLVAMEKPVSLKPEHIRDEKVKVLQSVEPIKHEEVVIGQYDGYKDDPTVPDDSNTPTFASVVLRVHNERWEGVPFILKAGKALNSRKAEIRVQFKDAPGDIFRCKKQGRNEFVIRLQPSEAMYMKLTVKKPGLEMATEQSELDLSYGMRYNDVKIPEAYERLILDTIRGDQQHFVRRDELRAAWEIFTPLLHDIDGGKLRSVPYKPGTRGPQEADELSRRMGYVQTHGYVWVPPTLSKV

SEQ ID NO: 46493 - protein, 539 aa, Zea mays
  Clone ID: 700452520_FLI.pep
TPHHTHRVAHPRHARAAAAEATGGWAPMGCCGSSQRAGTHPEKKPPGALPPHRPSYSLNQHQAPAPPPPSAARAGARQVPPLKEFSLAELRAATAGFAAGNIVSESGEKAPNFVYRGRLDAGRRAIAVKKFTKMAWPDPKQFAEEAKGVGKLRHCRLANLIGYCCDGDERLLVAEFMPNDTLAKHLFHWENQTIEWAMRLRVAYYIAEALEYCSTEGRPLYHDLNAYRVLFDENGDPRLSCFGLMKNSRDGKSYSTNLAYTPPEYLRNGRVTSESVIFSFGTILLDLLSGKRIPPSRALDMIKGNNIQVLMDSHLEGNYSTDEATTLVDLASQCLQYEPRDRANTKKLVSVLEPLQIKSEVPSYEMLGIPKHEEEAPPPPQPQRPLSPMGEACSRTDLTAIHQILVNTHYRDDEGSNELSFQEWTQQMRDMLEARKRGDFAFRDKDFKAAIDCYTQFVDVGTMVSPTVYARRSLCHLMCDQPDAALRDAMQAQCVYPDWPTAFYMQAVALAKLNMQSDATDMLNEASQLEEKRQKNTKP

SEQ ID NO: 46494 - protein, 390 aa, Zea mays
  Clone ID: 700453111_FLI.pep
FIDMVGNYFWMEGATRWLYPEALDEPCPLLQRVEVALDVLLDLNGPVARARALLVEEPRQRRHQAPDGRLLEHDDGGPGPLGVREHPVLDAGVGAVGEHVQDVGDVDDEGARQRAHGEPPAAPADLQAGRVVHVQQQREAQPVRVRRDAHHLLPLAAGRVVVDRHALPLPREGVLQRLRLHPEVGRHEPQEPHCEADHLYRVDVERVPERGWICRPHLHVPVLDWLRDENHALCPVQLAAGRSAVVVSESFEAVPSDRHLGLAVQRGAEELHRGVFHPLHHRFVHSMVCQLKETPVSAGVAELGDLRRRQLRVEEPGHVDDRQLVALVRADDDAVKDLLRPDVLLRDLLRVGERCSCSVGDLIPVDNTVIVKSLGGLHCSASAIAAPPSS

SEQ ID NO: 46495 - protein, 508 aa, Zea mays
  Clone ID: 700458002_FLI.pep
GSQNGVQMLSPSEIPQRDWFPSDFTFGAATSAYQIEGAWNEDGKGESNWDHFCHNHPERILDGSNSDIGANSYHMYKTDVRLLKEMGMDAYRFSISWPRILPKGTKEGGINPDGIKYYRNLINLLLENGIEPYVTIFHWDVPQALEEKYGGFLDKSHKSIVEDYTYFAKVCFDNFGDKVKNWLTFNEPQTFTSFSYGTGVFAPGRCSPGLDCAYPTGNSLVEPYTAGHNILLAHAEAVDLYNKHYKRDDTRIGLAFDVMGRVPYGTSFLDKQAEERSWDINLGWFLEPVVRGDYPFSMRSLARERLPFFKDEQKEKLAGSYNMLGLNYYTSRFSKNIDISPNYSPVLNTDDAYASQEVNGPDGKPIGPPMGNPWIYMYPEGLKDLLMIMKNKYGNPPIYITENGIGDVDTKETPLPMEDALNDYKRLDYIQRHIATLKESIDLGSNVQGYFAWSLLDNFEWFAGFTERYGIVYVDRNNNCTRYMKESAKWLKQFNAAKKPSKKILTPA

SEQ ID NO: 46496 - protein, 368 aa, Zea mays
  Clone ID: 700458068_FLI.pep
KRTLAMASEVVRPSDAELLKAQADIWRLSLSYLTPLSLRCAVELGIPTAIYRHGGAASAAELVTALSLPSTKLPFLRRLLRLLAASGVFTVDKQSSEEERYRISPVSYLLVDGIPHEDHMNHTALVLTCTSTRYIEAGIGLAEWFKRDVVTSPFEELHGATLFHESMGSLDADFHDMASEALDAHDNFGIEIAMREFRDLFEGIQSMTYCCGNFGDDKGARAIVKAFPHIKCTVLAPPKIIATKPADGAMINYVEGDMFSFIPPAQTVVLKLVLHHLTDEECVKLLAQCRKAIPSRKDGGKVIIGDIMIDHSGPMLETHLLMDIGMMTMTKGRQRDEKEWSELFTKAGFSEYKILKEFGARVAFEVYP

SEQ ID NO: 46497 - protein, 269 aa, Zea mays
  Clone ID: 700458338_FLI.pep
SSPATHLRPPRHGIEEEGRAHRDGGCGGDAAADDDDVVGRGRRLRGGPGGVLGAVGGAGDVPDVRAGAGDGDGADARLLRGPQGGAAEQPQVPVRAGQGPGRPQSRPQAQRRQGARPPRRLPRARQHLRLPQAAGPAGRLQGRTGVRAVREAAGCGGGAGRRTHQWTQQRGGEHDRGRAEERSLSRRSVVGSGEGRWCWWRRTRGGAARRAFPAPARVDNNHFTRGQRPESRRFGWRRALPTCGVLRVRACVVGYFSHYIGKRSYYLWM

SEQ ID NO: 46498 - protein, 548 aa, Zea mays
  Clone ID: 700458614_FLI.pep
VRFKGDLDLWFRYLEFCRDKRHGRMKQVLAQAIRFHPKVPGLWIYAAAWEFDQNLNVAAARALMQSGLRSCPQSEDMWIEYLRMELTYLNKLKARKVALGEDVKTLQKKDNDASQWKEENKELFMPLNEQVKDPKEPGSAGDALEEKEDLFWRQGLLIIQTIYHGAVEALPSSLTLRKKFLEILNSVDLAHSDELKLEVLDDLKRDFSHSEDYWDWFARLQLSNLNSSSNSNRKDAISNKLNRSIQVYDEAIRKLPNSKMYSLYAKFWMDVIYTDREDSVTLFQDSEFDASEFTSSILKVYENAESCGCLTEDLACQYISLYLKLERLEEAKTLAEKLCDGPLSNAANLWSLRFTMEINSIATAPGSSSLSKENLSSLLDLFSTVLSKLSVTEAERLWHMAMKLFSHDKVCFEKLVKCAMLSLSLAGGSDSGASVSSAIVGWYLQRDGVKHARKMYKRLLALPRPSLKFMQYCIALEANLASLGDNGALKDARRLYDSALDLYPQEREVWRSYYDLELKMGTSESANAVYSRARKVLGDSTALTAPRG

SEQ ID NO: 46499 - protein, 161 aa, Zea mays
  Clone ID: 700431227_FLI.pep
LEDLEKHIRDVNALVTVVRSVRCQVDLNEVFNRQAYGAKNSSHLQELLDYSKSVPPSRRHDNSISTLCIYEQDSVNLAKVESWLEDLLWEKKSSMDIYRCKGILYIHDSDQVHTLQAVREVYEVVPARKWSETESRMNKIVVIGRNLDINVLQDSFSGCKS

SEQ ID NO: 46500 - protein, 217 aa, Zea mays
  Clone ID: 700431780_FLI.pep
EMAQAMASMTGLSQGVLPSRRAANRARTAAVVRASAEAQAQAQAGRRAVLGLVATGIVGGALSQAVHAETVKTIKIGAPPPPSGGLPGTLNSDQARDFDLPLKERFYLQPLPPAEAVARVKTSAQDIINLKPLIDKKAWPYVQNDLRLRASYLRYDLKTVIASKPKEEKQSLKELTGKLFSTIDDLDHAAKIKSTPEAEKYFAATKDALGDVLAKLA

SEQ ID NO: 46501 - protein, 302 aa, Zea mays
  Clone ID: 700378306_FLI.pep
GSHTMQSTYTSIDVHLGQSYSFLVTADQPPADYSIVVSTRFTTPVLTTAAILHYSSSNGAASVPPPPAPTVEIDFSLNQARSIRWNLTASGPRPNPQGSYHYGLVNTTRTIRLANSRATINGKLRYAVNGISFVPADTPLKVADFYSIPGVFTLGSMPDNPTGGGAYLQTSVMAANMRDYVEVVFENAENLVQSWHIDGYAFWVVGMDGGQWTPASRQGYNLRDAIARYTLQVYPQSWTAIYMPLDNVGMWNVRSESWARQYLGQQFYLRVYSPANSWRDENPIPKNALLCGRASGRRTRPL

SEQ ID NO: 46502 - protein, 122 aa, Zea mays
  Clone ID: 700337916_FLI.pep
VTGPHYLGSQSPSPIQRNLRFITIAGFNITIAEIVGLAPHGQPCGVDNWQSQYSALEPAYLNSSGTCMPKPRFNFSIVGASFPRLRSFFPVASSITLPDISIEYDMPDVRGSPLPTSKSKSL

SEQ ID NO: 46503 - protein, 74 aa, Zea mays
  Clone ID: 700338259_FLI.pep
EPLKEEQYYEVREPFSVMSLLKSPMGLMVGFMVLMVFVMPKMMENIDPEEMKQAQEQMRNNPVSLSGLLARAQG

SEQ ID NO: 46504 - protein, 64 aa, Zea mays
  Clone ID: 700340259_FLI.pep
SFRHFKSNGKAHRPGPDNIIDFELLSHYEMMSLEEQLEIAQQIGTTRSQILSNFSDFSLGTSFL

SEQ ID NO: 46505 - protein, 411 aa, Zea mays
  Clone ID: 700343714_FLI.pep
FYLNSFADKGGAQLFVPAGRWLTGSFHLISHLTLSLDKDAIIIGSPDSSHWPVIDPLPSYGRGRDLPGKRHQSLIFGLNLTDVIITGANGSIDGQGAIWWGWFHNHTLNYTRPHLVELMYSTNVVISNLTFKNSPFWNIHPVYCSQVLVQHVTILAPLNSPNTDGVTPDSSTNVCINHCYVRNGGDVIVIKSGWDEYGISFAQPSSNISISDITGETRGGSGIAFGSEMSGGISEVRAVGLRIVNSLHGIRIKTAPGRGGYVENVYIADVSMDNVSMAIRITGNYGEHPDDKYDSTALPVISNITIKDVVGVNIGVAGILEGIQGDNFSNICLSNVSLSVQSAHPWNCSLIEGYSNSVIPESCEQLRSNCRQTSICYDGSSSSVMSVQQPRHTSPTSRLLDLFTGVGFVLV

SEQ ID NO: 46506 - protein, 216 aa, Zea mays
  Clone ID: 700344745_FLI.pep
PRQAQQPPQHIALLISAMAEVEQQQDTPKLFNRWTFDDVQVNDISLNDYLAVNATKHAMYLPHTAGRYSKKRFRKAQCPIVERLTNSLMMHGRNNGKKVMAVRIIKHTLEIIHLLTDANPIQVVVDAIINSGPREDATRIGSAGVVRRQAVDISPLRRVNQAIYLLTTGARESAFRNIKTIAECLADELINAAKGSSNSYAIKKKDEIERVAKANR

SEQ ID NO: 46507 - protein, 337 aa, Zea mays
  Clone ID: 700344754_FLI.pep
TLPALYLPLSLLLALGKAAAPLRLGLRRQRHPLRLSPVASRPRLRSHRPVTLLKMVFLSNEDAWIHDEDIMDDVDSDVEESDSEGDSGEEAQAKPADKAIYNKEAILEKLEDIAWPKNVDWMHKLTVEHDQGEKVDVNDDLARELAFYTQALDGTRQAFEKLQSMKVRFLRPTDYYAEMVKTDAHMHKIKGRLLSEKKRIEEAEERRKARESRKKAKEVQAEKKKERAKQKKEQIESVKKWRKQRQQGGFTKGNDDVPDLNFEGEEGFKQSKKKRPGVSPGDRSGGLAKRGKGGKNGRARDSKFGHGGRKGLKKQNTAETTNDFRGFNQGGEPQNKK

SEQ ID NO: 46508 - protein, 245 aa, Zea mays; identical to SEQ ID NO: 38748
  Clone ID: 700345019_FLI.pep

SEQ ID NO: 46509 - protein, 446 aa, Zea mays
  Clone ID: 700345689_FLI.pep
FAAHEHPDTHARAWPAASQPDTVIRSVCADTVTQAKPHNTIGASQHNSHVHLHAEVQTVSLHFGVSFIIHVLLGDLLKRHALGLRHEHRHEHAQEVGSGEHEERVADADARRVAMVGLLGVLRRVQEPERADDGAGLAGRCRYAVARGPEPRREDLGRHDEGGAVGPEVCEEEGEPVEDDEAGVVGRLGPVLVRHPEREHEHGHHEEAHDLDPEPAHDVDEADGEPVARDGAAERDQRLGARDAVHLLDGVHGPRRRYPPDLGEDVLLEEVLAVEGDVQQEPRAAGGQQVEAMAPEELRREEAPCVGADHLALHLLLFCLDLLLEHLGHVGRGLLRVAGDERRVPRRLGHLHAPVVGERGRDGAEHEDDAPDIVGLRDERRLGVDEVGRGRERVPERRRDDDCHDSAEEDAEPLHGEHGGDEGAAGLLVGVLGHDGGAQRVVAADA

SEQ ID NO: 46510 - protein, 175 aa, Zea mays
  Clone ID: 700349150_FLI.pep
SSPLGRTGCHGMTPHTNLVPAVALGVQQLKKDLGGPKAFPPGIHEIHQFLDRFYMSRIGIRMLIGQHVALHDPDPEPGVIGLINTKMSPMTVARIASEDARAICMREYGSSPNVDIYGDPGFTFPYVTPHLHLMIFELVKNSLRAVQERYMDSDKLAPPVRIIVADGAEDVTIKV

SEQ ID NO: 46511 - protein, 435 aa, Zea mays
  Clone ID: 700349155_FLI.pep
EIREWWADKFSYENYKGSTPTLYIWNDMNEPSVFNGPEVTMPRDAMHYGDVEHRELHNAYGYYFHMATADGLLKRGEGKDRPFVLSRAFFAGSQRYGAVWTGDNSADWDHLKSSIPMVLTLGLTGLPFSGADIGGFFGNPEPDLLVRWYQVGAFYPFFRGHAHHDTKRREPWLFGERRTAIIREAIHMRYSLLPYFYTLFREASVNGIPVMRPLWLEFPDDKETYNNGEAFMVGPSLLAQGIYEEGQKSVSVYLPGKESWYDLRNGSPYKGSATHKLQVLEDSIPSFQRAGTIVPRKDRFRRSSTQMVNDPYTLVIALNSSGAGEGELYVDDGKSYDYQQGAFIHRRFVFADNKLTSFNIGPDNLGKKFRSDCVIERIIILGLRSGVKKAIIEPGNQELEIESGPISLRSGSSPVAPTIRRPNVRIADSWTIRIA

SEQ ID NO: 46512 - protein, 705 aa, Zea mays
  Clone ID: 700349226_FLI.pep
AANRGARTGGGELEASSVMAKSSADDAELRRACAAAVAASGARGEEVAFSIRVAKGRGIFEKLGRLAKPRVLALTVKQSSRGEANKAFLRVLKYSSGAVLEPAKLYKLKHLTKVEVISNDPSGCTFVLGFDNLRSQSVAPPQWTMRNIDDRNRLLFCILNMCKEILSYLPKVVGIDIVELALWAKENTLTIDNQVSIQDGQETSVATQTERKVTVTVENDLVSQAKEEEEDMEALLDTYVMGIGEADAFSERLKQELVALEAANVYQLLESEPLIEEVLQGLDAASATVDDMDEWLRIFNLKLRHMREDIASIESRNNGLEMQSVNNKGLMEELDKLLERLRIPQEFAASLTGGSFEESRMLKNVEACEWLTGAIRSLEVPNLDPCYVNMRAVREKKAELEKLKTTFVRRASEFLRNYFSSLVDFMISDKSYFSQRGQLKRPDHADLRYKCRTYARLLQHLKSLDKSCLGPLRKAYCHSLNLLLRREAREFANELRASTKAPKNPAVWLEGSGGSGHNGSSSDTSQVSDAYSKMLTIFIPLLVDESSFFAHFMCFEVPALVPAGSPNANKSKSGGNDPDDDLGLMDPDGNDLKPDSTSAELGTLNEALQELLDGIQEDFYAVVDWAYKIDPLRCISMHGITERYLSGQKADAAGFVRKLLDDLESRISVQFSRFIDEACHQIERNERNVRQTGILAYIPSSYPKM

SEQ ID NO: 46513 - protein, 340 aa, Zea mays
  Clone ID: 700349322_FLI.pep
HPRPVADGRRSREMAVDEVNSVYVGGLPYEANEEMLRDAFGYYGTIVSVKVINDHAVKGKCYGFVTFTHPRAAEQAIAGMDGKKLGNRIVRVNEVRTRGPRDFGRDGFRRDPRRYGRDPYWDRRDRERSYDRERDPYHDRDSDRSREHDRERDYEHGGFNREIDYPMDRDREGDERRPREHDRTAEMHNVDSDNDKDKEHVSRKSRPKGRDSRDLSSSSDGLQNDGKHQLDKTIQMREDLENEVNQIKDKISGKEQHIADLQKKAQKLEDELVAARKVSSERQLAVTDLYKHFLQLQDYNDRVKTAEQRLQSLVDAALVELDMAEDATTRDGSMYENGVL

SEQ ID NO: 46514 - protein, 194 aa, Zea mays
  Clone ID: 700381777_FLI.pep
VLTPSPVLAVGRVVAMAWSAAAVSRFAAASPPAAPISVRLGAAASRSSLSFSSGRRRPVAASLSTSATVVKEAVQTEKAPPALGPYSQAIKANNLVFVSGVLGLNPETRKFISENVEEQTEQVMKNMGEILKASGASYSSVVKTTIMLADLQDFNKVNEIYGKYFPAPAPARSTYQVAALPLNARIEIECIAAL

SEQ ID NO: 46515 - protein, 271 aa, Zea mays
  Clone ID: 700381966_FLI.pep
QYSTNDKQGADQESQVGAIKKHDRAQAHQTRPDQTKSFFQNRGGASCRRRLLRLEGLHHLPGEVGVVPPKVPVGRRLEVAPVAAFLEVEVDDDHAGPEVEVLLHDLQDLLVGDRAGAVRVHEHRQGLGHADGVGDLDDGTAGEAGGDDALGSLPRDVGPAAVHLGRVLAGEGAPAVGSPATVGVDDDLPASEASVAVRSADDEAARRVEVEDCLLVEVLLGDDWLDDVLLQVSSNLVVGDCLVVLGRDEGGAMVPIRVHTVLISTQQSRRW

SEQ ID NO: 46516 - protein, 466 aa, Zea mays
  Clone ID: 700464617_FLI.pep
NACHDNIVHQQKVLTRIHRDDDDKSSSDWASQPLQQTHETDTNRLVHLLDLGARATASSRSVLVHAAGASHVGTRALVHLGDDGVAKALQLLHLVIELVRLGELVGVQPADGRVDGVLDLLLVVGSQLGRDLLVLDRVAHVVGVVLQRVLGLHLLLVLLVLGLVLLRVLHHLLDLLLGQTALVVGDGNLVLLPRRLVLGRHVQDAVGVDVEADRDLGDTTGSRWDAGELELPKQVVVAGPGPLALVHLDQHTRLVVRVGGEHLLLLGGDGGVPRDKDGHHSSGSLQTQRERSDVKQKQVLHLLVALTTEDSSLDSSTIGNGLIRIDVLAQLLAVEEVLEQLLHPGDPSGATNKDNIMDAALVHLGIPQAFLNRLHALPEQVHVELLKPGTGDGGVEVNALVQRVNLNGGLGSGRQSSLGPLTRGPQPPESPRVASDILLVLPLELLDKVVDHPVVKVLTPKMGVAS

SEQ ID NO: 46517 - protein, 280 aa, Zea mays
  Clone ID: 700465160_FLI.pep
LPSPSLPLSLSLRRPKLRTQSNRHLTEMGRKFFVGGNWKCNGTTDQVEKIVKTLNEGQVPPSDVVEVVVSPPYVFLPVVKSQLRQEFHVAAQNCWVKKGGAFTGEVSAEMLVNLGVPWVILGHSERRALLGESNEFVGDKVAYALSQGLKVIACVGETLEQREAGSTMDVVAAQTKAIAEKIKDWSNVVVAYEPVWAIGTGKVATPAQAQEVHASLRDWLKTNASPEVAESTRIIYGGSVTAANCKELAAQPDVDGFLVGGASLKPEFIDIINAATVKSA

SEQ ID NO: 46518 - protein, 322 aa, Zea mays
  Clone ID: 700465566_FLI.pep
AIRVHELGGPEVLRWEEVEVGEPGEGEIRIRTTAVGVNFIDIYFRKGVYAAPTMPFTPGMEAVGVVTAVGPGLTGRKVGDVVAYAGNPMGSYAQEQILPAAVAVPVPPSVDHKQAASVMLKGMTAHVLLRRVFKVESGHTILVHAAAGGVGSLLCQWANALGATVIGTVSNQEKAAQAAQDGCHHPIIYTSEDVVARVKDITSGKGVNVVYDSVGKDTYKASLECLASRGFLVSFGQSSGKPDPIPTSDLASKSLFLTRPSLMHYTATRDELLESAGEVFANVANGVLHVRVNHTYPLSEAAQAHADLEGRKTSGSIVLIPG

SEQ ID NO: 46519 - protein, 146 aa, Zea mays
  Clone ID: 700466465_FLI.pep
FCLPIGKAKIEREGKDVTITAFSKMVGYALQAAEILSKEGISAEVINLRSIRPLDRAAINASVRKTNRLVTVEEGFPQHGIGAEICMSVVEESFAYLDAPVERIAGADVPMPYAANLERMAVPQVDDIVRAAKRACYRAVPMAAAA

SEQ ID NO: 46520 - protein, 328 aa, Zea mays
  Clone ID: 700443291_FLI.pep
ESSVTFIIGKFDGILGLGYPEISVGKAPPIWQSMQEQELLAEDVFSFWLNRSPDADAASGGELVFGGVDPAHFSGNHTYVPVSRKGYWQFDMGDLLIDGHSTGFCAKGCAAIVDSGTSLLAGPTAIIAQVNEAIGADGIISTECKEVVSQYGEMILDMLIAQTDPQRVCSQVGLCVFDGARSVSEGIESVVGKENLGSDVMCSACQMAVVWIENQLRENKTKELILQYANQLCERLPSPNGESTVSCQEISKMPSLAFTIANKTFTLTPEQYIVKLEQGGQTVCISGFMAYDVPPPRGPLWILGDVFMGAYHTVFDFGNDRIGFAESA

SEQ ID NO: 46521 - protein, 222 aa, Zea mays
  Clone ID: 700405069_FLI.pep
PTRRSPSSLPSPNTQHRSINTTSEEHYCESISDQHSNRTQKQEPKIRAVGESGHGGGSEGVVDGGDERRRGGGAQGPGRPLPLELRRRGRWRSGRGTRTAPARRALPGGAWRASSAPAPRGAVVVVVQVYVGAGVDEERGVDDGVLVVRQPLRRDGAVGAERHRRVGEHLGGQPVRSRGQHGDGLEATHPVAPGTMLPARGRRRATMRTTGSGRGRPRASCG

SEQ ID NO: 46522 - protein, 179 aa, Zea mays
  Clone ID: 700443832_FLI.pep
IGSRTDAHPLPSIIRLRCQNFPLSRVARRRPAVLLADTAPPAAKMPFKRFVEIGRVALVNYGKEYGRLVVIVDVVDQNRALVDAPDMVRCQMNFKRLSLTDIKIDIKRVPKKTTLIKAMEEADVKSKWENSSWGKKLIVQKRRASLNDFDRFKVMLAKIKRGGAIRQELAKLKKVAAAA

SEQ ID NO: 46523 - protein, 240 aa, Zea mays
  Clone ID: 700445278_FLI.pep
SSKMLRRARVPCAAAPAPAPAVVVAVALLALSAVAAADFFSPLAPIFSPVINSICSTVACGQGNCTVAPDTLGYRCDCRPGWTQLHVGDSLRFLPCVIPNCSIDSSCFNGSPAPAPALALTPLPPPKNFSLDPCELAYCGAGGTCRKNGSGMSYHCECKEGYSNLLNMTAMPCFQNCSIGADCASIGIHPSSTSNSPPAPPGSESISNQGSTAAPGSISQRILLPLLLMVVVSLAVGYVM

SEQ ID NO: 46524 - protein, 463 aa, Zea mays
  Clone ID: 700445305_FLI.pep
KTNIQILQQSVLLKYKYTINFLKEHAKEIYAEVRTAYIDTMNKVLSAHFRAYIQALEKLQMDIATSTDLLGVETRSTGFIFSIGKEPLKTRPSVFALGERINILKEIDQPALIPHIAEAKSQKYSYEVLFRSLQKLLIDTATSEYLFTDDFFGEESIFHDIFAGPIQVVDEHFNTVLLNCYDAIGIMLMIRIIHQHQLIMFKRRIPCLDSYLDKVNMSLWPRFKMVFDLHLNSLRNANIKTLWEDDVHPHYVTRRYAEFTASLVHLNVEHGDGQLDLNLERLRMAIEDLLVKLAKMFSKPKLQTVFLINNYDLTISILKEAGTEGGKAQQHFEEVLKSNIAIYVEELLLEQFSSLIRFVKSRPADETAANSEKASIAEVEPLVKDFASRYKAAIELMHYDVITSFSNFLCGMEILRATLAQLLLYYTRLSECVKRINGGSALNKDLVSISSILFEIKKYSRTF

SEQ ID NO: 46525 - protein, 211 aa, Zea mays
  Clone ID: 700445404_FLI.pep
TPQVCNFKFSRDCHNSRGQQGMCVVGAINNYTDQLYSYGQKTSYNLTESLMFLAHFVGDVHQPLHVGFEDDEGGNTITVHWYRRKANLHHVWDVSIIDTAIKDFYNKSMDTMVEALKMNLTDGWSDDIVHWENCKNKHATCANDYAIESIHYSCNYAYKDVEQDITLGDDYFFSRYPIVEKRLAQAGIRLALVLNRIFGGGEADDIPLKVQ

SEQ ID NO: 46526 - protein, 168 aa, Zea mays
  Clone ID: 700445436_FLI.pep
LTTRRESTSRTSRRRRLPRTWRRTTPSSSTRSRTTTRRLRPHHRHRRRRRKACWTRSRRSYPVATRSRKTLLPPPPRRPSTRHRRRRPTPRSTSAARMARRACWARSWTRYPATTRARVKKTARTPPASTRPAPKVAACACPSYVLAGRALGARSEALRWRVCASGLL

SEQ ID NO: 46527 - protein, 176 aa, Zea mays; identical to SEQ ID NO: 44942
  Clone ID: 700449542_FLI.pep

SEQ ID NO: 46528 - protein, 299 aa, Zea mays
  Clone ID: 700449815_FLI.pep
GFRPRAAALPDPTETTMAGGPAAVSFLTNIAKVAAGLGAAASLASASLYTVDGGERAVIFDRFRGVLPETVGEGTHFLVPWLQKPFIFDIRTRPHNFSSNSGTKDLQMVNLTLRLLSRPDVQHLPTIFTSLGLEYDDKVLPSIGNEVLKAVVAQFNADQLLTDRPHVSALVRDALIRAREFNIILDDVAITHLSYGIEFSLAVEKKQVAQQEAERSKFLVAKAEQERRAAIVRAEGESESARLISEATAMAGTGLIELRRIEAAKEIAAELARSPNVAYIPSGENGKMLLGLNATGFGR

SEQ ID NO: 46529 - protein, 475 aa, Zea mays
  Clone ID: 700449933_FLI.pep
PSCSAAEMAAPASTTAAAAAALLLLLLLSLAAAADMSIVSYGERSDEEARRMYAEWMAAHGRTYNAVGEEERRYQVFRDNLRYIDAHNAAADAGVHSFRLGLNRFADLTNDEYRATYLGARTRPQRERKLGARYHAADNEDLPESVDWRAKGAVAEVKDQGSCGSCWAFSTIAAVEGINQIVTGDLISLSEQELVDCDTSYNQGCNGGLMDYAFEFIINNGGIDTEKDYPYKGTDGRCDVNRKNAKVVTIDSYEDVPANDEKSLQKAVANQPVSVAIEAAGTAFQLYSSGIFTGSCGTALDHGVTAVGYGTENGKDYWIVKNSWGSSWGESGYVRMERNIKASSGKCGIAVEPSYPLKEGANPPNPGPSPPSPTPAPAVCDNYYSCPDSTTCCCIYEYGKYCFAWGCCPLEGATCCDDHYSCCPHDYPICNVRQGTCLMGKDSPLSLSVKATKRTLAKPHWAFSGNTADGMKSSA

SEQ ID NO: 46530 - protein, 279 aa, Zea mays
  Clone ID: 700450023_FLI.pep
ARTHSPPTATAQRPSPAPPGRPVPVPSPPLGAAGAGAAAFVLCAARPAGLTKQSLSAGAGRTNDAAGPQKLREKKPGTGASSDVGELDQLRGFPGRVRPRLRRHGAHPRAPGLLRRARRRSQARPRRPRQAAIPKGAGRGLAAGPRVPAQRAARRGQAREGGRGRRAVPAEGGPRGARRVRGPAPRAPRHVRLLPRCRSRSRRGGADRHRRRVHAHLRGQGRRLDARRRRPLQDVRGLVQEDPPHEELRGRQPISEDIIPAVIVVGVDAICPTRLISPN

SEQ ID NO: 46531 - protein, 294 aa, Zea mays
  Clone ID: 700455027_FLI.pep
GKAVSKFCARHLHKQVLINDANSSGDLPTSLHKAFLRMDEMMKGQRGWRELTELGDKGNKISGMIDDIIWPPKGGDSDKIREDWDTEEGPNSNFPGPTSGSTACVAVIRNDKLIVANAGDSRCVISRKGQAYNLSTDHKPDLEEERERILGAGGFVVAGRVNASLNLSRAIGDMELKQNDLLPVERQIVTAEPELKTVQLSEDDEFIVLACDGIWDCMSSQEVVDFVHKQLKTEDKISSVCEKLLNRCVAPTSGGEGCDNMTVIVVQFKKPALAVATSSAEQSATTAEGMRPKI

SEQ ID NO: 46532 - protein, 273 aa, Zea mays
  Clone ID: 700455473_FLI.pep
FATDPRLPKNAKAFFSILDFSVFSWDNKLPGAQLLLSRLRMFLNPGYPYEESLAGYHNATSLNMCMYFPRFAAFNFTKGGMALFNHGRGQPLQYVVANSFIAALYADYMEAVNVPGWYCGPNFMTTNDLREFARSQVNYILGDNPKKMSYVVGFGSKYPRHVHHRGASTPHNGVKYSCTGGYKWRDSKKADPNLLAGAMVGGPDKNDGFKDSRNTFGQNEPTLVGNAGLVAALVALTNSGRGAGVTTVDKNTMFSAVPPMFPATPPPPSSWKP

SEQ ID NO: 46533 - protein, 390 aa, Zea mays
  Clone ID: 700455594_FLI.pep
SMDSEGVVAAKVADETTKPAIQEDGAESKAGMTDLLMLTDKSQLQALAMLLRNNEELMMSQAIKSETERIEYLKTVSDCYTRTMKLLDDSMAARTTYERSGGTRSLVARDMDDYVVYGLNACLQNVRNCCVRLDAIDKLRAHYDALADAVADPAANVEGLAAEASEYKAAMWQYCYNQRSASARAHSRAYSQALKLEGIDFAELVRRHQLRLGYGSKGEEFEDLDDTQKLEVYNSIIVESGRAGLPVRMFSSGRSAGGPKIAATTWAEAVSVFIMAAGNLAWDVFTTEHEVEAILKGSLNLLAGLGGFAVEAVVGAAVTKAVANVGAGVFACSLAGFVVGAIAGLIFVGVSGLLINLIIGSPRKVPDMSKLMFHTAVMPDGMALAYAVSH

SEQ ID NO: 46534 - protein, 175 aa, Zea mays
  Clone ID: 700455692_FLI.pep
IRHETDRIDGGGIAVVKPRGRSDEPQDQETQARSERPWIMAGAVDRILFTGRRYYIYTPRRRPPPLDSRAPSPGRASSVAAAAGAAAAGAALAGVAVAAAALGGRLEAAGAGLGGRRGEDRGLDAAGGGGLHVRVHTAAVASAAAGAAGAAPALAAAARRHDHRRREEVWFLLVL

SEQ ID NO: 46535 - protein, 221 aa, Zea mays
  Clone ID: 700456021_FLI.pep
EEEEQQILKGDEVIVELDASLEDLYMGGSLKVWREKNVIKPAPGKRRCNCRNEVYHRQIGPGMYQQMTEQVCDQCPNVKFVREGEFLTVDIEKGMKDGQEVLFFEEGEPKIDGEPGDLKFRIRTALHSHFKREGNDLHATVTISLLQALVGFEKTIKHLDNHLVEIGTKGITKPKEIRKFKGEGMPLYQSNKKGDLYVTFEVLFPKTLTADQKAKLKDVLV

SEQ ID NO: 46536 - protein, 445 aa, Zea mays
  Clone ID: 700422775_FLI.pep
RLWSSDSDQPTAAYVECRGSPALVNALPFGPMGLPGSSECSLDVPSDGGLAVEAAPKTAVCGGTDVGSRLGCSSFGFLASAMKLPTTTCTGVAAISIPATQPPTMRPSLPASATLKPPVLLRVSPSSASKNEPERESISKWPSYVTIPPEVAGCRSVAVHRAPFAEIMHVVRGPCWEKAIILDATSSLGFTVIMWGVNDVPEDPKASSCFFLPDPGGRPLRLPSGLGVDPPPPDWAPVASVTPAAAVLSPKPMLPSGPYFLGLPLFFFTRSPPLTATIAPPLAPTPPEPGCCCCKPVAPESGRYIDPSGMSTIFMLLMGDEASGEAIGLKARDIPCITLAAEACGNPDGGGAAPNAAACCIMTPPAPACGGDPTRGGACCCCGCWCRSRTSISRQGGENPRAGAPAQLPSPVPQRASSGTVHMRSSRRLDVTFLPVQQKTDLEIE

SEQ ID NO: 46537 - protein, 309 aa, Zea mays
  Clone ID: 700423665_FLI.pep
GLIPSLPEATIKSNNETKHLEGHVRPNFLPRITLANIWEPASRESCNNNIWEMVKASFRILFGRSTLQEPAFQELILLYTDEVVPSETKDEMVPLQLKIYERIPIPDLPVVFPHKKLSFRILDTVRLDIATVIGLLAYVVNYKFESLASSPSAFLLDIVAGTALVILVFRVALGYKQTRDRYQLLVNKTLYEKTLASGFGSVYFLLDASEQQQYKEALLAYAMLLCRKKYEVSSRASIRDACEQFMHEKFEAKIEMPIDKAMETLLRLGLVIELPTDGGSSVIGLPCSEAYRILKSRWDGLLEQDTEQG

SEQ ID NO: 46538 - protein, 98 aa, Zea mays; identical to SEQ ID NO: 41928
  Clone ID: 700423679_FLI.pep

SEQ ID NO: 46539 - protein, 171 aa, Zea mays
  Clone ID: 700427482_FLI.pep
GNEKGFSQWQRLAIGQALSILTMALAALVETRRLAIAEASGLRHREVPVPMSILWQGPVFFVHGAAEVFGAIGMTEFFYDQAPATMKSLCAAFGQLAVASGSYLNTVVLSVVALATTRGGATGWISDNLNEGHLDYFFWMMAALSLLNLALFVRYSMRHTDRQRKQDLGLS

SEQ ID NO: 46540 - protein, 356 aa, Zea mays
  Clone ID: 700428489_FLI.pep
SKRGVTNKCFSIECMIQLGQRDPGTTMQAINQPKLLHQTMQNINKRISTANGTAGTRGFIRNTVCAMLPVPHPSMDASPRIQQLAGWYSTDTTSSASGVGGEPVGRVGERAVGPALVDLLRLRGVPGGAERDVQRVEVVRPRVRHPRVRRLLLVPLHVLVPSVEERVLEPGVELGGPLRHGRVGRANLAQVVRGATGAEDEDAFLPQGRQRLAEVVVVRAVAVGLHRELAHGDAGVRVHEHQRHPGAVVEPAAVVLLHGAEPGLLQELYGPQGQVRSARSRVLELVHGLGKAIEVVDGVVAAADDIDRRRGRLPVSRDDEDGARGLVARDLRRHPRLEEVPRRDTVVDGERGRAVR

SEQ ID NO: 46541 - protein, 90 aa, Zea mays
  Clone ID: 700428645_FLI.pep
SSRTLTVMAPQPVRAPRLSAPAGHAACRCSAAPLFGKRAPPVVAFPRARSGGAVASCSAVQESSTSTTVSKKKDAADGAKEATAEAAKPA

SEQ ID NO: 46542 - protein, 257 aa, Zea mays
  Clone ID: 700428943_FLI.pep
TLVVGSGHGHHPGEHPEGEVPADQAAQGRAAHLPGRRQEQGGEPPHGPEEAAVQLLRQDPAHLLRVGRRVGVPPLQVGALPRRRLRRGGRLPEAVVAVGRRLAPVQEARVRGRPRDERGGGRRAGPPEQGHLGPHPVQDAVRRPPPRRVRALAPHHAQAAVPAVVVGRGGAQRPVQAGGVVRLRAAAELPPHRPRHGALGSVSRLPVPSAAGLLQIQGWRALRGAGRRRFRLQVREIDGEDVVELMMNEMECRITVL

SEQ ID NO: 46543 - protein, 285 aa, Zea mays
  Clone ID: 700433813_FLI.pep
DLSASKPEWRHINVSAAPPGRWGHTLSCLNGSRLILFGGCGGQGLLNDVFILDLDAQHPTWREIPGLAPPVPRSWHSSCTVDGTKLVVSGGCADSGVLLSDTYLLDVTMERPVWREIPASWSPPSRLGHSLSVYDGRKILMFGGLAKSGPLRLRSSDVFTLDLSEDKPCWRCITGSRMPGAGNPAGVGPPPRLDHVVVSLPGGRVLIFGGSVAGLHSASKLYLLDPTEDKPTWRLLNVPGHPPRFAWGHSTCVVGGTKAIVLGGQTGEEWTLTEIHELSLASSLV

SEQ ID NO: 46544 - protein, 285 aa, Zea mays
  Clone ID: 700434493_FLI.pep
RPGAGDSAADDDLVDVLLRLVEEDEDRPETTEASRLTRDGVKAFVQDIVAGGTESSAVTIEWAMSELLRRPDALRAATAELDRVIGHGRWVTERDLPDLPYIDAVVKETMRLHPVGPLLVPHHAREHTVVAGYDVPAGARVLVNVWAIARDPASWPDAPDAFRPERFLNGSSGASVDVRGAHFELLPFGAGRRMCPAHGLAMKLVTAGVANLVHGFAWRLPDGMAPEDVSMEELFGLSTRRKVPLVAVAEPRLPAHLYANVTPPQQVAGSTIASLSTRPEYKLVF

SEQ ID NO: 46545 - protein, 438 aa, Zea mays
  Clone ID: 700377505_FLI.pep
ATNNSQGPKPTRTHPRSPTMAVGDVETAAPLLPPPASALADEPSAGPPPDDRLGIGYLIFFTLGAGFLLPWNAFITAVDYFDFLYPGAPVDRVFSISYMVSALLPLLVIVLFFPKSSAPIRINTGLTLFTLTLVLVPAMDLIYVKGRAGLYGAFDVTVAATALCGVADALVQGGVIGFAGELPERYMQAVVAGTAASGVLVSALRVFTKALYPQDANGLRQSAILYFVAGIVLMVICIVCYNVADRLPVVIYYKNMKKRAQKAEVGGGMTGPAWRSTLWSIVGTVKWYGIGVALIYAVTLSIFPGYITEDVHSEALGDWYPIILITAYNVFDLVGKALPAVYLLQNGSAAIAGSFARLLFYPLFYGCLHGPSFFRTEIPVTVLTCLLGLTNGYLTSVLMILAPKAVPIHHSETAGIVIVLFLVVGLVIGSIVAWFWVI

SEQ ID NO: 46546 - protein, 395 aa, Zea mays
  Clone ID: 700377579_FLI.pep
PPQAGVCFRSIASQSQPKQDAARQDGLGGDEPGAVVASAVASTDPRRRLLRAEPVPRLARRRDDQGGHVCALHPRAEPHGVAAPLALPLPLVHGQGLLLQPILGPRPQQAQGRQGRQQQGRAGRQGVAGDRRHRGGRAHGRGGPHADRAPQVLLLPRLPARLRRALLLLRARALGRQQVPEAAHRHGHHPLRQLHHPGRHRRVARAHRHGHHQLHRQIHLPQQGHLLRDPRHRRPVPALLQPAHARVRRPPQLLPASQQQPHRQRRRGRQQGAAVRRRTHADGGAGGRGQGAAAGQRQGGIGAHGAEDHAALAGLRAGRAGQAQVHARRRVQGAHEPKQAEQAHLARERLPLLMIYLASHTSCSTSPCPCIHLLPTSQLYCNGVFIDLFMLCFVF

SEQ ID NO: 46547 - protein, 230 aa, Zea mays
  Clone ID: 700377774_FLI.pep
QNNVIYKPHPGDIMYSKTVRAIYLSIHGNACSKRPHGRPWALSWLQSILSARRSSLPTAPSGGRNAAEVVAPAAVIIRVHSSEKHPQPNGEPDDSEDRGHGQQSPLVDQVLLGGVLDVGGQGVALHPAVVRAHQEDEPEEEAGEEPSDVREVVDVREDADGEVDGDDDQQGHQGCSLVCVDGPVGEELRQHGPKEPEQSSGSADRDVVPDEQRRKHAASDARDKVDDANS

SEQ ID NO: 46548 - protein, 513 aa, Zea mays
  Clone ID: 700377868_FLI.pep
SANMGTRGVALLLLAAVLLLQALLPASSEGLVRVALKKLPVDQNGRVAARLSAEERQRLLLRGSNALGSGGDDDSDVIALKNYMNAQYFGEIGVGSPQQKFTVIFDTGSSNLWVPSSKCYFSIACYFHSRYKSGQSSTYKKNGKPAAIRYGTGSIAGFFSEDSVTLGDLVVKDQEFIEATKEPGLTFMVAKFDGILGLGFQEISVGNATPVWYNMVKQGLISDPVFSFWFNRHADEGEGGEIVFGGMDSSHYKGDHTFVPVTRKGYWQFNMGDVLVDGKSTGFCAGGCAAIADSGTSLLAGPTAIITEINEKIGAAGVVSQECKTVVSQYGQQILDLLLAETQPTKICSQVGLCTFDGTHGVSAGIRSVVDDEAGKSNGGLKSDPMCNACEMAVVWMQNQLAQNKTQELILNYINQLCERLPSPMGESAVDCGSLASMPDIAFTIGGKKFKLKPEQYILKVGEGQAAQCISGFTAMDIPPPRGPLWILGDVFMGVYHTVFDYGKLRVGFAEST

SEQ ID NO: 46549 - protein, 193 aa, Zea mays
  Clone ID: 700377920_FLI.pep
ELELIDDDKNEEMPLSVLQVNAMRKLGSVEEVPVPLFPSKGLRLKQKIKDWLEGFQRLPYVSPYENFSHINPGSDVSEKRAVGVLHELLSLFVTCSAERRRLRCLRQHLGLPQKFHLVFERHPHVFYLLLKEKTCFVVLKEAYIAGEDTAIEAHPMLEVFKKYVELMEQSREIIRCRRSGKPIELESKACGDS

SEQ ID NO: 46550 - protein, 505 aa, Zea mays
  Clone ID: 700342591_FLI.pep
KKHPKNHLLFLRSPARSPTRIRSRTHRSALRSPPIRGSIRARARSAPGSDLVAASPEEMNGAGGSHHHQQQRLRQQQQQALLMQQALLQQQQQQQYQSGVLAAAAAAAMTQMEPVSNGNLPPGFDPSTCRSVYVGNVNPNVTESLLIEVFQSAGLVERCKLIRKEKSSFGFVDYYDRRSAALAIMTLHGRHVYGQAIKVNWAYASTQREDTSGHFHIFVGDLSSEVNDATLYACFSAYPSCSDARVMWDNKTGRSRGYGFVSFRNQQEAETAITEMTGKWLGSRQIRCNWATKNNSEEKPETDNHNAVILTNGSSNNSATDASQDAGSKEPPQNNPDCTTVYVGNLGHEVNRDELHRHFYNLGVGAIEEVRVQQDKGFGFVRYSTHGEAALAIQMSNGSVVRGKPIKCSWGVKPTPPGTGSKPLPPPAATYQPAVAMQGVPQGFTTAELLAYQRQLALSQAAAGQQHAGLAGQVSAAGLLAAAGSQALYDGYPNQSSAQQLMYYN

SEQ ID NO: 46551 - protein, 131 aa, Zea mays
  Clone ID: 700342662_FLI.pep
HTDKKNSSMSEVKDSNVPAALDGNPQPMDQTEDNSMPSAQQQEEAIKKKFGGLMPKKPPLISKDHERAYFDSADWALGKQGVAKPKGPLEALRPKLQPTRQQQQQRARRPIYTSSENEDGDGAGAEDMNIN

SEQ ID NO: 46552 - protein, 384 aa, Zea mays
  Clone ID: 700343230_FLI.pep
QVPSAKHNTDHRLPAQLHPPPSPPKTQPNPRFAALSSGQTLPPSKMPNLECRMYEQRFPEVDAAVMIQVKHIADMGAYVSLLEYNNIEGMILFSELSRRRIRSISSLIKVGRQEPAIVLRVDRDKGYIDLSKRRVSEEEAHACEDRYNKSKLVHSIMRHVAETLEVDLEPLYQRIGWPLYRKYGHAFEAFKLIVADPDAILDVLTYEEKEVGPDGQEVAKVVPAVTPEVKDSLVKNIRRRMTPQPLKIRADIEMKCFQFDGVLHIKQAMKKAEAAGNDNCPVKIKLVAPPLYVLTTQTLDKDQGISVLTDAVKACTAEIEKYKGKLVVKEPPRAVSEREDKLFLDQIDSLMEQNAEVDGDVDSEEEEDTGMGNVDLTNSGVTAY

SEQ ID NO: 46553 - protein, 129 aa, Zea mays
  Clone ID: 700343440_FLI.pep
SVLFLLLSIPSLVVYRTYGSISMHHNIALMFLSGYFVNGPYSLITTAVATDLGTQDAIKGNSRALATVSAIIDGTGSVGAALGPLLTGYISTRGWNSVFFMLIVSISLAILFLIRLAKGEIVAKLSTWN

SEQ ID NO: 46554 - protein, 297 aa, Zea mays
  Clone ID: 700347604_FLI.pep
NTYLASTNLVNDRNTKHIYFLMDCLVELYSLDVQKSYERAIISVEQLNAILRQASKTKEKEDLRKIDNWQYISCVNLWVRFLCCHYKDYNLHPLFSQVLQVIRGVAHLFPGTRYLPLRLKLVQMLNELSTCSQMFYPIPSLLFDCLELREVSQKEQTQRTKINFSSLLKVPKNLLKSRDFQEECILSAIQILSAHFAQWSYHVSFPEVATIPLVLLKRLHEQTTVESLRRPIKRLIDQVTENKDFIERKREVVSFSPNDKASVDSFLQEEKVSRTASFTRFYASVAENRQPKWRKTL

SEQ ID NO: 46555 - protein, 336 aa, Zea mays
  Clone ID: 700347688_FLI.pep
GPSGGAAHSTSTGGGGGSPSDRGGPAPSASASVSTPASESTVARRLNGLDPHGDDAPSSQPATSKKKKRGARAVGPDKNGRGLRQFSMRVCEKVESKGRTTYNEVADELVAEFSDPNINIDSPDPDNSSAQQYDEKNIRRRVYDALNVLMAMEIISKDKKEIQWRGLPKTSMNDIEELKTEVNGLKGRIDKKNAYLQDLQDQYACLQNLVRRNEQLYGSGDAPSGGVALPFILVQTRPHATVEVEISEDMQHVHFDFNSTPFELQDDSFVLKAMALSGEETDCTQAPGANGGECSSTRNNYWHHHQQPQPPGPRVVRVPNSPPIPGILKGRVKHEH

SEQ ID NO: 46556 - protein, 225 aa, Zea mays
  Clone ID: 700347858_FLI.pep
SIRAFAEASMTTAYEKKWPLYLSTKNTILKKYDGRFKDIFQEVYEADWKSKFEAAGIWYEHRLIDDMVAYALKSEGGYVWACKNYDGDVQSDFLAQGFGSLGLMTSVLVCPDGKTIEAEAAHGTVTRHFRVHQKGGETSTNSIASIFAWTRGLAHRAKLDDNARLLDFALKLEAACVETVESGKMTKDLAILVHGSSSVTRSHYLNTEEFIDAVATELRSRLGAN

SEQ ID NO: 46557 - protein, 189 aa, Zea mays; identical to SEQ ID NO: 37961
  Clone ID: 700351633_FLI.pep

SEQ ID NO: 46558 - protein, 241 aa, Zea mays
  Clone ID: 700352025_FLI.pep
DLSVTTFSPDGRVFQVEYATKAVDNSGTVVGIKCKDGIVLGVEKLVTSKMMLEGSNRRIHSVHRHSGLVVAGLAADGRQIVSRTKSEAASYEKVYGEPISVKELADRVASYVHLCTLYWWLRPFGCGVILGGYDRDGPQLYMIEPSGVSYKYFGAALGKGRQAAKTEIEKLKLSELTCREGIVEVAKIIYGVHDEAKDKAFELELSWICDESNRQHQKVPNELLEQAKAAAQAALEEMDAD

SEQ ID NO: 46559 - protein, 256 aa, Zea mays
  Clone ID: 700381403_FLI.pep
TRSCGGQDQSTMATRIQFENNCEIGVFSKLTNAYCLVAIGGSENFYSAFEAELADAIPVVKTSIGGTRIIGRLCFGNKNGLLLPHTTTDQELQHLRNCLPDQVVVQRIDERLSALGNCIACNDHVALTHPDLDKETEEFIADVLGVEVFRQTIAGNILVGSYCAFSNRGGLVHPHTSVEDLDELSTLLQVPLVAGTVNRGSEVIAAGMTVNDWTAFCGSDTTATELSVIESVFKLREGQPTAIVEDMRKSLIDSYV

SEQ ID NO: 46560 - protein, 531 aa, Zea mays
  Clone ID: 700381725_FLI.pep
AKINDAKKLPDSSRSGHSSPESLTCVANVLVTVGDRGWREYDTQITMDSDGQSERRICVKLAEGTKYAHKVCQVLQPGATNRYTHAMMWKGGAEWCLEFPDRSQWLIFKQMHDECYSHNIRAASVRNIPIPGVHLVEIHDDNDVVSFVQSEAYLVHIGTDVEIALDQSRVLYDMDSDDEEWISSWRKSLVRDNTTTLQFAEDLFERVMDKLEKFAYSHNCNGLSIDQMKELETDDVPLHTIEVIHAYWQDKRQKRGMPLIRHFQSAMWKIYEQQLHEWESKVCRMQSSSNGYQEKKLPPKPALFAFCLRPRGLHVPYKGPKQRSHKKLMSTGCHSFSREHDGFYRQVSGRRYNECTGDGRISESYDTGSLYSPTGYSPRFSTRTDSPRAFESSERSSTPRFSRNNSSTKRSAALAFSDDHQPSPSCRPQRAKRSAHDHWNAAIHDWHNSKHLFPGSSRVDVEELKLRDAAGAAQHAAAMARLKREKAHCLMQKADLALHRATVALMIADAIKSSGRDTTRDGRRDSRNEER

SEQ ID NO: 46561 - protein, 853 aa, Zea mays
  Clone ID: 700381758_FLI.pep
VLLAAPSYAVPPPAVSLARAWLLLTAPRRRRRSSALHPDTSRRFKLKCHCATIHPGISRRFSLKSRYAGMEPRTEGDASRNLRQGRLLEPPPVPAVRTSPEGVQRHTGQDVIASRSQSAAASETGSSLPCEDGNATAETIGSSTHPVHIGVQNQDIEQEQVHETGKRYKRLTSDVWNYFTKKKEIIEENGKKREQIWGYCNFPNCKRRYRAEGRQGTTAFKNHLRSAHSIVRGQQQLKFEKDLGNNITHIQPFMYDQEVSVKKLIMAIIMHDYPFNIVEHGYFVDFIKSLHPSFPIKSCNAVGKEVMDTYLEEKEKLYAHLKTVHCRFSVTMDMWTSCSNKSYMCVTVHWINDDWCIQKRIIGFFNVKGRHTGKKLSETFTEAMVRWNLDKKLFSLTLDNASANELAVKDIISDLKDGQASLVCDGLFFHVRCACHILNLVARDGLKVISKTIDKIKALVLAVKGSPLQWKELMKCASESELDTKRGISLDVSARWNSTYLMLRDALYYKDAFARLKSSNRHMYVKNYPSPDEWDMALKIFQCLKKVYSLAEILSGTSYPTANLFYRGFCDIKVLLDDWCSSDDATISEMAIAMSQKIEKYWEHSNLALAVACFLDPRYKKKVIEYYMKKFHGDGYHVELEKIVNVVRGLYCFYSSSTPAPAKSTSPEPANSASDILMASVSDELDSFLYGTNEPTLVRSNELEKYMADPLLRLGGPFDGPFDILAWWKSKREVYPILSQIVRDVMAIQVSTVASESVFNAAGRFVDPYRNRLEPEMVEALICTKDWIAAERKDSKIVGSIVSDLEIETLSTVMANKIRAVDDKDIEWKDQEHDGENEYIDSDLDVMDDHNEL

SEQ ID NO: 46562 - protein, 276 aa, Zea mays
  Clone ID: 700382862_FLI.pep
ALLHCITSSQLARTQRELVLPKFHSSTAQIVGGGAGKATMSPAPSSGKRGRVPDPEEDVYVDNLHSHKRYLTEIMASSMNGLSVGDSVPDNIMGSPMRVENASCIRDEMSMQYSPMSEESDDYRYYDTQVNTNGNQTDVLGNPSTSLISSAHRFQRPHTWFSSASPYPLPSCSLPAVICSPARRGCGTEQEGWIPSSPNDMCYGGDLRRTALLRSVQMKVQSPHPCDVHEREQGRSNVHADELQQDQKEAVGVQLDQRPLSCPKSTQDAKCQSSIH

SEQ ID NO: 46563 - protein, 237 aa, Zea mays
  Clone ID: 700382914_FLI.pep
VATVIAVLMNRGGKRRPIDRHKTLFALMKKRQRKRGQERLAAVTAPPRLAFLGPKELEAFPVDDGWAGLVVLGLGDPHLLEGAEGCQDGSSDPDTVLPLWRSDHLDLHAAGSQGSDLLAHPVSDAREHGGATGEDDVAVQVLPNIHVALHDGVVGGLVDAGSFHPDEGWLEEDLGAAEALGADGDDLSVGELVALLHGRAGLGGLHLLVVVQGDVGELLLHVPHDFPLSGGGEGVSA

SEQ ID NO: 46564 - protein, 684 aa, Zea mays
  Clone ID: 700382976_FLI.pep
SRSFRKARRARSVEVLVPVPPMDRARGSAFLLGVLLAGSLFAFSVAKEETKKLGTVIGIDLGTTYSCVGVYKNGHVEIIANDQGNRITPSWVAFTDSERLIGEAAKNQAAVNPERTIFDVKRLIGRKFADKEVQRDMKLVPYKIINKDGKPYIQVKIKDGENKVFSPEEISAMILGKMKDTAEAYLGKKINDAVVTVPAYFNDAQRQATKDAGVIAGLNVARIINEPTAAAIAYGLDKKGGEKNILVFDLGGGTFDVSILTIDNGVFEVLATNGDTHLGGEDFDQRIMEYFIKLIKKKYSKDISKDNRALGKLRREAERAKRALSNQHQVRVEIESLFDGTDFSEPLTRARFEELNNDLFRKTMGPVKKAMEDAGLEKSQIHEIVLVGGSTRIPKVQQLLRDYFDGKEPNKGVNPDEAVAFGAAVQGSILSGEGGDETKDILLLDVAPLTLGIETVGGVMTKLIPRNTVIPTKKSQVFTTYQDQQTTVSIQVFEGERSMTKDCRLLGKFDLNGIAPAPRGTPQIEVTFEVDANGILNVKAEDKGTGKSEKITITNEKGRLSQEEIDRMVREAEEFAEEDKKVKERIDARNQLETYVYNMKNTVGDKDKLADKLEAEEKEKVEEALKEALEWLDDNQSAEKEDYEEKLKEVEAVCNPIVSAVYQRSGGAPGGDADGGVDDDHDEL

SEQ ID NO: 46565 - protein, 233 aa, Zea mays
  Clone ID: 700382977_FLI.pep
GLQMTTAARPTWAPAKGGNEQGGTRIFGPSQKFSSRDLAAHTSLKPRKDGQQTQEELQKRNLREELEERERKHYSSKDKSYAEERDRRKSSSHLLLEGSKRETEDKIVPREIDADDSDVEPKSDDESDEDDDDDDTEALMAELERIKKERAEEKLRKERQQAEEEAKMKEAELMRGNPLININNAGSFSVKRRWDDDVVFKNQARGETKTPKRFINDTIRSDFHRKFLQRYMK

SEQ ID NO: 46566 - protein, 260 aa, Zea mays
  Clone ID: 700383090_FLI.pep
TRRDKRMPVSRIAVGAPGELSHPDTAKAAVAEFISTLIFVFAGSGSGMAFSKLTDGGAATPAGLIAASLAHALALFVAVSVGANISGGHVNPAVTFGAFVGGNISLLKALVYWVAQLLGSVVACLLLKIATGGAALGAFSLSAGVGAMNAVVLEMVMTFGLVYTVYATAVDPKKGDLGVIAPIAIGFIVGANILAGGAFDGASMNPAVSFGPAVVTGVWENHWVYWVGPLAGAAIAALVYDIIFIGQRPHQQLPTTAADY

SEQ ID NO: 46567 - protein, 486 aa, Zea mays
  Clone ID: 700383114_FLI.pep
VFNQLDHPLLFTWNGMQHRKNSWMDGMPGTQCPIAPNTNFTYKWQPKDQIGSFFYFPSIGMQRAAGGYGAISVVSRLLIPVPFDQPPPESDHAVLIGDWYTKDHEVLARQLDAGKSVGRPAGVLINGKGGKDLEAAAPMLTFEAGKTYRLRVCNTGIKASLNFRIQGHDMKLVELEGSHTLQDVYDSLDVHVGHCLSVLVDADQAPGDYYMVASTRFIHDAKSASAVIRYAGSSGAPPAPNMTEPPAGWAWSINQARSFRWNLTASAARPNPQGSYHYGQINITRTIKVMVSRGHIDGKLRYGFNGISHRDTETPLKLAEYFNVTDGVFSYNQMGDVPPAVNGPLHVIPNVITAEFRTFIEIVFENPEKSIDSLHLDGYAFFGVGMGPGTWSPEMRKTYNLLDTVSRHTIQVYPRSWTAIMLTFDNAGMWSVRSNVWERYYLGEQFYISVISPARSLRDEYNMPDNALRCGKVVGLPLPPSYAPAR

SEQ ID NO: 46568 - protein, 177 aa, Zea mays
  Clone ID: 700439688_FLI.pep
VSEGHKCFESMGRDHGIEPSMDHYACVVDLLGRSGRFAEAEQFIRDMPVRPDSTIWGPLLAACQLHGNVDLAEKAAKELSALEPESDIWRVSLSNTYASVGRWRDAAKIRSEMRRVGLRKETGWSFVDVGGVEGFKFVSADTRHHDAEKIYSVWHSMNRHMADLAADVHKLNPISAI

SEQ ID NO: 46569 - protein, 513 aa, Zea mays
  Clone ID: 700440792_FLI.pep
ATSTSSKPPRPIERSVPSRADAETLAPLTPWPPCRSLRRRSSPPSPAAPWLLPPSSASRQTSYASSAPRHDATAATSASRRSSPPRGPTASLLAASAAADVSAIPNAKVAQPSAVVLAERNLLGSDASLAVHAGERLGRRIATDAITTPVVNTSAYWFNNSQELIDFKEGRHASFEYGRYGNPTTEALEKKMSALEKAESTVFVASGMYAAVAMLSALVPAGGHIVTTTDCYRKTRIYMENELPKRGISMTVIRPADMDALQNALDNNNVSLFFTETPTNPFLRCIDIEHVSNMCHSKGALLCIDSTFASPINQKALTLGADLVIHSATKYIAGHNDVIGGCVSGRDELVSKVRIYHHVVGGVLNPNAAYLILRGMKTLHLRVQCQNDTALRMAQFLEEHPKIARVYYPGLPSHPEHHIAKSQMTGFGGVVSFEVAGDFDATRKFIDSVKIPYHAPSFGGCESIIDQPAIMSYWDSKEQRDIYGIKDNLIRFSIGVEDFEDLKNDLVQALEKI

SEQ ID NO: 46570 - protein, 330 aa, Zea mays
  Clone ID: 700440963_FLI.pep
SAGVDTARREPEEGWTMSATGRAPCGLPRIGLGTAVQGPRPDPVRAAVLRAIQLGYRHFDTAAHYATEAPIGEAAAEAVRTGLVASREDLFVTSKVWCADAHRDRVLPALRRTLSNLQMEYVDLYMVHWPVTMKAGRFTAPFTPEDYEPFDMRAVWEAMEECHRLGLAKAIGVCNFSCKKLETLLSFATIPPVVNQVEINPVWQQRKLREFCRAKGIQLCAYSPLGAKGTHWGSDSVMDSGVLHEIAMSKGKTVAQVCLRWVYEQGDCLIVKSFDEGRMKENLDIVDWELSEEERQRISKIPQRKINQGRRYVSEHGPYKSFEELWDGEI

SEQ ID NO: 46571 - protein, 382 aa, Zea mays
  Clone ID: 700441834_FLI.pep
IPYAPASNPASPAATQGSMERYELLKDIGSGNFGVARLMRNKDTKELVAMKYIPRGLKIDENVAREIINHRSLRHPNIIRFKEVVLTPTHLAIVMEYAAGGELFDRICSAGRFSEDEARYFFQQLICGVSYCHFMQICHRDLKLENTLLDGSPAPRLKICDFGYSKSSLLHSKPKSTVGTPAYIAPEVLSRREYDGKMADVWSCGVTLYVMLVGAYPFEDPDDPKNFRKTIGRIVSIQYQIPEYVHISQDCRQLLARIFVANPAKRITIREIRNHPWFLKNLPRELTEAAQAKYYKKDNGAPTFSDQTVEEIMKIVEEARTPPQSPAPVAGFGWAEEEEQEDGKKPEDDEQDGEDEQYDGEDEYDKQVKQVHASGDFRHLIK

SEQ ID NO: 46572 - protein, 278 aa, Zea mays
  Clone ID: 700442544_FLI.pep
SAAGNLMLQRYKEDMEGLPEHRGMDEFNEIPVEGFGAALLAGYGWTEGKGIGRNNKTGDTKVLEYDRRAGTQGLGYNPSEADPRKTRSGDWIVGKKVSEDGSTKRDRGSRDRMEESDSSAQKKRYNEERSEKEGREKVRNGRGSREGTSNASDTHSNVWWLQSHIRVRIVSQKLSKRLYLMKGKVVDVVGPTKCDIMMDDGSELVQGVEQDMLETVLPRTNGRVLVLYGKHKGLYGHLVEKNSKEEIGLVEDADTKDIVRVRYDQMAEYTGDPELLGY

SEQ ID NO: 46573 - protein, 394 aa, Zea mays
  Clone ID: 700445105_FLI.pep
AAVSASERAHRQLILSPLSLTHTHPSSHPCDGRSEGLPTMVSAVLRTILVTGGAGYIGSHTVLQLLQQGFRVVVVDNLDNASEAALARVAELAGHDGANLVFHKVDLRDRHALVDIFSSHRFEAVIHFAGLKAVGESVHKPLLYYDNNLVGTITLLEVMAANGCKKLVFSSSATVYGWPKEVPCTEEFPLCATNPYGRTKLVIEDICRDVHRSDPDWKIILLRYFNPVGAHPSGYIGEDPCGVPNNLMPYVQQVAVGRLPHLTVYGTDYSTKDGTGVRDYIHVADLADGHIAALRKLYEDSDKIGCEVYNLGTGKGTSVLEMVAAFEKASGKKIPLVFAGRRPGDAEIVYAATAKAEKELKWKAKYGIEEMCRDLWNWASKNPYGYAGSRDNSK

SEQ ID NO: 46574 - protein, 500 aa, Zea mays
  Clone ID: 700445167_FLI.pep
MSSSPSFGLLAVAALLLALSLAQHGSLAATVGPRVIVVGAGMSGISAAKRLSEAGITDLLILEATDHIGGRMHKTNFAGINVELGANWVEGVNGGKMNPIWPIVNSTLKLRNFRSDFDYLAQNVYKEDGGVYDEDYVQKRIELADSVEEMGEKLSATLHASGRDDMSILAMQRLNEHQPNGPATPVDMVVDYYKFDYEFAEPPRVTSLQNTVPLATFSDFGDDVYFVADQRGYEAVVYYLAGQYLKTDDRSGKIVDPRLQLNKVVREIKYSPGGVTVKTEDNSVYSADYVMVSASLGVLQSDLIQFKPKLPTWKVRAIYQFDMAVYTKIFLKFPRKFWPEGKGREFFLYASSRRGYYGVWQEFEKQYPDANVLLVTVTDEESRRIEQQSDEQTKAEIMQVLRKMFPGKDVPDATDILVPRWWSDRFYKGTFSNWPVGVNRYEYDQLRAPVGRVYFTGEHTSEHYNGYVHGAYLSGIDSAEILINCAQKKMCKYHVQGKYD

SEQ ID NO: 46575 - protein, 168 aa, Zea mays
  Clone ID: 700445173_FLI.pep
QQLIDCGFAFNNFGCNGGLPSQAFEYIKYNGGLDTEESYPYQGVNGICKFKNENVGVKVLDSVNITLGAEDELKDAVGLVRPVSVAFEVITGFRLYKSGVYTSDHCGTTPMDVNHAVLAVGYGVEDGVPYWLIKNSWGADWGDEGYFKMEMGKNMCGVATCASYPIVA

SEQ ID NO: 46576 - protein, 187 aa, Zea mays
  Clone ID: 700445176_FLI.pep
RASCPTSSTAAAAMAMEAATAMAMETATAMGMAATAAATGTLLPPPPARTLIRTARTLTRTAATGTLLPPPTPRTRRTTGTRGRTTPATTATAAAAATTASTAAASTARSAAATARAAAASSTSGSEATETNQNNTLSLASHTCTRTRILVLHNKVQAGRRRTCASECCCCGDRVTVVVICVYGIKW

SEQ ID NO: 46577 - protein, 179 aa, Zea mays
  Clone ID: 700445211_FLI.pep
DRQHRLRRFLMDSGGDRVRAVHTRCGVERQRGAGGTSALLPLPQGRRLRRRGRARPRRHSAKHHLLHHAADPASCGGDGDGGIGCGHTEHARRRRRRPAVAVPRGSNGPAAVSVGQGASERLSRKTPGIRARAAASSGAAGPSSYRVSPPTTRLRTVRCSRQRVPRAKPPAPSAPSGPS

SEQ ID NO: 46578 - protein, 106 aa, Zea mays; identical to SEQ ID NO: 38992
  Clone ID: 700445240_FLI.pep

SEQ ID NO: 46579 - protein, 370 aa, Zea mays
  Clone ID: 700448582_FLI.pep
RGYTATTTINRAATGPASHCSRHTRPDTNRLVHLLDLGARATASSRSVLVHAAGASHVGTRALVHLGDDGVAKALQLLHLVIELVRLGELVGVQPADGRVDGVLDLLLVVGSQLRRDLLVLDRVAHVVGVVLQRVLGLHLLLVLLVLRLVLLRVLHHLLDLLLGQTALVVGDCDLVLLPRRLVLGRHVQDAVGVDVEADRDLGDTTRSRWDAGELELPKQVVVAGPGPLTLVHLDQHTRLVVRVGGEHLLLLGGDGGVPRDKDGHHSSGSLQTQRERSDVKQKQVLHLLVALTTEDSGLDGSTIGNGLIRIDVLAQLLAVEEVLEQLLHPGDPSGATNKDNIMDAALVHLGIPQALLNRLHALPEQVHVE

SEQ ID NO: 46580 - protein, 123 aa, Zea mays
  Clone ID: 700448622_FLI.pep
VHKHLLYYFRRRTLFTQIEIYKHSIPTLISQQQQAATYISVHCETVLHQTLQLRLKKNLPLSWAMALAGTSKQSCEKQERPSSFFFTASPKLPPKAVSGRNLLFDESKGKQTPIGHSPCTSSI

SEQ ID NO: 46581 - protein, 457 aa, Zea mays
  Clone ID: 700448959_FLI.pep
SDLRRDDPPLPSTGTCFTPSHPTDSTHPPARCLRRISSDSDPPDHDHPAPPPRSSSRSEKMAGLDTFLFTSESVNEGHPDKLCDQVSDAVLDACLAEDPDSKVACETCTKTNMVMVFGEITTKANVDYEKIVRETCRNIGFVSNDVGLDADHCKVLVNIEQQSPDIAQGVHGHFTKRPEEIGAGDQGHMFGYATDETPELMPLSHVLATKLGARLTEVRKNGTCPWLRPDGKTQVTVEYRNEGGAMVPIRVHTVLISTQHDETVTNDEIAADLKEHVIKPVIPEQYLDEKTIFHLNPSGRFVIGGPHGDAGLTGRKIIIDTYGGWGAHGGGAFSGKDPTKVDRSGAYVARQAAKSIVAAGLARRAIVQVSYAIGVPEPLSVFVDTYGTGAIPDKEILKIVKENFDFRPGMIIINLDLKKGGNGRYLKTAAYGHFGRDDPDFTWEVVKPLKAEKPSSA

SEQ ID NO: 46582 - protein, 231 aa, Zea mays
  Clone ID: 700453822_FLI.pep
REYYDYRKSIYGDVTHRALLVDAVGTLVVPAQPTAQVYKSIGEKYGVKYSEDEILMRYRRAYEQPWGGSRLRYVDDGRTFWQHIVTSSTGCSDAQYFEELYQYFMTEKAWKLCDPDAESVFKALRKAGVKTAVVSNFDTRLRPLLQALKCDHWFDAVAVSAEVAAEKPNPIIFLKACELLGVKPEEAVHVGDDRRNDIWGARDAGCDAWLWGSDVRSFKEVAERIGVEVTK

SEQ ID NO: 46583 - protein, 233 aa, Zea mays
  Clone ID: 700454040_FLI.pep
SGLTNRGRRFTSTQMWTPRPSRRVVSSASDTLLLCLLLLAGAADAAPLLVGVFPKDEAYFATQVIACRDGSGSFPRSRLNDGYCDCGDGTDEPGTSACPEGKFYCRNIGDTPRLLFSSFVNDKICDCCDGSDEYESGIHCQNTCRNIKDTAEADGGGGDLAVTHLDSTDDFMSKHAIAMEDHIQNNSNRDLVQKIRGLRTALVIELGLVVCIFAFCIARRRTRTRRRQHILKR

SEQ ID NO: 46584 - protein, 201 aa, Zea mays
  Clone ID: 700426128_FLI.pep
RQNFNRSGFPGLDEEFQMAQDYFQPIAGGILLDVSCGSGLFTRKFAKSGTYSAVIALDFSENMLRQCYEFIKQDDSLLNVNLALVRADISRLPFASCSVDAIHAGAAIHCWPSPSNAVAEISRVLRPGGVFVGTTFLSSPRNNPFSVEALRPLRQIVGPVNTSYNYFTEGELEDLCKSCGLVNYSSNVQRSFIMFSGQKPY

SEQ ID NO: 46585 - protein, 238 aa, Zea mays
  Clone ID: 700426716_FLI.pep
LQLVWLFSLLGPDCVLCLAKEGIMTSVVQSVSGDHRAEDQSHQKKQTEPGDQQEAPVTSSDSQPTVGTPSTDYVAPYAPHDMSHAMGQYAYPNIDPYYGSLYAAAYGGHPLMHPTLVGMHPAGLPLPTDAIEEPVYVNAKQYNAILRRRQSRAKAESERKLVKGRKPYLHESRHQHALKRARGAGGRFLNSKSDDKEENSDSSQKEIQNGVAPQKGGQPSTPPSPNGASSAYQAPSRE

SEQ ID NO: 46586 - protein, 168 aa, Zea mays
  Clone ID: 700427336_FLI.pep
VDELGERPELELRPQDCTAVMKVCIRLRRYAAVESLFSWFRGAIGSPTVVMYTTVIHSRCRDGRHREALSLVWEMEQAGCLLDLPAYRVIVKLCVALHDPGRALRYLSRMKEAGFIPTGDMYDSLIEGYLADGRLAKCRQLIRDAESAGVKLDRRLLSRLSETGGRHP

SEQ ID NO: 46587 - protein, 682 aa, Zea mays
  Clone ID: 700427360_FLI.pep
AYWCTEEEIRQVAGLDSVVFLRLFIFSIRIFSITSLVCVFVVLPVNYHGKEMNHNHIPEESLNVFTIANIVEESRKLWVHCSALYVITISACILLFHEYKYISRKRLAHVTGYPPNPGLFTVLVRSIPRFDNELLDDTIRNFFVNYHGSSYLSHQMIFRKGHFQKFVDRAERAYRRFVRVRLSVSERNGRSSMSRCGVCGVRASSFQLYRNKFIEAKKSDLTNPEVVEAQKNCPGALVFFKTRYAAVVASRVFQSSNPMLWVTDLAPEPRDVYWSNLWIPYRQIWLRKLATLAASIVFMFVFIVPVAFVQSMMQLEQLKRMFPSLTGLLNKSFFARVITGYLPSVTLLLSLYTVPPLMMLFSSIEGSISRRGRKRSGCLKILFFNIWNVFFVNVLSGSVLNQLNVFSRPKDMPTMLAELVPKQATFFITYVLTSGWASLCSEILQVFNLVYNFFSRFVCCCHRQNKEYVYSFPYHTEVPKVLLFNLLGFTFSIMAPLILPFLLVYFCLGYLVYRNQILNVYYPKYEMGGKLWPVMHNAIVFSLVLTQVIALGVFTIKRSPVTAGFTILLLVGTVLFNEYCRHRFSRIFEAYSAQDVIELDRDDEQSGRMQEIHQHLLDAYSQTPPGEGSSRGGSQVPIELIMEDPAQEASESSQELCDTVQEVVSGAIHDHDHVVEDKAHSV

SEQ ID NO: 46588 - protein, 186 aa, Zea mays
  Clone ID: 700427386_FLI.pep
ACTALLCHTGRARHARLLTHIQYTRTHLFLKTYRYDRGTTQTRTLVTRNNSTCCRAGPGFDIYGRPVGTRQVRHTYQSFVRPYPPVHYCYTAMATATSLPLTVPFAAPCPSPLTTASLSPVRSVAAESWEEMKRPEGSLEAFHCSTHSMAAGVLQAMLGPHGTVSLAESCMQGTTVFTDSAARRAY

SEQ ID NO: 46589 - protein, 317 aa, Zea mays
  Clone ID: 700432333_FLI.pep
ADTNAGPAAMQRAALVGSPLVPVGPLAQLAVRRRCRFHGGVRVRSSTGKDGTGTGTGGGSEGGDGAGAAASWLSSAVGEKVDELLRREENRALLEGVEDAERRVERARAALADIERQEAAARLAREEVRRLEKRRDEIAESQRELLQAREMIDEAQRSLSSSLDEGSFGDMSSGDVDEDNERIESVKAAAVSSVVGVLASLPISFYEVEDLPQLFLRSSIVFISCALFGVTFRYAVRRDLDNIQLKTGAPAAFAFVRGLALLESGRTFELSTDTLISVTLDAAVSVVENIFIFLPAAVALDYCFKMRFLSPFPRRKQ

SEQ ID NO: 46590 - protein, 150 aa, Zea mays
  Clone ID: 700432771_FLI.pep
PTHRRHPPPGMGVSPPPAFAPPRPSTSSAANPLPFMSFDVSAAAASSSSAPPLFAGPIGVGGSGASFEDEPPLLEELGINTRQIWRKTISILHPFRSTDPSLHADADLSGPFLFLLSFGLFQLLAGKFHFGIVLGWVTVASLFLYFVFSM

SEQ ID NO: 46591 - protein, 300 aa, Zea mays
  Clone ID: 700433118_FLI.pep
YLEAVPWVGEEEENVVSSVRNLQSESYGVSPVLKRVAPSDRTTPPNDTFSHIIELVLRSSEDRGRREMKSLVQKLLKESSTGCMSGSSDLCSAVLYRSCRNCLDSLLILFQQATDSDFAEQALNTKEPVFRQVALEADNLLWLAEILADRNAADEFAVIWASQRELAGLHSRLPVKSRHLVSCVTARLFVGIGKGEMLPSKDTRRLLLDVWLQPLMDDYNWLQHGCRSFDRKVVEEGVGRTILTLPLEDQQTILLSWLGSFLKVGDSCPNLQKAFEVWWRRTFVRPYAEQQGNRSQSGRS

SEQ ID NO: 46592 - protein, 92 aa, Zea mays
  Clone ID: 700433352_FLI.pep
DKVAVSGKKRSQKLYRRHSGRPGGMKEETFDQLQKRIPERIIEHAVRGMLPKGRLGRRLFTHLKVYKGTEHPHEAQKPVPLPIRDKRIQKTG

SEQ ID NO: 46593 - protein, 208 aa, Zea mays
  Clone ID: 700433481_FLI.pep
SSRRRRRRTRPRPSLPLRGRGRTLPLPEPGVSDREPMAESIVSGAAAPPPGAPSFSYLAVFSNCPLVAAVLAFAIAQSIKVLTTWYKENRWDAKQLVGSGGMPSSHSATVTALAVAVGLQEGFASSLFATTAVFASVVMYDAFGVRLHAGKQAEVLNQIVYELPSEHPLAETRPLRELLGHTPPQVFAGGVLGFAVATFTAMIAGLGS

SEQ ID NO: 46594 - protein, 224 aa, Zea mays
  Clone ID: 700334566_FLI.pep
SSIEERAMFSQKLCHLLIHCQRKRHLKNQNTNSRWRQFGVSLQYPRRNLSFITGMSHFMEFHNPRNLILFAVMIEKLLCSKWRDWIEGRAKSLTWLRIISLIFTLVMFLNPTRKIVPAVNMMLTTTTTRPKAWPAFLKTLANVSDHGGLANWGGRSVVTLPHIMTLLARNLPWIEPPHHNMLLLSAVIKLLLLLFLVWRFTLKDLMYASTTNSAKCGRVSNISL

SEQ ID NO: 46595 - protein, 269 aa, Zea mays
  Clone ID: 700334679_FLI.pep
REHLIPARLGTRQFIRRQPSDRGFPRIISSSTMDTRSDLSAIENQVRKLIDDLKSDSIDVQRSAASDLRSLAKHNMENRIVIANCGAVNVLVGLLHSPDAKTQEHAVTALLNLSINDNNKIAIANADAVDPLIHVLETGNPEAKENSAATLFSLSVVEENKVRIGRSGAIKPLVDLLGNGTPRGKKDAATALFNLSILHENKARIVQADAVQHLVELMDPAAGMVDKAVAVLANLATIPEGRNAIGQARGIPALVEVVELGSARGKENA

SEQ ID NO: 46596 - protein, 462 aa, Zea mays
  Clone ID: 700334725_FLI.pep
MSRSQRSRSIELLEKHKDLLNLFNRMESSIRLLRLRKRMATFNNIATQVEILAKRKLSYCHLAQMKYLFPEAIQIKRVLLHDEKSLCMYADMEIILVMDVVEYTSTDHSPSMTICDAFYSKLLTFLDAHHKGTDIPEAILPEPFNLRSRGQLNLEASHNGHAAEPHLQGTTKDGFSNASHFPQSFRKLMSQKVITDGAERTQLLLDPTKLSSVSAYDTEGTNRSPKKQDKHASVTVNSEISATPSRHLISRCQEGTPKQETLESPLLAQTPATQTPKRQLPTPLEKLEATCGHISEPRSASSARRSLNTSLKFEGGSPSYHDRMEHVATSKIGILSEDSSSFNKSLEENGPVFFTDRDKINLADPVGVQEKMASLRSTFGIVCDISHSIKNSLITKQELFHNILANNLEIEQMGEIEEQLHILEDLAPNWISKKVINGEEILYSFETIADQNSVWERLVEAV

SEQ ID NO: 46597 - protein, 380 aa, Zea mays
  Clone ID: 700334992_FLI.pep
QTRQARNPPMAHRVLLLLSLASAAAVAAAVDAEDPLIRQVVPGGDDNDLELNAESHFLSFVQRFGKSYKDADEHAYRLSVFKANLRRARRHQLLDPSAEHGVTKFSDLTPAEFRRTYLGLRKSRRALLRELGESAHEAPVLPTDGLPDDFDWRDHGAVGPVKNQGSCGSCWSFSASGALEGAHYLATGKLEVLSEQQFVDCDHECDSSEPDSCDSGCNGGLMTTAFSYLQKAGGLESEKDYPYTGSDGKCKFDKSKIVASVQNFSVVSVDEAQISANLIKHGPLAIGINAAYMQTYIGGVSCPYICGRHLDHGVLLVGYGASGFAPIRLKDKPYWIIKNSWGENWGENGYYKICRGSNVRNKCGVDSMVSTVSAVHASKE

SEQ ID NO: 46598 - protein, 449 aa, Zea mays
  Clone ID: 700335174_FLI.pep
HLLPHEPIPLSPSPSPAVAVASAAPAHAQQRNDNMATIVNTTEEEPMLAVVRFTAELAWADAGPEVADPEVARLCLEAQEHILAGRWLDMASLMLASADLLLTSPSRVSDKDLECVLSVICSLVTKAGSEDQALQITELICAKLTQQHGDKPALRLKVLFSLYNLLPSPYGKAFVYKKALELATAGKAAEYIIPSFKNIDSFVSEWGIDNLEKRELYLAITTILKDHKGMAKEYFNFLNKYLATFKGSDDESGIIGDAKEEAVAAIIEFVKSPNLFQCDLLNMPAVSQLEKDGKYQLVYELLKIFLTKKLDSYLEFQSANSDLLKDYGLVHEECVTKMRLMSLLDLSSRCSGEIPYSAITVELRINDDEVEQWIVKAIASKILDCKVDQLNQTVIVSRHTERIFGMEHWHALRTKLGAWRGNIARAINTIQANKVTEEGAQGMQGLAIH

SEQ ID NO: 46599 - protein, 97 aa, Zea mays
  Clone ID: 700340355_FLI.pep
GVDLPRWVQSVNRSEWGSLVFDMELMRHQTGEEPMAQLVLLAMDCTAQVPEARPSMAHVVMRIEEIKKSSVTPNIEQVDDQSSRAESEAAPTNPFAT

SEQ ID NO: 46600 - protein, 133 aa, Zea mays
  Clone ID: 700341749_FLI.pep
FTVLVGAGELLKEELMDRTVLQLHKASVSDLLIPSRPPAQTVYDVQLVQTLIGRYMSHAGVSQGGIFLNDLDQEMFETNVDGESLLALCKLVDRYLAEVASDPNLSVSSFVDLATSMPETASNSNLQLCVKWS

SEQ ID NO: 46601 - protein, 330 aa, Zea mays
  Clone ID: 700345814_FLI.pep
ALRRASTPNHPPRRRRRRLFCLRREKPRRGATRKRARMPRPEFQAPPDVFYNESEARKYTTSSRIIEIQSRISERALELLALPNDGVPKLLLDIGCGSGLSGETLTEHGHHWIGYDISKSMLDVALERETEGDLLLADMGQGLGLRPGVIDGAISISAIQWLCNADKSSHEPRLRLKAFFGSLYRCLARGARAVLQFYADNVKQSEMIVTFAMRAGFAGGVVVDWPHSSKAKKSYLVLTCGPPSVTTSLPKGKGENGEACSDDDDNESSGEDGDRTVGIYERNRPKKRQKTKKNGKGKDWLLRKKEQMRRRGHDVPADTKYTGRKRKGYF

SEQ ID NO: 46602 - protein, 581 aa, Zea mays
  Clone ID: 700349509_FLI.pep
NIYLSSVSDLLDFISPVQERKESNVQRKCRRAKNNTRAHHGESVEEKENFQHDSGSLGASKDGFEEEKPDVHPPAVLEENYAAHEEQKQCDVLSPEEYSDEGWQAANMRGRSANVRKKSSRRKPALMKLMVDRFEDDHTGSVYRTGLQPRTKGEKDDSATAPSQISFGSFLKTDKLNGDPSIAEDKSLNGTAKPEQLTNPTGINRPTSIASKFISYKDVAVSPPGTVLKPILEKKEAKEKGSGHDIYLTLPSEEEDPQFTENEKEKPSEDSSKEVLSSQQDLESHVETPDSNSDENPSAPKKASGSKLSASAPPFNPGSLLSMSHPYSTVAIYDASAVIQAVPNQAMEILPHAIDTRVPRGPRSTLYYRTGHSFQRKQGYTHSQSTIVRGSYSPTTMNPHAAEFVPGKTSQQSDVADREPSPDNHVANPDLDVVSQTTDEVKAETPATEKAGQVEKVVSGKGKENRGKDIVRNSYKTELARQILLSFIVKSVHDSLGSAQAEPERKPSGSDEASNKQSSNLVKNASGRKDSDKQEKSMEVPKGLKGTEGFTVVSKRRRRPQPFMNPINGLCSQPSICTSVS

SEQ ID NO: 46603 - protein, 177 aa, Zea mays
  Clone ID: 700349624_FLI.pep
GLSYLHHDCKPVIVHRDVKSNNILLDAEYGAKIADFGVARTIGDGPATMSMIAGSCGYIAPEYAYTLHVTEKSDIYSFGVVILELVTGKKPLAAEIGEMDLVAWVTAKVEQYGLESVLDQNLDEQFKDEMCMVLKIGLLCVSNLPTKRPSMRSVVMLLLEVKEENKPKLKAVATLPI

SEQ ID NO: 46604 - protein, 285 aa, Zea mays
  Clone ID: 700350279_FLI.pep
KHCKSTPLFVLPLPPPSHSIPFRQRRTTDARSQLPSQAGSQNRHSAPTPLSPFVHPHPSSQPASHGRQGLRQPRRGRPAAVVPAPASDPPSPGPDRGRDRADHLPGGPPHAPALLPAGRVAAAARPLQRHHHHHHLRVLVPPLHDAAGDAGLAQPERARGGVLRPAGRVRVVQVPAGDGGRGAAARVPGPRRRGRVVARALRPRRPLRALPRRRAPPGLPGGLPRPPGQGRRPRAMEGRQLDLRPLPPLRHLPRVPRHRRRQRRARRFRVQVPDHHLLPRRSLID

SEQ ID NO: 46605 - protein, 319 aa, Zea mays
  Clone ID: 700353411_FLI.pep
RKSDREDTRGTAKDKKYVRDDEKDHSRERGAGRDDKYGASKVALPVWDDDRHGRPNRGDWKSASSREQRLDCGDRRDSTRVKPTDHDGSNGGSGRSFRHGRSMSPEEHRHRGRHESHPSSRVSRSAAHIEDINSRGGEASRNGDPDALATMNATAEALEAKEKQKPSFELSGKLAEETNRVAGVNLLYSEPPEARKSEIRWRLYVFKDGEPLNEPLYVHRMTCYLFGRERKVADVPTDHPSCSKQHAVLQYRLVEKEQLDGMMTKKIRPYLMDLDSTNGTFINGNRIEPRRYYELFEKDTIKFGNSSREYVLLHENSTE

SEQ ID NO: 46606 - protein, 667 aa, Zea mays
  Clone ID: 700353950_FLI.pep
MDASAEVDHLAAERSAARFDVEAMKVAWAGSRHAVEVGDRMARLVASDPVFRKDNRTMLSRKDLFKDTLRKAAHAWKRIVELRLTEEEAGMLRLYVDQPGYVDLHWGMFVPAIKGQGTEEQQKKWLPMAYKFQIIGCYAQTELGHGSNVQGLETTATFDPKTDEFVIHSPTLTSSKWWPGGLGKASTHAVVYARLITEGKDYGIHGFIVQLRSLEDHSPLPGVTLGDIGGKFGSGAYNSMDNGVLRFDHVRIPRDQMLMRLSQVTREGKYVHSDVPKQLLYGTMVFVRQTIVADASKALSRAVCIAVRYSAIRKQFGSQDGGPETKVLDYKTQQSRLFPLLASAYAFRFVGDWLKWLYMDVTQKLEAKDYSTLQEAHACTAGLKAVTTSATADAIEECRKLCGGHGYLNSSGLPELFAVYVPACTYEGDNIVLLLQVARILMKTVSQLTSGKQPVGTMAYMGNVQYLMQCKCAVNTAEDWLNPVAIQEAFEARALRMAVNCAQNIGQAANQEEGFYERSPDLLEAAVAHIQLVIVTKFIAKVQQDIPGPGVKEQLQNLCNVYALYILHKHLGDFLATGCITPKQGALANEQLGKLYAQVRPNAVALVDAFNYTDHYLGSVLGRYDGNVYPALYEEAWKDPLNETVVPEGYHEYLRPLLKQQLKLSRL

SEQ ID NO: 46607 - protein, 489 aa, Zea mays
  Clone ID: 700354848_FLI.pep
IPTLLPCLPLMTSPGGVFSAALVAEDFPWVDMEEEMGMAPDMYREVFDLAQRGTRAFRDRLFDEAISCYTKAQNLRPDPIILGNRSLTFCRLSQLLRERSAADSEYQPLNGLDPTTHAELALKDAEKILSINSNSPRPYILKAYALFLMEHYHEARETLLAGLQVDPLSHVLQTCLNDLDRNTNIAAGARRARLARIDDFECTLCFKLLYEPVTTPCGHSFCRSCLHQSMDHGNKCPMCRTVLFIGPRTCPISVTLSNIIQRNFPEEYAERRSEHETMTYAGVDLMPLFVMDVVLPSQKMALNIFEPRYRLMVRRIMEGNHRMGMVAIDSATGTVADCGCEVEISECEPLPDGRFYLEVEGTRRFRIVRSWDQDGYRVAEVEWLKDIPLPEGSQGRRELMELANGASELARAYIRHARDTVRTARRTRHLDLEGMPGPQDPEKFSFWLANLISLRPSDRLDTLRLRDTRERISSSISLLRDSEQGCRVQ

SEQ ID NO: 46608 - protein, 453 aa, Zea mays
  Clone ID: 700467941_FLI.pep
SKVVDSFENQRSMPSSSRQVRGARRVAHNPRKTLLVSPPSYWPPWDKSITMDLLEMKNGLNYFRYTYDPSVSHVQELFEAAKAANDLNAIAAILGKYPYHPESLLTFAELFKYSGEHQSSADAVEKCLFALECAWHPLFSPLQGNYQLKFNHDTNKPLFTALFSHMKNLDRRGCHRSALEVCKFLLSLDFDDPKGSLFCIDYFALRSQQYKWLEQFAEEYQCDNSLWLFPNFSFSLATARFYLECDAASEGSDDADKSTSLDLMKQALMLHPMVLRKIVDKAPLKDSSWTQILRNVFFGSAKPGSPSLEHMINIYVERHYIMWRFPELQNLLKEAALLVIESLKQDNREALDWACVRKEAFSSDKNEYSHLLVSDFTDTTPSLPPEELRPFMVGPGMLHEMPPVEQEAGPERLRAPREVAGRNPAVVFLESLLPWVDYGDNHQGANDDDNDDE

SEQ ID NO: 46609 - protein, 177 aa, Zea mays
  Clone ID: 700404757_FLI.pep
KEENNDGSNKISGDSLKDLYKSFVSEYPIESIEDPFDQDDWSTYAKLTDEIGQKVQIVGDDLLVTNPTRVAKAINEKTCNALLLKVNQIGSVTESIEAVRMSKRAGWGVMASHRSGETEDTFIADLSVGLSTGQIKTGAPCRSERLAKYNQLLRIEEELGDAAVYAGAKFRAPVEPY

SEQ ID NO: 46610 - protein, 434 aa, Zea mays
  Clone ID: 700444117_FLI.pep
SLFLLKKELYLWGLGRTQSYFLFHSSAEVMAHLLGLAICGGRGRRVQLIPGLDPGDHGVTELDKVGVNRAQLLLHLSREVDVALLDGVAVLGDGHVLEEGDDVLLPEDALVFLLQVNEGVASLAVPDVWQASLDSQAQVVADDLHTPSCPHVVVATDGLAITHETKVHSRANEIPVEGKVHATHGEQGSLGDCHDSINIPLIPLLGLDQLCGSIIVRDVQPQAVGDGGVSTLPEAEGVSTHKVSTLTVGVVQGVEEERGGWAEEVLDVLLKSIDILARWVLGNEAVVVDGVDVLLLGDHVAEAAAGGVLEGDAGGLGPEDAVDVVAVVELVVEALGHLDGLGRVAVLHDDEVVGLEEGPPHLQEVEVADRRDHDVELVLEQRRGGGRRPRDRHRARHCRSRWWWRSHSRPPDLDLSAPPLSAAGPGGGGEQRRL

SEQ ID NO: 46611 - protein, 239 aa, Zea mays
  Clone ID: 700444141_FLI.pep
SGPDVDEGERERERRKGAAGAMAGHAPARDKTTTGFAATCSLLSQFLKEKKGGLQGLGGLAMAPAPAAGAGAFRPPTTMNLLSALDAAKATVGEPEGHGQRTGGNPREAAGEEAQQLTIFYGGKVVVFDRFPSAKVKDLLQIVSPPGADAVVDGAGAGAAVPTQNLPRPSHDSLSADLPIARRNSLHRFLEKRKDRITAKAPYQVNSSVGAEASKAEKPWLGLGQEQEGSDGRQAGEEM

SEQ ID NO: 46612 - protein, 82 aa, Zea mays
  Clone ID: 700444330_FLI.pep
LRHSLRYIEQRSCVVYLQKLVVQIAGARPHRTQGKRATTRSEQVLEGGELELARGGERDGEVADDGEVDGEPDLELVVDVPV

SEQ ID NO: 46613 - protein, 444 aa, Zea mays
  Clone ID: 700444344_FLI.pep
VQSPNSNLHPGHSPEMASELTYRGGSVAPGSASNGGEYSPKSSKPLSWLARAARYAAAEHRPVFALAGMLFAAAIFTFSSPSTLSPSEPAASVGFNHLAVSGHPSFRESVGGKVPLGLRRRALRVLVTGGAGFVGSHLVDRLLERGDSVIVVDNFFTGRKGNVAHHLQNPRFEVIRHDVVEPILLEVDQIYHLACPASPVHYKYNPIKTIKTNVVGTLNMLGLAKRIGARFLLTSTSEVYGDPLQHPQVETYWGNVNPIGVRSCYDEGKRTAETLTMDYHRGANLEVRIARIFNTYGPRMCIDDGRVVSNFVAQALRKEPLTVYGDGKQTRSFQYVSDLVEGLMKLMEGEHIGPFNLGNPGEFSMLELAKVVQDTIDPEAHIEFRPNTADDPHKRKPDISRAKELLGWEPKVPLREGLPRMVTDFRKRIFGDQEGSTESAGGLS

SEQ ID NO: 46614 - protein, 162 aa, Zea mays
  Clone ID: 700446047_FLI.pep
VPPANLARLVDHAGSVALGAAGVLGRLLGVPGFLPEPPRGVAAALRGGHVQRLEHRICLKGGGDGALLELVVVEEVLVVGEEAGRVDLLGHLVQVGALAGPVVAEPGSGGDEVPPLRREVLHLQQRRRDEERRVRVQRRRNRHGAHSSTLSFPSGPRMDGCI

SEQ ID NO: 46615 - protein, 407 aa, Zea mays; identical to SEQ ID NO: 40940
  Clone ID: 700450953_FLI.pep

SEQ ID NO: 46616 - protein, 285 aa, Zea mays
  Clone ID: 700452061_FLI.pep
YSCNIHEHPLSRSCFIYATAGMHAKDASGDKTPVILLVRMHACARSMGAMVISSVGSVVGLDLPALVVALAPLPEHDVGAVTDAAVPLVAVEGVEVEVDVVDHADAAETVADVAALRPQHRLVQKVRVVGHQAHRVGLPQRVLDGLPGRLVHQRERRVTFLVLDARAPPHVLDPVLVLVLGVRRRQHHLPVADAHGVVGVGAAVHLHGRLRRQRPPAPVALDVHLRHPVRDRRSVPRRCDATAAVVPAAVALIATAVVSAVHDDGVLFNLTHLDQQLLWRLMSDR

SEQ ID NO: 46617 - protein, 413 aa, Zea mays
  Clone ID: 700452092_FLI.pep
EETPCDRSQSQRNRTEARPPAASEMDGGAGEEGKQERHLVLAHKLFLLSHPSVDDLSKVALRAEVLDTVKSDDMATLFESLVAGGVLEGDAALLAEMRGRIDEEIRKLDEKIADAEENLGESEVREAHLAKSLYFIRVGEKEKALEQLKVTEGKTVAVGQKMDLVFHTLQIGFFYMDFDLISKSIDKAKNLFEEGGDWERKNRLKVYEGLYCMATRNFKKAASLFLDSISTFTTYEIFPYDTFIFYTVLTSVITLDRVSLKQKVVDAPEILAVIGKVPHLSEFLNSLYNCQYKSFFVAFSGLTEQIKLDRYLQPHFRYYMREVRTVVYSQFLESYKSVTMEAMATAFGVTVDFIDQELSRFIAAGKLHCKIDKVAGVLETNRPDERNAFYQATIKQGDFLLNRIQKLSRVIDL

SEQ ID NO: 46618 - protein, 431 aa, Zea mays
  Clone ID: 700452211_FLI.pep
RGYTATTTINRAATGPASHCSRHTRPDTNRLVHLLDLGARATASSRSVLVHAAGASHVGTRALVHLGDDGVAKALQLLHLVIELVRLGELVGVQPADGRVDGVLDLLLVVGSQLGRDLLVLDRVAHVVGVVLQRVLGLHLLLVLLVLRLVLLRVLHHLLDLLLGQTALVVGDCDLVLLPRRLVLGRHVQDAVGVDVEADRDLGDTTRSRWDAGELELPKQVVVAGPGPLTLVHLDQHTRLVVRVGGEHLLLLGGDGGVPRDKDGHHSSGSLQTQRERSDVKQKQVLHLLVALTTEDSGLDGSTIGNGLIRIDVLAQLLAVEEVLEQLLHPGDPSGATNKDNIMDAALVHLGIPQALLNRLHALPEQVHVELLKPGTGDGGVEVNALVQRVNLNGGLGSGRQSSLGPLTRGPQPPESPRVASDILLVLSLEL

SEQ ID NO: 46619 - protein, 409 aa, Zea mays
  Clone ID: 700456175_FLI.pep
SSSSLPPFHPVSSPPPSPGRVEFFHPPHRSTTTTRMLGAARRQLGSGPMLGQILRRLRPAVSAEVARGYSAAAKEMTVRDALNSALDEEMSADPSVFLMGEEVGEYQGAYKISKGLLDRYGPDRVLDTPITEAGFTGIGVGAAYHGLRPIIEFMTFNFSMQAIDHIINSAAKSNYMSAGQISVPIVFRGPNGAAAGVGAQHSQCYAAWFAHVPGLKVLTPYSSEDARGLLKAAIRDPDPVIFLENELLYGESFPVSAEVLDSSFCLPIGKAKIEREGKDVTITAFSKMVGYALQAAEILSKEGISAEVINLRSIRPLDRAAINASVRKTNRLVTVEEGFPQHGIGAEICMSVVEESFAYLDAPVERIAGADVPMPYAANLERMAVPQVDDIVRAAKRACYRAVPMAAAA

SEQ ID NO: 46620 - protein, 187 aa, Zea mays
  Clone ID: 700456186_FLI.pep
IKLKLKAVYMYAAGFYTYSIFALLFWETRRSDFGVSMSHHIATVVLIILSYIFRFARVGTVVLALHDASDIFLEIGKMAKYSSCEWLAVMAFLLFVASWILLRLVMFPFWILRSTSYEVLLTLDREKHRFYGPIYYYVFNCLLFSLLVLHIYWWVLIWRMLVKQIQSKGRVGDDVRSDSEGEDEHED

SEQ ID NO: 46621 - protein, 398 aa, Zea mays
  Clone ID: 700456526_FLI.pep
QHSTGSSRERERERCRGSGTTTTTSRLPRRRAPTRCSRSSAAPTRTTAWPSATAPSCWPRSTPRTTTSTGTRTCASAPGSRTRKACRRSRSSTRPRGSPSSTPSASPTRSSSRLSTRTRRTRRCCGRRARTWARASAASAWSTTPASTSTPSTATRTTAACTTAPPSCSGSGARATTRAGRSCRGVPRPTPPRPTREARTPCASSARPAARTTASRCATARRAWRPPTRGTSTSTGSRTCATAPGCGTRRATRPSRSSTRSPARRSSTPRGRATPSSSCPTTRTTRTSPCSGPRAATSATASAASAWSTTSTSTSTPSTATRPTAASMTVPRSCSGSGARATTSAGRSSLGERTKETTSWYPNNNSAGCGDPKIKEAGCDASRTSRVVFASDSQPLWG

SEQ ID NO: 46622 - protein, 389 aa, Zea mays
  Clone ID: 700457051_FLI.pep
PSHCLSRRRRFAAARFFEPLRSCPAMDSSATDGARLPPPRAGSRLCVRCGERKAALKRPKTLEQICRECFYIIFEDEIHQTIVQNSLFKAGERVAIGASGGKDSTVLAYVLSELNRQHNYGLDLFLLSVDEGITGYRDDSLETVKRNEIQYGLPLKIVSYKDLYGWTMDDIVKAIGLKNNCTFCGVFRRQALDRGAALLKADKIVTGHNADDIAETVLLNILRGDIARLSRCTFITTGEDGPIPRCKPFKYTYEKEIVMYAYFKKLDYFSTECIYSPNAYRGFAREFIKDLERMRPRAILDIIKSGENFRISTTTRMPEQGTCERCGYISSQKLCKACVLLDGLNRGLPKLGIGSTKAGARADSDGKQRTKRSERNTSSLQGKHGNFDF

SEQ ID NO: 46623 - protein, 217 aa, Zea mays
  Clone ID: 700423983_FLI.pep
STGGGRWPPCWASSWDRPGAASRGSRPAPTRAPSRPSPSARCWARSCCSWGGWSRSGGWTSSTRTRSPSSGPRPGPALPRTSPTSPATRATRAASSSTRSASPAPSRTASTSPTSRSSSGLSWPRSNTPASPCLPCSFSTSRPDRARRRSARLAYDLHAAGHDGCRVISHPCVLVLIGRSNPPSWFSIASVVVRLHRIRRMQQNGGFFFFFFRVCTM

SEQ ID NO: 46624 - protein, 296 aa, Zea mays
  Clone ID: 700424186_FLI.pep
EVDVWSAGVILYILLCGVPPFWAETEQGVAQAIIRSVIDFKRDPWPRVSDNAKDLVREMLNPDPKRRLTAHQVLGHPWLQNIKKAPNVNLGETVKARLQQFSVMNKFKKHALRVIAEHLSVEEAADIKDMFEKMDLNKDQMLSFEELKLGLHKFGHQMPDADVQTLMEAADADGNGSLNYGEFVTLFVHLRKIGNDEHLHKAFAYFDRNQSGFIEIDELRESLADDLGQNREEIINAIIRDVDTDKDGKISYDEFATMMKAGTDWRKASRQYSRERFTSLSLKLQKDGSLQMTSTR

SEQ ID NO: 46625 - protein, 136 aa, Zea mays
  Clone ID: 700424638_FLI.pep
STTRSLGRDGTCRPTAAAAAGTGCAAWALAPAPAPWCGSASPTSRARPRTRTCSPPAAASTARSGEPRSGTRRRARPAAPAARRGPTSSPSTDIDRRRPLPTPGSQPAGRPDLRRSGPDGTTLGPRPARSSFLLPS

SEQ ID NO: 46626 - protein, 383 aa, Zea mays
  Clone ID: 700429206_FLI.pep
ARKNPTRETNLPNLSVAMALSDRSRESLLPSFLYASSARSFAATGAAARLPVSSPAPATAGAGGGVPFSIQAPKEKIEMYSPAFYAACTAGGIASCGLTHMAVTPLDLVKCNMQIDPAKYKSISSGFGILLKEQGARGFFRGWVPTLLGYSAQGACKFGFYEFFKKYYSDIAGPEYAQKYKTLIYLAGSASAEVIADVALCPFEAVKVRVQTQPGFARGLSDGLPKFVRSEGVLGLYKGIVPLWGRQIPYTMMKFASFETIVELIYKHAVPVPKSECSKTTQLGISFAGGYIAGVFCAIVSHPADNLVSFLNNAKGATVGDAVKKLGLWGLFTRGLPLRIVMIGTLTGAQWGIYDAFKVMVGLPTTGGVTPAPAAEAELKASA

SEQ ID NO: 46627 - protein, 130 aa, Zea mays
  Clone ID: 700429252_FLI.pep
GALDRLEAHLAGCRYLCGDRLTLADVCLFTTLIRFDLVYNTLFRCTRRKLAEYPSLHAYTRDIYQMPKVAETCDMEAIMAGYFKTLFPLNPGGIQPHPPATCDRESLLRPHGREALSSAAGTPLEAAAVS

SEQ ID NO: 46628 - protein, 425 aa, Zea mays
  Clone ID: 700429329_FLI.pep
VGHLPGVLPLSSAAIATSLANVSGFSLLIGMASALETLCGQAYGAKQYHKLGLDTYRAVVTLLVVCVPLSLLWVFMDKILVLIGQDPLISQGAGRYMVWLIPGLFANAVIQPLTKFLQTQSLIYPLLLSSAATAAVHVPLCYVMVFKTGLGYTGAALTISISYWLNVAMLVGYIAFSSSCKETRARPTVEVFRGVDAFLRLALPSALMMCLEWWSFELLTLMSGLLPNPELQTSVLSICLTSVTLLFTIPFGLGAAGSTRVANELGAGNPDGARSAVRVVLSMAGIDAVVVSGSLLAARRLVGIAYSSEEEVISAVAAMVPLVCITAITDCLQGILSGVARGCGWQHLGAYVNLGSFYLLGIPMAILLGFVLRMGSRGLWMGIVCGSLSQTTLMSAITFFTDWNKMAEKARERVFSDKQPQEPGP

SEQ ID NO: 46629 - protein, 122 aa, Zea mays
  Clone ID: 700429786_FLI.pep
VHTAIIPSSLPPLLAIQRFSLPTLALLPFLPILFRPLNTLSAFAPTLAHLLSLTLSSLPSSPSISLLPYNITASSRHAIPLARRSHTSAAPPSSSPPCSPLTPHLLLFFFFLNIKTIYALLF

SEQ ID NO: 46630 - protein, 226 aa, Zea mays
  Clone ID: 700429923_FLI.pep
AGPRHSAAMVRLAKFYLVCYNSLQSLGWFVSLLRLLPCLVPPFPVHSAYVVAGDLICFLQTCAILETVHAAIGLVPTAPLLAFLQWGGRIHFILAVVRQIPEVQSSPSVFITFIAWSISEVIRYSHYALTTLKVCPAWLTYLRYTAFIPLYPIGVGPGEMWTMYQALPFVKKRDLYSGFFEKFSMSYRSFLVGVLVLYPFLWLKLYQHVFKQRKSKLGKGSRKKRA

SEQ ID NO: 46631 - protein, 512 aa, Zea mays
  Clone ID: 700048534_FLI.pep
GEGLALSGLDHATSNPMGYEESKKHLLSLSYPELQCLCKRYNLPAKKTHSQLASSLASLLEASPSPAPPPVQLANMKEASTCNHANNKRGPYNGRDDGKPLVHAKHQKGDQTPVDETSKKGIDTGTSIPPVSMNHGRPEYHGHLSSDLRTAHNLQSQCDVGIATNTTNLEFVGKHDCSPANVIDQICPPIIQKYPSNGNGQASTKFGRMNDNTEKGCRLSDKISANAAAVQFSVMSDEGIDLLVDLNSSSATWAKNFMAEMHITPPSEHGNFSSFISSLSTKDDHSTASPSGNIIVDIQNKGAENIVPSTDSSLASDVGESSRSVLYPVDTTTVNSVSSTSTVAGTPVELSGYQEGAPVVCSSCLTADVQNNVTSDMPGASDNEVLPPEPADVFLQSERITAPAVCGSVQPIGNKCTMSSGDEVRSGSNEDSCPKSSGKQTGDETLMENEPVKAVAVEENIGRDDSLSISYQLACKTVAELPVTDAQSPASSSGHFIAGNFDNTHPTSSATS

SEQ ID NO: 46632 - protein, 328 aa, Zea mays
  Clone ID: 700471931_FLI.pep
SSIVSPLAMDMAASGALPVVDLAPFFTDGDEGGASRARATEAVRQACRTHGFFRVVNHGVPAHLMARALEMSSAFFALPDDDKARARAAEGSEAPLPAGYARQPVHSADKNEYLLVFGPKLGFNVYPAEPSGFREAVEECYAKLTELGLLVQEVLNECMDLPPGFLTDYNSDRSFDFLAALRYFPATEEEDNGISAHEDGNCITFVIQDGVGGLEVLNDDGDWVPAEPIEGSIIVNLGDVIQVLSNNKLKSATHRVVRKPVHRHSFVFFFNIHGAKWIEPLPEFTAKIGEPPRYRGFVYNEYMQLRMRNKTHPPARPEDVVHVTHYAI

SEQ ID NO: 46633 - protein, 136 aa, Zea mays
  Clone ID: 700474339_FLI.pep
TLWTRVNITVANRITWPRGPHRSVPPVPVGVAVAAATVATAVAAATTTVAAAATVAAATAVAATAITAPATAVAAASTATTVPTAAASTAAAGLGLVDGDVAAVQLLAVHALDGVPHRLLRGEGDEAEAAGPLRLP

SEQ ID NO: 46634 - protein, 143 aa, Zea mays
  Clone ID: 700073416_FLI.pep
NPTRPIKTLPPDQQHSHATPRAPNPEPRRGSMAAAAGWLRRAAAVSLPRLPSGLPFIPPPPSGPLTEAQSLGVPGLGAAAGPAMELMAVPKKKVSKYKKGLRNGPKALKPVPVIVRCRCCGRVKLPHFYCCSGERGNPSESNS

SEQ ID NO: 46635 - protein, 332 aa, Zea mays
  Clone ID: 700083166_FLI.pep
QAGMKSNAEIVDLTKASILPEKLEESFIECSEEDKDAYLYYILSVHGQGRTIIFCTSIAALRHISSILRILGINVLTNHAQMQQRARMKAVDRFRESENSILVATDGFARGMDFDDVRTVIHYQLPHSTDVYIHRSGRTARKSLAGCSIALISPTDKSRFYSLCKSLSKENLQQFPVDHTYMSGVMNRLSLARQIDKIARKTSQENANKSWLQRNAESMGLILDTSDSEEDHVQGHKKRKATSAHLQKLQQELSDLLQCPLQPKTFSRRYLAGAGVSPLLQKQLEELAKRNASNNSSKSKNKGSGFVVIGQDRVEPLQALQNSGQEVCVNVD

SEQ ID NO: 46636 - protein, 667 aa, Zea mays
  Clone ID: 700093518_FLI.pep
FRKNLKKNSGRGEEAMSAQVAVVPNGGPGAVPAVVSPGAVGVAQPLPTTSLYVGDLEGAVSDSQLYELFSQAGQVVSVRVCRDVTSRRSLGYAYVNYSNPLDAARALEVLNFAALNNKPIRVMYSNRDPSSRRSGSANIFIKNLDKTIDNKTLHETFSSFGTILSCKVAVDEAGQSKGFGFVQYDKEEAAQNAIKSLNGMLINDKPVFVGPFVRKQERDHSFDKTKFNNVFVKNLSESTTKEDLLKIFGEYGDITSAVVMIGMDGKSRCFGFINFENPDAASHAVQELNGKKINDKEWYVGRAQKKSEREMELKRRFEQSLKDAADKYQGLNLYLKNLDDSIGDDQLCELFSNFGKITSYKVMRDQNGLSKGSGFVAFSTREEASQALTEMNGKMISGKPLYVAFAQRKEDRKAMLQAQFSQMRPAVPMTPTLAPRLPMYSPMAPQQLFYGQAPPAMMPPQPGFAFQQQLVPGMRPGGPHMPNYYVPVVQQGQQGPRPGIRRGAGAQGQQPVPPFQQQILPRGRMYRYPTGRNMPEAPAMPGVAGGMIQAYDMGGFPVRDAALSPAAQIGTLTSALANANPEQQRTILGENLYPLVEQLEPNQAAKVTGMLLEMDQTEVLHLLESPDALKSKVAEAMDVLRNVAHQQNPNLPTSQLAALSLTEGIMS

SEQ ID NO: 46637 - protein, 516 aa, Zea mays
  Clone ID: 700093652_FLI.pep
GTRLDDYKLKQRARASSSKTDKVGAPKDSSPPPPPSRMRSSTRTDKSGSAAKSALDELRAKQRMRQQAPEARRITDLLPHSGSSIRRRAGSPPSDGSNDGNNRGRMNDHGRIAGDGRDDEFDESPSRLDPLKFDDVKSITLRRSKLVKWFMEPFFDDLISGCFVRLGIGKTKNGTPSYRLCIVRNVDASDPDRNYKLENYSTCKYLNVVWDSEANAARWQMTQVSDSPPNEEEFKDWLQAAEKNGARIPTRQEVLDKKEAIQNAYNFVYSAATVQQMLQEKSAVRRPINIAAEKDRLRSELEMALSRRNEHEAERIRTKLKNLQNRAQPVSKDNKAAKLEAMNRKNRADNFKNASELKPVNTSLKAGEAGYDPFSRRWTRSRNYYASKPGGNNVEETANGSSSNVAPSNEDTKSKAQTGTAATTAAQVAAADAGKLIDTNAPVDLGTESNMLHTFELPISLSALQEFGGAKGLFDGYMARRQKIEATMGYKVPDNDGRRHALTLSVSDYKRRRGLL

SEQ ID NO: 46638 - protein, 246 aa, Zea mays
  Clone ID: 700072258_FLI.pep
VDLLPAIPDVRFPAARPPVEGDAPVLRAPRPRPAPGLLRWRHRPLGHAEILGALRLPHRHRRRHRLRLRLGRRGRGREELPRHEPRGRARRHLTGAVVVVDGAPEQAEPEAAVRGVEDGRARRARVRRRRYIEIQHHLRSGARRNPPKSSSPLKLRLTSWSLCLTCRPVCQHSPPPAAAPPRAALDRRLRSHASLWRLMGRSRAAAINSVVGEGAVGGGGRGHGLGRTEDEKGEGKGSGSGAAVQW

SEQ ID NO: 46639 - protein, 698 aa, Zea mays
  Clone ID: 700072506_FLI.pep
LASWSRSGSGRVSYFPARHLRALVLTSTEIAMDASAEVDHLAAERSAARFDVEAMKVAWAGSRHAVEVGDRMARLVASDPVFRKDNRTMLSRKDLFKDTLRKAAHAWKRIVELRLTEEEAGMLRLYVDQPGYVDLHWGMFVPAIKGQGTEEQQKKWLPMAYKFQIIGCYAQTELGHGSNVQGLETTATFDPKTDEFVIHSPTLTSSKWWPGGLGKASTHAVVYARLITEGKDYGIHGFIVQLRSLEDHSPLPGITLGDIGGKFGSGAYNSMDNGVLRFDHVRIPRDQMLMRLSQVTREGKYVHSDVPKQLLYGTMVFVRQTIVADASKALSRAVCIAVRYSAIRKQFGSQDGGPETKVLDYKTQQSRLFPLLASAYAFRFVGDWLKWLYMDVTQKLEAKDYSTLQEAHACTAGLKAVTTSATADAIEECRKLCGGHGYLNSSGLPELFAVYVPACTYEGDNIVLLLQVARILMKTLSQLTSGKQPVGTMAYMGNVQYLMQCKCAVNTAEDWLNPVAIQEAFEARALRMAVNCAQNIGQAANQEEGFYERSPDLLEAAVAHIQLVIVTKFISKVQQDIPGPGVKEQLQNLCNVYALYILHKHLGDFLATGCITPKQGALANEQLGKLYAQVRPNAVALVDAFNYTDHYLGSVLGRYDGNVYPALYEEAWKDPLNETVVPEGYHEYLRPLLKQQLKLSRL

SEQ ID NO: 46640 - protein, 366 aa, Glycine max; identical to SEQ ID NO: 37097
  Clone ID: 701105767_FLI.pep

SEQ ID NO: 46641 - protein, 461 aa, Glycine max
  Clone ID: 700993872_FLI.pep
KLKSCPSLFNSKHKTSSSMAASVSTVGAVNRALLNLNGSGPGVSAPSSSFFGSSLKKVIGSRVPNTKISSGSFKIVAVEEKKEIEETQQTDKDRWKGLAYDISDDQQDITRGKGLVDSLFQAPQDAGTHYAVMSSYEYLSTGLRQYLDNNMDGFYIAPAFMDKLVVHITKNFMTLPNIKVPLILGIWGGKGQGKSFQCELVFAKMGINPIMMSAGELESGNAGEPAKLIRQRYREAADLIKKGKMCALFINDLDAGAGRLGGTTQYTVNNQMVNATLMNIADNPTNVQLPGMYNKEENPRVPIIVTGNDFSTLYAPLIRDGRMEKFYWAPTRDDRIGVCTGIFRTDSIPEQDVVKIVDTFPGQSIDFFGALRARVYDDEVRKWISGVGVDGIGKKLVNSKDGPPTFEQPKMTLEKLLTYGNMLVQEQENVKRVQLADKYLNEAALGNANEDAINRGTFFQS

SEQ ID NO: 46642 - protein, 225 aa, Glycine max
  Clone ID: 701150419_FLI.pep
GRKKERKKEMEHGFPKGKFKSLCVFCGSNSGNRQVFSDATIELANELVKRNIDLVYGGGSVGLMGLISQRMYDGGCHVLGVIPKALMPLEISGEPVGEVRIVSDMHERKAAMAQEADAFIALPGGYGTMEELLEMITWAQLGIHKKPVGLLNVDGYYNSLLALFDNGVGEGFIKHGARNILVAASSAKELMMKMEQYSPSHEHVAPHDSWQTRQLGNYAEQENAE

SEQ ID NO: 46643 - protein, 293 aa, Glycine max
  Clone ID: 700959116_FLI.pep
DISDQSSEKIHRKQIKHLFLDLFVAGPVVAVKRLKDVTISEKEFKEKIEAVGAMDHESLVPLRAYYFSRDEKLLVYDYMPMGSLSALLHGNKGAGRTPLNWEVRSGIALGAARGIEYLHSRGPNVSHGNIKSSNILLTKSYDARVSDFGLAHLVGPSSTPNRVAGYRAPEVTDPRKVSQMADVYSFGVLLLELLTGKAPTHALLNEEGVDLPRWVQSVVREEWTSEVFDLELLRYQNVEEEMVQLLQLAVDCAAQYPDKRPSMSEVVRSIQELRRSSLKEDQDQIQHDNDILL

SEQ ID NO: 46644 - protein, 334 aa, Glycine max
  Clone ID: 701132627_FLI.pep
FFGQFLRAREVLSPRQHEEPSSELSSLQKQKMHPAMYEDHVALGCHATRKLRCSERLPSFVKSRSCSCCNPCSPNGNRLTGSHIMEAEKCPLEKTTETPDVSTTITIAKPSGDESLEKQVSVGPRFQAEVPEWTGVFSESDSKWLGTHVWSLKNDTEPATATDVGRGRQEMCSCEFHGSVECVRLHIAENRMKLKLELGSEFYRLGFDRIGEEVSLQWTTEEEQRFKDIMKSNISSKNKYFWNNPSKYFPKKTRRNLVNYYFNVFLIQLRTYQNRVTPESVDSDDDEVEFGSFSDGFGMDAVKSLGDDFLECSLNKQCTDLKYTKLECKFDNWI

SEQ ID NO: 46645 - protein, 62 aa, Glycine max
  Clone ID: 701102059_FLI.pep
LRQPRYTGRASSNESGAPLLPLSTITLPSESASTITESPSLISLASIFSAMLSSKSRIIALL

SEQ ID NO: 46646 - protein, 72 aa, Glycine max
  Clone ID: 701065532_FLI.pep
VVERFRSKSHSPPIQSYPSKCLAFQRRHLLLPFSNSPPKNSKSRPRPALSSPTVAFSLWDHKSLATPAMFLD

SEQ ID NO: 46647 - protein, 137 aa, Glycine max
  Clone ID: 701124726_FLI.pep
PPVRSYRKNTLQQKKEEQGEGSGMYVKVSMAGAPYLRKIDLNVYKSYPELLKALGNMFKCTFGKNLEQVLNNLLLFFLAFLRLIWHIYVYVERRNKVVIACDPGEYSEREGYNGSEYAPTYEDKDGDWMLVGDVPWK

SEQ ID NO: 46648 - protein, 356 aa, Glycine max; identical to SEQ ID NO: 46255
  Clone ID: 700998660_FLI.pep

SEQ ID NO: 46649 - protein, 103 aa, Glycine max; identical to SEQ ID NO: 42976
  Clone ID: 701044964_FLI.pep

SEQ ID NO: 46650 - protein, 260 aa, Glycine max; identical to SEQ ID NO: 42494
  Clone ID: 700977203_FLI.pep

SEQ ID NO: 46651 - protein, 110 aa, Glycine max
  Clone ID: 700763686_FLI.pep
IKMSLKNNMVVLKVCLLLLFLVGVTAARMELSFFKSDQSSSYDDDEYSKPCCDLCMCTRSMPPQCSCEDIRLNSCHSDCKSCMCTRSQPGQCRCLDTNDFCYKPCKSRDD

SEQ ID NO: 46652 - protein, 64 aa, Zea mays
  Clone ID: 700050913_FLI.pep
SVSSIPRRNRPSPLMRLSLLHAFACYQYFGPAFWSELCAKFVNAVKEFEMCILDLVDTLVACLV

SEQ ID NO: 46653 - protein, 147 aa, Zea mays
  Clone ID: 700612141_FLI.pep
ENRALKIISGLQNFDRSSVASVVTAADKMRLAELLEEEGADIIQTEGGKCSSPTKPGVLGLIEKATPTLAAAYSISRAVSIPVMCSSGLSSVTAPMAVTAGAAGVGVGSAINKLNDVVAMIAEVRSIAQAMELAPRIVSETLRTISY

SEQ ID NO: 46654 - protein, 154 aa, Zea mays
  Clone ID: 700612157_FLI.pep
VDLGPFKHVVDDGLELRKAAFECVDTLLDSCLDQVNPSSFIVPFLLSGLGDHYDVKMPCHLILSKLADKCPSAVLAVLDSIVEPIEKTISHKPKGDAVKQEVDRNEDMIRSALRAISSLSRISGSDYSIRFKNLMNKITATPALAEKYNSVRGE

SEQ ID NO: 46655 - protein, 191 aa, Zea mays
  Clone ID: 700612208_FLI.pep
RLHLWSPTPIIPFPSFKALRRFRFFPSISRYTHRSSTDKNSPDMASKRIQKELMDLQKDPPTSCSAGPAGEDLFHWQATIMGPSDSPYAGGVFFINIHFPPDYPFKPPKVNFQTKVYHPNINSNGSICLDILKEQWSPALTISKVLLSISSLLTDPNPDDPLVPEIAHMYKNQRQRYEETARAWTQKYAMG

SEQ ID NO: 46656 - protein, 341 aa, Zea mays
  Clone ID: 700612258_FLI.pep
NHQKAQVMVSSWPLNYWRTAPVFRTPLINQHASMQEAKVNDAGPSSNLNMPAMYGHTEDSLLSADLERDWIIEENPRTETTLFGDSSSEILDEPQMVMSAEPFHAPAYLNLEAGNSSPTVHVELTNSDEKLANLAEDKNRRLSDASQLRTGSNPMVDVELTNFDEKLANLAEGKNQRLSDASQLRTGSNPMVDVELTNFDEKLANLAEDKNQRLSDANQLRTGRLGEELVEKYLAKQLGSNNVRWVNNRIETGLPYDIVITHPEGFTEYVEVKTTVSSRKDWFDVSAREWQFALEKGDSFSIARVILGTKKASIEMLKNPHKLCKQKALRLALLISRSAAT

SEQ ID NO: 46657 - protein, 61 aa, Zea mays
  Clone ID: 700468443_FLI.pep
RSGLLIMNSRTRNDRLAGPCATYWYFVVRTLSTGSIGACLLSLSVGGSRTAFACQRVVSCN

SEQ ID NO: 46658 - protein, 227 aa, Zea mays
  Clone ID: 700468448_FLI.pep
YDFTRILSSFYFKGYTLLTKIQRIEWNNRGMSSAHAIFITAVSLYIVTSTDLFSDCVKGPITFRNSIISTSALGVSVGYFITDLEMIFWLYPSLGGMEYVLHHTLSLVAIAYTMLSGEGQFYTYMVLISETTTPEINLRWFLDTAGLKKSSAYLVNGILMFVAWLVARIFLFMYVFYHIYLHYSQIMQMHAFGYYLTFVVPSVLFVMNTMWFMKILKGVMKTLAKWS

SEQ ID NO: 46659 - protein, 150 aa, Zea mays
  Clone ID: 700468496_FLI.pep
AAGAGSYIRWMIPALFVYGPLQCHVRFLQTQNIVLPVMLSSGATALNHLLVCWLLVYKIGMGNKGAALANAISYFTNVSILAIYVRLAPACRNTWRGFSKEAFHDITSFLRLGIPSALMVCLEWWSFELLVLLSGLLPNPKLETSVLSIS

SEQ ID NO: 46660 - protein, 201 aa, Zea mays
  Clone ID: 700476677_FLI.pep
IAEKKDRYGGFLDLRMKPWIRNLVTRSLAILPSLIVSIIGGSSAAGQLIIIASMILSFELPFALVPLLKFTSSKTKMGQHTNSIFTAVLTWMIGSFIVVINTYFLITSFVKLLVQSGLTTISQVFSGIFGFLGMLIYIVAILYLVFRRNRKSTQPLLESDAELAVSGSSADAGAECSLGHLPREDISSMQLPQQRSASDLD

SEQ ID NO: 46661 - protein, 320 aa, Zea mays
  Clone ID: 700476763_FLI.pep
KILSNLVSQDEGIKVDRSIEFSYEELSDATNNFSMDHKIGQGGFGSVYYAELRGEKAAIKKMDTKASQEFLNELKILTRVHHTNLVRLIGYCVESCLFLVYEFIENGNLSQHLHGTGYEPLSWTSRVQIALDSARGLEYIHEHTVPVYVHRDIKSANILIDRDLRAKVADFGLTKLSEIGTTSQSLPSLRVVGTFGYMPPEYARYGEVSPKVDVYAFGIVLYELLSAKEAIVRSTEFTDAQGLVYLFEETLSMPNPMEALQEMIDPRLGGDYPIDSAVKIAYLAKSCTHEEPRMRPTMRSVVVALMALSSKDHELTRGHD

SEQ ID NO: 46662 - protein, 422 aa, Zea mays
  Clone ID: 700477131_FLI.pep
HSWGGSGTSRSDGDAVGDALGSEPCGGATVVRGVGVEQHVGELGGAVPVPQLRVAVLAHHLALDLDQRVAEPLERRQRPGVGGPLGGVALAEVHLVGGVLGEDLDERDADDGLDLARDGVDEGALRVALQLLVLLAAGLRHPAPAHRGPVREVPRVRVLAEVDGGVERRRDPDDGGAGAGELRHGLHLGPPGRVLVVAVPDLAHLLPPRLQLLVAPQRAVVGVVDGQVLAHPLLDGVPDGQPVARVRVVLDQQPHLVRAGRVRHRHAPLDEVGGEALLGEVPALVHHGGHAQRVLAREDGHLEDAAAVDERLPRQRVDGHGVAEVRAQELVHRVRHAQLPVRRDHERLHHRVRVQPVADELVPARVVDGDIGLGELPHPGLDAAGRRRVDLALGHGEVPVDVRLAELDGEGREPAVAAQEEE

SEQ ID NO: 46663 - protein, 160 aa, Zea mays
  Clone ID: 700573963_FLI.pep
QKFSRNSKNSSDMASKRIQKELMDLQKDPPTSCSAGPAGEDLFHWQATIMGPSDSPYAGGVFFINIHFPPDYPFKPPKVNFQTKVYHPNINSNGSICLDILKEQWSPALTISKVLLSISSLLTDPNPDDPLVPEIAHMYKNQRQRYEETARAWTQKYAMG

SEQ ID NO: 46664 - protein, 164 aa, Zea mays
  Clone ID: 700574484_FLI.pep
KGFSGPWCVENFIQVNSLRRAQDVRKQLLEIMDKFKLNVISAGNNSTKIGKALTAGFFFHAARKDPSDGYRTLADHQQVYIHPSSALFHQQPQWVIYHEIVMTTKEYMRDVTAVDPRWLLELAPRSYKSVDPTKISKRKRQERIEPLYDRYNEPNSWRLSKRRW

SEQ ID NO: 46665 - protein, 205 aa, Zea mays
  Clone ID: 700575083_FLI.pep
SLFLLKKELYLWGLGRTQSYFLFHSSAEVMAHLLGLAICGGRGRRVQLIPGLDPGDHGVTELDKVGVNRAQLLLHLSREVDVALLDGVAVLGDGHVLEEGDDVLLPEDALVFLLQVNEGVASLAVPDVLLLGDHVAEAAAGGVLEGDAGGLGPEDAVDVVAVVELVVEALGHLDGLGRVAVLHDDEVVGLGRFLMCCSRALISLP

SEQ ID NO: 46666 - protein, 207 aa, Zea mays
  Clone ID: 700575315_FLI.pep
QALLKMLEGTIVNVPEKGARKHPRGDNIQIDTKDILFICGGAFVDLEKTISERRQDSSIGFGAPVRANMRAGGISSAQVTSSLLESVESGDLIAYGLILVSLAALNEDQLVQVLIEPKNALGKQFKKLFSMNNVKLHFTDGALRIIAKKAMSKNTGARGLRTILENILMDSMYEIPDAKSGESHWHVIPGSDRTSVTCKNLIPVISM

SEQ ID NO: 46667 - protein, 225 aa, Zea mays
  Clone ID: 700579892_FLI.pep
REMCGGKYSDAASVACAEVTRAIANITSAVNREHVLEPACPDDDDDELFGPKTTMAETDGGTSRRLMLQSADYFLPAGFKCRRASYVLSRVWANDETVQESLGVRKGTIGAWKRCNQDILYNQNVQSVVPYHSRLAAKGYRALIYSGDHDRIVPFVGTQAWIRYLNLTVVDDWRPWYVGGQVAGFTRNSGNLIYATVKGAGHTAPEYKPTECQTMFRKWVSRDPL

SEQ ID NO: 46668 - protein, 350 aa, Zea mays
  Clone ID: 700580254_FLI.pep
FLSSSRYLSEKATSLATGVISELVKELRVKPVPTVLASFSGGSKGCMYKVIQLLAGICEGDATMKDYRLVRNCICGQIYDSSPVDFVSDVGTQFLQKPAVGNLSQSTILRSWMAKVLASGMDTLFPSRIEAQRAEYWHTLYSAAGLGPVLIFCSEDDNLAPCHIICGFARRLIELGTDVKLMKWSDSQHVGHYNSHEIEYRKAVDDTLKKALVTFCHRSQLYDSNMAGDQEYKIAHSVCSLHNAAANSNESLRRVANSPSDHFFLPSSKDHDESREPSSLIEDQRRHISHPPCMEPKGVLGQILFDVCVPNNVEGWDIKPTVSPNGRPTFASARQLGPFNPIRYFRRSRL

SEQ ID NO: 46669 - protein, 157 aa, Zea mays
  Clone ID: 700580634_FLI.pep
LSDDRSIHNTELDLAQRQVIQRRVQTIDRSLLRLLEETELLKRLQDLLSAGDRELPAFLDVCDGDREVVGQESEPLRAHAQPFVREIELEVERLGVRSRSVGEELHVLVLGVGLLVEPPELAVGEGVADSDGSHGRAGGDGWVSRGWGTGAARERRR

SEQ ID NO: 46670 - protein, 312 aa, Zea mays
  Clone ID: 700580760_FLI.pep
QSWAEAYYNYGLEYYPKLQSCVPFTPVTGQRILLRNTSYRDQVFDALVKGLMSLTTKMNVSSLHITFPSEGEFSKLKDSGLLQRIGLQYHWRNRNYKSFDEFLMDLKQPKRKNIRQERKKIPAQNLQMKRLRGDEIKSRHWDTFYKFYRNTTDNHWGRPYLTRDFFHLLGEKMGDNVMLIVAEKDDKLVAGALNLIGGDTLFGRLWGCLPDAYFPNLHFEACYYQAIEAAIELNLSKVEAGAQGEHKIQRGYLPVTTYSCHYFSNPGFAAAIGNYLTHETAQVKHAIKVLRDSGPYKEDILKEFAAQQDDDL

SEQ ID NO: 46671 - protein, 176 aa, Zea mays
  Clone ID: 700580838_FLI.pep
ASVANTKRKEKGLLPRPVRAGIVGYPNVGKSSLINRLLKRRMCPAAPRPGVTRELKWVRFGTDLELLDSPGILPMRISDQTSAIKLAICDDIGERSYDFADVAAILVQMLIRHPAVGSEAFRRRYKIDVDSECGKTFVTKLSVHLFNGDTSQAAFRILSDYRKGKFGWVALERPPT

SEQ ID NO: 46672 - protein, 72 aa, Zea mays
  Clone ID: 700581127_FLI.pep
IAEATCILQKLPICGFSTTRLVIAYTMAPSLTVTVNQARRTKTLCKSDQIQQFVDNKPCCYSTCKGHSLLFT

SEQ ID NO: 46673 - protein, 124 aa, Zea mays
  Clone ID: 700614766_FLI.pep
HDQRAIHVEAVRRWVGSLYPGQHPPGKGERGAEGQGQPLVGEVQELQERREEPRVLLAAVQSEQVLPVGLISNGAAAESILEATLVHMGVNEEHNSAGLASGSFCVSIVGQFCVFSDEMGVIEL

SEQ ID NO: 46674 - protein, 284 aa, Zea mays
  Clone ID: 700614836_FLI.pep
LEALTSKLKRSKRSLSFQSNIRNCLRALELHNQRFVFFFEDHLNFLNFTCRWKRRILFVFQGVLLYGPPGTGKTLLARAVAHHTDCTFIRVSGSELVQKYIGEGSRMVRELFVMAREHAPSIIFMDEIDSIGSARMESGTGNGDSEVQRTMLELLNQLDGFEASNKIKVLMATNRIDILDQALLRPGRIDRKIEFPNPNEDSRFDILKIHSRKMNLMRGIDLKKIAEKMNGASGAELKAVCTEAGMFALRERRVHVTQEDFEMAVAKVMKKDTEKNMSLRKLWK

SEQ ID NO: 46675 - protein, 481 aa, Zea mays
  Clone ID: 700615084_FLI.pep
QQKASANGGCHEDDDDCVVLDGDPDKAITVAEEGSLGDGSSDELQIVAEKGPVACRDFPHSRHSCSNLPFSTTSHVKHCSMCHCFVCDAPAPCKYWGNSTSADDHCHATDKDSKWTCMRQIFKQKLLPASFLEKHQNGVYSTMTPPRQQHMQCHVSVPQSPSVSHGSHPSLTIQSPLLNEGSQNQQRHPSVRVSLSVGATVSSPRAGRGTGNAHIAQSTHSHAIFKRAGAVAPVFATRNASQFCPSAPDDLLLQQALSHASQPVQVAPTTNAFTGASQNNHFQRSFSAPIAPQVQQGQPAARYQVAINGMHAVGPQLARSTSLTTQRTQCLPEPAIIDVSTTSWQDILATVASNLGVADYNTSTPESQHVTVDSLAMHPTANHGLDLQHEPIAESENLTYSLLHDSSNGAAGGSVQADGPMQTPENLDHLIGQSNPVPNEAHLDDFAGAPANQLPIEEEEAHQPEMSRLEPTNILFEFDWV

SEQ ID NO: 46676 - protein, 274 aa, Zea mays
  Clone ID: 700615448_FLI.pep
KNEPEFAKKLASVADLYVNDAFGTAHRAHASTEGVTKYLKPAVAGFLMQKELDYLVGAVANPKKPFAAIVGGSKVSSKIGVIESLLAKVDILILGGGMIYTFYKAQGYSVGKSLVEEDKLELATSLIEKAKAKGVSLLLPTDIVVADKFAADAESKIVPATAIPDDWMGLDVGPDATKTFNEALDTTKTVIWNGPMGVFEFEKFAAGTEAIAKKLAELTTTKGVTTIIGGGDSVAAVEKAGLADKMSHISTGGGASLELLEGKTLPGVLALDDA

SEQ ID NO: 46677 - protein, 129 aa, Zea mays
  Clone ID: 700615701_FLI.pep
LCTQAATKVMMKKRKGKIINIASVVGLTGNVGQANYSAAKAGVIGFTKTVAREYASRNINVNAIAPGFIASDMTAELGEELEKKILSTIPLGRYGQPEEVAGLVEFLALNPAASYMTGQVLTIDGGMVM

SEQ ID NO: 46678 - protein, 268 aa, Zea mays
  Clone ID: 700621762_FLI.pep
LACIDIDMEETQRFADSVAGLALERETKTNFSRFQEWLEANKDYQAIVDGANIALYQQNFAEGGFSLTQLDGVITELRDRYHGKWPLVILHNKRISKLMENSSNRHLIETWRTNGALYTSPSGSNDDWYWLYAAIKLNCLLVTNDEMRDHIFELLGPSFFPKWKQRHRVKYTFNKGKAVLVMPPPYSSELQESEMGSWHIPIEEKSGNERGRIWLCIGRGGSCKEHGEVPSTNGAVHKVPQTEASNVVQQGLTENKDESITGKRKDRD

SEQ ID NO: 46679 - protein, 248 aa, Zea mays
  Clone ID: 700622307_FLI.pep
STLDRLGFRPPLPPPRTEKMGKRWIPLEANPDVLNQFIWGLGVHEEDVQFCDVYGLDDELLAMVPQPVLAVLFLYPLTSLDEEKEESSVSAATSTSAGKELSKKVYFTKQTVGNACGTVGVIHAIGNATSQIKLVEGSYFEKFYKQTADMDPAQRAAFLEEDDEMEDAHSVAASAGDTDANVDVNEHFVCFSCVDGELYELDGRKSQPTSHGPSSPETLLQDAAKVIKARIAENPNSMNFNVMALSKK

SEQ ID NO: 46680 - protein, 178 aa, Zea mays
  Clone ID: 700801452_FLI.pep
KMILLGLQKLQSNMHLSHPPLLMLKSSCMLLFYLLHVLILMTYMILTCPALHLYVLVCSFHLMMPRLWIFPLLFLTFCRSTLMFSLWTSHRVFPRFVALNTRSTSSPVPSFQTAPRTVRIRMRQRRSGARCRRLLDKGYICESLSPCSVPVLLVPKKDGSWCMCVDCRAINNITIRYR

SEQ ID NO: 46681 - protein, 522 aa, Zea mays
  Clone ID: 700802115_FLI.pep
DIEHTDGKRYFTWDHSAFPNPEEMQRKIADKGRKMVTIVDPHIKRDSSFHLHKEATDKGYYVKDANGNDFDGWCWPGSSSYPDMLNPEIREWWADKFSYENYKGSTPTLYIWNDTNEPSVFNGPEVTMPRDAMHYGDVEHRELHNAYGYYFHMATADGLLKRGEGKDRPFVLSRAFFAGSQRYGAVWTGDNSADWDHLKSSIPMVLTLGLTGLPFSGADIGGFFGNPEPDLLVRWYQVGAFYPFFRGHAHHDTKRREPWLFGERRTAIIREAIHMRYSLLPYFYTLFREASVNGIPVMRPLWLEFPDDKETYNNGEAFMVGPSLLAQGIYEEGQKSVSVYLPGKESWYDLRNGSPYKGSATHKLQVLEDSIPSFQRAGTIVPRKDRFRRSSTQMVNDPYTLVIALNSSGAGEGELYVDDGKSYEYQQGAFIHRRFVFADNKLTSFNIGPDDLGKKFRSDCVIERIIILGLRSGVKKAIIEPGNQELEIESGPISLRSGSSPVAPTIRRPNVCIADSWTIRIA

SEQ ID NO: 46682 - protein, 652 aa, Zea mays
  Clone ID: 700802941_FLI.pep
FPMDFDMECNSLSWNNLDEESLYPLLNFLKAHNYKGTTMMLNDRIQSLRGLQSSLRKAEEYLLSVPQDTPYSEFNHRFQELGLEKGWGDTAKRVLDTLHLLLDLLEAPDPANLEKFLGTIPMMFNVVILSPHGYFAQSNVLGYPDTGGQVVYILDQVRALENEMLLRIKQQGLDITPKILIVTRLLPDAAGTTCGQRLEKVIGTEHTDIIRVPFRNENGILRKWISRFDVWPYLETYTEDVSSEIMKEMQAKPDLIIGNYSDGNLVATLLAHKLGVTQCTIAHALEKTKYPNSDIYLDKFDSQYHFSCQFTADLIAMNHTDFIITSTFQEIAGSKDTVGQYESHIAFTLPGLYRVVHGIDVFDPKFNIVSPGADMSVYYPYTETDKRLTAFHPEIEELIYSDVENSEHKFVLKDKKKPIIFSMARLDRVKNMTGLVEMYGKNARLRELANLVIVAGDHGKESKDREEQAEFKKMYSLIDEYKLKGHIRWISAQMNRVRNGELYRYICDTKGAFVQPAFYEAFGLTVIESMTCGLPTIATCHGGPAEIIVDGVSGLHIDPYHSDKAADILVNFFDKCKADPSYWDKISQGGLQRIYEKYTWKLYSERLMTLTGVYGFWKYVSNLERRETRRYIEMFYALKYRSLASQVPLSFD

SEQ ID NO: 46683 - protein, 442 aa, Zea mays
  Clone ID: 700803054_FLI.pep
THPSRWDTIGVFFKKKLDSSTLCRFYFDFSPTYIGCGLICPHIVNCSTLLGAIISWGILWPYISTKAGDWYPADLGSNDFKGLYGYKVFISVSVILGDGLYNLIKIIYATIKEIMNARAKQGRLPLAQVQDGDEGSNLSAEEKHLNETFIKDSIPPWLAGSGYIGLAAISIATVPMIFPQIKWYLVLSAYVVAPLLAFCNSYGTGLTDWNLASTYGKIGLFIFASWVGQNGGVIAGLAACGVMMSIVSTAADLMQDFKTGYLTLSSPRSMFVSQLIGTALGCVIAPLTFWLYWSAFDIGNPDGAFKAPYAVIFREMSILGVEGFSALPQHCLAICSFFFIASLVINLLRDVTPKNVSRFIPIPMAMAIPFYIGAYFAIDMFVGTVILFVWERVNRKECDDFAGAVASGLICGDGIWTVPSAILSILRIDPPICMYFKPSLSS

SEQ ID NO: 46684 - protein, 380 aa, Zea mays
  Clone ID: 701160303_FLI.pep
VGRRPRRRPPLPRPPRVPLPRRPTPSARLREAGDHAVPDDRPRHRGPRRRQRHHSGRLPPHRHPVAGTVPGLERHRPRRHHRGAVQPERAGGERPHRALRVRPRGVRVPAARGREHHPRPRRRARLQRGGVHAGGVGRGGRVRGRRARGRDHGVRADRRRLRGPPGGGPAPVAPRRPQGRGAPLPRAPLLLPAGVAGVDREPRPAHAGHRVQQRRPLHPQHHPRQRLRGHRHRRRAGHHHADRVRPEPCRRLRRIQGSPPQGDVHPHSRRLHRGHHRLRVLPPTSRDSPGGLRERADAADKAVLPTRAPRRRAGLRHGAGAGARDRVVVYSIGVSTPTSGMRSGTPSVHRCSQFLPSVFSSLFFFLCGFCKNLYNVDSVR

SEQ ID NO: 46685 - protein, 389 aa, Zea mays
  Clone ID: 701160361_FLI.pep
GPEKGHSRTTELNSQDLLEQLPALQQLLYRLIGCRAEGAAKNNYLVQYALAQVLKESFKIYCAINDGIINLIDKFFEMPKHEALKALDVYKRAVHQAGNLSDFYESCQGLELARNFQFPTLREPPQTFLSTMEEYVKEAPRMMPVVEPLELPERLLLTYKPEEEVHDTVPIVAEKLQVVEEIAPVPSSQIALPPKPEIADTGDLLGLGDSTPTVLAIEESSALALAILPTGIDNSTTTTQQDSGFDPTGWELALVTTSSNATPLSMESNLGGGFDKLTLDSLYDDGTYRQMQQQQLYGSAPPNPFMASDPFAVSNQVAPPPSVQMAAMAPQPQHLPMMIEPNPFGPPQQHHAGVAPAANPFLDAGFGAFPAVNGMHPQTNPFGGAAQLL

SEQ ID NO: 46686 - protein, 377 aa, Zea mays
  Clone ID: 701163196_FLI.pep
LAETEPSPAMPPPPQANGGKVTPNLAMDAEATRMLNLTVLQRLDPAVEDILITAAHVTLYDFNIDLNQWSRKDVEGSLFVVKRNSQPRFQFIVMNRRNTDNLVEDLLSDFEYELQPPYLLYRNASQEVNGIWFYNQHDCEAVASLFGRILNAYAKVPPKPKVPTTKSEFEELEAVPTSAAIDGPLEPPLSSTAVVSNAPDESLVNYFNGAASIGSVPSAQMAGRAHPSNDTVTPSHVPLIVPSATPTHQMSHPLGGSSAPPLPLHDTNPHASQSANLLTPAFFAPPPPSSTSVTPPASSMMPTAPPLHPTSTAAQHPSYGTPLLQPFPAPSPPPSLTPAHNDGLVISRDKVKDTLQRLVQNDEFIDLIYRELQSVHM

SEQ ID NO: 46687 - protein, 53 aa, Zea mays
  Clone ID: 701166248_FLI.pep
ISNRVIGVLKGNWSLRRKQRLPLHSITHPSPSLQASLHFWYNLHSYFICQRRE

SEQ ID NO: 46688 - protein, 282 aa, Zea mays
  Clone ID: 701166881_FLI.pep
FFDLISSSCYDLTHLFLSFSKSALIGSHKGSCHIYDTSDNKLLQKKQIDLQNKKKKSSQKKITGFQFLPGSTSRVLITSADSRIRVFDGLNLVHKYKGFRNTNSQISACLAANGRYVISASEDSHVYIWRNDGSLEKGRSKANVTVTSSYEHFHCQDVTVAVAPPSNGSAVVSRSNSTKHDERDSVLEHPLLHAVPEKLQDSSDLQPQSGNILSTSSNHSGDRATWPEELMTPTKQSPQSSASLLSGADQAPCWSAWGTVIVTAGRGGQIRAFQNFGFPARV

SEQ ID NO: 46689 - protein, 127 aa, Zea mays
  Clone ID: 701166918_FLI.pep
LYSFRSRHSLSTSRAPQQNEDAGHLPEAGGARAAGAQQPPRRRVAQQAPEPRRDPARLPRRAPGRRLLRLLRRRRRARLRRPLLRHRRRHRHRHLPADVLRPGRHLLRLPGPPRQPQRPHPPVRPVR

SEQ ID NO: 46690 - protein, 167 aa, Zea mays
  Clone ID: 701167024_FLI.pep
AAVRKYREKKKAHTASLEEEVVHLRALNQQLVKKLQSHAALEAEVARLRCLLVDIRGRIEGEIGAFPYQRPPPAAKNVDLVSGVDQGGFLAGAAAQVTSSCDFRCNDQMYCSPGMQGAVSGQVLGQGACDVSSIQCVGSTRSASTKLPVCGGMDAVPAACLPNVQNK

SEQ ID NO: 46691 - protein, 350 aa, Zea mays
  Clone ID: 700552433_FLI.pep
REIQTDASVQNLVERTDHTFQDLVSFKQPPADDKIALIDLTTDRELPSQMDLDITDAETKRSNAVWKNLELATMKLSQELAEQLRLVMEPTLASKLQGDYRTGKRINMKKVIPYIASHFRRDKIWLRRTKPNKRNYQVVIAVDDSRSMSEGKCGKFAIEALVTVCRAMSQLEVGQFAVASFGKKGNVSVLHDFDQIFNSEAGVNVISSLSFEQDNKIEDEPVSDLLTHLNVMLDTAVARARTPSGQNPLQQLILIISDGKFHEKENLRRHVRDVLNRKRMVAYVLLDSPEDSIINLKEACFRVGEKVELKKYMDSFPFPYYVMLQNIEALPRTLADLLRQWFELMQSANE

SEQ ID NO: 46692 - protein, 300 aa, Zea mays
  Clone ID: 700552568_FLI.pep
RAGNADKKVQELNMKLEKRTSSDQKRRIQKTEHALKAAEEELMKAQLETTTKVKQLREVHGAWLPPWLATHAARSMEVMSNHWNEHGKPAFDSFLQKASEKTVQTKKWAEPHLETAKTKWMPVAKEKWVTLKKHAKPYVQMVSEKSLEAYQTSSDFVRPHLVNAHQVVDPYFQEAKKLSKPYVDQIATATKPHVEKVRTALKPYTERARHVYGQFLETATTYHQQAQATISDYLHRHEFTKQFVTKELVWYLASALLVTPFFVLYTLLTETFCTKKKKKTPRSSNTNHGHRRHKRRHADK

SEQ ID NO: 46693 - protein, 132 aa, Zea mays
  Clone ID: 700552686_FLI.pep
GAMARGVVSAKGGAVAGKKKGSVSFTIDCTKPVEDKIMEVASLEKFLQERIKVAGGKAGNLGDSVTISREKTKVTVTSDGPFSKRYLKYLTKKYLKKHNVRDWLRVVAANKDRNVYELRYFNIAENEGEEED

SEQ ID NO: 46694 - protein, 319 aa, Zea mays
  Clone ID: 700552840_FLI.pep
IPVFTGRTWSPGATSVTPSPTLSMIPPGDHVLPVFTGECKECAHCKSAESNMCDLLRINTDRGVMIADGKSRFSINGKPIYHFVGTSTFSEYTVMHVGCVAKINPQAPLDKVCVLSCGISTGLGASINVAKPPKGSTVAVFGLGAVGLAAAEGARIAGASRIIGVDLNPSRFEEARKFGCTEFVNPKDHNKPVQEVLAEMTNGGVDRSVECTGNINAMIQAFECVHDGWGVAVLVGVPHKDAEFKTHPMNFLNERTLKGTFFGNYKPRTDLPNVVELYMKKELEVEKFITHSVPFAEINKAFDLMAKGEGIRCIIRMEN

SEQ ID NO: 46695 - protein, 422 aa, Zea mays
  Clone ID: 700552841_FLI.pep
ELLIASRNLEFFTNGYRYLIQILPAAVVAPMYFSGKIEFGVINQSVSAFNHILSDFSLIVFQFQSISAFSAVIDRLGEFDDLLDGNESSLSSQRDSIDGINIVFKSSGPCVPSSNGSLTQSDPCMVLEIHNLTLLTPRSGNVLITGLTMELKDKDHLLVMGPSGSGKTSLLRALAGLWTSGTGEIIYHVRGSTQLQKPNPSSDKPSSMNLKGEEESLQSSKQRRDNGIFFVPQRPYMVLGTLRQQLLYPTWTEEVQHSPDNDDKNSADPLPFLSEVSTSDLVGAKSEVPSTAELIEVLEDVKLGYILPRFNGLDSTHDWASVLSLGEQQRLAFARLLLATPTLVLLDESTSALDEANEAHLYSQIEAAGITYVSIGHRKTLHKFHNKALYISMSDSTDTNPRNWELKPADKLPAEEPSQFPS

SEQ ID NO: 46696 - protein, 419 aa, Zea mays
  Clone ID: 700471512_FLI.pep
SYFSFMDDLIDKMGDNEEAPLDIKLSYLPRSMVVALIAVPVDVLLISAVALWKSPCMLFKGWQRLCEDLVGREGPFLETVCVPFAGLAIVLWPLAVIGGLLASFFSSFFFGFRAGLVAYQEASFQMGLAYMISAVAIFDEYTNDLLYLREGSCLPRPKYRRADIMRECETEPAERQQTGHHKHRRTLPRSKTFMQTVQRLRPIQIWDWFFRSCELNGRILLSEGLITAQDMEQYITNGKCKKLDTKLPCWCIFQCLLRSANSDSDGLVISDHVQVTTLNWPKDRVLDWLLGPLLLIKDQMKKLEVTEDEEMCLRKLIMTSKNEKPSDWDDSGFPSDDNIKRGQLQSIIRRLQGIVAYMSRVPSFRRRFINLVKAMYLEAIEAGAIDGSRKVKADVADRCAEDIAGSCSSTDTPANIHMV

SEQ ID NO: 46697 - protein, 263 aa, Zea mays
  Clone ID: 700471645_FLI.pep
LLPLAGALRQDLEQRAHQLPAGVVPAGRVRRVRRGAGAAGRLQELPGQLPVRVRRVRRQRLQRHAVRQLQRGPGQHVHAAGRGRRRQRRREAGGHGRHRRRGARRPPHRLLPHLPHLLRHLQQRRLRQPRLPQEVQRPVHQPQQPAAGPDLRPPGQVQVGAHHVRRLLLRRLRHGQESRQLRVQHGVPDVLRVRRRQVQLPEQRAVRHAGRLRVLQPGGAPQLGRHPPHRGRVQADHRRLAQRALLPPGHSPQLKRQGGPINY

SEQ ID NO: 46698 - protein, 219 aa, Zea mays
  Clone ID: 700471883_FLI.pep
EKLQNLVNDALDRGAEIAVRGSFGNLGEDAVDQFFPPTVLVNVDHTMKIMQEETFGPIIPIMKFSSDEEAIKLANDSKYGLGCAVFSGNQKRAIRIASQLHCGVAAINDFASSYMCQSLPFGGVKDSGFGRFAGVEGLRACCLVKSVVEDRLWPYIRTVIPKPIQYPVSEHGFEFQQLLVETLYGYSVWDRLRSLVNLIKMVTEQNSAPASNATTKKRR

SEQ ID NO: 46699 - protein, 297 aa, Zea mays
  Clone ID: 700472410_FLI.pep
TSHFMDGGSCGLEGASVVTSTTSTGIPLLPEKHCALFDEACGAMAGSNGPEGVPVVTSADDPPTRADIPFVCNSVDETCEATGGGSAPLEGQICTGFSKLISLEVKKGLQKCATFPPSSGQPQQEDCSCCHVGDELTCAPAYGRSVSLPPTLKLVSAMKGGREKNGVASSPSENRHVKWAPDVYDPPVTSVCHSVTNSYQRRSKHRKKEKNKQKKRQKGKSKKNQQQSSAQNPSAPQVPGIGPKGVSTTGGQSPADDLSEHEAGIMDYSMGSQEANCGSSFLRESVAKMHFSTAEAS

SEQ ID NO: 46700 - protein, 374 aa, Zea mays
  Clone ID: 700472565_FLI.pep
IKGPSPEMVEYIGMQNLINAIKSSVGLSEGKLLFGFKGNLSGEIVWGALDDVVMGGVSESTFQILPTGSESSGPTGLFKGTVSTSNNGGFTSIRTKNFTVPEDLSAYDGIELRVNGDGRRYKLIIRTSYEWDTVGYTASFNTTKGGWQSVKVPFSSLKPVFRARTVTDAPPFDASNITSLQLMFSKFEYDGILNPTFTEGPFELPFSSIRAYINEPITPRFVHVSSAGVTRPERPGLDLSKQPPAVRLNKELGSILTFKLKGEDLIRESGIPYTIVRPCALTEEPAGADLMFDQGDNITGKISREEVARICVAALASPDAVGKTFEVKSTVPFSEPYVIDPANPPPEKDYEVYFKELKEGITGKEALEATPAQV

SEQ ID NO: 46701 - protein, 110 aa, Zea mays
  Clone ID: 700570435_FLI.pep
YGCRGIGDNDAGPLCTALQSCGNVHQDLSTTIQYRDHISYRGSWLTDGGEHSASTAKSLTTLRHGSPNTSLVTLIAHLFLPSQASTTKSRVVDAWQFPTEKFWQPPVGVP

SEQ ID NO: 46702 - protein, 186 aa, Zea mays
  Clone ID: 700571086_FLI.pep
VGAMLPYWFSAMTMKSVGSAALKMVEEVRRQFNTIPGLMEGITKPDYATCVKISTDASIKEMIPPGALVMLTPLIVGIFFGVETLSGVLAGALVSGVQIAISASNTGGAWDNAKKYIEAGASEHARTLGPKGSDPHKAAVIGDTIGDPLKDTSGPSLNILIKLMAVESLVFAPFFATHGGILFKWL

SEQ ID NO: 46703 - protein, 338 aa, Zea mays
  Clone ID: 700571528_FLI.pep
PFAAAHSSTRGSAPSAMAKKRKRTDAPAEAAGAEKPDDSAPARPERTLFGFKDLVPDAEPASAGAEAAVAPFRNREKVLITCSRRITYRYRHLMQDVLSLLPHAKKDSKVESKQSKGNALNELLELRSCSSCLFFECRKQKDLYLWMVKSPGGPSVKFLVNAVHTMEELKLTGNHLKGSRPLLTFSTNFDEQPHWKLVKEMITQIFATPKDHRKAKPFHDHVFVFSIVDGHVWFRNYQISVPHNEIDKVDKGGLDKMTLIEVGPRFCLNPIKIFGGSFGGPTWYENPYYISPNQIRALEKRQKAGKYAKKVKAKVRRKMHEMENTLEPDEFAELWKGE

SEQ ID NO: 46704 - protein, 393 aa, Zea mays
  Clone ID: 700571588_FLI.pep
AHAIPLPSRAACRQSKPPKAMPPPSANGAAAAAAARDDMSPAEARLAMMELANMVSVPMALAAVIRLGVPAAVWAGGANAPMSAADLLPPGHPDPSVLERLLRLLASRGVFSESTESTPTTRRRLFALTAVGRTLVPGPASGASYADYVLQHHQDALVAAWPRLHEAVLDPAGPEPFARANAGVTAYAYYGKDQDANRVMLRAMAGVSEPFMGALLDGYGAAGGFRGVATLVDVGGSSGACLEMIMRRVPTITEGINFDLPDVVAAAPPIAGVRHVGGDMFKSIPSGDAIFMKWVLTTWTDDECTAILRNCHAALPDGGKLVACEPVVPEETDSSTRTRALLENDIFVMTTYRTQGRERSEEEFRHLGVDAAGFTAFRAIYLDPFYAVLEYTK

SEQ ID NO: 46705 - protein, 128 aa, Zea mays
  Clone ID: 700577275_FLI.pep
GVLQTCRHRRFLVYFSDLNKCTKCVGMMYIVCSVTALRVSLYRIYKLQTWLQPTALLLGRRIHPSAMVLDQLDQGVSGTFHGDAALHNGLADVKVDLSGSASNVPKIGISHLSWSIDNTAHDSDRDTW

SEQ ID NO: 46706 - protein, 117 aa, Zea mays
  Clone ID: 700577290_FLI.pep
TFAGPRAWTTQEVITLCERLAGQDANVTTVPVAVLRFTRQLTRCFQWTNDVADRLAFSEVLSSDTVFSAPMNETYQLLGVDGNDILSLEKYLQDYFTNILKKLKDLKAQSKQTDIFF

SEQ ID NO: 46707 - protein, 119 aa, Zea mays
  Clone ID: 700578147_FLI.pep
TASTRSAVDDIHIPDFTQSAEQLGKTVGSDLAKGNLTAPVIFALQDEPELREIIDSEFSETDSFAAAIDLVHKSCGIRRARELAREKGDLAIQNLQCLPRSDFRSTVESMVKYNLERIE

SEQ ID NO: 46708 - protein, 138 aa, Zea mays
  Clone ID: 700578409_FLI.pep
FLGAKTLVDRTPGVGRNAGASLSSDLRHCFRKDASVADVCEGPHVLHPILRQRPTLRLKSTNLKQMQRLVIRYAKNESGTRAFSCFSCRHSQQRLTVDLRQLQSSTRGSPAARTAFRTLGPSSEPKRRLPMSSTLLST

SEQ ID NO: 46709 - protein, 308 aa, Zea mays
  Clone ID: 700578546_FLI.pep
PGARDRGRGDRRRRRRHAVQGRRHGRRGLLRGVLPLLRQLRQGGRQLLRGDRAHLQRRRPRARRRAHQGGILRRPGRERALRGPRPRRPGAGPHRAAALRRRHRVQPHDAPRPQRARQAPRRRRPRRPRPRRRQVRQGLRDEGHRHQHVRQQAPGGHREPRRGRVPHQPGRGPDEGGDGDHGRHHRHGVGVAPDHAAAGAAEAAGADGGRGRAEQAARAAGLRHRAGREGRGWEQCRQRQGLPGHARVRGEARHRGRGRGHQDGLRQHGHGAAREERRPLPLRHRRRRQPRLCRLGMAAKVSIRAQPQ

SEQ ID NO: 46710 - protein, 232 aa, Zea mays
  Clone ID: 700612442_FLI.pep
SRRSSTCARSRCTRTTRSGRWRRTTTSPASTRTSSSAPSMTPTKPTRVSSVRAPCTPSYCHLQLILWHVLTPKKDTASTWIFSFNCMQAWSTSCRGRSSTRCRRRSSGCGTRTRTRSSQACGRARTWRGCWRRRSWTTWPPRSASSGAPGRWTAATACRWAPPRSWCPRRPTPPQPCAPTWSGSETTGTASPRRSSAPLGPTSRRPPRSTRARPTTGSATARASRWTSCRTR

SEQ ID NO: 46711 - protein, 56 aa, Zea mays
  Clone ID: 700612749_FLI.pep
CTDYCLHFSGAFVISILSSPVVFFCMYFMFQGSIVFLEAIVKALYIIFHGCIFYLI

SEQ ID NO: 46712 - protein, 165 aa, Zea mays
  Clone ID: 700613016_FLI.pep
LLSNLYATNARWVDVDKLRSHMKTIKLNKRPACSWLKLKNEVSTFGIGDRSHMHAEKIYVKLDEILLKLREVGYVADTSSALHDTDEEQKEHNLWNHSEKLALAYGLLVVPEGSTIRIFKNLRVCADCHLVFKLVSMVFHREIVLRDPYRFHQFKHGSCSCSDFW

SEQ ID NO: 46713 - protein, 344 aa, Zea mays
  Clone ID: 700613140_FLI.pep
VDIAQSFLLPPNVQNEINEIQGKLNSSATDLAIKTTDNAAKIKKVLNRVRLALVVIAAVMLLLAFVGFLLSIFGLEFLVSVLVIIGWILVTGTFILCGVFLLLHNVVSDTCVAMEEWVAHPTEHTALDEVIPCVEPATANESLYRSRQVTFELVNVVNQVITNVSNRNFPPQLTPFYYNQSGPLMPLLCNPFTPDLRDRNCSRGEVTLDNATQVWKKYECQSTSVSGGAEICATVGRVTPSIYGQMTAGVTVSQGLYQYGPFLIQLQDCTFVRDTFTTINQGYCPGLERYSKWVYVGLVMVSSAVMLSLIFWVIYARERRHRVYSKQHQPYPVEDKPAATVPGA

SEQ ID NO: 46714 - protein, 156 aa, Zea mays
  Clone ID: 700618472_FLI.pep
LEPEVVERAAIESYGVELCDEVSGPDAPVQRGLAGVWNGAVQPLGPPHVRVEEGRHGDPRRVAALVGRHPVLHAPEPVIGHELQKVTDVDHERPRPGSDVHPAAAVLPVAEAHLQAAHAVLQEDGEEARVRVPLDAHGAVRLRARRVVLAHHVQVL

SEQ ID NO: 46715 - protein, 279 aa, Zea mays
  Clone ID: 700618603_FLI.pep
ERAKEIPDDYFVCLVGDMITEEALPTYQTMLNTLDGVRDETGASPTAWAVWTRAWTAEENRHGDLLNKYMYLTGRVDMRQIEKTIQYLIGSGMDPRTENNPYLGFIYTSFQERATFISHGNTARHAKDFGDLKLAQICGIIASDEKRHETAYTKIVEKLFEIDPDGTVVALADMMRKKISMPAHLMFDGQDDKLFEHFSMVAQRLGVYTARDYADILEFLVDRWKVASLTGLSGEGNKAQDYLCTLASRIRRLEERAQSRAKKAGTLPFSWVYGRDVQL

SEQ ID NO: 46716 - protein, 174 aa, Zea mays
  Clone ID: 700479603_FLI.pep
SGRTTIEEVQNYALPATSLSMRSAASSTVAIVCALDSSTLISKCSSRLITISTVSSESAPSSENFDSPQTSVWSGRASCFFTISQTLSVVSFLAAQETDLIGIGCRRRNVLPFLNGEKAREFVLIALTGLAKERAEDPAMEAMCVRREGRGRDGGEAAGTKSVRATGRWLASAA

SEQ ID NO: 46717 - protein, 130 aa, Zea mays
  Clone ID: 700623615_FLI.pep
NESRCFCCTQAELSEGLDSSFILDGVDMPSPPISALRSLRLCSNSSILAPISSIFEMMFSDIAWNLVCICIRRFCTKAVISAVLCAEPSESCSALIGMPDLELAIAAGDQGGCRSARRRWFLGSSFLSYF

SEQ ID NO: 46718 - protein, 98 aa, Zea mays
  Clone ID: 700624129_FLI.pep
AHPTSVVDQAQAAEPAGICGRSGRWRRRRWPSSCCSSSSLRRRRRRWRRRACAGAGARASRGSACPTTTARRCACRRATAAATATASCASASASGSAS

SEQ ID NO: 46719 - protein, 105 aa, Zea mays
  Clone ID: 700624545_FLI.pep
RLDQDTTAGTSSQKASRSWRTEMAMPSGRKTEPNLCLIRPSGPARRVLADLTCIFLSLLLLQIRDIYSDNLYSRYMRAPRDAEKEREARVSGQPKEELVKIIFSP

SEQ ID NO: 46720 - protein, 194 aa, Zea mays
  Clone ID: 700624679_FLI.pep
ASGSHMEKERSLGASTLFNRLEFLQLLEVLPWLLPDLSFVELLHFAILHFNSEIVHRASNHLCLGLHKLLEPQKSIGLLVVLIDGEAGEFLEVKVVLVPRHVLDAARQRPGVVGHGILLCVAGGRYGEGKQYEQGSHERDDSMFAHLDWGIGAEIYSRRRSRETTGGGYDERSVNAILLWRAETETGLERERQD

SEQ ID NO: 46721 - protein, 244 aa, Zea mays; identical to SEQ ID NO: 36900
  Clone ID: 700806267_FLI.pep

SEQ ID NO: 46722 - protein, 276 aa, Zea mays
  Clone ID: 700806773_FLI.pep
GFAAKPQTSRRPFPSAASSSHALRSKMYKLGRGNRDKVQQFMTITGASEKVALQALKASDWHLEGAFDFFYSQPQVSVVNTRHLEDIFNRYKEPDADMIMVEGISQFCNDLQVDPQDIVMLVISWHMKAATMCEFTRQEFIGGLQSIGVDSIEKFRGKLPSLRAELKDDNKFRDIYNFAFTWAREKGQKSLSLETSIGMWQLLFAERNWPLLDHWCQFLQVRHNKAISRDTWSQLLEFVKTTDPQLSNYDDEGAWPYLIDEFVEYLTENGLVQRKR

SEQ ID NO: 46723 - protein, 521 aa, Zea mays
  Clone ID: 700807442_FLI.pep
RSAPSWCRVLQSGVDELIARLTSSGGGAAANPVPNTNSPPPTMEEHAITDRELPIEGLNQPLSDFGNDPELFSEAQPVSSHGQGQGWLSEGGDKAEVVDASISNDVVVVAENTCTDISLGDIEQFLMQISDDQQNDELFSDLSTPLPKLQFQCDDRQVWLDAERGHEVYAADPTASSGAVVTAECTVTELPLGDLEGLLLQIANDQHMVESQSDLSAPTPHHNFNQADIGDLHESHGARVGNLSCIVQESTFCEPRTEPSDQFPQSNVTNLPFSGEANSSEGTSVAHSVSGQNANCMTTEYMMSATNGMFDNLEYSDASSFLPGSFDIVGLGAENQYFDTDNSGIQNQGYQNTTEVRTYNQAALTVRSHMKHDHVVLSSHASGTLNIHAANELHNQSSTSSQSWFNAALSALLDSVPSSPALAAEIENTVINRTLQRISSFRPQQTAGEENTFINRTLQHISSFRSQQATGEEPGTPSIQVTRGGRLMFISLLVILASVIWTFTSGSALNFCKGLWKSSST

SEQ ID NO: 46724 - protein, 165 aa, Zea mays
  Clone ID: 700968602_FLI.pep
EVCVILDSGQYSGDVLVFKHPGLHFGDIHILTARQIDGLEKNFIGYSKNAILFPTSGQRSLADEMANSDFDGDEFWVSRNNMLCKFQPSPFVSLPFWACSRSCCFQPSSLLLTHRRSAFVHFFSRSLASSTNENIPEIHLLMPKQYVRQVIVSSLISDLRHKRPQ

SEQ ID NO: 46725 - protein, 336 aa, Zea mays
  Clone ID: 700968684_FLI.pep
PGGIEICVGSMAAVEGTTKKKVIIDTDPGIDDAMAIFVALRSPELEVLGLTTTFGNVHTALATRNALHLLEAVGRTDIPVAEGSHVTIKKATKLRIASFVHGSDGLGNQDFPPPATKPIDQSAAAFLVEQANLYPGQVTIVALGPLTNLALAVELDPSFPKKIGQIIILGGAYSVNGNVNPAAEANIFGDPDAADIVFTCGADILAVGLNVTHQVVLTDADREKLEQCDSKYARYLCKIMDIYFDYHKDAYFIKGVYLHDPTTVIAAVNPSLLTYTEGVVRVQTVGITKGLTVFDNTKKRYGEITAWSGMPTVKVAVTVDAPAVVELMMQRLMTDD

SEQ ID NO: 46726 - protein, 137 aa, Zea mays
  Clone ID: 701161033_FLI.pep
ERLKYRRIDKRRNHSPAVHKNLQEANIYSIFLTGSLPTERMVATHVALSNVWISSSVLPLVSGTSFATNSTVTRLAAENRKNVPAGFQSMRKLNEYEIAKEPIQLARVTNPPAIAFMSIENICGNKSRDILKQMIIT

SEQ ID NO: 46727 - protein, 197 aa, Zea mays
  Clone ID: 701165103_FLI.pep
GRGSQNPRRGPRRAGTRTARGRTLAATWTAPPPTGAGWAGARAVPARAWAGSPRRTCCRGPPGSTLAAAASRRTAAAAGTPTTGRSRRPGKSVRTGKRQRHVLYVQKKHDTGDDAPEGSKHLREEEVEQIRAGVGEAAALVAPQRRRGAPRLGAEERALGVGGGGGRCDGDRKGALHGGGEVAHAFVFFCFVFWLVR

SEQ ID NO: 46728 - protein, 65 aa, Zea mays
  Clone ID: 701165181_FLI.pep
IPNKSNFFSIFFNLIQSMCIGNNRTSPHMFTGETETAWRSLIPPFYCAEKRSTNHLLGISIVLRH

SEQ ID NO: 46729 - protein, 59 aa, Zea mays
  Clone ID: 701176548_FLI.pep
TISGKCMVLRMHSLGICMFPTEHLIVVWSARFTVLNFPCGTHEAEINNSPLCREFGMNS

SEQ ID NO: 46730 - protein, 49 aa, Zea mays
  Clone ID: 701178015_FLI.pep
DRESLFTAWGLLRRVVLKGRSLRSVPQITRARSRIGGSTHSFVVLNLMY

SEQ ID NO: 46731 - protein, 277 aa, Zea mays
  Clone ID: 701178484_FLI.pep
KNERTDPERAAIGELLVLSRHNMESRISIANHGAIPFLVNLLYSADPSMQENAVTVILNLSLDDNNKITIASADAIKPLIHVLETGNPEARANSAATLFSLSVNEENKAKIGRSGAIKPLVDLLRDGSAQGKKDAATALFNLSIFHENKARVVEAGAVKPLVELMDPAAGMVDKAVAVLAILATVQEGRNGIAQAGGIPVLVEVVELGSARAKENAAAALLQLCTNNSRFCSLVLQEGAMPPLVALSQSGTARAREKAQVLLSYFRNQRQVGKVTRR

SEQ ID NO: 46732 - protein, 137 aa, Zea mays
  Clone ID: 701179138_FLI.pep
GDLVGRRAAVGEPALRAQVLQPLHLQQPLVRGRLPQPAGLRRLRWVERAEPGRARLAARPVAGPHGRRPVLPPVRRRLLRRRPDGRLVLPPGHDRVHAALARLVRARRLLHEGPRRLTHAGSEPNVCPASSLSIGVM

SEQ ID NO: 46733 - protein, 240 aa, Zea mays
  Clone ID: 700551126_FLI.pep
VKYCLKCLLNRYGESAEEAAGKEDWICPKCRGICNCSFCRKKKGEMPTGIMAHIAKASGCTSVHDLLKKGSDVVSAAQAILKVNGSDKGTKRSRGTDAAAEVATEKDVNIGIDINTVIADEGDENIGVDLNSLPSVDTKKRQKRQKLKHRTKKDPADATSHGVNTEPLQMDGNLDFLNSKTVRPRGTPVTKIAGAELDDEDTGAAIQFIEFCRAFTEVVKDFSNKERATRKNSSRFSWRP

SEQ ID NO: 46734 - protein, 216 aa, Zea mays
  Clone ID: 700551783_FLI.pep
PRPAQQPPQHIAISISAMAEVEQQQDTPKLFNRWTFDDVQVNDISLNDYLAVNATKHAMYLPHTAGRYSKKRFRKAQCPIVERLTNSLMMHGRNNGKKVMAVRIIKHTLEIIHLLTDANPIQVVVDAIINSGPREDATRIGSAGVVRRQAVDISPLRRVNQAIYLLTTGARESAFRNIKTIAECLADELINAAKGSSNSYAIKKKDEIERVAKANR

SEQ ID NO: 46735 - protein, 245 aa, Zea mays
  Clone ID: 700551785_FLI.pep
QELKSFLVLLDVRSKTTFVTNIRENKEGLELLKTAIEKAGYTGKVVIGMDVAASEFYSDKDQTYDLNFKEENNDGSQKISGDSLKNVYKSFVSEYPIVSIEDPFDQDDWVHYAKMTEEIGEQVQIVGDDLLVTNPTRVAKAIKEKSCNALLLKVNQIGSVTESIEAVKMSKRAGWGVMTSHRSGETEDTFIADLAVGLSTGQIKTGAPCRSERLAKYNQLLRIEEELGAIAVYAGAKFRAPVEPY

SEQ ID NO: 46736 - protein, 346 aa, Zea mays
  Clone ID: 700469525_FLI.pep
ISSSSAYDGLLENCRVAGDSTNTAIFQKAISSSSAYDDQFKQLISGGKDAESAYWELVIKDIQDACSLFEPIYDETDGADGYVSVEVSPRLANDTQGTVEAAKWLHKVVNRPNVYIKIPATAECVPSIREVIANGISVNVTLIFSIARYEAVIDAYLDGLEASGLSDLSRVTSVASFFVSRVDTLIDKMLEKIGTPEALALRGKAAVAQAKLANRLYQKKFSGPRWEALAKKGAKKQRLLWASTGVKNPAYPDTLYIDSLIGPDTVNTMPDQALHAFIDHGTVSRTVDANVSEAEGVYSALEKLGIDWGEVGKQLELEGVDSFKKSFDSLLVSLQEKGNSLKTATV

SEQ ID NO: 46737 - protein, 497 aa, Zea mays
  Clone ID: 700470059_FLI.pep
RSHSHHTTPPLLPAPHSPPRARIAIRVPQMGGNNEDKAVVIQTLLFVAGINTLLQSFFGTMLPAVIGGSYTFVLPTISIILAGRYANEPNPHIKFLRIMRGTQGALIVASALQIIVGFSGLWRNVARYLSPLSAAPLVALVGFGLYELGFPSVAKCVEIGLPQLILLVIFTMYLPHAVHMLKSIFDRFAVLFTIPIVWLYAYLLTVGGAYRNAPPKTQFHCRTDRSGLIGGAPWIRVPYPFQWGAPTFDAGEAFAMMAASFVALVESTGAFIAVSRYASATPIPPSVLSRGIGWQGIGILLDGLFGTGNGSSVSVENAGLLALTRVGSRRVVQISAGFMIFFSILGKFGAVFASIPAPIFAAMYCIFFAYAGSAGIGFLQFCNLNTFRTKFILGFSVFMGLSVPQYFNEYTSIAGYGPVHTHSRWFNDIVNVIFSSKAFVAGFVAYLLDNTIDRHEASVRRDRGYHWWDKFRSYRTDTRSEEFYSLPFNLNKFFPSV

SEQ ID NO: 46738 - protein, 218 aa, Zea mays
  Clone ID: 700470322_FLI.pep
TPHRSGGGGANAGEGEGVREGAPAMVHVNFYRNYGKTFKKPRRPYEKERLDAELKLVGEYGLRCKRELWRVQYALSRIRNAARHLLTLDEKNPRRIFEGEALLRRMNRYGLLAEGQNKLDYVLALTAENFLARRLQTLVFKAGMAKSIHHARVLIKQRHIRVGRQIVNVPSFMVRVESEKHIDFSLSSPFGGGPAGRVKRKNQKKASGGGDAGDEDEE

SEQ ID NO: 46739 - protein, 149 aa, Zea mays
  Clone ID: 700471286_FLI.pep
SLGLFNKYNEVPSIMAIKIACCFLSVILIWEIPGVFESLWAPFTFLLGYKDPSPSKAHLPLLHEWHFRSGLDRYIWIIGMIYAYFHPNVERWMEKLEESETKVRLSIKGTIVTLSLTVGFLWYEYIYKLDKVTYNKYHPYTSWIPITYV

SEQ ID NO: 46740 - protein, 423 aa, Zea mays
  Clone ID: 700471371_FLI.pep
ARAAAAMILRIRSRDGTDRITVPDSASVTVADLQRLIESHLTVPVPLQRLSLDPALLLPNPSAVVPLLTDSAAPLASLRLANGAFVYLAYPPDARSARPPPPKALSAAGSFGKKMTMDDLIARQIRVTRQENALCAAASFDRDAANAFQLYVAEFLGFGVKRAGFLYGRVDAETKDVFVDFIYEPPQQGSEDVVHLLRDPDEEARVDTIAEGLGMRRVGLVFTQAVGRKASETGEYTMSNREVVQAAQLQAEGGIPEWVTAIVKLEVGDDGTGDVHFEAFQMSEICVKLFKDGVLETEVQDADDPRLSKMRKEVVAGGKDTMEVDNDFFLVPVKISDHQGPLSVGFPIENRGNPVSISALRSHLERMKHLAFVKRISDFHLLLKLATFLDVKADMPTIAACVKTQSRVPEGYQLLIESFASQG

SEQ ID NO: 46741 - protein, 590 aa, Zea mays
  Clone ID: 700477949_FLI.pep
SNAVSSLSESSPMDLKCQYDSENLADGCIKMQTDDEIVVDGSHSNEDSVIEKKRRRVVEEIAADGTLPSYGDLEDVKGGSLRHPSNADGSELARTISSNASLAEQVIEPALVMFEVHVPPVCMLDGVHSQHFFGTGVIIYHSEHLGLVAVDRNTVAVSISDIMLSFAAYPIEIPGEVVFLHPVHNFVLVAYDPSALGAGASVVRAAKLLSEPALRRGDSVYLVGLSRSLQATSRKSIITNPCTAVNIGSADCPRYRAINMEVIELDTDFGSTFSGILTDEQGRVQALWASFSTQLKYGCSSSEDHQFVRGIPIYAISQVLEKIITGTEGPFRLINGIKRAMPFVRLLEVELYPTLLSKARSYGLSDNWVQALAKKDPVRRQVLRVKGCLAGSKAENLLEQGDMILAINKEPITCFLDIEKTCQELDQSIGSDGVLNMTIFRQGKEIDLVVGTDVRDGNGTTRMVNWCGCIIQDPHSAVRALGFLPEEGHGVYVARWCHGSPVHRYGLYALQWIIEINGQPTTDLETFIKVVKGLEDGEFVRVRTVHLNGKPRVLTLKQDLHYWPTWELSFEPETATWRRKIIKALQSARA

SEQ ID NO: 46742 - protein, 157 aa, Zea mays
  Clone ID: 700570125_FLI.pep
CPCVQQIMCLFSLSISKWRVHIHFFSPLKGASMLLLALSFTWKALAPYSGILAVVGTVLYVLSFALGAGPVPALLLPEIFASRIRAKAVALSLGMHWVSNFFIGLYFLSVVNKFGISNVYLGFASVCVLAVLYIAGNVVETKGRSLEEIERELSVAE

SEQ ID NO: 46743 - protein, 313 aa, Zea mays
  Clone ID: 700575924_FLI.pep
PSPLASTTNFPSPPPHLPTLLTSPLRTAAPPLPPPTRAPMAATAISVRLHPTAARHVASARRARLGAVRAQSAPAAAAAALTQDDLKRLAAVRAVEQVKSGMVLGLGTGSTAAFAVAEIGALLAAGKLEKIVGVPTSKRTFEQAQSLGIPLSTLDDNPLIDLAIDGADEVDPDLNLVKGRGGALLREKMVEAASDKFIVIVDETKLVDGLGGSGLAMPVEVVQFCWKYNLVRLQELFKEEGVEAKLRFEGDKPYVTDNSNYIVDLYFKTPIKDALAAGQEIAALEGVVDHGLFLNMASSVIIAGTDGVSVKTK

SEQ ID NO: 46744 - protein, 104 aa, Zea mays
  Clone ID: 700576117_FLI.pep
LVEWLKTMVAERKAEEVLDPKMAEKPSPKTLKRALLVALRCVDPDANKRPKMGHVIHMLEMDDLLFRDDKKPGRDVHPHGSDRYSSKEEGSISKREHMRIAIRE

SEQ ID NO: 46745 - protein, 312 aa, Zea mays
  Clone ID: 700577125_FLI.pep
VPSRPGARDRGRGDRRRRRRHAVQGRRHGRRGLLRGVLPLLRQLRQGGRQLLRGDRAHLQRRRPRARRRAHQGGILRRPGRERALRGPRPRRPGAGPHRAAALRRRHRVQPHDAPRPQRARQAPRRRRPRRPRPRRRQVRQGLRDEGHRHQHVRQQAPGGHREPRRGRVPHQPGRGPDEGGDGDHGRHHRHGVGVAPDHAAAGAAEAAGADGGRGRAEQAARAAGLRHRAGREGRGWEQCRQRQGLPGHARVRGEARHRGRGRGHQDGLRQHGHGAAREERRPLPLRHRRRRQPRLCRLGMAAKVSIRAQPQ

SEQ ID NO: 46746 - protein, 165 aa, Zea mays
  Clone ID: 700582716_FLI.pep
GTAGAFDVTTKGILHAALERSEYWRLSDEKGKPPGVLGWWPSRAVTFIENHDTGSTQGHWRFPYGMELQGYAYILTHPGTPAVFYDHIFSHLQPEIAKFISIRHRQKIHCRSKIKILKAERSLYAAEIDEKVTMKIGSEHFEPSGPQNWIVAAEGQDYKIWEASS

SEQ ID NO: 46747 - protein, 232 aa, Zea mays
  Clone ID: 700582970_FLI.pep
LYQYPFNVPAYYALILRSLTVLEGLALYADPDFKVLAASYPYFAKRLLTDPNPYLRDALIELVFKDGKFRWNRLENLLVQGRQDREFAAKDALQPVLKLLLGPGGEELRALVVKEAVRVTEAIAIGTLVDSYNAAPSFLKPLISSGNLAEPFKFSETEQEQMMELRDQVFRVWGLLRSSNNFDPSLLQPIVQVLQEPEARVLGSRVAGGVTQRLAARLLQQLLRTPPAPGSS

SEQ ID NO: 46748 - protein, 369 aa, Zea mays; identical to SEQ ID NO: 42422
  Clone ID: 700583073_FLI.pep

SEQ ID NO: 46749 - protein, 149 aa, Zea mays
  Clone ID: 700615859_FLI.pep
FSLIARGVAAMAAPVAAYSPALRVQVKAAMDAASSFRVLASLSFPGQRASFPSIRMQKRSQVSCSLAKQETVEKVSEIVKNQLALPEDTGVTGETKFVDIGADSLDTVEIVMGLEEAFQISVDESSAQEIQTVEDAAALIDKLIAEKDA

SEQ ID NO: 46750 - protein, 138 aa, Zea mays
  Clone ID: 700616432_FLI.pep
HALICPMVTTSHTRRLLIWSRSTMHRTLMEMLLPSCWTLRVLKLEVGMFLSHYRPSSTLFAFTNEERVKQRLALYQGVIPIHMQFSDDAEETFSRAISSLLKAQYVKKGDYVTLVQSGVTSIWREESTHNIQVRRAQV

SEQ ID NO: 46751 - protein, 352 aa, Zea mays
  Clone ID: 700616651_FLI.pep
KLCNSSNLPHPWHMWKLDSVHELLKRDYQLRPVAIEIFSMDGCNELLVFHKKEREEVFKNLIAMNLPRNSMLDTTISASSKQESGEGSRLFKVMAKSFSKRWQSGEITNFQYLMHLNTLAGRGYSDLTQYPVFPWVLADYESDVLDLRSPQTFRRLDKPMGCQTEEGEEEFCKRYDSWDDPDVPKFHYGSHYSSAGIVLFYLLRLPPFSTENQKLQGGQFDHADRLFNSVKDTWVSAAGKSNTSDVKELIPEFYYLPEFLENRFNLDLGEKQSGEKVGDVVLPPWAKGSAREFIRKHREALESDYVSENLHHWIDLIFGYKQRGKVLSISPLHFISSSVVVRIIAQICFGLK

SEQ ID NO: 46752 - protein, 367 aa, Zea mays
  Clone ID: 700623359_FLI.pep
RTLAMASEVVRPSDAELLKAQADIWRLSLSYLTPLSLRCAVELGIPTAIYRHGGAASAAELVTALSLPSTKLPFLRRLLRLLAASGVFTVDKQSTEEERYRISPVSYLLVDGIPHEDHMNHTALVLTCTSTRYIEAGIGLAEWFKRDVVTSPFEELHGATLFHESMGSLDADFHDMASEALDAHDNFGIEIAMREFRDLFEGIQSMTYCCGNFGDDKGARAIVKAFPHIKCTVLAPPKIIATKPADGAKINYVEGDMFSFIPPAQTVVLKLVLHHLTDEECVKLLAQCRKAIPPRKDGGKVIIGDIMIDHSGLMLETHLLMDIGMMTMTKGRQRDEKEWSELFTKAGFSEYKILKEFGARVAFEVYP

SEQ ID NO: 46753 - protein, 371 aa, Zea mays
  Clone ID: 700804561_FLI.pep
SPSQVMAGPAPDRAALTVGPGMDMPIMHDSDRYELVRDIGSGNFGVARLMRDRRTSELVAVKYIERGEKIDENVQREIINHRSLKHPNIIRFKEVILTPTHLAIVMEYASGGELFERICKNVRFSEDEARYFFQQLISGVSYCHSMQVCHRDLKLENTLLDGSDAPRLKICDFGYSKSSVLHSQPKSTVGTPAYIAPEVLLKKEYDGKIADVWSCGVTLYVMVVGAYPFEDPEEPKNFRKTIQRILNVQYAIPDNVNISPECRHLISRIFVGDPATRITIPEIRNHSWFLKNLPADLMDDDSMSNQYEEPDQPMQTMDQIMQILTEATIPPACSRSINVLADGLDMDDDMDDLDSDSDLDVDSSSEIVYAM

SEQ ID NO: 46754 - protein, 393 aa, Zea mays
  Clone ID: 700804878_FLI.pep
REFLYHILGEVIKAGATTLNIPDTVGYNLPYEFGKLIADIKANTPGIEKAIISTHCQNDLGLATANTLAGARAGARQLEVTINGIGERAGNASLEEVVMAIKCRRELLDGLYTGIDSRHITLTSKMVQEHSGLHVQPHKAIVGANAFAHESGIHQDGMLKYKGTYEIISPDDIGLTRANEFGIVLGKLSGRHAVRSKLVELGYEIGDKEFEDFFKRYKEVAEKKKRVTDEDLEALLSDEIFQPKVIWSLADVQATCGTLALSTATVKLIAPDGEEKIACSVGTGPVDAAYKAVDKIIQIPTVLREYSMTSVTEGIDAIATTRVVVTGDVSNNAKHALTGQSFNRSFSGSGASMDIVVSSVRAYLSALNKICSFAGAVKASSDVAETASVPSTE

SEQ ID NO: 46755 - protein, 167 aa, Zea mays
  Clone ID: 701164902_FLI.pep
LNNFDKMGRGISSGGGQSSLGYLFGSDEAPKSFEKPAPVQKPTPPSSAERLKDIAAGIQSSKSNNYKRSEGQNCGNFLTIAAENAQRQNLYLEIFVHLRILAVVGCCRTVRRPRCKQLQVATLHSVIFLVAAKMASDVHLLLVFAMIMGEGFCLTKEKGKRILYSHE

SEQ ID NO: 46756 - protein, 88 aa, Zea mays
  Clone ID: 700930274_FLI.pep
QIYLNSVLFEVRNVFTSLLGLVIVSHLSPKGSGRFSHAGTRTHNDTTNPFTSSSNQHAILTIANRLIRICLTNRTVKDTKPLSGFPLV

SEQ ID NO: 46757 - protein, 317 aa, Zea mays
  Clone ID: 701175704_FLI.pep
GHQLLAGPQRLRRPHARRVQGHLPGPPAEEDQRWPVQVRRRGRRRRRGARVRGLAEEGRRDGQPHVAVGAAAGRLQHRREQRVQRRRHGQRLLVHRRRRRAPLRGGVPVPHGGRGLRRQGPRRRGARHYIRVRGRAGQRRAGARQGPRPPARQRRHRGVREALPVLQRGRVRWTVRVGAGPRRGGGGLRQQQGAGLHHRQELVGHPLGREGLHPHEEGHRQAGGPLRHQQDGILPDQGPLMDHGRRRSYLSSLPFHPTLSISIVCPLFLNVCVFLYITVSSNFSMDRSRMNNKHALKHERSNAIFLFIWCVEMTDIK

SEQ ID NO: 46758 - protein, 461 aa, Glycine max
  Clone ID: 700833238_FLI.pep
KIQEFQYSDLEAATNGFSDRKLLGKGSHGYVYKAVVRGRPVAVKRPSRPHHNVPRPVSSSAPSEITNEVDNEIDILSKIQSPRLVNLVGFTNNDSRDRLLVVEFMSNGTLYDVLHTSPRPPNWGRRIRLALQTAKAIDTLHSSTPPVIHRDIKSANVLIDRSYNARLGDFGLALRGHVDDYRLRSTPPAGTMGYLDPCYVTPDNLSTKTDVFSFGILLLEIISGRKAIDITYSPPSIVDWAIPLIKKGKLLAVYDPRIAPPKDPIVRKQLAVIAAKCVRSCRERRPSMKEVVTWLCGLCKLVPLHSWNGFNNPCMMVETAGRPVEAAAARNNGQFSSRLEGVEEGKFDALDGRLSKSAMRYSRRVYSDLGFSRNLMDLMATTEEPEFLRDADGTEHSSKSAEQVSGSSSRFGSGRYSIRGRNLYRPCGSDKDAFGLSKGQILGQSETTSKQDGVSVRIRRI

SEQ ID NO: 46759 - protein, 299 aa, Glycine max
  Clone ID: 700833740_FLI.pep
HFYFFFMALFLFAILILMVPSSNAYWPPSPGYWPSSKFRSMSFYKGFRNLWGPQHQSLDQNALTIWLDRTSGSGFKSVRPFRSGYFGASIKVQPGYTAGVITAFYLSNNEAHPGFHDEVDIEFLGTTFGKPYTLQTNVYIRGSGDGRIIGREMKFHLWFDPTKDFHHYAILWSPKEIIFLVDDVPIRRYPRKSGATFPLRPMWLYGSIWDASSWATEDGKYKADYKYQPFVAKYTNFKASGCSAYAPRWCHPVSASPYRSGGLSRQQHSAMRWVQRYHMVYNYCQDPKRDHSLTPECWG

SEQ ID NO: 46760 - protein, 52 aa, Zea mays
  Clone ID: 700548484_FLI.pep
RRSSTDRFSHRTSKRRVVLDLGWNNGLSWGLKTMVSYKQPGPANKDRTRSRL

SEQ ID NO: 46761 - protein, 462 aa, Zea mays
  Clone ID: 700548720_FLI.pep
SLSGHTAPTDDNSRQQLGQPATAAHSRLTTNRLVHLLDLGARAAAAGRGVLVHAASAAHVFTRALVHLGDDGVAEALQLLHLVLELVRLGELVGVQPADGRVDGVLDLLLVIGRQLGRNLLVLDRVAHVVGVVLQRVLGLHLLLVLLILRLVLLSVLNHLLDLLLGETALVVGDCDLVLLPRCLVLGRHVQDAVGVDVKAHGDLWHTTGCRGDAGELELAQQVVVACPGPLTLVDLDQDTGLVVRVGGEYLLLLGGDGGVPRDQHCHNSSSSLQTQGQRGDVQQKQVLHLLIALTAQDGSLDSSTIGDSLIGVDVLAQLLAVEEVLEQLLHPGDPSGATNKYNVMDGALVHLGIPQALLNRLHALPEQVHVELLKPGTGDGGVEVDALIQRVNLNRGLGSGRQSPLRPLTSGPQPPESPGVASDILLVLPLELLDEVVDHPVVKVLTTKMGVTSCGLDLKDS

SEQ ID NO: 46762 - protein, 35 aa, Zea mays
  Clone ID: 700549310_FLI.pep
ILGVIYVMSLGHKITTTATQSTHIEWSKYFQLGKL

SEQ ID NO: 46763 - protein, 198 aa, Zea mays
  Clone ID: 700549604_FLI.pep
IDSAVLSRLKHFSAMNKLKKMALRVIAESLSEEEIGGLKELFKMIDTDSSGTITFDELKDGLKRVGSELTENEIQALMEAADIDNSGTIDYGEFIAATLHMNKLEREENLVSAFSFFDKDGSGFITIDELSQACREFGLDDLHLEDMIKDVDQNNDGQIDYSEFTAMMRKGNAGATGRRTMRNSLHLNLGELLNPSKT

SEQ ID NO: 46764 - protein, 279 aa, Zea mays
  Clone ID: 700553162_FLI.pep
IGSPRRGHLRHRQRHLLGSTPALCGLREREAPAAATGQDEPPPQTERAGDQCVRSWWRAWKSLAGGKQGFGRMVSLSTWFRYAAQKFEYCVSLSLKKYNDVGRISSTQLTDVLNKNLFQGKLTYVCPTKGEEAMAPIASPTGGAVLVRKLANLSPTQVFVGDVVLLKDPEKSDDLIIRRLAALEGYEMVSNDEKDEPFVLEKDQCWVLADNLALKPKEARDSRLFGPVPMTDILGRVIYSLRTAVDHGLVENSGMAMKQDGPVLAVELDVEEMAKNIKP

SEQ ID NO: 46765 - protein, 122 aa, Zea mays
  Clone ID: 700553328_FLI.pep
KDLPNTIHLPCLKFIGRPKGKSMLLWKIFKRISGSWRSMISGRKNWHVPFMLNSKIGYMPQGISASYTVCKANEHKMGFLCKREMQQYASASAIQFRAPPKSESDFQAELVSPALMHLVFQL

SEQ ID NO: 46766 - protein, 252 aa, Zea mays
  Clone ID: 700611044_FLI.pep
RAIQCHFGLFQYVLLIGIILPWAIFVGIYFKKNNFYDLHHGILGILYSVLITAVITDAIKDGVGRPRPDFFWRCFPDGNDVYDNITTGVICNGVKSVIKEGHKSFPSGHTSWSFAGLGFLAWYLAGKLTAFDRKGHIRKLCIVFLPLLTAALVAVSRVDDYWHHWQDVFAGGLIGLTVASFCYLQFFPYPFDGDALWPHAYTVQLAEEGSSRNTNSYSVRPAEIETVNIPGHGGITLRDTLNDMESGSGRRL

SEQ ID NO: 46767 - protein, 553 aa, Zea mays
  Clone ID: 700611462_FLI.pep
KPRNLPPSRLVRRRRPCPLCRQGTGWRVARARVDSCGRLFHAFVSLFQKVVCYSLIAMSTRREVVLYHPLPAPGVTNNLKDGIQSKVMETVGNAINSFDPNALPRHIEGALGTAGNLINSFEPKWSGKNEFDLNGEADFLDGYECPDEYWGSAPVKAHKPVNIKNLLGGVIAIIGRNLGNTEAEQPKDTKTSVSFLGSADDGNTFLHSSVYMPSAPPVLDEEALNYNIYRAVLEAEPPEWLPDSYASACMQCAALFTALTRGRHHCRFCGGIFCRACSKGRSLLPAKFRERNPQRVCDACYDRLDPLQNLLINSVSNASQTAKHDVMDWTCARGWLNFPIGLTMEHEIYKAANTLTSYSQVARINPEKSIPHAVLSGASGLAILTVVKAGAILTYKLGTGLVVARRSDGSWSAPSAILSAGFGWGAQVGGELMDFIIVLRGPEAVQTFCSRMHFSLGAGVSAAAGPVGRVAEADLRAGDKGSGVCYTYSCSKGAFIGVSLEGNLVATRMDANLRFYGDPYLTTSDILTGNVEQPNAAKFLYTALDNLYSGLDW

SEQ ID NO: 46768 - protein, 680 aa, Zea mays
  Clone ID: 700473276_FLI.pep
LSSPSPAPAPPCSVCFRPLCVAIAKLVCSVAMGSLATADGPLPPLKYPQARRDEDIVDDYHGVLVPDPYRWMEQVDSKEVKEFVDAQAAVTSAVLSSCDHRGRLRGQLTALFDHPRFRAPFKRRGSYFYFHNPGLRPHSALYVQHGLGGEPDVLLDPSTFSEDGTVSLGVVGVSDDGEHLAYGTSGSGSDWVTIRVMRVRDKEHLPDTLSWVKFSRIAWTRDGQGFFYSRFPAPRDALDSGMKTGVNLNHEVYYHFLGTEQSQDVLCWRDPDHPKYIYIPQVTEDGKYVILSVSETSEPVNKLYYCDLSALAHGLGGVKSAHGNGMLPFVKLVDRFEAYYGLIANDGTQFTFLTNKDAPRYKLARVDVDDDEPGSPWWTDVVPEDEDGKAVLESACAVHGHKLLVSYLSDVRCVLQMRSLVTGELLHDIPVDIGTVSGISGRRCDAEVFVEFASFLTPGIIYRCDVGSAVPEMDVYREISVPGFDRNEFEAKQVFYPSKDGTKIPMFIVSKKEISLDGSHPALLFGYGGFGVSVTPQFSVARVVLMRNLGFVACVANLRGGGEYGEGWHRAGSLANKQNCFDDFVAAGEFLVSAGYTSPARLCVEGGSNGGLLVAACVNQRPDLFGCALAHVGVMDMLRFHKFTIGRAWTCDFGCSENEEEFQWLIKYSPLHNVRRPWEN

SEQ ID NO: 46769 - protein, 452 aa, Zea mays
  Clone ID: 700473376_FLI.pep
SLSGHTAPTDDDNSRQRLGQPATAARSRLTTNRLVHLLDLGARAAAASGGVLVHAASAAHVFTRALVHLGDDGVAEALQLLHLVLELVRLGELVGVQPADGRVDGVLDLLLVIGRQLGRNLLVLDRVAHVVGVVLQRVLGLHLLLVLLILRLVLLSVLNHLLDLLLGETALVVGDCDLVLLPRCLVLGRHVQDAVGVDVKAHGDLWHTTGCRGDAGELELAQQVVVACPGPLTLVDLDQDTGLVVRVGGEYLLLLGGDGGVPRDQHCHNSSSSLQTQGQRGDVQQKQVLHLLIALTAQDGSLDSSTIGDSLIGVDVLAQLLAVEEVLEQLLHPGDPSGATNKYNVMDGALVHLGIPQALLNRLHALPEQVHVELLKPGTGDGGVEVDALIQRVNLNRGLGSGRQSPLRPLTSGPQPPESPGVASDILLVLRPGVQEEEVVNHFVQEFNRMVN

SEQ ID NO: 46770 - protein, 202 aa, Zea mays
  Clone ID: 700473795_FLI.pep
SSGGSSRRSNPAKEKRGKRQEPAQMDSGSDSDGAPEELTAVQGVEKHEEISQVEKDSAIRVTREGKERRKRWAQRRTSSKPDKKAPKEVVEDEGTKQSEETDTMPGMLPTSVIEILAAREKQTFASDSEEENVKQKVQKRKKRMKTAGPETILLKDVRSTQHVKNALDFLEQRKKQVPRSNAVLKNASKALRLLSSKGNFLS

SEQ ID NO: 46771 - protein, 446 aa, Zea mays
  Clone ID: 700473983_FLI.pep
LEVELGLDLKPLPLPDKTREDIFLLFKLYEPEKEQLRYVGRLFVKASGRPQDILPKLKMLAGFSQDDDIELYEEIKFEPNVMCEYIDNRLLFRSCQLEDGDIICFQKSSKADSADRYRFPDVPSFLTYIRNRQVVHFRSLEKPKEDDFFLEMSKIFTYDQVVEKVAEKLGVDDPSKIRLTSHNCYSQQPKPQPIKYRGVERLLDMLIHYNQTSDILYYEVLDIPLPELQALKTLKVTYHHATKDEVSVHSIRLPKNSTVGDVLNDIKTKVELSHPNAELRLLEVFYHKIYKVFAPNEKIENINDQYWTLRAEEVPDEEKNLGPFDRLIHVYHFTKDTQNQTQVQNFGEPFFMVIREDETLSSIKERIQRKLKVPDEDFSKWKFAYISLGRPDYFEDSDTVALKFQRNMYGAWEQYLGLEHPDTAPRKAHTINQNRHSFERPVKIYN

SEQ ID NO: 46772 - protein, 173 aa, Zea mays
  Clone ID: 700473986_FLI.pep
KPLQIPRSFPVPVNSGLVYEEESSDDDDDNDSDNVGLLETQPDSIESEALTCPAEELDLLQQEGSKERMFFFQFPNSLPLPKRSSSAGKEVMEGSNLQQLPQGYLGKMLVYKSGKIKMKLGDIIFDVNPGVESRMLQRAVALNTRDKHCCLLGEIENRHVIVTPNVDSLLNDK

SEQ ID NO: 46773 - protein, 163 aa, Zea mays
  Clone ID: 700572081_FLI.pep
SDLSSTRAYTVHSSHGSSSYGAEVLKFGGTTRIGFPCFLNSRNAGKILLDKCMLPVRSTRSKLQVPCFKELQMTSNDSGGKRFPAALTETRSGARHINLETKYAALIPPRFLLMLMWERATSVGNVSSSIWKPTVPKPISVAFKARTCEPKNLANAAATELPR

SEQ ID NO: 46774 - protein, 170 aa, Zea mays
  Clone ID: 700572120_FLI.pep
LLALGHTDQTRLLPQQRILVHTLRICMHADIHSYTQAHEHTYIYLRTHVRTRRTIIACTRAPSSGVLVRSPAAGRRPSCLGPVGSAAPVVPVAAVGAAVGVWVVGAVAAGLDVADVVDEVGVVPPGVLGGLPAAHRGGHELPPPGRVPVVGGQRALEPRVLALAPRHGGS

SEQ ID NO: 46775 - protein, 367 aa, Zea mays
  Clone ID: 700572310_FLI.pep
VEVKRIHNCRRLSHECLTFISVKGIYYQAEVQGQKITWLTPHALQQVLTDDVDFNVMLSFLEFYETLLGFVNFKIYHSINVNYPPILDPRLEALAVELYALCRYISAGSRRMIGNSQTDEVMEDKDEKSKAEEVIEEEKVVKNKASSKADESEFRLAQLQHQLPTNEPGALMNLVEESTADDADDDDTKDCKGLFKNLKFYLSREVPRESLLFIIPAFGGTVSWEGEGAPFKEIDEDITHQRLKDVFHSIGASSEKFTLSAENLPNTLEYIEGEVEALDEVIGSHADFCALVASRGTATAFLKAGCTHGKIVNRPNYSLSSSDLIDIPSLARSIGNRFMTQIWVNGGRKMTGDEARSHLKPDDEAEV

SEQ ID NO: 46776 - protein, 429 aa, Zea mays
  Clone ID: 700572930_FLI.pep
ERMKQTEGSHKVVTAAGGKMAVGVRSIVTSLVAFFILASSVVFLLLDREAGLQEESAIRAGGGGGGDEECSWSRGRWVYDNVSRPLYDGLKCAFIFPEVACDKYGRKDVMYQHWRWQPHGHGCDLPRFDGMKLLEELRNKRLVFVGDSVNRNQWVSLVCMVEASIPDDRLKMRIFNGSLISFKALEYNATIDFYWSPLLVESNSDNPIIHRVEYRIIRADRIEKHASVWRDADVIVFNSYLWWRKQKDDMRMKVMYGSFEDGDAKLDEMEMVDGFEIAIKKLTEWLAENIDKNKTRIFFAGSSPTHSWASNWGGQDKNKCLNETEPISYRPGGGYKAATTDYSLMAMARSYFRRTLEPRGIRVQILNITELSDYRKDGHPTVFRRQFVPLTKEQIADPASYADCTHWCLPGVPDVWNEFLYGYLTQQRK

SEQ ID NO: 46777 - protein, 119 aa, Zea mays
  Clone ID: 700578627_FLI.pep
KRLLSHLYYSSVFLWYHNSKTKLPMCSGTIIQSPSCPCAVRFRFPRTPLSIESDGAAPKLLPPPQHCDATRRHPDRAWYLFTCGLQARQQQGGTGICLISDHQCYNKYCFLGLFWMPLD

SEQ ID NO: 46778 - protein, 298 aa, Zea mays
  Clone ID: 700579166_FLI.pep
EKYSKSHLVFNDDIQGTASVVLAGLLAALKMVGGTLAEQTYLFLGAGEAGTGIAELIALEISKQTNAPIEECRKKVWLVDSKGLIVDSRKGSLQPFKKPWAHEHEPLKTLYDAVQSIKPTVLIGTSGVGRTFTKEIIEAMSSFNERPIIFSLSNPTSHSECTAEQAYTWSQGRSIFASGSPFAPVEYEGKTFVPGQSNNAYIFPGLGLGLVISGAVRVHEDMLLAASKALADQATQDNFEKGSIFPPFTSIRKISAHIAAAVAAKAYELGLATRLPPPSDLVKYAENCMYTPVYRNYR

SEQ ID NO: 46779 - protein, 132 aa, Zea mays
  Clone ID: 700579668_FLI.pep
KPSMKLGSWNHCYRIRSVRTREPNTNSRSASLEKVPEGEVPQSEGLPEPPGSVPRVNPSRQEPGVHGFASMQCDRYHQDQPDHEHRAENKQVHVEHPFQRADCREAGSRKHGQHPDRYGQPSEYGRAIQLPS

SEQ ID NO: 46780 - protein, 216 aa, Zea mays; identical to SEQ ID NO: 46506
  Clone ID: 700613974_FLI.pep

SEQ ID NO: 46781 - protein, 398 aa, Zea mays
  Clone ID: 700614326_FLI.pep
PAPPVALAVENGRAAVGPVEPAVGDLLVRGLGEVDAVPAEVRRRVGARGGARHAAPRAVLVVVLAASGPAARLERRAEPVAAWILDHVVDGGVEVGVHDARRLVLGLEAGDLGLQLVVVVGGQVVELPEAAEAVVVGAAGGAVEGEVDGEAADGEDAGHHDVGGAHGHQLLDAAGDGGHDLRRVRAGLVRAVVAEQHGVVVVAAELAEHEQGVGQVALAVGLLRLPHAAHGGRDLLEPLQLEADGPVVPDLVGEPERAEEGRVHGRRAGDGHVGALLEVGRRRLGRRQERQPELGAEEVRDHAAVAAAARRRAEVGLAVGRLREGDLRRPPAAAEVPRVGDGVAEVEDGIVLLRRRHSHSRERPRQRYQSCRHPPAAPHISPLISLLRYAEQSSWSPA

SEQ ID NO: 46782 - protein, 412 aa, Zea mays
  Clone ID: 700614611_FLI.pep
TSSHAAMMQPPPPHQQQQWAMAPPPPPQYYQAGHPPPPPPQFYQAGPPPPAMWGQPPPQAAAAPAPAGGGAGDEARTLWIGDLQYWMDENYLYSCFSQAGEVISVKIIRNKQTGQPEGYGFIEFSNHAVAEQVLQNYNGQMMPNVNQPFKLNWATSGAGEKRGDDGSDYTIFVGDLASDVTDFILQDTFKSRYPSVKGAKVVFDRTTGRSKGYGFVKFADSDEQTRAMTEMNGQYCSSRAMRLGPASNKKNTGGPQPSSAIYQNTQGTDSDSDPNNTTVFVGGLDPSVTDELLKQTFSPYGELLYVKIPVGKRCGFVQYSNRASAEEAIRVLNGSQLGGQSIRLSWGRSPANKQPQQEQSQWSGGGYYGYPQGYDPYGYARPPQDPAMYAYAAYPGYGNYQQQPPQQPPPQQ

SEQ ID NO: 46783 - protein, 458 aa, Zea mays
  Clone ID: 700614637_FLI.pep
LPQTTGAMKVPVLLLLVSLCFSLALAWQTDTESGSGRPYHYGEESFRHWTRSRQGRFRVLERFTHELLEDAVGNYRVAELEAAPRTFLQPSHYDADEVMFVKEGEGVIVLLRGGKRESFCVREGDVMVIPAGAVVYSANTHQSEWFRVVMLLSPVVSTSGRFEEFFPIGGESPESFLSVFSDDVIQALFNTRREEWEKVFEKQSKGEITTASEEQIRELSRSCSRGGRGSRGEGGDSGSSSSSKWEIKPSSLTDKKPTHSNSHGRHYEITGDECPHLRLLDMDVGLANIARGSMMAPSYNTRANKIAIVLKGQGYFEMACPHVSGGRSSPRRERGHGREEEEEREEEQGGGGGQKARSYRQVKSRIREGSVIVIPAGHPTALVAGEDKNLAVLCFEVNASFDDKVFLAGTNSALQKMDRPAKLLAFGADEEQQVDRVIGAQKDAVFLRGPQSHRVSSV

SEQ ID NO: 46784 - protein, 193 aa, Zea mays
  Clone ID: 700614713_FLI.pep
ESLGAVLDVHSTLALKLPLSTAHGAKGCGCLRIDPLQYAVKMISMVADTPNEWAIITRELTVRTAAIKSHPAYATCLILCIPRPRSHCMPLKNLDLHSATLLVAASTSRFSQSVTRDAQTQKPEDSRYAIAVGGQRCWRPGSGRQCPPGSRGLVPGGLQSANLTLACFAAPALLGASDGAECGGADCGSPAPV

SEQ ID NO: 46785 - protein, 170 aa, Zea mays
  Clone ID: 700620068_FLI.pep
AAYVKSVVDPTERLKQIAEMLAIHYYLLFNGPDGIWHHMKTFYMEQSTFSFSENVYVGQNEIFDILSNIRKKLKGDRPREKIVHVVEKLHCRANGETGVAIRVSGSFIVGNQFLVCGEGIKAEGMPSLDELSIDIPSKRVGQFREQFIMQPGNLMSCYYISKQDLYIIQS

SEQ ID NO: 46786 - protein, 280 aa, Zea mays
  Clone ID: 700620440_FLI.pep
HHRTPPTRRLRSPPKPKQRTLAFPHQGVHPSSHGDGVQDGDGGDEREGGVPALVHGDEVEEGAPLRGVQDRRAVARRAGGQGGRPRGRVRGARGRAARRRLPLRRLRLRLRHRRQLPEEQDLLHRLVTGGVEDQGQDPVRDIEARPAAAAGRGPLRGAGHRPLRDGLRRHQRPRAMRPPLRSAPIYVLTCAWACSPTTHCSVVSSHLRSCVCVCDRPDANWRWCAPVAIDAANLTRLRVCLLCYFRFSGEMVQAWCVDVDGWSRSSGEWQRTNETSTSAT

SEQ ID NO: 46787 - protein, 427 aa, Zea mays
  Clone ID: 700799057_FLI.pep
FFFWKMEIQTSGKPIDVLMEKVLSMNILSSDYFKELYRLKTYHEVIDEIYNTVKHVEPWMTGNCRGPSTAFCLLYKFFTMKLTVKQMHGLLKHPDSPHIRAIGFLYLRYVADPKVLWMWYEPYLRDDEEFSPGSNGRKTTMGVYVRDLILGQYYFDSLLPRIPLPVTRQITANLEKMKLPTKLSGATGDSSRQGSEDTARRPPSVKASLSVSFGQRAPHRASTRDSSPVRRTVTRDGHRSSYSPSRRSGSREGPDHDRSDRELDHSSRDRERARDRSNRDRYHSSRDLDRDKDARDYHRHERDSRDREYYRSRHSEERRDDRRDHESSRHRRSSSRHRSRSRSRSRSRSRSRRSRSRSTSRRSLNEQRSSPFRDANKEKAATVSSNLAKLKDLYGDITAKKEDSDAEKLHRDSCAEEVIRLGGPRWR

SEQ ID NO: 46788 - protein, 394 aa, Zea mays
  Clone ID: 700800510_FLI.pep
SHVEIQCCQNRTVDLELLAKSCKSLISLKIGDCDLSDLIGFFQSATSLEEFAGGTFNGQGELTKYGDVKFPSRICSLGLTFMGANEMPIIFPFSAILKKLDLQYTFLTTEDHCQLIAKCPNLLVLAVRNVIGDRGLGVVADTCKKLQRLRIERGDDEGGVQEEQGGVSQVGLTAIAVGCRELEYIAAYVSDITNGALESIGTFCKKLYDFRLVLLDREERITDLPLDNGVRALLRGCTMLRRFALYLRPGGLSDAGLGYIGQCSGNIQYMLLGNVGETDDGLISFALGCVNLRKLELRSCCFSERALALAILSMPSLRYVWVQGYKASQTGRDLMLMARPFWNIEFTPPSSQNAGRLIEDGEPCVDSHAQILAYGSLAGKRLDCPQSVVTLYPA

SEQ ID NO: 46789 - protein, 428 aa, Zea mays
  Clone ID: 700801123_FLI.pep
VTSSINRHILGSKGRKFPIEIVKITVAGGNANGGARASETYSQASSGPRDIHVVESGNMVISIQVLRNVTNNFSEDNILGRGGFGTVYKGELHDGTKIAVKRMEAGVMGNKGLNEFKSEIAVLTKVRHRNLVSLLGYCLDGNERILVYEYMPQGTLSQHLFEWSENNLRPLEWKKRLSIALDVARGVEYLHSLAQQTFIHRDLKPSNILLGDDMKAKVADFGLVRLAPDDGKCVSIETRLAGTFGYLAPEYAVTGRVTTKADVFSFGVILMELITGRKALDETRPEDSMHLVTWFRRMQLNKETFRKAIDPVIDLDEETYASVSTVSELAGHCCAREAHQRPDMGHAVNVLSTLSEVWKPTDPDSDDSYGIDLNMTLPQALKRWQAFEDSSHFDGATSSFVASLDNTQTSIPTRPPGFAESFTSADGR

SEQ ID NO: 46790 - protein, 273 aa, Zea mays
  Clone ID: 701181690_FLI.pep
ILQGAVVGTITGNCRFYDASDNLLRFETQVAVSGKKKSSLKRITAFEFSPSNPSKLMVTSADSKIKILEGTTVTQNYSGLRTGSCQSLATFTPDGQHIVCASEDSNIYVWNHENQDEASLKHAKTIWSSERFYSNNAAIAIPWNGPKPRNPVSLASQILSPQGDNLWCMSKAVKCSSSQSEDSAINSFVSRFAPGIFNLNQEFSSESTCRSSATWPEEILPSRSIRAILDESQYKFLRNCFQSTPNSWGQVIVTAGWDGKIRSFQNYGLPAHQ

SEQ ID NO: 46791 - protein, 296 aa, Zea mays
  Clone ID: 701182262_FLI.pep
IDLNIIGQKTASQDRIVGAHFFSPAHVMSLLEIVCTHHTSSQVIVDLIDLAKKIQKTPIVVGNCTGFAVNRMFFPYAQAASFLVDYGLDVYHIDHVITQFGMPMGPFRLADLVGFGVAIATRKQYYQSYPERSYKSMLLQILVEDNRTGESSCKGFYVYDDKRKASRDPDFGKYIEKSRNMAGVMQDPKLMKLTDNDIVEMIFFPVVNEACRVLDEGIALKASDLDVASIMGMGFPSYRGGVMFWADSLGAKYVYDKLDAWSKDYGEFFRPCEYLAVRARQGASLAAKVDGVKSRL

SEQ ID NO: 46792 - protein, 177 aa, Zea mays
  Clone ID: 701182975_FLI.pep
VNCSCNDDSDMGGAMFSSKAETIVDEYNRLLASQLETQREYYEGLLSEAKRNKEHQISEAADKAVSDKLEEMQLKLENLIVEKKKVADMNEKLTRSQDMWRQTLRDIEERERAQLKSKDEMILDLEEQIKDFKFSIKLQKSIEKNDGVKGGTLVPLPTVSDSGGKGKRSSRTSKRRN

SEQ ID NO: 46793 - protein, 160 aa, Zea mays
  Clone ID: 701185311_FLI.pep
QPAFGSICYPCYYGANRPAQGLGPISCTVQTPWFGLLFIYLLVVMVKLGRRYRRRRRSLELHGLQWPPQQGQHGGGDVPRRQPCLLDLVLRCAMVDVPVRQEHGSQFEGPVQEAGQAEVVGDVGAEPADGSLLGGDQHLVLGGELPDQRRVQRLAEPGVG

SEQ ID NO: 46794 - protein, 214 aa, Zea mays
  Clone ID: 701185862_FLI.pep
QHTCRSTGLMLWESAQFMCCLLAENPSIVASKRVLELGCGSAGICSMVAASFTPFVLATDGDEESLDLLRQNISSNMEPNLLSRIMVRKLFWGNEDDMKAVRELHGNGVGFDCIIGTDVTYNPDAILPLFKTARGVISEKANEDSVPALILCYIQRRVDEDSILSNATSQGFRLVDKWINGVHESNGTISSWFSGNDVCSAFRHTVLSVLYFEL

SEQ ID NO: 46795 - protein, 134 aa, Zea mays
  Clone ID: 700221443_FLI.pep
DTHRLPPPPLPLPLRRSPHASGATSTMAPKKEKAPPPSSKPAKPGGGKQKKKKWSKGKQKEKVNNAVLFDQATYDKLLSEVPKYKQITPSILSERLRVNGSLARRAIKDLMAKGLIRMVSVHSSQQIYTRATNT

SEQ ID NO: 46796 - protein, 36 aa, Zea mays
  Clone ID: 700339319_FLI.pep
WSLATYLAFSSSLMLIFCGLWLNNHTCKTSLGILFF

SEQ ID NO: 46797 - protein, 465 aa, Zea mays
  Clone ID: 700424996_FLI.pep
VPQAIAVPPESGRSAPEASRRDPPAHPEGADPTNAAARKTTWSVLAQTPAAAAEATPEGGGIIGGDASWPALVESTRACPKSGSSDSLNALSDVSGPPPQEDTIAASSVLPHPVVGANPIPTAQNPTSIPPRTPAASSQQNGATTQTFPVRRSGNRGNGSNGGVRAANSSGGDGSSGSGGDGNWNDGSLGTDSGCNSSNGDGPINLDDNVPGTRCARGNDNDSSRNPSGNGHWNHNIRGGGGGGDGNNRNSSGSSNHWNNNPRNSSSSNGVGGRGGYRGRRDHERGANFSPRNFPRVPVMPYQQQQQPGIYQPGPFHRPPPPAAHFMVPQHFYVPSFPYLADVQPYPVYLPPVEQFQNMHLLRPPMQPAWVPPHQDQPNLQDSIRNQIEFYFSTNNLCHDTFLRRHMNNQGWVPIDLILGFNRMRAFTGLVDTNYILDAIRGSELLEVQGDNVRRRNDWMEWLLH

SEQ ID NO: 46798 - protein, 77 aa, Zea mays
  Clone ID: 700341757_FLI.pep
YACQPFALINVDSKVQFHLVVLLLVSFSCFIVFDKCIIVFYPQKNTCNCAERTCSQLCIYHVLEILFQVIKTEFVIV

SEQ ID NO: 46799 - protein, 92 aa, Zea mays
  Clone ID: 700346561_FLI.pep
HYWNEIVPTFPERNECSRNEERGQVPSSRLLSIGAQKVKNTCIQFREFCQQKSRDGCLKVLETMRINFYELRGKFQTMLQLERQVNGFPPNK

SEQ ID NO: 46800 - protein, 415 aa, Zea mays
  Clone ID: 700354866_FLI.pep
IDHDKMACTNNAMRALFLLVLFCIVHGEKEESKGIDAKASGPGGSFDITKLGASGNGKTDSTKAVQEAWASACGGTGKQTILIPKGDFLVGQLNFTGPCKGDVTIQVDGNLLATTDLSQYKDHGNWIEILRVDNLVITGKGNLDGQGPAVWSKNSCTKKYDCKILPNSLVMDFVNNGEVSGVTLLNSKFFHMNMYRCKDMLIKDVTVTAPGDSPNTDGIHMGDSSGITITNTVIGVGDDCISIGPGTSKVNITGVTCGPGHGISIGSLGRYKDEKDVTDINVKDCTLKKTMFGVRIKAYEDAASVLTVSKIHYENIKMEDSANPIFIDMKYCPNKLCTANGASKVTVKDVTFKNITGTSSTPEAVSLLCTAKVPCTGVTMDDVNVEYSGTNNKTMAICTNAKGSTKGCLKELACF

SEQ ID NO: 46801 - protein, 412 aa, Zea mays
  Clone ID: 700355701_FLI.pep
NKMACTNNAMRALFLLVLFCIVHGEKEESKGIDAKASGPGGSFDITKLGASGNGKTDSTKAVQEAWASACGGTGKQTILIPKGDFLVGQLNFTGPCKGDVTIQVDGNLLATTDLSQYKDHGNWIEILRVDNLVITGKGNLDGQGPAVWSKNSCTKKYDCKILPNSLVMDFVNNGEVSGVTLLNSKFFHMNMYRCKDMLIKDVTVTAPGDSPNTDGIHMGDSSGITITNTVIGVGDDCISIGPGTSKVNITGVTCGPGHGISIGSLGRYKDEKDVTDINVKDCTLKKTMFGVRIKAYEDAASVLTVSKIHYENIKMEDSANPIFIDMKYCPNKLCTANGASKVTVKDVTFKNITGTSSTPEAVSLLCTAKVPCTGVTMDDVNVEYSGTNNKTMAICTNAKGSTKGCLKELACF

SEQ ID NO: 46802 - protein, 500 aa, Glycine max
  Clone ID: 701012412_FLI.pep
NRMVKSCCVMCLCLILLHIFLRFVPIQSAPESAIVTQIPGFSGTLPSKHYAGYVTVDKSHGRNLYYYFVESEGKPSEDPVVLWLNGGPGCSSFDGFIYEHGPFNFEAAKTRGGLPTLHLNPYSWSKVSSVIYLDSPAGVGFSYSENKTDYITGDIKTATDSHAFLLKWFELYPEFLSNPFFIAGESYAGVYVPTLASEVVKGIDAGVEPKLNFKGYMVGNGVTDEQIDGNALVPFVHGMGLIPDELFEEVNRECNGNFYDPTSANCSSKLSKVDELVDEINIYNILEPCYHGTEAEKITESYIRMPSTFRKLGETERPFPVRKRMFGRAWPLRAPVRDGIVPTWPQLMNSKSAPPCTDDEVANSWLNNEAVRTAIHTAQKSVVSSWDLCTDRIYFDHDAGSMIKYHKNLTSKGYRALIFSGDHDMCVPYTGSQVWTRSVGYKIVDEWRPWSSNGQVAGYTQGYDKNLTFLTVKGSGHTVPEYKPREALDFYKRFLAGLPI

SEQ ID NO: 46803 - protein, 379 aa, Glycine max
  Clone ID: 701037220_FLI.pep
PLKSNLPLFLLPPTSPSSSSIMSHFKGKYHDELIVNAAYIGTPGKGILAADESTGTIGKRLASISVENVESNRRALRELLFTAPGALKYLSGVILFEETLYQSTAAGKPFVEVLKEAGVLPGIKVDKGTVELAGTNGETTTQGLDGLGQRCAKYYEAGARFAKWRAVLKIGPNEPSELAIHENAYGLARYAVICQENGLVPIVEPEILVDGSHDIHKCAAVTERVLAACYKALNDHHVLLEGTLLKPNMVTPGSNSAKVSPQVVAEHTVRALQRTVPAAVPAIVFLSGGQSEEEASVNLNAINQVNGKKPWSLSFSFGRALQQSTLKAWSGKEENVKKAQEALLVRAKANSEATLGTYKGNSKLADGASESLHVEDYKY

SEQ ID NO: 46804 - protein, 417 aa, Glycine max
  Clone ID: 701009362_FLI.pep
SCMLLDWKVVAMGKVVLLFLCMVLVVVPLACTDSIQKLEVQKHLKNLNRPPVRSIKSPDGDVIDCIHVTHQPAFDHPDLKNHKIQMKPNFHPEGHPFGESKVSSNSKPITQLWHQNGRCPEGTIPVRRTKKDDILRTSSVQHFGKKKQSSFPQPKPAKPLPDIISQSGHQHAIVYVEGDKYYGAKATINVWDPKIQQPNEFSLSQMWILGGSFGQDLNSIEAGWQVSPDLYGDNNTRLFTYWTSDAYQATGCYNLLCSGFIQINSDIALGASISPLSKYSSSQYDISILVWKDPKEGNWWMQFGNDHVMGYWPAPLFSYLSDSASMIEWGGEVVNSESDGQHTSTQMGSGHFPEEGFGKASYFKNIQIVDGDNKLRAPKDLGTYTEQDSCYNVQTGSAGDWGNYFYYGGPGRNPNCP

SEQ ID NO: 46805 - protein, 109 aa, Glycine max; identical to SEQ ID NO: 44830
  Clone ID: 701061118_FLI.pep

SEQ ID NO: 46806 - protein, 425 aa, Glycine max
  Clone ID: 701062053_FLI.pep
RHRASTQIDGGDGFPRKTHHRSLMKPKPKPYSFLPLNRFLRALQSRPLMAQTPTSLDAEHPSDNDQHMGFRARSLSGESRAEQAWAHWTKLGRPRFIVAPMVDNSELPFRMLCRKYGAQGAYTPMLHSRIFTETEKYRNEEFTTCKEDRPLFVQFCANDPDVLLEAARKVERFCDYVDINLGCPQRIAKRGYYGAFLMDNLPLVKSLVEKLAVNLQVPVSCKIRLFPNLEDTLKYARMLEEAGCMLLAVHGRTRDEKDGKKFRADWKAIRAVKNAVRIPVLANGNIRHIDDVRDCLEETGVEGVLSAETLLENPALFAGFRTAEWVSESEGTNVDGKLDQADLLIEYLKLCEKYPVPWRMIRSHVHKLLGDWFSLQPHIREELNKQSKLTFEFLYDMVDRLRATGIRIPLYKDTQVELTAGSYPD

SEQ ID NO: 46807 - protein, 540 aa, Glycine max
  Clone ID: 701062315_FLI.pep
RMEQNACEELSKIASDFKCEKKVLETVDESIVCPTPQKNEEPLIVKFREGQTNLPEKYSALVDLFGHTSCSLRLLRLCKKSPTFQNVCRQVEVLSKREFSHAHLAQMKYILPKSVCIDKVLVHDKKSLCMVPDMKITLRFEVVKDCSGESDDLALRRYFKSKLIDFFDMHPEVADIPEAPLPEPFGKKTCRLNFEEFTGQSPHVNSSTELLSISNQTEMLPEQLQLYPSFRRHFSRKNNTDQAEKAQCFLPTKTSPSSHASDCLDNEESEKTLQKECVPLFDGVANPITERGHQKESFSMSLQPSFINTPVQMIRPPYSVTCSNSESPDMKNISCVADSFIAETPAQSAPARLLPISDVKLQDMPTQKSTSSHKPAKRVLDFSLMGDNDGLGIGVDKLESSRALHEFDSFPESSRGCYEDCNSFGSVSAPQEAEESLKQADLDTQHKKSSPLLDLVNVIHSIFQSVQRIPITKEELLHKILVNTLDFVEIRAVEEQIESLEKLVPDWICKKLVATGDTMYCINKVSDLDSVRSRLSTNVV

SEQ ID NO: 46808 - protein, 327 aa, Glycine max
  Clone ID: 701061555_FLI.pep
AYNKMASFHILVLVVAMVTLMIPTNANLSPHFYDKVCPQALPVIKSVVQRAIIRERRIGASLLRLHFHDCFVNGCDGSILLDDTRNFTGEKTALPNLNSVRGFSVVDEIKEAVDKACKRPVVSCADILAIAARDSVAIYGGPHYWYQVLLGRRDARTASKAAANSNLPPPSFSFSQLVSNFKSHGLNVRDLVALSGGHTLGFARCSTFRNRIYNASNNNIIDPKFAASARKTCPRSGGDNNLHPFDATPARVDTAYYTNLLHKKGLLHSDQELFKGKGTESDKLVQLYSRSPLVFARDFKASMIKMGNMKPLTGKKGEIRCNCRRVN

SEQ ID NO: 46809 - protein, 422 aa, Glycine max
  Clone ID: 701061673_FLI.pep
KFGLTTAQILRVVKNLDLAGMLDCLQLLHFHIGSQIPSTALLADGVGEAAQIYCELVRLGANMRVIDIGGGLGIDYDGSKSCDSDISVEYSLEDYAVAVVHAVQCVCDRRSVKHPVICSESGRAIVSHHSVLIFEAVGTSSTTGGGASPALSAQYLAEELSEDYRNLSELAFRGEYETCLVYTEEMKERCVEQFKQGTVCMEQLAAVEGLCELARKAVGAGESVRRYHVNLSVFTSVPDAWGIEQVFPIIPIHRLDEKPSVRGILSDLTCDSDGKIDKFINGESSLPLHEMEGGRTYYLGMFLGGAYEEALGGVHNLFGGPSVVRVSQSDGPHSFAVTRAVPGPSCGDVLRVMQHQPELMFETLKHRAQEYVSHDNAAALLAAGLARTFDRMPYLLSLSSFVADDVAAAVPAAQDLGEQWSY

SEQ ID NO: 46810 - protein, 355 aa, Glycine max
  Clone ID: 701050303_FLI.pep
CRRDRRVSFDQIITMVSEGTLLGMGNPLLDISAVVDEDFLKKYDITSNNAILAEDKHKPMYQELAEKYNVEYIAGGATQNSIKVAQWMLQVPGATSYMGGIGKDKFGEEMKKNSKLAGVNVHYYEDETTPTGTCAVCIVGGERSLVANLAAANCYKSDHLKRPENWALVEKAKYIYIAGFFLTVSPDSIQLVAEHSAANNKIFSMNLSAPFICEFFRDVQEKALPYTDFVFGNETEARTFSKVHGWETDNVEEIAVKISQWPKASGTHKRITVITQGADPICVAEDGKVKKFPVKLLPKEKLVDTNGAGDAFVGGFLSQLVQEKPIEECVRAGCYAANVIIQRSGCTYPEKPDFH

SEQ ID NO: 46811 - protein, 531 aa, Glycine max
  Clone ID: 701007191_FLI.pep
PSSSSISGSSIHPDVASSYQLRASSGASMVANNPSDSSFMSTRHHDAYQSNSGSDLMENGSLDSRDDEGLMRLRLKALERALLDDSDAGEDEEEEEEEEEDIFEAAQSMEIDPDIAEWADSIHNMLLHGSPKESSSSDSNTSSISSTKEISQTSQTPKKLLYECAIALSEGNEVEGSSMINNLRQMVSIQGEPSQRIAAYMVEGLAARLAESGKSIYKALRCKEPPTSDRLAAMQILFEVCPCFKFGFIAANNAITEAVKDDMKIHIIDFDINQGSQYINLIQTLASRSSKPPHVRLTGVDDPESVQRSVGGLRNIGQRLEKLAEALGLPFEFRAVASRTSIVTPSMLNCSPDEALVVNFAFQLHHMPDESVSTVNERDQLLRLVKSLNPKLVTVVEQDVNTNTTPFLPRFVEAYNYYSAVFESLDATLPRESQDRMNVERQCLARDIVNVVACEGEDRIERYEVAGKWRARMTMAGFTSSPMSTNVTDEIRKLIKTVYCDRYKIKEEMGALHFGWEDKNLIVASAWKLPR

SEQ ID NO: 46812 - protein, 601 aa, Glycine max
  Clone ID: 701046458_FLI.pep
LLFSVLSGHWHQTSMDTIKSFKGYGKVDELEQQAYQKKTRKRLIIIAVSSIVLFAVIIAAVAGVVIHKRNTSSSPSSDSPPQTELTPAASLKAVCHVTQYPNSCFSAISSLPESNTTDPELLFKLSLRVAIDELSKLSSFPSKLRANAEHDARLQKAIDVCGNVFGDALEQLNDSISALGSGAAEAGKIISPASVGDVETWISAALTDQDTCLDALAELNSTASRGALREIETAMRNSTEFASNSLAIVTKILGLLSKFDSPIHHRRLLGFPEWLGAAERRLLQVNSSETTPDAVVASDGSGQFRTIGEALRLVKKKSEKRFVVHVKEGRYVENIDLDKNTWNVFIFGDGKEKTVVVGSRNFMDGTPTFETATFAVKGKGFIAKDIGFVNNAGASKHQAVALRSGSDRSVFFRCSFDGFQDTLYAHSNRQFYRDCDITGTIDFIFGNAAAVFQNCKIMPRQPLPNQFNTITAQGKKDPNQNTGIIIQKSKFIPLGNNLTAPTYLGRPWKDFSTTVIMQSDIGSFLKPVGWISWVSNVEPVSTIFYAEYQNTGPGADVSQRVKWAGYKPTLTDVEADKFTVQSFIQGPEWLPNAAVEFDSTL

SEQ ID NO: 46813 - protein, 418 aa, Glycine max
  Clone ID: 701000232_FLI.pep
QIEYDEEKQTSKDRWGGLAYDTSDDQQDITRGKGMVDTLFQAPMESGTHYAVMSSYDYISAGLRQYNLDNTMDGFYIAPAFMDKIVVHITKNFLNLPNIKVPLILGIWGGKGQGKSFQCELVFAKMGINPIVMSAGELESGNAGEPAKLIRQRYREAADIIRKGKMCCLFINDLDAGAGRLGGTTQYTVNNQMVNATLMNIADNPTNVQLPGMYNKEENPRVPIIVTGNDFSTLYAPLIRDGRMEKFYWAPTRDDRIGVCQGIFRTDGVLKEDIIKLVDTFLGQSIDFFGALRARVYDDEVRKWISGVGVENIGKKLVNSKEGPPTFEQPKMTLSKLLEYGNMLVQEQENVKRVQLADKYLNEAALGDANDDAIKTGNFYGQGAQQVHVPVPEGCTDPTAENYDPTARSDDGSCTYKF

SEQ ID NO: 46814 - protein, 120 aa, Glycine max
  Clone ID: 701000252_FLI.pep
IFRTDGIPEQDIVKLVDTFPGQSIDFFGALRARVYDDEVRKWISGVGVDSVGKKLVNSKDGPPTFEQPKMTLEKLLLYGNMLVQEQENVKRVQLADKYLNEAALGNANEDAIQRGTFFQS

SEQ ID NO: 46815 - protein, 153 aa, Glycine max
  Clone ID: 701000456_FLI.pep
DFSSSFLILFLIMDVEVRQIFNKFDKNGDGKISVTELKDMLAALGSKTTDEELKRMMEELDQNGDGFIDLKEFADFHCNGGAGKDDSKELRDAFDLYDVDKNGLISAKELHDVLRNLGEKCSLSDCRRMISNVDADGDGNVNFEEFKKMMTRS

SEQ ID NO: 46816 - protein, 585 aa, Glycine max
  Clone ID: 701003772_FLI.pep
LFRNKPFKSESGFSFLDLISLSKVRFCVLWEEQTHMKDSNSDLFDPVMAMESEWSRGGTTSDADFAFAFNDSNFSDRVLRIEIMHDPVDARPDSDACATIADWARHRKRRREDIKKDNGADLASVPDEQVLNGHQSEADECENQDEEADAMVEEPHSGDEATNSNDSDWSMDCSAGAVVRVKTLHISSPILAAKSPFFYKLFSNGMRESEQRHVTLRINASEEAALMELLNLMYSTTLTTTTAPALLDVLMAADKFEVASCMRYCSRLLRNMPMTPDSALLYLELPSSVLMADAVQPLTDAAKQYLAGRYKDITKFQEEVIALPLAGVEAILSSDDLQVASEDAVYDFVLKWSRQQYTKLEDRREVLGTRLAQLIRFPYMTCRKLKKVLTCSDFDHEVASKLVLEGLFFKAEAPHRQRSLAAEDTASSNRRFVERAYKYRPVKVVEFELPRQQCVVYLDLKREECNNLFPSGRVYSQAFHLGGQGFFLSAHCNMDQQSSFHCFGLFLGMQEKGSVSFAVDYEFAARSRPTEEFVSKYKGNYVFTGGKAVGYRNLFAIPWTSFMAEDSLYFINGVLHLRAELTIKH

SEQ ID NO: 46817 - protein, 512 aa, Glycine max
  Clone ID: 701004427_FLI.pep
SLRKEVEELHIPLQQIQTFAFTMAEFLDLESQDGVRMPWNVIPGTKQDAQNAVVPISAVYTPIKHFPSMPVLNYSPLRCRTCRSVLNPFCIVDFAAKIWICPFCFQRNHFPPHYSSISDDSLPAELFPQYTTVEYNSDAAVGPTYNNPSVPPVFLFVVDTCVIEEEIGFLRSALAQAVELLPENSLVGLITFGTFVHVHELGFGAVPKTYVFKGSKDLTKDQLLEQMSFFAKKPRPAVGVVAGARDGLSPESISRFLVPASECEFTINSVLEELQKDPWAVPADQRAARCTSTALSIAAGLLGACVPGSAARIMAFIGGPATEGPAPIVSKQLSEPIRSHKDLDKDSVPHYHKCVKFYDGLSKQLVHQGHVLDLFACALDQVGIAELKTAVERTGGLVVLAESFGHSVFKDSLKRIFQSGDYDLGLSSNGIFEINCSKDLKVQGIIGPCASLEKKGPLCSDVAIGQGGTSAWKMCGLDKSTSLCLFFDVVRKETPDATIQSTSNQFYFQFLT

SEQ ID NO: 46818 - protein, 288 aa, Glycine max
  Clone ID: 701038535_FLI.pep
LGRVIMANHPSEAPTDDFLEQILGLSTFASADPAADASPMMLQLNSGDAATHLAATHLAAFHAPPYQLGLSLDQGKGPFLTPEDASGSGKRFRDDVVDTRPKNFFHGQPMPTTVPTAPHPPAVRPRVRARRGQATDPHSIAERLRRERIAERIRALQELVPSVNKTDRAAMLDEIVDYVKFLRLQVKVLSMSRLGGAGAVAPLVTDIPLSSVEEEGGEGRNQPAWEKWSNDGTERQVAKLMEENVGAAMQFLQSKALCIMPVSLASAIYQSQPSGTSSIVKPETNPPS

SEQ ID NO: 46819 - protein, 539 aa, Glycine max
  Clone ID: 701038821_FLI.pep
ELYKTARISPITLTYFHNCMENGNYTVNLHFAEIQFTNDKTFRSLGKRIFDIYVQGKLIRKNFDIENETNVAEKPLVLPIYNISITNNVLEIRFYWAGKGTTRIPDVGVYGLLVSAFSVVSNSRVCSNGEKKVSVSIIIAIVVGALCLVLFTSGFIWWKWKGFFRGKLRRAGTKDRDTQAGNFSLEQIRVATDDFSSANKIGEGGFGPVYKGQLLDGTFIAVKQLSSKSRQGNREFINEIGLISCVQHPNLVKLYGYCAEGEQLLLVYEYLENNSLARVLFGSENKQLKLDWPTRFRICIGIAKGLAFLHDESRFKIVHRDIKASNVLLDDKLNPKISDFGLAKLDEAEKTHISTRVAGTIGYMAPEYALWGYLTDKADVYSFGVVALEIVSGKSNNNYLPDDGSVCLLDRACQLNQTRNLMELIDERLGPDLNKMEVEKVVKIGLLCSNASPTLRPTMSEVVNMLEGHADIPDVIPEPSTYNDDLRFKALRNLHQYQSKQSLSGNQSQSSMTHTFTSASGGNTHTTSYIEDHSSVDSS

SEQ ID NO: 46820 - protein, 108 aa, Glycine max
  Clone ID: 701044837_FLI.pep
MVFFLFYYIFDANMFQIWVKYSSQNSIEMDGVWEVATCATGKVKKRKSEAFVGGVGSNCSIVCLNKESKQLPKQLNTASLHPYTIEKAAIKWKMLFGHWCLWPTLCLN

SEQ ID NO: 46821 - protein, 436 aa, Glycine max
  Clone ID: 701049385_FLI.pep
ETEQQMKHFALVFLLAILVPQECFHVSVEARDDFVRTRGIHFTLNGYPYYANGFNAYWLMYTASDPSQRFKVSNAFREAASHGLTVARTWAFSDGGYRPLQYSPGFYNEQMFTGLDFVVSEARKYGIKLILSLVNNYENFGGKKQYVNWARSHGQYLTSDDDFFRSPVVKGYYMNHVRTVLNRYNRFTGMHYKDDPTIMAWELMNEPRCTSDPSGRTIQAWITEMASFLKSIDRNHLLEAGLEGFYGQSTPQRKTMNPGFNIGTDFIANNRIPAIDFATVHCYPDQWVSSSNIQYQLSFLNNWLSAHFIDAQYHIKKPILVAEFGKSFKGSSSYERDEVFNSVYYKIYASAKRGGAASGALFWQLLTEGMESFQDGYGIILGQSSSTANLIARQSRKLYLIRKIFARVANMRRWQRARARGFSGSGGGNGGRYIDD

SEQ ID NO: 46822 - protein, 417 aa, Glycine max
  Clone ID: 701054306_FLI.pep
KMLEGGAKFPGIIDLNKNNNNYYDFSQGFYHKLGEGTNMSIDSVGSLQTSNGGGSVAMSIDNSSVGSNDSHTRMLDHQGLRRRANDNYSVAHSANRRGRVTHALSDDALAQALMDNSSPTEGLDNFDEWTIDLRKLNMGEPFAQGAFGKLYRGTYNGEDVAIKILERPENDPAKAQLMEQQFQQEVMMLATLKHPNIVRFIGACRKPMVWCIVTEYAKGGSVRQFLMKRQNRSVPLKLAVKQALDVARGMAYVHGLLLIHRDLKSDNLLIFGDKSIKIADFGVARIEVQTEGMTPETGTYRWMAPEMIQHRPYTQKVDVYSFGIVLWELITGMLPFQNMTAVQAAFAVVNKNVRPIIPNDCLPVLRDIMTRCWDPNPDVRPPFAEIVGMLENAENEIMTTVRKARFRCCMTQPMTAD

SEQ ID NO: 46823 - protein, 435 aa, Glycine max
  Clone ID: 701055296_FLI.pep
SLLSTDSMCRQNSPVHHAGEEEIAADESLLIYCKPVELYNILYRRALQNPSFLRRCLRYKIRASRKRRLRAGIVIFNYRDRYNILRKTEVTEDFSCPFCLMQCGNFKGLRFHLCSSHDLFNFEFWVTEDYQAVNVSVKIDILRSENVADGVIPQSQTFFFCSRPRKRRRKDSVQIEKRTNVKFLELDSPEGIHNGFLQKDDDILSCKGENVSRTSRSEKIFPSGRNDGGKFGPDHPGTMDNLEHVESSFNIPGVSIAMPQSSVDPECSKSICKSDPALPAKTKKLSMDRSDSRNRMLLQKRLFFHSHRVQPMALEQVLSDRDSEDEVDDDIADLEDRRMLDDFVDVSKDEKQLMHLWNSFMRKQRVLADGHVPWACEAFSKLHGKELISSPALFWCWRLFMIKLWNHGLLDACTMNNCSIVLDSYRNEGSGTRKN

SEQ ID NO: 46824 - protein, 192 aa, Glycine max
  Clone ID: 701057632_FLI.pep
KFSPFNARHGIDVRDRRSTNPEHPIVFSEPLQRTRSFCTLGHYFVLSSSSIASFFFRQDHRFIGDSTHRRLWHHTTTAQLLGTHTVASAHSQGPEAVGCSLLPCGPDPAGSLPPRQLREGLLGWPRAWEGEASRRVQEGPGPGWGSPALTPGTVASAAVSAPSSGWSLGFRQPGTSRPRSCEWPPGKPGCCH

SEQ ID NO: 46825 - protein, 154 aa, Glycine max
  Clone ID: 701062335_FLI.pep
LLQNAEFDIKKEAAWAISNATSGGSHEQIKFLVSQGCIKPLCDLLICPDPRIVTVCLEGLENILKVGEADKNIGNTGDVNLYAQMIDEAEGLEKIENLQSHDNTEIYEKAVKILETYWLEEEDETMPPGDASQSGFNFGSSDAPAVPSGGFNFN

SEQ ID NO: 46826 - protein, 310 aa, Glycine max
  Clone ID: 701064021_FLI.pep
FHIDLFSIVLFCFLKKLSFSSPLPKQEHECLVEGPLNNLKQSMVQFQKPKKIYNERRLFYGGGPGIAANDNFGSVGSGAGTSSDRRSSRGRGSYIPPGPPNGTHKPGVHPAGYPVPRVPLPPFHGGPQSQPYAIPSRGAVHGPVGAVPHVPSPGSRGFGAGRGNSGAPIGNHLPHQQGTQQPIGNIGSTFNFPALENPNSQPSVGGPSSQPGFANNMPVQGAGQSFRDQFSMPGMSQDFLGDDFKSQGSHVPYNVTDFSTQASQSGYAVDYATQGAQGGFSGNFLNQNSQAGYSRFGSGNDFMSQVVEVC

SEQ ID NO: 46827 - protein, 453 aa, Glycine max
  Clone ID: 701037507_FLI.pep
KKPTLGGVSDERKSESTSSVVNASELPPHLLLEMPALSPTMNQGNIAKWRKQEGDKIEVGDILCEIETDKATLEFESLEEGYLAKILAPEGSKEVAVGHSIAITVEDASDIEAIKNSVSSSTNQQKAPQRGTKSEVKAQKNNITRISPAAKLLIAEYGLDAPTLNATGPYGTLLKGDVLSAIKSGKLSPKPASSKEKALSSQSHQQVAASQESKSDLKKSDAYEDFPNSQIRKVIAKRLLDSKQNTLHLYLSSDVILDPLLSLRKGLKEQYDVKVSVNDIIIKVVAAALRNVPEANAYWNVEKDEVILNDSIDISIAVATEKGLMTPIIKNADQKTISAISSEVKELAAKARAGKLKPHEFQGGTFSISNLGMFPVDKFCAIINPPQACILAVGRGNKVVEPVIGTDGIEKPSIATKLSLTLSADHRVFDGKVGGAFLSALQSNFSDIRRLLL

SEQ ID NO: 46828 - protein, 864 aa, Glycine max
  Clone ID: 701040644_FLI.pep
ETQRRIMEVNNQIVERSKRVKGRVVLMKKGVLDFHDIKANVLDRVHELLGKGVSLQLISATTPDPAKGLLRGKVANLERWVSTITSLTSTTDTEFSVTFEWDESMGVPGAFIIRNNHHSQFYLKTLTIEDIPGHDGPVNFVCNSWVYPAHRYAHDRVFFANKAYLPCHTPEPLRKFREQELKTLCGKGFGKLNEWDRVYDYAYYNDLGLPDDGPDYARPVLGGSQFPYPRRGRTSRPHCKTDPKTESRLHLLNLNVYVPRDEQFGHVKFSDFLAYSLKSVAQVLLPEIKSLCDKTINEFDTFQDVLDIYEGSIKLPSGPLTSKLRKLVPYELLRELIRNDGERFLKFPVPDVIKVSKTAWRTDEEFAREMLAGVNPVIIRRLQEFPPASKLDPSVYGDQTSSIRATHIENSLDGLTIDEAIQNMRLFILDHHDSLMPYISRINSTNTKTYASRTLLFLQDDGTLKPLAIELSLPHPQGEQHGAVSKVFTPAQEGVSASVWQLAKAYAAVNDSGYHQLVSHWLYTHAVIEPFIIATNRQLSILHPIHKLLKPHFRDTMHINALARHTLINAGGVLEITVFPGKFALEMSSVIYKSWVFTEQALPADLLKRGMAIPDSSSRHGLRLVIEDYPFAVDGIEIWDAIETWVTEYCNFYYTSNDMVEEDSELQSWWKEVRNEGHGDLKDRNWWPDMKTKEELIHSCTIIIWLASAFHAAVNFGQYPFAGYLPNRPTVSRRFMPEQGTPEYEELKSDPELAFLKTITAQFQTLVGVSLIEVLSRHSTEEVYLGQCENPEWTLDAEPLAAFERFRQKLLEIENNIMERNKDKRFKNRNGPVKMPYTLLYPNTSDYSREGGLTGKGIPNSISI

SEQ ID NO: 46829 - protein, 552 aa, Glycine max
  Clone ID: 701051641_FLI.pep
QCVFSLVISVDNMGSTGLLHLICLVIALVSVSLVQAEDAYKYFTWTVTYGTLYPLASPQQVILINGQFPGPRLDLVTNENVILNLINKLDEPFLLTWNGIKQRKNSWQDGVLGTNCPIPPNSNYTYKFQAKDQIGTYTYFPSTQLHKAAGGFGALNVYHRSVIPIPYPNPDGDFTLLVGDWYKTNHKTLRQTLDSGKSLAFPDGLLINGQAHSTFTGNQGKTYMFRISNVGLSTSINFRIQGHTLKLVEVEGSHTVQNLYDSLDVHVGQSVAVLVTLNQPPKDYYIVASTRFTETPLTTTAVLHYANSFSSALGPVPAPPVDKYDFDWSMKQARTYRWNLTANAARPNPQGSFHYGKITPTKVIKLANSAPLINGKLRYAVNSVSYVNPDTPLKLADYFNIPGVFSVNLLQNSPSNGPGYIGTSVLQTSLHDFIEVIFQNNENTMQSWHLDGYDFWVIGHGFGQWTDASRKTYNLVDALTRHTAQVYPKSWTTILVSLDNQGMWNLRSAIWERQYLGQQFYLRVWNAQKSLANEYDIPNNVLLCGKAVGHHP

SEQ ID NO: 46830 - protein, 335 aa, Glycine max
  Clone ID: 701057042_FLI.pep
SLCFYFVKGESILADSGTEQLEFIVLSQRTGDPKYQQKVENVIAQLNKTFPDDGLLPIYINPHSGAAGYSPITFGAMGDSFYEYLLKVWIQGNKTSAVKHYRDMWEKSMKGLSSLIRRSTPSSFAYICEKNGGSLTDKMDELACFAPGMIALGSFGYSADDDSQKFLSLAEELAWTCYNFYQSTPTKLAGENYFFHSGQDMSVGTSWNILRPETVESLFYLWRLTGNKTYQEWGWNIFQAFEKNSRIESGYVGLKDVNSGVKDNMMQSFFLAETLKYFYLLFSPSSVIPLDEWVFNTEAHPLRIVTRHEEGLVKNLNEKQKPFSRIGGRKEGRSG

SEQ ID NO: 46831 - protein, 186 aa, Glycine max
  Clone ID: 700942135_FLI.pep
INLFAQSFFLLLSKRKVENRWSELLGLLAFWVWYPLLVSFLPNWWERVLFVFVSFSVTGIQHVQFCLNHFSSEVYLGPPSGGDWFEKQTKGTLGVDCSPWMDWFHGGLQFQVEHHLFPRLPRCHLRKIAPLVKDLCKKHNLPYNCVSFWKANVLTIQTLRNAALQARDGSKPVPKNLVWEAVNTHG

SEQ ID NO: 46832 - protein, 277 aa, Glycine max
  Clone ID: 701064742_FLI.pep
SLIARMALRCLVMSLSVLFTLGLARESHARDEDFWHAVWPNTPIPSSLRDLLKPGPASVEIDDHPMQIEETQYPKTFFYKEDLHPGKTMKVQFSKPPFQQPWGVGTWLKEIKDTTKEGYSFEELCIKKEAIEGEEKFCAKSLGTVIGFAISKLGKNIQVLSSSFVNKQDQYTVEGVQNLGDKAVMCHRLNFRTAVFYCHEVRETTAFMVPLVAGDGTKTQALAICHSNTSGMNHQMLHQLMGVDPGTNPVCHFLGSKAILWVPNLSVDTAYQTNIVA

SEQ ID NO: 46833 - protein, 286 aa, Glycine max
  Clone ID: 701213946_FLI.pep
VKRLQESQYSEKEFLSEMNILGSVKHRNLVPLLGFCVAKKERLLVYKNMPNGTLHDQLHPDAGACTMDWPLRLKIAIGAAKGLAWLHHSCNPRIIHRNISSKCILLDADFEPTISDFGLARLMNPIDTHLSTFVNGEFGDLGYVAPEYTKTLVATPKGDIYSFGTVLLELVTGERPTHVAKAPETFKGNLVEWIQQQSSNAKLHEVIDESLVGKGVDQELFQFLKVASNCVTAMPKERPTMFEVYQFLKAIGINYNFTIEDEIMLPIDTGDADNLEELIVAREGHN

SEQ ID NO: 46834 - protein, 303 aa, Zea mays
  Clone ID: UC-ZMFLB73147A09_FLI.pep
ANLLFLEAPVGVGFSYANRTSDLRRLGDRVTAQDSYAFLLGWLDRFPEFKGRDLYIAGESYAGHYVPQLAELIYEGNKGASRDRAISIKGFMIGNAVLNDATDQLGMVEYAWSHAIISDELYSAVRRDCDSFKEEADGGRPGKGCSPALRAFLGAYDDIDIYSIYTPTCLLSNLSSASAAAGSARPRPARLVAAPRLLSKHEEWHRLMKRVPAGYDPCTEAYVTKYFNRGDVQRALHANRTGLPYPYSPCSEVIRKWNDSPATVLPILKKLMGAGLRVWVYSGDTDGRVPVTSTRYSINTMGL

SEQ ID NO: 46835 - protein, 465 aa, Zea mays
  Clone ID: UC-ZMFLB73303B05_FLI.pep
PRFTTALPLPHAQSRERCHAPTTRRRGQRTATTMAVAMASALLMLALATASAAVSGAGAPWRSRRPRPEADLVTGLPGQPAVGFSHYAGYVDVTSGGGGGKALFYWFFEAEREPDKKPLLLWLNGGPGCSSVAYGAAQELGPFLVRSYGANLTRNAYAWNKAANLLFLEAPVGVGFSYANRTSDLRRLGDRVTAQDSYAFLLGWLDRFPEFKGRDLYIAGESYAGHYVPQLAELIYEGNKGASRDRAISIKGFMIGNAVLNDATDQLGMVEYAWSHAIISDELYSAVRRDCDSFKEEADGGRPGKGCSPALRAFLGAYDDIDIYSIYTPTCLLSNLSSASAAAGSARPRPARLVAAPRLLSKHEEWHRLMKRVPAGYDPCTEAYVTKYFNRGDVQRALHANRTGLPYPYSPCSEVIRKWNDSPATVLPILKKLMGAGLRVWVYSGDTDGRVPVTSTRYSINTMGL

SEQ ID NO: 46836 - protein, 332 aa, Zea mays
  Clone ID: UC-ZMFLMO17030E08_FLI.pep
PPQPPPEPSSRSGFWLAIEGQFMGNAEARALRLDAAFRTFVQGDLSVSAYCRKMKTMADSLGDLGCPVEDRILVLNVLRGLGDRYTHLRSLIMRQRPFPTFLQVRDDLALEEITLGAQAASISGTGSSSSSTALAAFTPTRPPTPSQSALGPRPPGPSMGGGGRGGRGGGGGGRRRRGGRGGGSGGGARGHAPTPGPQQGAPWPTFHHPWSGRISMWPFQGPGSEARPPAAMFAGAQPGFAFASPSPWTSTPAASSWPTPPATPPSGLVGWDAATLAAFQTPTLTPPMGPEWIADTGATYHTTPDPGILTSVRPPSSSLPSSIMVANGSCLP

SEQ ID NO: 46837 - protein, 524 aa, Zea mays
  Clone ID: UC-ZMFLMO17076D12_FLI.pep
IPRHSIRFPSRNAPCIYCTSLALRPSAIFKSSTVKSGRRREGRALKDGARAAGGVHRGRRQRQGGRGRGHGHRRRGRRRRPARRRQAQHEEPAVARRLRLGRVVQLRLQPGGAGAPDAAVLLLPAGDAVRRAAADLLRLPWQLDRVPHQRPLRRVPLPQGEGGRQLQEPRHPVVRGAGRAAGPLLEGGGSGLQLHVPAVRLRHPADRLREQHLLHQRPAGQADMDVHLRRLLRHHGVHPVLPQLPDLVLPGPRHDHLHRVVPRHRRAPQRPGRRRGALRPHQARALLHRRHQHPLHLRRPRRHSRDHARDVEARQVQVHLPAGDAVRVHADAAVVGGHVLGVRRRASDPLERLLAAAQDPVARRGGDPDADPPVHHLRLRVHAALLRVGEGDRDARRQEHLQARPGAAAHRRAHLVPRHHLPLLRAHQLRRRRAARQLHRLHHPGPGARPHLPHGVRAHERRGEAALLPAELDGDVRPQHVHRGVGAGGRLRAGRLGQHGQLREADRHVRAVRQVLPVPEAAGP

SEQ ID NO: 46838 - protein, 273 aa, Zea mays
  Clone ID: UC-ZMFLMO17095G02_FLI.pep
VLAPILLLVELLEHRVADVEGVARHVAARGDQPEVLHGPDLLDGARRRGGLALQRLVRRGEDGGFRLLAAEDLRPLVEAGGGRRDVADEVRPAEPQRQPTAFEVCDLDVEQRREEELGAEHLVVAELPDPAGRAAVADPLGHVAVAPGLHDAHAAVVALDVGPRAVPLRLGAADAAGDGEVVVQPREHGVLEHLGGEAVPGPVVVHPAQVVQLEGQVRVRQRVVHLPRHGARHHRGEPVPVHRARQHRLLLLLLEHHAAFLVLYSAPAPGVSS

SEQ ID NO: 46839 - protein, 176 aa, Zea mays
  Clone ID: UC-ZMFLMO17255B02_FLI.pep
IMSGLGGRILESSARAAGENGLQLLGTLSKPFSRAELLELLAKDTHETLSIQSSPISPVSDRQIGDALKAEAFVAHFQPKISCLTGGLVGFECLARWPQPDGSMIPPDQFICFAEQKGLIDALTRQVYDYALANLPLCNLRNQLKYALNLSPINLKDATFPHWLRNKCCEHNVKPS

SEQ ID NO: 46840 - protein, 364 aa, Glycine max
  Clone ID: 700830949_FLI.pep
STSSVVVSPLLNGVNKVIEKNLVPFGPSGSSADLTHSLEPFPVEISQSESQLVYFRDSAILLSPYHVKQQTTFIKTPSTRVESFTVMDPTKRAGTELKYGPYENHPPYSYSPVLIHFENNNAFAVVEELEREIEISHWGSVQVTERYSLVHAGARHKGVFSRVEYQTKPGGTGVSSFKHLLAKLPPRVHSVYYRDGIGNISSSHLRTDSWKSELEIEPRYPLFGGWKSTFVIGYGLPLQDFLFESPDGRRYLNFTFGCPLVETVVDKLIVKVVLPEGSKDPTVEIPFEVKQHLEIKYSYLDVVGRTVVVLEKRNAVPEHNTPFQVYYRFNPIFMLAEPLMLVSAFFLFFVASVAYLHIDLSIRK

SEQ ID NO: 46841 - protein, 378 aa, Glycine max
  Clone ID: 700979473_FLI.pep
KTTEGEIEKKKKKKMEKYQIWSRRIALAAFAFALLFQSASADDVVVLSEDNFEKEVGQDRGALVEFYAPWCGHCKKLAPEYEKLGSSFKKAKSVLIGKVDCDEHKSLCSKYGVSGYPTIQWFPKGSLEAKKYEGPRTAESLVEFVNTEGGTNVKIATVPSNVVVLTPENFNEVVLDEAKDVLVEFYAPWCGHCKSLAPTYEKVATAFKLEEDVVIANLDADKYRDLAEKYDVSGFPTLKFFPKGNKAGEDYGGGRDLDDFVAFINEKSGASRDGKGQLTSQAGIVESLDVLVKEFVAASDEEKKSVFTRLEEEVVKLKGSASRYGKIYLKAAKNYREKGSDYAKNEIQRLQRILDKSISPAKADELTLKKNILSTYAA

SEQ ID NO: 46842 - protein, 65 aa, Zea mays
  Clone ID: 700049417_FLI.pep
MFQQLTGINVIMFYAPVLFKTLGFADDASLMSAVITGLVNVFATFVSIVTVDRLGRRKLFLQGGT

SEQ ID NO: 46843 - protein, 151 aa, Zea mays
  Clone ID: 700575731_FLI.pep
IVQLDTHCGFYIYLIISVVTKLTKDNNLPRMHVWWSVHVHQRLSTHLRDLPSSSNWMALLMSEKGILCVMNPSRFISRSPLTHLSTMAGSWDFPLTSPKTQAVIRRPSKSSIGCSGSILGVAWIPSTTVRPQPCICVAQRNTLLKFKGLAS

SEQ ID NO: 46844 - protein, 199 aa, Zea mays
  Clone ID: 700617495_FLI.pep
LYVQVTPSPQVGGATMPKVKNPHVFMDISIGGGSAERITFELFANVVPKTAENFRALCTGERGLGASTQKPLYYKGTYIHRIVKGFVAQGGDFSSGDGKGGESIYGGKFPDENFKLLHNQPGVLSMANSGPGTNGSQFFITFKALPHLDGKHVVFGKVVSGIALLKNLEAAGSETGNPSCQVKIVDCGEVSNTNSQDLL

SEQ ID NO: 46845 - protein, 168 aa, Zea mays
  Clone ID: 700617511_FLI.pep
RFLEAEKMVLKTELCRFSGQKIYPGKGIRFIRADSQVFLFANSKCKRYFHNRLKPAKLTWTAMYRKQHKKDIHAEAVKKRRRATKKPYSRSIVGASLEVIQKKRAEKPEVRDAAREAALREIKERIKKTKDEKKAKKAEVTKSQKAQTKGAVQKGSKGPKLGGGGGKR

SEQ ID NO: 46846 - protein, 310 aa, Zea mays
  Clone ID: 700805361_FLI.pep
RAGGPIRGSPPPDPSSLLGPAGDPSGMGYLSSVIGHPTDGSSVSGGGLSQNGRFSYGYASSPGKRASMEDFYETKIDCVDGQIVGLFGVFDGHGGAKVAEYVKENLFNNLVSHPKFISDTKVAIDDAYKSTDSEFLESDSSQNQCGSTASTAVLVGDRLFVANVGDSRAIICREGNAIAVSKDHKPDQTDERQRIEDAGGFVMWAGTWRVGGVLAVSRAFGDKLLKQYVVVDPEIREEVVDDTLEFLILASDGLWDVVSNEEAVAMTRSIKDPEEAAKMLLQVAYKRESSDNITCVVVHFLHGQGSSGYA

SEQ ID NO: 46847 - protein, 254 aa, Zea mays
  Clone ID: 701160707_FLI.pep
ASRRSSFRTLEEGHMLGPVGVKLKPANLLMQLITCGFVSVKEHRGFGFIPTYRPRFTQVEFPSPVFSTPVALRHLDRIPCNTKATGSTRAPEPECFSGSLVVETKQQDEPGRGIASLKRSSSYDEDRVYRAAHPKSDTESSCEPGSFRCLPQTIRIISCKQSRSGTVLSPPASDVRNGSSQQEHSTMSSPLGSSKSASNRMADPSPPGKLSCARAESLFREEKDMIKIEERLPSGARVIIQSAPLCEESDDSSE

SEQ ID NO: 46848 - protein, 154 aa, Zea mays
  Clone ID: 701163506_FLI.pep
EGALCIGYKSTSSWHYSMVFYFVTKKLIPNSLLQRFVDGDDEFRNSRFKLIPSVPKGSWIVRQSVGSTPCLLGKAVDITYIRGSNYLEIDVDIGSSTVANGVLGLVCGVITTLVVDMAFLVQANTYDELPERLIGAVRMSHIELSSAIVPVLED

SEQ ID NO: 46849 - protein, 244 aa, Zea mays
  Clone ID: 701164343_FLI.pep
SIHRSIRIKPPLWSSIPSDRCCSPPRLLVDGPYGAPAQDFRNYDVLLLVGLGIGATPFISILRDLLNNIKLADELMDLAMETGRAEDSASNLSASTASGGNKRRAYRTTCAHFYWVTREPGSFEWFKGVMNEVAEMDKKGVIELHNYLTSVYEERDARTTLLSMVQALNHAKHGVDIVSGTRVRTHFARPNWKEVFTRIASKHPNSTVGVFYCGRPTLAKELKKLSLDMSHRTGTRFDFHKEYF

SEQ ID NO: 46850 - protein, 316 aa, Zea mays
  Clone ID: LIB3245-092-F9_FLI.pep
AKRTSAADILQAYQLYMAAICFKRVVFVFSNNTIYNAALGKMKIHIVDYGIHYGFQWPCFLRWIADREGGPPEVRITGIDLPQPGFRPTQRIEETGRRLSKYAQQFGVPFKYQAIAASKMESIRAEDLNLDPEEVLIVNCLYQFKNLMDESVVIESPRDIVLNNIRKMRPHTFIHAIVNGSFSAPFFVTRFREALFFYSALFDALDTTTPRDSNQRMLIEENLFGRAALNVIACEGTDRVERPETYKQWQVRNQRAGLKQQPLNPDVVQVVRNKVRDLYHKDFVIDIDHHWLLQGWKGRILYAISTWVANDAPSYF

SEQ ID NO: 46851 - protein, 318 aa, Zea mays
  Clone ID: 700086035_FLI.pep
NSPPIHMLATSGVSIRAMTTLIAWWILLKTSHIRCAHLSLTYVALHTTGYLLTLAGLRRRGVSSTAINSFIRGIGITRSDNSLIRVDRLEYHIREELNKTAPRTMVVLRPLKVVITNLEEGKVLDLDGKMWPDASDTDASSHYKVPFSRTVYIEKTDFRLKDSKDYYGLAPGKSVMLRYAFPIKCTDVISGDSPDDIVEIRAEYDPLKTSKLKGVLHWIAEPAPGVEPLKVEVRLFEKLFMSENPAELEDWLGDLNPHSKEVIKDAYAVPSLATAVLGDKFQFERLGYFAVDTDSTPEKLVFNRTVTLRDSFGKAGPK

SEQ ID NO: 46852 - protein, 67 aa, Glycine max
  Clone ID: 701121326_FLI.pep
RVSRRGGRRRRLIWNPLGRQREEEAEEEDEQAQVPEAQEAHEETDVEGQGTEKAFNFINSVFFLVKL

SEQ ID NO: 46853 - protein, 236 aa, Zea mays
  Clone ID: LIB3332-042-C11_FLI.pep
STCCKNLVLYSLTGGRRSGSVVRRLPRRRGEQGEVLPAQLKARVLLHQRVPLPRIHAEEQPGLRGRAPGQGHWPEPGVPQLVAPPLHAHLPCPLGPPYGHDVAYLRAQELSLNRVPLGGLLLGRAGAVSQRVEQRRVVVQRLHEPAQEIAAVAQVLFHDGDQLRAQAPEQPHRAHVRPRHVIEAVVHPVHHGGLVIPPPLARAEERRGVGDVPDLPLDGSELEREAERGREVGEAA

SEQ ID NO: 46854 - protein, 284 aa, Zea mays
  Clone ID: 700102348_FLI.pep
SVYNPVIEFLCSNGSTAKAETFFRQLMKKGVDDKAAFNSLIRGHAKEGVPEAAQEILAIMTRREVPTDPESHALLVDSFLKNEPADAKTALDSMMQQGHLPSPALFKSVMEALFNDGRVQTASRVMKSMIEKGVTENMDVAHKILEALFTRGHVEEAIGRVNLMVENGCMPDLDKLLVGLCDNGRVMEAQKLADFALDRDFDVSFSTYDRVLEALYAEEKTLPAYSMLCKIKNKGGVVSQKGCDDLMESLKSEGYSKQADILSRILAENAQSTPKRGRRVAMGA
